United States Patent Application Publication US 2025/0084491 A1 - sequence listing, part 40

SEQ ID NO: 765410 - DNA, 75 bp, synthetic construct
  source 1..75: mol_type = other DNA
gcggcactgattgtcgaagtgattgacggaacgctttcgccgctcgcgcaggcattgatgcaaaccggtttgctg

SEQ ID NO: 765411 - DNA, 75 bp, synthetic construct
  source 1..75: mol_type = other DNA
tcatccagcgctgagctccttccagaatgaagatctgcaacgcctgcgtcaggcggtacgggaagcggaacctga

SEQ ID NO: 765412 - DNA, 75 bp, synthetic construct
  source 1..75: mol_type = other DNA
tgacccctacacgctgattttttcccgacccagcccgctacggggcgtttatgacaacaataataatttcataac

SEQ ID NO: 765413 - DNA, 75 bp, synthetic construct
  source 1..75: mol_type = other DNA
tctgaaggtaaaggaagcggtacagtatatgcggactacaactctcacggtgatagtatcgatgagatgaccaaa

SEQ ID NO: 765414 - DNA, 75 bp, synthetic construct
  source 1..75: mol_type = other DNA
ttggttgtactccttctttgggctacaaatggtggtgatactttgaaaacaactctcaaccaggcttttattatc

SEQ ID NO: 765415 - DNA, 75 bp, synthetic construct
  source 1..75: mol_type = other DNA
agttgccaatctgcgatgctacaaagcgaattctagaagatcgacgagatatcgtcaacgataccgaaaaacgag

SEQ ID NO: 765416 - DNA, 75 bp, synthetic construct
  source 1..75: mol_type = other DNA
caagcccgtgaggtagctcggcagttggttcagacaatgatcgcaacaaagagaaatcccaacaagattaagagg

SEQ ID NO: 765417 - DNA, 75 bp, synthetic construct
  source 1..75: mol_type = other DNA
tgattgtcgaagtgattgacggaacgctttcgccgctcgcgcaggcattgatgcaaaccggtttgctgcccgcag

SEQ ID NO: 765418 - DNA, 75 bp, synthetic construct
  source 1..75: mol_type = other DNA
tttgggacggttcttaactgcattacacaataagcgaagttttaatcgcttgggttgtgattatctgttgctgac

SEQ ID NO: 765419 - DNA, 75 bp, synthetic construct
  source 1..75: mol_type = other DNA
ttggagcccggaaagaagaaaccgctgcactgtgctggcgagagactctgacagaagaggaagccagaacgacaa

SEQ ID NO: 765420 - DNA, 75 bp, synthetic construct
  source 1..75: mol_type = other DNA
gatgttcatgctgaatggggggttaaacctaaaattcttggtgttggtggtggcgcaggtgttagaggtggtggt

SEQ ID NO: 765421 - DNA, 75 bp, synthetic construct
  source 1..75: mol_type = other DNA
gggaagcatcgaacagagcagaaagtgccctgcatgggttcagcagcagtattgccagtgcctggaacacgctca

SEQ ID NO: 765422 - DNA, 75 bp, synthetic construct
  source 1..75: mol_type = other DNA
tcatccggcgctgcgcagcttccagaatgaagatctgcaacgcctgcgtcaggcggtacgggaagcggaacccga

SEQ ID NO: 765423 - DNA, 75 bp, synthetic construct
  source 1..75: mol_type = other DNA
tggtgcaaccgccacgcagacccgtgacggcagtatggtgatggacgccagtggggcaatgtcccgtttgccggt

SEQ ID NO: 765424 - DNA, 75 bp, synthetic construct
  source 1..75: mol_type = other DNA
taacgattctggcaaaaccgcgccacgatgccgttatcgcagaaatgcagcaactcggcgtacgcgtatttgcta

SEQ ID NO: 765425 - DNA, 75 bp, synthetic construct
  source 1..75: mol_type = other DNA
tgggcattgaagccggtaaagtactgcgtctgggcgatatggcgcgtagcgataacgtcatcttctctgccaccg

SEQ ID NO: 765426 - DNA, 75 bp, synthetic construct
  source 1..75: mol_type = other DNA
gtggtaagtcacgtaccattcgtcgcattcagtcgattcattatctggatcgtaaagacccggaaatgcaggtgc

SEQ ID NO: 765427 - DNA, 75 bp, synthetic construct
  source 1..75: mol_type = other DNA
caacaggaaatggcccgggaggcgtcgaacagagcagaaagcgccctgcatgggttcagcagcagtattgccagt

SEQ ID NO: 765428 - DNA, 75 bp, synthetic construct
  source 1..75: mol_type = other DNA
agcggtcgtgatgcggatggcctcaaggctggaagttcctcaacctgatgaagcacatagcgtggaatatcggat

SEQ ID NO: 765429 - DNA, 75 bp, synthetic construct
  source 1..75: mol_type = other DNA
cccgtgccgatctgcttggtcgtcattgccctgataagcagtcaatgctggaacgcatcgatctgttcgtgctgt

SEQ ID NO: 765430 - DNA, 75 bp, synthetic construct
  source 1..75: mol_type = other DNA
acgggcgctcgaaaccgttcagcgatatgtactttctggcggcggaaaaactcaacgtgccgatcggcgagatct

SEQ ID NO: 765431 - DNA, 75 bp, synthetic construct
  source 1..75: mol_type = other DNA
cagaataataaatataatgaagaaaagtcggctcaggaaagaatgcccggggctgacagtccacaggaactgatg

SEQ ID NO: 765432 - DNA, 75 bp, synthetic construct
  source 1..75: mol_type = other DNA
actcagagcagcatacgtggcgaagaaaatattgtaggaagacagtattctgaactacaaaatcaccataaaaca

SEQ ID NO: 765433 - DNA, 75 bp, synthetic construct
  source 1..75: mol_type = other DNA
caagccagctaaacccaacaccctaaatgtattggacaaagcagaaaatcgattaaaagagtggcaaaaccttcg

SEQ ID NO: 765434 - DNA, 75 bp, synthetic construct
  source 1..75: mol_type = other DNA
gcgctgctgattgcgctttatccatccaccccggttaaggatattgctgtcagagtaaaaagaagtttctggggt

SEQ ID NO: 765435 - DNA, 75 bp, synthetic construct
  source 1..75: mol_type = other DNA
tatcagtgcgtacgtgctcaatgtggtttcctgttctcttccgcttcctcgcccactcgctcactaacgttcggt

SEQ ID NO: 765436 - DNA, 75 bp, synthetic construct
  source 1..75: mol_type = other DNA
cgtgatgtttgctgatatggaactgatcggtattccgcacactattgtgctgggcgaccgtaacctcgacaacga

SEQ ID NO: 765437 - DNA, 75 bp, synthetic construct
  source 1..75: mol_type = other DNA
ggctgagaaactgtacagcgaactgcgtgcacaggggatcgaagtactgctggatgaccgtaaagagcgtccagg

SEQ ID NO: 765438 - DNA, 75 bp, synthetic construct
  source 1..75: mol_type = other DNA
gctggttgcgctgctagtgcgcggtgatcacgagctgaacgaagttaaagcagaaaaactgccgcaggttgcaag

SEQ ID NO: 765439 - DNA, 75 bp, synthetic construct
  source 1..75: mol_type = other DNA
tatcagatccagaccaagttccgcgacgaagtgcgtccgcgtttcggcgtcatgcgttcccgcgaattcctgatg

SEQ ID NO: 765440 - DNA, 75 bp, synthetic construct
  source 1..75: mol_type = other DNA
ttgctacggtatcggggtaacgcgcgttgtggctgcggcgattgagcagaactacgacgaacgcggcatcgtatg

SEQ ID NO: 765441 - DNA, 75 bp, synthetic construct
  source 1..75: mol_type = other DNA
gtggtcgttgggaacagtacggtccggaaactgctgcgttttgttgaccgtggcgagcgtccgttcgtactcggc

SEQ ID NO: 765442 - DNA, 75 bp, synthetic construct
  source 1..75: mol_type = other DNA
catcgcagatcttgattatattgtagctaaaaaaaccagtccgttcagccctgcggtctttggctgcggaatgat

SEQ ID NO: 765443 - DNA, 75 bp, synthetic construct
  source 1..75: mol_type = other DNA
gttaaagatcttactggtaatgaaattcttcggaagtttgatgagattgcttcaagagccagaacagcagcggaa

SEQ ID NO: 765444 - DNA, 75 bp, synthetic construct
  source 1..75: mol_type = other DNA
acaaaggattgagttgcatatgcttatgactgctcctaaattatacaatgtgttacttgcttcggctaagtatcc

SEQ ID NO: 765445 - DNA, 75 bp, synthetic construct
  source 1..75: mol_type = other DNA
catgcacgtctttcactggtccatgagtatgtgctttgccttgctgctcgcctgcctgtccgggaggtgatgtga

SEQ ID NO: 765446 - DNA, 75 bp, synthetic construct
  source 1..75: mol_type = other DNA
aggccctgacagaagaggaagtcagaacgacaagctatgtcgatcttgaaccgccccgggtttcctggagagtgt

SEQ ID NO: 765447 - DNA, 75 bp, synthetic construct
  source 1..75: mol_type = other DNA
ccgtcaaaagaattttggaagacagaagggatattgttcaggaagcagaaactcgtccagaaagacttatgtggg

SEQ ID NO: 765448 - DNA, 75 bp, synthetic construct
  source 1..75: mol_type = other DNA
atacaatccattttcaatcctaaaagtgcagaaaaaatttaggactcgatcagaactggaagacagctacaaagc

SEQ ID NO: 765449 - DNA, 75 bp, synthetic construct
  source 1..75: mol_type = other DNA
ccggccgcgcagattgttcaccggcaggcagtcagccgtaaaggtgtggtgaatgaaaatgccgtggtgcactcc

SEQ ID NO: 765450 - DNA, 75 bp, synthetic construct
  source 1..75: mol_type = other DNA
gcatatcctttactggccatcgcgtatccatcgggcgtaattcctgatgcgcgtgggcagactatcaaaggaaaa

SEQ ID NO: 765451 - DNA, 75 bp, synthetic construct
  source 1..75: mol_type = other DNA
gatatctcagggagataatgctaacgttagctccggtagagtagcttcgtcgaactctgctcaaactcacttagg

SEQ ID NO: 765452 - DNA, 75 bp, synthetic construct
  source 1..75: mol_type = other DNA
accacaaacaaccacaaacaaccacaaacaaccaccaacagcacaaaactccccacccccaaatgatgggtgcgc

SEQ ID NO: 765453 - DNA, 75 bp, synthetic construct
  source 1..75: mol_type = other DNA
cgtcatttccaggtatagtttttccgctgtcgcaaaatcggcagccggaattggcgttccgtataacttattggc

SEQ ID NO: 765454 - DNA, 75 bp, synthetic construct
  source 1..75: mol_type = other DNA
cgtttgagcaatggaaagcgaaacaggccgcgacaggtgaggcggttttactggacgagtttgtgtttgccagtg

SEQ ID NO: 765455 - DNA, 75 bp, synthetic construct
  source 1..75: mol_type = other DNA
atgtcgtttcgttgaaaacgggagatgagacacaggtttcatcaagtaatgcagggcctcttagctgccggacca

SEQ ID NO: 765456 - DNA, 75 bp, synthetic construct
  source 1..75: mol_type = other DNA
tgagatggttgctcagattaccgctacgaccgatcatgacgtttccgtgggcagcagggcgcaggctaaagtcgg

SEQ ID NO: 765457 - DNA, 75 bp, synthetic construct
  source 1..75: mol_type = other DNA
tggctgggcgttccttttgtgcgcaagggcttgccgggcgttcgctggttgtctggccgcagccagacccacagc

SEQ ID NO: 765458 - DNA, 75 bp, synthetic construct
  source 1..75: mol_type = other DNA
aaccgtttcgatttacagaaaaaaagacctgatataaccccggcgtgctggctaaaaaagaaatctggagggacc

SEQ ID NO: 765459 - DNA, 75 bp, synthetic construct
  source 1..75: mol_type = other DNA
tcgaaggtcagaaagaactgcggggtatgtggctggccgaaaatgaaggggcgaagttctggcttaatgtgctga

SEQ ID NO: 765460 - DNA, 75 bp, synthetic construct
  source 1..75: mol_type = other DNA
ttatacaaccgctatccgaatggctctatcgtcaatgagattggctggccggtgaaacagaatagctatgtgtgg

SEQ ID NO: 765461 - DNA, 75 bp, synthetic construct
  source 1..75: mol_type = other DNA
agtcatcgtcaacggaggcctggcggatgaaacttcactgaatgataccgcgacagcatacgttgccatgaccgg

SEQ ID NO: 765462 - DNA, 75 bp, synthetic construct
  source 1..75: mol_type = other DNA
cgacggcgaaagcggcgaagctgaaaaaaggcgaaacactccaggttaaggtaacggtgaaggatgctcagggca

SEQ ID NO: 765463 - DNA, 75 bp, synthetic construct
  source 1..75: mol_type = other DNA
ttggcatcggcctggcgtgtgtgaatattgctgagttaaaccacggactccccgattttgactgggcacgttata

SEQ ID NO: 765464 - DNA, 75 bp, synthetic construct
  source 1..75: mol_type = other DNA
acgccgttgacggtcacgttggacaataacaccagcatcactgcgacaatggacgctattttcaccgtagtgacc

SEQ ID NO: 765465 - DNA, 75 bp, synthetic construct
  source 1..75: mol_type = other DNA
cctacgtcatctgtgaaaaaaggtgagacgcttcccttagtggtgacgatcaaagatgccaatggtaaccccgtt

SEQ ID NO: 765466 - DNA, 75 bp, synthetic construct
  source 1..75: mol_type = other DNA
tgcgacattgacagaaaataatgaagtctgggcacgtgtgagtcaggcgaatacgtccagtataagtaaaggtgg

SEQ ID NO: 765467 - DNA, 75 bp, synthetic construct
  source 1..75: mol_type = other DNA
gcgaggttacgtgaagggtaacccatgtgcaggtgtaagtaaattcaaggccaaaaaccgcgaacgatatgtaac

SEQ ID NO: 765468 - DNA, 75 bp, synthetic construct
  source 1..75: mol_type = other DNA
ctggggctactgaaatcacgaaagaagaatatttcgcccgcaaaaacggtacatactcaggttcacaacaaaata

SEQ ID NO: 765469 - DNA, 75 bp, synthetic construct
  source 1..75: mol_type = other DNA
agcgtggttatgtaccaggtaatccgtgtgttggtgtcgataagtttcctaaaccccagcgcgaccgctacataa

SEQ ID NO: 765470 - DNA, 75 bp, synthetic construct
  source 1..75: mol_type = other DNA
caatacggcaaccgatatatgtacaaaggctttaacgaaatgtgggtagaagcaagaaatcgcgcaggcaaaatt

SEQ ID NO: 765471 - DNA, 75 bp, synthetic construct
  source 1..75: mol_type = other DNA
caccgtgaaaaatctcataatttttatgaaatcactgtacccctgtctgctgctggcgttttgcgtatggatgtt

SEQ ID NO: 765472 - DNA, 75 bp, synthetic construct
  source 1..75: mol_type = other DNA
aagcccagtccacgctgggagcatgagatagcgacagctttgggtatgaagccttctgagatatggccggagcgg

SEQ ID NO: 765473 - DNA, 75 bp, synthetic construct
  source 1..75: mol_type = other DNA
atgggaagacgaaggaaaaatcccgaacacgaaaaattaccgccaaaggtataccccaataaatatagtgtatgg

SEQ ID NO: 765474 - DNA, 75 bp, synthetic construct
  source 1..75: mol_type = other DNA
gtcgttgaaggtcgaaaaaaactactcacctttcaacaattgtggaaaaaatttttaaatagtgctgactatgca

SEQ ID NO: 765475 - DNA, 75 bp, synthetic construct
  source 1..75: mol_type = other DNA
aagataatgcactaccaccgcgtgttagatcgaatggttacagttacgtatggaaacccgaaggaagcacaagaa

SEQ ID NO: 765476 - DNA, 75 bp, synthetic construct
  source 1..75: mol_type = other DNA
cgaacgcggatacgtaaaagggaatccatgccagggcgtcagtaaattttccctcaaggcacgcgactactattt

SEQ ID NO: 765477 - DNA, 75 bp, synthetic construct
  source 1..75: mol_type = other DNA
gtgctggccgattctgtaaaaccagagcacatcagacgatacatggacaaaagaggcgagcagagtaaaacgcag

SEQ ID NO: 765478 - DNA, 75 bp, synthetic construct
  source 1..75: mol_type = other DNA
aattatgaactggaaaaagcaaaacgccacaacataatgaccgtcgctaaattatggcacatgtttatggattcc

SEQ ID NO: 765479 - DNA, 75 bp, synthetic construct
  source 1..75: mol_type = other DNA
tataccgctggggttatcagcgtggttatgtaccaggtaatccgtgtgttggtgtcgataagtttcctaaacccc

SEQ ID NO: 765480 - DNA, 75 bp, synthetic construct
  source 1..75: mol_type = other DNA
ccaatctgctttatagccagcgcgacggcaaactcgcatgggggaaactcgccccggcgctggtttgtattggca

SEQ ID NO: 765481 - DNA, 75 bp, synthetic construct
  source 1..75: mol_type = other DNA
ttagcgcggcgcattcgcatcaccattggcagaaatggttcagaggttgtcgctcatattcacagaccataccgc

SEQ ID NO: 765482 - DNA, 75 bp, synthetic construct
  source 1..75: mol_type = other DNA
acgacttccgtgatgtaacgactggcagttcttcaaaggtgcgcagaagctgggcgaactgggtcagccggtgct

SEQ ID NO: 765483 - DNA, 75 bp, synthetic construct
  source 1..75: mol_type = other DNA
tcgtagaagaaaacgaggctgtagcagtttgtataagaggagaccatgaggtaaacgaaataaaacttgagaaga

SEQ ID NO: 765484 - DNA, 75 bp, synthetic construct
  source 1..75: mol_type = other DNA
ggcagtgtcacaagcaggtatgggcgttaaagattcgacatatcgaccacaaaccaaacccagacctttctggcg

SEQ ID NO: 765485 - DNA, 75 bp, synthetic construct
  source 1..75: mol_type = other DNA
tacagtaaccctggtttgttagagaaagcccggtcattcctgaaggccaatgttgaaggggataagccatctttc

SEQ ID NO: 765486 - DNA, 75 bp, synthetic construct
  source 1..75: mol_type = other DNA
tgcgcgcctggtaaggatggttgcagaagaacctgatccggatatgcgtaatgttctgacggcgcttaatgcggc

SEQ ID NO: 765487 - DNA, 75 bp, synthetic construct
  source 1..75: mol_type = other DNA
ccaatctgctttatagccagcgcgacggcaaactcgcgtggggaaaactcgccccggcactgatttgtattggca

SEQ ID NO: 765488 - DNA, 75 bp, synthetic construct
  source 1..75: mol_type = other DNA
ggggattcggttactgttggcagtggagccattattctgtctccgtatatatgcagcggagctgttatcggtgcg

SEQ ID NO: 765489 - DNA, 75 bp, synthetic construct
  source 1..75: mol_type = other DNA
acatctaattatttctggttcgatagaagtttgaaaaacagtatatttaatatagaaggtgtatttgtcaacact

SEQ ID NO: 765490 - DNA, 75 bp, synthetic construct
  source 1..75: mol_type = other DNA
atacgaaatatggtaatcaaaccggttgcacaagattcggaagatggtgcaatgtttgaaatatttaaccgccta

SEQ ID NO: 765491 - DNA, 75 bp, synthetic construct
  source 1..75: mol_type = other DNA
atgcggctcttagagaatgaaaacgtcctgagaaaaaggtcaacgatgctccagtcaatttataaattcctgttc

SEQ ID NO: 765492 - DNA, 75 bp, synthetic construct
  source 1..75: mol_type = other DNA
gcagttgtagtaaaaccgattgagaacaaaggcatttatgcaggaaacccggcaagactgctcagaatattatga

SEQ ID NO: 765493 - DNA, 75 bp, synthetic construct
  source 1..75: mol_type = other DNA
atgaatagtaatgatactgaactacttcgcttatttgacacattaaccacagaacaaaagattgatatcgccaga

SEQ ID NO: 765494 - DNA, 75 bp, synthetic construct
  source 1..75: mol_type = other DNA
tatcaaaattatttctggagaatgatggggaaagtcaacccaaatcttttgatattaaacttataaattgtgata

SEQ ID NO: 765495 - DNA, 75 bp, synthetic construct
  source 1..75: mol_type = other DNA
acattggtaacagctcaccggtggaactgatggattatatcaatgcattggagcaggcattgggattggaagcga

SEQ ID NO: 765496 - DNA, 75 bp, synthetic construct
  source 1..75: mol_type = other DNA
tacctatatagatgatattgtcgaagctattgttcgtatccaggatgtaatccctcagcctgatcctgaatggac

SEQ ID NO: 765497 - DNA, 75 bp, synthetic construct
  source 1..75: mol_type = other DNA
gagcggtatcgcgctgttagtggccggcgtgatcattgcagtcagagcaaaaccggaaaaacccttagctgaacc

SEQ ID NO: 765498 - DNA, 75 bp, synthetic construct
  source 1..75: mol_type = other DNA
atctgtattcagacgcgggaacattcatcactctgttgtgtgcgcaaacgtatctgaatctccctgatgctgcca

SEQ ID NO: 765499 - DNA, 75 bp, synthetic construct
  source 1..75: mol_type = other DNA
ctgctgcggtcagaaaggatgatagtggcaaggatgtagctgaaggtgccttctcagcagttgcgaatttcaacc

SEQ ID NO: 765500 - DNA, 75 bp, synthetic construct
  source 1..75: mol_type = other DNA
gtcgaagatggcgataagtgggctgaatttaagccgtacaatggtttttcgctggatttcaccatcgattttaac

SEQ ID NO: 765501 - DNA, 75 bp, synthetic construct
  source 1..75: mol_type = other DNA
tgccggtattgatgagctaaactgtgccaagaaatttgtacgcatcaaagagaccgttcgtgtcgaagatggcga

SEQ ID NO: 765502 - DNA, 75 bp, synthetic construct
  source 1..75: mol_type = other DNA
agaagaaaactgaccttagaaacagaggttaaagaaatttatactgacgcgtttattttcagtaagaagaaaaag

SEQ ID NO: 765503 - DNA, 75 bp, synthetic construct
  source 1..75: mol_type = other DNA
gcgactttacctatatcgacgacatcgtcgaggcgctagtgcgtgttcaggatgtgaccccgcaggccaatgccg

SEQ ID NO: 765504 - DNA, 75 bp, synthetic construct
  source 1..75: mol_type = other DNA
atgaacttctccgctgatgcgtttatgcgccagatcagccgtgcgcgtacgttcggtttcatgcgtgatatcgaa

SEQ ID NO: 765505 - DNA, 75 bp, synthetic construct
  source 1..75: mol_type = other DNA
tgcaggtattgaggaactgaacagcgcgaaaaaatttgtacgtatcaaagagactgttcgtgttgaagatggcga

SEQ ID NO: 765506 - DNA, 75 bp, synthetic construct
  source 1..75: mol_type = other DNA
cctgggcgttgaatacctggggcaccaacttccatcagatcattatggataccatctcaaccccactggcatcgt

SEQ ID NO: 765507 - DNA, 75 bp, synthetic construct
  source 1..75: mol_type = other DNA
gttgaagtaattgactcgctgctttatggcaaagtcgatgatttaggcgtgcttaaggctgcggttgcagcgatt

SEQ ID NO: 765508 - DNA, 75 bp, synthetic construct
  source 1..75: mol_type = other DNA
tgcgccattgaccaggattttcttgacgcagccggtattctcgaaaacgaagccattgatatctggaatgtcacc

SEQ ID NO: 765509 - DNA, 75 bp, synthetic construct
  source 1..75: mol_type = other DNA
ctgtgccgttaaagcattaggtggggatatgcaggccgagctgattgacttttgtcaggctaaaggggattacac

SEQ ID NO: 765510 - DNA, 75 bp, synthetic construct
  source 1..75: mol_type = other DNA
gcctcgaacagttgcaggacggtttacgccatccggtttttccgctttatctggggcgaaaaagtcatccgctgg

SEQ ID NO: 765511 - DNA, 75 bp, synthetic construct
  source 1..75: mol_type = other DNA
agattgcttatatgttgcccgaaatccagcgtttgttacccaacaaaccggttgaagtaattgactcgctggtga

SEQ ID NO: 765512 - DNA, 75 bp, synthetic construct
  source 1..75: mol_type = other DNA
gagaaagacgttatttttacggtgatcaccagccctgattccgacaaagcgcggatgtggggacatatgttaggc

SEQ ID NO: 765513 - DNA, 75 bp, synthetic construct
  source 1..75: mol_type = other DNA
agccctcaacgatggggcgcggaccgttggcggtagcacggcggtttatgtcagttgcctgacgacggctaacaa

SEQ ID NO: 765514 - DNA, 75 bp, synthetic construct
  source 1..75: mol_type = other DNA
acctttgcccgaccccgactggctgcggaagtgttcagtccggacggcacattaacggaaaataacgaagtctgg

SEQ ID NO: 765515 - DNA, 75 bp, synthetic construct
  source 1..75: mol_type = other DNA
atcgctgaaaatccagatggcttgctgcctgatggctacgggtgaagcggcaactatcagcgacggcctggcgcg

SEQ ID NO: 765516 - DNA, 75 bp, synthetic construct
  source 1..75: mol_type = other DNA
acctttgcccgaccccggctggctgcggaagtgtccagcccggacggcacattaacggaaaataacgaagtgtgg

SEQ ID NO: 765517 - DNA, 75 bp, synthetic construct
  source 1..75: mol_type = other DNA
cggctgttacgctgagtgaaagcggtaataccattagtggcatgacaggcgcggatgggacggcaagttttacgc

SEQ ID NO: 765518 - DNA, 75 bp, synthetic construct
  source 1..75: mol_type = other DNA
actcagttttctaaccagggcacgatggcaggggctgcactggtaaaagacgcgatgtataacggttctttgttg

SEQ ID NO: 765519 - DNA, 75 bp, synthetic construct
  source 1..75: mol_type = other DNA
cgcgcatgttctgggtatgtcgcaaccagcggtcagtaacgctgttgcacgcctgaaggtgatgtttaatgatga

SEQ ID NO: 765520 - DNA, 75 bp, synthetic construct
  source 1..75: mol_type = other DNA
tcaacggcactatcgacaacgaaatagccctactctgcaatgcccgcgatctgcatgcttttttaggcgtgaaaa

SEQ ID NO: 765521 - DNA, 75 bp, synthetic construct
  source 1..75: mol_type = other DNA
aggcttacagttcgaagcgcgaattgcccaacggcagtctctggtaaaacagctgcatgaacgccagcttgatct

SEQ ID NO: 765522 - DNA, 75 bp, synthetic construct
  source 1..75: mol_type = other DNA
cagcccggatgtcccgcaggccacaatgtggggtcatatgcccgatacgctgaaggcccgtgattacacttttag

SEQ ID NO: 765523 - DNA, 75 bp, synthetic construct
  source 1..75: mol_type = other DNA
cgggcgcggatggaacggccacgtttacggtaaagcaggatgattctataggcctggtaaccaatgtgtacgctc

SEQ ID NO: 765524 - DNA, 75 bp, synthetic construct
  source 1..75: mol_type = other DNA
gggaatggcaatgatgagcgtccttagcgtggtgtcacaaacgcatcttgtcgctattgcgcctcgttggctggc

SEQ ID NO: 765525 - DNA, 75 bp, synthetic construct
  source 1..75: mol_type = other DNA
atggtggtcaagctggcgtcaaaaccattgcagtatattaactccccttacctgctgatgattgccgcctatttt

SEQ ID NO: 765526 - DNA, 75 bp, synthetic construct
  source 1..75: mol_type = other DNA
tttgcgggctatgccgtgcaccgtattcgcggcgcgatcctggatgagctgcgcgctctcgactggcgaccgcgc

SEQ ID NO: 765527 - DNA, 75 bp, synthetic construct
  source 1..75: mol_type = other DNA
agggtggtttaaaagaagcggaactgaaaaccttaatcctcgagcaatatcaggctgcgggcattgcgccggaaa

SEQ ID NO: 765528 - DNA, 75 bp, synthetic construct
  source 1..75: mol_type = other DNA
tggggcgttacgcattaaacgagatattactgcgacaaccagagctggatgctgtgatttgcagccacgaagaga

SEQ ID NO: 765529 - DNA, 75 bp, synthetic construct
  source 1..75: mol_type = other DNA
ttcaccggcggcgattattcttgcaccgacatcaggtgacgtagtactggcggcgcaggcttccgaaatgtcgct

SEQ ID NO: 765530 - DNA, 75 bp, synthetic construct
  source 1..75: mol_type = other DNA
gagcatatttcccatgaaatgttagatgtcagcgaaatcacgaccaccgctcctgcgttttacgccattctgccg

SEQ ID NO: 765531 - DNA, 75 bp, synthetic construct
  source 1..75: mol_type = other DNA
atctctcttgttcgggcaatgagatggtcgcccagattgccgcgaccaccgatcgtgatgtttccgcaggcagca

SEQ ID NO: 765532 - DNA, 75 bp, synthetic construct
  source 1..75: mol_type = other DNA
tgactttagtaaagcaccgagctataccgatttacagtcattacatagcagctttagcgcgctgggatggccatc

SEQ ID NO: 765533 - DNA, 75 bp, synthetic construct
  source 1..75: mol_type = other DNA
gcgctggagtcagtcaggtgacggataacaatgaagtgtggccgttgtttaacgcaacgcaaagggtagacggca

SEQ ID NO: 765534 - DNA, 75 bp, synthetic construct
  source 1..75: mol_type = other DNA
ggctggaaagcctgttttcagcccatcccggtaacgcgattggcactgagtatggctggcccaccgcccaacaga

SEQ ID NO: 765535 - DNA, 75 bp, synthetic construct
  source 1..75: mol_type = other DNA
gtataaacgcccgttgctggcggatgaaaccgagcatgaactgggaacagtgcgggaaaacaacgaagactgggc

SEQ ID NO: 765536 - DNA, 75 bp, synthetic construct
  source 1..75: mol_type = other DNA
agcgatgatttagaagcgctctatacacgttatccaggaaacacgattaccgcgcaaattggctggcctacgcag

SEQ ID NO: 765537 - DNA, 75 bp, synthetic construct
  source 1..75: mol_type = other DNA
atccgcacaggatgacgccagaaccaccagcaatggcggccgtcccagcgcgtcagcgaaaaaaggtaactcaat

SEQ ID NO: 765538 - DNA, 75 bp, synthetic construct
  source 1..75: mol_type = other DNA
acatcgacggcactggatagcagtacgcaggcggcgaaggtgaaaaaaggcgacgccgttcccgttgtcgttacc

SEQ ID NO: 765539 - DNA, 75 bp, synthetic construct
  source 1..75: mol_type = other DNA
caggttgatgctcacacctatgaaggcatgaccgatgtcaacggtcaggcttcgctaaccctgagccagcccgac

SEQ ID NO: 765540 - DNA, 75 bp, synthetic construct
  source 1..75: mol_type = other DNA
acatctacagattgcccactcgagaatcaaccgcgcagtaaggaactgttggatttgtatagtgatcatccgaac

SEQ ID NO: 765541 - DNA, 75 bp, synthetic construct
  source 1..75: mol_type = other DNA
tgatttttaccgtgatcaccagccctgatagcgataaggcgcggatgtggggccatatgcgcggcattgttgaat

SEQ ID NO: 765542 - DNA, 75 bp, synthetic construct
  source 1..75: mol_type = other DNA
cgctattaaaatcggagttgccgtcaggggttaccgcagcagcaacgcccaatgtgaataatgaaacctgggcgc

SEQ ID NO: 765543 - DNA, 75 bp, synthetic construct
  source 1..75: mol_type = other DNA
aaatggggcaaaagtgctcagaacaacgggcagtgatggcacagccacctttgaagtgagccagaatgccacgac

SEQ ID NO: 765544 - DNA, 75 bp, synthetic construct
  source 1..75: mol_type = other DNA
ttatctgctgacctcgaccggttatccctatgaggggacggtggcgctggctgaccagaaagtgacgctgaatat

SEQ ID NO: 765545 - DNA, 75 bp, synthetic construct
  source 1..75: mol_type = other DNA
gccgcgaatacagtaaacatatgttacgtcttcgcagggaagggcatattaacgggaaagaagttcctgaattat

SEQ ID NO: 765546 - DNA, 75 bp, synthetic construct
  source 1..75: mol_type = other DNA
aaaacatctgacttagaggaagataaaatctttgatgtgaatgaagttagtgacaagaaagatacaccttgccgc

SEQ ID NO: 765547 - DNA, 75 bp, synthetic construct
  source 1..75: mol_type = other DNA
cagggttgatgaacttgatgactttgatgatagtgacgatgatgacttttctttcacaccaagaaagaaaactca

SEQ ID NO: 765548 - DNA, 75 bp, synthetic construct
  source 1..75: mol_type = other DNA
aaaacgcagaaaacaccgccagccgaacgcaaaaaagctgaagccagaatgaaggaggttaagcatgactggtaa

SEQ ID NO: 765549 - DNA, 75 bp, synthetic construct
  source 1..75: mol_type = other DNA
tgcttctatgaggcattaaaggtcgcaatgcgcaactatccggtaactccggatgggtggataagctgtagtgag

SEQ ID NO: 765550 - DNA, 75 bp, synthetic construct
  source 1..75: mol_type = other DNA
gagaaagacgttatttttacggtgatcaccagccccgataccgacaaagcgcggatgtggggccatatgttgggc

SEQ ID NO: 765551 - DNA, 75 bp, synthetic construct
  source 1..75: mol_type = other DNA
taaagcggagaagaaaaagagattcgaactggcaaaacaaaagaacagacttagtgaacttgatgactttgatga

SEQ ID NO: 765552 - DNA, 75 bp, synthetic construct
  source 1..75: mol_type = other DNA
aggctattaaaaaagcacaacgcaaagcagagattaaatcacgcattgaaatggcgaagctaaagaacaaggtta

SEQ ID NO: 765553 - DNA, 75 bp, synthetic construct
  source 1..75: mol_type = other DNA
cgatccgcatttcgactaaagatgcgcagggaaatttcgtcggcaatacgccgtttgccctgaaacacgcgaact

SEQ ID NO: 765554 - DNA, 75 bp, synthetic construct
  source 1..75: mol_type = other DNA
aaagaaaactcacaccgattcaaagaaagagaggattaaaccgaagatgtattttgctagtggaggtatgcgcta

SEQ ID NO: 765555 - DNA, 75 bp, synthetic construct
  source 1..75: mol_type = other DNA
acagacccaaaaagaaaactcacactgattcaaagaaagagaagattaaaccgaagatgtattttgctggtggag

SEQ ID NO: 765556 - DNA, 75 bp, synthetic construct
  source 1..75: mol_type = other DNA
ttgaagtaagctctaaaaagacttctaaacaagacaaagaaatctctgatgtgaatatcgatagtgaccataaaa

SEQ ID NO: 765557 - DNA, 75 bp, synthetic construct
  source 1..75: mol_type = other DNA
ggcgtaaatatcagcggtaataacaatgacgtcacgctggatggtcagttaaccgttgttgctgatagcgaaacc

SEQ ID NO: 765558 - DNA, 75 bp, synthetic construct
  source 1..75: mol_type = other DNA
atgcggtaattgagaacaacggcacgatcaatatttttgctaacgactcgtttgcgttcagcgtactgggcacag

SEQ ID NO: 765559 - DNA, 75 bp, synthetic construct
  source 1..75: mol_type = other DNA
gtaagtaccgctggtgcgacagaaagcgatgccttcctgtggaaccaggatgccggggtgattaacttcgataaa

SEQ ID NO: 765560 - DNA, 75 bp, synthetic construct
  source 1..75: mol_type = other DNA
gcacgctggttaacgaggaaagcggagcaatcaattcggccatcgtcgtgaatgcaggcggtgcgttaaccaatg

SEQ ID NO: 765561 - DNA, 75 bp, synthetic construct
  source 1..75: mol_type = other DNA
tggtatcggagatacaccgcttatcagcgttgatgggcattcctcagtctacctcaatggtgagtcaaccatcag

SEQ ID NO: 765562 - DNA, 75 bp, synthetic construct
  source 1..75: mol_type = other DNA
tggaacaacgcgctgcgttatgacgtgcataatctcgacagcagccgctcggtcgcttacggcgacgtcagcaaa

SEQ ID NO: 765563 - DNA, 75 bp, synthetic construct
  source 1..75: mol_type = other DNA
ttctcaaaactatgtccgctgacgagctggaagactaccgtgcagccggtgaagattttcgccgggagctgagcc

SEQ ID NO: 765564 - DNA, 75 bp, synthetic construct
  source 1..75: mol_type = other DNA
ggatctcatcgagtgtcttgacgccggtggctactcgtatgccagcatcatcagcacgctgtcacaggagggcgc

SEQ ID NO: 765565 - DNA, 75 bp, synthetic construct
  source 1..75: mol_type = other DNA
tcctgaaaaccatgtcttctgatgagctggaagactaccgcgccgccggtgaagactttcgccgggagctgagtc

SEQ ID NO: 765566 - DNA, 75 bp, synthetic construct
  source 1..75: mol_type = other DNA
gcgcggtaaaagcggtacgtaatcaaaatcaggccggaaaaattgctgttttcggttcggatatgacaaccgaaa

SEQ ID NO: 765567 - DNA, 75 bp, synthetic construct
  source 1..75: mol_type = other DNA
ccgtggtggattacttcgctcagtcgaataagaacatcaccattctggtgcaaatcgaaagccagcaaggtgttg

SEQ ID NO: 765568 - DNA, 75 bp, synthetic construct
  source 1..75: mol_type = other DNA
gcgccaaacgatatctccacgtttattccgcagttaatggccctgaaaggcagcgccagcgcgccagtagtgcga

SEQ ID NO: 765569 - DNA, 75 bp, synthetic construct
  source 1..75: mol_type = other DNA
aacaactatgttgccctcaacgatggcgtgatgaacatcagcggcaacaatgccgtggcgatggaaggtgataaa

SEQ ID NO: 765570 - DNA, 75 bp, synthetic construct
  source 1..75: mol_type = other DNA
gaatcattggttacctgcggacgtctgtttatggacgcggtaaaacaatgtaaagctcaacttttgcctgttgat

SEQ ID NO: 765571 - DNA, 75 bp, synthetic construct
  source 1..75: mol_type = other DNA
ctacgcttgctgcgatccgcgcgggtaaaaccattttgctggccaataaagaatcactggttacctgcggacgtc

SEQ ID NO: 765572 - DNA, 75 bp, synthetic construct
  source 1..75: mol_type = other DNA
ggaacaacttaccaatttgccgaccattgccattaacgacgcgcaggctgcagcatgggcggagtatcaggcgct

SEQ ID NO: 765573 - DNA, 75 bp, synthetic construct
  source 1..75: mol_type = other DNA
atccgaactggtcgatgggacgtaaaatttctgtcgattcggctaccatgatgaacaaaggtctggaatacattg

SEQ ID NO: 765574 - DNA, 75 bp, synthetic construct
  source 1..75: mol_type = other DNA
aaactaagtgcgttgacatttgccgcaccggattatgatcgttatccatgcctgaaactggcgatggaggcgttc

SEQ ID NO: 765575 - DNA, 75 bp, synthetic construct
  source 1..75: mol_type = other DNA
ccgggtctggtggccctttccgtgagacgccattgcgcgatttggcaacaatgacgccggatcaagcctgccgtc

SEQ ID NO: 765576 - DNA, 75 bp, synthetic construct
  source 1..75: mol_type = other DNA
caccaacaacgagctatataccagcctgaacgtgggtaccactgccgaactgaacagcgccctgaagcaggtcag

SEQ ID NO: 765577 - DNA, 75 bp, synthetic construct
  source 1..75: mol_type = other DNA
ggcattcagatcgacggtaataatgcgacatttgttaacgttggtgatattaccgcgaccaacgccggaaccggt

SEQ ID NO: 765578 - DNA, 75 bp, synthetic construct
  source 1..75: mol_type = other DNA
atacgacatgctggcattgcgtaaaaccatcgacctgagcgaaagccagacgatgagtctggagtacggtatcgc

SEQ ID NO: 765579 - DNA, 75 bp, synthetic construct
  source 1..75: mol_type = other DNA
gactatcttccaggcgcaattaagctgcccgaccacacacggtttctctgaaagcgctacgcgtttcctctccca

SEQ ID NO: 765580 - DNA, 75 bp, synthetic construct
  source 1..75: mol_type = other DNA
ggtctgtgtaaccaggtaaatcatttgataccgacaagggttttagtgaaaggaggtgaaatcacctgtaagata

SEQ ID NO: 765581 - DNA, 75 bp, synthetic construct
  source 1..75: mol_type = other DNA
gtaacgagcaggtgtaccagtgtcaggtggcatttgtattgccgggtgagcgggtcatgatggccttcacctatg

SEQ ID NO: 765582 - DNA, 75 bp, synthetic construct
  source 1..75: mol_type = other DNA
cagcctgacagcgcgcctcgatgccgatggctacagtcaggccagcattatcagtgttctggcgatggagggcgc

SEQ ID NO: 765583 - DNA, 75 bp, synthetic construct
  source 1..75: mol_type = other DNA
atggggcattacgacaatggtgagcacggctctaacgcaccgggcgatgtggagatggcacgcgcgctgcctgcc

SEQ ID NO: 765584 - DNA, 75 bp, synthetic construct
  source 1..75: mol_type = other DNA
ctgaaagcgtatatccagaaaagctcgccgctggatgtgagtgtttatgaaccgaaaggtgaggtgagctggcag

SEQ ID NO: 765585 - DNA, 75 bp, synthetic construct
  source 1..75: mol_type = other DNA
cgaagctggtgattcaggagctgcaacagacagaaaagccagacattattatcgcggcgacccatatggggcatt

SEQ ID NO: 765586 - DNA, 75 bp, synthetic construct
  source 1..75: mol_type = other DNA
ggtgattgattacctgaccgccgtcgcgcagatgaagccagattcaggtgcctacccgcaatttgctaacgttag

SEQ ID NO: 765587 - DNA, 75 bp, synthetic construct
  source 1..75: mol_type = other DNA
ttcggcaatgtggtggtgtatgccgacatgaccggtaaagaggtgattgattacctgaccgccgtcgcgcagatg

SEQ ID NO: 765588 - DNA, 75 bp, synthetic construct
  source 1..75: mol_type = other DNA
tatggggcattacgacaatggcgaacacggttcaaacgcaccgggcgatgtagagatggcgcgcagcctgcctgc

SEQ ID NO: 765589 - DNA, 75 bp, synthetic construct
  source 1..75: mol_type = other DNA
gcactactgggagtagcctgtattatgagcgggttgatgctgattttcctgcccacgacaaaacaacgttactga

SEQ ID NO: 765590 - DNA, 75 bp, synthetic construct
  source 1..75: mol_type = other DNA
attaaagcagtgcgcttctatgaacaggttaagcgtgaaaatccgccagtcgaaaccggagcgtggaaagatgcc

SEQ ID NO: 765591 - DNA, 75 bp, synthetic construct
  source 1..75: mol_type = other DNA
gaaggctttgcattttcgatggggcggctgcgtgaaaaaattgacgacgacctgccggagcttaccgaagggctg

SEQ ID NO: 765592 - DNA, 75 bp, synthetic construct
  source 1..75: mol_type = other DNA
caaagaggttgcggctgaaggcggtagcgtgctgctactttccggtggcgacattaacactggcgtgcccgagtc

SEQ ID NO: 765593 - DNA, 75 bp, synthetic construct
  source 1..75: mol_type = other DNA
tgctactggcagcgggcgacaagccgattatcttccgcacaatggacatcggaggcgataaaagcattccttatc

SEQ ID NO: 765594 - DNA, 75 bp, synthetic construct
  source 1..75: mol_type = other DNA
ccagcaattgcgtgagcgtgacggcgaaagcaaaactatcctcagcgcccatttgtcgctgattcaggatgatga

SEQ ID NO: 765595 - DNA, 75 bp, synthetic construct
  source 1..75: mol_type = other DNA
tggttagtaaaagcaaggcgcattgccgccgcatgctgcaggcattgcaacagacgagagcaggtatttttgacc

SEQ ID NO: 765596 - DNA, 75 bp, synthetic construct
  source 1..75: mol_type = other DNA
gcgatgaaagccaaaaccggcttacagcacctgacggtcattaatcagtcccaccagcaatatctgcaaaaagac

SEQ ID NO: 765597 - DNA, 75 bp, synthetic construct
  source 1..75: mol_type = other DNA
cagcaatgccggaaccggagtggatatcgccggtaacgccggaaacgtttctctggctggcaatatgcaggtagg

SEQ ID NO: 765598 - DNA, 75 bp, synthetic construct
  source 1..75: mol_type = other DNA
cgtggtctggaacgcccagggcagcaccaacgctagcggtaatgtcgatgtcactatgaccaaaaacgcctacag

SEQ ID NO: 765599 - DNA, 75 bp, synthetic construct
  source 1..75: mol_type = other DNA
atgatcaccaaagaaggtgatagctttaaaacctggatgtcaccacagtttaaaagcttccttatcagcgaaaaa

SEQ ID NO: 765600 - DNA, 75 bp, synthetic construct
  source 1..75: mol_type = other DNA
cgctgttagcagcggcactcctctttgttggctgtgatcaagccccgaaacccactaaagccccatctgcagacg

SEQ ID NO: 765601 - DNA, 75 bp, synthetic construct
  source 1..75: mol_type = other DNA
ttggcccggaacaacagccggttcaaattccgagccaggaacagatcgacgcgatgaaagccaaaactggtttac

SEQ ID NO: 765602 - DNA, 75 bp, synthetic construct
  source 1..75: mol_type = other DNA
gttgaggagcagggcggcattcaggtgctgttggaaaaactgcaaagtggcggcttaggggccattctctcaacc

SEQ ID NO: 765603 - DNA, 75 bp, synthetic construct
  source 1..75: mol_type = other DNA
attgatgctctctcaccgcagggtgaagtgtcttcgcaagccaataacgatttgctttccgcaggcatggaactg

SEQ ID NO: 765604 - DNA, 75 bp, synthetic construct
  source 1..75: mol_type = other DNA
tgctgctggaaaaactgcaaagtggcggcttaggggccattctctcaacctggctgagtaatcaacagggcaatc

SEQ ID NO: 765605 - DNA, 75 bp, synthetic construct
  source 1..75: mol_type = other DNA
tacgattacacgaagcggagaaactgtaacgctaaataaatctgctgctgtgactgataagctggctgggaatgt

SEQ ID NO: 765606 - DNA, 75 bp, synthetic construct
  source 1..75: mol_type = other DNA
gccaacgccacggcggatgcggtaatcgaaaacaacggcaccatcaatatcttcgccaatgactcgtttgcattt

SEQ ID NO: 765607 - DNA, 75 bp, synthetic construct
  source 1..75: mol_type = other DNA
attcttctattatttcctgggttctttattggtggtttattggaaatattactaaaaaggtagggatgcttgttg

SEQ ID NO: 765608 - DNA, 75 bp, synthetic construct
  source 1..75: mol_type = other DNA
aatgaatcatgtacatgccggatttaccgcaatgaccgaaatcatccgatctgcgttaccgactggatggatgaa

SEQ ID NO: 765609 - DNA, 75 bp, synthetic construct
  source 1..75: mol_type = other DNA
ccgatccacacggcccagtctgcggctgtggacgcacaggttgcgtggaggcgattgcttctggtcgcggcattg

SEQ ID NO: 765610 - DNA, 75 bp, synthetic construct
  source 1..75: mol_type = other DNA
attgccattaacgatgcgcaggccgcagcgtgggcggagtatcaggcgctggaaggcgatataaccgatatggtg

SEQ ID NO: 765611 - DNA, 75 bp, synthetic construct
  source 1..75: mol_type = other DNA
aatgaatcttgtacatgccggatttaccgcaacgaccgcaatcatccgatctgcgttaccgactggatggatgaa

SEQ ID NO: 765612 - DNA, 75 bp, synthetic construct
  source 1..75: mol_type = other DNA
aatgaatcttgtacatgccggatttaccgcaaagaccgaaatcatccgatctgcgttaccgactggatggatgaa

SEQ ID NO: 765613 - DNA, 75 bp, synthetic construct
  source 1..75: mol_type = other DNA
ggacgaaagaaatttacgccttccctgacaagcagaacggcatcgttccggtagtgggcgttgatggctggtccc

SEQ ID NO: 765614 - DNA, 75 bp, synthetic construct
  source 1..75: mol_type = other DNA
cgacatcactccggttaacgatgaaaccatgcaggagattaacactctgcttgaaccgccccggaaatcctggag

SEQ ID NO: 765615 - DNA, 75 bp, synthetic construct
  source 1..75: mol_type = other DNA
gtcggaaattaacgcccttcttacttccatggaaaaaacgtgggatgacgacctcttgccgctctgttcccagat

SEQ ID NO: 765616 - DNA, 75 bp, synthetic construct
  source 1..75: mol_type = other DNA
acgacaaccatactgccggtaaaaagctgcgcctgatgcagcaatacttccagtgtgcctgttcggtagcggata

SEQ ID NO: 765617 - DNA, 75 bp, synthetic construct
  source 1..75: mol_type = other DNA
ggcgctgcactcggatctggtggtgaaagatttgttcccggaataccaccagttgtggccgaacaaattccataa

SEQ ID NO: 765618 - DNA, 75 bp, synthetic construct
  source 1..75: mol_type = other DNA
aatactcgctttaaaacgctggtggagaaaacctggccgggcgatgaaaaagtgtgggccaaactggcggtggta

SEQ ID NO: 765619 - DNA, 75 bp, synthetic construct
  source 1..75: mol_type = other DNA
aaaatcgaagacatcatttatcgggtaagcgggatccggaatctggttaccaccgtcgcagagcccacctttgac

SEQ ID NO: 765620 - DNA, 75 bp, synthetic construct
  source 1..75: mol_type = other DNA
atctgattatccccggcgtacataaagccaatggccttcgccaactgcagaaattatggggaatagatgacagcg

SEQ ID NO: 765621 - DNA, 75 bp, synthetic construct
  source 1..75: mol_type = other DNA
cagtgcgcctgttcggtggcggatattctgcgtcgccatcatctggcggggcgtaaactgcacgaactggcagag

SEQ ID NO: 765622 - DNA, 75 bp, synthetic construct
  source 1..75: mol_type = other DNA
aagcatggacgtaaatgaagtgatcgagaagttgcaacaagagattcgcagccgcagtcttaaacaattggagga

SEQ ID NO: 765623 - DNA, 75 bp, synthetic construct
  source 1..75: mol_type = other DNA
cgtgtcctgtgggaaaaaaccggtcactgggacaactacaaagatgcaatgttcaccacgtcttctgagaaccgt

SEQ ID NO: 765624 - DNA, 75 bp, synthetic construct
  source 1..75: mol_type = other DNA
aatgaatcgtgtacatgccggatttaccgcaatgaccggaatcatccgatctgcgttaccgactggatggatgaa

SEQ ID NO: 765625 - DNA, 75 bp, synthetic construct
  source 1..75: mol_type = other DNA
tcagtggcagcgttatggcttaaattctgcggctgaaatgacccctcgtcagtggtggctggcagtgagcgaagc

SEQ ID NO: 765626 - DNA, 75 bp, synthetic construct
  source 1..75: mol_type = other DNA
aaactttcgcctacaccaaccataccctgatgccggaagcgctggagcgctgggatgtgaaactggtgaaagcgt

SEQ ID NO: 765627 - DNA, 75 bp, synthetic construct
  source 1..75: mol_type = other DNA
ctgactaaatttaacgatggtgatttcctgcgtgccgaacagcagggcatcaacgctgaaaaactgaccaaagtg

SEQ ID NO: 765628 - DNA, 75 bp, synthetic construct
  source 1..75: mol_type = other DNA
accgggctgcgtttcgtagcggcatcaacacgttgatgagcagttccgacgcccgaaaaacgtcggcgttactat

SEQ ID NO: 765629 - DNA, 75 bp, synthetic construct
  source 1..75: mol_type = other DNA
cgtggagttgagcgacggcactttatcgtggttagggaacgccttgttctggatgccgctaccagaaccgccgca

SEQ ID NO: 765630 - DNA, 75 bp, synthetic construct
  source 1..75: mol_type = other DNA
cgtcgtcagaactgtcccaagccgaagcagagaaggctcttggattccttaaacagaaagccacagagcataagg

SEQ ID NO: 765631 - DNA, 75 bp, synthetic construct
  source 1..75: mol_type = other DNA
tcaccgacgttagaaatcaaccatcggccattggcgacaatgggcgtcgagaaccagacgctggcggtctctttt

SEQ ID NO: 765632 - DNA, 75 bp, synthetic construct
  source 1..75: mol_type = other DNA
attgtcgagcagggcattaacttctctggcgaagtgtcgctggttggcgcgcgcggctttgatggcagcacggtg

SEQ ID NO: 765633 - DNA, 75 bp, synthetic construct
  source 1..75: mol_type = other DNA
catcgtcagaactgacacatgacgaagcagtgaaagctcttggattcctgaaacaaaaagccactgaacagaagg

SEQ ID NO: 765634 - DNA, 75 bp, synthetic construct
  source 1..75: mol_type = other DNA
caccggattatgatcgttatccatgcctgaaactggcgatggaggcgtttgaacaaggccaggcagcgacgacag

SEQ ID NO: 765635 - DNA, 75 bp, synthetic construct
  source 1..75: mol_type = other DNA
atgaacaaaggtctggaatacattgaagcgtgttggctgtttaacgccagcgccagccagatggaagtgctgatt

SEQ ID NO: 765636 - DNA, 75 bp, synthetic construct
  source 1..75: mol_type = other DNA
accgaagtcttaagtggccagcaggctgcttgcgatatggcggcgcttgacgatgttgatcaggtgatggctgcg

SEQ ID NO: 765637 - DNA, 75 bp, synthetic construct
  source 1..75: mol_type = other DNA
tggtgcgaatgcgaaaactattttcacgcgcgctgggcagggcgatgagcaggcgcagcaactgattcaccgctc

SEQ ID NO: 765638 - DNA, 75 bp, synthetic construct
  source 1..75: mol_type = other DNA
tggtatctatgacaaggatgaagccgaacgcattgtcgaaaataccgcatacacagcagaacgtcagccggaacg

SEQ ID NO: 765639 - DNA, 75 bp, synthetic construct
  source 1..75: mol_type = other DNA
tgtttctcccgccagttaccgtaacaatgccggaataattggcgctgcattactggcagaaaaaatgataaaaaa

SEQ ID NO: 765640 - DNA, 75 bp, synthetic construct
  source 1..75: mol_type = other DNA
cgtcgagaaccagacgctggcggtctcttttactacgctgtgcgtcgacgcccgcagtcagcatgactatattgc

SEQ ID NO: 765641 - DNA, 75 bp, synthetic construct
  source 1..75: mol_type = other DNA
tcgtttttgccgatggccctgcagcaactgaaacactggcagcgctgggccagcaagggcaattttcaactgcag

SEQ ID NO: 765642 - DNA, 75 bp, synthetic construct
  source 1..75: mol_type = other DNA
cgcgacagttcaatcagccattttatctggttttcgctcgccgtactgaccggttgtattctgctggcatcaggc

SEQ ID NO: 765643 - DNA, 75 bp, synthetic construct
  source 1..75: mol_type = other DNA
agtctgctggatgaaatggaagagtggcagcttcgtttacaggctaaaaatgcgcagcttctacgtaccgcgcta

SEQ ID NO: 765644 - DNA, 75 bp, synthetic construct
  source 1..75: mol_type = other DNA
actcactcaggcgcatctgtggctttcgccactccacgatgaaacccgggcgcaaatggataaactatggttggc

SEQ ID NO: 765645 - DNA, 75 bp, synthetic construct
  source 1..75: mol_type = other DNA
cagaactgacacaggccgaagcagtgaaagctcttggattcctgaaacaaaaagcctctgaacagaaggtggctg

SEQ ID NO: 765646 - DNA, 75 bp, synthetic construct
  source 1..75: mol_type = other DNA
aatgaatcctgcacatgccggatttaccgcaaagaccgcaatcatccgatctgcgttaccgagtggatggatgaa

SEQ ID NO: 765647 - DNA, 75 bp, synthetic construct
  source 1..75: mol_type = other DNA
gagttccgatttcggaagcagggatgtaggcgtaaccttaaactcgttcaataattacttctccccaccagtaac

SEQ ID NO: 765648 - DNA, 75 bp, synthetic construct
  source 1..75: mol_type = other DNA
atgaagcgatcaaagatatcgctgtttctgttgagcccccgcaattatattcaatacatctcaataggttcaggc

SEQ ID NO: 765649 - DNA, 75 bp, synthetic construct
  source 1..75: mol_type = other DNA
gccttaacggtagttacctacaagcagcctaagctcagtatagatgttacagacattcttcagggctcagatata

SEQ ID NO: 765650 - DNA, 75 bp, synthetic construct
  source 1..75: mol_type = other DNA
gctgtaactgtacattgtacgatgcctccacaatggggcagtgggatgtggtggtttacaaagttacctctaaat

SEQ ID NO: 765651 - DNA, 75 bp, synthetic construct
  source 1..75: mol_type = other DNA
gcattccagggcgaagagggtgttgccgacatcaagagcgttgtcattgataacgtcatggcttcatacactccc

SEQ ID NO: 765652 - DNA, 75 bp, synthetic construct
  source 1..75: mol_type = other DNA
aacatcatggaaggtagttataaactggaaatggacgttgtcagtacgcagggtcagagaggggttgttgtggtt

SEQ ID NO: 765653 - DNA, 75 bp, synthetic construct
  source 1..75: mol_type = other DNA
taaaattattcgatggccagcaccgtgcgctgggtatttttgaatttgtacgcgattattccaatacggaagata

SEQ ID NO: 765654 - DNA, 75 bp, synthetic construct
  source 1..75: mol_type = other DNA
aacaatgtgagttaactatcaaatctatcgaaaaagcttatattaagcgagcccatcttttgggaggactttttg

SEQ ID NO: 765655 - DNA, 75 bp, synthetic construct
  source 1..75: mol_type = other DNA
gtaaatatgcggcaattggtggcatcatgcaaagccttaccatcgaattttataccgatggcacatttgacccgg

SEQ ID NO: 765656 - DNA, 75 bp, synthetic construct
  source 1..75: mol_type = other DNA
gtatttcaagcgtcgaggtgggaagtaaagttactttagatggtaaatacactaacccgaacagccgattcaaga

SEQ ID NO: 765657 - DNA, 75 bp, synthetic construct
  source 1..75: mol_type = other DNA
gcagttagcatccgtgtttataagggcgaagagctagaaggtaatctctcaaagagtctgattatcggacgtatc

SEQ ID NO: 765658 - DNA, 75 bp, synthetic construct
  source 1..75: mol_type = other DNA
gtcccggcgaaaagctcacggctgatcagctttaaagcactgaacgatgcgacgaaaaaaatgctcaacctgcgg

SEQ ID NO: 765659 - DNA, 75 bp, synthetic construct
  source 1..75: mol_type = other DNA
ccgacggtgaggcttccattcgtactaaagaagccgagctggtgatgcgcttcgtggaaaaagcccgcaaaatcc

SEQ ID NO: 765660 - DNA, 75 bp, synthetic construct
  source 1..75: mol_type = other DNA
cattgagcacccgtgggtgaccaaagcgattgccaacgcccagcgtaaagttgaaagccgtaacttcgacattcg

SEQ ID NO: 765661 - DNA, 75 bp, synthetic construct
  source 1..75: mol_type = other DNA
gattttcatacgtcacggttgatagcgcgaatcaatcagaaaacagagcaatacgcggtgcgtccgcagcaaatt

SEQ ID NO: 765662 - DNA, 75 bp, synthetic construct
  source 1..75: mol_type = other DNA
gtaatgacgcagcaaaaggagtcggtgtactcatagaaggtttagcaactagtaaaatagactggccccctgaat

SEQ ID NO: 765663 - DNA, 75 bp, synthetic construct
  source 1..75: mol_type = other DNA
aactgctggtgaaagaaggcatcatggatgaaggggagtctctgtactctccggccaacatcatgctgatgcacc

SEQ ID NO: 765664 - DNA, 75 bp, synthetic construct
  source 1..75: mol_type = other DNA
tgctggaaaatttaatcccggaagcctttgcagtcgtacgtgaagcaagtaagcgtgtcttcggtatgcgtcatt

SEQ ID NO: 765665 - DNA, 75 bp, synthetic construct
  source 1..75: mol_type = other DNA
cgaactgaccaaagccggtattaagcacaacgtcctgaacgccaaattccacgccaacgaagcggcgattgttgc

SEQ ID NO: 765666 - DNA, 75 bp, synthetic construct
  source 1..75: mol_type = other DNA
tatcaaagcggtagacggtgaaatgatcacagttaccgtcgaaggtaaagatgaagtgttcgcgctgagtaatat

SEQ ID NO: 765667 - DNA, 75 bp, synthetic construct
  source 1..75: mol_type = other DNA
tatattgtattttttaaaacgtgccggtggaatagattctgaccgtggaagttatcgaaaaattaaggtgttacg

SEQ ID NO: 765668 - DNA, 75 bp, synthetic construct
  source 1..75: mol_type = other DNA
aagtggacagcaaaatgatgcagtccatcaaagacattacccaggtcatctatcaggttgccgtggcggccaacg

SEQ ID NO: 765669 - DNA, 75 bp, synthetic construct
  source 1..75: mol_type = other DNA
gtaatgacgcagcaaaaggagtcggtgtactcatagaaggtttagcaactagtaaaaatcctctaatgacattga

SEQ ID NO: 765670 - DNA, 75 bp, synthetic construct
  source 1..75: mol_type = other DNA
atacaaactttgatccaacagtaactcaacagatcaaattatccagctcattggatttgcccctatatttccaga

SEQ ID NO: 765671 - DNA, 75 bp, synthetic construct
  source 1..75: mol_type = other DNA
aaagaaaaatcgctttagatttggggatttcaaggtcacaagtacgtaaggttttgacggttgaggatgaagaca

SEQ ID NO: 765672 - DNA, 75 bp, synthetic construct
  source 1..75: mol_type = other DNA
ggcatgaccgtttgccccggttgtgcgacggcgaccgaagcctttagcgcgctcgaagcaggcgcgcaggcactg

SEQ ID NO: 765673 - DNA, 75 bp, synthetic construct
  source 1..75: mol_type = other DNA
ttgaaggattagcaaccagtaaaaatccgctaatgacattaaaacctaacgatgcaacctctatttataaagatt

SEQ ID NO: 765674 - DNA, 75 bp, synthetic construct
  source 1..75: mol_type = other DNA
ttggtggtgttgtacacgacataactgttgaattttatacagatgctagtttcgatcctacacttaatcagcaag

SEQ ID NO: 765675 - DNA, 75 bp, synthetic construct
  source 1..75: mol_type = other DNA
ttatacagcaagtgccggcaccgatgataacgtcagctatcttgttgggaatgattacggagtgggtccgggaga

SEQ ID NO: 765676 - DNA, 75 bp, synthetic construct
  source 1..75: mol_type = other DNA
tcatttccaggctacattaaaacaagacggtaatattgctatagaaccgggggattttaaagccaccagcacttt

SEQ ID NO: 765677 - DNA, 75 bp, synthetic construct
  source 1..75: mol_type = other DNA
ccgactttaacccgacaacgaatcaacgggtaacattatccagaacagatagttatctctactcattcaaagcat

SEQ ID NO: 765678 - DNA, 75 bp, synthetic construct
  source 1..75: mol_type = other DNA
tgtattcgtgttcgcaatatagaaacaaaactcatgtcaaacaaggtgggtagtgtaagcaaagaacttctggct

SEQ ID NO: 765679 - DNA, 75 bp, synthetic construct
  source 1..75: mol_type = other DNA
tatgtagctgacccggaccttcagagaaacggatgtaacaaggcaaactcaacgagtaagtattgggcaattggt

SEQ ID NO: 765680 - DNA, 75 bp, synthetic construct
  source 1..75: mol_type = other DNA
aaacatctgttccaggtctctattacacattgtcaattttcaacgtgtggtcagcttgggtaaaatctaatatca

SEQ ID NO: 765681 - DNA, 75 bp, synthetic construct
  source 1..75: mol_type = other DNA
ggccaaaggttttagcctgtatatgttgcgggcgatcattagcggacgcggtgatgaagtgatcgaactggcgaa

SEQ ID NO: 765682 - DNA, 75 bp, synthetic construct
  source 1..75: mol_type = other DNA
atgacgatacgaaatgcaatggtcgactccggactctcttatggcggacataaattattcaaaacatctgttacc

SEQ ID NO: 765683 - DNA, 75 bp, synthetic construct
  source 1..75: mol_type = other DNA
gctggcgattttgcaaaatcgtctccacgtggcggatggcaaagatgctgactacttggtcaaacgtcacctccg

SEQ ID NO: 765684 - DNA, 75 bp, synthetic construct
  source 1..75: mol_type = other DNA
ctaatatcacaattacattacctacatgcttcacctccgttttgagtggttcggctgtcagtggctcaacagtaa

SEQ ID NO: 765685 - DNA, 75 bp, synthetic construct
  source 1..75: mol_type = other DNA
ctcacgattgaattttataccgataccaactttaacccgacaacgaatcaacgggtaacattgtccaaaacagat

SEQ ID NO: 765686 - DNA, 75 bp, synthetic construct
  source 1..75: mol_type = other DNA
aaaaagcgcgcgtcctgctgcaactggctctgacgcaaaccaaagatccgcagcagatccagcagatcttcaatc

SEQ ID NO: 765687 - DNA, 75 bp, synthetic construct
  source 1..75: mol_type = other DNA
gtcaccaaaaccaacaccaccgacgtagcgaccttcaagtctgttaactacggtcctctgggttacattcacaac

SEQ ID NO: 765688 - DNA, 75 bp, synthetic construct
  source 1..75: mol_type = other DNA
acggtaccgacacgatggaagaaaccgcttacttccttgacctgacggtgaaatgagacaaaccggtggtgatgg

SEQ ID NO: 765689 - DNA, 75 bp, synthetic construct
  source 1..75: mol_type = other DNA
agtgatccgccgtgcggtgggctacggcatgaccgtctgccccggctgcgcgacggcgaccgaagcctttaccgc

SEQ ID NO: 765690 - DNA, 75 bp, synthetic construct
  source 1..75: mol_type = other DNA
ataggtggaatttttcaagactttactgttgagttttattcagatacgacatttaaccctacagcaggccaaaaa

SEQ ID NO: 765691 - DNA, 75 bp, synthetic construct
  source 1..75: mol_type = other DNA
aaagttggcgtagaaaacctggtcaatgcggtgccgcaattgaaggacattgcgaacgttaaaggcgagcaggtc

SEQ ID NO: 765692 - DNA, 75 bp, synthetic construct
  source 1..75: mol_type = other DNA
aaaataaaatggttgattccggcaaaagttatggtgggcataaactctttaagacatctgtcccaggcctgtatt

SEQ ID NO: 765693 - DNA, 75 bp, synthetic construct
  source 1..75: mol_type = other DNA
aaaagtgcacaaatggtactgaaaccaaatgatgcaacgtctatttataaagattacgaaacagaagatgacact

SEQ ID NO: 765694 - DNA, 75 bp, synthetic construct
  source 1..75: mol_type = other DNA
ggtaacacactcactggaagcgacacagcaaaaggcgttggggtattgattgaaggattagaaaacagtaaaagt

SEQ ID NO: 765695 - DNA, 75 bp, synthetic construct
  source 1..75: mol_type = other DNA
acggtaccgacacgatggaagaaactgcttacttcctcgacctgacggtgaaatgagacaaaccggtggtgatgg

SEQ ID NO: 765696 - DNA, 75 bp, synthetic construct
  source 1..75: mol_type = other DNA
acggtaccgacacgatggaagaaacagcttacttcctagacctgacggtgaaatgtgacaaaccggtggtgatgg

SEQ ID NO: 765697 - DNA, 75 bp, synthetic construct
  source 1..75: mol_type = other DNA
attacccacggtaccgacacgatggaagaaactgcttacttcctcgacctgacggtgaaatgcgacaaaccggtg

SEQ ID NO: 765698 - DNA, 75 bp, synthetic construct
  source 1..75: mol_type = other DNA
tgacggcaacaccaatccgacgggatggtctgcaccccattatttttatgtactgtggtgccattcgccatacag

SEQ ID NO: 765699 - DNA, 75 bp, synthetic construct
  source 1..75: mol_type = other DNA
ccagccttatcctgatcagtgggcttttcttgtatcggtgaccccgatgaatgtgcaggatattgaaccgacgat

SEQ ID NO: 765700 - DNA, 75 bp, synthetic construct
  source 1..75: mol_type = other DNA
gattgcgatgcaatatcacgtcctgttttgccgctcgtctagtgccggagggcaaccgaccgcactacatgactg

SEQ ID NO: 765701 - DNA, 75 bp, synthetic construct
  source 1..75: mol_type = other DNA
aaaacaccgaaggcgaatattcctcgctcggcggtagagtgaatgaaggtacagagcatgaagtcgtcattcagg

SEQ ID NO: 765702 - DNA, 75 bp, synthetic construct
  source 1..75: mol_type = other DNA
ctcacgggccgaaaacaccggacatgaaaggtaatgccaccacaccacaagttgctgacgcaatttgcgaggtta

SEQ ID NO: 765703 - DNA, 75 bp, synthetic construct
  source 1..75: mol_type = other DNA
ggggcttcgccttgagttttgagcaaatggagtgggcgagctgcgagtattacagccatcacggtaaaatgatgc

SEQ ID NO: 765704 - DNA, 75 bp, synthetic construct
  source 1..75: mol_type = other DNA
cgaatttatcaggggaaggggttatgccccatgtcaccgaaaaaatgttggggcatgaactggggggcgtgatgg

SEQ ID NO: 765705 - DNA, 75 bp, synthetic construct
  source 1..75: mol_type = other DNA
ccgtgtataataaacacgactggttgtcggaacagaaagatgcgtatgagttgtatgctgataaaattttctggc

SEQ ID NO: 765706 - DNA, 75 bp, synthetic construct
  source 1..75: mol_type = other DNA
caacgggctgaacagcagcaggaaaaatcagtcatcgaagcctgcaagcgcagcgaaatcatgaagcgaattctg

SEQ ID NO: 765707 - DNA, 75 bp, synthetic construct
  source 1..75: mol_type = other DNA
cagtaacggacgatgacataaagcagcgtgtgcaggatgcagccggggaattaggctgggaagcacactttcttg

SEQ ID NO: 765708 - DNA, 75 bp, synthetic construct
  source 1..75: mol_type = other DNA
caatacaatttgcggggtaatgccaggctggcaattcgtatgctgcgttgcgaactctgctatgttgcaggtgat

SEQ ID NO: 765709 - DNA, 75 bp, synthetic construct
  source 1..75: mol_type = other DNA
atttctgaaatgtggccagaaagaacgctggaaatgacgtggggcgagttctggaaagcagttaaggccagaggc

SEQ ID NO: 765710 - DNA, 75 bp, synthetic construct
  source 1..75: mol_type = other DNA
caataattgaacgttcgcgatttttgaaagaaaacggtcaatggtactatattgacggtacacgtccgcagtttg

SEQ ID NO: 765711 - DNA, 75 bp, synthetic construct
  source 1..75: mol_type = other DNA
acgtttattgctaatcacgtgaatgaatatccagttcactttcatttgttgaatacttttgccttctcctgctct

SEQ ID NO: 765712 - DNA, 75 bp, synthetic construct
  source 1..75: mol_type = other DNA
cgcgcctgaaacatggcaaattctactcgttttgggtaaaaaatgcaaatactgctgggatttggtgtaccgaga

SEQ ID NO: 765713 - DNA, 75 bp, synthetic construct
  source 1..75: mol_type = other DNA
tattcactgaaagccgcgttgggcgtcgcctgtatcattggtggattaatggtgatttttttgcccgcccccaaa

SEQ ID NO: 765714 - DNA, 75 bp, synthetic construct
  source 1..75: mol_type = other DNA
tatggcgacactgttatctgcgatcgcttccgatttggcaaaacgcacgcatggtgggggagattacggtctgct

SEQ ID NO: 765715 - DNA, 75 bp, synthetic construct
  source 1..75: mol_type = other DNA
gggcatcagttgttccacttggcttgagccagccatgattaaccgtctctacaggttgtgtaatcgttatggctg

SEQ ID NO: 765716 - DNA, 75 bp, synthetic construct
  source 1..75: mol_type = other DNA
tttctggcgcagcagcaatcttatcaggcgtcaacgcgctttgccgttgatcgtggctggtggcgtgactatatc

SEQ ID NO: 765717 - DNA, 75 bp, synthetic construct
  source 1..75: mol_type = other DNA
ccgggtgactggatctatgtgaccggtacaccgggcgatagcgccgccgggctggcgattttgcaaaaccgtttg

SEQ ID NO: 765718 - DNA, 75 bp, synthetic construct
  source 1..75: mol_type = other DNA
gttggcgattttgcaaaaccgtcttcaggttaccgatactaaagatgctgaatatttaataaaacgccatctccg

SEQ ID NO: 765719 - DNA, 75 bp, synthetic construct
  source 1..75: mol_type = other DNA
ctgagctttccaaagaacgccgcgatatctccaaaaagctgaaagctatgggtgaaatgaaaaacggcgaagcga

SEQ ID NO: 765720 - DNA, 75 bp, synthetic construct
  source 1..75: mol_type = other DNA
tggatttataaccatgctcagtatctcgataagcgcagagaaatgatgcagtggtgggaggactggatcgacggt

SEQ ID NO: 765721 - DNA, 75 bp, synthetic construct
  source 1..75: mol_type = other DNA
ggcgatcagcaccgatacgctggtggcgggcaatcacttcctccctgatatcgatcctgcggatttggcatataa

SEQ ID NO: 765722 - DNA, 75 bp, synthetic construct
  source 1..75: mol_type = other DNA
tatcgggcaaatgaccgccgatatcgaagggctttgttttattcgtgacggcgaacctgtcacgttagactggaa

SEQ ID NO: 765723 - DNA, 75 bp, synthetic construct
  source 1..75: mol_type = other DNA
aggaaatcattttacgctacctggaaacgcacgcacgtttcagcgccccagaactggtagaaaaactgggcgtga

SEQ ID NO: 765724 - DNA, 75 bp, synthetic construct
  source 1..75: mol_type = other DNA
aaaggcaggagtattaagatagaaatacatggaaatgtaaataaaatagtaaccgaaaatgctgatgtcagtatt

SEQ ID NO: 765725 - DNA, 75 bp, synthetic construct
  source 1..75: mol_type = other DNA
atccattgaagtgtatcagcgtaaagaagaagtggtcggcgctgagatgatgcgtcatttcgagaaaggcgtgat

SEQ ID NO: 765726 - DNA, 75 bp, synthetic construct
  source 1..75: mol_type = other DNA
cagaacgtcacgaatctcgtcgtatcgataaccagttgcgtggccgttcgggtcgccagggcgatgccggttctt

SEQ ID NO: 765727 - DNA, 75 bp, synthetic construct
  source 1..75: mol_type = other DNA
gttatgctggcgaggaattccgccatgttgcattaacgcatgaccaaaacatattagaagaagctgaaaaatgtc

SEQ ID NO: 765728 - DNA, 75 bp, synthetic construct
  source 1..75: mol_type = other DNA
tcaggttaatggcgatataaccactgtaagcggtgatgttacttgtggagatgtttctggtgacgtaaccactgt

SEQ ID NO: 765729 - DNA, 75 bp, synthetic construct
  source 1..75: mol_type = other DNA
aaggtttaattgtcgccggaaataaaatcacaattgatggaaaagagcatgttacagtagaaaatagtgacaatc

SEQ ID NO: 765730 - DNA, 75 bp, synthetic construct
  source 1..75: mol_type = other DNA
caggaatacaaacgtgaatcgttctccatgtttgcagcgatgctggagtcgttgaaatatgaagttatcagcacg

SEQ ID NO: 765731 - DNA, 75 bp, synthetic construct
  source 1..75: mol_type = other DNA
ttgaaaaaattaaagccgactggcaggtacgtcacgatgcggtactggcagcaggtggcctgcatatcatcggta

SEQ ID NO: 765732 - DNA, 75 bp, synthetic construct
  source 1..75: mol_type = other DNA
actatcgcgaccaacatggcgggtcgtggtacagatattgtgctcggtggtagctggcaggcagaagttgccgcg

SEQ ID NO: 765733 - DNA, 75 bp, synthetic construct
  source 1..75: mol_type = other DNA
cataacgttctgaacgccaaattccacgccaacgaagctgcgattgttgcccaggcgggttatccggcggctgtg

SEQ ID NO: 765734 - DNA, 75 bp, synthetic construct
  source 1..75: mol_type = other DNA
tgctggaaaacctgatcccggaagcctttgccgttgtgcgtgaagcaagtaagcgtgtctttgggatgcgtcact

SEQ ID NO: 765735 - DNA, 75 bp, synthetic construct
  source 1..75: mol_type = other DNA
ctgtcgttgtaccaaccaaccgaccgatgattcgtaaagatctgccagacctggtctacatgactgaagcagaaa

SEQ ID NO: 765736 - DNA, 75 bp, synthetic construct
  source 1..75: mol_type = other DNA
aatggactttcacgcttcagagtgggtacgcacggtgcgctgatctttgcaaaaaaagcaaacacagagattccc

SEQ ID NO: 765737 - DNA, 75 bp, synthetic construct
  source 1..75: mol_type = other DNA
ttttaccctgttcaatcaaaaccctgtccggcattgtccatagctatactgatggcttactgacccgtgcggcag

SEQ ID NO: 765738 - DNA, 75 bp, synthetic construct
  source 1..75: mol_type = other DNA
tccctgcgcgaagtgcaggcattagctgatgtcacgcatgatgcgcgcgatattgccgccagcatctcttccggt

SEQ ID NO: 765739 - DNA, 75 bp, synthetic construct
  source 1..75: mol_type = other DNA
taaaagcgatgtcaggatcattgattttgtggataccgcgtatcctgtgctgctcagaatgtgggataaacgtca

SEQ ID NO: 765740 - DNA, 75 bp, synthetic construct
  source 1..75: mol_type = other DNA
catcaggaaacagactgaatcttgctgttgctgaaccgctgaaaatcacgctggcaaatcagatctatttcgaaa

SEQ ID NO: 765741 - DNA, 75 bp, synthetic construct
  source 1..75: mol_type = other DNA
tcaagcctggaatggctgtcatgcaaggcatttttgagcgtgtggaacaagtctcgctggtcgaagttgatgaac

SEQ ID NO: 765742 - DNA, 75 bp, synthetic construct
  source 1..75: mol_type = other DNA
cccgtgttataggttgtgcggagaattacccgcaacacattgcgttgccccagggatgtctggacagcgtattat

SEQ ID NO: 765743 - DNA, 75 bp, synthetic construct
  source 1..75: mol_type = other DNA
ctactttaatcgaacacgacaaaatcaaagggacaacgcgttacttccatgtatctgtcccgctaaataatacag

SEQ ID NO: 765744 - DNA, 75 bp, synthetic construct
  source 1..75: mol_type = other DNA
attcatcgaatagtgcagaaagatcgtgaaaaagcaaataaagccgcttatgaaaatcgaataaccgccagaagt

SEQ ID NO: 765745 - DNA, 75 bp, synthetic construct
  source 1..75: mol_type = other DNA
agtacaaaaagttcctgtctcttgctgaatgttggaaggatctggtggtatcaaactcagtgttccatgacacca

SEQ ID NO: 765746 - DNA, 75 bp, synthetic construct
  source 1..75: mol_type = other DNA
tatttcgaaaaagcgcaattacctcaggtgctgattaaccgacttattcggctggcagcatttccgaaccctgag

SEQ ID NO: 765747 - DNA, 75 bp, synthetic construct
  source 1..75: mol_type = other DNA
ggtacgccgtgggaagagaaaaaatcatcaggaaacagactgaatatttctattgcagaaccgctgaaaatcacg

SEQ ID NO: 765748 - DNA, 75 bp, synthetic construct
  source 1..75: mol_type = other DNA
atgagctggaatcactcattgtcaaagcagaacagattggcactgataccaaatcaaaagagttgctttctggcc

SEQ ID NO: 765749 - DNA, 75 bp, synthetic construct
  source 1..75: mol_type = other DNA
aggcggcccggcaattgtcaatatggccatgaaaaccggtaaaaaagttatcggtgccggcccaggtaacccccc

SEQ ID NO: 765750 - DNA, 75 bp, synthetic construct
  source 1..75: mol_type = other DNA
ttttaatctgctgttctgcgtgctggtgatacgtgcacgtgggaatgtttcaaaaatccttgcattacgaaggta

SEQ ID NO: 765751 - DNA, 75 bp, synthetic construct
  source 1..75: mol_type = other DNA
tgaatgcggcgttgtgtacggttatcgtgctgacgctttttttctaccgcagaaaagcgtcccgacacaaaccgc

SEQ ID NO: 765752 - DNA, 75 bp, synthetic construct
  source 1..75: mol_type = other DNA
gagcgcggagagcttgttgatgtgctgtggggggaactggaatggtcttccccgacagatgacgatgagctgccg

SEQ ID NO: 765753 - DNA, 75 bp, synthetic construct
  source 1..75: mol_type = other DNA
ggcgtggcgctgattgtcagcggcggcattgcaccagatttaacaggcgttggcatggaaggtggcgcaatgctc

SEQ ID NO: 765754 - DNA, 75 bp, synthetic construct
  source 1..75: mol_type = other DNA
tgaacgtggcgttatgcatggttatcgtgctgacgctctttttttatcgacgtaaagattccacgcataaaccgc

SEQ ID NO: 765755 - DNA, 75 bp, synthetic construct
  source 1..75: mol_type = other DNA
gatgacggtatatgcgcttccgccgcttgcctttctctgcggcaccattattcccggtaactggctggtggtgtt

SEQ ID NO: 765756 - DNA, 75 bp, synthetic construct
  source 1..75: mol_type = other DNA
gttcacgaaatggtaaagacagtcgagagataaaaattatttccatcaccccaagaattattgacgttaaggccg

SEQ ID NO: 765757 - DNA, 75 bp, synthetic construct
  source 1..75: mol_type = other DNA
agaactcgataaaactgatactgggcagcgatggttcgtattcaatatcgacaagtacatcgtctgttattgtca

SEQ ID NO: 765758 - DNA, 75 bp, synthetic construct
  source 1..75: mol_type = other DNA
ctgtcgcggaaaaaatgaacagtgcaacaggcggaaaaagtactgatcaatttgatcatctactgcttgaggtat

SEQ ID NO: 765759 - DNA, 75 bp, synthetic construct
  source 1..75: mol_type = other DNA
tgaataccgcaattgcgtttatttttcgtgccgttgtgattaagtttgtgctttttacggcggtttatcttttta

SEQ ID NO: 765760 - DNA, 75 bp, synthetic construct
  source 1..75: mol_type = other DNA
gtgaaaaaatatgtgctgttaaccctgaccctcatcgccggcgccgtggcagcaaacccggtaacagcggccggc

SEQ ID NO: 765761 - DNA, 75 bp, synthetic construct
  source 1..75: mol_type = other DNA
gaggttctccgatgaggccgcgattgagtatgatcgcaaacagcaccaacttaccgttaatggcggcattgaaaa

SEQ ID NO: 765762 - DNA, 75 bp, synthetic construct
  source 1..75: mol_type = other DNA
gatgctcgacctggtcgaaggcggcggcacttttgccgaaacggtagaactggcgcaggccattgaagcggcggg

SEQ ID NO: 765763 - DNA, 75 bp, synthetic construct
  source 1..75: mol_type = other DNA
gctggcgcagcttgggctggatcccaacgtcgcgctgtcgtcactttccggcggctggttgcgtaaagccgcatt

SEQ ID NO: 765764 - DNA, 75 bp, synthetic construct
  source 1..75: mol_type = other DNA
accgggacaggggttaggcaaaaccaccggctggatccatcgcaccaccctgctctcgcgcggtgtgaaaatgat

SEQ ID NO: 765765 - DNA, 75 bp, synthetic construct
  source 1..75: mol_type = other DNA
acttcattattatctaccgactgtcgatgctcgacctggtcgaaggcggcggtacttttgccgaaacggtagagc

SEQ ID NO: 765766 - DNA, 75 bp, synthetic construct
  source 1..75: mol_type = other DNA
ctggagctgcttgaagagctaattgacagctatcagggtacggtactgctggtcagccacgatcgccagtttgtt

SEQ ID NO: 765767 - DNA, 75 bp, synthetic construct
  source 1..75: mol_type = other DNA
attggcccaaacggctgcggcaaaaccaccttgttgaaattgatgctcgggcagcttcaggcagacagtggacgc

SEQ ID NO: 765768 - DNA, 75 bp, synthetic construct
  source 1..75: mol_type = other DNA
gctggcacagcttgggttagatcctaacgttgcgttgtcgtcactttctggcggctggttgcgcaaagcggcatt

SEQ ID NO: 765769 - DNA, 75 bp, synthetic construct
  source 1..75: mol_type = other DNA
gcggatcagttacagtcgttcgatgaaacgatcctcgctagcgggatcgtaccgcgcattccgcctatcgacgga

SEQ ID NO: 765770 - DNA, 75 bp, synthetic construct
  source 1..75: mol_type = other DNA
accaggtcaggggctgggtaaaaccacaggctggatccatcgcaccaccctgctctcgcgaggcgtgaaaatgat

SEQ ID NO: 765771 - DNA, 75 bp, synthetic construct
  source 1..75: mol_type = other DNA
aaacgatcctcgccagtgggatcgtaccgcgcattccgcccatcgatggtatcgatcatccgaaggtgttgagtt

SEQ ID NO: 765772 - DNA, 75 bp, synthetic construct
  source 1..75: mol_type = other DNA
tcaacggtgaaccgcaaattttagcggtagatcatgtggtgatctgcgcggggcaggagccaaaccgcgcgctgg

SEQ ID NO: 765773 - DNA, 75 bp, synthetic construct
  source 1..75: mol_type = other DNA
atcgcaccattaccgaagccgtacatcaggaaggcggcaaaattgccctacaaattttgcataccggacgctaca

SEQ ID NO: 765774 - DNA, 75 bp, synthetic construct
  source 1..75: mol_type = other DNA
ggcgtggcgctgattgtcagcggcggtattgcaccagatttaacaggcgttggcatggaaggcggcgcaatgctc

SEQ ID NO: 765775 - DNA, 75 bp, synthetic construct
  source 1..75: mol_type = other DNA
ggacattgtgcagtcgctgccatcgtttaccgaaacgaaagcagatgacctgattctaccatcgctgaatgtggc

SEQ ID NO: 765776 - DNA, 75 bp, synthetic construct
  source 1..75: mol_type = other DNA
tggcacgtgaagcgttaggcacaaactggctaaaattagagattcaccctgacgcccgctggctgttgcccgatc

SEQ ID NO: 765777 - DNA, 75 bp, synthetic construct
  source 1..75: mol_type = other DNA
gaaacgtgtcgacttgcgccaacacaacgatgctatcctcgatccacttatcgcggcgggtgtgacactactgcc

SEQ ID NO: 765778 - DNA, 75 bp, synthetic construct
  source 1..75: mol_type = other DNA
cgcacgatgggctggaccgagtaccagcaggtgcgctacgccaccgcacgctcggttttcaaatgggatggcacc

SEQ ID NO: 765779 - DNA, 75 bp, synthetic construct
  source 1..75: mol_type = other DNA
gaaacgtgtcgacttgcgccagcacaacgacgctatcctcgaaccgcttatcgcggcgggtgtgaccctgctgcc

SEQ ID NO: 765780 - DNA, 75 bp, synthetic construct
  source 1..75: mol_type = other DNA
gtgttagtgaatacggcgattgccgtcgcggacgatcccgtcaacatggcgaaggcatttcgcctggcggtagaa

SEQ ID NO: 765781 - DNA, 75 bp, synthetic construct
  source 1..75: mol_type = other DNA
ctcggcgcaccaattggctctaatcagggactggaaacccgcgccatgctggagattattatccagcaagccacg

SEQ ID NO: 765782 - DNA, 75 bp, synthetic construct
  source 1..75: mol_type = other DNA
aagatcctctcccgcgtgttcaacttcgatcatgtagaagtggcggcaaacccggtccatctgttctacgtcctg

SEQ ID NO: 765783 - DNA, 75 bp, synthetic construct
  source 1..75: mol_type = other DNA
atcgtgaaggtgccgtattgcttgcgcatttccgaagagatcaaaatctacgagaaattgcttaatcacagtgaa

SEQ ID NO: 765784 - DNA, 75 bp, synthetic construct
  source 1..75: mol_type = other DNA
ccagaaaactccagcatttattcaaagatgcgcgtttacgatggcgaaagcctgaaagataccgatccgaaagcc

SEQ ID NO: 765785 - DNA, 75 bp, synthetic construct
  source 1..75: mol_type = other DNA
gaagactttgcttggcggcgacaacctgattgaagtgaataaccttgctgccgacccgctgattaaacccgcaca

SEQ ID NO: 765786 - DNA, 75 bp, synthetic construct
  source 1..75: mol_type = other DNA
atgtctggaaatataggggcaaatccagaagctgccaaggacgaagagttcacactgcaggagtttcttaccact

SEQ ID NO: 765787 - DNA, 75 bp, synthetic construct
  source 1..75: mol_type = other DNA
aacattttcgaccgttatgtcacctatgcggatttctggatccaggatcaggagtatcgcgacccggataccggt

SEQ ID NO: 765788 - DNA, 75 bp, synthetic construct
  source 1..75: mol_type = other DNA
caaccgacgcaattttgcgtacttgcttcataagcatcacgcaaaagctgcaaaacagcatctttcccggaacca

SEQ ID NO: 765789 - DNA, 75 bp, synthetic construct
  source 1..75: mol_type = other DNA
aaagggggtctgattcgcgtgaatcaggatggtaaatttcgttactgcataccgggcgttgatttaccggcagag

SEQ ID NO: 765790 - DNA, 75 bp, synthetic construct
  source 1..75: mol_type = other DNA
ggtgttgcgttaccagtccgggaagcggaaacacaggaagaaataaaaactgaaagtgtggcggtcacagtgcag

SEQ ID NO: 765791 - DNA, 75 bp, synthetic construct
  source 1..75: mol_type = other DNA
cgtgtggcttatagcaacgttcagcaggaacagccagcgcgggcagaactgccggaagaaaccaccacggcaaca

SEQ ID NO: 765792 - DNA, 75 bp, synthetic construct
  source 1..75: mol_type = other DNA
gccgcgctgcgggaactgaacaaacacagggatattctccgggatattaccgccaccagagagctgctgcggtga

SEQ ID NO: 765793 - DNA, 75 bp, synthetic construct
  source 1..75: mol_type = other DNA
tctgcgccgcgctgcgggagctgaacaagcaccgggatattgtccgacagattgtcgattcctccagtcgtattg

SEQ ID NO: 765794 - DNA, 75 bp, synthetic construct
  source 1..75: mol_type = other DNA
agctggtgttgcgttaccagtccaggaaacggctgcacaggaagaaattaaaacagaagcggtggaggacattgt

SEQ ID NO: 765795 - DNA, 75 bp, synthetic construct
  source 1..75: mol_type = other DNA
tgtggaaactgaagcgccgtggtgaggcggataacaggggctcgatgtggtggctgactgaggcgggtgaaagtg

SEQ ID NO: 765796 - DNA, 75 bp, synthetic construct
  source 1..75: mol_type = other DNA
aagcgatgggaaaagcctcttcacaggaggtggcatcccgcctgggaatcagccgtgaagatgctgtccacgaac

SEQ ID NO: 765797 - DNA, 75 bp, synthetic construct
  source 1..75: mol_type = other DNA
cggtaaatttcgttactgtatacctggcgctgatttaccggcagagccggaagctgcatccgcagcggaaacgga

SEQ ID NO: 765798 - DNA, 75 bp, synthetic construct
  source 1..75: mol_type = other DNA
tccagaagtgggagcgtgtctgtgctgcgctgcgggaactgaacaaacacagggatattctccgggatattaccg

SEQ ID NO: 765799 - DNA, 75 bp, synthetic construct
  source 1..75: mol_type = other DNA
gcgggagctgaacaagcaccgggatattgttcgacatattacggattcttcccgccgtgttgcatcggaaaagtg

SEQ ID NO: 765800 - DNA, 75 bp, synthetic construct
  source 1..75: mol_type = other DNA
cggtaaatttcgttactgtatgccgggcgataatttaccggcagagccggaagctgcatccgtagcggaaacgga

SEQ ID NO: 765801 - DNA, 75 bp, synthetic construct
  source 1..75: mol_type = other DNA
ggctgcgcgggaatgcagcgctatgtgcagacctggagcggcgataaccgcactagctgggacactctgcgctac

SEQ ID NO: 765802 - DNA, 75 bp, synthetic construct
  source 1..75: mol_type = other DNA
taatccgcagaccatccagtggtggcaggaaggcgtgaccacacagcttctggagatcggtatcgactccacctg

SEQ ID NO: 765803 - DNA, 75 bp, synthetic construct
  source 1..75: mol_type = other DNA
gctgggacgcgatattctggttgcaagtgtcgtggaagcagggcaacgacaacgacgagtatggttacccgacaa

SEQ ID NO: 765804 - DNA, 75 bp, synthetic construct
  source 1..75: mol_type = other DNA
gcctctccgggctgtataacctcggtcacgacgtcggcggtttctccggtgataagccggacccggaactgtttg

SEQ ID NO: 765805 - DNA, 75 bp, synthetic construct
  source 1..75: mol_type = other DNA
acgacgacaccgtggttatcgccaccgagtcactgcgtgccaccgttcaccagccgctgtggctggagtggcact

SEQ ID NO: 765806 - DNA, 75 bp, synthetic construct
  source 1..75: mol_type = other DNA
atatcaaccacaccatattaatgcatcgcccacatccggaaagttatattaaaggtggtacgctgaaagcgatta

SEQ ID NO: 765807 - DNA, 75 bp, synthetic construct
  source 1..75: mol_type = other DNA
ggtcccttcgccctacaggaagatgaagtcagtgaagtttgctggctgacaccggaagaaatcaccgcacgctgc

SEQ ID NO: 765808 - DNA, 75 bp, synthetic construct
  source 1..75: mol_type = other DNA
gcatccgcgctttacgattcactcatggaacgatgaccataccgtaaacgaaccgtggatgtatccgggcgtcac

SEQ ID NO: 765809 - DNA, 75 bp, synthetic construct
  source 1..75: mol_type = other DNA
atgataggattaaacggcacatcacacgcaaaagagtcaaaattaaacaccaacaagctgcttcaggacgttaac

SEQ ID NO: 765810 - DNA, 75 bp, synthetic construct
  source 1..75: mol_type = other DNA
acttgatatcaccaaagcctttgttcgattgacggggaaaacactcttcggtccaaaatggagtcttgggtacag

SEQ ID NO: 765811 - DNA, 75 bp, synthetic construct
  source 1..75: mol_type = other DNA
cgcgccagaaatctaatgctcgcatgatcatcatcgatccgcgctataccgacaccggtgccgggcgtgaagatg

SEQ ID NO: 765812 - DNA, 75 bp, synthetic construct
  source 1..75: mol_type = other DNA
cacgtagtggacggtgaaatcaaatatgtcgaaacggacaataccggcgatgacaattacgacggcctgcaccag

SEQ ID NO: 765813 - DNA, 75 bp, synthetic construct
  source 1..75: mol_type = other DNA
gtttattgacaaccaatacggctggcatcgttctctgtctaacatcgccgtcagtaacgtgcttggcatgtcgaa

SEQ ID NO: 765814 - DNA, 75 bp, synthetic construct
  source 1..75: mol_type = other DNA
ggctggcactcactacattgcggatgctgtcgcacagtctgctggtggggtgtttgtatcacttccagaaattga

SEQ ID NO: 765815 - DNA, 75 bp, synthetic construct
  source 1..75: mol_type = other DNA
tgcagctccgggcgccgtggcgtgcgtgactgtggagaaactaacgcatgaacagtttaacaacacactaccgtc

SEQ ID NO: 765816 - DNA, 75 bp, synthetic construct
  source 1..75: mol_type = other DNA
gtggaaccgcatgagaagacagcaattaacgacgagctgtatctctcaatttcgaagctgcaggagcatgcagca

SEQ ID NO: 765817 - DNA, 75 bp, synthetic construct
  source 1..75: mol_type = other DNA
tgattctggtggaattgagcgacgtgattttcgccgtggatagcattccggctatcttcgccgtgaccactgacc

SEQ ID NO: 765818 - DNA, 75 bp, synthetic construct
  source 1..75: mol_type = other DNA
gctggctgatttcgcagttcgactggatcctgtatatcttcggcgcattcctgctgtttaccggcgtgaagatgg

SEQ ID NO: 765819 - DNA, 75 bp, synthetic construct
  source 1..75: mol_type = other DNA
aggtcgcgccgttgccgatccacaggcactggcctttctcacaggttatctgattgagaaatcgctggcggtcga

SEQ ID NO: 765820 - DNA, 75 bp, synthetic construct
  source 1..75: mol_type = other DNA
ccagcgagcgcgttatgaatgacgtgacgctgacctcccgcaacatggacaacaccgtggcgcacgcgggtaagt

SEQ ID NO: 765821 - DNA, 75 bp, synthetic construct
  source 1..75: mol_type = other DNA
aaagctggaaaactcaccatcgactacgactacacaccagtgccgccacttgaaaatctgatgctgcgccagcgc

SEQ ID NO: 765822 - DNA, 75 bp, synthetic construct
  source 1..75: mol_type = other DNA
attacccgcgtggctaacatgctgggcaaagcaggcaaaaccggcaccctgttcaccactctgaaagccatttca

SEQ ID NO: 765823 - DNA, 75 bp, synthetic construct
  source 1..75: mol_type = other DNA
atgggtataaagatttgtaaaaactcccaccgatacaacccccaatactcacaccttcccgataaccagggacag

SEQ ID NO: 765824 - DNA, 75 bp, synthetic construct
  source 1..75: mol_type = other DNA
atgatcttgggcgtccttttgatacggtgccgccggggttactctggatgctgaatccaccattatctccggcaa

SEQ ID NO: 765825 - DNA, 75 bp, synthetic construct
  source 1..75: mol_type = other DNA
accagtgatactggggctgtgcaaatcaagtcaataggaagcggtcaatgcctagggaatggagagagcattaca

SEQ ID NO: 765826 - DNA, 75 bp, synthetic construct
  source 1..75: mol_type = other DNA
ttatcgatccgcgttataccgataccgccgccggtcgtgaagacgaatggatacctattcgtccaggaactgatg

SEQ ID NO: 765827 - DNA, 75 bp, synthetic construct
  source 1..75: mol_type = other DNA
aaaaccagcccgcgatgataaaaaatcgcgcgcttgaccgttcagtctcttacctgagagaagctctttccgtct

SEQ ID NO: 765828 - DNA, 75 bp, synthetic construct
  source 1..75: mol_type = other DNA
ctacgtgaaattattgacgtgaaaaaatgggaaattaatcaggctgccggtcgctatatccgctcgcatgaggag

SEQ ID NO: 765829 - DNA, 75 bp, synthetic construct
  source 1..75: mol_type = other DNA
cctttgagacctgtcaggcaaacaaatccgcctggctgcaacgcagggaagaactgacgcaggccgaacaggcat

SEQ ID NO: 765830 - DNA, 75 bp, synthetic construct
  source 1..75: mol_type = other DNA
acttggcgagccggtctttgaccgcctggatgccgacatcgcccatgcgctgatgagcatcaacgcggtgaaagg

SEQ ID NO: 765831 - DNA, 75 bp, synthetic construct
  source 1..75: mol_type = other DNA
caaaaccgggaacaacaaagcctgagaagaagacaccgcctccgttgccgccttcctgccaggcgctactggatg

SEQ ID NO: 765832 - DNA, 75 bp, synthetic construct
  source 1..75: mol_type = other DNA
gaactgcaaagctggtttgaacctccaaaaccgggaacaacaaagcctgagaagaagacaccgcctccgttgccg

SEQ ID NO: 765833 - DNA, 75 bp, synthetic construct
  source 1..75: mol_type = other DNA
acgttggcaccaaactggaagtggcttatttcgatcagcaccgtgcggaactggatcccgataaaacggtgatgg

SEQ ID NO: 765834 - DNA, 75 bp, synthetic construct
  source 1..75: mol_type = other DNA
accttcaatgggacgattattttcatctcccacgaccgttcgtttatccgcaatatggcgacgcgcattgttgat

SEQ ID NO: 765835 - DNA, 75 bp, synthetic construct
  source 1..75: mol_type = other DNA
tcttcgaaggcggcggtaaaattggtcgttatgtcggcggttatcatgatgcccgtggtcagcaagaacagtatg

SEQ ID NO: 765836 - DNA, 75 bp, synthetic construct
  source 1..75: mol_type = other DNA
tgatgatcaacctgattggtagcgatgtgaattatgactggctgaaactgccgctggtgcatctgcactggtacg

SEQ ID NO: 765837 - DNA, 75 bp, synthetic construct
  source 1..75: mol_type = other DNA
gaagccaacctccagcattaccgtgccagggcgtaccattaaccgctttggcgaagaagttgagatgatcaccaa

SEQ ID NO: 765838 - DNA, 75 bp, synthetic construct
  source 1..75: mol_type = other DNA
aatccattcttctgcccggatccggacaaaatcgaagccttagatgaactgatgcgcgcgctgaaaaaagagggc

SEQ ID NO: 765839 - DNA, 75 bp, synthetic construct
  source 1..75: mol_type = other DNA
accgcgacgaaatcaccaaagacggtttccagagcaaccatgcgggcggcattctcggcggtatcagcagcgggc

SEQ ID NO: 765840 - DNA, 75 bp, synthetic construct
  source 1..75: mol_type = other DNA
tgtgcccgcaattttgcggagacatcgatttcggtaaatcaaccgaacggtggtacacgcaatctcccttgctat

SEQ ID NO: 765841 - DNA, 75 bp, synthetic construct
  source 1..75: mol_type = other DNA
gccgaaaggctcgccggtctccgttgacgccggtactgcgaaccctgttcagtctgccaccagtgagtttcgcag

SEQ ID NO: 765842 - DNA, 75 bp, synthetic construct
  source 1..75: mol_type = other DNA
tggtcgcgttgtcaccacatctcttgcagtagctaattactttactaaacggcatgagcgggttttagatagaat

SEQ ID NO: 765843 - DNA, 75 bp, synthetic construct
  source 1..75: mol_type = other DNA
gttcaaagaggcatacatcaacgcctttaacctgatggagaagagtttatcaggtgccgatgcgtctgatatgtc

SEQ ID NO: 765844 - DNA, 75 bp, synthetic construct
  source 1..75: mol_type = other DNA
gatggcttcgcgttccttgccatgggcttcactggtaaacgtgctgcccggttcaaagaggcatacatcaacgcc

SEQ ID NO: 765845 - DNA, 75 bp, synthetic construct
  source 1..75: mol_type = other DNA
tttttcgtgtcatgagcatcattacgcccaaattatggtggggcgtgcagggccaacttcggttgggccgggttc

SEQ ID NO: 765846 - DNA, 75 bp, synthetic construct
  source 1..75: mol_type = other DNA
atgttactcaccgatctccttcacggtaatacgcatctgtcaggagaaggcagaaacgtcagtcgcctggacgaa

SEQ ID NO: 765847 - DNA, 75 bp, synthetic construct
  source 1..75: mol_type = other DNA
tctctccggtgtttttgaaggcgttactactggcaccagcattggcttgttgatcgaaaacactgaccagcgctc

SEQ ID NO: 765848 - DNA, 75 bp, synthetic construct
  source 1..75: mol_type = other DNA
gcgaagaagttgagatgatcaccaaaggccgtcacgatccttgtgtcgggatccgtgcggtgccgatcgcagaag

SEQ ID NO: 765849 - DNA, 75 bp, synthetic construct
  source 1..75: mol_type = other DNA
ttaacggccatcggattcaggcctgatgcggcttcgcgggatgataatcgcgagaaattcaccccagcacagaac

SEQ ID NO: 765850 - DNA, 75 bp, synthetic construct
  source 1..75: mol_type = other DNA
cggcaaaaagagcgtctggtagcggaaggcgcagggtttgcagaactgttgagcagcctgcaaaccccggagatt

SEQ ID NO: 765851 - DNA, 75 bp, synthetic construct
  source 1..75: mol_type = other DNA
atatcgcgttaagcaactgaccaaacggcaaaaagagcgtctggtagcggaaggcgcagggtttgcagaactgtt

SEQ ID NO: 765852 - DNA, 75 bp, synthetic construct
  source 1..75: mol_type = other DNA
tgcaacaggctggcattgacgtcagccacggtctgatgatgagtgaagccgagcaattgaataaaggctttctta

SEQ ID NO: 765853 - DNA, 75 bp, synthetic construct
  source 1..75: mol_type = other DNA
aggcttatgaagaatacttcgaaggtcttgccgacggcgaagaagctctcagcttcaacgaatttaaacaggcgc

SEQ ID NO: 765854 - DNA, 75 bp, synthetic construct
  source 1..75: mol_type = other DNA
aagaacccggtctggagaactggagttatctcgattgcctgccctactatcgcaaggccgagacgcgcgatattg

SEQ ID NO: 765855 - DNA, 75 bp, synthetic construct
  source 1..75: mol_type = other DNA
gtgcaggatgagtattacatggtgcgggcgctaaagctggcgcaacgaggacgtttcaccacgcatcccaatccg

SEQ ID NO: 765856 - DNA, 75 bp, synthetic construct
  source 1..75: mol_type = other DNA
gggccgacgcttgcgggtgcattgctccaggcggggttagtcgatgagctgattgtttatatcgcgcctaaacta

SEQ ID NO: 765857 - DNA, 75 bp, synthetic construct
  source 1..75: mol_type = other DNA
gatccagccttaacggtgcgttggtctgaactggatgaacaaactcaggggctctacccgcaacacaatcccgcc

SEQ ID NO: 765858 - DNA, 75 bp, synthetic construct
  source 1..75: mol_type = other DNA
gcgatggatctcgacaactgggcaaaagaacccggtctggagaactggagttatctcgattgcctgccctactac

SEQ ID NO: 765859 - DNA, 75 bp, synthetic construct
  source 1..75: mol_type = other DNA
gctacaactgggcctatgagacggaacccgaaccgtttatgaacaaccgccgcatggagtgcggacgcggcaaag

SEQ ID NO: 765860 - DNA, 75 bp, synthetic construct
  source 1..75: mol_type = other DNA
ctggtcatcactaaacagggcgatctgatttgcctcgacggcaaactgggtgctgacggcaacgcactgttccgc

SEQ ID NO: 765861 - DNA, 75 bp, synthetic construct
  source 1..75: mol_type = other DNA
agccgtgaggaatttgcgtggccgaatattcagtaccatttcctgccagtagcgattaactataacggctcgaat

SEQ ID NO: 765862 - DNA, 75 bp, synthetic construct
  source 1..75: mol_type = other DNA
gcgtcgaatggctggaaggcgacagcaccatcccaacccgcgcaacggccaacaaagaagtgctgttatgtgcag

SEQ ID NO: 765863 - DNA, 75 bp, synthetic construct
  source 1..75: mol_type = other DNA
gcgctggatctcgataactgggcgcaagaacccggtctggagaactggagctacctcgactgtctgccctactat

SEQ ID NO: 765864 - DNA, 75 bp, synthetic construct
  source 1..75: mol_type = other DNA
ccgcaggtcgctgggcgtggactttaccgtctgcaacaggctggcattgacgtcagccacgggctgatgatgagt

SEQ ID NO: 765865 - DNA, 75 bp, synthetic construct
  source 1..75: mol_type = other DNA
agcagctttttgacaagctccgtctgccgaccgcaccgtggcagttactggtcgatcgcaacgaatggtctgcgg

SEQ ID NO: 765866 - DNA, 75 bp, synthetic construct
  source 1..75: mol_type = other DNA
tgagtgatgaagaattagagttctttagccatctgacaagattatgtcctgaaggtatgattcctcttgccagag

SEQ ID NO: 765867 - DNA, 75 bp, synthetic construct
  source 1..75: mol_type = other DNA
aggagcacggcgggatattatgtggcaaatgggatgccggtgagagcgaaaaaaatgagtcgtgatgtgaactga

SEQ ID NO: 765868 - DNA, 75 bp, synthetic construct
  source 1..75: mol_type = other DNA
ggagagcgaacgcgtggtgctggcggcggagaatgcggagctgaagtctgtgcaccctcaaccattcggagctga

SEQ ID NO: 765869 - DNA, 75 bp, synthetic construct
  source 1..75: mol_type = other DNA
cgaggtggttttgattatgccgttaagtttctacgcagtgaagcgtctagtgtacgtttgttcgccggccagctt

SEQ ID NO: 765870 - DNA, 75 bp, synthetic construct
  source 1..75: mol_type = other DNA
gtgtcacagccagcaccaaccgcacagataaccagtcagatggccggaaatatccgggcgttatttcctgaataa

SEQ ID NO: 765871 - DNA, 75 bp, synthetic construct
  source 1..75: mol_type = other DNA
ccttgccgaaggcgaagaagctcacagcttcaacgaatttaaacaggtgctttccagttcggcaaaatctaacgg

SEQ ID NO: 765872 - DNA, 75 bp, synthetic construct
  source 1..75: mol_type = other DNA
cgggtgaaaaagctaaaggtgcaactgcgtatgtgacactcgaaccttgtagccatcatggtcgtacaccaccgt

SEQ ID NO: 765873 - DNA, 75 bp, synthetic construct
  source 1..75: mol_type = other DNA
atggcgaaattgtcggcgaaggttaccatcaccgtgcgggtgaaccacacgctgaagtacatgcgttgcgtatgg

SEQ ID NO: 765874 - DNA, 75 bp, synthetic construct
  source 1..75: mol_type = other DNA
ggcaagcaactgttccacggcgaattaacccgacatgaatcgcgaattgttattggcgaattgctgaaagacaag

SEQ ID NO: 765875 - DNA, 75 bp, synthetic construct
  source 1..75: mol_type = other DNA
gatgataataatcatgaaggcgcgctgaatgtgattcaggcggtgctggataatatcgctcctttcaatagttga

SEQ ID NO: 765876 - DNA, 75 bp, synthetic construct
  source 1..75: mol_type = other DNA
cgcccgttacactaccgatgataataatcatgacggcgcgctgaatgtgattcaggcggtgctggataacacaga

SEQ ID NO: 765877 - DNA, 75 bp, synthetic construct
  source 1..75: mol_type = other DNA
aactacgttgcgctggacggtaacatcggttgtatggttaacggcgcaggtctggcgatgggtaccatggacatc

SEQ ID NO: 765878 - DNA, 75 bp, synthetic construct
  source 1..75: mol_type = other DNA
ccgggcgcctggtacactacgccccgcctgcacctgctcatcaccggccaggactttgtggtcccgtacggctgg

SEQ ID NO: 765879 - DNA, 75 bp, synthetic construct
  source 1..75: mol_type = other DNA
tttgatttgtatgcgctgcctgatgaggctatcgcagctatcttcactcgcagccggctgcaggctgtctttccg

SEQ ID NO: 765880 - DNA, 75 bp, synthetic construct
  source 1..75: mol_type = other DNA
taattcaacagatgcaaagttttggcgcccttcttcttaaccatgagcaaactaaaaaattgcgcgccgtttgtc

SEQ ID NO: 765881 - DNA, 75 bp, synthetic construct
  source 1..75: mol_type = other DNA
cggctggtcttatgcgccgggtgcggcttaccggcccgaccttgcccgttatcaggggacgcttcagccgctggc

SEQ ID NO: 765882 - DNA, 75 bp, synthetic construct
  source 1..75: mol_type = other DNA
tcctggtccgggagctcaccacgcggtgtgaacagggtccgctggcggaggccctgaccgggctgcgcggcctgt

SEQ ID NO: 765883 - DNA, 75 bp, synthetic construct
  source 1..75: mol_type = other DNA
ttcctggcagatctgcgtcctgttgtggatcagatgtatgccgagcacctgctgcgcccgctggcgagcggctgc

SEQ ID NO: 765884 - DNA, 75 bp, synthetic construct
  source 1..75: mol_type = other DNA
gtgatattggttgtctggagattcagggggccagtctatgaagaagataaagcattgttgattggtaatggtctg

SEQ ID NO: 765885 - DNA, 75 bp, synthetic construct
  source 1..75: mol_type = other DNA
gtggcagacgacggagaaaaaagtgagcctgactgttcccggtcctgtcctgttattccgcatcaggagtggcag

SEQ ID NO: 765886 - DNA, 75 bp, synthetic construct
  source 1..75: mol_type = other DNA
cagtggcattgcctgctctatgcccttcgccatgcttggtttcgcggttgattttggtcgctggaaaacagggat

SEQ ID NO: 765887 - DNA, 75 bp, synthetic construct
  source 1..75: mol_type = other DNA
actgaaaaattgcgtgctgtttgcctgccagacggtgtcgccaacaaaaaactggttggtaaaagcccatcaacc

SEQ ID NO: 765888 - DNA, 75 bp, synthetic construct
  source 1..75: mol_type = other DNA
ttatccgcaacatcctgcgcgaacaactgatgcccagtgcgtcacaagtgcaaagaaatggtatttttcagactg

SEQ ID NO: 765889 - DNA, 75 bp, synthetic construct
  source 1..75: mol_type = other DNA
gaagacatcgcgtttcgctgtagtggcattcacaacctgatcgttaccgtatctgaaccgacctttgctgccacc

SEQ ID NO: 765890 - DNA, 75 bp, synthetic construct
  source 1..75: mol_type = other DNA
cagcttgacgacgcgctggacattctgatgaacggaggcgcgttaaatggcacgctggaacccgtcctggcacct

SEQ ID NO: 765891 - DNA, 75 bp, synthetic construct
  source 1..75: mol_type = other DNA
ccagacagtggcagtcaggcttgtggtgatatcggcccagggcgaatgctcgatccgttaaccattgtggatatg

SEQ ID NO: 765892 - DNA, 75 bp, synthetic construct
  source 1..75: mol_type = other DNA
cgaccaggcacagcgggaagcctcgcgctgcctgaagtgcggcgagcacagcgtttgtgaatggacctgtccgct

SEQ ID NO: 765893 - DNA, 75 bp, synthetic construct
  source 1..75: mol_type = other DNA
cgaaaaaagaggtgaagaacgcccgcgaagagggggctaacttcgaatttaacgtccagccagtggcgcttgaat

SEQ ID NO: 765894 - DNA, 75 bp, synthetic construct
  source 1..75: mol_type = other DNA
tcggttgtatggttaacggtgcaggtctggcgatggggacgatggacatcgttaaactgcacggcggcgaaccgg

SEQ ID NO: 765895 - DNA, 75 bp, synthetic construct
  source 1..75: mol_type = other DNA
gcgcggtagcggaagtgggtgttaacgtaccggttgtggtacgtctggaaggtaacaacgccgaactcggcgcga

SEQ ID NO: 765896 - DNA, 75 bp, synthetic construct
  source 1..75: mol_type = other DNA
atcaaacagacgccaatggccaaccggttaaccagattctggttgaagcagcgaccgatatcgctaaagagctgt

SEQ ID NO: 765897 - DNA, 75 bp, synthetic construct
  source 1..75: mol_type = other DNA
ttgtgaaatcgcctgtgtcatggctcacaatgatgagcaacatgtcctgagccaacaccattttcatccccgaat

SEQ ID NO: 765898 - DNA, 75 bp, synthetic construct
  source 1..75: mol_type = other DNA
cttttgtcgatccccgccacacccgcaaagtagcgatggtggtgggtaacactattaataccctcaaagagcgcg

SEQ ID NO: 765899 - DNA, 75 bp, synthetic construct
  source 1..75: mol_type = other DNA
ggatatttattgcgcttatcttatccgatgtctggtttttcgcggggaattagtgggatacggcgatttgtttcg

SEQ ID NO: 765900 - DNA, 75 bp, synthetic construct
  source 1..75: mol_type = other DNA
atgaaatttatctgccgttccgtgctgagcaggcggagcgggaggcctcacgttgcctgaagtgcggcgatcaca

SEQ ID NO: 765901 - DNA, 75 bp, synthetic construct
  source 1..75: mol_type = other DNA
tgaatttgtcatgccagccgacgcggtgattatggcgtttggcttcaatccgcacgggatgccgtggctggagtc

SEQ ID NO: 765902 - DNA, 75 bp, synthetic construct
  source 1..75: mol_type = other DNA
cggaagagccgtttatcaataccgccggacttaacgtcgtggtactgggcggcggcgacaccgcgatggactgtg

SEQ ID NO: 765903 - DNA, 75 bp, synthetic construct
  source 1..75: mol_type = other DNA
tttgattgggattccgggaaagtgctgattttcccagcacagccactgaccactctaacaccagaacagatttct

SEQ ID NO: 765904 - DNA, 75 bp, synthetic construct
  source 1..75: mol_type = other DNA
aacaagaacgttccggggctgattagaggcgcagagatatgcgtaagtattgctgaacagcttcgcaaaggaggc

SEQ ID NO: 765905 - DNA, 75 bp, synthetic construct
  source 1..75: mol_type = other DNA
agatgtttgcggagtgtgcatacacgcttgaacatcatgatcacgcagtagccttcgccgctgagcttcgcaaag

SEQ ID NO: 765906 - DNA, 75 bp, synthetic construct
  source 1..75: mol_type = other DNA
gcatgacaaaattgatgttgattgtggatgtgtaagtacagaaatgcttatgcactggataagggtcgcgtatga

SEQ ID NO: 765907 - DNA, 75 bp, synthetic construct
  source 1..75: mol_type = other DNA
atgaaattttctaaattttctgagttggtgaatcgtattttgttgaatcgtattttgtccaacaaccacagcgat

SEQ ID NO: 765908 - DNA, 75 bp, synthetic construct
  source 1..75: mol_type = other DNA
aaggatttcaaagcggcgcagagtgattgctgtatgcaccctggttcagacctgatagggaaggttgaaatgact

SEQ ID NO: 765909 - DNA, 75 bp, synthetic construct
  source 1..75: mol_type = other DNA
cataaagagcagttggaaaaattgtcgattgaactggatgctgcaaaacagcgcgtagcagaactggaggccagt

SEQ ID NO: 765910 - DNA, 75 bp, synthetic construct
  source 1..75: mol_type = other DNA
cgttctgctggaatcacgattgataaccttgaggccaagtgcgcggcgctggctgtggagaatgcgtggctgaat

SEQ ID NO: 765911 - DNA, 75 bp, synthetic construct
  source 1..75: mol_type = other DNA
ttcgactggagtgccggtcaggtgttgatttacccggcacagccattgaccacgcttacgccagaccaggtagca

SEQ ID NO: 765912 - DNA, 75 bp, synthetic construct
  source 1..75: mol_type = other DNA
cctgatccataaagttgcgcttgatccgctgacaggcccgatgccgtatcagggacgcgagctggcgttcaaact

SEQ ID NO: 765913 - DNA, 75 bp, synthetic construct
  source 1..75: mol_type = other DNA
tcggttgtatggttaacggcgcaggtctggcgatgggtacgatggacatcgttaaactgcacggcggcgaaccag

SEQ ID NO: 765914 - DNA, 75 bp, synthetic construct
  source 1..75: mol_type = other DNA
cgtaccggtcgtggtacgtctggaaggtaacaacgccgaacttggcgcgaagaaactggctgacagcggcctgaa

SEQ ID NO: 765915 - DNA, 75 bp, synthetic construct
  source 1..75: mol_type = other DNA
ttagagaagtacgggccaattgttcagatagccaactgcgcgccgatcatcagaagaaaatcgcaaagcagagag

SEQ ID NO: 765916 - DNA, 75 bp, synthetic construct
  source 1..75: mol_type = other DNA
aatcccctttggataagggatacattcgtatcaagttaagtcgttatcagcataaggctatttttaaggtaagga

SEQ ID NO: 765917 - DNA, 75 bp, synthetic construct
  source 1..75: mol_type = other DNA
aatgtgcataaggtatgtctgcgcgcgtcctggccccaccagcaaagccgactgtctgaacaacgtgctggacgc

SEQ ID NO: 765918 - DNA, 75 bp, synthetic construct
  source 1..75: mol_type = other DNA
gtattaaaggtggctctggtatggatattctggccattagtcatggaaccctttcaactaaagatttctctgggt

SEQ ID NO: 765919 - DNA, 75 bp, synthetic construct
  source 1..75: mol_type = other DNA
gcctttagcgacgcactgggtactcaggtccgcgacatgtttgtaaaagatgttccgcagggtgctgatctactg

SEQ ID NO: 765920 - DNA, 75 bp, synthetic construct
  source 1..75: mol_type = other DNA
aggctgatattgatatcagaactatttccaaagttaataatgctggtagatttataggttaccttgaaagattga

SEQ ID NO: 765921 - DNA, 75 bp, synthetic construct
  source 1..75: mol_type = other DNA
taaatacaagaaaaaagcagaggaaattgtaatcggtatttctgatgggcaagctgatattgatatcagaactat

SEQ ID NO: 765922 - DNA, 75 bp, synthetic construct
  source 1..75: mol_type = other DNA
gatgttatctcaacggcatactctgtcggtggtactggcagaacaatggtatctcgtaatgacatggttattaat

SEQ ID NO: 765923 - DNA, 75 bp, synthetic construct
  source 1..75: mol_type = other DNA
aatcgttgatggcgcaacctggacgcgcacgatgggctggaccgagtaccagcaggtgcgctacgccaccgcacg

SEQ ID NO: 765924 - DNA, 75 bp, synthetic construct
  source 1..75: mol_type = other DNA
agccagtacatgcagcttaatggcgggccgcagttatttgtggtgctggccttcgctgaagacggacaacaaaaa

SEQ ID NO: 765925 - DNA, 75 bp, synthetic construct
  source 1..75: mol_type = other DNA
cagacacagccgagcaggccgtggccagagtcttttatgagaaagcattctcaaatgtgtatcagaccgatgatc

SEQ ID NO: 765926 - DNA, 75 bp, synthetic construct
  source 1..75: mol_type = other DNA
ggaagcagcagaggcctttaataatgcaaaagtccatttggaaaaggcactaaatactgtcattcagccaaatga

SEQ ID NO: 765927 - DNA, 75 bp, synthetic construct
  source 1..75: mol_type = other DNA
accagacagagcatgacgatctgaccggtaagaaccaggcggtgacagaggcgaagaccccggcccaggctgcgg

SEQ ID NO: 765928 - DNA, 75 bp, synthetic construct
  source 1..75: mol_type = other DNA
tttcacatcgtccaaaagaaacatttccgttaattttaaattttggcgcaacagaactggccctgcccgttgccc

SEQ ID NO: 765929 - DNA, 75 bp, synthetic construct
  source 1..75: mol_type = other DNA
tggcagattttcattctctgtttgttaatcatccctttacccgtctggttacccagcgattaatatggggggttt

SEQ ID NO: 765930 - DNA, 75 bp, synthetic construct
  source 1..75: mol_type = other DNA
ggtctgaatatacttaccttgatgaataatgatatggcgctgatacagctgcatcatgtatcacaacgggcgaaa

SEQ ID NO: 765931 - DNA, 75 bp, synthetic construct
  source 1..75: mol_type = other DNA
gaaatgctgcgctttacccaggggggacgtttttatagcgggctggaacaactgaaaacgttctgccagccacaa

SEQ ID NO: 765932 - DNA, 75 bp, synthetic construct
  source 1..75: mol_type = other DNA
ttacgcgaacaagggttagctgccgtgccacgtctggcaatgtatgctcataaagacgactgcggcagcctgctg

SEQ ID NO: 765933 - DNA, 75 bp, synthetic construct
  source 1..75: mol_type = other DNA
cccgcaaaagacaactgggcatttctggcgttaagtctctttggtgacgaaagcacggctcgggatctgacgaca

SEQ ID NO: 765934 - DNA, 75 bp, synthetic construct
  source 1..75: mol_type = other DNA
aaagcgttgggggatatggaatctgtaccttatcgcgcaaatgccgcgcgaaatggcggtatcgtgctggcaaca

SEQ ID NO: 765935 - DNA, 75 bp, synthetic construct
  source 1..75: mol_type = other DNA
ttaccgatgacgctctggaaattatcggcgaaatgctgcgctttacccagggcggacgtttttatagcggactgg

SEQ ID NO: 765936 - DNA, 75 bp, synthetic construct
  source 1..75: mol_type = other DNA
tttctggcgttaagtctctttggtgacgaaaatacggcacgggatttaacgacacagatccttgcctggccacag

SEQ ID NO: 765937 - DNA, 75 bp, synthetic construct
  source 1..75: mol_type = other DNA
cgattttgaccgttcattctctgatggcgttctcgaagatatcgccgaacagcttcgtaaaggagtcatccaatg

SEQ ID NO: 765938 - DNA, 75 bp, synthetic construct
  source 1..75: mol_type = other DNA
agaagaggtgatgccgtggttaagtactcaagcccgggcagtggtgaatagttatttatcggcttcgccaaaacc

SEQ ID NO: 765939 - DNA, 75 bp, synthetic construct
  source 1..75: mol_type = other DNA
gctcaattagcagaacaggcgcttcgcaacggtcacgtagaagtgttaattaacatatgggaaaatgacagctac

SEQ ID NO: 765940 - DNA, 75 bp, synthetic construct
  source 1..75: mol_type = other DNA
atgtcgcatgaaaaccacttcggctacgcggcctgcgccgcccttttgcgcgaacaaggactggcagccgttccg

SEQ ID NO: 765941 - DNA, 75 bp, synthetic construct
  source 1..75: mol_type = other DNA
gcaaaaagcacgtgatgaatactggcgcacgctgttacaaacgttgatggcatcgcagccacaactggcagaaga

SEQ ID NO: 765942 - DNA, 75 bp, synthetic construct
  source 1..75: mol_type = other DNA
acttaaagcgcctgaagcactggctcgcctgaaaggattgagaaaagacgctactcagatcagcaaagatctact

SEQ ID NO: 765943 - DNA, 75 bp, synthetic construct
  source 1..75: mol_type = other DNA
tcgaagacaaaaagctgcctgcacagcaaaaagctcgagaagaatactggcgtacgctgttacaaacgctgatgg

SEQ ID NO: 765944 - DNA, 75 bp, synthetic construct
  source 1..75: mol_type = other DNA
cgtacgctgttacaaacgctgatggcatcgcagccacaactggcagcagaagtgatgtcgtggttaagtactcaa

SEQ ID NO: 765945 - DNA, 75 bp, synthetic construct
  source 1..75: mol_type = other DNA
catcgcagccacaactggcagaagagatgatgcagtggttaagtactcaagccagggcagtgctgaatagttatt

SEQ ID NO: 765946 - DNA, 75 bp, synthetic construct
  source 1..75: mol_type = other DNA
cgatgatgctctggaaattattggcgaaatgctgcgctttactcagggtgggcgtttttatagcggactggaaca

SEQ ID NO: 765947 - DNA, 75 bp, synthetic construct
  source 1..75: mol_type = other DNA
acagggtccaatggacatttacccggcacgcattccaaaagcccctgatttctggcatccggcaatgtggtccag

SEQ ID NO: 765948 - DNA, 75 bp, synthetic construct
  source 1..75: mol_type = other DNA
gttatgagagtgatcctctgctagtgacattgcagtatcagaacgaggattatggctatggttatcgctcagaaa

SEQ ID NO: 765949 - DNA, 75 bp, synthetic construct
  source 1..75: mol_type = other DNA
aagcatctctctctggcagaggaaagctgctggcagcgttgcgccgacaaactcattgccgcactgccaggaata

SEQ ID NO: 765950 - DNA, 75 bp, synthetic construct
  source 1..75: mol_type = other DNA
acccgacgctggtcgctggcagattttcattctctgtttgttaatcatccctttacccgcctggttacccagcga

SEQ ID NO: 765951 - DNA, 75 bp, synthetic construct
  source 1..75: mol_type = other DNA
tacggctactgcacttatccctcttgtctttaccaaacccagcgataatagcgaagccgcattacttgccctgcg

SEQ ID NO: 765952 - DNA, 75 bp, synthetic construct
  source 1..75: mol_type = other DNA
gcagcgtacagatgtatggcctgccctggagcaattacttaaacagagtccaatagagatttacccgacacgcat

SEQ ID NO: 765953 - DNA, 75 bp, synthetic construct
  source 1..75: mol_type = other DNA
ttgaagacaaaaaactgcccgcacagcaaaaagcacgtgatcaatactggcgtaatctgttgcaaacattgatta

SEQ ID NO: 765954 - DNA, 75 bp, synthetic construct
  source 1..75: mol_type = other DNA
cgcggtgacggtgctgcattaatcggtatgccggatccggcggttggagcacaatgcctgatgcgatgctggcgc

SEQ ID NO: 765955 - DNA, 75 bp, synthetic construct
  source 1..75: mol_type = other DNA
tgataacgttcagcaaacggtggcgaccatgaaccaaatggcggcgtcggtgaaacagaactctgccacggcgtc

SEQ ID NO: 765956 - DNA, 75 bp, synthetic construct
  source 1..75: mol_type = other DNA
ggctgcccggcaccgggtgcagtttttgatgcctgagtccgatgctgtcacaatgctgaaaaacaggcaggcata

SEQ ID NO: 765957 - DNA, 75 bp, synthetic construct
  source 1..75: mol_type = other DNA
ggatgtggctgcccggcaccgggtgcagtttgcgatgccggagtctgatgcggttgcgatgctgaaacaattatc

SEQ ID NO: 765958 - DNA, 75 bp, synthetic construct
  source 1..75: mol_type = other DNA
cgatattgctgacagtacccagcgcattggcaccattacttcgctgattaacgatattgcgtttcagaccaatat

SEQ ID NO: 765959 - DNA, 75 bp, synthetic construct
  source 1..75: mol_type = other DNA
gtcgattcgtacccgggcgacggatgaagagatcgcggcggtggagccgctgtacaaagcgttgaactccggacg

SEQ ID NO: 765960 - DNA, 75 bp, synthetic construct
  source 1..75: mol_type = other DNA
agccagatcccgctacgcgagacgtcgtttgtttatacccgccgtgaaccgctgggcgtggtcgccggaattggc

SEQ ID NO: 765961 - DNA, 75 bp, synthetic construct
  source 1..75: mol_type = other DNA
gtcgatatcgttaccggtgcggacgtgctggagtactacgccgggctgatcccggcgctggaaggcagccagatc

SEQ ID NO: 765962 - DNA, 75 bp, synthetic construct
  source 1..75: mol_type = other DNA
tgcgcgaagagatcttcgggccggtgatgtccattctgacctacgagtcggaagacgaagtcattcgccgcgcta

SEQ ID NO: 765963 - DNA, 75 bp, synthetic construct
  source 1..75: mol_type = other DNA
cgatctcgccgccgatatcgccatgatggcgaacttcttcagctccggtcaggtgtgtaccaacggcacccgcgt

SEQ ID NO: 765964 - DNA, 75 bp, synthetic construct
  source 1..75: mol_type = other DNA
accattaacccggccaacggtaacgtgctggcgaccgtgcaggccgccgggcgcgaggatgtcgatcgcgccgtg

SEQ ID NO: 765965 - DNA, 75 bp, synthetic construct
  source 1..75: mol_type = other DNA
cgcgcgcatcgcgtcattcatcagctggaagcgggtatttgctggatcaacacctggggcgaatccccggcagag

SEQ ID NO: 765966 - DNA, 75 bp, synthetic construct
  source 1..75: mol_type = other DNA
tcctatgcgatgcatatgctgtatgccggtataccgctgaaggtcctgcagagtctgatggggcataagtccatc

SEQ ID NO: 765967 - DNA, 75 bp, synthetic construct
  source 1..75: mol_type = other DNA
attgagattgccacgctggtgaccgatgccaacctgaatattctggcagaagggccgaccattgcagtacatcag

SEQ ID NO: 765968 - DNA, 75 bp, synthetic construct
  source 1..75: mol_type = other DNA
cgaattcccgaaagcggattctacgactgaagcgttaggcgcattgcgcccggccttcgataaagcaggaacagt

SEQ ID NO: 765969 - DNA, 75 bp, synthetic construct
  source 1..75: mol_type = other DNA
tcgccgctacacgcaccgccatcggtggtttccagggggcgctggcgaacatccccgccccacggctgggcgccg

SEQ ID NO: 765970 - DNA, 75 bp, synthetic construct
  source 1..75: mol_type = other DNA
ctttgcctccagcatccgtatttctgataacactgtggtgaccacttcccgcgatgtcctggaaacgataggaac

SEQ ID NO: 765971 - DNA, 75 bp, synthetic construct
  source 1..75: mol_type = other DNA
aaaccgccagagcagtttttaatgaattaagtgccaccgaaccggcgacagtcggggagattgcacagaatacgt

SEQ ID NO: 765972 - DNA, 75 bp, synthetic construct
  source 1..75: mol_type = other DNA
tctcgcccgggatgataggtaaaatgttaaaacaagacagaattaccttgctgaaattactgacgatattaattt

SEQ ID NO: 765973 - DNA, 75 bp, synthetic construct
  source 1..75: mol_type = other DNA
aatatcgtaatgacgctggcggcggccactgcgctgtggttctgcttcgctggtaacctgcaaaatgccgcaatc

SEQ ID NO: 765974 - DNA, 75 bp, synthetic construct
  source 1..75: mol_type = other DNA
gaagtgacggacagaacggtcaggacctggattggggaggcggttgccaccgctgctgctgacggtgtgacgttc

SEQ ID NO: 765975 - DNA, 75 bp, synthetic construct
  source 1..75: mol_type = other DNA
cacccgctgctgctgacggtgtgacgttctctgttccggtcacaccacatacgttccgccattcctatgcgatgc

SEQ ID NO: 765976 - DNA, 75 bp, synthetic construct
  source 1..75: mol_type = other DNA
gtgacgatggctttgagttcggttgtgatgatgacgaaaaactgcgtgtcacgttcgcactggactgttgcgatc

SEQ ID NO: 765977 - DNA, 75 bp, synthetic construct
  source 1..75: mol_type = other DNA
gcgttcagcgttggctgcgcccggaagcattgcgtactcatgacgctatcgacggcaaaccatttagcggtgccg

SEQ ID NO: 765978 - DNA, 75 bp, synthetic construct
  source 1..75: mol_type = other DNA
ggtctggatatgccttcccgcgttcagcgttggttgcgcccggaagcgttgcgtactcatgacgctatcgacggt

SEQ ID NO: 765979 - DNA, 75 bp, synthetic construct
  source 1..75: mol_type = other DNA
tttaccgttccgggcaaaggatacagcctgcctgaaccaatccagttacttaatgccgaacagatattgagtcac

SEQ ID NO: 765980 - DNA, 75 bp, synthetic construct
  source 1..75: mol_type = other DNA
ggatcgccccctatgacgccgaaaattattttgattatgacaatctgaataacggaccttctttgcagcactggt

SEQ ID NO: 765981 - DNA, 75 bp, synthetic construct
  source 1..75: mol_type = other DNA
gcaggatattatgaaggctggtgggaccgactgatcatgcgcatttgcgatgtgctgtttgcgtttcccggtatt

SEQ ID NO: 765982 - DNA, 75 bp, synthetic construct
  source 1..75: mol_type = other DNA
ggaagcgatcgccgatacaaaaaaaaggcgctgggcaagattgggggtaagcagcatgttttttacgtgctgatg

SEQ ID NO: 765983 - DNA, 75 bp, synthetic construct
  source 1..75: mol_type = other DNA
tttaattctgctgtagagtcgcaaccgggtatcaaagacgcacgtcttttggcctcggttttccagacgctgcgc

SEQ ID NO: 765984 - DNA, 75 bp, synthetic construct
  source 1..75: mol_type = other DNA
ggagcgaaacaggaaagaaaatcatagatacactggtgtctgtttttatgcgtttttcaccagttggactcttta

SEQ ID NO: 765985 - DNA, 75 bp, synthetic construct
  source 1..75: mol_type = other DNA
tcgccccaaggagcttgccgggggaaaggtcgaggtcaatatgattgctatgtggaaagacgcaatcgcgaatag

SEQ ID NO: 765986 - DNA, 75 bp, synthetic construct
  source 1..75: mol_type = other DNA
agctgtggcaaaacttgaacgtgaagagaaaaacgccaaagcccggttacgagcagccaggacagcaatactgta

SEQ ID NO: 765987 - DNA, 75 bp, synthetic construct
  source 1..75: mol_type = other DNA
cgaatcaacgagggctggcctgcttacgaggcggcgttgaaagccaataataaggtttatgaggcgtatatctat

SEQ ID NO: 765988 - DNA, 75 bp, synthetic construct
  source 1..75: mol_type = other DNA
tcacacgggtgcagccaaagcgcgatgaagagaagctgctgaacattacagtaactggcagaaaaaactacacac

SEQ ID NO: 765989 - DNA, 75 bp, synthetic construct
  source 1..75: mol_type = other DNA
tgagcgtgatttaccgattaaagagcttgccggatacagaaaagggagcattcgcaacgaagatgacgagatgcg

SEQ ID NO: 765990 - DNA, 75 bp, synthetic construct
  source 1..75: mol_type = other DNA
gctggctggcgtaaaggatgcgaaattatacaaaggtatccctgaccaggatccggagaactggcgcgactacct

SEQ ID NO: 765991 - DNA, 75 bp, synthetic construct
  source 1..75: mol_type = other DNA
ttgaaagcgaaggacgaaaacacggcgataacgtgccacctgtttacctggggccaacgcaactggcagatctgg

SEQ ID NO: 765992 - DNA, 75 bp, synthetic construct
  source 1..75: mol_type = other DNA
tggatattaaatcgcttgagctggtggtgaactttgagctggcgtgggaccctgaagttcatgtacatcgcatcg

SEQ ID NO: 765993 - DNA, 75 bp, synthetic construct
  source 1..75: mol_type = other DNA
ccgtggtccggtagcagccgcctctgctgaaactgcgcctgcaactaccgcgcctgtagcaaaaccgcaggccgt

SEQ ID NO: 765994 - DNA, 75 bp, synthetic construct
  source 1..75: mol_type = other DNA
tcatgttccttgcaccgctgctgtacctcctgcacgcactgctgaccggtatcagcctgtttgtggcaacgttgc

SEQ ID NO: 765995 - DNA, 75 bp, synthetic construct
  source 1..75: mol_type = other DNA
gagggtgaaagtgtggaagatgttgcccgtcgcgaagcgattgaagaggcgggactgatagtcaaacggaccaaa

SEQ ID NO: 765996 - DNA, 75 bp, synthetic construct
  source 1..75: mol_type = other DNA
cagagcctgatggggcatacgtccatcagctcaacggaggtctacacgaaggtgtttgcactggatgtggctgca

SEQ ID NO: 765997 - DNA, 75 bp, synthetic construct
  source 1..75: mol_type = other DNA
ggtgtttgcactggatgtggctgcacggcaccgggtgcagttttcgatgcctgagtccgatgcggtcacaatgct

SEQ ID NO: 765998 - DNA, 75 bp, synthetic construct
  source 1..75: mol_type = other DNA
gtcaacgatgcgatgtgtaaacgtctgggtgcttctggggtagtaaaactgaacaaacagactattcaggtgatt

SEQ ID NO: 765999 - DNA, 75 bp, synthetic construct
  source 1..75: mol_type = other DNA
cgcttgagctggtagtgaactttgaactggcgtgggatcctgaagttcatgtacatcgcatcggtcgtacagcgc

SEQ ID NO: 766000 - DNA, 75 bp, synthetic construct
  source 1..75: mol_type = other DNA
tggatcacctacaaaaaggcactgtgacgctggatgctctgaatacattggtcatggatgaagccgatcgtatgc

SEQ ID NO: 766001 - DNA, 75 bp, synthetic construct
  source 1..75: mol_type = other DNA
ttttgcctcctgcccagctcgctaaccttaatgagttgggttatttaaccatgacgccggtgcaggccgccgcac

SEQ ID NO: 766002 - DNA, 75 bp, synthetic construct
  source 1..75: mol_type = other DNA
caatacttacgctcaggtgcgcgagttaagccacttcgctaacggttttctgattggttcggcgttgatggccca

SEQ ID NO: 766003 - DNA, 75 bp, synthetic construct
  source 1..75: mol_type = other DNA
ttgggggcaaaggtcgttggcatcaacaaccgcgatctgcgtgatttgtcgattgatctcaaccgtacccgcgag

SEQ ID NO: 766004 - DNA, 75 bp, synthetic construct
  source 1..75: mol_type = other DNA
tttcaaacccaggctttagtgctgtgtcctacgcgtgaactggcggatcaggtggcaggtgaattgcgtcggctg

SEQ ID NO: 766005 - DNA, 75 bp, synthetic construct
  source 1..75: mol_type = other DNA
atatggtatcagtcgtcaattacaagatgcctacgcacttagctcacaacagaaagcgcgggcggccattgatgc

SEQ ID NO: 766006 - DNA, 75 bp, synthetic construct
  source 1..75: mol_type = other DNA
catgagccgcgcaccacatgttctgactgatagccgcaccggtgcacagcttggcaatagccagttggttgatag

SEQ ID NO: 766007 - DNA, 75 bp, synthetic construct
  source 1..75: mol_type = other DNA
tatcccaaactggcaaaagcttaccccaccaataaattaccggatttacggggtgaatttattcgtggctgggat

SEQ ID NO: 766008 - DNA, 75 bp, synthetic construct
  source 1..75: mol_type = other DNA
tttgcagcttctgagtggtgcggaaaacaaccgggtgttgcgtgaggcaacccgcgcgggggcgaatgaactgaa

SEQ ID NO: 766009 - DNA, 75 bp, synthetic construct
  source 1..75: mol_type = other DNA
acgcaacgctcgtaaaggattggctacactctgtattggtggtggtcagggcgtggcattaactattgagcgtga

SEQ ID NO: 766010 - DNA, 75 bp, synthetic construct
  source 1..75: mol_type = other DNA
tttctttggttcatgaaatggtgaaacgcaacgctcgtaaaggattggctacactctgtattggtggtggtcagg

SEQ ID NO: 766011 - DNA, 75 bp, synthetic construct
  source 1..75: mol_type = other DNA
cctgttccgtggccctcagccacaccaccaactggttggctgaaatgtaacggtgcagcattttcttctgaaatg

SEQ ID NO: 766012 - DNA, 75 bp, synthetic construct
  source 1..75: mol_type = other DNA
gaaggcggataacccgcgcaatgctttctactggcggtttgtggaaatggggactgtgaatatgccaccgcaccc

SEQ ID NO: 766013 - DNA, 75 bp, synthetic construct
  source 1..75: mol_type = other DNA
gcctatatcgattatgtcggttcctgggggccgatggtgctgggccataaccatccggcgatccgcaatgcagtg

SEQ ID NO: 766014 - DNA, 75 bp, synthetic construct
  source 1..75: mol_type = other DNA
cctgttccgtggccctcagccacaccgccaaccggctggctgaaatgtaacggtgcagcattttcttctgaaatg

SEQ ID NO: 766015 - DNA, 75 bp, synthetic construct
  source 1..75: mol_type = other DNA
cctgttccgtggccctcagccacacccccaacaggatggctgaaatgtaacggtgcagcattttcttctgaaatg

SEQ ID NO: 766016 - DNA, 75 bp, synthetic construct
  source 1..75: mol_type = other DNA
cctgttccgtggccctcagccacacctccaactgggtggctgaaatgtaacggtgcagcattttcttctgaaatg

SEQ ID NO: 766017 - DNA, 75 bp, synthetic construct
  source 1..75: mol_type = other DNA
tgggtggttttcagcctgatttcatcggtgtcggcggacgtgatgggcgggcaggcggagtcctcagtgtcggtg

SEQ ID NO: 766018 - DNA, 75 bp, synthetic construct
  source 1..75: mol_type = other DNA
ccaaaaatatgactggtgggcttatgtatcagctcgtccgcgtaatattgcatttaattacatcgtaagagcggc

SEQ ID NO: 766019 - DNA, 75 bp, synthetic construct
  source 1..75: mol_type = other DNA
ttgtcaaaaaccttggtttgggagaaggctctgcattacctgttggtgtccctgttccgtggccttcagccactc

SEQ ID NO: 766020 - DNA, 75 bp, synthetic construct
  source 1..75: mol_type = other DNA
cggtgaatttatccgtggctgggatgacggacgtggcgtggatgcgtggcgaacattactgagtgctcaggattt

SEQ ID NO: 766021 - DNA, 75 bp, synthetic construct
  source 1..75: mol_type = other DNA
aaaatctgagttccgcccagcgcacgctacggcagaatgctgacgaaacgcggcaggcgctggaccgccagcaaa

SEQ ID NO: 766022 - DNA, 75 bp, synthetic construct
  source 1..75: mol_type = other DNA
tgacatgcaggatgccattaaggctgccagtgagcaactgccgatggagaatggtgctatagactatgccgcgct

SEQ ID NO: 766023 - DNA, 75 bp, synthetic construct
  source 1..75: mol_type = other DNA
ggccaccaccacggcagcggggctggcaatgggcgcgccggttatggctgcagttaagagctatgccagtatgga

SEQ ID NO: 766024 - DNA, 75 bp, synthetic construct
  source 1..75: mol_type = other DNA
gctggcgatcggcatgacgctggtgatcgccactggcggcatcgatctttccgtaggcgcggtgatggctattgc

SEQ ID NO: 766025 - DNA, 75 bp, synthetic construct
  source 1..75: mol_type = other DNA
ctttgcgtgctgattgtccagtcgcaacgctttatcagtctgattaaaggagtacgtagccgtgataaaacgtaa

SEQ ID NO: 766026 - DNA, 75 bp, synthetic construct
  source 1..75: mol_type = other DNA
caactgatcacctccggacagatcgtcacatttaactcaccggatctctcctggttcggcagtggatcgctgttg

SEQ ID NO: 766027 - DNA, 75 bp, synthetic construct
  source 1..75: mol_type = other DNA
aggctctgcactgcctgttggtgtgcctgttccatggccgtcagccacaccgccagagggatggctgaaatgcaa

SEQ ID NO: 766028 - DNA, 75 bp, synthetic construct
  source 1..75: mol_type = other DNA
cagtctgacgctaaccgaggctcggggtgagtttccgcgcatttgggatgatgggcgtggcgtggataacgggcg

SEQ ID NO: 766029 - DNA, 75 bp, synthetic construct
  source 1..75: mol_type = other DNA
acggcatactggtagcgatcctcaaaattcagccgtttgtcgccaccctgatcctgatggtcgccgggcgcggcg

SEQ ID NO: 766030 - DNA, 75 bp, synthetic construct
  source 1..75: mol_type = other DNA
atctcacctgcctgggcaaaatcatcggcggtggaatgccggtaggcgcattcggtggtcgtcgtgatgtaatgg

SEQ ID NO: 766031 - DNA, 75 bp, synthetic construct
  source 1..75: mol_type = other DNA
agctggcgttagcgcaatggcagtatcatgaagagctgtgggtacgcggcaacgatgcggcgaaagagcaggtgc

SEQ ID NO: 766032 - DNA, 75 bp, synthetic construct
  source 1..75: mol_type = other DNA
gctcgacctggcgcagttaccgacggaagtctggccgaacggcgaattgcctgccgatctcgcttcccgcgtgca

SEQ ID NO: 766033 - DNA, 75 bp, synthetic construct
  source 1..75: mol_type = other DNA
cgcgaaaaatggttggtagatgttgatggcagccagattgagattgccctcgatttgggggaagtgaaagccggt

SEQ ID NO: 766034 - DNA, 75 bp, synthetic construct
  source 1..75: mol_type = other DNA
gcgcagataactgcgtggaagcggcacaaaccggctgcgccggacttgattttaattctgctgtagagtcgcaac

SEQ ID NO: 766035 - DNA, 75 bp, synthetic construct
  source 1..75: mol_type = other DNA
atgagccagtcattgccagaaggttgggggtctgtgtcattaagtacgttatggcgagattactgggggcgtagc

SEQ ID NO: 766036 - DNA, 75 bp, synthetic construct
  source 1..75: mol_type = other DNA
gaaattccaactggcataaaagttgctctcaatgatgaacagaatttattctgtactattacttttcaacacgtt

SEQ ID NO: 766037 - DNA, 75 bp, synthetic construct
  source 1..75: mol_type = other DNA
aatgggcggctggtgggtgttggtagcacctgccagccattcgctcatgcttactggtcacaagcgaaccacggc

SEQ ID NO: 766038 - DNA, 75 bp, synthetic construct
  source 1..75: mol_type = other DNA
ggtctggcgaaggataacggcggggggggggaaaaaattcagacgctgccagtaatggcggtttcctgctgtgaa

SEQ ID NO: 766039 - DNA, 75 bp, synthetic construct
  source 1..75: mol_type = other DNA
ttttgcatactccaccatcaaattttgcttccagtattcgcatttcagacaacacggtgatgaccacctcccgcg

SEQ ID NO: 766040 - DNA, 75 bp, synthetic construct
  source 1..75: mol_type = other DNA
ctgggcggcgagcaccatgaccccgtgcagttgctgaatatttactacgaaacgccggataactggttgcgtggg

SEQ ID NO: 766041 - DNA, 75 bp, synthetic construct
  source 1..75: mol_type = other DNA
taacctggaacgcgccggttgcgacagtgaatggcagttatagtcagtcgagtacttatcgacaggctggagcca

SEQ ID NO: 766042 - DNA, 75 bp, synthetic construct
  source 1..75: mol_type = other DNA
atgctaaaacagcaagatatgacagaaaccgccgccgcagtccttcatttcttacctgctgacaagtgggtaacg

SEQ ID NO: 766043 - DNA, 75 bp, synthetic construct
  source 1..75: mol_type = other DNA
gcgatttacggtgggttgatatttgttacaacgtcaccgcgctgcgtcaatgttgaacaggcgcaggcggtgatg

SEQ ID NO: 766044 - DNA, 75 bp, synthetic construct
  source 1..75: mol_type = other DNA
tacggcagtcaagcgcgcagcaattcgtcaccggaaatcatatcagtcacgtcatacttatgcttgctggtcatt

SEQ ID NO: 766045 - DNA, 75 bp, synthetic construct
  source 1..75: mol_type = other DNA
cgggaaatggatgtcagaaaataataatgcgcaggtaacgctgttaaatacacagttaagcgagtttgccccaac

SEQ ID NO: 766046 - DNA, 75 bp, synthetic construct
  source 1..75: mol_type = other DNA
tcacgggaggaatttatccgtcttatcgacgcctgcaggaatcagcaggccaaaaatttatggtgcgtttctgtt

SEQ ID NO: 766047 - DNA, 75 bp, synthetic construct
  source 1..75: mol_type = other DNA
gcttgttggaagcggcagaagaagcggggattcctctggttgtgaaccacgttggcggcatgttcggtattttct

SEQ ID NO: 766048 - DNA, 75 bp, synthetic construct
  source 1..75: mol_type = other DNA
gtggaacgctttaagcgtttcttccatatgatgctggatgaaggtgtttatctggcaccgtcagcgtttgaagcg

SEQ ID NO: 766049 - DNA, 75 bp, synthetic construct
  source 1..75: mol_type = other DNA
tacgacgacgcgccgcgtccagttcttcgctgaaatcgacactatatacggaacaacgacagtaaccagcgaggc

SEQ ID NO: 766050 - DNA, 75 bp, synthetic construct
  source 1..75: mol_type = other DNA
cgggtgttgctgggtgagaataaagtgtgtggtctgacgcgtgggcaagatgctaaagcaactcatgacgcgggc

SEQ ID NO: 766051 - DNA, 75 bp, synthetic construct
  source 1..75: mol_type = other DNA
cgacgaacagtatcgccagctcgctgctgtcgcccatagtctggggatgggtgtgctgaccgaagtcagtaatga

SEQ ID NO: 766052 - DNA, 75 bp, synthetic construct
  source 1..75: mol_type = other DNA
cgatgaactacgtaaggcattgccggaaaacgttgccatctggaaagcattaagcgtcggtgaaaccctgcccgc

SEQ ID NO: 766053 - DNA, 75 bp, synthetic construct
  source 1..75: mol_type = other DNA
tgaaggttatactttaagctctaactttaatgatatgggcgtacaaaaaccagggacaaggtcatactacgccta

SEQ ID NO: 766054 - DNA, 75 bp, synthetic construct
  source 1..75: mol_type = other DNA
tgttcatcgatgccggtatttccgaaagggactatgatgcagcaaaaaacagtatggcggtacgtgcccttacgg

SEQ ID NO: 766055 - DNA, 75 bp, synthetic construct
  source 1..75: mol_type = other DNA
tattgttctgtggggtgagcattgcctgcataccggtaatggtgaaggcagcggcgcctgtggaaggaaaggact

SEQ ID NO: 766056 - DNA, 75 bp, synthetic construct
  source 1..75: mol_type = other DNA
cactacatcattcgtgatttcgaccgtaaacagtttgaagcgcgtaaacgtaagatgatggaaattgccaagaaa

SEQ ID NO: 766057 - DNA, 75 bp, synthetic construct
  source 1..75: mol_type = other DNA
acattccgcatggtgatattcgcgtcgcctttaccccggatgaagaagtgggcaaaggggcgaaacattttgatg

SEQ ID NO: 766058 - DNA, 75 bp, synthetic construct
  source 1..75: mol_type = other DNA
acgccgcatcggtgaatatcaaaattgtcggtaacaacgttcaccctggctcggcaaaaggcgtgatggttaacg

SEQ ID NO: 766059 - DNA, 75 bp, synthetic construct
  source 1..75: mol_type = other DNA
ggtaaaggggcgaaacattttgatgttgaagcctttgatgcgcgctgggcttacaccgttgatggcggtggcgta

SEQ ID NO: 766060 - DNA, 75 bp, synthetic construct
  source 1..75: mol_type = other DNA
aaacgctgttgggcgcggatgacaaagctggtattgctgaaattatgacggcgctggcggtattgcagcagaaaa

SEQ ID NO: 766061 - DNA, 75 bp, synthetic construct
  source 1..75: mol_type = other DNA
tgaactacgtgtctctggatacccaatcaaaagcgggtgtgagacaagttcccagcacggaaggccagtggaagt

SEQ ID NO: 766062 - DNA, 75 bp, synthetic construct
  source 1..75: mol_type = other DNA
caagaaggcttcctccgaaaattaggctccattataggggtagatggcaatcagtcttccagtgaagagtcttta

SEQ ID NO: 766063 - DNA, 75 bp, synthetic construct
  source 1..75: mol_type = other DNA
ttgccattgttacagcaactcggtcagcaatcgcgctggcaactctggttaacaccgcaacaaaaactgagtcgc

SEQ ID NO: 766064 - DNA, 75 bp, synthetic construct
  source 1..75: mol_type = other DNA
aacaatcgcgttggcagttatggttaacgccacaacaaaaattgagtcgtgaatgggttcaggctgctggactac

SEQ ID NO: 766065 - DNA, 75 bp, synthetic construct
  source 1..75: mol_type = other DNA
ccgcgattcgcaatatagtgttggtcgcaaggtaaaatatgctaatggaaaatctccagctcaaccagttttgaa

SEQ ID NO: 766066 - DNA, 75 bp, synthetic construct
  source 1..75: mol_type = other DNA
atagggaaaggaatttctgcgctaggatttgaaagagcaggtgaaaaacttcaggattttgataccggagatatt

SEQ ID NO: 766067 - DNA, 75 bp, synthetic construct
  source 1..75: mol_type = other DNA
cggcatgtacgacattactaaagagatcacaggtaaagcagtatctcttaaagaatgggtagaaaaggggaaagg

SEQ ID NO: 766068 - DNA, 75 bp, synthetic construct
  source 1..75: mol_type = other DNA
ttgtcacgctggaaggaatggaaaaagcagtgcaggtgattgtgcgtattgccgagttaacagcgcaacggaaat

SEQ ID NO: 766069 - DNA, 75 bp, synthetic construct
  source 1..75: mol_type = other DNA
ctggtttttgcaaatcaggagggggcggtactggaagcgccgaacgcgaaaggcgaacagcgttttgcgcggttt

SEQ ID NO: 766070 - DNA, 75 bp, synthetic construct
  source 1..75: mol_type = other DNA
ctgaagccgttaaagaaaaatctgtacgtgcgatcgaagaacaaacgaaagttcttcaacgcaacgacagccaga

SEQ ID NO: 766071 - DNA, 75 bp, synthetic construct
  source 1..75: mol_type = other DNA
ccgttacgggatagcaacggacgatttgcctctcagaaaaaaaacgaggatctcgcacgccagaatgagctacgc

SEQ ID NO: 766072 - DNA, 75 bp, synthetic construct
  source 1..75: mol_type = other DNA
acgcaggcaaaagcgtggattaacgatctcattaaaaataaagcgcgaatcctcgataccaaagagcgtaacatt

SEQ ID NO: 766073 - DNA, 75 bp, synthetic construct
  source 1..75: mol_type = other DNA
cgtagtacacccggcgagcgtcctaaaggattgcatctggaaaaattagagacactgaatgtattcggtgtacgt

SEQ ID NO: 766074 - DNA, 75 bp, synthetic construct
  source 1..75: mol_type = other DNA
cagcaccgctggctgaaggcaaagccacgaagtcatcgcctgagcgcattcagttgctcactcctgacattcagc

SEQ ID NO: 766075 - DNA, 75 bp, synthetic construct
  source 1..75: mol_type = other DNA
gctgcgggatagtaatggacgttttgtatcccagaaaagcaatgaggatgtagccagaaaaaaagaaatgcagaa

SEQ ID NO: 766076 - DNA, 75 bp, synthetic construct
  source 1..75: mol_type = other DNA
ttgaaagagaataaagaccgtatcgcaataattgacgctattcagggggcgagcacaaacgaacttaaggctctt

SEQ ID NO: 766077 - DNA, 75 bp, synthetic construct
  source 1..75: mol_type = other DNA
ctatgttgaaggcgctggataacatctgctctatcctgaacgaccttctgaatgtgaacaagaacaatacaaaag

SEQ ID NO: 766078 - DNA, 75 bp, synthetic construct
  source 1..75: mol_type = other DNA
tcagaaataataaaagcacttgagtcttacggacgcaatcctgaaaccagcgacgcaccacaaggacgcgtaagt

SEQ ID NO: 766079 - DNA, 75 bp, synthetic construct
  source 1..75: mol_type = other DNA
tgaacaattaccgcaatggcgagcactccatatgtcaaaagccctggaagaaaaatacaaagctcaagctgggaa

SEQ ID NO: 766080 - DNA, 75 bp, synthetic construct
  source 1..75: mol_type = other DNA
gccaaatgagaacaatactaaccaatatattgataacgtcagtaaatatcttggtgtatcgcctaatgaaaaaat

SEQ ID NO: 766081 - DNA, 75 bp, synthetic construct
  source 1..75: mol_type = other DNA
gtttattatgcgtccgataagtgcctcttctcacgccacgagacaactttccgggttaaaaattcattctaattt

SEQ ID NO: 766082 - DNA, 75 bp, synthetic construct
  source 1..75: mol_type = other DNA
cgttctggataaaacaaaggcgaccgcagagagccgccagtggaaaagctacatacttgaacgcatcaccaacaa

SEQ ID NO: 766083 - DNA, 75 bp, synthetic construct
  source 1..75: mol_type = other DNA
tatgtcagcgtttgttgattataaaatcaaccaactggatagcgataataagttgaatattaataatgatgatat

SEQ ID NO: 766084 - DNA, 75 bp, synthetic construct
  source 1..75: mol_type = other DNA
gcgattcctcggcgcagaccgacaactttatgaccaaacgcgccagcggtctggcgacgtatcggaacaccgact

SEQ ID NO: 766085 - DNA, 75 bp, synthetic construct
  source 1..75: mol_type = other DNA
tctgaccgttgtcatttgtgattttgcgttctttgcacctgttgccatttctggttctcctgataatcggtgtat

SEQ ID NO: 766086 - DNA, 75 bp, synthetic construct
  source 1..75: mol_type = other DNA
cgacacaagctacacgttatccccaacgcatgagcattgccaacaatgccacatttgcggctggtgggcaatgca

SEQ ID NO: 766087 - DNA, 75 bp, synthetic construct
  source 1..75: mol_type = other DNA
cgcgccgctttagttcagcgcgccccaactctttaagccagttggctaggcttatgccgtcgctctgcgcttctt

SEQ ID NO: 766088 - DNA, 75 bp, synthetic construct
  source 1..75: mol_type = other DNA
agccgtggatgaatggtgtcaggaaaaccctgagtacgaacgagctatccgtgccggatctcttccaaaggaaac

SEQ ID NO: 766089 - DNA, 75 bp, synthetic construct
  source 1..75: mol_type = other DNA
ttcaatcagaacagactaacagcggtggtaacgctgttgacctggatgaagacatcgacaacttcttcaagagtt

SEQ ID NO: 766090 - DNA, 75 bp, synthetic construct
  source 1..75: mol_type = other DNA
atgcctgttaccgaacatgcgcagcgtcgtgctgcgcgtgcggatgcgctcatcaccgcacaactagcctttgcc

SEQ ID NO: 766091 - DNA, 75 bp, synthetic construct
  source 1..75: mol_type = other DNA
cttgagattatcaaggtgcataaatgcaaagccccgcaagtgtcgttaccactcgcagggcttctaaccaccaac

SEQ ID NO: 766092 - DNA, 75 bp, synthetic construct
  source 1..75: mol_type = other DNA
ggtgggcaatgcaatcagtctggttcagttcgttgccatacctgcaatgagcgcttttccctgtactctttaagg

SEQ ID NO: 766093 - DNA, 75 bp, synthetic construct
  source 1..75: mol_type = other DNA
ttgaagtggtcaacaaaaactggccaccgcgttagagtttttccagtatcgattttccgattcgtttgggggtaa

SEQ ID NO: 766094 - DNA, 75 bp, synthetic construct
  source 1..75: mol_type = other DNA
tcgctgaccattgccgacagtctgaagtttggtaaagctgtgttgaataagctcggtaaaatcaacaagctgcat

SEQ ID NO: 766095 - DNA, 75 bp, synthetic construct
  source 1..75: mol_type = other DNA
ccattgccggagcagaaggagggcatcatgacgcgttatgcgctgaagctgaatctgctgggctgtggtgacggt

SEQ ID NO: 766096 - DNA, 75 bp, synthetic construct
  source 1..75: mol_type = other DNA
tcagtgggtaaatgaacgtaatggtcgtaccgggatgctgacagtcagcggcgccctgctgtcatccccgtgcac

SEQ ID NO: 766097 - DNA, 75 bp, synthetic construct
  source 1..75: mol_type = other DNA
ggaacgcgacggtatgctgatgatgattgatgacaaccgtatcaacctgcaaccgggcgaagtgattaaaaaacg

SEQ ID NO: 766098 - DNA, 75 bp, synthetic construct
  source 1..75: mol_type = other DNA
aacaccgcaacaaaaactgagtcgggaatgggttcaggcatctgggctacccttaacgaaagtaatgcagattag

SEQ ID NO: 766099 - DNA, 75 bp, synthetic construct
  source 1..75: mol_type = other DNA
gcaggcgacagaccgtgcgcaggggaaaccgtacatgaacccgcgggacaacacggctctgttgcgtctgcggct

SEQ ID NO: 766100 - DNA, 75 bp, synthetic construct
  source 1..75: mol_type = other DNA
gtggaggatggcgtgctgcagccggagcagcggatggtcagcacggggcgtgcggttgtgtacggtggtgcgaat

SEQ ID NO: 766101 - DNA, 75 bp, synthetic construct
  source 1..75: mol_type = other DNA
agtttggtaaagcggtgctgaataagctcggtaaaatcaacaagctgcataaaaatcaagttgaacaggccgggt

SEQ ID NO: 766102 - DNA, 75 bp, synthetic construct
  source 1..75: mol_type = other DNA
cttcattccattgcaagtgcgcgtagcaaaagcggtgaccgctatgtcgaccacaccatgttcgatatggtacag

SEQ ID NO: 766103 - DNA, 75 bp, synthetic construct
  source 1..75: mol_type = other DNA
gcagcaggttgcggaatctatccttgcggggattaaagcctattttgccgatggggcaacgctggcgagaagggg

SEQ ID NO: 766104 - DNA, 75 bp, synthetic construct
  source 1..75: mol_type = other DNA
aagcactgagtgagccgttccgatgggacatcgggttcacctcccggaatgcgaacattcctccggaagaggtgc

SEQ ID NO: 766105 - DNA, 75 bp, synthetic construct
  source 1..75: mol_type = other DNA
tgaagatatgcagctggctgctggtcagaatctggcggttaacgccggaggtgatatctgcaccggaacaatggg

SEQ ID NO: 766106 - DNA, 75 bp, synthetic construct
  source 1..75: mol_type = other DNA
atgaaaaaagtattaggcgttattcttggtgggctgcttcttctacctgtagtgagcaatgcagccgatgcgcaa

SEQ ID NO: 766107 - DNA, 75 bp, synthetic construct
  source 1..75: mol_type = other DNA
gttcaggtatttcagttcccggaaggcgtcacctggggtgacggtcaggtagcgtacgtagcgatcggtattgct

SEQ ID NO: 766108 - DNA, 75 bp, synthetic construct
  source 1..75: mol_type = other DNA
aagcgatgattccgttgctgaacagctgaagtcagcaacgacagcagaagaacttcgcgcattgctgatgggcga

SEQ ID NO: 766109 - DNA, 75 bp, synthetic construct
  source 1..75: mol_type = other DNA
gatggatcgtatgcggttaggtaacagtctgtgggtgatcttcaactgggatagttatcgcagccgggtcacggg

SEQ ID NO: 766110 - DNA, 75 bp, synthetic construct
  source 1..75: mol_type = other DNA
ttattgttaatcacagtgccgttgaggcgttgcgtgaccatctcaatacgctgggcggcgagcaccatgaccccg

SEQ ID NO: 766111 - DNA, 75 bp, synthetic construct
  source 1..75: mol_type = other DNA
cgttaaaatatgatctcaactctttttttagattaaagcctaaaggagatacagttaaagattttgtagcaagta

SEQ ID NO: 766112 - DNA, 75 bp, synthetic construct
  source 1..75: mol_type = other DNA
acaaccgctgaacctcggacagggcatctggctgagcgatagcgccgaaggcaatctgcgtagcgcgattgcggt

SEQ ID NO: 766113 - DNA, 75 bp, synthetic construct
  source 1..75: mol_type = other DNA
ggtggcgaccgaaggacgaaccgaagagcgcctggagcagatcagggactcagttgaggatgctcttcaggacag

SEQ ID NO: 766114 - DNA, 75 bp, synthetic construct
  source 1..75: mol_type = other DNA
tgctacaccgaaggcgtggtgctggcaacccgtattgaagcgttgttccgggctgtaccgccaagcctgtatctg

SEQ ID NO: 766115 - DNA, 75 bp, synthetic construct
  source 1..75: mol_type = other DNA
gaaggctatgaagcgccgctggccgtggcctatacctcgctggttaataccatcaacaatatcgctgaacgtgac

SEQ ID NO: 766116 - DNA, 75 bp, synthetic construct
  source 1..75: mol_type = other DNA
ctttgccgatctgttctcgcaggcactggacgtggtgcgcaacggtcagtcattgatggaagcgtgttctcccgc

SEQ ID NO: 766117 - DNA, 75 bp, synthetic construct
  source 1..75: mol_type = other DNA
tttgcaaaattgttaagcaattctcttttattgaccgtatcagaatctatagcttgcatccatgtcttaacaaac

SEQ ID NO: 766118 - DNA, 75 bp, synthetic construct
  source 1..75: mol_type = other DNA
cctgatggatatgtttccggaagggaccatggtgtgtatgaccgtagtggtgcagcctcaggaccggcttgaaga

SEQ ID NO: 766119 - DNA, 75 bp, synthetic construct
  source 1..75: mol_type = other DNA
tcagcgattccttcaaacgctttgccgatatccatctttcccgccatgccgctgaactgaaaagcgttttctgcc

SEQ ID NO: 766120 - DNA, 75 bp, synthetic construct
  source 1..75: mol_type = other DNA
ccgaaactgatcggcggttatttcgataccgaccagcgtgcagcggggctgggctttacctacaacgttggcgca

SEQ ID NO: 766121 - DNA, 75 bp, synthetic construct
  source 1..75: mol_type = other DNA
ctactgcgctgtggttctgctttgccggtaacctgcaaaatgccgcaatcgtcgctgttctcgggctgttatgtg

SEQ ID NO: 766122 - DNA, 75 bp, synthetic construct
  source 1..75: mol_type = other DNA
cggcaacctgcaaaatgccgcaatcgtcgctgttcttgggctgttatgcgccgcaatttttatcagctttatggt

SEQ ID NO: 766123 - DNA, 75 bp, synthetic construct
  source 1..75: mol_type = other DNA
atccgaaaaaccagcgtccggagctgtggcataactacaacgggcagattaacaaaggcgaaagtatccgcgtct

SEQ ID NO: 766124 - DNA, 75 bp, synthetic construct
  source 1..75: mol_type = other DNA
aatccattcgttcatggcagcgcgaaacataccgatattatgaaaactgaaggcctgaaacaggcgctgaacaaa

SEQ ID NO: 766125 - DNA, 75 bp, synthetic construct
  source 1..75: mol_type = other DNA
agcgttggctgcgcccggaagcattgcgtactcatgacgctatcgacggcaaaccatttagcggtgccgtgccgt

SEQ ID NO: 766126 - DNA, 75 bp, synthetic construct
  source 1..75: mol_type = other DNA
cagcccgacgctcattaaacgggaggtgaacaccgatgtttcgctcaaggatggcgacataattttacttggtgg

SEQ ID NO: 766127 - DNA, 75 bp, synthetic construct
  source 1..75: mol_type = other DNA
ggcggctatgggtaggagtcttgatcgcttccgtgacgcctattctggtgctgctgatcgcatcatggctttggc

SEQ ID NO: 766128 - DNA, 75 bp, synthetic construct
  source 1..75: mol_type = other DNA
acagggctttcatttctgccggatgtgtttggttcagactctgatgaacgtgcgaaaaccgatatcatcgtcgtt

SEQ ID NO: 766129 - DNA, 75 bp, synthetic construct
  source 1..75: mol_type = other DNA
aatatcgtaatgacgctggcggcggctactgcgctgtggttctgcttcgccggtaacctgcaaaatgccgcaatc

SEQ ID NO: 766130 - DNA, 75 bp, synthetic construct
  source 1..75: mol_type = other DNA
aattggctgggatcttaccggagtaatggcgggaacctggttactgaccgtgttattaagcggctattcgtcgct

SEQ ID NO: 766131 - DNA, 75 bp, synthetic construct
  source 1..75: mol_type = other DNA
atggcgggaacctggttactgaccgtgctattgagcggatactcgtcgctgggagcgattgtcagtgcactgatt

SEQ ID NO: 766132 - DNA, 75 bp, synthetic construct
  source 1..75: mol_type = other DNA
cagcagcgtcgtacccggatggtgatttatcgctatgtgaacccgggagcgaacgaaccgtattcaccagaagag

SEQ ID NO: 766133 - DNA, 75 bp, synthetic construct
  source 1..75: mol_type = other DNA
ccgcatgcaactgctgttctccagtggcgtgatgacgggacgtatctcaccggagcgttttgttgaattaaccag

SEQ ID NO: 766134 - DNA, 75 bp, synthetic construct
  source 1..75: mol_type = other DNA
acgaaatcggctggctctccagtgtctccgacgcctatagcaatcagtcatcgttttcctacgatgtggtggcaa

SEQ ID NO: 766135 - DNA, 75 bp, synthetic construct
  source 1..75: mol_type = other DNA
acgacagcaaaggcctcgtctccagcattactgaccgcgctgggcagaagcgcacgttcacccataacgaccggg

SEQ ID NO: 766136 - DNA, 75 bp, synthetic construct
  source 1..75: mol_type = other DNA
tctcctgttggacgaacgcagttacgatacagaagacggcatgaagttcattcttagcccaccgctgcgtaacgt

SEQ ID NO: 766137 - DNA, 75 bp, synthetic construct
  source 1..75: mol_type = other DNA
tctaaaggcgatttcagccgctgcccaaatggcttacccggtgtggagaaccgcatgcaactgctgttctccagt

SEQ ID NO: 766138 - DNA, 75 bp, synthetic construct
  source 1..75: mol_type = other DNA
tctgggttgaaacctgcccacaatatctcctgttggacgaacgcagttacgatacagaagatggcatgaagttca

SEQ ID NO: 766139 - DNA, 75 bp, synthetic construct
  source 1..75: mol_type = other DNA
tacctttgataaacatctctattatccacttctttcgattgaaaaaaatgccaacataccgctaaaaatgcgacc

SEQ ID NO: 766140 - DNA, 75 bp, synthetic construct
  source 1..75: mol_type = other DNA
gaagccagaaatgtgctttttattgaggatactggtccagtgtatctggagaaattattcagtaagatggttagc

SEQ ID NO: 766141 - DNA, 75 bp, synthetic construct
  source 1..75: mol_type = other DNA
aaatcgattctgttcgattactcctataaattcttctatgaggatggttatggtaaagaatcactgattcttaac

SEQ ID NO: 766142 - DNA, 75 bp, synthetic construct
  source 1..75: mol_type = other DNA
gcccgtgcgaatcaccagccagtctgggttgaaacctgcccacaatatctcctgttggacgaacgcagttacgat

SEQ ID NO: 766143 - DNA, 75 bp, synthetic construct
  source 1..75: mol_type = other DNA
attcaacgcaaatactggtcgttgggaagggcggttctccgatgaaacattggcgcggcttaataaaattcagca

SEQ ID NO: 766144 - DNA, 75 bp, synthetic construct
  source 1..75: mol_type = other DNA
tcaggcgacgcgagaagtctatgggaaatcgattctgttcgattactcctataaattcttctatgaggatggtta

SEQ ID NO: 766145 - DNA, 75 bp, synthetic construct
  source 1..75: mol_type = other DNA
atggcttacccggtgtggaaaaccgcatgcagttactgttttccagtggcgtgatgacgggacgtataacaccgg

SEQ ID NO: 766146 - DNA, 75 bp, synthetic construct
  source 1..75: mol_type = other DNA
cgtaaccggttgtgggaaatgggcgaagcgatgaatatgttctgctccgggtttgaaggggaactgtttaaccgt

SEQ ID NO: 766147 - DNA, 75 bp, synthetic construct
  source 1..75: mol_type = other DNA
aatgacgaactcgccccgctcagttcgtggctgcgctggttaccgatgtgcttcgacccggcacgagacaagcgc

SEQ ID NO: 766148 - DNA, 75 bp, synthetic construct
  source 1..75: mol_type = other DNA
cgcgaacacggcctgacggtgaataaaatcagcctcaaacccggctccggcatcacgctgccgctgtttgctgat

SEQ ID NO: 766149 - DNA, 75 bp, synthetic construct
  source 1..75: mol_type = other DNA
gatgtggcgccgctgaacgggtatctgcgtgccctgccgatgtgttttgacccgcagacggataaaaaacactgg

SEQ ID NO: 766150 - DNA, 75 bp, synthetic construct
  source 1..75: mol_type = other DNA
agctttaccgggcctccctgtcattgctgctgcgtgccggctcggtggaggaactgaacaaaaagcgcgtggatc

SEQ ID NO: 766151 - DNA, 75 bp, synthetic construct
  source 1..75: mol_type = other DNA
tcggccctaccggcgcgggaaaatccgcgaccctgaacgccaaaatcgcgcagctaatggcgctgcaccgcccgc

SEQ ID NO: 766152 - DNA, 75 bp, synthetic construct
  source 1..75: mol_type = other DNA
ccggaaaacggcgtgtggtggctggacgggcttccgcatgccgccgtggtggtggagaaactgcgtacacccccg

SEQ ID NO: 766153 - DNA, 75 bp, synthetic construct
  source 1..75: mol_type = other DNA
gatgaaggaacaccagtgcagcgaactggaggctgcgttccatgtggcgcgtaagctggacaggctgcgtggtct

SEQ ID NO: 766154 - DNA, 75 bp, synthetic construct
  source 1..75: mol_type = other DNA
gttcacccagaaggggagttttgaggcggagttgttcaaccgcgagggcgaactgtggccggaagcggatgtgac

SEQ ID NO: 766155 - DNA, 75 bp, synthetic construct
  source 1..75: mol_type = other DNA
ggacagactctgcaggatgtggatgaacaggcgttgccggagattgatgagggggatgaagaggaggatcagcgc

SEQ ID NO: 766156 - DNA, 75 bp, synthetic construct
  source 1..75: mol_type = other DNA
taaaaaacagtggtacacgcgtctgatgtgggttcagcatctggcagggctcctgccggtgacgggaagggaaac

SEQ ID NO: 766157 - DNA, 75 bp, synthetic construct
  source 1..75: mol_type = other DNA
gtggtactggcgaagaaggtggaggcgctgttccgcgtggtgcccccgagtatttacctggcactggggatgacg

SEQ ID NO: 766158 - DNA, 75 bp, synthetic construct
  source 1..75: mol_type = other DNA
gatgggggtggctgcggcgccggccgatgcggccccgcttcatccgtttagcctgccggtgaaatcgggcgccgt

SEQ ID NO: 766159 - DNA, 75 bp, synthetic construct
  source 1..75: mol_type = other DNA
aactgtagctggtgcgccggttgcactgttccggtctggattatcaggtttacgtgctgttgctgtgatgtttat

SEQ ID NO: 766160 - DNA, 75 bp, synthetic construct
  source 1..75: mol_type = other DNA
gcctgcagagcttccaccgttgcaccctttggcacttcccgcgaaaggcggcgaagcgatggtgagtcgtgcagc

SEQ ID NO: 766161 - DNA, 75 bp, synthetic construct
  source 1..75: mol_type = other DNA
agcagatgacgaaggatgcgatgggaactatccagcgtgtgctggagaaggtgaacgcactgccgcaggacaagc

SEQ ID NO: 766162 - DNA, 75 bp, synthetic construct
  source 1..75: mol_type = other DNA
gttacggcagcagtaacccgaaccaacaacgcggtgtcctggctggcaggcgcaccactggcagtgctgcgacgc

SEQ ID NO: 766163 - DNA, 75 bp, synthetic construct
  source 1..75: mol_type = other DNA
cggaaatggggcgacgattcggggaggcgctggcggaagggctgaatatggttatgcatccgctggactccctca

SEQ ID NO: 766164 - DNA, 75 bp, synthetic construct
  source 1..75: mol_type = other DNA
tgatctgctgacacccgttaagtcgacttctgccgaactgcagagcgcagcggaaatggggcgacgattcgggga

SEQ ID NO: 766165 - DNA, 75 bp, synthetic construct
  source 1..75: mol_type = other DNA
ctggcatctggtccactggcgatgttgcgcgttgccctgtatgccgtatctggtctgttaggtgctttgctcagt

SEQ ID NO: 766166 - DNA, 75 bp, synthetic construct
  source 1..75: mol_type = other DNA
aagaccagaaacgtgaccttttggcctttgccagtacggcagcaaaggcggcaacagcttttgagctgccagcgg

SEQ ID NO: 766167 - DNA, 75 bp, synthetic construct
  source 1..75: mol_type = other DNA
cagcctgggcgaaacgctgcgccagcctctgatggatattctgtacacggtgaaaagcatcacgggggcgttgcg

SEQ ID NO: 766168 - DNA, 75 bp, synthetic construct
  source 1..75: mol_type = other DNA
ggggcttacgccaggcgtcttgaagtaagggatcggattgcaggtgccggagccaccaccacggctgcagggctg

SEQ ID NO: 766169 - DNA, 75 bp, synthetic construct
  source 1..75: mol_type = other DNA
ctgacaggcgcactgatgaaagcagcggctgttgtggctgcggttactgtcggcctcggcaccttagcggtggcg

SEQ ID NO: 766170 - DNA, 75 bp, synthetic construct
  source 1..75: mol_type = other DNA
cggcaatggggcgacgattcggggaggtactggtggaagggctgaatatggttatgcatccgctggactccctga

SEQ ID NO: 766171 - DNA, 75 bp, synthetic construct
  source 1..75: mol_type = other DNA
cactgtgccgcccgttcaccggattgaggcaccgacgcagatcatcatccagacgcagccaggacaaagtgcgca

SEQ ID NO: 766172 - DNA, 75 bp, synthetic construct
  source 1..75: mol_type = other DNA
tgaaaagcgtcacgggggcgttgcgtcgctgggtggaagctaacccggaactgacaggcacactgatgaaagtag

SEQ ID NO: 766173 - DNA, 75 bp, synthetic construct
  source 1..75: mol_type = other DNA
ggtgaatgcagacggtaaagtgatgacgccatcgggtggttttccatcatggggatatggctttgcggggatgta

SEQ ID NO: 766174 - DNA, 75 bp, synthetic construct
  source 1..75: mol_type = other DNA
ccgctattgtggctgcggttaccgtaggcctcggcaccttggctgtagcgctggctgcagtgctggggccgctgg

SEQ ID NO: 766175 - DNA, 75 bp, synthetic construct
  source 1..75: mol_type = other DNA
atgatgcgctcggttccatgcagaaagaatccgacatcaacaaggattcactttctgctcagtggttgctggtca

SEQ ID NO: 766176 - DNA, 75 bp, synthetic construct
  source 1..75: mol_type = other DNA
actggttgaaggtggtgcgcgtatgaacgttgcaaaccctgacgacagctgggaagaccagaaacgtgacctgct

SEQ ID NO: 766177 - DNA, 75 bp, synthetic construct
  source 1..75: mol_type = other DNA
cggcgtttcctggttgctggagaagctcggcattgtcagtaaagaggccgcaaaggcaaaactgccggaaagcgt

SEQ ID NO: 766178 - DNA, 75 bp, synthetic construct
  source 1..75: mol_type = other DNA
gctgggtatcaaaacgttaccttccgttacggcagtagtaacacgaaccagcagcgcgttgtcctggttaccgtc

SEQ ID NO: 766179 - DNA, 75 bp, synthetic construct
  source 1..75: mol_type = other DNA
ctggcatccggtccgctggtgatgctgcgcgttgccctgtatgccgtgtctggtctgttaggtgctctgctcagt

SEQ ID NO: 766180 - DNA, 75 bp, synthetic construct
  source 1..75: mol_type = other DNA
aggtgcgcgatcgcatcgcaggagctggagccaccaccatggctgcagggctggcaatggggacgccagtgatgg

SEQ ID NO: 766181 - DNA, 75 bp, synthetic construct
  source 1..75: mol_type = other DNA
gtagcaaaccctgatgacagctgggaagaccagaaacgtgatctgctggccttcgccagcacggcagcaaaggcg

SEQ ID NO: 766182 - DNA, 75 bp, synthetic construct
  source 1..75: mol_type = other DNA
cgggtttacttactgcaccgttgtcatctttgcgccgcacggcatcactgacgggaaatgtcatgaaaactgtag

SEQ ID NO: 766183 - DNA, 75 bp, synthetic construct
  source 1..75: mol_type = other DNA
gttacggcagcagtaactcgaaccagcaacgcgttgtcctggctggctggcgctccactggcactgctgcgacgc

SEQ ID NO: 766184 - DNA, 75 bp, synthetic construct
  source 1..75: mol_type = other DNA
ttcccgcgaaaggcggcgaagcgatggtgagtcgtgcagccactgtgccgcccgttcaccggattgaggcaccga

SEQ ID NO: 766185 - DNA, 75 bp, synthetic construct
  source 1..75: mol_type = other DNA
cggccatcgtgtcagtctgccgttatcggttttcaatccccaggactaccatccactgctgattaccgtttccgg

SEQ ID NO: 766186 - DNA, 75 bp, synthetic construct
  source 1..75: mol_type = other DNA
atcacaacgcttaatagatgatatctgtgggaaatatgcagggcgaatggggaaaggttatggccattttgaaga

SEQ ID NO: 766187 - DNA, 75 bp, synthetic construct
  source 1..75: mol_type = other DNA
attcccggggcggttcacaatacagatacgatatggctcccgggaaatatttgtgcttaccagttccggctggat

SEQ ID NO: 766188 - DNA, 75 bp, synthetic construct
  source 1..75: mol_type = other DNA
atgattcacctgttcaaaacctgcattattactggcgtcattctggggttaacgtggtctgccccactcagggca

SEQ ID NO: 766189 - DNA, 75 bp, synthetic construct
  source 1..75: mol_type = other DNA
gcaggcactgtattctggatgactcagccagagccggatgtcgtaccgacgcccgaggagatagctgcacgggca

SEQ ID NO: 766190 - DNA, 75 bp, synthetic construct
  source 1..75: mol_type = other DNA
ccccctcagaacaactgatgcgggtgttcacgtggtttcagaaaaaacagttaacaccggccattaatgaaatag

SEQ ID NO: 766191 - DNA, 75 bp, synthetic construct
  source 1..75: mol_type = other DNA
ttgtggcactggatcaggttcctgacgaagcattcgccagcaaagcggtgggtgacggtgtggtgcgtgaaaccg

SEQ ID NO: 766192 - DNA, 75 bp, synthetic construct
  source 1..75: mol_type = other DNA
gctgaagcaactccggcaactgccgctcctgtagcaaaaccgcaggctgtaccaaacgcggtgtctatcgcggag

SEQ ID NO: 766193 - DNA, 75 bp, synthetic construct
  source 1..75: mol_type = other DNA
gcgatgcaatgaagaaagtcgttgcccgtggtccggtagcagccgcctctgctgaaactgcgcctgcaactaccg

SEQ ID NO: 766194 - DNA, 75 bp, synthetic construct
  source 1..75: mol_type = other DNA
ctgacaacctttgtgaacgcagtctggccacaagaaccagaactgctatcgactaagctggccaaccaagaactg

SEQ ID NO: 766195 - DNA, 75 bp, synthetic construct
  source 1..75: mol_type = other DNA
aggttactttgtgttaaccaaagcgatggtgaccatcaacccagaaattaacatgggtgtactggcgggtatcat

SEQ ID NO: 766196 - DNA, 75 bp, synthetic construct
  source 1..75: mol_type = other DNA
taacgttgcgtttattgcccaggcgggcggtgcgatttttgataacctcgcattaatcttcgccatcggtgtggc

SEQ ID NO: 766197 - DNA, 75 bp, synthetic construct
  source 1..75: mol_type = other DNA
ttgccgcactggttatgggttttagtggtgcagcattggcattacccaatatcaccattttagcaaccggcggga

SEQ ID NO: 766198 - DNA, 75 bp, synthetic construct
  source 1..75: mol_type = other DNA
gggcttgcttcatcgggcaacgccgcaggtttacttactgcgccgttatcgtctttgcgccgcacggcatcactg

SEQ ID NO: 766199 - DNA, 75 bp, synthetic construct
  source 1..75: mol_type = other DNA
tcaaagcggcggctggtcccgtcagtgcagcattcgaaccacttaagcctgtatttcagtggattggcgataaag

SEQ ID NO: 766200 - DNA, 75 bp, synthetic construct
  source 1..75: mol_type = other DNA
ttgctgccactaacaggccaaccgccgcgcaggcaaagttattcagtcaggccaaaacacgagtacaggaacttc

SEQ ID NO: 766201 - DNA, 75 bp, synthetic construct
  source 1..75: mol_type = other DNA
ggttgaaggtggtgcgcgtatgaacgttgcaaaccctgacgacagttgggaagaccagaaacgtgacctgctggc

SEQ ID NO: 766202 - DNA, 75 bp, synthetic construct
  source 1..75: mol_type = other DNA
atgcgctgaactatctggatgataacgcaatgtcgaaaggggcagacatcatcgatgtgatgcaacgtctgggcg

SEQ ID NO: 766203 - DNA, 75 bp, synthetic construct
  source 1..75: mol_type = other DNA
cgtgcaaatttgctcagtcatgaactgggatcaatggggccgccttcgcaacgtcaggttgttgctctgggccgt

SEQ ID NO: 766204 - DNA, 75 bp, synthetic construct
  source 1..75: mol_type = other DNA
ctggcgcttaaagcacaggtagcctcatcgcttggtccgggcgcatttggcaggttcatgatggataatgagcag

SEQ ID NO: 766205 - DNA, 75 bp, synthetic construct
  source 1..75: mol_type = other DNA
cttgacaacggcggcagcggggaaggcttcgggccactgaccctttccctgcgcctgaaagacaaacagggtaat

SEQ ID NO: 766206 - DNA, 75 bp, synthetic construct
  source 1..75: mol_type = other DNA
atgccattctatttcaggaaggagtgtccgttaaactcaggctacctcatcactctgcaactcaaagacaaatat

SEQ ID NO: 766207 - DNA, 75 bp, synthetic construct
  source 1..75: mol_type = other DNA
gcccggattatatcaaggctctgaaggccgtattgccacctgagatcccggtattcgccgttggcggggttacgc

SEQ ID NO: 766208 - DNA, 75 bp, synthetic construct
  source 1..75: mol_type = other DNA
actattaacactgacatcgacacaacaggagaacaatatcccaatggtcttttcctttggtggtgtaatcatttt

SEQ ID NO: 766209 - DNA, 75 bp, synthetic construct
  source 1..75: mol_type = other DNA
ggcgcgagtctgacggaggctgcggaagtcgcagaacgtattcgcctgaagttaaatgaaaaagagatgttgatt

SEQ ID NO: 766210 - DNA, 75 bp, synthetic construct
  source 1..75: mol_type = other DNA
gatattgtcgatatcctgatcgatgcatattgctcacgtatggatcttcctgaaaatattgaatggcgtgaaccg

SEQ ID NO: 766211 - DNA, 75 bp, synthetic construct
  source 1..75: mol_type = other DNA
gcgaaatggacaaagtgaactgatccccaatgcgttaggtaagtttttaacacccagcgtagtttgtgttgacga

SEQ ID NO: 766212 - DNA, 75 bp, synthetic construct
  source 1..75: mol_type = other DNA
gccagtgtgggcgcgattgctggggaagccgtatcaactggccatatgactgccgcccgccgtactcaaattctg

SEQ ID NO: 766213 - DNA, 75 bp, synthetic construct
  source 1..75: mol_type = other DNA
acacagatcctttcatcaaggatgagtactaccgcctcatttcgctggtatcagacaagatgccagttacgagaa

SEQ ID NO: 766214 - DNA, 75 bp, synthetic construct
  source 1..75: mol_type = other DNA
actcattggattgacacaggctttcctccgttaaacaaagctatttccggtcgttacgatggcggtttcccatgt

SEQ ID NO: 766215 - DNA, 75 bp, synthetic construct
  source 1..75: mol_type = other DNA
gatattacgtcagctaaaagaagatgcagaaaactatttaggtgaagagataactgaagcagtaattagtgtacc

SEQ ID NO: 766216 - DNA, 75 bp, synthetic construct
  source 1..75: mol_type = other DNA
tattagaagccaacctggcgctgccaaaacacaacctggtcacgctcacctggggcaatgtcagcgccgttgatc

SEQ ID NO: 766217 - DNA, 75 bp, synthetic construct
  source 1..75: mol_type = other DNA
ggtccattctcacggcccgtttgcatggggcaaaaatgccgaagatgcggtgcacaacgccatcgtgctggaaga

SEQ ID NO: 766218 - DNA, 75 bp, synthetic construct
  source 1..75: mol_type = other DNA
cgaaggtacgaaaaaaccctcctccgacacgccaactcaccgactgctctacctggcattccccgccattggcgg

SEQ ID NO: 766219 - DNA, 75 bp, synthetic construct
  source 1..75: mol_type = other DNA
aggcagcggagcataaggccgccaggatgtgcgaaaccatcgccatgaaaggtagtccggttaaatatgttacta

SEQ ID NO: 766220 - DNA, 75 bp, synthetic construct
  source 1..75: mol_type = other DNA
atgatgaaaacgatgcgtattgctgcaatcccgggagacgggattggcaaagaagtccttcctgaagggattcga

SEQ ID NO: 766221 - DNA, 75 bp, synthetic construct
  source 1..75: mol_type = other DNA
tggcaccgccgctataaatccaggaaaacagcggaacgtaaagcagcggagatgtgtgaaaccatcgcaatgaaa

SEQ ID NO: 766222 - DNA, 75 bp, synthetic construct
  source 1..75: mol_type = other DNA
ctgaagcacaacttagcggagaactggcggtctgcgccggatcgtgcggccccggcaacctgcacttaatcaacg

SEQ ID NO: 766223 - DNA, 75 bp, synthetic construct
  source 1..75: mol_type = other DNA
gtggattcagcatgttgatgggcgatttcctctcagtagtacagatgaaattaccggtgaaaatcatcgtgttta

SEQ ID NO: 766224 - DNA, 75 bp, synthetic construct
  source 1..75: mol_type = other DNA
aatgaacggcaagcgtcgcctgttgggttcgtttaaccacggttcgatggctaatgctatgccacaggcgctggg

SEQ ID NO: 766225 - DNA, 75 bp, synthetic construct
  source 1..75: mol_type = other DNA
gatcgccatgcgcaaagcggtgttaaaccgcggcgtttcagtagtggttttaccgggcgatgtggcgttaaaacc

SEQ ID NO: 766226 - DNA, 75 bp, synthetic construct
  source 1..75: mol_type = other DNA
aaaccgagcgagaaagcgattcacccgcaatatctggctcagcaaattagccattttgctgccgatgatgccatc

SEQ ID NO: 766227 - DNA, 75 bp, synthetic construct
  source 1..75: mol_type = other DNA
taccgggcgacgtggcgttaaaaccggctccggaaggggcaaccacgcactggtatcatgcgccacaaccagtcg

SEQ ID NO: 766228 - DNA, 75 bp, synthetic construct
  source 1..75: mol_type = other DNA
ccgatgccaaaattattcagatcgatgtcaatcctgccagcattggcgcacacagcaaggtggatatggcgctgg

SEQ ID NO: 766229 - DNA, 75 bp, synthetic construct
  source 1..75: mol_type = other DNA
acaagagctattccgcgaatgtagtcactattgcgagctggtttccagcccggagcagatcccacaagtgctggc

SEQ ID NO: 766230 - DNA, 75 bp, synthetic construct
  source 1..75: mol_type = other DNA
tttccctaccgcgcgttctacccgaccgatgccaaaattattcagattgatatcaacccagccagcatcggcgct

SEQ ID NO: 766231 - DNA, 75 bp, synthetic construct
  source 1..75: mol_type = other DNA
tccagcaatatcgccctgatgtgtggcagcggctgcgcgggggcgcataaagagttagttgagtttgccgggaaa

SEQ ID NO: 766232 - DNA, 75 bp, synthetic construct
  source 1..75: mol_type = other DNA
aaaaccgatcgcaagttcctcgataaggcgctggaagattaccgcgatgcccgaaaagggctggacgatttagct

SEQ ID NO: 766233 - DNA, 75 bp, synthetic construct
  source 1..75: mol_type = other DNA
aagccctgcaacgcgccttctccatcgacggtccggtgttggtggatgtggtggtcgccaaagaagaattagcca

SEQ ID NO: 766234 - DNA, 75 bp, synthetic construct
  source 1..75: mol_type = other DNA
taaagaacatgtcgaatacgataatccgtatgatgttggaatgaccgggttaatcggcttctcgtcaggtttcca

SEQ ID NO: 766235 - DNA, 75 bp, synthetic construct
  source 1..75: mol_type = other DNA
tcaacatcgaaactggcgaggtcgtcgaaggtacgaaaaaaccctcctccgacacgccaactcaccgactgctct

SEQ ID NO: 766236 - DNA, 75 bp, synthetic construct
  source 1..75: mol_type = other DNA
ttctggagactgcaaccggcgcacgattgcagtcccttctgtttggcataacgacagcgggttttaacaaagaag

SEQ ID NO: 766237 - DNA, 75 bp, synthetic construct
  source 1..75: mol_type = other DNA
gcagagtcagcctggatggacatgattaagtgggaaaactgtgagtttatagccccccgtcatgagctgaaaacc

SEQ ID NO: 766238 - DNA, 75 bp, synthetic construct
  source 1..75: mol_type = other DNA
ggcggcaaaactctggcgaacggataacgggcatgttcatgctgattttaaattctggcttccggaagggcgact

SEQ ID NO: 766239 - DNA, 75 bp, synthetic construct
  source 1..75: mol_type = other DNA
catttcgcaccttctgcttctggatttgattttaaatgggagtggggaagaaaaatttataagcttcatatcgag

SEQ ID NO: 766240 - DNA, 75 bp, synthetic construct
  source 1..75: mol_type = other DNA
gacggtccgcaatctgtcagaggccatgaaggaaacggaatcactggtctatgccgggcgtttccatcacagcaa

SEQ ID NO: 766241 - DNA, 75 bp, synthetic construct
  source 1..75: mol_type = other DNA
tgagccggatgctggtcaatggcggtgaaccggagccggatctgtctgaacatctgattagtgttggtatccgct

SEQ ID NO: 766242 - DNA, 75 bp, synthetic construct
  source 1..75: mol_type = other DNA
cagtgcagcgtttgaaccacttaagcccgtgttccagtggattggcgacaaagtgcaggcgctgtggggctggtt

SEQ ID NO: 766243 - DNA, 75 bp, synthetic construct
  source 1..75: mol_type = other DNA
tcaaagcggcggcaggtcctgtcagtgccgcgttcgaaccgcttaagcctgtgttccagtggattggcgacaaag

SEQ ID NO: 766244 - DNA, 75 bp, synthetic construct
  source 1..75: mol_type = other DNA
ggctatatcccgcgtgggcagtttggcatcgtcggtgaaaacgggccggaaattgttacggcccggcaaatgtga

SEQ ID NO: 766245 - DNA, 75 bp, synthetic construct
  source 1..75: mol_type = other DNA
accacggcagggtttaacaaggaagggatttgttacgagcagcgtgattacgccatcaaggtattgcgtggctat

SEQ ID NO: 766246 - DNA, 75 bp, synthetic construct
  source 1..75: mol_type = other DNA
atgccagcaaatgaacctgcaaatgcaatcgttgtaaatcatgtggttattcaccttttagataaagagccgcat

SEQ ID NO: 766247 - DNA, 75 bp, synthetic construct
  source 1..75: mol_type = other DNA
ccggacagcagatgttgaggtggctcgtaaaaatgctaaatcaacgctttgctctggcgtggggctttatatggc

SEQ ID NO: 766248 - DNA, 75 bp, synthetic construct
  source 1..75: mol_type = other DNA
atgaaaaacgaacatgaagatcccggcagttttggcgaaacaacgacaccggcatccggcaaatccttcctgaaa

SEQ ID NO: 766249 - DNA, 75 bp, synthetic construct
  source 1..75: mol_type = other DNA
ctggaagctgaacctgtcctgtatcagtcctgcactcgccccacctggaatagcggtgttccgtggacggaatgg

SEQ ID NO: 766250 - DNA, 75 bp, synthetic construct
  source 1..75: mol_type = other DNA
aaaaaattgatacctatatgccaaaattttctatcagtctacggtgtgagagtcaacggttttatgacacaccca

SEQ ID NO: 766251 - DNA, 75 bp, synthetic construct
  source 1..75: mol_type = other DNA
gcagcacctgagtaacataatgcgccatgcggtccatcaggagttaatcgatacgaaccctgcagcaaaccttgg

SEQ ID NO: 766252 - DNA, 75 bp, synthetic construct
  source 1..75: mol_type = other DNA
ccggatatgcagcaaacgttgctggataaacattatttacgtaagcatggtgcgaaggcatattacgggcagtaa

SEQ ID NO: 766253 - DNA, 75 bp, synthetic construct
  source 1..75: mol_type = other DNA
ccacgccgactatttctacggcaccattccctgcacccgcaaaatgaccgacgcagaaatcaacggcgaatatga

SEQ ID NO: 766254 - DNA, 75 bp, synthetic construct
  source 1..75: mol_type = other DNA
atgaccgctgacgatatggtcgtggttagcatcgaaaccggtgaagtggttgaaggtacgaaaaagccctcctcc

SEQ ID NO: 766255 - DNA, 75 bp, synthetic construct
  source 1..75: mol_type = other DNA
ccagcaacccgaaaatctttgctggcggcgatatcgtccgtggttccgatctggtggtaaccgctattgccgaag

SEQ ID NO: 766256 - DNA, 75 bp, synthetic construct
  source 1..75: mol_type = other DNA
gcatggaaggcaaacgcgtggtggtccttggcggtggcgacactgcgatggactgcgtgcgtacgtccgtgcgcc

SEQ ID NO: 766257 - DNA, 75 bp, synthetic construct
  source 1..75: mol_type = other DNA
ctgcagatgcaggcttcgcggtcacaccgcccgcagccgaaagctgggcagagcccatgcccatgacggagaccg

SEQ ID NO: 766258 - DNA, 75 bp, synthetic construct
  source 1..75: mol_type = other DNA
atgtctttaaacgattctaaaatccgcaagttaaaaccttcttcccgtccggtaaaactttccgactctcatggt

SEQ ID NO: 766259 - DNA, 75 bp, synthetic construct
  source 1..75: mol_type = other DNA
actggatcacgccttagcggttcttgctgtcgaggcgcagcaggaagcggacatgtactggaacgcgcacaaatc

SEQ ID NO: 766260 - DNA, 75 bp, synthetic construct
  source 1..75: mol_type = other DNA
taactgcaactggcattgtccgctgcataacgctattccggattacatccgtctggtacaggagggaaagattat

SEQ ID NO: 766261 - DNA, 75 bp, synthetic construct
  source 1..75: mol_type = other DNA
tatgttcgacccagccacacagttctactatgacatacgcattgaagataaaccgttagcgaacggctgcgcggg

SEQ ID NO: 766262 - DNA, 75 bp, synthetic construct
  source 1..75: mol_type = other DNA
gccgccgtctttgggtttatcgacaaagaacagctggataaatatgttgcaagcggcggcaaacgtagcgactgg

SEQ ID NO: 766263 - DNA, 75 bp, synthetic construct
  source 1..75: mol_type = other DNA
gagcgttacggttatcgcgatgatgccctgaagctggcggatacgttcttccggcacgccaaagggttaaccgcc

SEQ ID NO: 766264 - DNA, 75 bp, synthetic construct
  source 1..75: mol_type = other DNA
cccgcaaggccatcactgaagtgaagaagatggagaaccgtgatgcggtggaggcgaccgtctggggcgcatatt

SEQ ID NO: 766265 - DNA, 75 bp, synthetic construct
  source 1..75: mol_type = other DNA
ggatggtattggtccggatgaagaagcacagctcaagaaaattgctcaggcgctgcagctaccactggagcagta

SEQ ID NO: 766266 - DNA, 75 bp, synthetic construct
  source 1..75: mol_type = other DNA
gagaaaaccattgcagcacttcctgcctttgcgccgttctcgggtgagattgcacaaatgagtgcaaatatccgc

SEQ ID NO: 766267 - DNA, 75 bp, synthetic construct
  source 1..75: mol_type = other DNA
tggaaattccggcacaggttgctgcgtcgtgggaatcaggtcgtgatgacgccgccgtctttgggtttatcgaca

SEQ ID NO: 766268 - DNA, 75 bp, synthetic construct
  source 1..75: mol_type = other DNA
catcggcgaagacgaagaaaaacagctgaagaaaatcgctcaggctcttcagttatcactcgacgcttatatctg

SEQ ID NO: 766269 - DNA, 75 bp, synthetic construct
  source 1..75: mol_type = other DNA
cacgcaaggcgatcgtcgaagtgaagaagatggaaaaccgcgacgcagttgaagcaacggtgtggggctgttact

SEQ ID NO: 766270 - DNA, 75 bp, synthetic construct
  source 1..75: mol_type = other DNA
cgttttaacccattttttgatctcggtgcctggcatggtcatctgttgccagacggcccgaacacgatgggcggt

SEQ ID NO: 766271 - DNA, 75 bp, synthetic construct
  source 1..75: mol_type = other DNA
atgaaaataaaaactattttaacgccagtaacctgcgctctgttgttaagtttttccgcccatgccgataacgcc

SEQ ID NO: 766272 - DNA, 75 bp, synthetic construct
  source 1..75: mol_type = other DNA
aagaacaattggataaatatgtcgctaacggcggcaaacgtagtgactggacggtgaaattcgctgaaaaccgca

SEQ ID NO: 766273 - DNA, 75 bp, synthetic construct
  source 1..75: mol_type = other DNA
ctcgtaaagctgttatcgaggtcaaaaaaatggagaaccgagatgcggttgaagccaccgtgtggggcgcgtaca

SEQ ID NO: 766274 - DNA, 75 bp, synthetic construct
  source 1..75: mol_type = other DNA
gacgcttgggcgcagcatgcgtttcggctgatgcagcaaaagctgcaaggggaaaacagcgacgtcaaaattacc

SEQ ID NO: 766275 - DNA, 75 bp, synthetic construct
  source 1..75: mol_type = other DNA
cctcagagagtatggcagaacagaaaaacaaaaatgcacctttgtttttcaacctgaagtgtcagcgagagtaaa

SEQ ID NO: 766276 - DNA, 75 bp, synthetic construct
  source 1..75: mol_type = other DNA
ttgctgggtaagatcaaactaaaaaaatttggtgaggcccgacaagatttaaccataaaagaactggctgaaaaa

SEQ ID NO: 766277 - DNA, 75 bp, synthetic construct
  source 1..75: mol_type = other DNA
ggtgagataatttgcaaacgctttttcaagcaaagcattttaaaaagccaaaccattattcaacacgcagatgat

SEQ ID NO: 766278 - DNA, 75 bp, synthetic construct
  source 1..75: mol_type = other DNA
gccgttctggcaacagcaagcgtttatcgatcagttacttgctgccggtcgctggttgctggtactgctggtggc

SEQ ID NO: 766279 - DNA, 75 bp, synthetic construct
  source 1..75: mol_type = other DNA
cggcggagcactgccgttctggcaacagcaagtgtttatcgatcagttgctggctgccggtcgctggttgctggt

SEQ ID NO: 766280 - DNA, 75 bp, synthetic construct
  source 1..75: mol_type = other DNA
gtttgtttataaaggtgtaagaatcagggaaaatcttggggttcctgacacggcaaaaaacaggcgcattgcagg

SEQ ID NO: 766281 - DNA, 75 bp, synthetic construct
  source 1..75: mol_type = other DNA
cgacaagatttaaccataaaagaactggctgaaaaatttctggcactgaaagaaactgaagtcgcaaaaacgtca

SEQ ID NO: 766282 - DNA, 75 bp, synthetic construct
  source 1..75: mol_type = other DNA
attggtccggatgaagaagtgcagctcaagaaaattgctcaggcgctgcagttaccgctggagcagtacctgtga

SEQ ID NO: 766283 - DNA, 75 bp, synthetic construct
  source 1..75: mol_type = other DNA
aaaaaatcttgcatcgtcgattaataaagaaaaattgctggcggtacgtaaagagttacttactggataccagat

SEQ ID NO: 766284 - DNA, 75 bp, synthetic construct
  source 1..75: mol_type = other DNA
gttcctgacacagcaaaaaacaggcgcattgcaggtgagctacgcgcctctgtttgttacgcaataaaaactggc

SEQ ID NO: 766285 - DNA, 75 bp, synthetic construct
  source 1..75: mol_type = other DNA
gatggaaaatcgcgatgcggtggaagcgaccgtctggggcgcatattccattgcatatgctgacggtacctgcga

SEQ ID NO: 766286 - DNA, 75 bp, synthetic construct
  source 1..75: mol_type = other DNA
tgcgtgacgataatggcaaccgcactgcacgtttttatgaaatgcaggatgccatcaaggctgccagcgaacagt

SEQ ID NO: 766287 - DNA, 75 bp, synthetic construct
  source 1..75: mol_type = other DNA
agaaggtgaacgcactgccgcaggacaagcgtctgtctgccatgaccatgttgtttggtaaagagtttggcgatg

SEQ ID NO: 766288 - DNA, 75 bp, synthetic construct
  source 1..75: mol_type = other DNA
atgccatcgggtggttttccgtcatggggatatggctttgcggggatgtatgacagcggcggctatatcccgcgc

SEQ ID NO: 766289 - DNA, 75 bp, synthetic construct
  source 1..75: mol_type = other DNA
agcaacctgcgacggtgaatgcagacggtaaagtgatgatcccatcgggtggttttccatcatggggatatggct

SEQ ID NO: 766290 - DNA, 75 bp, synthetic construct
  source 1..75: mol_type = other DNA
agcaacctgcgacggtgaatgcagacggaaaagtgatgataccatcgggtggttttccttcatggggatatggct

SEQ ID NO: 766291 - DNA, 75 bp, synthetic construct
  source 1..75: mol_type = other DNA
aatcgcccagctctacaaaatacctacccgcaatattgaacagctcggcgatgcgctgaactatctggatgataa

SEQ ID NO: 766292 - DNA, 75 bp, synthetic construct
  source 1..75: mol_type = other DNA
gttgctgtgatgtttatgaatcctctggcggcactgcgcggtggactggccgccgcaggcacggtgctgcgagta

SEQ ID NO: 766293 - DNA, 75 bp, synthetic construct
  source 1..75: mol_type = other DNA
aatccggcgtttcctggttgctggagaagctcggcattgtcagtaaagaggccgcaaaggcaaaactgccggaaa

SEQ ID NO: 766294 - DNA, 75 bp, synthetic construct
  source 1..75: mol_type = other DNA
tcgacctgacgccactgacaaccgaggacggctcgatctggctgcgcttggtggcccgatgaagaacgacaggac

SEQ ID NO: 766295 - DNA, 75 bp, synthetic construct
  source 1..75: mol_type = other DNA
gggcttgcttcatcgggcaacgcagcgggtttacttactgctccgttgtcatctttgcgtcgcacggcatcactg

SEQ ID NO: 766296 - DNA, 75 bp, synthetic construct
  source 1..75: mol_type = other DNA
gaggcaccgacgcagatcatcatccagacgcagccaggacaaagtacgcaggatattgcgcgggaggtggcccgc

SEQ ID NO: 766297 - DNA, 75 bp, synthetic construct
  source 1..75: mol_type = other DNA
gccagcagagcttccaccgttgcatcttttggcgcttcccgcaaaagacggtgaagcgatggtgagtcgtgcagc

SEQ ID NO: 766298 - DNA, 75 bp, synthetic construct
  source 1..75: mol_type = other DNA
agcaacctgcgacggtgaatgcagacggcaaagtgatgattccatcgggtggttttccatcatggggatatggct

SEQ ID NO: 766299 - DNA, 75 bp, synthetic construct
  source 1..75: mol_type = other DNA
gaagttcagccggaccagatgatcaacattagcggaagtctggataagaaaagcgctccggccgtcgttcgggtc

SEQ ID NO: 766300 - DNA, 75 bp, synthetic construct
  source 1..75: mol_type = other DNA
ctgggacatttcgcattgttgtcggagtacttgatcagggcatcaccgatgaaatgtatcaggaacttgagcgcc

SEQ ID NO: 766301 - DNA, 75 bp, synthetic construct
  source 1..75: mol_type = other DNA
gaccatcagtgcactccgccgcatcgttgaaccactgggctacctcatccgtgtatcagaatggtgggagtttga

SEQ ID NO: 766302 - DNA, 75 bp, synthetic construct
  source 1..75: mol_type = other DNA
gctggctgatgtcgccggtactgatgatgcagttaatgtgctgtgcctgtgtctggatatcgctgaccaggatgg

SEQ ID NO: 766303 - DNA, 75 bp, synthetic construct
  source 1..75: mol_type = other DNA
gtcaagctaacctttagcgatatttgtgagactgcgtctatgagccgttcgttagttaacgaagggcttaaaatt

SEQ ID NO: 766304 - DNA, 75 bp, synthetic construct
  source 1..75: mol_type = other DNA
agagcggtgaaattaatgttgttattcctgcggccgtttttgatggacgagaagttcagccgggtgatgctgcca

SEQ ID NO: 766305 - DNA, 75 bp, synthetic construct
  source 1..75: mol_type = other DNA
ctgacgggcactctgatgaaagtagccgctgtggtggctgccgttaccgtgggcctcggcaccttagcggtggcg

SEQ ID NO: 766306 - DNA, 75 bp, synthetic construct
  source 1..75: mol_type = other DNA
tcaaagcggcggcaggtcccgtcagtgcagcattcgaaccgcttaagcccgtgttccagtggattggcgacaaag

SEQ ID NO: 766307 - DNA, 75 bp, synthetic construct
  source 1..75: mol_type = other DNA
ggtaaagtgatgatgccatcgggtggttttccatcatggggatatggctttgcggggatgtatgacagcggcggg

SEQ ID NO: 766308 - DNA, 75 bp, synthetic construct
  source 1..75: mol_type = other DNA
gcgcacagcacagtacatcactgcttccaccgtccgcagggccattcatgcgcgccacagaggcgacaggagtac

SEQ ID NO: 766309 - DNA, 75 bp, synthetic construct
  source 1..75: mol_type = other DNA
atcggtatcggcatcctcggggggaaattcctggaaggcgcagcgcgtcaacctgatctgattcctctgctgcgt

SEQ ID NO: 766310 - DNA, 75 bp, synthetic construct
  source 1..75: mol_type = other DNA
ccgtgcggcgggtggtggagccgttcggctttctgatccgcattattgagtggtggcagaccggagaggcaccgg

SEQ ID NO: 766311 - DNA, 75 bp, synthetic construct
  source 1..75: mol_type = other DNA
ttgtcacgttcaggctctgctgacaacttcgcatggagctttggcgcgggtgtccgctatgacgtaaccccggat

SEQ ID NO: 766312 - DNA, 75 bp, synthetic construct
  source 1..75: mol_type = other DNA
tacaaccatgggctatcttacaccataccaggaaaacatggtatctcttaacccatcatcttttcctgataatgc

SEQ ID NO: 766313 - DNA, 75 bp, synthetic construct
  source 1..75: mol_type = other DNA
gcttttatgatgaattatcaggctaatgctttaagaagcgaatttcgtcaacagcaggggcatgatatcagttct

SEQ ID NO: 766314 - DNA, 75 bp, synthetic construct
  source 1..75: mol_type = other DNA
gctcgcgccattaccgcacggcttcaagccaaacaaggcgagttcgacgacgcgcgccagagtcttcaggaagag

SEQ ID NO: 766315 - DNA, 75 bp, synthetic construct
  source 1..75: mol_type = other DNA
gagctgggccagaacgaattcttccgccgccgcacgctgggcttccagaaggtacgcacgtacaacaagcagcaa

SEQ ID NO: 766316 - DNA, 75 bp, synthetic construct
  source 1..75: mol_type = other DNA
gattccgagtttgagtcatacggagaaaaaattgaacattatcgactgaacaacaatctaggcattgcaaaagct

SEQ ID NO: 766317 - DNA, 75 bp, synthetic construct
  source 1..75: mol_type = other DNA
ctggttaacgccgtacagcaagaggttcacgctatcctgcaactgggtgaagcgcagattgagaagtctgcccgt

SEQ ID NO: 766318 - DNA, 75 bp, synthetic construct
  source 1..75: mol_type = other DNA
atttcattgttgaaaaacaaagcgttgccggtaggtacgctgttggtggagctgatttacgtggttgaagcacaa

SEQ ID NO: 766319 - DNA, 75 bp, synthetic construct
  source 1..75: mol_type = other DNA
tcagtcggtgctggtgcgctggtatcacgaaggtctggatgcattcgagcacacctgcccgaccggacgcactat

SEQ ID NO: 766320 - DNA, 75 bp, synthetic construct
  source 1..75: mol_type = other DNA
ttccggttcgtacggaactggagttttacgcgcgtggaaaagctgattcgaagtataaccttgataaagacgact

SEQ ID NO: 766321 - DNA, 75 bp, synthetic construct
  source 1..75: mol_type = other DNA
atttggtgccggccttgcggtgggctatgatttttatcaacattacaatattccagtacgcacggaagtggaatt

SEQ ID NO: 766322 - DNA, 75 bp, synthetic construct
  source 1..75: mol_type = other DNA
ttccggaacgacagcgcattcacaccatgggtatccgcagggattggctacgccagaattcatcagaaaacaact

SEQ ID NO: 766323 - DNA, 75 bp, synthetic construct
  source 1..75: mol_type = other DNA
aaaaaatgaattggaaccgtggacacctgaaggaaacgcaccaaattattgctggtgggaggttgatccggttga

SEQ ID NO: 766324 - DNA, 75 bp, synthetic construct
  source 1..75: mol_type = other DNA
tacttcgtggtgttcagtttggttatccgtatgttcaacctgaaaacgccgggccgtgaagataaagaagacgag

SEQ ID NO: 766325 - DNA, 75 bp, synthetic construct
  source 1..75: mol_type = other DNA
ggtgacggtgtggcggtgaaaccgacagataaaatcgtcgtatcaccagccgcagggacaatcgtgaaaatcttc

SEQ ID NO: 766326 - DNA, 75 bp, synthetic construct
  source 1..75: mol_type = other DNA
cgaagcgttcgccagcaaagcggtgggcgacggtgtggcggtgaaaccgacggataaaatcgttgtatcaccagc

SEQ ID NO: 766327 - DNA, 75 bp, synthetic construct
  source 1..75: mol_type = other DNA
cctcctgcacgcactgctgaccggcatcagcctgtttgtcgcaacgttgctgggtatccacgcgggcttctcctt

SEQ ID NO: 766328 - DNA, 75 bp, synthetic construct
  source 1..75: mol_type = other DNA
gtcaacgatgcgatgtgtaaacgtctgggtgcttctggggtggtgaaactgaacaaacagaccgtccaggtgatt

SEQ ID NO: 766329 - DNA, 75 bp, synthetic construct
  source 1..75: mol_type = other DNA
gcgatgcgatgaagaaagttgttgcccgtggcccggtagcggctgcgtctgctgaagctgtaactgcaaccgtcg

SEQ ID NO: 766330 - DNA, 75 bp, synthetic construct
  source 1..75: mol_type = other DNA
atgggcttcccttctcctgcggcggattatgttgaaagccgaatttctcttgatcagcagataattagacatcct

SEQ ID NO: 766331 - DNA, 75 bp, synthetic construct
  source 1..75: mol_type = other DNA
tacacgggcagtaatgctgtttttggtgtgatcacccacattatcaatgacgccaggggcggtgaatttgatgat

SEQ ID NO: 766332 - DNA, 75 bp, synthetic construct
  source 1..75: mol_type = other DNA
cctacactccagatgaagataagtcagagcttattgaagctggagttgtatttttacgtgatgagaacggtaatg

SEQ ID NO: 766333 - DNA, 75 bp, synthetic construct
  source 1..75: mol_type = other DNA
cgcgatgaataactggtccttcctgcagtcaggaagcattggtattgatcgtaaagatattgaaaaagtgtttac

SEQ ID NO: 766334 - DNA, 75 bp, synthetic construct
  source 1..75: mol_type = other DNA
ttgcagaccgcatccactgactgcgacacaattgtcgaagcagcggcgctattaccggcatttgatcaggcggtg

SEQ ID NO: 766335 - DNA, 75 bp, synthetic construct
  source 1..75: mol_type = other DNA
tcgctgctgagcagtcggaagtgtcgccagaacagcggcgcgccatctgcgaggcttttgagtctgccaataata

SEQ ID NO: 766336 - DNA, 75 bp, synthetic construct
  source 1..75: mol_type = other DNA
gagcgcccgtcaggagctggtttcgatgctgatggatcgccacggcaccagccgcgtgctgttccgtaacacgcg

SEQ ID NO: 766337 - DNA, 75 bp, synthetic construct
  source 1..75: mol_type = other DNA
tccggttccggacaatattcacccgatgaccaaagacgaagcaggagtctggtcgtggcgcacacctatcctgaa

SEQ ID NO: 766338 - DNA, 75 bp, synthetic construct
  source 1..75: mol_type = other DNA
tatggctggattatctggacgcactggaactggttgatacctccagtgcgccagatattgaatggcctacgcctc

SEQ ID NO: 766339 - DNA, 75 bp, synthetic construct
  source 1..75: mol_type = other DNA
cacactgattaccgctggcgtcatgatgtgggggctgggcgagccggtgggggcgttgaccaacagcctgaccta

SEQ ID NO: 766340 - DNA, 75 bp, synthetic construct
  source 1..75: mol_type = other DNA
gacgagcccggtgaacatggcattgggttgtacttgattgccagctacgtaacgcgctgcggtggtgttatcact

SEQ ID NO: 766341 - DNA, 75 bp, synthetic construct
  source 1..75: mol_type = other DNA
cctggtgagtaaaatcgatagctggcgggctgagtttttattaccgatggcaggcgtgtttgtcgtgctgttagg

SEQ ID NO: 766342 - DNA, 75 bp, synthetic construct
  source 1..75: mol_type = other DNA
tttcgctactttgcccctggggcaaaaaatgtctccgtagtggtgggtgttccggttccggacaatattcacccg

SEQ ID NO: 766343 - DNA, 75 bp, synthetic construct
  source 1..75: mol_type = other DNA
aaaataaagaggcgttttttctgtatgttaacggtagaggggagttgtcggctcaatgcgtgataaaggtggctg

SEQ ID NO: 766344 - DNA, 75 bp, synthetic construct
  source 1..75: mol_type = other DNA
gaattggcaaaagttctgaaatgcgatcctgactggctattaaacggcgaaaattcagagcagcaaaaggtgtaa

SEQ ID NO: 766345 - DNA, 75 bp, synthetic construct
  source 1..75: mol_type = other DNA
ggaaaaattaaacaggaagcaagaatgaagaactggcagaaacggtttggtattaagccaaagtttgaagatgaa

SEQ ID NO: 766346 - DNA, 75 bp, synthetic construct
  source 1..75: mol_type = other DNA
catgaacagcaagcaatggccgggaaaagctgcaatgggacggctgaaagacgccgaaaaggtacagtataacgc

SEQ ID NO: 766347 - DNA, 75 bp, synthetic construct
  source 1..75: mol_type = other DNA
tccacccacgcatgaagagcttattgaaattactgaatcagaaagacagctactaattaaccaggctaacgaata

SEQ ID NO: 766348 - DNA, 75 bp, synthetic construct
  source 1..75: mol_type = other DNA
caggcgatgtcagaggtggttccgttcatctggatgcacagaccgtgatgcgccttaagcagtacagaatcgacc

SEQ ID NO: 766349 - DNA, 75 bp, synthetic construct
  source 1..75: mol_type = other DNA
tattctgatgctgttgtcgtggttcttagccgcacatatccgccgccagatgatggggatggaaccgaagcaaat

SEQ ID NO: 766350 - DNA, 75 bp, synthetic construct
  source 1..75: mol_type = other DNA
gtggttgatgggctacctgaccagccaccgctcgcagaaagtgctggtgatctgcgccaaagctgccaccgcgct

SEQ ID NO: 766351 - DNA, 75 bp, synthetic construct
  source 1..75: mol_type = other DNA
ttccttgatagcaaactggtgttcagcaaaccgcaggaccgtctgtttgccgggcagattgaccgtatggaccgc

SEQ ID NO: 766352 - DNA, 75 bp, synthetic construct
  source 1..75: mol_type = other DNA
tcccatctactggtgaaaaccgtctgtacgcacgcagtgattcccccgtgacccgcgtgatgttcaaccctggtg

SEQ ID NO: 766353 - DNA, 75 bp, synthetic construct
  source 1..75: mol_type = other DNA
gtccgatcatatgctggtgccggacttccctggcctgtcggaagatggcatcaccatcaccttcgaccgtgaagt

SEQ ID NO: 766354 - DNA, 75 bp, synthetic construct
  source 1..75: mol_type = other DNA
gctctacccggagcgtatttatcaggaatttgaaggcgataacgccacctggtggaacttcgatccgcgcgttga

SEQ ID NO: 766355 - DNA, 75 bp, synthetic construct
  source 1..75: mol_type = other DNA
catcgctctcagaaagtgctggtgatctgcgccaaagctgccactgcgctgcaactggagcaggtactgcgcgaa

SEQ ID NO: 766356 - DNA, 75 bp, synthetic construct
  source 1..75: mol_type = other DNA
tatcacccatcgcgaagtgatggctaatctacgtgctataagccacgacggcattaaattacgccctggcgaccg

SEQ ID NO: 766357 - DNA, 75 bp, synthetic construct
  source 1..75: mol_type = other DNA
ttatcctatgcagttcaccaaaccgggcgcgctggagaaaggggagagctacttcatcaccgggaaagggtcaat

SEQ ID NO: 766358 - DNA, 75 bp, synthetic construct
  source 1..75: mol_type = other DNA
gccgatttcttcaccgagcatattgatgaaaaacgccaggatgtggtgacaaattttaacggcctgagcgtcatt

SEQ ID NO: 766359 - DNA, 75 bp, synthetic construct
  source 1..75: mol_type = other DNA
caaagcctggaaagcccgaatcagggaaggtgtgacacccgaaaccatgctcaacggtgtgaaacgctatgccgc

SEQ ID NO: 766360 - DNA, 75 bp, synthetic construct
  source 1..75: mol_type = other DNA
gccgcttgggtacgtgctacaggaaataccggcacacagttcgtgaagcaggctgcgacgttctttggacccgat

SEQ ID NO: 766361 - DNA, 75 bp, synthetic construct
  source 1..75: mol_type = other DNA
aaggggcaaggtaatgtttcaaactattttaaacagttcctaggctgtaatgatgtcttaatcgccaaacgagag

SEQ ID NO: 766362 - DNA, 75 bp, synthetic construct
  source 1..75: mol_type = other DNA
ttcagctatttctctgttccggcggcattacaacgtcgcgtgctggtgtatggcgtgcttggggcgattgttctg

SEQ ID NO: 766363 - DNA, 75 bp, synthetic construct
  source 1..75: mol_type = other DNA
ccgcattcacagtacgcgccaaaagcaagcccgacatttaccggaacccccaaagcgccaacgccagcggcgggg

SEQ ID NO: 766364 - DNA, 75 bp, synthetic construct
  source 1..75: mol_type = other DNA
attggccttgatgcttcaagaattgttccaactgcaaacgaaaaccgtcctcgtaacattgcctttaattatatc

SEQ ID NO: 766365 - DNA, 75 bp, synthetic construct
  source 1..75: mol_type = other DNA
aatggtgcccggtatgggtggcgcgatggatctggtgaccggggcccgcaaagtgatcattgccatggaacattg

SEQ ID NO: 766366 - DNA, 75 bp, synthetic construct
  source 1..75: mol_type = other DNA
ttcaggatttactcatcgcggcgctgcaagggctttctgcctgggcggtaaaagcgcgtgaatacggcatcatca

SEQ ID NO: 766367 - DNA, 75 bp, synthetic construct
  source 1..75: mol_type = other DNA
ctaatggcgatgcagaaaagcgtatgaccggcgctgactggctgacagcgattgagatgtacaaaccaaatgtgc

SEQ ID NO: 766368 - DNA, 75 bp, synthetic construct
  source 1..75: mol_type = other DNA
ataaaaactatttttaacgagattgcaacagtatattataagagcgcatttggaaaaaaccctgatttaaaaaat

SEQ ID NO: 766369 - DNA, 75 bp, synthetic construct
  source 1..75: mol_type = other DNA
gaatcagtaggctcgtttaagggggcagtggtgcctttgaacccctcaacgaacaatagttatttctccttaatc

SEQ ID NO: 766370 - DNA, 75 bp, synthetic construct
  source 1..75: mol_type = other DNA
tacctgttggggtgcctgttccgtggccttcagccactccgccaacaggctggctgaaatgcaacggtgcggctt

SEQ ID NO: 766371 - DNA, 75 bp, synthetic construct
  source 1..75: mol_type = other DNA
cttggtttgggagaaggctctgcattacctgttggggtgcctgttccgtggccttcagccactccgccaacaggc

SEQ ID NO: 766372 - DNA, 75 bp, synthetic construct
  source 1..75: mol_type = other DNA
aatggtgcccggtatgggtggcgcgatggatctggtgaccgggtcgcgcaaagtgatcatcgccatggaacattg

SEQ ID NO: 766373 - DNA, 75 bp, synthetic construct
  source 1..75: mol_type = other DNA
atggatgcgaaacaacgtattgcgcgccgtgtggcgcaagagcttcgtgatggtgacatcgttaacttagggatc

SEQ ID NO: 766374 - DNA, 75 bp, synthetic construct
  source 1..75: mol_type = other DNA
tttgctcagcagcgtataacaggggatttcatggggggagctatgggtagctctggctcaataaaagcgggtgca

SEQ ID NO: 766375 - DNA, 75 bp, synthetic construct
  source 1..75: mol_type = other DNA
cctgcaactggtgagcgacgatctcggcgagctgcaacgtcaggcagcagaatttacccctaacaaagataaagc

SEQ ID NO: 766376 - DNA, 75 bp, synthetic construct
  source 1..75: mol_type = other DNA
atgaaagtaactaatagactccaactgctggcactggggctgtgtatagccggtactgccatcgcggctcctgat

SEQ ID NO: 766377 - DNA, 75 bp, synthetic construct
  source 1..75: mol_type = other DNA
aatcacatttttgactattcataaggataaaaacacaggctggcgagtcaactatggcgatgacacaatcagcgt

SEQ ID NO: 766378 - DNA, 75 bp, synthetic construct
  source 1..75: mol_type = other DNA
gttaatttggttgtcaatggtactagcgagaatattaatgttgaagttgagccattcagagaaggctcattcgaa

SEQ ID NO: 766379 - DNA, 75 bp, synthetic construct
  source 1..75: mol_type = other DNA
aaacctcgatagcggcacgctgataatgcggcagtacatctcaaccgatttcagtttcccttcggctccgcccct

SEQ ID NO: 766380 - DNA, 75 bp, synthetic construct
  source 1..75: mol_type = other DNA
tttacgccagcggcggcagcgaggcgctactgaatacgttgcagattaccgtcggtgggcaggattactggctgg

SEQ ID NO: 766381 - DNA, 75 bp, synthetic construct
  source 1..75: mol_type = other DNA
gccgcccatgttgactgcgaaaacccgttgagctgggtcaagttgacccaacaagcaattaaaggaggcaaagcc

SEQ ID NO: 766382 - DNA, 75 bp, synthetic construct
  source 1..75: mol_type = other DNA
ctacggcagcggctggcagaatcagcaagtagagttcgctcgcttccctggacctatcgtgatgacctcgaactg

SEQ ID NO: 766383 - DNA, 75 bp, synthetic construct
  source 1..75: mol_type = other DNA
ctgctggcggtgctgaacgagaaattcggcctgcgttctatcaccactgttgaagaagacatgaagcaactgttg

SEQ ID NO: 766384 - DNA, 75 bp, synthetic construct
  source 1..75: mol_type = other DNA
cctgcaactggtgagtgacgatctcggcgagctgcaacgtcaggcggcggaatttactcccaataaagataaagc

SEQ ID NO: 766385 - DNA, 75 bp, synthetic construct
  source 1..75: mol_type = other DNA
atctggcagcctgagttcacagataaaacactctccaggaaacccggggcggttcagtttatgggtttgggatga

SEQ ID NO: 766386 - DNA, 75 bp, synthetic construct
  source 1..75: mol_type = other DNA
ggcgattggcgaaaacattctcggcctgcgtctgctctgcctgtatggcctgaaaggtgcggcggcctatatgga

SEQ ID NO: 766387 - DNA, 75 bp, synthetic construct
  source 1..75: mol_type = other DNA
cttgagtgttcaatggaaatcggccagatgaatttcaaagtgatgagcattctggatgcaggcgaaaccggtaaa

SEQ ID NO: 766388 - DNA, 75 bp, synthetic construct
  source 1..75: mol_type = other DNA
ggaatattgcagagtccccatgtaaattcgaagcaggtggtgattcagtaagtattaatatgccgactgtaccaa

SEQ ID NO: 766389 - DNA, 75 bp, synthetic construct
  source 1..75: mol_type = other DNA
gttgaaaaagcaatttatgctactacgctatatacataagatgccattaataaaagtattttttaatctgtcatt

SEQ ID NO: 766390 - DNA, 75 bp, synthetic construct
  source 1..75: mol_type = other DNA
tgcatttctagatagtgatgatctatggcacgagtcgaaactagagaacactattaattacatgataaagaaaaa

SEQ ID NO: 766391 - DNA, 75 bp, synthetic construct
  source 1..75: mol_type = other DNA
cgcttaccaatttgagtggaaaggatgtagctggtcttctcgcataccttggtttgggaggaacgctacaaagcc

SEQ ID NO: 766392 - DNA, 75 bp, synthetic construct
  source 1..75: mol_type = other DNA
gggcaaacttgtattgattgccataaagggatagcgcacaagctgcctgatatgcgcgaagtcaaaccaggtttt

SEQ ID NO: 766393 - DNA, 75 bp, synthetic construct
  source 1..75: mol_type = other DNA
tataatcttagtgtaaaaaatgtattattaacatttgcgagggttttaaaaatatcatgcttagcaatattcaaa

SEQ ID NO: 766394 - DNA, 75 bp, synthetic construct
  source 1..75: mol_type = other DNA
attcgatgaatcatggcatgcaatagcagaagatgagaatttgcttgttgtgctagctgtccagacaacttcagt

SEQ ID NO: 766395 - DNA, 75 bp, synthetic construct
  source 1..75: mol_type = other DNA
acaatatcaccctgaaaatcgaccctgctgtagtgctggcaacccgcaagtatgtggatgacaaggcactggagc

SEQ ID NO: 766396 - DNA, 75 bp, synthetic construct
  source 1..75: mol_type = other DNA
taacgttggttcgtactcccccgagagcatgacgctattcaaaagcggctcacccagttcaaatgcctgtcactg

SEQ ID NO: 766397 - DNA, 75 bp, synthetic construct
  source 1..75: mol_type = other DNA
ctggctttattgccacttttgccgggttgattttccactacatcggtattggcccgaataaggaagtggacgatg

SEQ ID NO: 766398 - DNA, 75 bp, synthetic construct
  source 1..75: mol_type = other DNA
ctgaaatgcaacggtgcggttttttctgctgaagaatatccggaactggcaaaggcttatccgacaaataaattg

SEQ ID NO: 766399 - DNA, 75 bp, synthetic construct
  source 1..75: mol_type = other DNA
aaagtatttccttcgctggtattacctgaagcccgcggtgatttcattcgtatctgggatgacgggcgaggtgca

SEQ ID NO: 766400 - DNA, 75 bp, synthetic construct
  source 1..75: mol_type = other DNA
tgtagctggtcttctcacataccttggtttgggagaaggtgctccagctattggcgttccgttcttctggccgtc

SEQ ID NO: 766401 - DNA, 75 bp, synthetic construct
  source 1..75: mol_type = other DNA
gggcaaacctgtattgattgccataaagggatagcgcacaagctgcctgatatgcgtgaagtcgagccaggtttt

SEQ ID NO: 766402 - DNA, 75 bp, synthetic construct
  source 1..75: mol_type = other DNA
ttttcgccctccagagtaatgcgaacggcatatatacgagtggtattagtcagaatgatggtagtggcaccgctg

SEQ ID NO: 766403 - DNA, 75 bp, synthetic construct
  source 1..75: mol_type = other DNA
ctatctgcatgatggcaggaggtctggcggcgcagtcggtctctgccgaaccattggtcattcaggaacaaggaa

SEQ ID NO: 766404 - DNA, 75 bp, synthetic construct
  source 1..75: mol_type = other DNA
agcatggtggggatgtgacggtgacgcatcttcctgaagtagggataaaaggtaatacccacttcccgttcactg

SEQ ID NO: 766405 - DNA, 75 bp, synthetic construct
  source 1..75: mol_type = other DNA
ctggaaagttttacaggcaccacgattttaaaacaaatcacgcccctgtctccggccattaacttcgataattac

SEQ ID NO: 766406 - DNA, 75 bp, synthetic construct
  source 1..75: mol_type = other DNA
accagaccgacagaaactgtttctgataatacgtctaactatatgacgactgattatgattcccgtgaaggttta

SEQ ID NO: 766407 - DNA, 75 bp, synthetic construct
  source 1..75: mol_type = other DNA
tacctgttggggtgcctgttccgtggccttcagccactccgccaacaggctggttgaaatgcaatggtgcggctt

SEQ ID NO: 766408 - DNA, 75 bp, synthetic construct
  source 1..75: mol_type = other DNA
cgcaccatttcagaaattcgtgctgggggtgtgctggtgctggataacggtgcacagcgtactctggatgaagtt

SEQ ID NO: 766409 - DNA, 75 bp, synthetic construct
  source 1..75: mol_type = other DNA
ctgggataaaatgatgtatacggtgcgcaccatttcagaaattcgtgctgggggtgtgctggtgctggataacgg

SEQ ID NO: 766410 - DNA, 75 bp, synthetic construct
  source 1..75: mol_type = other DNA
accttatccgctaggcaagcagtctgttggctggctcgaatccgaacttgatgaatggattctgaaacgccgggc

SEQ ID NO: 766411 - DNA, 75 bp, synthetic construct
  source 1..75: mol_type = other DNA
ggcgtgtggccagagtattttaagggcgttcagttctctcacgacaaagaagcactgaatcagtatttccgtcag

SEQ ID NO: 766412 - DNA, 75 bp, synthetic construct
  source 1..75: mol_type = other DNA
aaaggcttacccgacaaataaattgcctgatttacgcggtgaatttatcgtggatgggatgatgggcgtggggtg

SEQ ID NO: 766413 - DNA, 75 bp, synthetic construct
  source 1..75: mol_type = other DNA
ctggatacactgaacgaactggcggcggcactggggaatgagcaccgccatcgtgggtatggtctgcacgggcga

SEQ ID NO: 766414 - DNA, 75 bp, synthetic construct
  source 1..75: mol_type = other DNA
ctgcctgatgctggtgtctggtttaaaaaagcagctgctcagggtaattttgttgcacatttctacctgggaaga

SEQ ID NO: 766415 - DNA, 75 bp, synthetic construct
  source 1..75: mol_type = other DNA
cgccttgcgggtgtgacaacgcttttagacgccgatatgacaccgcaggatatttctccacttgtcgcgcttgcc

SEQ ID NO: 766416 - DNA, 75 bp, synthetic construct
  source 1..75: mol_type = other DNA
tatggtgtgacacctaagaattatttttcttatcacaagaaaattatttttaacgactttagaaaattatcagaa

SEQ ID NO: 766417 - DNA, 75 bp, synthetic construct
  source 1..75: mol_type = other DNA
aaagcgctctacccgcacaaaatcgtactggcagacgccaaaattgccgatgcaggcaaaatcctttcgcgtatg

SEQ ID NO: 766418 - DNA, 75 bp, synthetic construct
  source 1..75: mol_type = other DNA
tcatcagggtaatctgtgtgaagcgcccattcaatacgatgcgcaaaacgacgtgctgcggcgtaaccactcctg

SEQ ID NO: 766419 - DNA, 75 bp, synthetic construct
  source 1..75: mol_type = other DNA
ttaaatggttaaccaaatctgcagagcaaaaaaacactgatgcgatatactttttagctacagcctacaaaggca

SEQ ID NO: 766420 - DNA, 75 bp, synthetic construct
  source 1..75: mol_type = other DNA
aaacgttacaaaccagccccgataccattcttaactgtatgaccaccatcatcgttaacccggaattgttcggcg

SEQ ID NO: 766421 - DNA, 75 bp, synthetic construct
  source 1..75: mol_type = other DNA
gaacacgcgtcgcgaacggcaggagatggggatcccgttggatgccggaagctggcaggcaatttgcgacgcagc

SEQ ID NO: 766422 - DNA, 75 bp, synthetic construct
  source 1..75: mol_type = other DNA
caggggattccactggatgcgggaagctggcaggccatttgtgatgcagcgcggcagattggtatgccggaagag

SEQ ID NO: 766423 - DNA, 75 bp, synthetic construct
  source 1..75: mol_type = other DNA
tagtcttagtcaaccagacactattccttgcgatttagtgaaaagaatttttatcatagatgatgatattacagc

SEQ ID NO: 766424 - DNA, 75 bp, synthetic construct
  source 1..75: mol_type = other DNA
gaggaacaagaagcgaaattagtcgccgatcatttaatcgcggcaaacctggcagggcatgattcacatggtatt

SEQ ID NO: 766425 - DNA, 75 bp, synthetic construct
  source 1..75: mol_type = other DNA
tgattgacgttaacggcgtgccgacgaccaatccggcggtaatgcaggagtcgccgttgggggcgctgttgacct

SEQ ID NO: 766426 - DNA, 75 bp, synthetic construct
  source 1..75: mol_type = other DNA
cgattcacgtctttatcgcgggccgtagtatccgtgatgccgcttctccggttgaagccgcgcgtcagttcaaac

SEQ ID NO: 766427 - DNA, 75 bp, synthetic construct
  source 1..75: mol_type = other DNA
aaacaacgaacggagaaagcgaccagaacggccggccgttcacccgccggtagtcaggcgcatcgcctggttccg

SEQ ID NO: 766428 - DNA, 75 bp, synthetic construct
  source 1..75: mol_type = other DNA
gagcctgatggggcacaagtcgattagttcgacagatgtgtacacgaaggtgtttgcgctggatgtggctgcacg

SEQ ID NO: 766429 - DNA, 75 bp, synthetic construct
  source 1..75: mol_type = other DNA
gaatgtagcagcttttgtttttaataaaaatctggttaatcctaaatatgtttggatatgggcaaagagtaaata

SEQ ID NO: 766430 - DNA, 75 bp, synthetic construct
  source 1..75: mol_type = other DNA
aggccatgcaggattctggccttgaaataacggaagagaacgcaacccgtgttggtgctgctattggctccggga

SEQ ID NO: 766431 - DNA, 75 bp, synthetic construct
  source 1..75: mol_type = other DNA
gcaaaatgctgctggcaaccctctggaacaccggggcgcgtatcaacgaggtgctggcgctgacccggggggatt

SEQ ID NO: 766432 - DNA, 75 bp, synthetic construct
  source 1..75: mol_type = other DNA
gtctatacgaaggtgttcgcacttgatgttgctgcgcggcatcgagttcagtttcagatgcccgaagcggatgcg

SEQ ID NO: 766433 - DNA, 75 bp, synthetic construct
  source 1..75: mol_type = other DNA
ttttagcatttgtctttgcacccacccatgggcttttggcaaatcgtcagcgtgcgcataaggcgctggaggatc

SEQ ID NO: 766434 - DNA, 75 bp, synthetic construct
  source 1..75: mol_type = other DNA
atcatccgttaaaagtgcaggccgggctggatgagatatttacccgcgcccacggacgcccggcgcgcacgtttc

SEQ ID NO: 766435 - DNA, 75 bp, synthetic construct
  source 1..75: mol_type = other DNA
tgcatgtggaaaactggcccgatacctcgcactacgagtttctcgccgacacgatgtggagcgattttgcctacg

SEQ ID NO: 766436 - DNA, 75 bp, synthetic construct
  source 1..75: mol_type = other DNA
ggtatggagaaaatgtcagccagttttaaagtttcgggttctgattctggtgttatgagctatttcgggttaata

SEQ ID NO: 766437 - DNA, 75 bp, synthetic construct
  source 1..75: mol_type = other DNA
cgtttgcgctattcgtgcagggcgaacgggttttaaattgtactgaatatactcctgtcgatatgaaaataatcg

SEQ ID NO: 766438 - DNA, 75 bp, synthetic construct
  source 1..75: mol_type = other DNA
gggggccagtatcgccacacagacggtggatgcacaggcctttatcgatattgtcggggagatgattaaccataa

SEQ ID NO: 766439 - DNA, 75 bp, synthetic construct
  source 1..75: mol_type = other DNA
ccgctgttgcttgattacgccaccagcaccattgcgtttggtaaagcgcgtgtggcctggcataaaggcgtgccc

SEQ ID NO: 766440 - DNA, 75 bp, synthetic construct
  source 1..75: mol_type = other DNA
tgaaatgcagtgcatagaaaccccagccaccgatgctttcctggctgaaattgaacgcaaagcaatccgcaagtt

SEQ ID NO: 766441 - DNA, 75 bp, synthetic construct
  source 1..75: mol_type = other DNA
gatgcgggcgtgatgccgtattacctgcatgtgctcgataaagtgcagggcgcggcgcattttatggtgagtgat

SEQ ID NO: 766442 - DNA, 75 bp, synthetic construct
  source 1..75: mol_type = other DNA
gtacttacctcgcaagatgagtatatcactgcacccggtttttccaccgacccgctggaagaacagcacagcgtg

SEQ ID NO: 766443 - DNA, 75 bp, synthetic construct
  source 1..75: mol_type = other DNA
gtgagctaggtaattgcattattgggttaacttacaaacctgaagatacatctgattatggtacattggtattac

SEQ ID NO: 766444 - DNA, 75 bp, synthetic construct
  source 1..75: mol_type = other DNA
gcagcgactactgactggtaaaacccgtttgccacagtttgcgttgcgcaaagatggctctgctaagggatataa

SEQ ID NO: 766445 - DNA, 75 bp, synthetic construct
  source 1..75: mol_type = other DNA
attcggtgcatttatgtcagtattccgaactgatatatatggatttacatttcaccaattccagtctgatattat

SEQ ID NO: 766446 - DNA, 75 bp, synthetic construct
  source 1..75: mol_type = other DNA
gctatatgaacgtactcgatactgcatggcctcgccaccgttacacccttccgtactacccaggcctccgttaca

SEQ ID NO: 766447 - DNA, 75 bp, synthetic construct
  source 1..75: mol_type = other DNA
accgcctgcgcgattgacattgcgctgccggcgcgcaacgcggacggtacgcaagatttgaaattcgccctgtgc

SEQ ID NO: 766448 - DNA, 75 bp, synthetic construct
  source 1..75: mol_type = other DNA
gctacatgaatatcctcgataccgcctggccgcgataccgctacacgctccctgtattccccggactgcgttata

SEQ ID NO: 766449 - DNA, 75 bp, synthetic construct
  source 1..75: mol_type = other DNA
ccccatccagagaagattggttagcgcaacttgccgatgttgtgaccgatcctaatgaacttctgcgtcttttga

SEQ ID NO: 766450 - DNA, 75 bp, synthetic construct
  source 1..75: mol_type = other DNA
ccaaactgtacgacctgatggttctggataatgaagaacttgatgaattggccgacggcggcacagttgccggcc

SEQ ID NO: 766451 - DNA, 75 bp, synthetic construct
  source 1..75: mol_type = other DNA
taaagcctgccaggtggcgtgttcggagtggaacgacatccgtgatgaagtggggcactgcgtcggggtttacga

SEQ ID NO: 766452 - DNA, 75 bp, synthetic construct
  source 1..75: mol_type = other DNA
aacgatcaggtacggcggggaaagatgtgcctgcggggtataagctgactgaggtgggggtgattcctgaggatt

SEQ ID NO: 766453 - DNA, 75 bp, synthetic construct
  source 1..75: mol_type = other DNA
gagcgccagctcaggcggctaaacagtaagcggctccggcagcaggcccgtgcatcagcggctggcgtgaaagaa

SEQ ID NO: 766454 - DNA, 75 bp, synthetic construct
  source 1..75: mol_type = other DNA
atgactggagataacaccctcatccattctcacggcattaaccgtcgtggtttcatgaagctttgtgcagcatta

SEQ ID NO: 766455 - DNA, 75 bp, synthetic construct
  source 1..75: mol_type = other DNA
ggcttccataaaggcatccatcagcttgccaacgtcgaaaaccagactccgcgttcacagaaaccggatgttaac

SEQ ID NO: 766456 - DNA, 75 bp, synthetic construct
  source 1..75: mol_type = other DNA
agcctttgccgagtgggtgaaagcctcgccgcatgatgacgataagccgattttgctaccgggcgagtgggaagt

SEQ ID NO: 766457 - DNA, 75 bp, synthetic construct
  source 1..75: mol_type = other DNA
gggcgccagctcaggcggctaaacagtaagcggctccggcagcaggcccatgcatcagcggctggcgtgaaagaa

SEQ ID NO: 766458 - DNA, 75 bp, synthetic construct
  source 1..75: mol_type = other DNA
gtgcgccagctcaggcggctaaacagtaagcggctccggcagcaggcccttgcatcagcggctggcgtgaaagaa

SEQ ID NO: 766459 - DNA, 75 bp, synthetic construct
  source 1..75: mol_type = other DNA
cttttatgcctattaccactttaatagcaagcaggtcaccatcttaagccgggagtgggatttagatattcatga

SEQ ID NO: 766460 - DNA, 75 bp, synthetic construct
  source 1..75: mol_type = other DNA
gaagtgcgggacaccgtcgtgtgccgctagttgctatagaaaaatatttgattccatgtcccccaaatttgcaag

SEQ ID NO: 766461 - DNA, 75 bp, synthetic construct
  source 1..75: mol_type = other DNA
cgccatcgccaccatcctctccgatatggacaaggaaattcagaccctgcaacagcgtctggacaaaacccgtca

SEQ ID NO: 766462 - DNA, 75 bp, synthetic construct
  source 1..75: mol_type = other DNA
ggttactaacccgcagcgtccgccagttatctggattggcgcgcaggagtgcaccggttgtacggaatctctgct

SEQ ID NO: 766463 - DNA, 75 bp, synthetic construct
  source 1..75: mol_type = other DNA
tgctcggcggtgtggttgggctggttgccggtgtcagcgtgatggcggtgcgtgaactgggtcgtcagcaaaaga

SEQ ID NO: 766464 - DNA, 75 bp, synthetic construct
  source 1..75: mol_type = other DNA
gcaacattaaccatcaatggcagaattagttcccctacatgcagtatggatgttgttaataatcatcttcagcaa

SEQ ID NO: 766465 - DNA, 75 bp, synthetic construct
  source 1..75: mol_type = other DNA
aagccctattttcaaagatggctttattgatgagcagcaactggaagagttaacagcacgcggaggcgttggtga

SEQ ID NO: 766466 - DNA, 75 bp, synthetic construct
  source 1..75: mol_type = other DNA
cgacagcgtgacatttggctgttatcaactgatggcgcgttacttacagggtgacaaaccgaccatcgttggtat

SEQ ID NO: 766467 - DNA, 75 bp, synthetic construct
  source 1..75: mol_type = other DNA
tcgatcaaaaagtacgggcggcgtggatgtattacatcgccggacttaaccagagcgaaatcgccagccagttag

SEQ ID NO: 766468 - DNA, 75 bp, synthetic construct
  source 1..75: mol_type = other DNA
gactgagcaacttaatctcgggttgacggcaggtaaagtgtggttcaacaccccaaccgatgattataacggtct

SEQ ID NO: 766469 - DNA, 75 bp, synthetic construct
  source 1..75: mol_type = other DNA
atgagcacacaatcccatcctttaaatctgcactggcaaccggccctgaaacgcgacggcgagtacgtctgtggg

SEQ ID NO: 766470 - DNA, 75 bp, synthetic construct
  source 1..75: mol_type = other DNA
gcctgtaattccaatgttattttcgtcggcatcggtgcattaggtcgacaaagcccgatcttcaaagatggcttt

SEQ ID NO: 766471 - DNA, 75 bp, synthetic construct
  source 1..75: mol_type = other DNA
taccgaaattatcgataaaccggacgaaacgacaattacatgccctcaatgtcggacgggccatctggtccagcg

SEQ ID NO: 766472 - DNA, 75 bp, synthetic construct
  source 1..75: mol_type = other DNA
agctgcttctttgttcgtttttaatttatcgtctggttttgcggcggaaaacattcctttttcacctcagcctcc

SEQ ID NO: 766473 - DNA, 75 bp, synthetic construct
  source 1..75: mol_type = other DNA
gggcagcatagctcagcatatgatttggctgtgctttctcgcgctatcattcatggcgaacctgatttttatcat

SEQ ID NO: 766474 - DNA, 75 bp, synthetic construct
  source 1..75: mol_type = other DNA
gtcaggattttctggcgtatttcagtaaccgcgaaccctgcctgattggcatggaagcttgtggaggccccagta

SEQ ID NO: 766475 - DNA, 75 bp, synthetic construct
  source 1..75: mol_type = other DNA
ggtcaacaaaaactggccaccgctttagagtttttccagtatcggttttccgattcatttggtggcaacccaccg

SEQ ID NO: 766476 - DNA, 75 bp, synthetic construct
  source 1..75: mol_type = other DNA
gagttttacgaggcagaggcaatcaaacaggcaaagatattgttccgggatattgctgccgggttatgtgaaggg

SEQ ID NO: 766477 - DNA, 75 bp, synthetic construct
  source 1..75: mol_type = other DNA
acggcaggtaaagtgtggttcaacaccccaaccgatgattataacggtctgcaacttgcagcccacctgatctgg

SEQ ID NO: 766478 - DNA, 75 bp, synthetic construct
  source 1..75: mol_type = other DNA
agtattaatatgccgactgtaccaactactgtatttgatggaaaagcgaaatactcaacttatgatgatgcagtc

SEQ ID NO: 766479 - DNA, 75 bp, synthetic construct
  source 1..75: mol_type = other DNA
cagcgtgagctcatgatacgcatagataacacttttgatttcttctacagcatgcacggaattaaacagaaatga

SEQ ID NO: 766480 - DNA, 75 bp, synthetic construct
  source 1..75: mol_type = other DNA
tcactcgcgcggttaacgttgccaaagaaaacctcaatgatgtaatggcagaactcggcatgaccgaagggtttg

SEQ ID NO: 766481 - DNA, 75 bp, synthetic construct
  source 1..75: mol_type = other DNA
ctggtgacgccgcctgccgcaaaagccgcacttgacctttacttccagcatcgtccgcaaaaaccgattgttgcc

SEQ ID NO: 766482 - DNA, 75 bp, synthetic construct
  source 1..75: mol_type = other DNA
gatcagcgcccaggatgtgtttacggcacaccgttttcctgccggtcttgcggggatcatccccacgaacggggc

SEQ ID NO: 766483 - DNA, 75 bp, synthetic construct
  source 1..75: mol_type = other DNA
atatcacagataaaagtgatgccagtgatatccgggaagtcgaaacccgcgcatttggcttcagcaaagaagccg

SEQ ID NO: 766484 - DNA, 75 bp, synthetic construct
  source 1..75: mol_type = other DNA
agcatactgaggatgctgtggtcattcctatggatgtgggatggaatgatgttggttcatggtcttctctatgga

SEQ ID NO: 766485 - DNA, 75 bp, synthetic construct
  source 1..75: mol_type = other DNA
agtcattcaacaaagaattcttatatttattctgagtcttgtttagtaacaactttgggagtagaggatcttatt

SEQ ID NO: 766486 - DNA, 75 bp, synthetic construct
  source 1..75: mol_type = other DNA
gcgtttctggtgaaggccatatcacctgtggtcactgtcgcaactgtcgtggcggtcgtacccatctgtgccgca

SEQ ID NO: 766487 - DNA, 75 bp, synthetic construct
  source 1..75: mol_type = other DNA
cgaggatgtgctggtctctggtgcaggtccgataggtattatggctgcggcggtggcgaaacacgttggtgcacg

SEQ ID NO: 766488 - DNA, 75 bp, synthetic construct
  source 1..75: mol_type = other DNA
cggaagaaggcatctggatgaccgacgttcctgaaccggaactcgggcataacgatttgctaattaaaatccgta

SEQ ID NO: 766489 - DNA, 75 bp, synthetic construct
  source 1..75: mol_type = other DNA
cagcgtcgactcattgcggtggtgatgggggctgaaagcgcaaaaggtcgtgaagaagaggcgagaaagctactg

SEQ ID NO: 766490 - DNA, 75 bp, synthetic construct
  source 1..75: mol_type = other DNA
agtgaacatggctttaaagagctggcgttacgctatacgctgaatctggcaaatggccgttttctgtggcgcaac

SEQ ID NO: 766491 - DNA, 75 bp, synthetic construct
  source 1..75: mol_type = other DNA
aaccagacgttaagcagcagcactacgtgatggctgtgctgatccgtggcggtgtctttggtgagaaatcggaat

SEQ ID NO: 766492 - DNA, 75 bp, synthetic construct
  source 1..75: mol_type = other DNA
aaccagacgttgatcagcagcactacgtgatggcagtgctgatccgtggcggtgtttttggtgagaaagcggaat

SEQ ID NO: 766493 - DNA, 75 bp, synthetic construct
  source 1..75: mol_type = other DNA
cgtagagaatggtgctactgtgtctgatcacgttcaaattaaaaacaataagttttctcttaaaggaaggatcac

SEQ ID NO: 766494 - DNA, 75 bp, synthetic construct
  source 1..75: mol_type = other DNA
atatgattaagaatgctggaattaacggcaatcgacgtatgcttatgcttgaatacctaaatcagttgatggaca

SEQ ID NO: 766495 - DNA, 75 bp, synthetic construct
  source 1..75: mol_type = other DNA
aacgctattgctgtaaagaccgcatcacctaagagcacaggcggacaggtaaaaagccaagtgccaaccaatgca

SEQ ID NO: 766496 - DNA, 75 bp, synthetic construct
  source 1..75: mol_type = other DNA
agaccgcctgaaatatccgatgaaacgcgtcggggcgcgcggtgaaggcaaattcgagcgtattagctgggaaga

SEQ ID NO: 766497 - DNA, 75 bp, synthetic construct
  source 1..75: mol_type = other DNA
cgagaagcgattcctgaattaccgacttttgaagagttccgcaagcaggggatctttaaaaaacgtgacccgcaa

SEQ ID NO: 766498 - DNA, 75 bp, synthetic construct
  source 1..75: mol_type = other DNA
tctatctgaactatggcaccggtacgctgggcggcaccatgacccgctcctggccgccgggaaataccctggtcg

SEQ ID NO: 766499 - DNA, 75 bp, synthetic construct
  source 1..75: mol_type = other DNA
aagcgcaggttcgcctcggtgccgggcaagaagtcttcccatcacaggaactggtgctcgacagcaacagtagca

SEQ ID NO: 766500 - DNA, 75 bp, synthetic construct
  source 1..75: mol_type = other DNA
gtgttagttggcatgtcttacgaagaagaagcaagcgaaagcctattgtttactcttgattttgagcaaatccgt

SEQ ID NO: 766501 - DNA, 75 bp, synthetic construct
  source 1..75: mol_type = other DNA
atgtcacaagctaccccgtagaaaatggtgctactgtgtctgatcacgttcaaattaaaaacaataagttttctc

SEQ ID NO: 766502 - DNA, 75 bp, synthetic construct
  source 1..75: mol_type = other DNA
taggggttcgtacgaaaaaacgtgttaacactgaagatcaaagtagtgaaggtgaagacactattactcctgcct

SEQ ID NO: 766503 - DNA, 75 bp, synthetic construct
  source 1..75: mol_type = other DNA
ttgttctggtttatgggggcgacagccagtggggaaaagtgtataccctgcgtgtattgcataccgcacagaagt

SEQ ID NO: 766504 - DNA, 75 bp, synthetic construct
  source 1..75: mol_type = other DNA
ctgatggccgccattgaactggacgaacggattggttattcagccagtggcctggccgggcagccgtataaaggt

SEQ ID NO: 766505 - DNA, 75 bp, synthetic construct
  source 1..75: mol_type = other DNA
ccgccgattcttgacgtctcagaagaagccaaagaaaaagtccacgcactgctggccgcgcagggcattttatcg

SEQ ID NO: 766506 - DNA, 75 bp, synthetic construct
  source 1..75: mol_type = other DNA
atgctggaagatctgcgcgccaacagctggagtttacgtccgtgctgcatggttctagcgtatcgcgtcgctcat

SEQ ID NO: 766507 - DNA, 75 bp, synthetic construct
  source 1..75: mol_type = other DNA
gggactaatgaagcgcattggtcgttgcatggggtatctgcaggtagccgctgagattgaagcgctggtcagtgg

SEQ ID NO: 766508 - DNA, 75 bp, synthetic construct
  source 1..75: mol_type = other DNA
ataaccggtgaactcgttaccgccggagtcggtatattccgtcatgaggggaacgatgccaaaggttcctttaca

SEQ ID NO: 766509 - DNA, 75 bp, synthetic construct
  source 1..75: mol_type = other DNA
ccgttgaacattatcttaaccacggtagttgcttggcgtttaccggcagagctctggggtatccctacagtgata

SEQ ID NO: 766510 - DNA, 75 bp, synthetic construct
  source 1..75: mol_type = other DNA
agacagtgaggttacttctcgtcagagtaatttatttgatggcagcgcagagaaaacgtcaggtctggttgtgat

SEQ ID NO: 766511 - DNA, 75 bp, synthetic construct
  source 1..75: mol_type = other DNA
tcggggctaatatgaaaaaacgtgttaacactactgaaaaatcaagtagtgaaggtgaagacactattactcctg

SEQ ID NO: 766512 - DNA, 75 bp, synthetic construct
  source 1..75: mol_type = other DNA
gtgaacggcacgagcattatggtattccgcacggcttcagttcgcgtgtagcgcttgaacgttatttgcacggat

SEQ ID NO: 766513 - DNA, 75 bp, synthetic construct
  source 1..75: mol_type = other DNA
aagataaaattatcggcaatagtgcttaccagactatgcggaaacataacaaaccttccctggagacagaacgca

SEQ ID NO: 766514 - DNA, 75 bp, synthetic construct
  source 1..75: mol_type = other DNA
gaacaggcacagcgtgcattgatcggcaatccgacagtgatcggcgcgattatggttcagcgtggcgaagccgat

SEQ ID NO: 766515 - DNA, 75 bp, synthetic construct
  source 1..75: mol_type = other DNA
gaagaggcgcgcgttctgcacgcgactcaggaactggtaacgctgggactggcaaaaccaattcttattggtcgt

SEQ ID NO: 766516 - DNA, 75 bp, synthetic construct
  source 1..75: mol_type = other DNA
agaaactgtccgtcgtttcggtattgagccgcgtgttgccttactgtcgcactccaacttcggttcttcaaactg

SEQ ID NO: 766517 - DNA, 75 bp, synthetic construct
  source 1..75: mol_type = other DNA
agcccccacggcggcgcagtcggtcaacaatacacagattgccactacggcgtttgttcaggcggcactgaaagc

SEQ ID NO: 766518 - DNA, 75 bp, synthetic construct
  source 1..75: mol_type = other DNA
gtataggtagggataaaaacgaaaacgttggtttgggggaaggctctgcactgcccgttggtgtgcctgttccgt

SEQ ID NO: 766519 - DNA, 75 bp, synthetic construct
  source 1..75: mol_type = other DNA
gcactttaactaatttatcgggaaagacagttaacggcattctccaataccttggtttgggagaaggttcggcat

SEQ ID NO: 766520 - DNA, 75 bp, synthetic construct
  source 1..75: mol_type = other DNA
cagcgggcgtacccagaccgtgcgtatggtgttgattaccagcagcacggacaagatcaccctgaaaatcgaccc

SEQ ID NO: 766521 - DNA, 75 bp, synthetic construct
  source 1..75: mol_type = other DNA
acaatatcaccctgaaaatcgaccctgccgtcgtgctggcaacccgcaagtatgtggatgataaggcactggagc

SEQ ID NO: 766522 - DNA, 75 bp, synthetic construct
  source 1..75: mol_type = other DNA
tgttagtgccttatggtcagatggcacattaacggctgctccgacctttaaacttatggggtacacgacaacaag

SEQ ID NO: 766523 - DNA, 75 bp, synthetic construct
  source 1..75: mol_type = other DNA
cacttgatttccatgaatttccagttccagggaaaatccaggtttctccaaccaagcctctggcaacgcagcgcg

SEQ ID NO: 766524 - DNA, 75 bp, synthetic construct
  source 1..75: mol_type = other DNA
ggcgttcacaccgcaggtgcaatgaacgcgctgctgttgccgagtggtaacacctttattgccgatacctacgtc

SEQ ID NO: 766525 - DNA, 75 bp, synthetic construct
  source 1..75: mol_type = other DNA
cacgattgtgactgatgcaacgattaatttctattttgatgaaagctgggtaaatagtggcactgacattatcaa

SEQ ID NO: 766526 - DNA, 75 bp, synthetic construct
  source 1..75: mol_type = other DNA
aacaatacacagattgccactacggcgtttgttcaggcggcactgaaagccctgattaatggcgcgcccgccacg

SEQ ID NO: 766527 - DNA, 75 bp, synthetic construct
  source 1..75: mol_type = other DNA
ttttcatttgcaggtccttcgcgaggcgatggggttaattttgtgaccattcgtcctcgtaatattgcgtttaat

SEQ ID NO: 766528 - DNA, 75 bp, synthetic construct
  source 1..75: mol_type = other DNA
aggcgttttaatgtcaacgactgcctctccatcacaacaatttccatcaatacaacgtgacgtcaatgatctgac

SEQ ID NO: 766529 - DNA, 75 bp, synthetic construct
  source 1..75: mol_type = other DNA
gcgatactgattctggcactgacgtatcaagaacgcgattcactgtggcgtatacgacacccaatctcggcgaaa

SEQ ID NO: 766530 - DNA, 75 bp, synthetic construct
  source 1..75: mol_type = other DNA
cacttttgccgggttgattttccactacatcggtattggcccgaataaggaagtggacgatgacgaggagggaaa

SEQ ID NO: 766531 - DNA, 75 bp, synthetic construct
  source 1..75: mol_type = other DNA
tgtagctggtcttctcgcataccttggtttgggagaaggctctgcattacctgttggtgtccctgttccgtggcc

SEQ ID NO: 766532 - DNA, 75 bp, synthetic construct
  source 1..75: mol_type = other DNA
cgctgactcatttgagtggaaaggatgtagcaggtcttctcgcataccttggtttgggagaagcggcaaaacgaa

SEQ ID NO: 766533 - DNA, 75 bp, synthetic construct
  source 1..75: mol_type = other DNA
cgggtggtaccacagagtcaatgaatatttcatcagtcacaaaatcgggttgcatcatttcttcagcatggcaaa

SEQ ID NO: 766534 - DNA, 75 bp, synthetic construct
  source 1..75: mol_type = other DNA
cgccggacgctcgcaaatttgactactgttggtgtagtaaattctgtgccagtgactttccctgtcccgttccct

SEQ ID NO: 766535 - DNA, 75 bp, synthetic construct
  source 1..75: mol_type = other DNA
cttttgtgaaatcggcgattgcagcaatggtggggtctgcacctgcggcactggatacattgaacgaactggcgg

SEQ ID NO: 766536 - DNA, 75 bp, synthetic construct
  source 1..75: mol_type = other DNA
ctggatacactgaatgaactggcggcggcgctggggaatgatcctaacttttcaacaacagtgcttaatgcactg

SEQ ID NO: 766537 - DNA, 75 bp, synthetic construct
  source 1..75: mol_type = other DNA
ccgcattcacagtatgcacccaaagaaagtccgacatttaccggaacccccaaagcgccaacgccagcggcgggg

SEQ ID NO: 766538 - DNA, 75 bp, synthetic construct
  source 1..75: mol_type = other DNA
gggggtaatggtggcggcccaggggctggagcagggaaatatgacaccactcagcagggagctgagtatgagcga

SEQ ID NO: 766539 - DNA, 75 bp, synthetic construct
  source 1..75: mol_type = other DNA
gatgaatggtcagatatggtttttctgaaatttaacggtgcgacgttttcggcagcgacttatccgaaactggct

SEQ ID NO: 766540 - DNA, 75 bp, synthetic construct
  source 1..75: mol_type = other DNA
aaacgcgattaatagtgattcagaaattacccgttccctggctatttcattcagaaggccaaaatcaattgaagg

SEQ ID NO: 766541 - DNA, 75 bp, synthetic construct
  source 1..75: mol_type = other DNA
acaccgcccattgaccgtgaggcactggcaaagctgccggatatcgcgacatatcacggcgcatgtctcggcgca

SEQ ID NO: 766542 - DNA, 75 bp, synthetic construct
  source 1..75: mol_type = other DNA
gaatgcaatcaatagtgattctgaaattacccgcgcaatgcaggtgttattcaaaaaaccgaaagcgatagagga

SEQ ID NO: 766543 - DNA, 75 bp, synthetic construct
  source 1..75: mol_type = other DNA
caaaagatgagtttgttaacatcaaaaatatcagcatgcaggatattttgaacgctcaccgcttcccaccaggcc

SEQ ID NO: 766544 - DNA, 75 bp, synthetic construct
  source 1..75: mol_type = other DNA
ccctgtatctgcgccgcaacagtaacggtggaacggtgatcgtgcagatggctatggatgacacggtatatggac

SEQ ID NO: 766545 - DNA, 75 bp, synthetic construct
  source 1..75: mol_type = other DNA
aagacgaatacgttaatattaagcgcatcagcgcccaggatcagcttactgcgcaccgttttccgcccggtttag

SEQ ID NO: 766546 - DNA, 75 bp, synthetic construct
  source 1..75: mol_type = other DNA
tgggggatatctccgcaaaagatgaatttgccaacatcaaaaacatcagtgcgcaggacattctcaacgcgcacc

SEQ ID NO: 766547 - DNA, 75 bp, synthetic construct
  source 1..75: mol_type = other DNA
cccggcctgtatattcgccgccgtaaagtcagggacaacgccacagaccagcccggcgattatgtggtattgcag

SEQ ID NO: 766548 - DNA, 75 bp, synthetic construct
  source 1..75: mol_type = other DNA
tcgtccgcaaaaaccgattgttgccgttatctacactcacagccacaccgaccactatggtggcgtgaaaggcat

SEQ ID NO: 766549 - DNA, 75 bp, synthetic construct
  source 1..75: mol_type = other DNA
atcggtggtattcattcagcgttactgaacagtgaggcgaccattttcagacgtcgctactatcacaacggtgcg

SEQ ID NO: 766550 - DNA, 75 bp, synthetic construct
  source 1..75: mol_type = other DNA
gcaaggacaacctatggacgggatgaagtgacacctgtctgccgtaaattcatgcaggctgtgaacagcgatccc

SEQ ID NO: 766551 - DNA, 75 bp, synthetic construct
  source 1..75: mol_type = other DNA
aataatgacccggagatccccgcacacttgcacctggtttttgacgtggatatcccggcaattgccaccgaaaag

SEQ ID NO: 766552 - DNA, 75 bp, synthetic construct
  source 1..75: mol_type = other DNA
accgtatcacggcgcggtattgcgtgcgcgcgtcaatatgatcatgcagggttttcggggtggtggtggtatgac

SEQ ID NO: 766553 - DNA, 75 bp, synthetic construct
  source 1..75: mol_type = other DNA
gacatgaagcccatttgaaacgctttaagtttttggcttccaaaaatggttatactttaattcattgcgatgtat

SEQ ID NO: 766554 - DNA, 75 bp, synthetic construct
  source 1..75: mol_type = other DNA
atgatgccggacagtgcttctattttaccgttcagaaaaaagaaagagaatgcctataatgtatccaacaaccaa

SEQ ID NO: 766555 - DNA, 75 bp, synthetic construct
  source 1..75: mol_type = other DNA
atgactctggctgaactgaaaaaggtcattgctgacatctatcccggtcagacgcagttttatgtaattgaattt

SEQ ID NO: 766556 - DNA, 75 bp, synthetic construct
  source 1..75: mol_type = other DNA
tcccctgcaacagcatacccctctatcgaattgccaccaactggagcaggcgcaggggctggttttagggttcga

SEQ ID NO: 766557 - DNA, 75 bp, synthetic construct
  source 1..75: mol_type = other DNA
aatttgagtggaaaggatgttgctggtcttctcgcataccttggtttaggagaaggctctgcattacccgtaggt

SEQ ID NO: 766558 - DNA, 75 bp, synthetic construct
  source 1..75: mol_type = other DNA
acaaccgctggacaatacgctgactaatttgagtggaaaggatgttgctggtcttctcgcataccttggtttagg

SEQ ID NO: 766559 - DNA, 75 bp, synthetic construct
  source 1..75: mol_type = other DNA
taaatacgttgttaggctttgtattccggtccttgattattaaattcgtcgtattctttgcgctgtattttattg

SEQ ID NO: 766560 - DNA, 75 bp, synthetic construct
  source 1..75: mol_type = other DNA
gcatggttagcagggccagaagccagttttgttaccggcgcgatgcataccattgatggcgcgtttggcgcataa

SEQ ID NO: 766561 - DNA, 75 bp, synthetic construct
  source 1..75: mol_type = other DNA
aatacctgctcaacacagagcgtgatcttgccgttcgcgtgcgtgaacgttatgacatgtacctgaaatcccagc

SEQ ID NO: 766562 - DNA, 75 bp, synthetic construct
  source 1..75: mol_type = other DNA
ttcaacgtttccaggatgacattctggctgggcgtaaaaccatcaccatccgcgacgagtctgaatcgcacttca

SEQ ID NO: 766563 - DNA, 75 bp, synthetic construct
  source 1..75: mol_type = other DNA
cagacggattctggtacttcattaacctgagtaaattaccacaggggattagtatgattatctccgcaatggcta

SEQ ID NO: 766564 - DNA, 75 bp, synthetic construct
  source 1..75: mol_type = other DNA
ccggtcattgattattaaattcgtcgtattctttgcgctgtattttgtagtccagggcttcgttgaaatccttgt

SEQ ID NO: 766565 - DNA, 75 bp, synthetic construct
  source 1..75: mol_type = other DNA
tatctacccgcaatgataacccgcaagcggccagccgcccgtgggataaagatcgtgatggctttgtactgggtg

SEQ ID NO: 766566 - DNA, 75 bp, synthetic construct
  source 1..75: mol_type = other DNA
caggagctattgcttcgttaatgatatggattggtacaggagtggttttggttatatcaagtctggttttattaa

SEQ ID NO: 766567 - DNA, 75 bp, synthetic construct
  source 1..75: mol_type = other DNA
acgtggtcaggtactggctaagccgggcaccatcaagccgcacaccaagttcgaatctgaagtgtacattctgtc

SEQ ID NO: 766568 - DNA, 75 bp, synthetic construct
  source 1..75: mol_type = other DNA
agtcgtgctcgaaagcttaggttcaattaagcgtgcgggtgcggatctgattttcagctactttgcgctggatct

SEQ ID NO: 766569 - DNA, 75 bp, synthetic construct
  source 1..75: mol_type = other DNA
agttgaaatcgttggtatcaaagagactcagaagtctacctgtactggcgttgaaatgttccgacaaactgctgg

SEQ ID NO: 766570 - DNA, 75 bp, synthetic construct
  source 1..75: mol_type = other DNA
gtgaacttctgtctccagtacgacttcccgggcgacgacactccgatcgttcgtggttctgctctgaaagcgctg

SEQ ID NO: 766571 - DNA, 75 bp, synthetic construct
  source 1..75: mol_type = other DNA
caaaaccgcacgttaacgtaggtactatcggccacgttgaccagggtaaaacgacactgaccgctgcaatcacga

SEQ ID NO: 766572 - DNA, 75 bp, synthetic construct
  source 1..75: mol_type = other DNA
atggttgttaccctgatccacccgattgcgatggacgacggcctgcgtttcgcaattcgtgaaggcggccgtacc

SEQ ID NO: 766573 - DNA, 75 bp, synthetic construct
  source 1..75: mol_type = other DNA
ataccgatgaaaccggcagcgatgcctggcgggaagatggactggtggcgcgtatgtcgcgcatctgcaagcaga

SEQ ID NO: 766574 - DNA, 75 bp, synthetic construct
  source 1..75: mol_type = other DNA
caaaaccgcacgttaacgtgggtactatcggccacgttgaccagggtaaaacaacactgaccgctgcaatcacga

SEQ ID NO: 766575 - DNA, 75 bp, synthetic construct
  source 1..75: mol_type = other DNA
caaaaccgcacgttaacgtgggtactatcggccacgttgaccaaggtaaaacgacactgaccgctgcaatcacga

SEQ ID NO: 766576 - DNA, 75 bp, synthetic construct
  source 1..75: mol_type = other DNA
actggctaagccgggcaccatcaagccgcatactaagttcgaatctgaagtgtacattctgtccaaagatgaagg

SEQ ID NO: 766577 - DNA, 75 bp, synthetic construct
  source 1..75: mol_type = other DNA
ggatttttatattcttggcggacataccacatcactgacaactgcccgtccggggctgcagccgtcggtgacatt

SEQ ID NO: 766578 - DNA, 75 bp, synthetic construct
  source 1..75: mol_type = other DNA
attatctgacataaataaggaaggttttttatatcagtcaattgggaaaataagattgcttgctctaagtagtgc

SEQ ID NO: 766579 - DNA, 75 bp, synthetic construct
  source 1..75: mol_type = other DNA
atactgaaatatccagtgaaatagtaacaggcataaatcatatagatgagattttactggctctcaggtcagaag

SEQ ID NO: 766580 - DNA, 75 bp, synthetic construct
  source 1..75: mol_type = other DNA
tgcacgctcaggaaaacttttacaggccgatactggagtacagaagtgcctcagtgcttttaatttgcgccgtca

SEQ ID NO: 766581 - DNA, 75 bp, synthetic construct
  source 1..75: mol_type = other DNA
gtgaaacgccagttatggcaggtgaacggctatgaatggactccggactatgccgggttaaccgcgcgtcctgat

SEQ ID NO: 766582 - DNA, 75 bp, synthetic construct
  source 1..75: mol_type = other DNA
tggtcagtgaaagccgggcagggcaggatttttatattcttggcggacataccacatcgctgacaagctcccgtc

SEQ ID NO: 766583 - DNA, 75 bp, synthetic construct
  source 1..75: mol_type = other DNA
atgttctaagagcctacattcaatccgcccagcaaacccaactgcaccttgcagacgcactcactgacgcggcga

SEQ ID NO: 766584 - DNA, 75 bp, synthetic construct
  source 1..75: mol_type = other DNA
taattacaaacatgaaatatctagaacgagccagatagataaagctgaaatgaatcatccatctgttcgtgaaaa

SEQ ID NO: 766585 - DNA, 75 bp, synthetic construct
  source 1..75: mol_type = other DNA
tgctgctcgtgcattcgaccaaatcgataacgcgccggaagaaaaagctcgtggtatcaccatcaacacttctca

SEQ ID NO: 766586 - DNA, 75 bp, synthetic construct
  source 1..75: mol_type = other DNA
taactcaggtgcaataaacattaataataaaatttaccataccggggacggtattaaagtcagagaatcaaagat

SEQ ID NO: 766587 - DNA, 75 bp, synthetic construct
  source 1..75: mol_type = other DNA
tgtccgcatggccggccacaatggccatgagtccaaaactgaacagaaatatgccaacgttttctcagatatggg

SEQ ID NO: 766588 - DNA, 75 bp, synthetic construct
  source 1..75: mol_type = other DNA
ttttcttaaacgttggtttgggagaagcggcaaaacggaatgtgggcaacggggaaaaccaaatccctgatatgt

SEQ ID NO: 766589 - DNA, 75 bp, synthetic construct
  source 1..75: mol_type = other DNA
accgttgttaccggtcgtgtagaacgcggtatcatcaaagttggtgaagaagttgaaaatcgttggtatcaaaga

SEQ ID NO: 766590 - DNA, 75 bp, synthetic construct
  source 1..75: mol_type = other DNA
acctggctgctgtggtgtgagcgcggggtgatgagccgcctgcaggcgctctatctgcgcgagcagggctttaac

SEQ ID NO: 766591 - DNA, 75 bp, synthetic construct
  source 1..75: mol_type = other DNA
gtcgaagggattgatgtggtttctctgccgttctataaactgagcaccaaatttggcgatctcgaccagaacaaa

SEQ ID NO: 766592 - DNA, 75 bp, synthetic construct
  source 1..75: mol_type = other DNA
gtcaatggctttggcccgaatgacgtgatcctcgatatccgttctatcgatgaacaagaagataaaccgctgaaa

SEQ ID NO: 766593 - DNA, 75 bp, synthetic construct
  source 1..75: mol_type = other DNA
atactgcggcgtgatctccaaaagcccgactgtgaaagcggttaagtcgaagattgaagcggaagaagagaagtt

SEQ ID NO: 766594 - DNA, 75 bp, synthetic construct
  source 1..75: mol_type = other DNA
tgccgttctacaagttgagcaccaaatttggcgatctcgaccagaacaaaacctggctgttgtggtgtgagcgcg

SEQ ID NO: 766595 - DNA, 75 bp, synthetic construct
  source 1..75: mol_type = other DNA
gaaagcgttggttcagtaccgtgatcaactggaaggcaaaactttctgcgtacgtgtgaaacgccgcggtaagca

SEQ ID NO: 766596 - DNA, 75 bp, synthetic construct
  source 1..75: mol_type = other DNA
cagttctacttccgtactaccgacgtgactggtaccatcgaactgccggaaggcgtagagatggtaatgccgggc

SEQ ID NO: 766597 - DNA, 75 bp, synthetic construct
  source 1..75: mol_type = other DNA
gattgggtgactttactaatatcattcgtggcataacttttccaggaaatgagaagtctcaatttcaagccccag

SEQ ID NO: 766598 - DNA, 75 bp, synthetic construct
  source 1..75: mol_type = other DNA
cgatacgctgatcctgcgtccgctgatctcttacgacaaagagcacatcatcaacctggctcgccagattggcac

SEQ ID NO: 766599 - DNA, 75 bp, synthetic construct
  source 1..75: mol_type = other DNA
gcgtggggcatgtttaccttccgcttaccgccgatgacctcgccgcgcagcctggacggcgatcgtaaaatggtg

SEQ ID NO: 766600 - DNA, 75 bp, synthetic construct
  source 1..75: mol_type = other DNA
gcgtggggcatgtttaccttccgcttaccgccgatgacttcaccgcgtagcctggacggcgaccgcaaaatggtg

SEQ ID NO: 766601 - DNA, 75 bp, synthetic construct
  source 1..75: mol_type = other DNA
taccgccgatgacctcgccgcgcagcctggacggcgaccgcaaaatggtgagtgattccctgcgcgtactggaac

SEQ ID NO: 766602 - DNA, 75 bp, synthetic construct
  source 1..75: mol_type = other DNA
atgaaaatcggcacacagaatcaggcgttctttccggaaaatattctggagaaatttcgttatatcaaagagatg

SEQ ID NO: 766603 - DNA, 75 bp, synthetic construct
  source 1..75: mol_type = other DNA
ggtttcgatggttttgagatcgacggcaaactgctggtcaacaatctcgaagaagtcaaagcagcaatcaaagaa

SEQ ID NO: 766604 - DNA, 75 bp, synthetic construct
  source 1..75: mol_type = other DNA
gcggtggctatgacggttggattggcgactttatcgaagagcgtcgacttaatggcttaaagcagatcgaacgca

SEQ ID NO: 766605 - DNA, 75 bp, synthetic construct
  source 1..75: mol_type = other DNA
ctctgaaagcgctggaaggcgacgcagagtgggaagcgaaaatcctggaactggctggcttcctggattcctaca

SEQ ID NO: 766606 - DNA, 75 bp, synthetic construct
  source 1..75: mol_type = other DNA
tatcggccacgttgaccacggtaaaactactctgaccgctgcaatcaccaccgtcctggctaaaacctacggcgg

SEQ ID NO: 766607 - DNA, 75 bp, synthetic construct
  source 1..75: mol_type = other DNA
gataacgcgccggaagaaaaagctcgtggtatcaccatcaacacttctcacgttgaatatgacaccccgacccgt

SEQ ID NO: 766608 - DNA, 75 bp, synthetic construct
  source 1..75: mol_type = other DNA
cggtatcatcaaagttggtgaagaagttgaaatcgttggtatcaaagagactcagaagtctacctgtactggcgt

SEQ ID NO: 766609 - DNA, 75 bp, synthetic construct
  source 1..75: mol_type = other DNA
tcgttttactgttaaacacagcctgatcttcacctgtattgtgggagtcatcacctctctccaggcatgggtatt

SEQ ID NO: 766610 - DNA, 75 bp, synthetic construct
  source 1..75: mol_type = other DNA
caaatgaaaaatatattggaaacaacatatataacaaaacctcatctaaactaaaaagtaggcttgtaaaaaacc

SEQ ID NO: 766611 - DNA, 75 bp, synthetic construct
  source 1..75: mol_type = other DNA
caaaagaaagagtattcaaacagatagggtaatattaattccgggaccaaaaaatgaaataaaaattgtaaatag

SEQ ID NO: 766612 - DNA, 75 bp, synthetic construct
  source 1..75: mol_type = other DNA
atgaagtctgtgatgctgtatctggttgcgacaataagtctgctggtatccggtcagacaactgcgcaacgtgaa

SEQ ID NO: 766613 - DNA, 75 bp, synthetic construct
  source 1..75: mol_type = other DNA
tccctgcccgcgacgcatcgtgaaccgctggtgaccgttttccgctccatctctgaaaccatgtttaaagtgact

SEQ ID NO: 766614 - DNA, 75 bp, synthetic construct
  source 1..75: mol_type = other DNA
tgctctgcctgacgctgtttctcaaacgctggcagccggtgcgcgtattccgcttcggtgacttgggagcctcac

SEQ ID NO: 766615 - DNA, 75 bp, synthetic construct
  source 1..75: mol_type = other DNA
atgggcaaaaccgaccgcagcgccaacccttcgccgggcaacaaaaacggcggtctcgctaacgtggtaaagaaa

SEQ ID NO: 766616 - DNA, 75 bp, synthetic construct
  source 1..75: mol_type = other DNA
atgggcaaaaccgaccgcagcgccaacccttcgccgggcaacaaaaatggcggtctcgccaacgtggtaaagaaa

SEQ ID NO: 766617 - DNA, 75 bp, synthetic construct
  source 1..75: mol_type = other DNA
atgggcaaaaccgaccgcagcgccaacccttcgccgggcaacaaaaaaggcgggctcgcaaacgtggtaaagaaa

SEQ ID NO: 766618 - DNA, 75 bp, synthetic construct
  source 1..75: mol_type = other DNA
tattctttacataatcagtctgaatatatcaaagattatgctgaaaagaacaatatggaaatcgcttatacctac

SEQ ID NO: 766619 - DNA, 75 bp, synthetic construct
  source 1..75: mol_type = other DNA
cccctctctgctggtggcaccgctatttttattgcggcgattatctcgatcttcatcctcggcgtggggatcaag

SEQ ID NO: 766620 - DNA, 75 bp, synthetic construct
  source 1..75: mol_type = other DNA
atgggcaaaaccgaccgcagcgccaacccttcgccgggcaacaaaaagggcggcctcgcgaacgtggtaaagaaa

SEQ ID NO: 766621 - DNA, 75 bp, synthetic construct
  source 1..75: mol_type = other DNA
gttgaaccgggggcagagcgttaccagccgctggcttatggctttatgacacaggatgacctgatgaaacgattt

SEQ ID NO: 766622 - DNA, 75 bp, synthetic construct
  source 1..75: mol_type = other DNA
catacctgccgagttaaacaatgacgacaagaaaagacttgtccttgagtattgtcagaaaaatttcgttgataa

SEQ ID NO: 766623 - DNA, 75 bp, synthetic construct
  source 1..75: mol_type = other DNA
ctcaacactctggaatgaagttgaaagagtcgagcgtcaacaaaatggtcaaacagcccgttattttgatgtcgc

SEQ ID NO: 766624 - DNA, 75 bp, synthetic construct
  source 1..75: mol_type = other DNA
aagaaaaaattggttgccgaatactgccagaagaactttgttgataaaggaatgattgctgatatcgcattccac

SEQ ID NO: 766625 - DNA, 75 bp, synthetic construct
  source 1..75: mol_type = other DNA
gataccactgatgctgaccatgataagcgtatcgctgaaaattatgtgtttgatgaagtgctgggtgtcaatgtt

SEQ ID NO: 766626 - DNA, 75 bp, synthetic construct
  source 1..75: mol_type = other DNA
tatacctgtagaactcaacaacgatgataagaaaaaattggttgccgaatactgtcagaagaactttgttgataa

SEQ ID NO: 766627 - DNA, 75 bp, synthetic construct
  source 1..75: mol_type = other DNA
tatggttaaattctccaataggacggttattctcttcaaattatacatatggtaagggagtatctcaggggaatc

SEQ ID NO: 766628 - DNA, 75 bp, synthetic construct
  source 1..75: mol_type = other DNA
ctggcggcagaccaggcgcagcagcgacaggccattgcgaaactggctgaacactacggcatcatgttcttttac

SEQ ID NO: 766629 - DNA, 75 bp, synthetic construct
  source 1..75: mol_type = other DNA
cgatagtgggctggcactggtacaacgaacctcagaaacaggatgagaaggaaacgccgccaccggctactgtgc

SEQ ID NO: 766630 - DNA, 75 bp, synthetic construct
  source 1..75: mol_type = other DNA
cgatagtgggctggcactggtacaacgaacctcagaaacaggatgaggaggaaacgccgccaccggccactgttc

SEQ ID NO: 766631 - DNA, 75 bp, synthetic construct
  source 1..75: mol_type = other DNA
tgttgtgcctcatggtaaaaaattgcgtcgccagagcagcgatgatgaagggcgagtgattgatgagtggatatt

SEQ ID NO: 766632 - DNA, 75 bp, synthetic construct
  source 1..75: mol_type = other DNA
aaagaatataaaaaacaggtagatagcaatgctaatatatatgatattttggactgttggggagcttgggctgta

SEQ ID NO: 766633 - DNA, 75 bp, synthetic construct
  source 1..75: mol_type = other DNA
cagtgttcgtccattatcatacggctttatttcgcaggatgacctggcaaaacagttcctgaacgtatctgaaga

SEQ ID NO: 766634 - DNA, 75 bp, synthetic construct
  source 1..75: mol_type = other DNA
gcaacaagaaaggcggtctggcaaacgtggtagagaaggcactcggctccattgctaaatcaggtaaaagtgcaa

SEQ ID NO: 766635 - DNA, 75 bp, synthetic construct
  source 1..75: mol_type = other DNA
ttgtcacttataaccaggtgactgacgtgcagatcctgcatgataaaggcaagctgatcccggctgactggcagt

SEQ ID NO: 766636 - DNA, 75 bp, synthetic construct
  source 1..75: mol_type = other DNA
cgcgcctgccgaataacagctcgccgttctactccaccatgggcttcctggtgcgtaagggcaacccgaagaata

SEQ ID NO: 766637 - DNA, 75 bp, synthetic construct
  source 1..75: mol_type = other DNA
gttctactccaccatgggcttcctggtgcgtaagggcaacccgaagaatatccacgactggaacgatttggttcg

SEQ ID NO: 766638 - DNA, 75 bp, synthetic construct
  source 1..75: mol_type = other DNA
ttcagtcatacgctctgttcccacatatgtcgctgggcgaaaacgttggctatgggctgaaaatgcttggcgtgt

SEQ ID NO: 766639 - DNA, 75 bp, synthetic construct
  source 1..75: mol_type = other DNA
ttatttctccggagatccgaaaaccccaagttcaggagcttcctctccccccacacaacgccacctcctgtaagc

SEQ ID NO: 766640 - DNA, 75 bp, synthetic construct
  source 1..75: mol_type = other DNA
atgaaaaatatcgttcctgattaccgtctagatatggtgggcgaaccctgcccttatccggcggtcgctactctt

SEQ ID NO: 766641 - DNA, 75 bp, synthetic construct
  source 1..75: mol_type = other DNA
cgcggcgtaatgatccccaaagataacggccaatggctttcgcgtttcgacgttgagcatgccctgcgagtggcg

SEQ ID NO: 766642 - DNA, 75 bp, synthetic construct
  source 1..75: mol_type = other DNA
tgctgatttaacagttgattgtagcattatgtttaacctggcatttgccaccagtgatcaacatatgtcgatatt

SEQ ID NO: 766643 - DNA, 75 bp, synthetic construct
  source 1..75: mol_type = other DNA
gtcgcgtcgattccaggccaggttgccgatcaggccccctccccagtctggctccaatgctggaaaaagtgcttc

SEQ ID NO: 766644 - DNA, 75 bp, synthetic construct
  source 1..75: mol_type = other DNA
attttgcagggcttaaaagcagacgttgtcacttataaccaggtgactgacgtacaaatcctgcatgacaaaggc

SEQ ID NO: 766645 - DNA, 75 bp, synthetic construct
  source 1..75: mol_type = other DNA
gctgaatcttcagtaccctgccaaatccggctttaaaggcgaacccgatacctgcctgttcatgcttaatgctca

SEQ ID NO: 766646 - DNA, 75 bp, synthetic construct
  source 1..75: mol_type = other DNA
atctcggctacgcaatggctgatgctgtgaaggtgattgatgaagtgctggcggcgcgcgctgaaaccgtgaagc

SEQ ID NO: 766647 - DNA, 75 bp, synthetic construct
  source 1..75: mol_type = other DNA
cgcgtaatgaagtgaagcagcgggtgaaagatgcgctggcaatggtggatctggaaggattcgaagaccgctatg

SEQ ID NO: 766648 - DNA, 75 bp, synthetic construct
  source 1..75: mol_type = other DNA
aagcgccttgagacctatgtattcccggatattggtgacagcaacgtttcagatctggatacgggtgatctgctt

SEQ ID NO: 766649 - DNA, 75 bp, synthetic construct
  source 1..75: mol_type = other DNA
tgattgaatcagggctatggtctaaagatgcggtagaacttcagatgagccacaaggaaagcaacagtgtgcgtg

SEQ ID NO: 766650 - DNA, 75 bp, synthetic construct
  source 1..75: mol_type = other DNA
aaagatattagctatgatattagcaatggtgagggtttgatatttatcggttgtcatgattatcgtaaacctatg

SEQ ID NO: 766651 - DNA, 75 bp, synthetic construct
  source 1..75: mol_type = other DNA
ggaacacaaatttgaccgtaagaaagcgctggcttatgagcgtgaagtgctgggcaaatttgataaaactgcgga

SEQ ID NO: 766652 - DNA, 75 bp, synthetic construct
  source 1..75: mol_type = other DNA
ctccacgctggtggtgggtatcgcgggtgttggtgatgccaaacagctcgggcgtattggcgcgaaaaccattat

SEQ ID NO: 766653 - DNA, 75 bp, synthetic construct
  source 1..75: mol_type = other DNA
tgattgaatcagggcgatggtctgaagatgcggtagaactccagatgagccacaaggaaagcaacagtgtgcgtg

SEQ ID NO: 766654 - DNA, 75 bp, synthetic construct
  source 1..75: mol_type = other DNA
gtaattcgggtatagtgttttatgagattactccagatgctatcacagtacagtttaaagatggatggaaatacg

SEQ ID NO: 766655 - DNA, 75 bp, synthetic construct
  source 1..75: mol_type = other DNA
aagaacacagtatgaagtgaaggttatcgagaaagagttaacccatgaggttgttagagcaagaaatgttagatt

SEQ ID NO: 766656 - DNA, 75 bp, synthetic construct
  source 1..75: mol_type = other DNA
tgcgcaacgtcactaaacgatttggcagtaatacggtaatcgacaatatcaacctcaccatcccgcaggggcaaa

SEQ ID NO: 766657 - DNA, 75 bp, synthetic construct
  source 1..75: mol_type = other DNA
ggccgctattcagtttgatgaccaggtggatgtggtcttccagttagaacccgttgatcagcaaccggcaaaaac

SEQ ID NO: 766658 - DNA, 75 bp, synthetic construct
  source 1..75: mol_type = other DNA
tgtccgcccaggaaacttacgagcaggccgctattcagtttgatgatcaggtcgatgtggtcttccagttagaac

SEQ ID NO: 766659 - DNA, 75 bp, synthetic construct
  source 1..75: mol_type = other DNA
cacccagccagattatgattatcaggatggtaaaagtatcctgaaaggctaccgcgctgtgagaacggtggaagt

SEQ ID NO: 766660 - DNA, 75 bp, synthetic construct
  source 1..75: mol_type = other DNA
atgactacactgactattagcagaaaaccgaaaggcatttacggcataccacagaaaaagacacagacgacacag

SEQ ID NO: 766661 - DNA, 75 bp, synthetic construct
  source 1..75: mol_type = other DNA
atggggcaaagcatgactaagctgaccattaacagaaaaccaaaaggtatttacggcacgccgcagaaaacgacg

SEQ ID NO: 766662 - DNA, 75 bp, synthetic construct
  source 1..75: mol_type = other DNA
gaactcttctggcattggcgttgaattattacctgtggagatgacgctggatgagcggctaccccgttttttacg

SEQ ID NO: 766663 - DNA, 75 bp, synthetic construct
  source 1..75: mol_type = other DNA
cgatgaaggtgccaccggccgcggcgcgaagccgaaagctggcctggtcggtttctccgtatccaacctgcgtat

SEQ ID NO: 766664 - DNA, 75 bp, synthetic construct
  source 1..75: mol_type = other DNA
ggcagatgtacgcgatgtcgcgcaactgaaaggcttctatgacgcgattcaggcgctggttgcacagcgtaagct

SEQ ID NO: 766665 - DNA, 75 bp, synthetic construct
  source 1..75: mol_type = other DNA
gcagaaaacgacgcaggcggcgcaagagcaggataaaaccacatcggcgcataaagtgatacccggcaatcagaa

SEQ ID NO: 766666 - DNA, 75 bp, synthetic construct
  source 1..75: mol_type = other DNA
aaagtcagcattgatgacgtgattgcgcgtaacttcaatctggatattaaaaacccacatcaggcggaaaccgtt

SEQ ID NO: 766667 - DNA, 75 bp, synthetic construct
  source 1..75: mol_type = other DNA
tgtcgccatagactacccagcagcgctggcacttcgccagatggctctcgttcaggatgaactcccgaaatacct

SEQ ID NO: 766668 - DNA, 75 bp, synthetic construct
  source 1..75: mol_type = other DNA
acgctcaaacaacggactgaaaaagcgaccagaacggcaggccgtgtccctgctggcagtcaggtgcatcgcctg

SEQ ID NO: 766669 - DNA, 75 bp, synthetic construct
  source 1..75: mol_type = other DNA
cccgtattgcccgggagcatgatatcaatgataatcttctgttcaaatggctcaggctctggctgatcaaagggc

SEQ ID NO: 766670 - DNA, 75 bp, synthetic construct
  source 1..75: mol_type = other DNA
gtaacgaggccgatggttttgccagccgcgtcgagaatgagcaggcgtggaaagtcagcattgatgacgtgattg

SEQ ID NO: 766671 - DNA, 75 bp, synthetic construct
  source 1..75: mol_type = other DNA
agccatgatccggacgaactgttagcgcagtatgcaaaacagcaggcggagatccagacgctgcgtaatcaactg

SEQ ID NO: 766672 - DNA, 75 bp, synthetic construct
  source 1..75: mol_type = other DNA
actggcacagcacggacttgctgattgtgtccattatgtcggtcaggctgtttctggtgaccgttttgtgattac

SEQ ID NO: 766673 - DNA, 75 bp, synthetic construct
  source 1..75: mol_type = other DNA
tcgttctcggcggcccggcgatgaacatcggtcttggcggcggcgcggcgtcttccatggcgtctggtcagtctg

SEQ ID NO: 766674 - DNA, 75 bp, synthetic construct
  source 1..75: mol_type = other DNA
ctttccaccgtgcaggcttcgatgcaatcgatgtgcatatgagcgacctgctggctggacgcacgggcctggagg

SEQ ID NO: 766675 - DNA, 75 bp, synthetic construct
  source 1..75: mol_type = other DNA
gcagcgcctgcgtgacaacccggagtgtgccgatcaggagcatcaggcgaaatctaacgacgccgatccgggcct

SEQ ID NO: 766676 - DNA, 75 bp, synthetic construct
  source 1..75: mol_type = other DNA
ctgatgcaggatctcgccgtcagggggctggcattcgggccaggggcattacgtgcgacgctggcatcttatgcg

SEQ ID NO: 766677 - DNA, 75 bp, synthetic construct
  source 1..75: mol_type = other DNA
gtcgcgcggcggtggtattgccggatggcacgctatttggcgaaggcgttaaaaccaaaatcaaaaagctactta

SEQ ID NO: 766678 - DNA, 75 bp, synthetic construct
  source 1..75: mol_type = other DNA
ggaagaggcgctggaactggagcaggataactatcaatatccgatcccacagcgttatttgtggcgcagttgggc

SEQ ID NO: 766679 - DNA, 75 bp, synthetic construct
  source 1..75: mol_type = other DNA
tgacgcgattcaggcgctggttgcacagcgtaagctgctcgcgtaccacgaccgctctgacggtggcctgctggt

SEQ ID NO: 766680 - DNA, 75 bp, synthetic construct
  source 1..75: mol_type = other DNA
tacgtgctggcggttgctgccgatcagttaccgctgtttgacgaactgtgtaagcgtgagcgcgcaccctacgcg

SEQ ID NO: 766681 - DNA, 75 bp, synthetic construct
  source 1..75: mol_type = other DNA
tcgcctggcggcgttgtttaacgaagaactgggtgcggtgattcaggttcgtgccgctgaccgtgaagcggtcga

SEQ ID NO: 766682 - DNA, 75 bp, synthetic construct
  source 1..75: mol_type = other DNA
ttaaactttccgctaactggatggcggcagcaggtcatccaggtgaagacgcgggcctgtatgaagccgttaaag

SEQ ID NO: 766683 - DNA, 75 bp, synthetic construct
  source 1..75: mol_type = other DNA
aagaactgcatctttctttgcacgatcgtcattttgataatcagccgatcgatctgccgctggacgtactgcttg

SEQ ID NO: 766684 - DNA, 75 bp, synthetic construct
  source 1..75: mol_type = other DNA
aaataccttcgaaaccacgccggatcacgttctctctgcttataaagataacgccgccgtaatggaaggttctga

SEQ ID NO: 766685 - DNA, 75 bp, synthetic construct
  source 1..75: mol_type = other DNA
gctgcagacgatggtggcaacactgaaaataccatggagcggcgtaaccgtcgcacaggaaggacagagaaagcg

SEQ ID NO: 766686 - DNA, 75 bp, synthetic construct
  source 1..75: mol_type = other DNA
atgctccgtttacttcgtcattatttttactttgttccgttgcagttatcaaaagcaaaaggaatgggtaaaaat

SEQ ID NO: 766687 - DNA, 75 bp, synthetic construct
  source 1..75: mol_type = other DNA
aagcgcggatctgggaagtgacggacagaacggtcaggacctggattggggaggcggttgccgccgctgctgctg

SEQ ID NO: 766688 - DNA, 75 bp, synthetic construct
  source 1..75: mol_type = other DNA
gatctgccgctgttcaaaggcattccgattcatgtgtttatcgctggtcgcagtatccgtgatgccgcttctccg

SEQ ID NO: 766689 - DNA, 75 bp, synthetic construct
  source 1..75: mol_type = other DNA
tttcagaaccgggtctggcgcgcttaacgggcgtgaaagagatggccagtgcgctaaaacaggcacaaacgctca

SEQ ID NO: 766690 - DNA, 75 bp, synthetic construct
  source 1..75: mol_type = other DNA
gatttctctcagtgggatgttgtgctggcagatgtacgctggcacgacggcgctaaaaaagccttcaccctggcc

SEQ ID NO: 766691 - DNA, 75 bp, synthetic construct
  source 1..75: mol_type = other DNA
attcttctaaaattacagctagttataaggatttccttaactgcttcttctcaccatcatgttattttcgccaca

SEQ ID NO: 766692 - DNA, 75 bp, synthetic construct
  source 1..75: mol_type = other DNA
gcggttgaggccgcagcagctgacggcgtgacgttctcggtgccggtgacaccccatacgttccgccacagttac

SEQ ID NO: 766693 - DNA, 75 bp, synthetic construct
  source 1..75: mol_type = other DNA
atgtcagccagctggagatgatggttgccacgctgaagatcccgcttgagcggaagaataaacgcaccggcagaa

SEQ ID NO: 766694 - DNA, 75 bp, synthetic construct
  source 1..75: mol_type = other DNA
atgagtggcccacaattgctttccctgcctggttcttttttaacgcctccggcaacattacctgttgccattgat

SEQ ID NO: 766695 - DNA, 75 bp, synthetic construct
  source 1..75: mol_type = other DNA
aaagcgctctatccgcacaaaatcgtactggctgatgccaaaatcgctgatgcgggaaaaattctttctcgcatg

SEQ ID NO: 766696 - DNA, 75 bp, synthetic construct
  source 1..75: mol_type = other DNA
gttgaacagcacggtccgtactttgtgctcgcaccaggcctggcaatgccgcacggtcgcccggaagagggcgtt

SEQ ID NO: 766697 - DNA, 75 bp, synthetic construct
  source 1..75: mol_type = other DNA
tctgtacgcaggcaccgtccgtcctgctgccggtggccattgattacccggctgccctcgcactgcgccagatgg

SEQ ID NO: 766698 - DNA, 75 bp, synthetic construct
  source 1..75: mol_type = other DNA
atgcgaggggctgagtacgtcatcatcagtaagggaacgctgcatggccgcgatgcgctggaactggtatttgaa

SEQ ID NO: 766699 - DNA, 75 bp, synthetic construct
  source 1..75: mol_type = other DNA
cagagaaagcgcggatctgggaagtgacggacagaacggtcaggacctggattggggaggcggttgccgccgctg

SEQ ID NO: 766700 - DNA, 75 bp, synthetic construct
  source 1..75: mol_type = other DNA
ggcgctgacgcggggggatttttcgcttgcgcctccgtatccgtttgtgcagctggccactctgaagcagcggac

SEQ ID NO: 766701 - DNA, 75 bp, synthetic construct
  source 1..75: mol_type = other DNA
caaaagcattagctcgacggaggtgtatacgaaggtgtttgcgcttgatttcgcagcacgccaccgggtgcagtt

SEQ ID NO: 766702 - DNA, 75 bp, synthetic construct
  source 1..75: mol_type = other DNA
gtttgtgcagcttgcgaccctgaaacaacggaccgaaaaagccaccaggacggcaggaagaatgcccgccgggca

SEQ ID NO: 766703 - DNA, 75 bp, synthetic construct
  source 1..75: mol_type = other DNA
atttttcgctcgcgcctccgtatccgtttgtgcagctggccactctgaagcagcggacagaaaaagccgccagga

SEQ ID NO: 766704 - DNA, 75 bp, synthetic construct
  source 1..75: mol_type = other DNA
cagctctggcacttcgccagatgtcgatggtccatgatgaactgccgaaatatctgctggctccggaagtgagtg

SEQ ID NO: 766705 - DNA, 75 bp, synthetic construct
  source 1..75: mol_type = other DNA
acggtcaggacctggattggggaagcggttgtcgccgctgccgctgatggtgtgacgttctctgtcccggtcacg

SEQ ID NO: 766706 - DNA, 75 bp, synthetic construct
  source 1..75: mol_type = other DNA
gttgcaaacccgttccaccgccgggcgcggcagttccggtaaaattgatttgtatggcattaagaaattacgtga

SEQ ID NO: 766707 - DNA, 75 bp, synthetic construct
  source 1..75: mol_type = other DNA
tgcagacgatggtggcaacactgaaaattcctctggaacggcgtaataaacgaacaggcaggacagagaaagcgc

SEQ ID NO: 766708 - DNA, 75 bp, synthetic construct
  source 1..75: mol_type = other DNA
gcggatctgggaagtgacggacagaacggtcaggacctggattggggaggcggttgccaccgctgctgctgacgg

SEQ ID NO: 766709 - DNA, 75 bp, synthetic construct
  source 1..75: mol_type = other DNA
aggaagtctacacgaaggtttttgcgctggatgtggctgcccggcaccgggtgcagtttgcgatgccggagtctg

SEQ ID NO: 766710 - DNA, 75 bp, synthetic construct
  source 1..75: mol_type = other DNA
cactggacgtagcggcgcgacatcgggtgcagttcctgatgcccagtgatgatgctgtggctatgctcaggggaa

SEQ ID NO: 766711 - DNA, 75 bp, synthetic construct
  source 1..75: mol_type = other DNA
gataacgcgccggaagaaaaagctcgtggtatcactatcaacacttctcacgttgaatacgacaccccgacccgt

SEQ ID NO: 766712 - DNA, 75 bp, synthetic construct
  source 1..75: mol_type = other DNA
atgattagcgtaacccttagccaacttaccgacattctcaacggtgaactgcaaggtgcagatatcacccttgat

SEQ ID NO: 766713 - DNA, 75 bp, synthetic construct
  source 1..75: mol_type = other DNA
gacggtaaatatcgtcaaatcatcaacgtagccgatggttccgaagcccatgacgccgttacggttcgtcaattg

SEQ ID NO: 766714 - DNA, 75 bp, synthetic construct
  source 1..75: mol_type = other DNA
atgatgattgagcagaacacccaaattatcaatcagctcgctggtaacaccgacgcaacctatatccaagaaaac

SEQ ID NO: 766715 - DNA, 75 bp, synthetic construct
  source 1..75: mol_type = other DNA
caaaaccgcacgttaacgtcggtactatcggccacgttgaccagggtaaaaccaccctgaccgctgcaatcacga

SEQ ID NO: 766716 - DNA, 75 bp, synthetic construct
  source 1..75: mol_type = other DNA
ccggaagccgcactggtcaacaatctggcggctgcgcatctggaaggtttcggctcgcttgcgggtgtcgcgaaa

SEQ ID NO: 766717 - DNA, 75 bp, synthetic construct
  source 1..75: mol_type = other DNA
agaaggtcagcggctgcgccagagaatttctggtcgtagatgactttctctgctcgcgtagtgactccacaaaaa

SEQ ID NO: 766718 - DNA, 75 bp, synthetic construct
  source 1..75: mol_type = other DNA
accgatgctgttaacgtggcacagttgaagtcttccgaagctggcggtgtgcgttacgacaccaaagctgatggt

SEQ ID NO: 766719 - DNA, 75 bp, synthetic construct
  source 1..75: mol_type = other DNA
acgacgctgaccgctgcaatcacaaccgtactggctaaaacctacggcggtgctgctcgtgcattcgaccagatc

SEQ ID NO: 766720 - DNA, 75 bp, synthetic construct
  source 1..75: mol_type = other DNA
accacactgaccgctgcaatcacgaccgtactggctaaaacctacggcggtgctgctcgtgcattcgaccagatc

SEQ ID NO: 766721 - DNA, 75 bp, synthetic construct
  source 1..75: mol_type = other DNA
acaaccctgaccgctgcaatcacgaccgtactggctaaaacctacggcggtgctgctcgtgcattcgaccagatc

SEQ ID NO: 766722 - DNA, 75 bp, synthetic construct
  source 1..75: mol_type = other DNA
gggcgcgtattagcgagcatttcgacacactttttaccaccgaagccagcgtggatgcgttaaaacagaccattc

SEQ ID NO: 766723 - DNA, 75 bp, synthetic construct
  source 1..75: mol_type = other DNA
tatttgccattgacagtgatggcgttattctgaatgacacgtacagcccggcgatcaaaattttcgtggaatctt

SEQ ID NO: 766724 - DNA, 75 bp, synthetic construct
  source 1..75: mol_type = other DNA
aagttggcgaagaagttgaaatcgttggtatcaaagagactcagaagtctacctgtactggcgttgaaatgttcc

SEQ ID NO: 766725 - DNA, 75 bp, synthetic construct
  source 1..75: mol_type = other DNA
gtcgttgggtctacaaattacaaggtagtaccaatagccagggtgaatactccgctgaaccgccccgggtttcct

SEQ ID NO: 766726 - DNA, 75 bp, synthetic construct
  source 1..75: mol_type = other DNA
tatcggccacgttgaccaaggtaaaaccacgctgaccgctgcaatcaccaccgtactggctaaaacctacggcgg

SEQ ID NO: 766727 - DNA, 75 bp, synthetic construct
  source 1..75: mol_type = other DNA
tatcggccacgttgaccaaggtaaaacaaccctgaccgctgcaatcacaaccgtactggctaaaacctacggcgg

SEQ ID NO: 766728 - DNA, 75 bp, synthetic construct
  source 1..75: mol_type = other DNA
caaaaccgcacgttaacgtgggtactatcggccacgttgaccagggtaaaaccactctgaccgctgcaatcacta

SEQ ID NO: 766729 - DNA, 75 bp, synthetic construct
  source 1..75: mol_type = other DNA
ggctggcttcctggattcttacattccggaaccagagcgtgcgattgacaaaccgttcctgctgccgatcgaaga

SEQ ID NO: 766730 - DNA, 75 bp, synthetic construct
  source 1..75: mol_type = other DNA
cgatttaatttcaccagtaactctgtgggtgatggtgtgaattttgttgctgtcagaccgcgaaatattgcattt

SEQ ID NO: 766731 - DNA, 75 bp, synthetic construct
  source 1..75: mol_type = other DNA
tgactccacaggaacagaaagaggcagagacccggctaatggtgctgaatgaccgacgaaaagccagaaaacctc

SEQ ID NO: 766732 - DNA, 75 bp, synthetic construct
  source 1..75: mol_type = other DNA
accctgtgctggcgaaagtgtttccttcactggtattacctgaagcccgcggtgatttcattcgtatctgggatg

SEQ ID NO: 766733 - DNA, 75 bp, synthetic construct
  source 1..75: mol_type = other DNA
gctccagctattggcgttccgttcttctggccctccgcggcaatgccaaatactgtaatcgacagctggtccagt

SEQ ID NO: 766734 - DNA, 75 bp, synthetic construct
  source 1..75: mol_type = other DNA
gacagctggtccagtatggtgtttttgaagttcaacggggcgaaattttctgcctctgattaccctgtgctggcg

SEQ ID NO: 766735 - DNA, 75 bp, synthetic construct
  source 1..75: mol_type = other DNA
tgaacatgcttcaattaacgatagtgatgagtcattacaacaagcagtaaaacaaaattacccgcaagcatggca

SEQ ID NO: 766736 - DNA, 75 bp, synthetic construct
  source 1..75: mol_type = other DNA
gaaacgcggctggtggcgctgaatgagaagcgcaaacgtcagcgccgggcagcaaaggagaaaacaggcgcatga

SEQ ID NO: 766737 - DNA, 75 bp, synthetic construct
  source 1..75: mol_type = other DNA
ccattaacagaaaaccgaaaggcatttacggcacgccgcagaaaacgacgcaggcggcacaggagcaggataaaa

SEQ ID NO: 766738 - DNA, 75 bp, synthetic construct
  source 1..75: mol_type = other DNA
gaaagatgccgataatctggaatctgcccaacaagcgaagcttaaaatgatctgtgaaaaattgcagttgaaacc

SEQ ID NO: 766739 - DNA, 75 bp, synthetic construct
  source 1..75: mol_type = other DNA
aaccgatctgaatgttgatccctggattaataaatatatttttccgaacggttgcctgccctctgtacgccagat

SEQ ID NO: 766740 - DNA, 75 bp, synthetic construct
  source 1..75: mol_type = other DNA
agcgaaccacactttgtgatggaagactggcataactttggcgccgattacgataccacgctgatggcctggtat

SEQ ID NO: 766741 - DNA, 75 bp, synthetic construct
  source 1..75: mol_type = other DNA
atgattagcgtaacccttagccaactggcgaacattctcaacggtgaactgcaaggggcagatatcacccttgat

SEQ ID NO: 766742 - DNA, 75 bp, synthetic construct
  source 1..75: mol_type = other DNA
caaaaccgcacgttaacgtgggtactatcggccacgttgaccaaggtaaaacaacgctgaccgctgcaatcacga

SEQ ID NO: 766743 - DNA, 75 bp, synthetic construct
  source 1..75: mol_type = other DNA
caaaaccgcacgttaacgtgggtactatcggccacgttgaccaaggtaaaacaaccctgaccgctgcaatcacca

SEQ ID NO: 766744 - DNA, 75 bp, synthetic construct
  source 1..75: mol_type = other DNA
caaaaccgcacgttaacgtgggtactatcggccacgttgaccaaggtaaaacaacactgaccgctgcaatcacaa

SEQ ID NO: 766745 - DNA, 75 bp, synthetic construct
  source 1..75: mol_type = other DNA
agttgaaatcgttggtatcaaagagactcagaagtctacctgtactggcgttgaaatgttccgcaaaactgctgg

SEQ ID NO: 766746 - DNA, 75 bp, synthetic construct
  source 1..75: mol_type = other DNA
atctcaacaacgacatcggtgtgccgatgacgctgctgcgtttaacgccggaatacgattacgcggtgattgaac

SEQ ID NO: 766747 - DNA, 75 bp, synthetic construct
  source 1..75: mol_type = other DNA
tatcggccacgttgaccatggtaaaacgacactgaccgctgcaatcactaccgtactggctaaaacctacggcgg

SEQ ID NO: 766748 - DNA, 75 bp, synthetic construct
  source 1..75: mol_type = other DNA
tgccgtacaggtactggccgaaatgccgggttaccgcgtgctggtcgttggcgatatggcagagttgggggctga

SEQ ID NO: 766749 - DNA, 75 bp, synthetic construct
  source 1..75: mol_type = other DNA
actacgcagagccccacctttggaaaccaagaaggttacccgcgcaacgtcgcatttaactatatcgtgagggca

SEQ ID NO: 766750 - DNA, 75 bp, synthetic construct
  source 1..75: mol_type = other DNA
tttcccgattgcatttccaaacagatgtctgcgtgttttggtctcacaagactacacaccagatagcggggctgt

SEQ ID NO: 766751 - DNA, 75 bp, synthetic construct
  source 1..75: mol_type = other DNA
caaaaccgcacgttaacgtcggtactatcggccacgttgaccaaggtaaaacaacgctgaccgctgcaatcacca

SEQ ID NO: 766752 - DNA, 75 bp, synthetic construct
  source 1..75: mol_type = other DNA
caaaaccgcacgttaacgtaggtactatcggccacgttgaccaaggtaaaacaacgctgaccgctgcaatcacaa

SEQ ID NO: 766753 - DNA, 75 bp, synthetic construct
  source 1..75: mol_type = other DNA
aacgatcgtggtgaggttcatattgaggcgaaagtgacgccacgaatgatgccgggtgtggtcgcactgggtgaa

SEQ ID NO: 766754 - DNA, 75 bp, synthetic construct
  source 1..75: mol_type = other DNA
atgtttggcattgatgcacagcgtatagcagcttttgcaaaaagccctcttgataatcccttgtctcgtagtgag

SEQ ID NO: 766755 - DNA, 75 bp, synthetic construct
  source 1..75: mol_type = other DNA
ggtctcatcgatatgatcagtcatgatgatattccctggatgcaggcactgattgctgaagcagggctgcgctgg

SEQ ID NO: 766756 - DNA, 75 bp, synthetic construct
  source 1..75: mol_type = other DNA
ggaaacatttgatgccgtttattatgcatccctgcctgcacttacgcccgtcatcctgcagggatggcagttctg

SEQ ID NO: 766757 - DNA, 75 bp, synthetic construct
  source 1..75: mol_type = other DNA
cgctatgggccagggagcctggcacgaggccaatatgtctggcgataaaatcgaccatggcggctgtgtgaatac

SEQ ID NO: 766758 - DNA, 75 bp, synthetic construct
  source 1..75: mol_type = other DNA
aatggtcattttgtcgcctacaaagcatttcgtgacgaccccgaggcaaatccacttaaaacgccttccggtaag

SEQ ID NO: 766759 - DNA, 75 bp, synthetic construct
  source 1..75: mol_type = other DNA
atttcgcgactgcgtggatcccgcataacgacggtaccaacaacttctacaccgctaatctgggtaacggcatcg

SEQ ID NO: 766760 - DNA, 75 bp, synthetic construct
  source 1..75: mol_type = other DNA
aatgcgtgagcgtctgggtgatgacaaacagcgtatcagccaggaaatgatggcgctgtacaaagctgagaaggt

SEQ ID NO: 766761 - DNA, 75 bp, synthetic construct
  source 1..75: mol_type = other DNA
cagtacacctccatggcgaagatgcgtatgctgcagccgaagattcaggcaatgcgtgagcgtctgggcgatgac

SEQ ID NO: 766762 - DNA, 75 bp, synthetic construct
  source 1..75: mol_type = other DNA
gtatctgcatgaagtcaaaaacggtatggacccgctggcgcaatatcatcataaattcgggtatgatagtcgccc

SEQ ID NO: 766763 - DNA, 75 bp, synthetic construct
  source 1..75: mol_type = other DNA
cacccggtaataaaggtcacggcttcggttcgctgcatattccttttgtcgcgctgcatgcagaaaatgttgatc

SEQ ID NO: 766764 - DNA, 75 bp, synthetic construct
  source 1..75: mol_type = other DNA
ggacgctgagcgacagataatcacagaggcacttaatatccatcaggggcgtatcaatgaggttgctgaatattt

SEQ ID NO: 766765 - DNA, 75 bp, synthetic construct
  source 1..75: mol_type = other DNA
gatactttatctacagaattgacgaatcgtctttctaatttattaatgatgaataagaattttggcaatggaatg

SEQ ID NO: 766766 - DNA, 75 bp, synthetic construct
  source 1..75: mol_type = other DNA
gggcagtggatactgccgatgctcgtacagagaacggacagcttatttttgatttgcgtgataaaggggtactgc

SEQ ID NO: 766767 - DNA, 75 bp, synthetic construct
  source 1..75: mol_type = other DNA
cagatcagtacacctgatcagatttgggcagtggatactgccgatgctcgtacagagaacggacagcttattttt

SEQ ID NO: 766768 - DNA, 75 bp, synthetic construct
  source 1..75: mol_type = other DNA
gtactggtgtccaggaggatggcgtatcggtacctgcggggatgtcactggttagtggacagagtgtgacgaatg

SEQ ID NO: 766769 - DNA, 75 bp, synthetic construct
  source 1..75: mol_type = other DNA
aaccctttctttctgccattatttcggcggccctgttttattcagcggcacctcatgcagatattcttgatggtg

SEQ ID NO: 766770 - DNA, 75 bp, synthetic construct
  source 1..75: mol_type = other DNA
cttctgctgtaacaggtggagggtatgttttattttttctttttatatctctcttgtttttttcttttcgagttg

SEQ ID NO: 766771 - DNA, 75 bp, synthetic construct
  source 1..75: mol_type = other DNA
cacttctttcagcgattatgtcaatgtctctgttttattcggcagcgccacatgcagatattcttgatggtggtg

SEQ ID NO: 766772 - DNA, 75 bp, synthetic construct
  source 1..75: mol_type = other DNA
tatcagtcagggggtactggctgacggtcgggtgatgaatctggctgcggcatatgcctctgtagtgtcggattt

SEQ ID NO: 766773 - DNA, 75 bp, synthetic construct
  source 1..75: mol_type = other DNA
tgacgaagctccgaaatggacctggcagataagttcgccggaccagacctgggcagtggatactgcagatgcgcg

SEQ ID NO: 766774 - DNA, 75 bp, synthetic construct
  source 1..75: mol_type = other DNA
ccgctgcttatgcatcttctgtgtctgattttgaattacaccttccggcagaagggacacctgctcagtggcagg

SEQ ID NO: 766775 - DNA, 75 bp, synthetic construct
  source 1..75: mol_type = other DNA
gaaatccggagacagggaacgtgtcggggcagctttcttttaccctgaaccaggggatggctgttagtacaggca

SEQ ID NO: 766776 - DNA, 75 bp, synthetic construct
  source 1..75: mol_type = other DNA
cgcagagagtgggcagcttgtttttgacttgcatgataaaggggccctgctgtttcttgaagggcatctgcatga

SEQ ID NO: 766777 - DNA, 75 bp, synthetic construct
  source 1..75: mol_type = other DNA
aatcagaattttggcaatggcatgaatgcggtggataacggacaggttatcaaccaaggggtactggccgacggt

SEQ ID NO: 766778 - DNA, 75 bp, synthetic construct
  source 1..75: mol_type = other DNA
ttggcccggaaatccaggacaaaatggcagctgttgctccgcacctggatctgaccgttgattacggttggttgt

SEQ ID NO: 766779 - DNA, 75 bp, synthetic construct
  source 1..75: mol_type = other DNA
tttgccggtacgggcgacagccatatcgcttttgcttcaccggatgagaaaccgctcggtgctggcagcgtggat

SEQ ID NO: 766780 - DNA, 75 bp, synthetic construct
  source 1..75: mol_type = other DNA
catcaactgggatggtttccgcacctataactttgatgtgattgatggtgtgaattatcagattgatgttaccca

SEQ ID NO: 766781 - DNA, 75 bp, synthetic construct
  source 1..75: mol_type = other DNA
gctgaagagtcgaagcgtgcaggagaaattcacccagcggcagataataactggcgtttagcgccgattgccggt

SEQ ID NO: 766782 - DNA, 75 bp, synthetic construct
  source 1..75: mol_type = other DNA
gggcgatcccgatctggcaaaactcccggtgctctctgccgccgcgccgtttaaagtcggcggtcgcaaaaatga

SEQ ID NO: 766783 - DNA, 75 bp, synthetic construct
  source 1..75: mol_type = other DNA
gtatagctatctggcgctggtgcaggacgatccgaccgtgcaggtggtgaacaacgcgcaaaaagcgtatgtcga

SEQ ID NO: 766784 - DNA, 75 bp, synthetic construct
  source 1..75: mol_type = other DNA
tttaatggcaaaccgattgatccgaacgcgatgttcctcgttgccaccaataactatcgtgcttatggcggcaaa

SEQ ID NO: 766785 - DNA, 75 bp, synthetic construct
  source 1..75: mol_type = other DNA
gcgaacgcgccgcaacgtgtcatgaaagatatcaccgtgaccagccgcgacgattccaaccaggtgatcgctaaa

SEQ ID NO: 766786 - DNA, 75 bp, synthetic construct
  source 1..75: mol_type = other DNA
gtttaactcgctgcgtctgcccgtgctgaacagcatcagcggccagaatcccaatgcggaattactcgccgggca

SEQ ID NO: 766787 - DNA, 75 bp, synthetic construct
  source 1..75: mol_type = other DNA
atgtacgcaaaatcctttgtcgctcttgatagcaacggacgtctgacgggcgcccgtactgaacaggccgcacct

SEQ ID NO: 766788 - DNA, 75 bp, synthetic construct
  source 1..75: mol_type = other DNA
tatgcccgctacacctgccacctttgcggcagtgcactcagataccacccgcaatacgacactgaatgtcccggg

SEQ ID NO: 766789 - DNA, 75 bp, synthetic construct
  source 1..75: mol_type = other DNA
tcgtaccggatgccttacccgtggtgcgtaaagccagctggcactgcagacaatgtcaccacgattatgtcagcg

SEQ ID NO: 766790 - DNA, 75 bp, synthetic construct
  source 1..75: mol_type = other DNA
tcgatggcaatggacatctgaccggtgcccgtactgcacagactgctccatacgatcgttatacctgccatcttt

SEQ ID NO: 766791 - DNA, 75 bp, synthetic construct
  source 1..75: mol_type = other DNA
tacgctgattgtggtgaaagccagcggtaaagaggtgaaagagtggctggaatgctctgccggacagtttaacca

SEQ ID NO: 766792 - DNA, 75 bp, synthetic construct
  source 1..75: mol_type = other DNA
caatgtcaccacgattattatggggagccgtactgcacacgctgtcggaccgggcgcttcagtgaggaggcagca

SEQ ID NO: 766793 - DNA, 75 bp, synthetic construct
  source 1..75: mol_type = other DNA
atgtacgcaaaatcctttattgcattcgatggcaacggacgtctgaccggtgcccgtaccgcacagactgcgcca

SEQ ID NO: 766794 - DNA, 75 bp, synthetic construct
  source 1..75: mol_type = other DNA
tatgctaactacacctgccacttgtgtggcagtgcactcagataccatccgcaatacgacactgaacttccctgg

SEQ ID NO: 766795 - DNA, 75 bp, synthetic construct
  source 1..75: mol_type = other DNA
gaagcagcaacttcgcactgcacaccttccgcggcgcggcgtactccacgcctgacgagaagtacgagaaataca

SEQ ID NO: 766796 - DNA, 75 bp, synthetic construct
  source 1..75: mol_type = other DNA
tacgaccgctacacctgccacctttgcggcagtgcactcagataccacccgcaatacgacactgaacggccctgg

SEQ ID NO: 766797 - DNA, 75 bp, synthetic construct
  source 1..75: mol_type = other DNA
gcaatacgacactgagcgtccctggtttgaacacaccgacgacgggctgactgaacacgctcagcagtgtcctta

SEQ ID NO: 766798 - DNA, 75 bp, synthetic construct
  source 1..75: mol_type = other DNA
atttactggcagaaaggttcaatgcgtcgtctgatgaaagacgatccggaatacaaccgcatcgccacctaccag

SEQ ID NO: 766799 - DNA, 75 bp, synthetic construct
  source 1..75: mol_type = other DNA
atgtacgcaaaatcctttctcgcacttgatggcaacgggcgtctgacgggtgcccgtaccgcacagactgcacct

SEQ ID NO: 766800 - DNA, 75 bp, synthetic construct
  source 1..75: mol_type = other DNA
tcacaatgtgcgatcgattactatggtgaacgctattgtctgacctgtagcaccggagacttcagccaaccaaca

SEQ ID NO: 766801 - DNA, 75 bp, synthetic construct
  source 1..75: mol_type = other DNA
gggtaccggatgctttacctgtagtgcgtaaagccagctggcactgcagacaatgtcgccacgattattatgggg

SEQ ID NO: 766802 - DNA, 75 bp, synthetic construct
  source 1..75: mol_type = other DNA
atgtacgcaaaatcctttctcgctcttgatggcaacgggcgtctgacaggcgcccgtactgcacaggccgcacct

SEQ ID NO: 766803 - DNA, 75 bp, synthetic construct
  source 1..75: mol_type = other DNA
caatgccgccacgattattatggggagcgctactgcacacactgtcatacagggcgtttcagtgaggaggcagtg

SEQ ID NO: 766804 - DNA, 75 bp, synthetic construct
  source 1..75: mol_type = other DNA
ttctgaggcaggcggcgttcgttacgacaccaaagctgatggttctatagactacagcaacatcactctcggtgg

SEQ ID NO: 766805 - DNA, 75 bp, synthetic construct
  source 1..75: mol_type = other DNA
tcaacggttctcagctgaaagcgaccaaggacgatgtggcggcaaacaccaccaacatcactaacctgacgagcg

SEQ ID NO: 766806 - DNA, 75 bp, synthetic construct
  source 1..75: mol_type = other DNA
tgctgtgggatgcgaccgccaataacggcgaaggggcttacaacgccagtcatgatggcaaagccagcatcatca

SEQ ID NO: 766807 - DNA, 75 bp, synthetic construct
  source 1..75: mol_type = other DNA
gctactgagattatgagtattgctcttggcgacagcgccaatgcgtcaaaagcgtattcaatggcgctgggagca

SEQ ID NO: 766808 - DNA, 75 bp, synthetic construct
  source 1..75: mol_type = other DNA
cgctggcgtcaacaacaacgacgcggtgaactacgcgcagttgaagcaaagcgtgcaggaaacgaagcaatacac

SEQ ID NO: 766809 - DNA, 75 bp, synthetic construct
  source 1..75: mol_type = other DNA
agcgacgcgattaacggctcacaactctataccaccaataagtacatcgctgatgcgctgggcggtgatgcagaa

SEQ ID NO: 766810 - DNA, 75 bp, synthetic construct
  source 1..75: mol_type = other DNA
cgcgataggggctgaagcaaaggccttaggtaaaggtactacggcaatcggctataaaagcaaggcctctggaga

SEQ ID NO: 766811 - DNA, 75 bp, synthetic construct
  source 1..75: mol_type = other DNA
gcatttagcgccgctcacgggaaagataaaactgccagtgtaatcactaacgtcgctaacggtgcagtctctgcc

SEQ ID NO: 766812 - DNA, 75 bp, synthetic construct
  source 1..75: mol_type = other DNA
actaacctgaacaatcaggtcactaatctggatactcgcgttactaatatcgaaaacggtattggcgacattgta

SEQ ID NO: 766813 - DNA, 75 bp, synthetic construct
  source 1..75: mol_type = other DNA
gtggcgaccaacaccaccaatatcgccactaacaccaccaatatcactaacctgactgatacggtgaataatctc

SEQ ID NO: 766814 - DNA, 75 bp, synthetic construct
  source 1..75: mol_type = other DNA
ttaatatggctgctggtgccataagcaacaccagtaccgatgccatcaacggctcacagctttatacgatcagtg

SEQ ID NO: 766815 - DNA, 75 bp, synthetic construct
  source 1..75: mol_type = other DNA
aagtgaggccggtgctgaaaatgctattgcactgggaaaactcagtaacgcaagtaaaatcaattcaatcgccct

SEQ ID NO: 766816 - DNA, 75 bp, synthetic construct
  source 1..75: mol_type = other DNA
tgctcaagggacaaattccgttgctctgggtgcgggttctgtagcgactgaagataattccgtctctgtgggtaa

SEQ ID NO: 766817 - DNA, 75 bp, synthetic construct
  source 1..75: mol_type = other DNA
gcaggcttacacgccgggtgccagcatggcctctattggtggcggtacttacaacggtgaatcggctgttgcttt

SEQ ID NO: 766818 - DNA, 75 bp, synthetic construct
  source 1..75: mol_type = other DNA
tcatggtagctcaacgaccagcgtaatcactgatgtggcgaacggtacgatttcagcagccagtaaagatgcggt

SEQ ID NO: 766819 - DNA, 75 bp, synthetic construct
  source 1..75: mol_type = other DNA
cactctgtggggaaaatgggtctggtaaatcaacgctgatgaaagtgctgtgtggtatttatccccatggctcct

SEQ ID NO: 766820 - DNA, 75 bp, synthetic construct
  source 1..75: mol_type = other DNA
accaataagtacatcgctgatgcgctgggtggtgatgcagaagtcaacgctgacggtactatcactgcaccgact

SEQ ID NO: 766821 - DNA, 75 bp, synthetic construct
  source 1..75: mol_type = other DNA
ttggtggtggtgctgatatcagcgatacgggtgtattaagtgggccaacctacactattggtggtactgactaca

SEQ ID NO: 766822 - DNA, 75 bp, synthetic construct
  source 1..75: mol_type = other DNA
tcaacaacaacgacgcagtgaactatgcgcaactgaagcaaagcgtgcaggaaacgaagcaatacaccgatcagc

SEQ ID NO: 766823 - DNA, 75 bp, synthetic construct
  source 1..75: mol_type = other DNA
cccacaatgggattatggattatgaccagatgacgctacgctgccagaagctattagcacaggtcagtttatcca

SEQ ID NO: 766824 - DNA, 75 bp, synthetic construct
  source 1..75: mol_type = other DNA
tcagcttgctggtaataccgacgcaacctatatcgaagaaaatggcgctggtatcaactacgttcgtactaacga

SEQ ID NO: 766825 - DNA, 75 bp, synthetic construct
  source 1..75: mol_type = other DNA
acgctctgctctgggatgcggacgccggtgaaaatggtgcatttagcgccgctcacggaaaagataaaactgcca

SEQ ID NO: 766826 - DNA, 75 bp, synthetic construct
  source 1..75: mol_type = other DNA
acccgcgcattctcattcttgatgaacccaccaggggtatcgatattggcgcgaaatacgagatctacaaattaa

SEQ ID NO: 766827 - DNA, 75 bp, synthetic construct
  source 1..75: mol_type = other DNA
ttgttaattctcgatgaaccgacagcctcattaactgagcaggaaacgtcggttttactggatattattcgcgat

SEQ ID NO: 766828 - DNA, 75 bp, synthetic construct
  source 1..75: mol_type = other DNA
gcaaaaatgtattctggaatcaatccagcaactcaaagttaaaacgtcgtcccccgaccttgctattggacgttt

SEQ ID NO: 766829 - DNA, 75 bp, synthetic construct
  source 1..75: mol_type = other DNA
aaatcaccaacttactggcaggcactgtatcctctgatagcactgacgccattaatggctcacaactttatggct

SEQ ID NO: 766830 - DNA, 75 bp, synthetic construct
  source 1..75: mol_type = other DNA
gaatgcgatgtatgaactgttcagaacagataaccgctttaaggtggtatccgcgccgcagctgcgcatggattc

SEQ ID NO: 766831 - DNA, 75 bp, synthetic construct
  source 1..75: mol_type = other DNA
aaaaacgcgcgcgaagccgatcgtcagctgtttgtgttcggcaaaaaagacggcgaaatcaattcaccgaaaatt

SEQ ID NO: 766832 - DNA, 75 bp, synthetic construct
  source 1..75: mol_type = other DNA
aaaaacgcgcgtgaggctgatcgccagctgtttgttcacggtaaagaggacggtgaaattaactcaccgaaaatt

SEQ ID NO: 766833 - DNA, 75 bp, synthetic construct
  source 1..75: mol_type = other DNA
ctgccaccggaacttgccagtgatacacgcccggtcacactggatttaagtcttgcaggtgaccagaagacccag

SEQ ID NO: 766834 - DNA, 75 bp, synthetic construct
  source 1..75: mol_type = other DNA
ggctcagggggttgtggtgacggggtatatttacgaggtacagacagggagttctgaaggttcagggctggcgct

SEQ ID NO: 766835 - DNA, 75 bp, synthetic construct
  source 1..75: mol_type = other DNA
gcgtgtcttatgaggatggtaaagccgttcagtccgtgacgtatcgtgattcgggggtgatattcaaagttaagc

SEQ ID NO: 766836 - DNA, 75 bp, synthetic construct
  source 1..75: mol_type = other DNA
ttgcttcttacatggcagccacccacaggcggtactcgttatgttgttggtcagattgatcgtcagcaaggggat

SEQ ID NO: 766837 - DNA, 75 bp, synthetic construct
  source 1..75: mol_type = other DNA
ggttgatgcttcggcattaccagcccttgcagaacaatttcacgttcaggggctggaaggttggttatttaccac

SEQ ID NO: 766838 - DNA, 75 bp, synthetic construct
  source 1..75: mol_type = other DNA
gtggggataaatactgtgcttcatgtgggacgggcatttacagtattgaagaatccagttggcaactcaattact

SEQ ID NO: 766839 - DNA, 75 bp, synthetic construct
  source 1..75: mol_type = other DNA
ctttcctcctggtggcctgcgatgcctcgcatgacgtggagtggtacaaaaaacatgagaaagagcgcaaggcaa

SEQ ID NO: 766840 - DNA, 75 bp, synthetic construct
  source 1..75: mol_type = other DNA
gtcgttcccgttattggagcactaactggagccacattaaacacaatgtttaccgactattatcaagatatggct

SEQ ID NO: 766841 - DNA, 75 bp, synthetic construct
  source 1..75: mol_type = other DNA
gttgcaaaactgaaagacggaggagtgcagtttgaagtcatgacccgcaaacaagtagaaaaagttcgcgacaca

SEQ ID NO: 766842 - DNA, 75 bp, synthetic construct
  source 1..75: mol_type = other DNA
atgagtgagtcagtgcacactaacacttcgttgtggtcgaaggggatgaaagcggttatcgtggcgcagtttctc

SEQ ID NO: 766843 - DNA, 75 bp, synthetic construct
  source 1..75: mol_type = other DNA
ccgctgacaacagcgtcgcactgggtaccggttccgttgcagaggaagaaaataccatctctgtaggttcttcta

SEQ ID NO: 766844 - DNA, 75 bp, synthetic construct
  source 1..75: mol_type = other DNA
gctattggttctggttccattgctgccgctgacaacagcgtcgctctgggtacaggctccgtggccaacgaagaa

SEQ ID NO: 766845 - DNA, 75 bp, synthetic construct
  source 1..75: mol_type = other DNA
gaagcaatacaccgatcagcggatggttgagatggataacaaactgtctaaaactgaaagcaagttgagcggtgg

SEQ ID NO: 766846 - DNA, 75 bp, synthetic construct
  source 1..75: mol_type = other DNA
cgccgctcacggtaccgatgccaccagcaaaatcaccaacgtcaaagacggtgacctgacggctggcagcaccga

SEQ ID NO: 766847 - DNA, 75 bp, synthetic construct
  source 1..75: mol_type = other DNA
tagcaccaagtacttcaagaccaacaccgatggcgtagatgctaacgcgcagggtaaagacagtgttgcgattgg

SEQ ID NO: 766848 - DNA, 75 bp, synthetic construct
  source 1..75: mol_type = other DNA
ttacggttcgccagttgcaaaatgccattggtgcagtcgctaccacgccgaccaaatacttccacgccaactcaa

SEQ ID NO: 766849 - DNA, 75 bp, synthetic construct
  source 1..75: mol_type = other DNA
tggcgtggtggtactgattttctccctgcaacacgagctgctgccagcctatgccttgttgatgctgattggcgt

SEQ ID NO: 766850 - DNA, 75 bp, synthetic construct
  source 1..75: mol_type = other DNA
cgctgcgtttcctgttagtactttgggtgccggtggcgctgggcattaccgataacgccacgccgacctatctca

SEQ ID NO: 766851 - DNA, 75 bp, synthetic construct
  source 1..75: mol_type = other DNA
ctccaccattgcggcgattttgctcggttccgtagccggtggtgtactggcagactggcatattctggtcgccct

SEQ ID NO: 766852 - DNA, 75 bp, synthetic construct
  source 1..75: mol_type = other DNA
cggttctcagttgaatgcgacgaatatgatgattgagcagaacagccaaatcatcaatcagcttgctggtaacac

SEQ ID NO: 766853 - DNA, 75 bp, synthetic construct
  source 1..75: mol_type = other DNA
actggccatggagttacaggcagagcctattattcgatcgaattttgacgttctgactcgctgtacgaaagcctt

SEQ ID NO: 766854 - DNA, 75 bp, synthetic construct
  source 1..75: mol_type = other DNA
ttactcgctggcggtaatgataggcatcccggtcgtgcccattggcattggcttcggtgcgctgtttgcgctggc

SEQ ID NO: 766855 - DNA, 75 bp, synthetic construct
  source 1..75: mol_type = other DNA
gagcggcttaaaagcggcgttgttgtttattgatgctcagcaaaagcgcgttggcagtgaaaccgcgtggatcaa

SEQ ID NO: 766856 - DNA, 75 bp, synthetic construct
  source 1..75: mol_type = other DNA
aaggcgatcaccttacgcgacggcaatcagaccatttctctgagtggcttaaaagcggcgttgttgtttattgat

SEQ ID NO: 766857 - DNA, 75 bp, synthetic construct
  source 1..75: mol_type = other DNA
gtgttgatttccgcgccgcgtatcgggcaatttctacgtgaagacaggctgattgccttagtgcgtcagcgtctg

SEQ ID NO: 766858 - DNA, 75 bp, synthetic construct
  source 1..75: mol_type = other DNA
taggtctatgtgtgctggtatacattatcaaaagattgattttaatatctaaatcaatggcttataaaaaagatt

SEQ ID NO: 766859 - DNA, 75 bp, synthetic construct
  source 1..75: mol_type = other DNA
tgattttggttttaggggtggcggtactggtatcgggattcattaaggtactatatgtaggctttttcatgtttc

SEQ ID NO: 766860 - DNA, 75 bp, synthetic construct
  source 1..75: mol_type = other DNA
atgaccctgagccgcagcgccggggcgcataccgatgccgttttacgtattgagcgcggcgggttgaagtcgccg

SEQ ID NO: 766861 - DNA, 75 bp, synthetic construct
  source 1..75: mol_type = other DNA
ccagtactgccgccagtttgctccggtcctgaaagctttttctcagcaaaccggtcttgacgttttccctatcag

SEQ ID NO: 766862 - DNA, 75 bp, synthetic construct
  source 1..75: mol_type = other DNA
gtcgtgcacattaaccagcgatatctggaaacggcatccctgcttgtggcgatgtcgctatggcattcccattcc

SEQ ID NO: 766863 - DNA, 75 bp, synthetic construct
  source 1..75: mol_type = other DNA
tcgcaaaaacaatgggtaagcctacctcatttgtcagtaaacaccttcgtctcattgatgcaccagaaaatgtta

SEQ ID NO: 766864 - DNA, 75 bp, synthetic construct
  source 1..75: mol_type = other DNA
tcataagagtcgttttgcgattcgttttatgccgctggacagtgaaaatggtctggtgccagagcgcctggattt

SEQ ID NO: 766865 - DNA, 75 bp, synthetic construct
  source 1..75: mol_type = other DNA
cgagcacgatggtcgccactggcgacgaataccagaaccaatgcgactgttagatgatgctgtggagcgctcatc

SEQ ID NO: 766866 - DNA, 75 bp, synthetic construct
  source 1..75: mol_type = other DNA
gccctgacgctatgtcgccctaaccgtaccggcgatatcatgaccattggcggtaatcggctggtgctgtttctc

SEQ ID NO: 766867 - DNA, 75 bp, synthetic construct
  source 1..75: mol_type = other DNA
gaagtattaaaagtgatgcgttcactggcggatgaagggatgacgatggttatagtgacgcacgagattggcttt

SEQ ID NO: 766868 - DNA, 75 bp, synthetic construct
  source 1..75: mol_type = other DNA
tgcggtattacccagagtcatcgcttcagatgttggaatttgctctagagttgttagggggcacactggtatttt

SEQ ID NO: 766869 - DNA, 75 bp, synthetic construct
  source 1..75: mol_type = other DNA
ggattgccagccgcgttgattgattggaaagatatagtaattaatgatggaacgatcaagctaattagacgtgac

SEQ ID NO: 766870 - DNA, 75 bp, synthetic construct
  source 1..75: mol_type = other DNA
aacgacgaagcgtggcaggccgccgagcggttaatctcgcatcttgatgatgaaactatcgccaaagcacaggcc

SEQ ID NO: 766871 - DNA, 75 bp, synthetic construct
  source 1..75: mol_type = other DNA
gaatattgagctggtggctgaaggcgtggaaacccaggaacaggcgaaatatttgcgccgtcatggggtgcatat

SEQ ID NO: 766872 - DNA, 75 bp, synthetic construct
  source 1..75: mol_type = other DNA
ctctatggtaatgggctggtagattcccttccgcaacctgaaaacaatgaaaactatcaggtttcttcgcaacgc

SEQ ID NO: 766873 - DNA, 75 bp, synthetic construct
  source 1..75: mol_type = other DNA
gtaataacgatgaaaactatcagctttcttcacggcactttccttttactatcaacgttaacgggccgggcgcta

SEQ ID NO: 766874 - DNA, 75 bp, synthetic construct
  source 1..75: mol_type = other DNA
acgcccattacgatgctctcgaaacccgcttctggcagttttatccgcggatgatggagcaggcgtcacgcaagg

SEQ ID NO: 766875 - DNA, 75 bp, synthetic construct
  source 1..75: mol_type = other DNA
atcacagcaacatcactgacaccaggcgctatctggacttagacaagcaagccgttagccggattatcaatgaaa

SEQ ID NO: 766876 - DNA, 75 bp, synthetic construct
  source 1..75: mol_type = other DNA
cctaataaaaaaatattaaaattgattaaatccccaaaaaaattcgctcaagacatgctcttgaaaaaaaaataa

SEQ ID NO: 766877 - DNA, 75 bp, synthetic construct
  source 1..75: mol_type = other DNA
aagatactcagaaagcttataaaaattgaagttgaacatatacataactttgatttcagtaagctccagtctctt

SEQ ID NO: 766878 - DNA, 75 bp, synthetic construct
  source 1..75: mol_type = other DNA
tttgccgattatccgcacaagtggcagttaaagcgcccggacagcaacatcgatcaccgtcgggttcctaacctg

SEQ ID NO: 766879 - DNA, 75 bp, synthetic construct
  source 1..75: mol_type = other DNA
accttgccatcgcagacggtgccagacagcaaatcggcagcacgctattttacgatccggcgtatgtgcagctta

SEQ ID NO: 766880 - DNA, 75 bp, synthetic construct
  source 1..75: mol_type = other DNA
atatgtgtgggtgaaactggaaattggtgaaatttcagttgaggcatctgaactccgtgttaaagggatgcgatc

SEQ ID NO: 766881 - DNA, 75 bp, synthetic construct
  source 1..75: mol_type = other DNA
cgtgaactggcgttacgtattacctcactgggtaatgactccaacttactgatagtgttttatgttcagataatg

SEQ ID NO: 766882 - DNA, 75 bp, synthetic construct
  source 1..75: mol_type = other DNA
ccccgccgcgtattgccgagtatcgctaccgaccggcatgcactttcggtactcatttacatgtatcttcttttc

SEQ ID NO: 766883 - DNA, 75 bp, synthetic construct
  source 1..75: mol_type = other DNA
agaagaaaagggttggttatttcgtcttccataatgaccagtggtggctggttaacgaggggcttagcgggctca

SEQ ID NO: 766884 - DNA, 75 bp, synthetic construct
  source 1..75: mol_type = other DNA
tttcgaatctacaatttagatacacaagaatataaggactacaaattacgcaaactggaagatactaacgggggt

SEQ ID NO: 766885 - DNA, 75 bp, synthetic construct
  source 1..75: mol_type = other DNA
atgatggattacctgagtgctattcaaaagttagcggttcagctgcgtaaacgtaaccacagaaacgaggagtta

SEQ ID NO: 766886 - DNA, 75 bp, synthetic construct
  source 1..75: mol_type = other DNA
ggtcggtcaaaaacaggttcccattctgcaaaaagatgacagccgctatatgccagaaagcatggatatcgttca

SEQ ID NO: 766887 - DNA, 75 bp, synthetic construct
  source 1..75: mol_type = other DNA
ccgcaataaaatcgccatttatttgcactggtatcagaaaaaaggcatcgaggttccacaaacccagcaagggga

SEQ ID NO: 766888 - DNA, 75 bp, synthetic construct
  source 1..75: mol_type = other DNA
ttaatgatgagttgtatctgtcaatttcgaagctccaggagcatgcagacactggtctacaaaatcttttgcgct

SEQ ID NO: 766889 - DNA, 75 bp, synthetic construct
  source 1..75: mol_type = other DNA
gattcgttcggcaatcgaagatggggtagtggagccacacgagcagacagcaattaatgatgagttgtatctgtc

SEQ ID NO: 766890 - DNA, 75 bp, synthetic construct
  source 1..75: mol_type = other DNA
tcggttattctttgacccatattgacggtgtagtcagatttggctcactttatgagtatgtcgcatcattcggaa

SEQ ID NO: 766891 - DNA, 75 bp, synthetic construct
  source 1..75: mol_type = other DNA
atggccagcctgaataacctggtcgggattttccccgccccggcattcacgcaggtcaaacggctggcgcaatcc

SEQ ID NO: 766892 - DNA, 75 bp, synthetic construct
  source 1..75: mol_type = other DNA
gcaggtcaagcgcctggcacaatccgcagcgacgctggccatcgaaaaaatgcagatccccgctaaaaccggggc

SEQ ID NO: 766893 - DNA, 75 bp, synthetic construct
  source 1..75: mol_type = other DNA
tcacgcaattaataatgcagaaatgcgtgaactggcgttacgtattacatcgctgttagattttctgccactgta

SEQ ID NO: 766894 - DNA, 75 bp, synthetic construct
  source 1..75: mol_type = other DNA
acgcaggacaacaggagacaacggagcatgatgccgtgcgtattaaccagcgctatctggatacggcgtccctgc

SEQ ID NO: 766895 - DNA, 75 bp, synthetic construct
  source 1..75: mol_type = other DNA
tgcagatcccggcgaaagccgccgcagcgttacctgcgtccattccactgtctgtaccaaccagcagggcagctt

SEQ ID NO: 766896 - DNA, 75 bp, synthetic construct
  source 1..75: mol_type = other DNA
tcacggattcgctggccgcgttaagttgttccattgttcccgcgcatccgtggatccacggactggggcagcaaa

SEQ ID NO: 766897 - DNA, 75 bp, synthetic construct
  source 1..75: mol_type = other DNA
cagcaggctaccagcaaatccacgacggtattattcacctggtcgatagcgcccgcacggaaacggtacgtagcg

SEQ ID NO: 766898 - DNA, 75 bp, synthetic construct
  source 1..75: mol_type = other DNA
tgggtggcggatggtttacgcagcctcggcagttcggtggatcgcaaagagttccagaacttgctggtggagatg

SEQ ID NO: 766899 - DNA, 75 bp, synthetic construct
  source 1..75: mol_type = other DNA
atattcttccgcagcaggcgatacgcgatccctttgtgctcgaatttctggaattgaaagatgaatactcagaat

SEQ ID NO: 766900 - DNA, 75 bp, synthetic construct
  source 1..75: mol_type = other DNA
acactggtgttattcgcaagagtaataacttcattgcactggcactgaaaataaaagagcctcgcaataaagaat

SEQ ID NO: 766901 - DNA, 75 bp, synthetic construct
  source 1..75: mol_type = other DNA
accgcgctggcaaagcggcaggcagaagccagagccgaagagcagcgccgacaaggtgaaatagatgcgattgag

SEQ ID NO: 766902 - DNA, 75 bp, synthetic construct
  source 1..75: mol_type = other DNA
gactggcagaccgtgaacgtgcctgcggtgccggaactcccggcagaagcgaggcaaaagccagcggtgccgcat

SEQ ID NO: 766903 - DNA, 75 bp, synthetic construct
  source 1..75: mol_type = other DNA
ttgataaaggccggattgcggaagatggcgatccgcaggtgttgatcaagaacccaccgagccagcgtttgcagg

SEQ ID NO: 766904 - DNA, 75 bp, synthetic construct
  source 1..75: mol_type = other DNA
ctgaaggtcatgcaggatctggcagaggaaggtatgacgatggtgatcgtaacccacgaaatcggttttgccgaa

SEQ ID NO: 766905 - DNA, 75 bp, synthetic construct
  source 1..75: mol_type = other DNA
ggtccgctacgcgtgcgtggcgcgaacaaagaagaggcggaaaaactggcgcgtgagctgctggcgaaagtcggt

SEQ ID NO: 766906 - DNA, 75 bp, synthetic construct
  source 1..75: mol_type = other DNA
tcgtaccggatgccttacccgtggtgcgtaaagccagctggcactgcagacaatgtcatcacgattattatgggg

SEQ ID NO: 766907 - DNA, 75 bp, synthetic construct
  source 1..75: mol_type = other DNA
gcaatacgacactgaacttccctggtttgaacacactgacgacgggctgactaagcacggtcatgagtgccctta

SEQ ID NO: 766908 - DNA, 75 bp, synthetic construct
  source 1..75: mol_type = other DNA
cactgcaggcaatgtcaccacgattattatggggagcggtactgcacacactgccagaccgggcgcttcagtgag

SEQ ID NO: 766909 - DNA, 75 bp, synthetic construct
  source 1..75: mol_type = other DNA
ccatcctgatggcggcaatgcagctcggctgtgtgcaggccggtacgctggatgatatccgcgcgctggaagctg

SEQ ID NO: 766910 - DNA, 75 bp, synthetic construct
  source 1..75: mol_type = other DNA
gcaatacgacactgagcgtccctggtttgaacacactgacgacgggctgactgagtatggtcatgagtgtcctta

SEQ ID NO: 766911 - DNA, 75 bp, synthetic construct
  source 1..75: mol_type = other DNA
gtttgtattacacattattaatttcaaacatgtggtcagcttacggtaccgtaactaacgttagttcacctggga

SEQ ID NO: 766912 - DNA, 75 bp, synthetic construct
  source 1..75: mol_type = other DNA
cagggcgaagtcgtggtgattatcgggccgtccggttccggtaaatcgaccctgctgcgctgcatcaacaaactg

SEQ ID NO: 766913 - DNA, 75 bp, synthetic construct
  source 1..75: mol_type = other DNA
catcagtaataccagcccgaatctgtttaccgtccccggtgaccggattatcgccgtgaacagtctggatggtgc

SEQ ID NO: 766914 - DNA, 75 bp, synthetic construct
  source 1..75: mol_type = other DNA
cgtggaaaataaaacgctgtctgcgctgaatatccgtaagcgtcaacggagcaccgtattgacgcttatttattg

SEQ ID NO: 766915 - DNA, 75 bp, synthetic construct
  source 1..75: mol_type = other DNA
cgcttgattaatcgtctgcagcaattcgttccggatgccttacccgtggttcgtaaagccagctggcactgcagg

SEQ ID NO: 766916 - DNA, 75 bp, synthetic construct
  source 1..75: mol_type = other DNA
atgtacgcaaaatcctttatcgctcttgatagcaacggacgtctgacgggcgcccgtactggacaggccgcacct

SEQ ID NO: 766917 - DNA, 75 bp, synthetic construct
  source 1..75: mol_type = other DNA
acgtaaagccagctggtactgcagacaatgtcaccacgattattatggggagcggtactgcacacactgccagac

SEQ ID NO: 766918 - DNA, 75 bp, synthetic construct
  source 1..75: mol_type = other DNA
caatgtcaccacgattattatggggagcggtactgcacacactgccagaccgggcgtttcagtgaggaggtggta

SEQ ID NO: 766919 - DNA, 75 bp, synthetic construct
  source 1..75: mol_type = other DNA
atgtacgcaaaatcctttctcgctcttgatcgcaacggacgtctgacgggcgcccgtactgcacaggccgcacct

SEQ ID NO: 766920 - DNA, 75 bp, synthetic construct
  source 1..75: mol_type = other DNA
atgtacgcaaaatcctttttcgctcttgattgcaacggacgtctgacgggcgcccgtactgaacaggccgcacct

SEQ ID NO: 766921 - DNA, 75 bp, synthetic construct
  source 1..75: mol_type = other DNA
atgtacgcaaaatcctttatcgctcttgatggcaacggacgtctgacgggcgcccgtactgaacaggccgcacct

SEQ ID NO: 766922 - DNA, 75 bp, synthetic construct
  source 1..75: mol_type = other DNA
cgcttgattgatcgtctgcagcaattcgttccggatgccttacccgtggttcgtaaagccagctggcactgcaga

SEQ ID NO: 766923 - DNA, 75 bp, synthetic construct
  source 1..75: mol_type = other DNA
cgcttgattgatcgtctgcagcaattcgttccggatgccttacccgtggtacgtaaagccagctggcactgcagt

SEQ ID NO: 766924 - DNA, 75 bp, synthetic construct
  source 1..75: mol_type = other DNA
cgcttgattaatcgtctgcagcaattcgttccggatgccttacccgtggtgcgtaaagccagctggcactgcagt

SEQ ID NO: 766925 - DNA, 75 bp, synthetic construct
  source 1..75: mol_type = other DNA
caatgtcaccacgattattatggggagccgtactgcacacactgccagaccgggcgcttcagtgaggagggggta

SEQ ID NO: 766926 - DNA, 75 bp, synthetic construct
  source 1..75: mol_type = other DNA
caatgtcaccacgattattatggggagctgtactgcacacactgccagaccgggcggttcagtgaggaggtggta

SEQ ID NO: 766927 - DNA, 75 bp, synthetic construct
  source 1..75: mol_type = other DNA
caatgtcaccacgattattatggggagcagtactgcacacactgccagaccgggcgattcagtgaggaggcggta

SEQ ID NO: 766928 - DNA, 75 bp, synthetic construct
  source 1..75: mol_type = other DNA
ttgatttggggattgatgcggcagagtttaaaaatgaaatcccccgtatcaaaaaccttctgaatggtgcagcca

SEQ ID NO: 766929 - DNA, 75 bp, synthetic construct
  source 1..75: mol_type = other DNA
gtcgggtattcatggcaatgccacccagaccagtatcccgggcgtgtttgccgcaggtgatgtaatggatcacat

SEQ ID NO: 766930 - DNA, 75 bp, synthetic construct
  source 1..75: mol_type = other DNA
cagcttcccgtcgagatgagtggcgcgagcagtttatagagggcaaacaggaagtcatcaaaactgacagaaccg

SEQ ID NO: 766931 - DNA, 75 bp, synthetic construct
  source 1..75: mol_type = other DNA
cactgaatttgtaggcaccatcacagcttcaaacgatgaagagttgaacaagaaattagctgagatcacggctgc

SEQ ID NO: 766932 - DNA, 75 bp, synthetic construct
  source 1..75: mol_type = other DNA
ctgaagtccctgtcgcagcagaccggtctcagtgtcttcccggtaagccttgacggaaaaggagacgctgaattt

SEQ ID NO: 766933 - DNA, 75 bp, synthetic construct
  source 1..75: mol_type = other DNA
atgaatccgtcacagcaggcggcgtttgaggccgctgccggtccggggatgtctccggctgtgctgaatctgttg

SEQ ID NO: 766934 - DNA, 75 bp, synthetic construct
  source 1..75: mol_type = other DNA
ttatcgccaggccattacttctgctggtacaggttgcatggcggcacttgatgctgaacgctacctcgacggttt

SEQ ID NO: 766935 - DNA, 75 bp, synthetic construct
  source 1..75: mol_type = other DNA
cggagatctgggaagataccgacggtcaggttgatgtatttattgctggcgttgggactggcggtacgctgactg

SEQ ID NO: 766936 - DNA, 75 bp, synthetic construct
  source 1..75: mol_type = other DNA
ccgtcatcgggtgagcgttatttaagcactgcattgtttgccgatctcttcactgagaaagaattgcaacagtaa

SEQ ID NO: 766937 - DNA, 75 bp, synthetic construct
  source 1..75: mol_type = other DNA
ttgagtttactggtgggttatgttgcatggcttgcaaccgcacacagaatgagtttttcgcgcgaaattaatctt

SEQ ID NO: 766938 - DNA, 75 bp, synthetic construct
  source 1..75: mol_type = other DNA
cactcaacttgagcgtatttctaatgctcacagccagcttttaactcaactccagcagcaactctccgataatca

SEQ ID NO: 766939 - DNA, 75 bp, synthetic construct
  source 1..75: mol_type = other DNA
caaaagcgaaagccgtataccagcaggttatcagtaaataccctggtactgatggcgctaaacaggcacaaaaac

SEQ ID NO: 766940 - DNA, 75 bp, synthetic construct
  source 1..75: mol_type = other DNA
tgaagagattaaacctggcccgcataaaattcagggtattggcgctggttttatcccggctaacctcgatctcaa

SEQ ID NO: 766941 - DNA, 75 bp, synthetic construct
  source 1..75: mol_type = other DNA
cctgaccaataatgagcagaccgcgtcagggggcgtggtggtggccaccgtcaacaaaaagccctttaccttcat

SEQ ID NO: 766942 - DNA, 75 bp, synthetic construct
  source 1..75: mol_type = other DNA
tattcggcggcctgtttttttcctgcagcgtgatggccgcaaacggcacactggcacccaccgtggtgccaatgg

SEQ ID NO: 766943 - DNA, 75 bp, synthetic construct
  source 1..75: mol_type = other DNA
gaagaagccggtgcgtgggaaacgtccacgccttacgaatccctgcttgtgaccatcagccaggctgtccgtggc

SEQ ID NO: 766944 - DNA, 75 bp, synthetic construct
  source 1..75: mol_type = other DNA
catctggcaatcaggtctattttacctggcaaggcggtgaacccactctggctggcctggattttttccgtaaag

SEQ ID NO: 766945 - DNA, 75 bp, synthetic construct
  source 1..75: mol_type = other DNA
ctcaggtaaaatgtatggctcccataaattatttaatacatcagttcctggtttgtattacactgatcctaccca

SEQ ID NO: 766946 - DNA, 75 bp, synthetic construct
  source 1..75: mol_type = other DNA
gttcagccagcctgtcagccagttactggtcgctgcccgtatggatgtgtacgtcattcgtgacggggagggcaa

SEQ ID NO: 766947 - DNA, 75 bp, synthetic construct
  source 1..75: mol_type = other DNA
cgtggaaaataaaacgctgtctgcgctgaatatccgggaaagtgacttctggcagccgggaacccgggcggtgat

SEQ ID NO: 766948 - DNA, 75 bp, synthetic construct
  source 1..75: mol_type = other DNA
cacagtatatggaacatctggggatcgagacggtgctggtcgatccgaaacgtacctttatgagtatcagcggtg

SEQ ID NO: 766949 - DNA, 75 bp, synthetic construct
  source 1..75: mol_type = other DNA
gagattgcgttgcagtattccgactacgataaaatcgcgctgggacacgcgcaatatattgattttgcagtgaaa

SEQ ID NO: 766950 - DNA, 75 bp, synthetic construct
  source 1..75: mol_type = other DNA
cgtgaaggcgcggggcgtaccattcagctggtcagtgacctgcgcggaaccggagaagaagccggtgcgtgggaa

SEQ ID NO: 766951 - DNA, 75 bp, synthetic construct
  source 1..75: mol_type = other DNA
tccaggagtcatgtaaagacaatctggtagtggaaagtaatggtgatatttatgaatgcgatcattttgtctacc

SEQ ID NO: 766952 - DNA, 75 bp, synthetic construct
  source 1..75: mol_type = other DNA
gttttcaatgtaatctcaaatgtgattactgtttttatcttgaaaaagagtcgcagtttactcatgaaaaatgga

SEQ ID NO: 766953 - DNA, 75 bp, synthetic construct
  source 1..75: mol_type = other DNA
ttgatttttctgtgcctcccacggcttatggcaagtttatgtcaaccatttttatgcaatgggttaaaaacgatg

SEQ ID NO: 766954 - DNA, 75 bp, synthetic construct
  source 1..75: mol_type = other DNA
ggggcatgcgcctacgtctcactagatggtggcgcaagtgcggaaacacctgaactaggtgatatttggattgct

SEQ ID NO: 766955 - DNA, 75 bp, synthetic construct
  source 1..75: mol_type = other DNA
tccgtcaatgaaaaatgtcctggtgggccttggctgggatgcgcgttcaacagacggtcaggactttgacctgga

SEQ ID NO: 766956 - DNA, 75 bp, synthetic construct
  source 1..75: mol_type = other DNA
gcgatgattctcttgctgcctggataaagcgaataatccgcaaagaattacagcaacgcggcatagaacccaaag

SEQ ID NO: 766957 - DNA, 75 bp, synthetic construct
  source 1..75: mol_type = other DNA
tttatgcagcatccgttacagagccgaacatgatgttctgggtaatgttgcttaacgcgatggctttcatgccaa

SEQ ID NO: 766958 - DNA, 75 bp, synthetic construct
  source 1..75: mol_type = other DNA
aatccggcacgcataccgcgatgaacggtaagcggatgccgttcacatcggctgagctggctgcttgtgcagccg

SEQ ID NO: 766959 - DNA, 75 bp, synthetic construct
  source 1..75: mol_type = other DNA
gtttttcaatggcatcatttgaaaactgtcagtttaataattgtacatataaggatatatcttattccggtaatg

SEQ ID NO: 766960 - DNA, 75 bp, synthetic construct
  source 1..75: mol_type = other DNA
ccaacattagtagtatcaacccctgttctacagagggcctaattgccgtgacgggaaatgatggagagacgcata

SEQ ID NO: 766961 - DNA, 75 bp, synthetic construct
  source 1..75: mol_type = other DNA
aaaactgatgcaaaccaaagatatgcgtaatgaacacgatcttatctgttcctgggtattcgacaaggatccgca

SEQ ID NO: 766962 - DNA, 75 bp, synthetic construct
  source 1..75: mol_type = other DNA
tgcgtaatgaacacgatcttatctgttcctgggtattcgacaaagatccgcagatcccggtctttactgaaggta

SEQ ID NO: 766963 - DNA, 75 bp, synthetic construct
  source 1..75: mol_type = other DNA
taatgctggcgattgcactccctgtacttgtcgcttatttcggaggaggtaaggtcatgtcagtttattgggtgc

SEQ ID NO: 766964 - DNA, 75 bp, synthetic construct
  source 1..75: mol_type = other DNA
taacatcacactatctggtatttctcctgaaatacaaggtacaataagtgtaatcaggtttccgtcaattggtaa

SEQ ID NO: 766965 - DNA, 75 bp, synthetic construct
  source 1..75: mol_type = other DNA
acaacgaatacaccggtaacggcgctacgacatcatttccgtataccttccgtattttcaaaaaatccgacctgg

SEQ ID NO: 766966 - DNA, 75 bp, synthetic construct
  source 1..75: mol_type = other DNA
atgttgcttttcgtgggcgagtggttatcggcgagggggaacgatatcctctttagcgctacgggcgtgacgggc

SEQ ID NO: 766967 - DNA, 75 bp, synthetic construct
  source 1..75: mol_type = other DNA
gttcgccgactggggactttcaaccagcgcagggatgtttgcccgcctgcgcgatttcctgatcagcaagttcag

SEQ ID NO: 766968 - DNA, 75 bp, synthetic construct
  source 1..75: mol_type = other DNA
gttcttccaggtcgcgcgtaaccagtgtgaaggtctggcaaaaaccaaacctgggatggtgatgggttttattgg

SEQ ID NO: 766969 - DNA, 75 bp, synthetic construct
  source 1..75: mol_type = other DNA
ggcagcggtaactatccgcgtaggttatcgtctgggtcaaggctcaacgctggatgcgcaaaccgctgcgcggac

SEQ ID NO: 766970 - DNA, 75 bp, synthetic construct
  source 1..75: mol_type = other DNA
tttcactgcgggagcaaatcgccctgttgtataacgataacccagaggttgtgacgctggcggctcacttaatgt

SEQ ID NO: 766971 - DNA, 75 bp, synthetic construct
  source 1..75: mol_type = other DNA
tttgccgtcgtggctctgttagtgtctccgctcggtattgttgatgtcgcaggacaccagattgccctgaacttt

SEQ ID NO: 766972 - DNA, 75 bp, synthetic construct
  source 1..75: mol_type = other DNA
attatgatgatgctgcgtatgcggttcctgcaacgtctgccgtcagccatcattctgcaacgagcgtcccgctaa

SEQ ID NO: 766973 - DNA, 75 bp, synthetic construct
  source 1..75: mol_type = other DNA
gccagcaggtttctggatcggctttattattggcctgacttctgccgctattatgatgatgctgcgtatgcgttt

SEQ ID NO: 766974 - DNA, 75 bp, synthetic construct
  source 1..75: mol_type = other DNA
aggctgacccggaacgtctggcactgcatgagaaagcgctggcactgtcgaaaaaagaaggcatcagctacgacg

SEQ ID NO: 766975 - DNA, 75 bp, synthetic construct
  source 1..75: mol_type = other DNA
ggacgagaccgacaaggtgcttccttcatggcaggtggactccctgcgtgaagaggcttaccgcgacaccgggaa

SEQ ID NO: 766976 - DNA, 75 bp, synthetic construct
  source 1..75: mol_type = other DNA
agaaagaagaaggcgtcgtggagtttgccgactggagtgatatcaccaacgcctctttatggggccgtctgcgcg

SEQ ID NO: 766977 - DNA, 75 bp, synthetic construct
  source 1..75: mol_type = other DNA
tggatgcacaaacagccgcacggacagggcttatggttggcgtttgtatggcgactctgaccgcaattttcacga

SEQ ID NO: 766978 - DNA, 75 bp, synthetic construct
  source 1..75: mol_type = other DNA
agtaacgcctatgacgctgtaacccgtaccagtaaacacaaggcaagacagcaggcgaagaaacatatccgatgc

SEQ ID NO: 766979 - DNA, 75 bp, synthetic construct
  source 1..75: mol_type = other DNA
ttgagtttgccgaaggcgatacccgcaccccgctggccacggcgtttaagacgctgctggacagcactgatccgg

SEQ ID NO: 766980 - DNA, 75 bp, synthetic construct
  source 1..75: mol_type = other DNA
agttttaaacgagtcgcaaaatgaggtgaaaatttctccaaaaacccgctccctcatcctctggacagaacgcgg

SEQ ID NO: 766981 - DNA, 75 bp, synthetic construct
  source 1..75: mol_type = other DNA
tcaagtacaaccgagacagcaaaggtgagcgtcacgtaatagttaacggcgtcctgatggtcaaacaaggcaaga

SEQ ID NO: 766982 - DNA, 75 bp, synthetic construct
  source 1..75: mol_type = other DNA
aacctgactgacgctgttgacagcctcggtgacgattccctgctgtggaacgctacggcgggggcattcagtgcc

SEQ ID NO: 766983 - DNA, 75 bp, synthetic construct
  source 1..75: mol_type = other DNA
gcaatttcctccaccagcagcgatgctattaacggctcacaactgtataccaccaacaagtacatcgctgatgcg

SEQ ID NO: 766984 - DNA, 75 bp, synthetic construct
  source 1..75: mol_type = other DNA
aaaaatctgtaagcaaggctgtgacatcaaacgagacgaaaatcaaagacgctatagccctgttcacagcttcga

SEQ ID NO: 766985 - DNA, 75 bp, synthetic construct
  source 1..75: mol_type = other DNA
agaaggaaatttctggtcattccgcaagggatgtcagcagaggtgacgcactatcaggggaaggactggatacaa

SEQ ID NO: 766986 - DNA, 75 bp, synthetic construct
  source 1..75: mol_type = other DNA
catgttattaggtgcggtactgcaaattactaacgtctttgggaatccgttcctgcatgattttgcccgtaaccc

SEQ ID NO: 766987 - DNA, 75 bp, synthetic construct
  source 1..75: mol_type = other DNA
ggtaatgcgggtattggtatcggcctgaatactctggttctggcagatgccatcaacggtattgctatcggttct

SEQ ID NO: 766988 - DNA, 75 bp, synthetic construct
  source 1..75: mol_type = other DNA
caactttatggcttagctgattcatttacgtcataccttggcggtggtgctgatatcagcgatgcgggtgtatta

SEQ ID NO: 766989 - DNA, 75 bp, synthetic construct
  source 1..75: mol_type = other DNA
gtttaacaccaatatgctgatccagcagaacagcgaaatcatcaatcagcttgccggtaacaccagcgaaaccta

SEQ ID NO: 766990 - DNA, 75 bp, synthetic construct
  source 1..75: mol_type = other DNA
ttgcgatgggtagtggttcccagaccacccgtggtgcgcagactgattacaccgcctacaacatggacgcaccgc

SEQ ID NO: 766991 - DNA, 75 bp, synthetic construct
  source 1..75: mol_type = other DNA
ggtgcctacaacgccagccatgacggcaaggccagcatcatcacaaacgttgctgatggtaacattggcgaaggc

SEQ ID NO: 766992 - DNA, 75 bp, synthetic construct
  source 1..75: mol_type = other DNA
aaaatacgatctccgtaggttcttccactaaccaacgccgtatcaccaacgttgccgctggtaaaaatgctactg

SEQ ID NO: 766993 - DNA, 75 bp, synthetic construct
  source 1..75: mol_type = other DNA
tggcagggaatacgggcatgatgttactggggatggtccttttcctgtttaccgtgagtggcgggacgctctggt

SEQ ID NO: 766994 - DNA, 75 bp, synthetic construct
  source 1..75: mol_type = other DNA
gccgcagtatgaaggcaaaattggcgagcaggagtacttcgataaaggcgtactgatgatcgcgatggtaaaagc

SEQ ID NO: 766995 - DNA, 75 bp, synthetic construct
  source 1..75: mol_type = other DNA
atggctaactacttcaatacactgaacctgcgccagcagctgacacagctgggcaaatgtcgctttatggggcgc

SEQ ID NO: 766996 - DNA, 75 bp, synthetic construct
  source 1..75: mol_type = other DNA
cagaaacatatggacgacatcatctccggtgaattctcctctggcatgatggcagactgggctaatgatgataag

SEQ ID NO: 766997 - DNA, 75 bp, synthetic construct
  source 1..75: mol_type = other DNA
ccgatcacccataaccagattcctgttattaccaccgaacttttggcgcagttgtacggtgctggagttaagaac

SEQ ID NO: 766998 - DNA, 75 bp, synthetic construct
  source 1..75: mol_type = other DNA
acgccacagcctgttgcttgaactaaaaaaaccgctctgtcggagcggaaaactgaaaacgttattacgcgttcc

SEQ ID NO: 766999 - DNA, 75 bp, synthetic construct
  source 1..75: mol_type = other DNA
tacgcttgcgtaccgctgctgaaaccgtttatggcagagttgcaaccgggcgacctgggtaaggctattcctgaa

SEQ ID NO: 767000 - DNA, 75 bp, synthetic construct
  source 1..75: mol_type = other DNA
cgaagaactgatcccgcaggcggatctggtggttaacctgacgccagacaagcagcactctgacgtagtgcgttc

SEQ ID NO: 767001 - DNA, 75 bp, synthetic construct
  source 1..75: mol_type = other DNA
aaggcgaaggtatggcgatcgctaaagcatgggcggcagcaaccggtggtcaccgtgcgggcgtgctggaatcgt

SEQ ID NO: 767002 - DNA, 75 bp, synthetic construct
  source 1..75: mol_type = other DNA
gtgcttacgcgctgtctgaacagctgaaagagatcatggcaccgctgttccagaaacatatggatgacatcatct

SEQ ID NO: 767003 - DNA, 75 bp, synthetic construct
  source 1..75: mol_type = other DNA
gaaagagatcatggcaccgctgttccagaaacatatggacgacatcatctccggtgaattctcctctggcatgat

SEQ ID NO: 767004 - DNA, 75 bp, synthetic construct
  source 1..75: mol_type = other DNA
tcatgcgattgagcaggtaggtaagaaactgcgcggctatatgacggatatgaaacgtattgctgttgcaggtta

SEQ ID NO: 767005 - DNA, 75 bp, synthetic construct
  source 1..75: mol_type = other DNA
agaaggtaccgatccagcatacgcagaaaaactgattcagttcggttgggaaaccatcaccgaagcactgaaaca

SEQ ID NO: 767006 - DNA, 75 bp, synthetic construct
  source 1..75: mol_type = other DNA
cggacctggcaccgttgattaaaacattgtcgctggcgtttgtggtgatcccccacgggcaacagttccgcgcgt

SEQ ID NO: 767007 - DNA, 75 bp, synthetic construct
  source 1..75: mol_type = other DNA
tgatgcaaaaagagctggaatttaacaagattggcctgattgaaaccagttcggtgctggcaggtttcactttta

SEQ ID NO: 767008 - DNA, 75 bp, synthetic construct
  source 1..75: mol_type = other DNA
gcggcgcgaagtggtcggcgattgccacggtgatcatcatcggcctcgggctggtgcagatgaccgtgctggcgc

SEQ ID NO: 767009 - DNA, 75 bp, synthetic construct
  source 1..75: mol_type = other DNA
cgctgctgtttggctactttggccgcaaaatttatcgccccggtctacatttctcgctggcgtcggtggcaccga

SEQ ID NO: 767010 - DNA, 75 bp, synthetic construct
  source 1..75: mol_type = other DNA
cctggcaccgttgattaaaacattgtcgctggcgtttgtggtgatcccccacgggcaacagttccgcgcgttgat

SEQ ID NO: 767011 - DNA, 75 bp, synthetic construct
  source 1..75: mol_type = other DNA
tcagcgaaaagaaatcagccaccttgaactcaccacgctgtactggctgaacgtcgggctggggattgtagtgtg

SEQ ID NO: 767012 - DNA, 75 bp, synthetic construct
  source 1..75: mol_type = other DNA
ctgctgggtctgatggtggtgtcgagcaactttgtgccgctggtgtttggcgagaagtggaacagcatcatcccg

SEQ ID NO: 767013 - DNA, 75 bp, synthetic construct
  source 1..75: mol_type = other DNA
tcaacgtattcaaaacctttctgtttattccggcgattgttataggtgggcagatggcgggcgcaatcggcgtca

SEQ ID NO: 767014 - DNA, 75 bp, synthetic construct
  source 1..75: mol_type = other DNA
cgccttatccatcctacggttctgtgctcgggacctgtaggcctgataagacgcgtcagcgtcgcatcaggcact

SEQ ID NO: 767015 - DNA, 75 bp, synthetic construct
  source 1..75: mol_type = other DNA
ctggtatctggcacgccagttgcctgacatcaacattcaggtcttcaccaatagccatccgatttgccatgaact

SEQ ID NO: 767016 - DNA, 75 bp, synthetic construct
  source 1..75: mol_type = other DNA
tccctttcacatccggctgaaaagccattatgcgcataaagcagatatcgcgcgcgaggcgctcgcgtggattga

SEQ ID NO: 767017 - DNA, 75 bp, synthetic construct
  source 1..75: mol_type = other DNA
actatttgcaacagtgccctttttctgctccttgagaatgcaaaaagcaatgggatttttgattttattgaaaat

SEQ ID NO: 767018 - DNA, 75 bp, synthetic construct
  source 1..75: mol_type = other DNA
aataaaaaataacaacggctccagacgaaaatttcagattggaacgaccaaattcagcacacatgagccacatcc

SEQ ID NO: 767019 - DNA, 75 bp, synthetic construct
  source 1..75: mol_type = other DNA
actatattgccggtgggcaacggcagtttgttgaaatgatgaacaactatgccgagaagctgcatctcaaggata

SEQ ID NO: 767020 - DNA, 75 bp, synthetic construct
  source 1..75: mol_type = other DNA
atgattaaggtcagcgcgctaggctctcgtcatagaaaaacattcgacgatgtaatgacggagccgccaaaatct

SEQ ID NO: 767021 - DNA, 75 bp, synthetic construct
  source 1..75: mol_type = other DNA
ggcgcgaagatgagtggatccctattcgtccgggaacagatgccgcactggttaacggtctggcgtacgtcatga

SEQ ID NO: 767022 - DNA, 75 bp, synthetic construct
  source 1..75: mol_type = other DNA
agatgccgcactggttaacggtctggcgtatgtcatgatcaccgaaaacctggtggatcaggcattcctcgataa

SEQ ID NO: 767023 - DNA, 75 bp, synthetic construct
  source 1..75: mol_type = other DNA
accactcaacgtccgtctcctctcgctaaggggaatccgtcacatacaaaccttgttcaggttgaaaaggtgtaa

SEQ ID NO: 767024 - DNA, 75 bp, synthetic construct
  source 1..75: mol_type = other DNA
cttgcgactggcattatatttatatgcttttcttttttcccaacaaccagaagcatgttcacttcatggtgtggt

SEQ ID NO: 767025 - DNA, 75 bp, synthetic construct
  source 1..75: mol_type = other DNA
cttcgtattgtcactaatacaacaaacggctaacttggatgcaaagaccattacattcatgtctgtggctacttt

SEQ ID NO: 767026 - DNA, 75 bp, synthetic construct
  source 1..75: mol_type = other DNA
acaacagcgagaaatttaacacgagcagccggaagcaaagcaaccgacatgctatttcatcgcaatggaaaactt

SEQ ID NO: 767027 - DNA, 75 bp, synthetic construct
  source 1..75: mol_type = other DNA
tcgaattatcccgctcacaggcgcctgttacaattagcaagacagctatactctttgcagaagcagacaatgata

SEQ ID NO: 767028 - DNA, 75 bp, synthetic construct
  source 1..75: mol_type = other DNA
ccggtcgcataactatgggacacggtctgaatgttacagaagatgtatttgcaggccgttttgcgattaacagca

SEQ ID NO: 767029 - DNA, 75 bp, synthetic construct
  source 1..75: mol_type = other DNA
tggttcgcaggtcaatggtgcgctgggtatcggcgttcagaacgccctggggggaattcaattgctttcggggat

SEQ ID NO: 767030 - DNA, 75 bp, synthetic construct
  source 1..75: mol_type = other DNA
ggcgtcttctgggaatcggctggcgaaggtgaatacaccgttgccgatatcaccaaagaagatcgtggtactgaa

SEQ ID NO: 767031 - DNA, 75 bp, synthetic construct
  source 1..75: mol_type = other DNA
attatctctgttggcactgagtatatattctcattttagtgtcgcgacagaattaaacctggattttatccaagg

SEQ ID NO: 767032 - DNA, 75 bp, synthetic construct
  source 1..75: mol_type = other DNA
gcacagacattaaaatttaatattcctcaggcgtatttactgagtaaaacagaccctgcacgctgggattatggc

SEQ ID NO: 767033 - DNA, 75 bp, synthetic construct
  source 1..75: mol_type = other DNA
gaatggcagctcaacagtctgcgcgaagaggcgtaccgcgacacacggtcgcaggatgcagcaggtgcacaattc

SEQ ID NO: 767034 - DNA, 75 bp, synthetic construct
  source 1..75: mol_type = other DNA
ggaaatggaaagcagtgtcgtttttccgcgaaaggtttaaaagcgaataccaataaagttcaggaggttcgttgt

SEQ ID NO: 767035 - DNA, 75 bp, synthetic construct
  source 1..75: mol_type = other DNA
gcaaagagtttttcagagcgtacggacctgcaacttctgacctaccgttatcagagtaaagggtatgtggagttc

SEQ ID NO: 767036 - DNA, 75 bp, synthetic construct
  source 1..75: mol_type = other DNA
ggagtacgcgcgggtatgcgccggtgattaacggggtggccccgaccacggcccgtatcaccgtgacgcagaaca

SEQ ID NO: 767037 - DNA, 75 bp, synthetic construct
  source 1..75: mol_type = other DNA
caggccacaaaagagcgtgtcggcgacacggtgaaggtggatgtggcagagtttgcggaagccgatcctgagcgt

SEQ ID NO: 767038 - DNA, 75 bp, synthetic construct
  source 1..75: mol_type = other DNA
tatcgtctgggtcagggttcaacgctggatgcacaaacagcagcgcggaccggccttatggtgggtgtctgtatg

SEQ ID NO: 767039 - DNA, 75 bp, synthetic construct
  source 1..75: mol_type = other DNA
gatgcgcgatattcgtaacgaaaaaggcaccgcgaagcccgatcctgcggttatgaaacgactgattcaactcgg

SEQ ID NO: 767040 - DNA, 75 bp, synthetic construct
  source 1..75: mol_type = other DNA
gaatggcagctcaacactctgcgcgaagaggcgtaccgcgacacaccgtcgcaggatgcagcaggtgcacaattc

SEQ ID NO: 767041 - DNA, 75 bp, synthetic construct
  source 1..75: mol_type = other DNA
gaatggcagctcaacaatctgcgcgaagaggcgtaccgcgacacacagtcgcaggatgcagcaggtgcacaattc

SEQ ID NO: 767042 - DNA, 75 bp, synthetic construct
  source 1..75: mol_type = other DNA
caggaggagaaccgccgcctgaagcagcaggctgctgatcgcgatgcgcgtgatgcacaggtcagacaggagcaa

SEQ ID NO: 767043 - DNA, 75 bp, synthetic construct
  source 1..75: mol_type = other DNA
catctgtttttgattcggtgtccctgttcctgaacggggcttactcaaagtatgcctggtcggacaagccggatt

SEQ ID NO: 767044 - DNA, 75 bp, synthetic construct
  source 1..75: mol_type = other DNA
gcgagcgacacgagcattacggtatcccgcatggctttagttcgcgtgttgcgcttgaacgttatttgaatggtt

SEQ ID NO: 767045 - DNA, 75 bp, synthetic construct
  source 1..75: mol_type = other DNA
tatcttccatcagtttttagccgtattttgctaccgcgtaaagtattgttcactacaggtaaattacaatggctc

SEQ ID NO: 767046 - DNA, 75 bp, synthetic construct
  source 1..75: mol_type = other DNA
ttttcgattatgctgctgacattagaattaatacagttaattgtgttggtgtaatgggggcaggggttgcttttg

SEQ ID NO: 767047 - DNA, 75 bp, synthetic construct
  source 1..75: mol_type = other DNA
cttctgcgcagaccgtatctctggaagactacgtttcccgcatgaaagaagggcaggagaaaatctactacatca

SEQ ID NO: 767048 - DNA, 75 bp, synthetic construct
  source 1..75: mol_type = other DNA
ggcaccaaatcattcctcgaatcgctgggttccgaccaggcaaaagatagccagttgatcggccagtttggtgtt

SEQ ID NO: 767049 - DNA, 75 bp, synthetic construct
  source 1..75: mol_type = other DNA
cccgcatggctttagttcgcgtgttgcgcttgaacgttatttgaatggtttggtgatgcttccaattagtagaac

SEQ ID NO: 767050 - DNA, 75 bp, synthetic construct
  source 1..75: mol_type = other DNA
ttataacacgaaatcccgttatgaaatgcgggtgtcccggcgactgggaaatagtaatctcagcttgtctgggtg

SEQ ID NO: 767051 - DNA, 75 bp, synthetic construct
  source 1..75: mol_type = other DNA
tatccggcaggacagtattatgttgatgtcattgttaatcaggaaaacgtgggtaaggcccatttgtctattacg

SEQ ID NO: 767052 - DNA, 75 bp, synthetic construct
  source 1..75: mol_type = other DNA
gcgctatgaagctcgtctgtcgcaccgttttgacggcacatacctgagcggctcttactggcgtcaggattactg

SEQ ID NO: 767053 - DNA, 75 bp, synthetic construct
  source 1..75: mol_type = other DNA
ttgattctgtatctgtgttcctgaacggttcatataaccgttacgcaaatactgataaagcggattattcagcgt

SEQ ID NO: 767054 - DNA, 75 bp, synthetic construct
  source 1..75: mol_type = other DNA
acttcggcatcgctaactcgattattcagcgaaaagaaatcagccatcttgaactcaccacgctgtactggctga

SEQ ID NO: 767055 - DNA, 75 bp, synthetic construct
  source 1..75: mol_type = other DNA
gacctcgttgtcactctggaagatgaaagcgggcataagactgaacggatttatccggtgacgacactgcccact

SEQ ID NO: 767056 - DNA, 75 bp, synthetic construct
  source 1..75: mol_type = other DNA
gatcaccaacgtcgcagcggggtcggcggataccgatgcggttaacgtgggtcagttgaaagtaacggacgcgca

SEQ ID NO: 767057 - DNA, 75 bp, synthetic construct
  source 1..75: mol_type = other DNA
gttgagacgagtattgcgctgggtagcgaatccgtctccagccgtgtgattgttaaaggttctcgtaacaccagc

SEQ ID NO: 767058 - DNA, 75 bp, synthetic construct
  source 1..75: mol_type = other DNA
cactgacgccgttaacggctcgcagctcaaaaccaccaacgacaacgtgtcgaccaacaccaccaacatcgccac

SEQ ID NO: 767059 - DNA, 75 bp, synthetic construct
  source 1..75: mol_type = other DNA
ctgatgcaatcaacggtattgctatcggtagcaacgcgagtgcaaatcatgcaaacagtattgcgatgggtagtg

SEQ ID NO: 767060 - DNA, 75 bp, synthetic construct
  source 1..75: mol_type = other DNA
caccaacatctctaacctgactgagacggtgactaatcttggtgaggatgcgctgaaatgggataaggacaatgg

SEQ ID NO: 767061 - DNA, 75 bp, synthetic construct
  source 1..75: mol_type = other DNA
taacacgattgctctgggcaatcaaagcctggcagtagctgctggtgcaattgccatcggtcaggggaataaagc

SEQ ID NO: 767062 - DNA, 75 bp, synthetic construct
  source 1..75: mol_type = other DNA
cactgacgccgttaacggctcacagctcaaaaccaccaacgataacgtgacgaccaacaccaccaacatcgccac

SEQ ID NO: 767063 - DNA, 75 bp, synthetic construct
  source 1..75: mol_type = other DNA
tgagaacgcgctgctgtgggatgcgaccgccaataacggcgaaggggcttacaacgccagtcatgacggcaaggc

SEQ ID NO: 767064 - DNA, 75 bp, synthetic construct
  source 1..75: mol_type = other DNA
ttggtgacgcactggaagcgatcgataccacgctggatgacgccctgctctgggatgcaacagccaatgacggtg

SEQ ID NO: 767065 - DNA, 75 bp, synthetic construct
  source 1..75: mol_type = other DNA
cactgacgccgttaacggctcccagctcaaaaccaccaacgagaacgtgtcgaccaacaccaccaacatcgccac

SEQ ID NO: 767066 - DNA, 75 bp, synthetic construct
  source 1..75: mol_type = other DNA
cactgacgccgttaacggctctcagctcaaaaccaccaacgagaacgtgccgaccaacaccaccaacatcgccac

SEQ ID NO: 767067 - DNA, 75 bp, synthetic construct
  source 1..75: mol_type = other DNA
cactgacgccgttaacggctctcagctcaaaaccaccaacgacaacgtggcgaccaacaccaccaacatcgccac

SEQ ID NO: 767068 - DNA, 75 bp, synthetic construct
  source 1..75: mol_type = other DNA
gcaagcgtgatcactgatgtcgcaaacggggatgtttcaagcacaagctctgatgctgtgaacggctcgcaactc

SEQ ID NO: 767069 - DNA, 75 bp, synthetic construct
  source 1..75: mol_type = other DNA
gtgtcgaccaacaccaccaacatcgccactaacaccaccaacatcaccaacctgacggattccgttggcgacctt

SEQ ID NO: 767070 - DNA, 75 bp, synthetic construct
  source 1..75: mol_type = other DNA
tagcaccgacgctatcaacggttctcagttgaatgcaaccaacatgatgatccagcagaacagcgaaatcatcaa

SEQ ID NO: 767071 - DNA, 75 bp, synthetic construct
  source 1..75: mol_type = other DNA
caacaacgtcggtgaagccctggatgcgctcgataataacgcgctgctgtgggatgcgaccgccaataacggcga

SEQ ID NO: 767072 - DNA, 75 bp, synthetic construct
  source 1..75: mol_type = other DNA
atgctctggaacggcactgcattcaacgccgctcatggtacggaaaccaccagcaccatcaccaacgtgaaagct

SEQ ID NO: 767073 - DNA, 75 bp, synthetic construct
  source 1..75: mol_type = other DNA
accctggccgggacgctttacccggagctcaccggcggaaagctgacgatgacggctatccgcctgatggctgac

SEQ ID NO: 767074 - DNA, 75 bp, synthetic construct
  source 1..75: mol_type = other DNA
gctgtcactcacccgcgttgatgaatcactggccgcgctttatggcgatatcggtaaacaggcggaatcgctcat

SEQ ID NO: 767075 - DNA, 75 bp, synthetic construct
  source 1..75: mol_type = other DNA
tccagaatatatttttcagataacttttatgctgggacaaatttatggattgagaatgtaaaaaacaaaggaata

SEQ ID NO: 767076 - DNA, 75 bp, synthetic construct
  source 1..75: mol_type = other DNA
ctgacggctggcagcaccgatgccgttaacggctctcagctgaaaaccaccaacgatgctgtggcgacgaatacc

SEQ ID NO: 767077 - DNA, 75 bp, synthetic construct
  source 1..75: mol_type = other DNA
gcagaactctgtcggtgaattctcagtcggtagtgcggatggtcaacgtcagatcactaacgtcgcagcaggttc

SEQ ID NO: 767078 - DNA, 75 bp, synthetic construct
  source 1..75: mol_type = other DNA
ttataacgcagttgcctctcatgccagcagtgtagccatcggtcaggacagcatcagcgaagttgatacgggtat

SEQ ID NO: 767079 - DNA, 75 bp, synthetic construct
  source 1..75: mol_type = other DNA
actctgttgccgatggcgataacagcgtggcaatcggtcatggcagcaacagcatcgttgagacgagtattgcgc

SEQ ID NO: 767080 - DNA, 75 bp, synthetic construct
  source 1..75: mol_type = other DNA
attgcgctgggaaatatcgctaaagctgctggtattatgagcatcggtctcggtgataatgccaatgcctcaaaa

SEQ ID NO: 767081 - DNA, 75 bp, synthetic construct
  source 1..75: mol_type = other DNA
cagcaacgttggtgacgcactggaagcgatcgataccacgctggatgacgccctgctctgggatgcaacagccaa

SEQ ID NO: 767082 - DNA, 75 bp, synthetic construct
  source 1..75: mol_type = other DNA
caggttcgatcgccgatgaaactaataccatatctgtggggtcatcaactaatcagcgccgcatcaccaatgttg

SEQ ID NO: 767083 - DNA, 75 bp, synthetic construct
  source 1..75: mol_type = other DNA
ctccttagtggtacaggacgcaattaacggtatcgctatcggttccagtgctcgcgcgaaccatgctaacagcat

SEQ ID NO: 767084 - DNA, 75 bp, synthetic construct
  source 1..75: mol_type = other DNA
aatgccaatggattgtattcactcgcgataggatacaacagtaaaacaagcaaagataacgctatcgcgttggga

SEQ ID NO: 767085 - DNA, 75 bp, synthetic construct
  source 1..75: mol_type = other DNA
attaataatgctcccagtgtaatcactgatgttgcaaacggtgcagtctcgtccaccagcagcgacgccattaac

SEQ ID NO: 767086 - DNA, 75 bp, synthetic construct
  source 1..75: mol_type = other DNA
tcggaagaaggtgttgtgattggttatgacaccacggatggcgaactgcttggcgcgttgtcaattggtgatgat

SEQ ID NO: 767087 - DNA, 75 bp, synthetic construct
  source 1..75: mol_type = other DNA
taaaaactacatcgaagataacggtgcgggtattaactatgtacgtaccaacgacagcggcttagcgttcaacga

SEQ ID NO: 767088 - DNA, 75 bp, synthetic construct
  source 1..75: mol_type = other DNA
gtggaacaaagcggctggcgcgttcagcgccgcgcacggtaccgaagctaccagcaagatcaccaacttactggc

SEQ ID NO: 767089 - DNA, 75 bp, synthetic construct
  source 1..75: mol_type = other DNA
caatgggactcggttaaaaaggcatacagcgcagcacacggctccgatgccaccagcaaaattaccaatattaag

SEQ ID NO: 767090 - DNA, 75 bp, synthetic construct
  source 1..75: mol_type = other DNA
aaaattgttaatatggcaaaagggagtatcgctaaggatagcaacgatgccatcaatggctcacaactttttgat

SEQ ID NO: 767091 - DNA, 75 bp, synthetic construct
  source 1..75: mol_type = other DNA
aatggtaatgcgggtattggtatcggcctgaacactttagttctggctgatgcgatcaacggtattgctatcggt

SEQ ID NO: 767092 - DNA, 75 bp, synthetic construct
  source 1..75: mol_type = other DNA
gccgctcacgggaaagataaaactgccagtgtaatcactaacgtcgctaacggtgcagtctctgccaccagtagc

SEQ ID NO: 767093 - DNA, 75 bp, synthetic construct
  source 1..75: mol_type = other DNA
gtgccgctggtggcagcaacagccttgctttcggtagccagtccagggcaaacggcaatgattctgtcgccctcg

SEQ ID NO: 767094 - DNA, 75 bp, synthetic construct
  source 1..75: mol_type = other DNA
gaatgctgtggtgaacactgacggcagtatcactacaccaacttatgccatcgctggcggcagttacaacaacgt

SEQ ID NO: 767095 - DNA, 75 bp, synthetic construct
  source 1..75: mol_type = other DNA
agcagcgacgcgattaacggctcacaactctataccactaataaatatatcgcagatgctctgggcggtgatgca

SEQ ID NO: 767096 - DNA, 75 bp, synthetic construct
  source 1..75: mol_type = other DNA
tggatgacgccctgctctgggatgcaacagccaatgacggtgctggtgcattcagcgccggtcgtggggtagata

SEQ ID NO: 767097 - DNA, 75 bp, synthetic construct
  source 1..75: mol_type = other DNA
caaactggctacaccgcctacaacatggatgcaccgcagaactctgtgggtgaattctccgtaggtagcgaagac

SEQ ID NO: 767098 - DNA, 75 bp, synthetic construct
  source 1..75: mol_type = other DNA
ctattggtggtggtacttacaacggcgaatcggctgttgctttaggtgtgtcgatggtgagcgccaatggtcgtt

SEQ ID NO: 767099 - DNA, 75 bp, synthetic construct
  source 1..75: mol_type = other DNA
gcgtagatgctaacgcccagggtaaagacagtgtggcgattggttctggatccattgctgccgctgacaacagcg

SEQ ID NO: 767100 - DNA, 75 bp, synthetic construct
  source 1..75: mol_type = other DNA
attcaattgctctgggtgctgattctgtcgcgactgaagcggatactgtctccgtgggtaacacaacagctcagc

SEQ ID NO: 767101 - DNA, 75 bp, synthetic construct
  source 1..75: mol_type = other DNA
ataacgcgcatgcaaaaggggtgaatagcatcgcgatgggctccgggagcattgccgataaagtcaatactatcg

SEQ ID NO: 767102 - DNA, 75 bp, synthetic construct
  source 1..75: mol_type = other DNA
agcggtggtatcgcttctgcaatggcgatgaccggtctgccgcaggcttacacgccgggtgccagcatggcctct

SEQ ID NO: 767103 - DNA, 75 bp, synthetic construct
  source 1..75: mol_type = other DNA
agcaacagcagtgctgcaggtacaaaagccactgcgttgggtaatgcagctaaagctacaaaaattatgagcatc

SEQ ID NO: 767104 - DNA, 75 bp, synthetic construct
  source 1..75: mol_type = other DNA
aacaccaccaacatcaccaacctgacggattccgttggcgaccttaaggacgattctctgctgtggaacaaagcg

SEQ ID NO: 767105 - DNA, 75 bp, synthetic construct
  source 1..75: mol_type = other DNA
atggtgagcgccaatggtcgttgggtctacaaattacaaggtagtaccaatagccagggtgaatactccgccgcg

SEQ ID NO: 767106 - DNA, 75 bp, synthetic construct
  source 1..75: mol_type = other DNA
accagcttgctggtaacactagcgaaacctacatcgaagataacggtgcgggtattaactatgtacgtaccaacg

SEQ ID NO: 767107 - DNA, 75 bp, synthetic construct
  source 1..75: mol_type = other DNA
gcatgggattttctgaagattgtctcatccgggcatgagggggcgataacgagtctccatgctggttcaccttat

SEQ ID NO: 767108 - DNA, 75 bp, synthetic construct
  source 1..75: mol_type = other DNA
ttttctctcgatgttgcacagaagttcgctaggcagctagcaacttatcataaggataacatcagtgatgtaaaa

SEQ ID NO: 767109 - DNA, 75 bp, synthetic construct
  source 1..75: mol_type = other DNA
tgcgtaaaacaggaaaagggttaaaagctgggatgctctatttgctggttctggcattgataatggtcctgggat

SEQ ID NO: 767110 - DNA, 75 bp, synthetic construct
  source 1..75: mol_type = other DNA
ttgaagggaatagaggttagagtaaacactgattattttgctaataaagaatattttgatgggctagcgaaaaaa

SEQ ID NO: 767111 - DNA, 75 bp, synthetic construct
  source 1..75: mol_type = other DNA
atcacaaaagcttaagttagaacgtgaaccattgaatttggaagagcaggctctttcgctagttggcacggatat

SEQ ID NO: 767112 - DNA, 75 bp, synthetic construct
  source 1..75: mol_type = other DNA
atcacaaaagcttaagttagaacgtaaaccattgaatttggaagagcaggctctttcgctagttggtactgatat

SEQ ID NO: 767113 - DNA, 75 bp, synthetic construct
  source 1..75: mol_type = other DNA
tatctggctaaatttatttcccagtactggactacatgctggccatcgacggaagaaggccaagaaatacgttat

SEQ ID NO: 767114 - DNA, 75 bp, synthetic construct
  source 1..75: mol_type = other DNA
atttgtcagagtatttgaaagcatatcctcttcttgatgataaagaaattactctgtctaaatggtataaggcgc

SEQ ID NO: 767115 - DNA, 75 bp, synthetic construct
  source 1..75: mol_type = other DNA
cagtcctgtaccttatcttcttgagagagcagtacgttggtcaacaatgactatgtcagaatggcttgaggaact

SEQ ID NO: 767116 - DNA, 75 bp, synthetic construct
  source 1..75: mol_type = other DNA
acaaaaaagggcgttgggattggctagatagagcgtgtgatgttagcaaggaagaactgaaccaggaagaatggt

SEQ ID NO: 767117 - DNA, 75 bp, synthetic construct
  source 1..75: mol_type = other DNA
tcctctgcttgatgataaagaaatcacactttctaaatggtataaggcgctggcgtttgagcatggtgcaagttt

SEQ ID NO: 767118 - DNA, 75 bp, synthetic construct
  source 1..75: mol_type = other DNA
tcctcttcttgaggataaagaaatcacactttctgaatggtataaagcgctggcgtttgagcatagcgcaagctt

SEQ ID NO: 767119 - DNA, 75 bp, synthetic construct
  source 1..75: mol_type = other DNA
gaaaatgaactattgccaatgaaaaattaccaaggtaatgcagttattaactacacatcagcagatatcccatgg

SEQ ID NO: 767120 - DNA, 75 bp, synthetic construct
  source 1..75: mol_type = other DNA
tgaagcgtatggcaagtctgattgagtacacgacagcatgggctattggtcagggtgtcagatttaccgacagga

SEQ ID NO: 767121 - DNA, 75 bp, synthetic construct
  source 1..75: mol_type = other DNA
gataaagacaaacccgttacgatccgcatcaccgattacaagcggaatctcgatcaaaatgccaaatttcacgcg

SEQ ID NO: 767122 - DNA, 75 bp, synthetic construct
  source 1..75: mol_type = other DNA
gtgaagcaaacaatcttcctccgaactaagcaacaacagcaagctgcaataaatgccatcctcgcaacaccactc

SEQ ID NO: 767123 - DNA, 75 bp, synthetic construct
  source 1..75: mol_type = other DNA
gacaaggcagttatgccggtttagaaaatggcactgcaattggtgctcaagccagtgctcaggggaaaaattcag

SEQ ID NO: 767124 - DNA, 75 bp, synthetic construct
  source 1..75: mol_type = other DNA
tcagatcgtactgtccgcatcaaggtaggttatggggctggaagaaaaggtaaccgatgctctggctggagatat

SEQ ID NO: 767125 - DNA, 75 bp, synthetic construct
  source 1..75: mol_type = other DNA
gtattcccgggttttggccttttcttagaatgttgttaacttatgaggatggttatattagatatgatgtcgatg

SEQ ID NO: 767126 - DNA, 75 bp, synthetic construct
  source 1..75: mol_type = other DNA
cacaaggcgggaactttacctttaactttctgccactcggtgcaattgatgggatgcgtatcgggtcgacactga

SEQ ID NO: 767127 - DNA, 75 bp, synthetic construct
  source 1..75: mol_type = other DNA
gccagcagcatccggtcacccagtttaccgatcagttgcgcggtattattcacgccgacgaaaaactggcgcggg

SEQ ID NO: 767128 - DNA, 75 bp, synthetic construct
  source 1..75: mol_type = other DNA
tggctgttgtggttgatgatcatttccagggcgttacagaaatagtgcgtggggctgatctgattgaaccaacag

SEQ ID NO: 767129 - DNA, 75 bp, synthetic construct
  source 1..75: mol_type = other DNA
acgggtagatcataaccggtccaagagaccgggtgacccgacatttccatcttatgggtggtgtagagaacgtga

SEQ ID NO: 767130 - DNA, 75 bp, synthetic construct
  source 1..75: mol_type = other DNA
gcaaatcacaacggtagatggattgtttgaagactggcacaaagacctggttaggcggttgaagcatccacaaat

SEQ ID NO: 767131 - DNA, 75 bp, synthetic construct
  source 1..75: mol_type = other DNA
gcaactgaccacagtagatggactgtttgaagactggcacaaagacctcgttaaacgattaaaacatcctcacat

SEQ ID NO: 767132 - DNA, 75 bp, synthetic construct
  source 1..75: mol_type = other DNA
ttcatatcggtgcaacaaaatacattatataccacattaaaaaacacaatggataataatatgtcaagggagaaa

SEQ ID NO: 767133 - DNA, 75 bp, synthetic construct
  source 1..75: mol_type = other DNA
gcagacgccaacgcgcagggtaaagacagtgttgcgattggttctggttccattgctgccgctgacaacagcgtc

SEQ ID NO: 767134 - DNA, 75 bp, synthetic construct
  source 1..75: mol_type = other DNA
accaactacactgcctacaacatggatgcaccgcagaactctgtgggtgaattctctgtcggcagtgaagacggt

SEQ ID NO: 767135 - DNA, 75 bp, synthetic construct
  source 1..75: mol_type = other DNA
tgtaggttataacgcagttgcctctcatgccagcagtgtagccatcggtcaggacagcatcagcgaagttgatac

SEQ ID NO: 767136 - DNA, 75 bp, synthetic construct
  source 1..75: mol_type = other DNA
acggtgatgatgatgatatcattttaactcctaagtatccaggagagcagcatgacatgttcctaagaaggtatt

SEQ ID NO: 767137 - DNA, 75 bp, synthetic construct
  source 1..75: mol_type = other DNA
attgctgaacgcagtccgacaatgcgggcggatattttcacccgcatggaattactgattgaagaagacgatcgt

SEQ ID NO: 767138 - DNA, 75 bp, synthetic construct
  source 1..75: mol_type = other DNA
ctcagtcgcagcccgactcggggctggtgctggcgtaaatggagatggaagtataaatgcgccaagctacaagct

SEQ ID NO: 767139 - DNA, 75 bp, synthetic construct
  source 1..75: mol_type = other DNA
ttcttctaccaaccagcgccgtatcaccaacgttgctgccggtgttaatgccaccgatgcggttaacgtttcaca

SEQ ID NO: 767140 - DNA, 75 bp, synthetic construct
  source 1..75: mol_type = other DNA
atgctggcattaggtatgtttgtttttatgcgtcagacgctgccctaccagagcatgcagcgcagcgcggattat

SEQ ID NO: 767141 - DNA, 75 bp, synthetic construct
  source 1..75: mol_type = other DNA
gatgagcgcgtagcgcaaaatacccagagcattactaacctgaacaatcaggtcactaatctggatactcgcgtt

SEQ ID NO: 767142 - DNA, 75 bp, synthetic construct
  source 1..75: mol_type = other DNA
cgcagaccaactacactgcctacaacatggacgcaccgcagaactctgtgggtgagttctctgtcggcagtgaag

SEQ ID NO: 767143 - DNA, 75 bp, synthetic construct
  source 1..75: mol_type = other DNA
gtatcaccaacgttgctgccggtgttaatgccaccgatgcggttaacgtttcgcaactgaagtcttctgaagcag

SEQ ID NO: 767144 - DNA, 75 bp, synthetic construct
  source 1..75: mol_type = other DNA
cagcaacagcatcgttgagacgagtattgcgctgggtagcgaatccgtctccagccgtttgattgtgaaaggctc

SEQ ID NO: 767145 - DNA, 75 bp, synthetic construct
  source 1..75: mol_type = other DNA
tacccatgcaaatttagagatgatatttataaattatgcaaatctgccacccttacttttacgatagctaatgat

SEQ ID NO: 767146 - DNA, 75 bp, synthetic construct
  source 1..75: mol_type = other DNA
tatgactctggggccgttgatcggacggctttgcgcggaagagattctccacgataagcgttcttcgcttttgag

SEQ ID NO: 767147 - DNA, 75 bp, synthetic construct
  source 1..75: mol_type = other DNA
cgttttaatgtagaagttcaagatgttggtggatgtgaagctttacaaccatatatcgaaaaaataacctcagga

SEQ ID NO: 767148 - DNA, 75 bp, synthetic construct
  source 1..75: mol_type = other DNA
tgctaacggcctttgaattattctttactgaagaacatgcggattatgattactacaatcaaaaaatatcactaa

SEQ ID NO: 767149 - DNA, 75 bp, synthetic construct
  source 1..75: mol_type = other DNA
ggagggcatgcattgcggattggaatatcttgcgaaatttatttctcaatactggactacatgctggccatctct

SEQ ID NO: 767150 - DNA, 75 bp, synthetic construct
  source 1..75: mol_type = other DNA
gctattgaacaactggaaagaatagctatttttttcaggcaatctgaacccacaagtcctgtaccttatctcctt

SEQ ID NO: 767151 - DNA, 75 bp, synthetic construct
  source 1..75: mol_type = other DNA
ggcggctggtgcgccagagcaaaaacggttacaagaccgggtcagccgtcttttggaactgaactatcctgttca

SEQ ID NO: 767152 - DNA, 75 bp, synthetic construct
  source 1..75: mol_type = other DNA
agatccgccaccataacaaatgcgtgattctggaactgctgtaccggcaaaaacgtgccaataaatcgacgctcg

SEQ ID NO: 767153 - DNA, 75 bp, synthetic construct
  source 1..75: mol_type = other DNA
atgagagcctgcattaacaatcaacagattcgccaccataacaaatgcgtgattctggaactgctgtaccggcaa

SEQ ID NO: 767154 - DNA, 75 bp, synthetic construct
  source 1..75: mol_type = other DNA
agaattgaatgcggatgaggtcattagtcagattgccaggataacaggctggaaaccctcctccggtgatttaaa

SEQ ID NO: 767155 - DNA, 75 bp, synthetic construct
  source 1..75: mol_type = other DNA
aacgccggttgaggtgaagtatctgctggaagagaagctcggcattcgggtgatggtcgataatgactgcgtgat

SEQ ID NO: 767156 - DNA, 75 bp, synthetic construct
  source 1..75: mol_type = other DNA
tgtatggtcgtagttgcgcctttggcgagaactggcttaataccattattcgccagacagggtttaatccgttcg

SEQ ID NO: 767157 - DNA, 75 bp, synthetic construct
  source 1..75: mol_type = other DNA
gtgaatttgagtatttacagattgatgcaccgacgccgcaggcgctgctgtccgaaatcgaaaaatgctggcatc

SEQ ID NO: 767158 - DNA, 75 bp, synthetic construct
  source 1..75: mol_type = other DNA
taccgcaatgtgtttatccaggatgacccgggaatgcatttccgttgggttatccgcaacgcggaaggtcagcga

SEQ ID NO: 767159 - DNA, 75 bp, synthetic construct
  source 1..75: mol_type = other DNA
gacatgaactaccgcgggatgatcaatatgctgatcttctgcggttgtgtcgggcaaagcggcggcggctgggcg

SEQ ID NO: 767160 - DNA, 75 bp, synthetic construct
  source 1..75: mol_type = other DNA
ctcgatcgcgggctggaagatgaaaacagcgcgaaagattacgctgaaatcaaaccttacacccctgcctggggc

SEQ ID NO: 767161 - DNA, 75 bp, synthetic construct
  source 1..75: mol_type = other DNA
cctctttctcaaaagaagagcaggataaggtctcggtcgataaagccgccgctgccgttgcctggcaggaacgga

SEQ ID NO: 767162 - DNA, 75 bp, synthetic construct
  source 1..75: mol_type = other DNA
tgtttgtctggcgttctaacctgcttggctcttccggcaagggccacgagtatatgcagaagtatctgctgggga

SEQ ID NO: 767163 - DNA, 75 bp, synthetic construct
  source 1..75: mol_type = other DNA
ggattatctcccacagaatttaccgcccaggcgctgaaatcgggcgatttacgtatggcctgcgaacaaccagat

SEQ ID NO: 767164 - DNA, 75 bp, synthetic construct
  source 1..75: mol_type = other DNA
gccccacatggtctggtctggaaagcgatcacgtctcctataatgcgggatacaccaacgttcatgagctaattc

SEQ ID NO: 767165 - DNA, 75 bp, synthetic construct
  source 1..75: mol_type = other DNA
cgacgtttaacctttacgcaccatcgtatttacccgggcctggttaacattccgcgccactgggtgcgttgtaat

SEQ ID NO: 767166 - DNA, 75 bp, synthetic construct
  source 1..75: mol_type = other DNA
gcacctctggccaacccggcgctgctgacaaagcacaacagccgcgatgatttcagcctgctgctgccgtccgca

SEQ ID NO: 767167 - DNA, 75 bp, synthetic construct
  source 1..75: mol_type = other DNA
gaaggaaacctacaaaatccgtccgcaggccactgccggtgtgtcctggcacaacgacctgttcaccaccgcact

SEQ ID NO: 767168 - DNA, 75 bp, synthetic construct
  source 1..75: mol_type = other DNA
ccttcttctgccgtctgttggggcacaagttgctgatcctgatgatgtatcaaataaagctgatgatgttaaaga

SEQ ID NO: 767169 - DNA, 75 bp, synthetic construct
  source 1..75: mol_type = other DNA
gaaatcaatcgtgcttatgaagaaggatgggtaggaaatcacgcgctggcgtttattggcgacacactttcggca

SEQ ID NO: 767170 - DNA, 75 bp, synthetic construct
  source 1..75: mol_type = other DNA
atgaaacagataacctttgctccccgtaatcacctgctcaccaataccaatacctggacgcccgacagccagtgg

SEQ ID NO: 767171 - DNA, 75 bp, synthetic construct
  source 1..75: mol_type = other DNA
ggtgttaactgtacaggctcctgcagctggaaaatctacgttaaaaaaggtctggttacctgggaaatccaacag

SEQ ID NO: 767172 - DNA, 75 bp, synthetic construct
  source 1..75: mol_type = other DNA
gcgccaggatgcggagaaagtctgggatcagttttgccttctgtctgaacgaagcgataaatgctttaccgatgt

SEQ ID NO: 767173 - DNA, 75 bp, synthetic construct
  source 1..75: mol_type = other DNA
accgcgcgctgtatgactgttacatcacagcagccttgcttatcgatattatgaacacatccggctggacggcag

SEQ ID NO: 767174 - DNA, 75 bp, synthetic construct
  source 1..75: mol_type = other DNA
cctgcggtttacagggagggatcgtcgagattgcctcagttgatgttgttgatgggaaaatcgtcaaccccatga

SEQ ID NO: 767175 - DNA, 75 bp, synthetic construct
  source 1..75: mol_type = other DNA
tgttatggaagatggtgctgccggagcagtactggcatcagttatgacaggagatactgccccgggaaccactga

SEQ ID NO: 767176 - DNA, 75 bp, synthetic construct
  source 1..75: mol_type = other DNA
gtgacggcggagaagaacagcggaagggagcagtctgtgatttccgcaccggctgaccatgacaccgtcatgaat

SEQ ID NO: 767177 - DNA, 75 bp, synthetic construct
  source 1..75: mol_type = other DNA
catccagtatcagccgtatggagaacaccctgaaatacctgtatccgtggatccccgaacttctggaatcaggaa

SEQ ID NO: 767178 - DNA, 75 bp, synthetic construct
  source 1..75: mol_type = other DNA
ggtgttaactgtacaggctcctgcagctggaaaatctacgttaaaaagggtctggtcacctgggaaagccaacag

SEQ ID NO: 767179 - DNA, 75 bp, synthetic construct
  source 1..75: mol_type = other DNA
ggtgttaactgtacaggctcctgcagctggaaaatctacgttaaaaacggtctggtgacctgggaaagccaacag

SEQ ID NO: 767180 - DNA, 75 bp, synthetic construct
  source 1..75: mol_type = other DNA
ggtgttaactgtacaggctcctgcagctggaaaatctacgttaaaaatggtctggttacctgggaaaaccaacag

SEQ ID NO: 767181 - DNA, 75 bp, synthetic construct
  source 1..75: mol_type = other DNA
accgtgcgctgtatgactgttacatcaccgcggccttacttatcgatattatgaacacatccggctggacggtag

SEQ ID NO: 767182 - DNA, 75 bp, synthetic construct
  source 1..75: mol_type = other DNA
gagtaaagctgatgatgttttcagcaacgaagactatatacctcatgagatccacgaatggattaaaaggaatac

SEQ ID NO: 767183 - DNA, 75 bp, synthetic construct
  source 1..75: mol_type = other DNA
ggtgttaactgtacaggctcctgcagctggaaaatctacgttaaaaagggtctggtgacctgggaaacccaacag

SEQ ID NO: 767184 - DNA, 75 bp, synthetic construct
  source 1..75: mol_type = other DNA
acttcaggacttccgtcacacgcatgctgacgcacaggtgggaacatctgctgtggcgactcttcccggtgacac

SEQ ID NO: 767185 - DNA, 75 bp, synthetic construct
  source 1..75: mol_type = other DNA
aggcaaacgcgtggtgcggctgaaaggcggcgatccgtttatttttggccgtggtggcgaagagctggaaacact

SEQ ID NO: 767186 - DNA, 75 bp, synthetic construct
  source 1..75: mol_type = other DNA
actcgaatcactgctgccgctgcatctgggtcaggtggcgaaatatgccgggcagttacgtggtcgggtaaaaca

SEQ ID NO: 767187 - DNA, 75 bp, synthetic construct
  source 1..75: mol_type = other DNA
aaagctgattgaacacggtatgcctggcgaaatgccggtggcaattgtcgaaaacggaacggcagtcacgcagcg

SEQ ID NO: 767188 - DNA, 75 bp, synthetic construct
  source 1..75: mol_type = other DNA
ccaggtaacgcttgggaacagctatgtttcggaagtgaaaaatgggcttacgcgggaaatccctttttctatccg

SEQ ID NO: 767189 - DNA, 75 bp, synthetic construct
  source 1..75: mol_type = other DNA
agagcaatgctgcaggggcttatgatattgttataaacccaactcccttcagcatccaggcagcggaggtcacag

SEQ ID NO: 767190 - DNA, 75 bp, synthetic construct
  source 1..75: mol_type = other DNA
ggcgtggctgtaaaagttaattcaacttacgacaatagcaaagttttgttgaaagcagatggtagcaacgcggtt

SEQ ID NO: 767191 - DNA, 75 bp, synthetic construct
  source 1..75: mol_type = other DNA
ggcaaacaacgatcagaaagccattactgaaaccaccgaacagttaatcaacgaaccgctcgaccatcgcggtga

SEQ ID NO: 767192 - DNA, 75 bp, synthetic construct
  source 1..75: mol_type = other DNA
gtctcctccggcggcacatctccagtcctggcgcgcctgctgcgcgaaaaactcgaatcactactgcctctccat

SEQ ID NO: 767193 - DNA, 75 bp, synthetic construct
  source 1..75: mol_type = other DNA
gtggatcatttgcctatattttgccaattacgcgatcgcgactgtctgattgtcggcggtggtgatgtcgcggaa

SEQ ID NO: 767194 - DNA, 75 bp, synthetic construct
  source 1..75: mol_type = other DNA
tgcgtaccgcaggaagagattaaccagatccttcttcgggaagcgcaaaaaggcaaacgcgtggtgcgtttgaaa

SEQ ID NO: 767195 - DNA, 75 bp, synthetic construct
  source 1..75: mol_type = other DNA
aacgtggtcgatgcgccgaaagccgccagcttcattatgccgtcgattattgaccgctcaccgttgatggtggcg

SEQ ID NO: 767196 - DNA, 75 bp, synthetic construct
  source 1..75: mol_type = other DNA
ggcgaacaacgatcagaaagccattactgaaactaccgaacagttaatcaatgagccgctcgatcatcgtggtga

SEQ ID NO: 767197 - DNA, 75 bp, synthetic construct
  source 1..75: mol_type = other DNA
gccatgattgcgaaacgcaacaagaaaaaacggaatggtcggcaggagaaaagcctccgattggcgtgtggcttg

SEQ ID NO: 767198 - DNA, 75 bp, synthetic construct
  source 1..75: mol_type = other DNA
atgaaattacggatagtgatgcctctactgctgtctgctgccgcactgacaggatgccagcagctcaacgatggt

SEQ ID NO: 767199 - DNA, 75 bp, synthetic construct
  source 1..75: mol_type = other DNA
agaagacctcgtgagtgtcagcgatacgttgcagaaagggagcgcggcgttaattacctcgctcaacggtaaaag

SEQ ID NO: 767200 - DNA, 75 bp, synthetic construct
  source 1..75: mol_type = other DNA
taattcgtcatcgcactaaccctgatgtttacccatcgtttgaggtaacaacatgccgcacggaatacaattttg

SEQ ID NO: 767201 - DNA, 75 bp, synthetic construct
  source 1..75: mol_type = other DNA
gaacgcttttgaaagcgcggtgaagagcattgcaatggtgattctgatcatcggtgcgggtggcgtgctgaagca

SEQ ID NO: 767202 - DNA, 75 bp, synthetic construct
  source 1..75: mol_type = other DNA
taccgtcaacaacgccgatatgccagttcgtcttgttgttctgaaaaacggcactatcagtcacaaaaagggata

SEQ ID NO: 767203 - DNA, 75 bp, synthetic construct
  source 1..75: mol_type = other DNA
ttcgtggatttgccacagtaaacaatgccgatatgccagttcgtctagttgttctgagaaacggcactatcaatc

SEQ ID NO: 767204 - DNA, 75 bp, synthetic construct
  source 1..75: mol_type = other DNA
aattatcgaagagtcagaaggtgaagtggcgggtatcaaatccgtaactattaagatttccggcgactacgcata

SEQ ID NO: 767205 - DNA, 75 bp, synthetic construct
  source 1..75: mol_type = other DNA
gtaccgaatccgcagtgcgtattactcacatcccgaccgggattgtgactcagtgccagaacgatcgttcccagc

SEQ ID NO: 767206 - DNA, 75 bp, synthetic construct
  source 1..75: mol_type = other DNA
tacattggcgataagtggtctattgctcacagtaagttagagaatggtattgagacgccgattgcatggaaacaa

SEQ ID NO: 767207 - DNA, 75 bp, synthetic construct
  source 1..75: mol_type = other DNA
tgcgattatcgcaacatggcgcaagctattattgacggatgtatcggacacgttgaatacacgggggataaataa

SEQ ID NO: 767208 - DNA, 75 bp, synthetic construct
  source 1..75: mol_type = other DNA
ctgaaaaaggcagtaaacagcaagaacataccattgattggggtttttgtaattattttttatacgttgatccta

SEQ ID NO: 767209 - DNA, 75 bp, synthetic construct
  source 1..75: mol_type = other DNA
gtcggtgataaattcggcgtgtacactgaaaaaggcagtaaacagcaagaacataccattgattggggtttttgt

SEQ ID NO: 767210 - DNA, 75 bp, synthetic construct
  source 1..75: mol_type = other DNA
ttgcattttcaggaaggtcagcaggtaaaagcgggggatttactggctgagattgatcccagccagttcaaagtt

SEQ ID NO: 767211 - DNA, 75 bp, synthetic construct
  source 1..75: mol_type = other DNA
tggttgaagcctgggatcgcaccaactcgaagaaattaagtgaaggcacgctgttaagtctcgataaccaaatcg

SEQ ID NO: 767212 - DNA, 75 bp, synthetic construct
  source 1..75: mol_type = other DNA
acagccgccctgcaaatgggcaatgaaggccattttgtctgggtgctgaatagcgaaaacaaggtcagcaaacat

SEQ ID NO: 767213 - DNA, 75 bp, synthetic construct
  source 1..75: mol_type = other DNA
acgatggttacgcagggctatgagtatcgtcgtgatgacgatatggcgttgtggagttctgcggatttgacttat

SEQ ID NO: 767214 - DNA, 75 bp, synthetic construct
  source 1..75: mol_type = other DNA
agactaactcattgcacggcacgctcctggaatttggtgaaaccattcacaaaggtcgggcagcgatggagcgag

SEQ ID NO: 767215 - DNA, 75 bp, synthetic construct
  source 1..75: mol_type = other DNA
actgatagaggatattgaaaaacagcttaccagcgtggcgaggcagaatgaaacctgtaagcggttgctggatat

SEQ ID NO: 767216 - DNA, 75 bp, synthetic construct
  source 1..75: mol_type = other DNA
aaacaaaactgacggtctggatcccgatcaggcagtggttgatttctacgcgcttggtttaggtgaaatctaccc

SEQ ID NO: 767217 - DNA, 75 bp, synthetic construct
  source 1..75: mol_type = other DNA
tgacgcgtatcatgaccatggcggttgaagatcaccagccgccgctggttcgcgggcgtcgtgtgaagctgaaat

SEQ ID NO: 767218 - DNA, 75 bp, synthetic construct
  source 1..75: mol_type = other DNA
tgctgccgtggatggaagatctcgcaccacaagaagaagtggatgaagacgctgagtactgggcgcaatttgaag

SEQ ID NO: 767219 - DNA, 75 bp, synthetic construct
  source 1..75: mol_type = other DNA
cgagtacgattgattgcttacttcatgacgtcattcattgttggcgttcttgctgctggcctggttggttcaaag

SEQ ID NO: 767220 - DNA, 75 bp, synthetic construct
  source 1..75: mol_type = other DNA
aaaatcctgacgttcctgaataatcaggatatcggctccctgggggcgctcataacgcgccggggaggttcaggt

SEQ ID NO: 767221 - DNA, 75 bp, synthetic construct
  source 1..75: mol_type = other DNA
gccgattgtggtgattcacggcaaccaagtgaaagacctgcctgattcgtacaaacgctacttgatgaattactt

SEQ ID NO: 767222 - DNA, 75 bp, synthetic construct
  source 1..75: mol_type = other DNA
tcggtgcaggcggcgtgctgaagcaaaccattatcgacacaggtattggtgacaccatcggcatgctgatgtcgc

SEQ ID NO: 767223 - DNA, 75 bp, synthetic construct
  source 1..75: mol_type = other DNA
atcccggcgatcattatgatctctaccaccatcgccaatatctggctggtaaaagatacccctgcctgggaagtg

SEQ ID NO: 767224 - DNA, 75 bp, synthetic construct
  source 1..75: mol_type = other DNA
tgaagtggcctttatcatgttagcgccgctggttattgtcattgccgccgaagctaaaattccgttcctgaaact

SEQ ID NO: 767225 - DNA, 75 bp, synthetic construct
  source 1..75: mol_type = other DNA
gggccacactgcatattgaagtgttcctaccggcacaggtaccggattcagagctggattcgtggatggaaaccc

SEQ ID NO: 767226 - DNA, 75 bp, synthetic construct
  source 1..75: mol_type = other DNA
gagcttgatcagtggatggaaagccggatttacccggcgatggcggtgatccctgcactggcaggcatgattacc

SEQ ID NO: 767227 - DNA, 75 bp, synthetic construct
  source 1..75: mol_type = other DNA
tcgtcttcggtatcggcctgatgctggtactgaatttgaggttcaagatcaactcgatggtagctttgttggtgg

SEQ ID NO: 767228 - DNA, 75 bp, synthetic construct
  source 1..75: mol_type = other DNA
tttatatctatggcgtactggtgacgatcccaagtgtaatctgcgcaggtctgatcctgccgaagttcctcggca

SEQ ID NO: 767229 - DNA, 75 bp, synthetic construct
  source 1..75: mol_type = other DNA
ggatttatccggcgatgaccgcgatcccggcactggcaggactgattaccacgatggttacgcagggctatgagt

SEQ ID NO: 767230 - DNA, 75 bp, synthetic construct
  source 1..75: mol_type = other DNA
aggttccgggcatgatcgagcgctacactgctgccatcactggtgcagaaggcaagatccaccgtctggaagact

SEQ ID NO: 767231 - DNA, 75 bp, synthetic construct
  source 1..75: mol_type = other DNA
gtacagctgtcggtgattatcatcggcctgattttcggtctggcgatgttctatgaagtggcctttatcatgtta

SEQ ID NO: 767232 - DNA, 75 bp, synthetic construct
  source 1..75: mol_type = other DNA
acacgctgggggaactggctatcatcgtggtgttcggtgcggtcatcggtaaattgatggtcgactccggcgcag

SEQ ID NO: 767233 - DNA, 75 bp, synthetic construct
  source 1..75: mol_type = other DNA
acccggcgctgctggtgctggcgacggcggcgggttccaacaccctcactcatattaacgatgcctccttctggc

SEQ ID NO: 767234 - DNA, 75 bp, synthetic construct
  source 1..75: mol_type = other DNA
ggtacgccgattcgtattcagttcaaagaaggggaaaacccgtatgcgaacaagcgtaacaccctgacgccgacc

SEQ ID NO: 767235 - DNA, 75 bp, synthetic construct
  source 1..75: mol_type = other DNA
ctcttgagatgtttcgcgatgaattaattggtgatttactgcatgcgctgccccatccggagctggattatgacc

SEQ ID NO: 767236 - DNA, 75 bp, synthetic construct
  source 1..75: mol_type = other DNA
cgggctggacaccgtgcccaaagtcacccgtgacccggatggtgagcccgatatgtacatcttcagcgacggggg

SEQ ID NO: 767237 - DNA, 75 bp, synthetic construct
  source 1..75: mol_type = other DNA
gatcggtgacctgctgaaggctctgccacatccggtactggattacgatcgctggttgctggagctggatccccg

SEQ ID NO: 767238 - DNA, 75 bp, synthetic construct
  source 1..75: mol_type = other DNA
tggtatggcgaattattgcgcgatgacgcgatgatgagtgcggttggtttaagtctgacaattgcggcctgtgcg

SEQ ID NO: 767239 - DNA, 75 bp, synthetic construct
  source 1..75: mol_type = other DNA
aaaacttggtgaaagagcaatagcattcttagagagtgatatagataagtggattgatgaaaagattactttatc

SEQ ID NO: 767240 - DNA, 75 bp, synthetic construct
  source 1..75: mol_type = other DNA
aactgctgcgtctgatgcgcgttatgcgccgtcttcgggagctgcaacgcggtctgacgtacggggaggatgaca

SEQ ID NO: 767241 - DNA, 75 bp, synthetic construct
  source 1..75: mol_type = other DNA
aaagcgaactggtacaacgcagcccatttatgatgctggcagaagaagtacctgaggcgcgggaacatatgggaa

SEQ ID NO: 767242 - DNA, 75 bp, synthetic construct
  source 1..75: mol_type = other DNA
cgcgaacaactggataacaatctggcgaacatcagcagccgctggttgccactgccaggtggtttgcgcgggcat

SEQ ID NO: 767243 - DNA, 75 bp, synthetic construct
  source 1..75: mol_type = other DNA
cttctgagtgtgctgcgccgtctgcgagccctgcagcgcagtgtgttacccgacgacgatgagggggatgagaat

SEQ ID NO: 767244 - DNA, 75 bp, synthetic construct
  source 1..75: mol_type = other DNA
caactggataataacctggcgaacatcagcagccgctggttgccgctgccgggcggattacaagggcatgaatat

SEQ ID NO: 767245 - DNA, 75 bp, synthetic construct
  source 1..75: mol_type = other DNA
ttgatgccaacgtatcgtattaacggcactgaaagtcctttgctgaccgatcctgcaacgccgaacttcttttgg

SEQ ID NO: 767246 - DNA, 75 bp, synthetic construct
  source 1..75: mol_type = other DNA
tatctgttgatgccaacgtatcgtattaacggcacggaaagtcctttgttgaccgatccttcaacgccgaacttc

SEQ ID NO: 767247 - DNA, 75 bp, synthetic construct
  source 1..75: mol_type = other DNA
tttatcgcctggtatctgatggctcgcgcagaaaaacagcggatacgcgacatccagtgtgcaagacgtggctga

SEQ ID NO: 767248 - DNA, 75 bp, synthetic construct
  source 1..75: mol_type = other DNA
gtgaaaaaccgaccttcctggtggcaaacaaaactgacggtctggatcccgatcaggcagtggttgatttctact

SEQ ID NO: 767249 - DNA, 75 bp, synthetic construct
  source 1..75: mol_type = other DNA
agtctgggcgttgatgaatcttctgtcgctatcgtagttatggcaacaatgctgctgcttggcatcgtaacctgg

SEQ ID NO: 767250 - DNA, 75 bp, synthetic construct
  source 1..75: mol_type = other DNA
atcgtgcgttatttcttcgcttctggtagcgcctatatcgttgctatgttgccggtatttgccatgctggcgaac

SEQ ID NO: 767251 - DNA, 75 bp, synthetic construct
  source 1..75: mol_type = other DNA
ctgctggcgattgaagaggcggacgtcgtactgtttatggtcgatgcgcgcgcgggtctgatgcctgcggatgaa

SEQ ID NO: 767252 - DNA, 75 bp, synthetic construct
  source 1..75: mol_type = other DNA
atgcccacgctggtggttacaacccaccgattgtggtgattcacggtaaccaggtgaaagacctgccagattctt

SEQ ID NO: 767253 - DNA, 75 bp, synthetic construct
  source 1..75: mol_type = other DNA
gtggtgttggtaacctgtttgaatcagtgcgtgaagcgtatgacagctctacccgtcgcgtgggtacgtctatgc

SEQ ID NO: 767254 - DNA, 75 bp, synthetic construct
  source 1..75: mol_type = other DNA
cgtttaaactggtggcagacgatctggcctgcaaagtcgccaatagtgcgctggcgcagattctggaatccgccc

SEQ ID NO: 767255 - DNA, 75 bp, synthetic construct
  source 1..75: mol_type = other DNA
aaaaaccgatcctgtttaccggaaaaacggctgccgttaatggttattccgtagcaggaacgacagagggctggc

SEQ ID NO: 767256 - DNA, 75 bp, synthetic construct
  source 1..75: mol_type = other DNA
ggtatgggcgggctggtcaacgcgctggtacggcgaattattgcgtgatgacgcgatgatgagcgcggtgggttt

SEQ ID NO: 767257 - DNA, 75 bp, synthetic construct
  source 1..75: mol_type = other DNA
ccgtattaagcggttactcttcaggtaccacctggctggtgttctcggcgtttaccttaagcgccgcatttgtga

SEQ ID NO: 767258 - DNA, 75 bp, synthetic construct
  source 1..75: mol_type = other DNA
catttgcacgcgtcacgcacgacgcgtggcggatgcgcggcgatattcgtgaaattctggcggcgctggaaagcg

SEQ ID NO: 767259 - DNA, 75 bp, synthetic construct
  source 1..75: mol_type = other DNA
gccgatgaaaggctggctgaatattttcaacccaacgtttactcttccccttttagaggagtgcattgctgaaac

SEQ ID NO: 767260 - DNA, 75 bp, synthetic construct
  source 1..75: mol_type = other DNA
cagtgtcgcagttgtaacgtgttaaaagcgtgctggggaggctgcccgaaacaccgcttcatgctcgatgccagc

SEQ ID NO: 767261 - DNA, 75 bp, synthetic construct
  source 1..75: mol_type = other DNA
ccgcgcgtggcgctttatagcgcgattccagttaaccgcaccttatgtgcgctctatgccatgacggggctggcg

SEQ ID NO: 767262 - DNA, 75 bp, synthetic construct
  source 1..75: mol_type = other DNA
ctgaatatcctgtacatcctttttggtgtccacggagggagctatttcctcggcgtagtggaaaccatcaccttt

SEQ ID NO: 767263 - DNA, 75 bp, synthetic construct
  source 1..75: mol_type = other DNA
tgctgcaaaaacatcatgtcgactataacgtgctggtctgcgttaatcgcaccagcgcgcagcaaccgttgcagg

SEQ ID NO: 767264 - DNA, 75 bp, synthetic construct
  source 1..75: mol_type = other DNA
gaagcgtatgtccgccactatatcgctgccagtgaaccacaaaacgaagttgcttttacctggcaaggtggagag

SEQ ID NO: 767265 - DNA, 75 bp, synthetic construct
  source 1..75: mol_type = other DNA
gtggtcgagcgcctggctgatgaaacggctgcccgcgaaggactgaaattgcatgcgcctggtgatattcagggt

SEQ ID NO: 767266 - DNA, 75 bp, synthetic construct
  source 1..75: mol_type = other DNA
caaagcgcgtaatgccagcgagctgcgtgccgatctggaacaggctatgcggctgattccggggccgaaacggct

SEQ ID NO: 767267 - DNA, 75 bp, synthetic construct
  source 1..75: mol_type = other DNA
gaatagtgaagagctcacaatcatttttaattgcgttgggtggcctgatttaggtggtggagcagcagtatcaca

SEQ ID NO: 767268 - DNA, 75 bp, synthetic construct
  source 1..75: mol_type = other DNA
aataaaggtgaagaaattaccttttatgaggatatcaacttcttaataaaacaatccctcattgatggatatgct

SEQ ID NO: 767269 - DNA, 75 bp, synthetic construct
  source 1..75: mol_type = other DNA
acgctgggcacttccacccgacggaagtgatttccgacaagatttcctccgccatgctgtatgtgccgcagttgc

SEQ ID NO: 767270 - DNA, 75 bp, synthetic construct
  source 1..75: mol_type = other DNA
cttggcacaccatcggtgatgaacatctggatcccggatggcatgaaagatatcaccgttgaccgtctcgccccg

SEQ ID NO: 767271 - DNA, 75 bp, synthetic construct
  source 1..75: mol_type = other DNA
gataccccagcgggtagcgaatggctgaagagcgtgcgggcttatgaaaaagaaattttgagccagcgtgggtaa

SEQ ID NO: 767272 - DNA, 75 bp, synthetic construct
  source 1..75: mol_type = other DNA
gcattgctaattgtcgttgtcgtaggtcgttctgtcagcctgcatcgtcagcaaatcaaagactggctggcgcgt

SEQ ID NO: 767273 - DNA, 75 bp, synthetic construct
  source 1..75: mol_type = other DNA
atgtatccgatggatcgtattcaacaaaaacatgatcgtcaaatagatctgctggaaaacttgatggcagttatt

SEQ ID NO: 767274 - DNA, 75 bp, synthetic construct
  source 1..75: mol_type = other DNA
ggatgtttttattcagaacagattctggacaatatctattcagtcatttcttaatggacacagaaatatcattct

SEQ ID NO: 767275 - DNA, 75 bp, synthetic construct
  source 1..75: mol_type = other DNA
atggcaattttacgatgcaacacatattcgccataaggataactatgaccaaaaatattttgttagtgatgatat

SEQ ID NO: 767276 - DNA, 75 bp, synthetic construct
  source 1..75: mol_type = other DNA
gcaccgtttactgttcctgatgcaggtctggaaatgttgcgcgaagcggtaaaagcaacgggacgtggtttacac

SEQ ID NO: 767277 - DNA, 75 bp, synthetic construct
  source 1..75: mol_type = other DNA
gcaggaaggcgttgatatcgccatcgaaaatgatgtgattgtcgctatcggcgatgccctgacgcaacgctaccc

SEQ ID NO: 767278 - DNA, 75 bp, synthetic construct
  source 1..75: mol_type = other DNA
atgattgatgaatttcatgtgatgtatatgtataaacaaatccaagcagaagccgcaactaccgacatcaaaaca

SEQ ID NO: 767279 - DNA, 75 bp, synthetic construct
  source 1..75: mol_type = other DNA
agtttggtctggagtgcggtggttccgacggtctttctggtattactgctaacccgatgctggggcgtttctctg

SEQ ID NO: 767280 - DNA, 75 bp, synthetic construct
  source 1..75: mol_type = other DNA
gggtgcctctttcctgatgccagctattacagcggtcgtcctgggcggcgccaatatctacggcggctccgggtc

SEQ ID NO: 767281 - DNA, 75 bp, synthetic construct
  source 1..75: mol_type = other DNA
gtggcactgtatagcgctatcccagtaaaccggactctgtgcgtgctgtacgcaatgaccggctttgcatcagcg

SEQ ID NO: 767282 - DNA, 75 bp, synthetic construct
  source 1..75: mol_type = other DNA
gcctgccgattggttatgcactggcggatattgcggcgggggaacacgttcacgcccacaatacgcgcacgaatc

SEQ ID NO: 767283 - DNA, 75 bp, synthetic construct
  source 1..75: mol_type = other DNA
aacaaccaggttgatgctttccgcgaaacgctgggggatattgatcctgaacgcgttcatttcatgatctgccag

SEQ ID NO: 767284 - DNA, 75 bp, synthetic construct
  source 1..75: mol_type = other DNA
tcgtttcctgaaagagactaacaacgccgaagggactgatggtgtgttcctcttcagccacacctacggctgctc

SEQ ID NO: 767285 - DNA, 75 bp, synthetic construct
  source 1..75: mol_type = other DNA
cgctccgctttctgctgtctcttgatcagatctcctgatcaagagacttcatcaccaggtaaccctcaaccatat

SEQ ID NO: 767286 - DNA, 75 bp, synthetic construct
  source 1..75: mol_type = other DNA
atgaaagcgtttgtcacttacctgaaaaacgaatcaccggccatgcaattgcccagtggttcaacgggctggatt

SEQ ID NO: 767287 - DNA, 75 bp, synthetic construct
  source 1..75: mol_type = other DNA
tactgataatttcaaaaaaccatttaactacgaaatggatgttacaacggattccgcaggtgctactgagcgtaa

SEQ ID NO: 767288 - DNA, 75 bp, synthetic construct
  source 1..75: mol_type = other DNA
gaatcagtagcaaatgagtatttaataaaatatatgcttgaaacagaaagcaaaggttcactactcagtactgat

SEQ ID NO: 767289 - DNA, 75 bp, synthetic construct
  source 1..75: mol_type = other DNA
actggaaaagcggtaagtcagaaaaatgtattttctgttatccgcgaattgagtcaggcccaacccaccgtgtgc

SEQ ID NO: 767290 - DNA, 75 bp, synthetic construct
  source 1..75: mol_type = other DNA
caaagttcttttctgaaaatactgagtatatgttagtatatgctaaagattttaatgctgctaactttaactctg

SEQ ID NO: 767291 - DNA, 75 bp, synthetic construct
  source 1..75: mol_type = other DNA
atgggttgagctttatgctgtaaataaaattcctggatattcatttccattcacaaaagatttcttgtataaaaa

SEQ ID NO: 767292 - DNA, 75 bp, synthetic construct
  source 1..75: mol_type = other DNA
gtcggcgcactgaaagctgtagcgccaattctggtgctgatgctggtgatggcatctattgctaaccaccagcac

SEQ ID NO: 767293 - DNA, 75 bp, synthetic construct
  source 1..75: mol_type = other DNA
tacgcgagcgtataaagcaagaattaaaagagatagccgataagaaaaccgccgaagttttatggcgtgtaggca

SEQ ID NO: 767294 - DNA, 75 bp, synthetic construct
  source 1..75: mol_type = other DNA
tatgctgaatgggtgcacaatatgccaggtaaattaaagggacagccgcgcgaacatttcggcaagactagcgaa

SEQ ID NO: 767295 - DNA, 75 bp, synthetic construct
  source 1..75: mol_type = other DNA
tggtgaaactggtcattcgcttcgcaccgatcggtatttttggtctggtttcttctaccctggcaaccaccggtt

SEQ ID NO: 767296 - DNA, 75 bp, synthetic construct
  source 1..75: mol_type = other DNA
tccgctgggagccaccatcaatatggcgggcgcagcaatcaccattaccgtgttgacgctggctgcggttaatac

SEQ ID NO: 767297 - DNA, 75 bp, synthetic construct
  source 1..75: mol_type = other DNA
atgactacgcaacattcaccggggctattccggcgtctggctcatggcagcctggtaaaacaaatcctggtcggc

SEQ ID NO: 767298 - DNA, 75 bp, synthetic construct
  source 1..75: mol_type = other DNA
caactacggtaagaatccctgaatctttacgcgaggctcttgctgtcagagcatcaaaaaatggtcgctctgtta

SEQ ID NO: 767299 - DNA, 75 bp, synthetic construct
  source 1..75: mol_type = other DNA
ataccggtgcgccgactaaagtattggcacccgatacggcgggtaaattttatccgaaccaggattgcagtagtt

SEQ ID NO: 767300 - DNA, 75 bp, synthetic construct
  source 1..75: mol_type = other DNA
ggagatgctcgatcgtgaaggtaatccgattgaatcgcagttcaactatacgctggaaccggcacaatccagttt

SEQ ID NO: 767301 - DNA, 75 bp, synthetic construct
  source 1..75: mol_type = other DNA
gccagtgacgccgatgactctacgcggcatgtatttttatatggctgatgcggcaacctttactgattgtgcgac

SEQ ID NO: 767302 - DNA, 75 bp, synthetic construct
  source 1..75: mol_type = other DNA
cggcgaccttcactgattgcgcgaccggaaaacgttttattgtggcgaataacgcagagctggagcgtggctacc

SEQ ID NO: 767303 - DNA, 75 bp, synthetic construct
  source 1..75: mol_type = other DNA
ataccggtgcgccgactaaagtattggcacccgatacggcagggaaattttaccccaaccaggattgcagtagtt

SEQ ID NO: 767304 - DNA, 75 bp, synthetic construct
  source 1..75: mol_type = other DNA
agaaagccgtattgttggcaatggaggggcattttactctggaagagaacccggacacgggcgaatcggtaaaag

SEQ ID NO: 767305 - DNA, 75 bp, synthetic construct
  source 1..75: mol_type = other DNA
aacgcttgacagcgatgaagttgaaaaacgagggcgtaaacttgaagtgatatatcactataccggtgaaatcaa

SEQ ID NO: 767306 - DNA, 75 bp, synthetic construct
  source 1..75: mol_type = other DNA
cggaaaagttcgggtcgctgccagccagaccatttccgcgcatcttattccgcaatgcattgctaaagctatcgc

SEQ ID NO: 767307 - DNA, 75 bp, synthetic construct
  source 1..75: mol_type = other DNA
ccaaagtcagttgagtcatttgctcagcaagaagcagacaaattcaaagaggcgctgcttgagacgctaaagacc

SEQ ID NO: 767308 - DNA, 75 bp, synthetic construct
  source 1..75: mol_type = other DNA
ccaaccaaagtattagcgcccgatacggcggggaaattttacccgaataaggattgcagtagtttggggcagtaa

SEQ ID NO: 767309 - DNA, 75 bp, synthetic construct
  source 1..75: mol_type = other DNA
aacgcagagctggagcgtggctacctggctgcgcgcggtaacagtgaaaaaccggtgttactgtcagtagaaggt

SEQ ID NO: 767310 - DNA, 75 bp, synthetic construct
  source 1..75: mol_type = other DNA
ttctgagcaaccttcccaaggatttaggtctgaacaaacgactttactacatggataagtcactggaaaaaccca

SEQ ID NO: 767311 - DNA, 75 bp, synthetic construct
  source 1..75: mol_type = other DNA
gtgactgattttcgtatggcggtaaaggcgaaagagaatgaagaagtggtttttagctggattgaatacccttca

SEQ ID NO: 767312 - DNA, 75 bp, synthetic construct
  source 1..75: mol_type = other DNA
cacggatgaaagagttcggcgagtccatgccgtttgacggcaagcgaatgatctatggcggattcgagtcaatca

SEQ ID NO: 767313 - DNA, 75 bp, synthetic construct
  source 1..75: mol_type = other DNA
atgaagtatgttgatggttttgtggttgctgttcctgccgaaaataaagatgcctatcgagaaatggccgcaaag

SEQ ID NO: 767314 - DNA, 75 bp, synthetic construct
  source 1..75: mol_type = other DNA
cgacatggtctggccttgaagatgaacacgtttcttacaacgccggttacaccaacgttcacgagctgatcccgt

SEQ ID NO: 767315 - DNA, 75 bp, synthetic construct
  source 1..75: mol_type = other DNA
aatccctgaaagagggttctatccgtttcgctgcggaacagccggaaaacggtaaaaaccacccgcgtaacctgt

SEQ ID NO: 767316 - DNA, 75 bp, synthetic construct
  source 1..75: mol_type = other DNA
cggaaggtccggcaaaaggtcagccgatgctcaataccgcaattgatgcggcagagatgatcctgacgctggcac

SEQ ID NO: 767317 - DNA, 75 bp, synthetic construct
  source 1..75: mol_type = other DNA
cagcaaacaacaatacagggttaaatcgcagttactggagagactggggagtgtgttgtttttcacgttgcttta

SEQ ID NO: 767318 - DNA, 75 bp, synthetic construct
  source 1..75: mol_type = other DNA
aaagtacctgatgcctgcagccgggagacactaccaaaagaagaaaatcgccaggagcagaagtggtgaaagtta

SEQ ID NO: 767319 - DNA, 75 bp, synthetic construct
  source 1..75: mol_type = other DNA
tgactggtaaacatttatctcttaatgccccgccttttatgctgattccgcgtagtatccggagaaaagtggatg

SEQ ID NO: 767320 - DNA, 75 bp, synthetic construct
  source 1..75: mol_type = other DNA
ttgccgttcctgccgataaaaaggatgcctatcgggaaatggccgctaaggctgcgccattgtttaaagagtttg

SEQ ID NO: 767321 - DNA, 75 bp, synthetic construct
  source 1..75: mol_type = other DNA
aagcgtcttccggggaagaaaagctgaaagcatatcagagaataattaactacattgaagatttctgcaacaaaa

SEQ ID NO: 767322 - DNA, 75 bp, synthetic construct
  source 1..75: mol_type = other DNA
gcctggaaagatacccagcgaatactgcagcgcagcggactcgtgtacagaggagaacagtcagagccgtttgat

SEQ ID NO: 767323 - DNA, 75 bp, synthetic construct
  source 1..75: mol_type = other DNA
aagcggacatccgtgtgcaattcaatcgcgcaattgacctggcgcgtcgcaacggttcaaccattgccattgggc

SEQ ID NO: 767324 - DNA, 75 bp, synthetic construct
  source 1..75: mol_type = other DNA
tcttcttgcttttggtatgtcgatggatgcctttgccgcatcaatcggtaaaggtgccactctccataaaccgaa

SEQ ID NO: 767325 - DNA, 75 bp, synthetic construct
  source 1..75: mol_type = other DNA
gacggggctggcgtctgggtcgccgctgtgctgctggtatcgtattttggttcagcacgttccgatctcggtgcg

SEQ ID NO: 767326 - DNA, 75 bp, synthetic construct
  source 1..75: mol_type = other DNA
cagcacttaaacgaaacttaagtgaaagtgagaaggcttattattttaaaaaaaataatgttgctgagttagaat

SEQ ID NO: 767327 - DNA, 75 bp, synthetic construct
  source 1..75: mol_type = other DNA
gctgtcctgaaccaatcgacttataccttccgacagttggcgaggacaacttcacgcccaactctgatacatggt

SEQ ID NO: 767328 - DNA, 75 bp, synthetic construct
  source 1..75: mol_type = other DNA
attacagtgaagttgaaagccacaactgaggcaccaaataaaaaattaattggaaaatcatccggctcagcaacc

SEQ ID NO: 767329 - DNA, 75 bp, synthetic construct
  source 1..75: mol_type = other DNA
cctgtcctgaagtagtcgacttacgcattccaccagctggcgacgataacttcacccccaactccgatatctggt

SEQ ID NO: 767330 - DNA, 75 bp, synthetic construct
  source 1..75: mol_type = other DNA
atcctcacccttcaacggtacgtgtgctccaacagatggtttataacctgccgccagacattacgctggtgaaag

SEQ ID NO: 767331 - DNA, 75 bp, synthetic construct
  source 1..75: mol_type = other DNA
ccaccagatattacgctggtgaaagccagcagtctgctcaatgaaccgcaggtcgacacctctacgccgccgaaa

SEQ ID NO: 767332 - DNA, 75 bp, synthetic construct
  source 1..75: mol_type = other DNA
cacgctgatcgtttacttccagcatcagtggcaaggctggggcaaacagcccgaagcggcgaagtttaacgctag

SEQ ID NO: 767333 - DNA, 75 bp, synthetic construct
  source 1..75: mol_type = other DNA
gttcctcggtttcgatgcggtgaccacgctttcggaagagacgccggacgccgcacgcgtgatcccgaaagccat

SEQ ID NO: 767334 - DNA, 75 bp, synthetic construct
  source 1..75: mol_type = other DNA
gaaaaagaaatatgtagatctgtaattaataattataatcggattttcatatatgattatatatctttgagtggt

SEQ ID NO: 767335 - DNA, 75 bp, synthetic construct
  source 1..75: mol_type = other DNA
tttgatgaaatcaatattgtgcgtggtctgcctgttcctggcgggcggctggggataaaaatcacagaactggag

SEQ ID NO: 767336 - DNA, 75 bp, synthetic construct
  source 1..75: mol_type = other DNA
ggacaggggctgcattattactggcggggatcttgctggcaggctgcgaccagcaaagcagcgatacaaaacaca

SEQ ID NO: 767337 - DNA, 75 bp, synthetic construct
  source 1..75: mol_type = other DNA
gatgccgttattgcagggatacggtattccggccatgtgcatcaggataacggcaaaggcagtaagacaggagcg

SEQ ID NO: 767338 - DNA, 75 bp, synthetic construct
  source 1..75: mol_type = other DNA
aaaggcaccaccacgctgcgcaatatttataactggcgcgtaaaagagacggatcgcctgtttgcgatggcaaca

SEQ ID NO: 767339 - DNA, 75 bp, synthetic construct
  source 1..75: mol_type = other DNA
tataaggagcgtaagctaaagatgaaaaggctcctcaagttgatggcgcgagatggtatttcaccacaggaacta

SEQ ID NO: 767340 - DNA, 75 bp, synthetic construct
  source 1..75: mol_type = other DNA
atgaatgatgaagtgttcagccgcctgattgccccggtaacgcgcggtattcgcctgctgtttggccggggcgtt

SEQ ID NO: 767341 - DNA, 75 bp, synthetic construct
  source 1..75: mol_type = other DNA
accgcatacgtctgacaaagaacggtcggatcattgtgacctgtaagacgctggaaatttacgccgatgaaggtg

SEQ ID NO: 767342 - DNA, 75 bp, synthetic construct
  source 1..75: mol_type = other DNA
ccgctaccgcccgacaaatcttgaaccgggtgatgcaggcatttaccaccatgaggggcatcgtatcaggctgac

SEQ ID NO: 767343 - DNA, 75 bp, synthetic construct
  source 1..75: mol_type = other DNA
atgacctgttttgaaaccactgaccgtaacaacggcattaaagaactacaggaaggagtagaggaaaatatccgc

SEQ ID NO: 767344 - DNA, 75 bp, synthetic construct
  source 1..75: mol_type = other DNA
agaaagcggctaccgagccatatctggtcgaagcgcatattggtgctcacgcgccgtttactgtgccggatgcag

SEQ ID NO: 767345 - DNA, 75 bp, synthetic construct
  source 1..75: mol_type = other DNA
acgtatcccacagtcaccactggtacagcaaagacctgctgatacgcctggcggagtacgatctcatcgacagta

SEQ ID NO: 767346 - DNA, 75 bp, synthetic construct
  source 1..75: mol_type = other DNA
tacaactcgccaacgccgctgctggcagacaatattgcaggccacatcgccttcggtatgggttcaggcagcgtt

SEQ ID NO: 767347 - DNA, 75 bp, synthetic construct
  source 1..75: mol_type = other DNA
gcgacgccctgacacaacgttatccagatgccagctacaaagagatgcatgggcggattgtgatgccagggattg

SEQ ID NO: 767348 - DNA, 75 bp, synthetic construct
  source 1..75: mol_type = other DNA
catgcctctccggcgtatatcggcgggtcgctctccacattgcgcaacgcatttttaaaagttggcctgcgtgcg

SEQ ID NO: 767349 - DNA, 75 bp, synthetic construct
  source 1..75: mol_type = other DNA
ctgggttgaatgggcgaaagccaatcacctcggtctggactttaacccctcctgtttttcgcatccgctaagcgc

SEQ ID NO: 767350 - DNA, 75 bp, synthetic construct
  source 1..75: mol_type = other DNA
atgagtacgcaagaggccacctcgcaacagccattgttgcaggctatcgacctgaaaaagcattatccggtgaag

SEQ ID NO: 767351 - DNA, 75 bp, synthetic construct
  source 1..75: mol_type = other DNA
ctatcaaagccttaatgctgcggaggcaaccggcggcctggggtcaaccgctaccgggaatatgctcgcttctat

SEQ ID NO: 767352 - DNA, 75 bp, synthetic construct
  source 1..75: mol_type = other DNA
ctcagcaactcgggcgcacatcaacactgtatttgagtggtagccatcaaacttattggggaacgagtaatgtcg

SEQ ID NO: 767353 - DNA, 75 bp, synthetic construct
  source 1..75: mol_type = other DNA
agggggcacagttgccgcgtgtactggacgacccgaaagtggatgtggcgattatcagcacgacttatattcagc

SEQ ID NO: 767354 - DNA, 75 bp, synthetic construct
  source 1..75: mol_type = other DNA
gcaacagatcatggtgaactggatgccaatgtattccagcatcgcccttttcttgaacaggataatcaggcgcac

SEQ ID NO: 767355 - DNA, 75 bp, synthetic construct
  source 1..75: mol_type = other DNA
cgaacgtcttccagcatcgaccctttcttgaacaagataatcagacgcatggttataaactggtagcggtgggaa

SEQ ID NO: 767356 - DNA, 75 bp, synthetic construct
  source 1..75: mol_type = other DNA
tctggatcccggatggcatgaaagatatcaccgttgaccgtctcgccccgcgtcagcgtctgctggcagcactgg

SEQ ID NO: 767357 - DNA, 75 bp, synthetic construct
  source 1..75: mol_type = other DNA
gataccccagcaggtagcgaatggctggagagcgtgcgggcttatgaaaaagaaattttgagccagcgtgggtaa

SEQ ID NO: 767358 - DNA, 75 bp, synthetic construct
  source 1..75: mol_type = other DNA
ctggaagagcagaaatcgttgccgtggcaggcggtgtgggaaatgtattgccagcgtcacgatacgccagcgggt

SEQ ID NO: 767359 - DNA, 75 bp, synthetic construct
  source 1..75: mol_type = other DNA
cggaaatagtgtacagaatcggattgggggtaacaaccattatgcatatttaaacctacagagtgggttaaatat

SEQ ID NO: 767360 - DNA, 75 bp, synthetic construct
  source 1..75: mol_type = other DNA
aaaccgctttttccagagtacattactccacggccttccggctggctggacaatatatggtggaacgcaactggc

SEQ ID NO: 767361 - DNA, 75 bp, synthetic construct
  source 1..75: mol_type = other DNA
atgacacaacaaggggatgctgtagccggggtggcgacagaaaaagtgggcattaaagggtatctggcttttttt

SEQ ID NO: 767362 - DNA, 75 bp, synthetic construct
  source 1..75: mol_type = other DNA
gatgagaacggttttaatatctacattctcgatgaaagcaatcgggttgaggtgtatcaccactgcgaaggtagc

SEQ ID NO: 767363 - DNA, 75 bp, synthetic construct
  source 1..75: mol_type = other DNA
gctgacgcgtaaactgtacgccgcgtttgaagcattgccaggtaaagtgacgctggtaaacccgcagatttcgcc

SEQ ID NO: 767364 - DNA, 75 bp, synthetic construct
  source 1..75: mol_type = other DNA
aacgtaaatgcagcctgctggaaagctgggccgcctcgctgggtgtggaagtcagcttcttcctgattgatgaaa

SEQ ID NO: 767365 - DNA, 75 bp, synthetic construct
  source 1..75: mol_type = other DNA
acataaagcagttgaagaagttattgattcccccctttcggaggtcgcaaatttaattaaagtattacagtcttg

SEQ ID NO: 767366 - DNA, 75 bp, synthetic construct
  source 1..75: mol_type = other DNA
gcgcctgaaactgagtcaggttggatctatgtcgttgtgactgcgtacacacgaaggacggcgcacggtactttg

SEQ ID NO: 767367 - DNA, 75 bp, synthetic construct
  source 1..75: mol_type = other DNA
ggcgatgcgttacctaccgaatcggcattacaaacagagtttggcgtcagccgggttacggtgcgtcaggctttg

SEQ ID NO: 767368 - DNA, 75 bp, synthetic construct
  source 1..75: mol_type = other DNA
cgcgcgaagagaacggctttaatatctacattcttgatgaaagcaaccgggtcgaggtgtatcaccactgcgaag

SEQ ID NO: 767369 - DNA, 75 bp, synthetic construct
  source 1..75: mol_type = other DNA
ctttccagtactcgtcaggaaaccggacgcttcaaggcgctgcgtgtctccggtcaaacctggggcttgttcttc

SEQ ID NO: 767370 - DNA, 75 bp, synthetic construct
  source 1..75: mol_type = other DNA
tcggaaaaatgcaccaggacgccgccccgccagatagtgtggaagtgttctgttatagccagcatctgcgcggtt

SEQ ID NO: 767371 - DNA, 75 bp, synthetic construct
  source 1..75: mol_type = other DNA
gctcgataatcgcgccaactggaagattgatcaggtgcgtgaagcgcacaacgagttgcttgatgcaatgatgca

SEQ ID NO: 767372 - DNA, 75 bp, synthetic construct
  source 1..75: mol_type = other DNA
ttaaaggcaacggcattgtcgatttgcctaaattgcaggagatggtcgccgatgtgtcacaccatttcccgctgc

SEQ ID NO: 767373 - DNA, 75 bp, synthetic construct
  source 1..75: mol_type = other DNA
ataaccgttacctgaataaactggtggcgtgggcatggtttaacggcctgctgacctcgcgcacccgtttgtata

SEQ ID NO: 767374 - DNA, 75 bp, synthetic construct
  source 1..75: mol_type = other DNA
agtcatcgttcatcgcttgcgataagttgtgatttatccgttgaaattcccgtcaaaagcgaggcggataattta

SEQ ID NO: 767375 - DNA, 75 bp, synthetic construct
  source 1..75: mol_type = other DNA
gacgattattgtcaaaattgcgcttgaacaaacggcgggaagccaaagcatcgccgtcctgttaagcgatctcaa

SEQ ID NO: 767376 - DNA, 75 bp, synthetic construct
  source 1..75: mol_type = other DNA
tggttgttaggaccggtgggtatgctgctttccgtgccgttgacaattattgtcaaaattgcgcttgaacaaaca

SEQ ID NO: 767377 - DNA, 75 bp, synthetic construct
  source 1..75: mol_type = other DNA
ccggttgaagggatggcggcgattcagcgtgcgattgacagtgtttctcattatctggtgctgaaaacagccatc

SEQ ID NO: 767378 - DNA, 75 bp, synthetic construct
  source 1..75: mol_type = other DNA
tgggagagcgcccggctgataccttttttgccgatcagcacccagatctcaaggctgatttcatcatggctaatc

SEQ ID NO: 767379 - DNA, 75 bp, synthetic construct
  source 1..75: mol_type = other DNA
ccgcgctttgcaggttttcgcactcctcctaccggcaacgctaactatgcctggatcctgcacatgctttccaag

SEQ ID NO: 767380 - DNA, 75 bp, synthetic construct
  source 1..75: mol_type = other DNA
gacgattattgtcaaaattgcgcttgaacaaacagcgggaggtcaaagtatcgccgtgctgttaagcgatctcaa

SEQ ID NO: 767381 - DNA, 75 bp, synthetic construct
  source 1..75: mol_type = other DNA
tggtgggcaagttttgaatcaaacagctggaacacaattcatgagaatagtaatgaatttcttgctcttaattac

SEQ ID NO: 767382 - DNA, 75 bp, synthetic construct
  source 1..75: mol_type = other DNA
ggtgagacgacagaaatcctggcaacactacctagtctgaaaaaaatgggtaattatttgatctcttttacacgc

SEQ ID NO: 767383 - DNA, 75 bp, synthetic construct
  source 1..75: mol_type = other DNA
atgaataactcggaacttatacatcttattaaacattttatgcgtaacgaacataaggccgttgaagaggttatt

SEQ ID NO: 767384 - DNA, 75 bp, synthetic construct
  source 1..75: mol_type = other DNA
atggtgttgctgttagcttatctgggttccgcgctcaacgagttgacgcggacgttaccgcaatatcgcaactct

SEQ ID NO: 767385 - DNA, 75 bp, synthetic construct
  source 1..75: mol_type = other DNA
tactggcggtgtcgattttgatgaccatcatcgtgatggcgatggtgttgctattagcttatctgggttccgcgc

SEQ ID NO: 767386 - DNA, 75 bp, synthetic construct
  source 1..75: mol_type = other DNA
ttcgtcagacggaccttgacggaaatcgtgccagaaataatcagcatcagatagatggctatttaacttatcgta

SEQ ID NO: 767387 - DNA, 75 bp, synthetic construct
  source 1..75: mol_type = other DNA
ggcaactctataaaagtatcgattctccgtataaagcagtgctgaaaactctgctgctggaagcctattcctggg

SEQ ID NO: 767388 - DNA, 75 bp, synthetic construct
  source 1..75: mol_type = other DNA
ggtgatcccgcattttgcctggcgactggtgaatccggcaacgctgaaatattttgatgcgccgcacaggccgat

SEQ ID NO: 767389 - DNA, 75 bp, synthetic construct
  source 1..75: mol_type = other DNA
ccaccgcgtgggtgaacgtttcgccatactggaggccgcgcttgtgctttccggtcatgtaactggctgggccgt

SEQ ID NO: 767390 - DNA, 75 bp, synthetic construct
  source 1..75: mol_type = other DNA
cgttgagggagaaaatggacggggtggcgctcattctgctgccggattcgtttcctgacagggagttcgtctggt

SEQ ID NO: 767391 - DNA, 75 bp, synthetic construct
  source 1..75: mol_type = other DNA
gcatatcgctgcattaggccgcccggatttcagcagcaaaatcaaactgtataccggcgagatcccgctgttcag

SEQ ID NO: 767392 - DNA, 75 bp, synthetic construct
  source 1..75: mol_type = other DNA
aatttgttggctgcacggatacatttttgtggatggtaaaaagagcgggttacactattattccaccagcaaagg

SEQ ID NO: 767393 - DNA, 75 bp, synthetic construct
  source 1..75: mol_type = other DNA
ggaagagcaaattggttatacactttttacccgcaaagataataatattagcctcaataaagcagggcaggaact

SEQ ID NO: 767394 - DNA, 75 bp, synthetic construct
  source 1..75: mol_type = other DNA
ggacttgcttatggtgtaagcctgccctggcaggggggatgctcattctggggggggagaaaaaagatggtaaag

SEQ ID NO: 767395 - DNA, 75 bp, synthetic construct
  source 1..75: mol_type = other DNA
gcgaagttaatgaaccgcaaacggtactcgccatggtcagtatgggtattggtatcacattgatagcggacagct

SEQ ID NO: 767396 - DNA, 75 bp, synthetic construct
  source 1..75: mol_type = other DNA
cgctgccggaaggtaaaaggcgggcgattgtttattaaggtatgcgaacgcggcgacctgctaccggatattaac

SEQ ID NO: 767397 - DNA, 75 bp, synthetic construct
  source 1..75: mol_type = other DNA
gtcaaaggtaaatacatcaccatcgaaaataacgatgcgctggcccagcttgctggtcatacgcgtaacgttgcc

SEQ ID NO: 767398 - DNA, 75 bp, synthetic construct
  source 1..75: mol_type = other DNA
cttccagaaaagcggtatgctggcagtcaaaggtaaatacatcaccatcgaaaataacgatgcgctggcccagct

SEQ ID NO: 767399 - DNA, 75 bp, synthetic construct
  source 1..75: mol_type = other DNA
gaaccaccgactggttttaccagcttacggttgcatgaatcggcgtttctggtggcgatgcctgaagagcatcat

SEQ ID NO: 767400 - DNA, 75 bp, synthetic construct
  source 1..75: mol_type = other DNA
caacctgcgctggcaacgtttgccatgcctgatgttccaccagcgccagccccggcagaaccagcagttcaggca

SEQ ID NO: 767401 - DNA, 75 bp, synthetic construct
  source 1..75: mol_type = other DNA
atgtgttgatcgcctgcgccgctgccgatgcgcgtcatgagttaaaaatattcagctatcttgccagcgtgctgt

SEQ ID NO: 767402 - DNA, 75 bp, synthetic construct
  source 1..75: mol_type = other DNA
cattgagcgcgatgttttaaattgtcgggtaattattgcccgtagcttaagcgaacttgttgccattcgcgaaga

SEQ ID NO: 767403 - DNA, 75 bp, synthetic construct
  source 1..75: mol_type = other DNA
cggtatgccgcgtcgttctcgtcgctcgcctcgccatctgcgcgtgagtggtcagcgtcgtcgtcgctatcgtga

SEQ ID NO: 767404 - DNA, 75 bp, synthetic construct
  source 1..75: mol_type = other DNA
cgaagccctgaaaactattctcggcaaaatgcatcaggacgccgcaccgccagatagcgtggaagtcttctgcta

SEQ ID NO: 767405 - DNA, 75 bp, synthetic construct
  source 1..75: mol_type = other DNA
gtcgcttctactcgtcatcgcacgaccgcttcacctacggctcaagcttcatcaacttcaacctgccgcagttct

SEQ ID NO: 767406 - DNA, 75 bp, synthetic construct
  source 1..75: mol_type = other DNA
gagctaccgtaatctgatccgctttgcgcgtcgcaataaccttagcgtctccgccagtccgcaggatatcggcgt

SEQ ID NO: 767407 - DNA, 75 bp, synthetic construct
  source 1..75: mol_type = other DNA
gcggcgaagaaaccaaaccggccgagcaacccgcgtcgaaagcagaagcaaaaccggagcgccaacaggatcgcc

SEQ ID NO: 767408 - DNA, 75 bp, synthetic construct
  source 1..75: mol_type = other DNA
gccagctgaacctgccgcgcctgtcgtagccccagcacctaaatctgcaccggcaacaccagccgctcctgccca

SEQ ID NO: 767409 - DNA, 75 bp, synthetic construct
  source 1..75: mol_type = other DNA
aaaccggaacgtcaacaggatcgtcgcaagcctcgtcagaacagccgccgtgaccgtaatgagcgccgcgacacc

SEQ ID NO: 767410 - DNA, 75 bp, synthetic construct
  source 1..75: mol_type = other DNA
ttagcgcgccagttgttgaagaagtggccggtgtcgtagaagcccccgttcaggttgccgaaccgcaaccggaag

SEQ ID NO: 767411 - DNA, 75 bp, synthetic construct
  source 1..75: mol_type = other DNA
ccgaaactgccgaggttgtgattgccgaacctgaagtcgttgctcaacctgccgcgcctgtggtcgctgaagttg

SEQ ID NO: 767412 - DNA, 75 bp, synthetic construct
  source 1..75: mol_type = other DNA
cagctcaatcagaaagtgcgttacgagcaaagcgtagccgaagaagcggtagtcgcaccggtggttgaagaaact

SEQ ID NO: 767413 - DNA, 75 bp, synthetic construct
  source 1..75: mol_type = other DNA
cctgggtcttcaacggcaacagtaaacagcttggtacggcgggcggtattgccagtgccagctttgataatagta

SEQ ID NO: 767414 - DNA, 75 bp, synthetic construct
  source 1..75: mol_type = other DNA
tatcggtggtaatacggccattgcgcttaacaaaacgtatgtggccaaactgtactcggatgaaaaccagaacgg

SEQ ID NO: 767415 - DNA, 75 bp, synthetic construct
  source 1..75: mol_type = other DNA
atgaaacctcatatgaaacgtggcctgacaaaagtcgcgctggcactgatgctggctggatactgtgccgtacca

SEQ ID NO: 767416 - DNA, 75 bp, synthetic construct
  source 1..75: mol_type = other DNA
acagcgtggcaaattttgataagcgcctgtcgtcgacgatctttctgattggttttcaaattgccagttcgcttg

SEQ ID NO: 767417 - DNA, 75 bp, synthetic construct
  source 1..75: mol_type = other DNA
actggcgggttactgcgtgacgccccttgcgctggcggaagacagcgcgtggatcgagagcggcgagaccaatat

SEQ ID NO: 767418 - DNA, 75 bp, synthetic construct
  source 1..75: mol_type = other DNA
acctgtgccgtgaactggtattaccggcgcaaagaacgggaggaccgccttaatggtcatgtctccgggaacaag

SEQ ID NO: 767419 - DNA, 75 bp, synthetic construct
  source 1..75: mol_type = other DNA
aaataagaaaagttgtacaaacaataaaagagtcaggcttctactctccagagaaggggtatgaaggattatctt

SEQ ID NO: 767420 - DNA, 75 bp, synthetic construct
  source 1..75: mol_type = other DNA
cagaaagcgaaattcacggcttcctggcaacagtgggcgtgggttatacccgaatgttgcgccagcaggatgaca

SEQ ID NO: 767421 - DNA, 75 bp, synthetic construct
  source 1..75: mol_type = other DNA
gattcaggatggcgcaacttacggcaccagcgataaccgcaacctgtcgctgtttttgcgcggcatgttactcga

SEQ ID NO: 767422 - DNA, 75 bp, synthetic construct
  source 1..75: mol_type = other DNA
ctccggcatctcatcaaggacgctggccaacaccatgcacaccatggctgcacgtggatatgagtacaaggaacg

SEQ ID NO: 767423 - DNA, 75 bp, synthetic construct
  source 1..75: mol_type = other DNA
acgtttcccgcagatgatccggtatcgggttaaagagtgggaaaaagttgccggtgtacctgttgcagaagtatt

SEQ ID NO: 767424 - DNA, 75 bp, synthetic construct
  source 1..75: mol_type = other DNA
tggattgataatagacccatattacgggaaagacattaatgcttatttctacatattgttatggtggttcttatt

SEQ ID NO: 767425 - DNA, 75 bp, synthetic construct
  source 1..75: mol_type = other DNA
cagtccccatatcaacttctggttggtctcgctatttggcgctgtatttatgatgatcaacatgcgttttaaata

SEQ ID NO: 767426 - DNA, 75 bp, synthetic construct
  source 1..75: mol_type = other DNA
ttggtgtcagtaaaaaactggcgcgagtgctggtggatgtcaacaaagcccgcacgctgagccagcgtctgaaac

SEQ ID NO: 767427 - DNA, 75 bp, synthetic construct
  source 1..75: mol_type = other DNA
ttacagcgttagtcgcgcttgcgccacgagttttcaggctgtcgctaacgttgccgaaagtttaatggcgggaac

SEQ ID NO: 767428 - DNA, 75 bp, synthetic construct
  source 1..75: mol_type = other DNA
ttcgccgtcgtggcggtggatttggtttagtgaccgcctgtgctgcgggtgggcttggcgcagcaatggttctgg

SEQ ID NO: 767429 - DNA, 75 bp, synthetic construct
  source 1..75: mol_type = other DNA
tggatcctgcacggcgtgaatcacaaaaaatggcttaacggtaaagaaacgcaggaagcattagccaatcttgcc

SEQ ID NO: 767430 - DNA, 75 bp, synthetic construct
  source 1..75: mol_type = other DNA
tgagcgatctgacagtgttcgatatgcacgaagcctttgcagctcagacgctggcgaatattcagttgctgggta

SEQ ID NO: 767431 - DNA, 75 bp, synthetic construct
  source 1..75: mol_type = other DNA
gcggaatactccaccggcttgcgaatgggtgacactgcggagcaaatggcgaaaacatacggcattactcgcgaa

SEQ ID NO: 767432 - DNA, 75 bp, synthetic construct
  source 1..75: mol_type = other DNA
ctggaatgaatgtgcatactgatgcttacagcgtcagccgcgcttgcgccaccagttttcaggcggttgcgaacg

SEQ ID NO: 767433 - DNA, 75 bp, synthetic construct
  source 1..75: mol_type = other DNA
tgggcgacaccgctgaacaaatggcgaaaacctacggtattactcgcgaacagcaagatgcactggcgcaccgtt

SEQ ID NO: 767434 - DNA, 75 bp, synthetic construct
  source 1..75: mol_type = other DNA
cgggtattgtctgcctgatgttgttatttggcattttcttcctgagtaaaaaacgtgagcaaatggtgatggaaa

SEQ ID NO: 767435 - DNA, 75 bp, synthetic construct
  source 1..75: mol_type = other DNA
cttaatgcccgtaccgcctgcggtagcagagtattctaccggcttgcggatgggggacaccgcagagcaaatggc

SEQ ID NO: 767436 - DNA, 75 bp, synthetic construct
  source 1..75: mol_type = other DNA
ttgatgtctggcaggacatgttgctcggcccggcctggtcaacgccgctggcgctggaacgcgctggattgacga

SEQ ID NO: 767437 - DNA, 75 bp, synthetic construct
  source 1..75: mol_type = other DNA
cgtgctggtggatgtcaacaaagcacgcacaatgagtcaacggctgaaactcttttcccgcctgcgtttgcgtga

SEQ ID NO: 767438 - DNA, 75 bp, synthetic construct
  source 1..75: mol_type = other DNA
attacccgaagagcaggttgcttatctggaagagcatctctgcgatggcgagcaattaattatctcccgcttcga

SEQ ID NO: 767439 - DNA, 75 bp, synthetic construct
  source 1..75: mol_type = other DNA
gatgttcaaggtgctggcatagtgagaaaagtagctagctatcggcctaatgtcgacataaaattacgccctttc

SEQ ID NO: 767440 - DNA, 75 bp, synthetic construct
  source 1..75: mol_type = other DNA
atatattttgtccacctgatacaaaaacagccattacaggctgtagatttcaggctgggatcgagcgggttctct

SEQ ID NO: 767441 - DNA, 75 bp, synthetic construct
  source 1..75: mol_type = other DNA
ctaatattgttgatattcttgcgcctgctgagctcacgcgcctattctctgcctatcagcagtgggattggccag

SEQ ID NO: 767442 - DNA, 75 bp, synthetic construct
  source 1..75: mol_type = other DNA
catattgaacctcttcctcctgagcatcataccgctgcagattacttacgtcagtttgatttattcgtactgaac

SEQ ID NO: 767443 - DNA, 75 bp, synthetic construct
  source 1..75: mol_type = other DNA
acaaaaatacttactctggaatactgggaaacaaaacaccgattactggcaattcatcgtatatagcagaaattg

SEQ ID NO: 767444 - DNA, 75 bp, synthetic construct
  source 1..75: mol_type = other DNA
tggagagtccacgacaaaaacaatgtcgatctgggactgtatcagaggaagcgagtttacctataagtacgagct

SEQ ID NO: 767445 - DNA, 75 bp, synthetic construct
  source 1..75: mol_type = other DNA
aaaatgggcactgtgggagccgtggcgttggatctccatggcaatctggcggctgccacgtccacggggggaatg

SEQ ID NO: 767446 - DNA, 75 bp, synthetic construct
  source 1..75: mol_type = other DNA
gatgtggtgacggaagcggtgcgtctgctggaagagtgtccactgtttaacgccggaattggcgctgtctttacg

SEQ ID NO: 767447 - DNA, 75 bp, synthetic construct
  source 1..75: mol_type = other DNA
atgaatatgatgatctcatatcaggaacttgttcgcaccttccctaaagcaaaaaaagggtttgaagaaacatta

SEQ ID NO: 767448 - DNA, 75 bp, synthetic construct
  source 1..75: mol_type = other DNA
tcttgtttcttggcttaaaactattaataccgatatctcaacattaggtgagcttcacgattttaatccttatca

SEQ ID NO: 767449 - DNA, 75 bp, synthetic construct
  source 1..75: mol_type = other DNA
ttatcgttccggttgaggagttgctgaccgttcaggcgcaaaaatggcaaattttgcagaaaccgccagtatttt

SEQ ID NO: 767450 - DNA, 75 bp, synthetic construct
  source 1..75: mol_type = other DNA
aatattgccaccgctggtttcatctattgttgaagatcatcaggtgggggttatcgtaccggttgaagagctact

SEQ ID NO: 767451 - DNA, 75 bp, synthetic construct
  source 1..75: mol_type = other DNA
aattgtttctggataacatcagcggtgtgccaaaagcgcgtaaggtcaacaacatgcccctgacttcggatatca

SEQ ID NO: 767452 - DNA, 75 bp, synthetic construct
  source 1..75: mol_type = other DNA
tatcagcaccggagaggtggatatcgaaacatacctcaaaacgtcggggataaaagttaaggtcgggcaacttgt

SEQ ID NO: 767453 - DNA, 75 bp, synthetic construct
  source 1..75: mol_type = other DNA
atggaaactactgtatttttaagtaatcgcagtcaggccgtcagattaccgaaagcggtcgctctgccagaagac

SEQ ID NO: 767454 - DNA, 75 bp, synthetic construct
  source 1..75: mol_type = other DNA
aaaagtcagctgcgtcagagaaggtgttgcttgttctgttatacctgaaaacgacatttgtgtgtgtatttatgg

SEQ ID NO: 767455 - DNA, 75 bp, synthetic construct
  source 1..75: mol_type = other DNA
ttagccttgtcgcccgttctggctgcccgccaggattgggtaagtaatgatgacctggcagaaaaaatcacatcg

SEQ ID NO: 767456 - DNA, 75 bp, synthetic construct
  source 1..75: mol_type = other DNA
atgtttcgtcctcgtccaataccgccgaaactaactaatggctatcagccgaatactccagaaatacaagggagc

SEQ ID NO: 767457 - DNA, 75 bp, synthetic construct
  source 1..75: mol_type = other DNA
aatcttcactactggctgctcagctatggaagcagtgcaatactacgtaacaaaacaaaacaaaacaaaacaaat

SEQ ID NO: 767458 - DNA, 75 bp, synthetic construct
  source 1..75: mol_type = other DNA
atggaaacgaccgtatttctcagtaaccggagtcaggcagtcaggctgccgaaagctgtagccctgcctgaagac

SEQ ID NO: 767459 - DNA, 75 bp, synthetic construct
  source 1..75: mol_type = other DNA
ttcatcatcacgccgatgctggctatcgcgaccgcgttgctgactgtggtggggcaaaactggggacacggaaat

SEQ ID NO: 767460 - DNA, 75 bp, synthetic construct
  source 1..75: mol_type = other DNA
gtggtcacctttgttgatggcggcgaaaaaatggagttcatcaagtataaaccagtgcaaatttatattaatggc

SEQ ID NO: 767461 - DNA, 75 bp, synthetic construct
  source 1..75: mol_type = other DNA
ttgaagatgtcaggaaatcagaggatatactgaaccgactggagtttattgacagaagatttcgggaattcatca

SEQ ID NO: 767462 - DNA, 75 bp, synthetic construct
  source 1..75: mol_type = other DNA
atgggatttttctcgtttttacgaaagataagtaataaagaaaaaggggtggttatctatgagaagcagtggttc

SEQ ID NO: 767463 - DNA, 75 bp, synthetic construct
  source 1..75: mol_type = other DNA
gttatcatacggctttatttcgcaggacgacctggcaaaacagttcctgaacgtttctgaagattttaaacccaa

SEQ ID NO: 767464 - DNA, 75 bp, synthetic construct
  source 1..75: mol_type = other DNA
cactggagcacctcaaaaacaccatcatacactaaatcagtaagttggcagcatcacctgctcaccaataccaat

SEQ ID NO: 767465 - DNA, 75 bp, synthetic construct
  source 1..75: mol_type = other DNA
cgtgcagcgacgtttaacctttactcaccatcgtacttacccagggttagtcaacgttccacgccattgggtgcg

SEQ ID NO: 767466 - DNA, 75 bp, synthetic construct
  source 1..75: mol_type = other DNA
tcggcagatgccgtggttttctcgcccgatggcaaatggctggcgtggatggaagccggtcagttgtggatcacc

SEQ ID NO: 767467 - DNA, 75 bp, synthetic construct
  source 1..75: mol_type = other DNA
atgagtttaagttttattgcaagagtcttgcgccaattggcaattatgtttgtcctctccgtgcttattgtggcc

SEQ ID NO: 767468 - DNA, 75 bp, synthetic construct
  source 1..75: mol_type = other DNA
ccattgagcggatacttgaccaactgagcaagccaccggaagacatcccgaattgcgaactggttatcgagcgtg

SEQ ID NO: 767469 - DNA, 75 bp, synthetic construct
  source 1..75: mol_type = other DNA
tctgcggacgccgtggttttctcgccggatggtcaatggttggcgtggatggaggacggtcagttgtggatcacc

SEQ ID NO: 767470 - DNA, 75 bp, synthetic construct
  source 1..75: mol_type = other DNA
gttattgacaggatgaatgatggcggcgggtgcactcttgcgtttacatgggatagttacaggagcagatcgtga

SEQ ID NO: 767471 - DNA, 75 bp, synthetic construct
  source 1..75: mol_type = other DNA
tatgaatgaattcacacaagaacaagctcataatgaagagttctcatgtgatgagtttgcaactaaattcatcct

SEQ ID NO: 767472 - DNA, 75 bp, synthetic construct
  source 1..75: mol_type = other DNA
gacatcagcgaatgcatgatgtttgaagaaagaaaatccggcgcaacccgagaagagtttaacgaagcgtggagg

SEQ ID NO: 767473 - DNA, 75 bp, synthetic construct
  source 1..75: mol_type = other DNA
gaggtcgaggagatctatcgagcgtcacacggagcgcacgttggcgtggtgaccgttcatccaaagaaagaaaaa

SEQ ID NO: 767474 - DNA, 75 bp, synthetic construct
  source 1..75: mol_type = other DNA
cgaacggtgaaatggtgagctttacctataacgaccatgtaatgcatgaacgcagcccggcgctggatttgcgaa

SEQ ID NO: 767475 - DNA, 75 bp, synthetic construct
  source 1..75: mol_type = other DNA
tatccataccggcgaggtcgaggttatctatcgcgcgtcacagggcgcacacgtcggcgtggtgaccgttcatcc

SEQ ID NO: 767476 - DNA, 75 bp, synthetic construct
  source 1..75: mol_type = other DNA
ggcattgctggagtgtgtcccaatacaccacttcccgttgtgcctcttaaaattggtcctgatggccggggttac

SEQ ID NO: 767477 - DNA, 75 bp, synthetic construct
  source 1..75: mol_type = other DNA
ttaccgccgtatcaacgatatcggtcgtgagctctggctgagcatggatgacctcacccggcatatcatgttttt

SEQ ID NO: 767478 - DNA, 75 bp, synthetic construct
  source 1..75: mol_type = other DNA
tgtcgggtgttaaatacctgtgcgtcacagaaaaaaggtgcatgtcgatgcagctgctgcgcgaatacatgcctc

SEQ ID NO: 767479 - DNA, 75 bp, synthetic construct
  source 1..75: mol_type = other DNA
ctgaagtgtgacgaccccagcgaagatcgagaggagacagcccgctttcttggtgcatggaattacacacgcatc

SEQ ID NO: 767480 - DNA, 75 bp, synthetic construct
  source 1..75: mol_type = other DNA
gtgcactactctctttattgttactcggcatcacgtttaccctaccggactggttgggaacgctgttgattcttt

SEQ ID NO: 767481 - DNA, 75 bp, synthetic construct
  source 1..75: mol_type = other DNA
aatcctggcatttttctatctcgtcgtcatcggcacatcgctgacgtttagtctgtatctgaaaggtgcacagtt

SEQ ID NO: 767482 - DNA, 75 bp, synthetic construct
  source 1..75: mol_type = other DNA
gtggggaagttcaggggtctgcgcgcaatacatcatggagcaaagccagatgtcgtcgcagtttttgactatgac

SEQ ID NO: 767483 - DNA, 75 bp, synthetic construct
  source 1..75: mol_type = other DNA
cgcgctggggaaaatcatggtgacgcagcagagcatgatcctcgcccgtgacctgggtcaccggattggcgggac

SEQ ID NO: 767484 - DNA, 75 bp, synthetic construct
  source 1..75: mol_type = other DNA
tcaggggggcgaatggcagtcccgcgccatcgcaatgaacaaggctctggtgtcgggtgttaaatacctgtgcgt

SEQ ID NO: 767485 - DNA, 75 bp, synthetic construct
  source 1..75: mol_type = other DNA
gtaagaaagacgccgcgtattcctgccgttccgctcacggaacttaaccgtgagcagaagtggcagatgatgttg

SEQ ID NO: 767486 - DNA, 75 bp, synthetic construct
  source 1..75: mol_type = other DNA
gttctcagagacatactccactttcaccgaaacttacggtcacatttttggccaggatgcgggtgatattgacct

SEQ ID NO: 767487 - DNA, 75 bp, synthetic construct
  source 1..75: mol_type = other DNA
aacagcacggctacctgaccggccagttctcagagacatactccactttcaccgaaacttacggtcacatttttg

SEQ ID NO: 767488 - DNA, 75 bp, synthetic construct
  source 1..75: mol_type = other DNA
gaccggcgtcgatgcccgctggccggaagaggcgctttctcccctgaaaaactaccttcaggaactgcccggctt

SEQ ID NO: 767489 - DNA, 75 bp, synthetic construct
  source 1..75: mol_type = other DNA
aaaacatattctgagagaattaaatggttatgtggttatgttcatgaggataagaagataaagatgaaacagttg

SEQ ID NO: 767490 - DNA, 75 bp, synthetic construct
  source 1..75: mol_type = other DNA
tcttctctgctcgactatctgttcgcgccgatgatcaacattctactggcgaaaatctattttgaagctctggtg

SEQ ID NO: 767491 - DNA, 75 bp, synthetic construct
  source 1..75: mol_type = other DNA
aaagccggatttatccggcgatgagtgcgatcccggcactgtcaggcctgattaccacgatggttacgcagggct

SEQ ID NO: 767492 - DNA, 75 bp, synthetic construct
  source 1..75: mol_type = other DNA
gcttacgcttattccggttgttatgatgggcctggcctatatgcagccgatgacgctgtttgatacgttcggtat

SEQ ID NO: 767493 - DNA, 75 bp, synthetic construct
  source 1..75: mol_type = other DNA
tgggctgctatcggtctgatttacctggcttgcgtaaccaagagtttccgtaacccggttccgcagtacgaagac

SEQ ID NO: 767494 - DNA, 75 bp, synthetic construct
  source 1..75: mol_type = other DNA
gtactccggcgatgaacatcatcctggttggcgcgattgccctgctggcaatcaacttcgacctggtaatggcaa

SEQ ID NO: 767495 - DNA, 75 bp, synthetic construct
  source 1..75: mol_type = other DNA
tcgctcaacacatatcagcagcagttacagcaaacaacctggctatggtgtgaatgatttctacgtcagttatca

SEQ ID NO: 767496 - DNA, 75 bp, synthetic construct
  source 1..75: mol_type = other DNA
ggcgatcacagcctggggttaggcgccagtgcttttgggcgaactgaaaatctggatggtattgtggcctggtct

SEQ ID NO: 767497 - DNA, 75 bp, synthetic construct
  source 1..75: mol_type = other DNA
attaaagccacactctccaccccgctcgttgccgggcaaccgaaacaggatgtcaccgacgtgctgtataccgct

SEQ ID NO: 767498 - DNA, 75 bp, synthetic construct
  source 1..75: mol_type = other DNA
ggtcgccccgttgtttttgacgaagaggattttcccgcggtcgcggtttatctgacggatgcagagtataccggt

SEQ ID NO: 767499 - DNA, 75 bp, synthetic construct
  source 1..75: mol_type = other DNA
gatacggtcgatgcaaaagatttattgcaggaaggacaaagcagtggttttcgtgtctttggtactggcggcacg

SEQ ID NO: 767500 - DNA, 75 bp, synthetic construct
  source 1..75: mol_type = other DNA
aagcagataccaatcttcttatctggcgagcatgggattttgaaccggattttgaatataatttcaagcagcagc

SEQ ID NO: 767501 - DNA, 75 bp, synthetic construct
  source 1..75: mol_type = other DNA
taatataaaagtatcatatgcattaacagatatatcagcaatggaagttcagtttcattctcgtaaaataccatg

SEQ ID NO: 767502 - DNA, 75 bp, synthetic construct
  source 1..75: mol_type = other DNA
ttcagcgtgtaccggttgaggtgtctctggatccaaaagaactcatggaacatcccttgcgcattggtttatcga

SEQ ID NO: 767503 - DNA, 75 bp, synthetic construct
  source 1..75: mol_type = other DNA
atcgcactcaataaagctaaaaataatctggcaaatattgttcggcaaacgaataaactgtacttacaggataaa

SEQ ID NO: 767504 - DNA, 75 bp, synthetic construct
  source 1..75: mol_type = other DNA
tatatatagatacaaaaataaaaggtgcatttgaacaactaattcgatatttccaatcgcaagtgtttaataatg

SEQ ID NO: 767505 - DNA, 75 bp, synthetic construct
  source 1..75: mol_type = other DNA
agctattatcttattataaacataatttatttcacattagtgatgacatattaaatattgagtcttgtcctgaat

SEQ ID NO: 767506 - DNA, 75 bp, synthetic construct
  source 1..75: mol_type = other DNA
atatttcatttaaatttattaagaaaaattcagacttggtttttaataatggtaaaattgttttctatttattca

SEQ ID NO: 767507 - DNA, 75 bp, synthetic construct
  source 1..75: mol_type = other DNA
tcacctgcaatgcgctaaaaaacgctctctcaattccgctcacccctgaagaacaggagcttgaagcccaaatgg

SEQ ID NO: 767508 - DNA, 75 bp, synthetic construct
  source 1..75: mol_type = other DNA
atgacgatgttcttgcaatcaagtcatcaaaagaaagcttgtcagtaattgcggctaagtacgggatatctaaga

SEQ ID NO: 767509 - DNA, 75 bp, synthetic construct
  source 1..75: mol_type = other DNA
tgtcattacgtactgagtttgttttgttcgcctcgcaggacggggcgaacatccgttccctctgccgtcgcttcg

SEQ ID NO: 767510 - DNA, 75 bp, synthetic construct
  source 1..75: mol_type = other DNA
aggtcggcgaaacagtgagtcccggacaatcgttaatggctgtcgtaccggcacgtcaaatgtgggttaatgcca

SEQ ID NO: 767511 - DNA, 75 bp, synthetic construct
  source 1..75: mol_type = other DNA
gtcgttaatcataaagatacgaactacgttcgacagggtgacattttagtttcactggataaaactgatgccact

SEQ ID NO: 767512 - DNA, 75 bp, synthetic construct
  source 1..75: mol_type = other DNA
ctgcccttctatgccgggcaaggaacaaacttcgtggttaatggcagcctgattctggcgtttttctatctggtg

SEQ ID NO: 767513 - DNA, 75 bp, synthetic construct
  source 1..75: mol_type = other DNA
tcaggaaatggcccgcagcagcaaagtagtaaccagcagaacactcctgtatacgacgattccatcccattctga

SEQ ID NO: 767514 - DNA, 75 bp, synthetic construct
  source 1..75: mol_type = other DNA
ggcaaaatggtcaatcaatcactcttgaattactgaatgcaaagattggatttgcaacttcaggaaacagccaac

SEQ ID NO: 767515 - DNA, 75 bp, synthetic construct
  source 1..75: mol_type = other DNA
tatctcctatgccggacgtggcgcgttaagtgacgccaacgccgcaggctggctgacccggctgtttaaccatcc

SEQ ID NO: 767516 - DNA, 75 bp, synthetic construct
  source 1..75: mol_type = other DNA
tgaacaccgagcgccgtctcgcggtctgcgtgccggtcaccatgccgcagtcggtttacgacgcgctcgtcagtt

SEQ ID NO: 767517 - DNA, 75 bp, synthetic construct
  source 1..75: mol_type = other DNA
gcgctgtgtcctagtggatgttccgcagtttgtctatgacgcgctggtgtctctggcctttaacgttgggaccgg

SEQ ID NO: 767518 - DNA, 75 bp, synthetic construct
  source 1..75: mol_type = other DNA
gatgcgggtgtgtggactgacggcatcggcaacacgtcaggcgtgaagccgggccggaccattacagaacggcag

SEQ ID NO: 767519 - DNA, 75 bp, synthetic construct
  source 1..75: mol_type = other DNA
ctgttttatgccgacgttagtgcgtcgtcattctgttgctatacgccagaatgcggcggcgatcactaactcaac

SEQ ID NO: 767520 - DNA, 75 bp, synthetic construct
  source 1..75: mol_type = other DNA
tgcttcaatggcgaaaatggccaccgaactggcattacagggggccgcaggcaacattgatctgcgtgccagtca

SEQ ID NO: 767521 - DNA, 75 bp, synthetic construct
  source 1..75: mol_type = other DNA
gcatcagaaatacgtgctaatcggcaatagctatcatgaagcggaaaaagagcgtcacgccattgaggtgttaat

SEQ ID NO: 767522 - DNA, 75 bp, synthetic construct
  source 1..75: mol_type = other DNA
gccattctggtcaaaaaagacgacgcatactttgcgccaccgaaaaccgaagcaccgcctccggcagacgggcgt

SEQ ID NO: 767523 - DNA, 75 bp, synthetic construct
  source 1..75: mol_type = other DNA
aatgcgcaaagcagggtggatgagcgcgctgaaagagcaggatattgttccgtcggaaagctggatcggcaccgg

SEQ ID NO: 767524 - DNA, 75 bp, synthetic construct
  source 1..75: mol_type = other DNA
gtcaggctggcgtttctgtggcaacggtttcccgggtattaaataacagcgccctggtgagtgcggacacgcgtg

SEQ ID NO: 767525 - DNA, 75 bp, synthetic construct
  source 1..75: mol_type = other DNA
tgcctgcctgacggttaagcccccgcaacatgtctacgatgcgctggtgagcattggtttcaatgtggggaccgg

SEQ ID NO: 767526 - DNA, 75 bp, synthetic construct
  source 1..75: mol_type = other DNA
gcctggagatcatctcaaccgcaattgaaacgctgcggacacaaatcgcgcttatacagaaacgaaatccgggcg

SEQ ID NO: 767527 - DNA, 75 bp, synthetic construct
  source 1..75: mol_type = other DNA
tggatgctattgcctatatccatgagtacccgcatggtctggttgcggagactggtcagcgtggtgaagctctgt

SEQ ID NO: 767528 - DNA, 75 bp, synthetic construct
  source 1..75: mol_type = other DNA
caggaaatcattgacgcttgccgggtatgggcgaacgaatgggataagaagaatgggggtgtagaagatctttac

SEQ ID NO: 767529 - DNA, 75 bp, synthetic construct
  source 1..75: mol_type = other DNA
acagggaacaagtaagagacatcatcgagctattaaatttaaatattaacctaccttgccgactggcaattgcca

SEQ ID NO: 767530 - DNA, 75 bp, synthetic construct
  source 1..75: mol_type = other DNA
aatgcgccaagatactggcgctaaatcctgatgatgattccatagagtgccgtaacatcggtagtgacctactgg

SEQ ID NO: 767531 - DNA, 75 bp, synthetic construct
  source 1..75: mol_type = other DNA
aaattactctatcagcggcgctgggcagatgcgtgccgacagttgccgcgttgggtttatgtgaaaggtgtgttt

SEQ ID NO: 767532 - DNA, 75 bp, synthetic construct
  source 1..75: mol_type = other DNA
tgctgcgtgtggagcgggcactggaaaggtgtgtgaagcaacagccgccgcagaaggtgtatgacgcggtggtgt

SEQ ID NO: 767533 - DNA, 75 bp, synthetic construct
  source 1..75: mol_type = other DNA
tgaaactgattgccgattacgagggctgtcgtctgcagccgtatcaatgcagcgcgggtgtctggaccgacggca

SEQ ID NO: 767534 - DNA, 75 bp, synthetic construct
  source 1..75: mol_type = other DNA
aaattgctcaatcagcggcgctgggcggatgcatgccgacagttgccgcgctgggtttatgtaaaaggtgtgttt

SEQ ID NO: 767535 - DNA, 75 bp, synthetic construct
  source 1..75: mol_type = other DNA
aatcagcaatgcattgattatcaaggcgaaggcgtcacactgcgtaaaaagttggctacagcgcagagcattatc

SEQ ID NO: 767536 - DNA, 75 bp, synthetic construct
  source 1..75: mol_type = other DNA
tgctgcgtgtggagcgggcactggaaaggtgtgtgaagcaacagccaccgcagaaagtgtatgacgcggtggtgt

SEQ ID NO: 767537 - DNA, 75 bp, synthetic construct
  source 1..75: mol_type = other DNA
tgctgcgtgtggagcgggcgctgaaaaggtgtgtgaagcaacagccgccgcagaaggtgtatgacgctacggtgt

SEQ ID NO: 767538 - DNA, 75 bp, synthetic construct
  source 1..75: mol_type = other DNA
gttggactaccgaccaaacgccaatgcccaggcgctggcaactcaggtgagcgagactattggcgtggtggtgat

SEQ ID NO: 767539 - DNA, 75 bp, synthetic construct
  source 1..75: mol_type = other DNA
tatgagatcaagaacatttttattaatgggtaggaatgctcttttagatgcgaaagatgcaactgaaggagaatg

SEQ ID NO: 767540 - DNA, 75 bp, synthetic construct
  source 1..75: mol_type = other DNA
tgatgagttatcgggggttgtatttattgatgaaattgatgctcatttgcatgtttcattacaacgaaaaatctt

SEQ ID NO: 767541 - DNA, 75 bp, synthetic construct
  source 1..75: mol_type = other DNA
gactataaaaaagaaattcagcagataatagaagaaaagaaacggcttaaggtttgttctctttcagctacatat

SEQ ID NO: 767542 - DNA, 75 bp, synthetic construct
  source 1..75: mol_type = other DNA
ttccggcgctggaagtggtggggagccgcattcgcgactggtcgattcagtttgtcgataccgtggcagataacg

SEQ ID NO: 767543 - DNA, 75 bp, synthetic construct
  source 1..75: mol_type = other DNA
ctgtataacgccattgaatgggtgcttccggcgctggaggtggtgggcagccgcattcgcgactggtcgattcag

SEQ ID NO: 767544 - DNA, 75 bp, synthetic construct
  source 1..75: mol_type = other DNA
aatcattcctttttcccgtgttctgcaaccccgcattgaagcggagatcgcactggtgttgaaccgcgatttacc

SEQ ID NO: 767545 - DNA, 75 bp, synthetic construct
  source 1..75: mol_type = other DNA
gagcttgaaaaacacaacgtcaagcccactccggtatatttacgatgggtaatgagaattattgacgcttctctg

SEQ ID NO: 767546 - DNA, 75 bp, synthetic construct
  source 1..75: mol_type = other DNA
tgttcggtacggggaacaaggagcacaagcagattattgaacaggctgaggcgtttcttgcggcctatgggatga

SEQ ID NO: 767547 - DNA, 75 bp, synthetic construct
  source 1..75: mol_type = other DNA
gtggggaagttcaggtgtctgcgcacaatacatcatggagcaaagccagatgtcatcgcagtttcttaccatgac

SEQ ID NO: 767548 - DNA, 75 bp, synthetic construct
  source 1..75: mol_type = other DNA
gtaatcacctgagtctggcctacgtcgatgaggcgctgctggctggcgtacttacagcctttgtcgcccaggcgc

SEQ ID NO: 767549 - DNA, 75 bp, synthetic construct
  source 1..75: mol_type = other DNA
taccgccgtcgagctgccggaagcagagttcgaacgtcgccgcaaagccaccaactatgaatggccgctgttgaa

SEQ ID NO: 767550 - DNA, 75 bp, synthetic construct
  source 1..75: mol_type = other DNA
caaatttacaggggcgcacaatagcacatccatatgcacatactttaggctctgtggatatcaaagaccccacaa

SEQ ID NO: 767551 - DNA, 75 bp, synthetic construct
  source 1..75: mol_type = other DNA
ctgcgcgatctgattggtattgaaaacgctgaagcggcctacgccattcagcgcatcaatgtgcaacatgacgtt

SEQ ID NO: 767552 - DNA, 75 bp, synthetic construct
  source 1..75: mol_type = other DNA
acgagaaattgtgattggcatagataatacttatccgaccattatttttgatcagttgattagtctcggagataa

SEQ ID NO: 767553 - DNA, 75 bp, synthetic construct
  source 1..75: mol_type = other DNA
tgaaaagaatgctggtggagtggggaccggttatcccgaaagggaaggtcgagatcactatcagtaagtacgaga

SEQ ID NO: 767554 - DNA, 75 bp, synthetic construct
  source 1..75: mol_type = other DNA
ggattgtattacgccgaccacattacagcggttagtccgacctacgctcgtgagatcactgaaccacagtttgcc

SEQ ID NO: 767555 - DNA, 75 bp, synthetic construct
  source 1..75: mol_type = other DNA
ggtttcccgggtgctcaataacagcacgctggtcagtgccgacacgcgtgaagcagtaatgaaagccgtgagtga

SEQ ID NO: 767556 - DNA, 75 bp, synthetic construct
  source 1..75: mol_type = other DNA
agattttattatctccccacagcatgtatctgcacgagttcaggaactggaaaacctgactatcagtgaactacc

SEQ ID NO: 767557 - DNA, 75 bp, synthetic construct
  source 1..75: mol_type = other DNA
aatacttatccgaccattatttttgatcagttgattagtctcggagataagtatgaaggcgtgaccgcccagcca

SEQ ID NO: 767558 - DNA, 75 bp, synthetic construct
  source 1..75: mol_type = other DNA
tgtgtttgacggtcgctcactggtggtgacccgttatgacacgtacaacggtaatccccggatttttgtcgaaca

SEQ ID NO: 767559 - DNA, 75 bp, synthetic construct
  source 1..75: mol_type = other DNA
tgtgtttgagggccgcacactgacggtgacccgttatgacacgtacaacggtaaaccccggatttttgtcgaaca

SEQ ID NO: 767560 - DNA, 75 bp, synthetic construct
  source 1..75: mol_type = other DNA
caaccccgcattgaagcggagattgcactggtgttgaaccgcgatctacccgcaaccgatatcaccttcgacgaa

SEQ ID NO: 767561 - DNA, 75 bp, synthetic construct
  source 1..75: mol_type = other DNA
tgctgttgtcgaagaaaaatgccgaggaacgtctggctgcattcatctacaacctgtcccgtcgttttgcccaac

SEQ ID NO: 767562 - DNA, 75 bp, synthetic construct
  source 1..75: mol_type = other DNA
aagaacgtgaaatcatcgaaaactggcgttatgaatatgcgattccttattatgaagaagaccaagtagaaatcg

SEQ ID NO: 767563 - DNA, 75 bp, synthetic construct
  source 1..75: mol_type = other DNA
ccctgtatgactggactgttaaaatctccggcaaaaccgtttctgtaacccctagccatgtagaaaatgattggg

SEQ ID NO: 767564 - DNA, 75 bp, synthetic construct
  source 1..75: mol_type = other DNA
acccgattgagggcagcggctttgagatgaacggaaagggcagcagtgcccgcccgtcgctgacggtgtccaatc

SEQ ID NO: 767565 - DNA, 75 bp, synthetic construct
  source 1..75: mol_type = other DNA
gcaacaccgacggagacggacggggcgctgtttcctggtcgcatcatgctggcgaacacctgtatgtggacctac

SEQ ID NO: 767566 - DNA, 75 bp, synthetic construct
  source 1..75: mol_type = other DNA
cgctgtttcccggtcgcattatgctggcgaatacctgtatgtgggattaccggggagatgaatgcgggtataacg

SEQ ID NO: 767567 - DNA, 75 bp, synthetic construct
  source 1..75: mol_type = other DNA
aactttgtggcaggcaatccggaggccgacccggagcaggagctgactgaccgctgggtggtggagcagatgtca

SEQ ID NO: 767568 - DNA, 75 bp, synthetic construct
  source 1..75: mol_type = other DNA
gtcaccgcgggtggtactctgggaaatcgacctgacggtacagggcggtgagcggtattttttctgtaatgagct

SEQ ID NO: 767569 - DNA, 75 bp, synthetic construct
  source 1..75: mol_type = other DNA
gtcaccgcgtgtggtactctgggaaatcgacctgacggtgcagggcggtgagcgctattttttctgcaatgaact

SEQ ID NO: 767570 - DNA, 75 bp, synthetic construct
  source 1..75: mol_type = other DNA
tggcaggggcgacagtatcaggcgtaccctattcaggggagcggctttgagatgaacggcaagggagccagtgca

SEQ ID NO: 767571 - DNA, 75 bp, synthetic construct
  source 1..75: mol_type = other DNA
actgagtgcggtcagtgcctcctttgtgttgtccacaccgacggaaacggatggtgccgtttttccggggcgcat

SEQ ID NO: 767572 - DNA, 75 bp, synthetic construct
  source 1..75: mol_type = other DNA
cttcgtcaacggaaacagtgatgccgacccggagcaggaggtgatcagcagctggcgcatcgagcagtgcagcga

SEQ ID NO: 767573 - DNA, 75 bp, synthetic construct
  source 1..75: mol_type = other DNA
tggcaggggcgtcagtatcaggcgtaccccattcagggaacgggatttgaactgaacggcaagggcagtagcgca

SEQ ID NO: 767574 - DNA, 75 bp, synthetic construct
  source 1..75: mol_type = other DNA
cggagcgctgtttcccggtcgcattatgctggcgaatacctgtatgtggacctaccgctctgatgagtgtggtta

SEQ ID NO: 767575 - DNA, 75 bp, synthetic construct
  source 1..75: mol_type = other DNA
tggcaggggcggcagtatcaggcataccccattcaggggagcggttttgaactgaatggcaaaggggccagcgcc

SEQ ID NO: 767576 - DNA, 75 bp, synthetic construct
  source 1..75: mol_type = other DNA
tattttttctgcaatgagctgaatgaaaaaggggaggcggttacctggcaggggcggcaatatcaggtatacccg

SEQ ID NO: 767577 - DNA, 75 bp, synthetic construct
  source 1..75: mol_type = other DNA
aagggcagcagtgcctgaccgtcgctgacggtgtcgaatctgtttggtctggtcaccggcatggcggaggacctg

SEQ ID NO: 767578 - DNA, 75 bp, synthetic construct
  source 1..75: mol_type = other DNA
ggtgggtggtggagcagttatcagcgctgacggccatgacggcctcgtttgtgctggcgacaccgacggagacgg

SEQ ID NO: 767579 - DNA, 75 bp, synthetic construct
  source 1..75: mol_type = other DNA
tgggggccacggtggtccgccgccgggtgtatgcccgttttctggatgcggtgaatttagtcgcgggcaatccgg

SEQ ID NO: 767580 - DNA, 75 bp, synthetic construct
  source 1..75: mol_type = other DNA
cgctgaccgccatgacggcctcgtttgtgctggccacaccgaccgagacggacggggcgctgtttcccggtcgta

SEQ ID NO: 767581 - DNA, 75 bp, synthetic construct
  source 1..75: mol_type = other DNA
caccgaccgagacggacggggcgctgtttcccggtcgcatcatgctggcgaacacctgtatgtgggattaccggg

SEQ ID NO: 767582 - DNA, 75 bp, synthetic construct
  source 1..75: mol_type = other DNA
acggtgcggttttcccgggacgtaccatgctggccaacacctgtacctggacctatcgcggtgatgagtgcggtt

SEQ ID NO: 767583 - DNA, 75 bp, synthetic construct
  source 1..75: mol_type = other DNA
tggcaggggcggcagtatcaggcgtatcccattcaggggagcggatttgagatgaacggcaaaggagccagtgcc

SEQ ID NO: 767584 - DNA, 75 bp, synthetic construct
  source 1..75: mol_type = other DNA
tgggggccacggtggtccgccgccgggtgtatgcccgttttctggatgcggtgaatttcgtagcgggcaatccgg

SEQ ID NO: 767585 - DNA, 75 bp, synthetic construct
  source 1..75: mol_type = other DNA
ttctcgctctcggtgaagactacaaaatggaaattaacgagtcgcgcaccgtcctgaaaacggaagacaacagct

SEQ ID NO: 767586 - DNA, 75 bp, synthetic construct
  source 1..75: mol_type = other DNA
ccttttggctgggcggaagagaacttagccgaagtcgagcaaaataaacgggaaaaacatactgtcccctggcgt

SEQ ID NO: 767587 - DNA, 75 bp, synthetic construct
  source 1..75: mol_type = other DNA
aaaattatgctggcaaatattgccagtattgaaataccaccgatttattgtacttatctggaatggttacaaagg

SEQ ID NO: 767588 - DNA, 75 bp, synthetic construct
  source 1..75: mol_type = other DNA
tcgataattatgcggcaatcccttcagagtctattcgtcggctgctggccttacgtgaagcgggaatcattcata

SEQ ID NO: 767589 - DNA, 75 bp, synthetic construct
  source 1..75: mol_type = other DNA
tccaggaagtcgaacgcaataaacgagaaaaacacactgttccctggcgttatgtcattctgcgcctgcatgaag

SEQ ID NO: 767590 - DNA, 75 bp, synthetic construct
  source 1..75: mol_type = other DNA
agtaaaggccttgcccgggttttcatcgataattatgcggcaatcccttcagagtctattcgtcgactactggcc

SEQ ID NO: 767591 - DNA, 75 bp, synthetic construct
  source 1..75: mol_type = other DNA
tgtttggcgaagccaccaatccgacgattgcccaggggcgcgtgccgttggtgctggagctgctttcacccgccc

SEQ ID NO: 767592 - DNA, 75 bp, synthetic construct
  source 1..75: mol_type = other DNA
gggtggtggagcagatgtcagagctgacggccatgacagcctcgtttgtgctggcaacaccgacggagacggacg

SEQ ID NO: 767593 - DNA, 75 bp, synthetic construct
  source 1..75: mol_type = other DNA
tgtgcgcctgcggagtcgtgcggcttcgtggtgagaacgccggagggggagcggtatatcccttgtgtgaatatc

SEQ ID NO: 767594 - DNA, 75 bp, synthetic construct
  source 1..75: mol_type = other DNA
ggaagacctgcagagtctggtgggtgcaacggtggtccgccgtcgggtgtatgcgcgttttctggatgaggtgaa

SEQ ID NO: 767595 - DNA, 75 bp, synthetic construct
  source 1..75: mol_type = other DNA
ggcagcagtgccagaccgtcgctgacggtgtccaatctgttcggtctggtcaccgggatggcggaagacctgcag

SEQ ID NO: 767596 - DNA, 75 bp, synthetic construct
  source 1..75: mol_type = other DNA
ttcccgaccaaccctgacggtttctaacctgcacggtatggtcaccgggatggcggaagagctgcagagtctggt

SEQ ID NO: 767597 - DNA, 75 bp, synthetic construct
  source 1..75: mol_type = other DNA
ttcccggcctaccctgacggtttctaacctgtacggtatggtcaccgggatggcggaagagctgcagagtctggt

SEQ ID NO: 767598 - DNA, 75 bp, synthetic construct
  source 1..75: mol_type = other DNA
ttcccgtcctaccctgacggtttctaacctgaacggtatggtcaccgggatggcggaagagctgcagagtctggt

SEQ ID NO: 767599 - DNA, 75 bp, synthetic construct
  source 1..75: mol_type = other DNA
gacccggagcaggagctgagcgaccgctgggtggtggagcagatgtcgcagctgacagccatgacggcctcgttt

SEQ ID NO: 767600 - DNA, 75 bp, synthetic construct
  source 1..75: mol_type = other DNA
agaccgtcgctgacggtgtccaatctgttcggccttgtcaccgggatggcggaagacctgcagagtctggtgggg

SEQ ID NO: 767601 - DNA, 75 bp, synthetic construct
  source 1..75: mol_type = other DNA
gcctgcggagtcgtgcggcttcgtggtgagaacgccggagggggagcggtatatcccttgtgtgaatatctctgc

SEQ ID NO: 767602 - DNA, 75 bp, synthetic construct
  source 1..75: mol_type = other DNA
acctgccgctctgatgagtgtggttacacgggcggggctgtggcggatgagttcgataaacccaccacggatatc

SEQ ID NO: 767603 - DNA, 75 bp, synthetic construct
  source 1..75: mol_type = other DNA
aaagaagggcgatgtaacaaaaagtgaagaggtaatggctgcagtgcagtcattaatcttattttcattttttct

SEQ ID NO: 767604 - DNA, 75 bp, synthetic construct
  source 1..75: mol_type = other DNA
tggtcattatatgactcttcattaaatcatgccagagcaaccacacaaattgaatatatatcaacagctatagat

SEQ ID NO: 767605 - DNA, 75 bp, synthetic construct
  source 1..75: mol_type = other DNA
ttggcagggaaacgccagaccccattacaagatctcgtctgggatctatcaaaatttgccattattttaacattc

SEQ ID NO: 767606 - DNA, 75 bp, synthetic construct
  source 1..75: mol_type = other DNA
tcactttagtgagtctcctaacaattggaagtatattaaactccctcttattcaaaatgaatctttgtcaaggga

SEQ ID NO: 767607 - DNA, 75 bp, synthetic construct
  source 1..75: mol_type = other DNA
ttttttttcttgaatcaatgataggtatgcaagacaactatttcacatattgtatatcaaacggaatatcaaata

SEQ ID NO: 767608 - DNA, 75 bp, synthetic construct
  source 1..75: mol_type = other DNA
aatatcaggagggaagggcgggataaaattaatggttggtggtattggtgattacaacatagaatgtacccccgg

SEQ ID NO: 767609 - DNA, 75 bp, synthetic construct
  source 1..75: mol_type = other DNA
ccatctacaacaaggccgagtaccgcgatcagcggcgggcaatgctacaggattgggcggacatgattgacgagt

SEQ ID NO: 767610 - DNA, 75 bp, synthetic construct
  source 1..75: mol_type = other DNA
atttcattccgctacaactactcgatccacggtaggcaggagaccatcaccttcggccgctacggtgtcggaggg

SEQ ID NO: 767611 - DNA, 75 bp, synthetic construct
  source 1..75: mol_type = other DNA
ggcaatgaaacaggccgttatcgatcgcgatattatgccggtgcttggcaacaaaatgatggctgagataaccac

SEQ ID NO: 767612 - DNA, 75 bp, synthetic construct
  source 1..75: mol_type = other DNA
gccattctggaagctgcgcttgtactgtccggccatgtaactggctggtccgtgcaggaatgccgcgatgcaatt

SEQ ID NO: 767613 - DNA, 75 bp, synthetic construct
  source 1..75: mol_type = other DNA
gtacataccgacagttatatgaaacacgtcatcctggctgacagtacccgcgcaatgaagcaggcggtgatcgac

SEQ ID NO: 767614 - DNA, 75 bp, synthetic construct
  source 1..75: mol_type = other DNA
ctggattaacggggagcatacggatctgattccgttctccccgtcgaagtttgagaagtggatggaagacagtaa

SEQ ID NO: 767615 - DNA, 75 bp, synthetic construct
  source 1..75: mol_type = other DNA
acaatggaagcgcaaaggttctaagcattaacaaagatacaggcataatcgatttatcaaataatcaggtgttag

SEQ ID NO: 767616 - DNA, 75 bp, synthetic construct
  source 1..75: mol_type = other DNA
tcatgatgccgttcgtcaggaaatgctcgctatctatagggaaggtgattaccgcatagcaataggtagcaagaa

SEQ ID NO: 767617 - DNA, 75 bp, synthetic construct
  source 1..75: mol_type = other DNA
ggtccaggcgatggcaatgatcaggttgatgatctctaagcgctggttcgagcctgcagatatccggcagaaaca

SEQ ID NO: 767618 - DNA, 75 bp, synthetic construct
  source 1..75: mol_type = other DNA
tacatcgttattgatgagtttcatgcttttattggttcagagcgtggtgtacagctgctttctctgctcaataga

SEQ ID NO: 767619 - DNA, 75 bp, synthetic construct
  source 1..75: mol_type = other DNA
gtattccgcggcctgaaaactgtcctgcattatatggatgtcgtttctgtgccgctgtgccgcaaaccgtttggt

SEQ ID NO: 767620 - DNA, 75 bp, synthetic construct
  source 1..75: mol_type = other DNA
tgaatgcgccggaatggcggtattactggcaggtcaacatgccagtcgccaccaacaccacctggatgacatgtg

SEQ ID NO: 767621 - DNA, 75 bp, synthetic construct
  source 1..75: mol_type = other DNA
tctgccggatgaatgtattcccgcagggacacagacccttcgccagcgtcagcaacgactggatgcgaaggttaa

SEQ ID NO: 767622 - DNA, 75 bp, synthetic construct
  source 1..75: mol_type = other DNA
acagctatgcctgcaagggccatttcagaaagtccggatctatgacttcaaaacgttattgaaacatatggggga

SEQ ID NO: 767623 - DNA, 75 bp, synthetic construct
  source 1..75: mol_type = other DNA
taccgacagtcagactcacgccacgctaaaagtacaggtgaaaggttatctggaaccgctgaccacctcgggcca

SEQ ID NO: 767624 - DNA, 75 bp, synthetic construct
  source 1..75: mol_type = other DNA
gagttatcattttccaagtcaatttttgatgatataaaaaccaaatatatcacagatcccgaaacaaaacgaaac

SEQ ID NO: 767625 - DNA, 75 bp, synthetic construct
  source 1..75: mol_type = other DNA
cacgaatggatttggcatcgtctatatcagtccgttgaaggcattgattaacgatcagtaccgtcgtcttgggag

SEQ ID NO: 767626 - DNA, 75 bp, synthetic construct
  source 1..75: mol_type = other DNA
gatccggcgattgccggtgcggcaccttcattaacccgcgttcatcagcgtgcggatgccctgatgcgggagctg

SEQ ID NO: 767627 - DNA, 75 bp, synthetic construct
  source 1..75: mol_type = other DNA
agggcgaacgtcaggtaaatcaatacaccttctacgccgtgttcagcacgccggaagagtttcgcattgtggcgg

SEQ ID NO: 767628 - DNA, 75 bp, synthetic construct
  source 1..75: mol_type = other DNA
aggaatggcacttaagcacgaaggctggctggcattctggcgcgtatatcatgccggacggttcggttatcggcg

SEQ ID NO: 767629 - DNA, 75 bp, synthetic construct
  source 1..75: mol_type = other DNA
aggctgacatctgcgaagcgcttcacgaccgcgctgacgagctttaccgcagctgcctcgcacgcttcggggatg

SEQ ID NO: 767630 - DNA, 75 bp, synthetic construct
  source 1..75: mol_type = other DNA
aggcagatatctgtgaatcgctccacgaccacgccgatgagctttaccgcagttgcctcgcacgcttcggggatg

SEQ ID NO: 767631 - DNA, 75 bp, synthetic construct
  source 1..75: mol_type = other DNA
aagggcagcagtgcctggccgtcgctgacggtgtcgaatctgttaggtctggtcaccggtatggcggaggacctg

SEQ ID NO: 767632 - DNA, 75 bp, synthetic construct
  source 1..75: mol_type = other DNA
aagggcagcagtgcctgtccgtcgctgacggtgtcgaatctgttgggtctggtcaccggcatggcggaggacctg

SEQ ID NO: 767633 - DNA, 75 bp, synthetic construct
  source 1..75: mol_type = other DNA
aagggcagcagtgcctgtccgtcgctgacggtgtcgaatctgttcggtctggtcaccgggatggcggaggacctg

SEQ ID NO: 767634 - DNA, 75 bp, synthetic construct
  source 1..75: mol_type = other DNA
atggtgctgtttttccggggcgcatcatgctggccagcacctgcacctggacctatcgcggtgatgagtgcggtt

SEQ ID NO: 767635 - DNA, 75 bp, synthetic construct
  source 1..75: mol_type = other DNA
ggtggtccgccgccgggtgtatgcccgttttctggatgcggtgaattttgtggcgggcaatccggaagcggaccc

SEQ ID NO: 767636 - DNA, 75 bp, synthetic construct
  source 1..75: mol_type = other DNA
ttggtctgatgtatcggtacatggaacgggtaggaacgacgccatcaatcagagcagcggttaaacttttgctgt

SEQ ID NO: 767637 - DNA, 75 bp, synthetic construct
  source 1..75: mol_type = other DNA
caacagcagtgcaggcccgggagatcatcagcagcgtataccgtcacgccaatgaccgtggtcatggtttgttta

SEQ ID NO: 767638 - DNA, 75 bp, synthetic construct
  source 1..75: mol_type = other DNA
tacacgatatgcgccgtacagccagtacgttgttgcatgaggctggttatccttcagactggattgaaaaggctc

SEQ ID NO: 767639 - DNA, 75 bp, synthetic construct
  source 1..75: mol_type = other DNA
gctggtttttcaatcagcttgaacaaacgggtacattacccaccatcaagctggccattaaattggttttattaa

SEQ ID NO: 767640 - DNA, 75 bp, synthetic construct
  source 1..75: mol_type = other DNA
gattccgatgcacctatgagtagcgctactttaaaccgggttttgacactgacgtatcgtcaggcacagaaagaa

SEQ ID NO: 767641 - DNA, 75 bp, synthetic construct
  source 1..75: mol_type = other DNA
tgaagacttacgcgcattaaccgataacattgtcgagagaggggcaccggcgacagctgtacacgccagagagat

SEQ ID NO: 767642 - DNA, 75 bp, synthetic construct
  source 1..75: mol_type = other DNA
tgaacgtgatttaccgattaaagaccttgccggatacagaaaggggagtatcagaaatgaagatgatgagttccg

SEQ ID NO: 767643 - DNA, 75 bp, synthetic construct
  source 1..75: mol_type = other DNA
ccagtacatggagcgcattggcaccacaccttcgatccgcgcggccgccaagttgctgctgctgacgatggtacg

SEQ ID NO: 767644 - DNA, 75 bp, synthetic construct
  source 1..75: mol_type = other DNA
ggcaaagttcaccgacttcggtggccatcttgtcgacggtctgattaacggtatcaaaaacaaatgggagtcgct

SEQ ID NO: 767645 - DNA, 75 bp, synthetic construct
  source 1..75: mol_type = other DNA
agcagaaacttagtgagattacacatgaagacttacgcgcattaaccgataacattgtcgagagaggggcaccgg

SEQ ID NO: 767646 - DNA, 75 bp, synthetic construct
  source 1..75: mol_type = other DNA
tatcagcagcgtataccgtcacgccaatgaccgcggtcatggtttgtttaatcctgcggctgatattaagccttc

SEQ ID NO: 767647 - DNA, 75 bp, synthetic construct
  source 1..75: mol_type = other DNA
ccttcagactggattgaaaaggctctggcacatgagcagaaaggtgtgcgcgccgtatataacaaagcggaatac

SEQ ID NO: 767648 - DNA, 75 bp, synthetic construct
  source 1..75: mol_type = other DNA
ttggccggtggtggagcagatcttgatatcagcgtgaaagaggcggacggttcggtaaccacctatctggtgcct

SEQ ID NO: 767649 - DNA, 75 bp, synthetic construct
  source 1..75: mol_type = other DNA
aaaattttacgccacgggtgcaggggattgctcagagtaacgcgctggtaactattgaacagaatggttttgtgg

SEQ ID NO: 767650 - DNA, 75 bp, synthetic construct
  source 1..75: mol_type = other DNA
aacaagacaacggcgatgtatttgacgggcaaagttatcaaattgcctacaacaaatttgtgagccaaacgtcga

SEQ ID NO: 767651 - DNA, 75 bp, synthetic construct
  source 1..75: mol_type = other DNA
acggagccagatatttccggctgcgggatgtgtgtaacctgagccatgcgcagatcacaacgcgcattaaggagg

SEQ ID NO: 767652 - DNA, 75 bp, synthetic construct
  source 1..75: mol_type = other DNA
ggggcgagcaaacaaagtgattttgtccaggcgggttatcagtatggttttaataacttattaacgctgtatggt

SEQ ID NO: 767653 - DNA, 75 bp, synthetic construct
  source 1..75: mol_type = other DNA
tggcagtttgatgatgataagctcaatacgttgcatcatttaggtgctggcacgtttgttaccagtggtaagcga

SEQ ID NO: 767654 - DNA, 75 bp, synthetic construct
  source 1..75: mol_type = other DNA
actgataagtgcaatatgcgatatgggcattaaaggaatcttggaacgcctacagcaaccaaccaggcaaactaa

SEQ ID NO: 767655 - DNA, 75 bp, synthetic construct
  source 1..75: mol_type = other DNA
tatcctctgatggagacgttaatgtaaaaggcagcaatgtaaccgtcgcagctgatggtgatatagccctgaaag

SEQ ID NO: 767656 - DNA, 75 bp, synthetic construct
  source 1..75: mol_type = other DNA
cattaatagcgataacttcgccagcggtaagcaatgtttaacatttgagcaacttgttcagggggggggagctat

SEQ ID NO: 767657 - DNA, 75 bp, synthetic construct
  source 1..75: mol_type = other DNA
cctagccatctctatgtgacaacggattacatcgttacgcacaatacggaactggcgctgaagattgccgaaggc

SEQ ID NO: 767658 - DNA, 75 bp, synthetic construct
  source 1..75: mol_type = other DNA
gatcgcatcgcgtcaatagacgggcttccttcggaggtaattggcgtcttcccacaagggaagaaattcacatat

SEQ ID NO: 767659 - DNA, 75 bp, synthetic construct
  source 1..75: mol_type = other DNA
tcccttatccggcgattaacgccagcgcagaagccgagcgcgcttactggatgagccgcgaaaaaatggcggtaa

SEQ ID NO: 767660 - DNA, 75 bp, synthetic construct
  source 1..75: mol_type = other DNA
cgcgcggacttgggatgcgctggatgggagtgctgttcgctatctttctgctcatcgcttacggtttaattttca

SEQ ID NO: 767661 - DNA, 75 bp, synthetic construct
  source 1..75: mol_type = other DNA
attcatccacaaccgggcggtttaacctcttttcaatcattatgtaccagtcttgccgcgcgcgtgggtagcggt

SEQ ID NO: 767662 - DNA, 75 bp, synthetic construct
  source 1..75: mol_type = other DNA
ccggtgtttgatccgctgcgctacccggatatcgaccagcaactcgcgcctgatacgtgggatgatgtttcgcgg

SEQ ID NO: 767663 - DNA, 75 bp, synthetic construct
  source 1..75: mol_type = other DNA
gaccagcctggtgatttgcgtaatgaatatcgggcaacttccccacgtcatttggtctatttttgagagtgcttt

SEQ ID NO: 767664 - DNA, 75 bp, synthetic construct
  source 1..75: mol_type = other DNA
attaatggggccatggggagcggagtttgtcacagtagtgattattctgttcgccttcagttctatcgtcgccaa

SEQ ID NO: 767665 - DNA, 75 bp, synthetic construct
  source 1..75: mol_type = other DNA
atcggcatggcgacctcgtttgccgaatgttccctcgcacagctttataaagaacgtgatgccaatgggcagttt

SEQ ID NO: 767666 - DNA, 75 bp, synthetic construct
  source 1..75: mol_type = other DNA
ctcagcgccgacgtctgacgtcggaaaattactgctggagtttgtcaaaacactggcctttgaaacctcaatgga

SEQ ID NO: 767667 - DNA, 75 bp, synthetic construct
  source 1..75: mol_type = other DNA
ttacatcagatgctgcgggaaaagcggcacacgcaggaagaaatccgcgaagccatcaacgccctgattgacgaa

SEQ ID NO: 767668 - DNA, 75 bp, synthetic construct
  source 1..75: mol_type = other DNA
ggaaatttcctactcttactgattttgtaagttcgatcatatttaacatcaacaagacaaaaattgacaggtcaa

SEQ ID NO: 767669 - DNA, 75 bp, synthetic construct
  source 1..75: mol_type = other DNA
atcggcatggcgacctcgtttgccgaatgttccctggcacaactttataaagaacgtgacgtcaatgggcagttt

SEQ ID NO: 767670 - DNA, 75 bp, synthetic construct
  source 1..75: mol_type = other DNA
tttttactataccatgactctcctaggtattcaggagttgatgtatgtattagtggtatgatggggttgattctt

SEQ ID NO: 767671 - DNA, 75 bp, synthetic construct
  source 1..75: mol_type = other DNA
ggaccaaacaccctgccggacttatgcgagcgcaggtccgcatactgcctgactgggacggtgtaccggatgaag

SEQ ID NO: 767672 - DNA, 75 bp, synthetic construct
  source 1..75: mol_type = other DNA
aaaccatgaacctctggcgggggaagacgacgatacgcttccggttcccgtctctttacaagggcgcgtaacagg

SEQ ID NO: 767673 - DNA, 75 bp, synthetic construct
  source 1..75: mol_type = other DNA
ccgctgacgttgacaccaccacgctgtccggcggtaaagccaccgatagcgcacaagattttctcgttttgttga

SEQ ID NO: 767674 - DNA, 75 bp, synthetic construct
  source 1..75: mol_type = other DNA
cggcttcgcagctgcagcgtctgcgtgataaaaacattcctttaactgttacggtagacaaagtcgctgccagcg

SEQ ID NO: 767675 - DNA, 75 bp, synthetic construct
  source 1..75: mol_type = other DNA
ctcagccattaacaccgctgatagcagaagcccagagtaaagcggaagtcatcagcacgccttcgtcggtgaccg

SEQ ID NO: 767676 - DNA, 75 bp, synthetic construct
  source 1..75: mol_type = other DNA
tttttgcgatgttgcctggttttgacaatacgcccaaagtgactgatacgccgtcaaccgtgttatcgacagaga

SEQ ID NO: 767677 - DNA, 75 bp, synthetic construct
  source 1..75: mol_type = other DNA
cgaaaaagcggatgatctgaatgaagatgttaccgccagcctgagtgccctttttgcgatgttgcctggttttga

SEQ ID NO: 767678 - DNA, 75 bp, synthetic construct
  source 1..75: mol_type = other DNA
aagggcgcgagaaattccgtgaagaactgaacgaaacacatcagttgtttaaggattttgtgaagcgtatgcgtc

SEQ ID NO: 767679 - DNA, 75 bp, synthetic construct
  source 1..75: mol_type = other DNA
gtaataaacgccagcgtggcgagttacgggtcaacaatctcagcgaacagtataaggagatgaaagaagaactgg

SEQ ID NO: 767680 - DNA, 75 bp, synthetic construct
  source 1..75: mol_type = other DNA
taccggcagtgcggcagagagcgtcgaccgattgttgttacgctggtggcagcgcgggcaaaagcctttgatgta

SEQ ID NO: 767681 - DNA, 75 bp, synthetic construct
  source 1..75: mol_type = other DNA
caggcggtagagaaaggtctggttgacgaaataaacaccagtgatgaagtgattctgagtctgatggaaggccgt

SEQ ID NO: 767682 - DNA, 75 bp, synthetic construct
  source 1..75: mol_type = other DNA
gcaaaaacagtggcacaaagcgcagaagaaaaagcacaagcaagaagcgaaagcagcaaaagcgaaagccaaact

SEQ ID NO: 767683 - DNA, 75 bp, synthetic construct
  source 1..75: mol_type = other DNA
caatacgcccaaagtggctgatgcgccgtcaaccgtgttaccgacagagaaaccaactctctacacaaaactgac

SEQ ID NO: 767684 - DNA, 75 bp, synthetic construct
  source 1..75: mol_type = other DNA
cgctggaaaaaattagcaaatcatgaagtcatcacaatggcgatcccgtgtggtggcattggcgaccgtgacggc

SEQ ID NO: 767685 - DNA, 75 bp, synthetic construct
  source 1..75: mol_type = other DNA
atgtgactggctgggatgagcaggaatgccgcgatgccattcagcataattttaatgcctgggtgaaggagttcg

SEQ ID NO: 767686 - DNA, 75 bp, synthetic construct
  source 1..75: mol_type = other DNA
atcatgccggacggttcgatcattggtgaatctgaaaaaccgatcctgtttaccggaaaaagcgccgcgattaac

SEQ ID NO: 767687 - DNA, 75 bp, synthetic construct
  source 1..75: mol_type = other DNA
acagtaaaaggcgacctggtatgggtagagtttccttatctggatgttaatggtcgaattgataccagacgccca

SEQ ID NO: 767688 - DNA, 75 bp, synthetic construct
  source 1..75: mol_type = other DNA
gaactgtgcacccggcagggcttatgcgtgctcaagtccgtgttttacctgactggaatggcgttcctgatgacg

SEQ ID NO: 767689 - DNA, 75 bp, synthetic construct
  source 1..75: mol_type = other DNA
agaacatcgcatcaagtttatggggagagccggacgcgcagcggctgacctggtacggcacagcgttaggtatcg

SEQ ID NO: 767690 - DNA, 75 bp, synthetic construct
  source 1..75: mol_type = other DNA
ttaacgagtcggttaagtcagagcagtcaccgcgggtggtgctctgggaaatcgacctgacagcgcagggcggtg

SEQ ID NO: 767691 - DNA, 75 bp, synthetic construct
  source 1..75: mol_type = other DNA
tttaggtgaagtacaaatctccctcaaagtggatgatagccaggcgcaaatccagatggtgtcaccgcatcagca

SEQ ID NO: 767692 - DNA, 75 bp, synthetic construct
  source 1..75: mol_type = other DNA
aaaaaaaaaaaaaacaacacagagaccccatatcaaccacttctcgagacacccgcaagcttagagcctacacac

SEQ ID NO: 767693 - DNA, 75 bp, synthetic construct
  source 1..75: mol_type = other DNA
aggggataaaagttaaggcggggcagcttgtccgactgcttaacgttccgatggaaaaagccacgaaatttcacg

SEQ ID NO: 767694 - DNA, 75 bp, synthetic construct
  source 1..75: mol_type = other DNA
tggcagggcagggagtatcaggcatacccgattgacggcagcggttttgagatgaacggaaagggcagcagtgcc

SEQ ID NO: 767695 - DNA, 75 bp, synthetic construct
  source 1..75: mol_type = other DNA
ccgctctgatgagtgtggttacacgggcggggctgtggcggatgagttcgataaacccaccacggatatccgtaa

SEQ ID NO: 767696 - DNA, 75 bp, synthetic construct
  source 1..75: mol_type = other DNA
gctgacagccatgacggcctcgtttgtgctggctacaccgaccgagacggagggggcgctgtttcccggtcgtat

SEQ ID NO: 767697 - DNA, 75 bp, synthetic construct
  source 1..75: mol_type = other DNA
gctgacagccatgacggcctcgtttgtgctggcaacaccgaccgagacggagggggcgctgtttcccggtcgaat

SEQ ID NO: 767698 - DNA, 75 bp, synthetic construct
  source 1..75: mol_type = other DNA
gctgacagccatgacggcctcgtttgtgctggcaacaccgaccgagacggaaggggcgctgtttcccggtcggat

SEQ ID NO: 767699 - DNA, 75 bp, synthetic construct
  source 1..75: mol_type = other DNA
gggatggcggaggacctgcagagtctggtgggggccacggtggtccgccgccgggtgtatgcccgttttctggat

SEQ ID NO: 767700 - DNA, 75 bp, synthetic construct
  source 1..75: mol_type = other DNA
gaaagtctgaacgagtcggttaaatcagagcagtcaccgcgggtggtgctctgggaaatcgacctgacggtgcag

SEQ ID NO: 767701 - DNA, 75 bp, synthetic construct
  source 1..75: mol_type = other DNA
ggaggatttgcagagcctggtgggtggtggagcagatgtcatcgctgacggccatgacggcctcgtttgtgctgg

SEQ ID NO: 767702 - DNA, 75 bp, synthetic construct
  source 1..75: mol_type = other DNA
tgtgctggccacaccgaccgagacggacggagcgctgtttcccggtcgtatcatgctggcgaacacctgtatgtg

SEQ ID NO: 767703 - DNA, 75 bp, synthetic construct
  source 1..75: mol_type = other DNA
gctgacagccatgacggcctcgtttgtgctggccacaccgaccgagacggacggggcgctgtttcccggtcggat

SEQ ID NO: 767704 - DNA, 75 bp, synthetic construct
  source 1..75: mol_type = other DNA
tagtacaacgctgcccgcagctggtacagcagtctgacaccgtggaatgggatgacgcgcaaggtacgctgaaag

SEQ ID NO: 767705 - DNA, 75 bp, synthetic construct
  source 1..75: mol_type = other DNA
acagcagtcggacaccgtggaatgggatgacgcgcaaggcacgctgaaagcctggcgtcggctgcaaatcggtca

SEQ ID NO: 767706 - DNA, 75 bp, synthetic construct
  source 1..75: mol_type = other DNA
agtgaattgcctgcgcattacactgtgccgacgggaagccggatcgccattcgttatcatgaagataacccgccc

SEQ ID NO: 767707 - DNA, 75 bp, synthetic construct
  source 1..75: mol_type = other DNA
gcgctaccggtcgatatcgatgagttaatacagcgttgtccgcagctgttacggcagtctgataccgttgaatgg

SEQ ID NO: 767708 - DNA, 75 bp, synthetic construct
  source 1..75: mol_type = other DNA
gcttgcgtttgctgtgtgctgcaaagtggttaccggaatatgactggccagcaatggatgaggcgagcttgctgg

SEQ ID NO: 767709 - DNA, 75 bp, synthetic construct
  source 1..75: mol_type = other DNA
gctatcaactggcaaatggcatgggggcgatgctggacgccgacgatgccaaccttcctggcagcaacgcagtca

SEQ ID NO: 767710 - DNA, 75 bp, synthetic construct
  source 1..75: mol_type = other DNA
atgcaggatattcacgaagcaagcctgaacgagtcggttaagtcagagcagtcaccgcgggtggtgctctgggaa

SEQ ID NO: 767711 - DNA, 75 bp, synthetic construct
  source 1..75: mol_type = other DNA
gctgacagccatgacggcctcgtttgtgctggcgacaccgaccgagacggagggggcgctgtttcccggtcggat

SEQ ID NO: 767712 - DNA, 75 bp, synthetic construct
  source 1..75: mol_type = other DNA
gctgacagccatgacggcctcgtttgtgctggccacaccgaccgagacggagggggcgctgtttcccggtcgcat

SEQ ID NO: 767713 - DNA, 75 bp, synthetic construct
  source 1..75: mol_type = other DNA
cggaaggacagatgcagtaaatgcatgcgcgggtgtgagatgcgcggcatggcggttaatttcggcggtttcctt

SEQ ID NO: 767714 - DNA, 75 bp, synthetic construct
  source 1..75: mol_type = other DNA
ggaagacctgcagagtctggtgggggccacggtggtccgccgccgggtgtatgcgcgttttctggatgcggtgaa

SEQ ID NO: 767715 - DNA, 75 bp, synthetic construct
  source 1..75: mol_type = other DNA
caatgaaaagggcgagcctgtcacctggcaggggcgtcagtatcaggcatacccgatagagggcagcggctttga

SEQ ID NO: 767716 - DNA, 75 bp, synthetic construct
  source 1..75: mol_type = other DNA
atgcgcgttttctggatgcggtgaactttgtggcaggcaatccggaggccgacccggagcaggagctgagcgacc

SEQ ID NO: 767717 - DNA, 75 bp, synthetic construct
  source 1..75: mol_type = other DNA
acactcttatatgagtttttattgattgctctgtttattctttttttctttatctatgccatagacataaatcgt

SEQ ID NO: 767718 - DNA, 75 bp, synthetic construct
  source 1..75: mol_type = other DNA
atagatataaatcgttataatctctcagctatagcctcagtaataggactgttcaaaaaagagtctgttagttaa

SEQ ID NO: 767719 - DNA, 75 bp, synthetic construct
  source 1..75: mol_type = other DNA
ccgtctgcttaacgtgccgatggaaaaggcctcgcagtttcacgaatacagcaccggaaaggcgcacgcagacgc

SEQ ID NO: 767720 - DNA, 75 bp, synthetic construct
  source 1..75: mol_type = other DNA
tgaacgagtcggttaaagcggagcagtctccgcgggtggtgctctgggaaatcgacctgacggtgcagggcggtg

SEQ ID NO: 767721 - DNA, 75 bp, synthetic construct
  source 1..75: mol_type = other DNA
ttaagcggaaaccatgaggaatggcagttaagcacaacaacgggctggcattttggtgcgtacatcatgccggac

SEQ ID NO: 767722 - DNA, 75 bp, synthetic construct
  source 1..75: mol_type = other DNA
aatatcgagcaacttcctcacgtcatttggtctatttttgaaagcgcctttggctggcaggaagcggcaggcggc

SEQ ID NO: 767723 - DNA, 75 bp, synthetic construct
  source 1..75: mol_type = other DNA
acaaaggacaaatgcagcaagtgtctgcgcgggtgtgagatgcgcaacaatgtcggcaattttggcggtttcctt

SEQ ID NO: 767724 - DNA, 75 bp, synthetic construct
  source 1..75: mol_type = other DNA
gacccggagcaggagctgacggaccggtgggtggtggagcagatgtcagagctgacggccatgacggcctcgttt

SEQ ID NO: 767725 - DNA, 75 bp, synthetic construct
  source 1..75: mol_type = other DNA
aatacctgcacctggacctatcgcggtgatgagtgcggttatcacggtccggcggtcgcggatgaatatgaccag

SEQ ID NO: 767726 - DNA, 75 bp, synthetic construct
  source 1..75: mol_type = other DNA
aggaggtgatcagccgctggcgcatcgagcagtgcagcgaactgagcgcggtcagtgcctcttttgtactgtcca

SEQ ID NO: 767727 - DNA, 75 bp, synthetic construct
  source 1..75: mol_type = other DNA
gttcgacaaccccaccacggatatccgtaaggacagatgcagcaagtgcatgcgtgggtgtgaactgcgcaggaa

SEQ ID NO: 767728 - DNA, 75 bp, synthetic construct
  source 1..75: mol_type = other DNA
cgtcggcaactttggcggcttcctttccattaacaaacctgcgccagcgcctgttccgctgcgtgagtatccgtg

SEQ ID NO: 767729 - DNA, 75 bp, synthetic construct
  source 1..75: mol_type = other DNA
ttcacgacctacactgacggtttctaacctggacggtatggtcaccggaatggcggaagatgtgcagagtctggt

SEQ ID NO: 767730 - DNA, 75 bp, synthetic construct
  source 1..75: mol_type = other DNA
atgatgagacgacacgcctcacgcagtcagcccgggtgacgctctgggaaattgatctgaccggcatcgggggcg

SEQ ID NO: 767731 - DNA, 75 bp, synthetic construct
  source 1..75: mol_type = other DNA
atgatcactcactatgatataaaaatggagatgcaaaaactaaaggaggtactctctgtagagggtgttaatatc

SEQ ID NO: 767732 - DNA, 75 bp, synthetic construct
  source 1..75: mol_type = other DNA
ttcacgaccgactctgacggtttctaacctggacggtatggtcaccggaatggcggaagatgtgcagagtctggt

SEQ ID NO: 767733 - DNA, 75 bp, synthetic construct
  source 1..75: mol_type = other DNA
ttcacgaccgacactgacggtttctaacctggacggtatggtcaccggaatggcggaagatttgcagagtctggt

SEQ ID NO: 767734 - DNA, 75 bp, synthetic construct
  source 1..75: mol_type = other DNA
gccgctgtgccgcaaaccgtttggtccggtagatgaaaaatatctgccagaactgaaggcgctggctcagcagtt

SEQ ID NO: 767735 - DNA, 75 bp, synthetic construct
  source 1..75: mol_type = other DNA
ttaaccgtacgagtaatgggcttgcttctgatgcagagaaacgtaagcgattgattatgcgagttcagttcgcat

SEQ ID NO: 767736 - DNA, 75 bp, synthetic construct
  source 1..75: mol_type = other DNA
tacttccgggatttttggctctcaacaattctgtatgggcaagcgattcatctacaggagcgagtgatttacctg

SEQ ID NO: 767737 - DNA, 75 bp, synthetic construct
  source 1..75: mol_type = other DNA
accgtgcaagtaatgggctgacttctggtacagagaagcgtaagcgcttaatcatgcgggttcaattcgctttgc

SEQ ID NO: 767738 - DNA, 75 bp, synthetic construct
  source 1..75: mol_type = other DNA
ccagtatacgctgggggaaggtcctgtcatcggtaatgttcgctgggtggttgattcgcattttgatgtcgtatt

SEQ ID NO: 767739 - DNA, 75 bp, synthetic construct
  source 1..75: mol_type = other DNA
cgtatacagaatggctgattgaaagaaaattacgttataatgacaatgcacctaaagcattcatggatatgtttg

SEQ ID NO: 767740 - DNA, 75 bp, synthetic construct
  source 1..75: mol_type = other DNA
aaccacagtctgatcctgttgcagatgaagttcctaagatagtgactgacttcctgggcggcgtgttcacaaagt

SEQ ID NO: 767741 - DNA, 75 bp, synthetic construct
  source 1..75: mol_type = other DNA
gggccgataagaataaagttggcaccgttgaaattgaggatctacgggttattccggttatttttctgcccggag

SEQ ID NO: 767742 - DNA, 75 bp, synthetic construct
  source 1..75: mol_type = other DNA
tttcgatattttaaaatcaagcatcaaaaaatgggatattaccgcagataaagctacagatcagtttgcagaaag

SEQ ID NO: 767743 - DNA, 75 bp, synthetic construct
  source 1..75: mol_type = other DNA
agttgccgcgcacatccggtacggctatcaatgagcttaaagtagagatcatgggccttgttgagcagttggacg

SEQ ID NO: 767744 - DNA, 75 bp, synthetic construct
  source 1..75: mol_type = other DNA
ggatatcacctcagttgcgactgctgtaacggcaaagggcgatatccgtgtgaatgccggtcatgacatcgtact

SEQ ID NO: 767745 - DNA, 75 bp, synthetic construct
  source 1..75: mol_type = other DNA
gccgacgttaaaggaaccacgctgaataataccggtacgcttcagggtgcggacctgctggtgaattaccacaca

SEQ ID NO: 767746 - DNA, 75 bp, synthetic construct
  source 1..75: mol_type = other DNA
atgacatcgacgatgcatatggacagggccgataagaataaagttggcaccgctgaaattgaggatctacgggtt

SEQ ID NO: 767747 - DNA, 75 bp, synthetic construct
  source 1..75: mol_type = other DNA
ggagctgcaggggttcttcctgtagcatatacagaatggctgattgaaagaaaattacgttataacgacgatgct

SEQ ID NO: 767748 - DNA, 75 bp, synthetic construct
  source 1..75: mol_type = other DNA
ctggatcaggctaacagcttctgttctacgctggtggaccgtatcgttaccggttatccgcgtgatgaagtggct

SEQ ID NO: 767749 - DNA, 75 bp, synthetic construct
  source 1..75: mol_type = other DNA
ttcccggtgcacagtatccagaacgtatcattcagtttggtgaaggtaactttctgcgcgcctttgttgactggc

SEQ ID NO: 767750 - DNA, 75 bp, synthetic construct
  source 1..75: mol_type = other DNA
ggtgacagggcgtttccgtaatccatacattaagcatcagttattgtctattgcgcttaacggtatgaccaagtt

SEQ ID NO: 767751 - DNA, 75 bp, synthetic construct
  source 1..75: mol_type = other DNA
ccatttattatgaacatcattgaccatattcagaataactttgagagatttacaacccaagaaggtgatagtggg

SEQ ID NO: 767752 - DNA, 75 bp, synthetic construct
  source 1..75: mol_type = other DNA
ccatttattatttatgttattgaccatattcagaataactttaaaagattcaccgctcaagaaggaaataatggt

SEQ ID NO: 767753 - DNA, 75 bp, synthetic construct
  source 1..75: mol_type = other DNA
atgaactggaatctttcgccagtgcagtcaccgggcgtttccgtaacccgtacattaagcatcagctgctgtcta

SEQ ID NO: 767754 - DNA, 75 bp, synthetic construct
  source 1..75: mol_type = other DNA
acgcccgccgacgaaagatcgcaagtgcaataacgagatttttcacgtctttacgctcaaaaagtaaaaaaacca

SEQ ID NO: 767755 - DNA, 75 bp, synthetic construct
  source 1..75: mol_type = other DNA
ccagtgaagggacgggtagtttgccgctctcgatatgccggacggagccaaggccatcgatcacggggcgcgtca

SEQ ID NO: 767756 - DNA, 75 bp, synthetic construct
  source 1..75: mol_type = other DNA
ggtgagaaatacaccgtcgataatgaagcgaaaattgatatcaaaatggctgcactcaggaaggtgacaggatga

SEQ ID NO: 767757 - DNA, 75 bp, synthetic construct
  source 1..75: mol_type = other DNA
agggtatccgcgtgacgaagtgacaaaactggaagaagaactgggttatcacgatggcttccttgacaccgcaga

SEQ ID NO: 767758 - DNA, 75 bp, synthetic construct
  source 1..75: mol_type = other DNA
acacattttctgaataatagcggcttcacgacgtccttagagcttgaggtcaggctttctgatgtggagtacgaa

SEQ ID NO: 767759 - DNA, 75 bp, synthetic construct
  source 1..75: mol_type = other DNA
ttattgaagctcgttataatcgaggtatttctcttagtctggaaaaaataaagcaagataccagctatggcgatt

SEQ ID NO: 767760 - DNA, 75 bp, synthetic construct
  source 1..75: mol_type = other DNA
tggctgtgaaggctggcgaggtggcagagaagatcatcgcaatggtgacgccaatcaaggcgctaatggatggct

SEQ ID NO: 767761 - DNA, 75 bp, synthetic construct
  source 1..75: mol_type = other DNA
ttgaatccacgtcagcgtatctcgcagatcctggattttccgctgcgcctgaacactgacctcgagcctgagcag

SEQ ID NO: 767762 - DNA, 75 bp, synthetic construct
  source 1..75: mol_type = other DNA
ccggaccggctggtttcgtcgtcagaccgtagaagcggtaaaacctttgagctttacgctacgtgaaggccagac

SEQ ID NO: 767763 - DNA, 75 bp, synthetic construct
  source 1..75: mol_type = other DNA
atatcgacagtacaaatctatttaactgaacaacgcagtgggatgcgttggccggtaaaactcaaaggattctaa

SEQ ID NO: 767764 - DNA, 75 bp, synthetic construct
  source 1..75: mol_type = other DNA
acggtggaagcggtaaaacccttgagttttacattgcgtgaacgccagacactggcgatcatcggcgaaaatggt

SEQ ID NO: 767765 - DNA, 75 bp, synthetic construct
  source 1..75: mol_type = other DNA
gctgcacgacctcactaaacgactgattgccggtcattttggcgaggcattgacggcggatgcgtggcgtaagga

SEQ ID NO: 767766 - DNA, 75 bp, synthetic construct
  source 1..75: mol_type = other DNA
ggcatttcgtatatttatgttacccagcatatcggaatgatgaagcacattagcgaccaggtgctggtgatgcat

SEQ ID NO: 767767 - DNA, 75 bp, synthetic construct
  source 1..75: mol_type = other DNA
atgaaataccacgtcagtgtgtgactccaggcgattatgttcttcatgagggcaggacatatattgcatcggcaa

SEQ ID NO: 767768 - DNA, 75 bp, synthetic construct
  source 1..75: mol_type = other DNA
aatctaaaattactgctttgattcattgtgctgaattggttccttatttagcccttttgtattttatggtcgaaa

SEQ ID NO: 767769 - DNA, 75 bp, synthetic construct
  source 1..75: mol_type = other DNA
gattggttttttctttaattctcttgcgcaactgcctttttctgcaattcaatccctaggtaattctaaaataac

SEQ ID NO: 767770 - DNA, 75 bp, synthetic construct
  source 1..75: mol_type = other DNA
tattcgtaacctgaccacaaaaacatgcattactgaccgcatgattaaagtcttcctcggtcgtaatggtttacc

SEQ ID NO: 767771 - DNA, 75 bp, synthetic construct
  source 1..75: mol_type = other DNA
acaatattgaaaagagaaaactctatattcgtaacttcacaacaaaaacatgcattaccgactgcatgattaaag

SEQ ID NO: 767772 - DNA, 75 bp, synthetic construct
  source 1..75: mol_type = other DNA
acatgcatttctgactgcatgattaaagtcttcctcggtcgtgatggtttacctgtaaaggcggagtcatggtaa

SEQ ID NO: 767773 - DNA, 75 bp, synthetic construct
  source 1..75: mol_type = other DNA
gctgcatgaactcaccaaacggctgattgccgggcactttggcgaggcattgacggcggatgcgtggcgtaaaga

SEQ ID NO: 767774 - DNA, 75 bp, synthetic construct
  source 1..75: mol_type = other DNA
atcttttcggcatatcagatggcgttgtgtcagctatcgacttaataactggtggcgttgagggattaggtaaag

SEQ ID NO: 767775 - DNA, 75 bp, synthetic construct
  source 1..75: mol_type = other DNA
caaggccattgatgctgcattcgcccagggtaaaatcactctccttgagtaccgcgccgcgcaaaaagggatagg

SEQ ID NO: 767776 - DNA, 75 bp, synthetic construct
  source 1..75: mol_type = other DNA
agccgcagacttgagcagacgatggagcgcgtagcaatgaaaatgatggcaagggaatcgcaacgaccgggagga

SEQ ID NO: 767777 - DNA, 75 bp, synthetic construct
  source 1..75: mol_type = other DNA
gacaagccgaaaaaacagaaaaaagagaagaaatcggaagctgatcggcttggtgacaaaggtataagcgtttct

SEQ ID NO: 767778 - DNA, 75 bp, synthetic construct
  source 1..75: mol_type = other DNA
tattcagaaaatgggtgcattaggcggcgcgtcagcggaacagatgtctaactcaatgcgtcaattccgtcagtc

SEQ ID NO: 767779 - DNA, 75 bp, synthetic construct
  source 1..75: mol_type = other DNA
tagcagatcagatcatgatggaaacacaaagcaaggcaactcaagcaagtacaacggcaagcgcggttgccgctc

SEQ ID NO: 767780 - DNA, 75 bp, synthetic construct
  source 1..75: mol_type = other DNA
atcagcgtgcaggaaaagcgggaagccagggcaacaggcaaaacgtctgccaaaaaacagacggccggtaatgcg

SEQ ID NO: 767781 - DNA, 75 bp, synthetic construct
  source 1..75: mol_type = other DNA
gctacatgaactcaccaaacggctcatttccgggcactttggcgaagcgttgacggcggatgcgtggcgcaaaga

SEQ ID NO: 767782 - DNA, 75 bp, synthetic construct
  source 1..75: mol_type = other DNA
aaatcctggattttcctctgcgtttaaacaccgatctggagccggaacaacgacggaaacagatcattgaaacga

SEQ ID NO: 767783 - DNA, 75 bp, synthetic construct
  source 1..75: mol_type = other DNA
gaagcgggcaagctggtgaccttcggcattgtgccggatctaccagaaaccggttatggctatattcgtcgcggt

SEQ ID NO: 767784 - DNA, 75 bp, synthetic construct
  source 1..75: mol_type = other DNA
ctgcggatcagcggtgaaataccttttaaacagcctgaaatactgaagcgtatttttgagctggccagtgctacc

SEQ ID NO: 767785 - DNA, 75 bp, synthetic construct
  source 1..75: mol_type = other DNA
ttaacggcgaggccatacagctgaagaatatgcgcgtgacagtctcacagcagtttcaggataaagaccagtcag

SEQ ID NO: 767786 - DNA, 75 bp, synthetic construct
  source 1..75: mol_type = other DNA
tgtagccatcggtcaggacagcatcagcgaagttgatacgggtatcgctctgggtagcagttccgtttccagccg

SEQ ID NO: 767787 - DNA, 75 bp, synthetic construct
  source 1..75: mol_type = other DNA
gcacagggcagtttataaacgcagccatgcgcggcgagatcaaacgccgccagcgtcgcaaggccaaagaatcag

SEQ ID NO: 767788 - DNA, 75 bp, synthetic construct
  source 1..75: mol_type = other DNA
gaggcggtaaaaatgcctggcgaaagtacggggcaatttgttactgcggcattaaaacgagaagttgaatatcgc

SEQ ID NO: 767789 - DNA, 75 bp, synthetic construct
  source 1..75: mol_type = other DNA
tgcagtctcgtccaccagcagcgacgccattaacggttcacaactttatggtgttagtgactacattgccgatgc

SEQ ID NO: 767790 - DNA, 75 bp, synthetic construct
  source 1..75: mol_type = other DNA
gaaagtaacggacgcgcaggtttcccagaatacccagagcattactaacctgaacactcaggtcactaatctgga

SEQ ID NO: 767791 - DNA, 75 bp, synthetic construct
  source 1..75: mol_type = other DNA
acggctgaagactcactggcagtcggtgaagactcgctggcaatgggcgcgaaaaccatcgttaatggtaatgcg

SEQ ID NO: 767792 - DNA, 75 bp, synthetic construct
  source 1..75: mol_type = other DNA
ctggtggcgctggtcacgggccttatcatcagtattttgcaggccgccacgcagattaacgaaatgacgctgtcg

SEQ ID NO: 767793 - DNA, 75 bp, synthetic construct
  source 1..75: mol_type = other DNA
tggggactgaagcgatgaaagtcgcgctggcactggctgccccgctattgttggtagcgttggtcacgggcctta

SEQ ID NO: 767794 - DNA, 75 bp, synthetic construct
  source 1..75: mol_type = other DNA
ccgcagcggctgtaaagcccccccgtcatccccgtttcagacgcgaagacatccccgcgccggaaattgaccccg

SEQ ID NO: 767795 - DNA, 75 bp, synthetic construct
  source 1..75: mol_type = other DNA
aatcacaaacagttgcggcaagggttccgcatgaagttatgaacaatgttgaggcggtaaaaatgcctggtgaaa

SEQ ID NO: 767796 - DNA, 75 bp, synthetic construct
  source 1..75: mol_type = other DNA
gtacagggcagtttataagtgcagccatgcgcggcgagatcaaacgccgacagcgccggaaggccaaagagcagg

SEQ ID NO: 767797 - DNA, 75 bp, synthetic construct
  source 1..75: mol_type = other DNA
tggggactgaagcgatgaaagtcgcgctggcactggctgccccgctgttgctggtggcgctggtcacgggcctta

SEQ ID NO: 767798 - DNA, 75 bp, synthetic construct
  source 1..75: mol_type = other DNA
ccaccaacatcactaacctgacggattccgttggcgaccttaaggacgattctctgctgtggaacaaagcggctg

SEQ ID NO: 767799 - DNA, 75 bp, synthetic construct
  source 1..75: mol_type = other DNA
tgattataacgcatgtaatggatcatgagtttgtttgtaagctaatcgatttggcgatgagaaatgctgagaagc

SEQ ID NO: 767800 - DNA, 75 bp, synthetic construct
  source 1..75: mol_type = other DNA
gtaacgcactctacctgtcccggactgcactggagcaagcctttgataccaacggccatcagctcacccggctgc

SEQ ID NO: 767801 - DNA, 75 bp, synthetic construct
  source 1..75: mol_type = other DNA
cgccagggcggactgataactttttatccggtaatgccatccttgatcactgtggagcagcggtttctccccttc

SEQ ID NO: 767802 - DNA, 75 bp, synthetic construct
  source 1..75: mol_type = other DNA
tcagggagcgattgaagcaggaaataaaggaaattacagacagaaaaacgcacgatgtattatggcgagtggggc

SEQ ID NO: 767803 - DNA, 75 bp, synthetic construct
  source 1..75: mol_type = other DNA
taggtaacacggcggagggtatgcagttacggctgggatatacagcccgttacgctgaatgggtgcacaatatgc

SEQ ID NO: 767804 - DNA, 75 bp, synthetic construct
  source 1..75: mol_type = other DNA
tcaaaggataaaacgaccagcaatatgattataacgcatgtaatggatcatgagtttgtttgtaagctaatcgat

SEQ ID NO: 767805 - DNA, 75 bp, synthetic construct
  source 1..75: mol_type = other DNA
agcggcttagcgttcaacgatgccagcgcttcaggtattggcgctacagctgtaggttataacgcagttgcctct

SEQ ID NO: 767806 - DNA, 75 bp, synthetic construct
  source 1..75: mol_type = other DNA
catttagcgccgctcacgggaaagataaaactgccagtgtaatcactaacgtcgctaacggtgcagtctctgcca

SEQ ID NO: 767807 - DNA, 75 bp, synthetic construct
  source 1..75: mol_type = other DNA
ctgtggtgaacactgacggcagtatcactacaccaacttatgccatcgctggcggcagttacaacaacgtcggtg

SEQ ID NO: 767808 - DNA, 75 bp, synthetic construct
  source 1..75: mol_type = other DNA
gctacagctgtaggttataacgctgtcgcgtctggtgccagcagcgtagccattggtcagaacagcaatagcacc

SEQ ID NO: 767809 - DNA, 75 bp, synthetic construct
  source 1..75: mol_type = other DNA
tctgtgggtgaattctccgtaggtagcgaagacggtcaacgtcagatcaccaacgtcgcagcaggttcggcggat

SEQ ID NO: 767810 - DNA, 75 bp, synthetic construct
  source 1..75: mol_type = other DNA
tgagcgccaatggtcgttgggtctacaaattacaaggtagtaccaatagccagggtgaatactccgccgcgctcg

SEQ ID NO: 767811 - DNA, 75 bp, synthetic construct
  source 1..75: mol_type = other DNA
agtttttccgcgagctatcccgtgcgggtatgcgtggttacatctatacagcgcttggctacatacctgatgacc

SEQ ID NO: 767812 - DNA, 75 bp, synthetic construct
  source 1..75: mol_type = other DNA
tggatgactttggaacaaaatattctaatcttgatgtgttatccagggtcaatgcaggatttataaaaataggca

SEQ ID NO: 767813 - DNA, 75 bp, synthetic construct
  source 1..75: mol_type = other DNA
tcctcgtctttttcatttaccgcaggggaaagtggtcattaccctgcaagatgctcaggcctgctttaatctgaa

SEQ ID NO: 767814 - DNA, 75 bp, synthetic construct
  source 1..75: mol_type = other DNA
caaaatcctctgttgtggtaatggaacttccgctgccaatgcacagcattttgctgccagcatgatcaaccgttt

SEQ ID NO: 767815 - DNA, 75 bp, synthetic construct
  source 1..75: mol_type = other DNA
tcatttattatcagtagagtcagtaagtaatctgtcagatatttataattgtatatatggaggggagaccttttt

SEQ ID NO: 767816 - DNA, 75 bp, synthetic construct
  source 1..75: mol_type = other DNA
cggcgatctggacccgtatttttttttccggatttatcaaatcgacccccgcctggcagcctctgccagtggcta

SEQ ID NO: 767817 - DNA, 75 bp, synthetic construct
  source 1..75: mol_type = other DNA
aattctccagcaagttacatataagtgaggagtgtttgccattttttcagcctgtcatggacgctcactataatt

SEQ ID NO: 767818 - DNA, 75 bp, synthetic construct
  source 1..75: mol_type = other DNA
tatttctttcactttctttcggtgcatcagccgctgaaaaaacacaggatttagacggtgctaagtttggtgatg

SEQ ID NO: 767819 - DNA, 75 bp, synthetic construct
  source 1..75: mol_type = other DNA
aagtgtattccgacgccgtggatttctcatccgaagacgtaacggcggtcgttaaactgaaccgccccggaaatc

SEQ ID NO: 767820 - DNA, 75 bp, synthetic construct
  source 1..75: mol_type = other DNA
cgcagttctcgccgctgtaaaacagatggtatacggaaaagaatatctggaaattaccttacaggcggcggctga

SEQ ID NO: 767821 - DNA, 75 bp, synthetic construct
  source 1..75: mol_type = other DNA
tccgctgagcgagtatcagcgtaatgtgccgcctcatgtacgcgccgctcgccttgccgatgaagaaaaccaaaa

SEQ ID NO: 767822 - DNA, 75 bp, synthetic construct
  source 1..75: mol_type = other DNA
ccggtatcgcgctttcttcctcagccttagccgctgagaaatttaaagagattgatagtaaatctcttggtgata

SEQ ID NO: 767823 - DNA, 75 bp, synthetic construct
  source 1..75: mol_type = other DNA
tctgcattgcactttcttcctcagccatagccgctgagaagtttaaagagatagacggcgctgcatatggtgaca

SEQ ID NO: 767824 - DNA, 75 bp, synthetic construct
  source 1..75: mol_type = other DNA
ccctttctcgcttaacaaaagtgagacatcgaaatgaattgaattcaacgctgtcaacattgcctatgtctgcta

SEQ ID NO: 767825 - DNA, 75 bp, synthetic construct
  source 1..75: mol_type = other DNA
aatggacgccgggctttatcaaaaactgaaaccgctggtctgtgcgctgccgatgacccgccagcaaatcaacat

SEQ ID NO: 767826 - DNA, 75 bp, synthetic construct
  source 1..75: mol_type = other DNA
tgctgaaagcctgtgggagtttattgacgaagaccgcagcgtgcagacgcgtctgggccgtgaagacagcgagta

SEQ ID NO: 767827 - DNA, 75 bp, synthetic construct
  source 1..75: mol_type = other DNA
gtaaagaaaataaataaagcgttttaccaaaaaaacttcagacgtaaactttctgaaaaacgggaacgggagtct

SEQ ID NO: 767828 - DNA, 75 bp, synthetic construct
  source 1..75: mol_type = other DNA
gtgcatcgcagtaatatcgcggatatttctcgagagtgggaagagagcttccgccacggagttttcgctcgaggg

SEQ ID NO: 767829 - DNA, 75 bp, synthetic construct
  source 1..75: mol_type = other DNA
cgatgacccaccaacaaatcaacatcaacaccttagaggtcgcgcaaagcgtgattcttgaggcgctgttcgacc

SEQ ID NO: 767830 - DNA, 75 bp, synthetic construct
  source 1..75: mol_type = other DNA
cgtggttaagccctgttcaggcgcgggcgttattacaacaacgtccggcgaagggctgggaagatgtcgatcagt

SEQ ID NO: 767831 - DNA, 75 bp, synthetic construct
  source 1..75: mol_type = other DNA
ccagcaggagtaccagcaggcgctgagcgcgctcagtctgagcctaaaaaatgaacaacgcgtgcatctggcgca

SEQ ID NO: 767832 - DNA, 75 bp, synthetic construct
  source 1..75: mol_type = other DNA
tgtgcgctgccgatgacccgccagcaaatcaacatcaataccttagacgtcacgcaaagtgtgattcttgaggcg

SEQ ID NO: 767833 - DNA, 75 bp, synthetic construct
  source 1..75: mol_type = other DNA
aaaaaacttaagttttgttgtctcagaaaaaattggtagaaaagttcataagttaaagttttcttattccattag

SEQ ID NO: 767834 - DNA, 75 bp, synthetic construct
  source 1..75: mol_type = other DNA
cacaaatttaaacattaactggtatcagaaagccggaataacagattctcctgcaagccatagcgaaagatactc

SEQ ID NO: 767835 - DNA, 75 bp, synthetic construct
  source 1..75: mol_type = other DNA
atatcactggtgtcaaacaatgggaacctctatcgaaggctcgttatatcgagcaactttttggtctcacctccc

SEQ ID NO: 767836 - DNA, 75 bp, synthetic construct
  source 1..75: mol_type = other DNA
atgaattcgttaattgtccgcatgggcccacaacacttttcggttctctggcatcagacaggagaaagtgagtga

SEQ ID NO: 767837 - DNA, 75 bp, synthetic construct
  source 1..75: mol_type = other DNA
tatataaaatattttttaaaattgcttcttcgagtaattcggttgttgtggataaaaatacgctcactcaaaaaa

SEQ ID NO: 767838 - DNA, 75 bp, synthetic construct
  source 1..75: mol_type = other DNA
gaaatgacaggttgtttttttaccctactccattaaaaaatggatgttttatcttgcataatccactttactcta

SEQ ID NO: 767839 - DNA, 75 bp, synthetic construct
  source 1..75: mol_type = other DNA
cattaatgtattccgaaaaaacatgacttctttagatagtagtggttcattgatatatttgcctggcggtgatat

SEQ ID NO: 767840 - DNA, 75 bp, synthetic construct
  source 1..75: mol_type = other DNA
caatgaaaaacttggaaaatttcaaataaaactcaaagagaaaaaaatcaagatgtctaaggctgaagttatcaa

SEQ ID NO: 767841 - DNA, 75 bp, synthetic construct
  source 1..75: mol_type = other DNA
cctgcaaaaaaatatttagaacacggtttgttttctgaatatcgacaggacggtacaattccttatgtagtcagt

SEQ ID NO: 767842 - DNA, 75 bp, synthetic construct
  source 1..75: mol_type = other DNA
cattacaatgtccaatgagttaggcaacaatagattaaaacactcacagttagaaagcctagaattgaaggaccc

SEQ ID NO: 767843 - DNA, 75 bp, synthetic construct
  source 1..75: mol_type = other DNA
ggctttaacgtttataaaaaatataacgagcaatggtaacttttcatctttatatggaagtggtattgttaaaat

SEQ ID NO: 767844 - DNA, 75 bp, synthetic construct
  source 1..75: mol_type = other DNA
aaccctaacctctcatcttacatattacactttaatgacttatctggatatatatcaaatatatgggataatatt

SEQ ID NO: 767845 - DNA, 75 bp, synthetic construct
  source 1..75: mol_type = other DNA
cacgtctgggctggacgaatgaacgtattggtacagagctgggaatggaccaggatgaagtgctgaggctgaaac

SEQ ID NO: 767846 - DNA, 75 bp, synthetic construct
  source 1..75: mol_type = other DNA
atatgcaagttcagataaagaaaataaaagttttaactggctaaatccagtgagtgttggtattaatgatattac

SEQ ID NO: 767847 - DNA, 75 bp, synthetic construct
  source 1..75: mol_type = other DNA
gacggtgtagctcagatgtcattacctatatatgcatactcaatatgtcgtttttggccaaaagaaagtgtagct

SEQ ID NO: 767848 - DNA, 75 bp, synthetic construct
  source 1..75: mol_type = other DNA
ttcatatctatatgataattttcagattgctgatggtgatgttcatattaagcttcttcatctcaatagagaaac

SEQ ID NO: 767849 - DNA, 75 bp, synthetic construct
  source 1..75: mol_type = other DNA
gcaccgctgatgtgctggcatcgccgctgcatgaactcaccaaacggctgatcgccggtcattttggcgaagcat

SEQ ID NO: 767850 - DNA, 75 bp, synthetic construct
  source 1..75: mol_type = other DNA
atgcacttaaattccagaaagcacaggacgcattaaagtatgccgctttactgcatagccggacggcgcaacaaa

SEQ ID NO: 767851 - DNA, 75 bp, synthetic construct
  source 1..75: mol_type = other DNA
tttcattaatgacgtatttcagcacctgcgatacgagcgggatgttgaaagagccatcataaaggctggcggaaa

SEQ ID NO: 767852 - DNA, 75 bp, synthetic construct
  source 1..75: mol_type = other DNA
catataaaggccttcaacatatgtatatttcagtaatttcaaatgatacggtaattgaaagagaaatcccttgta

SEQ ID NO: 767853 - DNA, 75 bp, synthetic construct
  source 1..75: mol_type = other DNA
aacaggaccgtgagcctaccgatccgatggtgatggaggacgtggagtataaatgcgagcagaccaactatgaca

SEQ ID NO: 767854 - DNA, 75 bp, synthetic construct
  source 1..75: mol_type = other DNA
aacagccacgagggaaaatacacgccgacacggaagtgattattttcgctggcagtgatgcgtggtcacacgcga

SEQ ID NO: 767855 - DNA, 75 bp, synthetic construct
  source 1..75: mol_type = other DNA
gaactggaaaaaatcgccactgactatgcacttaaattccagaaagcacaggacgcattaaagtatgccgctttg

SEQ ID NO: 767856 - DNA, 75 bp, synthetic construct
  source 1..75: mol_type = other DNA
gggcggtggcgcacctgcaggtggcaatatcggtggtggtcagccgcagggcggttggggtcagcctcagcagcc

SEQ ID NO: 767857 - DNA, 75 bp, synthetic construct
  source 1..75: mol_type = other DNA
cgctggctacttccgaatcctggcgtgacaaagcgaccggcgagatgaaagagcagactgaatggcaccgcgttg

SEQ ID NO: 767858 - DNA, 75 bp, synthetic construct
  source 1..75: mol_type = other DNA
cagcggcgagttattgattgacgatcatccgctgcattttggcgattattccttccgcagtcagcgtattcgcat

SEQ ID NO: 767859 - DNA, 75 bp, synthetic construct
  source 1..75: mol_type = other DNA
gtatcataccctcccgtataaaaattgaaatcacttatagtagcgatcagtttggtttttcaaacaaaaaaaatt

SEQ ID NO: 767860 - DNA, 75 bp, synthetic construct
  source 1..75: mol_type = other DNA
agttgaaagagcgattaaaaggcttaatgagggcgaggctagagaattattgactagactcggtcttgatgcaaa

SEQ ID NO: 767861 - DNA, 75 bp, synthetic construct
  source 1..75: mol_type = other DNA
ccttgcgttaattgtcgaagggatttcttatattgttggcctagttagtatgacactttttaacttccatccaac

SEQ ID NO: 767862 - DNA, 75 bp, synthetic construct
  source 1..75: mol_type = other DNA
gtagattctcatttgcataacgatctcatagatacgttatcaacgcgtggtattcctggagtagtattaacaatt

SEQ ID NO: 767863 - DNA, 75 bp, synthetic construct
  source 1..75: mol_type = other DNA
gaaaacactgaatggcaccgtgttgttgtgtttggaaaactggccgaagtggccggggaatatctgcgtaaaggt

SEQ ID NO: 767864 - DNA, 75 bp, synthetic construct
  source 1..75: mol_type = other DNA
gccgtgggcgtaaggccgcgcagccggagcctcagccgcaaccgccagagggtgaggattacggattttcagacg

SEQ ID NO: 767865 - DNA, 75 bp, synthetic construct
  source 1..75: mol_type = other DNA
gccctgttctgcaggcgatgatgaatgacgccgtgggggccattccggtaccgcgcgatggtcgtgattatgatc

SEQ ID NO: 767866 - DNA, 75 bp, synthetic construct
  source 1..75: mol_type = other DNA
ttggggacgaaaaccacatcgtcgtttgattacggaaccaaatccacgaataacaccggggcgcatacccatagt

SEQ ID NO: 767867 - DNA, 75 bp, synthetic construct
  source 1..75: mol_type = other DNA
actgggcagaagtttatacctcgaaaaatcttccaccagaaagctacccagtcggcgcaccaatcccgtggccat

SEQ ID NO: 767868 - DNA, 75 bp, synthetic construct
  source 1..75: mol_type = other DNA
tctaccgttcttcaagagacggttatggttttgaggaagactgggcagaagtttatacctcgaaaaatcttccac

SEQ ID NO: 767869 - DNA, 75 bp, synthetic construct
  source 1..75: mol_type = other DNA
gttcgtccgattgaaacttcattcccgccgtcactgagcacgcaagagtgggcactgccagaagcatttattcaa

SEQ ID NO: 767870 - DNA, 75 bp, synthetic construct
  source 1..75: mol_type = other DNA
tgcaataaagattcactctgcagtacagataatatctggttccgaaatcctcacggatgctccgactgtaatcac

SEQ ID NO: 767871 - DNA, 75 bp, synthetic construct
  source 1..75: mol_type = other DNA
atgacgggcgtggtattgatgctgtacgtgccttgctaagtcttcagaatggaggagtggaatcacacacccacc

SEQ ID NO: 767872 - DNA, 75 bp, synthetic construct
  source 1..75: mol_type = other DNA
aagtgcgtgacgggcgatgatgtgcgtccgatgcttgaacagatagtgaaggaggcggtaagccatattcctgtt

SEQ ID NO: 767873 - DNA, 75 bp, synthetic construct
  source 1..75: mol_type = other DNA
tgctgcgctatgcgcaagagtgggcactgccagaagcatttattcaatggctggatcaggctaacagcttctgtt

SEQ ID NO: 767874 - DNA, 75 bp, synthetic construct
  source 1..75: mol_type = other DNA
tctgtggtattacagaagtgcgtgacgggcgatgatgtgcgtccgatgcttgagcagatggtgaaggaggcggta

SEQ ID NO: 767875 - DNA, 75 bp, synthetic construct
  source 1..75: mol_type = other DNA
cggcgaactggttattggaaccaaactgtccgcaagtctgaacggtaatgcattaacagcaacaaagctgcaaac

SEQ ID NO: 767876 - DNA, 75 bp, synthetic construct
  source 1..75: mol_type = other DNA
tggtgaatgcaggtatttgtgcggtcatcgtccttgtcctgatgttttaccagcgtgaaggggcaagacatcgcc

SEQ ID NO: 767877 - DNA, 75 bp, synthetic construct
  source 1..75: mol_type = other DNA
accgctggcctgttaatgttgccaaggacaacaggaagttacctttaatgaccggctcattatcggtgagtgaat

SEQ ID NO: 767878 - DNA, 75 bp, synthetic construct
  source 1..75: mol_type = other DNA
tgacggcggcggtcatgttggctttgttgttggtcagcaggcaaatggcgatttgatggtactgggtggaaatca

SEQ ID NO: 767879 - DNA, 75 bp, synthetic construct
  source 1..75: mol_type = other DNA
atgccttaagaactgctaaagaaccttatattttaatcttgcttttttcactactggtagtaggcctaagtgatg

SEQ ID NO: 767880 - DNA, 75 bp, synthetic construct
  source 1..75: mol_type = other DNA
actttgtctttgtgggatgatgttgcaacaaagtttcttcatgcagctggaattatatctgcattgtattttcta

SEQ ID NO: 767881 - DNA, 75 bp, synthetic construct
  source 1..75: mol_type = other DNA
actctggtgtcaagtctttaattctcatgttatgtatgttgtctttaatgactttgtctttgtgggatgatgttg

SEQ ID NO: 767882 - DNA, 75 bp, synthetic construct
  source 1..75: mol_type = other DNA
ggcgctttattatctccgggaactgcaccgacagcatattgtggagcctgaccgcagaggtaaggggcgcgctat

SEQ ID NO: 767883 - DNA, 75 bp, synthetic construct
  source 1..75: mol_type = other DNA
ttattatctccgggaactgcaccgacagcatattgtggagcctgaccgcagcggtaaaggaagcgccatttattg

SEQ ID NO: 767884 - DNA, 75 bp, synthetic construct
  source 1..75: mol_type = other DNA
atgaacgtcaaaatccgaaatgaaattcaggcattaatccgaatccgggaacgtaataacaacggtggtgaatta

SEQ ID NO: 767885 - DNA, 75 bp, synthetic construct
  source 1..75: mol_type = other DNA
ttcaggcattaattcggattaaagagcgtaatagcaatggtggagacttgcgcgaatttatttgcgcgcgcgaag

SEQ ID NO: 767886 - DNA, 75 bp, synthetic construct
  source 1..75: mol_type = other DNA
ttccttccggtcacacgatgtttgctgccagttgggcactgctggccgttggtttgctgtggccgcgtcggcgaa

SEQ ID NO: 767887 - DNA, 75 bp, synthetic construct
  source 1..75: mol_type = other DNA
taaaaattaaagcggggcagcttgtccgtctgcttaacgtaccgatggaaaaggcctcgcagtttcacgaataca

SEQ ID NO: 767888 - DNA, 75 bp, synthetic construct
  source 1..75: mol_type = other DNA
accgtaccgtgagtgctgatgccgcaggcatcatccttacctcccttgtgattaaccgccagttgtggctgtacc

SEQ ID NO: 767889 - DNA, 75 bp, synthetic construct
  source 1..75: mol_type = other DNA
gttgagtgctgccggaatgctggaagcgggaggcgaccgccgttacaagaaaaaggcgctcggcaggattggcgg

SEQ ID NO: 767890 - DNA, 75 bp, synthetic construct
  source 1..75: mol_type = other DNA
gcatggcggaaatgctgggcgcaatcaccacggtaaaaagcggtaatctgttattcatcatgccaggtggtggcg

SEQ ID NO: 767891 - DNA, 75 bp, synthetic construct
  source 1..75: mol_type = other DNA
tgatgaaatcgctcacgaaggaccaccggacaggctgactgtttcagccagaagcgcagattttcgggatgaatt

SEQ ID NO: 767892 - DNA, 75 bp, synthetic construct
  source 1..75: mol_type = other DNA
gacttcccttgtgattaaccgccagttgtggctgtaccacgacagcggtaacgcagggctgacacacctgtaccg

SEQ ID NO: 767893 - DNA, 75 bp, synthetic construct
  source 1..75: mol_type = other DNA
atcaggactggattattgcgaaagccgagcacaccattgataacagcggctttaccacgcagcttgagcttgaag

SEQ ID NO: 767894 - DNA, 75 bp, synthetic construct
  source 1..75: mol_type = other DNA
atctgttattcatccggcagggacagggcaaaagcgccagcggtaaaccactgccggtgatcactatcacgcgta

SEQ ID NO: 767895 - DNA, 75 bp, synthetic construct
  source 1..75: mol_type = other DNA
agccgcagccggagtacagcgtggtgctgaacggtaaggacattacgcggaatctggacaaccgcttaatcagcc

SEQ ID NO: 767896 - DNA, 75 bp, synthetic construct
  source 1..75: mol_type = other DNA
gaagtggagccagttacagcgtggcgcggcgtcattctccatcacgctggcgcggggccgggcggatttgtaccc

SEQ ID NO: 767897 - DNA, 75 bp, synthetic construct
  source 1..75: mol_type = other DNA
tcagtttcgcattgctgaccgcgaggcgtatacgggtgtacgcgcctactggcttgatcttaattacgggaaaaa

SEQ ID NO: 767898 - DNA, 75 bp, synthetic construct
  source 1..75: mol_type = other DNA
gcggcaaagtggcagcagttacagcgcggcgcggcggagttttcgatcaccctggcgcgcgggcgtgcggagttg

SEQ ID NO: 767899 - DNA, 75 bp, synthetic construct
  source 1..75: mol_type = other DNA
tggtcggcacggtggcgctgttttacaccggttatctgctttatctcggtattccaagtttcctgaatatcaaca

SEQ ID NO: 767900 - DNA, 75 bp, synthetic construct
  source 1..75: mol_type = other DNA
ttttattcggctggtttctctggtgtctgcgttttcgcattaaggctgcctttgtattatttgccattctggcgg

SEQ ID NO: 767901 - DNA, 75 bp, synthetic construct
  source 1..75: mol_type = other DNA
atgcaatatgcgaaacctgtcactctgaatgttgaagagtgcgaccgcctcttctttctgccttacctgtttggc

SEQ ID NO: 767902 - DNA, 75 bp, synthetic construct
  source 1..75: mol_type = other DNA
atgcggggctgactcagctttaccggatgcgtgatgcgcagttgtggcgtcacatcgaatttcaccccgaatgca

SEQ ID NO: 767903 - DNA, 75 bp, synthetic construct
  source 1..75: mol_type = other DNA
gagaaggggtgattgaactgcaactggagggaagtaaaacacaccgcgagtggtgtgtgccgatcgtggcgccac

SEQ ID NO: 767904 - DNA, 75 bp, synthetic construct
  source 1..75: mol_type = other DNA
atgcagtatgcaaaatctgtcattctgaacgttgaagaaatcgaccgtctgtcttttctgccttacctgtttggc

SEQ ID NO: 767905 - DNA, 75 bp, synthetic construct
  source 1..75: mol_type = other DNA
tatcccacaatatttgcgttcacactggcagaaagagacggggtttgcctttccttccggtcacacgatgtttgc

SEQ ID NO: 767906 - DNA, 75 bp, synthetic construct
  source 1..75: mol_type = other DNA
gctgcgtgatacccagctctggaatcacatcgcctttcaccccgaatgcaacgctatttacgccgcgcttgactg

SEQ ID NO: 767907 - DNA, 75 bp, synthetic construct
  source 1..75: mol_type = other DNA
tttctgccttacctgtttggcaacgattttctgtatgccgaggcgtatgtgtacgcgctggcgcaaaaaatgatg

SEQ ID NO: 767908 - DNA, 75 bp, synthetic construct
  source 1..75: mol_type = other DNA
gtgctgatgcctgcggcatcattctgacttcccttgtgattaaccgccagttgtggctgtaccacgacagcgggg

SEQ ID NO: 767909 - DNA, 75 bp, synthetic construct
  source 1..75: mol_type = other DNA
tgacttcccttgtgattaaccgccagttgtggctgtaccacgacagcggtgatgcgggactgacacacctgtacc

SEQ ID NO: 767910 - DNA, 75 bp, synthetic construct
  source 1..75: mol_type = other DNA
ttgtggctgtaccacgacagcggtaacgcagggttgactcacctgtacaggatgcgcgatgcacagttgtggagc

SEQ ID NO: 767911 - DNA, 75 bp, synthetic construct
  source 1..75: mol_type = other DNA
tgccgcaggcatcattctgacttcccttgtgattaaccgccagttgtggctgtaccacgacagcggtaacgcagg

SEQ ID NO: 767912 - DNA, 75 bp, synthetic construct
  source 1..75: mol_type = other DNA
aaatcgaccacgccgaccagaccgaagaaagcgacatgtccttccttacgcgcatggcggaaatgctgggcgcaa

SEQ ID NO: 767913 - DNA, 75 bp, synthetic construct
  source 1..75: mol_type = other DNA
ccgcagcagcggtgacagccatcacttccgcattgcagaccggcaggcgtacacgggggtacgcgcttactggct

SEQ ID NO: 767914 - DNA, 75 bp, synthetic construct
  source 1..75: mol_type = other DNA
tctcacgataagaaacgcatccgtttcttaagcgcctttctggtgggggcaacatggccgatgagtttcccggtg

SEQ ID NO: 767915 - DNA, 75 bp, synthetic construct
  source 1..75: mol_type = other DNA
cgcatttcttatcacctggtttctttctcacgataagaaacgcatccgtttcttaagcgcctttctggtgggggc

SEQ ID NO: 767916 - DNA, 75 bp, synthetic construct
  source 1..75: mol_type = other DNA
taatgttaaacgtgaggcgtcctggcatgatgtgaccgttgaacgtgtggtatccgccatcgctcatcggtacgg

SEQ ID NO: 767917 - DNA, 75 bp, synthetic construct
  source 1..75: mol_type = other DNA
ggcttgatcttaattacgggaaaaagaaaaaagtcagcgtgaaacgccgtaaaccgccaaaacccaaaaaggaga

SEQ ID NO: 767918 - DNA, 75 bp, synthetic construct
  source 1..75: mol_type = other DNA
cattgataacagcggctttaccacacagcttgagcttgaggcaaaaatcccggaatggatagcagaaacagagtg

SEQ ID NO: 767919 - DNA, 75 bp, synthetic construct
  source 1..75: mol_type = other DNA
caggaaaacagtgaaaaactggcagccgatatgattatcagtcagaaacgcatggggggcctgcaggccgtgcgt

SEQ ID NO: 767920 - DNA, 75 bp, synthetic construct
  source 1..75: mol_type = other DNA
atacagcataactttaatgcctgggtgaaagagttcggtacgggcaacagggaacacaggcagattattgaacag

SEQ ID NO: 767921 - DNA, 75 bp, synthetic construct
  source 1..75: mol_type = other DNA
cacaccgggtgcggtgaaagtcggtaaaggtggcgaatatgccaacttggacgccgtggtgatggatgccgtcaa

SEQ ID NO: 767922 - DNA, 75 bp, synthetic construct
  source 1..75: mol_type = other DNA
caggaaaacagtgaaaaactggcggccgatatgattatcagtcagaaacgcatgggaggcctgcaggccgtgcgt

SEQ ID NO: 767923 - DNA, 75 bp, synthetic construct
  source 1..75: mol_type = other DNA
caggaaaacagtgaaaaactggctgccgatatgatgatcagtcagaaacgcatgggaggcctgcaggccgtgcgt

SEQ ID NO: 767924 - DNA, 75 bp, synthetic construct
  source 1..75: mol_type = other DNA
caggaaaacagtgaaaaactggctgccgatatgataatcagtcagaaacgcatggggggcctgcaggccgtgcgt

SEQ ID NO: 767925 - DNA, 75 bp, synthetic construct
  source 1..75: mol_type = other DNA
ccggacaggctgacggtttcagccagaagcgcagattttcgggatgaatttaacgttaaacgtgaggtgtcctgg

SEQ ID NO: 767926 - DNA, 75 bp, synthetic construct
  source 1..75: mol_type = other DNA
ttaacgcttacctgcagcagttggcgcgtctgaacggtgtggcagttgaagaactgtccagcaagttcaccgtgg

SEQ ID NO: 767927 - DNA, 75 bp, synthetic construct
  source 1..75: mol_type = other DNA
tgctgatcacccgtctggataacctgtctatctactggcaggaagacacccgccgccgctcagttatcgacaacc

SEQ ID NO: 767928 - DNA, 75 bp, synthetic construct
  source 1..75: mol_type = other DNA
aaaggtggcgaatatgccaacctggacgctgtggtgatggatgccgttaatgagcttatcgacgtggtctaccag

SEQ ID NO: 767929 - DNA, 75 bp, synthetic construct
  source 1..75: mol_type = other DNA
gcaatcaccacggtaaaaagcggtaatctgttattcattatgccaggcggtggcgtgaacgcacagggccaaccg

SEQ ID NO: 767930 - DNA, 75 bp, synthetic construct
  source 1..75: mol_type = other DNA
tagcctcccgtaacaggctggaagccagtgtcactccgtcactggccggaattaaaatcccgcacatcgaccagt

SEQ ID NO: 767931 - DNA, 75 bp, synthetic construct
  source 1..75: mol_type = other DNA
ctaatgagagtgacggcagttttctgatgcgactggcgcgacagtacggtgccatcgcgtcggtgaaaaatggca

SEQ ID NO: 767932 - DNA, 75 bp, synthetic construct
  source 1..75: mol_type = other DNA
cactactgcagaaccggtaaaagtaggtccgggtggtaagtatgtaaatcttgacgcggtggtgatggataccgt

SEQ ID NO: 767933 - DNA, 75 bp, synthetic construct
  source 1..75: mol_type = other DNA
cgagcacaccatcgataacagcggctttaccacgcagcttgagcttgaggcaaaaatcccggaatggatagcaga

SEQ ID NO: 767934 - DNA, 75 bp, synthetic construct
  source 1..75: mol_type = other DNA
tggctgcactcctgactccttttgatcaacaacaagcactggataaagcgagtctgcgtcgcctggttcagttca

SEQ ID NO: 767935 - DNA, 75 bp, synthetic construct
  source 1..75: mol_type = other DNA
ttcctgacgctgattaatgtcacgccagtgactgagcagtctggtcagttgctggggctgggtgttggcagcacc

SEQ ID NO: 767936 - DNA, 75 bp, synthetic construct
  source 1..75: mol_type = other DNA
ctttgaatccgtcaacgaggcgtatgtggtcgaggactaccgctgcgcggcgctggttgaaaacatcgaaatcgg

SEQ ID NO: 767937 - DNA, 75 bp, synthetic construct
  source 1..75: mol_type = other DNA
cagtgactgaacagtccggtcaactgctggggctgggtgttggtagtaccattgccggaaccactgataccaccg

SEQ ID NO: 767938 - DNA, 75 bp, synthetic construct
  source 1..75: mol_type = other DNA
taatagcttttctgtccgccagctcaaccattacatccattatttgcaggaaaccggacaacccagcagcgaata

SEQ ID NO: 767939 - DNA, 75 bp, synthetic construct
  source 1..75: mol_type = other DNA
tgcccctgttggtgctggcatggcaagcctggcaaagcctgaatgcgcttagcgatcaggcggcgctggttaacc

SEQ ID NO: 767940 - DNA, 75 bp, synthetic construct
  source 1..75: mol_type = other DNA
tgctgccgccgccgcgcgtcttgaagcctttgccagtgccaataccgaaatggtgcaggccacgcgcacagtggt

SEQ ID NO: 767941 - DNA, 75 bp, synthetic construct
  source 1..75: mol_type = other DNA
cataaaaccggccagtattaaccgcgatcttacctgcctgagtggtatgtttactgcgctaattgatgcggaatt

SEQ ID NO: 767942 - DNA, 75 bp, synthetic construct
  source 1..75: mol_type = other DNA
tatgcgttttgatgatatcgatttgctgcgtctctccgcacgcgaacggcgcaaactggttggccataacgtgtc

SEQ ID NO: 767943 - DNA, 75 bp, synthetic construct
  source 1..75: mol_type = other DNA
gcgagtatgcgtgaaggcaccgaattacttgccgatcaggttgtcgggccgcttacgccagagcaaaaagaggtg

SEQ ID NO: 767944 - DNA, 75 bp, synthetic construct
  source 1..75: mol_type = other DNA
actgcttgattacaaccgtaaacaggcggacggtgcggtggaactggagaatgttgagttagcgccactggtgga

SEQ ID NO: 767945 - DNA, 75 bp, synthetic construct
  source 1..75: mol_type = other DNA
cggaatgggagtcgttgtgtgatggttgcggtcagtgttgcctgcataaactgatggatgaagacaccgacgaaa

SEQ ID NO: 767946 - DNA, 75 bp, synthetic construct
  source 1..75: mol_type = other DNA
ggtgatggcgaagacctgtatctcaaagaggtaacccactggatgtcgctaccagaacagcctcgattaaaggag

SEQ ID NO: 767947 - DNA, 75 bp, synthetic construct
  source 1..75: mol_type = other DNA
gcaggcaaatgctgaattcatcgccgcagccaatccggctaccgtgctgacactgctggacgagctggaaacagc

SEQ ID NO: 767948 - DNA, 75 bp, synthetic construct
  source 1..75: mol_type = other DNA
tgcagggcgcaacggaaagcgcatccgcaggaaatttgacaagaaaagtgaggctgtagcttttgagaaacacac

SEQ ID NO: 767949 - DNA, 75 bp, synthetic construct
  source 1..75: mol_type = other DNA
gaactcttacagagttgttaggcagatggtggatatatcacggaaaatcacatgagcgtggagatattgaacgag

SEQ ID NO: 767950 - DNA, 75 bp, synthetic construct
  source 1..75: mol_type = other DNA
gagggagcgcatccagaaagcggtttcgatgaagatttccaaatggaacagcaggccaatgctgaattcatcgcc

SEQ ID NO: 767951 - DNA, 75 bp, synthetic construct
  source 1..75: mol_type = other DNA
gcacaacgagaatgtatagtgacaccgcgcctgacgggcgcgaaaaatcatctctatgcctgtcatttcccgctg

SEQ ID NO: 767952 - DNA, 75 bp, synthetic construct
  source 1..75: mol_type = other DNA
tgttgattacgtgtgagatcggcgttataccagcttattacggctttgtgagcgttaatggggataagcattatg

SEQ ID NO: 767953 - DNA, 75 bp, synthetic construct
  source 1..75: mol_type = other DNA
tcgaattattcattaaaaatccgcttgataacggacttacccgtggagaacaaatggaactggcacgaattgcac

SEQ ID NO: 767954 - DNA, 75 bp, synthetic construct
  source 1..75: mol_type = other DNA
gttgagcctacgatagccattctagacgaattcgattcgattattgattacggcgctgaggattctaaggatgcg

SEQ ID NO: 767955 - DNA, 75 bp, synthetic construct
  source 1..75: mol_type = other DNA
tcctttcttaactatctggagcaagggcaaaaccggctgttacacactcgggtagacgaacggaaggataaacta

SEQ ID NO: 767956 - DNA, 75 bp, synthetic construct
  source 1..75: mol_type = other DNA
atggctagagacgatccgcactttaacttccgtatgcctttggaagtaagagaaaaattgaaattaagagcagag

SEQ ID NO: 767957 - DNA, 75 bp, synthetic construct
  source 1..75: mol_type = other DNA
tcgctgatgagcagtccgaacttgttaggaagatggtgtttgatacgctgaaggatttgtacaaaaaacccacct

SEQ ID NO: 767958 - DNA, 75 bp, synthetic construct
  source 1..75: mol_type = other DNA
aaacgggaaaaagcgcacggttccgatatcggaagaactggagaaagagatcaagaccagcgacactgggccact

SEQ ID NO: 767959 - DNA, 75 bp, synthetic construct
  source 1..75: mol_type = other DNA
atggtttatgctcaccttgcacctgattacctgcaacacgcagtaacgttaaaccctctcggcggcgggctggcg

SEQ ID NO: 767960 - DNA, 75 bp, synthetic construct
  source 1..75: mol_type = other DNA
aacgcaggcgcaaattttccgcctgctaacgcggctgaatcaaaacagcaataccaccattttgcttatcagcca

SEQ ID NO: 767961 - DNA, 75 bp, synthetic construct
  source 1..75: mol_type = other DNA
aaacaggtgactggttgtacgacgaccaaatcgatcttgccagggcgattcgcaaaggtccggatatgcctactg

SEQ ID NO: 767962 - DNA, 75 bp, synthetic construct
  source 1..75: mol_type = other DNA
cacttttcggcgcggagatgcaacgattaagccgggtaatggtattgagcaagcaactcactggatgccgctacc

SEQ ID NO: 767963 - DNA, 75 bp, synthetic construct
  source 1..75: mol_type = other DNA
ggtcactgataatgcctataaattctggcgtcgttgccgtcgtgatggccttggtaaacgtatttacctgtttaa

SEQ ID NO: 767964 - DNA, 75 bp, synthetic construct
  source 1..75: mol_type = other DNA
ttcggcttttcagatgctgtcgatgccgtggttgacagaattgctgatttagaagctaaacagccatcgccagta

SEQ ID NO: 767965 - DNA, 75 bp, synthetic construct
  source 1..75: mol_type = other DNA
tttcgaaacacagagtcgcaatgtaaccgactggatgcctctaccagaaccgccgaaggaggttaaccgtggcta

SEQ ID NO: 767966 - DNA, 75 bp, synthetic construct
  source 1..75: mol_type = other DNA
gataaaccgtcaaccactgagtttgtgcatcagcttaacgcacaaaacatcagagcaatcccgaacatcgcttct

SEQ ID NO: 767967 - DNA, 75 bp, synthetic construct
  source 1..75: mol_type = other DNA
caatgatatcgatggactccagctcaaacattggagaggaaagacctgtcatccctgtacctgatacttctcgca

SEQ ID NO: 767968 - DNA, 75 bp, synthetic construct
  source 1..75: mol_type = other DNA
acttgccagaattaatcgaaggcatggaagtttccattgatgtaagcacttgtgatgctgatttaggtaatcgct

SEQ ID NO: 767969 - DNA, 75 bp, synthetic construct
  source 1..75: mol_type = other DNA
cagcaattgagatgtacaaaccaactgtgcgcatcgtggaaattaatgtgccacgcgccgctagcattcgcatca

SEQ ID NO: 767970 - DNA, 75 bp, synthetic construct
  source 1..75: mol_type = other DNA
aaagcgcatagcagaactggaagccgaacctgtaagccaaacttacaagttgcacgagctatcgggcaactctcc

SEQ ID NO: 767971 - DNA, 75 bp, synthetic construct
  source 1..75: mol_type = other DNA
cattcgaatacaacgggattgctttcaaagcatctcaattgggaaaagggtattcctggtctgccttgcaaagca

SEQ ID NO: 767972 - DNA, 75 bp, synthetic construct
  source 1..75: mol_type = other DNA
gaggaaagagtttcgctggtatcgtcctctatgcattaaagcccggttctcatcataaaaaagaccctatcgtga

SEQ ID NO: 767973 - DNA, 75 bp, synthetic construct
  source 1..75: mol_type = other DNA
gggaagctctacttaggtaaaaatgagaaccttatcagcacccgtatcatccaggatcttgaacaagactaccag

SEQ ID NO: 767974 - DNA, 75 bp, synthetic construct
  source 1..75: mol_type = other DNA
tgcccagagatagggttacccttaacaagacctgacatagcccccacaaaacccacaagcatgacaatgcgttgg

SEQ ID NO: 767975 - DNA, 75 bp, synthetic construct
  source 1..75: mol_type = other DNA
aatacagccaaaaagcttcgagaagatatagtaaaaccggtgtggcacaattcacttcgattaccaaaagatgat

SEQ ID NO: 767976 - DNA, 75 bp, synthetic construct
  source 1..75: mol_type = other DNA
accgtgctggtcaggacgaatacactaacgcttctgtaaagcagtttcacttagaagctggtgctaaagaagcgt

SEQ ID NO: 767977 - DNA, 75 bp, synthetic construct
  source 1..75: mol_type = other DNA
gagccagaaatgacggtcagatattatattagttctgctgatttaaccgcagagaagttcgccacagcaatccga

SEQ ID NO: 767978 - DNA, 75 bp, synthetic construct
  source 1..75: mol_type = other DNA
cggcgttgatgatgccggaaatgccattgatgttcgcgatccgcttagcgataaaattcgcgaacttgttgcggg

SEQ ID NO: 767979 - DNA, 75 bp, synthetic construct
  source 1..75: mol_type = other DNA
gccatgggaagagatgaaactgcgtatgcttaatggcagccactcttttctcgcttatctgggttacctctcagg

SEQ ID NO: 767980 - DNA, 75 bp, synthetic construct
  source 1..75: mol_type = other DNA
gccatcgaacaagcctggcaacaaatctcacaattcggcgcgcatcaggcgctattaaacaccctcaaaatttaa

SEQ ID NO: 767981 - DNA, 75 bp, synthetic construct
  source 1..75: mol_type = other DNA
agcagaactgtctgctagccacagcaaattgcgcgacacaatggctggcatccacaacacaatccgaatggatgg

SEQ ID NO: 767982 - DNA, 75 bp, synthetic construct
  source 1..75: mol_type = other DNA
ctgtttggccctggcgaattgccggacaaatctgagaaagatgctcaggcctactttaatcgcaaatatgcaccg

SEQ ID NO: 767983 - DNA, 75 bp, synthetic construct
  source 1..75: mol_type = other DNA
atccggcgctgaaacataagacctggcaaatcgcgatggatggcagccagaaattaccgcaacgtatgctggcag

SEQ ID NO: 767984 - DNA, 75 bp, synthetic construct
  source 1..75: mol_type = other DNA
tggcatcactgggagcagaacctgtaagccaaacttacaacttgccagaattaatcgaaggcatggaggtttcca

SEQ ID NO: 767985 - DNA, 75 bp, synthetic construct
  source 1..75: mol_type = other DNA
gctttcacgtatttatcaggaaatatcttggatgacgtaactcactggatgccgctaccagagccgccgcaggag

SEQ ID NO: 767986 - DNA, 75 bp, synthetic construct
  source 1..75: mol_type = other DNA
ttgccagagttgtatcctgtatcagtcctgcaaaatttcactgagtgctttattaactggatgcgtgactgccat

SEQ ID NO: 767987 - DNA, 75 bp, synthetic construct
  source 1..75: mol_type = other DNA
caccagcaattcgcgcattattcacgatctacaaacgccggaagaacctcattccgcaccaggcattcttgtcga

SEQ ID NO: 767988 - DNA, 75 bp, synthetic construct
  source 1..75: mol_type = other DNA
tgcgtgaaaaggcagagaaagcaacgagtggtgtgtggtcgctcgaatatggagaggagagatttgatgctggtg

SEQ ID NO: 767989 - DNA, 75 bp, synthetic construct
  source 1..75: mol_type = other DNA
ttcaaatttctgaccggaccagaaaccgtgctggcactgctggatgagatcaacgcattagaggaaacgcgtatc

SEQ ID NO: 767990 - DNA, 75 bp, synthetic construct
  source 1..75: mol_type = other DNA
ggacccatcgatgctgtatgcgccgccagcccgcattgaagaagaagtggcgacaattcttgccggtttcggtca

SEQ ID NO: 767991 - DNA, 75 bp, synthetic construct
  source 1..75: mol_type = other DNA
cgcaatgccttgtttctggcgctgttcaccaccgtggcggcttatcttattatgatgctcgcccccttccccggt

SEQ ID NO: 767992 - DNA, 75 bp, synthetic construct
  source 1..75: mol_type = other DNA
ggttgatcgcaaaaacacctttgatgaattgttcgcactttaccgttatgtgttaaccggcttgttgctggtggc

SEQ ID NO: 767993 - DNA, 75 bp, synthetic construct
  source 1..75: mol_type = other DNA
taagcaaagcaaagaagcttttgaatttgtttatcaattaatagatgaagcatgtcatagctgggctcagagact

SEQ ID NO: 767994 - DNA, 75 bp, synthetic construct
  source 1..75: mol_type = other DNA
ggacaaagcgtcgatcaaaaatggtttgtagtttacggcgactccccacagcaaaccttgggacggctggagaca

SEQ ID NO: 767995 - DNA, 75 bp, synthetic construct
  source 1..75: mol_type = other DNA
gagtatgcgaaaaaagaggggcttatcagcaactaccgcactattccgctgaactccctggcgcggcaggaggaa

SEQ ID NO: 767996 - DNA, 75 bp, synthetic construct
  source 1..75: mol_type = other DNA
cattatacatcagattcaactaattagaggcatcaccctgcattttgaggttaaagcgccggacaacgaccctcg

SEQ ID NO: 767997 - DNA, 75 bp, synthetic construct
  source 1..75: mol_type = other DNA
caggcaccacccttgcctggaaagcgcagaaactgatccgcacgcaatatcatcgcccgctttccacggcgcttt

SEQ ID NO: 767998 - DNA, 75 bp, synthetic construct
  source 1..75: mol_type = other DNA
acatatttgaaatgcatgcgaccacagtgaaaaacaaaatcacgcaaagagacaactataaagaaatcatgtctg

SEQ ID NO: 767999 - DNA, 75 bp, synthetic construct
  source 1..75: mol_type = other DNA
atgttttttattaataatcaaaaggtaatgtgttttgtcattaatgaagaagcgggaaattacatatcaatgctc

SEQ ID NO: 768000 - DNA, 75 bp, synthetic construct
  source 1..75: mol_type = other DNA
atttttcgcaaacacaccggtttaacgccagcagcgtggaagcggcgttacagcaaggaacatatcaattcgtag

SEQ ID NO: 768001 - DNA, 75 bp, synthetic construct
  source 1..75: mol_type = other DNA
cggctatttccggcagatttttcgcaaacacaccggcttaacgccagcagcgtggaagcggcgttacagcaagga

SEQ ID NO: 768002 - DNA, 75 bp, synthetic construct
  source 1..75: mol_type = other DNA
ggcggggatgtcaatgctacgcgtcgatgacgatatctcgcagttacaggcgctaccgcagcatattctggcgca

SEQ ID NO: 768003 - DNA, 75 bp, synthetic construct
  source 1..75: mol_type = other DNA
aacccagcaaaagagcaggaagtgctggcaatgggcgctgataaagtagtgaacagccgcgatcctcaggcactg

SEQ ID NO: 768004 - DNA, 75 bp, synthetic construct
  source 1..75: mol_type = other DNA
ttccgatctatcgatgatcgacaatgaatggggattttcacaatatccgctgattgccgggcatgaggtgattgg

SEQ ID NO: 768005 - DNA, 75 bp, synthetic construct
  source 1..75: mol_type = other DNA
ttctccggggtaagcggcaaggagctgcaaaacgatccgctgatgttaatgcgcggctcgcagctggcgatggcg

SEQ ID NO: 768006 - DNA, 75 bp, synthetic construct
  source 1..75: mol_type = other DNA
acactgtcggtgcggttctcacgccgctgtctgttccggcctttacgttaattgcgggcgatcgcagtgtctcag

SEQ ID NO: 768007 - DNA, 75 bp, synthetic construct
  source 1..75: mol_type = other DNA
atgcgaggtgacagcctttagttcgaatccggcgaaagagcaggaagtactggcgatgggtgctgataaagtggt

SEQ ID NO: 768008 - DNA, 75 bp, synthetic construct
  source 1..75: mol_type = other DNA
ccgggccgctgttgtgcggcggtatcacggtctttaaaccactgttgatgcaccatatcactgctaccagccgcg

SEQ ID NO: 768009 - DNA, 75 bp, synthetic construct
  source 1..75: mol_type = other DNA
gctggtgcttggcatcggcatcaactacacgctgtttttcagtaatccgcgcggtacaccgttaacttccctact

SEQ ID NO: 768010 - DNA, 75 bp, synthetic construct
  source 1..75: mol_type = other DNA
gctggcagtaattgcctgcggcgcagtggcccgcctcggctggcgcaaagggcttatcagcctggtgccttcggt

SEQ ID NO: 768011 - DNA, 75 bp, synthetic construct
  source 1..75: mol_type = other DNA
ctcaggagtggctgacgctgctgcaaaaatccgctgcgctcggcgacgttaaagggccaatggatgccgccagcc

SEQ ID NO: 768012 - DNA, 75 bp, synthetic construct
  source 1..75: mol_type = other DNA
ccagtaaacgccccgcgctgttatgggggctagtctgcctggtcatggcggtggcgttgctgatcctgctgccgc

SEQ ID NO: 768013 - DNA, 75 bp, synthetic construct
  source 1..75: mol_type = other DNA
gccgtggcaaagcctggcgaaagtgcgcaatgccttgctgctggcgctgctcactaccgtggcggcatatctgat

SEQ ID NO: 768014 - DNA, 75 bp, synthetic construct
  source 1..75: mol_type = other DNA
gatcctctcccagctttattctgcattctccggggtaagcggcaaggagctgcaaaacgatccgctgatgttaat

SEQ ID NO: 768015 - DNA, 75 bp, synthetic construct
  source 1..75: mol_type = other DNA
cattggcactgcggttggttcaactgtgtcaggaccgttcagtgcagtaggtgctgttgctgggtcagaaattgg

SEQ ID NO: 768016 - DNA, 75 bp, synthetic construct
  source 1..75: mol_type = other DNA
gataaagacgcgccgaccatctaaaaagcgcagaaaccacgacttacaagacaggtcattgagtgatgttcaatt

SEQ ID NO: 768017 - DNA, 75 bp, synthetic construct
  source 1..75: mol_type = other DNA
ggatcagatttaaatcctttctcaatagatgttcagcgtcgcaatcggctgatgatcttacttctgttttatctt

SEQ ID NO: 768018 - DNA, 75 bp, synthetic construct
  source 1..75: mol_type = other DNA
gtatgtggtctggggcagcaacggaaaactcgacaaatgcccgcacggtggcccgttcccgggtgtgattacgca

SEQ ID NO: 768019 - DNA, 75 bp, synthetic construct
  source 1..75: mol_type = other DNA
gaatcggtacgccagcaactggccgacctggaggcgcgcggcgcactgccgctggatgcctttcgccaggccgca

SEQ ID NO: 768020 - DNA, 75 bp, synthetic construct
  source 1..75: mol_type = other DNA
tagtactaacaggatccgtattgttaggcgagcagatgaacgggctgactctagaaccaatgagcctaatgccaa

SEQ ID NO: 768021 - DNA, 75 bp, synthetic construct
  source 1..75: mol_type = other DNA
ggatctgagttaaatcctttctcaatagatgtgcagcgccggaataggctgatgatcttgcttctgttttatctt

SEQ ID NO: 768022 - DNA, 75 bp, synthetic construct
  source 1..75: mol_type = other DNA
aaacaggttgaagctgatgccttagcgctgccggaggattggcgagagaccacaaactgcgctttcaaagacctg

SEQ ID NO: 768023 - DNA, 75 bp, synthetic construct
  source 1..75: mol_type = other DNA
acgcacggcaaaagctgcatcccttaaagaagagatatccaccctaagggacacattgctaccagaggctgggat

SEQ ID NO: 768024 - DNA, 75 bp, synthetic construct
  source 1..75: mol_type = other DNA
ccaaccagggtgggacaaggaggtactgttctcaacttattcgtcggtagaccatgcagcctaccaggaatcagt

SEQ ID NO: 768025 - DNA, 75 bp, synthetic construct
  source 1..75: mol_type = other DNA
cgccttacagcagtggtggcacacacaaatcagaccgcagcatggccccttcggacaagtatgtcggtcacaccc

SEQ ID NO: 768026 - DNA, 75 bp, synthetic construct
  source 1..75: mol_type = other DNA
catactagagttgacgagcgcaaagatgccctaggaaatttatttaacattagtgatattgctactgaagttgaa

SEQ ID NO: 768027 - DNA, 75 bp, synthetic construct
  source 1..75: mol_type = other DNA
tcctgactgccgagaagtctgaacacgacgcagtcatgtccatgagttctggtcaggtgtctgcccttagccttg

SEQ ID NO: 768028 - DNA, 75 bp, synthetic construct
  source 1..75: mol_type = other DNA
cagagccacagcaaatcagcgatcggaacgacgcactgaaacgcctgcgagtcatccgccgctggtttgagcaca

SEQ ID NO: 768029 - DNA, 75 bp, synthetic construct
  source 1..75: mol_type = other DNA
cgcttatttactgcgccacccggaacgacgcggtaaggacgtggaaaccacccggcgctcatgtgagaagtttcg

SEQ ID NO: 768030 - DNA, 75 bp, synthetic construct
  source 1..75: mol_type = other DNA
caaaaaaaactggtatttgcttatctgcaatcaccgcagttgggcagatattgttgtgctttgtgtcctgttccg

SEQ ID NO: 768031 - DNA, 75 bp, synthetic construct
  source 1..75: mol_type = other DNA
atccctgttaaatggagaaatgctgttggggaactgaaaggtgatctgaatattgcgatggctgatgctaaatct

SEQ ID NO: 768032 - DNA, 75 bp, synthetic construct
  source 1..75: mol_type = other DNA
ggctttacggttcgctcgccgatgatcaaaaggcggcgctgtcagagacaaatgcattacgtgattttgaagttg

SEQ ID NO: 768033 - DNA, 75 bp, synthetic construct
  source 1..75: mol_type = other DNA
tgtgaaagaaaccagtgagcgtggtgtaaaacttacccaaccaattgagcgaggcggcgaaaaaatcacgtatgt

SEQ ID NO: 768034 - DNA, 75 bp, synthetic construct
  source 1..75: mol_type = other DNA
tattacagctgtaggtgttctattctccttgtatatgctctttttacgtggactgcctggggggatggcatatta

SEQ ID NO: 768035 - DNA, 75 bp, synthetic construct
  source 1..75: mol_type = other DNA
gatacgaagagttatccgggaaattacaggaatactcctccattagagtgaataaaacagtaccgactgattttt

SEQ ID NO: 768036 - DNA, 75 bp, synthetic construct
  source 1..75: mol_type = other DNA
ttatcgccctgcttctggaagatgccagacaggtttatcgacttagcccaaactccgcaacgcaggaacgcatcc

SEQ ID NO: 768037 - DNA, 75 bp, synthetic construct
  source 1..75: mol_type = other DNA
cgaccggaacgacgcgctggaacgcctgcgtgtcatccgtcgctggtttgagcacagcgaaccgagcagcccgac

SEQ ID NO: 768038 - DNA, 75 bp, synthetic construct
  source 1..75: mol_type = other DNA
cggcgcaacagctaacattgtggatacgaaacttcgctgtctggagcttgcctcgctctctttaaaaacggacga

SEQ ID NO: 768039 - DNA, 75 bp, synthetic construct
  source 1..75: mol_type = other DNA
tctgggatgacccagtcttagcccgcagctacctgaaccactggacatcccgctgggcgcaaggaacggactgga

SEQ ID NO: 768040 - DNA, 75 bp, synthetic construct
  source 1..75: mol_type = other DNA
tctcgccctgatgcgggtgacgttctctggcaagggcagcccttgcatcaggtacgcgacagctaccatcaaaat

SEQ ID NO: 768041 - DNA, 75 bp, synthetic construct
  source 1..75: mol_type = other DNA
gggaaaaagataccgacagcctgatcatgtacgatcgcaccttactgtggctgaccttcggcctcgcggcgattg

SEQ ID NO: 768042 - DNA, 75 bp, synthetic construct
  source 1..75: mol_type = other DNA
ctgatcagttacggtggttcgagcttactgattatgtcgacagccatcatgatgctgttgcgtattgattatgaa

SEQ ID NO: 768043 - DNA, 75 bp, synthetic construct
  source 1..75: mol_type = other DNA
ccgtatccgccgtgttaccgcattctggaacccgtgggaagatccctttggcagcggctatcagttaacgcaatc

SEQ ID NO: 768044 - DNA, 75 bp, synthetic construct
  source 1..75: mol_type = other DNA
acgcaatcgttgatggcgtttggtcgcggtgaactgtggggacaaggtttaggtaactcggtacaaaaactggag

SEQ ID NO: 768045 - DNA, 75 bp, synthetic construct
  source 1..75: mol_type = other DNA
gaaattgtggcagttcattgccattatcggtatgggcatttcagcggttgtgttgctgatcctcgccgaaccgta

SEQ ID NO: 768046 - DNA, 75 bp, synthetic construct
  source 1..75: mol_type = other DNA
gcgatgtcgattggccgcaaagcattagaaattgaccaccgtttttccggttttctcgcctgttccattggcatc

SEQ ID NO: 768047 - DNA, 75 bp, synthetic construct
  source 1..75: mol_type = other DNA
cacagcaatccgaaaccactggcacgtggagaataagctgcactggcgtctggacgtggtaatgaatgaagacga

SEQ ID NO: 768048 - DNA, 75 bp, synthetic construct
  source 1..75: mol_type = other DNA
tacaaaaacagggaggtgattatttattcgctgtaaaaggaaatcaggggcggcttaataaagcctttgaggaaa

SEQ ID NO: 768049 - DNA, 75 bp, synthetic construct
  source 1..75: mol_type = other DNA
atatttctgttattcccgagtacagacaagcctggaaagtggaacataaattgtcggatattctactgttgacta

SEQ ID NO: 768050 - DNA, 75 bp, synthetic construct
  source 1..75: mol_type = other DNA
acatctcgatttcttgaagcaatatggtgattttgaaaatggtattcctgttcacgatactattgccagagttgt

SEQ ID NO: 768051 - DNA, 75 bp, synthetic construct
  source 1..75: mol_type = other DNA
ttgaagcaatatggtgattttgaaaatggtattcctgttcacgatactattgccagagttgtatcctgtatcagt

SEQ ID NO: 768052 - DNA, 75 bp, synthetic construct
  source 1..75: mol_type = other DNA
cattgctattaatattttgacgaatgataaggtattcaaggcagggttaagacgtaagatgcgaaaagcagccat

SEQ ID NO: 768053 - DNA, 75 bp, synthetic construct
  source 1..75: mol_type = other DNA
aatgcccatagggcaacgcttaaccaacgatccgttcttcttcgcgaagcgtgatggcgtctatctgattctggc

SEQ ID NO: 768054 - DNA, 75 bp, synthetic construct
  source 1..75: mol_type = other DNA
ccgcaacgtgcagaccgtgctggcagaagaaatggcagatgcagcgcagagcgcaatgcttgccgccaccggctt

SEQ ID NO: 768055 - DNA, 75 bp, synthetic construct
  source 1..75: mol_type = other DNA
tgccggagattatgccggggcgctggagatcgggcgtcatgccctgcgtcatggctgggtgatgccgctgggtaa

SEQ ID NO: 768056 - DNA, 75 bp, synthetic construct
  source 1..75: mol_type = other DNA
gcagaaaagttcgccacagcaatccgaaaccactggcacgtggagaataagctgcactggcgtctggacgtggta

SEQ ID NO: 768057 - DNA, 75 bp, synthetic construct
  source 1..75: mol_type = other DNA
aggacattctcgaagcgattcgtgatcaccaggtggtgatcgtcgccggggaaaccggttctggtaaaacgactc

SEQ ID NO: 768058 - DNA, 75 bp, synthetic construct
  source 1..75: mol_type = other DNA
ccggagattctgcgtaccaacctggcctcggttattttgcagatgaccgcgctggggctaggcgatatcgctgcg

SEQ ID NO: 768059 - DNA, 75 bp, synthetic construct
  source 1..75: mol_type = other DNA
catcgtcgcttccacgacaaagaatccgacttcctcgcgtttgtaaatctgtggaattatcttggcgagcagcaa

SEQ ID NO: 768060 - DNA, 75 bp, synthetic construct
  source 1..75: mol_type = other DNA
ggatattaaaggaaaaatcatcacaactgatgcgatgggttgccagaaagatattgcagagaagatacaaaaaca

SEQ ID NO: 768061 - DNA, 75 bp, synthetic construct
  source 1..75: mol_type = other DNA
gatcaagacggatgagaaatctaatgagattacagctccccctgaacttcttaacatactggatattaaaggaaa

SEQ ID NO: 768062 - DNA, 75 bp, synthetic construct
  source 1..75: mol_type = other DNA
atgcgtttatctctccctcgcctgaaaatgccgcgcctgccgggattcagtatcctggtctggatctccacggcg

SEQ ID NO: 768063 - DNA, 75 bp, synthetic construct
  source 1..75: mol_type = other DNA
gtcagatattatatcagttctgctgatttaaccgcagaaaagttcgccacagcaatccgaaaccactggcacgtg

SEQ ID NO: 768064 - DNA, 75 bp, synthetic construct
  source 1..75: mol_type = other DNA
agaataagctgcactggcgtctggacgtggtaatgaatgaagacgactgcaaaataagaagaggaaatgcagcag

SEQ ID NO: 768065 - DNA, 75 bp, synthetic construct
  source 1..75: mol_type = other DNA
cggctaaataaagcctttgaggaaaaatttccgctgaaagaattaaataatccagagcatgacagttacgcaatt

SEQ ID NO: 768066 - DNA, 75 bp, synthetic construct
  source 1..75: mol_type = other DNA
cggctaaataaagcctttgaggaaaaatttccactgaaagaattaaataatccaaagcatgacagttacgcaatt

SEQ ID NO: 768067 - DNA, 75 bp, synthetic construct
  source 1..75: mol_type = other DNA
gatccgaaatcactggcacgtggagaataagctgcactggcgtctggacgtggtaatgaatgaagacgactgcaa

SEQ ID NO: 768068 - DNA, 75 bp, synthetic construct
  source 1..75: mol_type = other DNA
tatatcagttctgatgatttaaccccagagaagttcgccagagcaatccgaaaccactggcacgtggagaataag

SEQ ID NO: 768069 - DNA, 75 bp, synthetic construct
  source 1..75: mol_type = other DNA
ggtgaaacacatctcgattttttgaagcaatatggtgattttgaaaatggtattcctgttcacgataccattgcc

SEQ ID NO: 768070 - DNA, 75 bp, synthetic construct
  source 1..75: mol_type = other DNA
ttacaagagtcgccgcaggggagcgattcatgtcattagtgcgttctcaacaatgcacagtctggtcatcggaca

SEQ ID NO: 768071 - DNA, 75 bp, synthetic construct
  source 1..75: mol_type = other DNA
ggttaagacgtaagatgcgaaaagcagccatggatagaaactatctcgcgtcagtccttgcggggagcgggcttt

SEQ ID NO: 768072 - DNA, 75 bp, synthetic construct
  source 1..75: mol_type = other DNA
tttgtgccgttatttcgggtgcggaaggttgggaagatatagaggattttggggaaacacatctcgattttttaa

SEQ ID NO: 768073 - DNA, 75 bp, synthetic construct
  source 1..75: mol_type = other DNA
aaaagaaagagcccgaaatgacggtcagatattatatcagttctgctgatttaaccgcagagaagttcgccacag

SEQ ID NO: 768074 - DNA, 75 bp, synthetic construct
  source 1..75: mol_type = other DNA
gagccagaaatgacggtcagatattatatcagttctgttgatttaaccgcagagaagttcgccacagcaatccga

SEQ ID NO: 768075 - DNA, 75 bp, synthetic construct
  source 1..75: mol_type = other DNA
gatattaaagggaaaatcatcacaactgatgcgatgggttgccagaaagatattgcagagaagatacaaaaacag

SEQ ID NO: 768076 - DNA, 75 bp, synthetic construct
  source 1..75: mol_type = other DNA
aatggtattcctgttcacgatactattgccagagttgtatcctgtatcagtcctgcaaaatttcatgagtgcttt

SEQ ID NO: 768077 - DNA, 75 bp, synthetic construct
  source 1..75: mol_type = other DNA
gaagaaattatgcgtggcagtctcctttcggtccataatagcagaacaaaagaaagagccagaaatgacggtcag

SEQ ID NO: 768078 - DNA, 75 bp, synthetic construct
  source 1..75: mol_type = other DNA
tctggccggtctcaatcatgtagctgaattgcgtgcgagatattggggtgatagctggaaagaggtcgagcgttt

SEQ ID NO: 768079 - DNA, 75 bp, synthetic construct
  source 1..75: mol_type = other DNA
aaccgatgttcggtgataacggttccggtatgcactgccacatgtcgctgtctaaaaatggcgtcaacctgtttg

SEQ ID NO: 768080 - DNA, 75 bp, synthetic construct
  source 1..75: mol_type = other DNA
gaacgaagacgactgcaaaataagaagaggaaacgcagcagaattattttcagggatacggcacattgctattaa

SEQ ID NO: 768081 - DNA, 75 bp, synthetic construct
  source 1..75: mol_type = other DNA
gccagaaagatattgcagagaagatacaaaaacagggaggtgattatttattcgctgtaaaaggaaaccaggggc

SEQ ID NO: 768082 - DNA, 75 bp, synthetic construct
  source 1..75: mol_type = other DNA
agagttgtatcctgtatcagtcctgcaaaatttcacgagtgctttattaactggatgcgtgactgccactcatca

SEQ ID NO: 768083 - DNA, 75 bp, synthetic construct
  source 1..75: mol_type = other DNA
cagggttaagacgtaagatgagaaaagcagccatggacagagactatctcgcgtcagtccttgcggggagcgggc

SEQ ID NO: 768084 - DNA, 75 bp, synthetic construct
  source 1..75: mol_type = other DNA
gatacggcacattgctattaatattttgacgaatgataaggtattcaaggcagggttaagacgtaagatgagaaa

SEQ ID NO: 768085 - DNA, 75 bp, synthetic construct
  source 1..75: mol_type = other DNA
agacgtaagatgcgaaaagcagccatggacagaaactatctcgcgtcagtccttgcggggagcgggctttcgtaa

SEQ ID NO: 768086 - DNA, 75 bp, synthetic construct
  source 1..75: mol_type = other DNA
ttaacatgctggatattaaaggaaaaatcatcacaactgatgcgatgggatgccagaaagatattgcagagaaga

SEQ ID NO: 768087 - DNA, 75 bp, synthetic construct
  source 1..75: mol_type = other DNA
ccgttatttctggtgcagaaggttgggaagatatagaggattttggggaaacacatctcgattttttgaagcaat

SEQ ID NO: 768088 - DNA, 75 bp, synthetic construct
  source 1..75: mol_type = other DNA
tacaaaaacagggaggtgattatttattcgctgtaaagggaaatcaggggcgactaaataaagccttcgaggaaa

SEQ ID NO: 768089 - DNA, 75 bp, synthetic construct
  source 1..75: mol_type = other DNA
atattaaaggaaaaatcatcacaactgatgcgatgggttgccagaaagatattgcagagaagatacaaaaacagg

SEQ ID NO: 768090 - DNA, 75 bp, synthetic construct
  source 1..75: mol_type = other DNA
acgtggagaataagctgcactggcgtctggacgtggtaatgaatgaagacgactgcaaaataagaagaggaaacg

SEQ ID NO: 768091 - DNA, 75 bp, synthetic construct
  source 1..75: mol_type = other DNA
ccttgaacctggcaccctgcaaggctatgaccgtgacccgcgctccattgcgaagcgcgccgaagattacctgcg

SEQ ID NO: 768092 - DNA, 75 bp, synthetic construct
  source 1..75: mol_type = other DNA
cgctgcgttatttgcaggcgattgaaaaacgactggaaaaactggcggttgacccgcatcgtgaccgtgctcaga

SEQ ID NO: 768093 - DNA, 75 bp, synthetic construct
  source 1..75: mol_type = other DNA
cagcaatggatcaacaaactgccgcccgcacgtcgtgaggatgaagacgtgaaagagatccgttggatgatagaa

SEQ ID NO: 768094 - DNA, 75 bp, synthetic construct
  source 1..75: mol_type = other DNA
gatccggcgttatgtcgtgaactctttattcgccatgcgctggtggaaggtgactggcagacgcgtcacgcattc

SEQ ID NO: 768095 - DNA, 75 bp, synthetic construct
  source 1..75: mol_type = other DNA
atgcgcaataccgaaccccgtagttttaatactgatagtgacgcgctggccgtgctgctgacagatgccaaaaaa

SEQ ID NO: 768096 - DNA, 75 bp, synthetic construct
  source 1..75: mol_type = other DNA
gaggagttaggtgcaatcaccaccgacgaacagcaaaccgcatataaactgacaccacttggtcgtcagttatca

SEQ ID NO: 768097 - DNA, 75 bp, synthetic construct
  source 1..75: mol_type = other DNA
gaaaatctgtatggaactggggcgcgggattaaagggctgattggccatacccagcctcgtcgactggcagcccg

SEQ ID NO: 768098 - DNA, 75 bp, synthetic construct
  source 1..75: mol_type = other DNA
gcgaaagaaattgacctggcggcagggaaagttctgctacgagaagcggcacgcccggaaattacctatccagat

SEQ ID NO: 768099 - DNA, 75 bp, synthetic construct
  source 1..75: mol_type = other DNA
cgtttttctcgccgtctgcatggggtgaaaaaggttaaaaatcctgatgcacaacaggccattttccaggagatg

SEQ ID NO: 768100 - DNA, 75 bp, synthetic construct
  source 1..75: mol_type = other DNA
gcgctcattacaggatctgaaagatgcgctgaaaggcaaagtgcaggaaacgctgtccgcggtggcggatgacgg

SEQ ID NO: 768101 - DNA, 75 bp, synthetic construct
  source 1..75: mol_type = other DNA
gcgctcgctacaagatctgaaagatgcgctgaaaggcaaagtgcaggaaacgctatctgcggtggcggatgacgg

SEQ ID NO: 768102 - DNA, 75 bp, synthetic construct
  source 1..75: mol_type = other DNA
gattgaggagttgcgcgtcagctacttcgcgcaacagctcggcacgccatatccgatctctgataagcgtatttt

SEQ ID NO: 768103 - DNA, 75 bp, synthetic construct
  source 1..75: mol_type = other DNA
taaccaggtcgtgattgtcgctggggaaacagggtctggtaaaaccactcagttgccgaaaatctgtatggaact

SEQ ID NO: 768104 - DNA, 75 bp, synthetic construct
  source 1..75: mol_type = other DNA
ggctctaaagacgtgtttgtacacttctctgctatccagaacgatggttacaaatctctggacgaaggtcagaaa

SEQ ID NO: 768105 - DNA, 75 bp, synthetic construct
  source 1..75: mol_type = other DNA
ggaaagtaacagcggggaaagccaggaacttcctctctcagtcacgttacatctgcagactcagcaatatggggg

SEQ ID NO: 768106 - DNA, 75 bp, synthetic construct
  source 1..75: mol_type = other DNA
atgtcgatgataaaaagttatgccgcaaaagaggctggcggcgaactggaagtttatgagtacgatcccggtgaa

SEQ ID NO: 768107 - DNA, 75 bp, synthetic construct
  source 1..75: mol_type = other DNA
actgcgagcaaggtgcggtgccaacaattatgaatcgcggcggttttgccgagaagttgcgtgcagactggcaat

SEQ ID NO: 768108 - DNA, 75 bp, synthetic construct
  source 1..75: mol_type = other DNA
ctttcagaacggactggccttccctcccctaaagaagctctccagcagatacttgataaaagtttggaagataag

SEQ ID NO: 768109 - DNA, 75 bp, synthetic construct
  source 1..75: mol_type = other DNA
gcctgacccgttaccggacgcgggacactgaccacaggcagcggggaacgggcgccacaggggcgccctcccggt

SEQ ID NO: 768110 - DNA, 75 bp, synthetic construct
  source 1..75: mol_type = other DNA
tcaatagcggcgacgatgaaatagatatggattatgctctccagacactattgggtgcatctggagttaccagta

SEQ ID NO: 768111 - DNA, 75 bp, synthetic construct
  source 1..75: mol_type = other DNA
ccgcacgctgaatgaaaatcagaaagtagaattcagcattgagcagggaccgcgtggacctgcggcactgaacgt

SEQ ID NO: 768112 - DNA, 75 bp, synthetic construct
  source 1..75: mol_type = other DNA
gagaagttgcgtgcagactggcaatgggtgatcccactgccggaaaatatcgatatcgagtccgccgggccgctg

SEQ ID NO: 768113 - DNA, 75 bp, synthetic construct
  source 1..75: mol_type = other DNA
attttagcctgaaagaaattgccatgttcgtctggctacctttcctgctgggcgatctcggctgtttagccagtg

SEQ ID NO: 768114 - DNA, 75 bp, synthetic construct
  source 1..75: mol_type = other DNA
ctgaggccacaagatgttgaagtgcaggtggattattgcgggatctgccattccgatctatcgatgatcgacaat

SEQ ID NO: 768115 - DNA, 75 bp, synthetic construct
  source 1..75: mol_type = other DNA
tcgcgtagtggcgctcgggagtgccgcgcaggataaaggtttgcaggtcggtcagcgtgtcgggattggctggac

SEQ ID NO: 768116 - DNA, 75 bp, synthetic construct
  source 1..75: mol_type = other DNA
taaaatggtttaacgcagataaaggttttggctttatcactcctgatgatggcagcaaggacgttttcgttcatt

SEQ ID NO: 768117 - DNA, 75 bp, synthetic construct
  source 1..75: mol_type = other DNA
agctggaacacaaatcacgtcgtcgcgatattctggtagatgacgagacgctgtttgaattttacgaccagcgca

SEQ ID NO: 768118 - DNA, 75 bp, synthetic construct
  source 1..75: mol_type = other DNA
tctgcataaagcgattggcgcagtcctgagtgaaagcaatccggcttccgcccttaatcatctcaaccaggcgtt

SEQ ID NO: 768119 - DNA, 75 bp, synthetic construct
  source 1..75: mol_type = other DNA
atgacagaacaacaaaaattgacctttacagccttgcagcagcggctggattcgctgatgctgcgtgacagactg

SEQ ID NO: 768120 - DNA, 75 bp, synthetic construct
  source 1..75: mol_type = other DNA
aaagaatccgacttcctcgcgtttgtgaatctgtggaattatcttggcgagcagcagaaagcactctcttcaaac

SEQ ID NO: 768121 - DNA, 75 bp, synthetic construct
  source 1..75: mol_type = other DNA
attcctgttcacgataccattgccagagttgtatcctgtatcagtcctgcaaaatttcacgagtgctttattaac

SEQ ID NO: 768122 - DNA, 75 bp, synthetic construct
  source 1..75: mol_type = other DNA
ggccgctcgcgagggtggtagtgttcgccacgcgtcgggctatgacctgatgctgctgcaactggcggaagaccg

SEQ ID NO: 768123 - DNA, 75 bp, synthetic construct
  source 1..75: mol_type = other DNA
atgagcctgagtcccgcacggcagcatcgcctgcgcgttcaggctgaacaggccgctcgcgagggtggtagtgtt

SEQ ID NO: 768124 - DNA, 75 bp, synthetic construct
  source 1..75: mol_type = other DNA
acattaaagcgcagatgggcgggttggtatatcgcggttttgtcactggtaacggcttcaaacggctgggcgaca

SEQ ID NO: 768125 - DNA, 75 bp, synthetic construct
  source 1..75: mol_type = other DNA
tcacttcgacagctggtggaaaaaagtcagccgcgaaacgcctgatttgctcaactttgaaaagagcatgttgat

SEQ ID NO: 768126 - DNA, 75 bp, synthetic construct
  source 1..75: mol_type = other DNA
ggcgttatgtcgtgaactctttattcgccacgcgctggtggaaggtgactggcagacgcgtcacgcattcttccg

SEQ ID NO: 768127 - DNA, 75 bp, synthetic construct
  source 1..75: mol_type = other DNA
gcatatctggagctttgggcaactgccggaaagctacgaacagaagcgtggcaactacaaagtgaaggcgtggcc

SEQ ID NO: 768128 - DNA, 75 bp, synthetic construct
  source 1..75: mol_type = other DNA
gctgcatgaaaaagtgcgcgccgaactgaatgacacggtggtggatattgcgaagcaggtcgaacaaatccttac

SEQ ID NO: 768129 - DNA, 75 bp, synthetic construct
  source 1..75: mol_type = other DNA
gcaactacaaagtgaaggcgtggccagcgctggtggatgagcgcgacagcgtggcgatcaaactgtttgataatc

SEQ ID NO: 768130 - DNA, 75 bp, synthetic construct
  source 1..75: mol_type = other DNA
gtccctgatgaacttattgatttcacgtttgaatggaaagggctgaagaaattatgcgtggcagtctcctttcgg

SEQ ID NO: 768131 - DNA, 75 bp, synthetic construct
  source 1..75: mol_type = other DNA
tggagctgctgccgaagtacgccgcctgggcggagggtgtcctggctgccggaggcactcaacaggatgacgtgc

SEQ ID NO: 768132 - DNA, 75 bp, synthetic construct
  source 1..75: mol_type = other DNA
agagcgcaatgcttgccactaccggctttgatgtcgatctgttgctgcagacgctggagctaacagacggtctgg

SEQ ID NO: 768133 - DNA, 75 bp, synthetic construct
  source 1..75: mol_type = other DNA
cgtatattgtggtccttactgccaccggctggtcggtacgccaaagcagccattattcatgactggatgtacgac

SEQ ID NO: 768134 - DNA, 75 bp, synthetic construct
  source 1..75: mol_type = other DNA
aatctagtgtcttggcctttagctaactatactaaatataaaggagatcttactgaggagaatttatacagtaag

SEQ ID NO: 768135 - DNA, 75 bp, synthetic construct
  source 1..75: mol_type = other DNA
ggcctttagctaactatactaaatataaaggagatcttactgaggagaatttatacagtaagatgggtgatgctg

SEQ ID NO: 768136 - DNA, 75 bp, synthetic construct
  source 1..75: mol_type = other DNA
attatggcggttcttgtgttctacaaccgaccagtagcactatttcaaataagatatatgtaaaaggtggggaaa

SEQ ID NO: 768137 - DNA, 75 bp, synthetic construct
  source 1..75: mol_type = other DNA
aagagtcgtcgcaggggagcgattcatgtcattagtgcgttctcaacaatgcacagtctggtcatcggacagatc

SEQ ID NO: 768138 - DNA, 75 bp, synthetic construct
  source 1..75: mol_type = other DNA
aattaaacgggaagaaaaaacatctagggtactttaatgaattagaagatgccaaaaaagcttactgcgactttg

SEQ ID NO: 768139 - DNA, 75 bp, synthetic construct
  source 1..75: mol_type = other DNA
aagcaatatggtgattttgaaaatggtattcctgttcacgataccattgccagagttgtatcctgtatcagtcct

SEQ ID NO: 768140 - DNA, 75 bp, synthetic construct
  source 1..75: mol_type = other DNA
taaccgcaacgtgcagaccgtgctggcagaggaaatagcagacgccgcgcagagcgcaatgcttgccgccaccgg

SEQ ID NO: 768141 - DNA, 75 bp, synthetic construct
  source 1..75: mol_type = other DNA
atatttctgttatccccgattacagacaagcctggaaagtggaacataaattatcggatattctactgttgacta

SEQ ID NO: 768142 - DNA, 75 bp, synthetic construct
  source 1..75: mol_type = other DNA
gaaacgcagcagaattattttcagggatacggcacattgctattactcttttgacgaatgagcaggtattctagg

SEQ ID NO: 768143 - DNA, 75 bp, synthetic construct
  source 1..75: mol_type = other DNA
gctgtctgttccggcctttacgttaattgcgggcgatcgcagcgtctctggctctgctaccggcacgccttatga

SEQ ID NO: 768144 - DNA, 75 bp, synthetic construct
  source 1..75: mol_type = other DNA
aacaatgtgcaagctgttttcgtaagaaaagttttggcagtcagatcagagactctctgagagcatccagagaaa

SEQ ID NO: 768145 - DNA, 75 bp, synthetic construct
  source 1..75: mol_type = other DNA
gttttttactctcactggcgatcagatccggggcaatggctttctggcccggctgctattttgcgaacccggagc

SEQ ID NO: 768146 - DNA, 75 bp, synthetic construct
  source 1..75: mol_type = other DNA
tcccgcgcactggagatctttcacaaagaaaatatggatactgtcagacagaatcctcatatgggtacttttgaa

SEQ ID NO: 768147 - DNA, 75 bp, synthetic construct
  source 1..75: mol_type = other DNA
actgttttccctgttaacaatttctttgtcgttttaactcttgtgtcttccctggttaactctgtcggaatattt

SEQ ID NO: 768148 - DNA, 75 bp, synthetic construct
  source 1..75: mol_type = other DNA
ccctgttaacaatttctttgtcgttttaactcttgtgtcttccctggctaactctgtcggaatattttttcccat

SEQ ID NO: 768149 - DNA, 75 bp, synthetic construct
  source 1..75: mol_type = other DNA
ggaactggagaaagatccagactcgacagtaataacgctggaaagtactaatagcgccatttatctcattgaatt

SEQ ID NO: 768150 - DNA, 75 bp, synthetic construct
  source 1..75: mol_type = other DNA
gcgtgagaaagcgcgtggtgcgaaagcgatcggcaccaccggtcgtggtatcgggcctgcttatgaagataaagt

SEQ ID NO: 768151 - DNA, 75 bp, synthetic construct
  source 1..75: mol_type = other DNA
gacacctttctcagagatttgagatttcatgatctccggcatgaagcaacttcacgcctggctgaaatcttccct

SEQ ID NO: 768152 - DNA, 75 bp, synthetic construct
  source 1..75: mol_type = other DNA
tcaatgtttcgcggaaagaatggggcatggagagcctgctgaaccccgtagaggccattcgcaaaccccaaccca

SEQ ID NO: 768153 - DNA, 75 bp, synthetic construct
  source 1..75: mol_type = other DNA
ctttattgccctggctttctttgacattattggtgctattgcgttgtggacgcttatcaaagttaaagatgaaga

SEQ ID NO: 768154 - DNA, 75 bp, synthetic construct
  source 1..75: mol_type = other DNA
atgcacctcccaccgcaagcggcgggccccgaccggagccactttagttacaacacacaaaaacaacctccagaa

SEQ ID NO: 768155 - DNA, 75 bp, synthetic construct
  source 1..75: mol_type = other DNA
caagcagggtaacgaattcggcgcaactacgggtcgtcgtcgtcgtaccggctggttggacaccgttgccgttcg

SEQ ID NO: 768156 - DNA, 75 bp, synthetic construct
  source 1..75: mol_type = other DNA
ctgtgcgtggagcggtcagttgattttcaacctgttcatcggggcattcgttcacattatcggcttcgcgccgtt

SEQ ID NO: 768157 - DNA, 75 bp, synthetic construct
  source 1..75: mol_type = other DNA
cggacccggtacgtgtgcgccaggcgctgatgggcggctttgcttcctcacgtattctggaagttcacggtgagc

SEQ ID NO: 768158 - DNA, 75 bp, synthetic construct
  source 1..75: mol_type = other DNA
cgccgttagtgttgaaactgcgcgccaggtaacagatgcatcggacatcatttttattatggtgccggatacgcc

SEQ ID NO: 768159 - DNA, 75 bp, synthetic construct
  source 1..75: mol_type = other DNA
taatctggcgcgtgccggtcatcaactgcatgtcacgaccattggaccggttgctgatgaattactgtcactggg

SEQ ID NO: 768160 - DNA, 75 bp, synthetic construct
  source 1..75: mol_type = other DNA
ttatgcctgcgcatgtgatctacagtgatgttgatccgcgtccggcgagcggttctccctactggctgaaaaccg

SEQ ID NO: 768161 - DNA, 75 bp, synthetic construct
  source 1..75: mol_type = other DNA
gcgtgaaatacttgcgcatccgctggtgggagggctgattctctttacgcgtaactatcatgatcctgcccagtt

SEQ ID NO: 768162 - DNA, 75 bp, synthetic construct
  source 1..75: mol_type = other DNA
aggtccggcagcggaggaattctttgacccggttcctgaacaggatctattcgaggcgctgagggaaaccttgaa

SEQ ID NO: 768163 - DNA, 75 bp, synthetic construct
  source 1..75: mol_type = other DNA
gcctgtgcgtctgcatcgcccttaccttgcggcgaatcttagccgtaagcaattgctggaggcgttacgttacca

SEQ ID NO: 768164 - DNA, 75 bp, synthetic construct
  source 1..75: mol_type = other DNA
cgccgtagttttcgccagaaatttttgctgcgctcgttgattatgccgcgtttaagcgttgagtggatgaacgaa

SEQ ID NO: 768165 - DNA, 75 bp, synthetic construct
  source 1..75: mol_type = other DNA
attgccgtattactgattagtattggcgcgttctcgcatcaatgcctttctactgtagcagcaactctgggtggc

SEQ ID NO: 768166 - DNA, 75 bp, synthetic construct
  source 1..75: mol_type = other DNA
cgcaaagatccgtcgaaaaaatacggttctggcggtctggtacaaggtaaaaaatatatgctttccctgacctgg

SEQ ID NO: 768167 - DNA, 75 bp, synthetic construct
  source 1..75: mol_type = other DNA
tcggtacggagtccacaccacgacgtcctgcctccattgccacttcaatggcaagatcgggtttggaagagcgat

SEQ ID NO: 768168 - DNA, 75 bp, synthetic construct
  source 1..75: mol_type = other DNA
tgttcgtctgcaccgcccttaccttgctgcgaatcttaatcgcaagcaattgctgggggcgttacgttatcatta

SEQ ID NO: 768169 - DNA, 75 bp, synthetic construct
  source 1..75: mol_type = other DNA
atgcatgagttgacaaaaataacgggacataaagaccccaggatgcttatgcgctattatcatccaaaggctgaa

SEQ ID NO: 768170 - DNA, 75 bp, synthetic construct
  source 1..75: mol_type = other DNA
tgattcataaactctcaaaaggggtcacccaggcggccgtggcgaccattccctgccgccctgacatgcgtcaga

SEQ ID NO: 768171 - DNA, 75 bp, synthetic construct
  source 1..75: mol_type = other DNA
ttccctgggatgccggccgggatgacgggtatgcgaatgtcaacggcaacggttacccgacctgctatcagtggt

SEQ ID NO: 768172 - DNA, 75 bp, synthetic construct
  source 1..75: mol_type = other DNA
ggataggggcattatcctgggccggtgtgcatattggaggagcgataactcaaagtatgggagatggttctaggc

SEQ ID NO: 768173 - DNA, 75 bp, synthetic construct
  source 1..75: mol_type = other DNA
cgtcaaattattgaaggcgtttgtcttgatccgcgcatcggcaaccactacaacaatccatcatttggttacggt

SEQ ID NO: 768174 - DNA, 75 bp, synthetic construct
  source 1..75: mol_type = other DNA
tttacgaaccggtgatgaaagaagactcattcttcaactctcgcctggaacgtgatctcgccaccttcaaacaac

SEQ ID NO: 768175 - DNA, 75 bp, synthetic construct
  source 1..75: mol_type = other DNA
gttcagataacttccgtgcgtcttctattcagggaattatgaagcgtatcaaggcgaaaggcgtagaagtaatca

SEQ ID NO: 768176 - DNA, 75 bp, synthetic construct
  source 1..75: mol_type = other DNA
tcagttggataggcagcagtacctttctgaaaggggactacaccaccctgcagtcgaaattgccgcgcgggatgt

SEQ ID NO: 768177 - DNA, 75 bp, synthetic construct
  source 1..75: mol_type = other DNA
tggttcataaattgtccaaaggcgtgacacaggcagcagtggccagtattccctgtcggccggatctgcggcaac

SEQ ID NO: 768178 - DNA, 75 bp, synthetic construct
  source 1..75: mol_type = other DNA
ggggaagatgaaggtaacaagggtatgctgtcgctaccccgtatcgagaatgcgctttatggtgcgttcttcgtg

SEQ ID NO: 768179 - DNA, 75 bp, synthetic construct
  source 1..75: mol_type = other DNA
gctggatgataacggcgctgtatggttcagatacacattcgagtctgaatatgatggggctgcagaacacgtcgg

SEQ ID NO: 768180 - DNA, 75 bp, synthetic construct
  source 1..75: mol_type = other DNA
aaagataaaaaagtgcttgatgatatctcctggatagggagcgccacattcatgcagggggattacgggacgctg

SEQ ID NO: 768181 - DNA, 75 bp, synthetic construct
  source 1..75: mol_type = other DNA
tttcgcaacaagcgggaggtcaagcaggtaatattgctcaaagcggtgtgagcagtttttctaagggaattgata

SEQ ID NO: 768182 - DNA, 75 bp, synthetic construct
  source 1..75: mol_type = other DNA
atttatcgcctgattatgaagagcggttcagataacttccgtgcatcttccattcaagggattatgaagcgtatc

SEQ ID NO: 768183 - DNA, 75 bp, synthetic construct
  source 1..75: mol_type = other DNA
ctattgtaaattttgttgagggttcccgcttcactgaagagaaacaccagcaaacccactcaacatttcaaaatc

SEQ ID NO: 768184 - DNA, 75 bp, synthetic construct
  source 1..75: mol_type = other DNA
gccattttcagcagtggctgaactcactgtggcaggaaaaagaccggcttctgacatctctgatgtcatcacagc

SEQ ID NO: 768185 - DNA, 75 bp, synthetic construct
  source 1..75: mol_type = other DNA
aagtttgaaatcaacaaggtagcaactgaacttaaccgcatcattgcagaataccgcaataacagaatcacagtt

SEQ ID NO: 768186 - DNA, 75 bp, synthetic construct
  source 1..75: mol_type = other DNA
cgtttggccttactttctcatgtattcaatgtttcgcggaaagaatggggcatggagagcctgctgaaccccgta

SEQ ID NO: 768187 - DNA, 75 bp, synthetic construct
  source 1..75: mol_type = other DNA
gtttcgtaagcacattccgatgaataaatatttcctcaaacagcaacttgcctgggtgccttttcttggcctggc

SEQ ID NO: 768188 - DNA, 75 bp, synthetic construct
  source 1..75: mol_type = other DNA
ttgacaattcaagtccttaaggatcatccgttatttgggtcgttttctgctaaaatctgcgccttgcgcttcttt

SEQ ID NO: 768189 - DNA, 75 bp, synthetic construct
  source 1..75: mol_type = other DNA
aaggcgaaaggcgttgaagtgatcatctacgaaccggtgatgaaagaagactcattcttcaactctcgcctggaa

SEQ ID NO: 768190 - DNA, 75 bp, synthetic construct
  source 1..75: mol_type = other DNA
aaagataccaagcagttactggcgaactaccagtctgtgccgaataacctgatttcggcaattgtcgatgctaac

SEQ ID NO: 768191 - DNA, 75 bp, synthetic construct
  source 1..75: mol_type = other DNA
gttattacaggaaggagcgattaagcaaaatatcccgaccctgtttaccgactccactgaagcagaagcgattaa

SEQ ID NO: 768192 - DNA, 75 bp, synthetic construct
  source 1..75: mol_type = other DNA
ccaactggcgatgttattcaccctggccaacctgtttcgggtggaccaaatggagtgcgaccgcctctggaaaaa

SEQ ID NO: 768193 - DNA, 75 bp, synthetic construct
  source 1..75: mol_type = other DNA
tttatcgttccgttacattgcgaagaaggcgatgtgtatggcgtggtattggtgaatcaggtacgaatgatggat

SEQ ID NO: 768194 - DNA, 75 bp, synthetic construct
  source 1..75: mol_type = other DNA
atgggactgctgctggaaaaaaagaacatttacattgatgacagctctggcctaacacctatggacgttcgctcc

SEQ ID NO: 768195 - DNA, 75 bp, synthetic construct
  source 1..75: mol_type = other DNA
atgggtattttgctcgaaaaacgcaatatctatatcgatgactcttccggcctgacgccaacggaagtgcgttcc

SEQ ID NO: 768196 - DNA, 75 bp, synthetic construct
  source 1..75: mol_type = other DNA
atgggtattttgctcgaaaaacgtaatatctatatcgatgattcctccggcttgacgccaacggaagtgcgttcc

SEQ ID NO: 768197 - DNA, 75 bp, synthetic construct
  source 1..75: mol_type = other DNA
ggtggttttgcttatctggcagagctgtcaaaaaatacgccaagtgcggcgaacatcagtgcatatgccgacatc

SEQ ID NO: 768198 - DNA, 75 bp, synthetic construct
  source 1..75: mol_type = other DNA
ccgcagggagagtaccccggtcatacttcacccgctaaacaacataaaggctgaacgcagtatcacccggttcgc

SEQ ID NO: 768199 - DNA, 75 bp, synthetic construct
  source 1..75: mol_type = other DNA
ctcattattttctgatatttctttagaaaaccctggtagaatgactaataggagaataaaaacaacgattggttt

SEQ ID NO: 768200 - DNA, 75 bp, synthetic construct
  source 1..75: mol_type = other DNA
cgcgcgcgccgtatcgctcgtgaacatggcggcatcggacttatcatgatcgattacctgcaactgatgcgtgtg

SEQ ID NO: 768201 - DNA, 75 bp, synthetic construct
  source 1..75: mol_type = other DNA
ttcttcgacaaagttgaactgaaggcccgcaatgttcgcgttaagcctttccgggcttatgttgaaaatcactgg

SEQ ID NO: 768202 - DNA, 75 bp, synthetic construct
  source 1..75: mol_type = other DNA
taacgatattgaagattattttggtgtggaattagtggtgcggaaaaataccggtgtaacattaacacctgccgg

SEQ ID NO: 768203 - DNA, 75 bp, synthetic construct
  source 1..75: mol_type = other DNA
aaacgccggttgctggaagaagtgatgtacgtcataacagaaacagtgagaaaaacggcgaggcaaatcaccttg

SEQ ID NO: 768204 - DNA, 75 bp, synthetic construct
  source 1..75: mol_type = other DNA
cgcttcaaaaattcagcgggagagtggtggctggtggtttcgccgtggggaaggctacggctttgccagaaagga

SEQ ID NO: 768205 - DNA, 75 bp, synthetic construct
  source 1..75: mol_type = other DNA
gcgatcttgttgttttgccagaatatcgtagcgaccctggtctggttgtgctgaacaagacatataacgatcttg

SEQ ID NO: 768206 - DNA, 75 bp, synthetic construct
  source 1..75: mol_type = other DNA
tattttgacagtatcacgctgaaggcccgcaatgttcgcgttaagcctttccgggcttatgttgaagaccactgg

SEQ ID NO: 768207 - DNA, 75 bp, synthetic construct
  source 1..75: mol_type = other DNA
attcaccgccggtgtgcataactaccgtaccgggatgacgccacagtatgtcggggagaacaagccggagccggt

SEQ ID NO: 768208 - DNA, 75 bp, synthetic construct
  source 1..75: mol_type = other DNA
cccctcaacctgacactcaaaacccgtatctgaatgcgcggcggtcctggaacattcatatggggcatgttcagc

SEQ ID NO: 768209 - DNA, 75 bp, synthetic construct
  source 1..75: mol_type = other DNA
acgcaaaaattaacgaaaacaatgatgtgatgaacccacatcgtattttcattaaagattttaactggtcaaaac

SEQ ID NO: 768210 - DNA, 75 bp, synthetic construct
  source 1..75: mol_type = other DNA
aatctgctacgcaccaaagtgcgtgaaaccgtagcggcgcaggtctttatcacccgcagttttgaagtattacgc

SEQ ID NO: 768211 - DNA, 75 bp, synthetic construct
  source 1..75: mol_type = other DNA
tctggaaaatggtagctccacgcttagcacatcaattaatgtcaacgctgatgcgtctacagcacatctcacctt

SEQ ID NO: 768212 - DNA, 75 bp, synthetic construct
  source 1..75: mol_type = other DNA
gatcgacgactaccgcaccgctgtatggaactttatcgatcacatcagaacggttacgccagatggtgaactaca

SEQ ID NO: 768213 - DNA, 75 bp, synthetic construct
  source 1..75: mol_type = other DNA
cccctcagcctgatagccctaatccgtatctcaatgcacgtcgttcatggaatatccacatgggccatgtgcagc

SEQ ID NO: 768214 - DNA, 75 bp, synthetic construct
  source 1..75: mol_type = other DNA
cccggatttcgaaatgggggaatataagcgccaggatctggtttatgagaaagaggatctgctgatctccggtcc

SEQ ID NO: 768215 - DNA, 75 bp, synthetic construct
  source 1..75: mol_type = other DNA
cattcagcagtcgtgcggatgctatctcgttcgagaaggacgagatctacaaacaaggcaaattctttgccgatg

SEQ ID NO: 768216 - DNA, 75 bp, synthetic construct
  source 1..75: mol_type = other DNA
ggatccgttcaccggacagaaatatcgaaggtacagtagcggaaattggctggcgaattaccaaaattacgactt

SEQ ID NO: 768217 - DNA, 75 bp, synthetic construct
  source 1..75: mol_type = other DNA
gccgatgcgctgggggaaccgctgggctgccaggcgattgtcgggctttctgacgaagatctgcatcggctttct

SEQ ID NO: 768218 - DNA, 75 bp, synthetic construct
  source 1..75: mol_type = other DNA
cacgctgactcatctgtcggcggaaaaaatggtcgctaaaagcgatccgcgcctgggttttcgcgctgttctcga

SEQ ID NO: 768219 - DNA, 75 bp, synthetic construct
  source 1..75: mol_type = other DNA
gtccgaccacggcgattcagttaaccccggattcgaaatgggggaatacaagcgccaggatctggtttacgaaaa

SEQ ID NO: 768220 - DNA, 75 bp, synthetic construct
  source 1..75: mol_type = other DNA
gtcttctttccccttcacatagcgccattattgccgagttcgccaacctggcagggtctaccgatgtatacatga

SEQ ID NO: 768221 - DNA, 75 bp, synthetic construct
  source 1..75: mol_type = other DNA
cactgaaactgtccggaaaaatccacaaacagcgtgaaagtattgcccgaagtcgtggcgaccccccccccaaaa

SEQ ID NO: 768222 - DNA, 75 bp, synthetic construct
  source 1..75: mol_type = other DNA
tcccgctgaaactgtccggaaaaatccacaaacagcttgaaagtattgcccgaagtcgtggtgtccccccaaaaa

SEQ ID NO: 768223 - DNA, 75 bp, synthetic construct
  source 1..75: mol_type = other DNA
aaactgctgaatgaaatgattgagcaggcgtaccgggatttggtggcaaccaggcagaacagccagatcgattcc

SEQ ID NO: 768224 - DNA, 75 bp, synthetic construct
  source 1..75: mol_type = other DNA
cgctgaaactgtccggaaaaatccacaaacagcatgaaagtattgcccgaagtcgtggcgaccccccccccaaaa

SEQ ID NO: 768225 - DNA, 75 bp, synthetic construct
  source 1..75: mol_type = other DNA
ccctgaaactgtccggaaaaatccacaaacagcctgaaagtattgcccgaagtcgtggcgaccccccacccaaaa

SEQ ID NO: 768226 - DNA, 75 bp, synthetic construct
  source 1..75: mol_type = other DNA
ctctgaaactgtccggaaaaatccacaaacagcttgaaagtattgcccgaagtcgtggcgaccccccccccaaaa

SEQ ID NO: 768227 - DNA, 75 bp, synthetic construct
  source 1..75: mol_type = other DNA
ggctcgctggaaagcgatcagcacccgtctgaatcagttacatgaacgctggcaggaagagaaagcaggtcacta

SEQ ID NO: 768228 - DNA, 75 bp, synthetic construct
  source 1..75: mol_type = other DNA
atcactggatgcgggttgcgatatgatcttggtctgcaataatcgtaaaggggccgtcagcgtgttagataatct

SEQ ID NO: 768229 - DNA, 75 bp, synthetic construct
  source 1..75: mol_type = other DNA
atcagcgcggcgattggcgagcgttcttatcatgccgatcccgaaaaagccctggcaattgccagccggtttatt

SEQ ID NO: 768230 - DNA, 75 bp, synthetic construct
  source 1..75: mol_type = other DNA
atccggataaaatctaccgtgaaattatatggttctgctccggttacctgcggaaatccggaccagaagctacga

SEQ ID NO: 768231 - DNA, 75 bp, synthetic construct
  source 1..75: mol_type = other DNA
ttgcctgtcacgaataatgatcctgccagtgtctatctcattcagattacggtacgacatttttcagtgccagtc

SEQ ID NO: 768232 - DNA, 75 bp, synthetic construct
  source 1..75: mol_type = other DNA
gtcagtgcattccagttggcctatacattagggcaaccggtaatgggcttctttattgataccgtgggtctgaag

SEQ ID NO: 768233 - DNA, 75 bp, synthetic construct
  source 1..75: mol_type = other DNA
cttgcctgtatggatgatgccgccaggctgcgtgatgccctcggcgtacgactaccagagtcattgccagagatt

SEQ ID NO: 768234 - DNA, 75 bp, synthetic construct
  source 1..75: mol_type = other DNA
gccggaggcaataccggacaagcggaaaagaccagaaactcaggactcacacccattcctgaaaaacgttcagga

SEQ ID NO: 768235 - DNA, 75 bp, synthetic construct
  source 1..75: mol_type = other DNA
tgaacgatattatcactctcggcgctacctcatggcggatccagcaaatcacccgcgatcaggtgattgtgactc

SEQ ID NO: 768236 - DNA, 75 bp, synthetic construct
  source 1..75: mol_type = other DNA
gaatcggttgatccctcggctctgcaagaggcgttatgggcgctggtctggcaaggcgtcattaccagcgacatt

SEQ ID NO: 768237 - DNA, 75 bp, synthetic construct
  source 1..75: mol_type = other DNA
gggcatttgctgaagcgacgaagtgcggaatgcttgttaagcaacatcaggtagcgaataacaatgcccaggtgt

SEQ ID NO: 768238 - DNA, 75 bp, synthetic construct
  source 1..75: mol_type = other DNA
accccgctgaatccccttaccccggagcagaaatactggtttgcctgcgccacgtttgataactgggagggctgg

SEQ ID NO: 768239 - DNA, 75 bp, synthetic construct
  source 1..75: mol_type = other DNA
ccgcagggcctccggttaccgattctgcagcatacacaacgaatgtgtccggctcttacctgtgggggccgcact

SEQ ID NO: 768240 - DNA, 75 bp, synthetic construct
  source 1..75: mol_type = other DNA
tccatctggccatatattgaaacgggtatccttgatgaagttttgcgccatcgctcgaccattgtctttactaat

SEQ ID NO: 768241 - DNA, 75 bp, synthetic construct
  source 1..75: mol_type = other DNA
tcggagcggagaaccggaagtgaacatccgtgtgggtatcagaactggcgatactcccgcacaggaacgcagcaa

SEQ ID NO: 768242 - DNA, 75 bp, synthetic construct
  source 1..75: mol_type = other DNA
cgacctgctgcgcgaactggggccaatgaccgttgaagacctggcgcaacggcatacaggcagcagtgaagaggt

SEQ ID NO: 768243 - DNA, 75 bp, synthetic construct
  source 1..75: mol_type = other DNA
tgggcgcctttgcgcgcgcttactcgcagcagttcaaacgtccgctcttcggcacgtcgcggtggtcgattacgc

SEQ ID NO: 768244 - DNA, 75 bp, synthetic construct
  source 1..75: mol_type = other DNA
caacctccacaccctcgccttttgccgctaacctgttgttcggttatgttgcggagtttatgtaccagggtgata

SEQ ID NO: 768245 - DNA, 75 bp, synthetic construct
  source 1..75: mol_type = other DNA
ttacagcggctagcggctggcagagaagcgaaaggtgaagaaggtttgtttgacctgctacgcgaactggggcca

SEQ ID NO: 768246 - DNA, 75 bp, synthetic construct
  source 1..75: mol_type = other DNA
tccatcaaagaagagttgggcatcgataacgtcttcttctcgccagagttcctgcgcgagggcagggcgttatac

SEQ ID NO: 768247 - DNA, 75 bp, synthetic construct
  source 1..75: mol_type = other DNA
gctggttatgggcgatgccctcgctgtcgcgctgttaaaagcacgcggctttactgctgaagattttgcgctctc

SEQ ID NO: 768248 - DNA, 75 bp, synthetic construct
  source 1..75: mol_type = other DNA
gccgtgtcttcgatatgggcgtggatgtccgtcagttaggtattgccgatgtgatgacgccaggcggaattcgcg

SEQ ID NO: 768249 - DNA, 75 bp, synthetic construct
  source 1..75: mol_type = other DNA
gaggcctatctggccaacaaacatctgaatcttaaggcgacgctggataaattcgaggcgtatgaggcggccgaa

SEQ ID NO: 768250 - DNA, 75 bp, synthetic construct
  source 1..75: mol_type = other DNA
gaagagtatttagccaacaagccactcaatcttcgtgccaccctggataagttcgaagcctatgagagtgcagaa

SEQ ID NO: 768251 - DNA, 75 bp, synthetic construct
  source 1..75: mol_type = other DNA
gctatgtcggcctttccaatgccgttcttcttgcacaacatcatcaagtcatagcccttgacgtcgtgcctgaga

SEQ ID NO: 768252 - DNA, 75 bp, synthetic construct
  source 1..75: mol_type = other DNA
caacaatccgtcgtttggctatggtggttattgtctgccgaaagataccaagcagttactggcgaactaccagtc

SEQ ID NO: 768253 - DNA, 75 bp, synthetic construct
  source 1..75: mol_type = other DNA
attacgatcccaaaaccaactacttcaacacctctacggtggaagcggttattcgcgatgtcacagagatcaacc

SEQ ID NO: 768254 - DNA, 75 bp, synthetic construct
  source 1..75: mol_type = other DNA
gaaggcgcgatcaagcaggatatcccgaccctgtttaccgactctaccgaagcggaagcgatcaaactgttcgct

SEQ ID NO: 768255 - DNA, 75 bp, synthetic construct
  source 1..75: mol_type = other DNA
aatacctacctggcaatgcgagttgcttattttaatgagctggatagctacgctgaagccctgggattgaattcc

SEQ ID NO: 768256 - DNA, 75 bp, synthetic construct
  source 1..75: mol_type = other DNA
gaaggtgctattaagcaagatattccaacgttgtttactgactcaacagaagctgaggcgattaaactttttgca

SEQ ID NO: 768257 - DNA, 75 bp, synthetic construct
  source 1..75: mol_type = other DNA
ggttattgtctgccgaaagataccaagcagttactggcgaactaccagtctgtgccgaataacctgatctcggca

SEQ ID NO: 768258 - DNA, 75 bp, synthetic construct
  source 1..75: mol_type = other DNA
agaacgttttgcttcgttgttacaggaaggcgcgattaagcaaaatatcccgaccctgtttaccgactccactga

SEQ ID NO: 768259 - DNA, 75 bp, synthetic construct
  source 1..75: mol_type = other DNA
tgtttatttccctggaataatgtatttgcggatcggaaagtaccgaagataaccattaatgacaatacggtgacg

SEQ ID NO: 768260 - DNA, 75 bp, synthetic construct
  source 1..75: mol_type = other DNA
aagcgtattgaagagctgactggtgtgccgatcgatatcatctctaccggtccggatcgtactgaaaccatgatt

SEQ ID NO: 768261 - DNA, 75 bp, synthetic construct
  source 1..75: mol_type = other DNA
aatttatagaacagtatcttgaagttcctatagcccttttatcctttggccctgagagagaaagttgttttttat

SEQ ID NO: 768262 - DNA, 75 bp, synthetic construct
  source 1..75: mol_type = other DNA
aacggttcccgttggttttaccgcagcgatgcataagaaatatcgcactgaaaatattatattctccccggaatt

SEQ ID NO: 768263 - DNA, 75 bp, synthetic construct
  source 1..75: mol_type = other DNA
gtggcattagatattttaccgtcacgcgttgctatgctgaatgatcggatatctccaattgttgataaggaaatt

SEQ ID NO: 768264 - DNA, 75 bp, synthetic construct
  source 1..75: mol_type = other DNA
ccgccttctctgtttatgacctgtcagaaatcacatcaccttccctttgattattctctttttcctcctgttctg

SEQ ID NO: 768265 - DNA, 75 bp, synthetic construct
  source 1..75: mol_type = other DNA
gttcagataacttccgtgcatcttccattcaggggattatgaaacgtattaaggcgaaaggcgtcgaagtaatca

SEQ ID NO: 768266 - DNA, 75 bp, synthetic construct
  source 1..75: mol_type = other DNA
gttcagataacttccgtgcgtcttctattcaggggattatgaaacgtatcaaggcgaaaggtgttgaagtgatca

SEQ ID NO: 768267 - DNA, 75 bp, synthetic construct
  source 1..75: mol_type = other DNA
aagactttattgccgattctatccttgcacgtaaaccgaaagttgttggcgtttatcgtctgattatgaagagtg

SEQ ID NO: 768268 - DNA, 75 bp, synthetic construct
  source 1..75: mol_type = other DNA
aaaataaaatagggactacctgtaggggaataggcccttgttatgaggataaagtagcgagaaaagggttcaggt

SEQ ID NO: 768269 - DNA, 75 bp, synthetic construct
  source 1..75: mol_type = other DNA
ggtgaaaaccccggttatcagaccggacgcctggctcgttcgattggttacatggtacccagagccagtaaacat

SEQ ID NO: 768270 - DNA, 75 bp, synthetic construct
  source 1..75: mol_type = other DNA
tcgcagccatcatcgtggtgcatccggtggcagcggctggcgactggctccacgtaataacttcatggtggaaac

SEQ ID NO: 768271 - DNA, 75 bp, synthetic construct
  source 1..75: mol_type = other DNA
cgaacgtttcgcagacctgttgaaagaaggcgcgattaagcaggatatcccgaccctgtttaccgactccactga

SEQ ID NO: 768272 - DNA, 75 bp, synthetic construct
  source 1..75: mol_type = other DNA
atgttgcatagagttttatggaaaagcgttattgtcggtgcgatgctggctatgtccgggtgtgcaatggtgcaa

SEQ ID NO: 768273 - DNA, 75 bp, synthetic construct
  source 1..75: mol_type = other DNA
atgttgcatagagttttatggaaatgcggtattgtcggcgcgatgctggctatatctgggtgtgcgatggtgcaa

SEQ ID NO: 768274 - DNA, 75 bp, synthetic construct
  source 1..75: mol_type = other DNA
gttcttgattatgcggtagttggaaattcagtgagctttgtacttcctctgttgagggcctcgttgttattcgga

SEQ ID NO: 768275 - DNA, 75 bp, synthetic construct
  source 1..75: mol_type = other DNA
actgctatccaaccactaatcctgagctgtcagggaaacttctgtccctcctggctgatagtcctgatgaatggc

SEQ ID NO: 768276 - DNA, 75 bp, synthetic construct
  source 1..75: mol_type = other DNA
aatttaagaagtatgcttattggttatcaacagatgaaacgatgccggaggtcgggcaaatttctccggctctct

SEQ ID NO: 768277 - DNA, 75 bp, synthetic construct
  source 1..75: mol_type = other DNA
atggggaacgttgtcgggaaattcatcaggtatgccgtctgcggaagtcacacattcgtgcgcagtacgatgatc

SEQ ID NO: 768278 - DNA, 75 bp, synthetic construct
  source 1..75: mol_type = other DNA
ggataccaccagaagagtgcagtgacgagcaaggccggtgcgtcaataaggcctatgccgagcaggtagcctccc

SEQ ID NO: 768279 - DNA, 75 bp, synthetic construct
  source 1..75: mol_type = other DNA
tagatgagataacgcttgtcagcggaggaaacgcaaacagcaactttgaaggtggcccccgtaatgaccgttcca

SEQ ID NO: 768280 - DNA, 75 bp, synthetic construct
  source 1..75: mol_type = other DNA
gcccgcagcaaggttgcgccgaccaccgaactgttcccgatgtcgaaaattaacgacgccatcaagcatgtgcgc

SEQ ID NO: 768281 - DNA, 75 bp, synthetic construct
  source 1..75: mol_type = other DNA
attgactgggaagagttgatcggttggatatcaggtaatgattcaaaagcaaatggggaggttaaactacaacca

SEQ ID NO: 768282 - DNA, 75 bp, synthetic construct
  source 1..75: mol_type = other DNA
actatatgtgtctttcaaacactgttgatcctaaagagttttttggttcagacggacactcaggattgtgtgaaa

SEQ ID NO: 768283 - DNA, 75 bp, synthetic construct
  source 1..75: mol_type = other DNA
aaaggaaaagcccctggcaagaaacgagcctctaagttctggggctgcacagcgtatcccgattgcaaaggcact

SEQ ID NO: 768284 - DNA, 75 bp, synthetic construct
  source 1..75: mol_type = other DNA
gatgtaggctttgactctgtacattttgattgtggcgcaccggtcgttgaagggcttgagtgctggcaatggtaa

SEQ ID NO: 768285 - DNA, 75 bp, synthetic construct
  source 1..75: mol_type = other DNA
tcaatttccgcgctacgacagataagtatgacgcgtataaaaatgccgattacgttattattgccacacctaccg

SEQ ID NO: 768286 - DNA, 75 bp, synthetic construct
  source 1..75: mol_type = other DNA
aagcggacgtgattatctctaaccgcatggcggaagagttggcggatgtggcggataaagtctatacccgcgatc

SEQ ID NO: 768287 - DNA, 75 bp, synthetic construct
  source 1..75: mol_type = other DNA
cgtgatctggaggcgtttaaacaggaagcggatgttatcgtttctaatcgtatggccggagagttaacggacgta

SEQ ID NO: 768288 - DNA, 75 bp, synthetic construct
  source 1..75: mol_type = other DNA
aagtggatatgcttaaccagaagatctctccgattgtcgataaagagattcaggaatatctggcagaaaaaccgt

SEQ ID NO: 768289 - DNA, 75 bp, synthetic construct
  source 1..75: mol_type = other DNA
aatacttatctggcgatgcgtgtggcttatttcaatgaattagatagttacgctgaaagtctggggcttaattcc

SEQ ID NO: 768290 - DNA, 75 bp, synthetic construct
  source 1..75: mol_type = other DNA
gttcggacaatttccgtgcttcctcgattcagggtattatgaagcgaatcaaggcgaaaggtgtgccagtaatcg

SEQ ID NO: 768291 - DNA, 75 bp, synthetic construct
  source 1..75: mol_type = other DNA
gatatgttggcctatctaacggtctgcttatcgcgcaaaaccatgaagttacagcattagatattgtgcctgcgc

SEQ ID NO: 768292 - DNA, 75 bp, synthetic construct
  source 1..75: mol_type = other DNA
aatatgaagcttatagagatgctgattatgttattatttcgacaccaaccaattatgaccctattaataataact

SEQ ID NO: 768293 - DNA, 75 bp, synthetic construct
  source 1..75: mol_type = other DNA
aagtggcattgattagtgcatcacatacatcagaggaagatgctcgccgattcatgatcgcaagcaaggagctgg

SEQ ID NO: 768294 - DNA, 75 bp, synthetic construct
  source 1..75: mol_type = other DNA
tggatccgcgtatcggcaaccattataacaacccgtcctttggctacggcggctactgcctgccgaaagatacca

SEQ ID NO: 768295 - DNA, 75 bp, synthetic construct
  source 1..75: mol_type = other DNA
ataatgttattttctctcctgagttcctgcgtgaaggccgtgcgctgtacgacaacctgcacccatcgcgcattg

SEQ ID NO: 768296 - DNA, 75 bp, synthetic construct
  source 1..75: mol_type = other DNA
aacaactgctggccaattaccattcagtgccaaacaatattatttctgctatcgtcgatgcaaaccgtacgcgta

SEQ ID NO: 768297 - DNA, 75 bp, synthetic construct
  source 1..75: mol_type = other DNA
tttaccgtgatatgcgcgcaggccttgtcagttaccgtacgagccaggacggacgacgggagtttgaaaccagtg

SEQ ID NO: 768298 - DNA, 75 bp, synthetic construct
  source 1..75: mol_type = other DNA
agctgtgaccgcagaagttgaagcggcgctgggtagccgtggacgtgtgctgttgcgtaaatccggcaccgaacc

SEQ ID NO: 768299 - DNA, 75 bp, synthetic construct
  source 1..75: mol_type = other DNA
gttgattcgcgtgatggtcgaaggtgaagacgaagcacaggtgactgaatttgcccaccgtatcgctgatgcggt

SEQ ID NO: 768300 - DNA, 75 bp, synthetic construct
  source 1..75: mol_type = other DNA
ttctccgggagctgaatgagctgaatgagctgaaacaatgcctgacgctgatgcttgaggacaaacaggcacagg

SEQ ID NO: 768301 - DNA, 75 bp, synthetic construct
  source 1..75: mol_type = other DNA
ggagtgacagtagtgtcgggctgaagaagcgggtgacagaggaagtcgatgaaggactgtggttgcgtatttcgg

SEQ ID NO: 768302 - DNA, 75 bp, synthetic construct
  source 1..75: mol_type = other DNA
ggggcggatgagggaaataaagggatgctctcactgccccgcattgagcatgccctgtatggtgcattttttgtg

SEQ ID NO: 768303 - DNA, 75 bp, synthetic construct
  source 1..75: mol_type = other DNA
gcgatcagatcatgtatatcatcgcgcgtgaaggtcttcgtcagggccagctgcgtggtggcgcggtgggtacat

SEQ ID NO: 768304 - DNA, 75 bp, synthetic construct
  source 1..75: mol_type = other DNA
ctgcgtggcggcgtggtggggacattgatgagcaacatggggctggagctggcattgaaacagttaggcattcca

SEQ ID NO: 768305 - DNA, 75 bp, synthetic construct
  source 1..75: mol_type = other DNA
tcattaaacattttatgcataacgaacttaaagcagtagaagaggttattgattccccactttctgaattcgcga

SEQ ID NO: 768306 - DNA, 75 bp, synthetic construct
  source 1..75: mol_type = other DNA
tgcacgacctttgcagcggcatgaaaatgttcccgcagattctggtaaacgtgcgttacaccgcaggtagcggcg

SEQ ID NO: 768307 - DNA, 75 bp, synthetic construct
  source 1..75: mol_type = other DNA
gaacgaacttagcctcagtgaactgaagattgtggtggattgcgcaaatggcgcgacttatcacatcgcgccaaa

SEQ ID NO: 768308 - DNA, 75 bp, synthetic construct
  source 1..75: mol_type = other DNA
gcgtgaaggtcttcgtcagggccagctgcgtggtggcgctgtgggtacattgatgagcaacatggggcttgaact

SEQ ID NO: 768309 - DNA, 75 bp, synthetic construct
  source 1..75: mol_type = other DNA
ttgtcagttaccgtaccggccaggacggacgacgggagtttgaaaccagtgaactgatccgggcatacggcgaat

SEQ ID NO: 768310 - DNA, 75 bp, synthetic construct
  source 1..75: mol_type = other DNA
acgggtaatcgccgcaggaaaatacacacaccgtctcaggctcaagaagcaatttcccgctggactgccacttgt

SEQ ID NO: 768311 - DNA, 75 bp, synthetic construct
  source 1..75: mol_type = other DNA
acgggtaatcgccgcagcaaaatacacacaccgcctcaggctcaagaagcaattacccgctggactgccacttgt

SEQ ID NO: 768312 - DNA, 75 bp, synthetic construct
  source 1..75: mol_type = other DNA
acgggtaatcgccgcagcaaaatacacacaccgactcaggctcaagaagcaattccccgctggactgccacttgt

SEQ ID NO: 768313 - DNA, 75 bp, synthetic construct
  source 1..75: mol_type = other DNA
atttcctgaccctgctgggctggctggtaaataatggcctctgggacgtccttgtcagtaccggactgtttgcgc

SEQ ID NO: 768314 - DNA, 75 bp, synthetic construct
  source 1..75: mol_type = other DNA
ttgcgggattttgtcgaggagtgttatgccccttcccgagcccgcctgaaattccgcgccggagagctggacgat

SEQ ID NO: 768315 - DNA, 75 bp, synthetic construct
  source 1..75: mol_type = other DNA
tttgccgcatatgacgaccgtttcattaacagccttgaaaagttagcagcggcagcccaaagtgggggggctccg

SEQ ID NO: 768316 - DNA, 75 bp, synthetic construct
  source 1..75: mol_type = other DNA
cgcagtaaaatacacacaccgtctcaggctcaagaagcaattacccgctggcctgccacttgttgcgatccgcca

SEQ ID NO: 768317 - DNA, 75 bp, synthetic construct
  source 1..75: mol_type = other DNA
cgcagaaaaatacacacaccgtctcaggctcaagaagcaattacccgctggtctgccacttgttgcgatccggca

SEQ ID NO: 768318 - DNA, 75 bp, synthetic construct
  source 1..75: mol_type = other DNA
gtatttcgtatatacatacctcgctggtcagtattagcatagctaccctgttgagtctgccaaatggcccccgaa

SEQ ID NO: 768319 - DNA, 75 bp, synthetic construct
  source 1..75: mol_type = other DNA
acgggtaatcgccgcagtaaaatacacacaccggctcaggctcaagaagcaatttcccgctggactgccacttgt

SEQ ID NO: 768320 - DNA, 75 bp, synthetic construct
  source 1..75: mol_type = other DNA
acgggtaatcgccgcagaaaaatacacacaccgcctcaggctcaagaagcaattccccgctggactgccacttgt

SEQ ID NO: 768321 - DNA, 75 bp, synthetic construct
  source 1..75: mol_type = other DNA
cgcagcaaaatacacacaccgtctcaggctcaagaagcaattacccgctggactgccacttgttgcgatccgtca

SEQ ID NO: 768322 - DNA, 75 bp, synthetic construct
  source 1..75: mol_type = other DNA
actatgcgggatttatttgccatgccgataaagtccgacgtgccactcgtgatgccctgctattgaacgaatttg

SEQ ID NO: 768323 - DNA, 75 bp, synthetic construct
  source 1..75: mol_type = other DNA
gggttattgatgaaatcattgatatggctcctatccctaaacccgtcgcaacgctggcgaaagcggcaaaaaaag

SEQ ID NO: 768324 - DNA, 75 bp, synthetic construct
  source 1..75: mol_type = other DNA
atggcgataaacgcctgccggttaccgtactttcgggatttttgggagcagggaaaacgacactgcttaaccata

SEQ ID NO: 768325 - DNA, 75 bp, synthetic construct
  source 1..75: mol_type = other DNA
tgtcaccgttttcgacgatcgcggtaatagctggagcggcgatattctgattggctgtgatggcgtgaagtcagt

SEQ ID NO: 768326 - DNA, 75 bp, synthetic construct
  source 1..75: mol_type = other DNA
tatcagcaggattgtgcgggcctggtgcgattttcggcgaacgaggcgctgaaaattcacgacagcaaatggcta

SEQ ID NO: 768327 - DNA, 75 bp, synthetic construct
  source 1..75: mol_type = other DNA
ctcgccagatgctggataaaccgacgtcatggcgacgctggtcaacggccgatcgtgaaccggtagggaaatggg

SEQ ID NO: 768328 - DNA, 75 bp, synthetic construct
  source 1..75: mol_type = other DNA
gaacgaagcgcattacgctggtgggcgatgcggcccatccggtggcgcagtatatggcgcagggtgcctgtatgg

SEQ ID NO: 768329 - DNA, 75 bp, synthetic construct
  source 1..75: mol_type = other DNA
aagcgggggggcgctggcaatcctgcaactgtttcatgccggtaataaagcggttcccgaactcatccctagtgg

SEQ ID NO: 768330 - DNA, 75 bp, synthetic construct
  source 1..75: mol_type = other DNA
caacgctcagacgaattggcgatccctggaaaactatggcatgtgattcagaagacacccggatggttcccgaca

SEQ ID NO: 768331 - DNA, 75 bp, synthetic construct
  source 1..75: mol_type = other DNA
ggatggttggataagctgtagtgagcgaatgccggataagttaattccggtaatggtcatgtatgaagacggtga

SEQ ID NO: 768332 - DNA, 75 bp, synthetic construct
  source 1..75: mol_type = other DNA
tcggcgtcggcgaaatcgcccgccagcgcgcggtattcaccgatcacatcaccatgatggatgcggtaaacgccg

SEQ ID NO: 768333 - DNA, 75 bp, synthetic construct
  source 1..75: mol_type = other DNA
aaaagccaaagcagaagctgagaagaaagcggctgctgaaaaggctgcagctgataagaaagcggcagccgacaa

SEQ ID NO: 768334 - DNA, 75 bp, synthetic construct
  source 1..75: mol_type = other DNA
aagttatctctctgtggttacaggaaggcattaaaccaacgacaatgctgcaaaaagggttacgtcaggcgatta

SEQ ID NO: 768335 - DNA, 75 bp, synthetic construct
  source 1..75: mol_type = other DNA
acctgaacagcgtcaactggcgcaaaactggaatcaggggaacggaaaaaccggcccctatgtgactaatgccga

SEQ ID NO: 768336 - DNA, 75 bp, synthetic construct
  source 1..75: mol_type = other DNA
tactatagctgaagggccgcgctttcaagtgaaacatgtgattgtattacctggccacattaccgctaagcaaat

SEQ ID NO: 768337 - DNA, 75 bp, synthetic construct
  source 1..75: mol_type = other DNA
tcattaccatcgtactgagcattggattgttgtctcggggacagctaaagttcatcttgaagataagacttacct

SEQ ID NO: 768338 - DNA, 75 bp, synthetic construct
  source 1..75: mol_type = other DNA
cccgctttggtcatttgtaacgaatcacatcgctttatcgttgctgaacaattgcgtaaagagggtttaaagcat

SEQ ID NO: 768339 - DNA, 75 bp, synthetic construct
  source 1..75: mol_type = other DNA
tagttataccgttagatgcagaatggaatgacgttggatcttggtcatctctttgggatataagtgctaaagaca

SEQ ID NO: 768340 - DNA, 75 bp, synthetic construct
  source 1..75: mol_type = other DNA
tagttgttaaaccaaaagagaaaatagaactccaacagcattttcatcgagctgagcattggactgttttgaaag

SEQ ID NO: 768341 - DNA, 75 bp, synthetic construct
  source 1..75: mol_type = other DNA
aacacttcgaatagttatatctattcaacaaatggactagttgctactgttggtattgataatttaattgttgta

SEQ ID NO: 768342 - DNA, 75 bp, synthetic construct
  source 1..75: mol_type = other DNA
aaaaccggcccctatgtgaccgcgattaatttgattcagtacaacagccagtttattggccaggacataaactag

SEQ ID NO: 768343 - DNA, 75 bp, synthetic construct
  source 1..75: mol_type = other DNA
ttcatggacaataagataataggagagctaaaagagattgagactgagtttcttgatcaagaaggtgcgaaaata

SEQ ID NO: 768344 - DNA, 75 bp, synthetic construct
  source 1..75: mol_type = other DNA
atgagacacgggctgctggcgctgatttgctggctgtgttgtgttgttgcccatagcgaaatgctgaatgtcgaa

SEQ ID NO: 768345 - DNA, 75 bp, synthetic construct
  source 1..75: mol_type = other DNA
gaatatccgatcgccgtacactctctgctgcctcccgtatggccgcgcagcttacttcctttcgctatcgcttcg

SEQ ID NO: 768346 - DNA, 75 bp, synthetic construct
  source 1..75: mol_type = other DNA
acttccgctgtctgtcgtgcggtttaatgtctttaccggtcgaatatccgctcgccgcacgctctctgctgcctc

SEQ ID NO: 768347 - DNA, 75 bp, synthetic construct
  source 1..75: mol_type = other DNA
aaaagtaacggtatagcaagtcaatatttgccgcctgaaatgacgctaacacctgaacagcgtcaactggcgcaa

SEQ ID NO: 768348 - DNA, 75 bp, synthetic construct
  source 1..75: mol_type = other DNA
catgcggatactgatagcaccgaagtggcgaaaaataacgcgctgactgatgatgatttttctgcgggaaagtct

SEQ ID NO: 768349 - DNA, 75 bp, synthetic construct
  source 1..75: mol_type = other DNA
agtcattatctttgcaggtagtgatgcatgggcacatgcgaaagagtggagcgaatgggccggaaagcatattgc

SEQ ID NO: 768350 - DNA, 75 bp, synthetic construct
  source 1..75: mol_type = other DNA
tatataacgctgaaaaaaagtttgacatattatataatctgtgcaggcgttttagcgttatgctcgtttgctata

SEQ ID NO: 768351 - DNA, 75 bp, synthetic construct
  source 1..75: mol_type = other DNA
atgcgggaaattgttccagcggcgcgtcaacgtgcgagcgatgaattagcctccatacaggcggttatcgataag

SEQ ID NO: 768352 - DNA, 75 bp, synthetic construct
  source 1..75: mol_type = other DNA
attatcgatttcgccgaactgaaagcaatttttaaacccacgctagataagttggaccactattatctcaacgac

SEQ ID NO: 768353 - DNA, 75 bp, synthetic construct
  source 1..75: mol_type = other DNA
gggattacccgattatttccttggtatccgttatgttggtgtcaaaggtgcaggggagcgaacgcattgggtaga

SEQ ID NO: 768354 - DNA, 75 bp, synthetic construct
  source 1..75: mol_type = other DNA
taatcaccgagggcaaggtccgtacactggcccagctttttgcacttgaataccaacaattaatgaaggaaaacg

SEQ ID NO: 768355 - DNA, 75 bp, synthetic construct
  source 1..75: mol_type = other DNA
aaccgctaactgccgcgccctattcgtcctccgttgctacgccactagacatcgtcaaacagaccggccaactgg

SEQ ID NO: 768356 - DNA, 75 bp, synthetic construct
  source 1..75: mol_type = other DNA
atatcttaaaaaaaattgcccaagagatataatagcaatatctcgttatatatgcttggttttgatgattgtgtc

SEQ ID NO: 768357 - DNA, 75 bp, synthetic construct
  source 1..75: mol_type = other DNA
gaaatgaaaatagggtcaaatgttggttccctgggtattgacacaaccaataataaagacgccttagatgttgta

SEQ ID NO: 768358 - DNA, 75 bp, synthetic construct
  source 1..75: mol_type = other DNA
gccgggcaggacaacgagacaaaacatccaaagccctcagcaaacgaggtgtgctgcccgttcaagaaatgccag

SEQ ID NO: 768359 - DNA, 75 bp, synthetic construct
  source 1..75: mol_type = other DNA
ttctgaactgtcagccctgcagcgtattgagcatcttgctctgatgaaacggcaggcagaaccggcgggatccga

SEQ ID NO: 768360 - DNA, 75 bp, synthetic construct
  source 1..75: mol_type = other DNA
tactgatattaccgaagtggcgaaaaataacgcgctgactgatgatgatttttctgcgggaaagtcttcgacggc

SEQ ID NO: 768361 - DNA, 75 bp, synthetic construct
  source 1..75: mol_type = other DNA
cacacttcccgatgacagtcagcatgacggacaatcggtgcgttttctctataacaaatcgctcaatgagtcagg

SEQ ID NO: 768362 - DNA, 75 bp, synthetic construct
  source 1..75: mol_type = other DNA
gagaatgctcgctgtgtcgccgattacaaactgccaccagagagtcagcagcagttattaactcagctatcagcc

SEQ ID NO: 768363 - DNA, 75 bp, synthetic construct
  source 1..75: mol_type = other DNA
gtagccgttacgcgcaaatcaagcaggcctgggataatcgacaaatggatgtggtcgaacaaatgatgcctggac

SEQ ID NO: 768364 - DNA, 75 bp, synthetic construct
  source 1..75: mol_type = other DNA
gagcttatcagaggcggggcgtttctggtggcgatgtctctgtggcataaccatccacagaagacaaagctgccg

SEQ ID NO: 768365 - DNA, 75 bp, synthetic construct
  source 1..75: mol_type = other DNA
ggcaagattttcgtgttattttggagcgactaacatcattaggctatgtagtcagttggcgggtgatgaatagtc

SEQ ID NO: 768366 - DNA, 75 bp, synthetic construct
  source 1..75: mol_type = other DNA
ttgaacaatagttcagtcgcgattagttctttatatgaaaaagataaaggcaaacacttaaaaaatattagagaa

SEQ ID NO: 768367 - DNA, 75 bp, synthetic construct
  source 1..75: mol_type = other DNA
gaagatgttgtgttgtgcctgtccgggatgatcgaagctgttcgtccggatactgatatcaccgaagtggcgaaa

SEQ ID NO: 768368 - DNA, 75 bp, synthetic construct
  source 1..75: mol_type = other DNA
cctgaatggacttaatcacattgcggaattaagggcgaaagtttttggcctgaatattgagtcagagcttgagcg

SEQ ID NO: 768369 - DNA, 75 bp, synthetic construct
  source 1..75: mol_type = other DNA
tccgttacgttcccggctgacgctgggtgatggttatacccagggcgatattttcgatggtattaactttcgcgg

SEQ ID NO: 768370 - DNA, 75 bp, synthetic construct
  source 1..75: mol_type = other DNA
gtcatctgccgaactctattttaacccgcgctttttagcggatgatccccaggctgtggctgatttatcgcgttt

SEQ ID NO: 768371 - DNA, 75 bp, synthetic construct
  source 1..75: mol_type = other DNA
gtatgtctgagtttgtggtgaataatgctcctgagcagacagaagacgccgggcctgcagagcctgtgtctgcgg

SEQ ID NO: 768372 - DNA, 75 bp, synthetic construct
  source 1..75: mol_type = other DNA
cacgttagtgtggccagttccacttctgcacggtttttccagctcttacggtgtattacctccgctttgtaaaga

SEQ ID NO: 768373 - DNA, 75 bp, synthetic construct
  source 1..75: mol_type = other DNA
gcagaggcgattaaagaaggcgcttcggatatccacatcgagacgtttgaaaagagtctggtgatccgttttcgc

SEQ ID NO: 768374 - DNA, 75 bp, synthetic construct
  source 1..75: mol_type = other DNA
accgacgaagaaaaacgcctgctggggattaccgatgcgcgaaccgtcactctgtaccatccgcagggctgtccc

SEQ ID NO: 768375 - DNA, 75 bp, synthetic construct
  source 1..75: mol_type = other DNA
attccgtcagggggagggcgggccaggcggccggggcttcaacggcggcaaattttgtactcgccacgccgatgg

SEQ ID NO: 768376 - DNA, 75 bp, synthetic construct
  source 1..75: mol_type = other DNA
tctctttacgcttcaggaaggagtgtcattggcgcaatttaaagaaatgcagcaagaacgggtcacactggttgt

SEQ ID NO: 768377 - DNA, 75 bp, synthetic construct
  source 1..75: mol_type = other DNA
ccggaggaaatcagggaggaaatattaacattagatggttttattacacagttaataacgctttatgaagatttt

SEQ ID NO: 768378 - DNA, 75 bp, synthetic construct
  source 1..75: mol_type = other DNA
ccgctaacaccgtgcgtctgccctacagtttcagccgtcggtttagcctggtggcgtggtgcgaagcgtcgctgg

SEQ ID NO: 768379 - DNA, 75 bp, synthetic construct
  source 1..75: mol_type = other DNA
ctcgatgagccgcagcggatggaggggggcaagaccctagattccttggctaatttcaacccgttgatggtgttg

SEQ ID NO: 768380 - DNA, 75 bp, synthetic construct
  source 1..75: mol_type = other DNA
gcactggagcgactagtccggcaacaacacaatgccttaatcaaaaatggcctgcaaaaagtgataagcggtgac

SEQ ID NO: 768381 - DNA, 75 bp, synthetic construct
  source 1..75: mol_type = other DNA
cctgcaaaaagtgataagcggagacacttcctgggatgaagtgatgcgcgtcgccagtgccacgctggagagcga

SEQ ID NO: 768382 - DNA, 75 bp, synthetic construct
  source 1..75: mol_type = other DNA
cgatattttctgccctggcagtgctgactggcattgtgatggtgacacgcgagaaatccccccgtcagccgatgg

SEQ ID NO: 768383 - DNA, 75 bp, synthetic construct
  source 1..75: mol_type = other DNA
ctgggtgaatcactgacggtcagaacgatattttctgccctggcagtgctgactggcattgtgatggtgacacgc

SEQ ID NO: 768384 - DNA, 75 bp, synthetic construct
  source 1..75: mol_type = other DNA
gtaccatcaagctaagacagacggcacgctggaggcattgccggatgaactgcatccctatgcagagcagatatt

SEQ ID NO: 768385 - DNA, 75 bp, synthetic construct
  source 1..75: mol_type = other DNA
tacccggaaccggtgaaagctgaacttatgacgctgggttcatttatcgctgaactgaccggactttatgcagat

SEQ ID NO: 768386 - DNA, 75 bp, synthetic construct
  source 1..75: mol_type = other DNA
acaccatactgtatccgatacttatcagttatttatgaaagccatgctggtactcgtctatcgaggcagaaatcg

SEQ ID NO: 768387 - DNA, 75 bp, synthetic construct
  source 1..75: mol_type = other DNA
atgatgcactgatcaaacgtcagattgatgacctaacgctccgcaaacgtttccaggatagaggattaccagatt

SEQ ID NO: 768388 - DNA, 75 bp, synthetic construct
  source 1..75: mol_type = other DNA
agaaatacattacgttttgatgagatgaacagatttaaaggtattgaaggacatctgcccatcgacaaagaatat

SEQ ID NO: 768389 - DNA, 75 bp, synthetic construct
  source 1..75: mol_type = other DNA
ggtaccactcactatttgagttgaccgggcaaacccacccagtgtatctaaccacaggggtaattcaacggtcga

SEQ ID NO: 768390 - DNA, 75 bp, synthetic construct
  source 1..75: mol_type = other DNA
gctaacctgcatacttttgacgatcgggatgatgtagccgagttcattgaggcgtcatttgctgacggtttgttt

SEQ ID NO: 768391 - DNA, 75 bp, synthetic construct
  source 1..75: mol_type = other DNA
acgcggatgcgtacccacattccccggcacaacatcaatacctttcttgccattgcggaaatctctgaccactta

SEQ ID NO: 768392 - DNA, 75 bp, synthetic construct
  source 1..75: mol_type = other DNA
ggactggtcagggccgtactccgaaagcaatagtggctgctattgaggcagggaaaacactggaagatttccaga

SEQ ID NO: 768393 - DNA, 75 bp, synthetic construct
  source 1..75: mol_type = other DNA
ttgagttgttctgtacgccgggagaaattccctctgcccgcttaccgatgagcgatgtgcgtttttattcccgca

SEQ ID NO: 768394 - DNA, 75 bp, synthetic construct
  source 1..75: mol_type = other DNA
tgatgaagaggacgtcattgagaccgctattggtgaagttatacccggagcgcttatatccggccccgcaggaca

SEQ ID NO: 768395 - DNA, 75 bp, synthetic construct
  source 1..75: mol_type = other DNA
tctggcaggtggttaaacgggatcacgccattatttcattcttcgatcaggtatttgaccaaggactgaatccgg

SEQ ID NO: 768396 - DNA, 75 bp, synthetic construct
  source 1..75: mol_type = other DNA
agacggtatcgatcctacagaactactcgcttcagttggttcatcccagcctaaaaccaaatcaactcgtgctcc

SEQ ID NO: 768397 - DNA, 75 bp, synthetic construct
  source 1..75: mol_type = other DNA
ggtcagggccgcactcctaaagcaatagctgctgctatcgaagctggtaaaacactggaagactttgcgctctga

SEQ ID NO: 768398 - DNA, 75 bp, synthetic construct
  source 1..75: mol_type = other DNA
tgggaggcgttgtccaaatgctatctcctcaacctgcaggtctggcaagcaaacaaagcgcagataaccgcgcat

SEQ ID NO: 768399 - DNA, 75 bp, synthetic construct
  source 1..75: mol_type = other DNA
atttgagcagtttatgatttccagccaacgccgtgggctcacatactccgtgtttaagggtaaaaaaaacatcgg

SEQ ID NO: 768400 - DNA, 75 bp, synthetic construct
  source 1..75: mol_type = other DNA
aattaggcagtgttcttggaaaaacgtttggcaaagttcactaccgtctgatatcccgcgtaagcgaagcaggcg

SEQ ID NO: 768401 - DNA, 75 bp, synthetic construct
  source 1..75: mol_type = other DNA
tttgatcataatggcgtggggctggcgctattttatggtgatttcttcgcccgtgattcaaaaagcggtggcgcg

SEQ ID NO: 768402 - DNA, 75 bp, synthetic construct
  source 1..75: mol_type = other DNA
caacaaccggcgcttgcagaactccgcgatcgttctacacgtgaaaaactgttcactgcggggtggacacgtgcg

SEQ ID NO: 768403 - DNA, 75 bp, synthetic construct
  source 1..75: mol_type = other DNA
agcggcgcgtcaacgtgcaagcgatgaattagcctccatacaggcggttatcgataagcagcaaggcgggtttag

SEQ ID NO: 768404 - DNA, 75 bp, synthetic construct
  source 1..75: mol_type = other DNA
ctttaaggaacatgtcacgccccgcgagaaggtgtacaaagtctggcagcagatggcagaagacggttttattac

SEQ ID NO: 768405 - DNA, 75 bp, synthetic construct
  source 1..75: mol_type = other DNA
cgtgaactgcgcggctatgatgccatgacggcggcttatgcccatgccagaaagacacggaggatggcacaatga

SEQ ID NO: 768406 - DNA, 75 bp, synthetic construct
  source 1..75: mol_type = other DNA
gagaagatttacaaaatctggcagcagatgtttcttgacggtttcgtctccgatatcagcgacgctgcgctggac

SEQ ID NO: 768407 - DNA, 75 bp, synthetic construct
  source 1..75: mol_type = other DNA
catagcccacaatcaaaagaatcgcctttaggtgactcaatttccttcaaagttagggtgaaatcaggtggcagc

SEQ ID NO: 768408 - DNA, 75 bp, synthetic construct
  source 1..75: mol_type = other DNA
ggcgtgaactgcgcggctatgatgccatgacggcggcttatgcccgtgccagaaagacacggaggatggcacaat

SEQ ID NO: 768409 - DNA, 75 bp, synthetic construct
  source 1..75: mol_type = other DNA
aaaccagttgccgcgagctgacggtcacgcaactggaacaggtgctcgatgccatgaaagaacgcggctttaaga

SEQ ID NO: 768410 - DNA, 75 bp, synthetic construct
  source 1..75: mol_type = other DNA
acaggtacgtcgtgagaaattcgatcttgatgaggcgcaactcaaaccttattttgaattaaacacggtactgaa

SEQ ID NO: 768411 - DNA, 75 bp, synthetic construct
  source 1..75: mol_type = other DNA
aggcgttccgcgaagatccggacctcgaaccgctggggacgccgagcgggttgattgagatctactcgcaaacca

SEQ ID NO: 768412 - DNA, 75 bp, synthetic construct
  source 1..75: mol_type = other DNA
ccaggcggtggctttggttttggctggcactacaacggcgcaggcacgccggggcgtaaaggcattattctgagc

SEQ ID NO: 768413 - DNA, 75 bp, synthetic construct
  source 1..75: mol_type = other DNA
attgagatctactcgaaaaccatcgccgatatgaactacgacgattgtcaggggcatccgatgtggtttgagaaa

SEQ ID NO: 768414 - DNA, 75 bp, synthetic construct
  source 1..75: mol_type = other DNA
gtacgtcgagtttgaccatccgcagatgtttgttcgccaccaggcattccgcgaagatccggatctcgaaccgct

SEQ ID NO: 768415 - DNA, 75 bp, synthetic construct
  source 1..75: mol_type = other DNA
cggtgctgcgcaggtgatcctgccgcgcgtggtcggttcgatggaagtgtatgaacagcaaacctcctggccgct

SEQ ID NO: 768416 - DNA, 75 bp, synthetic construct
  source 1..75: mol_type = other DNA
gccttgcatggtaatagcgttggtacgggcggagattactctaccggtgctgcgcaggtgatcctgccgcgcgtg

SEQ ID NO: 768417 - DNA, 75 bp, synthetic construct
  source 1..75: mol_type = other DNA
tcggcgtggcgaccggctggaccggtgtaggtctcacctttggtgccggacttatcatgtcgggcgcgtcaatga

SEQ ID NO: 768418 - DNA, 75 bp, synthetic construct
  source 1..75: mol_type = other DNA
tcagcggctcaatggctcagcgatttggcaggacacatcgccgcgcactaacgtctgccagcgaagtgttcaggg

SEQ ID NO: 768419 - DNA, 75 bp, synthetic construct
  source 1..75: mol_type = other DNA
aacggtttgatataccggtatatcacccggatgtgcgggtctgggaaatctttgatcataacggtgttggactgg

SEQ ID NO: 768420 - DNA, 75 bp, synthetic construct
  source 1..75: mol_type = other DNA
tcacgtacacaatgcggcgcgtattcgctatccgatggtgcgcgtggactggctacgtaagcgtcatctgagtga

SEQ ID NO: 768421 - DNA, 75 bp, synthetic construct
  source 1..75: mol_type = other DNA
ggatcatcccctggccatgatcagcctcgacctggataaattcaaaccggtaaatgatttattcggccacaatgc

SEQ ID NO: 768422 - DNA, 75 bp, synthetic construct
  source 1..75: mol_type = other DNA
tcgacgccgccacgtccggcgggccggttcaggccaccacgacgctgatttataagatctaccgcgaaggcttta

SEQ ID NO: 768423 - DNA, 75 bp, synthetic construct
  source 1..75: mol_type = other DNA
ggatatgcgtcgctcagtctatgcccgagagctagagggaaaatttggcaaccaaaagctaacagaaattaccca

SEQ ID NO: 768424 - DNA, 75 bp, synthetic construct
  source 1..75: mol_type = other DNA
gactcagacttgccgatgagcagcgcaacgctcaatcaggtgcttacccttacctatcggctggcccagaaggaa

SEQ ID NO: 768425 - DNA, 75 bp, synthetic construct
  source 1..75: mol_type = other DNA
cgctgaagaccttcgccggcggttcggaatacattctgccatcacgctatgactcagacttgccgatgagcagcg

SEQ ID NO: 768426 - DNA, 75 bp, synthetic construct
  source 1..75: mol_type = other DNA
aaacataattattgatagtgagtacaagtcaaataaggcagtaaaggaatatgtagaaattttaaaagaattcaa

SEQ ID NO: 768427 - DNA, 75 bp, synthetic construct
  source 1..75: mol_type = other DNA
ataagttcgacaagaaacgctatatgttactggcaattaccgccttcgccagcggttttattgccattcctttag

SEQ ID NO: 768428 - DNA, 75 bp, synthetic construct
  source 1..75: mol_type = other DNA
cctatgtttattgagtttgctgttggcatattaatttatgaaatatacaagagatcacgcaatagattttttcag

SEQ ID NO: 768429 - DNA, 75 bp, synthetic construct
  source 1..75: mol_type = other DNA
cgatgtcaccgacgagcaggcgaaatggcgcgatgacgccattatgcgctcgcaatccacgtcgttgattgaacg

SEQ ID NO: 768430 - DNA, 75 bp, synthetic construct
  source 1..75: mol_type = other DNA
tgcccaggcgcagcagcttaatgaagatcagattcaggagctgcgcgatatcgtcgcctggcgtttgatgggcaa

SEQ ID NO: 768431 - DNA, 75 bp, synthetic construct
  source 1..75: mol_type = other DNA
cagcgcggggcgtatcgacgcggtggcgtttgtcgagagcattccattctccgaaacacgcggttatgtgaagaa

SEQ ID NO: 768432 - DNA, 75 bp, synthetic construct
  source 1..75: mol_type = other DNA
cgaggacttgcgggcgctgactgacgccatcgtggaacaaggcaggccatcaacggccgtgctttgccgcgaaat

SEQ ID NO: 768433 - DNA, 75 bp, synthetic construct
  source 1..75: mol_type = other DNA
ttcatagctctgaaaaccttcgcaggcggctcggagtacgtgctgccatcgcgctatgactcggacttgccgatg

SEQ ID NO: 768434 - DNA, 75 bp, synthetic construct
  source 1..75: mol_type = other DNA
tgaaggattatccgctttatccctacctggaataccgccagattaccgatgacctgatgaatcaaccggcggtca

SEQ ID NO: 768435 - DNA, 75 bp, synthetic construct
  source 1..75: mol_type = other DNA
gacacactgtcactttttgtggataaaacaaaatcgaatgacaacaataatgtgtttataaaaaaattacctgat

SEQ ID NO: 768436 - DNA, 75 bp, synthetic construct
  source 1..75: mol_type = other DNA
actcagggcaaaaaaatgcagatagttaaattgaagacagaaggtgcaggattacatggcgttgctcgtctgaca

SEQ ID NO: 768437 - DNA, 75 bp, synthetic construct
  source 1..75: mol_type = other DNA
gttcagccacggttgagcatggaaaatactacggtaactgctgataataacgtggagaaaaatgtcgcgtcgctt

SEQ ID NO: 768438 - DNA, 75 bp, synthetic construct
  source 1..75: mol_type = other DNA
tgagggctatttacccgcctggccgcagcttggcgcaagcctgatgtatgaacagtattatggcgatgaagtcgg

SEQ ID NO: 768439 - DNA, 75 bp, synthetic construct
  source 1..75: mol_type = other DNA
ggttttattacaatgaaaacttcgtcgaaattgatagcaataacattgtttgcgaaatttttatccccgttcgtc

SEQ ID NO: 768440 - DNA, 75 bp, synthetic construct
  source 1..75: mol_type = other DNA
aactgggaaaattatcctgactgggtgcgtaacatcaatctgatagagttacctgccagggggttagggaaggtg

SEQ ID NO: 768441 - DNA, 75 bp, synthetic construct
  source 1..75: mol_type = other DNA
taattagtatttttattatgtctggttgtgctgtgcataatgatgagacaagtatcggtaaatttggtcttgcat

SEQ ID NO: 768442 - DNA, 75 bp, synthetic construct
  source 1..75: mol_type = other DNA
tgttcctgggttgcttttagctctacaaaatggacatgataatgtaattgatgaatatggtactttaattaaaaa

SEQ ID NO: 768443 - DNA, 75 bp, synthetic construct
  source 1..75: mol_type = other DNA
tgagctggtggattttaaaatggactctctcgatattcaattgcaggctgtttttgaaaaggtgacaggtatcta

SEQ ID NO: 768444 - DNA, 75 bp, synthetic construct
  source 1..75: mol_type = other DNA
tatctggtgcagaaaatatagtaaaaaatgatgcaactcatttctgtgttactcagggcaaaaaaatgcaaatag

SEQ ID NO: 768445 - DNA, 75 bp, synthetic construct
  source 1..75: mol_type = other DNA
ggtagaatatctggtgcagaaaatatagtaaaaaatgatgcaactcatttctgtgttactcagggcaaaaaaatg

SEQ ID NO: 768446 - DNA, 75 bp, synthetic construct
  source 1..75: mol_type = other DNA
ctgtgttactcagggcaaaaaaatgcaaatagttgagctgaagacagaaggtataggattacatggtgtcgctcg

SEQ ID NO: 768447 - DNA, 75 bp, synthetic construct
  source 1..75: mol_type = other DNA
gatctccctctccccccacacaacgccacctcccgtcagcacaacatgtggtgccggattcagctactgatgaca

SEQ ID NO: 768448 - DNA, 75 bp, synthetic construct
  source 1..75: mol_type = other DNA
gttcgccagcatgagcgggataccgggggcggtgatggtgggctcaccaccgctgaacgtcagcgtctgaaagag

SEQ ID NO: 768449 - DNA, 75 bp, synthetic construct
  source 1..75: mol_type = other DNA
ccgaggtccgtcaacgggcggttcgtatggttctggaaagtcaggatgaatatgactcacagtgggcggcaattt

SEQ ID NO: 768450 - DNA, 75 bp, synthetic construct
  source 1..75: mol_type = other DNA
gaagtccgtcaacgggcagttcgtatggttctggaaagtcaggacgaatatgactcacaatgggcggcaatttgt

SEQ ID NO: 768451 - DNA, 75 bp, synthetic construct
  source 1..75: mol_type = other DNA
aagattggctgtacgccggagactctgcgtgtctgggttcgccagcatgagcgggataccgggggcggtgatggt

SEQ ID NO: 768452 - DNA, 75 bp, synthetic construct
  source 1..75: mol_type = other DNA
atgactaaaaatactcgtttttcccccgaagtccgtcagcgggcagtccgtatggttctggaaagtcagggcgaa

SEQ ID NO: 768453 - DNA, 75 bp, synthetic construct
  source 1..75: mol_type = other DNA
tgcccgtggtgtgctaatccggagtcgatctccggcaaaatccagacggtgcgcagagaggcgaaatgtctgcac

SEQ ID NO: 768454 - DNA, 75 bp, synthetic construct
  source 1..75: mol_type = other DNA
attgaaactgccggagacgcgccaaccagcaagttgttaccgctggcgaaattgtgcgatgaagtgttgttcgat

SEQ ID NO: 768455 - DNA, 75 bp, synthetic construct
  source 1..75: mol_type = other DNA
ttgctggtgagtgagggtgtcaacgtgatcccgcgtttaccgctgatccctggtttcacgctcagccgggagaat

SEQ ID NO: 768456 - DNA, 75 bp, synthetic construct
  source 1..75: mol_type = other DNA
cacaaagcgtggcatcgagtttatggggtgatcctgaagcgcagcgattaacctggtacggaacagcgttaggca

SEQ ID NO: 768457 - DNA, 75 bp, synthetic construct
  source 1..75: mol_type = other DNA
atgtactacccgaagtctgcatctgctttttatcccttttagcagaacaagattttccacattttcaggacttgt

SEQ ID NO: 768458 - DNA, 75 bp, synthetic construct
  source 1..75: mol_type = other DNA
tgatgccagcatcattaagtgatgataaaattatcaaacatatggcgcgcaggaccctcaaactgggtgatgctg

SEQ ID NO: 768459 - DNA, 75 bp, synthetic construct
  source 1..75: mol_type = other DNA
acaaaggcactaaaaccatcgccattacccctgactactctgaagtggccaaattgtgcgaccagtggctggcac

SEQ ID NO: 768460 - DNA, 75 bp, synthetic construct
  source 1..75: mol_type = other DNA
tgctgttgcatgaagcggtcggtcatggcctggaaggcgacttcaaccgccgtggtacttcagtctttagtggac

SEQ ID NO: 768461 - DNA, 75 bp, synthetic construct
  source 1..75: mol_type = other DNA
aagcgtatctgattgaaaacggtaaagtaacgaagccggtgaaaggcgcaacgttgattggttccggtatcgaaa

SEQ ID NO: 768462 - DNA, 75 bp, synthetic construct
  source 1..75: mol_type = other DNA
gtacttggcgcaggttggccgggcgtgctgttgcatgaagcggtgggtcacggtctggaaggcgacttcaaccgc

SEQ ID NO: 768463 - DNA, 75 bp, synthetic construct
  source 1..75: mol_type = other DNA
gttctcggcgctggctggccgggcgtgttgttgcatgaagcggtcggtcacggcctggaaggcgacttcaaccgc

SEQ ID NO: 768464 - DNA, 75 bp, synthetic construct
  source 1..75: mol_type = other DNA
cgatggtgaagttcgcgctgatgcatgggcgaaagaagcagtgcgtatggcactggtcaatctttccgccgttgc

SEQ ID NO: 768465 - DNA, 75 bp, synthetic construct
  source 1..75: mol_type = other DNA
gccagtggcggcggcggtcgttttggttatgagttcttccttgccgatctcgacggcgaagtccgtgcggatgca

SEQ ID NO: 768466 - DNA, 75 bp, synthetic construct
  source 1..75: mol_type = other DNA
gattaaagctgaagccgacaaggccggattatcccccacagaatttaccgcccaggcgctgaaatcgggcgattt

SEQ ID NO: 768467 - DNA, 75 bp, synthetic construct
  source 1..75: mol_type = other DNA
atgccagtaagtacagcggtcatctgattgatttcaacgttcgcgccgaacgtatgggctggctaccttctgcgc

SEQ ID NO: 768468 - DNA, 75 bp, synthetic construct
  source 1..75: mol_type = other DNA
aagaagtcgagtggcaaactgcggcgattgaaggcaagctcgacctgctggtgacgctcgacttccgcatgtcca

SEQ ID NO: 768469 - DNA, 75 bp, synthetic construct
  source 1..75: mol_type = other DNA
agactatcacttatttaagtgatactggttgtctggagattcagggggccagtctaatgactaaaaatactcgtt

SEQ ID NO: 768470 - DNA, 75 bp, synthetic construct
  source 1..75: mol_type = other DNA
atcgcgttgccggtttctcgccgatcccggcgatgtcgatggtgtcatacgctgccggaacgcgttatctgtcgc

SEQ ID NO: 768471 - DNA, 75 bp, synthetic construct
  source 1..75: mol_type = other DNA
ccctgctacgtatgaacgctttacctcgctcgggccattgatggacaaacttggcaacggcggtaaagggatttc

SEQ ID NO: 768472 - DNA, 75 bp, synthetic construct
  source 1..75: mol_type = other DNA
atcgaaactgccggagacgcgccagccagcaagctgttaccgctggcgaaattgtgcgatgaagtgttgttcgat

SEQ ID NO: 768473 - DNA, 75 bp, synthetic construct
  source 1..75: mol_type = other DNA
tcctttgattttatttttattttttggcattacatcagtcttgataaatgctttttgttttaaaaaatatgttaa

SEQ ID NO: 768474 - DNA, 75 bp, synthetic construct
  source 1..75: mol_type = other DNA
tatggaaaccgcatttgctgaactcagcaaggacgccacgaagctgccgggcaacaatccggccggtggcgaaac

SEQ ID NO: 768475 - DNA, 75 bp, synthetic construct
  source 1..75: mol_type = other DNA
tgggcgagacgtggcaatgaatttgtgacggtaaaatcgctaaacgaacagggccagccggtgggggtggagatt

SEQ ID NO: 768476 - DNA, 75 bp, synthetic construct
  source 1..75: mol_type = other DNA
agattataaagaacgctggcttttaattaagtcgcgatgtctgagcttaaatcgaaccgcattattaaatgcggc

SEQ ID NO: 768477 - DNA, 75 bp, synthetic construct
  source 1..75: mol_type = other DNA
aacaagcaggaatctcagcgctgaggcaggaattagaggtaaaaacgccctaccgggccatgaatcacccggtca

SEQ ID NO: 768478 - DNA, 75 bp, synthetic construct
  source 1..75: mol_type = other DNA
tatctttggtgaaaagttggttacgggaagctggagcgcacaacgtgttagtaaccagtgcagttaataacaatg

SEQ ID NO: 768479 - DNA, 75 bp, synthetic construct
  source 1..75: mol_type = other DNA
acatttatgcacgcagtgccaccattgaagacgacaaaacgtggatcctgcatggtgtgaatcataaaaaatggc

SEQ ID NO: 768480 - DNA, 75 bp, synthetic construct
  source 1..75: mol_type = other DNA
atgaatgttttcagtcgctatttaattcgtcatctctttctcggttttgccgccgccgcagggctattgctgccg

SEQ ID NO: 768481 - DNA, 75 bp, synthetic construct
  source 1..75: mol_type = other DNA
tggatcctgcatggtgtgaatcataaaaaatggcttaacggtaaagaaacgctggaaacatcagataatcttgcc

SEQ ID NO: 768482 - DNA, 75 bp, synthetic construct
  source 1..75: mol_type = other DNA
cggctatcgctggacccaggcggtgatggtggtgctgatgaccttaccgcgcacactggtggagctttcgccgtt

SEQ ID NO: 768483 - DNA, 75 bp, synthetic construct
  source 1..75: mol_type = other DNA
agcagtcgcagtcggagctggatgttcgccagttgcgggcaaagaaatttaacactaacgataacggacgaatga

SEQ ID NO: 768484 - DNA, 75 bp, synthetic construct
  source 1..75: mol_type = other DNA
tgattttgctggctgtgccgtttacctttagtgccccgcgctcgccagggatgggtagccgtctcgctgtaggcg

SEQ ID NO: 768485 - DNA, 75 bp, synthetic construct
  source 1..75: mol_type = other DNA
attcagtgatgaaacggtaattcagaaacatatcgatgccggtataactttggccgatgccgttaactttttggt

SEQ ID NO: 768486 - DNA, 75 bp, synthetic construct
  source 1..75: mol_type = other DNA
cgatgtgcgcatcgtttactcgccgatggatgcgttgaaactggcgcaggagaatccaacccgtaaagtcgtatt

SEQ ID NO: 768487 - DNA, 75 bp, synthetic construct
  source 1..75: mol_type = other DNA
ctgtaatcctcaaaccgcgttcggtgcgctgatggtttcctccgaaggagcctgtgcagcgtggtatcagtatcg

SEQ ID NO: 768488 - DNA, 75 bp, synthetic construct
  source 1..75: mol_type = other DNA
gagaatcagtatcgtcgggtggtaccggatgccggtaacctgctggcgcaacaggcaattgccgatgtgttctgt

SEQ ID NO: 768489 - DNA, 75 bp, synthetic construct
  source 1..75: mol_type = other DNA
aatatgactcacaatgggcgacaatttgttccattgccccaaagattggctgtacaccggagactctgcgtgtct

SEQ ID NO: 768490 - DNA, 75 bp, synthetic construct
  source 1..75: mol_type = other DNA
tccactaataaagaacagtcagatgctcagaccgagatccgccgccttcagaaagagctgaagcgggttaccgac

SEQ ID NO: 768491 - DNA, 75 bp, synthetic construct
  source 1..75: mol_type = other DNA
cgcgtgccggggaaacaggggtcgctgttacaggcaaaagcgcgcggtgccgatgttcgcatcgtttactcgcca

SEQ ID NO: 768492 - DNA, 75 bp, synthetic construct
  source 1..75: mol_type = other DNA
gtttgctggaacaaccggacaatggcattgatgcgttccttgcgccgggccacgtcagtatggttatcggcaccg

SEQ ID NO: 768493 - DNA, 75 bp, synthetic construct
  source 1..75: mol_type = other DNA
ctcaggccgagatccgccgtcttcagaaagagttgaagcgggttacggacgaacgggacatattaaaaaaagccg

SEQ ID NO: 768494 - DNA, 75 bp, synthetic construct
  source 1..75: mol_type = other DNA
gaacgggacatattaaaaaaagccgttgtagattcaattggtcaacgcaacagttatgtgaaaacatggggttgc

SEQ ID NO: 768495 - DNA, 75 bp, synthetic construct
  source 1..75: mol_type = other DNA
atgcgttttgttgatgaatatcgcgcgccggaacaggtgatgcagttaattgagcatctgcgcgaacgagcttca

SEQ ID NO: 768496 - DNA, 75 bp, synthetic construct
  source 1..75: mol_type = other DNA
cggatgccggtaacctgctggcgcaacaggcgattgccgatgtgttctgtgtcaacggcgacagcgaatggcgcg

SEQ ID NO: 768497 - DNA, 75 bp, synthetic construct
  source 1..75: mol_type = other DNA
cgatgtgcgcatcgtttactcgccaatggatgcgttaaaactggcgcaggagaatccaacccgtaaagtggtatt

SEQ ID NO: 768498 - DNA, 75 bp, synthetic construct
  source 1..75: mol_type = other DNA
gctggcaggaatgagtgaacaagagattgcgcaggcggcagaggcggctcgcgagaaaggtctggataacaactg

SEQ ID NO: 768499 - DNA, 75 bp, synthetic construct
  source 1..75: mol_type = other DNA
ggtcgggcggttatgccctggtatttactgactggcgacaactgcctgctttaaccgatgcgtttcaggccagcg

SEQ ID NO: 768500 - DNA, 75 bp, synthetic construct
  source 1..75: mol_type = other DNA
gctgggatgtggctgcggtgactacgtggccgcttaacgtgcttgagcccggccagaagacggagatctatgtgg

SEQ ID NO: 768501 - DNA, 75 bp, synthetic construct
  source 1..75: mol_type = other DNA
tgagcttaaacgttatttacagcaggatattctggagccgcatacactggcatcgcaactttatcgagcgctctt

SEQ ID NO: 768502 - DNA, 75 bp, synthetic construct
  source 1..75: mol_type = other DNA
atctggcggaaacctttattgaatgggtaagtggcattattcaacctggtgagcgttaccagtttaaatctcctg

SEQ ID NO: 768503 - DNA, 75 bp, synthetic construct
  source 1..75: mol_type = other DNA
aaccagcgatcattattttgaggtagcagcgcagcggcttcgggggactattaccacaaccatttcggctacata

SEQ ID NO: 768504 - DNA, 75 bp, synthetic construct
  source 1..75: mol_type = other DNA
gcgattctatcaacacaagaaattactcactttaaaacaggcgagaataattatgcttcttatattctcacttgg

SEQ ID NO: 768505 - DNA, 75 bp, synthetic construct
  source 1..75: mol_type = other DNA
attacttccatcgttaatcgcagcgcaaggagatcaacctccactagctgaacgctatcgggtaccggaaaaata

SEQ ID NO: 768506 - DNA, 75 bp, synthetic construct
  source 1..75: mol_type = other DNA
aacggtgagtggctgttgaaaatgttgcgttcaaatgagaaggagcgcaaagagaaacacggtattatcggtgca

SEQ ID NO: 768507 - DNA, 75 bp, synthetic construct
  source 1..75: mol_type = other DNA
gctgggatgtggctgcggtgactacatggccgcttaacgtacttgaaccaggccagaagacagaactgtatgtag

SEQ ID NO: 768508 - DNA, 75 bp, synthetic construct
  source 1..75: mol_type = other DNA
ggccagaagacggagatctatgtggcgaagaagcagaagcgtggtctcgcaccaacgtctaagcgtccatcgctg

SEQ ID NO: 768509 - DNA, 75 bp, synthetic construct
  source 1..75: mol_type = other DNA
agcagaatatcgtgtattagtcagtcacatgatcgctacttttgaacaggcattacagcaaatcagtctaagcag

SEQ ID NO: 768510 - DNA, 75 bp, synthetic construct
  source 1..75: mol_type = other DNA
agaaagcgacaaattggcctatgcacatctggcgtttttcaccaatatagctccagtggattgccgccagatccg

SEQ ID NO: 768511 - DNA, 75 bp, synthetic construct
  source 1..75: mol_type = other DNA
ttctcgatatcgttttgaaccacagcgccgaactggatctcgaaggccccgtcttctcgctgcgcggaattgata

SEQ ID NO: 768512 - DNA, 75 bp, synthetic construct
  source 1..75: mol_type = other DNA
aaacgcgatggtcgcaaacccagcgcgacggtcaatctggtgactgcgcacgacggttttacgctacgcgactgt

SEQ ID NO: 768513 - DNA, 75 bp, synthetic construct
  source 1..75: mol_type = other DNA
tgctgcacggtgggctaaatgaaccggatcatcatgataatgccaccatcgcgctgaagggcgtggtggtgtccg

SEQ ID NO: 768514 - DNA, 75 bp, synthetic construct
  source 1..75: mol_type = other DNA
atgaaacgtaaaacactgcctctgctggcactggttgccaccactctgtttctgagcgcctgcgatgacagaagt

SEQ ID NO: 768515 - DNA, 75 bp, synthetic construct
  source 1..75: mol_type = other DNA
cgccagtcgccggaaggatgtgagtcaggcaattattactacattgctgacatgcagcagaaaacggtgcagcca

SEQ ID NO: 768516 - DNA, 75 bp, synthetic construct
  source 1..75: mol_type = other DNA
ctccaggattcccggggcggttcactttggcatgaaggcccacattggtgtcgatgccaagagtggcctgaccca

SEQ ID NO: 768517 - DNA, 75 bp, synthetic construct
  source 1..75: mol_type = other DNA
aaagccagtccgggcaatctgccgttgatagccagcatctacttgccgaatttaatgcttttaacggcgagtggt

SEQ ID NO: 768518 - DNA, 75 bp, synthetic construct
  source 1..75: mol_type = other DNA
aaaacgcaatttactaaatcgctggtgacacaattaatatgtaaccaatcctgtaacgttgatggtaaatcgatt

SEQ ID NO: 768519 - DNA, 75 bp, synthetic construct
  source 1..75: mol_type = other DNA
tgccgttggctgaacgctaccgggtaccagataaataccgtcttaagccagagagtgatgagcacccatctccat

SEQ ID NO: 768520 - DNA, 75 bp, synthetic construct
  source 1..75: mol_type = other DNA
gccataagttgccgatgccggatcagtatcgccgcaccaccgccaccgtactggtggaagaaatttgcgatcccg

SEQ ID NO: 768521 - DNA, 75 bp, synthetic construct
  source 1..75: mol_type = other DNA
cttgaaatgacggcatacgaaaccatgcttcaccgcctgcgactggataaagcccgtttgagccgtgtccagtcc

SEQ ID NO: 768522 - DNA, 75 bp, synthetic construct
  source 1..75: mol_type = other DNA
aaccagtgatcattattttgaggtagcagcgcaacggcttcgggggactattaccacaaccatttcgtctccata

SEQ ID NO: 768523 - DNA, 75 bp, synthetic construct
  source 1..75: mol_type = other DNA
tgatagtcagcatttgctggctgaatttaatgcctttaacggcgaatggctgctgaaaatgctgcgctccagtga

SEQ ID NO: 768524 - DNA, 75 bp, synthetic construct
  source 1..75: mol_type = other DNA
aagaggtaaacaggatgactaaaaatacacgtttttcccccgaggtccgtcaacgggcagttcgtatggttctgg

SEQ ID NO: 768525 - DNA, 75 bp, synthetic construct
  source 1..75: mol_type = other DNA
gagttcgaccgcctctggaaaaaactaatgccgctgctggataagctgcgtgagcagtacggggtcggaccggta

SEQ ID NO: 768526 - DNA, 75 bp, synthetic construct
  source 1..75: mol_type = other DNA
atgactaaaaatacacgtttttcccccgaagtccgtcaacgggcagttcgtatggttctggaaagtcaggacgaa

SEQ ID NO: 768527 - DNA, 75 bp, synthetic construct
  source 1..75: mol_type = other DNA
gttccattgctccaaagagtggctgtacgccagagactctgcgtgtctgggttcgccagtatgagcgggataccg

SEQ ID NO: 768528 - DNA, 75 bp, synthetic construct
  source 1..75: mol_type = other DNA
gttccattgctccaaagattggctgtacgccagagactctgcgtgtctgggttcgccagaatgagcgggataccg

SEQ ID NO: 768529 - DNA, 75 bp, synthetic construct
  source 1..75: mol_type = other DNA
gggctcaccagcgctgaacgtcagcgtctgaaagagctggaacgtgaaaatcgtgaactgcgccgcagtaacgat

SEQ ID NO: 768530 - DNA, 75 bp, synthetic construct
  source 1..75: mol_type = other DNA
gaggcggtgatggagggctcaccaccgctgaacgtcagcgtctgaaagagctggagcgtgaaaatcgtgaactgc

SEQ ID NO: 768531 - DNA, 75 bp, synthetic construct
  source 1..75: mol_type = other DNA
tatgactcacagtgggcggcaatttgttccattgccccaaagattggctgtacaccggagactctgcgtgtctgg

SEQ ID NO: 768532 - DNA, 75 bp, synthetic construct
  source 1..75: mol_type = other DNA
gtgggtgtctgcggcaaagaagggcagagtttgccggttggcgtgggtcagccgacgcttaaagtcgataacctg

SEQ ID NO: 768533 - DNA, 75 bp, synthetic construct
  source 1..75: mol_type = other DNA
tacaccggagactctgcatgtctggggttgccagcatgggcgggataccggggcggtgatggtggggtcaccacc

SEQ ID NO: 768534 - DNA, 75 bp, synthetic construct
  source 1..75: mol_type = other DNA
ctggaacgtgaaaatcgtgaactgcgccgcagtaacaatatccttcgccaggcttccgcttattttgcgaaggcg

SEQ ID NO: 768535 - DNA, 75 bp, synthetic construct
  source 1..75: mol_type = other DNA
ggcagcctgacggctgcaaattgaaacccgcccctgttcgtcctgttgttgccgcacgctccgcagaatatgtat

SEQ ID NO: 768536 - DNA, 75 bp, synthetic construct
  source 1..75: mol_type = other DNA
gttccattgctccaaagagtggctgtacgcctgagactctgcgtgtctgggttcgccagaatgagcgggataccg

SEQ ID NO: 768537 - DNA, 75 bp, synthetic construct
  source 1..75: mol_type = other DNA
ggagaagatgaccagtttgtacgaattgattgacggtgtcactgtgattgaactggctggttacccgccagaagt

SEQ ID NO: 768538 - DNA, 75 bp, synthetic construct
  source 1..75: mol_type = other DNA
ggaaaagatgaccagcttgtacgaattgattgaaggcgtcaccgtgatcgaactagctggttacccgccagaagt

SEQ ID NO: 768539 - DNA, 75 bp, synthetic construct
  source 1..75: mol_type = other DNA
ttgacagcaacaaactggctcccttgctcgagcgacgcgaatggtggttaacgggcgactatcagttaggcgagt

SEQ ID NO: 768540 - DNA, 75 bp, synthetic construct
  source 1..75: mol_type = other DNA
ctggtaaaagacaaactcaatgagttcacggacgcttacgcccgattgttccagagcactgaaaacagtgcattg

SEQ ID NO: 768541 - DNA, 75 bp, synthetic construct
  source 1..75: mol_type = other DNA
tacattgttactacgtttgaacagtcactccagcaaatcggcctgagtagagcgctaacagcgcaggaaaaacgt

SEQ ID NO: 768542 - DNA, 75 bp, synthetic construct
  source 1..75: mol_type = other DNA
tcatttaacgtcgaggggccgggagcagaagaagggttaacgctgccgttgctttttgaccaaagtcgtttcaat

SEQ ID NO: 768543 - DNA, 75 bp, synthetic construct
  source 1..75: mol_type = other DNA
atgctaaacgaacgccagttaaagattgtcgatctgctggagcaacagccgcgcacgcctggcgagctggcgcaa

SEQ ID NO: 768544 - DNA, 75 bp, synthetic construct
  source 1..75: mol_type = other DNA
attaccgggcatttattacgttgccttgccgcaccggtgtggattgctgagcaccgccaaagcagcatgaataac

SEQ ID NO: 768545 - DNA, 75 bp, synthetic construct
  source 1..75: mol_type = other DNA
agggtgattatctctccagcctgattctggcgatttacgccctgcgtaatcagcttactgacatatggccgcaat

SEQ ID NO: 768546 - DNA, 75 bp, synthetic construct
  source 1..75: mol_type = other DNA
tatgactcacaatgggcgacaatttgttccattgctccaaagactggctgtacaccggagactctgcgtgtctgg

SEQ ID NO: 768547 - DNA, 75 bp, synthetic construct
  source 1..75: mol_type = other DNA
cgttatcttgctggcgaacttgctacgcaaagatccgtttttaattccgctggcgggcgtaacacgagacaacct

SEQ ID NO: 768548 - DNA, 75 bp, synthetic construct
  source 1..75: mol_type = other DNA
ttttattaccctcgcccaaccggttgaggtgaataacgaagtagttaaccatgtgctgatcgcctgtgccgccgc

SEQ ID NO: 768549 - DNA, 75 bp, synthetic construct
  source 1..75: mol_type = other DNA
attgacgtccgtgtatctaccatgccttccgcctggggggaacgggtggtgctgcgactgctggacaaaaaccag

SEQ ID NO: 768550 - DNA, 75 bp, synthetic construct
  source 1..75: mol_type = other DNA
ccgggtgaacccatgccggaagcaaccatgaaagccattgagtacgcgaagaaatataacgtaccggtggtgctg

SEQ ID NO: 768551 - DNA, 75 bp, synthetic construct
  source 1..75: mol_type = other DNA
acaaggcgtggatggcccgattggtcgttgctttacgctgattggcgagtccggggaacgtacctttgctatcag

SEQ ID NO: 768552 - DNA, 75 bp, synthetic construct
  source 1..75: mol_type = other DNA
gtctggacaaccgcgcaatttatttcgtggctggagagtcagggagcatttaaccatccttactggatgtgcaaa

SEQ ID NO: 768553 - DNA, 75 bp, synthetic construct
  source 1..75: mol_type = other DNA
gcagggtgtggatggcccgattggtcgttgctttacgctgattggcgagtctggcgaacgtacctttgctatcag

SEQ ID NO: 768554 - DNA, 75 bp, synthetic construct
  source 1..75: mol_type = other DNA
ccaaacattacttccccgttaacgcacgtgatccgttgttgcaacagatccagcctgaaaacgaaaccagtgcct

SEQ ID NO: 768555 - DNA, 75 bp, synthetic construct
  source 1..75: mol_type = other DNA
aaacgtaaaacccagcatccgctgctgccgggcgctatagcggaattcaaccagtatgagtttagccgcgccatg

SEQ ID NO: 768556 - DNA, 75 bp, synthetic construct
  source 1..75: mol_type = other DNA
atgatgattctcatgtgccaccggaattacgtgcggggtatcgcttgttgaagaatgccggttgcttgccgccat

SEQ ID NO: 768557 - DNA, 75 bp, synthetic construct
  source 1..75: mol_type = other DNA
ctgtgccggcgttaaaagcaactttgactgcgatgccacaacgtctgatacctgtatgaccatgacgaaagccaa

SEQ ID NO: 768558 - DNA, 75 bp, synthetic construct
  source 1..75: mol_type = other DNA
ccaccctatatcattcacccgcaacagttgcagcgcctgaccgcagcggttaattgcgcggtgcaggatgaaaca

SEQ ID NO: 768559 - DNA, 75 bp, synthetic construct
  source 1..75: mol_type = other DNA
ccgtgatgaattaattgatacaacacaggcaaggccagttcagtattgcattaatggaacgtggtataacgcggg

SEQ ID NO: 768560 - DNA, 75 bp, synthetic construct
  source 1..75: mol_type = other DNA
gtggtgcatcgacattaatcctccacttcaatatgaatgcggggagttgccctgctgtacagttccgcgtgaatt

SEQ ID NO: 768561 - DNA, 75 bp, synthetic construct
  source 1..75: mol_type = other DNA
atgcctgcgtttctcggcggtctgccaggtgcagcgttagctatgtatcactgcgcgcgcccggaaaatcgccat

SEQ ID NO: 768562 - DNA, 75 bp, synthetic construct
  source 1..75: mol_type = other DNA
tgtattggtattggcggcgatccggttccgggcacaaactttattgatgcgctgcgtttattcgaaaatgatccg

SEQ ID NO: 768563 - DNA, 75 bp, synthetic construct
  source 1..75: mol_type = other DNA
gacattcaacaaggaaagaaacttgtcgctggcatggacgtcaacattgacgatgagattggcgacgacgaataa

SEQ ID NO: 768564 - DNA, 75 bp, synthetic construct
  source 1..75: mol_type = other DNA
caagtatttatgtgccgactgggagatgaacaggaggatcatactatgaatgcatttttgcgttttctggatgca

SEQ ID NO: 768565 - DNA, 75 bp, synthetic construct
  source 1..75: mol_type = other DNA
ccctgaaacagacgcgttcatccggggatgtgctgatatatggacttcactgccactgtctgctgccggatggcg

SEQ ID NO: 768566 - DNA, 75 bp, synthetic construct
  source 1..75: mol_type = other DNA
atgttgcgcgatcggcagcgtttctcccgccggttgcagggagtgaaaaaggttaaaaatcctgatgcacaacag

SEQ ID NO: 768567 - DNA, 75 bp, synthetic construct
  source 1..75: mol_type = other DNA
ctgggtgaaaggtttcgccgtcggccggaccatctttggcgaaccgtcacgccagtggttaggcggccagcttaa

SEQ ID NO: 768568 - DNA, 75 bp, synthetic construct
  source 1..75: mol_type = other DNA
ccgtatggcaaagtgctggagctgatcgatgactgtatctcctgcggtgtggatcaactgatcgatgccaatggt

SEQ ID NO: 768569 - DNA, 75 bp, synthetic construct
  source 1..75: mol_type = other DNA
atgtgtgatgtatacagcacccgcgtacatgaagtgttaatcgcagccatcaaaaatgcagatatgcaggaagcc

SEQ ID NO: 768570 - DNA, 75 bp, synthetic construct
  source 1..75: mol_type = other DNA
accataacatatatgatagctgataaagcatctttctatgattctggtataaatactctatacttgattcaaatt

SEQ ID NO: 768571 - DNA, 75 bp, synthetic construct
  source 1..75: mol_type = other DNA
aagaggtgcatctcacaccgattgagttccgcctgctggccgtgctgctcaacaacgccggaaaagtgctcaccc

SEQ ID NO: 768572 - DNA, 75 bp, synthetic construct
  source 1..75: mol_type = other DNA
cgacggtgttctcgtcagtgacctggtgggaagcggagaagaggttcgggaagcccgggatacctttctttccat

SEQ ID NO: 768573 - DNA, 75 bp, synthetic construct
  source 1..75: mol_type = other DNA
cgttcgaccgtcgccggaggaaccggtacgcagcttgccagacactttctgacgcgcggcgtacacgtcattcag

SEQ ID NO: 768574 - DNA, 75 bp, synthetic construct
  source 1..75: mol_type = other DNA
cgttcgaccgtcgcaggaggaaccggtacgcagcttgccaaacactttctgacccgcggcgtacacgtcattcag

SEQ ID NO: 768575 - DNA, 75 bp, synthetic construct
  source 1..75: mol_type = other DNA
cgcccggaacagttgcagcgcctgaccgcagcggtaaatcgcgccgtactggatgaaacatttttttgccaataa

SEQ ID NO: 768576 - DNA, 75 bp, synthetic construct
  source 1..75: mol_type = other DNA
tgagtttcgtgatgcagtcaaagccctgcataaagcgggcattgaggtcattctcgacatcgtgctcaaccacag

SEQ ID NO: 768577 - DNA, 75 bp, synthetic construct
  source 1..75: mol_type = other DNA
cctctcctctcggcgcgcattacgacggacagggcgtcaacttcacgctcttctccgctcatgccgggcgggtag

SEQ ID NO: 768578 - DNA, 75 bp, synthetic construct
  source 1..75: mol_type = other DNA
ccgctccccttggcgcgcattacgacggccatggcgtcaacttcacgctcttctccgctcatgccgagcgggtag

SEQ ID NO: 768579 - DNA, 75 bp, synthetic construct
  source 1..75: mol_type = other DNA
cgccgatgttactggcgggtgacgaacacggtcacagtcaacatggcaataacaatgcctattgccaggataacc

SEQ ID NO: 768580 - DNA, 75 bp, synthetic construct
  source 1..75: mol_type = other DNA
gcgccgaaatgcgtagtggtcgtggatcactatgactgggaagatgatgccccgccgcgcacgtcgtggggcagt

SEQ ID NO: 768581 - DNA, 75 bp, synthetic construct
  source 1..75: mol_type = other DNA
catcgaacatcggtatgatttgccaggacgaagtggtgacatctggcacggttatctgccggatgcgcgcccggg

SEQ ID NO: 768582 - DNA, 75 bp, synthetic construct
  source 1..75: mol_type = other DNA
cgcccgcattcatgttcgttttacgctgaccaatggcaacaacgaagagcaagaactggttttacagcggcgcga

SEQ ID NO: 768583 - DNA, 75 bp, synthetic construct
  source 1..75: mol_type = other DNA
aatagaacggcaatttatttacgacaatccgatctgttttggcgaagagtcgctattttcacgcgttgatgaaat

SEQ ID NO: 768584 - DNA, 75 bp, synthetic construct
  source 1..75: mol_type = other DNA
ccgattttatccgtccaggcagcggtagcttgcttaaacagattgaaacgaaaaccgccgccagattaacgcaat

SEQ ID NO: 768585 - DNA, 75 bp, synthetic construct
  source 1..75: mol_type = other DNA
gtaaatgggcttaccgggctattcgtcagggctggccggcattctcacaatggcttgatgcggtgattcagcgtg

SEQ ID NO: 768586 - DNA, 75 bp, synthetic construct
  source 1..75: mol_type = other DNA
aactaccatctgttcgaaaaggtccgtaaatgggcctacagagcgattcgtcagggctggcctgtattctcacaa

SEQ ID NO: 768587 - DNA, 75 bp, synthetic construct
  source 1..75: mol_type = other DNA
ttcggctgataacctgttgcgctggcatgatgcgcagcatttcacggtgcaagcctctacgccgcttaaagccaa

SEQ ID NO: 768588 - DNA, 75 bp, synthetic construct
  source 1..75: mol_type = other DNA
tcgcaataaacgccacgcttgaggtaacagagattgttttacctgctggggagtggcacgccattcccccattcg

SEQ ID NO: 768589 - DNA, 75 bp, synthetic construct
  source 1..75: mol_type = other DNA
attatcaaaactggtgaatggcaacagcaggtggtggctattgaagtgcagctacgcgagcaactggcacccgcc

SEQ ID NO: 768590 - DNA, 75 bp, synthetic construct
  source 1..75: mol_type = other DNA
ttttggcaaactgatttacctgatgccgccctatattattcgcccggaacagttgcagcgcctgaccgcagcgat

SEQ ID NO: 768591 - DNA, 75 bp, synthetic construct
  source 1..75: mol_type = other DNA
tcattgaaccgattgtccagggcgcaggcgggatgcgcatctaccatccggaatggttaaaacgaatccgcaaaa

SEQ ID NO: 768592 - DNA, 75 bp, synthetic construct
  source 1..75: mol_type = other DNA
cgcagcagcaaacgccagcctggcgattctcgaatctggcgactggcagcatcaggtggcggctattgaagggca

SEQ ID NO: 768593 - DNA, 75 bp, synthetic construct
  source 1..75: mol_type = other DNA
tactggcaggccaaaggcgaagcgcgccagcgttttctgaccttccgcaatggttatcatggcgatacctttggc

SEQ ID NO: 768594 - DNA, 75 bp, synthetic construct
  source 1..75: mol_type = other DNA
cgtgacgccgaaatggttgccgatgtgcgcgtgctgggggcgattggcgtggtcgaaaccactcgtccggtgaat

SEQ ID NO: 768595 - DNA, 75 bp, synthetic construct
  source 1..75: mol_type = other DNA
agcgggctgatttgcaaaaatccgttccaccgggaatggcaggtggctgaatggcgggaagatgcctacaccctc

SEQ ID NO: 768596 - DNA, 75 bp, synthetic construct
  source 1..75: mol_type = other DNA
tgagcgcctcagcgcgccgtagcatcgataaacattacggaatggggagaaactgccatctgttcgaaatgacgc

SEQ ID NO: 768597 - DNA, 75 bp, synthetic construct
  source 1..75: mol_type = other DNA
ccgcaattgaacgctcgttgtgtgagaaacttgacgcagacgcgaactacagcgggctgatttgcaaaaatccgt

SEQ ID NO: 768598 - DNA, 75 bp, synthetic construct
  source 1..75: mol_type = other DNA
atgacaacggacgatcttgcctttgaccaacgccatatctggcacccatacacatccatgacctcccctctaccg

SEQ ID NO: 768599 - DNA, 75 bp, synthetic construct
  source 1..75: mol_type = other DNA
tcacacggatgatctcgcttttggtcttcgcatctccggcaaaggacgtgcgcttcttgcgcggtacatccagca

SEQ ID NO: 768600 - DNA, 75 bp, synthetic construct
  source 1..75: mol_type = other DNA
tgagcgcctcagagcgtcgtagcatcgataaacattacgggatggggcgaaactgccacctgttcgaaatgacgc

SEQ ID NO: 768601 - DNA, 75 bp, synthetic construct
  source 1..75: mol_type = other DNA
ccactggctgatcattcaggggcaacgcagtatgcgcggcctgcgtatgaacaccctcggctggttcgattttaa

SEQ ID NO: 768602 - DNA, 75 bp, synthetic construct
  source 1..75: mol_type = other DNA
gattgccgggatcatgcagcagattctggcaagtcaccaggtcacgctgaaaatcaaagagatcagctacgatca

SEQ ID NO: 768603 - DNA, 75 bp, synthetic construct
  source 1..75: mol_type = other DNA
ctgttccattaagccccggtaaacgcctggacggactgaaccatattgcggaattacgagcaaaagtgtttggcc

SEQ ID NO: 768604 - DNA, 75 bp, synthetic construct
  source 1..75: mol_type = other DNA
agagtcacggcagagaagaaatccgtcttcatattgtttgcgatgtccctgatgaacttattgatttcatatttg

SEQ ID NO: 768605 - DNA, 75 bp, synthetic construct
  source 1..75: mol_type = other DNA
actggcaagccgacgccgcccgctggcgcaatggcgagatgaatctggcgaactggtgccagcaactggtcgcca

SEQ ID NO: 768606 - DNA, 75 bp, synthetic construct
  source 1..75: mol_type = other DNA
tgctgaaattgtatcgccgacgccctggacgctggatatccatctcacgcagccagaccgctggttgccgttact

SEQ ID NO: 768607 - DNA, 75 bp, synthetic construct
  source 1..75: mol_type = other DNA
cgggataaaacaatcaacgcgatcaccttcctgcaacaagcggtggctctccgtttatcgcgatctcgtgacaca

SEQ ID NO: 768608 - DNA, 75 bp, synthetic construct
  source 1..75: mol_type = other DNA
aggttggttacctggggctggagaaaatacataagatccctctgcactggcaggaaaaaggattaacgctggatg

SEQ ID NO: 768609 - DNA, 75 bp, synthetic construct
  source 1..75: mol_type = other DNA
agactacgcagagggtctggcaaaagcacgcgactgggtcagccatgatccgctgatcgcacaattgcggtcgga

SEQ ID NO: 768610 - DNA, 75 bp, synthetic construct
  source 1..75: mol_type = other DNA
gcaagcccgtgagcaggcagaagaatatcgaagctggggaatgccagaccaggcgaaattgtcacaagcgcaggc

SEQ ID NO: 768611 - DNA, 75 bp, synthetic construct
  source 1..75: mol_type = other DNA
attatgaaaaagaactattactcagccagtcagtgaaccatcgtgctggacagattccttcccccgttatcatgc

SEQ ID NO: 768612 - DNA, 75 bp, synthetic construct
  source 1..75: mol_type = other DNA
gacgaaatagagcaaatacctgatctggatctaaaagataaaaatgataataaaattaaagggataagtcctgag

SEQ ID NO: 768613 - DNA, 75 bp, synthetic construct
  source 1..75: mol_type = other DNA
tcggacagatcaggacggatgagaaatccaatgaaattacagctatcccagaacttcttaacatgctggatatta

SEQ ID NO: 768614 - DNA, 75 bp, synthetic construct
  source 1..75: mol_type = other DNA
tcaacgtgccgacccgccgtgaactgaccagcggtgagcgcgcgatccagcacggtctggcgattgccgccggga

SEQ ID NO: 768615 - DNA, 75 bp, synthetic construct
  source 1..75: mol_type = other DNA
acgtttgaatggaaaggtctgaagaaattatgcgtggcagtctcctttcggtcaataatagcagaacaaaagaaa

SEQ ID NO: 768616 - DNA, 75 bp, synthetic construct
  source 1..75: mol_type = other DNA
gcaagataagaagaggaaatgcagcagaattattttcagggatacggcacattgctattaatattttgacgaatg

SEQ ID NO: 768617 - DNA, 75 bp, synthetic construct
  source 1..75: mol_type = other DNA
gcccggagaaacagcggagttcctgcatcgtcgtgggcgtcttcgaaccacgtcgcctttctccgattgcagaac

SEQ ID NO: 768618 - DNA, 75 bp, synthetic construct
  source 1..75: mol_type = other DNA
gcctacctcgcctctcaggcgcgccagttggctgacagctacagtaagaatgtcattacccgcgttatcggcgag

SEQ ID NO: 768619 - DNA, 75 bp, synthetic construct
  source 1..75: mol_type = other DNA
agctacaactgccgattaatgttatcggcgtgctggcaggttgtgaaaacatgccaggcggtcgcgcctatcgtc

SEQ ID NO: 768620 - DNA, 75 bp, synthetic construct
  source 1..75: mol_type = other DNA
cttaggcctgaaggatattctcaatgcccgcgaagttttgttactggtgactggcgaaggaaagcaggatgcgac

SEQ ID NO: 768621 - DNA, 75 bp, synthetic construct
  source 1..75: mol_type = other DNA
gaagaaatccgtcttcatattgtttgcgatgtccctgatgaacttattgatttcacgtttgaatggaaaggactg

SEQ ID NO: 768622 - DNA, 75 bp, synthetic construct
  source 1..75: mol_type = other DNA
ggtgattcatgtcattagtgcgttctcaacaatgcacagtctggtcatcggacagatcaagactgatgaaaaatc

SEQ ID NO: 768623 - DNA, 75 bp, synthetic construct
  source 1..75: mol_type = other DNA
gaaagggctgaagaaattatgcgtggcagtctcctttcggtccataatagcagaacaaaagaaagagccagaaat

SEQ ID NO: 768624 - DNA, 75 bp, synthetic construct
  source 1..75: mol_type = other DNA
cctgaatggacttaatcacattgcagagttaagggcgaaagtttttggcctgaatattgagtcagagcttgagcg

SEQ ID NO: 768625 - DNA, 75 bp, synthetic construct
  source 1..75: mol_type = other DNA
accaggggcggctaaataaagcctttgaggaaaaatttccgctgaaagaattaaataatccagagcatgacagtt

SEQ ID NO: 768626 - DNA, 75 bp, synthetic construct
  source 1..75: mol_type = other DNA
ctgaaatgttgttgttccgggaattcatgcgtcgccctaaacggactaacagcctggaaacacaggggctggttc

SEQ ID NO: 768627 - DNA, 75 bp, synthetic construct
  source 1..75: mol_type = other DNA
gcactcttatgacaagagtcgtcgcaggggagcgattcatgtcattagtgcgttctcaacaatgcacagtctggt

SEQ ID NO: 768628 - DNA, 75 bp, synthetic construct
  source 1..75: mol_type = other DNA
ttgtcagcttcctcgcgatgctggtgatgctccagcttttgctgttgctggcgtatgaaagtttgtggcccgatg

SEQ ID NO: 768629 - DNA, 75 bp, synthetic construct
  source 1..75: mol_type = other DNA
gttcgccacagcaatccgaaaccactggcacgtggagaataagctgcactggcgtctggacgtggtaatgaatga

SEQ ID NO: 768630 - DNA, 75 bp, synthetic construct
  source 1..75: mol_type = other DNA
ttatcggatattctactgttgactatttgcgccgttatttcgggtgcagaaggctgggaagatatagaggatttc

SEQ ID NO: 768631 - DNA, 75 bp, synthetic construct
  source 1..75: mol_type = other DNA
atatttctattatccccgattacagacaagcctggaaagtggagcataaattatcggatattctactgttgacta

SEQ ID NO: 768632 - DNA, 75 bp, synthetic construct
  source 1..75: mol_type = other DNA
aaatccaatgagattacagccattcctgaacttcttaacatgatggatattaaaggaaaaatcatcacaactgat

SEQ ID NO: 768633 - DNA, 75 bp, synthetic construct
  source 1..75: mol_type = other DNA
atgacggtatcgagcagagcggtttacatatctggagttttggtcaactgccggaaagctacgagcagaagcgcg

SEQ ID NO: 768634 - DNA, 75 bp, synthetic construct
  source 1..75: mol_type = other DNA
ccatcttcccgggctctggcttattcaaaaaaccgccgaagtggacgatggttgccgaactggtggaaaccagtc

SEQ ID NO: 768635 - DNA, 75 bp, synthetic construct
  source 1..75: mol_type = other DNA
ggtatcctgctggcggagatccagcaagaccgcctgctgatgcagtacgacaccatcattattgacgaagcgcac

SEQ ID NO: 768636 - DNA, 75 bp, synthetic construct
  source 1..75: mol_type = other DNA
tggggatttacaggcgcagacagactggtttgcaactggtgtcgatattatcgctactgactgggaggttttttg

SEQ ID NO: 768637 - DNA, 75 bp, synthetic construct
  source 1..75: mol_type = other DNA
tggacccaaaagcgagaggaactttacgcctcattagttcgcaaaggcgtcaatatcgaaaccgcacagagcggc

SEQ ID NO: 768638 - DNA, 75 bp, synthetic construct
  source 1..75: mol_type = other DNA
gtctttccgcatggctatctgtggatgcatcgtatcgtgggccaacctggcaacgctgggtgtttaaaccgttaa

SEQ ID NO: 768639 - DNA, 75 bp, synthetic construct
  source 1..75: mol_type = other DNA
ataaagacgtcatcgcaattgatggaaaaacgctccggcactcttatgacaagagtcgccgcaggggagcgattc

SEQ ID NO: 768640 - DNA, 75 bp, synthetic construct
  source 1..75: mol_type = other DNA
atgataaagacgttattgcaattgatggaaaaacgctccggcattcttatgacaagagtcgccgcaggggagcga

SEQ ID NO: 768641 - DNA, 75 bp, synthetic construct
  source 1..75: mol_type = other DNA
atatttctattatccccaattacagacaagcctggaaaatggaacataagttatcggatattctactgttgacta

SEQ ID NO: 768642 - DNA, 75 bp, synthetic construct
  source 1..75: mol_type = other DNA
agcctttgaggaaaaatttccgctgaaagaattaaataatccagcgcatgactgttccgcaattagtgaaaagag

SEQ ID NO: 768643 - DNA, 75 bp, synthetic construct
  source 1..75: mol_type = other DNA
tgccagaccaggcgaaattgtcacaagcacaggctgaacagcttgaacaggcttatcaggctgcaaccggtggaa

SEQ ID NO: 768644 - DNA, 75 bp, synthetic construct
  source 1..75: mol_type = other DNA
cggctaaaagacaacgtcgaggtcgatcttgttattcctgcgggagtggatgacccggacctgttgcatgaacta

SEQ ID NO: 768645 - DNA, 75 bp, synthetic construct
  source 1..75: mol_type = other DNA
cctcggttattttgcagatgaccgcactgggcttgggcgatatcgccgcattcccgtttgtcgaagcaccggata

SEQ ID NO: 768646 - DNA, 75 bp, synthetic construct
  source 1..75: mol_type = other DNA
ttcgctcaacaacttggtacgccttatccgatttcggataagcgtattttgcaggcgatggagcagattagcggt

SEQ ID NO: 768647 - DNA, 75 bp, synthetic construct
  source 1..75: mol_type = other DNA
aactggaacacaaatcacgtcgccgcgatattctggtggatgacgaaacgttgtttgagttttacgaccagcgca

SEQ ID NO: 768648 - DNA, 75 bp, synthetic construct
  source 1..75: mol_type = other DNA
atcaggttgaggagaacgggtttgagtggcagatccccggcctgcgtcgtgaactgatcatcgcactgattaaat

SEQ ID NO: 768649 - DNA, 75 bp, synthetic construct
  source 1..75: mol_type = other DNA
tgattgctctaatcaaatcgttgccgaaaccggtacggcgtaattttgtacccgcgccaaactacgccgaagcgt

SEQ ID NO: 768650 - DNA, 75 bp, synthetic construct
  source 1..75: mol_type = other DNA
gaagcgtttttaggccgcgtcacaccgctggaattgccgttgctcgacagccttgaacgagagctacggcggatg

SEQ ID NO: 768651 - DNA, 75 bp, synthetic construct
  source 1..75: mol_type = other DNA
gtcgccgcgatattctggtggatgacgaaacgctgtttgagttttacgaccagcgcatcagccacgatgtgatct

SEQ ID NO: 768652 - DNA, 75 bp, synthetic construct
  source 1..75: mol_type = other DNA
acgaagttgttgaggctcataatttcatcgtttggaatatatcaagtttagataaaaaagatatattatctatct

SEQ ID NO: 768653 - DNA, 75 bp, synthetic construct
  source 1..75: mol_type = other DNA
atttaaatgaattggcacatggagatattgttaatataaaggaggatgcaatgataaaaaatgatgggcaaaatg

SEQ ID NO: 768654 - DNA, 75 bp, synthetic construct
  source 1..75: mol_type = other DNA
accgccagcgccagcttgatcaggagcgtcggcagctggaagatgaagagcggagaatggaagatgagtatgggc

SEQ ID NO: 768655 - DNA, 75 bp, synthetic construct
  source 1..75: mol_type = other DNA
tttcatcttgatccttcatcaatgcagctcggcagcaacgtgccatttccgcgccaacttactgtcacacgtgat

SEQ ID NO: 768656 - DNA, 75 bp, synthetic construct
  source 1..75: mol_type = other DNA
ataacgacttgcagcgtcaactggaagatgccggtgccagcattattgagccgcttgcagtttctactgaatatg

SEQ ID NO: 768657 - DNA, 75 bp, synthetic construct
  source 1..75: mol_type = other DNA
gataaaaaaaataggttaaccctcaaactttcaacatatgaactagaacttattttcaaagaaacactgctagtc

SEQ ID NO: 768658 - DNA, 75 bp, synthetic construct
  source 1..75: mol_type = other DNA
gtgacctccatcgtatcgcggatgccctgcaggcggtgcagaaacgtaacttctggcagttacaggctgaaatca

SEQ ID NO: 768659 - DNA, 75 bp, synthetic construct
  source 1..75: mol_type = other DNA
gtgatcttcatcgtatcgcggatgccctgcaggcggtacagaaacgtaacttctggcagttacaggctgaaatca

SEQ ID NO: 768660 - DNA, 75 bp, synthetic construct
  source 1..75: mol_type = other DNA
gtgaactacatcgtatcgcggatgccctgcaggcggtccagaaacgtaacttctggcagttacaggctgaaatca

SEQ ID NO: 768661 - DNA, 75 bp, synthetic construct
  source 1..75: mol_type = other DNA
ttttcaccctgctcacgctgaccaccgttccggctcaggccgatattatcgacgacacgattggtaatattcagc

SEQ ID NO: 768662 - DNA, 75 bp, synthetic construct
  source 1..75: mol_type = other DNA
gagagtggggacatttcaaagactcgagatggttataagcccactggaaaagcaattaatacgttaaatcacttc

SEQ ID NO: 768663 - DNA, 75 bp, synthetic construct
  source 1..75: mol_type = other DNA
gtgagcttcatcgtatcgcggatgccctgcaggcggttcagaaacgtaacttctggcagttacaggctgaaatca

SEQ ID NO: 768664 - DNA, 75 bp, synthetic construct
  source 1..75: mol_type = other DNA
ggcgatattatgatcctccgcacgccgattatttctgaaagttactcccccgacgaatcgcccagtagcgatgcc

SEQ ID NO: 768665 - DNA, 75 bp, synthetic construct
  source 1..75: mol_type = other DNA
caacattctcgattttgaactcagtcctgaagatatgctgcaaattaccgccctggataccgcaaccagtgcgtt

SEQ ID NO: 768666 - DNA, 75 bp, synthetic construct
  source 1..75: mol_type = other DNA
ggttaatgaaatgggcggcgatatctcgttccatagccagccgaatcgtggctccacattctggttccacattaa

SEQ ID NO: 768667 - DNA, 75 bp, synthetic construct
  source 1..75: mol_type = other DNA
agaagatctggagccggagctactggaactgttagacgagatggataatgtggcgcgcgaagccagcaaaattct

SEQ ID NO: 768668 - DNA, 75 bp, synthetic construct
  source 1..75: mol_type = other DNA
atggctttatcatccaaagaaaagaaagagttacaacaacgcttcgaaaagcaattactacctgaccttgatctg

SEQ ID NO: 768669 - DNA, 75 bp, synthetic construct
  source 1..75: mol_type = other DNA
ctctttatgcgggaaatgttcgagttttggctatatgtattctcgctcgttatttgtctggtttgtggttggtgg

SEQ ID NO: 768670 - DNA, 75 bp, synthetic construct
  source 1..75: mol_type = other DNA
ccctggataccgcaaccagcgcgttcttctctcaccgcgatcccgcaatggtggaatggctgactggccgcaaac

SEQ ID NO: 768671 - DNA, 75 bp, synthetic construct
  source 1..75: mol_type = other DNA
tcgatttcctgcctgaagttcgcaacaaagttgaggaacaactggttggagaaaacccggaaggcctggttgatt

SEQ ID NO: 768672 - DNA, 75 bp, synthetic construct
  source 1..75: mol_type = other DNA
gttaccctgctggcacattcttctcacgataaagggctggaactgacgctcaatattaaaagcgacgtgcccgat

SEQ ID NO: 768673 - DNA, 75 bp, synthetic construct
  source 1..75: mol_type = other DNA
caagatggtatcggcgcgtgtctgctgaaacccctgacgcctacacgtttgttgcctgtactgacggaattttgt

SEQ ID NO: 768674 - DNA, 75 bp, synthetic construct
  source 1..75: mol_type = other DNA
tgatgctggcgcttccttgtcatgcacaggtcaatgccgaaaaactcaagcaagatggtatcggcgcgtgtctac

SEQ ID NO: 768675 - DNA, 75 bp, synthetic construct
  source 1..75: mol_type = other DNA
caagcggtgtcaatgaccgatttcctgatgctggcgcttccttgtcatgcacaggtcaatgccgaaaaactcaag

SEQ ID NO: 768676 - DNA, 75 bp, synthetic construct
  source 1..75: mol_type = other DNA
cgccgctggaagtggtttatagcccaacgttctccgcgctgccccccgcgcattacgacatgatgttgttaggga

SEQ ID NO: 768677 - DNA, 75 bp, synthetic construct
  source 1..75: mol_type = other DNA
gaaacaagtagtggattcaggctaacaggaaaggcactgaacacaatatctacattcaataaagatgaggtgcgg

SEQ ID NO: 768678 - DNA, 75 bp, synthetic construct
  source 1..75: mol_type = other DNA
tgctaagggcggctggcacggcctgggcaacacccgcttcaaatcatcggttaaccgtactccccggcagaaaac

SEQ ID NO: 768679 - DNA, 75 bp, synthetic construct
  source 1..75: mol_type = other DNA
gaaaagtatattccgaaaggcggcccggatggcggcgacggcggtgatggtggtgacgtatggatggaagccgac

SEQ ID NO: 768680 - DNA, 75 bp, synthetic construct
  source 1..75: mol_type = other DNA
tgggagcgatggggccgccttcgcaacgtcaggttgttgctctgggccgtcaacggctggctgtgtgtgtcacga

SEQ ID NO: 768681 - DNA, 75 bp, synthetic construct
  source 1..75: mol_type = other DNA
gaaaagtatattccgaaaggcggcccggatggcggcgacggcggtgacggcggtgacgtatggatggaagccgac

SEQ ID NO: 768682 - DNA, 75 bp, synthetic construct
  source 1..75: mol_type = other DNA
gaaagtcgaattcatgtgggatgattatcatcgccagcagcttgaagagattgctgaagaggatgatgaggactg

SEQ ID NO: 768683 - DNA, 75 bp, synthetic construct
  source 1..75: mol_type = other DNA
atcgttttgaaaaatctttccgtgcagagcgcggtcagaatggcgcaagccgcgactgtaccggtaagcgcggta

SEQ ID NO: 768684 - DNA, 75 bp, synthetic construct
  source 1..75: mol_type = other DNA
caacgtcgtcgcctgacgctgcacgatattgaactggagctgcaaaaagaggcgaaaaagaagacgccgcagatc

SEQ ID NO: 768685 - DNA, 75 bp, synthetic construct
  source 1..75: mol_type = other DNA
cgaccggttccggcaaaagcaccacgctgtacgccggattgcaggagctgaacaaccactcgcgtaacattctca

SEQ ID NO: 768686 - DNA, 75 bp, synthetic construct
  source 1..75: mol_type = other DNA
tccagtctgacgggcgtgatggcgcagcgactggttcgcacgctgtgtcccgactgccgccagcccgcaccagcc

SEQ ID NO: 768687 - DNA, 75 bp, synthetic construct
  source 1..75: mol_type = other DNA
gattgaagggatcggtcagacgcaggttaacacccgcgtcggcatggcctgcgcgcgattttgcgtcaggacccg

SEQ ID NO: 768688 - DNA, 75 bp, synthetic construct
  source 1..75: mol_type = other DNA
cgattgccgccagtccgcgcctgccaccgacgaagaaaaacgcctgctggggattaccgatgcgcgaaccgtcac

SEQ ID NO: 768689 - DNA, 75 bp, synthetic construct
  source 1..75: mol_type = other DNA
tccacattgagacgtttgaaaagagtctggtgatccgttttcgtggtgacggcacattacatgaaatgctgcgtc

SEQ ID NO: 768690 - DNA, 75 bp, synthetic construct
  source 1..75: mol_type = other DNA
agcagcttgaagagattgctgaagaggatgatgaagactgggatgacgactgggacgaagacgacgaagaaggcg

SEQ ID NO: 768691 - DNA, 75 bp, synthetic construct
  source 1..75: mol_type = other DNA
ctggcagccagcgacaccccggaaaatcagggaatatgcccctcaggaccgtgagcttcatcgtatcgcggatgc

SEQ ID NO: 768692 - DNA, 75 bp, synthetic construct
  source 1..75: mol_type = other DNA
gggaatgcaacctaaatcgattgccagaattgaaaattgtagtgtgaagacagtgtatacccatcgacgtaatgc

SEQ ID NO: 768693 - DNA, 75 bp, synthetic construct
  source 1..75: mol_type = other DNA
ttgattgcggccagaaagtcagaagccttagcaaattattggtattacaacagcaatattaggggcgtggtatac

SEQ ID NO: 768694 - DNA, 75 bp, synthetic construct
  source 1..75: mol_type = other DNA
cgggagtatgccccgcaggaccgtgagcttcatcgtatcgcggatgccctgcaggcggtacagaagcgtaacttc

SEQ ID NO: 768695 - DNA, 75 bp, synthetic construct
  source 1..75: mol_type = other DNA
acgagtacgactggctgacctcagatgccgctgtggatgaggctctgctcatcaacgaatacacctttaccgaag

SEQ ID NO: 768696 - DNA, 75 bp, synthetic construct
  source 1..75: mol_type = other DNA
cgactggctgacctcagatgccgctgtggatgaggccctgctcatcaacgaatacacctttaccgaagccggtct

SEQ ID NO: 768697 - DNA, 75 bp, synthetic construct
  source 1..75: mol_type = other DNA
atgagccgaattatcaccaccacagtgtatacgctggatgaactttcctgcccttctgcacgggaaaaagcccgc

SEQ ID NO: 768698 - DNA, 75 bp, synthetic construct
  source 1..75: mol_type = other DNA
aaaatacagccaggatctggcggcgaaaccacgttggttagtcttcaacaagatcgacctgctggataaggcaga

SEQ ID NO: 768699 - DNA, 75 bp, synthetic construct
  source 1..75: mol_type = other DNA
tcgttgttgccgatattccaggactgattgaaggcgctgcggaaggtgcaggtctgggcattcgcttcctgaagc

SEQ ID NO: 768700 - DNA, 75 bp, synthetic construct
  source 1..75: mol_type = other DNA
tggccgctatagcttcgttgcaaaaagaacagccggaagcctttgttgccgaactctttgaacatattgctgatt

SEQ ID NO: 768701 - DNA, 75 bp, synthetic construct
  source 1..75: mol_type = other DNA
atgcagctcaacattaccggaaataacgtcgagatcaccgaggcactgcgcgaatttgttacagccaaatttgcc

SEQ ID NO: 768702 - DNA, 75 bp, synthetic construct
  source 1..75: mol_type = other DNA
tgacagccgatgcggaagccgctgtcagcgaagccctgcgcgacctggccttctggttgtaccgtcagctggaaa

SEQ ID NO: 768703 - DNA, 75 bp, synthetic construct
  source 1..75: mol_type = other DNA
agaagggttttccgctgtacaggccgcacgcggtcgcaagggggggatcgctaaaggcgaagcctacgaggacaa

SEQ ID NO: 768704 - DNA, 75 bp, synthetic construct
  source 1..75: mol_type = other DNA
atcaacctttgcttgaatatttcagcgcagcagagatcagcgacctgacttttgccatcggactgatgaattgct

SEQ ID NO: 768705 - DNA, 75 bp, synthetic construct
  source 1..75: mol_type = other DNA
atcagcctttgcttgagcatttcagcgcagcagaaatcagcgacttaacgtttgccatcgggctgatgaattgtt

SEQ ID NO: 768706 - DNA, 75 bp, synthetic construct
  source 1..75: mol_type = other DNA
tccggtgagaaccgcgccggatgcatcggcttcggcgctcaaatacgctgccgcgattgaacgttcgctgtgtga

SEQ ID NO: 768707 - DNA, 75 bp, synthetic construct
  source 1..75: mol_type = other DNA
cgcttcttgctcggtacatccagcagaaccagcctcatgcgcagttctggctggtttttgacgttgaccgcgagg

SEQ ID NO: 768708 - DNA, 75 bp, synthetic construct
  source 1..75: mol_type = other DNA
gagaatggatattctcagaaagctattgcggcgatgctgaatgtacatcgtaatacgatccgtaattgggcaatg

SEQ ID NO: 768709 - DNA, 75 bp, synthetic construct
  source 1..75: mol_type = other DNA
ttgtgcattgtgggatctggcggcgcgaaaacagcagcaatcgctggctgatttgatcggcataacgcttcccgg

SEQ ID NO: 768710 - DNA, 75 bp, synthetic construct
  source 1..75: mol_type = other DNA
gcaattggtaagacccgcagtatcgagcgtatcaacaaagcgctggattttattgctgaacgcgaaaatcagcag

SEQ ID NO: 768711 - DNA, 75 bp, synthetic construct
  source 1..75: mol_type = other DNA
acgggagggctgaccgaagccctggcattggcgaccgaagcgcgtgcacaaggttttagtctgatgctgggctgc

SEQ ID NO: 768712 - DNA, 75 bp, synthetic construct
  source 1..75: mol_type = other DNA
gcgattatgaaccaaacccgtactattcgtttgccgattcacatcgtaaaggagctgaacgtttacctgcgtacc

SEQ ID NO: 768713 - DNA, 75 bp, synthetic construct
  source 1..75: mol_type = other DNA
tgacctccagcagtgaagaagtggaagaatatatcaacagaaatgattttacagacaaacagaaactggagattt

SEQ ID NO: 768714 - DNA, 75 bp, synthetic construct
  source 1..75: mol_type = other DNA
ttgtgcattgtgggatctcgcggcgcgaaaacagcaggaatcgctggctgatttgatcggcataacgcttcccgg

SEQ ID NO: 768715 - DNA, 75 bp, synthetic construct
  source 1..75: mol_type = other DNA
ggtaaagcaaaaggcgcaaccggtcgtccggtagcgttgctggcacagttcctgctgaatcgcgccggttttaac

SEQ ID NO: 768716 - DNA, 75 bp, synthetic construct
  source 1..75: mol_type = other DNA
gcatcgcttcctgttccgctttcaccagctgaatgccgggctattggcaggagtattgcgaaatacacgcacagg

SEQ ID NO: 768717 - DNA, 75 bp, synthetic construct
  source 1..75: mol_type = other DNA
ccaagagaggccggaaaggtggtatcgctaaaggcgaagcctacgatgacaagcgtttcatggcgctatgtatgc

SEQ ID NO: 768718 - DNA, 75 bp, synthetic construct
  source 1..75: mol_type = other DNA
tcacacggatgatctcgcttttggccttcgtatctccggcaaagggcgcgcgcttcttgcacggtatatccagca

SEQ ID NO: 768719 - DNA, 75 bp, synthetic construct
  source 1..75: mol_type = other DNA
tggcttgatgccgtgattcagcgagtcgaaatgtacaacgcatcgcttcccgttccgctttcacctcctgaatgt

SEQ ID NO: 768720 - DNA, 75 bp, synthetic construct
  source 1..75: mol_type = other DNA
gaacgcccccgcgccgaacatcaccgtaaaaaatcctgtgaacggtcatgctcacctgctctacgcactcaatat

SEQ ID NO: 768721 - DNA, 75 bp, synthetic construct
  source 1..75: mol_type = other DNA
atgagcgccgtacttcaactcttcagggaaaaattaccgcacaaaccgtactgtacgaacgatttcacgtacggc

SEQ ID NO: 768722 - DNA, 75 bp, synthetic construct
  source 1..75: mol_type = other DNA
agcacttataaaagtcgcttgatggaaaaattagaatgcaaatcactgatggatctttacacattcgcacaacgt

SEQ ID NO: 768723 - DNA, 75 bp, synthetic construct
  source 1..75: mol_type = other DNA
tcattgcggctattgaagctgcaaaaaatggctactgctatttccccttctctctcaaccggtttgttggaagtt

SEQ ID NO: 768724 - DNA, 75 bp, synthetic construct
  source 1..75: mol_type = other DNA
tcaacgtgccgacccgccgtgagctgaccagcggtgaacgcgcgatccagcacggtctggcgattgccgccggga

SEQ ID NO: 768725 - DNA, 75 bp, synthetic construct
  source 1..75: mol_type = other DNA
gggcatcaatcgactggagcgaccggaattgtccggccccgaacatcaccgtaaaaaatccccgtaacgggcacg

SEQ ID NO: 768726 - DNA, 75 bp, synthetic construct
  source 1..75: mol_type = other DNA
cgtgattcagcgtgtcgaaatgtacaacgcatcgcttcccgttccgctttctccgcctgaatgtcgggctattgg

SEQ ID NO: 768727 - DNA, 75 bp, synthetic construct
  source 1..75: mol_type = other DNA
cttcgtatctccggcaaagggcgtgcgctgcttgcgcggtacattcagcagaaccagccacatgcgcaacactgg

SEQ ID NO: 768728 - DNA, 75 bp, synthetic construct
  source 1..75: mol_type = other DNA
ctggctcactaaagaacaggcaattgagcgactggcgacgcaaactgaacggcggaccgatttaccctttctcaa

SEQ ID NO: 768729 - DNA, 75 bp, synthetic construct
  source 1..75: mol_type = other DNA
cagtggcggcgttatttaagtgaaaatgcccataaagcaggtgccgatattaacgtgctggaacacgcgctcaaa

SEQ ID NO: 768730 - DNA, 75 bp, synthetic construct
  source 1..75: mol_type = other DNA
gcgtatcagaatccaggcattctggcggcggtagaccgagagatctttggttcttcggataccgatgccgatccg

SEQ ID NO: 768731 - DNA, 75 bp, synthetic construct
  source 1..75: mol_type = other DNA
atgcacgataatcctgaaacacagaaaactaatcaaaccagcgtgatgcctgagaaaactggcgcttactggagt

SEQ ID NO: 768732 - DNA, 75 bp, synthetic construct
  source 1..75: mol_type = other DNA
cgggatattctggctaaaacaagcaaacaggaggttattcgttatcttggtttgggagatacaagcggatacgtg

SEQ ID NO: 768733 - DNA, 75 bp, synthetic construct
  source 1..75: mol_type = other DNA
cctgtcactatcggcgcaggtggggccggcggcgttagtgcgacgaacggcctcaagggcggtgatagctcgttc

SEQ ID NO: 768734 - DNA, 75 bp, synthetic construct
  source 1..75: mol_type = other DNA
atgctgtattcaatggcactatcactggcgacgactcttcaagtgtgcaattagatcggcgcggcaaatggaaca

SEQ ID NO: 768735 - DNA, 75 bp, synthetic construct
  source 1..75: mol_type = other DNA
tggacaactggcaggacggcgagccacaaagtaagtcgcttttctttattctcgacactgaaaaagccagttctg

SEQ ID NO: 768736 - DNA, 75 bp, synthetic construct
  source 1..75: mol_type = other DNA
cattagaggtattacaagtaaaaggtgaggaaaagcgccctctttggcaggtatatcaagattgcttaggttatt

SEQ ID NO: 768737 - DNA, 75 bp, synthetic construct
  source 1..75: mol_type = other DNA
gttttatgaacgcatgggaaatgtggagagaatgagtgacagtggagacgccgtatatgtccgtaaaacagtatg

SEQ ID NO: 768738 - DNA, 75 bp, synthetic construct
  source 1..75: mol_type = other DNA
ggtcggtttagcgttgcaccaatgctcgactggacggacagacattgccgctatttcttgcgtctgctttcccgc

SEQ ID NO: 768739 - DNA, 75 bp, synthetic construct
  source 1..75: mol_type = other DNA
gcccaggccgatattatcgacgacaccattggcaatattcagcaggcgattaacgacgcttataaccctgaccgt

SEQ ID NO: 768740 - DNA, 75 bp, synthetic construct
  source 1..75: mol_type = other DNA
cggggtatttgttaacaaacttggcgcggtattaagtgaagttgcctttggcgtaaacagcacaaacaaaaaagg

SEQ ID NO: 768741 - DNA, 75 bp, synthetic construct
  source 1..75: mol_type = other DNA
acgacaacatgacgccggacgattttaatattctgctggcatcacgcaacgtcctgaaggtaaagcggaacggcg

SEQ ID NO: 768742 - DNA, 75 bp, synthetic construct
  source 1..75: mol_type = other DNA
cccttcttcgacgggccctgctgacaacgccatcgcaaccatcattcatgctcacggcaatgccggaaatatgtc

SEQ ID NO: 768743 - DNA, 75 bp, synthetic construct
  source 1..75: mol_type = other DNA
ctgccatcctgctgtttctggtagtggcggtggatttcaccggacgcctgatgtcagtgcttgccgatggcgtgc

SEQ ID NO: 768744 - DNA, 75 bp, synthetic construct
  source 1..75: mol_type = other DNA
ccccggaagttgtggaagacacggttgcactgaaactggaggctgcaggccactggcgcagagcttccgcccgct

SEQ ID NO: 768745 - DNA, 75 bp, synthetic construct
  source 1..75: mol_type = other DNA
ctggtttactgaagaacaggcgattgagcgactggcgacgcaaactgaacagcgaaccgatttaccttttcttaa

SEQ ID NO: 768746 - DNA, 75 bp, synthetic construct
  source 1..75: mol_type = other DNA
cctcttatgcgaccatcgccaaccagatgatccccggcagtggctacttacttgatgagagttacagcggcgaaa

SEQ ID NO: 768747 - DNA, 75 bp, synthetic construct
  source 1..75: mol_type = other DNA
ttctcaaaattctgtttatcctctttgttgttgccttctgtatttatttagtaccacgcgtagccatcaacttct

SEQ ID NO: 768748 - DNA, 75 bp, synthetic construct
  source 1..75: mol_type = other DNA
gagttaagggcgaaagtatttggcttgaatattgagtcagagcttgaacggtttattaaagatatgcgtgatcca

SEQ ID NO: 768749 - DNA, 75 bp, synthetic construct
  source 1..75: mol_type = other DNA
atgccaatcataaagaactgcttatcattaattagtaatgcattaagaaacgaaaaaacatcatatcccctaata

SEQ ID NO: 768750 - DNA, 75 bp, synthetic construct
  source 1..75: mol_type = other DNA
gcaggatatgaccttcgccgggggcgagccgggtgtggccatcaccattaccggtacgtattacatcaactctga

SEQ ID NO: 768751 - DNA, 75 bp, synthetic construct
  source 1..75: mol_type = other DNA
caaccgctggagtgcgtttttctcgcggactccggttccgtagcggtggaagtggcgatgaaaatggcgttgcag

SEQ ID NO: 768752 - DNA, 75 bp, synthetic construct
  source 1..75: mol_type = other DNA
acaatcacccgcagcttaatgcggcgatgaagtcgcaaattgatgctatgtcgcatgtgatgtttggcggtatca

SEQ ID NO: 768753 - DNA, 75 bp, synthetic construct
  source 1..75: mol_type = other DNA
atgttgttatcatacagaaatgcagatttaacgcaagaaaaaaacattacagaaagagttttatccatatttaaa

SEQ ID NO: 768754 - DNA, 75 bp, synthetic construct
  source 1..75: mol_type = other DNA
gggaagggagagatctccactgcctgtaaagactgccgtgggcgtggtgttgccattcatcgtgaagagtcagaa

SEQ ID NO: 768755 - DNA, 75 bp, synthetic construct
  source 1..75: mol_type = other DNA
caaatcagataacacgcgcgtcatgggaaaaaacggttaagcaattctatgacactctggtggttcggtttgaca

SEQ ID NO: 768756 - DNA, 75 bp, synthetic construct
  source 1..75: mol_type = other DNA
aggccgagcacggcccggactcacaggttattctgctgacgccggacgcgaaacttgccgaaggcgtggccgagg

SEQ ID NO: 768757 - DNA, 75 bp, synthetic construct
  source 1..75: mol_type = other DNA
gcagcgcagcgagtaaaaagcagtgcccttgttgccatggggaaaaatttattgaaagcgtagtttttacaaaca

SEQ ID NO: 768758 - DNA, 75 bp, synthetic construct
  source 1..75: mol_type = other DNA
aatggaaaaaagtcagggaggtggtaaaagttgcctgtccggagtgtggagggaagggggaggtttccaccgcct

SEQ ID NO: 768759 - DNA, 75 bp, synthetic construct
  source 1..75: mol_type = other DNA
tattgaaagcgtagtttttacaaacaaggtccagtatccggatggtaagccgccggtatgggcaaagtgtacgaa

SEQ ID NO: 768760 - DNA, 75 bp, synthetic construct
  source 1..75: mol_type = other DNA
ataaaaccgaggttggcgcgctgcgcgtgactgaggaagaaattcagcaggccgcaggccgtctgagcgacgaac

SEQ ID NO: 768761 - DNA, 75 bp, synthetic construct
  source 1..75: mol_type = other DNA
aaaacgcacgatgtgctgaccggaagtgatgacggtcgccacagcaacacgtctctggcgtggggagctggcgtg

SEQ ID NO: 768762 - DNA, 75 bp, synthetic construct
  source 1..75: mol_type = other DNA
taactgacaacaaggggaaaatgcacgacgtgctgaccggaagtgatgacggtcgccacagcaatacctctctgg

SEQ ID NO: 768763 - DNA, 75 bp, synthetic construct
  source 1..75: mol_type = other DNA
ccgaaggtggataaaatcttcgggccaggcaatgcgtacgtcaccgaagcgaaacgccaggttagccagcgtctc

SEQ ID NO: 768764 - DNA, 75 bp, synthetic construct
  source 1..75: mol_type = other DNA
tgtgctcgccgccgccgattgccgatgagattctgtatgcggcgcagctgtgcggcgtcaaagaggtatttaacg

SEQ ID NO: 768765 - DNA, 75 bp, synthetic construct
  source 1..75: mol_type = other DNA
gcgcagattctgccgccggtggatatcgaaactcaaccgggcgtacgctgccagcaggtcacccgccctatcgcc

SEQ ID NO: 768766 - DNA, 75 bp, synthetic construct
  source 1..75: mol_type = other DNA
gcgttcctggggaaaatgggtattagtatgaatgacagggcgcgggcaacagaattactggcagattatgcatta

SEQ ID NO: 768767 - DNA, 75 bp, synthetic construct
  source 1..75: mol_type = other DNA
ctgaagttaaaactgctgttgtaagtaaaaacaaacacccatggctggcagatgatgcagccattccggtaaccg

SEQ ID NO: 768768 - DNA, 75 bp, synthetic construct
  source 1..75: mol_type = other DNA
aatacttaagcaaagcctgtcaaaaacattccgctgcggctattgccgcttatgcaactttgctggcaatacatg

SEQ ID NO: 768769 - DNA, 75 bp, synthetic construct
  source 1..75: mol_type = other DNA
atgactattgctgaacggctacggcaggaaggacatcaaattggttggcaggaagataaattagaaggtttgcat

SEQ ID NO: 768770 - DNA, 75 bp, synthetic construct
  source 1..75: mol_type = other DNA
gcccttgccgatgcgggattcccccaggccgtgatcccgccgcacgagcgtccgtttattccggtgctgcgtcag

SEQ ID NO: 768771 - DNA, 75 bp, synthetic construct
  source 1..75: mol_type = other DNA
gaccaaaacgttccggcgatcacctggttaagtatgatggtaagcgatgatgttgccctggccatccaggaaaaa

SEQ ID NO: 768772 - DNA, 75 bp, synthetic construct
  source 1..75: mol_type = other DNA
catggcgaagctggcggcgctggtgcccaaacctagagtgaacctgacccgcttccacggcgtgttcgcccccaa

SEQ ID NO: 768773 - DNA, 75 bp, synthetic construct
  source 1..75: mol_type = other DNA
atgatcaagatgctttattgatcgtcaaaaaagagggctattctaatctggtggtcaaatgttcgtgtgctggca

SEQ ID NO: 768774 - DNA, 75 bp, synthetic construct
  source 1..75: mol_type = other DNA
gtgagcagcttgctgcgtatgagagcagtctggcggacagtaatgccagtgcccgggcatctgacgaagcgcagt

SEQ ID NO: 768775 - DNA, 75 bp, synthetic construct
  source 1..75: mol_type = other DNA
tcgtatgcttttgaggattatgcccgcagcgcagcgagtaaaaagcagtgcccctgttgccgaggggaaaaattt

SEQ ID NO: 768776 - DNA, 75 bp, synthetic construct
  source 1..75: mol_type = other DNA
actattctccaaaatcgccaggcttgactgatgcgcccatctcgacgtcaaaagatgcgctgagtatcactgatg

SEQ ID NO: 768777 - DNA, 75 bp, synthetic construct
  source 1..75: mol_type = other DNA
aaaaatttattgaaagcgaggtttttacaaacaagatccagtatccggatggtaagccgccagtgtgggcaaagt

SEQ ID NO: 768778 - DNA, 75 bp, synthetic construct
  source 1..75: mol_type = other DNA
actgccagcgttgtggtggtcgtggctatgaaagattaccttcaacggaggcatttaatgccatatgtaatgtaa

SEQ ID NO: 768779 - DNA, 75 bp, synthetic construct
  source 1..75: mol_type = other DNA
gctgatcggaagtgatgacggtcgccacagcaacacgtctctggcgtggggggctggcgtgcagtttaacccgac

SEQ ID NO: 768780 - DNA, 75 bp, synthetic construct
  source 1..75: mol_type = other DNA
ccgcgtaactgacaacaaggggaaaacgcacgacgtgctgaccggaagtgatgacggtcgccacagcaacacgtc

SEQ ID NO: 768781 - DNA, 75 bp, synthetic construct
  source 1..75: mol_type = other DNA
aatcgccagctgacccattacagcgatacccgctggcatgaagattccgtgcgtaaccgctggttcagcgtaatg

SEQ ID NO: 768782 - DNA, 75 bp, synthetic construct
  source 1..75: mol_type = other DNA
acacactggggctggtgacgtcattcagctatgcaggagacaagaatcgccagcttacccgttacagcgataccc

SEQ ID NO: 768783 - DNA, 75 bp, synthetic construct
  source 1..75: mol_type = other DNA
gtcgttcagctatgcaggagacaggaatcgccagcttacccgttacagcgatacccgctggcatgaagattccgt

SEQ ID NO: 768784 - DNA, 75 bp, synthetic construct
  source 1..75: mol_type = other DNA
agtccgtggccattgatattgcttatgaaggctccggcagtggtgactggcgcactgacgggttcatcgtgggtg

SEQ ID NO: 768785 - DNA, 75 bp, synthetic construct
  source 1..75: mol_type = other DNA
acaaggggaaaacgcacgatgtgctgaccggaagtgatgacggtcgccacagcaacacgtctctggcgtgggggg

SEQ ID NO: 768786 - DNA, 75 bp, synthetic construct
  source 1..75: mol_type = other DNA
tacccgcaatcgctcatagccttaatcgttctcctctcgcgatgcaatcagccatcatcagttatacgctgacgg

SEQ ID NO: 768787 - DNA, 75 bp, synthetic construct
  source 1..75: mol_type = other DNA
cgccgataacgtccacaagctgaaagaagcctgggtgttccgtactggcgatgtgaagcagccgaacgatccggg

SEQ ID NO: 768788 - DNA, 75 bp, synthetic construct
  source 1..75: mol_type = other DNA
gcagtatgtggtgatctccgcaggcggtcacggttcatttggtacgaagatgggcgactatattgtggcttatgc

SEQ ID NO: 768789 - DNA, 75 bp, synthetic construct
  source 1..75: mol_type = other DNA
gggcgtggcttacagccgtgtgtcgactttttccggggattatctccgcgtaactgacaacaggggaaaacgcat

SEQ ID NO: 768790 - DNA, 75 bp, synthetic construct
  source 1..75: mol_type = other DNA
cggatgataatgccagcagtggtaacagcgttctggcggtcacacaacaactgtcgatcagtttaggcgttgctg

SEQ ID NO: 768791 - DNA, 75 bp, synthetic construct
  source 1..75: mol_type = other DNA
cggtaattgtcaccagcatcgggttactgcttctctatattctccatgcacgacgcacgccaaacccattaattt

SEQ ID NO: 768792 - DNA, 75 bp, synthetic construct
  source 1..75: mol_type = other DNA
cgaatccgtggccattgatattgcttatgaaggctccggcagcggtgactggcgtaccaacagtttcatcgttgg

SEQ ID NO: 768793 - DNA, 75 bp, synthetic construct
  source 1..75: mol_type = other DNA
cattgatgtcgcttatgaaggttccggcagtggcgactggcgcactgacggtttcatcgtgggtgtcggttataa

SEQ ID NO: 768794 - DNA, 75 bp, synthetic construct
  source 1..75: mol_type = other DNA
acgtctctggcgtggggagctggcgtgcagtttaacccgaccgaatccgtggccattgatattgcttatgaaggt

SEQ ID NO: 768795 - DNA, 75 bp, synthetic construct
  source 1..75: mol_type = other DNA
cgaatccgtggccattgaccttgcttatgaaggttccggcagtggtgactggcgcactgacggtttcatcgtggg

SEQ ID NO: 768796 - DNA, 75 bp, synthetic construct
  source 1..75: mol_type = other DNA
ccgaatccgtggccattgatattgcttatgaagggtccggaagtggtgactggcgcactgacggtttcatcgtgg

SEQ ID NO: 768797 - DNA, 75 bp, synthetic construct
  source 1..75: mol_type = other DNA
ccgaattcgtggccattgatattgcttatgaagggtccggaagtggcgactggcgcactgacggtttcatcgtgg

SEQ ID NO: 768798 - DNA, 75 bp, synthetic construct
  source 1..75: mol_type = other DNA
ccgaatacgtggccattgatattgcttatgaagggtccggtagtggagactggcgcactgacggtttcatcgtgg

SEQ ID NO: 768799 - DNA, 75 bp, synthetic construct
  source 1..75: mol_type = other DNA
gcgtaaccgctggttcagcgtgatggcggggctgtctgtgcgcgtgaatgaatggttcagcgcgtatgcgatggc

SEQ ID NO: 768800 - DNA, 75 bp, synthetic construct
  source 1..75: mol_type = other DNA
gtccttcagttatgccaatgctgaggatgagccaaaaacgcgctacagcgatacccgctggcatgaagattccgt

SEQ ID NO: 768801 - DNA, 75 bp, synthetic construct
  source 1..75: mol_type = other DNA
ccatctgtgcgcgtgaatgaatggttcagcgcgtatgcgatcgcgggtgtgacttacagccgtgtgtcgactttt

SEQ ID NO: 768802 - DNA, 75 bp, synthetic construct
  source 1..75: mol_type = other DNA
gggctggcgtgcagtttaacccgaccgaatccgtggccattgatattgcttatgaaggctccggcagtggcgact

SEQ ID NO: 768803 - DNA, 75 bp, synthetic construct
  source 1..75: mol_type = other DNA
cgactttctccggggattatcttcgcgtaactgacaacaaggggaaaacgcacgatgtgctgaccggaagtgatg

SEQ ID NO: 768804 - DNA, 75 bp, synthetic construct
  source 1..75: mol_type = other DNA
aagaatacgtatggtgggacggcagggctgcttttcatggtgaggttgtcagacctgcctgtactctggcgatgg

SEQ ID NO: 768805 - DNA, 75 bp, synthetic construct
  source 1..75: mol_type = other DNA
ggtgcaggaaagcaggtctatacggcaacccgggtgcgtgtgacttttgatggcattcccggagaaacaccggac

SEQ ID NO: 768806 - DNA, 75 bp, synthetic construct
  source 1..75: mol_type = other DNA
ggagaagaacacgtatggtgggacggcagggctgcttttcatggtgaggttgtcagacctgcctgtactctggcg

SEQ ID NO: 768807 - DNA, 75 bp, synthetic construct
  source 1..75: mol_type = other DNA
taacatttttcttgagtgcagcagctcaggctgcgccatcgccctcctttccgccgccggggatgaccctgccgg

SEQ ID NO: 768808 - DNA, 75 bp, synthetic construct
  source 1..75: mol_type = other DNA
agttgtgcgaaacggaaaaaacttgaagccggaaattattttgctgtactgggatttcgggtcgattatgagtga

SEQ ID NO: 768809 - DNA, 75 bp, synthetic construct
  source 1..75: mol_type = other DNA
ctgtgaatttaacagtcagggtgggaaccttttctctgattcccggataagggtgactttcgatggcgtccgggg

SEQ ID NO: 768810 - DNA, 75 bp, synthetic construct
  source 1..75: mol_type = other DNA
tgccgtgattgcgtccacggcaacggcagataaaaacaggctggataccggcacactgggcttcagtgacattga

SEQ ID NO: 768811 - DNA, 75 bp, synthetic construct
  source 1..75: mol_type = other DNA
agaacctgccagcgggaatgcaacagagaattattattgatgtacgtggtcaaatagttaccccaaatcaagaac

SEQ ID NO: 768812 - DNA, 75 bp, synthetic construct
  source 1..75: mol_type = other DNA
ccggcgcacagtcaggtaagacgactgttgagaataatgcgctcagtaaggacaagatctttgacattaatccaa

SEQ ID NO: 768813 - DNA, 75 bp, synthetic construct
  source 1..75: mol_type = other DNA
atcaggcagagttcggtaagtaaccgttatggtacgacgaaagtgtttgaaagccagaatctgacggataaacag

SEQ ID NO: 768814 - DNA, 75 bp, synthetic construct
  source 1..75: mol_type = other DNA
atggtggccaccattgcctcaggtattgcggggggacttgccggcaacagtacggcgtctgtcggtacgggtgca

SEQ ID NO: 768815 - DNA, 75 bp, synthetic construct
  source 1..75: mol_type = other DNA
ccggataatgaagaaaaagcccgtcatcaggaggttcagcaacaacgatttgatgaactgagtaaaatatatgat

SEQ ID NO: 768816 - DNA, 75 bp, synthetic construct
  source 1..75: mol_type = other DNA
ccgtcaaatagagctcgctgagggacatccgagccttgaggcttgggttgaatcagtattagccggtcgagatga

SEQ ID NO: 768817 - DNA, 75 bp, synthetic construct
  source 1..75: mol_type = other DNA
ccctgaagttaaatttatgcactgcctgcccgccttccataatgagcacaccacagtaggacgcgagatcgagat

SEQ ID NO: 768818 - DNA, 75 bp, synthetic construct
  source 1..75: mol_type = other DNA
gatcatctctgcagataacttcaagaatgaattcattgcgctgcgcaacaggatgatgaaattagatggacttgg

SEQ ID NO: 768819 - DNA, 75 bp, synthetic construct
  source 1..75: mol_type = other DNA
tagtaattgctaatttatggaatgttaatataaataaatacatgccagcattaaccgaaaatagcgaaatcatag

SEQ ID NO: 768820 - DNA, 75 bp, synthetic construct
  source 1..75: mol_type = other DNA
gatgaacgaacggccagcaaaaatcgagaagccacactgactgccggacaggacccggatgacaccttcacctgg

SEQ ID NO: 768821 - DNA, 75 bp, synthetic construct
  source 1..75: mol_type = other DNA
gtgaactattaaaggcaatagagattggggcattaattgaagttgacaatattgatgaatgtaaaagacttaatg

SEQ ID NO: 768822 - DNA, 75 bp, synthetic construct
  source 1..75: mol_type = other DNA
ttcaggcgtgaatgcccggagacaaaagccgctgtccgcacagcccccctctgacctgaacaaaaagcatacaca

SEQ ID NO: 768823 - DNA, 75 bp, synthetic construct
  source 1..75: mol_type = other DNA
ccggctcaggaattgtgaatttaacagtcagggtgggaaccttttctctgattcccggataagggtgactttcga

SEQ ID NO: 768824 - DNA, 75 bp, synthetic construct
  source 1..75: mol_type = other DNA
ctctggcgatggaagacgcctggcagattatcgatatgggggaaaccccggtacgggatttacagaatggtttct

SEQ ID NO: 768825 - DNA, 75 bp, synthetic construct
  source 1..75: mol_type = other DNA
tttggctgtgtgtttgttcatggtgtttttgccggtccgtttcctcctcccggcatgacccttcctgaatactgg

SEQ ID NO: 768826 - DNA, 75 bp, synthetic construct
  source 1..75: mol_type = other DNA
gggcggccgtcttcacgttctgccttgcgcagatgagatagatctagcgtggactcaaggctctcgcgaatggct

SEQ ID NO: 768827 - DNA, 75 bp, synthetic construct
  source 1..75: mol_type = other DNA
ggaactgtgaatttaacagtcagggtgggaaccttttctctgattcccggataagggtgactttcgatggcgtcc

SEQ ID NO: 768828 - DNA, 75 bp, synthetic construct
  source 1..75: mol_type = other DNA
tgtcaggggaaatattgcccgggcaggaaaagtaatgcctgcaataccattgacgggtaatgaagaagcgctgga

SEQ ID NO: 768829 - DNA, 75 bp, synthetic construct
  source 1..75: mol_type = other DNA
ctgggtgtttgccgcaggccataaatggaaaggactgatgaaccgtcgcgaagtggaaatggcaatctggaatat

SEQ ID NO: 768830 - DNA, 75 bp, synthetic construct
  source 1..75: mol_type = other DNA
cgggaacacgccggagtatggtgttatctcaatgaactccttgccgctgacaacccgattagcgaactaaaagtc

SEQ ID NO: 768831 - DNA, 75 bp, synthetic construct
  source 1..75: mol_type = other DNA
aacctgcgtgctcgggtcaatagctttatggcaatagaggtgcccacggcgcaggtttccgtgtcggatgcggtg

SEQ ID NO: 768832 - DNA, 75 bp, synthetic construct
  source 1..75: mol_type = other DNA
gaacgccgggcggtgaatccggcggtgatgatgaacgataccttgtttaatgcgctcaatgactgggtggatcgt

SEQ ID NO: 768833 - DNA, 75 bp, synthetic construct
  source 1..75: mol_type = other DNA
gatttttgtttacgggcgagaagagggtaacggtacgcggccttcccgatatccggcgcggcagacccgcgaagc

SEQ ID NO: 768834 - DNA, 75 bp, synthetic construct
  source 1..75: mol_type = other DNA
gcgcgaaggaagggaagctctggatgcactgactcgtttgctgaatctcggttcggtttacccgttccaacggga

SEQ ID NO: 768835 - DNA, 75 bp, synthetic construct
  source 1..75: mol_type = other DNA
acaaatttcaccgttcgctggaagcaccgaccaccgaattgctgttaaaagccatttttattgatgaagagaaat

SEQ ID NO: 768836 - DNA, 75 bp, synthetic construct
  source 1..75: mol_type = other DNA
taacccaataagctcactaaaagtttttgatttacgtgaaagcatggcgaatggcggtggcccggcgtgcctgcg

SEQ ID NO: 768837 - DNA, 75 bp, synthetic construct
  source 1..75: mol_type = other DNA
gtgattgccgtgagtaaccgccaggtgctgttttgccaccaacaggcgttcgctcgccagtcacagttactggca

SEQ ID NO: 768838 - DNA, 75 bp, synthetic construct
  source 1..75: mol_type = other DNA
caacccgattagcgaactgaaagtctttgatttacgtgaaagcatggcaaacggcggcggcccggcgtgcctgcg

SEQ ID NO: 768839 - DNA, 75 bp, synthetic construct
  source 1..75: mol_type = other DNA
tgccgatacgctggatggcaaagtgcatttcacggttgccaacctgaacaataaatttcaccgttcgctggaagc

SEQ ID NO: 768840 - DNA, 75 bp, synthetic construct
  source 1..75: mol_type = other DNA
gaagcagggcttactgaaaatgaaagcccttgccgacgcgggattcccccaggcggtgatcccgccgcacgagcg

SEQ ID NO: 768841 - DNA, 75 bp, synthetic construct
  source 1..75: mol_type = other DNA
gcccttgccgatgcgggattcccgcaggcggtgatcccgccacatgagcgcccgtttattccggttttgcgtcaa

SEQ ID NO: 768842 - DNA, 75 bp, synthetic construct
  source 1..75: mol_type = other DNA
gaaccgggctgagatgggattttctgcgttcctggggaaaatgggcatcagtatgaatgacagagtgcgggcaac

SEQ ID NO: 768843 - DNA, 75 bp, synthetic construct
  source 1..75: mol_type = other DNA
cacggatttatcaataagtctttgcgtgaagttttcgacgttacacgcatgattttgtcagcgaaagaagagttg

SEQ ID NO: 768844 - DNA, 75 bp, synthetic construct
  source 1..75: mol_type = other DNA
aaaacgccaggtgagccagcgtctggacggtgcggcgatcgatatgcccgcaggcccgtcggaagtgctggtgat

SEQ ID NO: 768845 - DNA, 75 bp, synthetic construct
  source 1..75: mol_type = other DNA
gacggtgcggcgatcgatatgcccgcaggcccgtcggaagtgttggtgattgctgacagcggcgctacgccggat

SEQ ID NO: 768846 - DNA, 75 bp, synthetic construct
  source 1..75: mol_type = other DNA
cgcaggccataaatggaaaggactgatgaaccgtcgcgaagtggaaatggctatctggaatatcaggggggcgga

SEQ ID NO: 768847 - DNA, 75 bp, synthetic construct
  source 1..75: mol_type = other DNA
tggaaaggactgatgaaccgtcgcgaagtggaaatggctatctggaatatcaggggggcggatgaccttcgccag

SEQ ID NO: 768848 - DNA, 75 bp, synthetic construct
  source 1..75: mol_type = other DNA
tgggacataccgggccggatatcgaaatgcgccgttacagccatgcggagtgtatggctcttctcgacagtgatt

SEQ ID NO: 768849 - DNA, 75 bp, synthetic construct
  source 1..75: mol_type = other DNA
atgaatgacagggcgcgggcaacagaattactggcagattatgcactcagtcggtgcgatcgtgtggcggcgttg

SEQ ID NO: 768850 - DNA, 75 bp, synthetic construct
  source 1..75: mol_type = other DNA
acgtatgcgtttgaagattatgcccgcagtgcagcgagtaaaaagcagtgtccttgttgccgtggggaaaaattt

SEQ ID NO: 768851 - DNA, 75 bp, synthetic construct
  source 1..75: mol_type = other DNA
cccctgctgtcacggaaaaaaatttattgaaagcgaggtttttacaaacaagatccagtatccggatggtaagcc

SEQ ID NO: 768852 - DNA, 75 bp, synthetic construct
  source 1..75: mol_type = other DNA
ggtgattttactgacccccgacgccgatatggcgcgtcgcgttgccgaggccgtcgaacgccaactggcagaact

SEQ ID NO: 768853 - DNA, 75 bp, synthetic construct
  source 1..75: mol_type = other DNA
tcggcggcgcacaggccattgccgcactggcgtttggtacagaatccgtgccgaaagtggacaaaatcttcgggc

SEQ ID NO: 768854 - DNA, 75 bp, synthetic construct
  source 1..75: mol_type = other DNA
aaacggggtatgcctgttatcagggactgccagcgttgtggtggtcgtggctatgaaagattgccgtcaacagag

SEQ ID NO: 768855 - DNA, 75 bp, synthetic construct
  source 1..75: mol_type = other DNA
gccctgcgcgtctgttgatggcttatcaacgcggtatttttccgtggttttctcctggcgaccctattctgtggt

SEQ ID NO: 768856 - DNA, 75 bp, synthetic construct
  source 1..75: mol_type = other DNA
gaatttatccatcatggcggtaaattgatcgactgccaggtgcttaatgagcatacagcttcgcttggtgcctgc

SEQ ID NO: 768857 - DNA, 75 bp, synthetic construct
  source 1..75: mol_type = other DNA
ttatgcttttggtaaggtcatagaaggatgtgccagcaatcgcgaagaagggacctggattacgcgcagcgtaat

SEQ ID NO: 768858 - DNA, 75 bp, synthetic construct
  source 1..75: mol_type = other DNA
tcatgcctttggtcaggtcattgaaggctgtgccagcgatcgcgaagaaggaacctggattacgcgcgatgtgat

SEQ ID NO: 768859 - DNA, 75 bp, synthetic construct
  source 1..75: mol_type = other DNA
ttacgcctttggtcaggttattgaaggttgtgccagcgatcgcgaagaaggaacctggatcacgcgcgacgtggt

SEQ ID NO: 768860 - DNA, 75 bp, synthetic construct
  source 1..75: mol_type = other DNA
tctccaggcgaccccatcctctggtggtcgcccgatcctcgcgcggtgctatggccagaatcactgcatatcagc

SEQ ID NO: 768861 - DNA, 75 bp, synthetic construct
  source 1..75: mol_type = other DNA
tccgtggccattgatattgcttatgaaggttccggtagtggcgactggcgatcggatgcatttattgttggtatc

SEQ ID NO: 768862 - DNA, 75 bp, synthetic construct
  source 1..75: mol_type = other DNA
tggcgtgcagtttaacccgaccgaatccgtggccattgatattgcttatgaaggttccggtagtggcgactggcg

SEQ ID NO: 768863 - DNA, 75 bp, synthetic construct
  source 1..75: mol_type = other DNA
tcctgctgaaagaagaagtgaaaaacatccaacgtaccgctgaactgctgctggaagttaaccttggcgcaacag

SEQ ID NO: 768864 - DNA, 75 bp, synthetic construct
  source 1..75: mol_type = other DNA
cggtaagcttatcgactgccaggtccttaacgatcacacagcatcgcttggtgcctgcgaaattccccgccggga

SEQ ID NO: 768865 - DNA, 75 bp, synthetic construct
  source 1..75: mol_type = other DNA
tattcgccacttaccttccgataccggaattgaagtggcttttgcaggccgttccaacgcaggtaaatccagcgc

SEQ ID NO: 768866 - DNA, 75 bp, synthetic construct
  source 1..75: mol_type = other DNA
tgatattgcttatgaaggttctggcagtggtgactggcgcactgacggtttcatcgtgggtgtcggttataaatt

SEQ ID NO: 768867 - DNA, 75 bp, synthetic construct
  source 1..75: mol_type = other DNA
cgtagtatgaaacgatttcataaacgctcgccctatcgtgtcacgatgaattacgcctttggtcaggtcattgaa

SEQ ID NO: 768868 - DNA, 75 bp, synthetic construct
  source 1..75: mol_type = other DNA
gggcgtggcttacagccgtgtgtcgactttttccggggattatctgcgtattaccgtgaaggagatcggtgagta

SEQ ID NO: 768869 - DNA, 75 bp, synthetic construct
  source 1..75: mol_type = other DNA
tcgtaaccgctggttcagcgtgatggcggggccctctgtgcgcgtgaatgaatggttcagcgcgtatgcgatggc

SEQ ID NO: 768870 - DNA, 75 bp, synthetic construct
  source 1..75: mol_type = other DNA
cgcgccagagcaacagtgtcgatctcgacaaagcccgtctggtggttagcgtcggtcgcggcattggctgcaaag

SEQ ID NO: 768871 - DNA, 75 bp, synthetic construct
  source 1..75: mol_type = other DNA
ttacggacacgctggggctgattacgtccttcagttatgccaatgctgaaggtgagcaaaaaacgcactacaacg

SEQ ID NO: 768872 - DNA, 75 bp, synthetic construct
  source 1..75: mol_type = other DNA
ttaacccgaccgaatccgtgaccattgaccttgcttatgaaggttccggtagtggcgactggcgaacggatgcat

SEQ ID NO: 768873 - DNA, 75 bp, synthetic construct
  source 1..75: mol_type = other DNA
tgtccgcagccatctgtctgtccgtatccggtgcgcctgcatgggcgtctgaacatcagtccatactgagcacag

SEQ ID NO: 768874 - DNA, 75 bp, synthetic construct
  source 1..75: mol_type = other DNA
taactgacaacaaggggaaaaagcacgatgtgctgaccggaagtgatgacggtcgtcacagcaacacgtctctgg

SEQ ID NO: 768875 - DNA, 75 bp, synthetic construct
  source 1..75: mol_type = other DNA
gagcagcaggccacgctgagcgcggggtatcttcatgtctcgacgaacgctcccggtagcgataatcttaacggg

SEQ ID NO: 768876 - DNA, 75 bp, synthetic construct
  source 1..75: mol_type = other DNA
attaacgtgaaataccgttatgagtttacggacacactggggctagtgacgtcattcagctatgcaggagacaag

SEQ ID NO: 768877 - DNA, 75 bp, synthetic construct
  source 1..75: mol_type = other DNA
ggacggtaaagcgacagtgaaacacatggtttacggcggcctggcgattggcgaagaacgcattgccacgccgta

SEQ ID NO: 768878 - DNA, 75 bp, synthetic construct
  source 1..75: mol_type = other DNA
aaaaatgcgccgatcttccagtacgcggattacggcattgttggcgacgccgtgaagatccttccggcgctgacc

SEQ ID NO: 768879 - DNA, 75 bp, synthetic construct
  source 1..75: mol_type = other DNA
atggtttacggtggtctggcgattggcgaagaacgcattgccacgccgtatgcggtactgaccatcagcagcggc

SEQ ID NO: 768880 - DNA, 75 bp, synthetic construct
  source 1..75: mol_type = other DNA
gccccctggtaccttgagcatgatgctggtaatggtgcggacctgctgggtaaaggtggtcttgtcagttgtcgt

SEQ ID NO: 768881 - DNA, 75 bp, synthetic construct
  source 1..75: mol_type = other DNA
tgtcggataccatcaacgctaataaaaatgcggctgctgtagcaactcaggaactggacacccgcatcaataaaa

SEQ ID NO: 768882 - DNA, 75 bp, synthetic construct
  source 1..75: mol_type = other DNA
gctgaactgggatgaaaaaggcgatcttaagggattcgattttggtgtcttccagtggcacgccgacggttcatc

SEQ ID NO: 768883 - DNA, 75 bp, synthetic construct
  source 1..75: mol_type = other DNA
tgaagcctcagcgcatcgccatcattcacgacaaacaacagtatggcgaagggctggcgcgttcggtgcaggacg

SEQ ID NO: 768884 - DNA, 75 bp, synthetic construct
  source 1..75: mol_type = other DNA
caatggactatattgaaatgatccattggggtaacagtaatatcgctcgtgacaacgttttgagtatgaaagact

SEQ ID NO: 768885 - DNA, 75 bp, synthetic construct
  source 1..75: mol_type = other DNA
gttccttatgccgcagatcaaggacttatccgtggtgaggtttctggtggtgcatatgttgcatggagagaccga

SEQ ID NO: 768886 - DNA, 75 bp, synthetic construct
  source 1..75: mol_type = other DNA
ttgaccggatgttccagaagaccatcaactttggtgtagaaactggatggtttaaaattgctaccgcctttattc

SEQ ID NO: 768887 - DNA, 75 bp, synthetic construct
  source 1..75: mol_type = other DNA
ggttggcgtggaatatgacgacgcctgcgacccgaaacaagccgttgcggtcgccaacaaaatcgttaacgacgg

SEQ ID NO: 768888 - DNA, 75 bp, synthetic construct
  source 1..75: mol_type = other DNA
gcggcaaaatacattcttgagacggtgaagccccagcgcatcgccatcattcacgacaaacaacagtatggcgaa

SEQ ID NO: 768889 - DNA, 75 bp, synthetic construct
  source 1..75: mol_type = other DNA
ggcgagaaagatttctccgcgctgatcgcccgcctgaaaaaagaaaacatcgacttcgtttactacggcggttac

SEQ ID NO: 768890 - DNA, 75 bp, synthetic construct
  source 1..75: mol_type = other DNA
tcgcagggatgattgcactggcaatatcacacaccgcgttggctgacgatattaaagttgccgttgtcggcgcaa

SEQ ID NO: 768891 - DNA, 75 bp, synthetic construct
  source 1..75: mol_type = other DNA
tgatgcgctgaaagcagacaagaaagatccgtccgggccttatgtctggatcacctacgcggcggtgcaatctct

SEQ ID NO: 768892 - DNA, 75 bp, synthetic construct
  source 1..75: mol_type = other DNA
ccgcctgaaaaaagaaaacatcgacttcgtttactacggcggttactacccggaaatggggcagatgctgcgcca

SEQ ID NO: 768893 - DNA, 75 bp, synthetic construct
  source 1..75: mol_type = other DNA
agataacagcgatacagaaaaggctgttatctgggctacagatgagggtattttacatattcgcaataaccacgg

SEQ ID NO: 768894 - DNA, 75 bp, synthetic construct
  source 1..75: mol_type = other DNA
ggtcgaaataacgttttaagtcttcgtgactcaaaaggatttttagctgaatttgaacgattaggcgataatacc

SEQ ID NO: 768895 - DNA, 75 bp, synthetic construct
  source 1..75: mol_type = other DNA
ggttatcacttctatactgaacgtaggacagataacagtttgatgtttgatgttgctggcgcttttactgtgcat

SEQ ID NO: 768896 - DNA, 75 bp, synthetic construct
  source 1..75: mol_type = other DNA
ggcattagctttgcatgtgccacatcctagcggtctaaatcattctcgcggttttgattttacatatggttctaa

SEQ ID NO: 768897 - DNA, 75 bp, synthetic construct
  source 1..75: mol_type = other DNA
atgctgtcgcagtcttcggtcggcacgtttacggcagacaagttgcgcgtgaccgatatcactaaaaatgcgact

SEQ ID NO: 768898 - DNA, 75 bp, synthetic construct
  source 1..75: mol_type = other DNA
ctgctggtcagcttgagcttaacgttatggagccggtcatcacctttgcgctgttcacctcactcaaggtgatga

SEQ ID NO: 768899 - DNA, 75 bp, synthetic construct
  source 1..75: mol_type = other DNA
ttcttcatcattgccttcggttatgtgaaaaaagcagctgcgatggctaataaggagttaggtacaattcctgct

SEQ ID NO: 768900 - DNA, 75 bp, synthetic construct
  source 1..75: mol_type = other DNA
taactttaacgatgtttatattcgttccgatggtcgtctgaaaattaatgttgaagattacgaagaaaatgcggt

SEQ ID NO: 768901 - DNA, 75 bp, synthetic construct
  source 1..75: mol_type = other DNA
tgattggtaagctgaaagtgaaaacttacgataaagttaaatctcttaaggaccgtgaaattataggccatgaga

SEQ ID NO: 768902 - DNA, 75 bp, synthetic construct
  source 1..75: mol_type = other DNA
tgcaatgatcttgcatgttccgcacccatccggcgttaatcatgctcgtggttttgagttcacttatgggtctaa

SEQ ID NO: 768903 - DNA, 75 bp, synthetic construct
  source 1..75: mol_type = other DNA
gaaggtggattggatctaggtggcacagctaccgcacgctgtttacatctgggaattgatggtagcacccgcatc

SEQ ID NO: 768904 - DNA, 75 bp, synthetic construct
  source 1..75: mol_type = other DNA
attgatattcgtcgaggaccaaacgaagcaagccattttaatttcatggattatcgcactggacaagatgttcgt

SEQ ID NO: 768905 - DNA, 75 bp, synthetic construct
  source 1..75: mol_type = other DNA
ctgacagcaacatccgggttacatgtcaagaaattaacattggatggcggtgttactggaaattctggtattgat

SEQ ID NO: 768906 - DNA, 75 bp, synthetic construct
  source 1..75: mol_type = other DNA
tgtccgcagtagtctggctggtcgccgctggtacgccagcgagcgcagcagagcatcagtccacactaagcgccg

SEQ ID NO: 768907 - DNA, 75 bp, synthetic construct
  source 1..75: mol_type = other DNA
aatggttcagcgcgtatgcgatggcgggggggggttacagccgtgtgtcgactttttccgggggttatctccgcg

SEQ ID NO: 768908 - DNA, 75 bp, synthetic construct
  source 1..75: mol_type = other DNA
gcgtaaccgctggttcagcgtgatggcggggccgtctgtgcgcgtgaatgaatggttcagcgcgtatgtgatggc

SEQ ID NO: 768909 - DNA, 75 bp, synthetic construct
  source 1..75: mol_type = other DNA
tcggtaacgacaccactgttaccatggcagcagaagcaggtcagctgcagttgaacgttatggagccggtcattg

SEQ ID NO: 768910 - DNA, 75 bp, synthetic construct
  source 1..75: mol_type = other DNA
cgtaaagctgtcgaattccaggacatcctgaaaatgggtcgcacccaactgcaggacgcagtaccaatgaccctt

SEQ ID NO: 768911 - DNA, 75 bp, synthetic construct
  source 1..75: mol_type = other DNA
gcgtaaccgcgggttcagtgtgatggcggggccgtctgttcgcgtgaatgaatggttcagcgcgtatgcgatggc

SEQ ID NO: 768912 - DNA, 75 bp, synthetic construct
  source 1..75: mol_type = other DNA
gtgcgtaaccgctggttcagcatgatggcggggccatctgtacgcgtgaatgaatggttcagtgcttatgcgatg

SEQ ID NO: 768913 - DNA, 75 bp, synthetic construct
  source 1..75: mol_type = other DNA
cccgaccgaatccgtggccgttgatgtcgcttacgaaggctccggcagcggtgactggcgtaccaacagtttcat

SEQ ID NO: 768914 - DNA, 75 bp, synthetic construct
  source 1..75: mol_type = other DNA
tcccggcagcgatgatctgaacgggattaacgtgaaataccgttatgagtttacggacacgctggggctgattac

SEQ ID NO: 768915 - DNA, 75 bp, synthetic construct
  source 1..75: mol_type = other DNA
gccgtctgtgcgcgtgaatgaatggttcagcgcgtatgcgatggcaggcgtggcttacagccgtgtgtcgacttt

SEQ ID NO: 768916 - DNA, 75 bp, synthetic construct
  source 1..75: mol_type = other DNA
cttgcttatgaaggttccggcagtggtgactggcgcactgacggtttcatcgtgggtgtcggttataagttctga

SEQ ID NO: 768917 - DNA, 75 bp, synthetic construct
  source 1..75: mol_type = other DNA
ggtcaggaattccgcgctttcagcatcctgctgaaagaggaagtgaaaaatatccaacgtaccgctgaactgctg

SEQ ID NO: 768918 - DNA, 75 bp, synthetic construct
  source 1..75: mol_type = other DNA
cttggcgtcgcctggatgttgtggcgcagtaaacgcgcagcactttggctgtacgccgctctgctgctcggcacc

SEQ ID NO: 768919 - DNA, 75 bp, synthetic construct
  source 1..75: mol_type = other DNA
gcaattaacgctgaaaacggcaagctgtgcgaaaccttcgccaataaaggcgtgctcaatctgcaaagcaatatg

SEQ ID NO: 768920 - DNA, 75 bp, synthetic construct
  source 1..75: mol_type = other DNA
tgtccgcagccatttgtctggccgtatccggagcgcctgcatgggcgtctgagcagcaggccacgctgagcgcgg

SEQ ID NO: 768921 - DNA, 75 bp, synthetic construct
  source 1..75: mol_type = other DNA
tgccgatgctgggcgggccaatctccacggcgggtaacgtgctgtttatcgccgctacggcagataactacctgc

SEQ ID NO: 768922 - DNA, 75 bp, synthetic construct
  source 1..75: mol_type = other DNA
aactgagcttccgtccgacgaaagatttgagcggtgcggatatgtggggagccaccatgtttgaccaactggtgt

SEQ ID NO: 768923 - DNA, 75 bp, synthetic construct
  source 1..75: mol_type = other DNA
aactgagcttccgtccgacgaaaaatttgagcggtgcggatatgtggggagccaccatgtttgaccagctggtgt

SEQ ID NO: 768924 - DNA, 75 bp, synthetic construct
  source 1..75: mol_type = other DNA
atgcgtaaattatgtgctgttattttgtccgcagtagtctggctggtcgccgctgctacgccagcgagtgcagca

SEQ ID NO: 768925 - DNA, 75 bp, synthetic construct
  source 1..75: mol_type = other DNA
caaaatctgtaacgacctgcgcttgctctcttctggcccacgtgccggcctgaacgaaatcaacctgccggaact

SEQ ID NO: 768926 - DNA, 75 bp, synthetic construct
  source 1..75: mol_type = other DNA
atgtcaaacaacattcgtatcgaagaagatctgttgggtactagggaagttccagctgatgcctactatggtgtt

SEQ ID NO: 768927 - DNA, 75 bp, synthetic construct
  source 1..75: mol_type = other DNA
tgtccgcagccatttgtctgaccgtatccggggcgcctgcatgggcgtctgagcagcaggccacgctgagcgcgg

SEQ ID NO: 768928 - DNA, 75 bp, synthetic construct
  source 1..75: mol_type = other DNA
aactgacaacaaggggaaaacgcacgatgtgctgaccggaagtgatgacggtcgccacagcaacacgtctctggc

SEQ ID NO: 768929 - DNA, 75 bp, synthetic construct
  source 1..75: mol_type = other DNA
tttgtctggccgtatccggtgcgcctgcatgggcgtctgaacatcagtccacgctgagcgcggggtatcttcatg

SEQ ID NO: 768930 - DNA, 75 bp, synthetic construct
  source 1..75: mol_type = other DNA
gtgtcgtatgcccgggtgtcgtcttttgccggtgattatgtgaccctcacgtcagatgagggtaaaaagcaggag

SEQ ID NO: 768931 - DNA, 75 bp, synthetic construct
  source 1..75: mol_type = other DNA
ttccggcagcgatgatctgaacgggattaacgtgaaataccgttatgagtttacggacacgctgggaatggtgac

SEQ ID NO: 768932 - DNA, 75 bp, synthetic construct
  source 1..75: mol_type = other DNA
gcgggaccgtctgtacgcgtgaatgaagggttcagcttgtatgcgatggcgggggtggcttacagccgtgtatcc

SEQ ID NO: 768933 - DNA, 75 bp, synthetic construct
  source 1..75: mol_type = other DNA
attgcttatgaaggttccggcagtggcgactggcgcactgacggtttcattgtggggggcggttataaattctga

SEQ ID NO: 768934 - DNA, 75 bp, synthetic construct
  source 1..75: mol_type = other DNA
ttgatattgcttatgaaggttctggcagtggtgactggcgcactgacgggttcatcgtgggtgttggttataaat

SEQ ID NO: 768935 - DNA, 75 bp, synthetic construct
  source 1..75: mol_type = other DNA
ttacggacactctgggaatggtgacgtcattcagctatgcaggagacaggaatcgccagcttacccgttacagcg

SEQ ID NO: 768936 - DNA, 75 bp, synthetic construct
  source 1..75: mol_type = other DNA
tctggcgtggggagctggcgtgcagtttaacccgaccgaatccgtggccattgatgtcgcttatgaaggctccgg

SEQ ID NO: 768937 - DNA, 75 bp, synthetic construct
  source 1..75: mol_type = other DNA
tttacggacacactggggatggtgacgtcgttcagctatgcaggagacaagaatcgccagattacccgttacagc

SEQ ID NO: 768938 - DNA, 75 bp, synthetic construct
  source 1..75: mol_type = other DNA
acgacgtgctgaccggaagtgatgacggtcgccacagcaacacgtctctggcgtggggagctggcgtgcagttta

SEQ ID NO: 768939 - DNA, 75 bp, synthetic construct
  source 1..75: mol_type = other DNA
ggcggggccgtctgtacgcgtgaatgaatggttcagcgcgtatgcgatggcgggtgtggcttacagccgtgtgtc

SEQ ID NO: 768940 - DNA, 75 bp, synthetic construct
  source 1..75: mol_type = other DNA
gaaaaagcacgatgtgctgaccggaagtgatgacggtcgccacagcaacacgtctctggcgtggggggctggcgt

SEQ ID NO: 768941 - DNA, 75 bp, synthetic construct
  source 1..75: mol_type = other DNA
ttgcccgactgttattaccgtcaacgccgataagcttgaaaattgtctgatgagcttaacgctgagtatccagag

SEQ ID NO: 768942 - DNA, 75 bp, synthetic construct
  source 1..75: mol_type = other DNA
gctggcgtgcagtttaacccgaccgaatccgtggccattgatattgcttatgaaggctccggcagtggcgactgg

SEQ ID NO: 768943 - DNA, 75 bp, synthetic construct
  source 1..75: mol_type = other DNA
attaacgtgaaataccgttatgagtttacggacacactggggctggagacgtcttcagtatgcagcgaatcaacc

SEQ ID NO: 768944 - DNA, 75 bp, synthetic construct
  source 1..75: mol_type = other DNA
gggctgattacgtcattcagttatgccaacgctgaagatgagcaaaaaacgcattacagcgatacccgctggcat

SEQ ID NO: 768945 - DNA, 75 bp, synthetic construct
  source 1..75: mol_type = other DNA
atctgctgaaccggttgatcgacgcacgcgttgacctcgccgcatacgtgcaactgaggaaggcaaaaggataca

SEQ ID NO: 768946 - DNA, 75 bp, synthetic construct
  source 1..75: mol_type = other DNA
aatggttcagcgcgtattcgatggcgggtgtggcttacagccgtgtgtcgactttctccggggattatctccggc

SEQ ID NO: 768947 - DNA, 75 bp, synthetic construct
  source 1..75: mol_type = other DNA
acagaaaatatcgtggtcgacctggcttatgaagcctcaggacgtggtgactggcgtacggatgcgtttattgtc

SEQ ID NO: 768948 - DNA, 75 bp, synthetic construct
  source 1..75: mol_type = other DNA
caaccagttgcggttctttctaataatcgccccgcaggatatctcttaagtgccagcgcattcgaagcgttaatg

SEQ ID NO: 768949 - DNA, 75 bp, synthetic construct
  source 1..75: mol_type = other DNA
cgtggggagctggcgtgcagtttaacccgaccgaatccgtggccattgacgtcgcttatgaaggctccggcagtg

SEQ ID NO: 768950 - DNA, 75 bp, synthetic construct
  source 1..75: mol_type = other DNA
ccaccaacgcgttataccgcgctacactgggcgggtaaggtgagtgatgaagagcgggcggaaatactggcctgg

SEQ ID NO: 768951 - DNA, 75 bp, synthetic construct
  source 1..75: mol_type = other DNA
aaattacggcggcggatattggtcgtatgaatgttactaaagaagagcgtgataaattgcgtcagaaagtacccg

SEQ ID NO: 768952 - DNA, 75 bp, synthetic construct
  source 1..75: mol_type = other DNA
agcgtgatggcggggccgtctgtacgcgtgaatgaatggttcagcgcgtattcgatggcgggtgtggcttacagc

SEQ ID NO: 768953 - DNA, 75 bp, synthetic construct
  source 1..75: mol_type = other DNA
ttggtaaagagctgccgcaggaagatgtgaatgatattgttgctttcctgcacagtctgaatggggtttacacac

SEQ ID NO: 768954 - DNA, 75 bp, synthetic construct
  source 1..75: mol_type = other DNA
gtaccgggtctgcgtaacgttgcgctgacggcaccatacttccaccgtggcgacgtgccgacgctggatggggcg

SEQ ID NO: 768955 - DNA, 75 bp, synthetic construct
  source 1..75: mol_type = other DNA
agagcgggcggaaatactcgcttggattgcaaaacagcgcgcggaatattacgccagcaatgacaccgcgccgga

SEQ ID NO: 768956 - DNA, 75 bp, synthetic construct
  source 1..75: mol_type = other DNA
cagaagccattacaaacaaggccgttcagccgggagattacaacgctacggcaacattcgaacttttatataaat

SEQ ID NO: 768957 - DNA, 75 bp, synthetic construct
  source 1..75: mol_type = other DNA
aaacaaataaaagtgcagatttaattaatcagttggctcccaatgataatttaaaatatttcaatgcggactttg

SEQ ID NO: 768958 - DNA, 75 bp, synthetic construct
  source 1..75: mol_type = other DNA
atgtggaattaaggttaacaatttaggcattgctggcattgatagcgaaaaatattacaaatacatcattgaaaa

SEQ ID NO: 768959 - DNA, 75 bp, synthetic construct
  source 1..75: mol_type = other DNA
tttattgggcgtaatgatagctatttaaagaaaaaacatttttttggttctgacagtatcgcttatataatgaat

SEQ ID NO: 768960 - DNA, 75 bp, synthetic construct
  source 1..75: mol_type = other DNA
caaggaattattattggtcgtaaaggaactgttgggaaagcgtacttaacttatggaccattttggtgtattgat

SEQ ID NO: 768961 - DNA, 75 bp, synthetic construct
  source 1..75: mol_type = other DNA
gataaggaaagctctttagatatagatgatagaatggatttcgaacttgcaattaccattcagcaaaaaaaaaat

SEQ ID NO: 768962 - DNA, 75 bp, synthetic construct
  source 1..75: mol_type = other DNA
ttccagcccgtagtggatctaaagggttgagaaataaaaatgctttgatgctgatagataaacctcttcttgctt

SEQ ID NO: 768963 - DNA, 75 bp, synthetic construct
  source 1..75: mol_type = other DNA
ctgatagcggtgatctgactttcgactcccttgatggtttcgttcaggctatcgctggtatctctgatgacgacg

SEQ ID NO: 768964 - DNA, 75 bp, synthetic construct
  source 1..75: mol_type = other DNA
ccacctgtaaaatcataccgtgatcccaataaggtcagtaaagtaaatgtatcagggaagaaatcccctgttctg

SEQ ID NO: 768965 - DNA, 75 bp, synthetic construct
  source 1..75: mol_type = other DNA
cctctgttctggttgttcctgaaccaactgcatccactaaactgaaaaccccatctcttcaaaacaccagagcga

SEQ ID NO: 768966 - DNA, 75 bp, synthetic construct
  source 1..75: mol_type = other DNA
agctctaaagtcgctgtagaaaaagaccgtcgtcgtatgaaggcgaatcagattcgtcgtgcggtgaaacgtcac

SEQ ID NO: 768967 - DNA, 75 bp, synthetic construct
  source 1..75: mol_type = other DNA
tttatctgctgattttacatatgatgggttacatttcaacggaaaagcatatagacaactaaaaaaagaacttat

SEQ ID NO: 768968 - DNA, 75 bp, synthetic construct
  source 1..75: mol_type = other DNA
gtggtttttttaatgttgggtacaaatgatattgttattcagggttgggatgagaatgacaccttaagatggctc

SEQ ID NO: 768969 - DNA, 75 bp, synthetic construct
  source 1..75: mol_type = other DNA
ccttcactgccagagcaaaaaaccatcgcctctgtgctgtcctctcttgatgacaaaatagacttgcttcatcgc

SEQ ID NO: 768970 - DNA, 75 bp, synthetic construct
  source 1..75: mol_type = other DNA
ggctctggttgaaaaagaaaatctggtttttaatcagttacccaaagtggaagtgcacaataagaatgaagagaa

SEQ ID NO: 768971 - DNA, 75 bp, synthetic construct
  source 1..75: mol_type = other DNA
aggagaaagcgcgtactgccgcgctggggcgtcgcgaaactaagggctatgaagagatggtaaataatgggcgta

SEQ ID NO: 768972 - DNA, 75 bp, synthetic construct
  source 1..75: mol_type = other DNA
atggtcaggcaaaagtgtagcggtattaggcgcagctatttagaggataatggctttaatagatatgaccaagat

SEQ ID NO: 768973 - DNA, 75 bp, synthetic construct
  source 1..75: mol_type = other DNA
ggtggatctggatatcgcggactatatggataaggaagacttcctgatccagattatggctggggaaaaggtcgg

SEQ ID NO: 768974 - DNA, 75 bp, synthetic construct
  source 1..75: mol_type = other DNA
attctcaccgatatcaacattaccatgaatgacgattcctgcatgggtaatgactccaacttattgatagtgttt

SEQ ID NO: 768975 - DNA, 75 bp, synthetic construct
  source 1..75: mol_type = other DNA
atccgcgaaagagtagaacgacagaattcctgtttctcattctgtttatcgtattgatgataccgatatccccgt

SEQ ID NO: 768976 - DNA, 75 bp, synthetic construct
  source 1..75: mol_type = other DNA
ccgacaaacccattatcaaagtacctggctgcccgccgatcccggatgtgatgagcgccatcattacttacatgg

SEQ ID NO: 768977 - DNA, 75 bp, synthetic construct
  source 1..75: mol_type = other DNA
ggtttctgggatcgcggctcattctacagccgcgtggtcgatattccgcagatgggaacgcactctaccgccgat

SEQ ID NO: 768978 - DNA, 75 bp, synthetic construct
  source 1..75: mol_type = other DNA
agaactggtataaaacgccaaatgcagcgccacgtgtttttgataccggcggtcatcaaaccggagcggctatta

SEQ ID NO: 768979 - DNA, 75 bp, synthetic construct
  source 1..75: mol_type = other DNA
cgtgcgcggtaaaagtgccgatattcattatctggtgaatgtggactgtaaagcgggaatggcggaatatcagcg

SEQ ID NO: 768980 - DNA, 75 bp, synthetic construct
  source 1..75: mol_type = other DNA
tggttgcccgccgatcccggatgtgatgagcgccatcattacttatatggtgacgtttgatcgcctgccagatgt

SEQ ID NO: 768981 - DNA, 75 bp, synthetic construct
  source 1..75: mol_type = other DNA
aatgctatcgccgcgctcacttcgacgccggagagttcgtccagagttgggatgatgacgctgcccgcaaaggtt

SEQ ID NO: 768982 - DNA, 75 bp, synthetic construct
  source 1..75: mol_type = other DNA
ccacgctcagagtttgaaagacgtgctaagtttaacaatgacccggtattaccagaagcaagagtctatggcaac

SEQ ID NO: 768983 - DNA, 75 bp, synthetic construct
  source 1..75: mol_type = other DNA
cgacgccttagcgcaggaaactgccgatatgccgctgcatgtacagactgaccgggtaattaaagactccggcct

SEQ ID NO: 768984 - DNA, 75 bp, synthetic construct
  source 1..75: mol_type = other DNA
ggcggaaatgcgtcatcgtatcgggcaactgatgggcaccagccagggcggcatgtgggtaggcaccttccacgg

SEQ ID NO: 768985 - DNA, 75 bp, synthetic construct
  source 1..75: mol_type = other DNA
agccgcccggtcagccatcagcgtatgggtacgccgatggtcgagaacgacagcggctacaagctcggccagcgt

SEQ ID NO: 768986 - DNA, 75 bp, synthetic construct
  source 1..75: mol_type = other DNA
cggtgaacatagccgtttgcaggtggcgtttcagggccagggaatcaaatggctggtggcggcttacgcccggct

SEQ ID NO: 768987 - DNA, 75 bp, synthetic construct
  source 1..75: mol_type = other DNA
gtacgtcagacatcgcgcgatcgccagttaacactgtggcaggcgtgccgcgaattattgcaggaaaaagcgctc

SEQ ID NO: 768988 - DNA, 75 bp, synthetic construct
  source 1..75: mol_type = other DNA
gaggtgcgcctgcgcgccacggtaagccgcccggtcagccatcagcgtatgggtacgccgatggtcgagaacgac

SEQ ID NO: 768989 - DNA, 75 bp, synthetic construct
  source 1..75: mol_type = other DNA
gtgcgaggaaaggaaaccgaaactatttcagaaaggttgatacgtgaggctgatacacgagaatatgaactatgg

SEQ ID NO: 768990 - DNA, 75 bp, synthetic construct
  source 1..75: mol_type = other DNA
attcgatgtgtttacgggaaaaaaatcggcccagatccgcgaaattttaatcagcgagtcagcttgggaagaaat

SEQ ID NO: 768991 - DNA, 75 bp, synthetic construct
  source 1..75: mol_type = other DNA
gaaggtctcttccggcaggactgcaggcgggcatcaccaccggcatacagggtacacctggtctgtttctgtgaa

SEQ ID NO: 768992 - DNA, 75 bp, synthetic construct
  source 1..75: mol_type = other DNA
taccatcgcccgtcgcgctttatcggcgagctgccggaagagtgtgtggaagaggtgcgcctgcgcgccacggta

SEQ ID NO: 768993 - DNA, 75 bp, synthetic construct
  source 1..75: mol_type = other DNA
tacgccaacgcggggtattggtgaccggacgctggacgtggtacgtcagacatcgcgcgatcgccagttaacact

SEQ ID NO: 768994 - DNA, 75 bp, synthetic construct
  source 1..75: mol_type = other DNA
ttatttttttacaaataaagatatcggttcttgtattgacatcgctcgtggtgtttattttaaagaaggaggaag

SEQ ID NO: 768995 - DNA, 75 bp, synthetic construct
  source 1..75: mol_type = other DNA
ctgaaaacatcctcctctcaagccctaaacagggcatccagaagcgcccctgaacgtgttaagagaaaacaggct

SEQ ID NO: 768996 - DNA, 75 bp, synthetic construct
  source 1..75: mol_type = other DNA
taccttgaagccgcaggcagtgaagaacgtatcgatcaccgttctctcaggacgcaatgtgctgatgcccttgct

SEQ ID NO: 768997 - DNA, 75 bp, synthetic construct
  source 1..75: mol_type = other DNA
tggaaagaaagcagatattcagtatcgtgtgcgcgttgactgtaagaacggaagtgccacctggcaacgccaggg

SEQ ID NO: 768998 - DNA, 75 bp, synthetic construct
  source 1..75: mol_type = other DNA
aaccgcaggaagagacggcagatattgaagaagttgccgaaactgctgaggttgtggttgctgaacctgaagttg

SEQ ID NO: 768999 - DNA, 75 bp, synthetic construct
  source 1..75: mol_type = other DNA
agcgtatcgcagagaactatgtctatgatgaagtgctgggtgtcaatgtcccacgctcagagtttgaaaaacgcg

SEQ ID NO: 769000 - DNA, 75 bp, synthetic construct
  source 1..75: mol_type = other DNA
cccctgttctggttgcgcctgaaccaactgcatccactaaattgaaaaccccatctcttcaaaaaaccagagcga

SEQ ID NO: 769001 - DNA, 75 bp, synthetic construct
  source 1..75: mol_type = other DNA
aaaaaagacagaagctggaatgataagaagataatgatccaatggcgtgagtcatgggccacgatgtcaaacagc

SEQ ID NO: 769002 - DNA, 75 bp, synthetic construct
  source 1..75: mol_type = other DNA
ggttataaattacgcacaaactattcgccttgagcgtgagaagagagagaaagaacaggctctgcaagaaataaa

SEQ ID NO: 769003 - DNA, 75 bp, synthetic construct
  source 1..75: mol_type = other DNA
ccttcaatattgcattcttcgaaaaagattcctttcaaaactttctttcgtttgaaccatttcaacaaactaaat

SEQ ID NO: 769004 - DNA, 75 bp, synthetic construct
  source 1..75: mol_type = other DNA
tattccctgtgaacttagcaatgaagataagataaaattggttgttgaatactgccagaaaaatttcgttgataa

SEQ ID NO: 769005 - DNA, 75 bp, synthetic construct
  source 1..75: mol_type = other DNA
ttttgccttcgaaggtaaaggtgccgcaggtggtcatacggcaacgcatcatgcctctgccgctcctgcgcgtcc

SEQ ID NO: 769006 - DNA, 75 bp, synthetic construct
  source 1..75: mol_type = other DNA
ccgcctgcgcgagcgtttgcgtcagcgtattttttcagagataaagtggtgccggaagcaatggaaaaaccaaga

SEQ ID NO: 769007 - DNA, 75 bp, synthetic construct
  source 1..75: mol_type = other DNA
gaaccaggtgagaaagccaactggaaattagcccctaatagatactctgattggggaaaacttaaagttccggct

SEQ ID NO: 769008 - DNA, 75 bp, synthetic construct
  source 1..75: mol_type = other DNA
tgtggggttgagcaccgaagacataaccgatggcccgctggcaggccgcacggcactgtatgccgaaattgagcc

SEQ ID NO: 769009 - DNA, 75 bp, synthetic construct
  source 1..75: mol_type = other DNA
tccgtcacggtaaaatgacgctggaaaatccttcaccagagctgctcacggtgttgatccgtgaactgaccggga

SEQ ID NO: 769010 - DNA, 75 bp, synthetic construct
  source 1..75: mol_type = other DNA
gtaaacaagtcagaatgctggaagacgagctaggcattcaaattttttcccgaagcggcaagcacctgacgcagg

SEQ ID NO: 769011 - DNA, 75 bp, synthetic construct
  source 1..75: mol_type = other DNA
gatttcactgtccaccgaagaaatcagggaaggcaaactggccggccgcaccgcactgtatgccgaaattgagcc

SEQ ID NO: 769012 - DNA, 75 bp, synthetic construct
  source 1..75: mol_type = other DNA
gatgacgccagtttctcccgtattcaggaagcggtggaaggtgtcgcaacgtcacaggccgacattatcgaccgt

SEQ ID NO: 769013 - DNA, 75 bp, synthetic construct
  source 1..75: mol_type = other DNA
accgatggcccgctggcaggccgcacggcactgtatgccgaaattgagccgaccgctcgcatgatgtccctgctt

SEQ ID NO: 769014 - DNA, 75 bp, synthetic construct
  source 1..75: mol_type = other DNA
aagtccgtcaacgggcagtccgtatggttctggaaagtcagagcgaatatgactcacaatgggcgacaatttgtt

SEQ ID NO: 769015 - DNA, 75 bp, synthetic construct
  source 1..75: mol_type = other DNA
tatgactcacaatgggcgacaatttgttccattgctccaaagactagctgtacgccggagactctgcgtgtctgg

SEQ ID NO: 769016 - DNA, 75 bp, synthetic construct
  source 1..75: mol_type = other DNA
gcgcgctggattgccgttgggcgtctcgacgttaacacttgtggtctgctgctgttcaccactgatggtgagctg

SEQ ID NO: 769017 - DNA, 75 bp, synthetic construct
  source 1..75: mol_type = other DNA
agaaaataatggcgagtgatggaaacagattttgtatgattttggattcaaaaaacggtttgccattgtattatc

SEQ ID NO: 769018 - DNA, 75 bp, synthetic construct
  source 1..75: mol_type = other DNA
tgcaatgtttagaacctgaaagccaatacaatccatttgttgatatcagttgccgtaaaagaaatcaactcataa

SEQ ID NO: 769019 - DNA, 75 bp, synthetic construct
  source 1..75: mol_type = other DNA
cgccagcatgagcgggataccgggggcggtgatggagggctcaccaccgctgaacgtcagcgtctgaaagagctg

SEQ ID NO: 769020 - DNA, 75 bp, synthetic construct
  source 1..75: mol_type = other DNA
gatttcactctccaccgaagaaatcacggaaggcaagctggccggtcgcaccgcactgtatgccgaaatagagcc

SEQ ID NO: 769021 - DNA, 75 bp, synthetic construct
  source 1..75: mol_type = other DNA
ccatcatcatgagggcgtgggactcgctaacttcatctgaacaagagattttgtccaacttattgatcagaaaag

SEQ ID NO: 769022 - DNA, 75 bp, synthetic construct
  source 1..75: mol_type = other DNA
gatgacgccagtttctcccgcattcaggaagcggtggaaggcgtcgcaacgtcacaggccgacattatcgaccgt

SEQ ID NO: 769023 - DNA, 75 bp, synthetic construct
  source 1..75: mol_type = other DNA
gtgaagcgccgcttatctccgaagccattgagtctgaaatcatcgaaatggcagaacaacgccaggaagaaggca

SEQ ID NO: 769024 - DNA, 75 bp, synthetic construct
  source 1..75: mol_type = other DNA
agaagaatcgttacattgcaagcaaggttggcgtgtctgaaacctctgtgcggaaggtgttgaacatggcgcgta

SEQ ID NO: 769025 - DNA, 75 bp, synthetic construct
  source 1..75: mol_type = other DNA
gcttcgacgaagcgctggagtcactgatcgagtcgcatccgcagaaagattacatcctcaaagcgtccggtaaca

SEQ ID NO: 769026 - DNA, 75 bp, synthetic construct
  source 1..75: mol_type = other DNA
gatcccggctgagttcgtgcgctcccacttcgggcagaacttcaaaatcgaagatggcaaggtcgtggcttacga

SEQ ID NO: 769027 - DNA, 75 bp, synthetic construct
  source 1..75: mol_type = other DNA
gtgctcggtaccttcatcatgctggcaacctatacgctgttttacatcatgacggtctactctatgacctttagt

SEQ ID NO: 769028 - DNA, 75 bp, synthetic construct
  source 1..75: mol_type = other DNA
gctgttcgcctttaacccactgctcggttctggcaacccgattctggtttttgccttcctgctgctggggttaag

SEQ ID NO: 769029 - DNA, 75 bp, synthetic construct
  source 1..75: mol_type = other DNA
caagcctgggcactgagcgcctgaaattcacggcacagcaacgtcaggcggtgatgacgttcaacagtatccagg

SEQ ID NO: 769030 - DNA, 75 bp, synthetic construct
  source 1..75: mol_type = other DNA
ggtcagggtctgggcttaggcggtgaatggggcggcgcggcgctgctggcgactgaaaacgccccaccgcgcaaa

SEQ ID NO: 769031 - DNA, 75 bp, synthetic construct
  source 1..75: mol_type = other DNA
ccagttgggcttggcctgccgcgtaacgaagtgttgtggatgctgatgatggcagttattggttttggcgtgatg

SEQ ID NO: 769032 - DNA, 75 bp, synthetic construct
  source 1..75: mol_type = other DNA
tcgtaaaagcatggtaatcatcacgacgctgatcatcctgttcgcgctgttcgcctttaacccactgctcggttc

SEQ ID NO: 769033 - DNA, 75 bp, synthetic construct
  source 1..75: mol_type = other DNA
ccgcctgatccgtgttcgttacggtgatatcccactgccaaaaggtctgccacgcggtggctggacggagctgga

SEQ ID NO: 769034 - DNA, 75 bp, synthetic construct
  source 1..75: mol_type = other DNA
attgatgtacttatccaccggatggctcaaccaaccttacagcaacaacgattacaactcaccccgattctaatg

SEQ ID NO: 769035 - DNA, 75 bp, synthetic construct
  source 1..75: mol_type = other DNA
tgctgggcggagacttagcaacgcaatatctgatcgataaaggtcatacccgtatcgcctgtattaccggtccgc

SEQ ID NO: 769036 - DNA, 75 bp, synthetic construct
  source 1..75: mol_type = other DNA
cgcttcgtcagtgaagcgattaccgccaaagttgaagcggcgattaaagaactcaattacgcgccatcagctctg

SEQ ID NO: 769037 - DNA, 75 bp, synthetic construct
  source 1..75: mol_type = other DNA
gcaagctttatgacgccaccgctcactacaattcatcaaccaaaagatgaactgggagagctggcgattgatgta

SEQ ID NO: 769038 - DNA, 75 bp, synthetic construct
  source 1..75: mol_type = other DNA
gtgcgttaatcacggcattgctggaagaaaaaccattgccagaggcgattcgttttgcccatgctgccgctgcga

SEQ ID NO: 769039 - DNA, 75 bp, synthetic construct
  source 1..75: mol_type = other DNA
cctactgtgatgatggactgggctccgttcgatggcgacagcgatcttattcaggataactcgttgctgggcgga

SEQ ID NO: 769040 - DNA, 75 bp, synthetic construct
  source 1..75: mol_type = other DNA
gtgcctacactattcaggaaaaactatccgcgaaagagtagagcaatagaatttctgtttctcattctgtttatc

SEQ ID NO: 769041 - DNA, 75 bp, synthetic construct
  source 1..75: mol_type = other DNA
ctcaaaattcctgtttgatgaatatgttcgtcagattctgccagaagcgaactcgcagattgttggtttccgtta

SEQ ID NO: 769042 - DNA, 75 bp, synthetic construct
  source 1..75: mol_type = other DNA
tcgctttccatctcaacacccagcttaataacggtgaatcaccgaagctgttcgaaggtagcgagaactttaaac

SEQ ID NO: 769043 - DNA, 75 bp, synthetic construct
  source 1..75: mol_type = other DNA
ggtcatacccgtatcgcctgtattaccggcccgccgcctgcggttggaaggttatcgggcggcgatgaaacgtgc

SEQ ID NO: 769044 - DNA, 75 bp, synthetic construct
  source 1..75: mol_type = other DNA
ttcgccgcgctcagggatccgatctccagagcttactacacccgcaaaatgagtcagggaaaacgacacaatcag

SEQ ID NO: 769045 - DNA, 75 bp, synthetic construct
  source 1..75: mol_type = other DNA
atgttaagccttccgatccatcacgagaggtaaaaaaaccggcagcttcagcgagaactgatatcagggctaatt

SEQ ID NO: 769046 - DNA, 75 bp, synthetic construct
  source 1..75: mol_type = other DNA
aaatcgcagaactctccatgctctgcggcttcgatgatgatcttgccgcacagacaacgcaggccagcaaccgta

SEQ ID NO: 769047 - DNA, 75 bp, synthetic construct
  source 1..75: mol_type = other DNA
aaaatttctgattttaacaaggagaaaagatatcttaaagtttgtaaaagagtgaatgacccagcagatccaagg

SEQ ID NO: 769048 - DNA, 75 bp, synthetic construct
  source 1..75: mol_type = other DNA
ccaaaacctggtttgaactggcaccgaaagcggccaatatcattgtaaaaaacgaaaaatgggaccagagccaat

SEQ ID NO: 769049 - DNA, 75 bp, synthetic construct
  source 1..75: mol_type = other DNA
gattgcagccgcagcaggttatgatttagctaattcagaatataactttgcggtaaatgaattgggtaatgactc

SEQ ID NO: 769050 - DNA, 75 bp, synthetic construct
  source 1..75: mol_type = other DNA
gcacgctggattgccgtaggtcgtctggacgttaacacctgtggtctgttgctgttcaccaccgacggtgaactg

SEQ ID NO: 769051 - DNA, 75 bp, synthetic construct
  source 1..75: mol_type = other DNA
aaattgctaaactcggcgatcgcgttgaagttacccctgggctgaaaatccgtatcgatggtcacctgatttcgg

SEQ ID NO: 769052 - DNA, 75 bp, synthetic construct
  source 1..75: mol_type = other DNA
caatagtgaacgggaggcgtgtaattacctcgacagcctgccagcctctgaacgcagccgcgcgcaacgcgcggc

SEQ ID NO: 769053 - DNA, 75 bp, synthetic construct
  source 1..75: mol_type = other DNA
cagacaacgcaggccagcaaccgtatccgcggccttctgacccagatacatccggcactggagcgcgttctcggt

SEQ ID NO: 769054 - DNA, 75 bp, synthetic construct
  source 1..75: mol_type = other DNA
atatctgacctgaaacaacatggccagatactgctggttgttgatcagccagctaccatcggtgcgttacctgtc

SEQ ID NO: 769055 - DNA, 75 bp, synthetic construct
  source 1..75: mol_type = other DNA
cgaggtggcgcttgcggtagaacagcgagttcttgctcaccctctttacccggtcctgaccagtatgcccggagt

SEQ ID NO: 769056 - DNA, 75 bp, synthetic construct
  source 1..75: mol_type = other DNA
tgatctcgtgttatggcagaatccaacagttgagcaacagatggttgttgacgctctgcacactattaaattcac

SEQ ID NO: 769057 - DNA, 75 bp, synthetic construct
  source 1..75: mol_type = other DNA
attaactacaacccaatcaagtatgaaatcctgttttcacattgggcaggaatggcccgtgtctactctgctcgt

SEQ ID NO: 769058 - DNA, 75 bp, synthetic construct
  source 1..75: mol_type = other DNA
tatggcggatgggcgtattttccgctgattagtgtccggatcgggggcatttttgtctgtgacagtattgctcag

SEQ ID NO: 769059 - DNA, 75 bp, synthetic construct
  source 1..75: mol_type = other DNA
catcaggtgcgggttgaaaaaatcctgaaccgtgcgggcatccagccgcttcacaggaagtgctcattcgggaac

SEQ ID NO: 769060 - DNA, 75 bp, synthetic construct
  source 1..75: mol_type = other DNA
ccacaccagcacgaattcgacctgattgtcgcgacaggtgatttagcgcaggatcaaactgctgcggcctatctg

SEQ ID NO: 769061 - DNA, 75 bp, synthetic construct
  source 1..75: mol_type = other DNA
gctacctgcgggttgtagttggctcgatcaacacagtctgcgtaacgcgggcgaactggataccgtgctggcgaa

SEQ ID NO: 769062 - DNA, 75 bp, synthetic construct
  source 1..75: mol_type = other DNA
aacggcttcactgcgcagtgtcgggatgctgacgaacctgaatcacgcagcgatgagcacactcctcggcgagcg

SEQ ID NO: 769063 - DNA, 75 bp, synthetic construct
  source 1..75: mol_type = other DNA
tccatgaacggtggtcgctgggtgacgtttaactgggagagctggcgtccgaacgtcagccagcacaggaactga

SEQ ID NO: 769064 - DNA, 75 bp, synthetic construct
  source 1..75: mol_type = other DNA
aacctggtactgggaagaaccacttagcggcagctatcgggaatcacctgctgaaagacggtcagacagtgattg

SEQ ID NO: 769065 - DNA, 75 bp, synthetic construct
  source 1..75: mol_type = other DNA
gggagctgtgcgaagtggatctgctggttcttgatgaaattggcattcagcgcgagacaaaaaacgagcaggtgg

SEQ ID NO: 769066 - DNA, 75 bp, synthetic construct
  source 1..75: mol_type = other DNA
aatacgcgctgagccaggccaaatccatagctgacgaactgatgaccgagtgcacgaattttgtgttcagcggta

SEQ ID NO: 769067 - DNA, 75 bp, synthetic construct
  source 1..75: mol_type = other DNA
tgaacggtggtcgatgggtgacgtttaactgggatagctggcgtccaaatgtcagcaatatgagggttgtgaagt

SEQ ID NO: 769068 - DNA, 75 bp, synthetic construct
  source 1..75: mol_type = other DNA
ggcggaagtgctgcaactggcgcatttgctggatcgcaaaccgaaagcgctctctggtggtcagcgtcagcgtgt

SEQ ID NO: 769069 - DNA, 75 bp, synthetic construct
  source 1..75: mol_type = other DNA
gattatggaccgcatgaccatgaacggttgtcggtgggtgacgtttaactgggatagctggcgttcaaatgtcag

SEQ ID NO: 769070 - DNA, 75 bp, synthetic construct
  source 1..75: mol_type = other DNA
ttaaccgctccggtatccagccgcttcaccggaagtgtacgttcggtaactaccgggtgcagaacgatggtcagc

SEQ ID NO: 769071 - DNA, 75 bp, synthetic construct
  source 1..75: mol_type = other DNA
ctcccagcttctggcaaatatgagctgcgtgtgctgcaaacccgaaacgacgcccgtaaaaacaaaactaaaaaa

SEQ ID NO: 769072 - DNA, 75 bp, synthetic construct
  source 1..75: mol_type = other DNA
cattgcttgaggcgttgcctgaacccgtgctttcggtcgatatgaaaagcaaagtggatatggcgaatccggcga

SEQ ID NO: 769073 - DNA, 75 bp, synthetic construct
  source 1..75: mol_type = other DNA
cccgactgattgagcaggtctgtctacagcgtcagaacctgctggcccgtgccgttacggaactgaacttttgtt

SEQ ID NO: 769074 - DNA, 75 bp, synthetic construct
  source 1..75: mol_type = other DNA
ttatgcatgaaatccgtttcatcgttcaggaatcggaagaggccatccttgagagggagcgctggctggtaccaa

SEQ ID NO: 769075 - DNA, 75 bp, synthetic construct
  source 1..75: mol_type = other DNA
aaaaaccacaccacgccttacgctggtctggtgtttgacatcaatgacaactggtcgacctacgccagctatacc

SEQ ID NO: 769076 - DNA, 75 bp, synthetic construct
  source 1..75: mol_type = other DNA
cggctcggtgctgctggatgagattggtgagatgtctccacggatgcaggctaaattgctgcgtttccttaatga

SEQ ID NO: 769077 - DNA, 75 bp, synthetic construct
  source 1..75: mol_type = other DNA
ttaagcgcgccactgctgattacgggtgacacgggtactggtaaagatctctttgcttacgcctgtcatcaggcc

SEQ ID NO: 769078 - DNA, 75 bp, synthetic construct
  source 1..75: mol_type = other DNA
atgaaaaatattgcggcaggtggtgttcttgaacgcatccgtaagctggccccgcagcatgtagccgcgccgtac

SEQ ID NO: 769079 - DNA, 75 bp, synthetic construct
  source 1..75: mol_type = other DNA
tgtgatggaccgcatgaccatgaacggtggtcgatgggtgacatttaactgggatagctggcgtccaaatgtcag

SEQ ID NO: 769080 - DNA, 75 bp, synthetic construct
  source 1..75: mol_type = other DNA
ggcaacttgctgaaggacgaaaacgcagcgaggagattaaccgccagaatcaccagttgcgggtggaaaaaatcc

SEQ ID NO: 769081 - DNA, 75 bp, synthetic construct
  source 1..75: mol_type = other DNA
ttaccctgcaacctgctcgacaggctgcactgcaggccatcatgactgtggaagatgctcgccagcgcggcgctc

SEQ ID NO: 769082 - DNA, 75 bp, synthetic construct
  source 1..75: mol_type = other DNA
actgtccgctgccgctgacaatggatgtgcaggctgaactttttccggaagtccttcatacccgaacagtacgca

SEQ ID NO: 769083 - DNA, 75 bp, synthetic construct
  source 1..75: mol_type = other DNA
cccgcgagtacgaacagcgctggaaactgcgccagaacctgctggagcaggcgaaaatcgacctgaattttcagt

SEQ ID NO: 769084 - DNA, 75 bp, synthetic construct
  source 1..75: mol_type = other DNA
tgtggttaccgtggctgatgtcatgagtgctctacacgccagctatgacgacgggcaatcaggcgaaaaattttt

SEQ ID NO: 769085 - DNA, 75 bp, synthetic construct
  source 1..75: mol_type = other DNA
cgcgagacgaaaaacgagcagatagtactgcaccagattattgatcgacggacagcgtcgatgcgtagcgtggga

SEQ ID NO: 769086 - DNA, 75 bp, synthetic construct
  source 1..75: mol_type = other DNA
tttaggcggtgcagtactgactaatggcagcacgctgggtacgttaggcggtgcagcagtcggtggtattatcgg

SEQ ID NO: 769087 - DNA, 75 bp, synthetic construct
  source 1..75: mol_type = other DNA
atgtttgtaacgagcaaaaaaatgaccgcagctgttctggcaattacactggcaatgtctctaagcgcctgttct

SEQ ID NO: 769088 - DNA, 75 bp, synthetic construct
  source 1..75: mol_type = other DNA
gccattctctaccgcagtaacgcccagtcgcgtgtgctggaagaagcactgttgcaggcgagtatgccgtaccgt

SEQ ID NO: 769089 - DNA, 75 bp, synthetic construct
  source 1..75: mol_type = other DNA
ctccctgcttctggcaaatatgagctgcgagtgctgcaaacccgaaacgacgcccgtaaaaacaaaactaaaaaa

SEQ ID NO: 769090 - DNA, 75 bp, synthetic construct
  source 1..75: mol_type = other DNA
aatgtcaatgttgagttcagaaaaggccatagcagcgctcagtactccggcgaaataaagggatacgattacgat

SEQ ID NO: 769091 - DNA, 75 bp, synthetic construct
  source 1..75: mol_type = other DNA
gggttagcattagacgaactgattgatgagtatcgttcattatctttactgccgcagaatacgcagtgggcaatg

SEQ ID NO: 769092 - DNA, 75 bp, synthetic construct
  source 1..75: mol_type = other DNA
gggcatgaaaggaacttcttgtcgatgctgcactgtattaatccggaagcctaccaagtggatgagacccatctg

SEQ ID NO: 769093 - DNA, 75 bp, synthetic construct
  source 1..75: mol_type = other DNA
gcgtttgtgcaggccactccggaggctgtcagaaataaaacggttcagcccggggattactcttcaacggtaacg

SEQ ID NO: 769094 - DNA, 75 bp, synthetic construct
  source 1..75: mol_type = other DNA
gctggtgcgcgctgctggcggttcgctggcgcttgccggtgcgacccctgtttatgctgccctgggcgctgaagt

SEQ ID NO: 769095 - DNA, 75 bp, synthetic construct
  source 1..75: mol_type = other DNA
ccaaacttttttatatccttttcactttgctttgcttagcttctttcattgccttctgtattttacttgcaggat

SEQ ID NO: 769096 - DNA, 75 bp, synthetic construct
  source 1..75: mol_type = other DNA
ttgtattaaatggattaaaagaagaagcgagaggtttgatcatgaactcagaaatcttattgacttactaaaaag

SEQ ID NO: 769097 - DNA, 75 bp, synthetic construct
  source 1..75: mol_type = other DNA
caatatggaaggcagcggtgaacatagccgtttgcaggtggcattccagggccagggaatcaaatggctggtggc

SEQ ID NO: 769098 - DNA, 75 bp, synthetic construct
  source 1..75: mol_type = other DNA
atggcgaaggggcgtagcgtgattatcgtcaccgtgtctgacgtcatgagtgtgttgcatgacagctacgacaac

SEQ ID NO: 769099 - DNA, 75 bp, synthetic construct
  source 1..75: mol_type = other DNA
catcgctgatgaactgatgaccgggtgtacaaattttgcgttcagcggaaaacctggtaccgggaagaatcactt

SEQ ID NO: 769100 - DNA, 75 bp, synthetic construct
  source 1..75: mol_type = other DNA
aacgatctctttatggcaatggttacttgtgccgtagttgctggtctgcccgcgctggctgtttggttctgggat

SEQ ID NO: 769101 - DNA, 75 bp, synthetic construct
  source 1..75: mol_type = other DNA
gacagcgtcgatgcgcagcgtggggatgctgacaaacctgaactatgaggcgatgaaaacattgctcggcgagcg

SEQ ID NO: 769102 - DNA, 75 bp, synthetic construct
  source 1..75: mol_type = other DNA
cgcgttacatgccagctatgacgacggactgtcaggggaaaaatttttgcgtgaactgtgcgaagtggacctcct

SEQ ID NO: 769103 - DNA, 75 bp, synthetic construct
  source 1..75: mol_type = other DNA
tattgcaccagataattgatcgccggacagcatcactgtgcagtgtcgggatgttaacaaacctgaatcatgccg

SEQ ID NO: 769104 - DNA, 75 bp, synthetic construct
  source 1..75: mol_type = other DNA
tacactcggcgaaaggtctggagttcccgcaggtgtttatcgtcggtatggaagagggtatgttcccaagccaga

SEQ ID NO: 769105 - DNA, 75 bp, synthetic construct
  source 1..75: mol_type = other DNA
gctggcgcaccgcctgctgcgtgcgcaccatatggacgccaatctgccgcaggatttccagatcctcgacagtga

SEQ ID NO: 769106 - DNA, 75 bp, synthetic construct
  source 1..75: mol_type = other DNA
gcatgtgggtcggcaccttccacgggctggcgcaccgtctgctgcgtgcgcaccatatggacgccaatctgccgc

SEQ ID NO: 769107 - DNA, 75 bp, synthetic construct
  source 1..75: mol_type = other DNA
gcgaagtgtgcgccagggtgcgcaccttactgcgtcgggtgaagaagttctcgacgccgtctcccgtcatccgta

SEQ ID NO: 769108 - DNA, 75 bp, synthetic construct
  source 1..75: mol_type = other DNA
tcgaagacgagcaagggatagccgatacgctggtctacatgttgcaacaggaaggttttgacgtcgaggtctttg

SEQ ID NO: 769109 - DNA, 75 bp, synthetic construct
  source 1..75: mol_type = other DNA
agtgatggaccgtatgaccatgaatggtggtcgttgggtgaattttaactgggagagctggcggtcaaacgttgg

SEQ ID NO: 769110 - DNA, 75 bp, synthetic construct
  source 1..75: mol_type = other DNA
cgtcacaggccacacagctgaaacagcagttatcggcggaaaaagccgtcaccgatcaggcactgaagcaggcag

SEQ ID NO: 769111 - DNA, 75 bp, synthetic construct
  source 1..75: mol_type = other DNA
gaatgtgcgcctgaatgcgtcatggaataacggcggcgataccaatatcggcgccgggtttgccgtgggctggta

SEQ ID NO: 769112 - DNA, 75 bp, synthetic construct
  source 1..75: mol_type = other DNA
gtgacggcgatttcctccattccgtatgtgaacagtgaacgtttttcattcgggatggcgatggggcattaccgc

SEQ ID NO: 769113 - DNA, 75 bp, synthetic construct
  source 1..75: mol_type = other DNA
gatgcgccgtgggatgtctggcttcacggctgaataccagtcgatgatgcagaagactggttttgacgcggataa

SEQ ID NO: 769114 - DNA, 75 bp, synthetic construct
  source 1..75: mol_type = other DNA
agacgtggaaagaaggtggcaaaagcctgattgactgggggaaatggaagactgaaattgatcaggccgtcaaaa

SEQ ID NO: 769115 - DNA, 75 bp, synthetic construct
  source 1..75: mol_type = other DNA
gtgactgcaatatcttccattccgtatgtgaacagtgagcgtttttcgttcgggatggcgatggggcattaccgt

SEQ ID NO: 769116 - DNA, 75 bp, synthetic construct
  source 1..75: mol_type = other DNA
tgagatcctttacgcggcgcagctgtgcggtgtgcaggacgtgtttaacgtcggcggcgcacaggccattgccgc

SEQ ID NO: 769117 - DNA, 75 bp, synthetic construct
  source 1..75: mol_type = other DNA
acgcccgtgaactggtcgatagcatcaccagtgccggttcggtatttcttggtgactggtcaccggaatcggcgg

SEQ ID NO: 769118 - DNA, 75 bp, synthetic construct
  source 1..75: mol_type = other DNA
actggcgtttggtactgaatctgtgccgaaagtggacaaaatcttcgggccgggtaacgcctttgtcaccgaagc

SEQ ID NO: 769119 - DNA, 75 bp, synthetic construct
  source 1..75: mol_type = other DNA
aggggcaggctgaccgtctggctcaggaagtgaaaaaacgggttgagcaggatacgtcggtcagtaatgacacgc

SEQ ID NO: 769120 - DNA, 75 bp, synthetic construct
  source 1..75: mol_type = other DNA
ggagaaggtgaaagcggagctggcgcagaaacaggcggaatatcaggcggcggataaagcgctgaatgaggctca

SEQ ID NO: 769121 - DNA, 75 bp, synthetic construct
  source 1..75: mol_type = other DNA
atgtcgaaaaataacaacagtctcaaacagcatgccttcaatatgctgtcggctggcagcgaccttaaagaagtg

SEQ ID NO: 769122 - DNA, 75 bp, synthetic construct
  source 1..75: mol_type = other DNA
cgctgctggggatcctgcgcgataaggtcggctcaaacctggctggtggcctgagcggcacgctgaataacctca

SEQ ID NO: 769123 - DNA, 75 bp, synthetic construct
  source 1..75: mol_type = other DNA
attgcgctgcgcattctgaacagtacgttctggatgtcgccgattggcctcattaccgcgctggcggcggggatt

SEQ ID NO: 769124 - DNA, 75 bp, synthetic construct
  source 1..75: mol_type = other DNA
agtctcctgccgataagtatgatctcatcaataaaacctcccgtgtttctcctgacagtggccgtttttatgaac

SEQ ID NO: 769125 - DNA, 75 bp, synthetic construct
  source 1..75: mol_type = other DNA
aaggcagcaggcatatgaggcgctgagaaaggaaaatcccggccaagactttttcactgatgagcaaatccagcg

SEQ ID NO: 769126 - DNA, 75 bp, synthetic construct
  source 1..75: mol_type = other DNA
tgttgaaggagctgcactgtccgtggtggcctttacggctaagatcgcctccggtctggataatctttactgggc

SEQ ID NO: 769127 - DNA, 75 bp, synthetic construct
  source 1..75: mol_type = other DNA
caaaatcggctctaatcttgcgggtgggcttgcgggttcgctggacacactgcgccgccatatcctggacaactt

SEQ ID NO: 769128 - DNA, 75 bp, synthetic construct
  source 1..75: mol_type = other DNA
cgggctaaccagtatgcgcagatgctgggtattgacgaaaataccctcatggcgatgcgccggggtgtgggtgat

SEQ ID NO: 769129 - DNA, 75 bp, synthetic construct
  source 1..75: mol_type = other DNA
cctcacaaaccggctccagcgccgaggctgcccagaactcactggagagcctggcgcgcttcatgcgcagcaatc

SEQ ID NO: 769130 - DNA, 75 bp, synthetic construct
  source 1..75: mol_type = other DNA
cgatgtcacgcaaggaaggttacgggcaatggaattccccactggcgagcctcgcggcaaaccaggcggcctccc

SEQ ID NO: 769131 - DNA, 75 bp, synthetic construct
  source 1..75: mol_type = other DNA
tctcatgcaacgccgatggatgggtggatggcaatggcccggcagattcggctctacttcaccgggaaaagtgct

SEQ ID NO: 769132 - DNA, 75 bp, synthetic construct
  source 1..75: mol_type = other DNA
atactgctgccatctttactggcgttgggcaaaagctcaacaacatgccgtattaccgcgcgaagcaatacgcgc

SEQ ID NO: 769133 - DNA, 75 bp, synthetic construct
  source 1..75: mol_type = other DNA
gctgcgcagtgtggccatcacggaatcgggcggtaatcagttcgccgtttcaggcgctggcgctaaaggtctgtt

SEQ ID NO: 769134 - DNA, 75 bp, synthetic construct
  source 1..75: mol_type = other DNA
aatattaacgacccacaaacgatgtcagcattaatgagtagcattattcaccatgagaatgggcgaaacatctat

SEQ ID NO: 769135 - DNA, 75 bp, synthetic construct
  source 1..75: mol_type = other DNA
caccagcgccggttcggtatttcttggtgactggtcaccggaatcggcaggtgattacgcctccggcaccaacca

SEQ ID NO: 769136 - DNA, 75 bp, synthetic construct
  source 1..75: mol_type = other DNA
gtatcattatgaaggtgtgacagatattatggatctggctgccgtgtatttagttgctattgctcgtggtcacat

SEQ ID NO: 769137 - DNA, 75 bp, synthetic construct
  source 1..75: mol_type = other DNA
tttattgaaagaaagagacaagagtttaataggtaaaggggctgtaaaattacagaagtataatcaacaagataa

SEQ ID NO: 769138 - DNA, 75 bp, synthetic construct
  source 1..75: mol_type = other DNA
ggctttatgtgctcaatggttgctatttggggtttgttccttacagtcgccatgattttgaacaggagaatgagt

SEQ ID NO: 769139 - DNA, 75 bp, synthetic construct
  source 1..75: mol_type = other DNA
gctgttctggcggtaactacgaaaacgtcatcgcggcggcgaatgcgctgcgcggtcaatcctgcggcaatgaca

SEQ ID NO: 769140 - DNA, 75 bp, synthetic construct
  source 1..75: mol_type = other DNA
tgattggcgcaggcgcaatcatcagaaccgcgttctgcggcccatgctttggcgcgggcgcgatacgccaatcaa

SEQ ID NO: 769141 - DNA, 75 bp, synthetic construct
  source 1..75: mol_type = other DNA
tggaacgatctgtttatggcaatggttacttgtgctgttgttgcgggtctgccagcgcttgcggtctggttctgg

SEQ ID NO: 769142 - DNA, 75 bp, synthetic construct
  source 1..75: mol_type = other DNA
atgttgtttaataaacacaaccttgctactaacagccgcattcgtgctcagtgggatcacctttgggcgcagcgc

SEQ ID NO: 769143 - DNA, 75 bp, synthetic construct
  source 1..75: mol_type = other DNA
accgcgcatgatgccgaccgataactacaacttccgcattatgtctgctgagggtcttcagatcacctgtgatat

SEQ ID NO: 769144 - DNA, 75 bp, synthetic construct
  source 1..75: mol_type = other DNA
cgcacatcgtcaatggtgctgtagtcggtagcgtgctgagcgtcattatgccgttcgctccggttggtgagattc

SEQ ID NO: 769145 - DNA, 75 bp, synthetic construct
  source 1..75: mol_type = other DNA
gccgtattgcaggtgttaccgatgtgcgtactgtcccgtggatgccttccgaacgtgagcatctggcgttgagcg

SEQ ID NO: 769146 - DNA, 75 bp, synthetic construct
  source 1..75: mol_type = other DNA
ggttggtaaaaccgccaagctgtataacgtggtcggcgacatcgctgacgacgtgtcagtaagcatcgatggtca

SEQ ID NO: 769147 - DNA, 75 bp, synthetic construct
  source 1..75: mol_type = other DNA
gccaacctggcagcgccgcacattgcaaacgggactgtcgtaggcagtgttctgaatatcgttaaaccgttcatt

SEQ ID NO: 769148 - DNA, 75 bp, synthetic construct
  source 1..75: mol_type = other DNA
tagttcacgtatttcgtttgatgaaatgcaaattatcgctttgaatgctgcaacaggagaatataactggaagat

SEQ ID NO: 769149 - DNA, 75 bp, synthetic construct
  source 1..75: mol_type = other DNA
tcagtgggtttgtatattcctggcggctccgccccgctcttctcaacggtattaatgctggcgactccggcgcgt

SEQ ID NO: 769150 - DNA, 75 bp, synthetic construct
  source 1..75: mol_type = other DNA
gcactgagcgccagccgcctgatcgtaaccaacgatttagcgcagtgcgtggagatctccaaccagtacggcccg

SEQ ID NO: 769151 - DNA, 75 bp, synthetic construct
  source 1..75: mol_type = other DNA
ggtgattttactgactcctgatgctgatatggcgcgtcgcgttgccgaagccgtcgaacgccagctggcagaact

SEQ ID NO: 769152 - DNA, 75 bp, synthetic construct
  source 1..75: mol_type = other DNA
ccagcaagtcacgcgcccggtggcttcggttggtttgtatattcctggcggctccgccccgctcttctcaacggt

SEQ ID NO: 769153 - DNA, 75 bp, synthetic construct
  source 1..75: mol_type = other DNA
ggtgattttactgacgcccgctgctgatatggcgcgtcgcgttgccgaagctgtcgaacgccagttggcagaact

SEQ ID NO: 769154 - DNA, 75 bp, synthetic construct
  source 1..75: mol_type = other DNA
gacggtgcggcgatcgatatgcccgcaggcccgtcggaagtgttggtcattgccgacagcggcgcaacgccggat

SEQ ID NO: 769155 - DNA, 75 bp, synthetic construct
  source 1..75: mol_type = other DNA
tccgagcggcagaggcaccggtagaagagaaagcggtctggagttcctgcaccgttaactgcgggagccgctgtc

SEQ ID NO: 769156 - DNA, 75 bp, synthetic construct
  source 1..75: mol_type = other DNA
acctgatgccgacggaacaggaagatctcatctcacacgaatccgccgggaatatggggtatgtgatcctcgccc

SEQ ID NO: 769157 - DNA, 75 bp, synthetic construct
  source 1..75: mol_type = other DNA
tttggctacacttttgtggcgctggatcctgatgggcatcgtattcgcctgtgtgcgacggacacaagtgggatc

SEQ ID NO: 769158 - DNA, 75 bp, synthetic construct
  source 1..75: mol_type = other DNA
tttcagtacttaccgggaacgtcggcataaacggcggtaactcgggtgtacgcgaaggtagctgggatctggggg

SEQ ID NO: 769159 - DNA, 75 bp, synthetic construct
  source 1..75: mol_type = other DNA
cggccgttctatccgtcggcggatgaatcatccagatcggttgaaatatcccatgaagcgcgtcggaaagcgtgg

SEQ ID NO: 769160 - DNA, 75 bp, synthetic construct
  source 1..75: mol_type = other DNA
gtttatcaaacctttactgaaggtcgcagtcagcatgaatggatcaaatatctccatgcgaaaacgaaggaacgt

SEQ ID NO: 769161 - DNA, 75 bp, synthetic construct
  source 1..75: mol_type = other DNA
gggtgctggagtacgccgcgggcaacggtgcggctctgttacagaaaggggggcagattcgctgccgctttaagg

SEQ ID NO: 769162 - DNA, 75 bp, synthetic construct
  source 1..75: mol_type = other DNA
cttccgctgccggagacatatgaccgtccggacccgcgtattaagcagctggcgcgccgcagtacggtgacaccg

SEQ ID NO: 769163 - DNA, 75 bp, synthetic construct
  source 1..75: mol_type = other DNA
ggcagcacgaaattcaatgggtggaaattatggaacctagcacttgaaggtataacaagcttttccactttccct

SEQ ID NO: 769164 - DNA, 75 bp, synthetic construct
  source 1..75: mol_type = other DNA
ttttatggccgcagcaaaaagcatggaccgtaatagctctcagttaatccgggattttatgcgtcagactgttga

SEQ ID NO: 769165 - DNA, 75 bp, synthetic construct
  source 1..75: mol_type = other DNA
cttccccatgacatggtcgaatcttccgctgctgcatggcgggatgaaatgagcaggaagatcgccggtaaatga

SEQ ID NO: 769166 - DNA, 75 bp, synthetic construct
  source 1..75: mol_type = other DNA
agcaactcgagcgcggcgatgtgcttccccatgacatggtcgaatcttccgctgctgcatggcgggatgaaatga

SEQ ID NO: 769167 - DNA, 75 bp, synthetic construct
  source 1..75: mol_type = other DNA
ttcatgaaaggtgtattgagttgggtaggtggtcgcaccgatgttgttgagtatgttcgcgcagaacgtgtcgct

SEQ ID NO: 769168 - DNA, 75 bp, synthetic construct
  source 1..75: mol_type = other DNA
ttcatgaagggcgttctgagttgggttggagggcgtactgatgttgtcgagtatgctcgcgctgggcgtgtcgcc

SEQ ID NO: 769169 - DNA, 75 bp, synthetic construct
  source 1..75: mol_type = other DNA
cataacaagtttctcaactttcccattacgcatgtggacatatattggcttgtttgtagcaggtatttcattctt

SEQ ID NO: 769170 - DNA, 75 bp, synthetic construct
  source 1..75: mol_type = other DNA
tgctaaacgatctgaccgctcaacggatggcagactgaagcgaaaaacggctgagtggttctataagctccacaa

SEQ ID NO: 769171 - DNA, 75 bp, synthetic construct
  source 1..75: mol_type = other DNA
gagaatgttggcgacttccggctcatgtctcgcgaagtagtagaaaacattaagctcatgccagaacgaaacctg

SEQ ID NO: 769172 - DNA, 75 bp, synthetic construct
  source 1..75: mol_type = other DNA
ttatggcgcatggatgattttagataagattctttttggcaacagcgttccaggctacccatcactactcgtttc

SEQ ID NO: 769173 - DNA, 75 bp, synthetic construct
  source 1..75: mol_type = other DNA
gatatcgtcgccgagcctcgtcgcattgccaaccgtatcgtcgaagaagcgatgattgccgctaacatttgtgcg

SEQ ID NO: 769174 - DNA, 75 bp, synthetic construct
  source 1..75: mol_type = other DNA
aaccacagacgcatttctggaaacggagtgcgtggaaaatgtcgccacaaccgaaatcattaaagcaactgaaga

SEQ ID NO: 769175 - DNA, 75 bp, synthetic construct
  source 1..75: mol_type = other DNA
gaccaggttgaggcaggacgccagcaacttgagcgcggtgatgtgctttcccatgacatggtcgaatcctcagct

SEQ ID NO: 769176 - DNA, 75 bp, synthetic construct
  source 1..75: mol_type = other DNA
acggcagcataatgcctcgacgtataggaaattgaaaaaccagtcgataccattgtccacgccttatgccacgtg

SEQ ID NO: 769177 - DNA, 75 bp, synthetic construct
  source 1..75: mol_type = other DNA
gcaatgctcgacacgctggcaaaagcaggccacacagcacaagtgaactggttccatgcggcagaaaatggcgat

SEQ ID NO: 769178 - DNA, 75 bp, synthetic construct
  source 1..75: mol_type = other DNA
gtgctggcaaatgtatttatcaatcgcgaggcggaaatctataacgaaaacgccagcaaagccggtggctgggaa

SEQ ID NO: 769179 - DNA, 75 bp, synthetic construct
  source 1..75: mol_type = other DNA
ggaacagtacaacatcgtcggcgaacacctgttggcgacgctggacgaaatgttcagcccgggccaggaagtgct

SEQ ID NO: 769180 - DNA, 75 bp, synthetic construct
  source 1..75: mol_type = other DNA
agttgcatctaatagcattccttatctgacgcgtaaagggcagattcgctacactactgcaatggggaaaccgac

SEQ ID NO: 769181 - DNA, 75 bp, synthetic construct
  source 1..75: mol_type = other DNA
agcgattaatgcaaaactcactgtgggtcaatacgatactgaatcctctattttcgattctttccatttttctgg

SEQ ID NO: 769182 - DNA, 75 bp, synthetic construct
  source 1..75: mol_type = other DNA
tcataatctggaaaaagaagcaccagacggcgtcgctaccgaaatgctcgatgaaggtctggttcgtgaagatct

SEQ ID NO: 769183 - DNA, 75 bp, synthetic construct
  source 1..75: mol_type = other DNA
atgcaccacatcagggcgataattcgcaaaatataagttcctatgggcaggctggggttaatcttggggcctggc

SEQ ID NO: 769184 - DNA, 75 bp, synthetic construct
  source 1..75: mol_type = other DNA
gggttggctgaacaatgtatccctgtatggtggttcagttttaacaaaccgtgattatcaatctctggctgccgg

SEQ ID NO: 769185 - DNA, 75 bp, synthetic construct
  source 1..75: mol_type = other DNA
cctgatctacgtggttacgcaccgcaaatcacgggtgttgcacaaacgaatgcaaaggtcactgtctcacagggt

SEQ ID NO: 769186 - DNA, 75 bp, synthetic construct
  source 1..75: mol_type = other DNA
gattacaagtttttctacattccctttgcgagtatggacatacattggcctattagttgcaggagttgcttttat

SEQ ID NO: 769187 - DNA, 75 bp, synthetic construct
  source 1..75: mol_type = other DNA
ttcatgaaaggtatcttgagctgggttggcggcagagcagacgttgttgaatacgctcgcgcagaacgcgttgcg

SEQ ID NO: 769188 - DNA, 75 bp, synthetic construct
  source 1..75: mol_type = other DNA
ttcatgaagggggttttgagttgggtgggtggtcgcactgatatcgttgattatgcccgcgcagagcgtgttgct

SEQ ID NO: 769189 - DNA, 75 bp, synthetic construct
  source 1..75: mol_type = other DNA
ttaataggcataggagttcttggagagtatataggaagaatttatgttgaagttaagcaacgaccaagatacatt

SEQ ID NO: 769190 - DNA, 75 bp, synthetic construct
  source 1..75: mol_type = other DNA
agccaaagaaacgtggaaccacgccgactggaaccgtttttatcagcgcattttgtgttacagccactacagcca

SEQ ID NO: 769191 - DNA, 75 bp, synthetic construct
  source 1..75: mol_type = other DNA
gccgcaaagtgtgcgcttatctggtgaacagccgctactacccgcagctggcgcagcagatgaacaacgatgagc

SEQ ID NO: 769192 - DNA, 75 bp, synthetic construct
  source 1..75: mol_type = other DNA
atccgctacatccatcacccggaaaaactgccgctgggcaaaaaacgcaatatgctcaacgaactggcgcgcggc

SEQ ID NO: 769193 - DNA, 75 bp, synthetic construct
  source 1..75: mol_type = other DNA
caaggaatctgaagttcttactaatctggaaatccttgagcggggttttgagcaagcttcaccctccacggtaac

SEQ ID NO: 769194 - DNA, 75 bp, synthetic construct
  source 1..75: mol_type = other DNA
tggcagaaaccaaacctgggctgccgcaggatggcgcgttctatggccttggtgtgcatacgatggaccagatta

SEQ ID NO: 769195 - DNA, 75 bp, synthetic construct
  source 1..75: mol_type = other DNA
cgctttgattcctgcttcctgacggcgaaaaaagcgattgaaagcggtaagctgggagagattgttgaagtggaa

SEQ ID NO: 769196 - DNA, 75 bp, synthetic construct
  source 1..75: mol_type = other DNA
ttggtgggaaaattgatgttgttgagtatgcaagagctgaacgtgttgccggagactcaaaatttaatggctgga

SEQ ID NO: 769197 - DNA, 75 bp, synthetic construct
  source 1..75: mol_type = other DNA
ttctatgccgtgtcgttcaccctggcgatgggacatgacgaagcggtaaaagcctatgagcagaatatttctgcc

SEQ ID NO: 769198 - DNA, 75 bp, synthetic construct
  source 1..75: mol_type = other DNA
tcagggcggcatcgccgtcagaccttgctgaacgactgacacaaaaactgaaggaggggtggcagccatttggca

SEQ ID NO: 769199 - DNA, 75 bp, synthetic construct
  source 1..75: mol_type = other DNA
cactattgcgatgcgtttatggatggcaaggcgggagaacgagcggcgttggtgattgtggaggcgttggggtaa

SEQ ID NO: 769200 - DNA, 75 bp, synthetic construct
  source 1..75: mol_type = other DNA
gtgggtatccatctttactggtttctatcctgtttcttggaggaatccagctgatcggtatcggtgtcctgggtg

SEQ ID NO: 769201 - DNA, 75 bp, synthetic construct
  source 1..75: mol_type = other DNA
gtcattcctaatctgatcgaaaaatggcaggctggtgcagatatggtgttggctaagcgctcagaccgttcaact

SEQ ID NO: 769202 - DNA, 75 bp, synthetic construct
  source 1..75: mol_type = other DNA
taaaataagcaatccgcagatagaggaaaatgttggagatttcaggctgatgtctcgcgaggtagtggagaatat

SEQ ID NO: 769203 - DNA, 75 bp, synthetic construct
  source 1..75: mol_type = other DNA
cttattggaatcggagtgctaggggaatatataggaaggatttatttagagtccaaaaaaagacctcgttacatt

SEQ ID NO: 769204 - DNA, 75 bp, synthetic construct
  source 1..75: mol_type = other DNA
gcgggtatccctccctgcttgtatcaatacttttcttgggtggagtgcaactgatcgggattggtgttctcggtg

SEQ ID NO: 769205 - DNA, 75 bp, synthetic construct
  source 1..75: mol_type = other DNA
tgtcgacctgcaagacccaattgaggttatccctcatcttattgaaaagtggcaggcaggtgctgacatggtgct

SEQ ID NO: 769206 - DNA, 75 bp, synthetic construct
  source 1..75: mol_type = other DNA
tatttaatgaagaagacgccataaccattttctatagggaaatccgtcattttcagcccttccagggggaagagg

SEQ ID NO: 769207 - DNA, 75 bp, synthetic construct
  source 1..75: mol_type = other DNA
tgttgacctgcaagacccgattgaagtaattcctcatcttattgaaaagtggcaggcaggtgctgatatggtgct

SEQ ID NO: 769208 - DNA, 75 bp, synthetic construct
  source 1..75: mol_type = other DNA
cttataggaattggtgttcttggcgaatatattgggcgaatttacatagaagtcaagaagcgacctaagtacata

SEQ ID NO: 769209 - DNA, 75 bp, synthetic construct
  source 1..75: mol_type = other DNA
cttcgcatgtggacgtatattggtttattagtcgctgggctagcatttatatatggctcatggatgatttttgac

SEQ ID NO: 769210 - DNA, 75 bp, synthetic construct
  source 1..75: mol_type = other DNA
ctcattggtattggtgttcttggtgagtacattggacgaatttatattgaaacaaaacaacgcccaaaatacatt

SEQ ID NO: 769211 - DNA, 75 bp, synthetic construct
  source 1..75: mol_type = other DNA
taaaataagcaacccaaagattgaagagaatgttggtgatttccggttaatgagccgtgaggttgtcgaaaatat

SEQ ID NO: 769212 - DNA, 75 bp, synthetic construct
  source 1..75: mol_type = other DNA
atgctgccgatatcgcgatgtatcaggagaaaaaacacaaacagaaaacaccttttgtcgcgcatccagcgctac

SEQ ID NO: 769213 - DNA, 75 bp, synthetic construct
  source 1..75: mol_type = other DNA
tcttgatgagattggcgaactgggcgcagacgaacaagcaatgctgctaaaagccattgaagagaaaacctttta

SEQ ID NO: 769214 - DNA, 75 bp, synthetic construct
  source 1..75: mol_type = other DNA
cctggattatgaagtggagcgccacgcctcactcactggtgacagcgtgcgttttaacaccgaagcgcggcgcgc

SEQ ID NO: 769215 - DNA, 75 bp, synthetic construct
  source 1..75: mol_type = other DNA
ataggtaagcgaataccactttccgcagcagatttaagcaacgtatacgaaagtgtaatacgcgccgtccatgac

SEQ ID NO: 769216 - DNA, 75 bp, synthetic construct
  source 1..75: mol_type = other DNA
atcgactttctggcgagccgtattgcagaatatgaaaacaaccacgaaaagtttgcagagttcgataaagccgtt

SEQ ID NO: 769217 - DNA, 75 bp, synthetic construct
  source 1..75: mol_type = other DNA
atgcgctacgcttatcaggcctaccttttcctgcaacactttgaatttatgagtttttgtaggctggataaggcg

SEQ ID NO: 769218 - DNA, 75 bp, synthetic construct
  source 1..75: mol_type = other DNA
tccactttattctcgacgtcgccagcgggaagaagaaaaccttctcagatcaatggggactgcataaccagctgg

SEQ ID NO: 769219 - DNA, 75 bp, synthetic construct
  source 1..75: mol_type = other DNA
ggaagagatggagtggtacgataactatctcaatatgggaaaaaccgaccgcagcgccaacccttctccgggcaa

SEQ ID NO: 769220 - DNA, 75 bp, synthetic construct
  source 1..75: mol_type = other DNA
cctgtcatggccggttgattctgcagacagatgctcagggggcgtggtttgagcacgatttacatgccctgagct

SEQ ID NO: 769221 - DNA, 75 bp, synthetic construct
  source 1..75: mol_type = other DNA
taatctgacctatgcggatttgaagaacgaaatcggctctaaatccctggtcagtcagatcttgtctggacaacg

SEQ ID NO: 769222 - DNA, 75 bp, synthetic construct
  source 1..75: mol_type = other DNA
tactggtgcgctgcggcgcaacggtgatgttctcagaagtcacggaagtgcgtgacgcgatccatctgctgacac

SEQ ID NO: 769223 - DNA, 75 bp, synthetic construct
  source 1..75: mol_type = other DNA
cgccagcgggaagaagaaaaccttctcagatcaatggggactgcataaccagctggcggtgtttaacccggcacc

SEQ ID NO: 769224 - DNA, 75 bp, synthetic construct
  source 1..75: mol_type = other DNA
cgtgctgaaaatgcctatgcggattacgttttggatataggcaagcgaataccgctttccgcagcagatttaagc

SEQ ID NO: 769225 - DNA, 75 bp, synthetic construct
  source 1..75: mol_type = other DNA
gccgcaaaagccctgtttgccaaagggatggaaattcacattcgccagcgtaacatgaaaaaagagatcgccgcc

SEQ ID NO: 769226 - DNA, 75 bp, synthetic construct
  source 1..75: mol_type = other DNA
gaatcgggccagatataccaatggctattgttggctcaccggattatttttctcgccgaagtgttccaacgtcag

SEQ ID NO: 769227 - DNA, 75 bp, synthetic construct
  source 1..75: mol_type = other DNA
gaacggatgccgtatttgaacttgatttcaccggtaataatttaaaatggaataagcttgctcccgtcgcatcac

SEQ ID NO: 769228 - DNA, 75 bp, synthetic construct
  source 1..75: mol_type = other DNA
ttgcaacgatgagtaacacgatgattctggcaggattaaaaacgggggaaattgatatcggcgtgggtcggatgt

SEQ ID NO: 769229 - DNA, 75 bp, synthetic construct
  source 1..75: mol_type = other DNA
cagatcccgaactgatgaccgggcttaattatgaattgctgtttcttgaatcgctgaagttggtcgttcgtccca

SEQ ID NO: 769230 - DNA, 75 bp, synthetic construct
  source 1..75: mol_type = other DNA
aaacgcgtctgtattaccggaaactcctgtgccatttaaaagtggtaccggagtaattgataacgacactgtcta

SEQ ID NO: 769231 - DNA, 75 bp, synthetic construct
  source 1..75: mol_type = other DNA
tctcaatatgggaaaaaccgaccgcagcgccaacccttcgccgggcaacgacaagggcggtctcgcaaacgtggt

SEQ ID NO: 769232 - DNA, 75 bp, synthetic construct
  source 1..75: mol_type = other DNA
tctcaatatgggaaaaaccgaccgcagcgccaacccttcgccgggcaacgataacggcgggctcgcaaacgtggt

SEQ ID NO: 769233 - DNA, 75 bp, synthetic construct
  source 1..75: mol_type = other DNA
tttccagcattactggataatgctttgattcgtaacggcattatgcaatcacaacattttcgcactattgcggat

SEQ ID NO: 769234 - DNA, 75 bp, synthetic construct
  source 1..75: mol_type = other DNA
tctctcttgatggatcttctcagtcggagggcgatcaggcttcaatcgacgttacccaaaaatcatcccgatcag

SEQ ID NO: 769235 - DNA, 75 bp, synthetic construct
  source 1..75: mol_type = other DNA
gcaattgttgaagtgctgtcgcccggtcaacgcccgactaaacgcgcattaatttacgccgcgacgccagccagc

SEQ ID NO: 769236 - DNA, 75 bp, synthetic construct
  source 1..75: mol_type = other DNA
gcaattgttgaagtgctgtcgcccggtcaacccccgactaaacgcgaattaatttacgccgcgacgccagccaga

SEQ ID NO: 769237 - DNA, 75 bp, synthetic construct
  source 1..75: mol_type = other DNA
tttcagaccttgtgacgccagaactttttgctgcatatgtaggtaaaactccggcagcaattcgaaaaatggcga

SEQ ID NO: 769238 - DNA, 75 bp, synthetic construct
  source 1..75: mol_type = other DNA
agatccgtgaagaactggcattgctgcatattccacccgagaagatcacccgccttgccgccagtgaagatgaaa

SEQ ID NO: 769239 - DNA, 75 bp, synthetic construct
  source 1..75: mol_type = other DNA
ctggcaaaggccgattacgtgctgaccgataacagcggctttattttcgatgctatccacgttgataagcgggtg

SEQ ID NO: 769240 - DNA, 75 bp, synthetic construct
  source 1..75: mol_type = other DNA
tggcgcgcaggcatttaaaacagcgcaccgactccgcccgccacacgctggcgctgctggcaaaggccgattacg

SEQ ID NO: 769241 - DNA, 75 bp, synthetic construct
  source 1..75: mol_type = other DNA
gctgaccgataacagcgggtttattttcgatgctatccacgttgataagcgggtgatcctgctcgactttccggg

SEQ ID NO: 769242 - DNA, 75 bp, synthetic construct
  source 1..75: mol_type = other DNA
cgcggttattctcaagcaggagaaacatattcaggtgctgaacacgctgctggcgagcctggcgaaaattccctg

SEQ ID NO: 769243 - DNA, 75 bp, synthetic construct
  source 1..75: mol_type = other DNA
aatatccaacccgattcccgtaaacctacggtgctctacgcccccacgtttggcgcattaagctccctgccccac

SEQ ID NO: 769244 - DNA, 75 bp, synthetic construct
  source 1..75: mol_type = other DNA
tattggtttttctccgatcaaaaaaataccagcggtgatgctgtactccaatggtaaggagattgctacatcacc

SEQ ID NO: 769245 - DNA, 75 bp, synthetic construct
  source 1..75: mol_type = other DNA
catgcagtttgccgcgaaacagttagtggatctgggcgtgaagcaggaaaacattcattacgaatgctttggccc

SEQ ID NO: 769246 - DNA, 75 bp, synthetic construct
  source 1..75: mol_type = other DNA
caggtcacaacgcccaggttaactggttccatgcggcagaaaatggcgatgtccacgcctttgccgatgaagtta

SEQ ID NO: 769247 - DNA, 75 bp, synthetic construct
  source 1..75: mol_type = other DNA
cacgccgactggaaccgtttttaccaacgcgttttgtgttacagccactacagccagcaggcgctggaacatttc

SEQ ID NO: 769248 - DNA, 75 bp, synthetic construct
  source 1..75: mol_type = other DNA
ggcaggtgatgatcctcggcggcgaaatttcgcaaggaacgatgctaaaaagtttgccggggctggtgcacgcgc

SEQ ID NO: 769249 - DNA, 75 bp, synthetic construct
  source 1..75: mol_type = other DNA
ccgaccagcgaatccgcgaaatattgccggtggctcatgacatggcagagctgcgttatttgttgtcagaggcgt

SEQ ID NO: 769250 - DNA, 75 bp, synthetic construct
  source 1..75: mol_type = other DNA
gcagccgctgctacgcgccgacaaatggctggcctgttacccgagccttagttatcagcgaccgggctttagtga

SEQ ID NO: 769251 - DNA, 75 bp, synthetic construct
  source 1..75: mol_type = other DNA
gcgactgaaaaatcgcgaggtgccatttctgcgtcgtcagatcggtatgatttttcaggatcaccatctgctgat

SEQ ID NO: 769252 - DNA, 75 bp, synthetic construct
  source 1..75: mol_type = other DNA
ccggtcattccggcgcagggaaaagtaccctcctgaagctgatctgtgggattgagcggcccagcgccgggaaaa

SEQ ID NO: 769253 - DNA, 75 bp, synthetic construct
  source 1..75: mol_type = other DNA
atgggaaaaccgactttttttatttaagccagcagctggttcacggaataaacgtatcagtaaaaaagcagctta

SEQ ID NO: 769254 - DNA, 75 bp, synthetic construct
  source 1..75: mol_type = other DNA
cggttcgcgtctactatgaagataccgatgccggtggtgtggtgtaccacgccagttacatcgctttttatgaaa

SEQ ID NO: 769255 - DNA, 75 bp, synthetic construct
  source 1..75: mol_type = other DNA
atgcaagaaagcactcaaaacgcgcctgagtcactttgcggaacacgatgcgatcacctgtcagaaatgccagag

SEQ ID NO: 769256 - DNA, 75 bp, synthetic construct
  source 1..75: mol_type = other DNA
tccctattcagctttccggcggtgaacaacagcgtgttggcattgcccgcgcggtggtgaacaagcccgcggtac

SEQ ID NO: 769257 - DNA, 75 bp, synthetic construct
  source 1..75: mol_type = other DNA
tatttcaataagttacccgtagccaccaagccatccgcattacccatcgccgacaccatcggcttttttatggaa

SEQ ID NO: 769258 - DNA, 75 bp, synthetic construct
  source 1..75: mol_type = other DNA
atcatcaaaacactcgccacccaccgcgaaaaaccgtttgtcagcgtcgtcacgccaacctggaaccgcggcgca

SEQ ID NO: 769259 - DNA, 75 bp, synthetic construct
  source 1..75: mol_type = other DNA
cagacgaagctggcggaaattcgccatcattattgcgatgcgtttatggatggcaaggcgggagaacgggcggcg

SEQ ID NO: 769260 - DNA, 75 bp, synthetic construct
  source 1..75: mol_type = other DNA
tgcctgttatgccctacgcccggaaggaataaactggcctgaaaatgatgacggtctaccgagctttcgccttga

SEQ ID NO: 769261 - DNA, 75 bp, synthetic construct
  source 1..75: mol_type = other DNA
atcagcgcgcacgttcatcacattcacacattaactcacccaaacaccatgccaacaccaaccatcatcaaaaca

SEQ ID NO: 769262 - DNA, 75 bp, synthetic construct
  source 1..75: mol_type = other DNA
ggataaacgcccggatcgcttacaacagatccgtgaagaactggcattgctgcatattccgcccgagaagatcac

SEQ ID NO: 769263 - DNA, 75 bp, synthetic construct
  source 1..75: mol_type = other DNA
tatgaccgtccggacccgcgcattaagcagctggcgcgccgcagtacggtgacaccgggcggtgcagcatgcaaa

SEQ ID NO: 769264 - DNA, 75 bp, synthetic construct
  source 1..75: mol_type = other DNA
gcctgccgaagatcctgatctggcagaagccggttattacggtgctgcatcccgcagtaatggaaactggacctc

SEQ ID NO: 769265 - DNA, 75 bp, synthetic construct
  source 1..75: mol_type = other DNA
acaaaagcagcactgaagaagagcccgaaaaatgtgctgtttgccgtggtgtggatgcagggggaatttgatttt

SEQ ID NO: 769266 - DNA, 75 bp, synthetic construct
  source 1..75: mol_type = other DNA
ctggcagaggctgcaaaaacggtggatgtgtcgcgattacgccgtctggttgtctacaatatgaaaatggcgcct

SEQ ID NO: 769267 - DNA, 75 bp, synthetic construct
  source 1..75: mol_type = other DNA
agggctggcagccgtttggtagtccggtggccataaccccttataccctgatgcaggcgattgcagcagaaggtg

SEQ ID NO: 769268 - DNA, 75 bp, synthetic construct
  source 1..75: mol_type = other DNA
cggtgtatggtgcatacaagacgaaatccgcaaaaaaaatcttctttgtgccgtttatgacggatgaaaacgggc

SEQ ID NO: 769269 - DNA, 75 bp, synthetic construct
  source 1..75: mol_type = other DNA
gttacgcctgacagatttaaccagtacggcaacatatccggtgctgattgacagcattttggtggaagtgaataa

SEQ ID NO: 769270 - DNA, 75 bp, synthetic construct
  source 1..75: mol_type = other DNA
aggtggcgacaaataacctgaaactgggaagctttggcgcatttgataacgaatggcatacgctggctttccgct

SEQ ID NO: 769271 - DNA, 75 bp, synthetic construct
  source 1..75: mol_type = other DNA
tattcagctaagacactgcactggattaagatgaaaacgattgaagttgatgatgaactctacagctatattgcc

SEQ ID NO: 769272 - DNA, 75 bp, synthetic construct
  source 1..75: mol_type = other DNA
agaccaagccgaaacatgtgccaggcacgccgtattgggtgatcaccaacaccaacaccggccgtaaatgcagca

SEQ ID NO: 769273 - DNA, 75 bp, synthetic construct
  source 1..75: mol_type = other DNA
gtaccaccgtcgaacgcttgaaaatgctggcggatgagcggctgtataagagtaagaaaaacggcagggctcaga

SEQ ID NO: 769274 - DNA, 75 bp, synthetic construct
  source 1..75: mol_type = other DNA
ccttatattccgcagaatgccgggatacttctggttccctgctgtcgtggtgcttcggcattcaccaccggggat

SEQ ID NO: 769275 - DNA, 75 bp, synthetic construct
  source 1..75: mol_type = other DNA
ggcgacactccatcggggccgtctgatggtgacacatccgttcgtacagtctccctgctgccgacagccggagag

SEQ ID NO: 769276 - DNA, 75 bp, synthetic construct
  source 1..75: mol_type = other DNA
gctggttccgtgctgtcgtggtggttcagcgttcaccaccggagctgatggcacatacagtgacgcgagtggtgc

SEQ ID NO: 769277 - DNA, 75 bp, synthetic construct
  source 1..75: mol_type = other DNA
gctcgatggtaaagatggtcaggcgtttgatcttgttaagtggactaattcagctaatgaggccaataagtttat

SEQ ID NO: 769278 - DNA, 75 bp, synthetic construct
  source 1..75: mol_type = other DNA
atgaccggtgatcagcccgtcaccgacgagccgcaaattgctgtggatgacgaagggaacacaatcaacgaaccg

SEQ ID NO: 769279 - DNA, 75 bp, synthetic construct
  source 1..75: mol_type = other DNA
gccccggtcagtaaccgaaccctgatgagtctgctggcgtccggtgaagacctggcatcacagggctggcgctat

SEQ ID NO: 769280 - DNA, 75 bp, synthetic construct
  source 1..75: mol_type = other DNA
cgcatgcgcagcatccggggctgtttagtgcgatggtgaatcagttcagaacggaccttgccggtcaggcatcac

SEQ ID NO: 769281 - DNA, 75 bp, synthetic construct
  source 1..75: mol_type = other DNA
acatatgaccgtccggacccgcgtattaaacagctggcgcgtcgcagcactgtcacgccgggtggtgcgttctgt

SEQ ID NO: 769282 - DNA, 75 bp, synthetic construct
  source 1..75: mol_type = other DNA
tccttcttcctgcagacggatgcgacgaacctgaacgcgatgtaccacaagacgcagaatgtgaagctggatacg

SEQ ID NO: 769283 - DNA, 75 bp, synthetic construct
  source 1..75: mol_type = other DNA
cggctattcactggtgcgcaaaattctcgaagtcagcggttgtgatccacaaatcaccgaactcgacggcaaacc

SEQ ID NO: 769284 - DNA, 75 bp, synthetic construct
  source 1..75: mol_type = other DNA
aaggcagacctgagcaaagggcagtacggctgtgtcggccagggcttacatattgccaaaaaactgctcccgtat

SEQ ID NO: 769285 - DNA, 75 bp, synthetic construct
  source 1..75: mol_type = other DNA
ttaccgccatgagccgtacggagctggctgagaaagttaacgaacgtctggcgctgggctggcagcttcagggcg

SEQ ID NO: 769286 - DNA, 75 bp, synthetic construct
  source 1..75: mol_type = other DNA
ggcgtgacagctcagccacctggacgtcacaggacagggcgagccatttcagcagctgggcacgccgggggatta

SEQ ID NO: 769287 - DNA, 75 bp, synthetic construct
  source 1..75: mol_type = other DNA
cgctaccggcttcattcgaccgccctgaaccgcgcattaagcaactggcacgtcgcagcacggtaacgcccgatg

SEQ ID NO: 769288 - DNA, 75 bp, synthetic construct
  source 1..75: mol_type = other DNA
acaaacaacccgtcagaagatcctgatattgtcgggtctggttattacggttcggcatcccgaacgaacaaaaac

SEQ ID NO: 769289 - DNA, 75 bp, synthetic construct
  source 1..75: mol_type = other DNA
gttaccgcttcaacgagcagaccgcagccaaagcaggtattgcggccagcgacggtgatgtttcctacaacgtag

SEQ ID NO: 769290 - DNA, 75 bp, synthetic construct
  source 1..75: mol_type = other DNA
atagtaaaagcaaaaggaaaaaaagaggtttttttaggtgctattaatacaacaacaggaagcatcatggccgtt

SEQ ID NO: 769291 - DNA, 75 bp, synthetic construct
  source 1..75: mol_type = other DNA
ggtaatggagcgctgttacaggaattcaaccgtctcggcacaaatgtaaatgacctgaaaaatgccactacattt

SEQ ID NO: 769292 - DNA, 75 bp, synthetic construct
  source 1..75: mol_type = other DNA
gctgaagtatatgatgttaaagcaggtagacagtttttgggagcgataaatacaactacaggaagtgtaagcaca

SEQ ID NO: 769293 - DNA, 75 bp, synthetic construct
  source 1..75: mol_type = other DNA
gggttaccgctttaacgagcagacagcagccaaagcaggtattgcagccagcgacggtgatgtatcctacaacgt

SEQ ID NO: 769294 - DNA, 75 bp, synthetic construct
  source 1..75: mol_type = other DNA
acaaacaggctatggccgttggtgtgggttaccgctttaacgagcagacagcagccaaagcaggtattgcagcca

SEQ ID NO: 769295 - DNA, 75 bp, synthetic construct
  source 1..75: mol_type = other DNA
ggatgtcgatgtgttgcgtcctgatggtcgtcatcgcaccaaaaaattcgctaacaccactaaagtgtcacgaac

SEQ ID NO: 769296 - DNA, 75 bp, synthetic construct
  source 1..75: mol_type = other DNA
atgccgggttgtacatcacgtttattgcccgaaggccctttctcacgcgaacaggtggttgctgttacaacagtt

SEQ ID NO: 769297 - DNA, 75 bp, synthetic construct
  source 1..75: mol_type = other DNA
cgctggcggtgctggagttttgagtctgacgccggaaaacagcttaatgtgtggctctccagtgaagggcttctc

SEQ ID NO: 769298 - DNA, 75 bp, synthetic construct
  source 1..75: mol_type = other DNA
gaaaaccataaggaaatgaaacgagcagcagcacagtctgcggccctgactggtctgttccagccgtacagcgtg

SEQ ID NO: 769299 - DNA, 75 bp, synthetic construct
  source 1..75: mol_type = other DNA
ctgacagtaaaagcgatatattttttggtattccagatccgttacatgacggtgagatgttggcggtgttgttga

SEQ ID NO: 769300 - DNA, 75 bp, synthetic construct
  source 1..75: mol_type = other DNA
gccgtggttcgtacatgaagataaacaaggcaatatgcgcgtagtagtgcctgacagtaaaagcgatatattttt

SEQ ID NO: 769301 - DNA, 75 bp, synthetic construct
  source 1..75: mol_type = other DNA
cgtgaaaaccacgaagaaatgaaacgtgcggcagcacagagtgcggcgctgtccggtctgttccagccgtacagt

SEQ ID NO: 769302 - DNA, 75 bp, synthetic construct
  source 1..75: mol_type = other DNA
ggtgctgtggtgggcgttctatcacagcccggataagcatcctaacctcagcaaagccgagctggactttattcg

SEQ ID NO: 769303 - DNA, 75 bp, synthetic construct
  source 1..75: mol_type = other DNA
aaacttaatcagttaaggcattgtagccgaatgattatggatttgcttccttattatgtgtttgacgatatggac

SEQ ID NO: 769304 - DNA, 75 bp, synthetic construct
  source 1..75: mol_type = other DNA
tgagtttctgggtgcctctatacctgtccaaaacctatggcatggacctgaagcagatcgcattattcgcctggt

SEQ ID NO: 769305 - DNA, 75 bp, synthetic construct
  source 1..75: mol_type = other DNA
ccaccatttttcaggccgaaagcagtgcgctgcaaactcgcctggacgttactcgttcccgtccgcatcagggag

SEQ ID NO: 769306 - DNA, 75 bp, synthetic construct
  source 1..75: mol_type = other DNA
gcaggtcagcaacggcgggacaagcgaaggtagcaaggtcaatgatggcggcagattaatcgtcaccggcacatg

SEQ ID NO: 769307 - DNA, 75 bp, synthetic construct
  source 1..75: mol_type = other DNA
aagtattgccagcggatatctgacaaaactctatacccgtctgtttgggttaagcagagtaaattctgttattgc

SEQ ID NO: 769308 - DNA, 75 bp, synthetic construct
  source 1..75: mol_type = other DNA
agtaaaacaacacgctgaagaattatccgaaaccaacgctgttcgtaaccaatggcggccagatatttgcccaat

SEQ ID NO: 769309 - DNA, 75 bp, synthetic construct
  source 1..75: mol_type = other DNA
ccgtagcgctggtactgggcaccgttgtgctgattaagatgaagcgcacccaatacatctgggtaactgttgttc

SEQ ID NO: 769310 - DNA, 75 bp, synthetic construct
  source 1..75: mol_type = other DNA
gaaacgggtaaaactgggtctggcaatgatgatcacgttcgccattgccccatcattacctgccaacgatgttcc

SEQ ID NO: 769311 - DNA, 75 bp, synthetic construct
  source 1..75: mol_type = other DNA
ttggtagcgaaccgttgaacagcaatgcgtttctggcactcaccaaagcagggagtttgattttccttaacgggc

SEQ ID NO: 769312 - DNA, 75 bp, synthetic construct
  source 1..75: mol_type = other DNA
attatcggtctgcaaatgggactgtcatttgcgacgtttgtcgatccgggcagccatctcaatatgcccgtttta

SEQ ID NO: 769313 - DNA, 75 bp, synthetic construct
  source 1..75: mol_type = other DNA
ttcagttcatgggcgcgcaggagcattattccggatcgtctggcaaccgctattctgaacgcagccgggcgcacc

SEQ ID NO: 769314 - DNA, 75 bp, synthetic construct
  source 1..75: mol_type = other DNA
aagcctgtcagtataacgacatcattctggccgaccactgtctgcatgatgtgcaggatatgagtggaaaaaatc

SEQ ID NO: 769315 - DNA, 75 bp, synthetic construct
  source 1..75: mol_type = other DNA
acggcacgtacagtgatgcaacaggagcatcagaaagttcaacccgctggggtgtggacaaaccgctgtataagg

SEQ ID NO: 769316 - DNA, 75 bp, synthetic construct
  source 1..75: mol_type = other DNA
tacaggacatgagcgggaaaaatcacccgaaagcagacacatcgaaaggacagtacggcactgtaggtcaggggc

SEQ ID NO: 769317 - DNA, 75 bp, synthetic construct
  source 1..75: mol_type = other DNA
aagtataacgacatcattccggcggaccattgtctgcatgatgtgcaggacatgagccgccttaaccatccgaaa

SEQ ID NO: 769318 - DNA, 75 bp, synthetic construct
  source 1..75: mol_type = other DNA
gtcagaagacccggatattccggcatcaggatattacggtgcagcttcccggacgtcggcaaactggacgtcagc

SEQ ID NO: 769319 - DNA, 75 bp, synthetic construct
  source 1..75: mol_type = other DNA
aacgaatccacgtaccagacggtgtacggcagctataaaaacaaaacggaaaagaatatccatttcgtaccgttc

SEQ ID NO: 769320 - DNA, 75 bp, synthetic construct
  source 1..75: mol_type = other DNA
caaatggcatgtcgtatggtgaaggtcttccgctgccggagacatatgaccgtccggacccgcgtattaagcaac

SEQ ID NO: 769321 - DNA, 75 bp, synthetic construct
  source 1..75: mol_type = other DNA
aacgcaagggatcgtaagtggactatcctgcgtcgcaagatgcctgccgagaagattaacgaaaatctcgttcag

SEQ ID NO: 769322 - DNA, 75 bp, synthetic construct
  source 1..75: mol_type = other DNA
ttcaggtgacgccggttattgatggtcaggatggtacaccgttcacgctgacgcagtcaccggtcagtgcctttg

SEQ ID NO: 769323 - DNA, 75 bp, synthetic construct
  source 1..75: mol_type = other DNA
tcttaccgtgccagtgagtctgaagggaggctgaccgaacagggctggagtgctggcggaggtaaagcggaaatt

SEQ ID NO: 769324 - DNA, 75 bp, synthetic construct
  source 1..75: mol_type = other DNA
tggcaacggcgattctgattcatgcaggacgaaccacagtaaaagtcgatgctccatcttctgaaactggcgcac

SEQ ID NO: 769325 - DNA, 75 bp, synthetic construct
  source 1..75: mol_type = other DNA
tcccgcagaacgtcaccctggcgggcaatgcaggtaacaacctgctggcgtcgttctacatccagacagacgcaa

SEQ ID NO: 769326 - DNA, 75 bp, synthetic construct
  source 1..75: mol_type = other DNA
aagaacgaatccacgtaccagacggtgtacggcagctataaaaacaaaacggaaaagaatatccatttcgtaccg

SEQ ID NO: 769327 - DNA, 75 bp, synthetic construct
  source 1..75: mol_type = other DNA
attcggaggtcagtgtctcgggggctctccgtcatcggttccctggatttgtggcgacacgacctactactggaa

SEQ ID NO: 769328 - DNA, 75 bp, synthetic construct
  source 1..75: mol_type = other DNA
catcaatgcccggaaactttaccgttaaagtttccggtggtacagcggcatttcttgaggctccctttcctccgg

SEQ ID NO: 769329 - DNA, 75 bp, synthetic construct
  source 1..75: mol_type = other DNA
caaggaatctgaagttcttacgaatctggaaatccttgaacgcggttttgagcaagcttctccctccgcagtgac

SEQ ID NO: 769330 - DNA, 75 bp, synthetic construct
  source 1..75: mol_type = other DNA
tgcagcatcccgtactcagggcagttttgtctcgacacagcgtgacagccatttcagctcatgggcacgcagggg

SEQ ID NO: 769331 - DNA, 75 bp, synthetic construct
  source 1..75: mol_type = other DNA
caacagcattcaggtgacaccagtactggatgagaaacggggagcggcgttcacactggtgaagtcaccggcatc

SEQ ID NO: 769332 - DNA, 75 bp, synthetic construct
  source 1..75: mol_type = other DNA
caccggtcagtgcctttgcggcggataaactgcatgtgacagacattaccaaaggtgcgacttacccggtactga

SEQ ID NO: 769333 - DNA, 75 bp, synthetic construct
  source 1..75: mol_type = other DNA
atccatttcgtaccgttcatgacggatgagaacggggtgaatgtgccgacgaacaaaccggaagaagacccggac

SEQ ID NO: 769334 - DNA, 75 bp, synthetic construct
  source 1..75: mol_type = other DNA
gctgaaggagggcgtgcattggtagttgatgatgcaggtgctgcaggaggtaaggcgctgaggtggaccaaacag

SEQ ID NO: 769335 - DNA, 75 bp, synthetic construct
  source 1..75: mol_type = other DNA
catggcctacggtgaagggcttccgttaccggattcatttgaccgcacagagccgcgcattaagcaactgtcacg

SEQ ID NO: 769336 - DNA, 75 bp, synthetic construct
  source 1..75: mol_type = other DNA
gccacagaccttaacgtgatgtatcacaaggggaatccagaccagaacacgaagctgggttcattcggtgcattt

SEQ ID NO: 769337 - DNA, 75 bp, synthetic construct
  source 1..75: mol_type = other DNA
cgtggtgtggatgcagggggaatttgattttggcggtacgccggtaaatcacgcagcacagtttggtgcgctggt

SEQ ID NO: 769338 - DNA, 75 bp, synthetic construct
  source 1..75: mol_type = other DNA
aaactgcaactgacaggcatatcaaaggcggcgacatatacgctgctgattgacagtgtgaaggtggaagtgaac

SEQ ID NO: 769339 - DNA, 75 bp, synthetic construct
  source 1..75: mol_type = other DNA
gggaaaaccaacatccgtcgggcataacgatatcaataatccctttttctggacggcggaagcctcctggggctg

SEQ ID NO: 769340 - DNA, 75 bp, synthetic construct
  source 1..75: mol_type = other DNA
attgatatctctcgttttgagaaaaaaggctacataaccccaggtaaatatctggtccgagtgcaaatcaataaa

SEQ ID NO: 769341 - DNA, 75 bp, synthetic construct
  source 1..75: mol_type = other DNA
atgaacaataaaaacacgtttaccggggataagttatcccatgcaattaaaattgccctgtctggcgttgtgtgt

SEQ ID NO: 769342 - DNA, 75 bp, synthetic construct
  source 1..75: mol_type = other DNA
ggtggtaacccaccattatattcgtgcggtcttagtgcgctgtaatatccaacgatatagtccgttattgcgtga

SEQ ID NO: 769343 - DNA, 75 bp, synthetic construct
  source 1..75: mol_type = other DNA
gtttaacctggggtgataactcctgcgaaattactccccctaaccaaagtaacatcagcgaaagtgccattattt

SEQ ID NO: 769344 - DNA, 75 bp, synthetic construct
  source 1..75: mol_type = other DNA
cacctctatgttacgggtgaacaataacgatctaccagaaggtgttgatgtcgaaaactcggttattcgtaccac

SEQ ID NO: 769345 - DNA, 75 bp, synthetic construct
  source 1..75: mol_type = other DNA
tttgttaatggtactgccggggtggttgttccagacagaccggttaccacctcagagtctgtaattttttacgat

SEQ ID NO: 769346 - DNA, 75 bp, synthetic construct
  source 1..75: mol_type = other DNA
tctggcagggcagtcaaacggcatgtcgtatggtgaaggccttccgctgccggggacatatgaccgtccggaccc

SEQ ID NO: 769347 - DNA, 75 bp, synthetic construct
  source 1..75: mol_type = other DNA
atgccgcacagtttggtgcgctggttgataaattccgtgcagacctggcggatatggcaggtcagtgcgttggtg

SEQ ID NO: 769348 - DNA, 75 bp, synthetic construct
  source 1..75: mol_type = other DNA
ggggagtttgatttcagcggcacgccagcgaatcacacggctcagtttggcgcactggtggataaataccgtgcg

SEQ ID NO: 769349 - DNA, 75 bp, synthetic construct
  source 1..75: mol_type = other DNA
tggttatggtgcggagtttatccagcctgttgtgagtgacagggatatctcatcacctgcggagccaggcagtca

SEQ ID NO: 769350 - DNA, 75 bp, synthetic construct
  source 1..75: mol_type = other DNA
agacagataaagccagtattgatgttgcataccatcatacagttaatcaacaaaaagaacttggcacgtttggcg

SEQ ID NO: 769351 - DNA, 75 bp, synthetic construct
  source 1..75: mol_type = other DNA
tcaactcacgtaatggtgatgagtcaatcgataacgaaaaagaaagttatgttatttccctgaaccagtactttg

SEQ ID NO: 769352 - DNA, 75 bp, synthetic construct
  source 1..75: mol_type = other DNA
gctgttcactggtgggtggcgaaacggcagaaatgccggggatgtatcacggtgaggattacgatgtcgcgggtt

SEQ ID NO: 769353 - DNA, 75 bp, synthetic construct
  source 1..75: mol_type = other DNA
cacctgaccggcggcggcttctgggaaaacattccgcgcgtattgccagataatacccaggcagtgattgatgaa

SEQ ID NO: 769354 - DNA, 75 bp, synthetic construct
  source 1..75: mol_type = other DNA
gacggaagacccggatattgtggctatcgggtattacggtgcggcatcccgtacccagggcagttttgtctcgac

SEQ ID NO: 769355 - DNA, 75 bp, synthetic construct
  source 1..75: mol_type = other DNA
ctgtcggaattcggaggtcagtgtctcgggggctctccgtcatcggttccctggatttgtggcgacacgacctac

SEQ ID NO: 769356 - DNA, 75 bp, synthetic construct
  source 1..75: mol_type = other DNA
tgtgacagacattaccagaggtgcgacttacccggtactgatagacagcattgcggtggaagtgaacagcacaga

SEQ ID NO: 769357 - DNA, 75 bp, synthetic construct
  source 1..75: mol_type = other DNA
agaaatcatcgacggctctaaagtcagcgacggcgatgtgctgattgcactcggttccagcggtccgcactcgaa

SEQ ID NO: 769358 - DNA, 75 bp, synthetic construct
  source 1..75: mol_type = other DNA
actattctccgtggggacgcctgaatatcaacggtagtatgcaaccaaatcaatacaactcaatcactgctggct

SEQ ID NO: 769359 - DNA, 75 bp, synthetic construct
  source 1..75: mol_type = other DNA
caggcatggttaaaataccaggcaacaaactggacgccaccagagttttgggataccggtatcgccgggtttatc

SEQ ID NO: 769360 - DNA, 75 bp, synthetic construct
  source 1..75: mol_type = other DNA
tctggaatatttcggcgtcagcaacggacgataatattcgcgatggcgaaccaacgctgcgtggcagctatcagc

SEQ ID NO: 769361 - DNA, 75 bp, synthetic construct
  source 1..75: mol_type = other DNA
atcagcttctttcgcgtgaaaaaaacagctatatctgtcctcaacggcatcagtttgatatggcgaaagaaggat

SEQ ID NO: 769362 - DNA, 75 bp, synthetic construct
  source 1..75: mol_type = other DNA
ctctaaggttgcgattaaagctgcggcgaaacgttatcagcaggttaccttttgtgtcgcttccagccaccgtct

SEQ ID NO: 769363 - DNA, 75 bp, synthetic construct
  source 1..75: mol_type = other DNA
taaacgatcccgcgatccgggcgacagtgcggaaatgatgcaagcgcggcgcacatttttagatgccggccatta

SEQ ID NO: 769364 - DNA, 75 bp, synthetic construct
  source 1..75: mol_type = other DNA
tctgcctactgggataatctggatgtcgccctggtgggaattggctcaccggccattcgcgacggagctaactag

SEQ ID NO: 769365 - DNA, 75 bp, synthetic construct
  source 1..75: mol_type = other DNA
ttccggtgataaaacctggcttattaatggcgaagtcaaacccgggctacgaaccgatagcgtgtttgaactgga

SEQ ID NO: 769366 - DNA, 75 bp, synthetic construct
  source 1..75: mol_type = other DNA
tcttcaataagtttctgttgtcttttgatccctctacacagcaatggagttacgctggcgaatctccctggtacg

SEQ ID NO: 769367 - DNA, 75 bp, synthetic construct
  source 1..75: mol_type = other DNA
atcatgatcgacccgaaaatgctggagctttcggtttatgaaggcattccgcatctgttaacggaagtcgttact

SEQ ID NO: 769368 - DNA, 75 bp, synthetic construct
  source 1..75: mol_type = other DNA
atcatatagcactgatattcatctttggcataacgggaaatgggataaatcgggtgaattatcgcaaggtcgggc

SEQ ID NO: 769369 - DNA, 75 bp, synthetic construct
  source 1..75: mol_type = other DNA
ggcggaattccccgctggcccgagagatcaagcaacctctgcctttattgatggtaatttgtatgtatttggcgg

SEQ ID NO: 769370 - DNA, 75 bp, synthetic construct
  source 1..75: mol_type = other DNA
catcggtaaaaatcaacaaggtttgccccaggtattcaacgacgtgtataaatatgatcccagaaccaatatctg

SEQ ID NO: 769371 - DNA, 75 bp, synthetic construct
  source 1..75: mol_type = other DNA
gtcacccgtagcgatgtggtactggtgtccggtattcaccgtggcgaaccgaaaatcgttggtcgttatgacagt

SEQ ID NO: 769372 - DNA, 75 bp, synthetic construct
  source 1..75: mol_type = other DNA
tgaacagggcaccgacgtcatcaccgtgtttacccttaccaaagcgcaggaggtttctgcggcagcggtgaaagc

SEQ ID NO: 769373 - DNA, 75 bp, synthetic construct
  source 1..75: mol_type = other DNA
gcgatgtggtgttggtgtccggtattcagcgcggcgcggcggaaattgttggtcgctatgacagcctcggcaacc

SEQ ID NO: 769374 - DNA, 75 bp, synthetic construct
  source 1..75: mol_type = other DNA
aagcatcaatttctggcgtacagcgtcagttccgcattggttataaccgtgcagcgcgtattatcgaacagatgg

SEQ ID NO: 769375 - DNA, 75 bp, synthetic construct
  source 1..75: mol_type = other DNA
gctgccttctctggatttgctgacgccgccgccgagcgaagtggagccggtagatacctttgcgcttgaacaaat

SEQ ID NO: 769376 - DNA, 75 bp, synthetic construct
  source 1..75: mol_type = other DNA
gtccgttgcataaaccgacgacgccgctgccttctctggatttgctgacgccgccgccgagcgaagtggagccgg

SEQ ID NO: 769377 - DNA, 75 bp, synthetic construct
  source 1..75: mol_type = other DNA
atagtctattgattattggcggtgaaactgcaggcggcaaagcggtgacggattcagttttgatctctgtgaagg

SEQ ID NO: 769378 - DNA, 75 bp, synthetic construct
  source 1..75: mol_type = other DNA
atgcgtaaactttatgccaccattttgtccgcagccatctgtctggccgtatccggtgcgcctgcatgggcgtct

SEQ ID NO: 769379 - DNA, 75 bp, synthetic construct
  source 1..75: mol_type = other DNA
cagcagccgcaatatcagcagccgcaacaaccggttgcaccgcagcagcaatatcagcagccgcaacagccagtt

SEQ ID NO: 769380 - DNA, 75 bp, synthetic construct
  source 1..75: mol_type = other DNA
gcaccgcagcagcaatatcagcagccgcaacagccggttgcacagcagccgcaatatcagcagccgcaacagcca

SEQ ID NO: 769381 - DNA, 75 bp, synthetic construct
  source 1..75: mol_type = other DNA
gtttccctgcttaatgccattcgcggcaacgccaaaatcggcatcatcaccaacggctttagcgccttgcagcaa

SEQ ID NO: 769382 - DNA, 75 bp, synthetic construct
  source 1..75: mol_type = other DNA
atatgccaggcagcgatgacctgaagggcattaacgtgaaataccgttatgaatttacggacacgctggggctgg

SEQ ID NO: 769383 - DNA, 75 bp, synthetic construct
  source 1..75: mol_type = other DNA
cagcttacagcaggcaaaatttaaccagaaaaaagccgctgaattactggggctgacttaccatcagcttcgcgc

SEQ ID NO: 769384 - DNA, 75 bp, synthetic construct
  source 1..75: mol_type = other DNA
atgcagaacctcgcagctatggatcgctatcgtttcaccaaagtagggtatgcggatgaggaagctgaactcagc

SEQ ID NO: 769385 - DNA, 75 bp, synthetic construct
  source 1..75: mol_type = other DNA
tccacctcgtactggcaactcagcgtccatcggttgatgttattactggtctgattaaagcgaatattccgaccc

SEQ ID NO: 769386 - DNA, 75 bp, synthetic construct
  source 1..75: mol_type = other DNA
cagcagccgcaacaaccggttgcgccgcagcagcagtatcagcagccacaacagccagttgcgccacaaccgcag

SEQ ID NO: 769387 - DNA, 75 bp, synthetic construct
  source 1..75: mol_type = other DNA
ttctctggatttgctgacacctccgccgagcgaagtggagccggtagatacctttgcgcttgaacaaatggcgcg

SEQ ID NO: 769388 - DNA, 75 bp, synthetic construct
  source 1..75: mol_type = other DNA
aaactatggcttacaaggaagccaaccctctgatgttcgtgcgcataatcgcgctgccaacggcgcgtgtgatga

SEQ ID NO: 769389 - DNA, 75 bp, synthetic construct
  source 1..75: mol_type = other DNA
tcgcggagatttctcctccggtagcaacttcgtcactctgtatttttctcacttcctctctttactcgtgttacc

SEQ ID NO: 769390 - DNA, 75 bp, synthetic construct
  source 1..75: mol_type = other DNA
ctttacggcattgaactgtatctgatgaccaagcagtttggtcgtaatccgtggctggcggaaaaactgctggca

SEQ ID NO: 769391 - DNA, 75 bp, synthetic construct
  source 1..75: mol_type = other DNA
cctgaaggccaatgcactcacgtgctgcgtcatacgttcgccagttattttatgatgaatggcggaaacatactg

SEQ ID NO: 769392 - DNA, 75 bp, synthetic construct
  source 1..75: mol_type = other DNA
aaaatatgcctggcaactggtgcacgctggagtgaagccgaaaatctgcagggccatcagttatcgaaataccgg

SEQ ID NO: 769393 - DNA, 75 bp, synthetic construct
  source 1..75: mol_type = other DNA
cgaaacttaaaattatctgtaatggtctgggcgatcccatcgcttcagagctgaccgccggtgactttacgaaat

SEQ ID NO: 769394 - DNA, 75 bp, synthetic construct
  source 1..75: mol_type = other DNA
gaaaatggctttgcgaatgttaccccgccggacgaagtgggcgtcgtgtgcgtaaacaattcgccaccaaaggcg

SEQ ID NO: 769395 - DNA, 75 bp, synthetic construct
  source 1..75: mol_type = other DNA
actattttcaatttgcatcagtaatggataaaacctctatcattcttccccgtggtcaactaacccatgtacttc

SEQ ID NO: 769396 - DNA, 75 bp, synthetic construct
  source 1..75: mol_type = other DNA
aagccattgcgtttgagaatttcaccatggacgaggtaaacaagaaaccttggctgggagaaaaggaagatcggc

SEQ ID NO: 769397 - DNA, 75 bp, synthetic construct
  source 1..75: mol_type = other DNA
atcttgagcagagctatttaagcggtgcttttagtgaactgatccgtttaggggaatggttgcaacctaatccct

SEQ ID NO: 769398 - DNA, 75 bp, synthetic construct
  source 1..75: mol_type = other DNA
gctgcattaaaatttaatccattggcatcaatgaaatcccaccaagatctcttttctattaattcaggtgatcta

SEQ ID NO: 769399 - DNA, 75 bp, synthetic construct
  source 1..75: mol_type = other DNA
gcgttatttacgccgctgcatgcgccgactgagccagccaaacccacgccagttgccggggggaatccggcgctg

SEQ ID NO: 769400 - DNA, 75 bp, synthetic construct
  source 1..75: mol_type = other DNA
aagccccagcctgctgatgattgcaaaaatatgcctagctactggtgcgcggtggagtgaagcagaaaacctgca

SEQ ID NO: 769401 - DNA, 75 bp, synthetic construct
  source 1..75: mol_type = other DNA
ctgacataaaaatgacgatggtttacgctcacttttctccggatcatcttgaagatgctgtaacaaaaaaccctt

SEQ ID NO: 769402 - DNA, 75 bp, synthetic construct
  source 1..75: mol_type = other DNA
tatgatgaacggcggaaatatactggtactgcgagatattcttggtcatgctgacataaaaatgacgatggttta

SEQ ID NO: 769403 - DNA, 75 bp, synthetic construct
  source 1..75: mol_type = other DNA
gctgaaaagctctcagatcgcaggcgataaagttacgttcgttaaaaccaaagggaagcgcaacagaacaatccc

SEQ ID NO: 769404 - DNA, 75 bp, synthetic construct
  source 1..75: mol_type = other DNA
ccgcagtatcagcagccgcagcaaccagttgcgccgcagccgcagtatcagcagccgcaacaaccggttgcgccg

SEQ ID NO: 769405 - DNA, 75 bp, synthetic construct
  source 1..75: mol_type = other DNA
ataccctgcttcatccgctgttgatgcgcaatggtgacagccgtccgttgcataaaccgacgacgccgctgcctt

SEQ ID NO: 769406 - DNA, 75 bp, synthetic construct
  source 1..75: mol_type = other DNA
cgcagccgcaatatcaacagccgcaacaaccggttgcaccgcagcagcaatatcagcagccacaacagccggttg

SEQ ID NO: 769407 - DNA, 75 bp, synthetic construct
  source 1..75: mol_type = other DNA
agaacccggcactgatttctgccgcactaaacctgtggcagcagggcaagatagccccggacagttgggttatcg

SEQ ID NO: 769408 - DNA, 75 bp, synthetic construct
  source 1..75: mol_type = other DNA
ggggcgggtccagtctgtgctgctcaaagtttatagcgacgatgattttctttatccggggcaggagagcggttt

SEQ ID NO: 769409 - DNA, 75 bp, synthetic construct
  source 1..75: mol_type = other DNA
cagcagccgcaacaaccggtagcaccgcagcagcaatatcagcagccgcaacaaccggtagcaccgcagcagcag

SEQ ID NO: 769410 - DNA, 75 bp, synthetic construct
  source 1..75: mol_type = other DNA
ggttatccgaaaaactgggaagatcaggatgagtggcaaggcggctgggtgcgtgatgtgaatggcaagatacgc

SEQ ID NO: 769411 - DNA, 75 bp, synthetic construct
  source 1..75: mol_type = other DNA
tacaaacgcgaagaagacggcattgtgctgatcgatcaggataaatgccgtggctggcgtttgtgcattagcggt

SEQ ID NO: 769412 - DNA, 75 bp, synthetic construct
  source 1..75: mol_type = other DNA
gcgtgatgtgaatggcaagatacgcccgcgtctgggcagcaagatgggcgtaataaccaaaattttcgccaaccc

SEQ ID NO: 769413 - DNA, 75 bp, synthetic construct
  source 1..75: mol_type = other DNA
tcacaggtgactaaataccgaattacctttgtcagaacgaaggggaagaaaaacagaagcattcccatcagtaaa

SEQ ID NO: 769414 - DNA, 75 bp, synthetic construct
  source 1..75: mol_type = other DNA
gctttacgaagagatcatagcgcttgatgggttcaatttctttacagactactattttcaatttttatccgtgat

SEQ ID NO: 769415 - DNA, 75 bp, synthetic construct
  source 1..75: mol_type = other DNA
tggagaacatgcgaaaattcaccatcgcagaaaaagagatggcatggcttacccatgagcagattgttgaattac

SEQ ID NO: 769416 - DNA, 75 bp, synthetic construct
  source 1..75: mol_type = other DNA
agtgcgctgatgcgcagccgtcgcggtgaacagatactgccgctggatgacgaattactgacggaactggcgcaa

SEQ ID NO: 769417 - DNA, 75 bp, synthetic construct
  source 1..75: mol_type = other DNA
ctggtcaccgtaatgctaatattaatgcagactaccgccttctggaattaacagtcatcaaccagcacaaaccat

SEQ ID NO: 769418 - DNA, 75 bp, synthetic construct
  source 1..75: mol_type = other DNA
aactgaacgtacattgttgatctgctgcaaagcctttatgaccgaaggggcagactttcctaatctgacgttggt

SEQ ID NO: 769419 - DNA, 75 bp, synthetic construct
  source 1..75: mol_type = other DNA
tgaactacatcgtcaccgactttgccaaaagccggggcgcgctgaatgatgacaccatcggcggcatggtgattt

SEQ ID NO: 769420 - DNA, 75 bp, synthetic construct
  source 1..75: mol_type = other DNA
agggcaacacggagtttctccaagcgctggacttcaataaactcaacatcctctatcgcgaagcctgccaccgcc

SEQ ID NO: 769421 - DNA, 75 bp, synthetic construct
  source 1..75: mol_type = other DNA
cgtggggggctggcgtgcagtttaacccgaccgagtccgtggccattgatgtcgcttatgaaggttccggcagtg

SEQ ID NO: 769422 - DNA, 75 bp, synthetic construct
  source 1..75: mol_type = other DNA
acccgaccgaatccgtggccgttgatgtcgcttatgaaggctccggcagcggtgactggcgtaccaacagtttca

SEQ ID NO: 769423 - DNA, 75 bp, synthetic construct
  source 1..75: mol_type = other DNA
gggtatggcttacagccgtgtttcgactttctccggagattatatccgcgtaactgacaacaaggggaaaaagca

SEQ ID NO: 769424 - DNA, 75 bp, synthetic construct
  source 1..75: mol_type = other DNA
tcagcgatctgctggttgtggtgatgaaaaatccacagcaggtatcagtatcagctgaattttataacccagaac

SEQ ID NO: 769425 - DNA, 75 bp, synthetic construct
  source 1..75: mol_type = other DNA
gcttcccataccgaaattgaagcagccatgcgaggcatgacggacgctgaaattgacgcaattctggaaaaactc

SEQ ID NO: 769426 - DNA, 75 bp, synthetic construct
  source 1..75: mol_type = other DNA
ggcaatgtccgtgtttgcctgtgagtttgatacccgctgggtggagcacgcgctggagaacggcaaatggccgga

SEQ ID NO: 769427 - DNA, 75 bp, synthetic construct
  source 1..75: mol_type = other DNA
cgaattgctggcagtccagccactggcaagccgttgtgcaattgcatcaggtgttgttgaaggaattcgcactgg

SEQ ID NO: 769428 - DNA, 75 bp, synthetic construct
  source 1..75: mol_type = other DNA
aagtaaaaaaacccaacaaccgcgaaggtatagtcgcagaacgcaaccgcatcaacgaacgctttaagaacccaa

SEQ ID NO: 769429 - DNA, 75 bp, synthetic construct
  source 1..75: mol_type = other DNA
caaccaatgccctgaatacacgcatttacttcgatcaggatggctcgctcagccggaagtttgaactcaaaacca

SEQ ID NO: 769430 - DNA, 75 bp, synthetic construct
  source 1..75: mol_type = other DNA
gccctttaccgacacgctgtattttattgatgcggataatccgcagcagctggcgtggatgaagaagcagaatcc

SEQ ID NO: 769431 - DNA, 75 bp, synthetic construct
  source 1..75: mol_type = other DNA
atcccggcagtggtgcgtcaggacgggagtttactggttgtcacatcggcagctatgccggagggaaaatcgtga

SEQ ID NO: 769432 - DNA, 75 bp, synthetic construct
  source 1..75: mol_type = other DNA
gacatttaccgtgaaggaaacgatcacagacatgcagggcaatgtgatcgcccgcaagggcgatacggtcaatcc

SEQ ID NO: 769433 - DNA, 75 bp, synthetic construct
  source 1..75: mol_type = other DNA
cgaccaaagccctggacacgcggatttattttgaccaggacggcacgctaagcaggaagtttgaactgaaggcta

SEQ ID NO: 769434 - DNA, 75 bp, synthetic construct
  source 1..75: mol_type = other DNA
acgctggcgcaggaaaacaccacgcactatatcgatccatcgctgacggtcagtgaagatctgaaagaccatcag

SEQ ID NO: 769435 - DNA, 75 bp, synthetic construct
  source 1..75: mol_type = other DNA
atgcacttttgccgcagaaagctgcagaattagccggaaagtatatccacgcgcataacattcttgtggatattc

SEQ ID NO: 769436 - DNA, 75 bp, synthetic construct
  source 1..75: mol_type = other DNA
acctttccacttttccggctgtaacgcagcgggcactggaaaccctgaacacaaccagaaacgcatggcttgaag

SEQ ID NO: 769437 - DNA, 75 bp, synthetic construct
  source 1..75: mol_type = other DNA
tccctttcaagtgacagtgtcacaaaacaagtaaacagcgaagagcgcgatgacacccgccaggcgcttgatgca

SEQ ID NO: 769438 - DNA, 75 bp, synthetic construct
  source 1..75: mol_type = other DNA
atgcatttttaccgcagaaggctgcgcaactggccggacagtatatccacgctcacgaaaaccttctgagtattc

SEQ ID NO: 769439 - DNA, 75 bp, synthetic construct
  source 1..75: mol_type = other DNA
ggcgcgtctggatttcagtaatcaactctctccggcagctatgcataaaattaaggttcgtcaggaactcgctga

SEQ ID NO: 769440 - DNA, 75 bp, synthetic construct
  source 1..75: mol_type = other DNA
accggctcttgctaacactgcgatgccggaactggaccctgtgtttaaactggcgggcgttgcgccggattatgc

SEQ ID NO: 769441 - DNA, 75 bp, synthetic construct
  source 1..75: mol_type = other DNA
gcgatattgtcatcaaaacttttgacgataaagcacctgaaacagttaaaaacttcctagactactgccgcgaag

SEQ ID NO: 769442 - DNA, 75 bp, synthetic construct
  source 1..75: mol_type = other DNA
atgaaaattgctaaaaacttaaatctgattatccctgtgcgcactgaaaagggaaatggctggatccatgccacg

SEQ ID NO: 769443 - DNA, 75 bp, synthetic construct
  source 1..75: mol_type = other DNA
atctacaaaacgtattaccagtgcaataatattgagtgtggggcctgtttttgtacgcttgagtcgtttgtacgc

SEQ ID NO: 769444 - DNA, 75 bp, synthetic construct
  source 1..75: mol_type = other DNA
tgtccgcagtagtctggcaggtcgccgctgctacgccagcgagtgcagcagaacatcaatccacgctgagcgcgg

SEQ ID NO: 769445 - DNA, 75 bp, synthetic construct
  source 1..75: mol_type = other DNA
taccgtaccgaagacctgtattctgggctacaacaatgtgcgtttcgacgacgaagtcacacgcaacgtttttta

SEQ ID NO: 769446 - DNA, 75 bp, synthetic construct
  source 1..75: mol_type = other DNA
tttctggaatgccagagaagacagttataaaggacagttcagtaatcaggactataaaggcaccaataccatcaa

SEQ ID NO: 769447 - DNA, 75 bp, synthetic construct
  source 1..75: mol_type = other DNA
gtacgagtgtttcattagccaatcaaggcaatgaaaaatcatcccttagcgcttcatcttctccggttgctgcag

SEQ ID NO: 769448 - DNA, 75 bp, synthetic construct
  source 1..75: mol_type = other DNA
cctgctgtggctgaccggcagcttatggggccgtgactggagctttgtgaagattgccatcccgctgatgatttt

SEQ ID NO: 769449 - DNA, 75 bp, synthetic construct
  source 1..75: mol_type = other DNA
tttccgcctgctgggcgagcctgacggattacctgatgctcctgcacccgcaggatgtaaacagtgccctgctgt

SEQ ID NO: 769450 - DNA, 75 bp, synthetic construct
  source 1..75: mol_type = other DNA
actgctggagcataaacagggtactgctgatccacagcatgttcctgcaaagtcctggtggcagttctggaaatc

SEQ ID NO: 769451 - DNA, 75 bp, synthetic construct
  source 1..75: mol_type = other DNA
ttccgaagaagttggcgttgccaaaccgaataagaaaattttcgattatgcgctggaacaggcgggcaatcctga

SEQ ID NO: 769452 - DNA, 75 bp, synthetic construct
  source 1..75: mol_type = other DNA
aagattcagtgcgtaaccgctggttcagcatgatggcggggccatctgtacgcgtgaatgaatggttcagtgctt

SEQ ID NO: 769453 - DNA, 75 bp, synthetic construct
  source 1..75: mol_type = other DNA
tgcgtaaccgctggttcagcgtgatggcggggccgtctgtgcgcgtgaatgaatggttcagcgcgtatgcgatgg

SEQ ID NO: 769454 - DNA, 75 bp, synthetic construct
  source 1..75: mol_type = other DNA
gctgggatctgctggatgtcatgcgcgcctgttatgctctgcgcccggagggaataaactggccagaaaatgaag

SEQ ID NO: 769455 - DNA, 75 bp, synthetic construct
  source 1..75: mol_type = other DNA
atgaaaattgcgctggttattttcatcacccttgccctggcgggctgtgcgctgttatcactccatatgggagtg

SEQ ID NO: 769456 - DNA, 75 bp, synthetic construct
  source 1..75: mol_type = other DNA
tcgttatcatttattaatgatgatagctctcttttatatcctaatgcgaccccaaaattaccgcaaccaacgcca

SEQ ID NO: 769457 - DNA, 75 bp, synthetic construct
  source 1..75: mol_type = other DNA
tgtaaaacttagtgatgaagataataaaatcgtcgctgtaaaagggagttctctgagcggtatatactatgaagt

SEQ ID NO: 769458 - DNA, 75 bp, synthetic construct
  source 1..75: mol_type = other DNA
ccgcagccatttgtctggccgtatccggtgcgcctgcatgggcgtctgaacatcagtccacgctgagcgcggggt

SEQ ID NO: 769459 - DNA, 75 bp, synthetic construct
  source 1..75: mol_type = other DNA
ctgctgtagctgcatcagtactgatggcgatgtctgctcaggcagcagagatttacaataaagacagtaacaatg

SEQ ID NO: 769460 - DNA, 75 bp, synthetic construct
  source 1..75: mol_type = other DNA
gggcggcatggcggggttgatattgctgaagatgctggcaaagacccaccagccgatgaagctggcgctcaccgg

SEQ ID NO: 769461 - DNA, 75 bp, synthetic construct
  source 1..75: mol_type = other DNA
caaacgctactgaaaaatggtaatcagaccaaaccgaaacacgtggcaggcacgccgtattgggtgatcaccaac

SEQ ID NO: 769462 - DNA, 75 bp, synthetic construct
  source 1..75: mol_type = other DNA
gcgaaaggagaaaacgaagccgcctttgccgcccgcatccactcgctttttaccgtaccgaaaacctgcattctt

SEQ ID NO: 769463 - DNA, 75 bp, synthetic construct
  source 1..75: mol_type = other DNA
aacggattgaaaagctgttgttcaattatcgggcgcgcaacttcccggggacgctggattatgccgagcagcaac

SEQ ID NO: 769464 - DNA, 75 bp, synthetic construct
  source 1..75: mol_type = other DNA
aattgctgaagatagtatatcctcaactaatttgttagacgttaagcttaaaagttccgggcagcatgtcaatat

SEQ ID NO: 769465 - DNA, 75 bp, synthetic construct
  source 1..75: mol_type = other DNA
tttctgttaagaaacgcagtttcagtgatggtgatatcgttataaaatcaaacagtgaagctcaacgagactatg

SEQ ID NO: 769466 - DNA, 75 bp, synthetic construct
  source 1..75: mol_type = other DNA
aactctgtcagattactggtcgaaatactatgataaatttaagcttttactaaaaaattattatatttcttctgc

SEQ ID NO: 769467 - DNA, 75 bp, synthetic construct
  source 1..75: mol_type = other DNA
cacggcatcagtttagcggcgcgtttgtggaagtgaactgcgccaccctgcgcggcgataccgccatgtcgacgc

SEQ ID NO: 769468 - DNA, 75 bp, synthetic construct
  source 1..75: mol_type = other DNA
cgcccctccacgcttacggcgttgctgggtacagaggcagaaaacatcgacctcttcgaccgtatgcaactggaa

SEQ ID NO: 769469 - DNA, 75 bp, synthetic construct
  source 1..75: mol_type = other DNA
tctgcgctataactggcaggaaagccgcccttccgcgcttacggcgttgctgggcgcggaggtggaaaacatcga

SEQ ID NO: 769470 - DNA, 75 bp, synthetic construct
  source 1..75: mol_type = other DNA
gcatttagcgatgatccaaaatgggagtccggacatcacgttcatgacaatgaaaccgagttgatttacgtcaag

SEQ ID NO: 769471 - DNA, 75 bp, synthetic construct
  source 1..75: mol_type = other DNA
gagttattaaataaagtatgcattgtttcaatgctggctcgtttacgtctgatgccaaaaggatgtgcacaatga

SEQ ID NO: 769472 - DNA, 75 bp, synthetic construct
  source 1..75: mol_type = other DNA
cgacgcatcttcgaattaaaacaggcacggcatcagtttagcggcgcgtttgtggaagtgaactgcgccaccctg

SEQ ID NO: 769473 - DNA, 75 bp, synthetic construct
  source 1..75: mol_type = other DNA
atgcgtaaatttttactcgtggcgggtcttgctgctcttgtatcgggatgcggtgaaaaaggggattttgagaaa

SEQ ID NO: 769474 - DNA, 75 bp, synthetic construct
  source 1..75: mol_type = other DNA
atgagtcttgactgtgtacccctttctacatactgcagggacgcgggggaaacggtagaagccgttaacaaacgg

SEQ ID NO: 769475 - DNA, 75 bp, synthetic construct
  source 1..75: mol_type = other DNA
tgaagctaaaggcgatgaaccgagagggggggtaaaaggttttttttcaaacattagtgagaacaaaaagaaata

SEQ ID NO: 769476 - DNA, 75 bp, synthetic construct
  source 1..75: mol_type = other DNA
gtgatttaacacataaccctgatagtaccgtttcgcaaaaaacggatgatgaatatcttgaagaagcaaggcgta

SEQ ID NO: 769477 - DNA, 75 bp, synthetic construct
  source 1..75: mol_type = other DNA
gtgattcgcacacagccatcgttcagccctgaaacggtgaatcacatcctgcgtctggcggcgagtctggatgag

SEQ ID NO: 769478 - DNA, 75 bp, synthetic construct
  source 1..75: mol_type = other DNA
atacgaagacagtcgtgctgcgggaagtgatgttcgttgtcgcctcacacatgccgtgatgcgtgaactggatgc

SEQ ID NO: 769479 - DNA, 75 bp, synthetic construct
  source 1..75: mol_type = other DNA
cgatgacattgtggtgatagaacgtggcaggctgcatgcggtggcctctgacgttaacgatccggcaacgacgtg

SEQ ID NO: 769480 - DNA, 75 bp, synthetic construct
  source 1..75: mol_type = other DNA
attgagcatacgctgcaatttatggctgaaaacagagcgaagatgcccgctcaccgttttgctattaatctgtct

SEQ ID NO: 769481 - DNA, 75 bp, synthetic construct
  source 1..75: mol_type = other DNA
atgaggggatctctcagtgttaagcaggcgcaaatcaccttgcagcatcttcaggaattaggctgccagattgcg

SEQ ID NO: 769482 - DNA, 75 bp, synthetic construct
  source 1..75: mol_type = other DNA
tttatcgtcgagtatcgacatgtgggtcattgagcatacgctgcaatttatggctgaaaacagagcgaagatgcc

SEQ ID NO: 769483 - DNA, 75 bp, synthetic construct
  source 1..75: mol_type = other DNA
cttctctattgtgtacaacctattctcccggtgctttcgcaggagtttggtttaacgcctgctaacagtagtatt

SEQ ID NO: 769484 - DNA, 75 bp, synthetic construct
  source 1..75: mol_type = other DNA
tttactgatgaccttattcagctcgctgtggctgatctttgccggaatgttactcttctcagccggattcttcgc

SEQ ID NO: 769485 - DNA, 75 bp, synthetic construct
  source 1..75: mol_type = other DNA
cttaacgcccgcgaacagtagtatttcactgtccatttctacggcgatgttggctatcggtttgctgtttactgg

SEQ ID NO: 769486 - DNA, 75 bp, synthetic construct
  source 1..75: mol_type = other DNA
atttactggcgatctgattcaatttattagctttggcgtattgcgtggcacaagaacaggttggccaatagcggt

SEQ ID NO: 769487 - DNA, 75 bp, synthetic construct
  source 1..75: mol_type = other DNA
atggttaaggctctgggtggtaaagaaaatattaaatcactggataattgtgtaactcgtttgcgtttaactatc

SEQ ID NO: 769488 - DNA, 75 bp, synthetic construct
  source 1..75: mol_type = other DNA
tatttccggggtgcttacagtcattattggcggcgtcagcgaaccgattgagtttctgttcttatttgtcagtcc

SEQ ID NO: 769489 - DNA, 75 bp, synthetic construct
  source 1..75: mol_type = other DNA
ttctatcgtgaccaacgccccggaaaatatgcagcgtcgcggagcaatgtatttgcaacgcgaattgaaagataa

SEQ ID NO: 769490 - DNA, 75 bp, synthetic construct
  source 1..75: mol_type = other DNA
tattaaaagagaaagatgataaagcctatggtgcattttctggcttaattggttttatggcgatgcatttgggaa

SEQ ID NO: 769491 - DNA, 75 bp, synthetic construct
  source 1..75: mol_type = other DNA
tggttatttcttctatgctgttgccgaacgcgtgacgataccttttggcttaaatcacttggtgacatcagtttt

SEQ ID NO: 769492 - DNA, 75 bp, synthetic construct
  source 1..75: mol_type = other DNA
tttgcgctggacatggctgccaccctggccgttccctttaccggtgatgggcgagatgccgcggagatccttcgc

SEQ ID NO: 769493 - DNA, 75 bp, synthetic construct
  source 1..75: mol_type = other DNA
tgggcgctgaagcggaaaacatcgatctctttgaccgcatgcaactggaaaacgttatcgtcgtttgccgtcagg

SEQ ID NO: 769494 - DNA, 75 bp, synthetic construct
  source 1..75: mol_type = other DNA
cccacgcggtcgtgcgctgggtgtgactttcttcttgcctgagggcgacgcaatcagcgccagccgtcagaaact

SEQ ID NO: 769495 - DNA, 75 bp, synthetic construct
  source 1..75: mol_type = other DNA
tctctggcgcagatctggctaacctggtgaacgaagcagcactgttcgctgcacgtggcaataaacgtgttgttt

SEQ ID NO: 769496 - DNA, 75 bp, synthetic construct
  source 1..75: mol_type = other DNA
attgaactgcataacccgtgggatttcgaggaggtttacgcctgcctgcatgatttcgcccgtggttacgcgttc

SEQ ID NO: 769497 - DNA, 75 bp, synthetic construct
  source 1..75: mol_type = other DNA
tgcgccaactggttgtcgaaggcaaatttcgcgaagacctgtacgcacggattaatctctggactttcgctctgc

SEQ ID NO: 769498 - DNA, 75 bp, synthetic construct
  source 1..75: mol_type = other DNA
aaaccttttatccgtttggcagcgatcgccaggtgagtagcgactttcagcttatcgccggaacggtgcgcgatt

SEQ ID NO: 769499 - DNA, 75 bp, synthetic construct
  source 1..75: mol_type = other DNA
gccagcttcgatctcggtgaaaaacacaaagtggcggtgctttccgttaccgaaggtgaagacaaaccgctgaaa

SEQ ID NO: 769500 - DNA, 75 bp, synthetic construct
  source 1..75: mol_type = other DNA
ggagtaaagaggttgcagagagttggttatcaaaaggctggtatgtccaacccttgcatctggcccagcctgcat

SEQ ID NO: 769501 - DNA, 75 bp, synthetic construct
  source 1..75: mol_type = other DNA
acctgtaatggtcagatatcaatcctgattccgattgaaatgctacgaagtgcttatattgagcgcggcctacat

SEQ ID NO: 769502 - DNA, 75 bp, synthetic construct
  source 1..75: mol_type = other DNA
gcgccgcgtccggttgatgaaccacgtacgccaaatccgggtaacaccatgtcagagcagttaggcgacaagtaa

SEQ ID NO: 769503 - DNA, 75 bp, synthetic construct
  source 1..75: mol_type = other DNA
ctgctggcttctatcttcatctcatggttcccgatgctgttactgattggtgtctggatcttcttcatgcgtcaa

SEQ ID NO: 769504 - DNA, 75 bp, synthetic construct
  source 1..75: mol_type = other DNA
ttgcgggcgaatcagcggaagggctgctggtgaccaagccgaagaactacgatcaggttccggcgaacaaaccca

SEQ ID NO: 769505 - DNA, 75 bp, synthetic construct
  source 1..75: mol_type = other DNA
gtggagcgccacgcctcactcactggcgacagcgtgcgttttaacaccgaagcgcggcgcgcctggctggccttt

SEQ ID NO: 769506 - DNA, 75 bp, synthetic construct
  source 1..75: mol_type = other DNA
acgtgatgttggcgactggttatacgcacgcttcctgaaagacaaagccgggaccgacacccgtttcgcggcgga

SEQ ID NO: 769507 - DNA, 75 bp, synthetic construct
  source 1..75: mol_type = other DNA
gtcggatgacgctgtccgctgatggcagcattgaagatgacatcgaattttttgccgctactatcgaatccaaag

SEQ ID NO: 769508 - DNA, 75 bp, synthetic construct
  source 1..75: mol_type = other DNA
gacagcgccagtacggaagatatggatgacgccctcttcgccaggacattgccggataacaagctgcaactgatt

SEQ ID NO: 769509 - DNA, 75 bp, synthetic construct
  source 1..75: mol_type = other DNA
atgagacaatgcgcaactggctgaaacaggcggtgaagcgggctgaagctgacggcgtgcatttttcgatccccg

SEQ ID NO: 769510 - DNA, 75 bp, synthetic construct
  source 1..75: mol_type = other DNA
ttgcgctggatatggctgccacgctggtagtgcctttcacaggtgacgggcgcgatgctgcagagatcctgcgta

SEQ ID NO: 769511 - DNA, 75 bp, synthetic construct
  source 1..75: mol_type = other DNA
gtcggatgacgctatctgctgacggcaccattgaagacgacatcgaattttttgctgccaccatcgaatccaaag

SEQ ID NO: 769512 - DNA, 75 bp, synthetic construct
  source 1..75: mol_type = other DNA
acgctgcaaaccacccgcgatccagacatttacgctattggcgactgcgcgtcatgcccgcgtccggaagggggc

SEQ ID NO: 769513 - DNA, 75 bp, synthetic construct
  source 1..75: mol_type = other DNA
gaagtgacgattatcgatctcgatttaagccgttataacgccatcgccagccgctttgccgaggaacgccagcaa

SEQ ID NO: 769514 - DNA, 75 bp, synthetic construct
  source 1..75: mol_type = other DNA
gaaaaagtggcgattaaatcccgcgcaccgatcctgcttaacggcccaaccggtgcgggcaagtcatttctggcg

SEQ ID NO: 769515 - DNA, 75 bp, synthetic construct
  source 1..75: mol_type = other DNA
cagcaaaaaacgccgtcgaggaagatgtgtatagcaaaattctgatgatgaatgagggacatcggttggttagaa

SEQ ID NO: 769516 - DNA, 75 bp, synthetic construct
  source 1..75: mol_type = other DNA
tgcaaaacggaaccggaaaaggtgaagacctttgtcgagcgcaccggttgcgacatgctggcagtttctattggc

SEQ ID NO: 769517 - DNA, 75 bp, synthetic construct
  source 1..75: mol_type = other DNA
tcaagtactcagctaacctgggcgcgaatggcaaggtaaatattgctattgtcggtggcggcgcaacgggagtgg

SEQ ID NO: 769518 - DNA, 75 bp, synthetic construct
  source 1..75: mol_type = other DNA
gtgggctggaagttgttccactttattctcgacgtcgccagcgggaagaagaaaaccttctcggatcaatggggg

SEQ ID NO: 769519 - DNA, 75 bp, synthetic construct
  source 1..75: mol_type = other DNA
aagcaggaacgcgttttccggatgggctggaattaattgaacatattccccaggggcataaagtcgcattgctgg

SEQ ID NO: 769520 - DNA, 75 bp, synthetic construct
  source 1..75: mol_type = other DNA
atgtagatgagattgaacgccttctgattgcgtgtgatgagtcacggaataaagatttgggggttgttgtccgta

SEQ ID NO: 769521 - DNA, 75 bp, synthetic construct
  source 1..75: mol_type = other DNA
tcggctccattgcgaaatcaggcaaaagcgccattgttgaagtattgtcacctggtcaacgcccgactaagcgcg

SEQ ID NO: 769522 - DNA, 75 bp, synthetic construct
  source 1..75: mol_type = other DNA
ctgtacggttgtggcgtagcgattaatgctccggcggcagtgatacccattcgcaccattcacaatatttcgctt

SEQ ID NO: 769523 - DNA, 75 bp, synthetic construct
  source 1..75: mol_type = other DNA
tattctcgacgtcgccagcgggaagaagaaaaccttctcggatcaatggggactgcataaccagctggcggtgtt

SEQ ID NO: 769524 - DNA, 75 bp, synthetic construct
  source 1..75: mol_type = other DNA
tctaggcgaccccatcgcctctgagctgacagcaggtgatttcacaaaatatcgggaagccagattaaaggggga

SEQ ID NO: 769525 - DNA, 75 bp, synthetic construct
  source 1..75: mol_type = other DNA
cacttaaaacgccttccggtaagattgaaatttattccagcaggctggcggaaattgcccgtacctgggaactgg

SEQ ID NO: 769526 - DNA, 75 bp, synthetic construct
  source 1..75: mol_type = other DNA
atttctcggccaaaccgggcgtaccgaacgtgtacgggctggtaggcggtgatgccaatgctgtagggccgaaca

SEQ ID NO: 769527 - DNA, 75 bp, synthetic construct
  source 1..75: mol_type = other DNA
cgctcactttgcccctgatcacttggaagatgctgtaacaaaaaatccactttacaaattagactggaaaaaagc

SEQ ID NO: 769528 - DNA, 75 bp, synthetic construct
  source 1..75: mol_type = other DNA
gtgttgcgcgacatccttggtcactcggatataaaaatgactatggtttatgcacattttgcacctgatcattta

SEQ ID NO: 769529 - DNA, 75 bp, synthetic construct
  source 1..75: mol_type = other DNA
gaaagtggttatgtgaatgctacccaaacgggagagatggcaaacgcgtacgcaaacaatttgcgacgaaaggcg

SEQ ID NO: 769530 - DNA, 75 bp, synthetic construct
  source 1..75: mol_type = other DNA
ggcaaacccggcggttgggtatgcgtctgatctattggtgcgctgcggcgcaacggtgatgttctcagaagtcac

SEQ ID NO: 769531 - DNA, 75 bp, synthetic construct
  source 1..75: mol_type = other DNA
atcgccaggcacattccccgccgacgctggccgctgaacgcgcaggcggactacgacctgcgggatattgagcag

SEQ ID NO: 769532 - DNA, 75 bp, synthetic construct
  source 1..75: mol_type = other DNA
gcgtggcaggatctgtctcctcatggactcacgcagcttatctgttctaagccagaggcgacgcctgccgcttcg

SEQ ID NO: 769533 - DNA, 75 bp, synthetic construct
  source 1..75: mol_type = other DNA
ctggccagtggctgccgctatcgcccgccgagcctcttcctgcgccgcaaacgcattatcaatggcgctggacgc

SEQ ID NO: 769534 - DNA, 75 bp, synthetic construct
  source 1..75: mol_type = other DNA
cgccagcagaaaccgagtggcagggctggataaacaacgccgacgacgctgtgattgaagccagccactggcaaa

SEQ ID NO: 769535 - DNA, 75 bp, synthetic construct
  source 1..75: mol_type = other DNA
gatgagaaaccgatgctcacccgctccgcatggcaggaggttctcgttcaggccgggtttgcaaacgagctggcg

SEQ ID NO: 769536 - DNA, 75 bp, synthetic construct
  source 1..75: mol_type = other DNA
attcagcaaagtggcatggctaccgcaggatggcagcccgaccgcggggatgagcgaacatatcattctcgccac

SEQ ID NO: 769537 - DNA, 75 bp, synthetic construct
  source 1..75: mol_type = other DNA
tattctcgacgtcgccagcgggaagaagaaaaccctctcggatcaatggggattgcataaccagctggcagtgtt

SEQ ID NO: 769538 - DNA, 75 bp, synthetic construct
  source 1..75: mol_type = other DNA
ttatacctttgaaggctatcgcaatgccgatggcagtgtgggcaccaagaacctgctcggcatcacgaccagcgt

SEQ ID NO: 769539 - DNA, 75 bp, synthetic construct
  source 1..75: mol_type = other DNA
atgggaaaaaccgaccgcagcgccaacccttcgccgggcaacaagaaaggcggtctggcaaatgtggtggagaag

SEQ ID NO: 769540 - DNA, 75 bp, synthetic construct
  source 1..75: mol_type = other DNA
ggcgacgctctgcctgtggaaccgccccccgtcgccgccccggagtggctggggaaggttcgcttaagctggcaa

SEQ ID NO: 769541 - DNA, 75 bp, synthetic construct
  source 1..75: mol_type = other DNA
atggataacttgcgcttctcttctgcgccgacagcagattccattgatgcatcgatcgttcaacactacccggac

SEQ ID NO: 769542 - DNA, 75 bp, synthetic construct
  source 1..75: mol_type = other DNA
cggaacccttaccgccgcttgaaggttacacctttgaaggctatcgcaatgccgatggcagcgtgggcaccaaaa

SEQ ID NO: 769543 - DNA, 75 bp, synthetic construct
  source 1..75: mol_type = other DNA
gaaagtggcgctgaaagaggcgatgggcagtacacaaagcattatgatcttacccagcaatagtggacacgcggc

SEQ ID NO: 769544 - DNA, 75 bp, synthetic construct
  source 1..75: mol_type = other DNA
cgtctcttatcatgaagccaaagcagaaactgcctcgccggaagtgatggcggattgcccgcgtcgtatcattct

SEQ ID NO: 769545 - DNA, 75 bp, synthetic construct
  source 1..75: mol_type = other DNA
gtattttttcggtaacgttaaacgcggaaacaccagattgggcgcgtttaacggcctgggcaggaattgttcttg

SEQ ID NO: 769546 - DNA, 75 bp, synthetic construct
  source 1..75: mol_type = other DNA
tgactgtcggactgttcgtaatgaccttttttaatcccggagcaaatttattcatcgtggtacaaaccagcctgg

SEQ ID NO: 769547 - DNA, 75 bp, synthetic construct
  source 1..75: mol_type = other DNA
gtgacattatgttaatggccgaacattttgccattcagatgtgccgcgagatcggattacctctgtttccgggtt

SEQ ID NO: 769548 - DNA, 75 bp, synthetic construct
  source 1..75: mol_type = other DNA
ccatctcaccggttgccgatcaggactggcctgcgtatggtcgcaatcaggaaggtcaacgcttttcacctctga

SEQ ID NO: 769549 - DNA, 75 bp, synthetic construct
  source 1..75: mol_type = other DNA
gaaaaccggcaacatttttgtgctcgatcgtcgtaatggtgaactggtggttccggccccggaaaaaccggttcc

SEQ ID NO: 769550 - DNA, 75 bp, synthetic construct
  source 1..75: mol_type = other DNA
gcatcagccgaaactaaaaagcagcaattgattaatcaggccaacgattatatgaacagtagacaatgggttggt

SEQ ID NO: 769551 - DNA, 75 bp, synthetic construct
  source 1..75: mol_type = other DNA
cggcaactcaattggcggcatgagcggacgcttaattagcggtgtcttcacggactttttcaactggcgaattgc

SEQ ID NO: 769552 - DNA, 75 bp, synthetic construct
  source 1..75: mol_type = other DNA
tttggacgcggtccggtgatgttattttcaacgggcgtcatgttgtttggtttgctgatgacattatccagctcg

SEQ ID NO: 769553 - DNA, 75 bp, synthetic construct
  source 1..75: mol_type = other DNA
tccgaaagtcatcgagcaggcgattaaagacggtattccgctgagcgttattgaagctgcacagcagtcgccggt

SEQ ID NO: 769554 - DNA, 75 bp, synthetic construct
  source 1..75: mol_type = other DNA
catgaacagtaagcaatggcccggtaaagccgctattggtcgtctgaaaggcgaggaactggcgcaatataattt

SEQ ID NO: 769555 - DNA, 75 bp, synthetic construct
  source 1..75: mol_type = other DNA
gaaattactgaatcagaaagacagctactaattaacctggccaacgaatacatgaacagtaagcaatggcccggt

SEQ ID NO: 769556 - DNA, 75 bp, synthetic construct
  source 1..75: mol_type = other DNA
tctgtcgccgattcagtctgcggcagacgcgggtgaactgggcagcaacggcattctgccagacgtcgaaagcct

SEQ ID NO: 769557 - DNA, 75 bp, synthetic construct
  source 1..75: mol_type = other DNA
caaagtattatggttgggcctgacggtgagttgtacggtgcatctgacccgcgctcggtggatgatttaacggcg

SEQ ID NO: 769558 - DNA, 75 bp, synthetic construct
  source 1..75: mol_type = other DNA
agtggtggataaagatggtaacgcggtggcggtgatgccaacgccgtcgggccgaataaacgtccgctgtcgtca

SEQ ID NO: 769559 - DNA, 75 bp, synthetic construct
  source 1..75: mol_type = other DNA
ttcgcatctggcctccggtacgcctggcacggtcgcaggcttctcgctggcgctggagaagtacggcactatgcc

SEQ ID NO: 769560 - DNA, 75 bp, synthetic construct
  source 1..75: mol_type = other DNA
atgataaaaccgacgtttttacgccgggcggcgattgctactttactttcaggatgttgttttagtgcggcagcc

SEQ ID NO: 769561 - DNA, 75 bp, synthetic construct
  source 1..75: mol_type = other DNA
gggtggctattgctgctctgctcacaggaagttgttttagtgctgtcgccgcgccacctgcgccgccgccagtct

SEQ ID NO: 769562 - DNA, 75 bp, synthetic construct
  source 1..75: mol_type = other DNA
cgatgcaaatcatggcagaagcggagaaatacgcctacgccgaccgctcggaatatcttggcgacccggattttg

SEQ ID NO: 769563 - DNA, 75 bp, synthetic construct
  source 1..75: mol_type = other DNA
gcctgagcgtcgcccaggtcgaagagatgtatcgctaccttgccatcgccaactatgaagatcgttttgtcattc

SEQ ID NO: 769564 - DNA, 75 bp, synthetic construct
  source 1..75: mol_type = other DNA
gagtcaggccaacccaccgtgtgctcagaaacctgcgtgggtcgcatccgatatctgggcgtgctgctttacgac

SEQ ID NO: 769565 - DNA, 75 bp, synthetic construct
  source 1..75: mol_type = other DNA
caagtaccgagaacgagaaagatctctaccagcgtcagctggatgtgttcctcgatccgaacgatccgaaagtca

SEQ ID NO: 769566 - DNA, 75 bp, synthetic construct
  source 1..75: mol_type = other DNA
aggaagttgttttagcgccgccgccgcgcctcctgtttcttacggcgtggaggaagatatcttccatccggtacg

SEQ ID NO: 769567 - DNA, 75 bp, synthetic construct
  source 1..75: mol_type = other DNA
atgcagaaaaacggtggcttgatcactaaagaagatttagcggcctataaagcggtcgaacgcactccgataagc

SEQ ID NO: 769568 - DNA, 75 bp, synthetic construct
  source 1..75: mol_type = other DNA
tttgaaaaacgcgcccgtgaccgcaacttcgaggccatgcaaaaggagatgtacgggcagtttgaaaacaccttc

SEQ ID NO: 769569 - DNA, 75 bp, synthetic construct
  source 1..75: mol_type = other DNA
tgccgcacgttttcaatccagacgaagcggtttatatcgttgcacggtctgccacatccggcacccgcacatctg

SEQ ID NO: 769570 - DNA, 75 bp, synthetic construct
  source 1..75: mol_type = other DNA
cccaggctaacctggtcgctctgctcagtcactgcgaacgcggcgaagagtatattgtcggtcaggccgcacaca

SEQ ID NO: 769571 - DNA, 75 bp, synthetic construct
  source 1..75: mol_type = other DNA
gtaatcgtgattacattaaacgtgccattcgctggcggaaaatgacaggtggcgggatgcgtcagtccggcattc

SEQ ID NO: 769572 - DNA, 75 bp, synthetic construct
  source 1..75: mol_type = other DNA
ccagtgaaatggagcagaccctgtggaactccatcgatcgtcttagcagcctgaaaccgaaatttgtttcagtga

SEQ ID NO: 769573 - DNA, 75 bp, synthetic construct
  source 1..75: mol_type = other DNA
atatggtgaagattttaagtcgtgaaggggtaaaagatttccacttctatacgcttaaccgtgctgaaatgagtt

SEQ ID NO: 769574 - DNA, 75 bp, synthetic construct
  source 1..75: mol_type = other DNA
cgggcattttgccggtctctaactttaagcaggcgaagaaatttgccgatatgaccaacgtgcgtattccggcgt

SEQ ID NO: 769575 - DNA, 75 bp, synthetic construct
  source 1..75: mol_type = other DNA
atggagcaggcacaggagcgccgcaacgagcttattgcacgcatagccgaccagatgcagcaacgaccactaaaa

SEQ ID NO: 769576 - DNA, 75 bp, synthetic construct
  source 1..75: mol_type = other DNA
cttcacgtccaggtctgggtaaggtgtccggtttcttctggcggaatccggggctggggctgtttttgctgctgc

SEQ ID NO: 769577 - DNA, 75 bp, synthetic construct
  source 1..75: mol_type = other DNA
caagctacattgttaaagcctatgcctggacattattgctggctaaagacggtgtagcgcagtggtttttacagc

SEQ ID NO: 769578 - DNA, 75 bp, synthetic construct
  source 1..75: mol_type = other DNA
gccgcgtttaaaacaggttgccctgtcggcaatttcggaggtcaacgctgagctgtatgagtttcgcagacgcca

SEQ ID NO: 769579 - DNA, 75 bp, synthetic construct
  source 1..75: mol_type = other DNA
ttacaggcaatgttcaggataacacctgcgatgttgacattaactcccgaaactttgatgtcagtctgggaagtt

SEQ ID NO: 769580 - DNA, 75 bp, synthetic construct
  source 1..75: mol_type = other DNA
cttcacgtccaggagttggaaagatatccggctttttctggcgaaaaccaggactggggctatttttgctactgc

SEQ ID NO: 769581 - DNA, 75 bp, synthetic construct
  source 1..75: mol_type = other DNA
attgcggtgatgttaccgatgtgggcgagctacattgttaaagcctatgcctggacgttattgctggcgaaagat

SEQ ID NO: 769582 - DNA, 75 bp, synthetic construct
  source 1..75: mol_type = other DNA
tcgttatcctgcaagctatcactttattggctacggtgattggtagccgttctggtggttgtgatggtggtatga

SEQ ID NO: 769583 - DNA, 75 bp, synthetic construct
  source 1..75: mol_type = other DNA
atgcggcggtgttgtactcgctgatcggcacatgccgtatgaacaatgtagagccagaaaaattgtcacgaacgg

SEQ ID NO: 769584 - DNA, 75 bp, synthetic construct
  source 1..75: mol_type = other DNA
ggttggaagaaaaaattatctcttcttcgactcagacaagggaggagaaagtgcggcgatcatctacagtctgct

SEQ ID NO: 769585 - DNA, 75 bp, synthetic construct
  source 1..75: mol_type = other DNA
atgttctggaggcaggaaaggtgcacgcagatgacactccggtgaaagtactgaaccgccccgggaatcctggag

SEQ ID NO: 769586 - DNA, 75 bp, synthetic construct
  source 1..75: mol_type = other DNA
gaactggaaaaccggctgaacacagccagaaatcttctggaagatgcatcgtcagtcacagattcatctgacacc

SEQ ID NO: 769587 - DNA, 75 bp, synthetic construct
  source 1..75: mol_type = other DNA
atgcccggtaaagtccatgccgatgatatccccgtcccggtccaggagccgggcagcggtaaaacccggaccgcc

SEQ ID NO: 769588 - DNA, 75 bp, synthetic construct
  source 1..75: mol_type = other DNA
ggacgccgtactgggtgagtaacgaactgaaaccggggaaagatgtggtctggttgcaggtgccgttctccgcac

SEQ ID NO: 769589 - DNA, 75 bp, synthetic construct
  source 1..75: mol_type = other DNA
atgctgtatccggaaggaaaaagcggaaaaaaacgcattgctgacgatatgatggagctaattgaaaaatctttt

SEQ ID NO: 769590 - DNA, 75 bp, synthetic construct
  source 1..75: mol_type = other DNA
catcggtctatttttgggtgccagatattcgcgacgaggcgaaaggaaacctgcgcgaacagtttcattttttgc

SEQ ID NO: 769591 - DNA, 75 bp, synthetic construct
  source 1..75: mol_type = other DNA
cgccgggcatatgatctcgtattatgcgctgggtgtggtggtcggcgcgccgatcatcgcgctcttttccagccg

SEQ ID NO: 769592 - DNA, 75 bp, synthetic construct
  source 1..75: mol_type = other DNA
cccgtaaagaagcgatgatgggcgtgctgggcattacctgcggcgtaatggtctgggcaggaatcgcgctgcttg

SEQ ID NO: 769593 - DNA, 75 bp, synthetic construct
  source 1..75: mol_type = other DNA
ccatggtgcacattgtggcgcttatgagccccggtcccgatttcttctttgtttctcagaccgctgtcagtcgtt

SEQ ID NO: 769594 - DNA, 75 bp, synthetic construct
  source 1..75: mol_type = other DNA
aaacgctggcgtggtttaccgtcgttgccagcctgtttgccctgccgcaaatgcgccgtggttatcaacgtctgg

SEQ ID NO: 769595 - DNA, 75 bp, synthetic construct
  source 1..75: mol_type = other DNA
aaatacgccgttctggcctgatgtggaactgtcggagtttcgcagtgtgatgcgcactgatggcacggtgacgca

SEQ ID NO: 769596 - DNA, 75 bp, synthetic construct
  source 1..75: mol_type = other DNA
atctcttcctgagcagtcaggaggtgagtcaagactcgtatcacaaaaaggaaatgccagagtagtatgtggtgt

SEQ ID NO: 769597 - DNA, 75 bp, synthetic construct
  source 1..75: mol_type = other DNA
atgacccccaggcgattgatttgccgtcgcgcctgctttcgccggatgcgcagcactggctgggcaccgatcact

SEQ ID NO: 769598 - DNA, 75 bp, synthetic construct
  source 1..75: mol_type = other DNA
agagcgcggcgttaagtggtcagacgaagcccggttagcactggaatggaaagcgaggtttggagacgccgcatg

SEQ ID NO: 769599 - DNA, 75 bp, synthetic construct
  source 1..75: mol_type = other DNA
cagccggtgtttccggcgaacgtgaaggcgggggaatacacgggggcactgacctttgtggtcacgtatcagtaa

SEQ ID NO: 769600 - DNA, 75 bp, synthetic construct
  source 1..75: mol_type = other DNA
ccctggcggtcgccttgatattgcctggaaaggtccgggtcatccgttatatatgacgggtccggcagtacatgt

SEQ ID NO: 769601 - DNA, 75 bp, synthetic construct
  source 1..75: mol_type = other DNA
aaccgtgctgcggtcagccgtaaccgtcaggcgggtgaacggcaacagtcacgccattgcttctcaggtacgtac

SEQ ID NO: 769602 - DNA, 75 bp, synthetic construct
  source 1..75: mol_type = other DNA
taaaccgtaatacccggggactgctttctcagggagaggtgctggagacgtatgaagagcgcctgaacactcagc

SEQ ID NO: 769603 - DNA, 75 bp, synthetic construct
  source 1..75: mol_type = other DNA
ggcgtcacggctttctggcgcgggccatgtgcgggtgtttgtcgatcatctggcaggcgcggtgatcccttcgct

SEQ ID NO: 769604 - DNA, 75 bp, synthetic construct
  source 1..75: mol_type = other DNA
tttctaagtattgtgcaaaattcacccgaaaagaagccatcttaaccccccctacgtactttaataaaacctcca

SEQ ID NO: 769605 - DNA, 75 bp, synthetic construct
  source 1..75: mol_type = other DNA
agaaatattgattattggacggtaaaaagaaagtttgcagaaattgtctccaccaatgacgttaataaaatttac

SEQ ID NO: 769606 - DNA, 75 bp, synthetic construct
  source 1..75: mol_type = other DNA
ccccggccaaaatgtggatcaacggcctgaccatgctcaacaaaccgttgctgcaattccacacccagtttaacg

SEQ ID NO: 769607 - DNA, 75 bp, synthetic construct
  source 1..75: mol_type = other DNA
aactgaaagatccgaagatcgccaaactgttcgataccaacggcgacggtaaagcggatttaaccggctgtaacc

SEQ ID NO: 769608 - DNA, 75 bp, synthetic construct
  source 1..75: mol_type = other DNA
gcgccgcagttaccggatatgcagcaaacgctactggataaacactatctgcgtaagcatggcgcgaaggcatat

SEQ ID NO: 769609 - DNA, 75 bp, synthetic construct
  source 1..75: mol_type = other DNA
tgattcttgaagagaatgcgctcggcgaccatagccgggtggaaaggatcgccacggagaagctgcaaatgcagc

SEQ ID NO: 769610 - DNA, 75 bp, synthetic construct
  source 1..75: mol_type = other DNA
ctatttcaacgcggtttactgttgggcacgcgccatgctcaacgaacgataccaggactatgacaccacggcatc

SEQ ID NO: 769611 - DNA, 75 bp, synthetic construct
  source 1..75: mol_type = other DNA
gcggaggccagcggcgacctgtggcgggatgcccgctgggctatcagtcgggtacaggatgcgccgcactgcacg

SEQ ID NO: 769612 - DNA, 75 bp, synthetic construct
  source 1..75: mol_type = other DNA
aaatcaccgctatttgccgcgacgccaattacgacgatcgttgcgccggtctggtggtgtggctgcacactttct

SEQ ID NO: 769613 - DNA, 75 bp, synthetic construct
  source 1..75: mol_type = other DNA
aaggacgatcctgcccgcctgatcttcaatacccaaaccggcccagccattgtcgccagcttgattgatctcggc

SEQ ID NO: 769614 - DNA, 75 bp, synthetic construct
  source 1..75: mol_type = other DNA
atctgccaactgcttccgaagcgtggatcctcgctggtggcgcgcaccataccgtcttcagccatgcgctgaacc

SEQ ID NO: 769615 - DNA, 75 bp, synthetic construct
  source 1..75: mol_type = other DNA
tatgggtatattctgccgtcagttagcgccgcagttaccggatatgcagcaaacgctactggataaacactatct

SEQ ID NO: 769616 - DNA, 75 bp, synthetic construct
  source 1..75: mol_type = other DNA
cagcaaccggtaccacccacgccgactatttctacggcaccattccctgcacccgcaaaatgaccgacgcagaaa

SEQ ID NO: 769617 - DNA, 75 bp, synthetic construct
  source 1..75: mol_type = other DNA
gaaaaagccctcctccgacacgccaactcaccggctgctctatcaggcattcccgtctattggcggcattgtgca

SEQ ID NO: 769618 - DNA, 75 bp, synthetic construct
  source 1..75: mol_type = other DNA
aaattatttactacttataaacctaatgaaaccccagcagtaataacacgaagttaccaggcgaagctaacgaca

SEQ ID NO: 769619 - DNA, 75 bp, synthetic construct
  source 1..75: mol_type = other DNA
aagccgcaccctcgtaaacgtgaaagcatggcgcgacaaactaacccagcaagcgattgattgtcgctacatcga

SEQ ID NO: 769620 - DNA, 75 bp, synthetic construct
  source 1..75: mol_type = other DNA
gctttctgcaaactcattcttgccacaaccacatcccggtaactgtggcaaagcctttgtgattgataaagcggg

SEQ ID NO: 769621 - DNA, 75 bp, synthetic construct
  source 1..75: mol_type = other DNA
tgaaacaaggtattccacaaaacgtgattgacgctgcccagcgttcgcctgtctacaaaatggcgatggactgga

SEQ ID NO: 769622 - DNA, 75 bp, synthetic construct
  source 1..75: mol_type = other DNA
ttcccggtcagagtgcggcaatggcaacccgcgattaccaggccgaattaacccaaaaacctggtgaaccactcg

SEQ ID NO: 769623 - DNA, 75 bp, synthetic construct
  source 1..75: mol_type = other DNA
tatatccccagagagccaaatcgtaaactttggacaaatcgcggccaacaccatcgccaccttcccgcccaaagc

SEQ ID NO: 769624 - DNA, 75 bp, synthetic construct
  source 1..75: mol_type = other DNA
tgaaaacgacagggcagaatttgacagggcaactgtagaagccatgataggtgcaatcgaggcgctcgatcaggc

SEQ ID NO: 769625 - DNA, 75 bp, synthetic construct
  source 1..75: mol_type = other DNA
tccaggagaaaagctcgctggtatcaaactccccttgatgcagaatcagcggttggaggtggcatttcagaacaa

SEQ ID NO: 769626 - DNA, 75 bp, synthetic construct
  source 1..75: mol_type = other DNA
ttttccaaactttagacacagcagatgtacctggcgatgttagaaaaattgcgaacttagtgtgggataatatgg

SEQ ID NO: 769627 - DNA, 75 bp, synthetic construct
  source 1..75: mol_type = other DNA
ctttactgacggcttctctgctctccttatcttctgtcaacgccgctgcgttgcaggcaaaacagtatggcgatt

SEQ ID NO: 769628 - DNA, 75 bp, synthetic construct
  source 1..75: mol_type = other DNA
cttcggcacgatggtacgcctgaatcaagaaattaaagagagcgaagccggaaaattccttgcggataactacgg

SEQ ID NO: 769629 - DNA, 75 bp, synthetic construct
  source 1..75: mol_type = other DNA
gctttctgcaaactcattcttgccacaaccacacccaggcaactgtggcaaaacctttgtgattgataaagcggg

SEQ ID NO: 769630 - DNA, 75 bp, synthetic construct
  source 1..75: mol_type = other DNA
tgtccgtacaaaaaaatctacttcaactggaaaagcggcaagtcagaaaaatgtatcttctgttatccgcgaatt

SEQ ID NO: 769631 - DNA, 75 bp, synthetic construct
  source 1..75: mol_type = other DNA
gggtggttacggttgcaaaaccgttcagggcaaacaaacaggctgaatgcgattatctgttcagtgcactgcgtc

SEQ ID NO: 769632 - DNA, 75 bp, synthetic construct
  source 1..75: mol_type = other DNA
acatgggtgtgctggaaaaaagacatatcgattctctgaccgaagaagaagagaactggcgtcggcagctggtca

SEQ ID NO: 769633 - DNA, 75 bp, synthetic construct
  source 1..75: mol_type = other DNA
tcggggcaaacaaacaggctgaatgcgattatctgttcagtgctctgcgtcggctggaaatccggggcgtgacgg

SEQ ID NO: 769634 - DNA, 75 bp, synthetic construct
  source 1..75: mol_type = other DNA
gatagtagtctacccggtaagagcatcaagaacgctcatagtgaccgctgtgtgcctctggtcgatggggcctat

SEQ ID NO: 769635 - DNA, 75 bp, synthetic construct
  source 1..75: mol_type = other DNA
gcgagaaccgagcgtctcactctacgttaatcgagatattcgactatctggatattcaggatgtcagcaaggcga

SEQ ID NO: 769636 - DNA, 75 bp, synthetic construct
  source 1..75: mol_type = other DNA
cgttcagggcaaacaaacaggctgaatgcgattatctgttcagtgcactgcgtcggctggaaatccgggccgtga

SEQ ID NO: 769637 - DNA, 75 bp, synthetic construct
  source 1..75: mol_type = other DNA
aatactgatggcgtaggtttgttaagcgatctggaacgcctgtcttttatccgccccggcttgcgtattttgctc

SEQ ID NO: 769638 - DNA, 75 bp, synthetic construct
  source 1..75: mol_type = other DNA
ctaaattgtttgcgcacactggcagtattcagacgttgagtatgggcgaactggaaggtcatgagtttgatctca

SEQ ID NO: 769639 - DNA, 75 bp, synthetic construct
  source 1..75: mol_type = other DNA
ctattgctacttatcgacccaaagctgcatttagcgtatctactataaaagatgttgctgccgactgtaccgagc

SEQ ID NO: 769640 - DNA, 75 bp, synthetic construct
  source 1..75: mol_type = other DNA
acatggctggcccggaaatcatcagtgggtggttacggttgcgaaaccgttcagggcaaacaaacaggctgaatg

SEQ ID NO: 769641 - DNA, 75 bp, synthetic construct
  source 1..75: mol_type = other DNA
tatactaattgataatgatcaaatagaaaatacaaatttgacaaggcaggttttattttcagaggatgatgtcgg

SEQ ID NO: 769642 - DNA, 75 bp, synthetic construct
  source 1..75: mol_type = other DNA
tggtcagatgaaataaaaatacattcccaaaatatgggccgttcgcctgtttgctctgtgtgtggaaatagaatg

SEQ ID NO: 769643 - DNA, 75 bp, synthetic construct
  source 1..75: mol_type = other DNA
atacgttgctctccgttagcgtgcggactaataaccctgaacctggtttccagttgattaaccagcgaatcaccc

SEQ ID NO: 769644 - DNA, 75 bp, synthetic construct
  source 1..75: mol_type = other DNA
cgacacgcaggggaatggttgctaccggattactccagggattagtttgctacctgctgatctcctggcttgcca

SEQ ID NO: 769645 - DNA, 75 bp, synthetic construct
  source 1..75: mol_type = other DNA
atggataacgttgaactttcaccggcaacacgctgggggatgattgctaccggattacttcaggggatgattgct

SEQ ID NO: 769646 - DNA, 75 bp, synthetic construct
  source 1..75: mol_type = other DNA
cgcgataacgtgatgacctgtattgaaaaggatgcctgcgtactggtcgagagagatctaaatagtgatggtcag

SEQ ID NO: 769647 - DNA, 75 bp, synthetic construct
  source 1..75: mol_type = other DNA
aaaatgtagccttcgggcttgctgtacttaaatactatcttcgtttcaactccaaagagaatttacaagatgcta

SEQ ID NO: 769648 - DNA, 75 bp, synthetic construct
  source 1..75: mol_type = other DNA
gcaatgcttgactgtattcttgtctcaagaaatgaacttgatcgtcaggttttccacgccaacagggttttagaa

SEQ ID NO: 769649 - DNA, 75 bp, synthetic construct
  source 1..75: mol_type = other DNA
caataaatatgactcacgccgcaaacgtgacaaagaattttatgatgaattgctctcatttgaaggtctgaatat

SEQ ID NO: 769650 - DNA, 75 bp, synthetic construct
  source 1..75: mol_type = other DNA
cggcttgtatggcacatgcccgacgcaagatccacgatgtacatgtccgccagaagagcgactggcggtcagaaa

SEQ ID NO: 769651 - DNA, 75 bp, synthetic construct
  source 1..75: mol_type = other DNA
aaaatggctgcgttacgtcattgagcataccaggattggccggcaaaccgggtacgcgatctgttgccctggaaa

SEQ ID NO: 769652 - DNA, 75 bp, synthetic construct
  source 1..75: mol_type = other DNA
cagggatgatcgtaatgcgggttcatccctgccggcagccgtctggttcgcgtattcggcagatcgcaaaggaga

SEQ ID NO: 769653 - DNA, 75 bp, synthetic construct
  source 1..75: mol_type = other DNA
tgtccttcaaacagaagcgactttggggatggctggcgatagtgttgattgccactcttgggatgagcggctggc

SEQ ID NO: 769654 - DNA, 75 bp, synthetic construct
  source 1..75: mol_type = other DNA
acagagctcatcaaacaccttgagtttgatattaccgcagccgaattgtcagcccatctgcttactccgggaaac

SEQ ID NO: 769655 - DNA, 75 bp, synthetic construct
  source 1..75: mol_type = other DNA
ttgctgaccgcgccagcgcatacgacagtagacagttttggtgctgacgatggttttatggcgggcttggtatat

SEQ ID NO: 769656 - DNA, 75 bp, synthetic construct
  source 1..75: mol_type = other DNA
ctatattcatatgcctttttgccagagccgctgcgggttttgtaatctctttacctgcacgggggcagacaatgc

SEQ ID NO: 769657 - DNA, 75 bp, synthetic construct
  source 1..75: mol_type = other DNA
atcaagttttgttcgatgaattttatgatttctgttatagaactgattggattactactcgtcaatcagatttag

SEQ ID NO: 769658 - DNA, 75 bp, synthetic construct
  source 1..75: mol_type = other DNA
ttatgataaggaaaggtggaaaggcatacctgtcgaaactataatatctggagtaaccacaccacaactatttag

SEQ ID NO: 769659 - DNA, 75 bp, synthetic construct
  source 1..75: mol_type = other DNA
ccgctggatgcgtcgcctctgggaggccttgccaaaattgctggttgaacgtcctgcggcccgctggttgttcat

SEQ ID NO: 769660 - DNA, 75 bp, synthetic construct
  source 1..75: mol_type = other DNA
ttagccatcgccaacaatcatggtgtaaatcgcaaggggtttgtgaaatagcatggcagacattggacatttata

SEQ ID NO: 769661 - DNA, 75 bp, synthetic construct
  source 1..75: mol_type = other DNA
tcaactgagcttatccagacctctctcatggccagctcagcaaaaactcagggtaggatccacttgcccggcgtg

SEQ ID NO: 769662 - DNA, 75 bp, synthetic construct
  source 1..75: mol_type = other DNA
tgaagatcatgcgaaataccacattatccgcatccccaaaaatgcttctctgccacgtgtacttgccgccattct

SEQ ID NO: 769663 - DNA, 75 bp, synthetic construct
  source 1..75: mol_type = other DNA
ggtagccgtacgcaataggatgaaaatattttatcgcccggagacattatcaggtaatccacttgacgcttataa

SEQ ID NO: 769664 - DNA, 75 bp, synthetic construct
  source 1..75: mol_type = other DNA
atgcatcagtttcctttatcgtcacttatgattaacgtgctgatatgcattttaatatgttgcacaaatgcgcag

SEQ ID NO: 769665 - DNA, 75 bp, synthetic construct
  source 1..75: mol_type = other DNA
tattaagcgattttcccctgctgggcgattttatcaaacaagattattgccaccagcaggataatcgtattctgc

SEQ ID NO: 769666 - DNA, 75 bp, synthetic construct
  source 1..75: mol_type = other DNA
gcgtctacgccgctacaagaacaagccattgtcggtgcgcttgatggtgattatcgcctgcgcagcggaatgaaa

SEQ ID NO: 769667 - DNA, 75 bp, synthetic construct
  source 1..75: mol_type = other DNA
atggggatattcctgtcgtcaattttgagaagtttgataaaatatcaaaggttgactcaattgtttttgtcttaa

SEQ ID NO: 769668 - DNA, 75 bp, synthetic construct
  source 1..75: mol_type = other DNA
agtcgccgttgctggccgcatgatgacccgccgtattatgggtaaagcgtctttcgttaccctgcaggatgtggg

SEQ ID NO: 769669 - DNA, 75 bp, synthetic construct
  source 1..75: mol_type = other DNA
aaacggcgcacaggggctacggtgctggtggttcaccattccggcaaggatgaaacaaagggggcgcgtggttcc

SEQ ID NO: 769670 - DNA, 75 bp, synthetic construct
  source 1..75: mol_type = other DNA
atctgccggatacgacacgcagcttgattacgtggtgaagggaattattccggcggtatcgctttgcagcatata

SEQ ID NO: 769671 - DNA, 75 bp, synthetic construct
  source 1..75: mol_type = other DNA
aacagccttacgacaaaatgaccgaggtcattatttttgcgggtagtgatgcctgggcacacgcgaagcagtggc

SEQ ID NO: 769672 - DNA, 75 bp, synthetic construct
  source 1..75: mol_type = other DNA
tctctacaaccctgacaaacccgaccgtcctgtgaatagtccgaaggcggtgtatcaaatcgaaccctccgcatt

SEQ ID NO: 769673 - DNA, 75 bp, synthetic construct
  source 1..75: mol_type = other DNA
gcattccgtgccgcgcttgatgcagagtaccgaatcagccgggaaaattcagaggttacagcactggtggcggcg

SEQ ID NO: 769674 - DNA, 75 bp, synthetic construct
  source 1..75: mol_type = other DNA
tgcacgatcccgctgttacgtgacgatatgaaaaagctggggtatgacacaaaacaccttaaacgatggttagcc

SEQ ID NO: 769675 - DNA, 75 bp, synthetic construct
  source 1..75: mol_type = other DNA
gtgaaaaacgcaccgaatttaaaatatcagccgaaggataaattcactgaggtaatcatttttgccgggacggat

SEQ ID NO: 769676 - DNA, 75 bp, synthetic construct
  source 1..75: mol_type = other DNA
gccgatatttttgccgctgggctaaagcgtaaagagagccacggtaaagtagtatttggcagcgtgcaatcggtc

SEQ ID NO: 769677 - DNA, 75 bp, synthetic construct
  source 1..75: mol_type = other DNA
gaaaatcacctattacgatgaagacggcgcggatgtgagtgagcgtttccgtctgcaaacgcccgcccagcgtac

SEQ ID NO: 769678 - DNA, 75 bp, synthetic construct
  source 1..75: mol_type = other DNA
cgctggtggtggtggataagccgcgccctcccgttgaactggaacgcatcgaggaggcaggcaacaagacggaaa

SEQ ID NO: 769679 - DNA, 75 bp, synthetic construct
  source 1..75: mol_type = other DNA
aaaacaccttaaacgatggttagcaaaactggaaaaagacggcgtgatttgcgtcgatggggatgatgttcaccc

SEQ ID NO: 769680 - DNA, 75 bp, synthetic construct
  source 1..75: mol_type = other DNA
ggtaatcatttttgccgggacggatgcttacgtccatgctcaacactggattgaaagcgaaggacgaaaacacgg

SEQ ID NO: 769681 - DNA, 75 bp, synthetic construct
  source 1..75: mol_type = other DNA
aggttcttttctatcaagaacaaccattttctattccatattgttttaaaaacaaatcaaaaaaatactatccag

SEQ ID NO: 769682 - DNA, 75 bp, synthetic construct
  source 1..75: mol_type = other DNA
tcttagaagacgctgatgcccttgaagagtttgctgaggattttgaggatcttgatgacttctacaatagccaat

SEQ ID NO: 769683 - DNA, 75 bp, synthetic construct
  source 1..75: mol_type = other DNA
tatcatcttaatgcgcaagagaaagggctggcgcgggcgcgcaataatattgatgcctggtggcccgcgattgaa

SEQ ID NO: 769684 - DNA, 75 bp, synthetic construct
  source 1..75: mol_type = other DNA
aggtagggctggtgctgcgaccgtttttaccggaacaggtcagagcaaaactgcctgccgaaacggtgaaagcta

SEQ ID NO: 769685 - DNA, 75 bp, synthetic construct
  source 1..75: mol_type = other DNA
tgaaggtgcagacagtgaagccctggttatctcctgcaccaaaatgaaggacgcggaggaactgaaagaggctgc

SEQ ID NO: 769686 - DNA, 75 bp, synthetic construct
  source 1..75: mol_type = other DNA
cgcatcgaggaggccggaaacaagacggagaatcacgccgcactatggggctgtatccggtcacgcacacagcgc

SEQ ID NO: 769687 - DNA, 75 bp, synthetic construct
  source 1..75: mol_type = other DNA
atatgatttacgtgtggtggagctttttaccgacgctgacaaggagttaatcacgtcgctggtggttgtggataa

SEQ ID NO: 769688 - DNA, 75 bp, synthetic construct
  source 1..75: mol_type = other DNA
tccggtaacgtgcttagcccggccaaactccgcgacaagtggacccagctcgaaatcaaccgtaacaagcaacag

SEQ ID NO: 769689 - DNA, 75 bp, synthetic construct
  source 1..75: mol_type = other DNA
ggcacgacgagaaaggcgaatggttgaaaatcacctattacgatgaagacggcgcggatgtgagtgagcgtttcc

SEQ ID NO: 769690 - DNA, 75 bp, synthetic construct
  source 1..75: mol_type = other DNA
tggctgaaacaggagctactctggaatggcttgcgactggacaaggtagaaagtttaacgatgacgaattagaca

SEQ ID NO: 769691 - DNA, 75 bp, synthetic construct
  source 1..75: mol_type = other DNA
gtgaacctacaaattgagttttcccagggcggatctgaggtactagatagagttatccaagcgtatggattcaac

SEQ ID NO: 769692 - DNA, 75 bp, synthetic construct
  source 1..75: mol_type = other DNA
aaatcaatgattggatacaatccagacctggcatcaaaatcagcaactgggaaagtacctgacagtgtttcagtt

SEQ ID NO: 769693 - DNA, 75 bp, synthetic construct
  source 1..75: mol_type = other DNA
gttcagcgtgaagtgggggcagatcaaacaactgctcgggtcacggatgatgatcggcgtttatatcggtcagta

SEQ ID NO: 769694 - DNA, 75 bp, synthetic construct
  source 1..75: mol_type = other DNA
catcagctttatctggttgaaagtcatccacgagccaaatcaacatccgggggtaaatcagaaagagctggagta

SEQ ID NO: 769695 - DNA, 75 bp, synthetic construct
  source 1..75: mol_type = other DNA
aagcggcgtaggtatggcttttgactgcggtattgacgatataaaaatcatcggccgcattgttctgacgattga

SEQ ID NO: 769696 - DNA, 75 bp, synthetic construct
  source 1..75: mol_type = other DNA
atgtgtctcgcgcagtgatgatagcttgtgtctggtgtatgaacatcgcagcggtgtttatcactatcgggtaag

SEQ ID NO: 769697 - DNA, 75 bp, synthetic construct
  source 1..75: mol_type = other DNA
gccgttgccgcgccagtgggtaaacaatggctttgccggatggaatggtcaggcccgcatcgagcagccgcagga

SEQ ID NO: 769698 - DNA, 75 bp, synthetic construct
  source 1..75: mol_type = other DNA
gtcctggtaaaaaaagcggtgtggcaaccgatgcctcctgttttccgctggtgccatttgcaaaccgggtgagcg

SEQ ID NO: 769699 - DNA, 75 bp, synthetic construct
  source 1..75: mol_type = other DNA
aactatgccgtgaagcacgtaaactcacactacaagaactatcagatagaacggatttaactaaatcttatttat

SEQ ID NO: 769700 - DNA, 75 bp, synthetic construct
  source 1..75: mol_type = other DNA
caagccgctgtataaggaccttatcggtcgaacaaaagcagcactgaagaagaacccgaaaaatgtgctgtttac

SEQ ID NO: 769701 - DNA, 75 bp, synthetic construct
  source 1..75: mol_type = other DNA
tggtcagcagaacgcgtgcagccctgaagaaaaatccgaaaaacgtgctgttgtcggtgatctggatgcaggggg

SEQ ID NO: 769702 - DNA, 75 bp, synthetic construct
  source 1..75: mol_type = other DNA
atcaaacagctgctcgggtcacggatgatgatcggcgtttatatcggtcagtactgtatcaacgccctgacttac

SEQ ID NO: 769703 - DNA, 75 bp, synthetic construct
  source 1..75: mol_type = other DNA
tttgggagataccagcggaacgtatgaaaatgcgtaggcctcacattgttcctttatctactcaggtagttgacc

SEQ ID NO: 769704 - DNA, 75 bp, synthetic construct
  source 1..75: mol_type = other DNA
gagcactagagaaaacacgtaaggtacgtcagaggtgcggtgaggtttatcgctacgcaatcataactggccgcg

SEQ ID NO: 769705 - DNA, 75 bp, synthetic construct
  source 1..75: mol_type = other DNA
accaaaaatgctacgaagatagttatgctaactggtgtaagaacgcaggagatgcgctttgctacgtggaaagaa

SEQ ID NO: 769706 - DNA, 75 bp, synthetic construct
  source 1..75: mol_type = other DNA
cgcgtactggtgctggcacacgtcaaagaactggtggcgcaaaaccatgcaaagtatcaggcgctggggctggaa

SEQ ID NO: 769707 - DNA, 75 bp, synthetic construct
  source 1..75: mol_type = other DNA
gacaacgttccggtacaggttttctgccctgcctgcggttttgccaacaccttttgggggaaaacgaccgccgac

SEQ ID NO: 769708 - DNA, 75 bp, synthetic construct
  source 1..75: mol_type = other DNA
aattgaagattttaaagcccagcgttttcgctatctggtcaacgtcgcggtactgaccaccggatttgacgcccc

SEQ ID NO: 769709 - DNA, 75 bp, synthetic construct
  source 1..75: mol_type = other DNA
ctggagagacagctcaatggagggaactcttttttgcaggagttcagtctgtatatggagcaaactcgctcagct

SEQ ID NO: 769710 - DNA, 75 bp, synthetic construct
  source 1..75: mol_type = other DNA
taatgcaataaataaaatcctacttttcggtaaagaatatatatgttctgaacttagccacgagattatgaaaat

SEQ ID NO: 769711 - DNA, 75 bp, synthetic construct
  source 1..75: mol_type = other DNA
gtttcttgataatggaaatgctattgagctggctataaaagcaatcagggagttgcactctgggagttatgagtt

SEQ ID NO: 769712 - DNA, 75 bp, synthetic construct
  source 1..75: mol_type = other DNA
tttggcagctacgatttagtaagcctcgcagaagcacgtgaaaagcgtgatatcgcccgtaagcaggttgctaat

SEQ ID NO: 769713 - DNA, 75 bp, synthetic construct
  source 1..75: mol_type = other DNA
ggaattcaattaggggaacgtacaatcatgcgcaatacttattacaaagaaaatctatgatgcaattttacagcg

SEQ ID NO: 769714 - DNA, 75 bp, synthetic construct
  source 1..75: mol_type = other DNA
ctagagagacagctcaacggagggaactcttttctgcaggcattcagtctgtatatggagcaaactcgctcagct

SEQ ID NO: 769715 - DNA, 75 bp, synthetic construct
  source 1..75: mol_type = other DNA
tggctgggggactggtgcagtgaagagcggcatcctgtgatctggtcaaccacgcaggctgcagaacacttaccg

SEQ ID NO: 769716 - DNA, 75 bp, synthetic construct
  source 1..75: mol_type = other DNA
ccaccgtgttgaccaggttcagcgggcgcagttacatcttgagcagaagttacatcttgagcaggttacatcttg

SEQ ID NO: 769717 - DNA, 75 bp, synthetic construct
  source 1..75: mol_type = other DNA
aaccagctactggatattctcagacataaagcattaacgcagatggcacaggagagtggcggtagtgcaaccgtg

SEQ ID NO: 769718 - DNA, 75 bp, synthetic construct
  source 1..75: mol_type = other DNA
agcagcatccggtgatctggtcaaccacgcaggctgcagaacacttaccggttcgcatgccccgtctctgctctg

SEQ ID NO: 769719 - DNA, 75 bp, synthetic construct
  source 1..75: mol_type = other DNA
aaattacgcaattacccgggtaaacgacagggtcagttcactggtcagtgatactgccaggctggcgcattattc

SEQ ID NO: 769720 - DNA, 75 bp, synthetic construct
  source 1..75: mol_type = other DNA
cgtttaaaagagggactgaccggcgaaggcgctgcacgacagaatgccatcaatgcttcggttgcacagggcctt

SEQ ID NO: 769721 - DNA, 75 bp, synthetic construct
  source 1..75: mol_type = other DNA
atgcttagcccatcccaatcccttcaataccagaaagaaagcgtcgagcgagctttaacgtgcgctaactgcggt

SEQ ID NO: 769722 - DNA, 75 bp, synthetic construct
  source 1..75: mol_type = other DNA
gctcgcatgccccgtctctgctcagcagagcgtctctctgaaagtatggtcgatgaaatatttctgaagggggct

SEQ ID NO: 769723 - DNA, 75 bp, synthetic construct
  source 1..75: mol_type = other DNA
cgtttaaaagaggggctgaccggcgaaggtgctgcacggcagaatgccatcaatgctgcgcttgcacagggcgtt

SEQ ID NO: 769724 - DNA, 75 bp, synthetic construct
  source 1..75: mol_type = other DNA
gcatgggagttatttaataacagccgccgccatagcgaattgcgtctgcataaagttcgccgtcatgatgaagcg

SEQ ID NO: 769725 - DNA, 75 bp, synthetic construct
  source 1..75: mol_type = other DNA
tgcgcagaactgatgagcgatccgaatagctcaatgtacgaggaagaagatgatgaaaacactttcccatccagg

SEQ ID NO: 769726 - DNA, 75 bp, synthetic construct
  source 1..75: mol_type = other DNA
gcaacaccttaatcctttcgactgacagtggcggtatcgatattggtaaattaatccttgatgtcaaccctacag

SEQ ID NO: 769727 - DNA, 75 bp, synthetic construct
  source 1..75: mol_type = other DNA
cactctgttggatatcgggcgtgatatcgtcgagcaaaaagtgaaacgtccactgccggatcgaatgctacgcga

SEQ ID NO: 769728 - DNA, 75 bp, synthetic construct
  source 1..75: mol_type = other DNA
agggctgcgccaggtggtgccgcgtccggcggtcttccgcgcgctgacgcaggtaggcctggtgctgcgaccgtt

SEQ ID NO: 769729 - DNA, 75 bp, synthetic construct
  source 1..75: mol_type = other DNA
agatgaactggacgggccgcgcgggcgcatctatctgattaagcaggtactggaaggtaacgaagtcacgcttaa

SEQ ID NO: 769730 - DNA, 75 bp, synthetic construct
  source 1..75: mol_type = other DNA
atcctgaaggaaatggtgctgcagcatcggtatcgggcaattttgcaactgcgctgggggcagaagcccgggcca

SEQ ID NO: 769731 - DNA, 75 bp, synthetic construct
  source 1..75: mol_type = other DNA
tacctacactaattgccgccatcctctccaccaaaggtggcgtggcgaaaaccaccgatacggcaaacctcggcg

SEQ ID NO: 769732 - DNA, 75 bp, synthetic construct
  source 1..75: mol_type = other DNA
acaccattggcgcacgcaccatcgcactggaaatggtgctgttagccagcgatctcattatctccccggtattac

SEQ ID NO: 769733 - DNA, 75 bp, synthetic construct
  source 1..75: mol_type = other DNA
ccaggcaggagaaagccagccaaacactggctaactaccttggttgcctgtcccagcttgtggcactggctcaga

SEQ ID NO: 769734 - DNA, 75 bp, synthetic construct
  source 1..75: mol_type = other DNA
tccggcacttagccatgctcttgaccgacgggtattccacgaatttttccagctggccgcaaaagcggttgccag

SEQ ID NO: 769735 - DNA, 75 bp, synthetic construct
  source 1..75: mol_type = other DNA
gtttacgaaccacagcaagctgccgcacatagcgaacgggcggcgatgtcgcttgatgaacagtggcggatgatt

SEQ ID NO: 769736 - DNA, 75 bp, synthetic construct
  source 1..75: mol_type = other DNA
ctcaaacttaagaataacattattgactcaagctctgaatacgattttcttggcgacacaataattttcaataaa

SEQ ID NO: 769737 - DNA, 75 bp, synthetic construct
  source 1..75: mol_type = other DNA
ctctcgtcaaacggcttatccaagacaactacaacggctttttgttctaccatgccagcatcacagaaagagctg

SEQ ID NO: 769738 - DNA, 75 bp, synthetic construct
  source 1..75: mol_type = other DNA
gatgtacgccatgatcgagaaagctacgaaccctttagcggtgatgaactggctaaggtgtacgcggtgcttgat

SEQ ID NO: 769739 - DNA, 75 bp, synthetic construct
  source 1..75: mol_type = other DNA
gtgaaaaaatacactcttattttagctctaataatatccaatgcaggggaaccccatgaacagcgggttgttttt

SEQ ID NO: 769740 - DNA, 75 bp, synthetic construct
  source 1..75: mol_type = other DNA
cccggtcttcccggtcatgccgttcgcgttgttccctgagtttatgacgctgttaaaactggctctggaaaagag

SEQ ID NO: 769741 - DNA, 75 bp, synthetic construct
  source 1..75: mol_type = other DNA
tccggtttttcccttgatgccattctctgcttttcctgagtacatggcattactcagaaaagccctggaaaagaa

SEQ ID NO: 769742 - DNA, 75 bp, synthetic construct
  source 1..75: mol_type = other DNA
tcctcttcgccgttagctatcgtggatgcagcctgcggttacgttatcgagaacagtttctctaaactaaaattg

SEQ ID NO: 769743 - DNA, 75 bp, synthetic construct
  source 1..75: mol_type = other DNA
aatgtacctggtggcggcacgctgcattgcgactggtggtttaccaacgaagcggtacttatcgataccgctggg

SEQ ID NO: 769744 - DNA, 75 bp, synthetic construct
  source 1..75: mol_type = other DNA
cccgtttgcgccactgtggctgcgtctgacgcttatcggcctgatcctgctgacttatgcactatacggcctgta

SEQ ID NO: 769745 - DNA, 75 bp, synthetic construct
  source 1..75: mol_type = other DNA
agggccgggagcaggcagataacgagtggcatgacgcgattaactggctgggagactggtgcagtgaagagcagc

SEQ ID NO: 769746 - DNA, 75 bp, synthetic construct
  source 1..75: mol_type = other DNA
gtaccgtggcattaccagatcctgcaaaaagtctttgaatcaatccgtactaaaggggccgcaggtaagcagctg

SEQ ID NO: 769747 - DNA, 75 bp, synthetic construct
  source 1..75: mol_type = other DNA
tattcaatattgactcacgtgcgaatgttgaagatggcgttgatgccatcctaaaagttttcctgaaagtcttta

SEQ ID NO: 769748 - DNA, 75 bp, synthetic construct
  source 1..75: mol_type = other DNA
aacgccgaacaggtagacaaagcgctggaacaactccgtaaaacgctaatggatgccattaacgcaggtgaacgc

SEQ ID NO: 769749 - DNA, 75 bp, synthetic construct
  source 1..75: mol_type = other DNA
tgatactgacaaagtagaactccgtcgacagattgaagccagtcttaatcgtttgcaggctgaaatgctgatctc

SEQ ID NO: 769750 - DNA, 75 bp, synthetic construct
  source 1..75: mol_type = other DNA
atcagtcgtttttgtaacggacatccgctggatggtgcgaatcttaacgatctggtggttaaagtgctcacgcca

SEQ ID NO: 769751 - DNA, 75 bp, synthetic construct
  source 1..75: mol_type = other DNA
cgagttcgtggataactatccgtttgtgccgtggcattaccagatcctgcaaaaggtctttgagtcaatccgtac

SEQ ID NO: 769752 - DNA, 75 bp, synthetic construct
  source 1..75: mol_type = other DNA
acagacagcgggcagggcggcggcgcgccggagttaaattcgctgctgacgatgctcaatgagtattacacccag

SEQ ID NO: 769753 - DNA, 75 bp, synthetic construct
  source 1..75: mol_type = other DNA
aacggtgacggcgggaaaaagttttcctgggcgatgcaggttcgcgtcgtggatatggatcctgccatcaccgaa

SEQ ID NO: 769754 - DNA, 75 bp, synthetic construct
  source 1..75: mol_type = other DNA
atatcgacgccctgtttgacggcagccgcgtggtgcattcgccgtatgaaaaagatgaagggttgatccgccagg

SEQ ID NO: 769755 - DNA, 75 bp, synthetic construct
  source 1..75: mol_type = other DNA
cgcctgtacctcgctgaatatgcccgccgctggcaggattttctggcaagcattcacagcatcaacagcgctggg

SEQ ID NO: 769756 - DNA, 75 bp, synthetic construct
  source 1..75: mol_type = other DNA
cgcagatacacgggagcagttactcatcctggccgatcaggttcaccataaactgaatcatcttgaagaaaaact

SEQ ID NO: 769757 - DNA, 75 bp, synthetic construct
  source 1..75: mol_type = other DNA
cacaggagaatcattcggtgaattatccggtggcatttgctgccagggggcagttccattttcgtgcgcagccgg

SEQ ID NO: 769758 - DNA, 75 bp, synthetic construct
  source 1..75: mol_type = other DNA
accgccggacgggattttgacccagtggatcgcggactattgcaacgcttcgcctgcccggagcgagcgctgtga

SEQ ID NO: 769759 - DNA, 75 bp, synthetic construct
  source 1..75: mol_type = other DNA
catccggaagagcggctggagaaatcactggtggatgaccgtttcgccgccctgcgggaagtggtttccgggcgg

SEQ ID NO: 769760 - DNA, 75 bp, synthetic construct
  source 1..75: mol_type = other DNA
ctcaccattgcagacagtgcactggcggccagcacattaccgggccgcatttcggcggcggataaacttcaactg

SEQ ID NO: 769761 - DNA, 75 bp, synthetic construct
  source 1..75: mol_type = other DNA
cgctggtggatgatcgttttgccgcattgcgggaagttgtttccgggcgtatggacagcggacaagggggcggtg

SEQ ID NO: 769762 - DNA, 75 bp, synthetic construct
  source 1..75: mol_type = other DNA
cagcaccgagcgtatctatactcgtgcactggcttctatggagagcgaagcgccgcaggagttttcgctggttcg

SEQ ID NO: 769763 - DNA, 75 bp, synthetic construct
  source 1..75: mol_type = other DNA
ttctgtacgaactgccgtggttcatggttatcggcagccccggtgatggtaaaaccaccgcgctgcttaacaccg

SEQ ID NO: 769764 - DNA, 75 bp, synthetic construct
  source 1..75: mol_type = other DNA
ctgacgcttatcggcctgatccttctgtcttatacgctgtatggcctgtaccgattgtggcgggcgctgcgtctg

SEQ ID NO: 769765 - DNA, 75 bp, synthetic construct
  source 1..75: mol_type = other DNA
cctgcccttcctgtggtaaacatattattatcagaccaaaaggttatttctgtaccggatgtgaatttaaaatct

SEQ ID NO: 769766 - DNA, 75 bp, synthetic construct
  source 1..75: mol_type = other DNA
ctgaaaatgcgttgcggatggtcagtctgggccgcaaaaactacctgttcttcggttcggatcatggaggagagc

SEQ ID NO: 769767 - DNA, 75 bp, synthetic construct
  source 1..75: mol_type = other DNA
cgtgcagaacgcttccgcatactggatgcgccagctctctctccgctgcctctgactccttatgaatacacggaa

SEQ ID NO: 769768 - DNA, 75 bp, synthetic construct
  source 1..75: mol_type = other DNA
tattatcctgaaggaatgcacagccagaaacgggagaactggcgcgaatatctggaacgtgaacgggcagagcag

SEQ ID NO: 769769 - DNA, 75 bp, synthetic construct
  source 1..75: mol_type = other DNA
tcactgagctatctgggcgaggataccgccgaactgaaccgccccggttttcctggagagtgttttatctgtgaa

SEQ ID NO: 769770 - DNA, 75 bp, synthetic construct
  source 1..75: mol_type = other DNA
ttacagcccggacagaaaaggcatccatccgcagactcatcttgcttgcttcagcggtgtgctgcaagcggatgc

SEQ ID NO: 769771 - DNA, 75 bp, synthetic construct
  source 1..75: mol_type = other DNA
acggcccatcgagcggggtatcgccggaccggggctgctggcccgcgtgctgacctcgaagtatgcagagcacac

SEQ ID NO: 769772 - DNA, 75 bp, synthetic construct
  source 1..75: mol_type = other DNA
gcaggcggatgcatacgccgggttcaacgagctgtaccgggatggccggataacggaagccgcctgttgggctca

SEQ ID NO: 769773 - DNA, 75 bp, synthetic construct
  source 1..75: mol_type = other DNA
tctggcacaaggggcagtgtgtggcgcaacatccgcgcagcacacatgaatataaacacacaaccaatccacttc

SEQ ID NO: 769774 - DNA, 75 bp, synthetic construct
  source 1..75: mol_type = other DNA
tggactcgggtgcaatttatcgcgtactggcattggcggcattacatcaccatgttgatgttgcgtcggaagatg

SEQ ID NO: 769775 - DNA, 75 bp, synthetic construct
  source 1..75: mol_type = other DNA
gcggcgagtttaggtttgcctgcgctcagcaatgccgccgagccgaacgcgcccgcaaaagcgacaactcgcaac

SEQ ID NO: 769776 - DNA, 75 bp, synthetic construct
  source 1..75: mol_type = other DNA
tcagcaacgccgccgaaccaaacgcgcccgcaaaagcgacaacccgcaaccacgagccttcagccaaagttaact

SEQ ID NO: 769777 - DNA, 75 bp, synthetic construct
  source 1..75: mol_type = other DNA
tgttgtacgggctgatcggcacctgccgtctgaacggtatcgatccggaagcgtatctgcgccatatcctgagcg

SEQ ID NO: 769778 - DNA, 75 bp, synthetic construct
  source 1..75: mol_type = other DNA
ttcagaaagagagcgatacgctgactggtagggtgtatgacccggcagtacagcgtccgttgcgtcagacccgca

SEQ ID NO: 769779 - DNA, 75 bp, synthetic construct
  source 1..75: mol_type = other DNA
aaactccgccggatgaacttcggcagtcgttccgaaaaagtctcccgccgtatcgcacaaatggaagccgatctg

SEQ ID NO: 769780 - DNA, 75 bp, synthetic construct
  source 1..75: mol_type = other DNA
atactggaggccgcgcttgtgctttccggtcatgtaactggctgggccgtgcaggaatgccgcgacgcgatactg

SEQ ID NO: 769781 - DNA, 75 bp, synthetic construct
  source 1..75: mol_type = other DNA
cgagcagccatcgtgaactggcgcgggaagccttcccggagaaaaatggttgcggctttacctttggtgacggct

SEQ ID NO: 769782 - DNA, 75 bp, synthetic construct
  source 1..75: mol_type = other DNA
cctggttgtcacagaataagcccggtaaaatacgggcttatgaacgacatctcttctgacgacatcttcctgctg

SEQ ID NO: 769783 - DNA, 75 bp, synthetic construct
  source 1..75: mol_type = other DNA
ggaggctcactgagctatctgggtgaggatgccgccgaacagctggagttgatgcgcagcgccttccgggttatc

SEQ ID NO: 769784 - DNA, 75 bp, synthetic construct
  source 1..75: mol_type = other DNA
ttgcaacagtgccttcctgacgatatcaatgcactgaaacgtctccttgccgaacaggaggcgctgaaccgtgcc

SEQ ID NO: 769785 - DNA, 75 bp, synthetic construct
  source 1..75: mol_type = other DNA
gctgcatccggaatatcgcacgctgccgatggtctggtatgtgccacctctgtcgccgattcagtctgcggcaga

SEQ ID NO: 769786 - DNA, 75 bp, synthetic construct
  source 1..75: mol_type = other DNA
tgacggaggatgccctgaagcgtatcggcgggttgtatgccatcggggcggaaataaggggaatgccggcggagc

SEQ ID NO: 769787 - DNA, 75 bp, synthetic construct
  source 1..75: mol_type = other DNA
tcacgcccgccgtaaaatccacgatgtgtacgcccgcacgccgtcggcgctgacggaggatgccctgaagcgtat

SEQ ID NO: 769788 - DNA, 75 bp, synthetic construct
  source 1..75: mol_type = other DNA
cgacctgcccgagcggtgcgatttacaagcgtgaagaagatggcatcgtcctgatcgaccaggataaatgccgtg

SEQ ID NO: 769789 - DNA, 75 bp, synthetic construct
  source 1..75: mol_type = other DNA
atatcgcacactgccgatggtctggtacgtgccgcctctgtctccgattcagtctgcggcagacgcgggtgagct

SEQ ID NO: 769790 - DNA, 75 bp, synthetic construct
  source 1..75: mol_type = other DNA
gatccgaaagtcatcgagcaggcgattaaagacggtattccgctgagcgttattgaagccgcacagcagtcgccg

SEQ ID NO: 769791 - DNA, 75 bp, synthetic construct
  source 1..75: mol_type = other DNA
gcgatcgtaatcgagcggtagcgccactggttccggcagccgatgctttagtgttggattccaccaccttaagca

SEQ ID NO: 769792 - DNA, 75 bp, synthetic construct
  source 1..75: mol_type = other DNA
gcggggagcgctactgtacagcctgatcgggatgtgcaaactgaatgacgtggatccagaaagctaccttcgcca

SEQ ID NO: 769793 - DNA, 75 bp, synthetic construct
  source 1..75: mol_type = other DNA
cggaaaaagtgctgaaactgacaggcgcacgcggcaacaacctgaaagatgtgacgctaacgttgccagtaggcc

SEQ ID NO: 769794 - DNA, 75 bp, synthetic construct
  source 1..75: mol_type = other DNA
gagctttccggcggtacggcggttgttgcggatatggacgatcccaaagcggaagaactgctgttctccgcgaac

SEQ ID NO: 769795 - DNA, 75 bp, synthetic construct
  source 1..75: mol_type = other DNA
tccgctatgtccttgacgtcatagccgactggtcgataaaccgggtcggcgaactgctcccctggcgcgtagcac

SEQ ID NO: 769796 - DNA, 75 bp, synthetic construct
  source 1..75: mol_type = other DNA
gtcatgctgcccggaatgtggaggctcgctgagctatctgggtgaggatgccgctgaacagctggagctgatgcg

SEQ ID NO: 769797 - DNA, 75 bp, synthetic construct
  source 1..75: mol_type = other DNA
aacttcggcagccgttccgaaaaggtatcccgccgtatcgcacagatggaagctgacctgagccggctgcagaaa

SEQ ID NO: 769798 - DNA, 75 bp, synthetic construct
  source 1..75: mol_type = other DNA
tgtttacttgcatcacaggggtttcaggttccggtaaatcgacgctgattaacgacacactgttcccgattgccc

SEQ ID NO: 769799 - DNA, 75 bp, synthetic construct
  source 1..75: mol_type = other DNA
ttcttaaggagattggcgatcgcctgaaattcctcgttaacgtcggcctgaattacctgacactttcccgctcgg

SEQ ID NO: 769800 - DNA, 75 bp, synthetic construct
  source 1..75: mol_type = other DNA
gaaattcctcgttaacgtcggcctgaattacctgacactttcccgctcggcagaaacactttccggcggtgaagc

SEQ ID NO: 769801 - DNA, 75 bp, synthetic construct
  source 1..75: mol_type = other DNA
tccgcaaccacgctttctggtggtgaagcccagcgcgtgaagctggcgcgtgagctgtcaaaacgcggcaccggg

SEQ ID NO: 769802 - DNA, 75 bp, synthetic construct
  source 1..75: mol_type = other DNA
ggcggtgcgatccgtggctgggatcgccgcaacttctattatttccagatgctgaaatcgctggcagatcactat

SEQ ID NO: 769803 - DNA, 75 bp, synthetic construct
  source 1..75: mol_type = other DNA
gttttcatttaacaacccggcgggagcctgcccgacctgtgacggtcttggcgtacagcaatatttcgatcctga

SEQ ID NO: 769804 - DNA, 75 bp, synthetic construct
  source 1..75: mol_type = other DNA
gcgtgatttaccgattaaagagcttgccggatacagaaaggggagtatcagaaacgaagatgacgagttccgttt

SEQ ID NO: 769805 - DNA, 75 bp, synthetic construct
  source 1..75: mol_type = other DNA
aggttcttgcccgcttcaaagcctcttctctgtcatggccattacctgctgatatatcccatgacacgctggaga

SEQ ID NO: 769806 - DNA, 75 bp, synthetic construct
  source 1..75: mol_type = other DNA
cacatcagcgcctcaaccgtttttgaggttcttgcccgcttcaaagcctcttctctgtcatggccattacctgct

SEQ ID NO: 769807 - DNA, 75 bp, synthetic construct
  source 1..75: mol_type = other DNA
gagaaaagctctttatcgacttctgcggtcctacggttcctgttattaatccggataccggagagatacgccgcg

SEQ ID NO: 769808 - DNA, 75 bp, synthetic construct
  source 1..75: mol_type = other DNA
gcggaagcgttgcaatggcatctgctggactcgggtgcaatttatcgcgtactggcactggcggcattacatcac

SEQ ID NO: 769809 - DNA, 75 bp, synthetic construct
  source 1..75: mol_type = other DNA
tgagaaaaccaggtgtgacgcggcaactgttgtggatggaatacaaggcacaggcgggtgacaaagcgatgggat

SEQ ID NO: 769810 - DNA, 75 bp, synthetic construct
  source 1..75: mol_type = other DNA
tggccgggagcctgatacggcagcgggaaacgcctcagacctacgacgaactgtcgttcgaggaaaggctgacgc

SEQ ID NO: 769811 - DNA, 75 bp, synthetic construct
  source 1..75: mol_type = other DNA
aaacgcttcttaagcgaactgaccgccgctgaaggccttgaacgttacctcggtgcaaaattccctggtgcaaaa

SEQ ID NO: 769812 - DNA, 75 bp, synthetic construct
  source 1..75: mol_type = other DNA
atgcataacagagctttgaaagcctggttgagctcttcttacctctctggcgcaaaccagagctggatagaacag

SEQ ID NO: 769813 - DNA, 75 bp, synthetic construct
  source 1..75: mol_type = other DNA
ctggggcggtgcggaaaaccttgcttacgctacgctggttgatgaaggtatcccggttcggctgtcaggtgaaga

SEQ ID NO: 769814 - DNA, 75 bp, synthetic construct
  source 1..75: mol_type = other DNA
gatatatctcatgacacgctggagaaactcattttcccgcccaaagacacctctgcgtcagagcttgttatgcct

SEQ ID NO: 769815 - DNA, 75 bp, synthetic construct
  source 1..75: mol_type = other DNA
gtgaaaacgctgtcgcgacactcagaactggcgaaagcgttcacgtacgtactgaaccagtggccagcgctgacg

SEQ ID NO: 769816 - DNA, 75 bp, synthetic construct
  source 1..75: mol_type = other DNA
ggcaaaggacacggtaagggaatgccgcgaacggtggcacaacctgataccggagagctacggcgagcaggtcca

SEQ ID NO: 769817 - DNA, 75 bp, synthetic construct
  source 1..75: mol_type = other DNA
gcttcagtggtgtcctgcaggcggatgcgtacgccgggttcaacgagctgtatcgcaatggtgggataacggaag

SEQ ID NO: 769818 - DNA, 75 bp, synthetic construct
  source 1..75: mol_type = other DNA
gtttcagcggtgtcctgcaagcggatgcgtacgccgggttcaacgagctgtatcgcaatggtgggataacggaag

SEQ ID NO: 769819 - DNA, 75 bp, synthetic construct
  source 1..75: mol_type = other DNA
gtttcagaggtgtcctgcacgcggatgcgtacgccgggttcaacgagctgtatcgcaatggtgggataacggaag

SEQ ID NO: 769820 - DNA, 75 bp, synthetic construct
  source 1..75: mol_type = other DNA
tgggtggatgcatgctgccggcagctgtctccgctggaagaggcgcttcatggctatgtgctgactgacggtaag

SEQ ID NO: 769821 - DNA, 75 bp, synthetic construct
  source 1..75: mol_type = other DNA
tcgccggaccggggctgctggcccgcgtgctgacctcgaagtatgcagagcacaccccgctgtatcgccagtcag

SEQ ID NO: 769822 - DNA, 75 bp, synthetic construct
  source 1..75: mol_type = other DNA
gcttcaggggtgtcctgcatgcggatgcgtacgccgggttcaacgagctgtatcgcaatggtgggataacggaag

SEQ ID NO: 769823 - DNA, 75 bp, synthetic construct
  source 1..75: mol_type = other DNA
aaagtgaacccgcaattcaaagcgtgggtgccggtaactcaggtgccaaactgctggttgctggtggatggcgtg

SEQ ID NO: 769824 - DNA, 75 bp, synthetic construct
  source 1..75: mol_type = other DNA
tctacgcagtttcacgaatacagcacaggaaaggcgcacgcagacgcgttaaaagccgcctggacagaaaaccac

SEQ ID NO: 769825 - DNA, 75 bp, synthetic construct
  source 1..75: mol_type = other DNA
aaaggcatccatccgcagacccatcttgcggggttcagcggtgtgctacaggcggatgcgtacgccgggttcaac

SEQ ID NO: 769826 - DNA, 75 bp, synthetic construct
  source 1..75: mol_type = other DNA
cttcctgctggatgccggggccgaatataacggctatgcggctgacctgacccgtacctggtcggcaaaaagcga

SEQ ID NO: 769827 - DNA, 75 bp, synthetic construct
  source 1..75: mol_type = other DNA
gagcgagttcgatatcaacatcgcctatctgaccgcgaccggtcatcgtgataccgacgtaccttacagcaacat

SEQ ID NO: 769828 - DNA, 75 bp, synthetic construct
  source 1..75: mol_type = other DNA
cagttcagcaagcacttcaactggcagaaaattgaagcactgaaaccgttcggcggcattcgtatcgaagacaac

SEQ ID NO: 769829 - DNA, 75 bp, synthetic construct
  source 1..75: mol_type = other DNA
gtcttaacgtgacgaccaacggtaaatacagagccatcctggctgactggatgcagttaagcggaagtcatgagg

SEQ ID NO: 769830 - DNA, 75 bp, synthetic construct
  source 1..75: mol_type = other DNA
cccgccgcaagatccacgatgtgcacgttcgcaccccgtcagcgctgacggaggaagccctgaaacggatcggtg

SEQ ID NO: 769831 - DNA, 75 bp, synthetic construct
  source 1..75: mol_type = other DNA
gtccaggtactgctgccgggtaataagaagacgaagaccgagcggttgtgggcgtatgttcgtgatgaccgcaat

SEQ ID NO: 769832 - DNA, 75 bp, synthetic construct
  source 1..75: mol_type = other DNA
tgcaaattaaacggcgtggatccggaacgctatctgcattatgtacttgatgtcatcgccgactggcctgtgaac

SEQ ID NO: 769833 - DNA, 75 bp, synthetic construct
  source 1..75: mol_type = other DNA
ggggttcagtggtgtactgcaggcggatgcatacgccgggttcaacgagctgtaccgggatggccggataacgga

SEQ ID NO: 769834 - DNA, 75 bp, synthetic construct
  source 1..75: mol_type = other DNA
tcattgaacatatccaggactggccggcaaaccgggtacgcgatctgttgccctggaaagttgatctgagctctc

SEQ ID NO: 769835 - DNA, 75 bp, synthetic construct
  source 1..75: mol_type = other DNA
aagcgttcacgtacgtactgaaccagtggccggcgctggcttactatactgacgacggctgggccgaggcagata

SEQ ID NO: 769836 - DNA, 75 bp, synthetic construct
  source 1..75: mol_type = other DNA
gctgggtggaaatcgacaacgacatcgctgaaaatgccctgcgggcggtcagtctgggtcgtaaaaacttcctgt

SEQ ID NO: 769837 - DNA, 75 bp, synthetic construct
  source 1..75: mol_type = other DNA
actggaaaactggctgcgtgaaaaagtgaaaaccctgtcgcgacactcagagctggcaaaagcgttcacctatgt

SEQ ID NO: 769838 - DNA, 75 bp, synthetic construct
  source 1..75: mol_type = other DNA
tggctgttcgcgggttccgacagcggtggcgaacatgcggcggtgttgtactcgctgatcggcacatgccgtctg

SEQ ID NO: 769839 - DNA, 75 bp, synthetic construct
  source 1..75: mol_type = other DNA
gctgaaccagtggccggcgctgatccgctatgcagaagatggctgggtggaggtggataataacattgccgaaaa

SEQ ID NO: 769840 - DNA, 75 bp, synthetic construct
  source 1..75: mol_type = other DNA
gccggatcagcgctggcccccgcagtgtggttcgcttacaacccggacagaaaaggtatccaccctcagacccat

SEQ ID NO: 769841 - DNA, 75 bp, synthetic construct
  source 1..75: mol_type = other DNA
cgtcagcgaaaaacgaaaccgctgttgaaatccctggaaagctggttgcgtgaaaagatgaagaccctgttcttc

SEQ ID NO: 769842 - DNA, 75 bp, synthetic construct
  source 1..75: mol_type = other DNA
gttcaacgagctgtaccgggatggccggataacggaagccgcctgttgggctcacgcccgccgtaaaatccacga

SEQ ID NO: 769843 - DNA, 75 bp, synthetic construct
  source 1..75: mol_type = other DNA
caacgctaccgcgccgattcaggtgatcaccgacggcagtgagccaaataccgctaactttgtacaaggttatgt

SEQ ID NO: 769844 - DNA, 75 bp, synthetic construct
  source 1..75: mol_type = other DNA
atgagtaatccgatcctgtcctggcgtcgcgtgcgggcgctgtgcgtcaaagagacgcggcagatcgttcgcgat

SEQ ID NO: 769845 - DNA, 75 bp, synthetic construct
  source 1..75: mol_type = other DNA
tcagcgataaccgtcaggaactgatcgccaaaatgcaggcggggaaaattcgcggtctggtggttattcccgtgg

SEQ ID NO: 769846 - DNA, 75 bp, synthetic construct
  source 1..75: mol_type = other DNA
aacgcgaaatagaccatctgcaggcacagctggataagctgcgccggatgaacgtcggcagcggctctgaaaaag

SEQ ID NO: 769847 - DNA, 75 bp, synthetic construct
  source 1..75: mol_type = other DNA
aacgcgaaatagaccatctgcaggcacagctggataagctgcgccggatgaacgtcggcagctgctcagaaaaag

SEQ ID NO: 769848 - DNA, 75 bp, synthetic construct
  source 1..75: mol_type = other DNA
aacgcgaaatagaccatctgcaggcacagctggataagctgcgccggatgaacttcggcagcagctccgaaaaag

SEQ ID NO: 769849 - DNA, 75 bp, synthetic construct
  source 1..75: mol_type = other DNA
cgggatggccggataacggaagccgcctgttgggctcacgcccgccgtaaaatccacgatgtgcacgttcgcacc

SEQ ID NO: 769850 - DNA, 75 bp, synthetic construct
  source 1..75: mol_type = other DNA
gaactggcgaaagcgttcgcatacgccctgaaccagtggccggcgctgacgtactatgcagatgatggctgggct

SEQ ID NO: 769851 - DNA, 75 bp, synthetic construct
  source 1..75: mol_type = other DNA
cgccgggaatattccggtggtgctggtagtgaatgtgctgtttttgatcgcttcggcggtgatgtttatcggcct

SEQ ID NO: 769852 - DNA, 75 bp, synthetic construct
  source 1..75: mol_type = other DNA
agacttttgaaccgcttattgatgtacaaacccgctactggtttaacccggcggcgattagccagcactttatta

SEQ ID NO: 769853 - DNA, 75 bp, synthetic construct
  source 1..75: mol_type = other DNA
ggttcgccctacatcgacgccaccatcagcgataaccgtcaggaactgatcgccaaaatgcaggcggggaaaatt

SEQ ID NO: 769854 - DNA, 75 bp, synthetic construct
  source 1..75: mol_type = other DNA
tgagccgttcactgctgtcgggctgggtggatgcatgctgccggctgctgtctccgctggaagaggcgcttcagg

SEQ ID NO: 769855 - DNA, 75 bp, synthetic construct
  source 1..75: mol_type = other DNA
ggcagatgagcacgctgtcgcgtcactcggatacggcgaaagcgttcacctatctgctgaagcaatgggatgccc

SEQ ID NO: 769856 - DNA, 75 bp, synthetic construct
  source 1..75: mol_type = other DNA
caggcacctgcaccttcgcggcccatcgagcggggtatcgccggaccggggctgctggcccgtgtgctgacctcg

SEQ ID NO: 769857 - DNA, 75 bp, synthetic construct
  source 1..75: mol_type = other DNA
catcttgcctgcttcagcggtgtgctgcaagcggatgcgtacgccgggttcaacgagctgtatcgcaatggtggg

SEQ ID NO: 769858 - DNA, 75 bp, synthetic construct
  source 1..75: mol_type = other DNA
gcagaagatggctgggtggaggtggataataacattgccgaaaacgccctacgacgggtcagtctggggagaaaa

SEQ ID NO: 769859 - DNA, 75 bp, synthetic construct
  source 1..75: mol_type = other DNA
tgctgccgctgctggcgtcactggaggggtggctgcgggagaaacagaaaaccctctcaaggcactcagaactgg

SEQ ID NO: 769860 - DNA, 75 bp, synthetic construct
  source 1..75: mol_type = other DNA
catcttgcaggcttcagtggcgtactgcaggctgatgcctacgccgggttcaacgagctctaccgcgacggccat

SEQ ID NO: 769861 - DNA, 75 bp, synthetic construct
  source 1..75: mol_type = other DNA
gaaaatgccttgcgggcggtcagtctgggtcgtaaaaacttcctgttcttcggctctgaccatggtggtgagcgg

SEQ ID NO: 769862 - DNA, 75 bp, synthetic construct
  source 1..75: mol_type = other DNA
actcgccgaaccggcaggggaaacacccggagcaacaccttcgccccttccggggtatcctgcaggcggatgcgt

SEQ ID NO: 769863 - DNA, 75 bp, synthetic construct
  source 1..75: mol_type = other DNA
gaagagacggaggccttcctgcgctctgcactggcacgtgccgaagaaaagatcgaagaagatgagcgagaaata

SEQ ID NO: 769864 - DNA, 75 bp, synthetic construct
  source 1..75: mol_type = other DNA
cactcagagttggcgaaggcgttcgcgtacgcacttaaccagtggccggcactgacgtactatgcgaacgatggc

SEQ ID NO: 769865 - DNA, 75 bp, synthetic construct
  source 1..75: mol_type = other DNA
ttgagcatctccaggactggccggcaaaccgggtacgcgatctgttgccctggaaagttgatctgacctctcagt

SEQ ID NO: 769866 - DNA, 75 bp, synthetic construct
  source 1..75: mol_type = other DNA
ccagaaaaatggctgcgttacgttattgagcatctccaggactggccggcaaaccgggtacgcgatctgttgccc

SEQ ID NO: 769867 - DNA, 75 bp, synthetic construct
  source 1..75: mol_type = other DNA
tacctcatccattgacacgagaggaaataacggaatcaatgattgtaaaaactgaagaatgtacttatgaccatg

SEQ ID NO: 769868 - DNA, 75 bp, synthetic construct
  source 1..75: mol_type = other DNA
cagatgaccttcagtgcccgcctgaggctgctcaatgtccaattacacttgagcaaccagaagaaggcgtattgg

SEQ ID NO: 769869 - DNA, 75 bp, synthetic construct
  source 1..75: mol_type = other DNA
tgcttttaatgatggagttaatgtgctcagaaacaggatattaagcgcgctccctggaatgggagtgcgaaactc

SEQ ID NO: 769870 - DNA, 75 bp, synthetic construct
  source 1..75: mol_type = other DNA
acgcagaggattctcaagtctgcacattatttgattatactgcgctttctcgcgtggttaatgaaggttcagttc

SEQ ID NO: 769871 - DNA, 75 bp, synthetic construct
  source 1..75: mol_type = other DNA
attttatgccgcattgttaatcgcgttgatgatgatcacttacatcccgcaaatatccttgttcattccacagct

SEQ ID NO: 769872 - DNA, 75 bp, synthetic construct
  source 1..75: mol_type = other DNA
tccagtggcggtaatggcggattgctttctgagttattgattttgggatttaataatggtcctcgagcccttagt

SEQ ID NO: 769873 - DNA, 75 bp, synthetic construct
  source 1..75: mol_type = other DNA
gtgaagcgcgttctgattaacgacaacacgcttccggcagtgaaaaaggcactggcaaatcttaaagataatcgt

SEQ ID NO: 769874 - DNA, 75 bp, synthetic construct
  source 1..75: mol_type = other DNA
caccgccgccgttattcaccgaagcctccttgcttgctgcgcttgttcgtgtcgcggattttgtcactgacccaa

SEQ ID NO: 769875 - DNA, 75 bp, synthetic construct
  source 1..75: mol_type = other DNA
ccactggatattgattctgtacgtaaaagcaaggcatttaacagcgcgaaggtgacagcgcataccgcgataatc

SEQ ID NO: 769876 - DNA, 75 bp, synthetic construct
  source 1..75: mol_type = other DNA
atgccattaacctcagatattaattcatcttcgttccatcttggaatggaggttcttcgtgctcaagttgcagcc

SEQ ID NO: 769877 - DNA, 75 bp, synthetic construct
  source 1..75: mol_type = other DNA
cacgttcatttaatcttgggctggaggttgttcgtgcccgaattgtagccaatgggcgcggagatattacagtcg

SEQ ID NO: 769878 - DNA, 75 bp, synthetic construct
  source 1..75: mol_type = other DNA
cgcctgaatcagctggacctgaaatcactaaaaaaatggtgcgagaaaggacaacaaaaaaaattaccttcgaaa

SEQ ID NO: 769879 - DNA, 75 bp, synthetic construct
  source 1..75: mol_type = other DNA
tgtccagatagccttcagtgtccgcctgaggctgctcaatgtccaattacactggagcaaccagaagaaggcgta

SEQ ID NO: 769880 - DNA, 75 bp, synthetic construct
  source 1..75: mol_type = other DNA
cggcggcaaatgcaggcccggcgggtgttacagcagatgagtgatgagcggttgagggatattgggttacgcagg

SEQ ID NO: 769881 - DNA, 75 bp, synthetic construct
  source 1..75: mol_type = other DNA
caaagcgatctttccggtttgctgatggaattactgcaatggggatgcagcgatccggcgcagatgagctggctg

SEQ ID NO: 769882 - DNA, 75 bp, synthetic construct
  source 1..75: mol_type = other DNA
ttcgtctggtggtagattgtgctcaggaacgtgtggcgcgctttgatccgcgcacggggctaacgcggctgatta

SEQ ID NO: 769883 - DNA, 75 bp, synthetic construct
  source 1..75: mol_type = other DNA
gatcgcaacgccggttcgaccatgccggcagcggtgtggttctcatactatcccgaccgcaaaggtatccacccg

SEQ ID NO: 769884 - DNA, 75 bp, synthetic construct
  source 1..75: mol_type = other DNA
cggcctttttaatcagccagttatccgataatttatttcaccatacccgcgatgttattgcgtttgtcacccgga

SEQ ID NO: 769885 - DNA, 75 bp, synthetic construct
  source 1..75: mol_type = other DNA
aagcgccgtttatcggtttcgtacaactctggcaagcggtgaggagctggtggcggcaaatgcagacccgacggg

SEQ ID NO: 769886 - DNA, 75 bp, synthetic construct
  source 1..75: mol_type = other DNA
cgtctggagccggggatctgtctacatttaatcgccaaagaacaagcagaacgcgcctccgcgcaaagtgaaccg

SEQ ID NO: 769887 - DNA, 75 bp, synthetic construct
  source 1..75: mol_type = other DNA
gacttcagtgcccgcctgaggctattcaatgtccaattacactggagcagcctgaaaaaggtatttttgtgaaga

SEQ ID NO: 769888 - DNA, 75 bp, synthetic construct
  source 1..75: mol_type = other DNA
atttccagtgcccgccagagtctattcagtgtccaattacactagagagacccgaagaaggagtgtttgtcaaaa

SEQ ID NO: 769889 - DNA, 75 bp, synthetic construct
  source 1..75: mol_type = other DNA
gtgtcgtcgttgcccgttgctgtcgtcttacctgagttacttgcttccctcgatggtgcatcgcaggtgttattc

SEQ ID NO: 769890 - DNA, 75 bp, synthetic construct
  source 1..75: mol_type = other DNA
agtggtgctggcgaccaatattgctgaaaccagtttaaccatcgaaggtattcgtctggtggtggattgtgctca

SEQ ID NO: 769891 - DNA, 75 bp, synthetic construct
  source 1..75: mol_type = other DNA
gtcgatattgatgagttagtacaacgctgcccgcagctggtacagcagtctgacaccgtggagtgggatgacgcg

SEQ ID NO: 769892 - DNA, 75 bp, synthetic construct
  source 1..75: mol_type = other DNA
gcgctgccattctggaaacgctgaaaaaacggaactacatcacccaggaaaaaggaaaacttattccaacagata

SEQ ID NO: 769893 - DNA, 75 bp, synthetic construct
  source 1..75: mol_type = other DNA
ccttatggggctggaatctatcggttgggcacgaaagaactggtcaacaatcttcattgagcacagcagttatag

SEQ ID NO: 769894 - DNA, 75 bp, synthetic construct
  source 1..75: mol_type = other DNA
tttccctgctggcgattatattactggctggctgtagctctcccacttcccgcatcgcagattgccaggcgcagg

SEQ ID NO: 769895 - DNA, 75 bp, synthetic construct
  source 1..75: mol_type = other DNA
ggcctgattgttaatcgtacccgtgctaaccagaaccataaatccagtttttactacaccatgaccggagtcttt

SEQ ID NO: 769896 - DNA, 75 bp, synthetic construct
  source 1..75: mol_type = other DNA
gatatgacggcattatgggcggaaaaacagacactcattgaaaacggagaaatgaccgtcgaacagttcgttgac

SEQ ID NO: 769897 - DNA, 75 bp, synthetic construct
  source 1..75: mol_type = other DNA
agccactttacttgccgcgcttgttcgtgtcgcagattttgtcactgatccagtgattaaaaagttactgaagga

SEQ ID NO: 769898 - DNA, 75 bp, synthetic construct
  source 1..75: mol_type = other DNA
tgatgaatgtactcagaagccttcctgtgctggctatttcagttcctcaaaaggccgttttcatcaatcaccgag

SEQ ID NO: 769899 - DNA, 75 bp, synthetic construct
  source 1..75: mol_type = other DNA
attttaagtgcatccgaggcgcaggcttataagaacgcagaagccgcacaacacgcccaggccgctaaaaaatcc

SEQ ID NO: 769900 - DNA, 75 bp, synthetic construct
  source 1..75: mol_type = other DNA
ctgaccaataccgtgacgcataatcaggggaactacgcagcgatgatggctgacaccatcagtcgttacaaagag

SEQ ID NO: 769901 - DNA, 75 bp, synthetic construct
  source 1..75: mol_type = other DNA
gaggatatcagggcgttctgtctgtcgggcgcgtccagacacccgttcttggcctgattgtgaatcgtacccgtg

SEQ ID NO: 769902 - DNA, 75 bp, synthetic construct
  source 1..75: mol_type = other DNA
catgatggctggtttgaaagtgataataccattgtgactaattgctttggtcatattatcgaatcacagccaccg

SEQ ID NO: 769903 - DNA, 75 bp, synthetic construct
  source 1..75: mol_type = other DNA
taaagaattttcggctaaagttaaattgattgataaaacaaccggaaaattagggtttgaatttccccctaaaaa

SEQ ID NO: 769904 - DNA, 75 bp, synthetic construct
  source 1..75: mol_type = other DNA
caccgccgccattatttactgaagcctccttgcttgctgcgcttgttcgtgtcgcggattttgtcactgacccaa

SEQ ID NO: 769905 - DNA, 75 bp, synthetic construct
  source 1..75: mol_type = other DNA
cgggacattatcgaatatgcgataaaagaaaatcttggagccagagaggcactgtcgataatggagcgggaaatt

SEQ ID NO: 769906 - DNA, 75 bp, synthetic construct
  source 1..75: mol_type = other DNA
cagcatcccttgcaggaaaaccggctacagttgaagcggcagcaactgatgataaaaaaacggctgcgccgttgc

SEQ ID NO: 769907 - DNA, 75 bp, synthetic construct
  source 1..75: mol_type = other DNA
cataaaagttgcccccggcacgccgtctggtcagtcacaacgcctgtcctctccttgcccttcctgtggtaaaca

SEQ ID NO: 769908 - DNA, 75 bp, synthetic construct
  source 1..75: mol_type = other DNA
agagttttcggctaaggtcaagctgatggataaggcaaccggaaagttggggtttgagtttattcccaaaaagta

SEQ ID NO: 769909 - DNA, 75 bp, synthetic construct
  source 1..75: mol_type = other DNA
gtgctaaccagaaccataaatccagtttttactacaccatgaccggagtctttcagcgtggtgctgatgttatca

SEQ ID NO: 769910 - DNA, 75 bp, synthetic construct
  source 1..75: mol_type = other DNA
cagacgtggagacgtgactgaaattgttcacgctggcgatcctgatgatgagggacagttacttgttgatgaagt

SEQ ID NO: 769911 - DNA, 75 bp, synthetic construct
  source 1..75: mol_type = other DNA
acacgcttccggcagtgaaaaaggcactggcaaatcttaaagataatcgtgatttcaaagggctttaccttaagg

SEQ ID NO: 769912 - DNA, 75 bp, synthetic construct
  source 1..75: mol_type = other DNA
cagcgtggtgctgatgttatcagggcgaactggaagccaggggaatttgctccgctgaccgaccgtaaattactt

SEQ ID NO: 769913 - DNA, 75 bp, synthetic construct
  source 1..75: mol_type = other DNA
taaagaattttcggctaaggttaaactgattgataaagcaaccggaaagttggggtttgagttctcccccaaaaa

SEQ ID NO: 769914 - DNA, 75 bp, synthetic construct
  source 1..75: mol_type = other DNA
ttacagatgttgacctgggcgagatgaagattgaagcagcagcgccagcaggccaatctcaacgcctgaatgctc

SEQ ID NO: 769915 - DNA, 75 bp, synthetic construct
  source 1..75: mol_type = other DNA
tgttatcagaccaaaaggttatttctgtaccggatgtgaatttaaaatctggagtgagttttctggtaagaaaat

SEQ ID NO: 769916 - DNA, 75 bp, synthetic construct
  source 1..75: mol_type = other DNA
cacaggagaaacagtgacgacaaaagaagtggttgtgaatgagaagaaaacaacgccaccgccattattcaccga

SEQ ID NO: 769917 - DNA, 75 bp, synthetic construct
  source 1..75: mol_type = other DNA
gaacaaagagttttcggctaaggttaagctgatggataaggcaaccggaaagttggggtttgagtttattcccaa

SEQ ID NO: 769918 - DNA, 75 bp, synthetic construct
  source 1..75: mol_type = other DNA
agaactggcgaaagcgttcacgtacgtactgaaccagtggccggcgctggcttactatactgacgacggctgggc

SEQ ID NO: 769919 - DNA, 75 bp, synthetic construct
  source 1..75: mol_type = other DNA
gaggccgaacgcggggaaagcattgtggtgaacctgcctgtaaaaaaacgggagccaaagcctgaaccgggcgat

SEQ ID NO: 769920 - DNA, 75 bp, synthetic construct
  source 1..75: mol_type = other DNA
gctatccagcatagctttaacgcctgggtgaaagagttcggcacgggtaacaaagagcaccagcagatcatcgag

SEQ ID NO: 769921 - DNA, 75 bp, synthetic construct
  source 1..75: mol_type = other DNA
tggagctgaggcgttcactgctgtcgggctggtggatgcatgctgccggctgctgtctccgctggaagaggcgct

SEQ ID NO: 769922 - DNA, 75 bp, synthetic construct
  source 1..75: mol_type = other DNA
gcgcctgctcaatatcccgattcaaaaagccacgcagttacacgaatacagcaacggaaaggatcacgctgacgc

SEQ ID NO: 769923 - DNA, 75 bp, synthetic construct
  source 1..75: mol_type = other DNA
gggtgtggccgtgggccggaagaactggttgtgtgtgtcacgaaggagaactgatagcggcaatatgaaaattgc

SEQ ID NO: 769924 - DNA, 75 bp, synthetic construct
  source 1..75: mol_type = other DNA
agaccgggcggttgtgggcgtatgttcgtgatgaccgcaatgccgggtcagcgttggcacctgcagtgtggttcg

SEQ ID NO: 769925 - DNA, 75 bp, synthetic construct
  source 1..75: mol_type = other DNA
agctgagccgttcactgctgtcgggctgggtggatgcatgctgccggctgctgtctccgctggaagaggcgcttc

SEQ ID NO: 769926 - DNA, 75 bp, synthetic construct
  source 1..75: mol_type = other DNA
ggtcagtctgggtcgtaaaaacttcctgttcttcggctctgaccatggtggtgagcggggagcgctactgtacag

SEQ ID NO: 769927 - DNA, 75 bp, synthetic construct
  source 1..75: mol_type = other DNA
ataccaaacagtttgccgaagttctaaagaatgcaggaatgcttacaccaccaacgagcgggcgaggctatcagg

SEQ ID NO: 769928 - DNA, 75 bp, synthetic construct
  source 1..75: mol_type = other DNA
gcagctggataaactccgccggatgaacttcggcagtcgttccgaaaagtctcccgccgtatcgcacaaatggaa

SEQ ID NO: 769929 - DNA, 75 bp, synthetic construct
  source 1..75: mol_type = other DNA
gaacgcgaaatagaccatctgcaggcgcagctggataaactccgccggatgaacttcggcagtcgttccgaaaaa

SEQ ID NO: 769930 - DNA, 75 bp, synthetic construct
  source 1..75: mol_type = other DNA
gcactgcatggcagacgttgaggactacgtggttaaaattatcgaacgcgacctgctgccgaaatacctgagcat

SEQ ID NO: 769931 - DNA, 75 bp, synthetic construct
  source 1..75: mol_type = other DNA
gaagcagccctggagcagatcggtcagttgtacgccatagaggcggatataaggggaatgccggcagagcagcgg

SEQ ID NO: 769932 - DNA, 75 bp, synthetic construct
  source 1..75: mol_type = other DNA
acggaggaagcgctgaaacggatcggcgaactgtacgccatcgaggcagagatatccgggctgccggaagtgatg

SEQ ID NO: 769933 - DNA, 75 bp, synthetic construct
  source 1..75: mol_type = other DNA
cgaacaggaagcgctgatccacgccctgcaggaaaagcttagcaaccgggagcgcgaaatagaccatctgcaggc

SEQ ID NO: 769934 - DNA, 75 bp, synthetic construct
  source 1..75: mol_type = other DNA
aatacatgaacgatcgtggcgatacctccatccgtcgtcatccgttcgaaggcgtgctgcacaatatggagcgcc

SEQ ID NO: 769935 - DNA, 75 bp, synthetic construct
  source 1..75: mol_type = other DNA
gtctcgaaaacacccacaacggcaaagtgttgccgcgtgaatacctgaaacaggcatgggaatttagccgcgagc

SEQ ID NO: 769936 - DNA, 75 bp, synthetic construct
  source 1..75: mol_type = other DNA
gcgcgcatctttaatgccgtggtggcttacggctgcgaactgaaagagatcacgcaatattgtgattcgttcacc

SEQ ID NO: 769937 - DNA, 75 bp, synthetic construct
  source 1..75: mol_type = other DNA
gcgttagcctcccagggaaaaacggttgcgggatataaacccgtagcgaaggggagcaaagagacacccgaaggg

SEQ ID NO: 769938 - DNA, 75 bp, synthetic construct
  source 1..75: mol_type = other DNA
tgcgtcagacccgcacccgtaagccgttccctgaatcactaccccgtgtacagcctgatcgggacgtgcaaactg

SEQ ID NO: 769939 - DNA, 75 bp, synthetic construct
  source 1..75: mol_type = other DNA
agccggaatgattggaacccctcagggatggtcacgccttaaagactggggattaaaaattactacacaaaataa

SEQ ID NO: 769940 - DNA, 75 bp, synthetic construct
  source 1..75: mol_type = other DNA
gcatcccgtcagcactgacggaagaagccctggagcagatcggtcagttgtacgccatagaggcggatataaggg

SEQ ID NO: 769941 - DNA, 75 bp, synthetic construct
  source 1..75: mol_type = other DNA
cacgctcatttcaaatggtctggctaatctggccgacaaagttgaacatgtagtcgttgaggggaccggcggatg

SEQ ID NO: 769942 - DNA, 75 bp, synthetic construct
  source 1..75: mol_type = other DNA
ccaggactggcgcattatgcggaaatcattgatgtgctcggtaaaaaacttccggcaccgctcattggtgaactg

SEQ ID NO: 769943 - DNA, 75 bp, synthetic construct
  source 1..75: mol_type = other DNA
acgtcgctgcatgaatggatggtggagaagaatggcacgttgtcgaaaaaatccagactgggcgaagcgttcagc

SEQ ID NO: 769944 - DNA, 75 bp, synthetic construct
  source 1..75: mol_type = other DNA
cgctgagtgaagccattggtctggagccagggtttatttcgggtgtcgtgcttgcggagctcaggctgttcaagc

SEQ ID NO: 769945 - DNA, 75 bp, synthetic construct
  source 1..75: mol_type = other DNA
cctgcgagttattaggcatgtcatgggggcaggaatcagacatttatcctactattgcgaatgccatccgagcag

SEQ ID NO: 769946 - DNA, 75 bp, synthetic construct
  source 1..75: mol_type = other DNA
tggcttaaaagtcagtgatataaaagcgattactcagaatgcgattgcagatcatgtacaggatacccggttgta

SEQ ID NO: 769947 - DNA, 75 bp, synthetic construct
  source 1..75: mol_type = other DNA
aagctacctacgcaatgtacttgacgtcatagccgactggccgctgaaccgggtcagcgaactgctcccctggcg

SEQ ID NO: 769948 - DNA, 75 bp, synthetic construct
  source 1..75: mol_type = other DNA
aagctacctacgcaatgtacttgacgtcatagccgactggccgatgaaccgggtcagcgaactgctcccatggcg

SEQ ID NO: 769949 - DNA, 75 bp, synthetic construct
  source 1..75: mol_type = other DNA
aagctacctacgcaatgtacttgacgtcatagcagactggccgatgaaccgggtcagcgaactgctcccctggcg

SEQ ID NO: 769950 - DNA, 75 bp, synthetic construct
  source 1..75: mol_type = other DNA
cggcggcaaatgcaggcccgacgggtgttacagcagatgagtgatgaacggttgagggacaatgggttatgctgg

SEQ ID NO: 769951 - DNA, 75 bp, synthetic construct
  source 1..75: mol_type = other DNA
cggcggcaaatgcaggcccgacgggtgttacagcagatgagtgatgaacggttgagggatagtgggttaggctgg

SEQ ID NO: 769952 - DNA, 75 bp, synthetic construct
  source 1..75: mol_type = other DNA
gcccggcgggggttacagcagatgagtgatgagcggttgagggatatcgggttacgcagggaggatgtggagtga

SEQ ID NO: 769953 - DNA, 75 bp, synthetic construct
  source 1..75: mol_type = other DNA
catggcaaactgactaaccagctacttcaggccgtggccaaacaaacccgtagcggtgatactcagcaatggttc

SEQ ID NO: 769954 - DNA, 75 bp, synthetic construct
  source 1..75: mol_type = other DNA
gtcattagtaaggagactaaaggtcacatttttagagctgttgaaaatgcgttacagcaacctcttgatatgaac

SEQ ID NO: 769955 - DNA, 75 bp, synthetic construct
  source 1..75: mol_type = other DNA
cggcggcaaatgcaggcccgacgggtgttacagcagatgagtgatgaacggttgagggacattgggttaagctgg

SEQ ID NO: 769956 - DNA, 75 bp, synthetic construct
  source 1..75: mol_type = other DNA
aagctacctacgcaatgtacttgacgtcatagccgactggccggtgaaccgggtcagcgaactgctcccgtggcg

SEQ ID NO: 769957 - DNA, 75 bp, synthetic construct
  source 1..75: mol_type = other DNA
agtggcgtactgcaggctgatgcctacgccgggttcaacgagctctaccgcgacggccatataaaggaagccgcg

SEQ ID NO: 769958 - DNA, 75 bp, synthetic construct
  source 1..75: mol_type = other DNA
tgcgtgttgtcgtctgctggcaccgctggatgaagcccttcagcactatgtcctgaccgacggcaaactccatgc

SEQ ID NO: 769959 - DNA, 75 bp, synthetic construct
  source 1..75: mol_type = other DNA
ctgggcatttatcgccagcagctgattggtaaaaacaaactgattatgcgctggctgtcgcatcgcggcggcgcg

SEQ ID NO: 769960 - DNA, 75 bp, synthetic construct
  source 1..75: mol_type = other DNA
catgccgatgataccccggtccaggtactgctgccgggtaataagaagacgaagaccgggcggttgtgggcgtat

SEQ ID NO: 769961 - DNA, 75 bp, synthetic construct
  source 1..75: mol_type = other DNA
tagcgccttccgggttatccggacggtacgtgaaaagcatgcctgtactcagtgcgatgccatcgtgcaggcccc

SEQ ID NO: 769962 - DNA, 75 bp, synthetic construct
  source 1..75: mol_type = other DNA
tcgatattgtcacatctttaaacgccaaggaagctgtggacagagtgttagagcggttttcattactcactaact

SEQ ID NO: 769963 - DNA, 75 bp, synthetic construct
  source 1..75: mol_type = other DNA
ttgggccgttggtggagatataagtggatcacttttcatccgtcgttgacacttgccgaacgtcagttgaaaacg

SEQ ID NO: 769964 - DNA, 75 bp, synthetic construct
  source 1..75: mol_type = other DNA
gcctgtaacagcacgcggagagacctggtataagggcggcaaaaacatggggcgctcgccagtaagcgtaacccg

SEQ ID NO: 769965 - DNA, 75 bp, synthetic construct
  source 1..75: mol_type = other DNA
aagctacctacgcaatgtacttgacgtcatagcggactggccggtgaaccgggtcagcgaactgctcccctggcg

SEQ ID NO: 769966 - DNA, 75 bp, synthetic construct
  source 1..75: mol_type = other DNA
gggacgtcccatcaaaaaagattcggatgtcgtcgcgcgtgttgatgcaatctgggatgagctggctatttttaa

SEQ ID NO: 769967 - DNA, 75 bp, synthetic construct
  source 1..75: mol_type = other DNA
tttgcgtgccggtgggcctgcgctgttgttcgaaaaccctaaaggctactcaatgccggtgctgtgcaacctgtt

SEQ ID NO: 769968 - DNA, 75 bp, synthetic construct
  source 1..75: mol_type = other DNA
ttgtgggcgtatgttcgtgatgaccgcaatgccgggtcagcgttggcacctgcagtgtggttcgcttacagcccg

SEQ ID NO: 769969 - DNA, 75 bp, synthetic construct
  source 1..75: mol_type = other DNA
gaccgccgataattttggcgatgcgctggaagacccgtcattccttgcgatgcttgcggcgctggtcaatagcgg

SEQ ID NO: 769970 - DNA, 75 bp, synthetic construct
  source 1..75: mol_type = other DNA
atccgttcgaagccatcatcgatgaagagctggagcctggcgatattctttatattccgccaggattcccgcatg

SEQ ID NO: 769971 - DNA, 75 bp, synthetic construct
  source 1..75: mol_type = other DNA
aagcagcactgcccacacccggatctgttacaggtcgagccgttcgaagcgattatcgatgaagagctggagcct

SEQ ID NO: 769972 - DNA, 75 bp, synthetic construct
  source 1..75: mol_type = other DNA
atgctttcgacacaatttaacagggataatcaacatcaagctatcatcaaaccgtcactccttgccggttgcata

SEQ ID NO: 769973 - DNA, 75 bp, synthetic construct
  source 1..75: mol_type = other DNA
aatatcatgagcataaacaaaccgctgcaaatgataatattgagctgcaaagcatactggagaatcagaagttca

SEQ ID NO: 769974 - DNA, 75 bp, synthetic construct
  source 1..75: mol_type = other DNA
gcgagtgggcgaaaagctgcaaatgaaacagcactgcccacacccggatctgttacaggtcgatccgttcgaagc

SEQ ID NO: 769975 - DNA, 75 bp, synthetic construct
  source 1..75: mol_type = other DNA
ctccttgcacacagaaatactctcacatccactacagctctgttatttctgttctgttgtacactgtatgcgcct

SEQ ID NO: 769976 - DNA, 75 bp, synthetic construct
  source 1..75: mol_type = other DNA
gtttggcgagtttatatcccagtcacgtcatgaactggatatcgcgccgccggaaccgccttatcagccagatga

SEQ ID NO: 769977 - DNA, 75 bp, synthetic construct
  source 1..75: mol_type = other DNA
gcactgtatgcgcctgcgggtatgacgtacggtaaaatcaacaacagttttattgtcgcgttgttgcagaccacg

SEQ ID NO: 769978 - DNA, 75 bp, synthetic construct
  source 1..75: mol_type = other DNA
aatgcagcgttataaacaactgaatcagcgtaagcgtgcagcaagaaccgtattgacggggatgtgttattcagt

SEQ ID NO: 769979 - DNA, 75 bp, synthetic construct
  source 1..75: mol_type = other DNA
gaccttcttctccggcattgtcgatgctgatttaggcgatcttacgatgctttcagccggttacgaatatcagcg

SEQ ID NO: 769980 - DNA, 75 bp, synthetic construct
  source 1..75: mol_type = other DNA
gttgacgtgaaagacagcgaaggcaacgtaacaggtaaacgcaccgtttacggctttgccaaatatatgcgtgat

SEQ ID NO: 769981 - DNA, 75 bp, synthetic construct
  source 1..75: mol_type = other DNA
cgatcccactaataatgcatttctggtcattaatcagctcaccatcaaagaaggcaaccatccccgccgacctga

SEQ ID NO: 769982 - DNA, 75 bp, synthetic construct
  source 1..75: mol_type = other DNA
tcttccagctctgccggggcgtggtattcccctcgcatctgcgctctgaggcgtttggtattacgttattggaag

SEQ ID NO: 769983 - DNA, 75 bp, synthetic construct
  source 1..75: mol_type = other DNA
aagaacacaatgacagtctcgaagttcgggtaaaacagactatcgatcaggctctggttaccgataaagttgttg

SEQ ID NO: 769984 - DNA, 75 bp, synthetic construct
  source 1..75: mol_type = other DNA
cgcaccttaatgagcagaagtgtgaagaagcgttaaaacaggtgatgcagattgcctcacctgttctaatggtaa

SEQ ID NO: 769985 - DNA, 75 bp, synthetic construct
  source 1..75: mol_type = other DNA
atatctcgcaggccgttgaagatggtgcaacagttcgtatcttttatgaaagccgtcttgccaaaattgccatca

SEQ ID NO: 769986 - DNA, 75 bp, synthetic construct
  source 1..75: mol_type = other DNA
cttgcaagcaccgctcatcaagatgttggaacaaggagaaggattctcgatcattcctgtatctatggacggcaa

SEQ ID NO: 769987 - DNA, 75 bp, synthetic construct
  source 1..75: mol_type = other DNA
gaaaaatttggttcacatcgtgtttattatgcgaaaacaaattttgaaatagcctcaacccctttttcagtgtca

SEQ ID NO: 769988 - DNA, 75 bp, synthetic construct
  source 1..75: mol_type = other DNA
ataataaacagctttttgaaattgcctccacgccgttttcgctgaaagcgttaaagcgttttaagctgattaaag

SEQ ID NO: 769989 - DNA, 75 bp, synthetic construct
  source 1..75: mol_type = other DNA
gtctgcagctggctgacgtaccaggagtcggagagcggaaccagccggtgagtctgctgcccggcaggcgttctt

SEQ ID NO: 769990 - DNA, 75 bp, synthetic construct
  source 1..75: mol_type = other DNA
ccaaacaacttggtatcgtaactttccctgctgtttacctcgcatctccagacggtcagttcgctcctataggac

SEQ ID NO: 769991 - DNA, 75 bp, synthetic construct
  source 1..75: mol_type = other DNA
ttaaggccgaatgttcactggatctcgggtgccccattgaagaatttaacgcattttgtgatgcccatcccgatc

SEQ ID NO: 769992 - DNA, 75 bp, synthetic construct
  source 1..75: mol_type = other DNA
atgtatcaacgattactgaaggttgacccgctgaagtgtgtgctgtgcgggagtcagatgcggtttacgggactg

SEQ ID NO: 769993 - DNA, 75 bp, synthetic construct
  source 1..75: mol_type = other DNA
accgcagtctctcccctttattttactgacgagcagacagaaactataaaaccggcgttgacatgccggggaagc

SEQ ID NO: 769994 - DNA, 75 bp, synthetic construct
  source 1..75: mol_type = other DNA
tgctaacaaaatgttgccgaacaacaagccaactgcgaccacggtcacagcgcctgtaacggtaccaacagcaag

SEQ ID NO: 769995 - DNA, 75 bp, synthetic construct
  source 1..75: mol_type = other DNA
gttttacggggctgaagcggggctaccgtctgacagagctggtcctgatgcatgagccactggcgcaacagcggg

SEQ ID NO: 769996 - DNA, 75 bp, synthetic construct
  source 1..75: mol_type = other DNA
gtccggtgaagcgccggttactggaagatgttgtgtacgtcataacggagacggtgagaaagacggcgatgcaaa

SEQ ID NO: 769997 - DNA, 75 bp, synthetic construct
  source 1..75: mol_type = other DNA
atgtatcagcggttactgaaggttgacccgctgaagtgcatcctgtgcggaggtcagatgcgttttacggggctg

SEQ ID NO: 769998 - DNA, 75 bp, synthetic construct
  source 1..75: mol_type = other DNA
acgagcatatcgccaaaatgatcgctgaaggaaaagtggcgtttggcctttccgttgagcacgttgaacacgcga

SEQ ID NO: 769999 - DNA, 75 bp, synthetic construct
  source 1..75: mol_type = other DNA
taataatctggatgtttacagcaaaagcgaaggtgataaccgttacctgcgcagggagcagcacggcgcagacat

SEQ ID NO: 770000 - DNA, 75 bp, synthetic construct
  source 1..75: mol_type = other DNA
cccggataaaggggcttttatcgataacgtcggtttacgggaaacggtaaataaggccgcaaatgccctgccatc

SEQ ID NO: 770001 - DNA, 75 bp, synthetic construct
  source 1..75: mol_type = other DNA
ataaggctgctgatgccctgccatcgggtggaaccgccgtggcagcaaacagactcgccaccccaagaaatatta

SEQ ID NO: 770002 - DNA, 75 bp, synthetic construct
  source 1..75: mol_type = other DNA
tgaaggaaaagtggcgtttggcctttccgttgagcacgttgaacacgcgattccgatgctgattaaccatctgaa

SEQ ID NO: 770003 - DNA, 75 bp, synthetic construct
  source 1..75: mol_type = other DNA
cgggcaactggattactacatcggcgcgtgtaataccggcgcaggtgcggcattgtcgattgctatcgcggtgat

SEQ ID NO: 770004 - DNA, 75 bp, synthetic construct
  source 1..75: mol_type = other DNA
ctgcgtttcgcccgctggtcagagattgatttcacaaaccgagtctggacgatacccgcgacgcgagaacccatt

SEQ ID NO: 770005 - DNA, 75 bp, synthetic construct
  source 1..75: mol_type = other DNA
aacgacaactccgcacaaatgctggtcgatgcctcacaagcggagggcagccatattgtgtctattttgcttaac

SEQ ID NO: 770006 - DNA, 75 bp, synthetic construct
  source 1..75: mol_type = other DNA
tattgcgattggtggttttagcattgcggtactactggtgattttacgcctgacgttcggaccgcagtgggcggc

SEQ ID NO: 770007 - DNA, 75 bp, synthetic construct
  source 1..75: mol_type = other DNA
acggttgtatgctgcgcgcctatcgccgtcatattgtcgatgcgatgttgcactgccatgaacgtagcaccttta

SEQ ID NO: 770008 - DNA, 75 bp, synthetic construct
  source 1..75: mol_type = other DNA
accagttcaacacgcttgcattttgaaattcgttacaaggggaaatccgtaaacccgctgcgttatttgccgcag

SEQ ID NO: 770009 - DNA, 75 bp, synthetic construct
  source 1..75: mol_type = other DNA
ccatattgtgtctattttgcttaaccgcaattacggacaacattcggcaattatggcgggattcagtcacgttac

SEQ ID NO: 770010 - DNA, 75 bp, synthetic construct
  source 1..75: mol_type = other DNA
attttagtaaatgatatttttttgaaggattttttcatgaagcaacctgattttgcgaagtggtacttctatcaa

SEQ ID NO: 770011 - DNA, 75 bp, synthetic construct
  source 1..75: mol_type = other DNA
gcttgtactaaagggattcgtgaaggacatatagtcattatatttaaacaatctgatggttcgactaatcgttat

SEQ ID NO: 770012 - DNA, 75 bp, synthetic construct
  source 1..75: mol_type = other DNA
ttgtaaataaacttccgggttatgtcgttaagatttttgaagaaaagatgggtaatgaattaaaaattagaacaa

SEQ ID NO: 770013 - DNA, 75 bp, synthetic construct
  source 1..75: mol_type = other DNA
acacagcacctgatgcaacaaaagcatcgggagtgggtgtcactctaatgcgtaatggaaaaatactggctacgg

SEQ ID NO: 770014 - DNA, 75 bp, synthetic construct
  source 1..75: mol_type = other DNA
tgtaactaacatcattcgtcattttgttcgttcaagcagggcaatctgtgagcttgatgatcgtgtgtatccacg

SEQ ID NO: 770015 - DNA, 75 bp, synthetic construct
  source 1..75: mol_type = other DNA
ccatacaaatctcccggaaacaaaccataattcatcagaaataaaaaacggaattgaagtcagaaaaatacgaac

SEQ ID NO: 770016 - DNA, 75 bp, synthetic construct
  source 1..75: mol_type = other DNA
gttttctgaaactttcagtagatgataaaattaatgcgcttaaattaataagtgagtataaagaaactgatgaag

SEQ ID NO: 770017 - DNA, 75 bp, synthetic construct
  source 1..75: mol_type = other DNA
ttaaaccgctggccttgcgtctgatgctgcaactggtaattgttgttgcgctggtggtttacgtgatttatggat

SEQ ID NO: 770018 - DNA, 75 bp, synthetic construct
  source 1..75: mol_type = other DNA
ggtcatccgtctggggcgttcgtctatacagcgttgtgtgaatcatatttctgaaccggatacagaaattccgcc

SEQ ID NO: 770019 - DNA, 75 bp, synthetic construct
  source 1..75: mol_type = other DNA
aggattttttaatccggcaccctggcgcagttgtgtttagtgcgaaaaaacgccagtggggtagccaggaggatc

SEQ ID NO: 770020 - DNA, 75 bp, synthetic construct
  source 1..75: mol_type = other DNA
agtcggtggggaacccaggaagatttggcatgcgctcagtggatttgggggcgagttgtcagtctttacgaacag

SEQ ID NO: 770021 - DNA, 75 bp, synthetic construct
  source 1..75: mol_type = other DNA
ttatcagttccaccacctgctgccggactttaccgcgctggaaaacgtcgctatgccgctgctgattggcaagaa

SEQ ID NO: 770022 - DNA, 75 bp, synthetic construct
  source 1..75: mol_type = other DNA
ttgctgcatttactgggcgggctggatacgccaacctccggtgatgtgatttttagcggtcagccgatgagcaaa

SEQ ID NO: 770023 - DNA, 75 bp, synthetic construct
  source 1..75: mol_type = other DNA
ttatcagtttcaccacctgttgccggattttaccgccctggaaaacgtggctatgccgctgttgattggcaagaa

SEQ ID NO: 770024 - DNA, 75 bp, synthetic construct
  source 1..75: mol_type = other DNA
tgttcaccctgctggcgctgttttctatcttgatccatgcctggatcggcatgtggcaggtgttgaccgactacg

SEQ ID NO: 770025 - DNA, 75 bp, synthetic construct
  source 1..75: mol_type = other DNA
cctcgttcgcgctaccgctatcgtcctgacgctctacatcatttatatggtcggttttttcgccaccagtggcga

SEQ ID NO: 770026 - DNA, 75 bp, synthetic construct
  source 1..75: mol_type = other DNA
ctgcaaccagaccagaccgatccggcagatctcgttctggatcatttcaatcgggtaaccaactcgacctatggc

SEQ ID NO: 770027 - DNA, 75 bp, synthetic construct
  source 1..75: mol_type = other DNA
caggcacagtacaactttgtcggtgccagcgaacaactggaaagcgcacaccgtagcgtcgtgcaaaccgtgcgt

SEQ ID NO: 770028 - DNA, 75 bp, synthetic construct
  source 1..75: mol_type = other DNA
aaaggtgagcatgccggagaacagcgggtcagcctgaaagccaggctgctgaatattgactggattaaaatcggt

SEQ ID NO: 770029 - DNA, 75 bp, synthetic construct
  source 1..75: mol_type = other DNA
ctgactcaggacagtcattcggtgaattacccggtggagtttgctgctaagggacagttccgttttcgtgcgcag

SEQ ID NO: 770030 - DNA, 75 bp, synthetic construct
  source 1..75: mol_type = other DNA
aaataggccaggagcaggtctataaggctgaaaaagcggagtccctgccaccgcaaaatggcacaactaaacgtc

SEQ ID NO: 770031 - DNA, 75 bp, synthetic construct
  source 1..75: mol_type = other DNA
gtttattattccaatagtaatctatgtgcatataatagtaagtgggctcaagttaatttaatggattataattaa

SEQ ID NO: 770032 - DNA, 75 bp, synthetic construct
  source 1..75: mol_type = other DNA
ttaatgcggtttattatgggggagtaagcattggagaaaaaaataggtatgaaagtgattactcctattattcaa

SEQ ID NO: 770033 - DNA, 75 bp, synthetic construct
  source 1..75: mol_type = other DNA
ttaattgggtttattatggagatgtaaagaaagggttaagatggattataaggacagatttttcttacatcaaaa

SEQ ID NO: 770034 - DNA, 75 bp, synthetic construct
  source 1..75: mol_type = other DNA
ttcgccaggcgcaggatggtcacttaccgacgctggatttaacagcttctaccgggatttctgatacctcttata

SEQ ID NO: 770035 - DNA, 75 bp, synthetic construct
  source 1..75: mol_type = other DNA
tgcagattacacctatagcaacggctaccgcgacgcgaacggcatcaactctaacgcgaccagtgcgtccctgca

SEQ ID NO: 770036 - DNA, 75 bp, synthetic construct
  source 1..75: mol_type = other DNA
aagcgcgcagtccattactgccacagctaggtttaggtgcagattacacctatagcaacggctaccgcgacgcga

SEQ ID NO: 770037 - DNA, 75 bp, synthetic construct
  source 1..75: mol_type = other DNA
aagggcagtttttaaccgcagtgattaatgcactcagtggaccggctgataaccctgtgtacgttcgtttcgata

SEQ ID NO: 770038 - DNA, 75 bp, synthetic construct
  source 1..75: mol_type = other DNA
gtaactcaagttcaagaagtcgctaaacaagaacctgactgggattatctcgaaatcccgacttaccttcgtaag

SEQ ID NO: 770039 - DNA, 75 bp, synthetic construct
  source 1..75: mol_type = other DNA
gcggttcgaaaacccgtggtgccgctggtacccagtatgacgatagcaatatgggccagaacaaagttggcctga

SEQ ID NO: 770040 - DNA, 75 bp, synthetic construct
  source 1..75: mol_type = other DNA
ttttccagttgcttggggaactcaatcgtttgcagggaactgcctttttagtcgtgacgcacgatctgcaactgg

SEQ ID NO: 770041 - DNA, 75 bp, synthetic construct
  source 1..75: mol_type = other DNA
ttttactgccgtcatcgacactatctggcttattaccaaacgccgaaagaatttcctggttggttacgagatatc

SEQ ID NO: 770042 - DNA, 75 bp, synthetic construct
  source 1..75: mol_type = other DNA
atgacagtgcgggagggcgggcctcccggcggattattgcgttggttgttgtttgacgacattaatcatccacgg

SEQ ID NO: 770043 - DNA, 75 bp, synthetic construct
  source 1..75: mol_type = other DNA
cgttagtgatcgccatgctagccgtgccgatcttgattcaagtgttcttcaattccgggttagcctactggctga

SEQ ID NO: 770044 - DNA, 75 bp, synthetic construct
  source 1..75: mol_type = other DNA
ggtgcagagcgatattcagaacgccgttgatgtggtggataccgcttcggacgatctcaacgcctcaattgcgtc

SEQ ID NO: 770045 - DNA, 75 bp, synthetic construct
  source 1..75: mol_type = other DNA
caccgaatcaatggtcgcggcgctgaactatcaggatgaagacgggcattacgtctttggcggcaccatcaacga

SEQ ID NO: 770046 - DNA, 75 bp, synthetic construct
  source 1..75: mol_type = other DNA
acaacagcctgctggcggtgcgtgacgacctgctggaagcagcgaacggcaccaataccgccgattcgctcgcaa

SEQ ID NO: 770047 - DNA, 75 bp, synthetic construct
  source 1..75: mol_type = other DNA
gatcacggcggcagtatcaatattctgacctctcaccgcccttcaccgctggcaaagggaaacccgtcgcacagc

SEQ ID NO: 770048 - DNA, 75 bp, synthetic construct
  source 1..75: mol_type = other DNA
tgtaaggaaggtaatacacaaggagaactggcttatctgatcgactttaacgatcctacgaataatgattttctg

SEQ ID NO: 770049 - DNA, 75 bp, synthetic construct
  source 1..75: mol_type = other DNA
attcccggcagttcaggatccgcattaccgtacgtctgggcgcgcattcgaaagaataccgctttcattcgttga

SEQ ID NO: 770050 - DNA, 75 bp, synthetic construct
  source 1..75: mol_type = other DNA
ccatgctgccgcctgtcagttatgaccagaacggaaaatatatttccgcagaactgatggccgaggctaacgtca

SEQ ID NO: 770051 - DNA, 75 bp, synthetic construct
  source 1..75: mol_type = other DNA
cgtggcaggtcaacgttatcgggacaaaaacaccggtctaccggttcagaacgggcgcatcggcaaccggcgaac

SEQ ID NO: 770052 - DNA, 75 bp, synthetic construct
  source 1..75: mol_type = other DNA
cccgatcgccgccacgcgcatcacccagttgaaccgccaacagtcggcgattgagcagtatcaaagcaatattga

SEQ ID NO: 770053 - DNA, 75 bp, synthetic construct
  source 1..75: mol_type = other DNA
caaccggacccgcagacggctgaacaggattttttaatccggcaccctgacgcagttgtgtttagtgcgaaaaaa

SEQ ID NO: 770054 - DNA, 75 bp, synthetic construct
  source 1..75: mol_type = other DNA
cgctggttataaacacgcagctggcgatgaaaattggtctgaacgaagccattgtgttgcagcagttgcattact

SEQ ID NO: 770055 - DNA, 75 bp, synthetic construct
  source 1..75: mol_type = other DNA
tccaggtacagcgcgcctacgaaatcaacagtaaagcggtatccactaccgatcaaatgctgcaaaaactgacgc

SEQ ID NO: 770056 - DNA, 75 bp, synthetic construct
  source 1..75: mol_type = other DNA
atacgccaacctccggcgatgtgatctttaacggtcaaccgatgagcaaactgtcttcggcggccaaagcagaac

SEQ ID NO: 770057 - DNA, 75 bp, synthetic construct
  source 1..75: mol_type = other DNA
ggctggagcatcgtgcgaatcaccgcccatctgaactttctggtggcgaacgccagcgtgtggcgattgcccgtg

SEQ ID NO: 770058 - DNA, 75 bp, synthetic construct
  source 1..75: mol_type = other DNA
cgaaccattattactgctgacgttgttgcatcagcatgccatgtttctgtagatgctgatggcagcgggcgtaat

SEQ ID NO: 770059 - DNA, 75 bp, synthetic construct
  source 1..75: mol_type = other DNA
tggtcatgaacggtggtcgctgggtgaattttaactgggagagctggcgttcgaatgtcagacacctgagggttg

SEQ ID NO: 770060 - DNA, 75 bp, synthetic construct
  source 1..75: mol_type = other DNA
tcgctctctcaggagttgcaagaccccaacgctgaccccgccgatccgcaggtgcagagcgatattcagaacgcc

SEQ ID NO: 770061 - DNA, 75 bp, synthetic construct
  source 1..75: mol_type = other DNA
ttgagcagtatcagagcaatatcgactccgcgtcggcgggcttaagccagcaggagtcgattctcgatggcgtca

SEQ ID NO: 770062 - DNA, 75 bp, synthetic construct
  source 1..75: mol_type = other DNA
tggcctgatgatcttacagagaatacaacagagattactacagagaataaaaacacttctcgtccggaagctttg

SEQ ID NO: 770063 - DNA, 75 bp, synthetic construct
  source 1..75: mol_type = other DNA
gcgaaaagctcaataaatcaaagcgcgacatgaccaatttctacacgatcaactacgggagcgatcttttagatg

SEQ ID NO: 770064 - DNA, 75 bp, synthetic construct
  source 1..75: mol_type = other DNA
acgctaaccactctgcgcccttcaccactggcgaagggaaacccgcagcacactaatctggtcgagatcgaaaaa

SEQ ID NO: 770065 - DNA, 75 bp, synthetic construct
  source 1..75: mol_type = other DNA
attatgctctattgtttttatatcatattcgatccgatattatattattaataaggttttaaatgaggttgaaaa

SEQ ID NO: 770066 - DNA, 75 bp, synthetic construct
  source 1..75: mol_type = other DNA
gcagcattcgtttcgcacgctgtgattgtattgaaggaacgctgtgtgaacacgtagcactggctgtgcaggcct

SEQ ID NO: 770067 - DNA, 75 bp, synthetic construct
  source 1..75: mol_type = other DNA
ggaattgactcatttaatctggcagatgcgcagcgaacacgtcacatcatctgacgatccgtttgccaacgatga

SEQ ID NO: 770068 - DNA, 75 bp, synthetic construct
  source 1..75: mol_type = other DNA
aatgtaattatactcgaaacaacggtacaaagtttacaacatctgattaatgataattggcaatttgttccacat

SEQ ID NO: 770069 - DNA, 75 bp, synthetic construct
  source 1..75: mol_type = other DNA
tgctttctgcaacctcattagtgatgacagctccggcgaaagctgctgatccatgtcagcaggttctgtgtcttt

SEQ ID NO: 770070 - DNA, 75 bp, synthetic construct
  source 1..75: mol_type = other DNA
aaaatacgacactaactatgtttttattatgctctattgtttttatatcgtattcgattcgatattatattatta

SEQ ID NO: 770071 - DNA, 75 bp, synthetic construct
  source 1..75: mol_type = other DNA
gcctgtggcaccgctaccttctgccagcgtcttgcctgtgccgtctaccgctcatcagttgctgatgcgctgcca

SEQ ID NO: 770072 - DNA, 75 bp, synthetic construct
  source 1..75: mol_type = other DNA
tggaaccacgggtgatgatgacaaaaacccgcgcctgggcgctggacgcagaaactgcgcctgtggcaccgctac

SEQ ID NO: 770073 - DNA, 75 bp, synthetic construct
  source 1..75: mol_type = other DNA
tggtgttaagttatcaacgactttgtgccaccgcccagcctacggaaaaagaagaagagtgggatccggcaatct

SEQ ID NO: 770074 - DNA, 75 bp, synthetic construct
  source 1..75: mol_type = other DNA
tgagaacggcgctttaatcgccaccttcagtgacggtgtccgtacccagctggcgaacggtcaggcactgaaaga

SEQ ID NO: 770075 - DNA, 75 bp, synthetic construct
  source 1..75: mol_type = other DNA
cgatgtcacccgtaaacgtgcacaagctcttgtcgctaaaggcatcaccattgagttgttctgtgcgccgggcga

SEQ ID NO: 770076 - DNA, 75 bp, synthetic construct
  source 1..75: mol_type = other DNA
tgatgatagtcaagagagaaggtgttggcttgttattaataaccctttggcaaccgtaaagttgagcgataataa

SEQ ID NO: 770077 - DNA, 75 bp, synthetic construct
  source 1..75: mol_type = other DNA
cgcatcaggacgaaccgcagtttggcgcgcaaagtacgccgctggatgagcgtacagaacgtttgatccttgcgc

SEQ ID NO: 770078 - DNA, 75 bp, synthetic construct
  source 1..75: mol_type = other DNA
atgcctcatgtatgtgatgaatcgatatcatacttactgggcgaaaatggtatacttgaagaaatagataagctc

SEQ ID NO: 770079 - DNA, 75 bp, synthetic construct
  source 1..75: mol_type = other DNA
aacgttacatgataccagaattgctagtggtacagaaggtaatgatgaaattaataacatcaaaattaacctgtc

SEQ ID NO: 770080 - DNA, 75 bp, synthetic construct
  source 1..75: mol_type = other DNA
caattttaaacaaaaaagtgaagttttaaatacctggcgtgttggaatgaataattttgcccgaattgccgaggg

SEQ ID NO: 770081 - DNA, 75 bp, synthetic construct
  source 1..75: mol_type = other DNA
gggtgacgcgctgaaaatcccccaggatgttcgtgaaggtattgaacgcgatctcgaacagcaaaaacgtacttt

SEQ ID NO: 770082 - DNA, 75 bp, synthetic construct
  source 1..75: mol_type = other DNA
tctcattgagcaggcaattgaacaaccgctggatccgcagcgcctggcgaatgggattcgtaatgaagaagaggc

SEQ ID NO: 770083 - DNA, 75 bp, synthetic construct
  source 1..75: mol_type = other DNA
aagatttttttaaagatgccttggctacaacattgtcaacaataaagcaagagcatctgctaataatgcctcatg

SEQ ID NO: 770084 - DNA, 75 bp, synthetic construct
  source 1..75: mol_type = other DNA
tgcaatatacagcgcatctcaaaaaatctggagaggaagtgatgattttttctcctgaaataattattcctaata

SEQ ID NO: 770085 - DNA, 75 bp, synthetic construct
  source 1..75: mol_type = other DNA
ataagtatactcgaaagagtaagtaacaagacttttttaagctatacagagttatattcattatcagagtttctt

SEQ ID NO: 770086 - DNA, 75 bp, synthetic construct
  source 1..75: mol_type = other DNA
caccggtcatcgattcgatgctggagacttttttaaaattcccatatatttatgatgtaagaatactggagtggt

SEQ ID NO: 770087 - DNA, 75 bp, synthetic construct
  source 1..75: mol_type = other DNA
gaaagaaaagatgatagttcattacacctgattactaacaaggttctggcgtgttaccaacgtgaagctaacaag

SEQ ID NO: 770088 - DNA, 75 bp, synthetic construct
  source 1..75: mol_type = other DNA
atggtgatgaagaaaaaacaaaagaaattgtaaataaacttccgggttatgtcgttaagatttttgaagaaaaga

SEQ ID NO: 770089 - DNA, 75 bp, synthetic construct
  source 1..75: mol_type = other DNA
attctgatacctgacctgctggtagtccatccagtccataacgagggatacctgcgacagcagtacgcagcagat

SEQ ID NO: 770090 - DNA, 75 bp, synthetic construct
  source 1..75: mol_type = other DNA
atggatacacactctgccggatatcagttcactgcagattcattccggcgttttattatacggacgctgactgac

SEQ ID NO: 770091 - DNA, 75 bp, synthetic construct
  source 1..75: mol_type = other DNA
tcgttatttattttggtggcgcatagccaaatacctttttgataaaggcggatactgtcggaagattgcggggaa

SEQ ID NO: 770092 - DNA, 75 bp, synthetic construct
  source 1..75: mol_type = other DNA
taaatatagggaaaggctttgatatttcttatctcaacagtgttgttatcggtcacaaagtaaccatcggtgaaa

SEQ ID NO: 770093 - DNA, 75 bp, synthetic construct
  source 1..75: mol_type = other DNA
tagagaattatttaaaaggaattaatgacattcgcgtttgcaatttctttttgagatgtctatacatgaaaaata

SEQ ID NO: 770094 - DNA, 75 bp, synthetic construct
  source 1..75: mol_type = other DNA
acaaatatcttgttcctttctttggtaagtacagcatagagaaaattacagcgccagtagctattaatgctctgg

SEQ ID NO: 770095 - DNA, 75 bp, synthetic construct
  source 1..75: mol_type = other DNA
atggataccctcactgccggatatcagttttccgcagatgcattccgacgttttattatccggacagtgactgac

SEQ ID NO: 770096 - DNA, 75 bp, synthetic construct
  source 1..75: mol_type = other DNA
ggacgacatcggtcagtatcaatatcgaagtgtgggtgaagaaagtggcgtcagaacctatcggacagcgctaca

SEQ ID NO: 770097 - DNA, 75 bp, synthetic construct
  source 1..75: mol_type = other DNA
agccatgcctgccgataccaatgccaatggtgacatctttggtggttggttaatgtcgcagatggatattggtgg

SEQ ID NO: 770098 - DNA, 75 bp, synthetic construct
  source 1..75: mol_type = other DNA
atcaccagaatgtaaagattacccgagcgtcattagcggttatttaggtaaaaactggggcatcctgttaggtgc

SEQ ID NO: 770099 - DNA, 75 bp, synthetic construct
  source 1..75: mol_type = other DNA
taaacgccctttctcctggcgaaaagcaattgttcgcgcaataaaacacagaagatcacgttatttattttggtg

SEQ ID NO: 770100 - DNA, 75 bp, synthetic construct
  source 1..75: mol_type = other DNA
taacgttacgataggtgctcatgctctggtaacaaaatctattccttccaactcaatatatataaacgaaataac

SEQ ID NO: 770101 - DNA, 75 bp, synthetic construct
  source 1..75: mol_type = other DNA
cagaaaacgatgaaacgctctgctttcgatgcactggatgttgcaggtaagcaaaatgcactgaaagacggtatc

SEQ ID NO: 770102 - DNA, 75 bp, synthetic construct
  source 1..75: mol_type = other DNA
tggatgagttagctgaacattacgatatgcgtataagtgatatactggaaaaattaatcagccagcattacagag

SEQ ID NO: 770103 - DNA, 75 bp, synthetic construct
  source 1..75: mol_type = other DNA
gcggcatcacgtcggcttgtgacccagacggccagaacgggatccatcggggtcatgatggcccacagcaattac

SEQ ID NO: 770104 - DNA, 75 bp, synthetic construct
  source 1..75: mol_type = other DNA
gcgcgctggcggaaacgcccgggatgacggtggaaagtgcccagcgcatccttgccgcggctcctctgagtgctc

SEQ ID NO: 770105 - DNA, 75 bp, synthetic construct
  source 1..75: mol_type = other DNA
tcgcggtcttgccggtttccggcactctggtgagtaaaacccgtgcgctgcagccttattccgggatgacgggtt

SEQ ID NO: 770106 - DNA, 75 bp, synthetic construct
  source 1..75: mol_type = other DNA
aatacgggaaggtttacaccgaaaaaaaccgtccttatgacgtgcaattcaactcaatgaacactgctatccagg

SEQ ID NO: 770107 - DNA, 75 bp, synthetic construct
  source 1..75: mol_type = other DNA
gatccggtaaatgcggcgaattatacgcgcggggtcagccaggcactgaagcgtcatagcgacctcgtagcgcaa

SEQ ID NO: 770108 - DNA, 75 bp, synthetic construct
  source 1..75: mol_type = other DNA
cggttcaggccgttcttgatactgaagcagctgtgttttcaggccaggaatcagttgacaacggcctggcggagc

SEQ ID NO: 770109 - DNA, 75 bp, synthetic construct
  source 1..75: mol_type = other DNA
gacaatggtcaggccaggtgaggcgattaaagcagagtggtcagagattgattttgattctggcttgtggattat

SEQ ID NO: 770110 - DNA, 75 bp, synthetic construct
  source 1..75: mol_type = other DNA
attacttaagataaagactgcattcacaggaaagaaaaataaatcattagcagcactacctgttgaaagattgcc

SEQ ID NO: 770111 - DNA, 75 bp, synthetic construct
  source 1..75: mol_type = other DNA
atagttctttgtccactactcaagaaacagataattatcaacttcaaaaacaagtggaggctaatatatcaaaaa

SEQ ID NO: 770112 - DNA, 75 bp, synthetic construct
  source 1..75: mol_type = other DNA
agcggcagtattctccggccaggagtctttggataacggactggcggatgaacttgttaacaataccgatgcgct

SEQ ID NO: 770113 - DNA, 75 bp, synthetic construct
  source 1..75: mol_type = other DNA
gtcggggactgggatatgcaggaaaatttacaagtcttgctgactggatcactgagtttggtaaggctgtccgga

SEQ ID NO: 770114 - DNA, 75 bp, synthetic construct
  source 1..75: mol_type = other DNA
cttcggcgaatgattgcacgtggagttgatccagtgacagagaagaaaaatcgtaaaattgagatggcgctaaaa

SEQ ID NO: 770115 - DNA, 75 bp, synthetic construct
  source 1..75: mol_type = other DNA
gaacgagtggagcatgatgagtatcgcaaaatatgtgccgaaatagagcaggaaacaaacctgaaaaacctacgt

SEQ ID NO: 770116 - DNA, 75 bp, synthetic construct
  source 1..75: mol_type = other DNA
attgacccctctgattttagaaaactgctaaaacgatatgacattaaagtgaagattgaagctaccgtttggtaa

SEQ ID NO: 770117 - DNA, 75 bp, synthetic construct
  source 1..75: mol_type = other DNA
gtgaaggtattgatcaatcaaccttccacaaactcttaaagaagtatgacattaaagtaaagattaccgccgagg

SEQ ID NO: 770118 - DNA, 75 bp, synthetic construct
  source 1..75: mol_type = other DNA
tctatgctgagcgggaaggtaatgggttgcttgtgagagtagatctgagaacgtgctatctgaatccaggtcaag

SEQ ID NO: 770119 - DNA, 75 bp, synthetic construct
  source 1..75: mol_type = other DNA
tatggttctggaaagtcaggacgaatatgactcacaatgggcgtcaatttgttccattgctccaaagattggctg

SEQ ID NO: 770120 - DNA, 75 bp, synthetic construct
  source 1..75: mol_type = other DNA
gactgattatgatgcggatctggggatattattcgggccttatttaactgacgatccgcagaaactgtttgcgat

SEQ ID NO: 770121 - DNA, 75 bp, synthetic construct
  source 1..75: mol_type = other DNA
cggcggtgttgagttctccgcaagagattgaaccggcacagtggctggttgccgtgtggggtggggctgactatg

SEQ ID NO: 770122 - DNA, 75 bp, synthetic construct
  source 1..75: mol_type = other DNA
cgcatccgcaggaaaaagctgttcagcaaccgatcaaagcagaagagaaaccggggcgtaacgatccttgcccgt

SEQ ID NO: 770123 - DNA, 75 bp, synthetic construct
  source 1..75: mol_type = other DNA
tagcgataaagaaaatatattctcttttgtcgatatagtacactacaacagtagcagtgacacttattctgaaaa

SEQ ID NO: 770124 - DNA, 75 bp, synthetic construct
  source 1..75: mol_type = other DNA
cgcaatcaataacgacgacaccgccgatttgttttttgaactgcccatcagcgagcgtgtgatcgtaatgcgcaa

SEQ ID NO: 770125 - DNA, 75 bp, synthetic construct
  source 1..75: mol_type = other DNA
ccgcaattgttgcttaatccggagcgtaatcaggacatcaaattctccgccgttatcaatgacgatgacagcgcc

SEQ ID NO: 770126 - DNA, 75 bp, synthetic construct
  source 1..75: mol_type = other DNA
tatcattactgggagcctatactcaaagacaaatgttgtcagcatcccacaaagcatcttttgctttgttattgt

SEQ ID NO: 770127 - DNA, 75 bp, synthetic construct
  source 1..75: mol_type = other DNA
ttactgtcagcaccctttttctgccgacaataattcaggcaaaaccgatttcgataaaagttgcctatgaaaata

SEQ ID NO: 770128 - DNA, 75 bp, synthetic construct
  source 1..75: mol_type = other DNA
tatcgcaggcagcaaaggacaggcaattatcgcgaccgcagatggccgcgttgtttatgccggtaacgcgctgcg

SEQ ID NO: 770129 - DNA, 75 bp, synthetic construct
  source 1..75: mol_type = other DNA
tgacctctcaccgcccttcaccgctggcaaagggaaacccgtcgcacagcaatcttgtccagatcgaaaaggttt

SEQ ID NO: 770130 - DNA, 75 bp, synthetic construct
  source 1..75: mol_type = other DNA
gaaaggcgatctggaatccgttctcgacctgaccggtaaactgaatgaggttgagttccgtgcagaagcgaatcc

SEQ ID NO: 770131 - DNA, 75 bp, synthetic construct
  source 1..75: mol_type = other DNA
aaaaacgtggctcgctggaaaaactgcgtaaggtccgccaatactgtaatcagatttttcgttatgctatcgcca

SEQ ID NO: 770132 - DNA, 75 bp, synthetic construct
  source 1..75: mol_type = other DNA
agcgtattgctttgattcaacgctttatagccatttttggtaaagaccgtattgtgaatgtgttcgcagacagag

SEQ ID NO: 770133 - DNA, 75 bp, synthetic construct
  source 1..75: mol_type = other DNA
tgcgggataaggcagagaaagcaactaaaggaggctacatcgtagggcatacatctgttaaccagcacggtaatt

SEQ ID NO: 770134 - DNA, 75 bp, synthetic construct
  source 1..75: mol_type = other DNA
gaaaaactttatgaattaagttatttatcgttgtttttctttgtgttatttttagtagtaggagttttattgaat

SEQ ID NO: 770135 - DNA, 75 bp, synthetic construct
  source 1..75: mol_type = other DNA
ctccgccagcatgagcgggataccgggagcggtgatggtgggctcaccaccgctgaacgtcagcgcctgaaagag

SEQ ID NO: 770136 - DNA, 75 bp, synthetic construct
  source 1..75: mol_type = other DNA
actgcgccaattagcggacgtatcggcaaatcgaccgtgaccgaaggcgctcttgtcactaatgggcaaacgact

SEQ ID NO: 770137 - DNA, 75 bp, synthetic construct
  source 1..75: mol_type = other DNA
atgaacaagattgactatcaggcactgcgtgaggcggcagagaaggcaacgtggggagactgggactcatataaa

SEQ ID NO: 770138 - DNA, 75 bp, synthetic construct
  source 1..75: mol_type = other DNA
tcgaggtactaacggaaatcatgaacgacaagcagcagccgaccgaaatacggttacaggccgccgctattctga

SEQ ID NO: 770139 - DNA, 75 bp, synthetic construct
  source 1..75: mol_type = other DNA
cgtgggcctggtagcgatcaccgacgtgcagaacgcccgcgcacagtacgataccgtgctggcgaacgaagtgac

SEQ ID NO: 770140 - DNA, 75 bp, synthetic construct
  source 1..75: mol_type = other DNA
tgttctatactcctacagcactgtaagttcagttgaagctgtagagcaacaatctcatcaactgtactcatattg

SEQ ID NO: 770141 - DNA, 75 bp, synthetic construct
  source 1..75: mol_type = other DNA
agctgtgggggagagttgttgagaaagaatgcggaagatgcaaaggtgtcggctattcaagaatgccagcaagcg

SEQ ID NO: 770142 - DNA, 75 bp, synthetic construct
  source 1..75: mol_type = other DNA
gtggattatcaaaacggcgtgatcacttcattacagcttcagcacgggcggtttgagagctgggccgaacggctg

SEQ ID NO: 770143 - DNA, 75 bp, synthetic construct
  source 1..75: mol_type = other DNA
cagcgacgacgtgaaaggaacttcgccggatcgtctcaccggtacagatgtaatggctgctatggggatggcgca

SEQ ID NO: 770144 - DNA, 75 bp, synthetic construct
  source 1..75: mol_type = other DNA
atgcgggatttaatcaagtcccagccggtatatgagatccagtattacggcaaaaccttccggatgaacgctgct

SEQ ID NO: 770145 - DNA, 75 bp, synthetic construct
  source 1..75: mol_type = other DNA
gattccgatatccggattggcgacctgccgattatccgggattctgaaatcggcactgttgcaaatagtcggtgg

SEQ ID NO: 770146 - DNA, 75 bp, synthetic construct
  source 1..75: mol_type = other DNA
tgattcgcaggagttaaataattctcagaagttaaataattcgcagaagttaaataatccgcaggagctaaataa

SEQ ID NO: 770147 - DNA, 75 bp, synthetic construct
  source 1..75: mol_type = other DNA
taaaaattagaacaagaatgatggaaaccctccgggatgggaaaatcaatatatataattatattaatgaaaaac

SEQ ID NO: 770148 - DNA, 75 bp, synthetic construct
  source 1..75: mol_type = other DNA
agtggtacagaaggtaatgatgaaattaataacatcaaaattaacctgtctaatattcttattgattccttagat

SEQ ID NO: 770149 - DNA, 75 bp, synthetic construct
  source 1..75: mol_type = other DNA
tgatgcaaactatcttgcaatcgagagttaatgtattaccatatattaatgaacagcgtttaaataaactaaatc

SEQ ID NO: 770150 - DNA, 75 bp, synthetic construct
  source 1..75: mol_type = other DNA
aaagttactatgatccctccatcgataaaatcctgaatccgctggatgcccgctgtgccgcatgggatttgtgga

SEQ ID NO: 770151 - DNA, 75 bp, synthetic construct
  source 1..75: mol_type = other DNA
cggcaaaacgtcggctgtttagttttcaggctggcgcactggcaggtgggcaaattgtttcacaagcagcgcgtc

SEQ ID NO: 770152 - DNA, 75 bp, synthetic construct
  source 1..75: mol_type = other DNA
gctgagtgtatttcacttggctgggacagcagccgccagacactggatgcgcaggtaatcagtggcgaaggcgaa

SEQ ID NO: 770153 - DNA, 75 bp, synthetic construct
  source 1..75: mol_type = other DNA
tagaactgacgccacaggcactgacagcgttaagtaatgccggttttgttaagcgcagccttaaggaactggaaa

SEQ ID NO: 770154 - DNA, 75 bp, synthetic construct
  source 1..75: mol_type = other DNA
cacggcaatggccacaaccggaaatgcagagcaacagaacacacagcaaataaggattgaacagatacaggaaga

SEQ ID NO: 770155 - DNA, 75 bp, synthetic construct
  source 1..75: mol_type = other DNA
cccggcacgctgttcatggtggaacaaatcacaccggaaagtgtgattctggaatacaacggcaacaagcagacg

SEQ ID NO: 770156 - DNA, 75 bp, synthetic construct
  source 1..75: mol_type = other DNA
agcgatgtacgtttttattcccgcagcagcattcgtttcgcacgctgtgattgtattgaaggcacactttgcgaa

SEQ ID NO: 770157 - DNA, 75 bp, synthetic construct
  source 1..75: mol_type = other DNA
gtatgcaatatcttggtgattctgaaaagataacgcatgcatgctccgtgatgagtcatattgattttgattgca

SEQ ID NO: 770158 - DNA, 75 bp, synthetic construct
  source 1..75: mol_type = other DNA
tattaatgaacagcgtttaaataaactaaatccaccggaaaatttacgtatagcaatagaacactttgggtggaa

SEQ ID NO: 770159 - DNA, 75 bp, synthetic construct
  source 1..75: mol_type = other DNA
cagaatttaaataattctcaggacttaaataactctaaggtgagttgtacagtttcagttgattctacgattacg

SEQ ID NO: 770160 - DNA, 75 bp, synthetic construct
  source 1..75: mol_type = other DNA
acttccgggttatgtcgttaagatttttgaagaaaagatcgataatgaattaaaaattagaacaagaatgatgga

SEQ ID NO: 770161 - DNA, 75 bp, synthetic construct
  source 1..75: mol_type = other DNA
gaataatgaattcaaacttagatttagaatgatgcaactatctttaaatcgaaggttaatgtatcgccatatatt

SEQ ID NO: 770162 - DNA, 75 bp, synthetic construct
  source 1..75: mol_type = other DNA
tgtatcttaatgagttaggatatgtttatggtgatgaagaaaaaacaaaagaaattgtaaataaacttccgggtt

SEQ ID NO: 770163 - DNA, 75 bp, synthetic construct
  source 1..75: mol_type = other DNA
tttcgtggatatttattggtgaagacacaggttaattgggtttattatggggatgtaaagaaagggttagaatag

SEQ ID NO: 770164 - DNA, 75 bp, synthetic construct
  source 1..75: mol_type = other DNA
gatgcacaggagagaatcagcgcacttcaggaagaaatggctgaaacgctgggtgagcaatatgacccggtactg

SEQ ID NO: 770165 - DNA, 75 bp, synthetic construct
  source 1..75: mol_type = other DNA
actggatgattgctaatattccggtaagtctgcgtgtgggcatcaccagcggtatcggcctgttcattggcatga

SEQ ID NO: 770166 - DNA, 75 bp, synthetic construct
  source 1..75: mol_type = other DNA
aagtctgcgtgtgggcattaccagcggtatcggtctgttcattggtatgatggggctgaaaaacgcgggggtgat

SEQ ID NO: 770167 - DNA, 75 bp, synthetic construct
  source 1..75: mol_type = other DNA
cgctttgagaccgcagtcggtggactgggcgggtgcccgtttgcgccaggggctgccggtaacgccgccaccgag

SEQ ID NO: 770168 - DNA, 75 bp, synthetic construct
  source 1..75: mol_type = other DNA
gcctgacctgctggatatcgcaaacctgatccgcagcacgattgagccgacgttgttgagcagtctttcacgtgc

SEQ ID NO: 770169 - DNA, 75 bp, synthetic construct
  source 1..75: mol_type = other DNA
catatgaagaaaggcaatatggacaaaatggacaaaatggacaaaatggacaaaatggacaagatgaaaaaggat

SEQ ID NO: 770170 - DNA, 75 bp, synthetic construct
  source 1..75: mol_type = other DNA
ttttcaagtggtaaccaaacacgtataaaacaaggattgaccgcaaaagcacctattgacggttggcattatggc

SEQ ID NO: 770171 - DNA, 75 bp, synthetic construct
  source 1..75: mol_type = other DNA
caaatcctgtctgaaggagaagggatgtacagatgccggaacggcagaagaacccgctgaaaacttcggtcaagt

SEQ ID NO: 770172 - DNA, 75 bp, synthetic construct
  source 1..75: mol_type = other DNA
cccctgattacctggacgccggaaaatccggaacatgggtatgttccgggccataccggtaacgacaggccgccg

SEQ ID NO: 770173 - DNA, 75 bp, synthetic construct
  source 1..75: mol_type = other DNA
ggtggatttggcgggttcttttaaccttgggctggctggcgtcattttctcctttatgctggtcaacctgtttga

SEQ ID NO: 770174 - DNA, 75 bp, synthetic construct
  source 1..75: mol_type = other DNA
taccggacgtctgcgtgatctaagcccgtgcgtaatcatcgttgcgctgctgtttatcctgaagattgtctttat

SEQ ID NO: 770175 - DNA, 75 bp, synthetic construct
  source 1..75: mol_type = other DNA
agaagggtaaattcccgcgcatgaagcaggcgctgtatgtcgacagtatctcttccgtgaccggttcgtttatcg

SEQ ID NO: 770176 - DNA, 75 bp, synthetic construct
  source 1..75: mol_type = other DNA
aaaaatcagcccaaacaggaagccactcccgcaatagctattccacaaagagtgttattaggggggggagcaatg

SEQ ID NO: 770177 - DNA, 75 bp, synthetic construct
  source 1..75: mol_type = other DNA
ttacgttccggtttcgctggatcagcctgccgcacggcgcgagaaaatctacgctgacgccagcgtccggctggt

SEQ ID NO: 770178 - DNA, 75 bp, synthetic construct
  source 1..75: mol_type = other DNA
aaccttactggaatggcgtcaccgttcatgatttacgccataacgacgctgaaagccgccaggactatctggacg

SEQ ID NO: 770179 - DNA, 75 bp, synthetic construct
  source 1..75: mol_type = other DNA
tacgactgggcagaaaacgcgcgtaaggatgaagtgaaattccagttgagtctggcgtttccgctgtggcggggg

SEQ ID NO: 770180 - DNA, 75 bp, synthetic construct
  source 1..75: mol_type = other DNA
ctgctgagctggcatcccggcgaaagctggctgcacagcgcgcagtcactacagcagcggctgagccagaacctc

SEQ ID NO: 770181 - DNA, 75 bp, synthetic construct
  source 1..75: mol_type = other DNA
cggggtggatggtgccgcaacggatcgtattcctcgacgccttaccgctgatggctaacgggaaaattgactacc

SEQ ID NO: 770182 - DNA, 75 bp, synthetic construct
  source 1..75: mol_type = other DNA
atccagccgcgctggcaggccgtggtggaacgctggttagcatttctggtgacacaacggcgactgaagcccgct

SEQ ID NO: 770183 - DNA, 75 bp, synthetic construct
  source 1..75: mol_type = other DNA
tcttcaccgtttcgtgaaactaactacgaaccgcaattgttcctcggttttgccacggattacaactttgctggc

SEQ ID NO: 770184 - DNA, 75 bp, synthetic construct
  source 1..75: mol_type = other DNA
cggagctgaaacaggcactgttgagcggaatctcttttgccgtaccgttgattgtcgcggggggcacggtgctgg

SEQ ID NO: 770185 - DNA, 75 bp, synthetic construct
  source 1..75: mol_type = other DNA
gacgcccttcgctgggccggtgatcctgagcttgcaaagcaattcgatgccgagggggaagaacatgcaaattcg

SEQ ID NO: 770186 - DNA, 75 bp, synthetic construct
  source 1..75: mol_type = other DNA
cccagctttacagcggttacggcgaatcgctcatcgactataacttcaaccagacccgcgtcggtgcgggggtta

SEQ ID NO: 770187 - DNA, 75 bp, synthetic construct
  source 1..75: mol_type = other DNA
ggtgaagccgtggtatgtggtggggaatacggacgataacccggacatcaccaaatatatgggctattaccagct

SEQ ID NO: 770188 - DNA, 75 bp, synthetic construct
  source 1..75: mol_type = other DNA
accctttatccgtatgacaccaactacgtgatctacacccaaaccagcgatatgaacaaggaagcgatcgcgagt

SEQ ID NO: 770189 - DNA, 75 bp, synthetic construct
  source 1..75: mol_type = other DNA
acaacaaagaaaatctacctaccgataccgcaccttgttttacaattggtattcctgatgaatatactaaagcca

SEQ ID NO: 770190 - DNA, 75 bp, synthetic construct
  source 1..75: mol_type = other DNA
cgtaacaactggcgtgttgagaaccaggggatgttaggtatcaagaaggagccttttggcaaagagataatcaaa

SEQ ID NO: 770191 - DNA, 75 bp, synthetic construct
  source 1..75: mol_type = other DNA
atgagcaatcttacttatcttcagggctatcccgagcagctactttcccaggtgcgcacgctaattaatgaacag

SEQ ID NO: 770192 - DNA, 75 bp, synthetic construct
  source 1..75: mol_type = other DNA
gtttctgcgtaatgccccgccgatcaataaagtgatgtatgacaataagatccatgtgctaaaaaacgcgctcgg

SEQ ID NO: 770193 - DNA, 75 bp, synthetic construct
  source 1..75: mol_type = other DNA
gaaaagtattattattattagatacagatcacaaatatagtccatatgatgctacagatacaataccaagtataa

SEQ ID NO: 770194 - DNA, 75 bp, synthetic construct
  source 1..75: mol_type = other DNA
aaagttactgatgatcgagtttatccacctacagaaattgagcagtctcttaatgctgatttctacgtagaaact

SEQ ID NO: 770195 - DNA, 75 bp, synthetic construct
  source 1..75: mol_type = other DNA
gatgacgatctggatgacgacgaaattgagatagaggaagaggaagaggaagaggaagaggaagagagcgtagaa

SEQ ID NO: 770196 - DNA, 75 bp, synthetic construct
  source 1..75: mol_type = other DNA
gggtaaagagccgctgcatatgccaacccaggcgcaggaagtgtatgacgtcaccggtgcgggcgatacggtgat

SEQ ID NO: 770197 - DNA, 75 bp, synthetic construct
  source 1..75: mol_type = other DNA
gatacaggctttggcgtgatgaccgaagaggaactgaagctggccgtagcggcagcgcgtaaacgtggtgaaaaa

SEQ ID NO: 770198 - DNA, 75 bp, synthetic construct
  source 1..75: mol_type = other DNA
cagcgtttcctaactcgtttgaagagcgcttgcgggcttacgacgaggataaaaagtttattttcgaaaaagaag

SEQ ID NO: 770199 - DNA, 75 bp, synthetic construct
  source 1..75: mol_type = other DNA
tcccaggtgcgaacgctgattaacgaacagcgtctgggcgatgtgctggcaaaacgctatccgggaacacacgac

SEQ ID NO: 770200 - DNA, 75 bp, synthetic construct
  source 1..75: mol_type = other DNA
gttatcccgagcagctactttcccaggtgcgaacgctgattaacgaacagcgtctgggcgatgtgctggcaaaac

SEQ ID NO: 770201 - DNA, 75 bp, synthetic construct
  source 1..75: mol_type = other DNA
ctgcctttcctgatgtttttgagagtaggctaagagctttcgacacaaagaaatttagattcgaaaaacaactcg

SEQ ID NO: 770202 - DNA, 75 bp, synthetic construct
  source 1..75: mol_type = other DNA
tatattgacaatatcaatagggatacacctgtccacaatcttagttctggtgaaaaaaggaaggcattacttgat

SEQ ID NO: 770203 - DNA, 75 bp, synthetic construct
  source 1..75: mol_type = other DNA
atgcggacacagtggccctctccggcaaaacttaatctgtttttatacattaccggtcagcgtgcggacggttac

SEQ ID NO: 770204 - DNA, 75 bp, synthetic construct
  source 1..75: mol_type = other DNA
cggctatcccgtcgctggattcgctgaatattgaaccggaactgaaagcggcgctgctgccacaacaggggctgg

SEQ ID NO: 770205 - DNA, 75 bp, synthetic construct
  source 1..75: mol_type = other DNA
cgacagcccgccccgtcagggggacgcccggaaaaggcataagcaggagaacaacaaaacagacagtaatcagag

SEQ ID NO: 770206 - DNA, 75 bp, synthetic construct
  source 1..75: mol_type = other DNA
tgcgtggcagtattatcgccaatatgctgcaggagcatgacaatccgttcacgctctatccttatgacaccaact

SEQ ID NO: 770207 - DNA, 75 bp, synthetic construct
  source 1..75: mol_type = other DNA
ggaactggcacggctggcgcgtggtcgcgtgctggtgctggcgcacgtcaaagagctggtggcgcaaaaccatgc

SEQ ID NO: 770208 - DNA, 75 bp, synthetic construct
  source 1..75: mol_type = other DNA
gctgaatcatctctggcaatgcggcctgagcatcgatgagctagcggaaatgggtctgacgctgggcgcagatgt

SEQ ID NO: 770209 - DNA, 75 bp, synthetic construct
  source 1..75: mol_type = other DNA
ataaaacccgcttttttgttcgtgctggcgtggcgtaccagtatcacgaatgcggatatattgaggcgcttgctt

SEQ ID NO: 770210 - DNA, 75 bp, synthetic construct
  source 1..75: mol_type = other DNA
gcgcaaaccaacacgcgacgagcgccacgctatccgggactttttaatcagtattgagcgctgggggacagatta

SEQ ID NO: 770211 - DNA, 75 bp, synthetic construct
  source 1..75: mol_type = other DNA
cgtaagcgcaagccaacgcgtgacgaacgacacgctatccgggactttttaatcagcatagaccgctgggaggca

SEQ ID NO: 770212 - DNA, 75 bp, synthetic construct
  source 1..75: mol_type = other DNA
cgagatgaggttgagcaatatttttctctacacgatgttggttttagcaaaattgaagttttttccgtcgaaaat

SEQ ID NO: 770213 - DNA, 75 bp, synthetic construct
  source 1..75: mol_type = other DNA
gcatcagtgaactgaaggcctcagcttcgctgtggttgtggtatgaactggccattcatggtgcgccacagaaca

SEQ ID NO: 770214 - DNA, 75 bp, synthetic construct
  source 1..75: mol_type = other DNA
atggataaagaaagggggttttcactcagctatgagcaactgaccagaatagcggaaaaaaatatccgtcaatgt

SEQ ID NO: 770215 - DNA, 75 bp, synthetic construct
  source 1..75: mol_type = other DNA
attggtcgtaccgttcactgctgtgaattgcaggatatcctgcaaaaccaatacagtgcactgatcaccaatatc

SEQ ID NO: 770216 - DNA, 75 bp, synthetic construct
  source 1..75: mol_type = other DNA
gttctacccggaatggctggagcgtggtaaaggtgcggtgaactacctgagcgtgccggaattcccgaccgacag

SEQ ID NO: 770217 - DNA, 75 bp, synthetic construct
  source 1..75: mol_type = other DNA
ccgaataaaccgctggaagtggtgcgtaccattcactcctttgacccgtgcatggcctgtgcggtacacgtagtg

SEQ ID NO: 770218 - DNA, 75 bp, synthetic construct
  source 1..75: mol_type = other DNA
ttacgagcagtcgctggtggggacaccggttgccgatccgaataaaccgctggaagtggtgcgtaccattcactc

SEQ ID NO: 770219 - DNA, 75 bp, synthetic construct
  source 1..75: mol_type = other DNA
tgaagccgaacattccggcaacgggtgagttcaaaggcgttggcttcctcgaagcgccgcgcggtatgctctctc

SEQ ID NO: 770220 - DNA, 75 bp, synthetic construct
  source 1..75: mol_type = other DNA
ccggttgctgatccgaataaaccgctggaagtggtgcgtaccattcactccttcgacccgtgcatggcctgtgcg

SEQ ID NO: 770221 - DNA, 75 bp, synthetic construct
  source 1..75: mol_type = other DNA
gaaggtaacctgggagcaggtggtcggtgtgacctgttttggtggggcaacatggcagctgagaccgactgtaca

SEQ ID NO: 770222 - DNA, 75 bp, synthetic construct
  source 1..75: mol_type = other DNA
cgctctggcgctgcatcaggctcagtcggtacaaatttatggcgtagcggccagcgctattctgggagagtattt

SEQ ID NO: 770223 - DNA, 75 bp, synthetic construct
  source 1..75: mol_type = other DNA
tgagactgcgccagagcgttgatggatatagtcgaacgcaacagaaactgggagagtttgtacttagcgatccgg

SEQ ID NO: 770224 - DNA, 75 bp, synthetic construct
  source 1..75: mol_type = other DNA
gttttatccggaatggctggagcgcggtaaaggcgcggtgaactacctgagcgtgccggaattcccgaccgacag

SEQ ID NO: 770225 - DNA, 75 bp, synthetic construct
  source 1..75: mol_type = other DNA
cgcgatgcatggatgattgtgcaacgtatctgtggcgtatgtactaccactcacgcgctgtcttccgttcgtgcg

SEQ ID NO: 770226 - DNA, 75 bp, synthetic construct
  source 1..75: mol_type = other DNA
tcgatgccctcactcgcggaggatgcatcaaaaccttttaccgcatatcctcacggcaggctgctgaatcggcca

SEQ ID NO: 770227 - DNA, 75 bp, synthetic construct
  source 1..75: mol_type = other DNA
taaatattgaattgacacatatcgcagcgacacatactgccggaatattattgtgcacgttatgtttactgcaat

SEQ ID NO: 770228 - DNA, 75 bp, synthetic construct
  source 1..75: mol_type = other DNA
atgttttccgctggtgccatttgcaaaccgggtgagcggcaatcgttttgtctggcagggcgtgagtatcaactg

SEQ ID NO: 770229 - DNA, 75 bp, synthetic construct
  source 1..75: mol_type = other DNA
cggatgaccatcatcgcccggaaggggggacctcattgcgcttgcgccgggggaatcaacaacctcagagatgtc

SEQ ID NO: 770230 - DNA, 75 bp, synthetic construct
  source 1..75: mol_type = other DNA
tgaagaaagtatgcagatatattaatctgacgctgattgcgtgggcgagaaagaaatataaaaccctgcggtata

SEQ ID NO: 770231 - DNA, 75 bp, synthetic construct
  source 1..75: mol_type = other DNA
gtcctggtaaaaaaaacggtgtggcaaccgatgcctcctgttttccgctggtgccgtttgcaaaccgggtgagcg

SEQ ID NO: 770232 - DNA, 75 bp, synthetic construct
  source 1..75: mol_type = other DNA
ccaatcaaggggcagaatctttgccgtttggtacgggctggcatccttattttccgttgtcgccgcaaacgcgga

SEQ ID NO: 770233 - DNA, 75 bp, synthetic construct
  source 1..75: mol_type = other DNA
atttggtaccggctggcatccttattttccgttgtcaccacaaacgcggattcaggcgcaggcgagcggttactg

SEQ ID NO: 770234 - DNA, 75 bp, synthetic construct
  source 1..75: mol_type = other DNA
gctgttcagtatcagatgggaccgatccgcctgaatgtggcgttacagatcctggccggtccggcctggcagttg

SEQ ID NO: 770235 - DNA, 75 bp, synthetic construct
  source 1..75: mol_type = other DNA
aggacttggagcagcaatcgaaagcgcagcagcagagtaccggcgagatgctgaaagccgcattcagcgagcacg

SEQ ID NO: 770236 - DNA, 75 bp, synthetic construct
  source 1..75: mol_type = other DNA
cgcaagcgcgaggagaatcagcgacgccatcctcgcccacgagcagagtatgagcgaggcgatggagaaaaaccg

SEQ ID NO: 770237 - DNA, 75 bp, synthetic construct
  source 1..75: mol_type = other DNA
tcgggcagtctgcatcacagcccaactgtaggcaggaggaggctgtgtgtgaacagacaaaaccgtttcaggtca

SEQ ID NO: 770238 - DNA, 75 bp, synthetic construct
  source 1..75: mol_type = other DNA
aatccccgatgatgtatctctcaatgcttctgcaaatcaatattctgcgggtatttactggcgcggtagtggatg

SEQ ID NO: 770239 - DNA, 75 bp, synthetic construct
  source 1..75: mol_type = other DNA
ttcccctggttaccctggccctgctggccgggtgtaacagcccacaaaaacttcagcaacgtgcgccggccatgc

SEQ ID NO: 770240 - DNA, 75 bp, synthetic construct
  source 1..75: mol_type = other DNA
tctgagtacggaatataaagatgtggtctcattcgccctgctgatcctggtgctgctggtgatgccgaccggtat

SEQ ID NO: 770241 - DNA, 75 bp, synthetic construct
  source 1..75: mol_type = other DNA
gcaacaaagtgcgttagacaaaattctgagcgcgctgtgccagcaagggctagcgattgtgatgagcagtcacga

SEQ ID NO: 770242 - DNA, 75 bp, synthetic construct
  source 1..75: mol_type = other DNA
atgtggcggaatcaacccgtctggggccgctttctggcgaggttcgggcaggggagatcttacatcttgtggggc

SEQ ID NO: 770243 - DNA, 75 bp, synthetic construct
  source 1..75: mol_type = other DNA
ataccggaaaggtaaccctgttccggccagagagaggcaaagagcttctctggctcgcagaagcaacactcataa

SEQ ID NO: 770244 - DNA, 75 bp, synthetic construct
  source 1..75: mol_type = other DNA
aagcggtgaacgaagcattgagtggcagcgtggcgtgggatggtaaagtgggcattgatctgccttatcatgctg

SEQ ID NO: 770245 - DNA, 75 bp, synthetic construct
  source 1..75: mol_type = other DNA
ttgaactggactttattaacgacggtttatggatgaaaaccgatggcgttaatctgggcggcgtgcgcgcgagta

SEQ ID NO: 770246 - DNA, 75 bp, synthetic construct
  source 1..75: mol_type = other DNA
attacgatttacactggcgtaaagcgccctggttgccggatgcggcgacgttgaatggcattatccatactcaat

SEQ ID NO: 770247 - DNA, 75 bp, synthetic construct
  source 1..75: mol_type = other DNA
ttcgcccgcctgaacggcgcgcttcgcccgcctgaacggcgcgctggacagcacgcgctggcatcggctgaaaaa

SEQ ID NO: 770248 - DNA, 75 bp, synthetic construct
  source 1..75: mol_type = other DNA
ttggcggcgtgggttgccacctgtatcctgtatcaggagtttgaaggccattgtctgacggcgtcgcagctggag

SEQ ID NO: 770249 - DNA, 75 bp, synthetic construct
  source 1..75: mol_type = other DNA
aaaacgggcggctgacgcccatctcaccccgtcggccgtactgttgtcagtgtggtcaacggttctctctgcatg

SEQ ID NO: 770250 - DNA, 75 bp, synthetic construct
  source 1..75: mol_type = other DNA
tgtgtgcagaggaaggggtaactcaggcagagttgatagaaaggcttatcgagaaagaggcctgttacaggaaca

SEQ ID NO: 770251 - DNA, 75 bp, synthetic construct
  source 1..75: mol_type = other DNA
taaaacgccacggctttcacgttttgcatttagcgatgatccaaaatgggagtctggacatcacgttcatgacaa

SEQ ID NO: 770252 - DNA, 75 bp, synthetic construct
  source 1..75: mol_type = other DNA
cgcgccgtcgtgcgtgatggacagcaacaggtgctcgcacagacgcctcgctgggtaatacccgcacacatcctc

SEQ ID NO: 770253 - DNA, 75 bp, synthetic construct
  source 1..75: mol_type = other DNA
gcgacgtctggctgaaacagggcggcgcaagctggttgggtgagaagaaaacgcattcgctgtcggtggataatc

SEQ ID NO: 770254 - DNA, 75 bp, synthetic construct
  source 1..75: mol_type = other DNA
cggaacgcattaacttccgtggctggccggacgcacaaatacgatgcgcagagtgctggttctgggggcaaaaat

SEQ ID NO: 770255 - DNA, 75 bp, synthetic construct
  source 1..75: mol_type = other DNA
ggttctattttgactccattcgcagcaccgcgtggattaaagacggcgttatgcacaccgacgacacgctggtgg

SEQ ID NO: 770256 - DNA, 75 bp, synthetic construct
  source 1..75: mol_type = other DNA
agtttcccacaacacataacgttacgtacgcctatgttgtcgctgggaaatcagcaatggaataacctgagtatt

SEQ ID NO: 770257 - DNA, 75 bp, synthetic construct
  source 1..75: mol_type = other DNA
gcgttaaaagcgcaattgcaggaaatgtgtgaagctgagggcgttacccaggctgagatgattgccgaactgata

SEQ ID NO: 770258 - DNA, 75 bp, synthetic construct
  source 1..75: mol_type = other DNA
tgcaagctggctgggcgagaaaaaaacgcattcgctgtcggtggataatctgaccgcgcacataacgcgcgaaca

SEQ ID NO: 770259 - DNA, 75 bp, synthetic construct
  source 1..75: mol_type = other DNA
cgcgaaagagaagttactgatcgatgctgacattaaaggcccaggtaaagctgtcggtccatattttgatgaaac

SEQ ID NO: 770260 - DNA, 75 bp, synthetic construct
  source 1..75: mol_type = other DNA
gaaaacttgatgggtaaagacctggttgattacttaagtggcgcgattcagggcggtgaagcggataacgcgacg

SEQ ID NO: 770261 - DNA, 75 bp, synthetic construct
  source 1..75: mol_type = other DNA
actttcacctgcactgggtgatgtttggcgctccacacaaccgagcggcaagattaacactctggcgctggatat

SEQ ID NO: 770262 - DNA, 75 bp, synthetic construct
  source 1..75: mol_type = other DNA
gatactcgtatcactatggacggcaaaccctggccaagcggggcattgacgctggcctggataccggaacaggac

SEQ ID NO: 770263 - DNA, 75 bp, synthetic construct
  source 1..75: mol_type = other DNA
accctgcaagaactccagctcgacggcgatgtgaatgctcgcttacatcttgatatcccgctgaacggcgagctg

SEQ ID NO: 770264 - DNA, 75 bp, synthetic construct
  source 1..75: mol_type = other DNA
tcgcatttctggtccgctggatgctccgcaaatcaacgaagtgttgcgtcagccgcgtaaagaaaaagcgcaatg

SEQ ID NO: 770265 - DNA, 75 bp, synthetic construct
  source 1..75: mol_type = other DNA
aaggggcgaaagcctaccaggttgcggtgaatctcaacggcaactggcaaccagcgaaaactggcgttctgcctg

SEQ ID NO: 770266 - DNA, 75 bp, synthetic construct
  source 1..75: mol_type = other DNA
tttgtggcgcagggggcttaacttttgggctaaaaaaagccgggattgaagtttctcatggcattgatattgatg

SEQ ID NO: 770267 - DNA, 75 bp, synthetic construct
  source 1..75: mol_type = other DNA
cacccagagaagaaagaggggcgttcggtcgctgttgcaaaagaaatcgataaattaggggatattgtattgggg

SEQ ID NO: 770268 - DNA, 75 bp, synthetic construct
  source 1..75: mol_type = other DNA
tttttagcaaaagatgagcttgaaactatacgcaagaaattttctgagaaagaatatgctgtgtgtatattggca

SEQ ID NO: 770269 - DNA, 75 bp, synthetic construct
  source 1..75: mol_type = other DNA
ctggcattgatgcgttaacccatgccattgaagcgtacagcgcgctgaacgctacaccgtttaccgacagcctgg

SEQ ID NO: 770270 - DNA, 75 bp, synthetic construct
  source 1..75: mol_type = other DNA
tacggcgttcgctgtcacagattggcggcgatgcgctgaatcgttttgagtctggcatctatggtcataaggatc

SEQ ID NO: 770271 - DNA, 75 bp, synthetic construct
  source 1..75: mol_type = other DNA
tatatcggcagccaggtgtcatgggaatggccgctgtacgaaaaaatcgcagcagcattcagacaggccagccgg

SEQ ID NO: 770272 - DNA, 75 bp, synthetic construct
  source 1..75: mol_type = other DNA
ttgagctttgacctgtcggtttacgatgcctttgcgccttttatggtgggtgcagcgctggtactgccggaagca

SEQ ID NO: 770273 - DNA, 75 bp, synthetic construct
  source 1..75: mol_type = other DNA
gggaacctgtcgcatggatcaataactcgcttaccgcctggctgaacggtctgtcaggaaataacgcactgttgt

SEQ ID NO: 770274 - DNA, 75 bp, synthetic construct
  source 1..75: mol_type = other DNA
cgggattttgatggtaccggtgctcgcagcctataccgcctattcactggctgataaaccggcgttagcgccagg

SEQ ID NO: 770275 - DNA, 75 bp, synthetic construct
  source 1..75: mol_type = other DNA
tgggtccaatccaggtggacagtgcgttacaacagcggctggtggcgctctggcaggaggtactcggcgtgagcc

SEQ ID NO: 770276 - DNA, 75 bp, synthetic construct
  source 1..75: mol_type = other DNA
atgatcaccacgccagcttcttcgaactgggggggcattcgctgttagcgtcaaccattttatatgatattcagc

SEQ ID NO: 770277 - DNA, 75 bp, synthetic construct
  source 1..75: mol_type = other DNA
cgaggccgtacggcctgccacgttctcccacgaatcgtcgaataatctcttatcccgcgcaacaaaatccgatat

SEQ ID NO: 770278 - DNA, 75 bp, synthetic construct
  source 1..75: mol_type = other DNA
acaaacaagaaaactgacgagcgcgaggtaattagcgtgataagcgagctgattgcggaagttgggatcaacaag

SEQ ID NO: 770279 - DNA, 75 bp, synthetic construct
  source 1..75: mol_type = other DNA
taaacagggcttcttcggtcgtatgatgagccgtgccggtggtctgctttcggctgccggaagccgcatggggtt

SEQ ID NO: 770280 - DNA, 75 bp, synthetic construct
  source 1..75: mol_type = other DNA
ggcggggatgtggtggtcagcggtgacggcaaaaccgtgcgcagccgtaaaaaacgcggccccggacgtgggcgg

SEQ ID NO: 770281 - DNA, 75 bp, synthetic construct
  source 1..75: mol_type = other DNA
gccagagtatccaggcagcggacgccaatattctgaccggatacgggattaacatttaccagttactggccgata

SEQ ID NO: 770282 - DNA, 75 bp, synthetic construct
  source 1..75: mol_type = other DNA
ttatctggggggctggctgacgcaggcctggcagaaactgcgtggcagcagtgacgaaaacggcggacaggccac

SEQ ID NO: 770283 - DNA, 75 bp, synthetic construct
  source 1..75: mol_type = other DNA
cttaccggggtaaatccggctgccgttcagcccgtgctggtcaccaactggcctgcgggtggcctggcctcaggt

SEQ ID NO: 770284 - DNA, 75 bp, synthetic construct
  source 1..75: mol_type = other DNA
ccgtgagaaaggcgaaaaaggaaaactggggccggacagcattcgcctgttatttcaggtgatggccgaacaggc

SEQ ID NO: 770285 - DNA, 75 bp, synthetic construct
  source 1..75: mol_type = other DNA
ggtgctcgatgcggcgaaagccgtggcgttgctggtgacgaaccccgatagcacgctggcagagatgtcagaaac

SEQ ID NO: 770286 - DNA, 75 bp, synthetic construct
  source 1..75: mol_type = other DNA
gggtgattgcgtttggcggcggctcggtgctggatgcagcaaaagccgtggcgttgctggtgacgaaccccgata

SEQ ID NO: 770287 - DNA, 75 bp, synthetic construct
  source 1..75: mol_type = other DNA
gtgggcgagagaaagcggaggggctatattcaaaatgaattgcagaccgcgctctttcaggcgttcgataccctg

SEQ ID NO: 770288 - DNA, 75 bp, synthetic construct
  source 1..75: mol_type = other DNA
cgaagttatatcaccatgcttgaggatcagggggcacttcagcgatggtctcttgaccgtgctcagggtgcttcc

SEQ ID NO: 770289 - DNA, 75 bp, synthetic construct
  source 1..75: mol_type = other DNA
cgcgatggcgcatccgccagtggcgcggtgcaattgccggatgcgacgcttgccgcgtcttatccagcctacggg

SEQ ID NO: 770290 - DNA, 75 bp, synthetic construct
  source 1..75: mol_type = other DNA
gcatcgacgcgttaacccatgccattgaagcgtatagcgcactgaacgccacaccgtttaccgacagtctggcga

SEQ ID NO: 770291 - DNA, 75 bp, synthetic construct
  source 1..75: mol_type = other DNA
cactcatacccctactgctcacccatcagatagccaatcacttagatgtgcagcacccgcttgtcaggggagtca

SEQ ID NO: 770292 - DNA, 75 bp, synthetic construct
  source 1..75: mol_type = other DNA
aggcagcttagcgcttacaggatgtgacgacaaacaggcccaacaaggtggccagcagatgcccgctgttggggt

SEQ ID NO: 770293 - DNA, 75 bp, synthetic construct
  source 1..75: mol_type = other DNA
gtaggcgcggatgacaaagtggaaactcgcccgatcgtcgcaagccaggctattggcgataagtggttggtaacg

SEQ ID NO: 770294 - DNA, 75 bp, synthetic construct
  source 1..75: mol_type = other DNA
aggcagcttagccctaacaggatgtgacgacaagcaggcccaacaaggtggccagcagatgcccgccgttggcgt

SEQ ID NO: 770295 - DNA, 75 bp, synthetic construct
  source 1..75: mol_type = other DNA
ctacgtaatcccccttctggcattacaccgttgccgttatttgagggagataaagccgcgcttaccgccgcatta

SEQ ID NO: 770296 - DNA, 75 bp, synthetic construct
  source 1..75: mol_type = other DNA
ggcgctatgagatccacgacatagaaggccgcgttgatccgacactgggaaagcggttaaaagcagatggggatg

SEQ ID NO: 770297 - DNA, 75 bp, synthetic construct
  source 1..75: mol_type = other DNA
gcgtcctggtgtccaggtgaaagcacaagagataaccgctgataacaaccagcaagacgcaagcggtgctcagcc

SEQ ID NO: 770298 - DNA, 75 bp, synthetic construct
  source 1..75: mol_type = other DNA
ttaatgcggtttattatggggagtggatgtttgaacatgaaattaaggtagatacggaaaccaatgttatctcaa

SEQ ID NO: 770299 - DNA, 75 bp, synthetic construct
  source 1..75: mol_type = other DNA
acccaggttaatgcggtttattatggaggggatataattacagattactcccgttatcattgttctatagaatga

SEQ ID NO: 770300 - DNA, 75 bp, synthetic construct
  source 1..75: mol_type = other DNA
ttaattgggtttattatggggatgtaaagaaagggttagaatggattgtaaggacagatttttcttacatcaaaa

SEQ ID NO: 770301 - DNA, 75 bp, synthetic construct
  source 1..75: mol_type = other DNA
taaatataatattaataatggtaataatcttttcattacacaaacaatgcacactactcaaattaaaaaccatta

SEQ ID NO: 770302 - DNA, 75 bp, synthetic construct
  source 1..75: mol_type = other DNA
gggtatttattggtgaagacgcaggttaatggggtttattatggggatagagtaagaaaacaaataaaagtaaaa

SEQ ID NO: 770303 - DNA, 75 bp, synthetic construct
  source 1..75: mol_type = other DNA
taacgctgtgaatgttgtattcaacggcggggatcgtttttactgccgccatcgacaatacctggcttactacca

SEQ ID NO: 770304 - DNA, 75 bp, synthetic construct
  source 1..75: mol_type = other DNA
agccaatcgccgtgggatgcggttgggcaactagaaacggccagcggcaatttgtgtacggcgacgctaattgcg

SEQ ID NO: 770305 - DNA, 75 bp, synthetic construct
  source 1..75: mol_type = other DNA
ttcaggtcaataccaccttctaccaatttacgtaccgtttgtggcgtacggcaaatcaggaagatcttctgatgc

SEQ ID NO: 770306 - DNA, 75 bp, synthetic construct
  source 1..75: mol_type = other DNA
tcttcccatccttcagcgccaccgataatggcggtgatcgtcagaaaaaggatatccgccaggctgtaactggtt

SEQ ID NO: 770307 - DNA, 75 bp, synthetic construct
  source 1..75: mol_type = other DNA
agggaaagatcatcagaagttcactttttgggtaatgactccaacttactgatagtgttttatgttcagataatg

SEQ ID NO: 770308 - DNA, 75 bp, synthetic construct
  source 1..75: mol_type = other DNA
tgctttcccggttaatgtcactattccaagcagagaatgatagtgagttggcaagagcgcttaacgtcaataggc

SEQ ID NO: 770309 - DNA, 75 bp, synthetic construct
  source 1..75: mol_type = other DNA
aagcactgaccctcgagcgtagcggtgagacgcgtaccgtacagcaagatacgcaaccggcgaaaagcgtcaaaa

SEQ ID NO: 770310 - DNA, 75 bp, synthetic construct
  source 1..75: mol_type = other DNA
ggcacccgtgaccgtcggggatggtggggagacagtttccgggagcgccccattggctcccgtctctggctgtta

SEQ ID NO: 770311 - DNA, 75 bp, synthetic construct
  source 1..75: mol_type = other DNA
aatgcacatcgatagcgacggtaatgactccaacttattgatagtgttttatgttcagataatgcccgatgactt

SEQ ID NO: 770312 - DNA, 75 bp, synthetic construct
  source 1..75: mol_type = other DNA
ccgaacctggcattaacggcaggacactgtttattaacgccgccgaagggcaaagcggataaagcagttgcgttg

SEQ ID NO: 770313 - DNA, 75 bp, synthetic construct
  source 1..75: mol_type = other DNA
tattgtaaaaacggccccgttagaagttaagactgaattaccaggccgcaccaatgcttatcgtatagccgaagt

SEQ ID NO: 770314 - DNA, 75 bp, synthetic construct
  source 1..75: mol_type = other DNA
caatgctcacacaggctacgccttacacaactactgttcataaacacgggcgttatagggtcatcgctggtgatg

SEQ ID NO: 770315 - DNA, 75 bp, synthetic construct
  source 1..75: mol_type = other DNA
ctacgccttttctgcggcaggagaagaagcaggtaatgactccaacttattgatagtgttttatgttcagataat

SEQ ID NO: 770316 - DNA, 75 bp, synthetic construct
  source 1..75: mol_type = other DNA
gattgaggggatcaccttcgcaggtgaagatccggacaacaacgccgaaagcggacagccgcaacccgaagcata

SEQ ID NO: 770317 - DNA, 75 bp, synthetic construct
  source 1..75: mol_type = other DNA
aacgcctcagcacttaatagtattttattaactatatctgaaccattaaatattgaaattacccttgataaaata

SEQ ID NO: 770318 - DNA, 75 bp, synthetic construct
  source 1..75: mol_type = other DNA
tgctgtttactgtcgccgcaattgccgggcctgccgttcccatgcaggcgctggatgaagcccggttgctgccag

SEQ ID NO: 770319 - DNA, 75 bp, synthetic construct
  source 1..75: mol_type = other DNA
ggcgcagcaggcgtcgcttaacaatatcccggtatctgcactggtatcgcgatttaccgtggaacccgcggtgca

SEQ ID NO: 770320 - DNA, 75 bp, synthetic construct
  source 1..75: mol_type = other DNA
accggcatcactccacgagctggcggcacgccagtacgcctgcgagcaggtcaactacgacacatttatcagcta

SEQ ID NO: 770321 - DNA, 75 bp, synthetic construct
  source 1..75: mol_type = other DNA
attggcttcaacggcgagtcgcatgcactgatttcagatcgcgcagctaaccctctcctgcaggacgtcaacccc

SEQ ID NO: 770322 - DNA, 75 bp, synthetic construct
  source 1..75: mol_type = other DNA
gacgatggatttgatgaatccgtgttccgtgagtgggtggttacaccagagcgcccgctcagggagtggttttaa

SEQ ID NO: 770323 - DNA, 75 bp, synthetic construct
  source 1..75: mol_type = other DNA
ggacctgcatcacgaattaacaaaaaacctgacggcggacgaagtgacaacgcttgagcatttgcttaagaaaat

SEQ ID NO: 770324 - DNA, 75 bp, synthetic construct
  source 1..75: mol_type = other DNA
ttgaaaggttgccgaacccgaatgataagcgcggcgtactggtaaaacttaccaccagcggcgcggcaatatgtg

SEQ ID NO: 770325 - DNA, 75 bp, synthetic construct
  source 1..75: mol_type = other DNA
gccgacgatatggcaaaacatctgcccatcaccgcgtatccggtgctgatcaccgacaaggggctggcacagtga

SEQ ID NO: 770326 - DNA, 75 bp, synthetic construct
  source 1..75: mol_type = other DNA
aagggtactttgttaatattcgtcttcttgacgatggctttgatgaatccgtgttccgtgagtgggtggttacac

SEQ ID NO: 770327 - DNA, 75 bp, synthetic construct
  source 1..75: mol_type = other DNA
ccgcacaggttcgctgaacattgcgcgtaaaacaccgatcgtgatgggcatgttgctatcaatggtgatggtgtt

SEQ ID NO: 770328 - DNA, 75 bp, synthetic construct
  source 1..75: mol_type = other DNA
ttcgtatccgaagcttgatgcctggtcggcacaccctgattttcagtcccgcatcagcgcacagattgcccgaca

SEQ ID NO: 770329 - DNA, 75 bp, synthetic construct
  source 1..75: mol_type = other DNA
atgctgcgacagcactttgcgaatgataagagttgcctcggtgacattatgactataagtaagcaaaaaaatggc

SEQ ID NO: 770330 - DNA, 75 bp, synthetic construct
  source 1..75: mol_type = other DNA
caaagcttcaaatcgtatgtaatgggcttggtgacccgattgcatctcgccttaccgcgaaagactgggctcatt

SEQ ID NO: 770331 - DNA, 75 bp, synthetic construct
  source 1..75: mol_type = other DNA
gaaaatggttgtgcgagtgttacccgaacgggcgtgacggcaagcgcgtgcgcaagcaatttgcgacaaagggcg

SEQ ID NO: 770332 - DNA, 75 bp, synthetic construct
  source 1..75: mol_type = other DNA
cagcgtcgttcctctacgccctcggctggacgcaacactccattggtgcgcaaaacattcgtacgatggcgatga

SEQ ID NO: 770333 - DNA, 75 bp, synthetic construct
  source 1..75: mol_type = other DNA
atacaaaatcacatacaccaacacgaaaggcagaaaaaaccgcaccgttccaattagcaaagagctctatgattc

SEQ ID NO: 770334 - DNA, 75 bp, synthetic construct
  source 1..75: mol_type = other DNA
cattggcagggcttccaacatttaaaattgctgaaggtgaattggcattcctatctcaggaggaaattaaacgcc

SEQ ID NO: 770335 - DNA, 75 bp, synthetic construct
  source 1..75: mol_type = other DNA
ctcgccgtcggctgatggggatccacgttcgtcaggggcgcaaccaggttcccggcgaagaagaggaagccgcgc

SEQ ID NO: 770336 - DNA, 75 bp, synthetic construct
  source 1..75: mol_type = other DNA
ttttgtcacaggtgatacaggccctgaaggacggcaatgtccgctattgcgaagcgctgggctttgaccgtgagg

SEQ ID NO: 770337 - DNA, 75 bp, synthetic construct
  source 1..75: mol_type = other DNA
aggagatcctcgccgcactgggtacaggtgatgcgctggcgtcgaaatatcgccgtcagttgtatgcgttgttgt

SEQ ID NO: 770338 - DNA, 75 bp, synthetic construct
  source 1..75: mol_type = other DNA
gacgcctatcagaattaattgagctgtggtattccctatatggtcaaacactcgcagaccccaagcgcctcatgg

SEQ ID NO: 770339 - DNA, 75 bp, synthetic construct
  source 1..75: mol_type = other DNA
ttaatcttgagcagcgtaacctgtcatcggtgttcggtacattgaaaaaactagggcactggtccgcaccaaacc

SEQ ID NO: 770340 - DNA, 75 bp, synthetic construct
  source 1..75: mol_type = other DNA
atgtcgccagttaagccccgtactgtaaaccttgaacaacgcaacctatcatcagtttttggcacactgaagaag

SEQ ID NO: 770341 - DNA, 75 bp, synthetic construct
  source 1..75: mol_type = other DNA
atagacttttatgtctatgctgactttcttgatttcattgaatctgatgccaccatccacttcaaaaaagatgct

SEQ ID NO: 770342 - DNA, 75 bp, synthetic construct
  source 1..75: mol_type = other DNA
acctagaagtgaccggacaggtgaaagacctgtgcgactccaccggcaccaccatgtcagcgatgcggcttgcct

SEQ ID NO: 770343 - DNA, 75 bp, synthetic construct
  source 1..75: mol_type = other DNA
tggcggactcagcatgcagcaaatgcggcagacctacaatgcccacaaacacaccgaaaatggtgatggtggcgg

SEQ ID NO: 770344 - DNA, 75 bp, synthetic construct
  source 1..75: mol_type = other DNA
ttgctttatttccggcgggcgatcgttctcatggtgtggttgtggtcgtggctgacagacgttaccggctgaaag

SEQ ID NO: 770345 - DNA, 75 bp, synthetic construct
  source 1..75: mol_type = other DNA
ctgcaacactattgtatggtatgtcaatggccatgtcggtcgggagttgtgcaacacctgtccagactaatcttc

SEQ ID NO: 770346 - DNA, 75 bp, synthetic construct
  source 1..75: mol_type = other DNA
gcgcccagagcacgttttgaaatggacctggaagtgaccggacaggtgaaagacctgtgcgactccggcggtacc

SEQ ID NO: 770347 - DNA, 75 bp, synthetic construct
  source 1..75: mol_type = other DNA
tttgaaatgccagtcgaatccaccgccgatattactgacaattgcgacagtggcggactcagcatgcagcaaatg

SEQ ID NO: 770348 - DNA, 75 bp, synthetic construct
  source 1..75: mol_type = other DNA
aaatcgcagcagcattcagacaggccagccgggaactgaatattccggtggaatggggcggcgactggaagaccc

SEQ ID NO: 770349 - DNA, 75 bp, synthetic construct
  source 1..75: mol_type = other DNA
cagcaacctttacgggatgctggcaggaggggctgcggtctatggttttaataaagcctttatccgcccggccac

SEQ ID NO: 770350 - DNA, 75 bp, synthetic construct
  source 1..75: mol_type = other DNA
tactttcgtctgtcggtagccgcatggggctggggcgtttctccggctttttccgcagtgccggtggactggccg

SEQ ID NO: 770351 - DNA, 75 bp, synthetic construct
  source 1..75: mol_type = other DNA
aaggggtgttatgcgccagcttcaatgcataaagattgtgataaacgcatcgttcaggcgcacacgctgtctaag

SEQ ID NO: 770352 - DNA, 75 bp, synthetic construct
  source 1..75: mol_type = other DNA
gctacgcgccgttttgcacaccaaacatctgatgaatcccgaagtactggctgccgcccgccggatagtgcgcca

SEQ ID NO: 770353 - DNA, 75 bp, synthetic construct
  source 1..75: mol_type = other DNA
ccggctgacagagatatccggagttcacccccagataaccgccaggatacaactgccgggcggacaaactgctga

SEQ ID NO: 770354 - DNA, 75 bp, synthetic construct
  source 1..75: mol_type = other DNA
tattataaacagagttgttgagtggtttactaaaaacctgggaacccccataaaaaccgctacccaacaacaaaa

SEQ ID NO: 770355 - DNA, 75 bp, synthetic construct
  source 1..75: mol_type = other DNA
gactggctgcatgggctgacgatgaggcgttatcagtgacacaaaccaggacagagcgccccttgtcacagccag

SEQ ID NO: 770356 - DNA, 75 bp, synthetic construct
  source 1..75: mol_type = other DNA
atgacaacatcaaccaggcggataagtttctatctgaagcctgcagccgtcaagaacgaaagcgaagcatgcgcc

SEQ ID NO: 770357 - DNA, 75 bp, synthetic construct
  source 1..75: mol_type = other DNA
aggagatcctcgctgcgctgggtaccggtgatgcactggcgtcgaagtatcgccgccagttatatgcgttgttgt

SEQ ID NO: 770358 - DNA, 75 bp, synthetic construct
  source 1..75: mol_type = other DNA
atgaaacacggaattaaagcactgctcattaccctgtccctgtccctggcctgtgccggaatgtctcatagcgcg

SEQ ID NO: 770359 - DNA, 75 bp, synthetic construct
  source 1..75: mol_type = other DNA
ctgtgccggaatgtctcatagtgctctggcggcagctcctgcggcgaaaccgacaacggtagaaaccaaagcgga

SEQ ID NO: 770360 - DNA, 75 bp, synthetic construct
  source 1..75: mol_type = other DNA
gagtgggatagaaaaccagttcatttgtcaatcaacgcaaaagaactagatggtgaaataaagtccgcgataata

SEQ ID NO: 770361 - DNA, 75 bp, synthetic construct
  source 1..75: mol_type = other DNA
ggcgctggcgcgatctgaacctgtgtgtggtggtggtcgcagctctgtttgcactgaagattattctggtggatt

SEQ ID NO: 770362 - DNA, 75 bp, synthetic construct
  source 1..75: mol_type = other DNA
atgaacagcagtgacctgtatctgagcaagaagcacgggtgtactttatcgcccggaaaaatgtcagagaggcag

SEQ ID NO: 770363 - DNA, 75 bp, synthetic construct
  source 1..75: mol_type = other DNA
gatcgcctgcttaacgagtatctgtctccgctggatattaccgcggcacagtttaaggtgctctgctctatccgc

SEQ ID NO: 770364 - DNA, 75 bp, synthetic construct
  source 1..75: mol_type = other DNA
ctttactgtatccgtggagtgtatcttaacaaatgtgttaggaactgctgggatgaacgctggcatgtttggtat

SEQ ID NO: 770365 - DNA, 75 bp, synthetic construct
  source 1..75: mol_type = other DNA
tcaccttactcttacttgttatccttgtgtatgcaggattagtaaagggtgatgtgttccctgaatggatcatga

SEQ ID NO: 770366 - DNA, 75 bp, synthetic construct
  source 1..75: mol_type = other DNA
ggtggcgggtgcgtttatcggtacctcgtctgttaccgcctatattgaaagtacttcaggtgtggctgtcggtgg

SEQ ID NO: 770367 - DNA, 75 bp, synthetic construct
  source 1..75: mol_type = other DNA
gatgagaaagaccgcaatggcgatggggcagatgccgtacgccagaaggtaccggcaatgctgaacagcgatgtg

SEQ ID NO: 770368 - DNA, 75 bp, synthetic construct
  source 1..75: mol_type = other DNA
tattggcggtgtaatgaaagtcgggttaagtaaagatgagattgaattactgggtcgcgaaggacataacgttac

SEQ ID NO: 770369 - DNA, 75 bp, synthetic construct
  source 1..75: mol_type = other DNA
atgctcaatcgcatttccagaaagatatcaacattccagataatgttttacgtagcattagtgacaggaagtgtc

SEQ ID NO: 770370 - DNA, 75 bp, synthetic construct
  source 1..75: mol_type = other DNA
aatacctgtcgttacgccatcaggggctgatgcaaagtattcagtcactgcaggcgcatatcaccagcctgcttg

SEQ ID NO: 770371 - DNA, 75 bp, synthetic construct
  source 1..75: mol_type = other DNA
attcagggagaaagttgaacagctgcgtaacacgctgattcagagctctgaagatcataaacgcgatcagcaggc

SEQ ID NO: 770372 - DNA, 75 bp, synthetic construct
  source 1..75: mol_type = other DNA
tgtcgatggtttggcaccagtgacctgggctgggaaaactatgacgaggatgtgagtcgcagcgtgatcaatatc

SEQ ID NO: 770373 - DNA, 75 bp, synthetic construct
  source 1..75: mol_type = other DNA
gggcgtcatgcgctggagatgcagcatattctcggggcgctatcgctggatgcatatttgattaccggcaacgga

SEQ ID NO: 770374 - DNA, 75 bp, synthetic construct
  source 1..75: mol_type = other DNA
atgcaatgaacgatcgtgaaatgctgggcagcgttggtaacggctttattatgggtaatgcaatgccacagttac

SEQ ID NO: 770375 - DNA, 75 bp, synthetic construct
  source 1..75: mol_type = other DNA
atggaagaacaaagaaaggctggcaataacgtctgctacatctttatggataccggttgcgaacatccgctgaca

SEQ ID NO: 770376 - DNA, 75 bp, synthetic construct
  source 1..75: mol_type = other DNA
tagccgtagctgtgtcaatcgtaactaatacgctcagttgggcgtattatgtcacgcttatcaatattgtgatgg

SEQ ID NO: 770377 - DNA, 75 bp, synthetic construct
  source 1..75: mol_type = other DNA
tgtatttctgcacggtggtgtgcacgttatatctggtcagtggcgggtataaggttatccggaactatatacgca

SEQ ID NO: 770378 - DNA, 75 bp, synthetic construct
  source 1..75: mol_type = other DNA
cgcaaaggcctgccctacccccacgtcaatcaacaaggcgagattgaagccgatgctgagtggtgggctaccatg

SEQ ID NO: 770379 - DNA, 75 bp, synthetic construct
  source 1..75: mol_type = other DNA
acaggatggtgtctggggtacgctttgtcgatgggcaaacaccagtgactggggctggaaagagtacagtgtgga

SEQ ID NO: 770380 - DNA, 75 bp, synthetic construct
  source 1..75: mol_type = other DNA
agtacgttcaaaagataaaagatggtctttgctttatagctttgctaagcaaattaaatttgcaaagccagatat

SEQ ID NO: 770381 - DNA, 75 bp, synthetic construct
  source 1..75: mol_type = other DNA
aggattagctagtgatgatttagctaatcttttcgcatcctatctctacagagttcgtcagtggtcacagggaaa

SEQ ID NO: 770382 - DNA, 75 bp, synthetic construct
  source 1..75: mol_type = other DNA
agaattatcaggagctaaaacgcagggttagccaccgagaattcagcgagcaacatatcgatttccttcttaatc

SEQ ID NO: 770383 - DNA, 75 bp, synthetic construct
  source 1..75: mol_type = other DNA
tacgttcaccgcaatgacgtataccaaaagcaaaacgtttaaaaccgaatctggagcgcgtcgctggctggaaag

SEQ ID NO: 770384 - DNA, 75 bp, synthetic construct
  source 1..75: mol_type = other DNA
gaatgttgcacgactgattggtaatgctgtgccggtgaggctcggtgaagttgttgggcaaagtattattgaaca

SEQ ID NO: 770385 - DNA, 75 bp, synthetic construct
  source 1..75: mol_type = other DNA
ggagaatgtgttgggataaacttggaccgacaattacaactcaatgtattggatatgggaatggacgctttgggc

SEQ ID NO: 770386 - DNA, 75 bp, synthetic construct
  source 1..75: mol_type = other DNA
taatccgcagtcaggctggtaaattaaagcaattgtcagagattaacacgctatacaagaacagacgtaaccggg

SEQ ID NO: 770387 - DNA, 75 bp, synthetic construct
  source 1..75: mol_type = other DNA
tgacgtataccaaaagcaaaacgtttaaaaccgaagctggcgcgcatcgctggctggaaagaaattcaggtgagt

SEQ ID NO: 770388 - DNA, 75 bp, synthetic construct
  source 1..75: mol_type = other DNA
ccggcgttaaggggaaatgaggtcagcatggatactatcgatcttggcaacagcgaatctctggtatgtggcgtg

SEQ ID NO: 770389 - DNA, 75 bp, synthetic construct
  source 1..75: mol_type = other DNA
ttctgtcggtcaagggtctactgagcctgactgacgtaaccattccggcctatcagcgtccttataaatggacgg

SEQ ID NO: 770390 - DNA, 75 bp, synthetic construct
  source 1..75: mol_type = other DNA
gacggtacgttcaccgcgatgacgtataccaaaagcaaaacgtttaaaaccgaactggcgcgcgtcgctggttag

SEQ ID NO: 770391 - DNA, 75 bp, synthetic construct
  source 1..75: mol_type = other DNA
acgaatctctggtatgtggtgtgtttcccaaccaggacggcacattcactgctatgacgtatacaaaaagcaaaa

SEQ ID NO: 770392 - DNA, 75 bp, synthetic construct
  source 1..75: mol_type = other DNA
gatggtgcaagccaggcgattcgataccggctcgtgttcagagtcatgtgaaatctggggtgatcaattggaatt

SEQ ID NO: 770393 - DNA, 75 bp, synthetic construct
  source 1..75: mol_type = other DNA
agcggagggcaaagtgttcacgcaggttcagtgggagcagaaattcgcccgtcacgtaaatcacgtcagggcgca

SEQ ID NO: 770394 - DNA, 75 bp, synthetic construct
  source 1..75: mol_type = other DNA
ttgccgccttccgggattactggagtaatgagggcaaagtgtttacacaggttcagtgggagcagaaattcgccc

SEQ ID NO: 770395 - DNA, 75 bp, synthetic construct
  source 1..75: mol_type = other DNA
acgtgtcacgcatctgtcacgacaagtcacgacagataaagatacagatacagatacagaattaaaccccacaca

SEQ ID NO: 770396 - DNA, 75 bp, synthetic construct
  source 1..75: mol_type = other DNA
aaaacactatcaataagttggagtcattaccagttcagtaataaaaacaggttgaatagttgtgctgcctggtgt

SEQ ID NO: 770397 - DNA, 75 bp, synthetic construct
  source 1..75: mol_type = other DNA
gagtgaaacaatatttttgtactaaggcattagatgtcattctgctaatttatctactccttggttttatacttc

SEQ ID NO: 770398 - DNA, 75 bp, synthetic construct
  source 1..75: mol_type = other DNA
gggctgatgtggaaccatccttgcgggagtttttttgcgataacggcgatgaatgggtgcatcttcggattgagg

SEQ ID NO: 770399 - DNA, 75 bp, synthetic construct
  source 1..75: mol_type = other DNA
tctgaaagccgctggtgacgcgcagtgggtattggttcatgatgccgcgcgtccttgtttgcatcaggatgatct

SEQ ID NO: 770400 - DNA, 75 bp, synthetic construct
  source 1..75: mol_type = other DNA
tacgctggggatattttcagccaataaaggggtaatacctgcgtttacgccactgatgcaggaagatgcaactgg

SEQ ID NO: 770401 - DNA, 75 bp, synthetic construct
  source 1..75: mol_type = other DNA
aaggaagttatgtcactgacccgggcatatttcggggagctgcaggcatccattgagcaggatattaaccagccc

SEQ ID NO: 770402 - DNA, 75 bp, synthetic construct
  source 1..75: mol_type = other DNA
gtgtgacagaaccactaacttctgcttatgaatcaatagcaggaaacgtctcgagacttattggctcctccacaa

SEQ ID NO: 770403 - DNA, 75 bp, synthetic construct
  source 1..75: mol_type = other DNA
tggtgtgctcacctcaaaaaccggtgctgcgctacatgatattttgcatgtgttaaaacgtcgcgatccttctct

SEQ ID NO: 770404 - DNA, 75 bp, synthetic construct
  source 1..75: mol_type = other DNA
cggataacattaaagtcacgcgcccggaagatttggcgcttgccgaattttacctcacccgaaccatccatcagg

SEQ ID NO: 770405 - DNA, 75 bp, synthetic construct
  source 1..75: mol_type = other DNA
atgttgcttttctttatgttaatgcaacttgttatctattttgcttttttaactctgtgggctaaattaagtgta

SEQ ID NO: 770406 - DNA, 75 bp, synthetic construct
  source 1..75: mol_type = other DNA
cgatggattattatctcgccaaccgcacgcgtcgttttacgcagatccatcatcgcttacagcagcagcatccgc

SEQ ID NO: 770407 - DNA, 75 bp, synthetic construct
  source 1..75: mol_type = other DNA
ccgctgaagtagtgagccgaaatcagcaagagttactgcgccaggtgcaatcggcccgtcaacggctggagatgg

SEQ ID NO: 770408 - DNA, 75 bp, synthetic construct
  source 1..75: mol_type = other DNA
ttatcaggtgataccagagggcattaaactgtcgccacggataagaatatacaacatttctgataacaaaaaatc

SEQ ID NO: 770409 - DNA, 75 bp, synthetic construct
  source 1..75: mol_type = other DNA
ctgacgcttgacgggattgccagaatgtatgccgacagcgactacagaaatttgtatcaggcgatggtgcaggcc

SEQ ID NO: 770410 - DNA, 75 bp, synthetic construct
  source 1..75: mol_type = other DNA
acatctttatggataccggttgcgaacatccgctgacataccgctttattcgggaggttgtgaagttctggggca

SEQ ID NO: 770411 - DNA, 75 bp, synthetic construct
  source 1..75: mol_type = other DNA
agtatgcagcctgccggtgaagggctgctgcaacagaagtacgaacagctcaaagcgaagttgcaggctgaaggt

SEQ ID NO: 770412 - DNA, 75 bp, synthetic construct
  source 1..75: mol_type = other DNA
gtttagtgaatcggcgctggagaatatggtgacgttgtcagccaaatcacaggaatatttgacgcgagcgactca

SEQ ID NO: 770413 - DNA, 75 bp, synthetic construct
  source 1..75: mol_type = other DNA
cgtcacgggattttcgacgacgggctgcgttgtgggggatggctttgccggagccggaatttacacctgctgaac

SEQ ID NO: 770414 - DNA, 75 bp, synthetic construct
  source 1..75: mol_type = other DNA
tctactattttagtggcttttgcttcaaaaaatgtagaaggtatttcgtactacgttttaaaaagcaccatagat

SEQ ID NO: 770415 - DNA, 75 bp, synthetic construct
  source 1..75: mol_type = other DNA
tgtttatctataacaaaactgagagtatcagcggactgcatcagcacgactattatgaatttactctggtattaa

SEQ ID NO: 770416 - DNA, 75 bp, synthetic construct
  source 1..75: mol_type = other DNA
gtcagccaaatcacaggaatatttgacgcgagcgactcaacgatattatggcaaaacgccaatgcagattattaa

SEQ ID NO: 770417 - DNA, 75 bp, synthetic construct
  source 1..75: mol_type = other DNA
tattgcatttgaagctggttatagtagcccaagtctgttcattaaaacgtttaagaaactaacgtcttttacgcc

SEQ ID NO: 770418 - DNA, 75 bp, synthetic construct
  source 1..75: mol_type = other DNA
ggcaccaccggttctcgtatggcaaacggcagttatgcgctgatgaatcccctaatgatttttatcaaaatcatt

SEQ ID NO: 770419 - DNA, 75 bp, synthetic construct
  source 1..75: mol_type = other DNA
caacagcctgtctccagagcaacaaaagacatatcttcgtgttcgaggccgtcctgatgctggcggggagaatgt

SEQ ID NO: 770420 - DNA, 75 bp, synthetic construct
  source 1..75: mol_type = other DNA
aaatggaaagtaataacgcgaagttcaacgagtttaggtcagagtggatgagtgcaaatggcagcccaggacaat

SEQ ID NO: 770421 - DNA, 75 bp, synthetic construct
  source 1..75: mol_type = other DNA
ggagaagaaaagccccgtaacagtttctggatacgtcgccttgtagccggtgatgtggttgaagtcgggagcacc

SEQ ID NO: 770422 - DNA, 75 bp, synthetic construct
  source 1..75: mol_type = other DNA
atgactagtaagtatctgttactaatagctatagcattacctttttttattagttcttgctctgataagtattct

SEQ ID NO: 770423 - DNA, 75 bp, synthetic construct
  source 1..75: mol_type = other DNA
atgactgttaaggagttgctactgataactatagtattaccttttttcattactgcctgttctgataagtattct

SEQ ID NO: 770424 - DNA, 75 bp, synthetic construct
  source 1..75: mol_type = other DNA
tagaaatcagcttgaaagcaagttgagcactgttaaaaaacagtttgattatcaggagccggtgcagaatatgcc

SEQ ID NO: 770425 - DNA, 75 bp, synthetic construct
  source 1..75: mol_type = other DNA
gttgatcaccttggaatggctgctcttggtccgattgattacttcaatgttcaggacaagatggctggtcgtgaa

SEQ ID NO: 770426 - DNA, 75 bp, synthetic construct
  source 1..75: mol_type = other DNA
ttcaccgcgatgacgtataccaaaagcaaaacgtttaaaaccgaaactgacgcgcgtcgctggctggaaagaaag

SEQ ID NO: 770427 - DNA, 75 bp, synthetic construct
  source 1..75: mol_type = other DNA
ccaacagcccaaaagatcatggaaaagtcgccagaaggggctaaaaaagctgctggatttgcatacagagttagg

SEQ ID NO: 770428 - DNA, 75 bp, synthetic construct
  source 1..75: mol_type = other DNA
agcgcacagttcaactagcagacggaagaactgtaaccgtaggcgggaaacttcatggtgctggtgctaacgcgt

SEQ ID NO: 770429 - DNA, 75 bp, synthetic construct
  source 1..75: mol_type = other DNA
tctattgctgctccggccacgtcggcagcaagcgcgcagaattacgcaatgaagaaagatcttgatgcaatttct

SEQ ID NO: 770430 - DNA, 75 bp, synthetic construct
  source 1..75: mol_type = other DNA
aaagtgaaggagttagtcttgagtggcttaaagagggcaagggtgaatcaccaaacgatgttggtatttgtggta

SEQ ID NO: 770431 - DNA, 75 bp, synthetic construct
  source 1..75: mol_type = other DNA
acttgaagattacggggcatgtttcttttggatatgatgtggtatctgatatcctaaaaattaaggatacaggtg

SEQ ID NO: 770432 - DNA, 75 bp, synthetic construct
  source 1..75: mol_type = other DNA
taccaggttcgcggtcaggatatctccaacatcacctttatcgaaggtgataccgggattattgtcatcgacccg

SEQ ID NO: 770433 - DNA, 75 bp, synthetic construct
  source 1..75: mol_type = other DNA
agttatgttgttgttttactttttagtgtgcttgctggaactacattaggtatctgggggattgctattgttaca

SEQ ID NO: 770434 - DNA, 75 bp, synthetic construct
  source 1..75: mol_type = other DNA
gcagattaaggatgctgtggatgcaacagttagcttttatcaaacgctatctgaaaaatatggtgaaaaatattc

SEQ ID NO: 770435 - DNA, 75 bp, synthetic construct
  source 1..75: mol_type = other DNA
agagaagaaagctgcagatgcaggggtgagttatgttgttgctttactttttagcttgcttgctggaactacatt

SEQ ID NO: 770436 - DNA, 75 bp, synthetic construct
  source 1..75: mol_type = other DNA
tgattaaagaaatcaaagagcgcatcggcagcctggacgttcgagacaatattgagcgccgggcttatgaaattg

SEQ ID NO: 770437 - DNA, 75 bp, synthetic construct
  source 1..75: mol_type = other DNA
ttgcatgaatacaaaccagtggagtatcaacgttcggtctacgagttaaccatgctggtaaagcagttagccagg

SEQ ID NO: 770438 - DNA, 75 bp, synthetic construct
  source 1..75: mol_type = other DNA
tcatacaggcatttaaaaaaggtgagcttacacgccatcaagtagtaatgaatcgtaatatggcaaggagtcgag

SEQ ID NO: 770439 - DNA, 75 bp, synthetic construct
  source 1..75: mol_type = other DNA
gagcgtgatgctatattcaatgcatttgagtctgttaattatgatgaatgggcaaaacatttagagcagatctca

SEQ ID NO: 770440 - DNA, 75 bp, synthetic construct
  source 1..75: mol_type = other DNA
gcagtattatacggactaatatatgtgagtttatacacggccggtgttcgtggaaataatacacaggcattactg

SEQ ID NO: 770441 - DNA, 75 bp, synthetic construct
  source 1..75: mol_type = other DNA
aacagtatcttgaaattatcagggatgtcgggcttgtaaaagagattagtaatgctgcaccagggaaagttctgg

SEQ ID NO: 770442 - DNA, 75 bp, synthetic construct
  source 1..75: mol_type = other DNA
gagctaaaagtgtttatcctcgacaccgatgccgctcagtattacccgtttgacggcgaacgtgtttgctatgac

SEQ ID NO: 770443 - DNA, 75 bp, synthetic construct
  source 1..75: mol_type = other DNA
ccccaaccaggatggaacgttcaccgccatgacgtataccaaaagcaaaacatttaaaactgaaacaggcgcacg

SEQ ID NO: 770444 - DNA, 75 bp, synthetic construct
  source 1..75: mol_type = other DNA
atgagagttgcagatcacattaaacaccttgaaagaattatcgaaaacggtgaactcttaagagatcagatgaga

SEQ ID NO: 770445 - DNA, 75 bp, synthetic construct
  source 1..75: mol_type = other DNA
atggatatgctcaatcttggcaacaatgaatctctggtgtgcggagtattccccaaccaggacggcacattcacc

SEQ ID NO: 770446 - DNA, 75 bp, synthetic construct
  source 1..75: mol_type = other DNA
acggcttgaacagcgtctgaatcagcaaaatcctcaaccacgcattcatcgcgcgcagactcgcattcaacaact

SEQ ID NO: 770447 - DNA, 75 bp, synthetic construct
  source 1..75: mol_type = other DNA
atggatactatcgatcttggtaacaacgaatctctggtgtgcggcgtgttcccaaaccaggacggcacattcacc

SEQ ID NO: 770448 - DNA, 75 bp, synthetic construct
  source 1..75: mol_type = other DNA
agtgaacatcctgatcgaaacaaacacggtgttgttcttgtggccgaatctgttaatgaccctgtaaataattct

SEQ ID NO: 770449 - DNA, 75 bp, synthetic construct
  source 1..75: mol_type = other DNA
tgcccttgacgcatttaagggcgcttccgcataatggcagagaaattgttttgccccgaagcgagagaaaggtat

SEQ ID NO: 770450 - DNA, 75 bp, synthetic construct
  source 1..75: mol_type = other DNA
acagaggatatactgatattaaagtggtggcctataatagtgtcggcgtttttgtttcacctgataaaaaatacc

SEQ ID NO: 770451 - DNA, 75 bp, synthetic construct
  source 1..75: mol_type = other DNA
atgattgaagaacgtttagagactattcggtctgtttgtgaaaacttaaagttacaagccaatccagccttaaga

SEQ ID NO: 770452 - DNA, 75 bp, synthetic construct
  source 1..75: mol_type = other DNA
acgaatctctggtatgcggtgtgttccctaaccaggacggcaccttcaccgcgatgacgtataccaaaagtaaaa

SEQ ID NO: 770453 - DNA, 75 bp, synthetic construct
  source 1..75: mol_type = other DNA
accccggcgttaaggggaaatgaggtcagcatggatactatcgatcttggtaacaacgaagctctggtgtacggc

SEQ ID NO: 770454 - DNA, 75 bp, synthetic construct
  source 1..75: mol_type = other DNA
tgaggctaccaaaacaagtataacctttccttcagttaaggaaagggccatggcttttcaggcagttgcgcagaa

SEQ ID NO: 770455 - DNA, 75 bp, synthetic construct
  source 1..75: mol_type = other DNA
caaaatcctcaaccacgcattcatcgcgcgcagactcgcattcaacaactggaatatcgcctggcagaaactctg

SEQ ID NO: 770456 - DNA, 75 bp, synthetic construct
  source 1..75: mol_type = other DNA
cgtgtttccaaaccaagacggtacgttcaccgcgatgacgtataccagaagcaaaacgtttaaaaccgaagctgg

SEQ ID NO: 770457 - DNA, 75 bp, synthetic construct
  source 1..75: mol_type = other DNA
ttcaccgcgatgacgtataccaaaagcaaaacgtttaaaactgaagctggcgcgcgtcgctggttaaccagaaac

SEQ ID NO: 770458 - DNA, 75 bp, synthetic construct
  source 1..75: mol_type = other DNA
acgaatctctggtgtgtggcgtgtttcccaaccaggacggcacattcaccgcgacgacgtataccaaaagcaaaa

SEQ ID NO: 770459 - DNA, 75 bp, synthetic construct
  source 1..75: mol_type = other DNA
gccatgacttataccaaaagcaaaacgtttaaaaccgaagctggcgcgaatcgctggttgaaaaaaaaattcagg

SEQ ID NO: 770460 - DNA, 75 bp, synthetic construct
  source 1..75: mol_type = other DNA
ccccaaccaggatggaacgttcaccgccatgacttataccaaaagcaaaacatttaaaacagaaacaggcgcacg

SEQ ID NO: 770461 - DNA, 75 bp, synthetic construct
  source 1..75: mol_type = other DNA
atggatacgctcaatcttggcaacaacgaatctctggtatgcggtgtgttccctaaccaggacggcaccttcacc

SEQ ID NO: 770462 - DNA, 75 bp, synthetic construct
  source 1..75: mol_type = other DNA
aacggttcgtctgctgcttgagcatgagatgggacaggtttggatcagcggcgaaatttctaatttcacacaacc

SEQ ID NO: 770463 - DNA, 75 bp, synthetic construct
  source 1..75: mol_type = other DNA
cactcccctcccccgcgcactgtgtaggtgtcatcacctcaaaaaccggtgccgcgttgcacgatattttgcatg

SEQ ID NO: 770464 - DNA, 75 bp, synthetic construct
  source 1..75: mol_type = other DNA
ttgatcgtcgggcgcggcggcggttcgctggaagatttatggggttttaacgacgaacgcgtagcgcgggcgatt

SEQ ID NO: 770465 - DNA, 75 bp, synthetic construct
  source 1..75: mol_type = other DNA
gaatcagcgcaatgagtgcgacgtattgatcgttgggcgcggcggcggttcgctggaagatttatggagttttaa

SEQ ID NO: 770466 - DNA, 75 bp, synthetic construct
  source 1..75: mol_type = other DNA
atgatggcgtggtggtcagcgtggtgagcgacgtgacgaaaacacgcaaatcacgcaaaaaagcggtgaactcgt

SEQ ID NO: 770467 - DNA, 75 bp, synthetic construct
  source 1..75: mol_type = other DNA
tctggaagccgtgagtccactgtccacgctggcgcgtggctatagcgtcaccagcgccgccgatgggacagtgct

SEQ ID NO: 770468 - DNA, 75 bp, synthetic construct
  source 1..75: mol_type = other DNA
tgaaacagtaccagattcaggtcaatccggtaaaactgtctcagtatggtatcagcctgcccgaagtgaaacagg

SEQ ID NO: 770469 - DNA, 75 bp, synthetic construct
  source 1..75: mol_type = other DNA
ggacaagttaatcaaaagcgttcctgaagtggcctctgtatttggcaagaccggtaaagcagagaccgcaacgga

SEQ ID NO: 770470 - DNA, 75 bp, synthetic construct
  source 1..75: mol_type = other DNA
tggcgggatgatcactgctccgctgctgtcgctgttcattattcctgccgcctacaaattaatctggctgcgcag

SEQ ID NO: 770471 - DNA, 75 bp, synthetic construct
  source 1..75: mol_type = other DNA
gaaccggctgctgattaaagcatatcatccgttgctgttgcgggttcttcactggccaaaaacaacactgctggt

SEQ ID NO: 770472 - DNA, 75 bp, synthetic construct
  source 1..75: mol_type = other DNA
gaggtggcctcggtgggcggcgtggtgaaacagtaccagatccaagtgaatccggtaaagctgtcccagtacggt

SEQ ID NO: 770473 - DNA, 75 bp, synthetic construct
  source 1..75: mol_type = other DNA
gccattgaagcgcatccggaactgtcaaacaaagaaacgttcacaccggaaggtcttgatgaagccctttatcat

SEQ ID NO: 770474 - DNA, 75 bp, synthetic construct
  source 1..75: mol_type = other DNA
cttacctgtttttcactggcaaaggaggagtaggtaaaacctcaatttcctgcgctacagctatacgcctggcag

SEQ ID NO: 770475 - DNA, 75 bp, synthetic construct
  source 1..75: mol_type = other DNA
caaggcgcatagcgttagtacccctaatggcatcagagcctaatggcatcgagaaactcagagagttggcagttt

SEQ ID NO: 770476 - DNA, 75 bp, synthetic construct
  source 1..75: mol_type = other DNA
aggtgtaggaaaaacttcgatttcctgcgcgactgcaatccgccttgctgaacagggtaaacgggttttgctggt

SEQ ID NO: 770477 - DNA, 75 bp, synthetic construct
  source 1..75: mol_type = other DNA
agcaccagcatcctgacgccacgctggataataaaacgcgctggcaggtgatcaccgatgcgtctgttgaagtgg

SEQ ID NO: 770478 - DNA, 75 bp, synthetic construct
  source 1..75: mol_type = other DNA
atgacgcagccattggtcggaaaacagattctcattgttgaagatgagcaggtatttcgctcgcttctggattca

SEQ ID NO: 770479 - DNA, 75 bp, synthetic construct
  source 1..75: mol_type = other DNA
aataccgctccagaatcgttgaacctattaaaggtctgttgcctgatgaagttgttaacagtatcagcgagcagc

SEQ ID NO: 770480 - DNA, 75 bp, synthetic construct
  source 1..75: mol_type = other DNA
gtaccaatgacggtgatgattattttcatcctgttgtatctggcattccgtcgagcagatgaggccttacttatc

SEQ ID NO: 770481 - DNA, 75 bp, synthetic construct
  source 1..75: mol_type = other DNA
gatttatggaagcgcgttttcgacatacttggtgtaccagtaacccaagttcaaagtaaaactggcacctcatca

SEQ ID NO: 770482 - DNA, 75 bp, synthetic construct
  source 1..75: mol_type = other DNA
ggctggcaaggcgatgtttatgtctttttattaaaagccattgcttctaatcctccgacgctgacatttcgttat

SEQ ID NO: 770483 - DNA, 75 bp, synthetic construct
  source 1..75: mol_type = other DNA
catgtgacccgtgggtgagcgacaaaacatttgatgtagtgttgttcattcacagtaatatcgcccattattttt

SEQ ID NO: 770484 - DNA, 75 bp, synthetic construct
  source 1..75: mol_type = other DNA
tcattgcgtccatttttttgctgagcggctgtaccggtgaaccgtctgagcaggatatttacactgcgatgaata

SEQ ID NO: 770485 - DNA, 75 bp, synthetic construct
  source 1..75: mol_type = other DNA
cgtgcaatgacgcaacatttgcaggaaatcagcgaatccgtgcgccaggaaaacagcgactggtttagcgaagag

SEQ ID NO: 770486 - DNA, 75 bp, synthetic construct
  source 1..75: mol_type = other DNA
tcccatccgggatgagaggcttttccccccgccttacggctcatgcatgcatcaaaaaagatgtgagcttgatca

SEQ ID NO: 770487 - DNA, 75 bp, synthetic construct
  source 1..75: mol_type = other DNA
gttgtttaatggcaaaaacttccatgtgtttatctacaacaaaactgagagtatcagcggactgcatcagcacga

SEQ ID NO: 770488 - DNA, 75 bp, synthetic construct
  source 1..75: mol_type = other DNA
cggtggttcatccgttgaaatggccgaagcggagtatatggtccgggccagcggatatcttcagaccattgatga

SEQ ID NO: 770489 - DNA, 75 bp, synthetic construct
  source 1..75: mol_type = other DNA
agaccggggaccagtgtggcattctcaggacagtttgaattactcgagcacgccaataagaaattaaaactgatg

SEQ ID NO: 770490 - DNA, 75 bp, synthetic construct
  source 1..75: mol_type = other DNA
gtcagtcgctataatttgatgaaaaaatacaacatcactgagcgaacagcatatcgtgatctgaatatgctttct

SEQ ID NO: 770491 - DNA, 75 bp, synthetic construct
  source 1..75: mol_type = other DNA
ttggcgacttctgcattaactgacgagctcgccgtcttctttattgccgatggcgtttttcagcttctgccaggg

SEQ ID NO: 770492 - DNA, 75 bp, synthetic construct
  source 1..75: mol_type = other DNA
atgaaacgaattgcgtttgttttttctactgtgcctcatggcaccgcggctggccgcgagggattagatgcttta

SEQ ID NO: 770493 - DNA, 75 bp, synthetic construct
  source 1..75: mol_type = other DNA
ttactacagccagtcaatatggttggtgtgtccgcattgaagggactgctggatatccattctgaggcgttaccg

SEQ ID NO: 770494 - DNA, 75 bp, synthetic construct
  source 1..75: mol_type = other DNA
cactgacggcacttacttctgcgccactaacgtggtgcgagtgaaccttattcgacaggtacaggagtcacgcag

SEQ ID NO: 770495 - DNA, 75 bp, synthetic construct
  source 1..75: mol_type = other DNA
atgtcgaaaagcaatccgtctgaagtgaaattggccgtaccgacatccggtggcttttccgggctgaaatcactg

SEQ ID NO: 770496 - DNA, 75 bp, synthetic construct
  source 1..75: mol_type = other DNA
cctcgcgggcatgttggcatttcgcggcatactcattggcatcaccaacggcacgactgtatctcccaccagcgc

SEQ ID NO: 770497 - DNA, 75 bp, synthetic construct
  source 1..75: mol_type = other DNA
gacgccagtgagaacccggaaccggaaacggaatcaaatccgtgggtcgaacattggggcacgctgttgtcctga

SEQ ID NO: 770498 - DNA, 75 bp, synthetic construct
  source 1..75: mol_type = other DNA
atctgcgttatggcgtgattgcgctcggcgacagtagttatgtgaatttctgcaatggcggcaaacagttcgatg

SEQ ID NO: 770499 - DNA, 75 bp, synthetic construct
  source 1..75: mol_type = other DNA
cactcgcttgtcgccttcctgcaactcgaattatttagagtatatccatttattttcttgctgcgcacttcacgg

SEQ ID NO: 770500 - DNA, 75 bp, synthetic construct
  source 1..75: mol_type = other DNA
cactgacggtacttacttctgcgccaccaacgtggcgcgggtgaatcttatccgacaggtacaggagccacgcag

SEQ ID NO: 770501 - DNA, 75 bp, synthetic construct
  source 1..75: mol_type = other DNA
ggaagacaggaggaaaggcaagaattcgccctgcgtcttctgagtaaaggaatgtctcgggaagacgttgcagag

SEQ ID NO: 770502 - DNA, 75 bp, synthetic construct
  source 1..75: mol_type = other DNA
atacgaggtcgacgaacgcctgattaccactatcgacaaacatcgttcggaaaaggatgcacaccacatctacct

SEQ ID NO: 770503 - DNA, 75 bp, synthetic construct
  source 1..75: mol_type = other DNA
ttggcggcaccagcctggccggcggtgtgggaagcgttgccggagcagtaatgggggcatttatcatggcttcac

SEQ ID NO: 770504 - DNA, 75 bp, synthetic construct
  source 1..75: mol_type = other DNA
tgcgggaaatatcgccgaactggacgcaattgcagcatgcgtgattggcggcaccgcctggctggcggtgtggga

SEQ ID NO: 770505 - DNA, 75 bp, synthetic construct
  source 1..75: mol_type = other DNA
catttacgctatcggtggcaatctggaagccgcgcgactctctggaattaacgttgaacgcaccaaacttgccgt

SEQ ID NO: 770506 - DNA, 75 bp, synthetic construct
  source 1..75: mol_type = other DNA
atcacggcagtgagggataaacttgagacgctgaaggccagcctgccggaaggcgttgaaatcgtgaccacctac

SEQ ID NO: 770507 - DNA, 75 bp, synthetic construct
  source 1..75: mol_type = other DNA
ccagttcgactaacgttgaagatgaaagtaacttttcatcggctcaatgggagatactggcagatttgttggatg

SEQ ID NO: 770508 - DNA, 75 bp, synthetic construct
  source 1..75: mol_type = other DNA
aatcggaatttactatcgtcgaagttatggaaaaggctaaatgtaatggaatagaaatcgttggtgttggtatta

SEQ ID NO: 770509 - DNA, 75 bp, synthetic construct
  source 1..75: mol_type = other DNA
gttccagatttgaacattgatctgaatgtctacaatgaagcattaaatatcagccagacccttggggcagattta

SEQ ID NO: 770510 - DNA, 75 bp, synthetic construct
  source 1..75: mol_type = other DNA
attgaggctgttaagaatcagcactctaaccgtatagcgcttgttccggtgctggcgtcagagcccgccggtatt

SEQ ID NO: 770511 - DNA, 75 bp, synthetic construct
  source 1..75: mol_type = other DNA
atcgagagtgttaaactccagcatgccagtcgcgtagctcttgttcctgtactggcgtcagaaccgaccggcatc

SEQ ID NO: 770512 - DNA, 75 bp, synthetic construct
  source 1..75: mol_type = other DNA
gtcctatttattgagtggtatctgcttaactcattgcgagtaaaagtccttcagcaggtaggtcacaaagaaacc

SEQ ID NO: 770513 - DNA, 75 bp, synthetic construct
  source 1..75: mol_type = other DNA
accacgatccagctcaaacctgaggatcagtggcgtccaggcatgacgattgacaagattattgaagaactcgac

SEQ ID NO: 770514 - DNA, 75 bp, synthetic construct
  source 1..75: mol_type = other DNA
ctcaaacctgaggatcagtggcgtcccggcatgacaattgacaagattattgatgaactcgacaggacagtccgt

SEQ ID NO: 770515 - DNA, 75 bp, synthetic construct
  source 1..75: mol_type = other DNA
atggggttctggatccgcgggaaaattcctgctgagaccagtaacccactgaaccggttgctgattaaagcgtat

SEQ ID NO: 770516 - DNA, 75 bp, synthetic construct
  source 1..75: mol_type = other DNA
taatgagggcaccttcgtaaatgttgatgatatttctttattgccgaatgaggtcagtaaattagtacatcaaat

SEQ ID NO: 770517 - DNA, 75 bp, synthetic construct
  source 1..75: mol_type = other DNA
cacgccatattcaacgcctgacgaatatagccagcgtgataagcggtataaatgggatttatgtaattattgaca

SEQ ID NO: 770518 - DNA, 75 bp, synthetic construct
  source 1..75: mol_type = other DNA
taaccgtattgatatgctctcaaccgggatcaaaagcccgataggtatcaaggtgtccggaacggttctgtccga

SEQ ID NO: 770519 - DNA, 75 bp, synthetic construct
  source 1..75: mol_type = other DNA
agcgatgtgctgcccgcctcccgcgtttatcccggctcatcacgtcaggcgtacctggctaaccgtgcgcttcat

SEQ ID NO: 770520 - DNA, 75 bp, synthetic construct
  source 1..75: mol_type = other DNA
ccggactggcatcgttaaatgacctggttcgtcttgctgcggcaatggggactgaatttccttttgacgaatacg

SEQ ID NO: 770521 - DNA, 75 bp, synthetic construct
  source 1..75: mol_type = other DNA
aatcgtcaggggtattgaaacaggttttcgtggtacggccctgtatgccacagaaaatattgccggacgcatcaa

SEQ ID NO: 770522 - DNA, 75 bp, synthetic construct
  source 1..75: mol_type = other DNA
ctgtcgcatatcaccagcctgcttgcggatatccgggaaatcgcggactgtcaggagcagatgaccactgatgtc

SEQ ID NO: 770523 - DNA, 75 bp, synthetic construct
  source 1..75: mol_type = other DNA
ctgataacagaagttatacagagctcacattccagatctgcggcactggccgttgattctgcggctgcaaaactc

SEQ ID NO: 770524 - DNA, 75 bp, synthetic construct
  source 1..75: mol_type = other DNA
aagcctgggtcgatgattttgtcagggaagctttcggtcgcatgaaaaaagaacacatctgtaaagacagcgaac

SEQ ID NO: 770525 - DNA, 75 bp, synthetic construct
  source 1..75: mol_type = other DNA
agaaaatattgccggacgtatcaatgcccgcctggaggacgagggcttcactgtaaaaatcactttcccggcagt

SEQ ID NO: 770526 - DNA, 75 bp, synthetic construct
  source 1..75: mol_type = other DNA
gcattaaatgaaagggttcctgagctcattactgacagtaaggcgctgagggaagagctggagacaatgctgtga

SEQ ID NO: 770527 - DNA, 75 bp, synthetic construct
  source 1..75: mol_type = other DNA
cccattccagagcggcggcactggcggttgactctgccgccgcaaaactgatgcagaatgcagaaaatgtcagcg

SEQ ID NO: 770528 - DNA, 75 bp, synthetic construct
  source 1..75: mol_type = other DNA
actgtaaaaatcagttttccggcagtcagccagttacagacccggctcgcagtaaaaacaaatctgagcgcgctt

SEQ ID NO: 770529 - DNA, 75 bp, synthetic construct
  source 1..75: mol_type = other DNA
agctctgaagatcataaacgcgatcagcaggcgcaggaacggcttaccgggcgacttcaggcattaaatgaaagg

SEQ ID NO: 770530 - DNA, 75 bp, synthetic construct
  source 1..75: mol_type = other DNA
aagcctgggtcgatgattttatcagggaagctttcggacctatggtggaagaggacgactggaaagacagcacta

SEQ ID NO: 770531 - DNA, 75 bp, synthetic construct
  source 1..75: mol_type = other DNA
cctttttctttgttgaagatgatgggcgtatctatgaggatggttactcttatgaagcccaaactggttgtatcc

SEQ ID NO: 770532 - DNA, 75 bp, synthetic construct
  source 1..75: mol_type = other DNA
taatacgtgatgaatatggctgctggacgcattctgaatatgaaaaattctgtgatggtagggaatatatttcaa

SEQ ID NO: 770533 - DNA, 75 bp, synthetic construct
  source 1..75: mol_type = other DNA
tgcttcagagatgaaggatgtgctgaccttgatgcgtgtgatgctgatatttctgcatgggaaccggaacgacca

SEQ ID NO: 770534 - DNA, 75 bp, synthetic construct
  source 1..75: mol_type = other DNA
atgaacgaaatcaaagaaatgccggtagaacgtgatgcatatggctgctggatacatcctgaatatgaaaaattt

SEQ ID NO: 770535 - DNA, 75 bp, synthetic construct
  source 1..75: mol_type = other DNA
cacccagatgaactcgaaagccgatgatgacgtccgtaaagagcttaatgccattgctgacgtatcagccggccg

SEQ ID NO: 770536 - DNA, 75 bp, synthetic construct
  source 1..75: mol_type = other DNA
cacccagatgaactctaaagccgatgaggacgtccgtaaagagcttaatgccattgctgacgtatcagccggccg

SEQ ID NO: 770537 - DNA, 75 bp, synthetic construct
  source 1..75: mol_type = other DNA
tagtacgtgatgaatatggctgctggacgcatcctgaatatgaaaaattctgtgatggtagagaacatatttcaa

SEQ ID NO: 770538 - DNA, 75 bp, synthetic construct
  source 1..75: mol_type = other DNA
tagaacgtgatgaatatggctgctggacacatccggagtatgaaaagttttgcgcaggtcgtgaatatatatcca

SEQ ID NO: 770539 - DNA, 75 bp, synthetic construct
  source 1..75: mol_type = other DNA
gtactcgtcctggtcaacatcaccgtcaggcagtgttggatcagtttgctaaaatcgttccaaccgtactgaaag

SEQ ID NO: 770540 - DNA, 75 bp, synthetic construct
  source 1..75: mol_type = other DNA
cgcgaaaggccatcgccgccgtttgtctaaagctgatgcgttattcagaaaatcgtttgttgagtgtgaaagcag

SEQ ID NO: 770541 - DNA, 75 bp, synthetic construct
  source 1..75: mol_type = other DNA
gagggtgagggctggtttattggctccattcatgacaccgaggatggaccggtttgtatctggttgaggaatcgt

SEQ ID NO: 770542 - DNA, 75 bp, synthetic construct
  source 1..75: mol_type = other DNA
gaaggtgaaggctggtttattggctcgattcatgacacggaagacggccctgtttgtgtgtggatgagaaataag

SEQ ID NO: 770543 - DNA, 75 bp, synthetic construct
  source 1..75: mol_type = other DNA
ggaaaataatcttcagtggaccatcagaactatggatgaagatgattttaatctggacgcagatggtcccgatat

SEQ ID NO: 770544 - DNA, 75 bp, synthetic construct
  source 1..75: mol_type = other DNA
catcggcaggtaaaactgtcggacaaatgtggaacaatgtgaccagttcaataaccagcgtttacgaaaacgtgg

SEQ ID NO: 770545 - DNA, 75 bp, synthetic construct
  source 1..75: mol_type = other DNA
tttatcgtcagctgctaccggaactggatctgattatctggatcctgcgagctgatgaacgtgcgtatgctgccg

SEQ ID NO: 770546 - DNA, 75 bp, synthetic construct
  source 1..75: mol_type = other DNA
gaccagaaagagatggaagcttctattcataagaatcaaaaatcctgttttacattagatacggaacgatgcgtc

SEQ ID NO: 770547 - DNA, 75 bp, synthetic construct
  source 1..75: mol_type = other DNA
gtgaacgcagaatgacgctggtcgatctgcccggcattggtgaaacaccgcagcatgatcaggaataccggacac

SEQ ID NO: 770548 - DNA, 75 bp, synthetic construct
  source 1..75: mol_type = other DNA
cgtgattggcattatgggtaaatccggcaccggcaaaagcagtctgtgtaatgccatttttcagtcccgtatctg

SEQ ID NO: 770549 - DNA, 75 bp, synthetic construct
  source 1..75: mol_type = other DNA
ccggaaacacgcacaacagacttttggtgaaaccatcgggaaaagttttgacgacgccgttgcccgtttcagttt

SEQ ID NO: 770550 - DNA, 75 bp, synthetic construct
  source 1..75: mol_type = other DNA
tccggcctggatgttacagcttctccgtaaagcccgggaccgcattatccacctgctggtcacactgtgggatcg

SEQ ID NO: 770551 - DNA, 75 bp, synthetic construct
  source 1..75: mol_type = other DNA
tcactgccgcaaccgaccattagttttgccgggcagctgcacgccgcgctcgatcgcattagcgatacacaaaca

SEQ ID NO: 770552 - DNA, 75 bp, synthetic construct
  source 1..75: mol_type = other DNA
gggttatcagccagttacaggctacggcgatgagtgcgcgtgcgcaggattcactgccgcaaccgaccattagtt

SEQ ID NO: 770553 - DNA, 75 bp, synthetic construct
  source 1..75: mol_type = other DNA
aaatgcaatgtaacagctgttgtcgataacgaaaaacgcacagcggctgtcacgctggtcaaaacggatgatggc

SEQ ID NO: 770554 - DNA, 75 bp, synthetic construct
  source 1..75: mol_type = other DNA
atgtcattcagccattcttccctctcctcgcaagtcaaatcatatctgacgtttcttcctgaagaaattcgccag

SEQ ID NO: 770555 - DNA, 75 bp, synthetic construct
  source 1..75: mol_type = other DNA
atgtcattcagccattcttccctctcctctcaagtgaaatcacatctgacgtttcttcctgaagaaattcgccag

SEQ ID NO: 770556 - DNA, 75 bp, synthetic construct
  source 1..75: mol_type = other DNA
aaaaccgctctgaacaggcccagaaacacgcacaacagacttttggtgacgccatcgggaaaagctttgacgctg

SEQ ID NO: 770557 - DNA, 75 bp, synthetic construct
  source 1..75: mol_type = other DNA
cgtcaccaggaactctcactggcgacagtaatagcccgggtggccaccctgttcccttcatcatttccggtactc

SEQ ID NO: 770558 - DNA, 75 bp, synthetic construct
  source 1..75: mol_type = other DNA
ccttgaaggctacttttgtgatccattggccaaagacaaaatttgctcttatgacgctagtggaaaaattatgaa

SEQ ID NO: 770559 - DNA, 75 bp, synthetic construct
  source 1..75: mol_type = other DNA
acgatgaaagcaggtaaatcaaccaccatcaacgccattgtggggcaggaaattctgcctaaccgtaaccgcccc

SEQ ID NO: 770560 - DNA, 75 bp, synthetic construct
  source 1..75: mol_type = other DNA
ctcattcagagctctgaagatcataaacgcgatcagcaggcgcaggaacggctgaccgggcgtcttcaggcgtta

SEQ ID NO: 770561 - DNA, 75 bp, synthetic construct
  source 1..75: mol_type = other DNA
aacacctgtgactggggctggaaagagtacagtgtggatgtgagccgcagcgtgatcaatattaacaaggtcagt

SEQ ID NO: 770562 - DNA, 75 bp, synthetic construct
  source 1..75: mol_type = other DNA
ctggctcaaaaatgaataccacggggaggaggaaatctttaccggactggaatcgttaaacgatctggttcgtct

SEQ ID NO: 770563 - DNA, 75 bp, synthetic construct
  source 1..75: mol_type = other DNA
tgcaggaaaaactcgccaccccggcaggacagcagatcgcacagaccctgcagcaaaccggggatacctgcgaac

SEQ ID NO: 770564 - DNA, 75 bp, synthetic construct
  source 1..75: mol_type = other DNA
tcaggagcagatgaccactgatgtcagaatggccatggaggagatcgatgccagaacccgggaattactgacggg

SEQ ID NO: 770565 - DNA, 75 bp, synthetic construct
  source 1..75: mol_type = other DNA
ggtaaaacagtagggcaaatgtggaacaacgtcacgagctccttaacgagcgtatatgaaaacgtcgctggtaat

SEQ ID NO: 770566 - DNA, 75 bp, synthetic construct
  source 1..75: mol_type = other DNA
gatccacgcactgccaccacaggcaaccagcgcggtgtattcacatatccggggggaaaaccgctctgaacagac

SEQ ID NO: 770567 - DNA, 75 bp, synthetic construct
  source 1..75: mol_type = other DNA
tgacccgggcatatttcggggagttgcaggcatctattgagcagaatattaaccagcccgtccgccaggagatcg

SEQ ID NO: 770568 - DNA, 75 bp, synthetic construct
  source 1..75: mol_type = other DNA
aattctgcccaaccgtaaccgtcccatgacctctgttccgacgctcatccgccacgtaccaggaaaaactgagcc

SEQ ID NO: 770569 - DNA, 75 bp, synthetic construct
  source 1..75: mol_type = other DNA
acggcttaccgggagacttcaggcattaaatgaaagggttcctgagctcattactgacagtaaggcgctgaggga

SEQ ID NO: 770570 - DNA, 75 bp, synthetic construct
  source 1..75: mol_type = other DNA
ctgaattgctaccatttttacatggcctttgatggcgaaaatgcttttcttggttcttcaccggaacggttatgg

SEQ ID NO: 770571 - DNA, 75 bp, synthetic construct
  source 1..75: mol_type = other DNA
gcaacagcctgcggttcttggcgtggaaagactataaagcggtaacccgtgacctgaaacaggtttaccgcgcag

SEQ ID NO: 770572 - DNA, 75 bp, synthetic construct
  source 1..75: mol_type = other DNA
ggccgaatcttgccacgttcttcgcttatccaacggacatccgcaaagtgatctatacgacgaatgccatcgagt

SEQ ID NO: 770573 - DNA, 75 bp, synthetic construct
  source 1..75: mol_type = other DNA
cagattctgaccagacggttcaggctgtacgcttacctgatgtctcaccggcgctggtatcgaaggtcaccgatg

SEQ ID NO: 770574 - DNA, 75 bp, synthetic construct
  source 1..75: mol_type = other DNA
acttctgagaaaaggcatttacacagaatcctaaacaggctcgggtatcggtggcgatttttcgctccatttctc

SEQ ID NO: 770575 - DNA, 75 bp, synthetic construct
  source 1..75: mol_type = other DNA
tggagggcctgaaaggcttctcggatgccatcaacacagtatatccgaaggcccgcatccagttatgcatcgtgc

SEQ ID NO: 770576 - DNA, 75 bp, synthetic construct
  source 1..75: mol_type = other DNA
aatcgttgccacgttcaaagaaatgtacgacgccgatgtctcgcccacgctgatatccaaagtgaccgatgcggt

SEQ ID NO: 770577 - DNA, 75 bp, synthetic construct
  source 1..75: mol_type = other DNA
gacaagcggtatccgcagataagccggagctgggagtcgaactgggctaacctggcgacgttcttcgcttacccg

SEQ ID NO: 770578 - DNA, 75 bp, synthetic construct
  source 1..75: mol_type = other DNA
tgtgaagaaaaaccagacccgaatcaccgggatggataaccagatcctgtcgttgtacgccaaaggcctgacaac

SEQ ID NO: 770579 - DNA, 75 bp, synthetic construct
  source 1..75: mol_type = other DNA
cagcgtaatccggcctgccatcaaaaaacgcaaggtgttcccgacggatgactcagtgaaaaaggtcgtgtggct

SEQ ID NO: 770580 - DNA, 75 bp, synthetic construct
  source 1..75: mol_type = other DNA
ttgtttatcttgactgtattgtggttaaggttcgtcacggcgggagtgtcattaacaaagcggtgttcctcgcgc

SEQ ID NO: 770581 - DNA, 75 bp, synthetic construct
  source 1..75: mol_type = other DNA
atgaaatggtttacatctgagcacgtcgtagaggcatttaaaaaaggtgagttatctcgccatcaagtagtaatg

SEQ ID NO: 770582 - DNA, 75 bp, synthetic construct
  source 1..75: mol_type = other DNA
caaccaacgccatcgagtcgctgaacagcgtaatccggcatgccatcaaaaaacgcaaggtgaaccgccccggaa

SEQ ID NO: 770583 - DNA, 75 bp, synthetic construct
  source 1..75: mol_type = other DNA
aaatggagtatgccaatccagaactggcggctggcaatgagccgttttattatcgagtttggtgaccgccttagc

SEQ ID NO: 770584 - DNA, 75 bp, synthetic construct
  source 1..75: mol_type = other DNA
ctatatatattctagaacattgagtaggttattacttgaaaaacataaagatattgatgggatcgtttttccaag

SEQ ID NO: 770585 - DNA, 75 bp, synthetic construct
  source 1..75: mol_type = other DNA
attttgccgggttcatgctaaaaattttgtggccggtgcatctcaccctggacagaggaacgggagggggttacg

SEQ ID NO: 770586 - DNA, 75 bp, synthetic construct
  source 1..75: mol_type = other DNA
actgaaaggctcccagggagaaaatgcggcggcggaagtggcaaagattcaggatgaggtcatgcagtcatggcc

SEQ ID NO: 770587 - DNA, 75 bp, synthetic construct
  source 1..75: mol_type = other DNA
atgcgtgggctgattgcgcccgccagcaaagaaacccgtattccaaaatcgatatatgaaggtatccagaccatt

SEQ ID NO: 770588 - DNA, 75 bp, synthetic construct
  source 1..75: mol_type = other DNA
tttgcccctggcttcggctttttgctcacatgttctttccggcgttatcccctgattctgtggataaccgtatta

SEQ ID NO: 770589 - DNA, 75 bp, synthetic construct
  source 1..75: mol_type = other DNA
ccattgtttatcttgactgtattgtggttaaggttcgtcacggcgggagtgtcattaacaaagcggtgttcctcg

SEQ ID NO: 770590 - DNA, 75 bp, synthetic construct
  source 1..75: mol_type = other DNA
tcgcagaggcatttaaaaaaggtgagctaacacgacatcaaatagtaatgaatcgtaatatggcaaggagtagag

SEQ ID NO: 770591 - DNA, 75 bp, synthetic construct
  source 1..75: mol_type = other DNA
gaaggtggcgctaactttagttggggagaaatgtacgggttcttcgactgggaaaacttctataacggtcgccat

SEQ ID NO: 770592 - DNA, 75 bp, synthetic construct
  source 1..75: mol_type = other DNA
agcagtaacccatgcagaatttaaaggcggttttgctgatataggtattcattatcttgactggactagcagaac

SEQ ID NO: 770593 - DNA, 75 bp, synthetic construct
  source 1..75: mol_type = other DNA
ttgcggctgaactggctaaaggccttaaaaccgaagccgatctcaatgctttttcccgcatgttgaccaagctta

SEQ ID NO: 770594 - DNA, 75 bp, synthetic construct
  source 1..75: mol_type = other DNA
gataaccgcgaaattatcgatattgctgagctgaatgctgagctgaaaaccacggtcagcaaaatcgaccagttg

SEQ ID NO: 770595 - DNA, 75 bp, synthetic construct
  source 1..75: mol_type = other DNA
cagcaaggaagatgttgcccatctggcgaaatctgtcgcgtttgaagccgttgtcgctaatgactataacctgtc

SEQ ID NO: 770596 - DNA, 75 bp, synthetic construct
  source 1..75: mol_type = other DNA
agcttcatcgccagatctggcaaattgctaacgatgtcaggggttcagtcgatggatgggattttaagcagtacg

SEQ ID NO: 770597 - DNA, 75 bp, synthetic construct
  source 1..75: mol_type = other DNA
acgtccgctggaataatgaaggttcattccttaacgatgcccataaagatttaagatccgattttatcattgcta

SEQ ID NO: 770598 - DNA, 75 bp, synthetic construct
  source 1..75: mol_type = other DNA
gatactcgcgaaattatcgatatcgctgagttgaatgcagaactgaaaaccacggtcagcaaaatcgaccagttg

SEQ ID NO: 770599 - DNA, 75 bp, synthetic construct
  source 1..75: mol_type = other DNA
gcgaaatctgtcgcgtttgagaccgttgtcgcgaatgactataacctgtcggtgagcagctatgtggaagcgaaa

SEQ ID NO: 770600 - DNA, 75 bp, synthetic construct
  source 1..75: mol_type = other DNA
gcgaaatctgtcacgtttgagaccgttgtcgcgaatgactataacctgtcggtaagcagctatgtggaagcgaaa

SEQ ID NO: 770601 - DNA, 75 bp, synthetic construct
  source 1..75: mol_type = other DNA
aaaaacagtttgatgaccatatcatcgaagaaggtttttttggtcaggaaatcaaccatacgacctataacctgg

SEQ ID NO: 770602 - DNA, 75 bp, synthetic construct
  source 1..75: mol_type = other DNA
cgttaacaaaatctacgacccggcagcaggttccggttcgctgttgttgcaggctaaaaaacagtttgatgacca

SEQ ID NO: 770603 - DNA, 75 bp, synthetic construct
  source 1..75: mol_type = other DNA
cgaattgttcaaaaaagagactaacaacaatatcctggccgatgctcatatcgaacagattatgcaggtattttc

SEQ ID NO: 770604 - DNA, 75 bp, synthetic construct
  source 1..75: mol_type = other DNA
gcgaaatctgtcgcgtttgagaccgttgtcgctaatgactataacctgtcggtgagctgctatgtagaagcgaaa

SEQ ID NO: 770605 - DNA, 75 bp, synthetic construct
  source 1..75: mol_type = other DNA
agattatgcaggtatttgccagcaaggaagatgttgctcatctggcgaaatctgttgcgtttgagactgttgtcg

SEQ ID NO: 770606 - DNA, 75 bp, synthetic construct
  source 1..75: mol_type = other DNA
ggttaacatgctggaaccctataaaggccgtgtctttgatccctgctgtggttctggtggtatgttcgttcagtc

SEQ ID NO: 770607 - DNA, 75 bp, synthetic construct
  source 1..75: mol_type = other DNA
cgtctggaacaactcgttgggaaagaactgttcgctcgtcacggtcgcaacaaactgttaactgaacatggcatt

SEQ ID NO: 770608 - DNA, 75 bp, synthetic construct
  source 1..75: mol_type = other DNA
ttaacctcgacctcgatctgctgagaacatttgttgctgttgccgatctgaacacttttgctgccgctgtgtgtc

SEQ ID NO: 770609 - DNA, 75 bp, synthetic construct
  source 1..75: mol_type = other DNA
tggagagctaccataatccgtggcaatacagcccaatgtctgctccggaaggagatgactcattgttaattgaaa

SEQ ID NO: 770610 - DNA, 75 bp, synthetic construct
  source 1..75: mol_type = other DNA
ttgtttatcttgactgtattgtggttaaggttcgtcacggcgggagggtcattaacaaagcggggttcctcgcgc

SEQ ID NO: 770611 - DNA, 75 bp, synthetic construct
  source 1..75: mol_type = other DNA
cggcactgatatcaaaggtcaccgatgccgtgatggagcaggttgtagaatggcaaaaccgaccactggatgctg

SEQ ID NO: 770612 - DNA, 75 bp, synthetic construct
  source 1..75: mol_type = other DNA
atgaaatggtttacaccgaaacacgtcgtagaggcatttaaaaaaggtgagcttacacgccatcaagtagtaatg

SEQ ID NO: 770613 - DNA, 75 bp, synthetic construct
  source 1..75: mol_type = other DNA
acagtcgctatcctcggataagccggagctggcaggctaactggccgaatcttgccacgttcttcgcttatccaa

SEQ ID NO: 770614 - DNA, 75 bp, synthetic construct
  source 1..75: mol_type = other DNA
ctaaaatctgattttatcattgccaatccaccgtttaacgtgtctgactggtccggtgagcagcttcgtggcgat

SEQ ID NO: 770615 - DNA, 75 bp, synthetic construct
  source 1..75: mol_type = other DNA
atggcaagaaaacctaaagaaatcaaaacagatccgttagaagtcatcctgtggaaagcggcagacaagctgcgt

SEQ ID NO: 770616 - DNA, 75 bp, synthetic construct
  source 1..75: mol_type = other DNA
atgataagtgcaaatcgtccgataattaacctcgacctcgacctcgatctgctgagaacatttgttgctgttgcc

SEQ ID NO: 770617 - DNA, 75 bp, synthetic construct
  source 1..75: mol_type = other DNA
taaggcattgaacctgcgtacctcgccaacacactggtactgcgcagcggaatacgtattgcaaaaaggtgagcc

SEQ ID NO: 770618 - DNA, 75 bp, synthetic construct
  source 1..75: mol_type = other DNA
tggagagttatcacaacccatggcaatacagcccgctgactacccaggagggggacgattccctgttgatagaag

SEQ ID NO: 770619 - DNA, 75 bp, synthetic construct
  source 1..75: mol_type = other DNA
attaaagtggcggaattttttggtaagagtcataagaacgtattaagaaagatcaggcaaaccatttctgaatgt

SEQ ID NO: 770620 - DNA, 75 bp, synthetic construct
  source 1..75: mol_type = other DNA
gatttttgacaagaagcagatttactactgcatggattttagcggcttcgttatgctggtgatgggatttaacgg

SEQ ID NO: 770621 - DNA, 75 bp, synthetic construct
  source 1..75: mol_type = other DNA
ctggtattttggtttatctgacctggtggttcccggcatatcatcgggccagagccaatgccttatttatgatag

SEQ ID NO: 770622 - DNA, 75 bp, synthetic construct
  source 1..75: mol_type = other DNA
gcctatatcaatgcgtttaactggatgtcagcagaactccgtaagtacagcgaaagttatgaagcagaacgcaac

SEQ ID NO: 770623 - DNA, 75 bp, synthetic construct
  source 1..75: mol_type = other DNA
gaattctcgacaacccatttttgggccgtcgagaaaatcaatgacttaggtatttttgacaagaaacagatttac

SEQ ID NO: 770624 - DNA, 75 bp, synthetic construct
  source 1..75: mol_type = other DNA
cagaacttatcatgcagggaaaaacacacctggaagctgagagaaatgcagtcatgctggaatacatgaaagaga

SEQ ID NO: 770625 - DNA, 75 bp, synthetic construct
  source 1..75: mol_type = other DNA
ccaaagaagtagccggagaagtgcaggagaaatatggtgaactgaccgataattgcggacatcaggtaaaaggtg

SEQ ID NO: 770626 - DNA, 75 bp, synthetic construct
  source 1..75: mol_type = other DNA
tttgtcgatgctgagtatgctaaagaatgcgcgctggaaggtatggcgagaacgcaggttatctggctgaaagag

SEQ ID NO: 770627 - DNA, 75 bp, synthetic construct
  source 1..75: mol_type = other DNA
ccctggcgtatgcaatggcaaccctgaaacgtctgtactggcacatatccggctggctggactgtgtggcaccgg

SEQ ID NO: 770628 - DNA, 75 bp, synthetic construct
  source 1..75: mol_type = other DNA
ctgacaatgggcaaggatcttggcctgacgtccacaatgtttggcctcgccgcgacactcttttatgtcacgtac

SEQ ID NO: 770629 - DNA, 75 bp, synthetic construct
  source 1..75: mol_type = other DNA
gtgctggcgagcctcggtgggctggtttcctgtgcggcaaaggttcatttcaaagagcaggtacacgctatgaac

SEQ ID NO: 770630 - DNA, 75 bp, synthetic construct
  source 1..75: mol_type = other DNA
ggtcgatgcggaatttgcaaaggagtgcgcgctggaaggcatggctcgcacgcaggtcatctggcttaaagaggg

SEQ ID NO: 770631 - DNA, 75 bp, synthetic construct
  source 1..75: mol_type = other DNA
tgtcgtttaccggcaaaaaagctgccgccatcaaagaggcgtttatcaaagcatttaattggatgcgtgacaggc

SEQ ID NO: 770632 - DNA, 75 bp, synthetic construct
  source 1..75: mol_type = other DNA
gggagccgtgattatggcattcaggctctgctaaaaatgccagataacattccggcctcccctgattcaggttat

SEQ ID NO: 770633 - DNA, 75 bp, synthetic construct
  source 1..75: mol_type = other DNA
tgaaaaccgcatcgcgggttcagtcctcggggctgtcgctggcggggtgatagggcatcagtttggtggtggtcg

SEQ ID NO: 770634 - DNA, 75 bp, synthetic construct
  source 1..75: mol_type = other DNA
gtaatcagattcagggctctctccaggaaagcgatacttacacgaccacccaacagcgttgtaaaacggtatatg

SEQ ID NO: 770635 - DNA, 75 bp, synthetic construct
  source 1..75: mol_type = other DNA
caaaaaagccgccagtgtcacccactgacggccaacgccgggagccgtgattatggcattcaggctctgctaaaa

SEQ ID NO: 770636 - DNA, 75 bp, synthetic construct
  source 1..75: mol_type = other DNA
gatttgctatggcgaccgcgcccgctatcgtcgcgctggtgggcggcacggtggaagaagctattgatttctccc

SEQ ID NO: 770637 - DNA, 75 bp, synthetic construct
  source 1..75: mol_type = other DNA
aagcctcagttgctggcaaggctggacaggctggagcagcaggggcagattgcgttacccggatttgataaaggc

SEQ ID NO: 770638 - DNA, 75 bp, synthetic construct
  source 1..75: mol_type = other DNA
caattgcttgcaaagctggaacgtctggagagacagggacagtttttattaccgggattcgataaaggtattcaa

SEQ ID NO: 770639 - DNA, 75 bp, synthetic construct
  source 1..75: mol_type = other DNA
cagcagggcaaaatccgaatggaccgcgatccgggtacgcagatcccgctagatagcaacgggcagctgattttg

SEQ ID NO: 770640 - DNA, 75 bp, synthetic construct
  source 1..75: mol_type = other DNA
agggcgcgatgcaggaaaatgatacctacactacaacgcagcagcgctgtaaaaccgtgtatgacaagtctgaaa

SEQ ID NO: 770641 - DNA, 75 bp, synthetic construct
  source 1..75: mol_type = other DNA
ctgctcggttttatgggcgtgccgtcggcaatcgacatcacccgcgtgggtagcagcggcattctgccggtgatc

SEQ ID NO: 770642 - DNA, 75 bp, synthetic construct
  source 1..75: mol_type = other DNA
atggtgaatttacgtaaagcggctaaaggccagatgtgccagatcagaatccctggctactgcaatcacaatccc

SEQ ID NO: 770643 - DNA, 75 bp, synthetic construct
  source 1..75: mol_type = other DNA
gggttagcgcctcgcgtattgtccaccaggcacaaatttatggcgatgccgtcgtccggtatgcttttattgaac

SEQ ID NO: 770644 - DNA, 75 bp, synthetic construct
  source 1..75: mol_type = other DNA
cgtattacaggtgcggtaatgattgaaaaccatgtggagataaccgaccacgccgtcgttgaagcctttggtggc

SEQ ID NO: 770645 - DNA, 75 bp, synthetic construct
  source 1..75: mol_type = other DNA
gcgtgctatggggagaggtttgcgcgacggataacacctggatcgataatagtgaaatcagccagggcgttcata

SEQ ID NO: 770646 - DNA, 75 bp, synthetic construct
  source 1..75: mol_type = other DNA
tttcaaatgacaggggaattagtttctatagtggcatttttagggatcttattgacatctattattacttatcta

SEQ ID NO: 770647 - DNA, 75 bp, synthetic construct
  source 1..75: mol_type = other DNA
ataaagcaaggaaagaagttgttgatgctgaactcgattactcagaaaaactgtcaaaaataatttcagaaattt

SEQ ID NO: 770648 - DNA, 75 bp, synthetic construct
  source 1..75: mol_type = other DNA
gagtggactggcaatcctgatattgataacgccatcatcatgctcgaccgcatagatacgctggaaaattgcgat

SEQ ID NO: 770649 - DNA, 75 bp, synthetic construct
  source 1..75: mol_type = other DNA
gagaacaacgtctggctatgcgattgcgctaaagtctacggtcacgcgcaggtgaaagctggcatagaagaagat

SEQ ID NO: 770650 - DNA, 75 bp, synthetic construct
  source 1..75: mol_type = other DNA
gtggtggtccgattctgctcgacgagcacgttatcatacaaggtgacagttgcattacaggcgcggtaatgattg

SEQ ID NO: 770651 - DNA, 75 bp, synthetic construct
  source 1..75: mol_type = other DNA
cgaccacgccgtcgttgaagcctttgatggcgacacggttcatgtccgtggtccaaaagtcattaacggcgagga

SEQ ID NO: 770652 - DNA, 75 bp, synthetic construct
  source 1..75: mol_type = other DNA
cacaaataacgtctggattgataacgccgaaatcagtcagggcgccagaataagtgacaacgtcacaatcaaaga

SEQ ID NO: 770653 - DNA, 75 bp, synthetic construct
  source 1..75: mol_type = other DNA
taacgatgtgatagcaggaaccgctggcggctggatcgatcgcgaaacggtgttagcacaggaaggaaattgctg

SEQ ID NO: 770654 - DNA, 75 bp, synthetic construct
  source 1..75: mol_type = other DNA
acagttcgcaggtggcggaatatgccattgtggaaggtaattgtgtgttaaaacatcatgtcttgattggcggaa

SEQ ID NO: 770655 - DNA, 75 bp, synthetic construct
  source 1..75: mol_type = other DNA
gggaagattttactatcggcattctgggggctggtgtattgggcagtaaagtcgcacagagtttgcgaacctggc

SEQ ID NO: 770656 - DNA, 75 bp, synthetic construct
  source 1..75: mol_type = other DNA
atgctggcaggtcgtgaccttaaggccgtgttcgcattgggtgccggtgttgattcgattttgagtaaattacag

SEQ ID NO: 770657 - DNA, 75 bp, synthetic construct
  source 1..75: mol_type = other DNA
cgtttgatacccaatggtggattgatgcgctggggaaatcgcttccacatgcaagagtcagagcatgggaaaccg

SEQ ID NO: 770658 - DNA, 75 bp, synthetic construct
  source 1..75: mol_type = other DNA
ggtatcaacgcgcggcggttgtgcacagtggcgggatggatgaagtttcattacacgcgccgacaatcgttgccg

SEQ ID NO: 770659 - DNA, 75 bp, synthetic construct
  source 1..75: mol_type = other DNA
ggcgatgtttgccggattaacaaacccgctgccggtggcgcgttatcactcgctggttggcagtaacattccggc

SEQ ID NO: 770660 - DNA, 75 bp, synthetic construct
  source 1..75: mol_type = other DNA
aagcggtggagtatattgcacgcaccattacgcaacttgaacgaggggagacggctagcgggcaggtcgatcgcg

SEQ ID NO: 770661 - DNA, 75 bp, synthetic construct
  source 1..75: mol_type = other DNA
tggtaggtgcagtactggctacgttaactgcatgtactggtcatatcgaaaaccgtgataagaactgctcggtaa

SEQ ID NO: 770662 - DNA, 75 bp, synthetic construct
  source 1..75: mol_type = other DNA
aacctggcgcgtggtgttcatgttgtggaagatgacctgctcgcggcgctggatagcggcaaagttaaaggcgca

SEQ ID NO: 770663 - DNA, 75 bp, synthetic construct
  source 1..75: mol_type = other DNA
gatgtttttaatcgtgaacccttaccggcagaaagcccgctctggcagcatccacgcgtgacgataacaccacat

SEQ ID NO: 770664 - DNA, 75 bp, synthetic construct
  source 1..75: mol_type = other DNA
atcgtcaccaacggcgcctatacattaaaagattgggttgttaacgaacgtatcgttcttgagcgcagcccgacc

SEQ ID NO: 770665 - DNA, 75 bp, synthetic construct
  source 1..75: mol_type = other DNA
acacctgtccaaattgcgcattacctctaacgaatcttttcgatattgaaccaaaagccattggccttaatggta

SEQ ID NO: 770666 - DNA, 75 bp, synthetic construct
  source 1..75: mol_type = other DNA
attatggtgcagattacctcaccagtcaacttaaagagtgcagaaaaacttacatgatcgggttacgtattaaag

SEQ ID NO: 770667 - DNA, 75 bp, synthetic construct
  source 1..75: mol_type = other DNA
aaagtatttgccaccgggggaattggtggtgttcatcgcggggcggaacataccttcgatatttctgccgatttg

SEQ ID NO: 770668 - DNA, 75 bp, synthetic construct
  source 1..75: mol_type = other DNA
tgggttggtggctataccggcaaagatccgctggataatacctacacccggaatatgtacattgtgaagcactaa

SEQ ID NO: 770669 - DNA, 75 bp, synthetic construct
  source 1..75: mol_type = other DNA
gttcacccttctacttctccggtgccaaaagccgccattgagaaatttggcgaaaaatggactcagccgggtaat

SEQ ID NO: 770670 - DNA, 75 bp, synthetic construct
  source 1..75: mol_type = other DNA
gaaatcgatctgaatctgccagctctgcgagtggttcgtgtactcaacaggatcgcgtcaaaccgtggctatccg

SEQ ID NO: 770671 - DNA, 75 bp, synthetic construct
  source 1..75: mol_type = other DNA
agagaaacatgcagtaaaactggagtttatccagccgggtaagccgacgcagaacgctttcatcgagcgttttaa

SEQ ID NO: 770672 - DNA, 75 bp, synthetic construct
  source 1..75: mol_type = other DNA
tcgattgaaatcgatctgaatctgccagctcagcgagtggtccgtgtactcgacaggatcgcggcaaaccgtggc

SEQ ID NO: 770673 - DNA, 75 bp, synthetic construct
  source 1..75: mol_type = other DNA
gaggcgatgggcagcacgcaaagcattatggttgggtcggatggtgagttgtacggcgcatccgactcgcgcttg

SEQ ID NO: 770674 - DNA, 75 bp, synthetic construct
  source 1..75: mol_type = other DNA
acggtaaaacctggctggtcaccggtagccctggcgggagccggatcatcactacagtgctgcaaatggtggtga

SEQ ID NO: 770675 - DNA, 75 bp, synthetic construct
  source 1..75: mol_type = other DNA
aacgcctgaggcacttaatcagagctggtcgatagactttatgcacgatgcgctgatctgtggcagacgcttccg

SEQ ID NO: 770676 - DNA, 75 bp, synthetic construct
  source 1..75: mol_type = other DNA
taccttcgatatttccgccgatttacaggaactggcgcacactaatgtcaccgtagtttgtgccggagcaaaatc

SEQ ID NO: 770677 - DNA, 75 bp, synthetic construct
  source 1..75: mol_type = other DNA
gttgcccaacgccaaatacaaactcaccgcgcaaacattacagtggctggcgggggagacgttacccgacgccag

SEQ ID NO: 770678 - DNA, 75 bp, synthetic construct
  source 1..75: mol_type = other DNA
catcactgagtttgtattctgccgatattgcattccagcgctatgacatgctgcatggtatttttcgtaaacaga

SEQ ID NO: 770679 - DNA, 75 bp, synthetic construct
  source 1..75: mol_type = other DNA
ttttgccagatggctgctatcttccctgggaagtagatagctggactctggttaaccagcaaacaagctggctca

SEQ ID NO: 770680 - DNA, 75 bp, synthetic construct
  source 1..75: mol_type = other DNA
atgccaggagtaccggaagtcaaattcatgggggtattgactgtttatgtactggagggggagcgggaatataaa

SEQ ID NO: 770681 - DNA, 75 bp, synthetic construct
  source 1..75: mol_type = other DNA
tcatggggatattgactgtttatgtactgggggggacggaaatatataaaaaaaagaaaaaaagattattttttt

SEQ ID NO: 770682 - DNA, 75 bp, synthetic construct
  source 1..75: mol_type = other DNA
tgcgtaatcagccagcgctgtccgcgtttacgtcagaaattaatgcgatgagcgcaaccattatcggtcagctgg

SEQ ID NO: 770683 - DNA, 75 bp, synthetic construct
  source 1..75: mol_type = other DNA
tcagactaaagcgctgcctgcgtttttctgccgcaccagcccgtttgacgtcagcattcgtctcgacagcgccag

SEQ ID NO: 770684 - DNA, 75 bp, synthetic construct
  source 1..75: mol_type = other DNA
ccgaagagcagggcgttattggtaaagaaagtacaccgttcctgctggctcgtgttgctgaactgactggcggtg

SEQ ID NO: 770685 - DNA, 75 bp, synthetic construct
  source 1..75: mol_type = other DNA
tgatagcctgaaatccaatattcaactggtctttaataacgccattctggcgagcgaaattgccaaagaatatca

SEQ ID NO: 770686 - DNA, 75 bp, synthetic construct
  source 1..75: mol_type = other DNA
gcgctgcctgcgtttttctgccgcaccagcccgtttgacgtcagcattcgtctcgacagcgccagcgaaattgcc

SEQ ID NO: 770687 - DNA, 75 bp, synthetic construct
  source 1..75: mol_type = other DNA
acggtggcctcgtggtagcgaacccgatcccggaacagtttgctatgccggaacacactatcaatgcggcgatcg

SEQ ID NO: 770688 - DNA, 75 bp, synthetic construct
  source 1..75: mol_type = other DNA
gtggggtacatcgtggcgcggaacagacattcgatatttctgccgatttacaggaattggcgcataccaatgtta

SEQ ID NO: 770689 - DNA, 75 bp, synthetic construct
  source 1..75: mol_type = other DNA
agaacgctttcatcgagcgttttaacaggacataccgtacagaaatactcgatttttatctgttcagaacactga

SEQ ID NO: 770690 - DNA, 75 bp, synthetic construct
  source 1..75: mol_type = other DNA
cgcagacccagaaaaggtcctggacgagttattggctgaatcctcctcgctggataccagaacgataggcgaggt

SEQ ID NO: 770691 - DNA, 75 bp, synthetic construct
  source 1..75: mol_type = other DNA
aggagcagtcaccgctctacaccatggctaccagccttgaagatgcgatcgacaacatcctgcaaatcatggctg

SEQ ID NO: 770692 - DNA, 75 bp, synthetic construct
  source 1..75: mol_type = other DNA
aacaacactctgaaatacgacaaattagaacagagcaggataaaaaagatgttaacagctatgccgtagctgaat

SEQ ID NO: 770693 - DNA, 75 bp, synthetic construct
  source 1..75: mol_type = other DNA
aattgatgatttccaacgtgttcttattgatgcacgcaaagactctattttatctgatcttgaaaagatcgaggc

SEQ ID NO: 770694 - DNA, 75 bp, synthetic construct
  source 1..75: mol_type = other DNA
ccatgacggggaagcctgatttcaaccgcaccgccttcaccatgacggcgacccgcctgaggatgcagggtcata

SEQ ID NO: 770695 - DNA, 75 bp, synthetic construct
  source 1..75: mol_type = other DNA
tctgccgactatttaactttaacgacattgataaaaatggaaaagtagaaaaaataacaaaaataatagaaaatg

SEQ ID NO: 770696 - DNA, 75 bp, synthetic construct
  source 1..75: mol_type = other DNA
ctggcgcgggcattgtccgtggttccgaccccgagcaagagtggcaggaaatcgacaacaaagcggcagggctgc

SEQ ID NO: 770697 - DNA, 75 bp, synthetic construct
  source 1..75: mol_type = other DNA
gccagcacccggaacacgccgacttacgcatctgggggctgaatgcgtttgacccgtcgcagggcaatttacttt

SEQ ID NO: 770698 - DNA, 75 bp, synthetic construct
  source 1..75: mol_type = other DNA
acgctattcagcgaaagctcccttcagcatgatgcgattaaggcaaaagaatttatcgccacactggtgagtatc

SEQ ID NO: 770699 - DNA, 75 bp, synthetic construct
  source 1..75: mol_type = other DNA
ttgagtattccggtaataccgctaacgatatttatgctgatggttgtggttatatctatatgatgaaagagggac

SEQ ID NO: 770700 - DNA, 75 bp, synthetic construct
  source 1..75: mol_type = other DNA
gatgctgcttcatatcaccgtcacgtctgcgagcggaacgccgcagacctggaaatatccggttaaggtcagctg

SEQ ID NO: 770701 - DNA, 75 bp, synthetic construct
  source 1..75: mol_type = other DNA
gctgttgctgttaatcaccgtcacggataacgcgggcacaccgcagacgtttgaacaccctgtgaggattatgta

SEQ ID NO: 770702 - DNA, 75 bp, synthetic construct
  source 1..75: mol_type = other DNA
gcgcaatacattttgacgctaaacatagataaacttaatgaaataggaaaggatgagttaaaactagacattaag

SEQ ID NO: 770703 - DNA, 75 bp, synthetic construct
  source 1..75: mol_type = other DNA
attcgctacgaacgccctgttcccggtgatcgggtccagatggatacctgtaaaattggccccggtttgtatcag

SEQ ID NO: 770704 - DNA, 75 bp, synthetic construct
  source 1..75: mol_type = other DNA
gaaagccacagccgtcgccccaagcgttcaccatcaacgaaaaacggcacttgcgaagtcgctctgattctggag

SEQ ID NO: 770705 - DNA, 75 bp, synthetic construct
  source 1..75: mol_type = other DNA
tggcgaagtcgctctgattctggagttacgttccctgcgaaatttgggtgcaaggaggattcagagcgagttaaa

SEQ ID NO: 770706 - DNA, 75 bp, synthetic construct
  source 1..75: mol_type = other DNA
gaacgctgaatgaagtgcgggaaatcacggaaagatgggtgtcagaatataactgtgaacgccctcatgaatcac

SEQ ID NO: 770707 - DNA, 75 bp, synthetic construct
  source 1..75: mol_type = other DNA
tctgccagctctgcgagtggtccgtgtacttgacaggatcgcggcaaaccgcggttatccggtcatgctacgcat

SEQ ID NO: 770708 - DNA, 75 bp, synthetic construct
  source 1..75: mol_type = other DNA
tacgccggaagcgcttaaccagagctggtccatcgattttatgcatgatgggctggtctgcggcagacgcttccg

SEQ ID NO: 770709 - DNA, 75 bp, synthetic construct
  source 1..75: mol_type = other DNA
ctcctagcatgtatgcggttgatgcggttgcagctattgcagaggtgagaggctggaacgcctgtcgtgccgcca

SEQ ID NO: 770710 - DNA, 75 bp, synthetic construct
  source 1..75: mol_type = other DNA
atacgtgaagctggaacggttgcagaatgcgctgtctggcaactatccggtaactccggatggttggataagctg

SEQ ID NO: 770711 - DNA, 75 bp, synthetic construct
  source 1..75: mol_type = other DNA
tatcttcattgcttaaaaaatttgaagatttcgattctaaatggaaagttaagaagtcagaacgctcttctatga

SEQ ID NO: 770712 - DNA, 75 bp, synthetic construct
  source 1..75: mol_type = other DNA
cccaatgaagagcatatacaggaacagaattacaagcttgaacttggactgagaaaattgaaacgatgtctatga

SEQ ID NO: 770713 - DNA, 75 bp, synthetic construct
  source 1..75: mol_type = other DNA
ggccggtggtcgcccgtacgttacgatgctgaatccacgccaggttattggatggaaatcgaaagttgaaaaagg

SEQ ID NO: 770714 - DNA, 75 bp, synthetic construct
  source 1..75: mol_type = other DNA
tgccgttcatgcaaactatcagcccaatgaagagcatatacaagaacagaattacaagcttgaacttgaactgag

SEQ ID NO: 770715 - DNA, 75 bp, synthetic construct
  source 1..75: mol_type = other DNA
acaacgttatacttttaaaagtaccaaccgcatttatcttggtgatacaggactgaatctttatcttcacgctta

SEQ ID NO: 770716 - DNA, 75 bp, synthetic construct
  source 1..75: mol_type = other DNA
tcccataaagatgattttggctatctggaattagaaggtggtgctaactttagttggggagaaatgtacgggttc

SEQ ID NO: 770717 - DNA, 75 bp, synthetic construct
  source 1..75: mol_type = other DNA
cgtgtcaccgtcgatggcgaaatcgtccgcaatgcagcgtttaaactgctccctgaacacagtgtggcttacgat

SEQ ID NO: 770718 - DNA, 75 bp, synthetic construct
  source 1..75: mol_type = other DNA
gagcgtgaaaaatgctttgacgatgcactaaaaattattgatgaactgcgtaaggcagaagcagagaaagaataa

SEQ ID NO: 770719 - DNA, 75 bp, synthetic construct
  source 1..75: mol_type = other DNA
gaacaaataaggctatgggtgatagcacagcgtgggcccggcaatgacatgttcgacagaatcatgagtgtttca

SEQ ID NO: 770720 - DNA, 75 bp, synthetic construct
  source 1..75: mol_type = other DNA
acgggccagcagataactatattattcaggcaaaaatcaccttccgtgatgcgggtatattttttggtaatgacg

SEQ ID NO: 770721 - DNA, 75 bp, synthetic construct
  source 1..75: mol_type = other DNA
attggcccgtttgcccgtctgcgtcctggtgctgagttgctggaaggtgcacacgtcggtaacttcgttgagatg

SEQ ID NO: 770722 - DNA, 75 bp, synthetic construct
  source 1..75: mol_type = other DNA
caggcagaacagctgggtacgggccatgcaatgcagcaagccgcacctttttttgccgatgacgaagacatttta

SEQ ID NO: 770723 - DNA, 75 bp, synthetic construct
  source 1..75: mol_type = other DNA
gggcgatgcggaaatcggcgataacgttaacatcggcgcgggaaccattacctgcaactacgacggtgcgaataa

SEQ ID NO: 770724 - DNA, 75 bp, synthetic construct
  source 1..75: mol_type = other DNA
tgacgctggagtctccggttgctgacgatacggcagagcaatttgccaaaggcgtgcaattgcacaacgaaaaag

SEQ ID NO: 770725 - DNA, 75 bp, synthetic construct
  source 1..75: mol_type = other DNA
catcattgcgagaagacctatctggtgacgctggaatcacccgtagctgacgatacggcagagcaatttgctaaa

SEQ ID NO: 770726 - DNA, 75 bp, synthetic construct
  source 1..75: mol_type = other DNA
cctgcaactacgatggtgcgaataaatttaaaaccattattggcgacgatgtgtttgttggatccgatactcagc

SEQ ID NO: 770727 - DNA, 75 bp, synthetic construct
  source 1..75: mol_type = other DNA
attctggtgctgtctaaacataaaacggataccaaagttcagtttattgatgccagcgaactgttcaaaaaagag

SEQ ID NO: 770728 - DNA, 75 bp, synthetic construct
  source 1..75: mol_type = other DNA
attggcccgtttgcccgtttgcgtcctggtgctgagttgttggaaggtgcacacgtcggtaacttcgttgagatg

SEQ ID NO: 770729 - DNA, 75 bp, synthetic construct
  source 1..75: mol_type = other DNA
cagcaaggaagatgttgctcatctggcgaaatctgttgcgtttgagactgttgttgctaatgactataacctgtc

SEQ ID NO: 770730 - DNA, 75 bp, synthetic construct
  source 1..75: mol_type = other DNA
ctaactatgcggcgaatgctggtaagtcaggcggcgagttctttacaccgcagcacgtctctaagctgattgcac

SEQ ID NO: 770731 - DNA, 75 bp, synthetic construct
  source 1..75: mol_type = other DNA
aacaatatcctgaccgacgcccatatcgaacagattatgcaggtatttgccagcaaggaagatgttgctcatctg

SEQ ID NO: 770732 - DNA, 75 bp, synthetic construct
  source 1..75: mol_type = other DNA
cagcacgtctccaagctgattgcacaactggctatgcacgggcagaccagcgttaacaaaatctacgacccggca

SEQ ID NO: 770733 - DNA, 75 bp, synthetic construct
  source 1..75: mol_type = other DNA
ggtgatgcctatgagtttctgatatccaattatgccgccaatgcgggtaagtccggcggtgagttctttaccccg

SEQ ID NO: 770734 - DNA, 75 bp, synthetic construct
  source 1..75: mol_type = other DNA
ctaactatgcggcaaatgccggtaagtctggcggggagttcttcacaccacagcacgtctctaagctaattgctc

SEQ ID NO: 770735 - DNA, 75 bp, synthetic construct
  source 1..75: mol_type = other DNA
gccatcaggactaaaggctacttcatttacccgagtcagctgttctgcaacgttgccgctaaggcgaacaccaac

SEQ ID NO: 770736 - DNA, 75 bp, synthetic construct
  source 1..75: mol_type = other DNA
cctgtcggtgagcagctatgttgaagcgaaagatactcgcgaaattatcgatattgctgagctgaatgctgagct

SEQ ID NO: 770737 - DNA, 75 bp, synthetic construct
  source 1..75: mol_type = other DNA
aaccgtaatatggcaaggagtcgaggttatccagagcgagctgcttgcttcaatgaagcactcaagattattgat

SEQ ID NO: 770738 - DNA, 75 bp, synthetic construct
  source 1..75: mol_type = other DNA
atgaaatggtttaccccggagcacgttgtctcggcatttaaaaaaggtgagcttacacgccatcaagtagtaatg

SEQ ID NO: 770739 - DNA, 75 bp, synthetic construct
  source 1..75: mol_type = other DNA
ttttttaccgtggcggcgcggagcagaaaatccgtcagtatctggttgacaataactatgtcgaaaccgtgattt

SEQ ID NO: 770740 - DNA, 75 bp, synthetic construct
  source 1..75: mol_type = other DNA
agattactggattagtagcgcacgaaaaattgtttatacaggccctattgatcgcttttttaattatgagtttgg

SEQ ID NO: 770741 - DNA, 75 bp, synthetic construct
  source 1..75: mol_type = other DNA
aacaagccctttccctggtgggggaagatgtttatgaaaaactaattaaggggtatacggaaaaacaatggggac

SEQ ID NO: 770742 - DNA, 75 bp, synthetic construct
  source 1..75: mol_type = other DNA
ttttgtgaatcgctttgcaaaatttaatagctttataaatcgacctattgctataaataatggtaaagcttattc

SEQ ID NO: 770743 - DNA, 75 bp, synthetic construct
  source 1..75: mol_type = other DNA
attgccgaaaccttgcgcgtgctggggtatcaacgcgcagcggttgtgcacagcggcggaatggatgaagtttcc

SEQ ID NO: 770744 - DNA, 75 bp, synthetic construct
  source 1..75: mol_type = other DNA
tggtgcgtttgttggcacacaaggcgaaaataaatatggtaaagatactcaggatgtgaagtatggtgatgcctc

SEQ ID NO: 770745 - DNA, 75 bp, synthetic construct
  source 1..75: mol_type = other DNA
ctggtgatgatgcttatcgatcttggtgcgtttgttggcacacaaggcgaaaataaatatggtaaagatacctag

SEQ ID NO: 770746 - DNA, 75 bp, synthetic construct
  source 1..75: mol_type = other DNA
gaaaataaatatggtaaagatacccaggatgtgaagtataaagccgacaataaatcaggtgatgctgccaactta

SEQ ID NO: 770747 - DNA, 75 bp, synthetic construct
  source 1..75: mol_type = other DNA
gcaacagcatcaatatttctaccgccagtgcgtttgtcgccgcggcctgcgggctcaaagtggcgaaacacggca

SEQ ID NO: 770748 - DNA, 75 bp, synthetic construct
  source 1..75: mol_type = other DNA
cagctcactgctttagggacagaatttaccgtccgccagcaggataatttcacgcagcttgacgtgcagcagcac

SEQ ID NO: 770749 - DNA, 75 bp, synthetic construct
  source 1..75: mol_type = other DNA
tcatggggatattgactgtttatgtactgggggggacggaaatatataaaaaaaaagaaaaaagattattttttt

SEQ ID NO: 770750 - DNA, 75 bp, synthetic construct
  source 1..75: mol_type = other DNA
taccagtgatgattcgctggaagtgattgcccgcaaactgaatcgcgaaaaagagctggcgctggagcaaacctg

SEQ ID NO: 770751 - DNA, 75 bp, synthetic construct
  source 1..75: mol_type = other DNA
atgcggggagtgaattcaccgaaaacgagcaaaaaatcgctgactttctgcaggccaacgtgagtgagctgcaat

SEQ ID NO: 770752 - DNA, 75 bp, synthetic construct
  source 1..75: mol_type = other DNA
agcttacgggggctatgtcggtcaggcgggcgaaattcttcacggtaaagcgtcgagcattgaacatgacggtca

SEQ ID NO: 770753 - DNA, 75 bp, synthetic construct
  source 1..75: mol_type = other DNA
atataaatattatgatatgcaccaggttattcgctcggctttaaattgttctaatgcattaatagaaagtgacgc

SEQ ID NO: 770754 - DNA, 75 bp, synthetic construct
  source 1..75: mol_type = other DNA
tatcagcaacagtttgaacattttatggcggtgagcggtaagcgccgctggttgatccccatccccctccccacc

SEQ ID NO: 770755 - DNA, 75 bp, synthetic construct
  source 1..75: mol_type = other DNA
aaacaggcggggtttaccgttaaaacgtctgccagccttcaggcgctatggcgggtggtcaatcaaatcggcggt

SEQ ID NO: 770756 - DNA, 75 bp, synthetic construct
  source 1..75: mol_type = other DNA
ctcggtgtggtttcttaatgtgattacctccgtaccgtcaaccaccgccaaagcgttgattcagggactgaaaca

SEQ ID NO: 770757 - DNA, 75 bp, synthetic construct
  source 1..75: mol_type = other DNA
agaatataagtattatgatatgcaccaagtaattgcatctgcattgaaagccgtaagtaaagaggtttctcaatg

SEQ ID NO: 770758 - DNA, 75 bp, synthetic construct
  source 1..75: mol_type = other DNA
atcaaggaaatgctgttataaattatactgaaagagaagttccatttactcgtattattgagcataaacacttcg

SEQ ID NO: 770759 - DNA, 75 bp, synthetic construct
  source 1..75: mol_type = other DNA
ttggtgggcgccttgctgagtacaagtattatgatatgcatcaaataattcgttcggcattaaatacagttgaga

SEQ ID NO: 770760 - DNA, 75 bp, synthetic construct
  source 1..75: mol_type = other DNA
tggaaaattttcaagggaatgcagtggttaattacactgaacgtgaaataccctataccagaattattgaacaca

SEQ ID NO: 770761 - DNA, 75 bp, synthetic construct
  source 1..75: mol_type = other DNA
atataatctgccatttaatatgaatacgttttaccagttgtggggagtaaaaactccggctgaagctttaaaaat

SEQ ID NO: 770762 - DNA, 75 bp, synthetic construct
  source 1..75: mol_type = other DNA
acttttgataataattatttctctgatcgttaccaaggtattcctattggggggtatactaatctggtagcaaaa

SEQ ID NO: 770763 - DNA, 75 bp, synthetic construct
  source 1..75: mol_type = other DNA
agcatgggcgaaggcggcgattttatcgcgcaggagcgccaggtggctctcaacgtccgcgatgcgctgcgcaaa

SEQ ID NO: 770764 - DNA, 75 bp, synthetic construct
  source 1..75: mol_type = other DNA
aaacaggcggggtttaccgttaaaacgtctgccagccttgcggctttatggcaggtggtgaatcaaatcggcggt

SEQ ID NO: 770765 - DNA, 75 bp, synthetic construct
  source 1..75: mol_type = other DNA
tagctggaaagtgattgtcgttgaaccggaaaaacaactcacgttgttatttggtatgaaagcgccggggcttgg

SEQ ID NO: 770766 - DNA, 75 bp, synthetic construct
  source 1..75: mol_type = other DNA
ggtgtttatggtgcttggtgtcatgttagtgctctgtgcgctggttctctccatttttggcatcgaaacgcggaa

SEQ ID NO: 770767 - DNA, 75 bp, synthetic construct
  source 1..75: mol_type = other DNA
gtttggttatttcatcggctcacttactggtgggtttattggtgactactttgggcggcgcagggcgtttcgcat

SEQ ID NO: 770768 - DNA, 75 bp, synthetic construct
  source 1..75: mol_type = other DNA
tcttcacgccctatggcgttgcggcattattaacacattatgggtcgatcacggtgtttatggtacttggtgtca

SEQ ID NO: 770769 - DNA, 75 bp, synthetic construct
  source 1..75: mol_type = other DNA
tgagatccgcgacacactggaaaaggcagtcattgactgttgtgatgaggccgatatgtgaatcaggtgaacgag

SEQ ID NO: 770770 - DNA, 75 bp, synthetic construct
  source 1..75: mol_type = other DNA
caccagtaggaatatttatagcagcattaataattgatcattttcctcgcagattatttggctcattcttgctca

SEQ ID NO: 770771 - DNA, 75 bp, synthetic construct
  source 1..75: mol_type = other DNA
tactgttttaatcgcgatgaatatttcgctttataccatcaccgtatggataccgacaatatttgttaactctgg

SEQ ID NO: 770772 - DNA, 75 bp, synthetic construct
  source 1..75: mol_type = other DNA
agccctgcatctggtggataacaccgatatcgcccgcgtcagcaaacgtaagcgtgagctgacctttaacacgga

SEQ ID NO: 770773 - DNA, 75 bp, synthetic construct
  source 1..75: mol_type = other DNA
gaggatgaactattgcgtattttctctgctgactggttcaaaactggtgccggaacacctaaccaatacggacgt

SEQ ID NO: 770774 - DNA, 75 bp, synthetic construct
  source 1..75: mol_type = other DNA
gttcattgcgtataagaactcaggggatctcaaacttgccagtgaggaaaaaatccggtcgcgaatatctcattt

SEQ ID NO: 770775 - DNA, 75 bp, synthetic construct
  source 1..75: mol_type = other DNA
ttagtgctgtgtgctctggtcctctacatttttggtatcgaaacgcggaaggtgtcgctggaagaaatctcggat

SEQ ID NO: 770776 - DNA, 75 bp, synthetic construct
  source 1..75: mol_type = other DNA
tggtcgtaaccgggtgccggaaatccgtccagcgatggatctggaagcctggtgtgcagagcaggatgaagggct

SEQ ID NO: 770777 - DNA, 75 bp, synthetic construct
  source 1..75: mol_type = other DNA
gggacctcgcgttttgcgtactgagacaactgcactcaccgccattaccgcgctacaagtgcgttttggcgattt

SEQ ID NO: 770778 - DNA, 75 bp, synthetic construct
  source 1..75: mol_type = other DNA
aatttcagcatgaaactgttcagcttgtgcccgtcagtgatgtcagacggtcgttttccgtcgtggtgaaagcga

SEQ ID NO: 770779 - DNA, 75 bp, synthetic construct
  source 1..75: mol_type = other DNA
tcaaaccggacagcgtaacgaaggaagggacgattatttaccgcgtgggagagagtgctatccgtgacggtggta

SEQ ID NO: 770780 - DNA, 75 bp, synthetic construct
  source 1..75: mol_type = other DNA
atcgttacgggaaccagctaacggtaaacggtagtttcgacttcaaaaagcgcattgtggccgtagccgctgcgc

SEQ ID NO: 770781 - DNA, 75 bp, synthetic construct
  source 1..75: mol_type = other DNA
catgcagcattactgatggcaaaacatcgttacgggaaccagctaacggtaaacggtagtttcgacttcaaaaag

SEQ ID NO: 770782 - DNA, 75 bp, synthetic construct
  source 1..75: mol_type = other DNA
aaatcacgccgggccggacatgaaatccgggcgctggggtttatgacgggatccgtggcgaaggccgtatatcag

SEQ ID NO: 770783 - DNA, 75 bp, synthetic construct
  source 1..75: mol_type = other DNA
gagaacgccccccaccaattcgtgaaaaccgacaggttcaccttggggagattcccgttatgtcgattaacaatg

SEQ ID NO: 770784 - DNA, 75 bp, synthetic construct
  source 1..75: mol_type = other DNA
cgctatgatatagagccaacacagcggcgtaatacgcgctctgagggcgacaagacttatcacctagtcgtttcc

SEQ ID NO: 770785 - DNA, 75 bp, synthetic construct
  source 1..75: mol_type = other DNA
tcgagtcactgcgcgccattccgtggatttttgcctggacacaaaaccgcctgatgctccccgcctggctgggtg

SEQ ID NO: 770786 - DNA, 75 bp, synthetic construct
  source 1..75: mol_type = other DNA
ataccggggcgattctggaagccaacctgctgccaccgccggagccgaaagagagctggcgtcgcattatggatg

SEQ ID NO: 770787 - DNA, 75 bp, synthetic construct
  source 1..75: mol_type = other DNA
gctaccagtcccttcaggcatgtggcatgggtattatcgccaacggcgatctgctcgacaccctgcgccgcgtga

SEQ ID NO: 770788 - DNA, 75 bp, synthetic construct
  source 1..75: mol_type = other DNA
gaaaagctgaggcaaattctgactaagaaagcggcccgcgaacgtgaatacatccacatcccctttgagcaaaga

SEQ ID NO: 770789 - DNA, 75 bp, synthetic construct
  source 1..75: mol_type = other DNA
tctggctaaagtgaaacgtgatcgattaattgaaaatgctaaaaggacaggaaggctaaaacgctctgccatcaa

SEQ ID NO: 770790 - DNA, 75 bp, synthetic construct
  source 1..75: mol_type = other DNA
ggaaaagctgagacaaatcctcactaaaaaagcagcccgcgaacgtgaatacatccatatcccgtttgagcaaag

SEQ ID NO: 770791 - DNA, 75 bp, synthetic construct
  source 1..75: mol_type = other DNA
gacgttccagtgggatctacgttttgcggatcaccgttccggttcattatcgcgccctgatagggcagcgtgaaa

SEQ ID NO: 770792 - DNA, 75 bp, synthetic construct
  source 1..75: mol_type = other DNA
ctcgctggcatcaaagatgtttatacgtgcgaaattgtcggctacgccatgggagagcgcatgacaaaagagctg

SEQ ID NO: 770793 - DNA, 75 bp, synthetic construct
  source 1..75: mol_type = other DNA
aatgcgcaaccggttgcgcagactcaaaacagcgaactgatttaccgtcttgaagatcgtccgccgcttcctcaa

SEQ ID NO: 770794 - DNA, 75 bp, synthetic construct
  source 1..75: mol_type = other DNA
gtgattgctatggcggcaggttatgcgctggcgtggttcatgggtatgttgccagagagcaacgaaccgatggcg

SEQ ID NO: 770795 - DNA, 75 bp, synthetic construct
  source 1..75: mol_type = other DNA
atgctcaatcaaaaaattaatatcaatgtaaaaagcgtcgtaacgccagcagaaactataatgggtgaagttttt

SEQ ID NO: 770796 - DNA, 75 bp, synthetic construct
  source 1..75: mol_type = other DNA
aagacatcgcattacaggccgctgcatatttccttgctaaagagcaggaggaagaatgtaactgccctgtctgtc

SEQ ID NO: 770797 - DNA, 75 bp, synthetic construct
  source 1..75: mol_type = other DNA
acagccgggagcgtcagcttgctttttccctctggcttaaacgcctggcaggatcacgtcagaccggtcatgaaa

SEQ ID NO: 770798 - DNA, 75 bp, synthetic construct
  source 1..75: mol_type = other DNA
gttgcaggtgccgaataaacagcgtcgctggtttgcggtgctgttagggcagggcagtgagtttgcctttgtggt

SEQ ID NO: 770799 - DNA, 75 bp, synthetic construct
  source 1..75: mol_type = other DNA
aatattcaaatggtggaagagatggcgatgggcgaaaacgacaccaaagcccgcgcggcagtctataaacgcacc

SEQ ID NO: 770800 - DNA, 75 bp, synthetic construct
  source 1..75: mol_type = other DNA
gatcactacattcgtttgcgccaggctggcgtggaaaggccagagcgtgaaacctttgagggagcgctcaaaacc

SEQ ID NO: 770801 - DNA, 75 bp, synthetic construct
  source 1..75: mol_type = other DNA
attgaccggtgttgccagccgttatgtcggttttgtcgtggcgctgatgttgatcgtgctgggcctgttccctgc

SEQ ID NO: 770802 - DNA, 75 bp, synthetic construct
  source 1..75: mol_type = other DNA
gttacgcagccatgagcgataacaccttcggcgcaccgaaaaatctgctgctggcaggcgtggtcttagccttaa

SEQ ID NO: 770803 - DNA, 75 bp, synthetic construct
  source 1..75: mol_type = other DNA
atgaatatgagaaaaagttggcacttatggcaataaacgataatgatgatagtgataacctattgtgccatatct

SEQ ID NO: 770804 - DNA, 75 bp, synthetic construct
  source 1..75: mol_type = other DNA
gtaagcagaaacgcaagttcagagcgactacgaactcgaaccacaatctgccagttgcgccaaatctgctgaacc

SEQ ID NO: 770805 - DNA, 75 bp, synthetic construct
  source 1..75: mol_type = other DNA
tgatgatctgcattttaccggacgcatggtgagtcactacgaaaacggcgtcgaggtatcccgcgaacggctgcg

SEQ ID NO: 770806 - DNA, 75 bp, synthetic construct
  source 1..75: mol_type = other DNA
cgtgaaattaatccaaccagggtaaaaaagttttatcaatatttagtcaacgcttacgagaaaaaggaaccattt

SEQ ID NO: 770807 - DNA, 75 bp, synthetic construct
  source 1..75: mol_type = other DNA
taagcctaacccactttatctgcagggctgcagccgtgtcgggtgtatgccatgtattcacgcccgcaagtccga

SEQ ID NO: 770808 - DNA, 75 bp, synthetic construct
  source 1..75: mol_type = other DNA
gcactggcggagcgtgcgcgactgattaagccgtcaacgtgccatcacgatgatgatctgcgttttaccgggtgt

SEQ ID NO: 770809 - DNA, 75 bp, synthetic construct
  source 1..75: mol_type = other DNA
tgatgatctgcattttaccggacgtatggtgagtcactacgaaaacggcgttgaagtatcccgcgaacggctgcg

SEQ ID NO: 770810 - DNA, 75 bp, synthetic construct
  source 1..75: mol_type = other DNA
gggggtaaacatgcgtgatgatcgttttaattccctgaaacaggaattttccggcgttcctgataatgcagctga

SEQ ID NO: 770811 - DNA, 75 bp, synthetic construct
  source 1..75: mol_type = other DNA
atgtcaccagctcgcagttgtccatgaaggatgtgcaaacgcatctcgactactgcgttgaacagctacgcagac

SEQ ID NO: 770812 - DNA, 75 bp, synthetic construct
  source 1..75: mol_type = other DNA
tggaagatggattttatgaaagagtacacacgccgggaggcgttatatccctggtggagaactcgcaccttatga

SEQ ID NO: 770813 - DNA, 75 bp, synthetic construct
  source 1..75: mol_type = other DNA
atgcagcagtatcactatccactgaaagacggatttacggaaagaattcatactccggaaggcgtcagatcactg

SEQ ID NO: 770814 - DNA, 75 bp, synthetic construct
  source 1..75: mol_type = other DNA
caacaaaagctcgtttctgcacttttgaactgaaacatgaaccaatacgtacacaggtaatcgatccagctctgg

SEQ ID NO: 770815 - DNA, 75 bp, synthetic construct
  source 1..75: mol_type = other DNA
ctcctgaccgtcacgaagaaaccgacaaggcattcgaggaaatattctggtgtgcaggcatgcggaaagccggga

SEQ ID NO: 770816 - DNA, 75 bp, synthetic construct
  source 1..75: mol_type = other DNA
gtggtgctgctggcgattccccccaatgaagcgggtactacgcatatgcaactgctgacagcgctgaccacgcgc

SEQ ID NO: 770817 - DNA, 75 bp, synthetic construct
  source 1..75: mol_type = other DNA
gacgtatgttgccacacaggagggatggttgtacctcactggcatcaaagatgtttatacgtgcgaaattgtcgg

SEQ ID NO: 770818 - DNA, 75 bp, synthetic construct
  source 1..75: mol_type = other DNA
ctccgatggaaagcttctggggaacgctgaaaaatgagagcctgagccactatcgttttaatagccgggatgagg

SEQ ID NO: 770819 - DNA, 75 bp, synthetic construct
  source 1..75: mol_type = other DNA
ccattccggtgatgtggcgtgagcggacagaaaactggtcgtgggagctgggggcgtctggttcgtggtcgcatt

SEQ ID NO: 770820 - DNA, 75 bp, synthetic construct
  source 1..75: mol_type = other DNA
tgagattttctacaatcgtcagcgtcgtcactctcgtctggggaatatctccccgacagccttcagggaaaaata

SEQ ID NO: 770821 - DNA, 75 bp, synthetic construct
  source 1..75: mol_type = other DNA
tctgccagttgcgccaaatctgctgaaccagacgttcgctcctacagcaccaaatcaggtctgggtggcagacct

SEQ ID NO: 770822 - DNA, 75 bp, synthetic construct
  source 1..75: mol_type = other DNA
ggggattgtcttcctcgcggcctggtacatgctgcatcacacgcgtctggggcgttacatctacgcgctgggcgg

SEQ ID NO: 770823 - DNA, 75 bp, synthetic construct
  source 1..75: mol_type = other DNA
taatcagctaaaacgcatcaatgcggatacgccgggcaatacgggcctgcaaaacaatctggcgctattgctgtt

SEQ ID NO: 770824 - DNA, 75 bp, synthetic construct
  source 1..75: mol_type = other DNA
ctgagtggctactcactcggtcagggcggttactacagcccgcaggaatacctgtcgtttgccataccggtgatg

SEQ ID NO: 770825 - DNA, 75 bp, synthetic construct
  source 1..75: mol_type = other DNA
cggcgtgcgtgccgatggcgcagggataagcctgagctatgacagaggcgaggcgaacggtgtctgggcatcact

SEQ ID NO: 770826 - DNA, 75 bp, synthetic construct
  source 1..75: mol_type = other DNA
tcgatctttagtgatggcgatagcgtggcggctgcgcaatcgcaactggcagaacagcaaaaacagctggccgat

SEQ ID NO: 770827 - DNA, 75 bp, synthetic construct
  source 1..75: mol_type = other DNA
catatcaacagcctgccgcgcgcgcagtggaacagcaatattcaggaactggcaaaccgcctgcaaagcgatcag

SEQ ID NO: 770828 - DNA, 75 bp, synthetic construct
  source 1..75: mol_type = other DNA
cgatgtggcgatggcgcgcaaagattatcccgccgctgaacgctattaccagcagaccctgcgtatggacagtag

SEQ ID NO: 770829 - DNA, 75 bp, synthetic construct
  source 1..75: mol_type = other DNA
acgtcttcgtaaggagctaaggctacgctgtaagcagaaacgcaagttcagggcgactacgaactcgaaccacaa

SEQ ID NO: 770830 - DNA, 75 bp, synthetic construct
  source 1..75: mol_type = other DNA
tgcaacctacccgccagcacggctttgccattggcgcatttaatgtggcggataactgtttccttcgcgcagtcg

SEQ ID NO: 770831 - DNA, 75 bp, synthetic construct
  source 1..75: mol_type = other DNA
gtggtgagcaatgaagaactaaaaatggctgatgaaataagaaaggcacttgacgcggcagaaaataatgaaacc

SEQ ID NO: 770832 - DNA, 75 bp, synthetic construct
  source 1..75: mol_type = other DNA
gataacggagagagactgcgtgtcacgttcgcgctggactgctgtgatcgtgaggcactgcactgggcggtgact

SEQ ID NO: 770833 - DNA, 75 bp, synthetic construct
  source 1..75: mol_type = other DNA
gacggataatggttcatgctaccgggccaatgaaacacgacagttggcctggatgttgggccttgaaccgaagat

SEQ ID NO: 770834 - DNA, 75 bp, synthetic construct
  source 1..75: mol_type = other DNA
gacggataatggttcatgctaccgggcaaatgaaacacgacagttggccgggatgttgggccttgaaccgaagag

SEQ ID NO: 770835 - DNA, 75 bp, synthetic construct
  source 1..75: mol_type = other DNA
atgcactgagtaaagtcttcggctccacgccgatgaacaaacagctccgtccggatctgaatgagatcccggagc

SEQ ID NO: 770836 - DNA, 75 bp, synthetic construct
  source 1..75: mol_type = other DNA
gccgggtaatttgtgttaacgacggctccacggataataccgaagcggtaatggcggaagtcaaacgcaaatggg

SEQ ID NO: 770837 - DNA, 75 bp, synthetic construct
  source 1..75: mol_type = other DNA
tttgagtacgttaaggcgtaagcccagccaaaagaaaggctgtattgacgcaattattcctgcctataacgaagg

SEQ ID NO: 770838 - DNA, 75 bp, synthetic construct
  source 1..75: mol_type = other DNA
tgtgcctgcactggcgcctgctgctgtcccggttcggatttttcagcatcctgcccatgttctgggtggtggtgc

SEQ ID NO: 770839 - DNA, 75 bp, synthetic construct
  source 1..75: mol_type = other DNA
tatatcaaaaacgccagctggacgctggggtaaaccagatgatcttgctggtgcagctatatttttagcatcgga

SEQ ID NO: 770840 - DNA, 75 bp, synthetic construct
  source 1..75: mol_type = other DNA
ttaaaggtaaaaaagctttagtcactggagcatcatatggtattggttttgagatcgctaaagcactaagtaacg

SEQ ID NO: 770841 - DNA, 75 bp, synthetic construct
  source 1..75: mol_type = other DNA
ttattatcagcggtgcctgcgggatgttccgtactgatgtattgcgtaagttcggtttctcggatcgtactaaag

SEQ ID NO: 770842 - DNA, 75 bp, synthetic construct
  source 1..75: mol_type = other DNA
gcggcaaagaagctgaagcggaagcgatgctgcgtcagcaaccaccttccacgcgtattgacctcacgctggctg

SEQ ID NO: 770843 - DNA, 75 bp, synthetic construct
  source 1..75: mol_type = other DNA
tgaacgatcatgcgcttatgtcgtgctgaaagcgccgcatcattcattatcgctggaagaggtggtggctttttt

SEQ ID NO: 770844 - DNA, 75 bp, synthetic construct
  source 1..75: mol_type = other DNA
tgttgttagatatctttaccccggaagcctgtcttttgctacttgagcagcaacggtgtacctgcatgctcggcg

SEQ ID NO: 770845 - DNA, 75 bp, synthetic construct
  source 1..75: mol_type = other DNA
ctcattaagtcagattctcgccgacaataccccactgactacggcgataacgacccacggcgatgaattagcagc

SEQ ID NO: 770846 - DNA, 75 bp, synthetic construct
  source 1..75: mol_type = other DNA
tctggcaaactggatgttagcgaagggtattgaatcaggcgatcgcatcgcatttcaactgcctggctggtgtga

SEQ ID NO: 770847 - DNA, 75 bp, synthetic construct
  source 1..75: mol_type = other DNA
tcgacatcaaattaggcgtcaataaattccatgttgatgagggccacccgcatatcattctggcggaaaatcccg

SEQ ID NO: 770848 - DNA, 75 bp, synthetic construct
  source 1..75: mol_type = other DNA
attaccgcggactgcatcaggtaaaatacaaaagtttttgttacgcaaagatattatgcggcgattaactcagga

SEQ ID NO: 770849 - DNA, 75 bp, synthetic construct
  source 1..75: mol_type = other DNA
cgcaacgtcgtgcagcatatcgtcagcaaggattatggggcgatgcttcgttggcggattactggcaccagaccg

SEQ ID NO: 770850 - DNA, 75 bp, synthetic construct
  source 1..75: mol_type = other DNA
gctcaataagtgtcaggcaaaaatgttctttgcaccgacgttgtttaaacaaacgcgtccggtagatttaatcct

SEQ ID NO: 770851 - DNA, 75 bp, synthetic construct
  source 1..75: mol_type = other DNA
ggagagcgcatgacaaaagagctgacaggtaaagccctgtttatggcgctcaggagccagcgcccacctgccggg

SEQ ID NO: 770852 - DNA, 75 bp, synthetic construct
  source 1..75: mol_type = other DNA
atgaaagtgacattaacgtttaacgaacaacgtcgtgcggcgtatcgtcagcaaggattatggggcgatgcttcg

SEQ ID NO: 770853 - DNA, 75 bp, synthetic construct
  source 1..75: mol_type = other DNA
aaaatacaaaagtttttgttaagaaaagatattatgcggcgattaactcaggatgtctgtgaagagattgaataa

SEQ ID NO: 770854 - DNA, 75 bp, synthetic construct
  source 1..75: mol_type = other DNA
tgcctgcgccgctgggtcatgcgacaggttttctgcatggcgtaacggcgccgtttttggtaggcgcacggagcg

SEQ ID NO: 770855 - DNA, 75 bp, synthetic construct
  source 1..75: mol_type = other DNA
aacgtgctggaatctcgcgatctggcgatgcgcatttgcgagcactacgtaaccgtgacccagaaactgggtatc

SEQ ID NO: 770856 - DNA, 75 bp, synthetic construct
  source 1..75: mol_type = other DNA
ttacttgagcgtcgcgtcacgtccaactggtttgtcggcacggcaatcgatatccagcaggcgaaagattatgcg

SEQ ID NO: 770857 - DNA, 75 bp, synthetic construct
  source 1..75: mol_type = other DNA
ggcccatctccagttctttgctggcctttggcgggcaaaaagactccccgagcaataccgggaaaaaatggggcg

SEQ ID NO: 770858 - DNA, 75 bp, synthetic construct
  source 1..75: mol_type = other DNA
ccccggcagccttcagggaaaatatcatcagatggctgcttaaaaaagaacaaatggtagtgtccgctattgcca

SEQ ID NO: 770859 - DNA, 75 bp, synthetic construct
  source 1..75: mol_type = other DNA
attgacctcacgctggctgactgggcgcaacaacgacgtgattacaccgccgcccgcgctgcatatcagaatgtc

SEQ ID NO: 770860 - DNA, 75 bp, synthetic construct
  source 1..75: mol_type = other DNA
tggcgctggaccccggcagcgtatggattacttaccgactttcgcaggatctctggcaggccggacaacgcagcc

SEQ ID NO: 770861 - DNA, 75 bp, synthetic construct
  source 1..75: mol_type = other DNA
cagaaaaagctgaagcgtttatcgcctcgctctctgccagtcagcggcgtagcattgatgatatcgaacgcagcc

SEQ ID NO: 770862 - DNA, 75 bp, synthetic construct
  source 1..75: mol_type = other DNA
tgaagcaaacttttggcgtaaaaattatcaccgacgttcacgagccaagccaggcacagcctgttgctgatgttg

SEQ ID NO: 770863 - DNA, 75 bp, synthetic construct
  source 1..75: mol_type = other DNA
gaagggatgaaaatcttccaggaactgaaacagacatttggcgtaaaaattatcaccgacgttcacgaaccaagc

SEQ ID NO: 770864 - DNA, 75 bp, synthetic construct
  source 1..75: mol_type = other DNA
tcttgctcgccagactgacctggttgaagccatggcgaaaaccggtgcggtaattaacgtcaagaaaccgcagtt

SEQ ID NO: 770865 - DNA, 75 bp, synthetic construct
  source 1..75: mol_type = other DNA
agaagcaattcggctggtgattgatgaacgtcattccattcgctgcagtacacttacagcaactattacgaataa

SEQ ID NO: 770866 - DNA, 75 bp, synthetic construct
  source 1..75: mol_type = other DNA
atcgtcagcgtcgtcactctcgtctggggaatatctccccggcagccttcagggaaaaatatcatcagatgactg

SEQ ID NO: 770867 - DNA, 75 bp, synthetic construct
  source 1..75: mol_type = other DNA
gatcgaggttcacagtactgcgcatacgattacggggtcatacaggagcagtttggtctgaaaacatcaatgtcg

SEQ ID NO: 770868 - DNA, 75 bp, synthetic construct
  source 1..75: mol_type = other DNA
ttgcagggatacgttgcaggggcattgattagcacaaatgcgagtaacaacccatcctatggaaagacagcattc

SEQ ID NO: 770869 - DNA, 75 bp, synthetic construct
  source 1..75: mol_type = other DNA
gcaaattcccctgccgtcaggattttctgccagccagtgttcctggagtgtcagcaatgctgagaacccacatgg

SEQ ID NO: 770870 - DNA, 75 bp, synthetic construct
  source 1..75: mol_type = other DNA
tgcggaagttgaaaaagagacaattattaacgcagcccaggtcacaggcggtcgcattcaggaaatgtcggcttt

SEQ ID NO: 770871 - DNA, 75 bp, synthetic construct
  source 1..75: mol_type = other DNA
tcgaaacagacgcggatgttcatgcccgttcattcacggcggcaaaagtggcacgcctggacgtactgaccacac

SEQ ID NO: 770872 - DNA, 75 bp, synthetic construct
  source 1..75: mol_type = other DNA
caaccgggaataaaaacattccattaagctcgggtatggcagtcactgcagaaataaagacaggtatgcgaagtg

SEQ ID NO: 770873 - DNA, 75 bp, synthetic construct
  source 1..75: mol_type = other DNA
gtggagggaatagtgcttctgccggggagattgtgctaacccatccagattgcagggatacgttgcagggcattg

SEQ ID NO: 770874 - DNA, 75 bp, synthetic construct
  source 1..75: mol_type = other DNA
tcggcgaactggaaaaaccgcaggtgcgtaagattgctgaagatcttggtctggtcaccgcgaagaaaaaagact

SEQ ID NO: 770875 - DNA, 75 bp, synthetic construct
  source 1..75: mol_type = other DNA
caacaacagggatatcaggttgaaggcctgtttatgaagaactgggaagaagacgacggtgaggaatattgcaca

SEQ ID NO: 770876 - DNA, 75 bp, synthetic construct
  source 1..75: mol_type = other DNA
tgttaacgacgttagcggtggcagatgacacaaaactggtcgactggttacagcaacgtctggggcttttagagc

SEQ ID NO: 770877 - DNA, 75 bp, synthetic construct
  source 1..75: mol_type = other DNA
atgaaaattcaaaacaaacatgttattgcctggctggagagttgtgctgcacatcttactgaacaacaagatttt

SEQ ID NO: 770878 - DNA, 75 bp, synthetic construct
  source 1..75: mol_type = other DNA
gtacctgcaaaaacatggcctgaaatatcacccattatgggatgaaggatatttatcggtgggcgatacccatac

SEQ ID NO: 770879 - DNA, 75 bp, synthetic construct
  source 1..75: mol_type = other DNA
gaaggcattgaaaagtacaatgacatcaacaaagtcgaaccgatgaaccgggcgctgaaagaactgaatgcgcaa

SEQ ID NO: 770880 - DNA, 75 bp, synthetic construct
  source 1..75: mol_type = other DNA
ggggcgcatatcagctggaactggttcgaaacagaggcggatgttcatgcccgctcattcacggccgcaaaagcg

SEQ ID NO: 770881 - DNA, 75 bp, synthetic construct
  source 1..75: mol_type = other DNA
ggtttggcagcatgaagaaaaaccctccaaattcctactttgttactggtcataatgacttttttataggaaagc

SEQ ID NO: 770882 - DNA, 75 bp, synthetic construct
  source 1..75: mol_type = other DNA
aacgatgcggtgttgcggaaattctttgctcctttcgcgggtaaggatgcctctagctggcccgaaaatcagact

SEQ ID NO: 770883 - DNA, 75 bp, synthetic construct
  source 1..75: mol_type = other DNA
aatgaattggttgaagcgttgtttgacagcctgcctcgcgattactcatcgaaaaatcgtgcccgattgatttct

SEQ ID NO: 770884 - DNA, 75 bp, synthetic construct
  source 1..75: mol_type = other DNA
atatcgcgaagttgcgcatattatcattaacgctaacaacgaacccagccaggtgatttctgaaattcgttgcgc

SEQ ID NO: 770885 - DNA, 75 bp, synthetic construct
  source 1..75: mol_type = other DNA
ttggttcgccacttaacccgccgtctgatttggggtgtttatagcgccgaaaaccagctgctggcgtgctttcgc

SEQ ID NO: 770886 - DNA, 75 bp, synthetic construct
  source 1..75: mol_type = other DNA
caccgtcagctttgatgaaaccttaaaaccgtttgtgcgtgatgtttccggcagccgcctgaaagacttacctaa

SEQ ID NO: 770887 - DNA, 75 bp, synthetic construct
  source 1..75: mol_type = other DNA
cagaacagcgaagccgacgcccatgcacaactcgactatgccgtcgctcagggcattaatcttatcgacgttgcc

SEQ ID NO: 770888 - DNA, 75 bp, synthetic construct
  source 1..75: mol_type = other DNA
cctcaagcgcctgcagactgattacctcgatctttatcaggtgcactggccgcagcgcccaaccaactgcttcgg

SEQ ID NO: 770889 - DNA, 75 bp, synthetic construct
  source 1..75: mol_type = other DNA
acgccggtatccagacggccgcgtctggttgcttattttattatggggtttctggttattgctttcattttatct

SEQ ID NO: 770890 - DNA, 75 bp, synthetic construct
  source 1..75: mol_type = other DNA
gaagttatagtgtatgaattaccattatggtttggtaaaatgccaaaggctatgcaagtatttggttttatgttt

SEQ ID NO: 770891 - DNA, 75 bp, synthetic construct
  source 1..75: mol_type = other DNA
catgccttggctttggtacgctgaccggaaaatatctcaacggcgcaaaacccgctggcgcacgtaatacgctct

SEQ ID NO: 770892 - DNA, 75 bp, synthetic construct
  source 1..75: mol_type = other DNA
tctgcccctgcggtttctctgctcgacacgctggatgcattagcagagtaccaacgggcggggaaaattcgctat

SEQ ID NO: 770893 - DNA, 75 bp, synthetic construct
  source 1..75: mol_type = other DNA
tgttaacgacgttagcggtggcagatgacacaaaactggtggactggatacaacaacgtatcgggcgtttagaac

SEQ ID NO: 770894 - DNA, 75 bp, synthetic construct
  source 1..75: mol_type = other DNA
cttggtaaatttgttcctgcaatcggaacaactatgtttggcggcccactcatcggcgctgctacagccttcggt

SEQ ID NO: 770895 - DNA, 75 bp, synthetic construct
  source 1..75: mol_type = other DNA
aaagcatggtgcttgcagccagctttaaaacgccgcgtcaggcactggattgtttgctggcaggatgtgagtcca

SEQ ID NO: 770896 - DNA, 75 bp, synthetic construct
  source 1..75: mol_type = other DNA
ccagcaaggagtccatctgggaagtgctgccgcgtctgcaaaaagcgattggtgatgagggcattctgtttgctc

SEQ ID NO: 770897 - DNA, 75 bp, synthetic construct
  source 1..75: mol_type = other DNA
accgctatactcggcgattcttgcgcgcacgctggcaaaacaggaagcggaacaactggcgcgaagcaaggccgc

SEQ ID NO: 770898 - DNA, 75 bp, synthetic construct
  source 1..75: mol_type = other DNA
atattgaatcgtcaccagtgcttcacaccagcaatgagagcatcaacagccatgttgacgccatggatgaagcat

SEQ ID NO: 770899 - DNA, 75 bp, synthetic construct
  source 1..75: mol_type = other DNA
ctgagttggatgaacagattaagacagtccagaacgaatcgaaggtttattctgtagcggcagcgtgcttcttga

SEQ ID NO: 770900 - DNA, 75 bp, synthetic construct
  source 1..75: mol_type = other DNA
cattcgtacggttcaggagctgcaagcgctgttggaaatgcacgcgccagaaagcatggtgctggctgccagctt

SEQ ID NO: 770901 - DNA, 75 bp, synthetic construct
  source 1..75: mol_type = other DNA
atacgattgatattaacggagatgtttttggtacaacatcccatttttatgatgatcaatatcatttagatgatt

SEQ ID NO: 770902 - DNA, 75 bp, synthetic construct
  source 1..75: mol_type = other DNA
ctgcgttcgccttatctggtgcgatatttacatgcattttttcttataaagtgcgaaaactatatcctggtaatt

SEQ ID NO: 770903 - DNA, 75 bp, synthetic construct
  source 1..75: mol_type = other DNA
ggtgatgagggcattctgtttgctcagaccatgagccgcgacgcgcagggtatggtggaagaagcgaagcgcctg

SEQ ID NO: 770904 - DNA, 75 bp, synthetic construct
  source 1..75: mol_type = other DNA
acaaatgctcaacactcctgcggtagagtcggctatagagaagtttgagcacgactggaatgccgcatttggcac

SEQ ID NO: 770905 - DNA, 75 bp, synthetic construct
  source 1..75: mol_type = other DNA
aaatacgttgctccgtatgttaaccgcgtagatgcccagggcggggacggcattcgtacggttcaggagctgcaa

SEQ ID NO: 770906 - DNA, 75 bp, synthetic construct
  source 1..75: mol_type = other DNA
aagtccagacagcaactttgcgatcacttaggcgcatcaaaaagcaccatggcaaacagatacttaagagatagt

SEQ ID NO: 770907 - DNA, 75 bp, synthetic construct
  source 1..75: mol_type = other DNA
cctgctgcggcggcgctcactaagtcatggagcaaccggcaggcgattgaacagtttgtaattaacgctgcctga

SEQ ID NO: 770908 - DNA, 75 bp, synthetic construct
  source 1..75: mol_type = other DNA
atccccggaaacagattggtagttcatcaagatgaatcatcttttgagtgcagcctggatgatatcgaggttgta

SEQ ID NO: 770909 - DNA, 75 bp, synthetic construct
  source 1..75: mol_type = other DNA
agctgggttttgaagcgctgtaccccaaccgctaccgcgtgattaaagaagtggtgaaagctgcacgcggcaacc

SEQ ID NO: 770910 - DNA, 75 bp, synthetic construct
  source 1..75: mol_type = other DNA
tctggtgatattattgataatattgctgttttctcaacactggaagaagcgttgcaggacgtggatttcaccgtc

SEQ ID NO: 770911 - DNA, 75 bp, synthetic construct
  source 1..75: mol_type = other DNA
atgaagtattgctgccggatggcgctgcacgcagaggcacagcgccaccgggtatggcttttaattattcgatag

SEQ ID NO: 770912 - DNA, 75 bp, synthetic construct
  source 1..75: mol_type = other DNA
tcactgaacatctggcttacaagtggcttgatgcgcctgctgcggcggcgctcactaagtcctggagcaaccggc

SEQ ID NO: 770913 - DNA, 75 bp, synthetic construct
  source 1..75: mol_type = other DNA
actttgtcgttagctcaaaagcgcgcgccaaaattcgtcagttgctgaaaaacctcaagcgtgatgattctgtaa

SEQ ID NO: 770914 - DNA, 75 bp, synthetic construct
  source 1..75: mol_type = other DNA
aacctcaagcgtgatgattccgtaagcctcggtcgccgtctgctcaaccatgcattaggtggcagccgcaagctg

SEQ ID NO: 770915 - DNA, 75 bp, synthetic construct
  source 1..75: mol_type = other DNA
gtgctttggagacaggggtttctttactgtggctcactaccggacagggtgagacaggttcaaacattgaccata

SEQ ID NO: 770916 - DNA, 75 bp, synthetic construct
  source 1..75: mol_type = other DNA
cagcgcctttattcgcctgactgcgcgcgaccgtgtacatctggcgaatatcatgcgcaaaattcgcgtgatgcc

SEQ ID NO: 770917 - DNA, 75 bp, synthetic construct
  source 1..75: mol_type = other DNA
gtacatctggcaaatatcatgcgcaaaatccgtgtgatgccagacgtgattaaagtcacccgaaacagaaattaa

SEQ ID NO: 770918 - DNA, 75 bp, synthetic construct
  source 1..75: mol_type = other DNA
cgatgattggcccccacggcgtgccggttgaagtccagatccgtaccgaagatatggatcaaatggcggagatgg

SEQ ID NO: 770919 - DNA, 75 bp, synthetic construct
  source 1..75: mol_type = other DNA
ctgccaaacgctctctagccccccaaatccgttacacgacccggctcactactccgaccattcccccgcacccaa

SEQ ID NO: 770920 - DNA, 75 bp, synthetic construct
  source 1..75: mol_type = other DNA
acaaggcgctcagcatcactacaccatcatgatccccaatcgcggctggccggcgatagctcacgtcggtctgct

SEQ ID NO: 770921 - DNA, 75 bp, synthetic construct
  source 1..75: mol_type = other DNA
taccattttggcgatcattgtggcatgtgtgacatggcaggtggtagcacgatttatatttaaaagccccagtat

SEQ ID NO: 770922 - DNA, 75 bp, synthetic construct
  source 1..75: mol_type = other DNA
cgctcaccaagactgcgatacgttgatcttgtttgtatatgacccggattgctacataaataatcctttgggcgt

SEQ ID NO: 770923 - DNA, 75 bp, synthetic construct
  source 1..75: mol_type = other DNA
ttgttgaaggcgcaaaccatatggatctttatgacggcaaagcctatgtggctgaagcaatttcagtattagctc

SEQ ID NO: 770924 - DNA, 75 bp, synthetic construct
  source 1..75: mol_type = other DNA
ctcgtttggaaagtttcattgccagacgggactcctgcaatcgtcaagggattgaaacctatagaagacattgct

SEQ ID NO: 770925 - DNA, 75 bp, synthetic construct
  source 1..75: mol_type = other DNA
agcgaggtatggtgctgaatatcttctctggcacaggtggtggattaggtgagctgtggtcctttttattaatgc

SEQ ID NO: 770926 - DNA, 75 bp, synthetic construct
  source 1..75: mol_type = other DNA
ttatcctaacgcctggctttcagggcagcgttatttcgaactttggccgcgtatttttaacttgcgctatgcagg

SEQ ID NO: 770927 - DNA, 75 bp, synthetic construct
  source 1..75: mol_type = other DNA
cttcggcgcaccgaaaaatctgttgctggcaggcgtggtcctggccttaattatcctgcttaaccgtcagcgtaa

SEQ ID NO: 770928 - DNA, 75 bp, synthetic construct
  source 1..75: mol_type = other DNA
ctgctgttccgcaaaaagtgaaaatgttgcggggccgtctggaagtcaccgtcagacacaaatccgctgaacgcg

SEQ ID NO: 770929 - DNA, 75 bp, synthetic construct
  source 1..75: mol_type = other DNA
tgaaagcgttacgcattgtttatggtgatgaggtcatcgtcgtacagtgtgttccgcgtcaggtcgtaaagggca

SEQ ID NO: 770930 - DNA, 75 bp, synthetic construct
  source 1..75: mol_type = other DNA
tgatgaggtcatcgtcgtacagtgtgttccgcgtcaggtcgtaaagggcagggtgctcatcaaggtttatccgga

SEQ ID NO: 770931 - DNA, 75 bp, synthetic construct
  source 1..75: mol_type = other DNA
ggtgattacctgcgctttgctgcgcttatcgcccacgcccaggaagtggtgctgtacgaccatccactggagatg

SEQ ID NO: 770932 - DNA, 75 bp, synthetic construct
  source 1..75: mol_type = other DNA
tgaatgaacgtaatctgacggtaacgcagatggggcgcagtgcctttgccgtactattatttcaggatatcgcgg

SEQ ID NO: 770933 - DNA, 75 bp, synthetic construct
  source 1..75: mol_type = other DNA
atatcacggagttccagcttcctgcaggaaaagtctggctatcaccggtggtggactgcttcgacagaaaagttg

SEQ ID NO: 770934 - DNA, 75 bp, synthetic construct
  source 1..75: mol_type = other DNA
gataatcgcggtcttttatccttatcgcaagtgtatccccttgtgttggtaatttgggagcaggcaatagcacaa

SEQ ID NO: 770935 - DNA, 75 bp, synthetic construct
  source 1..75: mol_type = other DNA
ctggaaagcgatatcgaaccctttaaaggtttgctgctggggctgtttttcattggcgttggcatgtcgatagac

SEQ ID NO: 770936 - DNA, 75 bp, synthetic construct
  source 1..75: mol_type = other DNA
cgtatccgcatcattcccatgcgaataaacggatgtttgaacaggcaaggacgctggaaggcgtcgaaattcgct

SEQ ID NO: 770937 - DNA, 75 bp, synthetic construct
  source 1..75: mol_type = other DNA
accaacctgcaactgacggagatggtgaaagaacatttcccgcatttgcagatcattgctcgcgcgcgtgatgtt

SEQ ID NO: 770938 - DNA, 75 bp, synthetic construct
  source 1..75: mol_type = other DNA
cccaggaactggaagatatggccaacgcgctgtttacctctgatttctcgtcagtcagcagtgataaagcgccgt

SEQ ID NO: 770939 - DNA, 75 bp, synthetic construct
  source 1..75: mol_type = other DNA
gacctgactgcgcgcattaaagaagccagcgcacaaggcaagccaccgctggatattcacgttctgccacgcgat

SEQ ID NO: 770940 - DNA, 75 bp, synthetic construct
  source 1..75: mol_type = other DNA
gctgtacgaccatccactggagatggatctgaccgcgcgcattaaagaagccagcgcacagggcaagcccccgct

SEQ ID NO: 770941 - DNA, 75 bp, synthetic construct
  source 1..75: mol_type = other DNA
gataatcgcgatcttttatccttatcgcaaatgtatccccttgtgttaggtaatttgggagcaggcaatagcaca

SEQ ID NO: 770942 - DNA, 75 bp, synthetic construct
  source 1..75: mol_type = other DNA
ttacccgcatctcaatgaaggaaaagataatcgcgatcttttatccttatcgcaaatgtatccccttgtgttagg

SEQ ID NO: 770943 - DNA, 75 bp, synthetic construct
  source 1..75: mol_type = other DNA
gataatcgcgatcttttttccttatcgcaaatgtatccccttgtgttagggaaggtgcgaataagcggggaaatt

SEQ ID NO: 770944 - DNA, 75 bp, synthetic construct
  source 1..75: mol_type = other DNA
taaagataaagctctggcggaagcagctgctcttttgatgttaagggaaaagttcaatgccctctgggacaacag

SEQ ID NO: 770945 - DNA, 75 bp, synthetic construct
  source 1..75: mol_type = other DNA
tgccaacacagcttgtcagaaggcggaccaacaacggaaggatgcaaatataaagattcgatactcattaaaata

SEQ ID NO: 770946 - DNA, 75 bp, synthetic construct
  source 1..75: mol_type = other DNA
tgacgatccgttctggaatacacactacccacccaatggctggaactgccgctgccgtgtccggccattgtctca

SEQ ID NO: 770947 - DNA, 75 bp, synthetic construct
  source 1..75: mol_type = other DNA
caaaatccctgaagatctcagtcagtttgatcgattgctgataaactcagcgttgaagctgctctcaatgcagaa

SEQ ID NO: 770948 - DNA, 75 bp, synthetic construct
  source 1..75: mol_type = other DNA
gggatcctgccgatcgatacctataagaaagatctggatgccatcgctaatgagccgctgcattacgactgggaa

SEQ ID NO: 770949 - DNA, 75 bp, synthetic construct
  source 1..75: mol_type = other DNA
ttggggccgaagtggtcacaggttcttcgcgaatgaaagcaggtacggcgcagaaactggtgctcaacatgctct

SEQ ID NO: 770950 - DNA, 75 bp, synthetic construct
  source 1..75: mol_type = other DNA
ttcgcgaatgaaagcaggcacggcgcagaaactggtgctcaatatgctttccaccgggctgatgattaaatccgg

SEQ ID NO: 770951 - DNA, 75 bp, synthetic construct
  source 1..75: mol_type = other DNA
tgaaaccttaaaaccgtttgtgcgcgatgcttccggcagccgcctgaaagacctgcccaaaccaaacaaaagcga

SEQ ID NO: 770952 - DNA, 75 bp, synthetic construct
  source 1..75: mol_type = other DNA
agcgaagaagttcaggaagtgctggaagaacgcgatgtgctatatcgcgaagttgcgcatattatcatcgacgca

SEQ ID NO: 770953 - DNA, 75 bp, synthetic construct
  source 1..75: mol_type = other DNA
agggaagagtgggcgggattccgcgccagagaaacggcggcgctggaagcggtaactgcgccatccaccgttatc

SEQ ID NO: 770954 - DNA, 75 bp, synthetic construct
  source 1..75: mol_type = other DNA
tggctaacgaactgaccaaaaacatcaaaatccctgaagatctcagtcagtttgatcgattgctgataaactcag

SEQ ID NO: 770955 - DNA, 75 bp, synthetic construct
  source 1..75: mol_type = other DNA
ctgagcatttgcctcaacggtgcatatggtgttgacgcgacaggactgttattcctttccattctgacgggatta

SEQ ID NO: 770956 - DNA, 75 bp, synthetic construct
  source 1..75: mol_type = other DNA
tcctttaaccatgctatgtgctctggtattacctgatattaagatcttcccaattggcgtattgatgtcaattat

SEQ ID NO: 770957 - DNA, 75 bp, synthetic construct
  source 1..75: mol_type = other DNA
cccgtgacggcgctgaagacgcgcaggacgatctggtgccgtcaatccaggacgatggctgcgaaagcggcgcat

SEQ ID NO: 770958 - DNA, 75 bp, synthetic construct
  source 1..75: mol_type = other DNA
tggatgattaataaaattctgcaggatataaaaacggctgaggaatcagattttatatcaaaagagttattacag

SEQ ID NO: 770959 - DNA, 75 bp, synthetic construct
  source 1..75: mol_type = other DNA
tgaccactgcaacacccacagcccatttgatccggctattgcgccagtgcgccagtctaacctgtgcctggaaat

SEQ ID NO: 770960 - DNA, 75 bp, synthetic construct
  source 1..75: mol_type = other DNA
gaagatatcacacttttcagcccatccgacgtaccggggctgtacgacgcgttcttcgccgatcaggaagagttt

SEQ ID NO: 770961 - DNA, 75 bp, synthetic construct
  source 1..75: mol_type = other DNA
tccggggagcgccgtttcaaccaccgcagagtttgccattacaccgattgtaggtgccgaagtggttaccggttc

SEQ ID NO: 770962 - DNA, 75 bp, synthetic construct
  source 1..75: mol_type = other DNA
gattgtaatggtcttgaaaaatctcgatgccgcagaagcgaaaaaacgcctggcgcagcatggcggttttattcg

SEQ ID NO: 770963 - DNA, 75 bp, synthetic construct
  source 1..75: mol_type = other DNA
aaggctccaacaatgcctctgctgaaattgaccgcgtatcgacgctggaaatgtgtcggatcattaacgaagaag

SEQ ID NO: 770964 - DNA, 75 bp, synthetic construct
  source 1..75: mol_type = other DNA
cgtgaaagccgttgagctgttctcgctgatgatgcaggaacgtgcgtctaccgggcgtatttacattcagaacgt

SEQ ID NO: 770965 - DNA, 75 bp, synthetic construct
  source 1..75: mol_type = other DNA
gttaaaacgctgtattatcagaacacccgtgacggtgcagaagacgcacaagacgatctggtgccgtcaatccag

SEQ ID NO: 770966 - DNA, 75 bp, synthetic construct
  source 1..75: mol_type = other DNA
tccacatttaaaatttcgctgccgacaccgattatggcaggcgtacgtactccgactcgtcagttcagctcttgt

SEQ ID NO: 770967 - DNA, 75 bp, synthetic construct
  source 1..75: mol_type = other DNA
gacgcctatgagctgctgtgggaaatgccgggtaacgatggctacctgcaactggtaggtatcatgcagaaattt

SEQ ID NO: 770968 - DNA, 75 bp, synthetic construct
  source 1..75: mol_type = other DNA
gaacggtgaaatcgcgctgtgtacgctgtctgctttcaacctgggcgcaattaatagcctggatgaactggaaga

SEQ ID NO: 770969 - DNA, 75 bp, synthetic construct
  source 1..75: mol_type = other DNA
aaccgctgaacgacgtcaacgacgagaacggtgaaatcgcgctgtgtacgctgtctgctttcaacctgggcgcaa

SEQ ID NO: 770970 - DNA, 75 bp, synthetic construct
  source 1..75: mol_type = other DNA
gacggataatggttcatgctaccgggcgaatgaaacacgacagttggccaggatgttgggccttgaaccgaagac

SEQ ID NO: 770971 - DNA, 75 bp, synthetic construct
  source 1..75: mol_type = other DNA
atactcaggtggcagtcccgaaatgaaggactaccgttcgtgaatgcaaagcgtgtttaccggataatgagcgaa

SEQ ID NO: 770972 - DNA, 75 bp, synthetic construct
  source 1..75: mol_type = other DNA
ccagcaaccaccttccacgcgtattgacctcacgctggctgactgggcgcagcagcgacgtgattacaccgccgc

SEQ ID NO: 770973 - DNA, 75 bp, synthetic construct
  source 1..75: mol_type = other DNA
cctgctttccgcgctcgtgcgcaaggtttagcggcggtggactctggtatggcgggtaaagccattcccgaacta

SEQ ID NO: 770974 - DNA, 75 bp, synthetic construct
  source 1..75: mol_type = other DNA
ctcagagagctgcccacgtatggttatcgtcgggtatgggcgctgcttcgcagacaggcaaaacttgatggtatg

SEQ ID NO: 770975 - DNA, 75 bp, synthetic construct
  source 1..75: mol_type = other DNA
gagtaacggcatagcagagagcttcgtgaaaacgataaagcgtgactacatcagtgtcatgcccaaaccagacgg

SEQ ID NO: 770976 - DNA, 75 bp, synthetic construct
  source 1..75: mol_type = other DNA
attataacgaatggcatccgcatagtgcactgggttatcgctcgccacgggaatatctacggcagcaagccagta

SEQ ID NO: 770977 - DNA, 75 bp, synthetic construct
  source 1..75: mol_type = other DNA
ccgctcagcaacagttgctggagcaagttcggttaggcgaagcgacccatcgtgaagacctggtgcaacagtcgt

SEQ ID NO: 770978 - DNA, 75 bp, synthetic construct
  source 1..75: mol_type = other DNA
cagctaacgccgacgccattcttggtctgacggaagtggatattgctgccggtgacaaagcggcggcacgtagcc

SEQ ID NO: 770979 - DNA, 75 bp, synthetic construct
  source 1..75: mol_type = other DNA
atgccagaacaaagcaaagccgatcggcagggcaatccagtggcgcaagcgatgcaggctgtagcgcgtaatgtc

SEQ ID NO: 770980 - DNA, 75 bp, synthetic construct
  source 1..75: mol_type = other DNA
ctgggggcgctgggccaggcgtattctcagaaaggcgatcgcgccaatgcagtggcgaatctggaaaaagccctc

SEQ ID NO: 770981 - DNA, 75 bp, synthetic construct
  source 1..75: mol_type = other DNA
gcacaggcgcagcttggcgataccgcagcggcgcagcagacgtttaataagttgatcccgcaggcaaaatctcag

SEQ ID NO: 770982 - DNA, 75 bp, synthetic construct
  source 1..75: mol_type = other DNA
gatccaacgcaggcgctggaaacctacaaagacgctatggttgcatccggtgtgaccacgacgcgtccgcaggat

SEQ ID NO: 770983 - DNA, 75 bp, synthetic construct
  source 1..75: mol_type = other DNA
cagcgatggtgctctgacgggttcgagttctgctgtgataacggagagagactgcgtgtcacgttcgcgctggac

SEQ ID NO: 770984 - DNA, 75 bp, synthetic construct
  source 1..75: mol_type = other DNA
tcattttatatgaaacgggaatgttatagtcaatttggttctttttctttagattatcgaatatctgctgattac

SEQ ID NO: 770985 - DNA, 75 bp, synthetic construct
  source 1..75: mol_type = other DNA
cgggctaatgaaacacgccagtttgcccggatgttggggcttgaaccgaagaacacggcggtgcggagtccggag

SEQ ID NO: 770986 - DNA, 75 bp, synthetic construct
  source 1..75: mol_type = other DNA
gcacgcgacacccggagacaacggctgactaagcttactccccatccccgggcaataagggcgcgtgcgcagttg

SEQ ID NO: 770987 - DNA, 75 bp, synthetic construct
  source 1..75: mol_type = other DNA
gagaattatcggagaagtagatggagatgatctcgctatatttcgcccacttcagataaaggttagaaattcttg

SEQ ID NO: 770988 - DNA, 75 bp, synthetic construct
  source 1..75: mol_type = other DNA
gagactattattcctgaacaagtaggtggctggtacgtccgcgaggttgggctactggatgctgacggcacgcta

SEQ ID NO: 770989 - DNA, 75 bp, synthetic construct
  source 1..75: mol_type = other DNA
cttataatagtgaaaaaactctctttgatacattactttctctagaaaagcaaacgcatccagatattgaatata

SEQ ID NO: 770990 - DNA, 75 bp, synthetic construct
  source 1..75: mol_type = other DNA
ttaccggatcatgcgcctgaatgcactgctgcttgagcgtaaacccgccgtccccccatcgaaacgggcacatac

SEQ ID NO: 770991 - DNA, 75 bp, synthetic construct
  source 1..75: mol_type = other DNA
ctggattatcgctctccacgcgaatatctacggccgcaggcctgtaatgggttaagtgataatagatgtctggaa

SEQ ID NO: 770992 - DNA, 75 bp, synthetic construct
  source 1..75: mol_type = other DNA
catgctgggagcggtggaacgccgcttcggcaacgagcttccggcgtctccagtagagtggctgacggataatgg

SEQ ID NO: 770993 - DNA, 75 bp, synthetic construct
  source 1..75: mol_type = other DNA
aatggttcatgctaccgggctaatgaaacacgccagttcgcccggatgttgggacttgaaccgaagaacacggcg

SEQ ID NO: 770994 - DNA, 75 bp, synthetic construct
  source 1..75: mol_type = other DNA
cggggatggggagtaagcttagtcagccgttgtctccgggtgtcgcgtgcgcagttgcacgtcattctcagacga

SEQ ID NO: 770995 - DNA, 75 bp, synthetic construct
  source 1..75: mol_type = other DNA
ttggagataccgcagcggcgcagcagacgtttaataagttgatcccgcaggcaaaatctcagccaccgtcgatgg

SEQ ID NO: 770996 - DNA, 75 bp, synthetic construct
  source 1..75: mol_type = other DNA
tatgaagatgagctacgcagcttagagattcagaaacaaaaactggcgctggcgaaagaagaagccctgaaccgc

SEQ ID NO: 770997 - DNA, 75 bp, synthetic construct
  source 1..75: mol_type = other DNA
agtggagtggctgacggataatggttcatgctaccgggctaatgaaacacggcagtttgcccggatgttgggact

SEQ ID NO: 770998 - DNA, 75 bp, synthetic construct
  source 1..75: mol_type = other DNA
agtggagtggctgacggataatggttcatgctaccgggctaatgaaacacgtcagtttgcccggatggtgggact

SEQ ID NO: 770999 - DNA, 75 bp, synthetic construct
  source 1..75: mol_type = other DNA
ggttatcgctcgccacgggaatatctgcggcagtgggccagtgatgggttaagtgataacaggtgtctggaaata

SEQ ID NO: 771000 - DNA, 75 bp, synthetic construct
  source 1..75: mol_type = other DNA
tgctgggagcggtggaacgccgcttcggcaacgagcttccggcgtctccagtagagtggctgacggataatggtt

SEQ ID NO: 771001 - DNA, 75 bp, synthetic construct
  source 1..75: mol_type = other DNA
gcgcggaaatggacgaacagtggggctatgtcggggctaaatcgcgccagttcgcccggatgttgggacttgaac

SEQ ID NO: 771002 - DNA, 75 bp, synthetic construct
  source 1..75: mol_type = other DNA
cggagagtaacggcataacagagagcttcgtgaaaacgataaagcgtgactacatcagtatcatgcccaaaccag

SEQ ID NO: 771003 - DNA, 75 bp, synthetic construct
  source 1..75: mol_type = other DNA
atgactgtccaggaagcgattccagtcccgtctgctgcttccttcaactgccagcgcatccggtatcaccagctc

SEQ ID NO: 771004 - DNA, 75 bp, synthetic construct
  source 1..75: mol_type = other DNA
tactaccctgagagcccatctattgccagcgattttgccaccattcaggaactggctgacgaacgacgaattcgt

SEQ ID NO: 771005 - DNA, 75 bp, synthetic construct
  source 1..75: mol_type = other DNA
agtggagtggctgacggataatggttcatgctaccgggctaatgaaacacgtcagtttgcccggatgatggggct

SEQ ID NO: 771006 - DNA, 75 bp, synthetic construct
  source 1..75: mol_type = other DNA
agtggagtggctgacggataatggttcatgctaccgggctaatgaaacacgacagtttgcccggatgttggggct

SEQ ID NO: 771007 - DNA, 75 bp, synthetic construct
  source 1..75: mol_type = other DNA
agagcttcgtgaaaacgataaagcgtgactacatcagtgtcatgcccaaaccagacgggttaacggcagcaaaga

SEQ ID NO: 771008 - DNA, 75 bp, synthetic construct
  source 1..75: mol_type = other DNA
catccgcatagtgcactgggttatcgctcgccacgggaatatctacggcagcaagctagtaatgggttaagtgat

SEQ ID NO: 771009 - DNA, 75 bp, synthetic construct
  source 1..75: mol_type = other DNA
caggatctggcatggaaactgactaaccgcctgatccatgcgccaacgaaatcacttcaacaggccgcccgtgac

SEQ ID NO: 771010 - DNA, 75 bp, synthetic construct
  source 1..75: mol_type = other DNA
ggcgaatgcttatctttatagcgttgacgatctgcaaagcatcatttcgcacaacctggcgcagcgtaaagccgc

SEQ ID NO: 771011 - DNA, 75 bp, synthetic construct
  source 1..75: mol_type = other DNA
gaacacaaagtacagaagatgattatcgccaaccgtactcgcgaacgcgcccaaattctggcagatgaagtcggc

SEQ ID NO: 771012 - DNA, 75 bp, synthetic construct
  source 1..75: mol_type = other DNA
cgtaatgtcgataacaccgacagttatgcagtgctggggctgggcgatgtggcgatggcgcgaaaagattatccc

SEQ ID NO: 771013 - DNA, 75 bp, synthetic construct
  source 1..75: mol_type = other DNA
tgacaaagcaacggtgcaggatgtcatgttaggagcaatagaaaaacgctttggcgataaaggagcggaacggcc

SEQ ID NO: 771014 - DNA, 75 bp, synthetic construct
  source 1..75: mol_type = other DNA
tgcttatctttatagcgttgacgatctgcaaagcattatttcgcacaacctggcgcaacgtaaagccgccgcagt

SEQ ID NO: 771015 - DNA, 75 bp, synthetic construct
  source 1..75: mol_type = other DNA
cgccaataatcctgacagccgtctgcgtttcttgtgttggcaacatcggctttgtcgggctgatagcacctcata

SEQ ID NO: 771016 - DNA, 75 bp, synthetic construct
  source 1..75: mol_type = other DNA
gatattcgcttgccgagagtcatcatggcgttgctatgcggagccatgttaggtatggcgggagccgcaatgcag

SEQ ID NO: 771017 - DNA, 75 bp, synthetic construct
  source 1..75: mol_type = other DNA
gataacggagaaaaactgcgagtcacgttcgcgctggactgctgtgaccgtgaggcactgcactgggcggtcact

SEQ ID NO: 771018 - DNA, 75 bp, synthetic construct
  source 1..75: mol_type = other DNA
agagtggctgacggataatggttcatgctaccgggctaatgaaacacggcagtttgcccggatgttggggcttga

SEQ ID NO: 771019 - DNA, 75 bp, synthetic construct
  source 1..75: mol_type = other DNA
cagagtggctgtgaaagaaagtaatcagcgatggtgctctgacgggttcgagttccgctgtgataacggagaaaa

SEQ ID NO: 771020 - DNA, 75 bp, synthetic construct
  source 1..75: mol_type = other DNA
gtgactaccggcggcttcaacagtgaaacagtacaggacgtcatgctgggagcggtggaacgccgcttcggcaac

SEQ ID NO: 771021 - DNA, 75 bp, synthetic construct
  source 1..75: mol_type = other DNA
tccacggaagttgttgtgagtgtcaatggtaccctgcagatgctggggtctccgcgtcagcagcagggtggtgga

SEQ ID NO: 771022 - DNA, 75 bp, synthetic construct
  source 1..75: mol_type = other DNA
ttgaagaacgggatgacctgcaagaggcgctcattcgctggttgtgtgattaccataatctcaacgaagacgatc

SEQ ID NO: 771023 - DNA, 75 bp, synthetic construct
  source 1..75: mol_type = other DNA
gcgagaacgtgtatcgttttcgccggacaaacttgatcaggcgctggacagtctgctcgcacagccgatggtgca

SEQ ID NO: 771024 - DNA, 75 bp, synthetic construct
  source 1..75: mol_type = other DNA
aaggaagttactgaatggcaccgcgttgttctctatggaaaactggctgaagttgccggcgagtacctgcataag

SEQ ID NO: 771025 - DNA, 75 bp, synthetic construct
  source 1..75: mol_type = other DNA
ggggacaacctcagcagcctgtatcaggtggtcagccgtcccaggttgggccgtcgtcaaccggaagctctgctg

SEQ ID NO: 771026 - DNA, 75 bp, synthetic construct
  source 1..75: mol_type = other DNA
atatccttcagccaacggagcgttctcctgggcagataacaatgatggtcagggataccggtgatggccttgttt

SEQ ID NO: 771027 - DNA, 75 bp, synthetic construct
  source 1..75: mol_type = other DNA
acaattgcaaattaccgggcggtgaaacgattgatgaatgggcattgtggcggcgtgaccatccggctggtgaaa

SEQ ID NO: 771028 - DNA, 75 bp, synthetic construct
  source 1..75: mol_type = other DNA
gctctgcctgctgagccatttatgacgaaactttttgccgataagtctatacctgacgttgctgaccatctttat

SEQ ID NO: 771029 - DNA, 75 bp, synthetic construct
  source 1..75: mol_type = other DNA
atgattcaaacacgtaatcaatatctgcagtttatgctggttatgctggttatgctggctgcatggggcattagt

SEQ ID NO: 771030 - DNA, 75 bp, synthetic construct
  source 1..75: mol_type = other DNA
gtgccagtgctgtgtctgtcgcttttgcggcttgtacgctggcgcggcagatctttgaatcgctctctacggtca

SEQ ID NO: 771031 - DNA, 75 bp, synthetic construct
  source 1..75: mol_type = other DNA
agtgtgtccacgcggtgtctgttcatgtggcagcttctcaccattacccgccctgccgaagctgctgaggcacga

SEQ ID NO: 771032 - DNA, 75 bp, synthetic construct
  source 1..75: mol_type = other DNA
tgattgatgcagttcccagtgtaaatatcggaaaagcgttcgagaaaccgcaaaagaaaaacatgccaagcatcc

SEQ ID NO: 771033 - DNA, 75 bp, synthetic construct
  source 1..75: mol_type = other DNA
ccagcagaatggtgtggaccgttattcaactgaggttgttgtgggcgtgaatggtgtcatgcagatgctgggttc

SEQ ID NO: 771034 - DNA, 75 bp, synthetic construct
  source 1..75: mol_type = other DNA
agccaggtcagttactccagcgcccgggccagcgcgaacgtgagctggcgattttttatgggccgtcgacgtttt

SEQ ID NO: 771035 - DNA, 75 bp, synthetic construct
  source 1..75: mol_type = other DNA
acaaactcagtttacagaccgctcagaatgctgatgctggtttcagttcgctggaaaaatcactcctgcgttacg

SEQ ID NO: 771036 - DNA, 75 bp, synthetic construct
  source 1..75: mol_type = other DNA
tcacgctttcaacggtgaaacctgcgtacaaccagtctgggagagtagtgccggcagcgtttttcggacgcgatt

SEQ ID NO: 771037 - DNA, 75 bp, synthetic construct
  source 1..75: mol_type = other DNA
ggagctggcgcgacgcgtctataacagtcctttcccgctggtggatatcactatcacaccggatgacgaaatcat

SEQ ID NO: 771038 - DNA, 75 bp, synthetic construct
  source 1..75: mol_type = other DNA
tatcaagcatccaagttatgttgtttacgctgaagctataatttggcgagtggataacatggttagaaagcagcg

SEQ ID NO: 771039 - DNA, 75 bp, synthetic construct
  source 1..75: mol_type = other DNA
agctacgcgaactgtgtgacctcgacacgctgcatcttgagtcggggagttttattgaagaaagcctgaaagggc

SEQ ID NO: 771040 - DNA, 75 bp, synthetic construct
  source 1..75: mol_type = other DNA
ggcagcatcaccagcgcagtgacgggtaacaacggccagtacgtgctcgggcaggccatcggcggcgggctgaag

SEQ ID NO: 771041 - DNA, 75 bp, synthetic construct
  source 1..75: mol_type = other DNA
tgaccctggccaccagtgaatcctggcgtgataaacagagcggtgaaatgaaggagcagaccgagtggcaccgcg

SEQ ID NO: 771042 - DNA, 75 bp, synthetic construct
  source 1..75: mol_type = other DNA
ggccggccaggataaatacaccacagaggtggtggtcaatattggtggcaccatgcagatgcttggcggtcggca

SEQ ID NO: 771043 - DNA, 75 bp, synthetic construct
  source 1..75: mol_type = other DNA
tcgagccgctcgaggacggacaaacccgcggagataacattttttacagcgtaatggagcggctgaaaatgctcg

SEQ ID NO: 771044 - DNA, 75 bp, synthetic construct
  source 1..75: mol_type = other DNA
cgcgccacagcccgaaacgccgccgccagccgccgttaaaccggtctacaccctgccacagaacagcacattaat

SEQ ID NO: 771045 - DNA, 75 bp, synthetic construct
  source 1..75: mol_type = other DNA
gatgaacctgaagcggactccggcgaaccactgcgctggatagcgcccgccgatgccctgccaaccgataaaaat

SEQ ID NO: 771046 - DNA, 75 bp, synthetic construct
  source 1..75: mol_type = other DNA
cgcgcaatatgctggcgtaaaaccggaacaagtgctggtcagccgcggcgcagacgaaggcattgaactactgat

SEQ ID NO: 771047 - DNA, 75 bp, synthetic construct
  source 1..75: mol_type = other DNA
cttttcgaagtctccgccacctacctagtggctacagcgagagggcatatattcaatgatgccaataagcgtacc

SEQ ID NO: 771048 - DNA, 75 bp, synthetic construct
  source 1..75: mol_type = other DNA
ttattgcgcttcatgatgcgaatataaaccgctacggcggcctgccgggaatgtctgatccgggcagggcagagg

SEQ ID NO: 771049 - DNA, 75 bp, synthetic construct
  source 1..75: mol_type = other DNA
atggaaaatgaactcctcaaagaagccgttgaatatggacgggcaaaaaagtggatagcgcacgcgcccttattg

SEQ ID NO: 771050 - DNA, 75 bp, synthetic construct
  source 1..75: mol_type = other DNA
cgcgaggtaaagcaatacctggttggtaagcaaattggtgccaggaccgctattgctgtgttatgccgtcaggaa

SEQ ID NO: 771051 - DNA, 75 bp, synthetic construct
  source 1..75: mol_type = other DNA
ggcgctgcgactggcgagatatctgtatcttctgtcgccgccacgttacgtagattgtatggttctgcggagtag

SEQ ID NO: 771052 - DNA, 75 bp, synthetic construct
  source 1..75: mol_type = other DNA
attcaatgatgccaataagcgtaccgcgctaaacagtgcgctgctatttctacgccgtaatggggtgcaggtatt

SEQ ID NO: 771053 - DNA, 75 bp, synthetic construct
  source 1..75: mol_type = other DNA
aggccgcacacacacgcagtagttttcaagtctcaactcaaaccaaagagcgttacaaccagtgcactaatattg

SEQ ID NO: 771054 - DNA, 75 bp, synthetic construct
  source 1..75: mol_type = other DNA
ataattttggttctggtgaatcagatcatgacaattacaaatttaacacatccacggatggagagcatgcacatt

SEQ ID NO: 771055 - DNA, 75 bp, synthetic construct
  source 1..75: mol_type = other DNA
gattactggtatccctgatggtacactgacgcagaaaggagtcgttaagcttaacaatacaacaaatagcaccag

SEQ ID NO: 771056 - DNA, 75 bp, synthetic construct
  source 1..75: mol_type = other DNA
ggcactgcactgggcggtgactaccggcggcttcaacagtgaaacagtacaggacgtcatgctgggagcggtgga

SEQ ID NO: 771057 - DNA, 75 bp, synthetic construct
  source 1..75: mol_type = other DNA
gtgggggaggggctggtttaggatcaacttcgataaaccacgctgcccgcaatggcggtcgtggcttgggtggtt

SEQ ID NO: 771058 - DNA, 75 bp, synthetic construct
  source 1..75: mol_type = other DNA
cagtattgtgctggcaacacgggattacgtcgattcgcaactggatgaacacgaacattcgactaaccaccctga

SEQ ID NO: 771059 - DNA, 75 bp, synthetic construct
  source 1..75: mol_type = other DNA
gtgagcgcttcccgccagcgtccaggcaatcacctgctgcccacgctgtttgaccgcctgtgtgacgacgcccca

SEQ ID NO: 771060 - DNA, 75 bp, synthetic construct
  source 1..75: mol_type = other DNA
gttggcgcactgtggctggttggcgcgatggccgtggtgtatgtcggtgaatttctgctgggtaaagtgctggac

SEQ ID NO: 771061 - DNA, 75 bp, synthetic construct
  source 1..75: mol_type = other DNA
gcagaagggcgggacgctcattccagtgcagacagcgcaaggggtcagcaacaattgcaaattaccgggcggtga

SEQ ID NO: 771062 - DNA, 75 bp, synthetic construct
  source 1..75: mol_type = other DNA
caaatccggcgtgtaaccaggtgaatcatttgataccaacgagggttttagtgaaaggaggtgaaatcacctgta

SEQ ID NO: 771063 - DNA, 75 bp, synthetic construct
  source 1..75: mol_type = other DNA
atgaagcctatatcgagttttgcccgcaggcatcgctggctggctggctggcggaatatccgcacctggctattt

SEQ ID NO: 771064 - DNA, 75 bp, synthetic construct
  source 1..75: mol_type = other DNA
ctacccgctctcgacgccggttgccgacattgcagcccaggcgttaagcccgcaggggatcgtcgccatgcgcga

SEQ ID NO: 771065 - DNA, 75 bp, synthetic construct
  source 1..75: mol_type = other DNA
caagctggacggcgtaaaagtggtctatgtttgcagccccaacaacccgaccgggcaactgatcaatccgcagga

SEQ ID NO: 771066 - DNA, 75 bp, synthetic construct
  source 1..75: mol_type = other DNA
ttgctcaacacggtcagtcatgaagataatattgatgccgcgcgttacccgcaggctgcggcttccgtactgaac

SEQ ID NO: 771067 - DNA, 75 bp, synthetic construct
  source 1..75: mol_type = other DNA
tacggcctgccgccactggcgggcagctttctgtatgagcacaagtgggacgatatccgcagggccattttgcga

SEQ ID NO: 771068 - DNA, 75 bp, synthetic construct
  source 1..75: mol_type = other DNA
ctgctcaacaccatcagccatgaagatgatattgatgccgcgcgttacccgcaggcggctgcttccgtagtgaac

SEQ ID NO: 771069 - DNA, 75 bp, synthetic construct
  source 1..75: mol_type = other DNA
tcgtcagtcaggggcatttgatcgcccacggcacgcctacagaaatcttacaagacgaacacgttaagcgtgtat

SEQ ID NO: 771070 - DNA, 75 bp, synthetic construct
  source 1..75: mol_type = other DNA
gattttctggaaatagttagccagtatatgactgccaaaggggaaaagttaatgccgactaaccgtaaagtcgcc

SEQ ID NO: 771071 - DNA, 75 bp, synthetic construct
  source 1..75: mol_type = other DNA
tcgtcggcccagctaactacttttcacatccaggcagtctcaatcacctgcatgattttttcactgatgaacagc

SEQ ID NO: 771072 - DNA, 75 bp, synthetic construct
  source 1..75: mol_type = other DNA
ggatgttggggcttgaaccgaagaacacggcggtgcggagtccggagagtaacgggatagcagagagcttcgtga

SEQ ID NO: 771073 - DNA, 75 bp, synthetic construct
  source 1..75: mol_type = other DNA
ggatgttgggccttgaaccgaagaccacggcggtgcggagtccggagagtaacggaatagcagagagcttcgtga

SEQ ID NO: 771074 - DNA, 75 bp, synthetic construct
  source 1..75: mol_type = other DNA
ggatgttgggccttgaaccgaagaacacggcggtgcggagtccggagagtaacggcatagcagagagcttcgtga

SEQ ID NO: 771075 - DNA, 75 bp, synthetic construct
  source 1..75: mol_type = other DNA
gaaactgccggaagtggtgaaacaaaaaggccgggtgaccggcagtgaataccgccagcttgagggattcacgcg

SEQ ID NO: 771076 - DNA, 75 bp, synthetic construct
  source 1..75: mol_type = other DNA
tggccgttcagcaacctgccgttgatgatgagcctgatgaagaatacgagcgtaatttccagcggggattgcagt

SEQ ID NO: 771077 - DNA, 75 bp, synthetic construct
  source 1..75: mol_type = other DNA
ggatgttggggcttgaaccgaagagcacggcggtgcggagtccggagagtaacggaatagcagagagcttcgtga

SEQ ID NO: 771078 - DNA, 75 bp, synthetic construct
  source 1..75: mol_type = other DNA
agattcagaaacaaaaactggcgctggcgaaagaagaagcccgcgttaagcgagaaaacgaatttatcgatcagg

SEQ ID NO: 771079 - DNA, 75 bp, synthetic construct
  source 1..75: mol_type = other DNA
cccttagcctcgactaccgtcactggataatctccgtcaggcttccttactccgaacgcccaccgcgtctgtccc

SEQ ID NO: 771080 - DNA, 75 bp, synthetic construct
  source 1..75: mol_type = other DNA
caacaaccgcccgcattctgaactgccgatgaaaccaaacgggaagcattacagcccggctgagttcagaaaaaa

SEQ ID NO: 771081 - DNA, 75 bp, synthetic construct
  source 1..75: mol_type = other DNA
ggatgttgggtcttgaaccgaagaacacggcggtgcggagtccggagagtaacggtatagcagagagcttcgtga

SEQ ID NO: 771082 - DNA, 75 bp, synthetic construct
  source 1..75: mol_type = other DNA
ggatgttgggacttgaaccgaagaacacggcggtgcggagtccggagagtaacggaatagcagagagcttcgtga

SEQ ID NO: 771083 - DNA, 75 bp, synthetic construct
  source 1..75: mol_type = other DNA
gataatctccgccaggctcccttattccgaacgcccaccgcgtccgtcccgcacattccagcagcgcatctggag

SEQ ID NO: 771084 - DNA, 75 bp, synthetic construct
  source 1..75: mol_type = other DNA
aaccaaccgcgatttacgctcggcatttaccgccctgcaacagggcaaacggctgaacgcccggcagcagtcagc

SEQ ID NO: 771085 - DNA, 75 bp, synthetic construct
  source 1..75: mol_type = other DNA
ttatgaaaaacggtcagccagttaataatcaatccgttacattctcaacaaactttgggatgttcaacggtaagt

SEQ ID NO: 771086 - DNA, 75 bp, synthetic construct
  source 1..75: mol_type = other DNA
gcatggacacagcaaacagcagatgatatacctaaaggttggactagtacatttgacatagttacaaaaaatgaa

SEQ ID NO: 771087 - DNA, 75 bp, synthetic construct
  source 1..75: mol_type = other DNA
tacgagtttcagaaagatctcagcttcgatcgtcgtcactggataatctccgccaggctcccttattccgaacgc

SEQ ID NO: 771088 - DNA, 75 bp, synthetic construct
  source 1..75: mol_type = other DNA
gtacttataacttaataacacaaaaccctcttcccggggttaacgtaaaaactccaaatgtctatgcggtttgtg

SEQ ID NO: 771089 - DNA, 75 bp, synthetic construct
  source 1..75: mol_type = other DNA
tgatgaagggggataagcctgtatctaatcaggaagtgacctttacgacgaccttaggtaagttaagtaattcca

SEQ ID NO: 771090 - DNA, 75 bp, synthetic construct
  source 1..75: mol_type = other DNA
caatggcgctctcaagatccaagtgttgcatcagttgatgctttaactggtcgagttactttgctgaagaaagga

SEQ ID NO: 771091 - DNA, 75 bp, synthetic construct
  source 1..75: mol_type = other DNA
cggcacgctgatgagccttatatgctcgatatcatgccgtcttatgacaccattcgccgcgcaatgaagaaactg

SEQ ID NO: 771092 - DNA, 75 bp, synthetic construct
  source 1..75: mol_type = other DNA
tgatgcacgaatcgcgatcgtcagcgaagtgatgaaagtcgcgcaacaacctggtttcagctgtgcgaaggctat

SEQ ID NO: 771093 - DNA, 75 bp, synthetic construct
  source 1..75: mol_type = other DNA
ggtggaggcatatcgcggatcaccacaactgatggtcgaacgcctcaatgccctgactgaaaaccagcgccaggt

SEQ ID NO: 771094 - DNA, 75 bp, synthetic construct
  source 1..75: mol_type = other DNA
atggcgcaaaattccagactacacaattctgataattcagccgcctttgccagcaggcacgggcggcgctctcat

SEQ ID NO: 771095 - DNA, 75 bp, synthetic construct
  source 1..75: mol_type = other DNA
aacatgataattcgaccgttcttgcccacacgcacgagcggtattctcacgcatttaagtcagactggtaccagc

SEQ ID NO: 771096 - DNA, 75 bp, synthetic construct
  source 1..75: mol_type = other DNA
ggtggccgatgcacgaatcgcgatcgtcagcgaagtgatgaaagtcgcgcaacaacccggctttagttgcgctaa

SEQ ID NO: 771097 - DNA, 75 bp, synthetic construct
  source 1..75: mol_type = other DNA
gcgacgaaataaaaccggaagaaattagctggctgcctgaatttctggcgcagtatcgtcaggctaacggcagac

SEQ ID NO: 771098 - DNA, 75 bp, synthetic construct
  source 1..75: mol_type = other DNA
accacgcaaatttatacgcatgtcgctactgagcgtctgcggcaacttcatcaacagcatcaccctcgggcgtga

SEQ ID NO: 771099 - DNA, 75 bp, synthetic construct
  source 1..75: mol_type = other DNA
atgaagctccaggagatatttctatcaaccctggggctgccactccaaacccagacaattcggatggtagttcct

SEQ ID NO: 771100 - DNA, 75 bp, synthetic construct
  source 1..75: mol_type = other DNA
caatcctggggctgccactccgagcctcaacaactcggatggtagtcccttcttcgcatggaggcaatataaaca

SEQ ID NO: 771101 - DNA, 75 bp, synthetic construct
  source 1..75: mol_type = other DNA
ggcgcggcattattgaacgcctgaaccggacgctgccgatgcgtatagccaggaggtatcgcacctattttggca

SEQ ID NO: 771102 - DNA, 75 bp, synthetic construct
  source 1..75: mol_type = other DNA
gagggattatagagcgtctgaaccgcactctggctatgcgtatatcacgtcagtttgccacgtattatggcaccg

SEQ ID NO: 771103 - DNA, 75 bp, synthetic construct
  source 1..75: mol_type = other DNA
ggtcgaaaggttattgcaggcaccgctggtggatcagccactggaactgcgtgacaaagcgatgctcgaagtgtt

SEQ ID NO: 771104 - DNA, 75 bp, synthetic construct
  source 1..75: mol_type = other DNA
tgttaccagtcggagcggagattttgtcacgaacggtgcaatagtgatccacacccaacgcctgaaatcagatcc

SEQ ID NO: 771105 - DNA, 75 bp, synthetic construct
  source 1..75: mol_type = other DNA
cggaagcggaagtgcagttctttggtaaaccgtacagtatgcagttgagaaaagagtttgtgagacaggtgatga

SEQ ID NO: 771106 - DNA, 75 bp, synthetic construct
  source 1..75: mol_type = other DNA
gacggataatggttcatgctaccgggcgaatgaaacacgacagttggcccggatgttgggccttgaaccgaagaa

SEQ ID NO: 771107 - DNA, 75 bp, synthetic construct
  source 1..75: mol_type = other DNA
attgctattggtatccagtcgaaaggcaccacagttatccaccagcaagggcttcctcccctgtctaacctggag

SEQ ID NO: 771108 - DNA, 75 bp, synthetic construct
  source 1..75: mol_type = other DNA
ccgatgtcgcattcgtagcagtcgaaggcgatcgtcttagtggttcaggtattgctatcggtattcagtcgaaag

SEQ ID NO: 771109 - DNA, 75 bp, synthetic construct
  source 1..75: mol_type = other DNA
gggatggcaatggttcagcgcaaacaatgacaaaatcacccgtactgcatcgggcgctgacagtcttacacggct

SEQ ID NO: 771110 - DNA, 75 bp, synthetic construct
  source 1..75: mol_type = other DNA
tgtacttaaccgtgatctgcgttcagcgtttaaccccctgcaacaggaaaagccactgaacgaccgccagaaagc

SEQ ID NO: 771111 - DNA, 75 bp, synthetic construct
  source 1..75: mol_type = other DNA
tacaacgctgagcgtgatgaatatctgaatcattcactggatattctggaacagaaaagacgtaaaaagctgttt

SEQ ID NO: 771112 - DNA, 75 bp, synthetic construct
  source 1..75: mol_type = other DNA
ccggcagtgaataccgtcagcttgaaggattcacccgccgcgactggacagctatgccggtgaattatgtctgga

SEQ ID NO: 771113 - DNA, 75 bp, synthetic construct
  source 1..75: mol_type = other DNA
gatgtactggcggcgcggattatatcgctgaatgccgatctttctgacaccgaagcgcggtggcagcaggaactg

SEQ ID NO: 771114 - DNA, 75 bp, synthetic construct
  source 1..75: mol_type = other DNA
gacattcatgacgcagagcgaattacggtacgccgtaaagacggcagctttatttgtgaggcgatatggaacggc

SEQ ID NO: 771115 - DNA, 75 bp, synthetic construct
  source 1..75: mol_type = other DNA
gaaatgtgcgcatccgatccacgggcgtccattctcaccagaagtcacgtttgtgatcgatggtggaacacggtt

SEQ ID NO: 771116 - DNA, 75 bp, synthetic construct
  source 1..75: mol_type = other DNA
cattcacgatgccgagcgaattacggtacgccgtaaggacggtagctttatctgtgaggcgatatggaacggcaa

SEQ ID NO: 771117 - DNA, 75 bp, synthetic construct
  source 1..75: mol_type = other DNA
caggcgatgacagagaaaacagctatcacgcaaatctgcatccgtgttgatgaggatgaacagattatttttgaa

SEQ ID NO: 771118 - DNA, 75 bp, synthetic construct
  source 1..75: mol_type = other DNA
ggattacgacgaagattatgaacgcgatttcaggctgggtttgcagaaacttgcagccatacaggaacaggatga

SEQ ID NO: 771119 - DNA, 75 bp, synthetic construct
  source 1..75: mol_type = other DNA
aaaattcgtgatgctgaagatgaaggtattcagattctggaacacaaacaggccgaaccctggctggataatgtt

SEQ ID NO: 771120 - DNA, 75 bp, synthetic construct
  source 1..75: mol_type = other DNA
agcgtgccgcagagcccggcgagcgtgatgaaatcacgctgcaacaggcagaaacggcattaagagactggcagg

SEQ ID NO: 771121 - DNA, 75 bp, synthetic construct
  source 1..75: mol_type = other DNA
accggtagatgaactattagatattcttccgtctttaatcacttcatctcctgaattaacagaaatgccttatga

SEQ ID NO: 771122 - DNA, 75 bp, synthetic construct
  source 1..75: mol_type = other DNA
ccgccgggcgcatggtgaaagatgaagccagccagatcctcgaactccccatccgtctggcgcagcgtgttaccg

SEQ ID NO: 771123 - DNA, 75 bp, synthetic construct
  source 1..75: mol_type = other DNA
attgccgtggggaactgcccggaaagttataaaccgcaactggctgaaggcagcgggcgcacccagaccgtgcgc

SEQ ID NO: 771124 - DNA, 75 bp, synthetic construct
  source 1..75: mol_type = other DNA
cttaatgtcggcgtcagtaatatcctcaataaacagatcttccgatcttctgaaggggcgaatacctataacgag

SEQ ID NO: 771125 - DNA, 75 bp, synthetic construct
  source 1..75: mol_type = other DNA
cttgctttgatacttttttatgcagggggaacggcttttgttatatatgccgccgctacgatgttaattgccaaa

SEQ ID NO: 771126 - DNA, 75 bp, synthetic construct
  source 1..75: mol_type = other DNA
ccaacgacgggttgtgcgcgaacgtttgcaggcgctggaaatcattaatgagcgctttgcccgccattttcgtat

SEQ ID NO: 771127 - DNA, 75 bp, synthetic construct
  source 1..75: mol_type = other DNA
cacaaacacaaacggtggtaacggaggtgtgccgagtactggcgatataaacatcattggtggatgtggaggcga

SEQ ID NO: 771128 - DNA, 75 bp, synthetic construct
  source 1..75: mol_type = other DNA
tgactaatcagggcgcagcacgactggctaacgcgacgatgctcggcagtaagctgaatctaacgcaaatggccg

SEQ ID NO: 771129 - DNA, 75 bp, synthetic construct
  source 1..75: mol_type = other DNA
tctttataaagaaaaaaataaatataaaaatattttactttcatgtgttgcatttgcctgcctgtatatttgctt

SEQ ID NO: 771130 - DNA, 75 bp, synthetic construct
  source 1..75: mol_type = other DNA
cgtactgacaaacttggcaccgagtatgtcatcgccctgatccctttgggcggttatgtcaaaatgctggatgag

SEQ ID NO: 771131 - DNA, 75 bp, synthetic construct
  source 1..75: mol_type = other DNA
ctggaaaatgtgcagccaaactcagcggcaagcaaggcgggtttgcaagcaggcgacaggatcgttaaagtcgat

SEQ ID NO: 771132 - DNA, 75 bp, synthetic construct
  source 1..75: mol_type = other DNA
atatttcgccgttttttttattcatgccctcattagcgaaagctgatgataactttgaattacctgttaacatgc

SEQ ID NO: 771133 - DNA, 75 bp, synthetic construct
  source 1..75: mol_type = other DNA
ttaactatatcctgcttaatgtttttgtaacgctgactattcatattcttattgaatttatgagcaaccaattcc

SEQ ID NO: 771134 - DNA, 75 bp, synthetic construct
  source 1..75: mol_type = other DNA
cggcggctctggcccctaaagtcaaagccgaaatggcagcaatacaggcgcagctggatgccttacccgcagaag

SEQ ID NO: 771135 - DNA, 75 bp, synthetic construct
  source 1..75: mol_type = other DNA
tggagctggtcgccaactttgccgatatctcgctacgcctgtcgcagattttaaaactgaaacccggcgacgtcc

SEQ ID NO: 771136 - DNA, 75 bp, synthetic construct
  source 1..75: mol_type = other DNA
tgggtaaaacgctggaagccggtattctggtttcggaactgatccgtcgtgggcgcggaaaacgtattctggttc

SEQ ID NO: 771137 - DNA, 75 bp, synthetic construct
  source 1..75: mol_type = other DNA
agtcagggcatctggcacaactggacctcatcgctgtccggtgggaacagcatcattcctgccaccctgcgcagc

SEQ ID NO: 771138 - DNA, 75 bp, synthetic construct
  source 1..75: mol_type = other DNA
tcaacggccagtatgcgttacggattgaacatttgattaacccgattttgaattctctgaacgaggaacagccca

SEQ ID NO: 771139 - DNA, 75 bp, synthetic construct
  source 1..75: mol_type = other DNA
tttgcgatcccattgacccgcctggattctgctggtttacaaaaggtgcgtaaccgcatccctaccaaccacaac

SEQ ID NO: 771140 - DNA, 75 bp, synthetic construct
  source 1..75: mol_type = other DNA
atcgaatggattgaggacaccatgacgactgaaaaagaaccctacattcaggtaattgctgttatcaccggagcg

SEQ ID NO: 771141 - DNA, 75 bp, synthetic construct
  source 1..75: mol_type = other DNA
cagcctgtttgatcaactgctgaacagcaacgtctcggaaagcgccgaacacgatctgtttggcgaaatatgcag

SEQ ID NO: 771142 - DNA, 75 bp, synthetic construct
  source 1..75: mol_type = other DNA
ggggctgttcaacctattgcgccgtagtccggacattaccgtcggggccatccgcattcagccgtaccatgaatt

SEQ ID NO: 771143 - DNA, 75 bp, synthetic construct
  source 1..75: mol_type = other DNA
tttaccaatatcaccacctcgccgaacgacattgtggttaacacgccgttccatgtggagattggcaacctgacc

SEQ ID NO: 771144 - DNA, 75 bp, synthetic construct
  source 1..75: mol_type = other DNA
aaccttaaccttatccacctgaaaccgctgcgcggcacaggactggtggtgttctcgccaagcctggtatttatt

SEQ ID NO: 771145 - DNA, 75 bp, synthetic construct
  source 1..75: mol_type = other DNA
tatctcactgcgtctgtcacagattttaaaactgaaacccggcgacgtcctgccgatagaaaaacccgaccgcat

SEQ ID NO: 771146 - DNA, 75 bp, synthetic construct
  source 1..75: mol_type = other DNA
cgcctggaaggcaattaatccgctggatgtcgagtacgtgcgttcggaaatgcaggtgaaatttaccaatatcac

SEQ ID NO: 771147 - DNA, 75 bp, synthetic construct
  source 1..75: mol_type = other DNA
agcccggatattaccgtcggggccatccgcattcagccgtaccatgaatttgcccgcaacctgccggtgccgacc

SEQ ID NO: 771148 - DNA, 75 bp, synthetic construct
  source 1..75: mol_type = other DNA
accggtatccgagcgggttcaagacttttgttatcgcattggctcgattttgctggtgctgttaatggggcttgc

SEQ ID NO: 771149 - DNA, 75 bp, synthetic construct
  source 1..75: mol_type = other DNA
cctggcattctggtttacaattcgcacgccagcctgaacaactggcacctgctgcgccagcagagacaaccgatg

SEQ ID NO: 771150 - DNA, 75 bp, synthetic construct
  source 1..75: mol_type = other DNA
ctgcacgcacgagcggtatcctcacacattcaaatctgactggtatcagcacgacccctgcaccgaagaacaggc

SEQ ID NO: 771151 - DNA, 75 bp, synthetic construct
  source 1..75: mol_type = other DNA
gataatttccgtcagactcccttattccgaacgcccaccgcgtccgtcccgcacattccagcaacggatctggag

SEQ ID NO: 771152 - DNA, 75 bp, synthetic construct
  source 1..75: mol_type = other DNA
gccacctctgatgtgtcaggcatcctcaacgcacccgcacttaacccgcttcggcgggttttgttttttcctggc

SEQ ID NO: 771153 - DNA, 75 bp, synthetic construct
  source 1..75: mol_type = other DNA
atggcgcaaaattccagactacataattctgataattcagccgtctttgccagcaggcacgggcggcgttttctc

SEQ ID NO: 771154 - DNA, 75 bp, synthetic construct
  source 1..75: mol_type = other DNA
aatttcacaattctgataccgcccttgccatccggcatgggcggcgttcacacgcatttaaaaccgactggtacc

SEQ ID NO: 771155 - DNA, 75 bp, synthetic construct
  source 1..75: mol_type = other DNA
tacgttttatcagatgataagcaaacagcaagttatacaatatctacacccaaagatatgataacagctgatata

SEQ ID NO: 771156 - DNA, 75 bp, synthetic construct
  source 1..75: mol_type = other DNA
gcatggacacagcaaactgaggaagataaaaaagcaggttggactagtacatttgacatagttacgcaaaatgaa

SEQ ID NO: 771157 - DNA, 75 bp, synthetic construct
  source 1..75: mol_type = other DNA
gtcttaggttcggcacctgttgttgctgcaggtggtgtcgctggtcatacgaataaaatgactaaaatgtccccg

SEQ ID NO: 771158 - DNA, 75 bp, synthetic construct
  source 1..75: mol_type = other DNA
cgaatggctcattcagtgttaccgcaggcgcggatgcgaggttaaaaaagcccttagcctcgactaccgtcactg

SEQ ID NO: 771159 - DNA, 75 bp, synthetic construct
  source 1..75: mol_type = other DNA
tggtaaggtgactgtaacgctgaaatcagataagccgggtcaggtagttgtgtctgccaaaaccgcggagatgac

SEQ ID NO: 771160 - DNA, 75 bp, synthetic construct
  source 1..75: mol_type = other DNA
attctagcggtggagtgactacaacatatgatctgataaagaagaatccccgacagaatgttgatgtgaaaagtc

SEQ ID NO: 771161 - DNA, 75 bp, synthetic construct
  source 1..75: mol_type = other DNA
ccgttcgtgccagcaggcatgggcggcgttctcgcgtatttaaaaccgactggtaccaacaccctccatgcactg

SEQ ID NO: 771162 - DNA, 75 bp, synthetic construct
  source 1..75: mol_type = other DNA
ttacgatttcaaagggagactaacaatacatcctgactatgtagataaccagccatcacgtcgtgacttttttaa

SEQ ID NO: 771163 - DNA, 75 bp, synthetic construct
  source 1..75: mol_type = other DNA
cctcttgagcgcattagcacaattgagtcgggcatagaagaggttgacacttcattcacaggtcgactaacgcta

SEQ ID NO: 771164 - DNA, 75 bp, synthetic construct
  source 1..75: mol_type = other DNA
gtcagcaggcgcagatgcttgtcaggttacactacgtgtcgagaacggtagaaaaatagttgttttgttcgattg

SEQ ID NO: 771165 - DNA, 75 bp, synthetic construct
  source 1..75: mol_type = other DNA
ggtcagccattaacgcaatgggtgacctttgtgttgcttgtccgggataatccgggtaaatccttagcgttggaa

SEQ ID NO: 771166 - DNA, 75 bp, synthetic construct
  source 1..75: mol_type = other DNA
atgctgagttttctctgggatttggcttcgttcatcgttgcactgggtgtacttatcaccgtgcatgaatttggt

SEQ ID NO: 771167 - DNA, 75 bp, synthetic construct
  source 1..75: mol_type = other DNA
cgaaccgatgactggaaagatggtcgccgcagccgtcactcagatgatacggatgtgcttctccgtatacaccat

SEQ ID NO: 771168 - DNA, 75 bp, synthetic construct
  source 1..75: mol_type = other DNA
agcatgacccctgcactgaagaacaggccgaatggctgattcagaactaccgcagacgtgggtatgagtttaaga

SEQ ID NO: 771169 - DNA, 75 bp, synthetic construct
  source 1..75: mol_type = other DNA
tttacaattcgcacgccagcctgaacaactggcacctgctgcgccagcagagacaaccgatggcgcacaaaacca

SEQ ID NO: 771170 - DNA, 75 bp, synthetic construct
  source 1..75: mol_type = other DNA
atcgtcactggataatctccgtcaggcttccttactccgaacgcccaccgcgtccgtcccgcacattccagcaac

SEQ ID NO: 771171 - DNA, 75 bp, synthetic construct
  source 1..75: mol_type = other DNA
agattacactaacgttgaaaaactactgatgttctggcgcagagaacaaattcctgtaagggtcactctcgaaga

SEQ ID NO: 771172 - DNA, 75 bp, synthetic construct
  source 1..75: mol_type = other DNA
atgacaaccaaagatattacctacggtatccaagctgaactctggccgcgagattacactaacgttgaaaaacta

SEQ ID NO: 771173 - DNA, 75 bp, synthetic construct
  source 1..75: mol_type = other DNA
ggttacgagtttcagaaagacctcagttctgacttccgacactggataatttccgtcagactcccttattccgaa

SEQ ID NO: 771174 - DNA, 75 bp, synthetic construct
  source 1..75: mol_type = other DNA
gttattctcgctctgctggtactggcaccgctgctctcctggctaccgctttccgccatggctgccctgctattg

SEQ ID NO: 771175 - DNA, 75 bp, synthetic construct
  source 1..75: mol_type = other DNA
catacatctagggggtttgaggaagctgctgatgagattctcatactcagggatcttctcgagaaacttaagaca

SEQ ID NO: 771176 - DNA, 75 bp, synthetic construct
  source 1..75: mol_type = other DNA
aatgggtttatgaaaacaaatacgagcttattgaagtgatggaaaaacttaagaagttgctaaatcctgagaatg

SEQ ID NO: 771177 - DNA, 75 bp, synthetic construct
  source 1..75: mol_type = other DNA
gaaattttagaaattttaaggcaacgtctctttccttcaaaaaagaatgcgtcaatacaattgtaggtgaaaatt

SEQ ID NO: 771178 - DNA, 75 bp, synthetic construct
  source 1..75: mol_type = other DNA
cgggtcgcgctttagcgtctccggtccgactgcggcatttgtggtcattctctatcccgtttcgcaacagtttgg

SEQ ID NO: 771179 - DNA, 75 bp, synthetic construct
  source 1..75: mol_type = other DNA
tacggtttatataccgccgctgttgcggggattgttattgctctgacaggcgggtcgcgctttagcgtctccggt

SEQ ID NO: 771180 - DNA, 75 bp, synthetic construct
  source 1..75: mol_type = other DNA
ccgcatatcgatacccgtgtgctggacggtaaacgcgtcgtgctgtttgggccatttgccaccttctcaactaaa

SEQ ID NO: 771181 - DNA, 75 bp, synthetic construct
  source 1..75: mol_type = other DNA
gaaattggcaccgatgtgaactacggtgagatcacccgtcagttgatcgcctcattacagaagaaatctaacttc

SEQ ID NO: 771182 - DNA, 75 bp, synthetic construct
  source 1..75: mol_type = other DNA
ggcatcgccaggggcgtcaaccgccgcgccgattatgttggatctgctggaaaaagtatttggcgatcgcgtttc

SEQ ID NO: 771183 - DNA, 75 bp, synthetic construct
  source 1..75: mol_type = other DNA
aatacctggtgagtcaggtgatgttgagcgaagacgatcgttttgaagcgttgaaagagtactatccgcaagcga

SEQ ID NO: 771184 - DNA, 75 bp, synthetic construct
  source 1..75: mol_type = other DNA
gaaatcggcactgatgtgaactatggcgagatcactcgtcagttaattgcttccttgcagaagaaatcaaacttc

SEQ ID NO: 771185 - DNA, 75 bp, synthetic construct
  source 1..75: mol_type = other DNA
tttccagcccgcaatggcaggctacgttgaaagcgatcgttccgtcttatggacgcaagctgaacggtgatgtag

SEQ ID NO: 771186 - DNA, 75 bp, synthetic construct
  source 1..75: mol_type = other DNA
tgtggtaagtgaacttaagaataatcgattcaatccatttcaaaagcttttagaatatgtttctaaaggaattga

SEQ ID NO: 771187 - DNA, 75 bp, synthetic construct
  source 1..75: mol_type = other DNA
cggtaccgcagtgaataacgaactgcgtattttgcgggcaataaatgaagagattgtctctctgttaccgctcgg

SEQ ID NO: 771188 - DNA, 75 bp, synthetic construct
  source 1..75: mol_type = other DNA
ctatccaaaagcgcgtcgatacctggcgttacgtgacctggcagatctacgacaacattgccgcgacgacctccc

SEQ ID NO: 771189 - DNA, 75 bp, synthetic construct
  source 1..75: mol_type = other DNA
cgctggcagaagaacgcgatattatcctgctggatgaatgggcggcggatcaggatccacacttccgtcgtgagt

SEQ ID NO: 771190 - DNA, 75 bp, synthetic construct
  source 1..75: mol_type = other DNA
ctgcaactgctgattaacaatcatctgaaagcacacgatatgcgccgtggcgatcgcgatgccttacgacgtatt

SEQ ID NO: 771191 - DNA, 75 bp, synthetic construct
  source 1..75: mol_type = other DNA
ttattcgcgatcaggatcgcgaagtgctggtaaacaagaaactcaagcaggcgcagcgtctgtatgagaaaaacc

SEQ ID NO: 771192 - DNA, 75 bp, synthetic construct
  source 1..75: mol_type = other DNA
gtgctggtacggctggtcgatgaaattcagttagcgaacatgctgacagacgatagctggaagagcgagacaacg

SEQ ID NO: 771193 - DNA, 75 bp, synthetic construct
  source 1..75: mol_type = other DNA
atgcgatcgatacgggataccgcctgatcgataccgcagcgtcttaccagaatgaaacccaggtcgggaacgcac

SEQ ID NO: 771194 - DNA, 75 bp, synthetic construct
  source 1..75: mol_type = other DNA
ccgcaaccagcgcgttcttctctcaccgcgatcccgcaatggtggaatggctgactggccgcaaacttgatgttt

SEQ ID NO: 771195 - DNA, 75 bp, synthetic construct
  source 1..75: mol_type = other DNA
tattttctgaaagaaaagaagatatagaaaaatattttaattttgttaaattcattattgatgagagaccaactt

SEQ ID NO: 771196 - DNA, 75 bp, synthetic construct
  source 1..75: mol_type = other DNA
ctggcaaaattagtgcgaaaagaacgcatggaagagaacatcaacattctcgattttgaactcagccctgaagat

SEQ ID NO: 771197 - DNA, 75 bp, synthetic construct
  source 1..75: mol_type = other DNA
ccaaagcccagttcgaacgctctctgaatcgactgcaacttgattacgttgacctgtacttgattcaccagccat

SEQ ID NO: 771198 - DNA, 75 bp, synthetic construct
  source 1..75: mol_type = other DNA
gattgacaccgccgcctcatatcagaatgaaactcaggtcgggaatgcgctgaaacaaagcggtattgcgcgtaa

SEQ ID NO: 771199 - DNA, 75 bp, synthetic construct
  source 1..75: mol_type = other DNA
cgcgagctggagcctgaatggtcgatgaccatggtggagcgcctggagggtgtcgcgcaggagagttcgaacggc

SEQ ID NO: 771200 - DNA, 75 bp, synthetic construct
  source 1..75: mol_type = other DNA
cttttccgccagcagttagggattagcgtcttaagctggcgcgaggaccaacgcattagtcaggcgaagctgctt

SEQ ID NO: 771201 - DNA, 75 bp, synthetic construct
  source 1..75: mol_type = other DNA
tagcccctcatattggttcaatggccggacaggctgtggggcatgctgtacaatgcaacacccaaggattaaagc

SEQ ID NO: 771202 - DNA, 75 bp, synthetic construct
  source 1..75: mol_type = other DNA
atcttgaagaaggctctgcaggaaaaaaagcattggatatgtttggtttattcaatgttactcagatggcattag

SEQ ID NO: 771203 - DNA, 75 bp, synthetic construct
  source 1..75: mol_type = other DNA
agttgtacaggcggcggggtgtctgctgtctgacagatgtactgcggaaggcctgactgagcaacttactgccct

SEQ ID NO: 771204 - DNA, 75 bp, synthetic construct
  source 1..75: mol_type = other DNA
gtggcagttggggaggcctcggttttacagcgatcattactgctctactggcatgggccatctggtcgcatgggg

SEQ ID NO: 771205 - DNA, 75 bp, synthetic construct
  source 1..75: mol_type = other DNA
attttctgaacagcctgcagttacgccaggctcagacgctgtctgatgtgacagagcagctgacgctgatggctg

SEQ ID NO: 771206 - DNA, 75 bp, synthetic construct
  source 1..75: mol_type = other DNA
tttgtctggatttgcctcgaaagcaatgaataatcaatttggttatcattttccatctgagttggttaatgattt

SEQ ID NO: 771207 - DNA, 75 bp, synthetic construct
  source 1..75: mol_type = other DNA
agaagatcgtggcactctgcttttgtggggcggtgatctcaatacgccagccgacaatatctggttgactgcact

SEQ ID NO: 771208 - DNA, 75 bp, synthetic construct
  source 1..75: mol_type = other DNA
acgcgaccttctctgctgctaacaaagctgacctgggtgcatacacctatcaggctgaacagcgcggtaacaccg

SEQ ID NO: 771209 - DNA, 75 bp, synthetic construct
  source 1..75: mol_type = other DNA
atggatataaattacgtcataaggatttatcatgaacattcaaccgaccatacaatccggaattaccacacaaca

SEQ ID NO: 771210 - DNA, 75 bp, synthetic construct
  source 1..75: mol_type = other DNA
cggacaggctttggggcatgctgtacaatgctacactccaagattaaagccagacactattttatggtgggcagg

SEQ ID NO: 771211 - DNA, 75 bp, synthetic construct
  source 1..75: mol_type = other DNA
tcgttgatgtaatggaaggatttgatagcatcatgtataaatatgagggagaatttaaaaattacatagaattaa

SEQ ID NO: 771212 - DNA, 75 bp, synthetic construct
  source 1..75: mol_type = other DNA
gcctgggaagaggccgtattgccggccatagataccgtgattaatgagcgtcgtgaagaaatggactgggtactg

SEQ ID NO: 771213 - DNA, 75 bp, synthetic construct
  source 1..75: mol_type = other DNA
gtgtgcgctatgaccgggtattgcaaattgaagaaagctctgatgatggtgatgaatatgactattcacccgcaa

SEQ ID NO: 771214 - DNA, 75 bp, synthetic construct
  source 1..75: mol_type = other DNA
ccagccagtttaatctacgagacgatcgcggtcagcctgtaccgtattttattcgccatgcccgtgagatcgatc

SEQ ID NO: 771215 - DNA, 75 bp, synthetic construct
  source 1..75: mol_type = other DNA
aattcagtgagcatattgcgccacttcaggatgctgtagatctggagatcgcaacggaggaagaaaactcgttgc

SEQ ID NO: 771216 - DNA, 75 bp, synthetic construct
  source 1..75: mol_type = other DNA
actgcaccgatattgagtggcctgcaaatcctgtcagggagtaatcattgggattatgccgcagacacgtcgtat

SEQ ID NO: 771217 - DNA, 75 bp, synthetic construct
  source 1..75: mol_type = other DNA
cagtgacggtagcgaagtgacggcgcaggtgctgccgttgggttatgccatcggtaagtacttacctgccgacga

SEQ ID NO: 771218 - DNA, 75 bp, synthetic construct
  source 1..75: mol_type = other DNA
gccgatgaaaataggttatttaccggattcctttggcatgtccgggcaactgccgcatatctacaatggatttgg

SEQ ID NO: 771219 - DNA, 75 bp, synthetic construct
  source 1..75: mol_type = other DNA
taatatatcaaccactgcagtgtcgactattgcatctgctgcaacatctgctgcaacatccgctgcatccactgc

SEQ ID NO: 771220 - DNA, 75 bp, synthetic construct
  source 1..75: mol_type = other DNA
aacatcgtaaaaccagatattcatcccacaagcgggagctattttttacagttattccctctgcatgatgaggtg

SEQ ID NO: 771221 - DNA, 75 bp, synthetic construct
  source 1..75: mol_type = other DNA
cctggcttattgttgcgataattatttttgttggtgtcgggttaatctggttagccaatcctttcgtgcattttg

SEQ ID NO: 771222 - DNA, 75 bp, synthetic construct
  source 1..75: mol_type = other DNA
atgtattcgtatgaagatcgccttcgagccgtgaggttgtacctgaagcttgggcgccggatgagcgccacacta

SEQ ID NO: 771223 - DNA, 75 bp, synthetic construct
  source 1..75: mol_type = other DNA
ttagatggtctgaaagaccttgaatgtgaaatagctatgatttcaagtgagtttgaaattgaaaaacactctatg

SEQ ID NO: 771224 - DNA, 75 bp, synthetic construct
  source 1..75: mol_type = other DNA
caactctgtctcgtctggcagaagcaggcgctgttcacagaacacatattatcggccagcccggcggctgggcag

SEQ ID NO: 771225 - DNA, 75 bp, synthetic construct
  source 1..75: mol_type = other DNA
gacagcgccacggcactgttcaaactggcggttgccaacaacgtttataactttgttgagcaccgatacgcattg

SEQ ID NO: 771226 - DNA, 75 bp, synthetic construct
  source 1..75: mol_type = other DNA
ctttgttgagcaccgatacgcattgttggaattatcgctcctgggccaggaccaagatgacctggcagaatcgga

SEQ ID NO: 771227 - DNA, 75 bp, synthetic construct
  source 1..75: mol_type = other DNA
cctcaatgaatgccataaagagacaggagctcattgacgccgactttcagcgcctcagaaagctcatctggccgg

SEQ ID NO: 771228 - DNA, 75 bp, synthetic construct
  source 1..75: mol_type = other DNA
ctggccataaatggctatgcctcaatgaatgccataaagagactggccgaccatcagcgcctcagaaacctcatc

SEQ ID NO: 771229 - DNA, 75 bp, synthetic construct
  source 1..75: mol_type = other DNA
tgcggaacgacgcatccgggaatgcaatctggacagccagggcgcgatttatctctgcgagtcagccaaagccgg

SEQ ID NO: 771230 - DNA, 75 bp, synthetic construct
  source 1..75: mol_type = other DNA
gtactacctaagtctgggggatttggacagcgctgcggcactgttcaaactggcggttgccaacaacgttcataa

SEQ ID NO: 771231 - DNA, 75 bp, synthetic construct
  source 1..75: mol_type = other DNA
acaaaaggaatgggatgatacttcccataaatgtacaggtattctttcaacattacattcctttgttgcaggata

SEQ ID NO: 771232 - DNA, 75 bp, synthetic construct
  source 1..75: mol_type = other DNA
ggtttactggtgcctgaagaacgcagtgttcttcccgtatttgatactgcagcgatccatgccgaggatgcggtt

SEQ ID NO: 771233 - DNA, 75 bp, synthetic construct
  source 1..75: mol_type = other DNA
gacgtgcaattaccggggcaggaatgactcgtgtggcgctgctgggtacgcgttacaccatggaacaggattttt

SEQ ID NO: 771234 - DNA, 75 bp, synthetic construct
  source 1..75: mol_type = other DNA
tcagcgcctccgaaagatgtaaatatccgacttggagtcggttctttagaaggtacaaccgtctcacatgttcag

SEQ ID NO: 771235 - DNA, 75 bp, synthetic construct
  source 1..75: mol_type = other DNA
ttggattacttgtgttacctgatgctgaaacatggtttgaccggatagatattacccgggcattagatggatttg

SEQ ID NO: 771236 - DNA, 75 bp, synthetic construct
  source 1..75: mol_type = other DNA
tatatgcgtcgacaacatttggtacaatcattagccactcaccttcaatgtggtggaaccctgaccagggcagcc

SEQ ID NO: 771237 - DNA, 75 bp, synthetic construct
  source 1..75: mol_type = other DNA
acccgatgtatcgctatcagcttgagaaaaaagcggaaaaagttgtctttcgcggtgagtgggcaggaagtggcg

SEQ ID NO: 771238 - DNA, 75 bp, synthetic construct
  source 1..75: mol_type = other DNA
gcgggccacgcaactaaggttatcttcctgactgctgatgctttcggcgtgttgccgccggtttctcgcctgact

SEQ ID NO: 771239 - DNA, 75 bp, synthetic construct
  source 1..75: mol_type = other DNA
tcggcgcggcgttcctgtcgctgcacccaactcagtacgcagaagtgctggtaaaacgtatgcaggcggcgggtg

SEQ ID NO: 771240 - DNA, 75 bp, synthetic construct
  source 1..75: mol_type = other DNA
ccgacgccaaccttctccgcttgcttcggcgcggcgttcctgtcgctgcacccgactcagtacgcagaagtgctg

SEQ ID NO: 771241 - DNA, 75 bp, synthetic construct
  source 1..75: mol_type = other DNA
tcggcgcggcattcctgtcgctgcacccgacccaatacgcagaagtgctggtgaaacgtatgcaggcggcgggcg

SEQ ID NO: 771242 - DNA, 75 bp, synthetic construct
  source 1..75: mol_type = other DNA
tcgacgccatcctcaacggttcactggataacgcagaaactttcactctgccgatgtttaacctggcgatcccaa

SEQ ID NO: 771243 - DNA, 75 bp, synthetic construct
  source 1..75: mol_type = other DNA
gatcctcgatccgcgtaacacctacgcttccccggaacagtggcaggaaaaagccgaaaccctggcgaaactgtt

SEQ ID NO: 771244 - DNA, 75 bp, synthetic construct
  source 1..75: mol_type = other DNA
gggctgcgtgcctgcaaaacccgcaaggtattctctgctgcgcccgtggcggtcaacgttcgcacattgtgcaac

SEQ ID NO: 771245 - DNA, 75 bp, synthetic construct
  source 1..75: mol_type = other DNA
aaggcactgcgccagaccgcgattcaggcaaccattgaactggcacaaaaaccgatagtgctgattggcggttgt

SEQ ID NO: 771246 - DNA, 75 bp, synthetic construct
  source 1..75: mol_type = other DNA
catcaccccgcaaactgcctgaacagcgccttacccttaagcagtcgcgcacccagccagccgccgcaaagcgac

SEQ ID NO: 771247 - DNA, 75 bp, synthetic construct
  source 1..75: mol_type = other DNA
cggtactgagcgtggcatcaccgaaccgacgccaaccttctccgcttgcttcggcgcagcgttcctgtcgctgca

SEQ ID NO: 771248 - DNA, 75 bp, synthetic construct
  source 1..75: mol_type = other DNA
aatctgggtgccgttgccgtcgataccgggatcttcaccggtcgttcaccgaaagataagtatatcgttcgtgac

SEQ ID NO: 771249 - DNA, 75 bp, synthetic construct
  source 1..75: mol_type = other DNA
agaaatattttaattttacaccattacataattataatcatttttgtgactttattgagtttaaccaccctaata

SEQ ID NO: 771250 - DNA, 75 bp, synthetic construct
  source 1..75: mol_type = other DNA
cagggcgcacagggcgtcatttttggctgcacagaaattggtttattggttccagaagagcgcagtgttttgcct

SEQ ID NO: 771251 - DNA, 75 bp, synthetic construct
  source 1..75: mol_type = other DNA
cgacccgcttttcacttctaccggggagcattacccgcttctttttactgctgatcattgtgttgctggtgacca

SEQ ID NO: 771252 - DNA, 75 bp, synthetic construct
  source 1..75: mol_type = other DNA
tcatgaaatggataatttgcacttcccgttcatcaaccagacccaaagcgatcgctatggcaaggcggacccgct

SEQ ID NO: 771253 - DNA, 75 bp, synthetic construct
  source 1..75: mol_type = other DNA
ttcagctagcgaatattcttgcggacgatagctggaagagcgagaccgagcttttctccgtacaggatttaatcg

SEQ ID NO: 771254 - DNA, 75 bp, synthetic construct
  source 1..75: mol_type = other DNA
cgtctgacgttgaacaccgacagattaagtaccggaacaacgtgattgaatgcgatcatggcaaactgaaacgga

SEQ ID NO: 771255 - DNA, 75 bp, synthetic construct
  source 1..75: mol_type = other DNA
gctaaacccgtatcgcagcaagcagtatgaagtggggctaaaatcggacatcggcgagatgaatctaggcgccgc

SEQ ID NO: 771256 - DNA, 75 bp, synthetic construct
  source 1..75: mol_type = other DNA
tttcgcgtcctgagcaacaccgccgggctgaatggtcatattgataccggctctatcggccacgatctgtcactt

SEQ ID NO: 771257 - DNA, 75 bp, synthetic construct
  source 1..75: mol_type = other DNA
gaagaacgtctgactttccgtattctggacaccggagatggtgtaagtattcatgaaatggataatttacatttc

SEQ ID NO: 771258 - DNA, 75 bp, synthetic construct
  source 1..75: mol_type = other DNA
caggataacagcctggtgttgatctctactctgccattaaaagatctcacttctggtttcaaagagtcgaccgtc

SEQ ID NO: 771259 - DNA, 75 bp, synthetic construct
  source 1..75: mol_type = other DNA
ggatgacctttatgaaaaacattggcgatgcgctgaaagaacccgcacagtccctggcggagagcgcggctaaac

SEQ ID NO: 771260 - DNA, 75 bp, synthetic construct
  source 1..75: mol_type = other DNA
gctattatgcgctctttgtagacacagtactgatgaatcccctaatgattttggtaaaaatcattaagttaaggt

SEQ ID NO: 771261 - DNA, 75 bp, synthetic construct
  source 1..75: mol_type = other DNA
agttcgaagattgaaatctcttcggcgctcaactccaccgatatgcggctggtctggcaggttccttacggcact

SEQ ID NO: 771262 - DNA, 75 bp, synthetic construct
  source 1..75: mol_type = other DNA
ggcattctggttgagtgatcaactggcgcgcaaactgggcggtcatttaaacatcaaaacacgggacggccttgg

SEQ ID NO: 771263 - DNA, 75 bp, synthetic construct
  source 1..75: mol_type = other DNA
aacgcacgggggcgtgcagtgggctttccgtggctacgcgccgcgctgatgtccgctgtctgcgtgctggcaata

SEQ ID NO: 771264 - DNA, 75 bp, synthetic construct
  source 1..75: mol_type = other DNA
tattgaatactttattgatgagcttaacccaataagcagttcaaaagctaacacatcagcgagatcaactggtaa

SEQ ID NO: 771265 - DNA, 75 bp, synthetic construct
  source 1..75: mol_type = other DNA
tgcagggcgatttgtcattagaaagtcatccaggcataggaacaacatttacgatcacaatcccggtagaaatta

SEQ ID NO: 771266 - DNA, 75 bp, synthetic construct
  source 1..75: mol_type = other DNA
ggcagtaaaaattacgacctccctggttcacattgatgacaaccacgctgttatcaaaatgacgattatggattc

SEQ ID NO: 771267 - DNA, 75 bp, synthetic construct
  source 1..75: mol_type = other DNA
agtgagcaacgtcccaaccactttccgcgtggtggtaaacaacgtgtttgataaacattactgggcttctatctt

SEQ ID NO: 771268 - DNA, 75 bp, synthetic construct
  source 1..75: mol_type = other DNA
ttgcgctcgactggaatattcagccgggcactcagctacagctcgacgccagccattacgaatttatccagaaag

SEQ ID NO: 771269 - DNA, 75 bp, synthetic construct
  source 1..75: mol_type = other DNA
acaacgaatacactggtaacggcgttacgacatcatttccgtataccttccgtattttcaaaaaatccgacctgg

SEQ ID NO: 771270 - DNA, 75 bp, synthetic construct
  source 1..75: mol_type = other DNA
atggcagttaaagtcacacctgaagagttcagtctgttaatccggcgactgagcaagcaatggcgcgtcctggca

SEQ ID NO: 771271 - DNA, 75 bp, synthetic construct
  source 1..75: mol_type = other DNA
caaagcgttctgaaaccgctgctggcaggcggcgcattttcttccctgcgcctgcgtggcctgatgttcagcccg

SEQ ID NO: 771272 - DNA, 75 bp, synthetic construct
  source 1..75: mol_type = other DNA
tgacggaatcgatccggtacgggcagcggtattgtgtgatacgcaacataaggactgatggcaatgggaacaggc

SEQ ID NO: 771273 - DNA, 75 bp, synthetic construct
  source 1..75: mol_type = other DNA
ttttataaaacacatttggaagaatactacagggagattgattatctccctgattttcaacccactgctataaga

SEQ ID NO: 771274 - DNA, 75 bp, synthetic construct
  source 1..75: mol_type = other DNA
ggtgccgcattggcaaaagcgggctttatcgtaattgctttcgacgccagttttcagggaagcagtggcggagaa

SEQ ID NO: 771275 - DNA, 75 bp, synthetic construct
  source 1..75: mol_type = other DNA
gccagtctgcgggagaacgtttacgttaccgtgcacttcataaagtcaatgattacaaagcccgcaatggtactg

SEQ ID NO: 771276 - DNA, 75 bp, synthetic construct
  source 1..75: mol_type = other DNA
aatgagactgtttactcaacagaaaatggcgcagctgttacagtggattatatcggtgccatcaaagacggttat

SEQ ID NO: 771277 - DNA, 75 bp, synthetic construct
  source 1..75: mol_type = other DNA
tatgcccgcctgttccactggtattgccccgggcgaaaacattccggggaaagtggcagtatttacgggcaaggg

SEQ ID NO: 771278 - DNA, 75 bp, synthetic construct
  source 1..75: mol_type = other DNA
ttaataaaataattgtaattataaggttaaatatcggtaatttgtatttaataaatacgatcgatattgttactt

SEQ ID NO: 771279 - DNA, 75 bp, synthetic construct
  source 1..75: mol_type = other DNA
cctatatgggtggcgcgtacgtgttgatcagcgacaccgacggtaaaatcattaaagcctacgacggtgagattt

SEQ ID NO: 771280 - DNA, 75 bp, synthetic construct
  source 1..75: mol_type = other DNA
cggaaatccgcatctgggtgcgcggtcagtccggccgggaaatcacggcagcgtcacgacttcatgtgctgagtg

SEQ ID NO: 771281 - DNA, 75 bp, synthetic construct
  source 1..75: mol_type = other DNA
acttaacgccgtgctggattacattgacgcggtgacggcaacagataccagcaccgcgccggatgtcatctggcg

SEQ ID NO: 771282 - DNA, 75 bp, synthetic construct
  source 1..75: mol_type = other DNA
tagcattgccagcggctcacctgcaagtgccaatattattaacagcatgtttaattctattggtgcaagtgttag

SEQ ID NO: 771283 - DNA, 75 bp, synthetic construct
  source 1..75: mol_type = other DNA
acgggtgccactgacgaattcaccttggctgcgatggtgcagaacctgcgccgcatggccaagcttttgcctcaa

SEQ ID NO: 771284 - DNA, 75 bp, synthetic construct
  source 1..75: mol_type = other DNA
caagaccgagcgcaaggacgacagcctctccagggcactgttgcaaatagtcggtggtgataaacttatcatccc

SEQ ID NO: 771285 - DNA, 75 bp, synthetic construct
  source 1..75: mol_type = other DNA
accgcttccagggtaaccagcaggtgatcctcgaccagatgcgcgagcgcgacgaagaggtgctggagcagctcc

SEQ ID NO: 771286 - DNA, 75 bp, synthetic construct
  source 1..75: mol_type = other DNA
ctgatctccgaagaacatctgcaattgcaggcggtattcctcgcgtttctgacgccggaaatctcggcggcggtg

SEQ ID NO: 771287 - DNA, 75 bp, synthetic construct
  source 1..75: mol_type = other DNA
gggttcctgatacaggacagtctggtgtacagcgcgggggatgtgttcagtcagcgggatgccctggtggcggcc

SEQ ID NO: 771288 - DNA, 75 bp, synthetic construct
  source 1..75: mol_type = other DNA
ccaggcgataccgttccagagatgtaccgcaccgatgagtacaatattaagcagtggcagttacgtaacctgcct

SEQ ID NO: 771289 - DNA, 75 bp, synthetic construct
  source 1..75: mol_type = other DNA
gttagagggtttgataaaaatactaaaaaaacagaagctttctcgctctatgatatcgttgatgatattttaagt

SEQ ID NO: 771290 - DNA, 75 bp, synthetic construct
  source 1..75: mol_type = other DNA
cagggctaatccttatggcaactcaggcagagcaggatccgccagaaatcgcgtccagttacatggagttatgta

SEQ ID NO: 771291 - DNA, 75 bp, synthetic construct
  source 1..75: mol_type = other DNA
gccctgtcacattcagaacgtttgtcagggctaatccttatggcaactcaggcagagcaggatccgccagaaatc

SEQ ID NO: 771292 - DNA, 75 bp, synthetic construct
  source 1..75: mol_type = other DNA
aatccatagagaaaaaactatacacccaacagtaaatctcaatggtagtgcatgttttttgcaatctccttctga

SEQ ID NO: 771293 - DNA, 75 bp, synthetic construct
  source 1..75: mol_type = other DNA
gtacggcaatgtcgtgttctccggaggtaaattctctggtttcggaagaacatattacaccagaaaccaatgagc

SEQ ID NO: 771294 - DNA, 75 bp, synthetic construct
  source 1..75: mol_type = other DNA
atgctgtcatactgtgttactcaggaatttaccgcaagctgtcgaaaaatttcacaaaattgttattccactgcc

SEQ ID NO: 771295 - DNA, 75 bp, synthetic construct
  source 1..75: mol_type = other DNA
aagtatgcccgcctgttccactggaattaaccctggcgaaaacattccgggaaaagtggctgtatttacaggtaa

SEQ ID NO: 771296 - DNA, 75 bp, synthetic construct
  source 1..75: mol_type = other DNA
gcttaacgctgtgctggattacattgacgcggtggcggcaacagataccagcaccgcgcctgatgtcatctggcc

SEQ ID NO: 771297 - DNA, 75 bp, synthetic construct
  source 1..75: mol_type = other DNA
aagtggcagtatttacaggtaagggatggagccatgaagaggaccatcgcaatgagactgtttactcaatcgaaa

SEQ ID NO: 771298 - DNA, 75 bp, synthetic construct
  source 1..75: mol_type = other DNA
gatacactgaaacaaataaaaacaatccccctatcattttcgttcatggatttttcatgaataatgaaatgttca

SEQ ID NO: 771299 - DNA, 75 bp, synthetic construct
  source 1..75: mol_type = other DNA
tgcaaaagaagtaaatacaatattaaaaaactggttacaaaaacgcactgagagtaaatctaactcttataaata

SEQ ID NO: 771300 - DNA, 75 bp, synthetic construct
  source 1..75: mol_type = other DNA
acttaacacggtgttggattacattgacgcggtgacggcaacagataccagcaccgcgccggatgttatctggcc

SEQ ID NO: 771301 - DNA, 75 bp, synthetic construct
  source 1..75: mol_type = other DNA
agcagcgcctgttctactcgttcaatctggaagatcacgtcccggcccaacatctcctgcgcagcatcgaccagt

SEQ ID NO: 771302 - DNA, 75 bp, synthetic construct
  source 1..75: mol_type = other DNA
gtcagaggtatttccgccgctctatcaggcaatgatccgcacgggggaattgactggtaagttagatgaatgttg

SEQ ID NO: 771303 - DNA, 75 bp, synthetic construct
  source 1..75: mol_type = other DNA
acacaaatccagcacgatatcagcaacggtcagcccatctggctggcgttaaaaaatgccggtgagtttagccca

SEQ ID NO: 771304 - DNA, 75 bp, synthetic construct
  source 1..75: mol_type = other DNA
ctttgaactggcgcgtcagcaaaaagcccagcgtcagttgaccgacaaagtgaaatcagcgttgcgttatcccat

SEQ ID NO: 771305 - DNA, 75 bp, synthetic construct
  source 1..75: mol_type = other DNA
cgctcccggaggtgggcgacagcgacaggtcgatgtcctggctggcctgggagccatgtctgacaaattcggtaa

SEQ ID NO: 771306 - DNA, 75 bp, synthetic construct
  source 1..75: mol_type = other DNA
gggtacgtgctacaggaaataccggcacacagttcgtgaagcaggctgcgacgttctttggacccgatcgtcact

SEQ ID NO: 771307 - DNA, 75 bp, synthetic construct
  source 1..75: mol_type = other DNA
gattacattctttaacaattgataatatattgctcggggatttaaataacccggagaccttcctctatgaccctc

SEQ ID NO: 771308 - DNA, 75 bp, synthetic construct
  source 1..75: mol_type = other DNA
gaaaagccgacgtttctgcaaaggatcttaattctgctttccatgatctgttttgttttcggctcgatagcgcca

SEQ ID NO: 771309 - DNA, 75 bp, synthetic construct
  source 1..75: mol_type = other DNA
ttgacgttctcgatcccaatacactacttagaataccattatggataatcacaattctctttacactagccggat

SEQ ID NO: 771310 - DNA, 75 bp, synthetic construct
  source 1..75: mol_type = other DNA
aataccatttatccaggtcagcactggagggattaggcgcggcgcgggataaaggcgtacatattattatggatc

SEQ ID NO: 771311 - DNA, 75 bp, synthetic construct
  source 1..75: mol_type = other DNA
ctgctggcggaacagcatcccagtaagcaatggcaagcgttgctgcaatcgctggcgcacgatctcgaacagggc

SEQ ID NO: 771312 - DNA, 75 bp, synthetic construct
  source 1..75: mol_type = other DNA
aacgctccgttctggttaaaatcggtggcgtgtgtgtctattttcttttttatattcggtaccatatcaccgcta

SEQ ID NO: 771313 - DNA, 75 bp, synthetic construct
  source 1..75: mol_type = other DNA
tgaatgcttttgctgacgccttttcctttttcctgttatggctgcaaaacagccctgtcatattatccctgttcg

SEQ ID NO: 771314 - DNA, 75 bp, synthetic construct
  source 1..75: mol_type = other DNA
ccaccccgactccaaccggctccacagtcaagtctatcccgctcatgaccggaacgcctgttaaaccggtatctc

SEQ ID NO: 771315 - DNA, 75 bp, synthetic construct
  source 1..75: mol_type = other DNA
aagctggcgcggcactatccgcgctgttggtcaacggcgggcgtgcatcctcatgacagcagtcaatggcaagct

SEQ ID NO: 771316 - DNA, 75 bp, synthetic construct
  source 1..75: mol_type = other DNA
catactggcgaggggaggatgctgcgtggctggcggctaccacagatgcgaatgtcaaaacactgtttgggattg

SEQ ID NO: 771317 - DNA, 75 bp, synthetic construct
  source 1..75: mol_type = other DNA
ttcgggacatgaagaccgtattgcctggctgcgaaaactgatagcgtggcaggaagagatggcggattccggcga

SEQ ID NO: 771318 - DNA, 75 bp, synthetic construct
  source 1..75: mol_type = other DNA
ccgatgctggcctggatggtcgaagaaaaggacatcgaaccgcatgtgccggtgtgggacaagaccgagcgcaag

SEQ ID NO: 771319 - DNA, 75 bp, synthetic construct
  source 1..75: mol_type = other DNA
cgcactggcgtggggaagatgccgcatggctggctgccaccacggatgccaatgtcaaaaagttatttgggattg

SEQ ID NO: 771320 - DNA, 75 bp, synthetic construct
  source 1..75: mol_type = other DNA
aaaaaaaaaaaaaaaaaaattcacccccccgggggggggggttgtcatatggagtacaggatgtttgatatcggc

SEQ ID NO: 771321 - DNA, 75 bp, synthetic construct
  source 1..75: mol_type = other DNA
aaagggaactcgagcaatatttatcttcttcgtcttgatggtgcaaaagattcaccaggtggtagtgcaaataat

SEQ ID NO: 771322 - DNA, 75 bp, synthetic construct
  source 1..75: mol_type = other DNA
tatctcagggtaaagtgaaccgccccgggtttcctggagagtgttttatctgtgaactcaggctgccagatcatt

SEQ ID NO: 771323 - DNA, 75 bp, synthetic construct
  source 1..75: mol_type = other DNA
aagagaatgcagccacgcccaaactgaataccaaactggtttcatggtctgccaatgatcagtggacccgttctc

SEQ ID NO: 771324 - DNA, 75 bp, synthetic construct
  source 1..75: mol_type = other DNA
gctgcatgagcgccgtctcgatcgcgaacactacattgaagagtttgtcggtcatctgcgcgcagagatgaaagc

SEQ ID NO: 771325 - DNA, 75 bp, synthetic construct
  source 1..75: mol_type = other DNA
ccgattcctggagatgagattgtcggcttcattacccaggggcgcggtatttcagtacaccgcgccgattgcgaa

SEQ ID NO: 771326 - DNA, 75 bp, synthetic construct
  source 1..75: mol_type = other DNA
tggggaccggttatcccgaaagggaaggtcgagatcactatcagtaagtatgagaaaccggcgggtgcagccgcc

SEQ ID NO: 771327 - DNA, 75 bp, synthetic construct
  source 1..75: mol_type = other DNA
tatctggcgaaactgcgtgaaacgccggaatacaaaaaagagcaggaaaaattcggtactggtagtgatatccag

SEQ ID NO: 771328 - DNA, 75 bp, synthetic construct
  source 1..75: mol_type = other DNA
gggcagttaagaaaggaaaagtgtctgctgctgtgttggctgaggtcaggtctaaattaaaagtcttgattggat

SEQ ID NO: 771329 - DNA, 75 bp, synthetic construct
  source 1..75: mol_type = other DNA
atgaaagtgaaggcactggaaggcgacaccgtggattcgctctgtttccggtactacggcacgacgcagggcgtc

SEQ ID NO: 771330 - DNA, 75 bp, synthetic construct
  source 1..75: mol_type = other DNA
tgccttcaaaccatggtgaacgcatcgtgctgcgtttactggacaaaaatagtgttagtctcgatcttgctgcac

SEQ ID NO: 771331 - DNA, 75 bp, synthetic construct
  source 1..75: mol_type = other DNA
tgccttcaaatcatggtgaacgcatcgtgctgcgtttactagacaaaaatagcgttagtctcgatcttgctgcac

SEQ ID NO: 771332 - DNA, 75 bp, synthetic construct
  source 1..75: mol_type = other DNA
ctgactgaggcaattaaagagaaagcctcagatattcatattgaaacttacgaacgccatctgcaggttcgcttt

SEQ ID NO: 771333 - DNA, 75 bp, synthetic construct
  source 1..75: mol_type = other DNA
aggatgccagccgcgtcttggcactccaaaatcaaaatatgtcagcgccgataacgccggaggccattgaaaacg

SEQ ID NO: 771334 - DNA, 75 bp, synthetic construct
  source 1..75: mol_type = other DNA
ggattctgtcgagctgaaaacactaatagtttaaaatcagttttcaatgaattgaatgctcatcgtgaaaatata

SEQ ID NO: 771335 - DNA, 75 bp, synthetic construct
  source 1..75: mol_type = other DNA
caaatgcagaactggaaaagatagctaataaatctttaactgacagattcgaaagtgatcaagaaagactaagct

SEQ ID NO: 771336 - DNA, 75 bp, synthetic construct
  source 1..75: mol_type = other DNA
ttcgtgaagatttcgccccgctggcggcgatcaaagagtacatccgtctgaagctggaagtctcccgcgattatc

SEQ ID NO: 771337 - DNA, 75 bp, synthetic construct
  source 1..75: mol_type = other DNA
gcaaattgcagagttggcgggcgtttcaaaaaccaatctgctgtattacttcccgtcgaaagaggcactgtatat

SEQ ID NO: 771338 - DNA, 75 bp, synthetic construct
  source 1..75: mol_type = other DNA
aacactggttcagaccgtaacgggatcgctggcgtgcggcgttcttgccatggccgtggccgggtcgttgcgctt

SEQ ID NO: 771339 - DNA, 75 bp, synthetic construct
  source 1..75: mol_type = other DNA
gtaggggagatccgtgacagtgaaacagcccagattgctgtacaggcctcactgactgggcatctggtgctgtca

SEQ ID NO: 771340 - DNA, 75 bp, synthetic construct
  source 1..75: mol_type = other DNA
cactctcccctgcattgcctgctatatgcatggagtaatatctaatgaggtgtctctgcaccatatcgccggtcg

SEQ ID NO: 771341 - DNA, 75 bp, synthetic construct
  source 1..75: mol_type = other DNA
aatttacgcgcctgaacgcctcggaagaggatttgctactcatggcctacaaacaggctggaataaccagagagg

SEQ ID NO: 771342 - DNA, 75 bp, synthetic construct
  source 1..75: mol_type = other DNA
ggtatccctgcaccatatcttcgggagaacggcagagaacgcgcataaatatgtcctccctttgtgtaaatggca

SEQ ID NO: 771343 - DNA, 75 bp, synthetic construct
  source 1..75: mol_type = other DNA
gccctaagacatcaatcatctgttctccaatgactagtctaaaaactagtattaagactatcacttatttaagtg

SEQ ID NO: 771344 - DNA, 75 bp, synthetic construct
  source 1..75: mol_type = other DNA
ggttggaataactattctaacctgtacgccaatactatcaccgtaactaacggtggtgtgctggatagactggcc

SEQ ID NO: 771345 - DNA, 75 bp, synthetic construct
  source 1..75: mol_type = other DNA
tgatgataattggcatgatggtgatgtattcactttaaatattgctaattctacaattgatgacgattatgaagg

SEQ ID NO: 771346 - DNA, 75 bp, synthetic construct
  source 1..75: mol_type = other DNA
tagtatcacaattagcattggcttgcactctggctatcacctctcaggctaatgcagctacttataataccttcg

SEQ ID NO: 771347 - DNA, 75 bp, synthetic construct
  source 1..75: mol_type = other DNA
taccgaaggccatcagtgggataacaacatcgttgttaatgactctactgtaacttctggttcattaactgaaga

SEQ ID NO: 771348 - DNA, 75 bp, synthetic construct
  source 1..75: mol_type = other DNA
tctgacgctgcgtggcgacgggcgacaaaaggtgctagccggtgagaccagttgggaggaggtggttcgcgttac

SEQ ID NO: 771349 - DNA, 75 bp, synthetic construct
  source 1..75: mol_type = other DNA
gggcgatcacgcgtttgcaggatatgggcgtggagcctttcctgctctcttccagtctgacaggtgtgatggcgc

SEQ ID NO: 771350 - DNA, 75 bp, synthetic construct
  source 1..75: mol_type = other DNA
gggcgtggagcctttcctgctctcttccagtctgacgggcgtgatggcgcagcgactggtccgcacgctgtgctc

SEQ ID NO: 771351 - DNA, 75 bp, synthetic construct
  source 1..75: mol_type = other DNA
tgcgccccggtcgtaaactggcctcgctactggtatcgcgtatcaaggtgatggcgcgactggatatcgccgaaa

SEQ ID NO: 771352 - DNA, 75 bp, synthetic construct
  source 1..75: mol_type = other DNA
ttggtcttggatatattgggttacccacagcagcaatgtttgcttcatgcaaaaaaagagtaattggggttgata

SEQ ID NO: 771353 - DNA, 75 bp, synthetic construct
  source 1..75: mol_type = other DNA
gggatctaacgctgggcaaaaccctggggctgtatccggatgaagtggtactgcgcggtctgtatcaggatcgcg

SEQ ID NO: 771354 - DNA, 75 bp, synthetic construct
  source 1..75: mol_type = other DNA
gccgttggcgtggcggaaggcggcgcagaaacctggtgcgatcgcgaactgtattgtctgaaagcgtcggttggt

SEQ ID NO: 771355 - DNA, 75 bp, synthetic construct
  source 1..75: mol_type = other DNA
gattggctaagcatgatgtactcacgtttgaaattggctcgtaatctactaagtgatgaaggagctgtgattatc

SEQ ID NO: 771356 - DNA, 75 bp, synthetic construct
  source 1..75: mol_type = other DNA
tgagacaatgtttgccgatgatggggtgaacaagttgctgaaggatttggacagacgacgcagggcggcagcgaa

SEQ ID NO: 771357 - DNA, 75 bp, synthetic construct
  source 1..75: mol_type = other DNA
ctgcgtggtttgtatcaggatcgcgaactggcgaagcaagggctgttggatgcgctgcataaatatggctgtctg

SEQ ID NO: 771358 - DNA, 75 bp, synthetic construct
  source 1..75: mol_type = other DNA
aagcgtatccagagcagtcgatggcggttgcggcgacgcatgacttgccaacactgcgcggttattgggaaagcg

SEQ ID NO: 771359 - DNA, 75 bp, synthetic construct
  source 1..75: mol_type = other DNA
tactacagccccgatgtgctggaaaaagccaatctcgacttgtttgttgacaacatcaagcctgatcgcacgcct

SEQ ID NO: 771360 - DNA, 75 bp, synthetic construct
  source 1..75: mol_type = other DNA
aaagcctgtatgaatgtgaagagtgcggtgcccccatcccgcaggcccgtcgggaagccattcctggcgtgcgct

SEQ ID NO: 771361 - DNA, 75 bp, synthetic construct
  source 1..75: mol_type = other DNA
gagcggataggaatatgacagggtattcgaatccagatgacgacccgagaggtgattggacgagtgcaaatatgg

SEQ ID NO: 771362 - DNA, 75 bp, synthetic construct
  source 1..75: mol_type = other DNA
atgactttatatatgaagacgatttttctgaaaatgcagagagcttcttaataaagtccaaccagaaagatagtg

SEQ ID NO: 771363 - DNA, 75 bp, synthetic construct
  source 1..75: mol_type = other DNA
gtatttactgcaaagatcgagaattcttcaagacaacctgcgagttccagcgaccaaaagagaatgcaggaaaaa

SEQ ID NO: 771364 - DNA, 75 bp, synthetic construct
  source 1..75: mol_type = other DNA
cgcgggctttaagaacagtgcggtcaagatcaatgtcgagcagattttcaagctcatgtcgcctgtcaccgaagt

SEQ ID NO: 771365 - DNA, 75 bp, synthetic construct
  source 1..75: mol_type = other DNA
gtaacgccagttccgaatgtcatggtttataccgcgggtaaaaaaatgtcggtggcggttgaaggtagcggtgaa

SEQ ID NO: 771366 - DNA, 75 bp, synthetic construct
  source 1..75: mol_type = other DNA
tgaagctggctcagctacctgaggggatgtcaggttttgtcctgctcagggacggtaagcaccctcttcgatata

SEQ ID NO: 771367 - DNA, 75 bp, synthetic construct
  source 1..75: mol_type = other DNA
actgatccagtggagatgagaaagaaagctactgaaacattactaatgattcttcacaaacaaccaggtgataaa

SEQ ID NO: 771368 - DNA, 75 bp, synthetic construct
  source 1..75: mol_type = other DNA
atgaacaatccccgaaggatcagcgacaaagacctgaagaagatgattgagtcggcgcagcagctactttcacga

SEQ ID NO: 771369 - DNA, 75 bp, synthetic construct
  source 1..75: mol_type = other DNA
ttaaaaagcattacgacaatgacgatctggccacagatgctatcccgtcgctgaaagcgcattctccacactacg

SEQ ID NO: 771370 - DNA, 75 bp, synthetic construct
  source 1..75: mol_type = other DNA
gggtgaatccggttattcgcttgtgcaggagtcaattgaagaagcgattgccttccgtaaagccgtggtcagcgt

SEQ ID NO: 771371 - DNA, 75 bp, synthetic construct
  source 1..75: mol_type = other DNA
gataattttctcagaacagaatattaccgatcgtatcccactcgacgtcttaaaagaggtcagcgaatatgttta

SEQ ID NO: 771372 - DNA, 75 bp, synthetic construct
  source 1..75: mol_type = other DNA
atcttgaccatctgaaaacccttattgctaagggggcaaatcagtgtgcgcgggcgggggataaattaccggatt

SEQ ID NO: 771373 - DNA, 75 bp, synthetic construct
  source 1..75: mol_type = other DNA
gttcctcctgttgagcgtcgggggagggaagttttttatgacgttaaaaccgtactggagatagatcgcgaaagg

SEQ ID NO: 771374 - DNA, 75 bp, synthetic construct
  source 1..75: mol_type = other DNA
aaggaacgcagtacaaagggcacgtgagcggtggtaaggcgttcaatctaccgacgaagctgccggaaggttatc

SEQ ID NO: 771375 - DNA, 75 bp, synthetic construct
  source 1..75: mol_type = other DNA
cgcacaaaatccggcagcgttatccccgccagatggtatgcatcccggaacagcgtgtaacagtccgtcaccccg

SEQ ID NO: 771376 - DNA, 75 bp, synthetic construct
  source 1..75: mol_type = other DNA
tgctcaaagcgccgtcctgtcagatgtggcacacagcagaatttatgaatttccccccggcagaccagccaccag

SEQ ID NO: 771377 - DNA, 75 bp, synthetic construct
  source 1..75: mol_type = other DNA
aggaaaactgattgacaccgggttctgtatttttgccctcagtaagctggcaatggcgttatccagtacgcttga

SEQ ID NO: 771378 - DNA, 75 bp, synthetic construct
  source 1..75: mol_type = other DNA
tggataacgcagaaaccttcactctgccgatgtttaacctggcgatcccaaccgaactgccgggcgtagacacca

SEQ ID NO: 771379 - DNA, 75 bp, synthetic construct
  source 1..75: mol_type = other DNA
tccgggtgatccccattaaaggggcatccgtctatccggagaggatgaatgacgcgacaggaagaacttgccgct

SEQ ID NO: 771380 - DNA, 75 bp, synthetic construct
  source 1..75: mol_type = other DNA
actttgaagcgtctgtgccggagcgagtggcatatctaacagcgggtattgactcccagcttgaccgttacgaaa

SEQ ID NO: 771381 - DNA, 75 bp, synthetic construct
  source 1..75: mol_type = other DNA
accattaaacctcacagaagaaaccacgcccccttttccgacaaaggcgaattatcttattcatcctgtgcgata

SEQ ID NO: 771382 - DNA, 75 bp, synthetic construct
  source 1..75: mol_type = other DNA
gtcgtcgcaaaaaaatcaggctattcaaagtggtacctgcaacggatgttccgcacggtgacgcatcagacgctt

SEQ ID NO: 771383 - DNA, 75 bp, synthetic construct
  source 1..75: mol_type = other DNA
gtgaatatatcgaacagtcagattgatattctgcggcgtgatgtacgcgccgggcttcgtgccctgttcaggccg

SEQ ID NO: 771384 - DNA, 75 bp, synthetic construct
  source 1..75: mol_type = other DNA
tgtttaagatgagagaagatgcgccaccattaaacctcacagaagaaaccacgcccacttatccgacaaaggcga

SEQ ID NO: 771385 - DNA, 75 bp, synthetic construct
  source 1..75: mol_type = other DNA
gtggcgtttacctcactgaggtaggaacagacaccgcaaaagagcagatttataaccgtttcacgctggtggcgc

SEQ ID NO: 771386 - DNA, 75 bp, synthetic construct
  source 1..75: mol_type = other DNA
ctttattaattgccggggtggcgacgttcagcacatcttctctggcggcacaatcattacgtttcggttatgaaa

SEQ ID NO: 771387 - DNA, 75 bp, synthetic construct
  source 1..75: mol_type = other DNA
tgaaattaaaactgttcccggatagcacccttggtaatgcgcaggcgatgatcagcggcgtgcgtggcggcacta

SEQ ID NO: 771388 - DNA, 75 bp, synthetic construct
  source 1..75: mol_type = other DNA
gcgcaaactggtcgccgaagatcagcaaaaaatcatcgacggcatgaaagacgcaggcgtggaagtgattaccga

SEQ ID NO: 771389 - DNA, 75 bp, synthetic construct
  source 1..75: mol_type = other DNA
tctcgaccgcaaagcctttagcgatgcgctgggtactcaggtccgtgacatgtttgttaaagatgttccccaggg

SEQ ID NO: 771390 - DNA, 75 bp, synthetic construct
  source 1..75: mol_type = other DNA
agcgaagtttgatggcttaaccccggagttccagcaggcactgatctcatctgcgcaggaagcgggtagctatca

SEQ ID NO: 771391 - DNA, 75 bp, synthetic construct
  source 1..75: mol_type = other DNA
ctgggaaaacggctggcgcgatgtcaccaactcgcgtgcaccagttaaaactcccgccgatctgcaagggctgaa

SEQ ID NO: 771392 - DNA, 75 bp, synthetic construct
  source 1..75: mol_type = other DNA
catacattgttgccgcgatcctgtttatcttcagtctggccgggctttcgaaacatgaaacgtctcgccagggta

SEQ ID NO: 771393 - DNA, 75 bp, synthetic construct
  source 1..75: mol_type = other DNA
tgattatcaccccaggctatggaatggcggtggcgcaggcgcaatatccggtagcggaaattaccgagaaactgc

SEQ ID NO: 771394 - DNA, 75 bp, synthetic construct
  source 1..75: mol_type = other DNA
catacattgttgccgcgatcctgtttatcttcagtctggccgggctttcaaaacatgaaacgtctcgccggggta

SEQ ID NO: 771395 - DNA, 75 bp, synthetic construct
  source 1..75: mol_type = other DNA
ttcggctggcatttagtggcttccatcggtggcgcagatatgccagtggtggtgtcgatgctgaactcttactct

SEQ ID NO: 771396 - DNA, 75 bp, synthetic construct
  source 1..75: mol_type = other DNA
tcgggggctatcctttcttacattatgtgtaaggcgatgaaccgttcctttatcagcgttattgcgggtggtttc

SEQ ID NO: 771397 - DNA, 75 bp, synthetic construct
  source 1..75: mol_type = other DNA
tcgatgaacactggctatgctggtgtgcaaaacccgctgttcttcaaggaaaacactcacatgctgtttggcgat

SEQ ID NO: 771398 - DNA, 75 bp, synthetic construct
  source 1..75: mol_type = other DNA
ggttcaacgccaaaaattaaaggctcctgtcagattgaaaaagctgcgaatgaatctgcgcatttcatgcggttt

SEQ ID NO: 771399 - DNA, 75 bp, synthetic construct
  source 1..75: mol_type = other DNA
tgttattgctggcgtcaatttcctggctggtcaccctgacccagccgctgtttagtttccgctcgtttaccttta

SEQ ID NO: 771400 - DNA, 75 bp, synthetic construct
  source 1..75: mol_type = other DNA
aaagattggttttaaaaatgatgccgacagcgatactgattcatacatgtggtttgaaacaggcgacaacggcaa

SEQ ID NO: 771401 - DNA, 75 bp, synthetic construct
  source 1..75: mol_type = other DNA
aatcttaaatgggatgctttgtctgttcttgttaaagcccttttcagcagtgaagtaaaaatatcgacagtcaat

SEQ ID NO: 771402 - DNA, 75 bp, synthetic construct
  source 1..75: mol_type = other DNA
tcacccgacgatcgttattctctgcttaagcttcctgttgatgattggctttagcctggtggcggaaggtttcgg

SEQ ID NO: 771403 - DNA, 75 bp, synthetic construct
  source 1..75: mol_type = other DNA
atttgctcggtgttgttcacgttatcgacctgctacaacagtcactgcgcggcgaaccgctcaacctgcgggtgt

SEQ ID NO: 771404 - DNA, 75 bp, synthetic construct
  source 1..75: mol_type = other DNA
gctggcgatggtgatgcgtctcctgctgctgacctctatctcctggctggtcactctgactcaaccgctgttcag

SEQ ID NO: 771405 - DNA, 75 bp, synthetic construct
  source 1..75: mol_type = other DNA
acggcacttacatcatgaactcgaaagatctgcgcgccatcgcccatgttgaacgcctgaccaaaatgggcgtgc

SEQ ID NO: 771406 - DNA, 75 bp, synthetic construct
  source 1..75: mol_type = other DNA
atggtcattttgataccgagcttatgcaatatctggcgtcacgcatggttaatatggtcgccagatataaccgcc

SEQ ID NO: 771407 - DNA, 75 bp, synthetic construct
  source 1..75: mol_type = other DNA
aaatattttccgctgcgccatcacatcaggctaaagccaagaaaatccttaatcgcgttgctgcgatggctgaag

SEQ ID NO: 771408 - DNA, 75 bp, synthetic construct
  source 1..75: mol_type = other DNA
ttcatacatgtggtttgaaacaggcgacaacggcaatgaatatttcaaatggagaagcaaacaaagcaccacaac

SEQ ID NO: 771409 - DNA, 75 bp, synthetic construct
  source 1..75: mol_type = other DNA
ttacgaagggcttcataaatatatgctctcactaggattcaggagaacgatcccccatggagatggttcgtataa

SEQ ID NO: 771410 - DNA, 75 bp, synthetic construct
  source 1..75: mol_type = other DNA
ccgttggcgacagccttgagctgatgacgccgcaaggcaacattaactttacccttgagcacatggaaaacgcca

SEQ ID NO: 771411 - DNA, 75 bp, synthetic construct
  source 1..75: mol_type = other DNA
cagttactggagcgaaatcagcatacgcggcttgtcgttactgatggcgatgacgcagaagatttgctcggtgtt

SEQ ID NO: 771412 - DNA, 75 bp, synthetic construct
  source 1..75: mol_type = other DNA
cgcagcacgcaccgctgccggaaagtctgacacagccaacgccggtcccctccctgccccgaccgctgacgtggg

SEQ ID NO: 771413 - DNA, 75 bp, synthetic construct
  source 1..75: mol_type = other DNA
atccattcattagaataccttttgatagcatatctttcactaaggctatgattgggcacgtgctatcagcaactt

SEQ ID NO: 771414 - DNA, 75 bp, synthetic construct
  source 1..75: mol_type = other DNA
tgtaacaataaggtattaggtgggctcgatgttgcaattgaaaatgtaacaaagtcctttaaagaacagttaagt

SEQ ID NO: 771415 - DNA, 75 bp, synthetic construct
  source 1..75: mol_type = other DNA
agccactggtcagggtattgccggtgacggctgtagaatgggccgatcaaaattattacctgcctaaagaatcgt

SEQ ID NO: 771416 - DNA, 75 bp, synthetic construct
  source 1..75: mol_type = other DNA
ttatctgacacgaaaatcgctgtgcgaaattcgttacagagacggatacagggaggtggcggctttcatggctta

SEQ ID NO: 771417 - DNA, 75 bp, synthetic construct
  source 1..75: mol_type = other DNA
ttccgataccgtcaaggaaatgctgtatgcgcgttttgccctgccggtggtatctcccagtgaagtcgcaccgta

SEQ ID NO: 771418 - DNA, 75 bp, synthetic construct
  source 1..75: mol_type = other DNA
gtcggtgaagtcgatggtgatgaccccgcagtattcaggccaatacaaaaatacatcaatggcacatggtataac

SEQ ID NO: 771419 - DNA, 75 bp, synthetic construct
  source 1..75: mol_type = other DNA
tttgcaaaccgttttttaattaacagcagtacaggcatgtggattcatatgcgtgaccagaacgttattatggga

SEQ ID NO: 771420 - DNA, 75 bp, synthetic construct
  source 1..75: mol_type = other DNA
cccgtcatgatattcagaaaaacgccgacggttcctggacggcgaatggtcatatgccgctggaagatctggtgc

SEQ ID NO: 771421 - DNA, 75 bp, synthetic construct
  source 1..75: mol_type = other DNA
accgtgagagctatgacttctattcagttcaggtcgactatacggccgttggcttaatgtccacgccgaacgtgg

SEQ ID NO: 771422 - DNA, 75 bp, synthetic construct
  source 1..75: mol_type = other DNA
gcaacacagtgccaggcatcttctttacagcgtcagcgggaacaaggagagtcattgatatctgtgatatgtaaa

SEQ ID NO: 771423 - DNA, 75 bp, synthetic construct
  source 1..75: mol_type = other DNA
tgttgttgggttttatgttgttttattcacaatttgttactgcgtgggaagtcagttgccccgtgtttatcaata

SEQ ID NO: 771424 - DNA, 75 bp, synthetic construct
  source 1..75: mol_type = other DNA
atgaaaaataaattaaaatataaattgctgcatattagattattaggagttttattaggttgcgctgtgatactc

SEQ ID NO: 771425 - DNA, 75 bp, synthetic construct
  source 1..75: mol_type = other DNA
agccatcaagaaggcgtgagtgatgaggcggcggcggaacatattcgtcaacacattcctgaacacgatgtttta

SEQ ID NO: 771426 - DNA, 75 bp, synthetic construct
  source 1..75: mol_type = other DNA
attccgcaacgtgaatttctggggctgtcttctgccaatcagcaggagctgcaacaggttatcagtcatttctgg

SEQ ID NO: 771427 - DNA, 75 bp, synthetic construct
  source 1..75: mol_type = other DNA
tgctggagagtatccagtacatcgtggaaaaccgcgtggtgcgtatcggttcaccgctggattatgcccgcatca

SEQ ID NO: 771428 - DNA, 75 bp, synthetic construct
  source 1..75: mol_type = other DNA
cttagcccgcgtcaacaatctgacgcaatccatcctggcaaaagcgttccgtggtgaactcaccgcccagtggcg

SEQ ID NO: 771429 - DNA, 75 bp, synthetic construct
  source 1..75: mol_type = other DNA
ggtgggttagcgccccagtatctacggtcacaactctaatccgaggggtaacgtataaaaaagagcaggcaataa

SEQ ID NO: 771430 - DNA, 75 bp, synthetic construct
  source 1..75: mol_type = other DNA
gaggaaatgtattacgaaatggaaaggctgattgccgatgcaaagccagccagccgccatcttattggcctgaat

SEQ ID NO: 771431 - DNA, 75 bp, synthetic construct
  source 1..75: mol_type = other DNA
agcaaatcccacaaatcctgaaacgttttcgtcaagcggtattggggggcgcagttaatggaaaattgacagaaa

SEQ ID NO: 771432 - DNA, 75 bp, synthetic construct
  source 1..75: mol_type = other DNA
aaaacagcgccgctgcgttgctggaaaaaatcaaagctgaacgcgcagccagcgggggtaaaaaagcctcgcgca

SEQ ID NO: 771433 - DNA, 75 bp, synthetic construct
  source 1..75: mol_type = other DNA
aaaatttgctatatcctgataaacttattcgagctcgattaaccaaagatgctttaccagaatatatcgaaatat

SEQ ID NO: 771434 - DNA, 75 bp, synthetic construct
  source 1..75: mol_type = other DNA
gacgtggccgatgccgaagataatggcccggacgatccgaaaatcatcgacggcaaacattttctgccgcagcac

SEQ ID NO: 771435 - DNA, 75 bp, synthetic construct
  source 1..75: mol_type = other DNA
ttgcgttgggcattatcgcctttatcgctggcctggatatgtttaacggcctaacccatatgcaccgcccggtgg

SEQ ID NO: 771436 - DNA, 75 bp, synthetic construct
  source 1..75: mol_type = other DNA
tattttctctgcgctttcctgccgatttacttcggtgcggaacatgccaaaaccatcattgatgtcctgccgcaa

SEQ ID NO: 771437 - DNA, 75 bp, synthetic construct
  source 1..75: mol_type = other DNA
tatgatggtgctaccaaaactgctaccagtgtaaaatcaatagatacgcaaactatggcgaaattggctaatccg

SEQ ID NO: 771438 - DNA, 75 bp, synthetic construct
  source 1..75: mol_type = other DNA
atgcttatcccactggcaaatgttcttggttgcgacccgatatggctgttaaccggtaaaccaacaggtggggat

SEQ ID NO: 771439 - DNA, 75 bp, synthetic construct
  source 1..75: mol_type = other DNA
atgcttatcccgctggcaaatgttcttggttgcgacccgatgtggttattgactggtagcaatgctgcaaaggag

SEQ ID NO: 771440 - DNA, 75 bp, synthetic construct
  source 1..75: mol_type = other DNA
atggttaaaaggggacagatttatggttatttgcgtttttatcaggggacagatttatggttaaaaggggacaga

SEQ ID NO: 771441 - DNA, 75 bp, synthetic construct
  source 1..75: mol_type = other DNA
ccggtgctgtggaagtacctctatcgttatgcgaaaaaacatcaggcacgcggtaacggcttcggttatggaatg

SEQ ID NO: 771442 - DNA, 75 bp, synthetic construct
  source 1..75: mol_type = other DNA
gctatgcgaaaaaacatcaggcgcgcggtaacggcttcgggtacgggatggtttatccgaacaatccgcaaagtg

SEQ ID NO: 771443 - DNA, 75 bp, synthetic construct
  source 1..75: mol_type = other DNA
tccgtcgcgatcttaatctgaagcaagattttaccctgcgtgatatcagcgattgtttccctgcgcagcgagtga

SEQ ID NO: 771444 - DNA, 75 bp, synthetic construct
  source 1..75: mol_type = other DNA
atatttttataattcaagcaattaagagtatgcgttggcggggtttttcgtacgtgaaagtcatcgctgtggacg

SEQ ID NO: 771445 - DNA, 75 bp, synthetic construct
  source 1..75: mol_type = other DNA
aaacttggtgtcaggcggctacatcagttgatgaatatcccccggtctcttatttcagtaaaaacgcagttgtga

SEQ ID NO: 771446 - DNA, 75 bp, synthetic construct
  source 1..75: mol_type = other DNA
caacgacaaaaaatacttatctgatcaaagcattagaaaacgtgtcctttgctactttttctgatgtttgcgtta

SEQ ID NO: 771447 - DNA, 75 bp, synthetic construct
  source 1..75: mol_type = other DNA
acgcgccgttatccgcgatgcctatttcatccactgtcataaaggcacaataggtgcaatccggcgtgtggtgga

SEQ ID NO: 771448 - DNA, 75 bp, synthetic construct
  source 1..75: mol_type = other DNA
agcccattgggagtagttaagccgggtagaaatctagggcatcgacgcccaatctgttacacttctggaacaatt

SEQ ID NO: 771449 - DNA, 75 bp, synthetic construct
  source 1..75: mol_type = other DNA
acggcgtttatctgacggaagtggggactgataccgcaaaggagcagatttataaccgcttcacacttcagccgg

SEQ ID NO: 771450 - DNA, 75 bp, synthetic construct
  source 1..75: mol_type = other DNA
ccccgtatctgtatgctccgcaccgttgccggtaatgaacacgctgcacgtcgttccctcgttcgcgattacgtc

SEQ ID NO: 771451 - DNA, 75 bp, synthetic construct
  source 1..75: mol_type = other DNA
tcgcgtcggtgcgtaaccacatccgcttgcttggacgcaaagattatcaacagttgccggggctgcgaaccctgg

SEQ ID NO: 771452 - DNA, 75 bp, synthetic construct
  source 1..75: mol_type = other DNA
cgaagtgcgcagcctgcaaagtattaacacctcgctggaggccgatctgcgtgaagtaaccacgcggatggaagc

SEQ ID NO: 771453 - DNA, 75 bp, synthetic construct
  source 1..75: mol_type = other DNA
ggacttaaagcaaatgttgatagtaacgatgtgatctttgttgctcgtttacaaaaatcttgggcctcattaaat

SEQ ID NO: 771454 - DNA, 75 bp, synthetic construct
  source 1..75: mol_type = other DNA
ctatcgctgatctttatcgttctgacgctgaacgctactggaattcaactcttgcgacaattgaaagggtcaaac

SEQ ID NO: 771455 - DNA, 75 bp, synthetic construct
  source 1..75: mol_type = other DNA
attaatatgacaggcggcgctgcctcaaggattacagcgagagtcagaaaggacgaagctaccggatggattttt

SEQ ID NO: 771456 - DNA, 75 bp, synthetic construct
  source 1..75: mol_type = other DNA
ttgccggtaatgaacacgctgcacgtcgttccctcgttcgcgattacgtcctctcgttcgctggccgcctgccgg

SEQ ID NO: 771457 - DNA, 75 bp, synthetic construct
  source 1..75: mol_type = other DNA
cgaacctgcgtttttactggcgcttgatcgccagccggagctgataacagaagcgttgaaaaacaatatcatgct

SEQ ID NO: 771458 - DNA, 75 bp, synthetic construct
  source 1..75: mol_type = other DNA
gcttcggtaaagaagcacaagaacgccataccctgacccacgaaattcgcaatctccagcagctcaacgcgcaaa

SEQ ID NO: 771459 - DNA, 75 bp, synthetic construct
  source 1..75: mol_type = other DNA
cttgttggggcgtaaagattatcagcagcttccggggctaagaaccctggattacgtgctgatgtttatccccgt

SEQ ID NO: 771460 - DNA, 75 bp, synthetic construct
  source 1..75: mol_type = other DNA
cgccgcaaaagcctgtgcggaaattgaaaaaacgccggtcagtattcgtgagctgtggaacccggacacctgccc

SEQ ID NO: 771461 - DNA, 75 bp, synthetic construct
  source 1..75: mol_type = other DNA
agatcgtactggccagcaaggttgaactggaaggaccggtagctctcccgcgccattacgaactccccattgacg

SEQ ID NO: 771462 - DNA, 75 bp, synthetic construct
  source 1..75: mol_type = other DNA
tcgttgtgtgtgaaggggcatttgacgtaatgggcgtgaagcgagccatcttcgacgaaaagacgctgagggatt

SEQ ID NO: 771463 - DNA, 75 bp, synthetic construct
  source 1..75: mol_type = other DNA
actcagtagaacaggcgctggaactgaagcgccgataccaggatgaagctgtctggtttgccggaggcagcaaac

SEQ ID NO: 771464 - DNA, 75 bp, synthetic construct
  source 1..75: mol_type = other DNA
ctgcccatgcgatcgcctgttaaccgaaattatcattaaagtatccgtatcgcacctgtacgactcgcaaaatta

SEQ ID NO: 771465 - DNA, 75 bp, synthetic construct
  source 1..75: mol_type = other DNA
atcctcaatttatatttgtttttgccgccgttcgtcgtgcagaacgtaaaccacgtatcagtatgctgcgtatcg

SEQ ID NO: 771466 - DNA, 75 bp, synthetic construct
  source 1..75: mol_type = other DNA
ttgcgtcggtgcgtaaccatatccgcttgcttgggcgtaaatattatcaacagttgccggggctaagaaccctgg

SEQ ID NO: 771467 - DNA, 75 bp, synthetic construct
  source 1..75: mol_type = other DNA
tggcccaggaagcgatcaacctgacgcgtgcgctgaaaggcgacaataaaacccagggcaactggggcgaggtag

SEQ ID NO: 771468 - DNA, 75 bp, synthetic construct
  source 1..75: mol_type = other DNA
cgcctgcacgatgtcgaaaaacaaaacctggaaggcaatgcacttgaacaggccgtcgccaacgccattttcccc

SEQ ID NO: 771469 - DNA, 75 bp, synthetic construct
  source 1..75: mol_type = other DNA
agcggcaacggcggcccgcaggcaaccgtaagtaacctgtgggatcagggcggtttcctgccgcacggctttagc

SEQ ID NO: 771470 - DNA, 75 bp, synthetic construct
  source 1..75: mol_type = other DNA
atgccacttacaaatccccctgaacgctatggcgttatatcaacagcctttcattggctaagtgcaatcattgtc

SEQ ID NO: 771471 - DNA, 75 bp, synthetic construct
  source 1..75: mol_type = other DNA
ctggcgcacaggctgactttgccggtgccctgcatttttggctcgcgtggagcgtcgtagtactgtccgttatgc

SEQ ID NO: 771472 - DNA, 75 bp, synthetic construct
  source 1..75: mol_type = other DNA
atggaaggtcaacagcacggcgagcagctaaagcgcggccttaaaaaccgccatattcagcttatcgcgctggga

SEQ ID NO: 771473 - DNA, 75 bp, synthetic construct
  source 1..75: mol_type = other DNA
tcatgttctcgttcggtgggctggaactggtggggatcaccgctgcagaagcagataacccggagcaaagcattc

SEQ ID NO: 771474 - DNA, 75 bp, synthetic construct
  source 1..75: mol_type = other DNA
acctgggtttctgccgccgtgttctttgtggtgatcaacgccatcaacctgaccaacgttaaagtgtttggcgag

SEQ ID NO: 771475 - DNA, 75 bp, synthetic construct
  source 1..75: mol_type = other DNA
tttagctgcaggaggtggtggaagcaaacatagacatgaaaatgatgagtctgatactacggccccatcgtcacc

SEQ ID NO: 771476 - DNA, 75 bp, synthetic construct
  source 1..75: mol_type = other DNA
cggtggcttctgctctgtttagtggcgcggttatggctgcacctgctgctaataatgcaagtactgcaactttgg

SEQ ID NO: 771477 - DNA, 75 bp, synthetic construct
  source 1..75: mol_type = other DNA
aaacggtgaaatggcgctcagtgcactgaatttaagcaacagcggacaatggattgcaaaaaatctgaccctgaa

SEQ ID NO: 771478 - DNA, 75 bp, synthetic construct
  source 1..75: mol_type = other DNA
cagacactgttaaagataacagtgaagtcacagcagttgctaaagatccgagtggtaatgaaagtgctccggtca

SEQ ID NO: 771479 - DNA, 75 bp, synthetic construct
  source 1..75: mol_type = other DNA
atgccaataaaggcgataccgtggatgtcacctttgaagatgaaaaaggtggtaagcacaccgtgacgcgatacc

SEQ ID NO: 771480 - DNA, 75 bp, synthetic construct
  source 1..75: mol_type = other DNA
gcaacggcggaagaaagatcgttgctggaggcatggaataaatatcgggtattgttgaatcgtgttgatacatca

SEQ ID NO: 771481 - DNA, 75 bp, synthetic construct
  source 1..75: mol_type = other DNA
acctgggtgtctgccgcagccttctttgtgctgattaacgccatcaacctgaccaacgtgaaagtgtttggcgag

SEQ ID NO: 771482 - DNA, 75 bp, synthetic construct
  source 1..75: mol_type = other DNA
aagacagccagactgcctacatctactcttctgctcacttcgcgaacaacgtctttgttgatggtagcttgagct

SEQ ID NO: 771483 - DNA, 75 bp, synthetic construct
  source 1..75: mol_type = other DNA
ctaacagctatcgcgatgctgatggtgatgtagataccaacggttgggatggcacagaccgtatggatgtgactc

SEQ ID NO: 771484 - DNA, 75 bp, synthetic construct
  source 1..75: mol_type = other DNA
cgctaacatgagcgacggtacttatgttgacggtagcaccaactctgacgcctggggcttcggtgttaaactggg

SEQ ID NO: 771485 - DNA, 75 bp, synthetic construct
  source 1..75: mol_type = other DNA
ctacaaagttcgtatcgacaacgctactggtgctggttcaatcgctgactacaacggtaacgagctgatttacgt

SEQ ID NO: 771486 - DNA, 75 bp, synthetic construct
  source 1..75: mol_type = other DNA
acggtatcctggatgttggtaacactgcggcgaatgctcttcaggttgatacactgaacctgaccagcaccactg

SEQ ID NO: 771487 - DNA, 75 bp, synthetic construct
  source 1..75: mol_type = other DNA
taacgatactctcgatggtaagatcgataaagacagcccgctggatggcatttacgatgcttatgagataggcac

SEQ ID NO: 771488 - DNA, 75 bp, synthetic construct
  source 1..75: mol_type = other DNA
ctgattcactgactgtcgacaacagtaccgtaaccatttctgatgaagtttctgctggttgggctgtaggtgatg

SEQ ID NO: 771489 - DNA, 75 bp, synthetic construct
  source 1..75: mol_type = other DNA
cctgctgttgatggtggcgtggaacatgagtgaagcgcacaaagtggtcgacttgctgcgtcatgcaccgaaaga

SEQ ID NO: 771490 - DNA, 75 bp, synthetic construct
  source 1..75: mol_type = other DNA
agatgccgttaagtggctgcatgacgtacttaacgaaaaattgccgctgggaacggacgcgcatggcgctgaacc

SEQ ID NO: 771491 - DNA, 75 bp, synthetic construct
  source 1..75: mol_type = other DNA
caatacggcttctgttgaagatggacagagcgaagttgataacagcggtgaccatgttgcagctgcaaccggtaa

SEQ ID NO: 771492 - DNA, 75 bp, synthetic construct
  source 1..75: mol_type = other DNA
ctgacagctatcgtgatactgatgctaacgtagatactaatggttgggatggcacagaccgtatggatgtgactc

SEQ ID NO: 771493 - DNA, 75 bp, synthetic construct
  source 1..75: mol_type = other DNA
tgcaggttgatactctgaacctgaccagcactactgataccagtggtaacattcacgctggtgtgttcaacatcg

SEQ ID NO: 771494 - DNA, 75 bp, synthetic construct
  source 1..75: mol_type = other DNA
ctgtccagggtaaccatgtcacgattcgccagaacagtgtcaccaacagtggcacgctcaccgggatagccgcgc

SEQ ID NO: 771495 - DNA, 75 bp, synthetic construct
  source 1..75: mol_type = other DNA
tgcatatggtgaagaacagggctggcaagagtattgcgagtacctgcatcatgggctttcagcaattaagcgtcg

SEQ ID NO: 771496 - DNA, 75 bp, synthetic construct
  source 1..75: mol_type = other DNA
tgcgctgggcgaacaggcatgtcgacagaaacacagcgtccggtactgtagaaccgggcgattactggaacagct

SEQ ID NO: 771497 - DNA, 75 bp, synthetic construct
  source 1..75: mol_type = other DNA
ctggtaagtattatgaagtattccgaggaaaggatcggtttgtattattgattaatggagctggttatttgtacg

SEQ ID NO: 771498 - DNA, 75 bp, synthetic construct
  source 1..75: mol_type = other DNA
agccgcaacttagccaggcgagttttgaaaacctgctggctgccgagatgctaaaaactgacgcccgtcaggatc

SEQ ID NO: 771499 - DNA, 75 bp, synthetic construct
  source 1..75: mol_type = other DNA
cgcgtacggcgacgaacagggctggcaggaatattgcgaatacctgcatcacggactttcggcgattaagcgtcg

SEQ ID NO: 771500 - DNA, 75 bp, synthetic construct
  source 1..75: mol_type = other DNA
tcgaactgtcacaaaaacccattgtgctgattggcggctgtaccggcagtggtaaaacacggttagtgcaacaac

SEQ ID NO: 771501 - DNA, 75 bp, synthetic construct
  source 1..75: mol_type = other DNA
atttccgacacaagataatgatcagctaaaatgtttatcctctcgagtggtggagttggctggaaaatataataa

SEQ ID NO: 771502 - DNA, 75 bp, synthetic construct
  source 1..75: mol_type = other DNA
acctgtagctgtgttagggattggcgggtacgcgatagtgaaacacaaaaaaaatgcgaaactgacagccgccct

SEQ ID NO: 771503 - DNA, 75 bp, synthetic construct
  source 1..75: mol_type = other DNA
caggattataatgctttttgtgattttattgaatttaagcataaaaatattataccgaacaccagtatgtatacc

SEQ ID NO: 771504 - DNA, 75 bp, synthetic construct
  source 1..75: mol_type = other DNA
gaagaaagctggcgaaggtgcaaaagttatcgaactgcaaggcattgccggtacatccgctgctcgtgaacgtgg

SEQ ID NO: 771505 - DNA, 75 bp, synthetic construct
  source 1..75: mol_type = other DNA
ctgcaaactgccggtaaatcggatgtgatggtcgtcggatttgacggtacaccggatggcgaaaaagcggtgaat

SEQ ID NO: 771506 - DNA, 75 bp, synthetic construct
  source 1..75: mol_type = other DNA
gtgagcaacaactcagtgatgttgcaaaatctatgggatggatgaatgatagcggaggagatatactcaaaaaga

SEQ ID NO: 771507 - DNA, 75 bp, synthetic construct
  source 1..75: mol_type = other DNA
tgcatatggcgacgaacagggctggcaagcgtattgcgaatatctgcatcacggtctttcggcgattaagcgtcg

SEQ ID NO: 771508 - DNA, 75 bp, synthetic construct
  source 1..75: mol_type = other DNA
cacgattcgccagaacggtgtcaccaacagtggcacgctcaccgggatagccgcgctgacgcttgccgcccgtat

SEQ ID NO: 771509 - DNA, 75 bp, synthetic construct
  source 1..75: mol_type = other DNA
cctccactgaaagtggtgtcggggttaatcttggtaacctttatgcccgcgagggcgatatcatactgagcagtg

SEQ ID NO: 771510 - DNA, 75 bp, synthetic construct
  source 1..75: mol_type = other DNA
tcagtcacaaacagtgacggtaacctcatgctgaacagcgcgtcttccacgctggcgggtgaaaccagtgcgggt

SEQ ID NO: 771511 - DNA, 75 bp, synthetic construct
  source 1..75: mol_type = other DNA
gcgggctccgccagcctgctcacccggggcagactgtttctcgcgcgcgatgacgcggggaaagatgggagcttg

SEQ ID NO: 771512 - DNA, 75 bp, synthetic construct
  source 1..75: mol_type = other DNA
atcagcagaacggcacgctgtacagtgctgcaggcctgacgctggatatacccgacgataaccatacgtgggcag

SEQ ID NO: 771513 - DNA, 75 bp, synthetic construct
  source 1..75: mol_type = other DNA
accgttaacacacagaggcttgataatcagcagaacggcacgctgtacagtgctgcaggcctgacgctggatata

SEQ ID NO: 771514 - DNA, 75 bp, synthetic construct
  source 1..75: mol_type = other DNA
actgaccagcagcggcgtacttgttggttccgccctgaatacacagtcacagaccctgaccaacagcggtctgtt

SEQ ID NO: 771515 - DNA, 75 bp, synthetic construct
  source 1..75: mol_type = other DNA
actgttaaaagagaagaatccagacctgattatcggcgtcggtggctgcgtggcatcgcaagaaggcgagcacat

SEQ ID NO: 771516 - DNA, 75 bp, synthetic construct
  source 1..75: mol_type = other DNA
tgttattcagctggcagtgctatgcgccacggaagcagttcgctgacccggttgaccggccagtctgctatgacg

SEQ ID NO: 771517 - DNA, 75 bp, synthetic construct
  source 1..75: mol_type = other DNA
ctctccgtcagcagccagggggatattaccaatggcgccacattgcagggcaacggtatcacgctgaatgctgca

SEQ ID NO: 771518 - DNA, 75 bp, synthetic construct
  source 1..75: mol_type = other DNA
tcagggcaacggtaaaaccacgctcagcgcggcaacgcaggcccacaacagtggcaagattctttccggcggtga

SEQ ID NO: 771519 - DNA, 75 bp, synthetic construct
  source 1..75: mol_type = other DNA
ccggcggcaaagggctgacggtcagtgcgcaggcgctgagctccggtaaaaaatcggtcacccacagcgatgctg

SEQ ID NO: 771520 - DNA, 75 bp, synthetic construct
  source 1..75: mol_type = other DNA
gaaataatattcgggggtgtccggatattcctgctgaaacgctgtatgcgccgggagaacagtttcagggagggt

SEQ ID NO: 771521 - DNA, 75 bp, synthetic construct
  source 1..75: mol_type = other DNA
gggctaccgaaaggtaggccggagtccttacagtccggttttctcacccccgccagtgtcaccgccctgtgtgag

SEQ ID NO: 771522 - DNA, 75 bp, synthetic construct
  source 1..75: mol_type = other DNA
gagtgtcgagcataatggtgaatttatccttatccataccgtcgccggatatggtcgggcagtagcgcgaatcct

SEQ ID NO: 771523 - DNA, 75 bp, synthetic construct
  source 1..75: mol_type = other DNA
tatgccattccgtgtacgttatgggcgcttgcatccggcttttttgttgcgggttatctgctgcctttatgtgcg

SEQ ID NO: 771524 - DNA, 75 bp, synthetic construct
  source 1..75: mol_type = other DNA
cgaattaatatacggaaatgtcgggatattcctgttgaaacgccgtatgcgccgggagaacaaattaagggaggg

SEQ ID NO: 771525 - DNA, 75 bp, synthetic construct
  source 1..75: mol_type = other DNA
tttctgtccccaatgtgcgaattaatattcggaaatatcatgatattcctgctgaaacgccgtatgcgccgggag

SEQ ID NO: 771526 - DNA, 75 bp, synthetic construct
  source 1..75: mol_type = other DNA
cccttaatttgcaacttaacgacgaagatttcagcatggcgcagcaaatcgctgacaccatcaaccgcgtgcgtg

SEQ ID NO: 771527 - DNA, 75 bp, synthetic construct
  source 1..75: mol_type = other DNA
gtgacttcgggttcaaattatatcctggatagcaatacttatggcaaaactggtcactttggcaattctgatgaa

SEQ ID NO: 771528 - DNA, 75 bp, synthetic construct
  source 1..75: mol_type = other DNA
accacctttaatggtgacactgttaacggggctatctctacatattacctgaatcatgattttactgatggaaca

SEQ ID NO: 771529 - DNA, 75 bp, synthetic construct
  source 1..75: mol_type = other DNA
gaccagacaacccagacgccgtttaccacacaaacgcttaataacatgctctcacagctgggaattaccgttccg

SEQ ID NO: 771530 - DNA, 75 bp, synthetic construct
  source 1..75: mol_type = other DNA
agtgaccctcgacagctgcgcggtagcgcaggggaatctctcggttacggtcaatcgtcaggccaatgtcagcca

SEQ ID NO: 771531 - DNA, 75 bp, synthetic construct
  source 1..75: mol_type = other DNA
gcaggttaatgtcaccccgcaggacgctaaagtagtgattaactcgcgcaccggttcggtggtgatgaatcgcga

SEQ ID NO: 771532 - DNA, 75 bp, synthetic construct
  source 1..75: mol_type = other DNA
atgccacgactcatggtggtaaggtgattaccgcaacttcaacgctttttatcaatggcattcaggtagctctcg

SEQ ID NO: 771533 - DNA, 75 bp, synthetic construct
  source 1..75: mol_type = other DNA
taacccggctaacgcagtggaaaattgtgccgaagcgtgccgttgatttggccgttgacgttaagggcgctcctg

SEQ ID NO: 771534 - DNA, 75 bp, synthetic construct
  source 1..75: mol_type = other DNA
gcatcaagatagagctaaggaacatcagaccaaggctacagaaatcctcaatcgcgttgcggttttaactgaact

SEQ ID NO: 771535 - DNA, 75 bp, synthetic construct
  source 1..75: mol_type = other DNA
cggtgccagcccttcggacacgcagagctatctaaccggtctttgggcacgcatacgcgccaagctacaccggga

SEQ ID NO: 771536 - DNA, 75 bp, synthetic construct
  source 1..75: mol_type = other DNA
aaaaggtgctttctctccagcccgactgcgtgcggttagatgtttatcgcactgctgcggtgctggagcaaaatc

SEQ ID NO: 771537 - DNA, 75 bp, synthetic construct
  source 1..75: mol_type = other DNA
aactatctaaccggtatctgggcgcgtatccgtgccaaactgcatcgggaagatgtccgtattttcggtattcgt

SEQ ID NO: 771538 - DNA, 75 bp, synthetic construct
  source 1..75: mol_type = other DNA
aaagcgcgctttcatgccgaggccattgacccggaaaaaggcagcgctaccggctatgttgctaaatacatttcg

SEQ ID NO: 771539 - DNA, 75 bp, synthetic construct
  source 1..75: mol_type = other DNA
ttctggctggctttattgctggttacctggtgaatgccgtggcctatcacctctcgcctttggaggataaaacgg

SEQ ID NO: 771540 - DNA, 75 bp, synthetic construct
  source 1..75: mol_type = other DNA
gtggatcacttttcatccgtcgttgacaacctctcgcctttggaggataaaacggcgttaacgtttcgccaggta

SEQ ID NO: 771541 - DNA, 75 bp, synthetic construct
  source 1..75: mol_type = other DNA
ggtgacccaacagcgacggaagaaggtcgtaatatagttgttaatcactgcaaatgtgcatgtggttgtagggtt

SEQ ID NO: 771542 - DNA, 75 bp, synthetic construct
  source 1..75: mol_type = other DNA
aaaaccagttcaacggtaaggtgttcgagtgtgattacttcagcgtgcgatattacaaaaagggcagcgcgcaca

SEQ ID NO: 771543 - DNA, 75 bp, synthetic construct
  source 1..75: mol_type = other DNA
atgaagcagctgctcggcgaggcgacggttgaatcgctgcgccatgccctcttttttgagaaaacgctcacgaac

SEQ ID NO: 771544 - DNA, 75 bp, synthetic construct
  source 1..75: mol_type = other DNA
atgacaatgctactgccgctcttcattctggttggttttatggcaggttattttgttaatgctatggcctatcac

SEQ ID NO: 771545 - DNA, 75 bp, synthetic construct
  source 1..75: mol_type = other DNA
gaacagcgtggtaacaccgttgttctgcaacagatggagctgaccgactacgctaacatggcgctgagcatcccg

SEQ ID NO: 771546 - DNA, 75 bp, synthetic construct
  source 1..75: mol_type = other DNA
tcacgttctgcgtgacggtaatcctcatcatctggatgctgcacggttcgctgtgtgaaatacggatgagctttt

SEQ ID NO: 771547 - DNA, 75 bp, synthetic construct
  source 1..75: mol_type = other DNA
atgtcgcaaaaatcgcttatggccatcacgttctgcgtgacggcaatcctcatcatctggatgctgcacggttcg

SEQ ID NO: 771548 - DNA, 75 bp, synthetic construct
  source 1..75: mol_type = other DNA
cgtgccaatccggtacgtggaagacttctggttcgctcaatggttcttacacaaacttaggttcacatagaggtt

SEQ ID NO: 771549 - DNA, 75 bp, synthetic construct
  source 1..75: mol_type = other DNA
taaacgcgtcaataaaggcaccggcgtgaaatcgctggctgatgtgttgggcattaagccggaagaaattatggc

SEQ ID NO: 771550 - DNA, 75 bp, synthetic construct
  source 1..75: mol_type = other DNA
caattccgctggtgttctgcgaagcggagaaaatggaccccaatacccagttcctgaaagtgatgatgattgatg

SEQ ID NO: 771551 - DNA, 75 bp, synthetic construct
  source 1..75: mol_type = other DNA
cgacccccccattccccccgccgttaaaaatgcgattgccgcagctcgcgcccgtggcgtgaatgtcgtgctaac

SEQ ID NO: 771552 - DNA, 75 bp, synthetic construct
  source 1..75: mol_type = other DNA
ctgatttctgactctatctctctgactggtctttctgcgctgaacatcaacgaagatggtcatgttgcaactgat

SEQ ID NO: 771553 - DNA, 75 bp, synthetic construct
  source 1..75: mol_type = other DNA
caatactgaagccactgcaactctgatcgacatcgcagctaacagcctgtggccttcatcaactgttggtgtaga

SEQ ID NO: 771554 - DNA, 75 bp, synthetic construct
  source 1..75: mol_type = other DNA
tgggtgcttacacctacgaagcccgccaggaaggtaacaccgttgttctgcatcagaccgagctgaccgactacg

SEQ ID NO: 771555 - DNA, 75 bp, synthetic construct
  source 1..75: mol_type = other DNA
gcctaacggccttgtaggccgcgataatacaggggcaatactttcgtgccaatccggtacttggcgtaaaagcaa

SEQ ID NO: 771556 - DNA, 75 bp, synthetic construct
  source 1..75: mol_type = other DNA
tgttgatttttttcgaggggattcatttcagataaccagcaaagatcctattaatttattaagtattgccgttta

SEQ ID NO: 771557 - DNA, 75 bp, synthetic construct
  source 1..75: mol_type = other DNA
tctgatgtcctctttatcgggagcaatcatgcgctctcttgagaaaggcacaccaccacaaatgatgtctttatt

SEQ ID NO: 771558 - DNA, 75 bp, synthetic construct
  source 1..75: mol_type = other DNA
atgtcgcaaaaatcgcttacggccattacgttctgcgtaacggcaatcctcatcatctggatgctacacggttca

SEQ ID NO: 771559 - DNA, 75 bp, synthetic construct
  source 1..75: mol_type = other DNA
tcaggctgaacagcgcggtaacaccgttgttctgcaacagatggagctgactgaagtggtcaacaaaaactggcc

SEQ ID NO: 771560 - DNA, 75 bp, synthetic construct
  source 1..75: mol_type = other DNA
tgacgttagcgaaggcgttgctgttaatcttaatgtcgaaagtaacattaatatttccaataactcccgcgttgc

SEQ ID NO: 771561 - DNA, 75 bp, synthetic construct
  source 1..75: mol_type = other DNA
gcaactatgtaaactatagtggttttgtctattacaacaacaccaatggtgatttcgatcagtcctttaacggcg

SEQ ID NO: 771562 - DNA, 75 bp, synthetic construct
  source 1..75: mol_type = other DNA
ataactcccgcgttgcaggtattgcattatctcaaggtaatacttacaacgaaacctacactaccgaatctcata

SEQ ID NO: 771563 - DNA, 75 bp, synthetic construct
  source 1..75: mol_type = other DNA
aaggtggttatgttgataccgatcatctgactattaattcctatagtactgttgatttgactgaatcaactggct

SEQ ID NO: 771564 - DNA, 75 bp, synthetic construct
  source 1..75: mol_type = other DNA
gcgcatgggtaagctacttcggtggtaacttcaacggcgacaacggcaccatcaactatgatcaggatgttaacg

SEQ ID NO: 771565 - DNA, 75 bp, synthetic construct
  source 1..75: mol_type = other DNA
ggccaaacggttcgggcaaaagtaccttatcggcaacgcttgccgggcgcgaagattatgaagtgacgggcggca

SEQ ID NO: 771566 - DNA, 75 bp, synthetic construct
  source 1..75: mol_type = other DNA
tgggttggaaggggaaagcgccctgactggctaaaaaaatatcttgacgaaggccgcgagctttcggagtttgag

SEQ ID NO: 771567 - DNA, 75 bp, synthetic construct
  source 1..75: mol_type = other DNA
cgtatttctgctactgaacaatggcgagtggaattaaccagggcggggatcagtgcaagtgctttggataatata

SEQ ID NO: 771568 - DNA, 75 bp, synthetic construct
  source 1..75: mol_type = other DNA
gtgatactggttgtctggagattcagggggccagtctactacagtactgtagcgctgtctagtgatgacaattca

SEQ ID NO: 771569 - DNA, 75 bp, synthetic construct
  source 1..75: mol_type = other DNA
aaaaagcgcaacgatattttgcaaatggcagtgctggagccggagttatgcattcttgatgagtcggactccggg

SEQ ID NO: 771570 - DNA, 75 bp, synthetic construct
  source 1..75: mol_type = other DNA
cggaagatttattaacccgttcggttaacgttggtttttccggtggcgagaaaaagcgcaacgatattttgcaaa

SEQ ID NO: 771571 - DNA, 75 bp, synthetic construct
  source 1..75: mol_type = other DNA
gctctggcaatcctgctacaccccagacttcaacacccagcgttggagccgcgatctcccgcagctcccccagga

SEQ ID NO: 771572 - DNA, 75 bp, synthetic construct
  source 1..75: mol_type = other DNA
atgtcaaacatctgcaaaccggtaccgtcagcgttacctttgatgactatacccgcagcgacgaaggcgagcgcc

SEQ ID NO: 771573 - DNA, 75 bp, synthetic construct
  source 1..75: mol_type = other DNA
cgcgtctggcgattgtcgatgccctgagaaagcagcaccgtttcttccactgggatctggagttctgcgacctgt

SEQ ID NO: 771574 - DNA, 75 bp, synthetic construct
  source 1..75: mol_type = other DNA
tgccgtactggaaggtgtgagttttggtattgctgacgggctgcgtgttctgcaagagagtggaacggctattga

SEQ ID NO: 771575 - DNA, 75 bp, synthetic construct
  source 1..75: mol_type = other DNA
gtgactggtcagactcgctattgcaaaagtgcggcctgacgcgggcaaatatgccggaactggtggaaggttgtg

SEQ ID NO: 771576 - DNA, 75 bp, synthetic construct
  source 1..75: mol_type = other DNA
taattacaacaattgtgccaccaggtgtgagccatataaatacttgtcttggaacggcgtttaaagatactcaat

SEQ ID NO: 771577 - DNA, 75 bp, synthetic construct
  source 1..75: mol_type = other DNA
ctgttttatgccttcagataagatcgtaggggggattaagaatgatcaggatgaatggaatctggaggggcatcc

SEQ ID NO: 771578 - DNA, 75 bp, synthetic construct
  source 1..75: mol_type = other DNA
tttttcatttgcaacaacacaacctcttgtcacaataggagaacttgaagcacaacaaaaccggaatattctttt

SEQ ID NO: 771579 - DNA, 75 bp, synthetic construct
  source 1..75: mol_type = other DNA
gggctgttttactggttattgatgatccccgcgcatctgtttatttttcgcggaatggcaaaacaaatcgccaga

SEQ ID NO: 771580 - DNA, 75 bp, synthetic construct
  source 1..75: mol_type = other DNA
gggcatgccaatacctctcttattaaccaactgccagtacttacaaatgatgcttatcgcacggcactgcatagt

SEQ ID NO: 771581 - DNA, 75 bp, synthetic construct
  source 1..75: mol_type = other DNA
aaaccgccgacagctacccggtgtggccggcagaaaacagcgagcagacgcgttcttcgctgagcagtaaagatg

SEQ ID NO: 771582 - DNA, 75 bp, synthetic construct
  source 1..75: mol_type = other DNA
agcggcctggcgcagcgagtatgaaggctgtgaagggatgcaaaacttcctcaatgcgcagcaaaactacccggt

SEQ ID NO: 771583 - DNA, 75 bp, synthetic construct
  source 1..75: mol_type = other DNA
cccgctattcctggcaagaaatcgccgaccgattcggcgtagaacattccacagtatcgcgtatctggtcgggga

SEQ ID NO: 771584 - DNA, 75 bp, synthetic construct
  source 1..75: mol_type = other DNA
taacggatgaacccagggaaatggtgtatctttctgatgggatgtggctggatcccaacggacgaattgtacaac

SEQ ID NO: 771585 - DNA, 75 bp, synthetic construct
  source 1..75: mol_type = other DNA
cgccaaaattgggcacaataccaagatatgatctttggaagcgaagatatcactccttcacctaaaaatgaactt

SEQ ID NO: 771586 - DNA, 75 bp, synthetic construct
  source 1..75: mol_type = other DNA
aaaaagacattgaatatatcttcagatgatgaactaagagggcaggattatgatgttgatatgtatttcgaaatt

SEQ ID NO: 771587 - DNA, 75 bp, synthetic construct
  source 1..75: mol_type = other DNA
atgatcaaacgcggtggcgagaatgtctcctgcgtggagctggaaaatatcatcgccacccatccgaaaattcag

SEQ ID NO: 771588 - DNA, 75 bp, synthetic construct
  source 1..75: mol_type = other DNA
atgagtgccgtaacagttaatgatgacggtctggttttacggctctatattcagccgaaagccagccgtgattct

SEQ ID NO: 771589 - DNA, 75 bp, synthetic construct
  source 1..75: mol_type = other DNA
tgcggtcagcggacaggcactggcgatgatgcagcggcacgggccgcgcacgtggccgctctccctgatgctggt

SEQ ID NO: 771590 - DNA, 75 bp, synthetic construct
  source 1..75: mol_type = other DNA
ctctaatagataaacaaacgttggtacgtaacaacggtgcagaggttcagtcagagcaggacactgactgtcgtc

SEQ ID NO: 771591 - DNA, 75 bp, synthetic construct
  source 1..75: mol_type = other DNA
acattagcccaatacttctaccaactacgacaagtaattagaagtattcccgcatcaagttatgttgaactattc

SEQ ID NO: 771592 - DNA, 75 bp, synthetic construct
  source 1..75: mol_type = other DNA
taaaatcgatgatgtgttttatataaagcctattgtgactattaggaataacagtaatgagcgaatttatgtgaa

SEQ ID NO: 771593 - DNA, 75 bp, synthetic construct
  source 1..75: mol_type = other DNA
actggctgataataggcatgctattcatagcatgtctattattaattttaaaattcaaagatatttacagaacac

SEQ ID NO: 771594 - DNA, 75 bp, synthetic construct
  source 1..75: mol_type = other DNA
agcttaccgagccacagttaccgacaatgttaaaacagtggcaacaaaagcataccgcttttgctctgacatccc

SEQ ID NO: 771595 - DNA, 75 bp, synthetic construct
  source 1..75: mol_type = other DNA
gatccccgcgcatctgtttatttttcgcggaatggcaaaacaaatcgccagactggcagaacaaagcacagatta

SEQ ID NO: 771596 - DNA, 75 bp, synthetic construct
  source 1..75: mol_type = other DNA
cattgcttataactattatgtatatattgaaatcaatattaactggaaatgtaaaagccgctaggatatgttttg

SEQ ID NO: 771597 - DNA, 75 bp, synthetic construct
  source 1..75: mol_type = other DNA
cgaaaggttgttgaaaaaataggctatccagagcctaagttttttattttttgtgatgacattgaatacgctatt

SEQ ID NO: 771598 - DNA, 75 bp, synthetic construct
  source 1..75: mol_type = other DNA
ggaaagctgcaatacgccgaaccctacaggggaaaacgttgaagctggagcagatttacaaagagattgaaccct

SEQ ID NO: 771599 - DNA, 75 bp, synthetic construct
  source 1..75: mol_type = other DNA
taggtcttttttgtctctcatctggcgatgttgaactggcgaaatatctggctggcatgttgccaataacctgtt

SEQ ID NO: 771600 - DNA, 75 bp, synthetic construct
  source 1..75: mol_type = other DNA
gctggtggtgcagtagcattaatccattatctgaatgaaatatgtcaacgcagtgaaaatattgccaatgacgca

SEQ ID NO: 771601 - DNA, 75 bp, synthetic construct
  source 1..75: mol_type = other DNA
tcatggtcagattaaaacctcattgggcgatatggatatttattttttatttctttttgactggaaaaaaaaata

SEQ ID NO: 771602 - DNA, 75 bp, synthetic construct
  source 1..75: mol_type = other DNA
gtatgccgggcgcaaaagcaccggagacaccccgtaagaaaataccgctgcatatgaggcttgcaggagtgagac

SEQ ID NO: 771603 - DNA, 75 bp, synthetic construct
  source 1..75: mol_type = other DNA
tgggatacacgaaaattcttgatcatgtggtgggctattacctggcacatgatccgtcccccatcctggtggttc

SEQ ID NO: 771604 - DNA, 75 bp, synthetic construct
  source 1..75: mol_type = other DNA
atgatccagtattcaggtaaacagtggggcgaacccaacaaatgggacatgagccgcatgagtttgcctgagttc

SEQ ID NO: 771605 - DNA, 75 bp, synthetic construct
  source 1..75: mol_type = other DNA
tgcgtgaggcagcagaacgtgcaattccagaaatggagctgctgacgcttccatttgatgcttggttaagcaaac

SEQ ID NO: 771606 - DNA, 75 bp, synthetic construct
  source 1..75: mol_type = other DNA
aagcaatcattgttgcgatagaaaacgaacaggaacgtctttttgatgaagattacctaatggattcgaaagaat

SEQ ID NO: 771607 - DNA, 75 bp, synthetic construct
  source 1..75: mol_type = other DNA
aactgcaaaacatatgcaccgggtctcggtgggaatgatcatcgaatcgctggcggttaaagggcgtaaggccgc

SEQ ID NO: 771608 - DNA, 75 bp, synthetic construct
  source 1..75: mol_type = other DNA
ctgaaatttgacgattgctataactttgctcggtgtcttgcaaaacaccataacgataatatcgaggatatcaaa

SEQ ID NO: 771609 - DNA, 75 bp, synthetic construct
  source 1..75: mol_type = other DNA
accgctataaacagcgattttttggtgactttctggaattaccaggactgacagaaatagctgttaatcgtccag

SEQ ID NO: 771610 - DNA, 75 bp, synthetic construct
  source 1..75: mol_type = other DNA
tgaaccctgaccgtattctgttaacagaagtacgcggcgcggaagcctgggattttctaaaaataacaggttccg

SEQ ID NO: 771611 - DNA, 75 bp, synthetic construct
  source 1..75: mol_type = other DNA
ccatcattcagatggtgacaaaatgttatcagaacagagaatgtcaaaatcttccttttgatgttcttcgtaaaa

SEQ ID NO: 771612 - DNA, 75 bp, synthetic construct
  source 1..75: mol_type = other DNA
tcctccggcctgtgagcgcgatacggtatctatcaccatccgtaagccatcgaaggtacaaatcccgcatcagtc

SEQ ID NO: 771613 - DNA, 75 bp, synthetic construct
  source 1..75: mol_type = other DNA
acgggttccggtaaaacaacgtatatgaagagtcttatcgatttcataccgttgaatacgcgtctgattactatt

SEQ ID NO: 771614 - DNA, 75 bp, synthetic construct
  source 1..75: mol_type = other DNA
atgaataactcaattaatacccctcgccttacgtcagcacttcaattaattgagcaagtagcggctgtcctggtt

SEQ ID NO: 771615 - DNA, 75 bp, synthetic construct
  source 1..75: mol_type = other DNA
gggcttgtcgatcaggatgtagcactgtttagtagtgatattgcagaaaacattcgttattcacggcatccgcca

SEQ ID NO: 771616 - DNA, 75 bp, synthetic construct
  source 1..75: mol_type = other DNA
aaataaacgaatcaaaccgttcattaagcgccgcaattttacaaaagaaggggcaggagatctgagtagcgtaaa

SEQ ID NO: 771617 - DNA, 75 bp, synthetic construct
  source 1..75: mol_type = other DNA
ggacaacccggaaatcacgttctttatccataaaaactacgtccatcttttttatccgtcagaatcatcagatga

SEQ ID NO: 771618 - DNA, 75 bp, synthetic construct
  source 1..75: mol_type = other DNA
agttttccgcgctggatgtactggtcaaagccgatttattgacagtaaaaaataccctggttgatgacgttattg

SEQ ID NO: 771619 - DNA, 75 bp, synthetic construct
  source 1..75: mol_type = other DNA
agctggcttattgacagtaaaagatacccaggttgatgaaactatcgtattttctaaaacaggtaaaaaagtacc

SEQ ID NO: 771620 - DNA, 75 bp, synthetic construct
  source 1..75: mol_type = other DNA
ggctggtctggttagtaaagcagttcagggaatggtagctaaaggctattcagatgcacaaatcggtagtcgtct

SEQ ID NO: 771621 - DNA, 75 bp, synthetic construct
  source 1..75: mol_type = other DNA
gtgtagcggcacgcgaagcccaaaagctggcacaacgtaaagagaaggcagaattaaagctgttagacgttggat

SEQ ID NO: 771622 - DNA, 75 bp, synthetic construct
  source 1..75: mol_type = other DNA
ctcacctctaaatactggacacgctccgctaaagaagtggaacaatcagcacgagaacaacgagaatcagggcgc

SEQ ID NO: 771623 - DNA, 75 bp, synthetic construct
  source 1..75: mol_type = other DNA
aattccgccactatgggcgctctgttatttggaggcgctacagcggcggctggcgtgatggctgcaagcaaaacc

SEQ ID NO: 771624 - DNA, 75 bp, synthetic construct
  source 1..75: mol_type = other DNA
gtagacgttaaccagatgtataatattacagaatgggcgtatagaaacggcgttgactctatgatgggtgatcaa

SEQ ID NO: 771625 - DNA, 75 bp, synthetic construct
  source 1..75: mol_type = other DNA
agatgaacaatattgagcaatgggcgtttaaaaacggcgttgattcaatgatgggcgaacaagggaaacgtaaat

SEQ ID NO: 771626 - DNA, 75 bp, synthetic construct
  source 1..75: mol_type = other DNA
tcaatggctggttaaaagttgccgttctcaaaaatggtgatttatctctgtctgacctcaaaagtgataaagaat

SEQ ID NO: 771627 - DNA, 75 bp, synthetic construct
  source 1..75: mol_type = other DNA
tggttcctccgatatcacattaaaagcaagtcatgttggtgcgtttgccttagggaaaacaggaagcaccgttgc

SEQ ID NO: 771628 - DNA, 75 bp, synthetic construct
  source 1..75: mol_type = other DNA
cagggaacgaataatacccaaatcgcaagcacggcttatgttatggctgcgatcgctgccctcgtggactcgtcg

SEQ ID NO: 771629 - DNA, 75 bp, synthetic construct
  source 1..75: mol_type = other DNA
attgcacaagctaaagctattgctcacgaatatgagaagggcgctattagcctggcacgtatgaacagccaaatg

SEQ ID NO: 771630 - DNA, 75 bp, synthetic construct
  source 1..75: mol_type = other DNA
cggggctgcccttgccccgttcggtgccattcttgccctgagcgggatactgaccctgctgtccgttcagctggt

SEQ ID NO: 771631 - DNA, 75 bp, synthetic construct
  source 1..75: mol_type = other DNA
tataacatatgcattcctggtaattattttgaatcagaggttagtgccgatgctgccggaattattgcaacgttg

SEQ ID NO: 771632 - DNA, 75 bp, synthetic construct
  source 1..75: mol_type = other DNA
ttaaagctccttgatgtgtcaagctctatcagtgcaatgcaccgtctctctgtagcggaacaatacaaagctatt

SEQ ID NO: 771633 - DNA, 75 bp, synthetic construct
  source 1..75: mol_type = other DNA
gcaacttcccctacttcgacagcctgcaatttgccgataacgtgaaaagcgtccgcaaactggataatcataccg

SEQ ID NO: 771634 - DNA, 75 bp, synthetic construct
  source 1..75: mol_type = other DNA
gcggttttgtctattgcgtcagcgggcaagtcaacacctttaacccatccaaagcgagcagtgggttaattgtcg

SEQ ID NO: 771635 - DNA, 75 bp, synthetic construct
  source 1..75: mol_type = other DNA
acgggttggttggcagtaatgcgagtgagtcagtactggaatgagttttactgtattccgggtactaacgctttc

SEQ ID NO: 771636 - DNA, 75 bp, synthetic construct
  source 1..75: mol_type = other DNA
cgacgttctggcctggcctgctgccagtcagctatccattttgcgtgacgacccgcgcttgcgtttaacgctgcg

SEQ ID NO: 771637 - DNA, 75 bp, synthetic construct
  source 1..75: mol_type = other DNA
gttaatgccgcaggtagtggtggatttaggctccggcggcaccggacgtctgtcgaaactcctgaccggggaatg

SEQ ID NO: 771638 - DNA, 75 bp, synthetic construct
  source 1..75: mol_type = other DNA
aatgaatgccgacgatgtggtgtttaccttccagcgaatttttgaccgcaacaacccgtggcataacgtcaacgg

SEQ ID NO: 771639 - DNA, 75 bp, synthetic construct
  source 1..75: mol_type = other DNA
taaattgagatttgatactgtcactaaaggctataagaaagcacaaaacgaggtagacaagattgctcaacagaa

SEQ ID NO: 771640 - DNA, 75 bp, synthetic construct
  source 1..75: mol_type = other DNA
aagtagataagattactaaaaagcaagcccaggctgataaagctaatgctaaagcacaattagccgctcaacgtg

SEQ ID NO: 771641 - DNA, 75 bp, synthetic construct
  source 1..75: mol_type = other DNA
aattccgccacgatgggtgctctgttatttggaggcgctacagcggctgctggcgtgatggctgttagtaaagcg

SEQ ID NO: 771642 - DNA, 75 bp, synthetic construct
  source 1..75: mol_type = other DNA
atggcacagggtttacaatgctgggatgcatctggacgattaattgtcgatattggtgattacaacatgcggtac

SEQ ID NO: 771643 - DNA, 75 bp, synthetic construct
  source 1..75: mol_type = other DNA
ttggctcgggtcaaaaataaaatcaaacgcgttgaccgactgctcggtaatgaatctcttcaccgcgatatccca

SEQ ID NO: 771644 - DNA, 75 bp, synthetic construct
  source 1..75: mol_type = other DNA
gggaattccgccacgatgggcgctctgttatttggaggcgctacagcggctgctggcgtgatggctgttagcaaa

SEQ ID NO: 771645 - DNA, 75 bp, synthetic construct
  source 1..75: mol_type = other DNA
atacagggtctaactctgccgataatatagcgggcgtttattacagacccgttcaaaagtatataaatggcacct

SEQ ID NO: 771646 - DNA, 75 bp, synthetic construct
  source 1..75: mol_type = other DNA
ccgcgcattctggagccagaatcgggcacgtaaccagccggacggtaatttgcaggtgccgcgcgtagagctggc

SEQ ID NO: 771647 - DNA, 75 bp, synthetic construct
  source 1..75: mol_type = other DNA
cagcgcctggtcgcgctgcatgggcagattgttccccaacaaaaacgtctggcgcagttaatggtcactatccag

SEQ ID NO: 771648 - DNA, 75 bp, synthetic construct
  source 1..75: mol_type = other DNA
agttacaggcgggtcagccttgtccactttgtggttccaccagccacccggcggtcgaggcgtatcaggcgctgg

SEQ ID NO: 771649 - DNA, 75 bp, synthetic construct
  source 1..75: mol_type = other DNA
tgatgggtggttcacccactccaatttcatttggcgaagtttatactgcgatgcagcaaggtgtagtagatggcg

SEQ ID NO: 771650 - DNA, 75 bp, synthetic construct
  source 1..75: mol_type = other DNA
ctatcggcgtgattagccacgttgacgcaatgaaagagcgcattccggtacagatcaaagtgaaaaagatcaacg

SEQ ID NO: 771651 - DNA, 75 bp, synthetic construct
  source 1..75: mol_type = other DNA
gtctggcacaaccggcacgaaatcttcgtccgcattgggaacgcatcgaagaacacactgcggcactaacgcata

SEQ ID NO: 771652 - DNA, 75 bp, synthetic construct
  source 1..75: mol_type = other DNA
aggttgttgatacctggcaggcagatgcggtacgcgatacccgtaccctttccggcggcgaaagtttcctcgtca

SEQ ID NO: 771653 - DNA, 75 bp, synthetic construct
  source 1..75: mol_type = other DNA
tgaagaagtaaatactcgcttacagagcacaatggcgcttcgggcgagcattcgccaccacgcggcgaagcagtc

SEQ ID NO: 771654 - DNA, 75 bp, synthetic construct
  source 1..75: mol_type = other DNA
tactcgcttacagagcacaatggcgcttcgcgcgagcattcgccaccacgcggcgaagcagtcagcagaattaca

SEQ ID NO: 771655 - DNA, 75 bp, synthetic construct
  source 1..75: mol_type = other DNA
taaccacgctgcaaaaccgtattcagcaactgacgccgattctggatacgttaccgcaaggtgatgagttaccgc

SEQ ID NO: 771656 - DNA, 75 bp, synthetic construct
  source 1..75: mol_type = other DNA
cgccagcagattgaagaagtaaatactcgcttacagagcacaatggcgcttcgcgcgagcattcgccaccacgcg

SEQ ID NO: 771657 - DNA, 75 bp, synthetic construct
  source 1..75: mol_type = other DNA
cagcgcctggtcgcgctgcatggacagattgttccccaacaaaaacgcctggcgcaattacaggtcactatccag

SEQ ID NO: 771658 - DNA, 75 bp, synthetic construct
  source 1..75: mol_type = other DNA
tggagagatatctgcgtgggcagatgagtcgtccgttggacaggtaactgcaaatgttattcgtggtgggattct

SEQ ID NO: 771659 - DNA, 75 bp, synthetic construct
  source 1..75: mol_type = other DNA
ctgaatgcatcggatgacaaaaatatcgtctggacgcgcggcaccactgaatccatcaacatggtggcgcaatgc

SEQ ID NO: 771660 - DNA, 75 bp, synthetic construct
  source 1..75: mol_type = other DNA
atggttcacgaagtgagttttgacggcttcacgactcaatctgcgccgtggaaactggaagcaggaacgccaaat

SEQ ID NO: 771661 - DNA, 75 bp, synthetic construct
  source 1..75: mol_type = other DNA
gtcaccctggctgggtggcggcaaaatgattcacgaagtgagttttgacggcttcacgactcaatctgcgccgtg

SEQ ID NO: 771662 - DNA, 75 bp, synthetic construct
  source 1..75: mol_type = other DNA
atttgcaaacggtgaaggcagctatatcggccaaatcgaataacttgaccacggaagtgaataatcaccagcttg

SEQ ID NO: 771663 - DNA, 75 bp, synthetic construct
  source 1..75: mol_type = other DNA
atttgcaaacggtgaaggccgctatttcggccaaatcgaataacttgaccacggtagtgaataatagccagcttg

SEQ ID NO: 771664 - DNA, 75 bp, synthetic construct
  source 1..75: mol_type = other DNA
ttaaaaaagttggcgtatttcaggctgcgcttatcatgtttgcttatatgtaccaggcacaaagcgagctatcta

SEQ ID NO: 771665 - DNA, 75 bp, synthetic construct
  source 1..75: mol_type = other DNA
aaggcggagaggtcattatatacgacgaaaacatggatgaagttggtaaatggcatcttgagcaatacgtcgagg

SEQ ID NO: 771666 - DNA, 75 bp, synthetic construct
  source 1..75: mol_type = other DNA
cggcagatcaccacggtttatccgtcagagccgctgactgtttcaccggtggcggcatgggcagccggtggccgg

SEQ ID NO: 771667 - DNA, 75 bp, synthetic construct
  source 1..75: mol_type = other DNA
ccgacctctccgcaggtatctccggtgaagtcgttcacgttgatggcggtttcagcatcgctgccatgaacgaac

SEQ ID NO: 771668 - DNA, 75 bp, synthetic construct
  source 1..75: mol_type = other DNA
ctggtggtcaagtaatattatttgatgaggaagatgatgaggtggggagatggcatcttgaacaatatgttgagg

SEQ ID NO: 771669 - DNA, 75 bp, synthetic construct
  source 1..75: mol_type = other DNA
aacacctgaaaggcggtgagaagatccgcacttggtatggctatgagtttattatagctgccttttcttttttgc

SEQ ID NO: 771670 - DNA, 75 bp, synthetic construct
  source 1..75: mol_type = other DNA
cagggggtcaagtaacattatttgatgaagaagacgacgaggtgggtaaatggcatcttgagcaatacgtcgagg

SEQ ID NO: 771671 - DNA, 75 bp, synthetic construct
  source 1..75: mol_type = other DNA
ctcaacattagacgtgttttaccaggaactttttctgtcattaaatggtgtacgtcaggcgaccgatcgtcttaa

SEQ ID NO: 771672 - DNA, 75 bp, synthetic construct
  source 1..75: mol_type = other DNA
cgtttcgctggaatacgcgtttgagtggcaggatcacgacgaaggcgacagcgataaattccattatgcgggtgt

SEQ ID NO: 771673 - DNA, 75 bp, synthetic construct
  source 1..75: mol_type = other DNA
aaaccgtcggcgtgcgggtgaattattacctggagcgcggctttaatatggatgatagtcggaacaacggtgagt

SEQ ID NO: 771674 - DNA, 75 bp, synthetic construct
  source 1..75: mol_type = other DNA
atcatcggcgcagaccttttcatctttggtcacacgcctgcacgtcagccactgaaatactccaaccagatgtac

SEQ ID NO: 771675 - DNA, 75 bp, synthetic construct
  source 1..75: mol_type = other DNA
tttgctgatttcggttggagaccttgttgaccgcggcgcggaaaacgtcgagtgcctggagttgattactatgcc

SEQ ID NO: 771676 - DNA, 75 bp, synthetic construct
  source 1..75: mol_type = other DNA
ctactcaatgacacaaattgccgagcagcttaaacgcaatatcaaaacgatccgcgcgcataaatttaatgtgat

SEQ ID NO: 771677 - DNA, 75 bp, synthetic construct
  source 1..75: mol_type = other DNA
cagcccgtacccgtacagcatgaactggctggactgttttgagaatccggcacttgcggctaaaatatacacaaa

SEQ ID NO: 771678 - DNA, 75 bp, synthetic construct
  source 1..75: mol_type = other DNA
tgatgatatatgtagaaatgacagatttttaagacaagttaaaatacttgaaagtgataataatctggctttgat

SEQ ID NO: 771679 - DNA, 75 bp, synthetic construct
  source 1..75: mol_type = other DNA
cttcactgcgtctacaggcttaccgctacgacatcaaagggttggtgctcagtccgttcggcaatgcctcttttg

SEQ ID NO: 771680 - DNA, 75 bp, synthetic construct
  source 1..75: mol_type = other DNA
acgaacctgatgaaaaaactggagacgataggattcgacaccaaaaaagacctgcttatctcggttggcgatttg

SEQ ID NO: 771681 - DNA, 75 bp, synthetic construct
  source 1..75: mol_type = other DNA
cgcccacgccgcatgatgccgcgttccggtcgttcctggcgaatcccgacgtcgccagggattttctggaactgc

SEQ ID NO: 771682 - DNA, 75 bp, synthetic construct
  source 1..75: mol_type = other DNA
actgatgactatcgcagaacgtcttgagcaaaaaggtcgccaggaaggcaggatggaaggacgcatggaaggacg

SEQ ID NO: 771683 - DNA, 75 bp, synthetic construct
  source 1..75: mol_type = other DNA
gcacggtcgcccggaagagggcgttaagaaaaccggtttctctctggtaacgctgaaaaagccgctggagttcaa

SEQ ID NO: 771684 - DNA, 75 bp, synthetic construct
  source 1..75: mol_type = other DNA
ttatcgctccggggctggcgatgccgcacgggcggccggaagagggtgttaagaaaaccggtttctctctggtaa

SEQ ID NO: 771685 - DNA, 75 bp, synthetic construct
  source 1..75: mol_type = other DNA
ggaggcgcggttgatggatatgagccatgatctgacgttatccggttgggcgacggacagtaacgacccggacag

SEQ ID NO: 771686 - DNA, 75 bp, synthetic construct
  source 1..75: mol_type = other DNA
attgatacggctgctctggtcacggtcgtggcactggtgacgctgcattgtagtggcacactaaatttggccacc

SEQ ID NO: 771687 - DNA, 75 bp, synthetic construct
  source 1..75: mol_type = other DNA
ggcagttgctaaaaaactgggtatggcaccgcgacaattagcagagcaggtgctgactcatctggatcttaacgg

SEQ ID NO: 771688 - DNA, 75 bp, synthetic construct
  source 1..75: mol_type = other DNA
catgttcggcatgatgttgggtaaagacggcaaaccgttcaaaacccgcgcaggtggcacggtgaaacttgcaga

SEQ ID NO: 771689 - DNA, 75 bp, synthetic construct
  source 1..75: mol_type = other DNA
catgagcaaatgatgattgatggcttgtcagagcgtggaaacgtcaatcactggctgcttaatggcggcggctgg

SEQ ID NO: 771690 - DNA, 75 bp, synthetic construct
  source 1..75: mol_type = other DNA
ctggcacaactgacggcgaaaacgctgaagctgggtctggatacgctgggtattgagactgtagagcgtatgtaa

SEQ ID NO: 771691 - DNA, 75 bp, synthetic construct
  source 1..75: mol_type = other DNA
attaacgaagatcaactggctgcggctccggttgtcatccgtgaggatcgtgaagcgcaactggccgctcgcctg

SEQ ID NO: 771692 - DNA, 75 bp, synthetic construct
  source 1..75: mol_type = other DNA
ggtgaagacggctatgtttatacgctcatcgagcaccagagcaccgaaaatctgtacatgccttttcgcatgtta

SEQ ID NO: 771693 - DNA, 75 bp, synthetic construct
  source 1..75: mol_type = other DNA
atgccgcagaccattatctggcgggagatatcgaatccctgccgttagcgactgcgacgttcgatcttgcatgga

SEQ ID NO: 771694 - DNA, 75 bp, synthetic construct
  source 1..75: mol_type = other DNA
tgaactgacctgtatgacagcgcgaattaaccgtggtgagacgatacctgaaccagtaaaacaacttcctgttat

SEQ ID NO: 771695 - DNA, 75 bp, synthetic construct
  source 1..75: mol_type = other DNA
taatttatccacggcactccgcgagctgtatcgggtggtgcgccccggaggcgtggtcgcgtttaccacgctggt

SEQ ID NO: 771696 - DNA, 75 bp, synthetic construct
  source 1..75: mol_type = other DNA
ggatatcgaatccttaccgctggtgaacacgacgtttgatctcgcgtggagcaaccttgccgtgcaatggtgcgc

SEQ ID NO: 771697 - DNA, 75 bp, synthetic construct
  source 1..75: mol_type = other DNA
atggcaacggttaataaacaagccattgcagcggcatttggtcgggcagccgcgcactatgagcaacatgcggat

SEQ ID NO: 771698 - DNA, 75 bp, synthetic construct
  source 1..75: mol_type = other DNA
taccggactttcggcagagcaaatgcaggcattagagcagcccttgcctgaaagcaagcgcgatccatggatcga

SEQ ID NO: 771699 - DNA, 75 bp, synthetic construct
  source 1..75: mol_type = other DNA
agagccgtgaggatattcatatggcctttcgcctgatgcgatattccatggcggtgatgcagcgccatatcgagc

SEQ ID NO: 771700 - DNA, 75 bp, synthetic construct
  source 1..75: mol_type = other DNA
tacaatttatagagcagttccgccaggccgccgatcatccggtgatcgccacctacccggaagggctatatctga

SEQ ID NO: 771701 - DNA, 75 bp, synthetic construct
  source 1..75: mol_type = other DNA
gtacccggaatgtgcgatttacgatcgcagcgacgtcgcggtacgtaaaaaagaagggatggagctgacccaggg

SEQ ID NO: 771702 - DNA, 75 bp, synthetic construct
  source 1..75: mol_type = other DNA
ctgtcgtgccagacgacgagattgtgcagcatcgcagagtcgccctgttggagttgatccaaaagcatattcgcc

SEQ ID NO: 771703 - DNA, 75 bp, synthetic construct
  source 1..75: mol_type = other DNA
gcttgaaaaagccctggctattgcgtgccagcttcagaaaatggggatgacgccggagcagattaagcaggctac

SEQ ID NO: 771704 - DNA, 75 bp, synthetic construct
  source 1..75: mol_type = other DNA
tcaccggaatttatgcgggcgctggctgagcgtctgccgcagcatgaggataaactgatgactatcgcagaacgt

SEQ ID NO: 771705 - DNA, 75 bp, synthetic construct
  source 1..75: mol_type = other DNA
cgctcatcgagcaccagagcaccgaaaatctgtacatgccttttcgcatgttacgttacagtgtggcggcgatgc

SEQ ID NO: 771706 - DNA, 75 bp, synthetic construct
  source 1..75: mol_type = other DNA
cgcttaccgtcgtcttgcacatgtcggcaccggctctcgcccaggtgatgggagtgatgtgcggggctatacctc

SEQ ID NO: 771707 - DNA, 75 bp, synthetic construct
  source 1..75: mol_type = other DNA
aacggacaaagcttttgcaatgtcggaaaagccagtcatcaggctggaagctcatttcaatgacaaacgcgaaaa

SEQ ID NO: 771708 - DNA, 75 bp, synthetic construct
  source 1..75: mol_type = other DNA
tgtacgcaacttttaaatatgatttgattctggaagagaaactatatctttctattcgcatcaaagtattaatgg

SEQ ID NO: 771709 - DNA, 75 bp, synthetic construct
  source 1..75: mol_type = other DNA
gctggtgacctgctggacatgtgggagaagcgcgtcagtgagggcaaaccaatccctccggtcagaaaacaaatc

SEQ ID NO: 771710 - DNA, 75 bp, synthetic construct
  source 1..75: mol_type = other DNA
gtatgaccgcacgaattaaccgtggtgaggctatatgtaaccaggtgaatcatttgataccaacgagggttttag

SEQ ID NO: 771711 - DNA, 75 bp, synthetic construct
  source 1..75: mol_type = other DNA
attacggcgcaaggctgccgatgaactgtcctgtatgaccgcacgaattaaccgtggtgaggctatacctgaacc

SEQ ID NO: 771712 - DNA, 75 bp, synthetic construct
  source 1..75: mol_type = other DNA
gtcagacgatgagctggaaaccgtcatgcagcgactggacgatgcctttgaatatggtgcggatgtcagcgttgt

SEQ ID NO: 771713 - DNA, 75 bp, synthetic construct
  source 1..75: mol_type = other DNA
cgcaacagagaagtccaacaagaaaggcaacgacgtgcaaatgcgcaggcagcagcgaataagaaagccgcagct

SEQ ID NO: 771714 - DNA, 75 bp, synthetic construct
  source 1..75: mol_type = other DNA
atgaaattacgtgattcgctggcagaaaataaatctatctgtttgcaggcagaagcagagacctggcaggacgcg

SEQ ID NO: 771715 - DNA, 75 bp, synthetic construct
  source 1..75: mol_type = other DNA
attatccgcgatgtactggatacagacgtgccggacagtgaatgcgtttttgccgtggtgctgacccgtgggaat

SEQ ID NO: 771716 - DNA, 75 bp, synthetic construct
  source 1..75: mol_type = other DNA
accgtcatgcagcggctggacgatgcctttgagcatggtgcggatgtcagcgttgttcacgacgttgttcgtgaa

SEQ ID NO: 771717 - DNA, 75 bp, synthetic construct
  source 1..75: mol_type = other DNA
cagacgatgagctggaaaccgtcatgcagcggctggacgatgcctttgagcatggtgctgatgtcagcattgttc

SEQ ID NO: 771718 - DNA, 75 bp, synthetic construct
  source 1..75: mol_type = other DNA
gcgggcaattaccgactccggcgaatcgctgctgaccatccttaacgatatcctcgattattcggctatcgaagc

SEQ ID NO: 771719 - DNA, 75 bp, synthetic construct
  source 1..75: mol_type = other DNA
agcagctcaataatgcggtgaaaattctgcaacgtcggcaaatacgcattgaagatccgggtgttcgtgcgcagg

SEQ ID NO: 771720 - DNA, 75 bp, synthetic construct
  source 1..75: mol_type = other DNA
ccgctaacccagcgaattactgtcgaaatgctgaacaccagtggtgcgcaggtcgttgcagtaggaaatgccgcg

SEQ ID NO: 771721 - DNA, 75 bp, synthetic construct
  source 1..75: mol_type = other DNA
ccacgaagataacgacccggtggatatcctcatcactatggcggcggttgatgccaacacccaccaggaagtggg

SEQ ID NO: 771722 - DNA, 75 bp, synthetic construct
  source 1..75: mol_type = other DNA
gagttcaaccacgaagataacgatccggtggatatcctcatcaccatggcggcggtcgatgccaacactcactag

SEQ ID NO: 771723 - DNA, 75 bp, synthetic construct
  source 1..75: mol_type = other DNA
ggagtgagaacgggggcgacggtgatgcgttcgtcagggaggaacgcgaagcaatggacgttgtgttacagccgc

SEQ ID NO: 771724 - DNA, 75 bp, synthetic construct
  source 1..75: mol_type = other DNA
gaaacggtaggtaacaccatccgtgcatttgcttccgacaacgcgactgtggttatcggtacttctcttgacccg

SEQ ID NO: 771725 - DNA, 75 bp, synthetic construct
  source 1..75: mol_type = other DNA
gaaatttatcgcctccatgctgtcgggagcgagaacgggggcgacggtgacgcatttgtcagggaagaacgtgag

SEQ ID NO: 771726 - DNA, 75 bp, synthetic construct
  source 1..75: mol_type = other DNA
ggcagaacttccccctcttaacgtgctgatacaaatcaacatcagcgatgaaaacagtaagtcaggcattcaact

SEQ ID NO: 771727 - DNA, 75 bp, synthetic construct
  source 1..75: mol_type = other DNA
ttcaggaaggggtagataaaattcgccactttcaggaactgggcgtaacaggattagaatggcattttattggcc

SEQ ID NO: 771728 - DNA, 75 bp, synthetic construct
  source 1..75: mol_type = other DNA
atgaacttgcatttgacaggcgcgaaacccacggagatacagtttgaggatgcgctgctttcgtgtccgcgttat

SEQ ID NO: 771729 - DNA, 75 bp, synthetic construct
  source 1..75: mol_type = other DNA
acttagcaaggtttgtggtttccatgcaacagcagtcacatctctttcatatcttgggcgtgaggaagaagaata

SEQ ID NO: 771730 - DNA, 75 bp, synthetic construct
  source 1..75: mol_type = other DNA
gggagcggaaagcattaagcaattttgaagagtgtgctgcgatggctgaacgtatcgaagagttggagcaggcta

SEQ ID NO: 771731 - DNA, 75 bp, synthetic construct
  source 1..75: mol_type = other DNA
tgaagtggcaaaagatttggggatcctgaccgttgctgtcgtaacgaagcctttcaactttgaaggcaagaagcg

SEQ ID NO: 771732 - DNA, 75 bp, synthetic construct
  source 1..75: mol_type = other DNA
tatggcattcgctgagcaggggatcactgaactgtccaagcatgtggactctctgatcactatccctaacgacaa

SEQ ID NO: 771733 - DNA, 75 bp, synthetic construct
  source 1..75: mol_type = other DNA
ctctgattactatcccgaacgacaaactgctgaaagttctgggccgcggtatctccctgctggatgcgtttggcg

SEQ ID NO: 771734 - DNA, 75 bp, synthetic construct
  source 1..75: mol_type = other DNA
gcgtgctggttaacatcacggcgggcttcgacttgcgtctggatgagttcgaaacggtaggtaacaccatccgtg

SEQ ID NO: 771735 - DNA, 75 bp, synthetic construct
  source 1..75: mol_type = other DNA
atgacaatgcgccgcaaactgcgaaagagccagattatctggatatcccagcattcctgcgtaagcaagctgatt

SEQ ID NO: 771736 - DNA, 75 bp, synthetic construct
  source 1..75: mol_type = other DNA
ggacaaacgtcctgaaatcactctggtgacgaacaaacaagttcagcagccggtgatggatcgctaccagcaaca

SEQ ID NO: 771737 - DNA, 75 bp, synthetic construct
  source 1..75: mol_type = other DNA
tgcaacgtcggcaaatacgtgttgaagatccgggggttcgtgcgcaggtcgcaactacgttatctaccgttcgcc

SEQ ID NO: 771738 - DNA, 75 bp, synthetic construct
  source 1..75: mol_type = other DNA
cccgacctgggcaccgtactttgactttaccggcgtgcagttgacctggatgctggtgggttacggttttgtggc

SEQ ID NO: 771739 - DNA, 75 bp, synthetic construct
  source 1..75: mol_type = other DNA
ccgtgcgggcggtgcgccgacgttggcggtggggatggcctacattctgcatggcgcgctgggcggcatgatgga

SEQ ID NO: 771740 - DNA, 75 bp, synthetic construct
  source 1..75: mol_type = other DNA
caacgttatgcctgggtggcactggtaccaacggcctggctgctgatttgtaccctgaccgcaggctggcagaaa

SEQ ID NO: 771741 - DNA, 75 bp, synthetic construct
  source 1..75: mol_type = other DNA
actaactcgttgtggagaataacaaaaatggtcatcatatattacgagggaagaatcattaaacgtgtccactat

SEQ ID NO: 771742 - DNA, 75 bp, synthetic construct
  source 1..75: mol_type = other DNA
gaaaatgcgctgaccggacatgaaaatgaggtggtatcagcgcagccggataccgtgactgatacggctgctctg

SEQ ID NO: 771743 - DNA, 75 bp, synthetic construct
  source 1..75: mol_type = other DNA
actggcggcattgaaagagccgaagccaacggcgaaagaaacgccgtatgagccaatgccggaaaatgtcgagga

SEQ ID NO: 771744 - DNA, 75 bp, synthetic construct
  source 1..75: mol_type = other DNA
tggcagagctggaagaggagcttgatgacacggatgacggagccggtcaggactcgtctgtcagcccggaaaatg

SEQ ID NO: 771745 - DNA, 75 bp, synthetic construct
  source 1..75: mol_type = other DNA
gaaatgtcgcactcatagaaaaatgcgtcatgagcagtatcggtattgagagtttattcagaaagtttgcgggta

SEQ ID NO: 771746 - DNA, 75 bp, synthetic construct
  source 1..75: mol_type = other DNA
tggcgctgttctcgattaagacggcactggcggcattgaaagagccgaagccaacggcgaaagaaacgccgtatg

SEQ ID NO: 771747 - DNA, 75 bp, synthetic construct
  source 1..75: mol_type = other DNA
tgacggcggtagatgcgggtacgcgtgctgcgcgctttatgttgcaggatctgctgggcgtggtttctccgggcc

SEQ ID NO: 771748 - DNA, 75 bp, synthetic construct
  source 1..75: mol_type = other DNA
aatggaatccttcgtggcgattatggcgctggtttccgcctgtatcatcgatccgggcgtgtattttgccatgaa

SEQ ID NO: 771749 - DNA, 75 bp, synthetic construct
  source 1..75: mol_type = other DNA
ggcacgggcggaagcagaaaaagccagccaggcaaaatcggcgtttctggcggcaatgagccatgagatccgcac

SEQ ID NO: 771750 - DNA, 75 bp, synthetic construct
  source 1..75: mol_type = other DNA
agatccacgaatggctgatattatttaaacaacatgccctgccgcttctcgatgacatcgacattgcccgcgcca

SEQ ID NO: 771751 - DNA, 75 bp, synthetic construct
  source 1..75: mol_type = other DNA
gccagacgatgagctggaaaccgtcatgcagcggctggacgatgcctttgagcatggtgcggatgtcagcgttgt

SEQ ID NO: 771752 - DNA, 75 bp, synthetic construct
  source 1..75: mol_type = other DNA
tacgttttactgacaaagggcagatcgttttacgtagccgcactgatggcgagcaatggctggtcgaagtggaag

SEQ ID NO: 771753 - DNA, 75 bp, synthetic construct
  source 1..75: mol_type = other DNA
gcgcacaactggagcagcagccattatctgccccccttccacacgaagaaattacacgcagtgttgccgctctgg

SEQ ID NO: 771754 - DNA, 75 bp, synthetic construct
  source 1..75: mol_type = other DNA
tacgggaacaaggttttgataccaccgctattgaacaacaggagcaggagatctcccgttcgttacgtcagcaag

SEQ ID NO: 771755 - DNA, 75 bp, synthetic construct
  source 1..75: mol_type = other DNA
tgacacggatgacgctgccggtcaggacacatctgtcaacccggaaaatgcgctgaccggacatgaaaatgaggt

SEQ ID NO: 771756 - DNA, 75 bp, synthetic construct
  source 1..75: mol_type = other DNA
cttatttcatcggttcatgtggtggagcaccgctggaagttgtgaaaagtatattcagaatcagcgtggctgata

SEQ ID NO: 771757 - DNA, 75 bp, synthetic construct
  source 1..75: mol_type = other DNA
tggcagagctggaagaagagcttgatgacacgggcgacactgccggtcaggagacccctctcagcccggaaaatg

SEQ ID NO: 771758 - DNA, 75 bp, synthetic construct
  source 1..75: mol_type = other DNA
gtctccggtcgctgggtgagcaactgaaccgcgatgtcagtttgacgggaacgaaagaagaactggcgctccgtg

SEQ ID NO: 771759 - DNA, 75 bp, synthetic construct
  source 1..75: mol_type = other DNA
gttgatgccgcaggtggtggtggatttaggctctggcggcaccggacggctgtcgaaactcttgaccggtgaatg

SEQ ID NO: 771760 - DNA, 75 bp, synthetic construct
  source 1..75: mol_type = other DNA
cgcgctggtggatcgcagcggtaagcacgatctggctgatttacgctcattgcaggactggtttctcaaatatga

SEQ ID NO: 771761 - DNA, 75 bp, synthetic construct
  source 1..75: mol_type = other DNA
atccaattaatctgcgttatccgcaaagctggcgcgatagtccgcaggcactgcgccagttgccgatcctgacgc

SEQ ID NO: 771762 - DNA, 75 bp, synthetic construct
  source 1..75: mol_type = other DNA
tccgctaactaccaccatgttgtcggtgcctggcgcgaagactgtgcgtggtttctcgcagtttggcgactctta

SEQ ID NO: 771763 - DNA, 75 bp, synthetic construct
  source 1..75: mol_type = other DNA
attatgaaatatgaactgtggcatatccctcctgccctgctgggtctggcaggagtgttgtcatggttgctgctg

SEQ ID NO: 771764 - DNA, 75 bp, synthetic construct
  source 1..75: mol_type = other DNA
ccgatgattggcggcatgatcaccgcgcctttgctgtcgctgtttattatcccggcggcgtataagctgatgtgg

SEQ ID NO: 771765 - DNA, 75 bp, synthetic construct
  source 1..75: mol_type = other DNA
gggcgatttgttagtgcttcatacggaacaacgtctataaccaataaaactgatcgggatattacgttaccagcc

SEQ ID NO: 771766 - DNA, 75 bp, synthetic construct
  source 1..75: mol_type = other DNA
aggggccggcgtggtggccgttgcccgggcagaaaatgaagcgtgtcgtctcggcctgccctgcccggaaccctg

SEQ ID NO: 771767 - DNA, 75 bp, synthetic construct
  source 1..75: mol_type = other DNA
agcgccgtgtcgctctaacccccgaagcctttgtggagcagaacaaccttatccgcaacatgcagctcgatgttg

SEQ ID NO: 771768 - DNA, 75 bp, synthetic construct
  source 1..75: mol_type = other DNA
atcgacgcccgcgatcgtgacatggtgtcggtggttcacgatctgcaaaaagcgattgccgagaaagtgcagttg

SEQ ID NO: 771769 - DNA, 75 bp, synthetic construct
  source 1..75: mol_type = other DNA
aataaagttcgccaacgatgtggtgaagtgtttcggtatgccattgttacaggtagggctcgatacaatccagcc

SEQ ID NO: 771770 - DNA, 75 bp, synthetic construct
  source 1..75: mol_type = other DNA
ttgattgtcaaatatgcaattaaattcaattccgtaactagcaagaaattaaccactgcctctccagcagacaag

SEQ ID NO: 771771 - DNA, 75 bp, synthetic construct
  source 1..75: mol_type = other DNA
aacgagtgttggataaaattcgcaatctggactgtttgaaccgccccgggtttcctggagagtgttttatctgtg

SEQ ID NO: 771772 - DNA, 75 bp, synthetic construct
  source 1..75: mol_type = other DNA
caatccttaaacaggttcataagcttagtggcgagcgcgattttgttttcgttggagatcacaatccttgtaaac

SEQ ID NO: 771773 - DNA, 75 bp, synthetic construct
  source 1..75: mol_type = other DNA
atggcttatcaatctcaagatatcattcgtcgttccgcgactaacggtctgaccccccccccccccccggggggg

SEQ ID NO: 771774 - DNA, 75 bp, synthetic construct
  source 1..75: mol_type = other DNA
aatgtacgttgtgcgttgaccgcgtggtggttgggcaagaaccggcctgcgtgaagacctgcccaacgggcgcga

SEQ ID NO: 771775 - DNA, 75 bp, synthetic construct
  source 1..75: mol_type = other DNA
gggctgctcatggaacacctgcagcgcattcccacagccggtgaagaggtgcagattggcccgtggacgctgaaa

SEQ ID NO: 771776 - DNA, 75 bp, synthetic construct
  source 1..75: mol_type = other DNA
tttgggcgggactcgtgacgctggtcgtcattgagctggttctcggaattgataatctggtgtttatcgccatct

SEQ ID NO: 771777 - DNA, 75 bp, synthetic construct
  source 1..75: mol_type = other DNA
aggactgaatgatgagtttctgaagactcagcttcagccggagagactgaagagcgtttgtgaggacaccggtca

SEQ ID NO: 771778 - DNA, 75 bp, synthetic construct
  source 1..75: mol_type = other DNA
cctccggtggtgagtttaccaacttatcactagaggctgccatcatggctactatccctaccctttctcaccctg

SEQ ID NO: 771779 - DNA, 75 bp, synthetic construct
  source 1..75: mol_type = other DNA
acccttaccctttctcaccctgacgtaaccatcgaaaatggtcgcgcagtcaccacgtctgttgcagttgcagag

SEQ ID NO: 771780 - DNA, 75 bp, synthetic construct
  source 1..75: mol_type = other DNA
atgttgaatgtagctattgaaaaccagtacgggtggaattatagtgcacctgcacctcataaaccgggtgccggg

SEQ ID NO: 771781 - DNA, 75 bp, synthetic construct
  source 1..75: mol_type = other DNA
atggcttatcaatcgcaagatatcattcgtcgttccgcgactaacggtctgacccccgcgcctcaggcgcgggac

SEQ ID NO: 771782 - DNA, 75 bp, synthetic construct
  source 1..75: mol_type = other DNA
tttggcaagcagcatcaccatgttgttcaaaaaatagaatccctcgaatgttctgaactatttttaaccagcaac

SEQ ID NO: 771783 - DNA, 75 bp, synthetic construct
  source 1..75: mol_type = other DNA
ccccacctgctgacaagatgattccgggtgatggtcgcactctggttgttcacttcgacaaattcggcaatgtcg

SEQ ID NO: 771784 - DNA, 75 bp, synthetic construct
  source 1..75: mol_type = other DNA
aacgcggtacacggtacgtcatggcttaacgtttggggtgaagcgttacaagaaaaaataaccggatttgatgtg

SEQ ID NO: 771785 - DNA, 75 bp, synthetic construct
  source 1..75: mol_type = other DNA
gttgatagtgaccataaaaacacacagtaccccgccactgatgatgagatggaccccttcgatgattaccttgat

SEQ ID NO: 771786 - DNA, 75 bp, synthetic construct
  source 1..75: mol_type = other DNA
cagaatttggttacctacctaaccagaatttggttacatgtaatactgaatataaagacaaaaatataaatactg

SEQ ID NO: 771787 - DNA, 75 bp, synthetic construct
  source 1..75: mol_type = other DNA
gtctggtgcagtcgttagtggtcgcgctagcttaccgtttaggagataaaaaacataataatacccaggaaaaca

SEQ ID NO: 771788 - DNA, 75 bp, synthetic construct
  source 1..75: mol_type = other DNA
ctgcgtggccgatctggtggaagctgggcgcaacagttgcctggacgtcgtctcccatattcgtcaattacaaca

SEQ ID NO: 771789 - DNA, 75 bp, synthetic construct
  source 1..75: mol_type = other DNA
gctgaatccggaaaagtcccacccttacattgaggatatggcgatgtttttatcgccattaccgaccgtcctgga

SEQ ID NO: 771790 - DNA, 75 bp, synthetic construct
  source 1..75: mol_type = other DNA
tgatggtgacgatgattttacttacagacccaaaaagaaaactcacactgattcaaagaaagagaagattaaacc

SEQ ID NO: 771791 - DNA, 75 bp, synthetic construct
  source 1..75: mol_type = other DNA
cataatggcgaccgcgaaggaatgcgggtatgccttaacttgtcacgagtagaagtattaaatcagcgttatttc

SEQ ID NO: 771792 - DNA, 75 bp, synthetic construct
  source 1..75: mol_type = other DNA
ttcttcagtcgttttttacccaaaagaaggtcgatatgattgtgttgccagaccctggcttactgaagctggcaa

SEQ ID NO: 771793 - DNA, 75 bp, synthetic construct
  source 1..75: mol_type = other DNA
caacggtaaaccaagatttcgttgaaggtgtaaaagttagtggtaacaaaaatgttgtgattaatgtgaaccgcc

SEQ ID NO: 771794 - DNA, 75 bp, synthetic construct
  source 1..75: mol_type = other DNA
caggtggatggcttccgttcgcaggtagcgtcgatgtgtctggcgcagacgttggccgtctcactggctctggct

SEQ ID NO: 771795 - DNA, 75 bp, synthetic construct
  source 1..75: mol_type = other DNA
cgaccactgggtatccccacgttgcgggaacgtattgttcagcggaccatgctgatggcgatggagccgatatgg

SEQ ID NO: 771796 - DNA, 75 bp, synthetic construct
  source 1..75: mol_type = other DNA
atgtcacttgcaaccacagtgaaggagagcaagttacagagacgcatgtacacgcagcaggcgttaatgtatcgc

SEQ ID NO: 771797 - DNA, 75 bp, synthetic construct
  source 1..75: mol_type = other DNA
gctggatgatgcactggacgttctggacgccatgctggccgttatcatccgtgacgccagaaagattgggcagaa

SEQ ID NO: 771798 - DNA, 75 bp, synthetic construct
  source 1..75: mol_type = other DNA
gcgatatctggatcaacgaccagcgcgtgactgaaatggagccaaaagatcgcgggattgcgatggtgttccaga

SEQ ID NO: 771799 - DNA, 75 bp, synthetic construct
  source 1..75: mol_type = other DNA
gatatctggatcgaccgcaagcgtgtcaccgaaatggagccgaaagatcgcgggattgcgatggtgttccagaac

SEQ ID NO: 771800 - DNA, 75 bp, synthetic construct
  source 1..75: mol_type = other DNA
cgttatcccctgctatcgcccctgtactggcagatggtgatccggaaaaactctttcatggtggtaaacgacctg

SEQ ID NO: 771801 - DNA, 75 bp, synthetic construct
  source 1..75: mol_type = other DNA
atgaagaagtcgattctcgctctgtctttgttagtcggtatttccgcagcggcttccagctatgcggcattgccg

SEQ ID NO: 771802 - DNA, 75 bp, synthetic construct
  source 1..75: mol_type = other DNA
caataaggcgcttggcgagctgcgtcaggacggcacctacgacaagatggcgaaaaagtatttcgactttaatgt

SEQ ID NO: 771803 - DNA, 75 bp, synthetic construct
  source 1..75: mol_type = other DNA
acctggcgtagcaaaggcgtggatgtggtggcctatgccaaccaggatttggtctattccgatctggctgcagga

SEQ ID NO: 771804 - DNA, 75 bp, synthetic construct
  source 1..75: mol_type = other DNA
gatcgcagacgtcagataaggacccgctggtcactcacggatgacgtgataccacgccgccatgataacgatgaa

SEQ ID NO: 771805 - DNA, 75 bp, synthetic construct
  source 1..75: mol_type = other DNA
ctctgtcaccggcgatcgcccccgttctggctgacggagacaacaacagactcttccacggacaaaaacgtcccg

SEQ ID NO: 771806 - DNA, 75 bp, synthetic construct
  source 1..75: mol_type = other DNA
ccttacatttcaaaaactctgcttaccaggcgcatttcgcccaggggatcaccataataaaatgctgaggcctga

SEQ ID NO: 771807 - DNA, 75 bp, synthetic construct
  source 1..75: mol_type = other DNA
gaccggaaacgccgcatcctgaccaactggtccctcaccgacgacatcctgccccgtacacctgctacagacaac

SEQ ID NO: 771808 - DNA, 75 bp, synthetic construct
  source 1..75: mol_type = other DNA
cgttgtcccctgctatcgcccctgtactggcagatggtgatccggaaaaactctttcatggtggtaaacggcctg

SEQ ID NO: 771809 - DNA, 75 bp, synthetic construct
  source 1..75: mol_type = other DNA
cggccacgcgccagtgctttatggcgcaactgggccagcctctgaccacctggaaagacatggctccacatgaaa

SEQ ID NO: 771810 - DNA, 75 bp, synthetic construct
  source 1..75: mol_type = other DNA
acagaactgacagtacattcaagagcgaatatcattgaacttatggttcatgaagataaagcgcgtaaagagttc

SEQ ID NO: 771811 - DNA, 75 bp, synthetic construct
  source 1..75: mol_type = other DNA
aagacaaaaaatcatcattgaccttctggacgagctccctgacagtgagacagatgaacttttaaaaactcttga

SEQ ID NO: 771812 - DNA, 75 bp, synthetic construct
  source 1..75: mol_type = other DNA
atatggataaaggccagaaacacaaagcctttaatgccagtaagattgaggcgcaccacgccatcatcccgacga

SEQ ID NO: 771813 - DNA, 75 bp, synthetic construct
  source 1..75: mol_type = other DNA
ctgcgccacgatgttaacttttccgtggctcaggcggcgatggaagctttcggcgactgcattgacgtgaaagaa

SEQ ID NO: 771814 - DNA, 75 bp, synthetic construct
  source 1..75: mol_type = other DNA
agcgtccggaaacttctcacctgacccgtgttgatctgaaagaagatggcaaaggactgaagattgttcgccaga

SEQ ID NO: 771815 - DNA, 75 bp, synthetic construct
  source 1..75: mol_type = other DNA
ataaaggtgccatgaccatccgtgtaacaacaccaagcacttccagcggtggcggaatcactaacgctcaattca

SEQ ID NO: 771816 - DNA, 75 bp, synthetic construct
  source 1..75: mol_type = other DNA
aggcgacaacggcaatgaatatttcaaatggagaagtcgccagagcaccacaacaaaagacctgatgaatcttaa

SEQ ID NO: 771817 - DNA, 75 bp, synthetic construct
  source 1..75: mol_type = other DNA
aacagccacaaaactgcaaacagcgcgtaccattaatggagtctcatttgacggttctaaaaacattacgctaac

SEQ ID NO: 771818 - DNA, 75 bp, synthetic construct
  source 1..75: mol_type = other DNA
atttaaaaagaaaagcggtggaacgtatgatacagttcttgttcttgaggataagaaaacagggaagctgggttt

SEQ ID NO: 771819 - DNA, 75 bp, synthetic construct
  source 1..75: mol_type = other DNA
aggctttactagtactaaaactggaaaaaaatttgacgctgctttagttttacaggataaaaacacgggaaaagt

SEQ ID NO: 771820 - DNA, 75 bp, synthetic construct
  source 1..75: mol_type = other DNA
taacgggaaccgtgatgaattaattgatacaacacaggcaaggccaattcagtattgcattaatgggacgtggta

SEQ ID NO: 771821 - DNA, 75 bp, synthetic construct
  source 1..75: mol_type = other DNA
atgaaactctcacgtatcagcgccatcaactggaacaagatatctgacgataaagatctggaggtgtggaatcgc

SEQ ID NO: 771822 - DNA, 75 bp, synthetic construct
  source 1..75: mol_type = other DNA
ggatcttttcttcaacgaaagcgaagttcaaccggcagagccccaacctgatgaaggagaacacctgtccccgct

SEQ ID NO: 771823 - DNA, 75 bp, synthetic construct
  source 1..75: mol_type = other DNA
atagctatttatctttccgaactgaaatatcatttatcccggccagcgctggaaggtttaggtgcggcgcgggat

SEQ ID NO: 771824 - DNA, 75 bp, synthetic construct
  source 1..75: mol_type = other DNA
gctggcgctgctcgcttttgtgcaacagcaacaactggtgctggcgttattagcggggctgacgatgccgttttt

SEQ ID NO: 771825 - DNA, 75 bp, synthetic construct
  source 1..75: mol_type = other DNA
cgctggattatatcgacctgaataaaggtatttttactggcatggacagggagaacgaaccgatgtatctcccgt

SEQ ID NO: 771826 - DNA, 75 bp, synthetic construct
  source 1..75: mol_type = other DNA
ttctggtggacgacgaactccgcaaggctaaaacggataatatgctgacggaaaccatcgacagtgagcgcacaa

SEQ ID NO: 771827 - DNA, 75 bp, synthetic construct
  source 1..75: mol_type = other DNA
gggtcttttcttcaacgaaagcgaagtcaaaccggcagagccccaacctgatgcgggagaacatctgtccccgct

SEQ ID NO: 771828 - DNA, 75 bp, synthetic construct
  source 1..75: mol_type = other DNA
tgatccgtctgattatccgcgatgaagcagtccacggttactacatcggctataaatatcagaaaaacatggaaa

SEQ ID NO: 771829 - DNA, 75 bp, synthetic construct
  source 1..75: mol_type = other DNA
cgaaaccccgtgggctgacgatgtgaaagcgtttctctgttacaacgccaataaggcgttgatgaatctgggcta

SEQ ID NO: 771830 - DNA, 75 bp, synthetic construct
  source 1..75: mol_type = other DNA
ttgctggaactctatgacaacgagttgcaatacaccgatgagctgtacgccgaaaccccgtgggctgacgatgtg

SEQ ID NO: 771831 - DNA, 75 bp, synthetic construct
  source 1..75: mol_type = other DNA
taaaagactggcagaaacaacacgcggatattatcggcaccacaggggccggtaaaggggtagccgccggcatat

SEQ ID NO: 771832 - DNA, 75 bp, synthetic construct
  source 1..75: mol_type = other DNA
tagcggggctgacgatgccgttttttgcatcaatgaaaagcgatgaacggcagaaagcgccgctctggaaaaagc

SEQ ID NO: 771833 - DNA, 75 bp, synthetic construct
  source 1..75: mol_type = other DNA
cccgcagaaatggcggaagtgaatccggcaatcctcgccgcgctttcgccgaatgccgatgaaaatcacgatttc

SEQ ID NO: 771834 - DNA, 75 bp, synthetic construct
  source 1..75: mol_type = other DNA
gatggttatgtccggtggctggtcagacagggggtcatatgctgctggttatttctggacgtatcaggcggatga

SEQ ID NO: 771835 - DNA, 75 bp, synthetic construct
  source 1..75: mol_type = other DNA
ctgattgagctgcataccgacaacctcgataaattcttcaccccgcgccgaaagtcgactggcccgcccattcgg

SEQ ID NO: 771836 - DNA, 75 bp, synthetic construct
  source 1..75: mol_type = other DNA
ccggggctttgaagcggaccagcttgatctggagctggacgacgccgatggaaaaatagcgctgccgcgccgtgg

SEQ ID NO: 771837 - DNA, 75 bp, synthetic construct
  source 1..75: mol_type = other DNA
ttctgtcagcccggataatggatttacgaccagcatggagcttgaagtaaagattggtgatcttgaaattgaata

SEQ ID NO: 771838 - DNA, 75 bp, synthetic construct
  source 1..75: mol_type = other DNA
ccgtgaaaaatcgtggcataacaccaccatcggggaagtggtgaaggaaatagccgtacgtcacaagctgaagat

SEQ ID NO: 771839 - DNA, 75 bp, synthetic construct
  source 1..75: mol_type = other DNA
cgcctgactatccgggcgcgaagcgctgattttcgggaaacgctgaatacccgtcgtgaaaaatcgtggcacaag

SEQ ID NO: 771840 - DNA, 75 bp, synthetic construct
  source 1..75: mol_type = other DNA
tactggcgcgaaggaaaactacgtcctccttcaacaacagaaaacaacgtgcctgagctgctcccgataacactt

SEQ ID NO: 771841 - DNA, 75 bp, synthetic construct
  source 1..75: mol_type = other DNA
tactgtgcacgtttgcataacattgagcagcagttgctgagtatgtttggcgataccgatggcaaacgtgacgca

SEQ ID NO: 771842 - DNA, 75 bp, synthetic construct
  source 1..75: mol_type = other DNA
atggttcaacttaagccatagcggtgacgatatcgccctgctgttgagcgatgaaggcgaagtcggctgcgatat

SEQ ID NO: 771843 - DNA, 75 bp, synthetic construct
  source 1..75: mol_type = other DNA
gctagaaaatttaagccttgcgatctgcccccccccccccctttacgctcaccgccgagagtgtgcaatggatcg

SEQ ID NO: 771844 - DNA, 75 bp, synthetic construct
  source 1..75: mol_type = other DNA
gatgaatggtgtaacacctaccaggatattgttgatttcactgatgccgccagttgccacatggtgcaaatcaaa

SEQ ID NO: 771845 - DNA, 75 bp, synthetic construct
  source 1..75: mol_type = other DNA
acaacctgtgaggcaactgtcgcgttcagtcgtgaggtgatttcatgtacgcaaacgatgatggatgaaagcatc

SEQ ID NO: 771846 - DNA, 75 bp, synthetic construct
  source 1..75: mol_type = other DNA
ttgttgttgcagtgacaaagttcatcgcgaaatcgtcgcccgcttcgaactggctgaagacatggcggataatct

SEQ ID NO: 771847 - DNA, 75 bp, synthetic construct
  source 1..75: mol_type = other DNA
cttaatcgcacttatgccaaccggagtaacgccgaacgagcggcaaaaatgcagtgggaacgcctgcaacgcggc

SEQ ID NO: 771848 - DNA, 75 bp, synthetic construct
  source 1..75: mol_type = other DNA
tggttctaaagatattgaacttaacccacggtctataggcacgatcaactccacaacaatgtcttttagtggtgg

SEQ ID NO: 771849 - DNA, 75 bp, synthetic construct
  source 1..75: mol_type = other DNA
tccggcacggatcactccgtctgaatggtgccattagcgaaaatatcctgaacctgctgatacgggagctcaaac

SEQ ID NO: 771850 - DNA, 75 bp, synthetic construct
  source 1..75: mol_type = other DNA
ccgcagaattagttaaaaataaggccggatgtgtgaattacgctccggcctgttctccaacatttaatgacaaat

SEQ ID NO: 771851 - DNA, 75 bp, synthetic construct
  source 1..75: mol_type = other DNA
catttgacggttctgcggacataacgctgactcctgcgaaccttgacgtatacagcaaaagcgaaatagacaata

SEQ ID NO: 771852 - DNA, 75 bp, synthetic construct
  source 1..75: mol_type = other DNA
caacgccagtggagctgtttctatcggtaatggactcaatgttactggcgatactgtatccagttcgagagttcg

SEQ ID NO: 771853 - DNA, 75 bp, synthetic construct
  source 1..75: mol_type = other DNA
ttatgcgctttgtctccggcagcattcaaagtaataaaaccataaatattacagggcgtgttaacccctcggatt

SEQ ID NO: 771854 - DNA, 75 bp, synthetic construct
  source 1..75: mol_type = other DNA
cccgcgaacccgcgaagaaagaaagcactacggtgaagcgtaagcgcagaacgaagaatcagaagaaagagccgg

SEQ ID NO: 771855 - DNA, 75 bp, synthetic construct
  source 1..75: mol_type = other DNA
atctgttattcattcggcagggacagggtaaaagtgctagcggtaaagcactgccggtgatcactatcacacgta

SEQ ID NO: 771856 - DNA, 75 bp, synthetic construct
  source 1..75: mol_type = other DNA
cgcgaacccgcgaagaaagaaagcactacggtgaagcgtaagcgcaggactaagaagcagaagaaagagccggaa

SEQ ID NO: 771857 - DNA, 75 bp, synthetic construct
  source 1..75: mol_type = other DNA
atgaaattgatcattaccgaagattaccaggaaatgagccgtgtctcggcacatcatctgcttggttatatgtca

SEQ ID NO: 771858 - DNA, 75 bp, synthetic construct
  source 1..75: mol_type = other DNA
cacggatcactccgtctgaatggtgccatcagcgaaaatatcctgaacctgctgatacgggagctcaaacgttga

SEQ ID NO: 771859 - DNA, 75 bp, synthetic construct
  source 1..75: mol_type = other DNA
gacgaaaaggctgccctaattatcctcccgaatttaaacagcagctcgttgctgcctcctgtgaacccgggatat

SEQ ID NO: 771860 - DNA, 75 bp, synthetic construct
  source 1..75: mol_type = other DNA
atgaagagtactgagtttcatcctgtccattatgatgcgcacggtcgcctgcgtttacccttgctcttctggctt

SEQ ID NO: 771861 - DNA, 75 bp, synthetic construct
  source 1..75: mol_type = other DNA
attctggcagtactaccgctgaaatatcgcggccacctggttgagcaggatagcttcatggctcggctggctgaa

SEQ ID NO: 771862 - DNA, 75 bp, synthetic construct
  source 1..75: mol_type = other DNA
cataattgcacagcagaactgattcccgcagatcctgaagccaccgcacatgccggactatggatcggtaagagt

SEQ ID NO: 771863 - DNA, 75 bp, synthetic construct
  source 1..75: mol_type = other DNA
tgtggctgaacggtgaatctgttagcggtatcggtctggcgctggtggtggcagatattgtggtgttaatctggc

SEQ ID NO: 771864 - DNA, 75 bp, synthetic construct
  source 1..75: mol_type = other DNA
ctgaatctgttttatcccgatcatgataatttctggttgggattgattcccggcgttccggcggtgctggcgttt

SEQ ID NO: 771865 - DNA, 75 bp, synthetic construct
  source 1..75: mol_type = other DNA
gcggatattgtggcgttaatctggctgctgaccaatcgacgtttacgcgcttgttttaatgaagaaaaagaataa

SEQ ID NO: 771866 - DNA, 75 bp, synthetic construct
  source 1..75: mol_type = other DNA
gctcaggtatttgtgaggaatgaattaagccctttacaggagcgtattaaagatattaatgagtgggtaggcgat

SEQ ID NO: 771867 - DNA, 75 bp, synthetic construct
  source 1..75: mol_type = other DNA
ggttgcatgcattaactaatgataacatcttgcctggggatctaaataatccggaagcctttctcatggatcctc

SEQ ID NO: 771868 - DNA, 75 bp, synthetic construct
  source 1..75: mol_type = other DNA
cgccacgctgttccgacgcaaatattacatcaacggcagccatgcaggcttcatcatgtatatgaccgatgccgc

SEQ ID NO: 771869 - DNA, 75 bp, synthetic construct
  source 1..75: mol_type = other DNA
aatatcttgaaagtcagggaattgaaataccagacgtggttttatccttgctggtggagcaggcaaacagcgtta

SEQ ID NO: 771870 - DNA, 75 bp, synthetic construct
  source 1..75: mol_type = other DNA
atgaagctgatttttcagcatggtgagccagtgccggtactcgaccgccgtgacattctggattacgtcgaatgc

SEQ ID NO: 771871 - DNA, 75 bp, synthetic construct
  source 1..75: mol_type = other DNA
aatatctggagagccagggaattaccattcccgattttgttcttcaggctctcgtcgaccaggccaacagcattc

SEQ ID NO: 771872 - DNA, 75 bp, synthetic construct
  source 1..75: mol_type = other DNA
atgccgtccgtgcctggtcggctgcagataatcaggatgttgttgccgcactcattgtgaatgagtatcgggagc

SEQ ID NO: 771873 - DNA, 75 bp, synthetic construct
  source 1..75: mol_type = other DNA
actatcgtttccctgccatccggtgattatgctctgaacaagccgggtttatcgccgcaagacgtggcatcgttt

SEQ ID NO: 771874 - DNA, 75 bp, synthetic construct
  source 1..75: mol_type = other DNA
ctttatgaatctgcgactaaagggcaacaaaaattcattgaggcagcaggaaagcgatataaccgcataattgac

SEQ ID NO: 771875 - DNA, 75 bp, synthetic construct
  source 1..75: mol_type = other DNA
agggaaaaaaccaataaaacctgctgatcgacatgctcttttagctgttaatcttgcaggaagcatgtcagtttt

SEQ ID NO: 771876 - DNA, 75 bp, synthetic construct
  source 1..75: mol_type = other DNA
agtcacgccagtcatttggcattaacgttcttggcacgttgattgttgaagtcgaagcagaaaacggccagaccg

SEQ ID NO: 771877 - DNA, 75 bp, synthetic construct
  source 1..75: mol_type = other DNA
atggtcgcggatatgcgtgaaaaatgcggtgaggatttctggttaatgctcgactgctggatgagtcaggacgtg

SEQ ID NO: 771878 - DNA, 75 bp, synthetic construct
  source 1..75: mol_type = other DNA
cgaaaaacaccttaaccgtttcattgagggcaaatgtgtcagtgatatcaaactgatccacgatcaaatgctcaa

SEQ ID NO: 771879 - DNA, 75 bp, synthetic construct
  source 1..75: mol_type = other DNA
gaacaggcaatgcaagagcagcgactggcacgaaaaattgcgctaaagctctctggttgcgtcagagcagataaa

SEQ ID NO: 771880 - DNA, 75 bp, synthetic construct
  source 1..75: mol_type = other DNA
tcgatgtttcgtgtggacccggatctggctggtccattaatggcgatggtgaccaccatgctgggggcaatatga

SEQ ID NO: 771881 - DNA, 75 bp, synthetic construct
  source 1..75: mol_type = other DNA
gataaatcgttctcaaacaaaacaggtgccaggccacgaaaaaatccgtgatgccgtccgcgcctggtcggctgt

SEQ ID NO: 771882 - DNA, 75 bp, synthetic construct
  source 1..75: mol_type = other DNA
agccagcttaaagtggctgacctctcggttgatctcgtatccagaaaagtcagccgcgccgggaaccgcattgtg

SEQ ID NO: 771883 - DNA, 75 bp, synthetic construct
  source 1..75: mol_type = other DNA
aagccacgcagtgaaatgggggtgacttgtgttggtcgccagaaaatgaaatcaggcagtaagctactgtatgag

SEQ ID NO: 771884 - DNA, 75 bp, synthetic construct
  source 1..75: mol_type = other DNA
gaacaggcaatgcaagaacagcgactggcgcgaaaaattgcgctaaagctctctggttgcgtcagagcagataaa

SEQ ID NO: 771885 - DNA, 75 bp, synthetic construct
  source 1..75: mol_type = other DNA
acaacccagccgtatcagttcacgaaagacagcatttttcatctgatggaaccggacattaaccaggagatctac

SEQ ID NO: 771886 - DNA, 75 bp, synthetic construct
  source 1..75: mol_type = other DNA
tgcgaatggcggcagaaaatgcaacccctggcgaatggtgttctgatgattatgggttaattgctgatgccggac

SEQ ID NO: 771887 - DNA, 75 bp, synthetic construct
  source 1..75: mol_type = other DNA
tgcctggttccggtaaatcctatgaggttgtcagtaatgtgattgttcctgctatctgtgaaggtcgtcgtgttg

SEQ ID NO: 771888 - DNA, 75 bp, synthetic construct
  source 1..75: mol_type = other DNA
atcctgaacatcaggttgatgatgtgctggctaataatcgctctcgcccgggttcgcatgcacatcgaattaatc

SEQ ID NO: 771889 - DNA, 75 bp, synthetic construct
  source 1..75: mol_type = other DNA
aatcacggaaggagcatcactattggtgctcacacacatacactcaataaacaacatactgtctttgatattaag

SEQ ID NO: 771890 - DNA, 75 bp, synthetic construct
  source 1..75: mol_type = other DNA
tcagttacagtcccgcgttcagaatcatattcttcgtgaatatctcggcgagcagcctgtaggttctgcatttgt

SEQ ID NO: 771891 - DNA, 75 bp, synthetic construct
  source 1..75: mol_type = other DNA
ttatgtcgtaacgctgacttcccggggtcaggatgtggcagaaggtcgtgcccgcgttgccggtgtcaagcgtcc

SEQ ID NO: 771892 - DNA, 75 bp, synthetic construct
  source 1..75: mol_type = other DNA
ttatgtcgtgacgctgacctcccgtggtcaggatgtggctgaaggccgggctcgtgtttccggtgtcaaacgtcc

SEQ ID NO: 771893 - DNA, 75 bp, synthetic construct
  source 1..75: mol_type = other DNA
caacccattatgcgtcggtgatgtccgcggaatacgccggaaagctggaaaaagaagatcgccaggagctgctcg

SEQ ID NO: 771894 - DNA, 75 bp, synthetic construct
  source 1..75: mol_type = other DNA
attgtgttgtgtgatggcctggaggaaaaacggctgaatgatggctcattattcaccgacgacggtgaggcgctt

SEQ ID NO: 771895 - DNA, 75 bp, synthetic construct
  source 1..75: mol_type = other DNA
aaaaacaaagcgttgaccccctgatgtggcagaacttccgtgaacatctggacaagctctatcaccactatctgg

SEQ ID NO: 771896 - DNA, 75 bp, synthetic construct
  source 1..75: mol_type = other DNA
ctgtctcttctggagagtttcggtttcatatctgctgacgtaaaatggggtgtgccgttagccattatctgtttt

SEQ ID NO: 771897 - DNA, 75 bp, synthetic construct
  source 1..75: mol_type = other DNA
ttatatatgtaaaaagcggtttcaggaacgctgaatatatcggcataagaaactggcttgctggcattcgcatca

SEQ ID NO: 771898 - DNA, 75 bp, synthetic construct
  source 1..75: mol_type = other DNA
ccagttgctgtttactttgttggcaaccgcattgatcgtcccctatttcaaacgctcgtcgcgggtaaaagcgac

SEQ ID NO: 771899 - DNA, 75 bp, synthetic construct
  source 1..75: mol_type = other DNA
aagatgatttctttaacatcaaaaaggttagtgcagaagatttgttgagtgctcatagggtacctccacaaatga

SEQ ID NO: 771900 - DNA, 75 bp, synthetic construct
  source 1..75: mol_type = other DNA
aaagtttactgattatattaaatactgtatagaaacgacaaaacacctttcaattcaacaacaaatggaagttga

SEQ ID NO: 771901 - DNA, 75 bp, synthetic construct
  source 1..75: mol_type = other DNA
ttcagcttcggtgatcccgttcctgttctggaccgccgcgaactgctggactatgtggaatgtgtacagatggat

SEQ ID NO: 771902 - DNA, 75 bp, synthetic construct
  source 1..75: mol_type = other DNA
ctggctattggtttccgtattactgtcagttaaagccttcgctttttcacccgttgaggatggagtagccgtccg

SEQ ID NO: 771903 - DNA, 75 bp, synthetic construct
  source 1..75: mol_type = other DNA
atgtggtattacacactgtggttgaccatcgctttctttaaacgtcggcgttgtgttcctaaacactatattatc

SEQ ID NO: 771904 - DNA, 75 bp, synthetic construct
  source 1..75: mol_type = other DNA
ctgctggagccggatattaatcaggagctgtacggcctgccggaatatctcagcgcccttaactctgcctggctg

SEQ ID NO: 771905 - DNA, 75 bp, synthetic construct
  source 1..75: mol_type = other DNA
ttacaggacaggattcgggaaataaacggctggctcggtcaggaggtcatccgctttaaaaactactcactggac

SEQ ID NO: 771906 - DNA, 75 bp, synthetic construct
  source 1..75: mol_type = other DNA
acaacagggacagtcacttttgcagatacttacccagcggactattctggagacggtagtattggaacgtcaaaa

SEQ ID NO: 771907 - DNA, 75 bp, synthetic construct
  source 1..75: mol_type = other DNA
atgagcaagaaaaaagggaaaacaccgcagccagcggtgaaaacaatgaccgccagggccccgaaaatggaggca

SEQ ID NO: 771908 - DNA, 75 bp, synthetic construct
  source 1..75: mol_type = other DNA
cgcgacctgcggcaaaaacaatcaccgccagcgccccgaaaatggaggcattcacctttggtgagccggtgccgg

SEQ ID NO: 771909 - DNA, 75 bp, synthetic construct
  source 1..75: mol_type = other DNA
cggtaatgcgtttctggaaaagcgttacagcaccaccggtaaggtcatcagactggaaacctcaccggcaaaata

SEQ ID NO: 771910 - DNA, 75 bp, synthetic construct
  source 1..75: mol_type = other DNA
cacgcccaggtgaatccccatttcctgttcaatgcgcttaacaccattaaagccgttatccgccgcgacagcgaa

SEQ ID NO: 771911 - DNA, 75 bp, synthetic construct
  source 1..75: mol_type = other DNA
aatatgagcggcaaaaagcgatgctcacccagtcagagatcaaactgcttcacgcccaggtgaatccccattttt

SEQ ID NO: 771912 - DNA, 75 bp, synthetic construct
  source 1..75: mol_type = other DNA
ccggtgaagtggtctacgccgatggcaacgaagtgccttaccgttgctcgttgcatccgcaatgcaagttaggct

SEQ ID NO: 771913 - DNA, 75 bp, synthetic construct
  source 1..75: mol_type = other DNA
gttctggggccgggtggcaaaaccgttgagatccaaatccgcaccaaacagatgcatgaagatgcagagttgggt

SEQ ID NO: 771914 - DNA, 75 bp, synthetic construct
  source 1..75: mol_type = other DNA
ctttcggcgcagattctcgctgggcaatatgagcggcaaaaagcgatgctcacccagtcagagatcaaactactt

SEQ ID NO: 771915 - DNA, 75 bp, synthetic construct
  source 1..75: mol_type = other DNA
ctcgccgacgaaattgaacacgtgaatgcttatctgcaaattgaaaaggcgcgtttccagtcacggttgcaggtc

SEQ ID NO: 771916 - DNA, 75 bp, synthetic construct
  source 1..75: mol_type = other DNA
ttatttgtactcaggtattagagcagagtgaaccgccccgggaatcctggagactaaacttcctgagaaagaggt

SEQ ID NO: 771917 - DNA, 75 bp, synthetic construct
  source 1..75: mol_type = other DNA
aatggtcagttaaagcgtgacggaaaagacgagcgttcccctcctgaattgctgattctggctcccgtctgggac

SEQ ID NO: 771918 - DNA, 75 bp, synthetic construct
  source 1..75: mol_type = other DNA
ccttatgccagcggtgctcacgcatgggaaatgagcgttgtcagagtgcgccgaagctggtggaaaaaacatcgg

SEQ ID NO: 771919 - DNA, 75 bp, synthetic construct
  source 1..75: mol_type = other DNA
cgccggtgccgtcacgttcgtcgctgaaatggtgcaaatgttgatcatcctggcgatcgcccgaccttatgaaga

SEQ ID NO: 771920 - DNA, 75 bp, synthetic construct
  source 1..75: mol_type = other DNA
agcatcctgatccgtcgcgggcgcactgataaagtctttaaccccattaccgccggtgccgtcacgttcgtcgct

SEQ ID NO: 771921 - DNA, 75 bp, synthetic construct
  source 1..75: mol_type = other DNA
gtattgcgcgtatcgaatcggcggtaagtcaggggaaatgcatcgcctggatccggaattctgtcgatgacgcta

SEQ ID NO: 771922 - DNA, 75 bp, synthetic construct
  source 1..75: mol_type = other DNA
cagtttgatgcgtggctgatggaaaacgcactaccgtcagggtttgaggtggggtttgatgggatggagattggg

SEQ ID NO: 771923 - DNA, 75 bp, synthetic construct
  source 1..75: mol_type = other DNA
tggtgattgattgcagccacccaccgcgcgcgaattcgccacgcaatcactgtgatttaaacaccgtgctggcgc

SEQ ID NO: 771924 - DNA, 75 bp, synthetic construct
  source 1..75: mol_type = other DNA
tgatttcagccacacagtggaaccgtttgtggtgtttgatttgcaggggttgcaggtcacgccgctgccgcttaa

SEQ ID NO: 771925 - DNA, 75 bp, synthetic construct
  source 1..75: mol_type = other DNA
tggagtttttcctccgccatcagggcgaagtgctgccccgctcgcttatcgcctcgcaggtgtgggacatgaatt

SEQ ID NO: 771926 - DNA, 75 bp, synthetic construct
  source 1..75: mol_type = other DNA
attcatacagtcaacctgaatattaaggatggctcagtaattggggcggctaataataaacaaacaatttatgcc

SEQ ID NO: 771927 - DNA, 75 bp, synthetic construct
  source 1..75: mol_type = other DNA
cataaatgctcaaggtaataagagttacagcaacggctctacggcaatttttgctcaaaaggttaatttgttgca

SEQ ID NO: 771928 - DNA, 75 bp, synthetic construct
  source 1..75: mol_type = other DNA
gtatcaatatgacctgacacagggagctgatggtaacttttatttcgtaaaaacacgcataaagcatccaacgcc

SEQ ID NO: 771929 - DNA, 75 bp, synthetic construct
  source 1..75: mol_type = other DNA
gtacctgcatcctcggtacgaacggttcgggtaaaaccatgttgatgacgttctttgagatcatgcagcagaaat

SEQ ID NO: 771930 - DNA, 75 bp, synthetic construct
  source 1..75: mol_type = other DNA
attcaggacatgcttcagaaatacggaaatccggcatcgttcgcaccacaaactaagataaaacgacaaacaacc

SEQ ID NO: 771931 - DNA, 75 bp, synthetic construct
  source 1..75: mol_type = other DNA
ccagtgcggacaacctgaaaatttttgacgagatctggcaggagggtatgaagccggaagactggaaagacgaaa

SEQ ID NO: 771932 - DNA, 75 bp, synthetic construct
  source 1..75: mol_type = other DNA
gcaaggaagacgccactctgtgaaactattgtcctgaatctgaggtatgggggaaaaacccgctacagactgttc

SEQ ID NO: 771933 - DNA, 75 bp, synthetic construct
  source 1..75: mol_type = other DNA
caatatcaatttcatcaagcaactgatgaaaatcctttgtacccgtaacggctcgacgatctccccacgcgatga

SEQ ID NO: 771934 - DNA, 75 bp, synthetic construct
  source 1..75: mol_type = other DNA
accgtttacctcgataaagaccggggcgcagagatgaacatccgggcgctgggtggccgttactatcgggttatc

SEQ ID NO: 771935 - DNA, 75 bp, synthetic construct
  source 1..75: mol_type = other DNA
cgccaatatcaacgattacctcccggaaaagctgtcgacacgtctggctgaggagtctgtttccctgtggctggc

SEQ ID NO: 771936 - DNA, 75 bp, synthetic construct
  source 1..75: mol_type = other DNA
tgcccggatctggcgcgagcgattacctttgctcattcagccgggatggtggtgatggttgatggtgctcagggg

SEQ ID NO: 771937 - DNA, 75 bp, synthetic construct
  source 1..75: mol_type = other DNA
cagaggttacggaagtaatacaggagagtgcattgaaattaaaacccgcgagcctttgagcagcgtgatagaaac

SEQ ID NO: 771938 - DNA, 75 bp, synthetic construct
  source 1..75: mol_type = other DNA
tgatgacgccgagtagtggcggtgggatttgggatattactcccatgcctaatacagatgtctgcataaaaatgc

SEQ ID NO: 771939 - DNA, 75 bp, synthetic construct
  source 1..75: mol_type = other DNA
ccagatgtcgaacgtcaccggtggttgcccggatttggcgagagcgattacgtttgcccacgccgccggaatggt

SEQ ID NO: 771940 - DNA, 75 bp, synthetic construct
  source 1..75: mol_type = other DNA
cccgtagccggattctggcgttgggccagatgtcgaacgtcactggcggttgcccggatctggcgcgagcgatta

SEQ ID NO: 771941 - DNA, 75 bp, synthetic construct
  source 1..75: mol_type = other DNA
taggattaagcgcggcgctggaatggctggcagattacgatatcaaccaggccgaaagctggagccgtagcttag

SEQ ID NO: 771942 - DNA, 75 bp, synthetic construct
  source 1..75: mol_type = other DNA
accagatcgaaattatcacccagaaacagccgaaccccagccgtgactggttaaacccaaacctcggttacgtca

SEQ ID NO: 771943 - DNA, 75 bp, synthetic construct
  source 1..75: mol_type = other DNA
aatgctcgacgaagtacgcagccaggtctttgacgaccgggtgtacgtctttacgccgaaaggtgatgtggttga

SEQ ID NO: 771944 - DNA, 75 bp, synthetic construct
  source 1..75: mol_type = other DNA
aattcctgatgaccagcccggattgttcaacgatgcgtccgcaatttgatccgattctgcttaatgagccggttc

SEQ ID NO: 771945 - DNA, 75 bp, synthetic construct
  source 1..75: mol_type = other DNA
cggaaagaaatctgccgttaatgaccagtgacatgctgaaagataaaacctttatgcagagtcaggctcagacat

SEQ ID NO: 771946 - DNA, 75 bp, synthetic construct
  source 1..75: mol_type = other DNA
catttaccttccctgatggtacgagcaccgaagatattggcaccgccattgatgagtattttgctggtcagtcag

SEQ ID NO: 771947 - DNA, 75 bp, synthetic construct
  source 1..75: mol_type = other DNA
agcgtttacaggactgctacgccgcgttggggatagtgcacactcactatcgccacctgccggatgagttcgacg

SEQ ID NO: 771948 - DNA, 75 bp, synthetic construct
  source 1..75: mol_type = other DNA
gagccaaagtggtgaaattgccgcttaatgcgcagcggttgccagatgtcgatttgttgccggaactgattactc

SEQ ID NO: 771949 - DNA, 75 bp, synthetic construct
  source 1..75: mol_type = other DNA
atccggcttactacaaacgttagaagtcggagaaaacctgatcaccgccagtaatgcattgcttccaggctggac

SEQ ID NO: 771950 - DNA, 75 bp, synthetic construct
  source 1..75: mol_type = other DNA
acactggcataacggcgatgcagtaaaagcctcacacttacaccagcgattattgatgctgttacaactgccagc

SEQ ID NO: 771951 - DNA, 75 bp, synthetic construct
  source 1..75: mol_type = other DNA
tcagtagcggtatcagtttaggtttttgctatttaacgttgcgcaaaagtccccgcctttccctctggcaggcgc

SEQ ID NO: 771952 - DNA, 75 bp, synthetic construct
  source 1..75: mol_type = other DNA
ctggtatatctctgcaaccgtcgtacttgcagactggacaggatcgtcaacgcgattttttccacgcgtcgcaca

SEQ ID NO: 771953 - DNA, 75 bp, synthetic construct
  source 1..75: mol_type = other DNA
ctctcattcaacgctgggctactggttgtggaatcattatttaagtgaatgtcaggagttacttccttcatcttc

SEQ ID NO: 771954 - DNA, 75 bp, synthetic construct
  source 1..75: mol_type = other DNA
tgattacccctggctgacgcatgtcacgaaatccgatgtgaactcacaccgggtagcgacgcgcaaagacgttga

SEQ ID NO: 771955 - DNA, 75 bp, synthetic construct
  source 1..75: mol_type = other DNA
tgtctaccccgatcatgggcgaatctggctgacgcagcgtgtgctgcgtgagcaaggcgctattcagatgccaca

SEQ ID NO: 771956 - DNA, 75 bp, synthetic construct
  source 1..75: mol_type = other DNA
caactttcctggtatatctctgcaaccgtcgtacttgcagactggacgggatcgtcaacgcgattttttccacgc

SEQ ID NO: 771957 - DNA, 75 bp, synthetic construct
  source 1..75: mol_type = other DNA
ttacagtctgagcggcggaaacgtgcatcgcagccagtttgccgaagctcaacgcctgaccgcgcgttatgaagc

SEQ ID NO: 771958 - DNA, 75 bp, synthetic construct
  source 1..75: mol_type = other DNA
tttgcagcgaacgccatgtgcgtacactattacgtcaggctcaggagtcgggatggctggagtggcaggcgcagt

SEQ ID NO: 771959 - DNA, 75 bp, synthetic construct
  source 1..75: mol_type = other DNA
tgtgctggagctggcgcaactggccccaggtgagctgcgcactctgttacagccgtttatgggcggacaatggca

SEQ ID NO: 771960 - DNA, 75 bp, synthetic construct
  source 1..75: mol_type = other DNA
ttgcttcgggctggctgactattttcgtcaactaggtttcgctgatacggagcaggcagcacaatttttcgcctg

SEQ ID NO: 771961 - DNA, 75 bp, synthetic construct
  source 1..75: mol_type = other DNA
ggccctgtgcatcctggtatgttcgtcagcggctgcgccgcgcttcggggcgatgtggccccgctgctccctggt

SEQ ID NO: 771962 - DNA, 75 bp, synthetic construct
  source 1..75: mol_type = other DNA
gtgaacttcatcgtatcgcggatgccctgcagtcggtacagaagcgtaacttctggcagttacaggctgaaatca

SEQ ID NO: 771963 - DNA, 75 bp, synthetic construct
  source 1..75: mol_type = other DNA
acagcaactggtatgaaaacgtgtatgaagacttcagggaggtctgtaacattttcgggattagcctccgccagc

SEQ ID NO: 771964 - DNA, 75 bp, synthetic construct
  source 1..75: mol_type = other DNA
ataacgctgcatggggagtgcgaacattgtggtttgaactcgtcacaaaaatagatatagatatacataaaaaga

SEQ ID NO: 771965 - DNA, 75 bp, synthetic construct
  source 1..75: mol_type = other DNA
tgatctgtaaccttgtccgtattggtacggtgacggatgttgatcttgctgctgagccgccagttgcgcgagtct

SEQ ID NO: 771966 - DNA, 75 bp, synthetic construct
  source 1..75: mol_type = other DNA
tcacagcggcggcagttttacctccaacggcgtcaccgtccatacccacacgcacacaggcgtggagcgcggggg

SEQ ID NO: 771967 - DNA, 75 bp, synthetic construct
  source 1..75: mol_type = other DNA
cagaaagtctggcggcaacgtttaagttatcgcctggtgcgcagcgcggaagagtgcaaaattgccctttcaagc

SEQ ID NO: 771968 - DNA, 75 bp, synthetic construct
  source 1..75: mol_type = other DNA
actgggtcacagtggttgccgtattggtggtaacgatctggatatcgcgctggcatttaaacatctgatgccgct

SEQ ID NO: 771969 - DNA, 75 bp, synthetic construct
  source 1..75: mol_type = other DNA
ggtttaaggatgtggtattccagtacgagccggtagcggctgggctggattacgaagccaccttgcaggaagaaa

SEQ ID NO: 771970 - DNA, 75 bp, synthetic construct
  source 1..75: mol_type = other DNA
tgcaacggatgtggagcatgtgcagccagctgtccggtatcagccataactgcggagtatctccatgcacactaa

SEQ ID NO: 771971 - DNA, 75 bp, synthetic construct
  source 1..75: mol_type = other DNA
gaactttcccgaattgacgaggcgatgaataatcacattaaaactcatttcaaagagcttgcaactcgtttgagc

SEQ ID NO: 771972 - DNA, 75 bp, synthetic construct
  source 1..75: mol_type = other DNA
atgagtcaaccaaatctgcaatgcatgggtattgatgttgccaaactatcgctggacatcgccaccaccgacacg

SEQ ID NO: 771973 - DNA, 75 bp, synthetic construct
  source 1..75: mol_type = other DNA
attgtggtttgaactcgtcacaaaaatagatatagatatacataaaaagaacagatatgcgagttatgatcttga

SEQ ID NO: 771974 - DNA, 75 bp, synthetic construct
  source 1..75: mol_type = other DNA
cgatccgtccatcacaaaatttctccatgcgggcagtgaagatctggaagtgttcctcaatgtctttggcgaatt

SEQ ID NO: 771975 - DNA, 75 bp, synthetic construct
  source 1..75: mol_type = other DNA
cggtaaaacgctgctggcgctggtggaaaaagcgcagacattgccggaagaggccttaccgcagccgatgcttaa

SEQ ID NO: 771976 - DNA, 75 bp, synthetic construct
  source 1..75: mol_type = other DNA
cggtaaaacgctgctggcgctggtagagaaagcgcaggcattgccggaagaggccttaccgcagccaatgcttaa

SEQ ID NO: 771977 - DNA, 75 bp, synthetic construct
  source 1..75: mol_type = other DNA
tccctaatctggcaaaagtaggctcttttgctggcatagcggcaacaggtgtgggtatccgtattgacgatgcgg

SEQ ID NO: 771978 - DNA, 75 bp, synthetic construct
  source 1..75: mol_type = other DNA
tttaacattgtggatgggggctgagtatgcagggatttcagtcgaaatattacggattatgcttatagggtatat

SEQ ID NO: 771979 - DNA, 75 bp, synthetic construct
  source 1..75: mol_type = other DNA
tatccggtagcgaaatccgctttcacggtaaaacgctgctggcgctggtggaaaaagcgcaggcattgccggaag

SEQ ID NO: 771980 - DNA, 75 bp, synthetic construct
  source 1..75: mol_type = other DNA
acagtcaggcaagggaaggggcgcaaataccgtgaaattcacgtggcggatgcagtggataaagctatccgcgta

SEQ ID NO: 771981 - DNA, 75 bp, synthetic construct
  source 1..75: mol_type = other DNA
tgggaacaacttaactacgccgccgtcgctaaagtacgtgcggcactgctggatgacggttacgccgtgtcgtcg

SEQ ID NO: 771982 - DNA, 75 bp, synthetic construct
  source 1..75: mol_type = other DNA
aaggaaaatcgaaatgcaacatgaagagtttcagaaaatgacagagcgcgagcaagtacctttattggaatcgcc

SEQ ID NO: 771983 - DNA, 75 bp, synthetic construct
  source 1..75: mol_type = other DNA
attgatcctctcgggatcaccgactggtcaccgctgaaagcgatcctgcgcgatccgtccatcacaaaatttctc

SEQ ID NO: 771984 - DNA, 75 bp, synthetic construct
  source 1..75: mol_type = other DNA
agtctcttaaagttaaactccgaatcacgtcatgatatttacgaagcactggttgaaattaatcgatttgaacct

SEQ ID NO: 771985 - DNA, 75 bp, synthetic construct
  source 1..75: mol_type = other DNA
actggcaggccacagcgacatatccacgacgacgcgctatgactatcgtgatgatgacatgaaagccaaagcatc

SEQ ID NO: 771986 - DNA, 75 bp, synthetic construct
  source 1..75: mol_type = other DNA
atggggccgcaatggcgttcgcgtctcgatcgtgaagccagcctgctgggtcatagtggttgccgtattggtggt

SEQ ID NO: 771987 - DNA, 75 bp, synthetic construct
  source 1..75: mol_type = other DNA
cattggcgtgatgatgagccatgtcagctatgccggtcatctggcgcaggccggtgtggatatcacgctgattta

SEQ ID NO: 771988 - DNA, 75 bp, synthetic construct
  source 1..75: mol_type = other DNA
agatgggggcagcaagtctttcggtaccacaacagcaggtacagcttgatgctcccggaatgctggctgaaacgg

SEQ ID NO: 771989 - DNA, 75 bp, synthetic construct
  source 1..75: mol_type = other DNA
ccggcagcggtgcagggcgtcgtgtcacagacgtcggcagacggtgatgcggacgtgaaaatgctcatggccatg

SEQ ID NO: 771990 - DNA, 75 bp, synthetic construct
  source 1..75: mol_type = other DNA
ttggagtcattacccgcgaagcccatcagcggcgacaccggcctgcgggatatccagcgcctggcggaggagaac

SEQ ID NO: 771991 - DNA, 75 bp, synthetic construct
  source 1..75: mol_type = other DNA
cctatgaactacaacggcatgaagctggtgcgcgagaatgcgaagcccatcagcggcgacaccggcctgcgggat

SEQ ID NO: 771992 - DNA, 75 bp, synthetic construct
  source 1..75: mol_type = other DNA
gcgggatcaggtaaggcagagccggtctctgcatccacaaccgccctgtttgaacgcatcatggcgaaccattca

SEQ ID NO: 771993 - DNA, 75 bp, synthetic construct
  source 1..75: mol_type = other DNA
tcaaatacggtgccgatatgggtatcgcttttgatggcgacttcgaccgctgcttcctgttcgacgagaaagggc

SEQ ID NO: 771994 - DNA, 75 bp, synthetic construct
  source 1..75: mol_type = other DNA
cctcacgccgctcaagctggtgattaactccgggaatggcgcagcggatccggtggtggacgttatcgaagcccg

SEQ ID NO: 771995 - DNA, 75 bp, synthetic construct
  source 1..75: mol_type = other DNA
cggtggtggacgctatcgaagcccgctttaacgccctcggcgctccggtggaattaatcaaagtgcacaacacgc

SEQ ID NO: 771996 - DNA, 75 bp, synthetic construct
  source 1..75: mol_type = other DNA
gatcatggccctggatgaggcaaaaggggctgaggcgcaggctgaacagctggctgcctgcccgggaatgactgt

SEQ ID NO: 771997 - DNA, 75 bp, synthetic construct
  source 1..75: mol_type = other DNA
gatcatggccctggatgaggcaaaaggggctgaggcgcaggctgaaaaactggcggcctgcccgggaatgaccgt

SEQ ID NO: 771998 - DNA, 75 bp, synthetic construct
  source 1..75: mol_type = other DNA
caaggtggatggcaatcagtttgaagcgttgccggcagaggttcgccaggacatgcagcagcggattgatgcggc

SEQ ID NO: 771999 - DNA, 75 bp, synthetic construct
  source 1..75: mol_type = other DNA
ccgatggattataacggcatgaagctggtgcgcgaaggggctcgcccgatcagcggtgataccggactgcgcgac

SEQ ID NO: 772000 - DNA, 75 bp, synthetic construct
  source 1..75: mol_type = other DNA
cagcggtgataccggactgcgcgacgtccagcgtctggcagaagccaacgactttcctcccgtcgatgaaaccaa

SEQ ID NO: 772001 - DNA, 75 bp, synthetic construct
  source 1..75: mol_type = other DNA
atgcacaataagatcatcctagataaattaacttgctttaaagcctacgatattcgcggaaaactaggcgaggaa

SEQ ID NO: 772002 - DNA, 75 bp, synthetic construct
  source 1..75: mol_type = other DNA
aactccgggaacggcgcagcgggtccggtggtggacgttatcgaagcccgctttaaagccctcggcgcaccggtg

SEQ ID NO: 772003 - DNA, 75 bp, synthetic construct
  source 1..75: mol_type = other DNA
gaagaagtgtggtttgtgaaatcaccaaaatcgttcctcggtgccagcggcttaaaaccgcagcaggtagcgctg

SEQ ID NO: 772004 - DNA, 75 bp, synthetic construct
  source 1..75: mol_type = other DNA
ccggtcgtacgcctgaatgtggaatcgcgcggtgatgtgccgctgatggaagaaaaaacacaattaattcttgat

SEQ ID NO: 772005 - DNA, 75 bp, synthetic construct
  source 1..75: mol_type = other DNA
taacctgcgctcttccaacaccgaaccggtcgtacgcctgaatgtggaatcgcgcggtgatgtgccgctgatgga

SEQ ID NO: 772006 - DNA, 75 bp, synthetic construct
  source 1..75: mol_type = other DNA
aaccgccctgtttgaacgcatcatggcgaaccattcaccggcagcggtacagggtggcgtgccacagacgtcagc

SEQ ID NO: 772007 - DNA, 75 bp, synthetic construct
  source 1..75: mol_type = other DNA
gcatttaccgtcatgtcatgtgacaacatgccagaaaacggtcatgttatgcgtgacgttgtcacttcctatgcg

SEQ ID NO: 772008 - DNA, 75 bp, synthetic construct
  source 1..75: mol_type = other DNA
acgttaagaacgcatataataccaacacatacgaccctttccatattaacgaaaaggacaaacaactaagaaatc

SEQ ID NO: 772009 - DNA, 75 bp, synthetic construct
  source 1..75: mol_type = other DNA
gttacccagacatcccgtatcggctccattggcgtgatgatgggccatgtcagctatgccggtcatctggcgcag

SEQ ID NO: 772010 - DNA, 75 bp, synthetic construct
  source 1..75: mol_type = other DNA
ggggctgaggtgcaggctgaaaaactggctgcctgcccgggaatgaccgtggagaacgcccgggatgtgctggct

SEQ ID NO: 772011 - DNA, 75 bp, synthetic construct
  source 1..75: mol_type = other DNA
tggcggcctgcccgggaatgaccgtggagagcgcccgggctgtgctggctgcgggatcaggtaaggcagaaccgg

SEQ ID NO: 772012 - DNA, 75 bp, synthetic construct
  source 1..75: mol_type = other DNA
aaattatcctgatgcgcgttttgctttgatcactccggcacatcaaagcccgctgggtgttgcgctctctttggc

SEQ ID NO: 772013 - DNA, 75 bp, synthetic construct
  source 1..75: mol_type = other DNA
ttacctgtgcctgttgatgacaacggactggatgtcgcaagcggaatgcaaaattatcctgatgcacgttttgct

SEQ ID NO: 772014 - DNA, 75 bp, synthetic construct
  source 1..75: mol_type = other DNA
gactggatatcacaagcggaatacaaaattatcctgatgcgcgttttgccctgataacaccagcacaccaaagtc

SEQ ID NO: 772015 - DNA, 75 bp, synthetic construct
  source 1..75: mol_type = other DNA
gtgaaagccagcaaccgctaccattccagatgggattacccgcactcgatctctttccgcgtgagctgtgggcgc

SEQ ID NO: 772016 - DNA, 75 bp, synthetic construct
  source 1..75: mol_type = other DNA
gggattgttgctctcatttaccaatatcatcaatgagaatatggcgcagcaggttgtacagcaattgtactacgc

SEQ ID NO: 772017 - DNA, 75 bp, synthetic construct
  source 1..75: mol_type = other DNA
ctaccttcgagccgtacctggtcgcaggagctgggtgtctctcgatccactgtcgaaaatgcttatgctgagctg

SEQ ID NO: 772018 - DNA, 75 bp, synthetic construct
  source 1..75: mol_type = other DNA
ctgaatatgcttcgcctggctcgcgctgtgatccctgctgctgttctgatgatgttcttcccgcaactggcaatg

SEQ ID NO: 772019 - DNA, 75 bp, synthetic construct
  source 1..75: mol_type = other DNA
tcccggttgctgttctgatgatgttgttccctgagttagctatggctgctggtaaaggcgacctgatggctaaag

SEQ ID NO: 772020 - DNA, 75 bp, synthetic construct
  source 1..75: mol_type = other DNA
gatgttcttcccgcaactggcaatggcagcacagggccaggacctgatggcaagcggtaacaccacggttaaggc

SEQ ID NO: 772021 - DNA, 75 bp, synthetic construct
  source 1..75: mol_type = other DNA
tgtcgaaaatgcgtatgctgagctggtggcgcaaggatggctgatcaggcggggacaggctggcacatttgtcag

SEQ ID NO: 772022 - DNA, 75 bp, synthetic construct
  source 1..75: mol_type = other DNA
ctctttccgcgtgagctgtgggcgcgggtgatggggcgccgtctgcgtacccagacgcgctttgatttggcgtta

SEQ ID NO: 772023 - DNA, 75 bp, synthetic construct
  source 1..75: mol_type = other DNA
gtgcttctgcgcctgtcaaaaagaagtcgtttttttctaaatttactcgtctgaatacgcttcgcctggttcgtg

SEQ ID NO: 772024 - DNA, 75 bp, synthetic construct
  source 1..75: mol_type = other DNA
ttattatggaccagttttattttgttaagcactttttttctgcttttataggtcagtcgataattccagatgtta

SEQ ID NO: 772025 - DNA, 75 bp, synthetic construct
  source 1..75: mol_type = other DNA
tgtgcttaacctgggcactattgatgaacctggtcatgcagataacaccgccactctcaaactgaaaaagacagc

SEQ ID NO: 772026 - DNA, 75 bp, synthetic construct
  source 1..75: mol_type = other DNA
ctattcaggcaacaaaagcggctgcggcagtccgtaaaatcacgattgaagcaaaccagaccgctgattttgaag

SEQ ID NO: 772027 - DNA, 75 bp, synthetic construct
  source 1..75: mol_type = other DNA
tgtattcatttgtcccggtcattacagcaggcagtacagcgtcgtctgccggaggcgatactggctccttatcgg

SEQ ID NO: 772028 - DNA, 75 bp, synthetic construct
  source 1..75: mol_type = other DNA
atggctaacgaatttcgtgatctgcttgttgagaaattcaaagacagcaaagtagaaacctttattggtactttc

SEQ ID NO: 772029 - DNA, 75 bp, synthetic construct
  source 1..75: mol_type = other DNA
aatatgagcctctctctgaccgcttatcgcagtgaatatgacaatgaatccgacgatggtgtctatgtttcactg

SEQ ID NO: 772030 - DNA, 75 bp, synthetic construct
  source 1..75: mol_type = other DNA
tcgctgaatggctggaagactgggccgacttcctcacagcctgtgacagcgacggtaatgtgctggatatcaaac

SEQ ID NO: 772031 - DNA, 75 bp, synthetic construct
  source 1..75: mol_type = other DNA
ctgactcatttggcccgattgcatatgtacaacctcagacgtttggcgctgctgctggcgcagcaaatgcagttc

SEQ ID NO: 772032 - DNA, 75 bp, synthetic construct
  source 1..75: mol_type = other DNA
gcgcgcccgggcagaagggcgtcacagtatgggaccgggaaaatttatcgccggtatcgtcatctgcggcatgct

SEQ ID NO: 772033 - DNA, 75 bp, synthetic construct
  source 1..75: mol_type = other DNA
tccatctggcgcaaatcactgctggacgggcacaccgccctgagcgccagtgaatccatcagtaaagggaacgtc

SEQ ID NO: 772034 - DNA, 75 bp, synthetic construct
  source 1..75: mol_type = other DNA
tcatcccgccggggagtctgactgcccggtcgcacgaagagcatactaccggcgttaccggattgttcagcgcct

SEQ ID NO: 772035 - DNA, 75 bp, synthetic construct
  source 1..75: mol_type = other DNA
aatggcgagcgtaactcccagaagtcactggcagaatggattgaagactgggccgactatcttgtgggctttgat

SEQ ID NO: 772036 - DNA, 75 bp, synthetic construct
  source 1..75: mol_type = other DNA
gcggtaccagtgtatgacaatcgggcgatcattaagcgtcactggatgtcgttgacggcaggcgtactgacggca

SEQ ID NO: 772037 - DNA, 75 bp, synthetic construct
  source 1..75: mol_type = other DNA
gaacgtcaaaatcgccgagctatcgatgaatgtcgcggatctcacgcagataaaagccggggatattttacccat

SEQ ID NO: 772038 - DNA, 75 bp, synthetic construct
  source 1..75: mol_type = other DNA
atgattcagtatctgaacgtctttttttacgatatctacccgtacttgtgtggcacggtttttatccttggaagc

SEQ ID NO: 772039 - DNA, 75 bp, synthetic construct
  source 1..75: mol_type = other DNA
tgctgtggcgcaggctgacaaatcagcgcgtgcgtgccacttccactacgccggatattatcatcatgatcattt

SEQ ID NO: 772040 - DNA, 75 bp, synthetic construct
  source 1..75: mol_type = other DNA
attgaacaggggcgaactatatcccgtgatgaggctgttaaagatgcacaacagaaagccgctgaaatttctgcc

SEQ ID NO: 772041 - DNA, 75 bp, synthetic construct
  source 1..75: mol_type = other DNA
agtaataaaaccataaatattacggggcgtgttaatccctcggattacggtaactttgattcccgctatgtccgg

SEQ ID NO: 772042 - DNA, 75 bp, synthetic construct
  source 1..75: mol_type = other DNA
tcatggagcgaatggcgggaagtttacacatcttattcacttcccctgaatctgggtatcggtggcgcagtagca

SEQ ID NO: 772043 - DNA, 75 bp, synthetic construct
  source 1..75: mol_type = other DNA
ccgttgcgaatgataaagccgttggatggaactggagtagcggagcctataacgcaactattggtggggcatcaa

SEQ ID NO: 772044 - DNA, 75 bp, synthetic construct
  source 1..75: mol_type = other DNA
gtgcgcgctgggcttgctgaccattccgttctcagcccagcatatggacggtagcgagatgatgaaactggttgg

SEQ ID NO: 772045 - DNA, 75 bp, synthetic construct
  source 1..75: mol_type = other DNA
agtaagaagctggatggtacgctggtgctggataaaattacgtggctgggggagacactacaagctacagaattg

SEQ ID NO: 772046 - DNA, 75 bp, synthetic construct
  source 1..75: mol_type = other DNA
agtaagaagctggatggctcgctagtgctggataaaattacgtggcttggggaaacactgcaagctacagaactg

SEQ ID NO: 772047 - DNA, 75 bp, synthetic construct
  source 1..75: mol_type = other DNA
aacgaagaattttggctgaaaatcgatttagctttaaatttgagcatgacatggagggtggagaatgtgctgata

SEQ ID NO: 772048 - DNA, 75 bp, synthetic construct
  source 1..75: mol_type = other DNA
aggctctcagctcatatttacaactcataacattgagctgatgaaatcagaaaatatgagaagagatcagatttg

SEQ ID NO: 772049 - DNA, 75 bp, synthetic construct
  source 1..75: mol_type = other DNA
tggatgtacgcgtggtttttgccagtggcagcgaaacaactaatggcgatggtgctcggcggtatttgcggcgtg

SEQ ID NO: 772050 - DNA, 75 bp, synthetic construct
  source 1..75: mol_type = other DNA
gccggtgccggatgccggtcagacgaaactggtgcatgaggtctggcgtcatgccctgaataaagtcagcgtgga

SEQ ID NO: 772051 - DNA, 75 bp, synthetic construct
  source 1..75: mol_type = other DNA
ccggtcgcacgaagagcatactaccggcgttaccggattgttcagcgcctgggatttatttcactgctgaagctg

SEQ ID NO: 772052 - DNA, 75 bp, synthetic construct
  source 1..75: mol_type = other DNA
atgaccgaatcaacaacctcctccccgcatgatgcggtatttaaaacctttatgttctcgcccgatacggcgcga

SEQ ID NO: 772053 - DNA, 75 bp, synthetic construct
  source 1..75: mol_type = other DNA
cttgaactgattcaaaagcatattcgcgaccgcgatttaatcggtatggtcgacaggatcaccacgcttttggtt

SEQ ID NO: 772054 - DNA, 75 bp, synthetic construct
  source 1..75: mol_type = other DNA
atcactgggagaaacgttcccggtggcgattgggcaatctgaattatttagcgccctgattgtggaagacaaaga

SEQ ID NO: 772055 - DNA, 75 bp, synthetic construct
  source 1..75: mol_type = other DNA
gatgaccaaaaacgtcaagttcctggtcggctttgccatactctctgtatttattgcagtaggtatgtctgttgc

SEQ ID NO: 772056 - DNA, 75 bp, synthetic construct
  source 1..75: mol_type = other DNA
cgtttcagaccgcactgatctccgcgctattgctgtctggtttactttgcgatcgctttggtatcggtgtcgacg

SEQ ID NO: 772057 - DNA, 75 bp, synthetic construct
  source 1..75: mol_type = other DNA
tgataaacatcgcagttggtccgagtgatgattccggtacggggcgctcaatgcatgtatggcgcagcactgtaa

SEQ ID NO: 772058 - DNA, 75 bp, synthetic construct
  source 1..75: mol_type = other DNA
cacctgcaggctatgcaatcatgcaggggcagacgtttgataaggcagcatatccgaaactggctatagcctatc

SEQ ID NO: 772059 - DNA, 75 bp, synthetic construct
  source 1..75: mol_type = other DNA
atttcaacgaactcgtgccagcggtgaagctgactgggggggaatgggcggaagtttacaactcaaaatcattac

SEQ ID NO: 772060 - DNA, 75 bp, synthetic construct
  source 1..75: mol_type = other DNA
caagtggtaacaccacggttaaggcgaccttcggtaaggactccagtgttgttaaatgggttgttctggctgaag

SEQ ID NO: 772061 - DNA, 75 bp, synthetic construct
  source 1..75: mol_type = other DNA
aaattgaatggggagaactaagacgctcaggctatcattttgggatagataagctccatcatttctatacaaagc

SEQ ID NO: 772062 - DNA, 75 bp, synthetic construct
  source 1..75: mol_type = other DNA
ttgaaacccgatccacagcgtctctattcacaatttgtgggaagatgtctcgagctgggcagcaacgttactatg

SEQ ID NO: 772063 - DNA, 75 bp, synthetic construct
  source 1..75: mol_type = other DNA
tgggggcgacacattgtttggaaaatccaggaaaaatacctttagaaataattgaggttcgctcaggttcttatc

SEQ ID NO: 772064 - DNA, 75 bp, synthetic construct
  source 1..75: mol_type = other DNA
agagctgcactcacacagctgaaggcaacgtttgccgcggtgacgttattaattataaatccgaaaacagttatg

SEQ ID NO: 772065 - DNA, 75 bp, synthetic construct
  source 1..75: mol_type = other DNA
tttgaagtggcgcagtttgtcgaaaaaccaaatctggaaaccgcgcaggcctatgtggcaagcggcgaatattac

SEQ ID NO: 772066 - DNA, 75 bp, synthetic construct
  source 1..75: mol_type = other DNA
gagcgcgatctggcggtgaactttgtcgtgcgtgaagagcatttgtggtcggtagcgcgttatatgccgggaagt

SEQ ID NO: 772067 - DNA, 75 bp, synthetic construct
  source 1..75: mol_type = other DNA
ttttgatggtgagcatctggcgctaattgatcctctcgggatcaccgactggtcaccgctgaaagcgatcctgcg

SEQ ID NO: 772068 - DNA, 75 bp, synthetic construct
  source 1..75: mol_type = other DNA
gaagagtcggtggattacgcggtcatggaacgcacggcagatgccgttgtggtgccgatggatgcgggctggagc

SEQ ID NO: 772069 - DNA, 75 bp, synthetic construct
  source 1..75: mol_type = other DNA
aacgggatcgtggttgatgcgcatcagcatactggcgtcctgaaaggcggcgacacaaccggaggaccggtatga

SEQ ID NO: 772070 - DNA, 75 bp, synthetic construct
  source 1..75: mol_type = other DNA
gacgtcggcggacgcctgcgtgacagaacatcctgatggtggctggtttgaatatgaacccgccaccgggcgctg

SEQ ID NO: 772071 - DNA, 75 bp, synthetic construct
  source 1..75: mol_type = other DNA
gctgagtctgggaggcaatctggaaaccgcctttgcgttgcccgctgtctattcgaatcagttcgcgccaccttc

SEQ ID NO: 772072 - DNA, 75 bp, synthetic construct
  source 1..75: mol_type = other DNA
ggcgggtgagcaggatacggtggcctttgaagtggcgcagtttgtcgaaaaaccgaatctggaaaccgctcaggc

SEQ ID NO: 772073 - DNA, 75 bp, synthetic construct
  source 1..75: mol_type = other DNA
taatttactcaaaacatctgttggataatgaattcgttggctgcatggatacatttctgtggatggcaaaaagag

SEQ ID NO: 772074 - DNA, 75 bp, synthetic construct
  source 1..75: mol_type = other DNA
accgcctttgcgttacccgccatctattcgaatcagttcgcgccaccatcgacgtcggcggaagcctgcgtgaca

SEQ ID NO: 772075 - DNA, 75 bp, synthetic construct
  source 1..75: mol_type = other DNA
atctcgattggattggcgaatacggcttccggttgggccagatgtcaatggttatgcttcatccagctcattact

SEQ ID NO: 772076 - DNA, 75 bp, synthetic construct
  source 1..75: mol_type = other DNA
atcaggccgcggctaaaatggcgcgggcaggaatcctggtcattgatggtaaggtctggcgaacggtatgttatt

SEQ ID NO: 772077 - DNA, 75 bp, synthetic construct
  source 1..75: mol_type = other DNA
gttaatcgacaaagaccatgaaccgcgtgcggtgcaggctattgaagagtgttggtgccttgcgctccctatgaa

SEQ ID NO: 772078 - DNA, 75 bp, synthetic construct
  source 1..75: mol_type = other DNA
attacctggggacgcataagagcttctgtgcgcaggacgttgctgcggtaacaggcgcaacagtaaccagcataa

SEQ ID NO: 772079 - DNA, 75 bp, synthetic construct
  source 1..75: mol_type = other DNA
ggctgtgctggctgcgggatcaggtaaggcagaaccggtctctgcatccacaaccgccatgtttgaacatttcat

SEQ ID NO: 772080 - DNA, 75 bp, synthetic construct
  source 1..75: mol_type = other DNA
ctttcagtttacgcttacgcaggtacagcttgatgctcccggaatgctggctgaaacggacgagtacatggccgg

SEQ ID NO: 772081 - DNA, 75 bp, synthetic construct
  source 1..75: mol_type = other DNA
tttaaggagtgtcgccagagtgccgcgatgaaacgggtattggcggtatctaacagtaaaagccgccggggtatg

SEQ ID NO: 772082 - DNA, 75 bp, synthetic construct
  source 1..75: mol_type = other DNA
acaggtgtgacagtaaccagcataaatcaggctgcggctaaaatggcgcgggcaggaatcttagtcattgatggt

SEQ ID NO: 772083 - DNA, 75 bp, synthetic construct
  source 1..75: mol_type = other DNA
aggaaaggtgagcacgaatctgattttcaaggagtgtcgccagagtgccgcgatgaaacgagtgttggcagtgta

SEQ ID NO: 772084 - DNA, 75 bp, synthetic construct
  source 1..75: mol_type = other DNA
ggccattgtgtttaaggatgataatgcggttagttttcatgaggatgttcaggagggggtcgcagagtatataac

SEQ ID NO: 772085 - DNA, 75 bp, synthetic construct
  source 1..75: mol_type = other DNA
attacctgaaaacgcaccggactttctgcgcgccggatgtagctgcggcaacaggcgcaacagtaaccagcataa

SEQ ID NO: 772086 - DNA, 75 bp, synthetic construct
  source 1..75: mol_type = other DNA
agtcatatcgcacgccaacgggtcgacattatgtctttaaggatttaaatattgaaatcccttcaggaaaaagtg

SEQ ID NO: 772087 - DNA, 75 bp, synthetic construct
  source 1..75: mol_type = other DNA
aggaaaggtgagcgcgaatttgatttttaaggagtgtcgccagagtgccgcgatgaaacgggtattgaggggctt

SEQ ID NO: 772088 - DNA, 75 bp, synthetic construct
  source 1..75: mol_type = other DNA
ggtaatgcccgcacatggtggaaaccatcggaaggtgagcaggtggtgctactgagtctgggcggcaatctggaa

SEQ ID NO: 772089 - DNA, 75 bp, synthetic construct
  source 1..75: mol_type = other DNA
gtccgctgacaatatcaccttgaaaaccagtgagtttgtactggaggctgaccgcacgcgcattaacagcgaagt

SEQ ID NO: 772090 - DNA, 75 bp, synthetic construct
  source 1..75: mol_type = other DNA
ggggcatcaaatcaatggtcattgagaccgctgacaagatcaccgtgaaaaccagtgagtttgtactggaggctg

SEQ ID NO: 772091 - DNA, 75 bp, synthetic construct
  source 1..75: mol_type = other DNA
ggggcatcaaatcaatggtcattgagaccgctgacaagatcaccttgaaaaccagtgagtttgttctggaggctg

SEQ ID NO: 772092 - DNA, 75 bp, synthetic construct
  source 1..75: mol_type = other DNA
gaatacctatcacgaatgccgcatcagcgatgaatggggcggcgtggaaattattaaacgccctgagtgggcacg

SEQ ID NO: 772093 - DNA, 75 bp, synthetic construct
  source 1..75: mol_type = other DNA
ggccgctgacaatatcaccatgaaaaccagtgagtttgtactggaggctgaccgcacgcgaattaacagcgaagt

SEQ ID NO: 772094 - DNA, 75 bp, synthetic construct
  source 1..75: mol_type = other DNA
gcccgctgacaatatcaccgtgaaaaccagtgagtttgtactggaggctgaccgcacgcggattaacagcgaagt

SEQ ID NO: 772095 - DNA, 75 bp, synthetic construct
  source 1..75: mol_type = other DNA
ggggcatcaaatcaatggtcattgagaccgctgacaatatcaccttgaaaaccagtgagtttgtactggaggctg

SEQ ID NO: 772096 - DNA, 75 bp, synthetic construct
  source 1..75: mol_type = other DNA
ggggcatcaaatcaatggtcattgagaccgctgacaatatcaccatgaaaaccagtgagtttgttctggaggctg

SEQ ID NO: 772097 - DNA, 75 bp, synthetic construct
  source 1..75: mol_type = other DNA
ggggcatcaaatcaatggtcattgagaccgctgacaaaatcaccatgaaaaccagtgagtttgtactggaggctg

SEQ ID NO: 772098 - DNA, 75 bp, synthetic construct
  source 1..75: mol_type = other DNA
ggggcatcaaatcaatggtcattgagaccgctgacaagatcaccatgaaaaccagtgagtttgtgctggaggctg

SEQ ID NO: 772099 - DNA, 75 bp, synthetic construct
  source 1..75: mol_type = other DNA
ggggcatcaaatcaatggtcattgagaccgctgacaacatcaccctgaaaaccagtgagtttgtactggaggctg

SEQ ID NO: 772100 - DNA, 75 bp, synthetic construct
  source 1..75: mol_type = other DNA
ggggcatcaaatcaatggtcattgagaccgctgacaacatcaccatgaaaaccagtgagtttgtcctggaggctg

SEQ ID NO: 772101 - DNA, 75 bp, synthetic construct
  source 1..75: mol_type = other DNA
tgacggcgtgagtaagtcacaactggatatggtggccaagaaccctgcccttctgaaatgggtcaaggcagcgcc

SEQ ID NO: 772102 - DNA, 75 bp, synthetic construct
  source 1..75: mol_type = other DNA
aacaaaccagagtattgctgaccatcaaaaacgggaaagtaatattcattcgccatgttcatgacgatgaacttg

SEQ ID NO: 772103 - DNA, 75 bp, synthetic construct
  source 1..75: mol_type = other DNA
gacgaggtattgatgcaggacgagagatactttcatttcaggaaggcactatcgtctccggttttgatgataatg

SEQ ID NO: 772104 - DNA, 75 bp, synthetic construct
  source 1..75: mol_type = other DNA
aggcactatcgtctccggttttgatgataatgatactggggatatcagttcactcagctcaacacaatacggatt

SEQ ID NO: 772105 - DNA, 75 bp, synthetic construct
  source 1..75: mol_type = other DNA
ttacccagggcggcggtgcaatgagttctaacggaattgtggttgatgcacatcagcatactggcgtcctgaaag

SEQ ID NO: 772106 - DNA, 75 bp, synthetic construct
  source 1..75: mol_type = other DNA
aaacgggcgacctcgaaaccaactggatcagctggctgacactgcgtgccgggaatgcccggacatggtggcgac

SEQ ID NO: 772107 - DNA, 75 bp, synthetic construct
  source 1..75: mol_type = other DNA
gcggagcgatgagttctaacgggatcgtggttgatgcgcatcagcatactggcgtcctgaaaggcggcgacacaa

SEQ ID NO: 772108 - DNA, 75 bp, synthetic construct
  source 1..75: mol_type = other DNA
aaaggttgcagatatggatcgttttgcacgccacatcgaggaattccgctaccacgtgcaggacgcaatgtaccg

SEQ ID NO: 772109 - DNA, 75 bp, synthetic construct
  source 1..75: mol_type = other DNA
ggaaactggagctgatgcgtgatagcgcaatggctcacccggcggcacgctggatgctggaagcacctggttact

SEQ ID NO: 772110 - DNA, 75 bp, synthetic construct
  source 1..75: mol_type = other DNA
cagccacacggattcttcttcctggctgtgagcgaaaccatcgactgcggtcgataccctgtccgcgtgttcgag

SEQ ID NO: 772111 - DNA, 75 bp, synthetic construct
  source 1..75: mol_type = other DNA
ccgttggtgtacctgttccatggccctcagccacaccaccaacggggtggctgaaatgcaatggtgcagcatttt

SEQ ID NO: 772112 - DNA, 75 bp, synthetic construct
  source 1..75: mol_type = other DNA
aaattcgatcgtcggacaaaacaaggtaaagctgacgaagaggcatttcttcgtgatgtggcggatatggggatt

SEQ ID NO: 772113 - DNA, 75 bp, synthetic construct
  source 1..75: mol_type = other DNA
tcgatatccggtacgcgtgttcgagctggatgcgccggatgtcgatgccgggcacgctctgttccgccgggatct

SEQ ID NO: 772114 - DNA, 75 bp, synthetic construct
  source 1..75: mol_type = other DNA
atagattaaaagtggtcatttaccctatggctgaccgctcactggtgacctattttccagaatcgaatcacatgc

SEQ ID NO: 772115 - DNA, 75 bp, synthetic construct
  source 1..75: mol_type = other DNA
atgagtgctaaacaagctaaaatttgccgtgtaaaaaacggcgaaagagttaatcttattgcgcttacgccagac

SEQ ID NO: 772116 - DNA, 75 bp, synthetic construct
  source 1..75: mol_type = other DNA
ccgtgaatacggtaccaataactttcccgactgctcaaacatgtgccatgaaccgaccagcgtaggtttggcagc

SEQ ID NO: 772117 - DNA, 75 bp, synthetic construct
  source 1..75: mol_type = other DNA
gctggtgatcaactccgggaacggcgcagcgggtccggtggtggacgccatcgaagcccgctttaaagccctcgg

SEQ ID NO: 772118 - DNA, 75 bp, synthetic construct
  source 1..75: mol_type = other DNA
gctcgcctgggtgagcgctatggcttcacaccacctcaagcacctggacatgctgcaattgccagcatgcaagca

SEQ ID NO: 772119 - DNA, 75 bp, synthetic construct
  source 1..75: mol_type = other DNA
tatggctgaccgctcactggtgacctattttccagaatcgaatcacatgctaactcttgataaccacgatccatt

SEQ ID NO: 772120 - DNA, 75 bp, synthetic construct
  source 1..75: mol_type = other DNA
acgatccgcgtctaatttggaacaccgttgatgtggtgagtgccgcaggtggcaccccggtaatgtcgaaaaccg

SEQ ID NO: 772121 - DNA, 75 bp, synthetic construct
  source 1..75: mol_type = other DNA
atgggctacgtggacctggcgaacttcacccgtccgctgaagctggtggtgaactccggcaacggggcggcgggg

SEQ ID NO: 772122 - DNA, 75 bp, synthetic construct
  source 1..75: mol_type = other DNA
ggcgaagaactgaatgaagatatcgcctggcgcattgggcgtgcctatggcgaatttctcaaaccgaaaaccatt

SEQ ID NO: 772123 - DNA, 75 bp, synthetic construct
  source 1..75: mol_type = other DNA
gcgctttaacctgcgctcctccaacaccgaacctgttgtgcgtttgaacgttgaatcaagaggtgatcagctcgt

SEQ ID NO: 772124 - DNA, 75 bp, synthetic construct
  source 1..75: mol_type = other DNA
cagcggaatgatcccctggttgctggtagcagaattgctgtgtctgaaaggactgtcactgggagaactgatcca

SEQ ID NO: 772125 - DNA, 75 bp, synthetic construct
  source 1..75: mol_type = other DNA
tcctaatcctctgctgccggagtgccgggctgatacgcgcaatgcggtgattgaacacggcgcggatatgggagt

SEQ ID NO: 772126 - DNA, 75 bp, synthetic construct
  source 1..75: mol_type = other DNA
gtgcataacacgccggacggcaatttccccaacggtattcctaacccgttgctgccggaatgtcgcgacgacacc

SEQ ID NO: 772127 - DNA, 75 bp, synthetic construct
  source 1..75: mol_type = other DNA
cagcggcgataccggactgcgcgaggtccagcgtctggcagaagcaaacgactttccccccgtcgatgaaaccaa

SEQ ID NO: 772128 - DNA, 75 bp, synthetic construct
  source 1..75: mol_type = other DNA
cagcggtgataccggactgcgcgacgtccagcgtctggcagaagctaacgactttccccccgtcgatgaaaccaa

SEQ ID NO: 772129 - DNA, 75 bp, synthetic construct
  source 1..75: mol_type = other DNA
cagcggagataccggactgcgcgaggtccagcgtctggcagaagccaacgactttccccccgtcgatgaaaccaa

SEQ ID NO: 772130 - DNA, 75 bp, synthetic construct
  source 1..75: mol_type = other DNA
tgccagagtgccgccaggataccacggatgcagtgattgccaatcaggcagatctgggtattgcatttgacggcg

SEQ ID NO: 772131 - DNA, 75 bp, synthetic construct
  source 1..75: mol_type = other DNA
taagatttatgtcacaactgacctgctttaaagcctatgatattcgtggaaaattaggcgaagaattaaatgaag

SEQ ID NO: 772132 - DNA, 75 bp, synthetic construct
  source 1..75: mol_type = other DNA
cagcggggataccggactgcgcgaagtccagcgtctggcagaagcgaacgactttccccccgtcgatgaaaccaa

SEQ ID NO: 772133 - DNA, 75 bp, synthetic construct
  source 1..75: mol_type = other DNA
ggcaccgaagagatttatttcgccacgttccatctcggcgtggatggcggcatagaagttacggccagccataag

SEQ ID NO: 772134 - DNA, 75 bp, synthetic construct
  source 1..75: mol_type = other DNA
tgaagaactgaatgaagatatcgcctggcgcattggtcgcgcctatggcgaatttctcaaaccgaaaaccattgt

SEQ ID NO: 772135 - DNA, 75 bp, synthetic construct
  source 1..75: mol_type = other DNA
gtgcgcctgaatgtggaatcacgcggtgatgtgccgctgatggaagcgcgaacgcgaactctgctgacgttgctg

SEQ ID NO: 772136 - DNA, 75 bp, synthetic construct
  source 1..75: mol_type = other DNA
ggcaccgaagagatttatttcgccacgttccatctcggcgtggatggcggcatggaagttacggccagccataaa

SEQ ID NO: 772137 - DNA, 75 bp, synthetic construct
  source 1..75: mol_type = other DNA
ggcaccgaagagatttatttcgccacgttccatctcggcgtggatggcggcatggaagttactgccagccataat

SEQ ID NO: 772138 - DNA, 75 bp, synthetic construct
  source 1..75: mol_type = other DNA
ggcaccgaagagatttatttcgccacgttccatctcggcgtggatggcggcatggaagttacagccagccataag

SEQ ID NO: 772139 - DNA, 75 bp, synthetic construct
  source 1..75: mol_type = other DNA
ttacaggatgcgggcgtcgatgtgctggatattggcatgtccggcaccgaagaaatctatttcgccacgttccat

SEQ ID NO: 772140 - DNA, 75 bp, synthetic construct
  source 1..75: mol_type = other DNA
tgtattcatttgtcccggtcattacagcaggcagtacagcgttgtctgccggaggaaatacttgcctcttatagg

SEQ ID NO: 772141 - DNA, 75 bp, synthetic construct
  source 1..75: mol_type = other DNA
tgaacgcatcatggcgaaccattcaccggcagccgtgcagggtggcgtgtcacagacgtcggcagacggtgatgc

SEQ ID NO: 772142 - DNA, 75 bp, synthetic construct
  source 1..75: mol_type = other DNA
agtgtgatggccacggcgctgaacagtaatgtcagaggaggcactatgccgcaattaactgcaacggaagccgcc

SEQ ID NO: 772143 - DNA, 75 bp, synthetic construct
  source 1..75: mol_type = other DNA
gcgagtgatggggatcctgacatgccaggaagcgaaaggacgtgaacagcttgccacgatgctggcaggacaaca

SEQ ID NO: 772144 - DNA, 75 bp, synthetic construct
  source 1..75: mol_type = other DNA
atggcgaatcattcaccggcagcggtgcggggtggcgtgtcacagacgtcagcagacggtgatgcggacgtgaaa

SEQ ID NO: 772145 - DNA, 75 bp, synthetic construct
  source 1..75: mol_type = other DNA
cggcagcaccacagcagccggtggcatccacgcagagtgaagccgatcgcattatggcgtgtgaagaggctaaag

SEQ ID NO: 772146 - DNA, 75 bp, synthetic construct
  source 1..75: mol_type = other DNA
accggtctgtctgttgatgctgtcacgggaacagaggccgccgtttttgaaggtcagtccggcattgaggccggg

SEQ ID NO: 772147 - DNA, 75 bp, synthetic construct
  source 1..75: mol_type = other DNA
aacaaagtgatctattcgaaccacccggatttggtgcgtccgattgcgtctatcagtaaattaatgaccgcgatg

SEQ ID NO: 772148 - DNA, 75 bp, synthetic construct
  source 1..75: mol_type = other DNA
ggcgaaccattcaccggcagcggtacagggtggcgtgccacagacgtcagcagacggtgatgcggacgtgaaaat

SEQ ID NO: 772149 - DNA, 75 bp, synthetic construct
  source 1..75: mol_type = other DNA
tcagtccggcattgaggccgggctggcggatgaattaatcaatgcgtcggatgccatcagcgtgatggctgcggc

SEQ ID NO: 772150 - DNA, 75 bp, synthetic construct
  source 1..75: mol_type = other DNA
aagccgccgcgcaggagaaccagcgagtgatggggatcctgacatgccaggaagcgaaaggacgtgaacagcttg

SEQ ID NO: 772151 - DNA, 75 bp, synthetic construct
  source 1..75: mol_type = other DNA
tcaccggcagcggtgcggggtggcgtgtcacagacgtcagcagacggtgatgcggacgtgaaaatgctcatggcc

SEQ ID NO: 772152 - DNA, 75 bp, synthetic construct
  source 1..75: mol_type = other DNA
taccctgcagccatattccggtatgaccagttatgacggtctgactgcccgtcttaagtcagcggtgaacgaccc

SEQ ID NO: 772153 - DNA, 75 bp, synthetic construct
  source 1..75: mol_type = other DNA
cagatcatggccctggatgaggcaaaaggggctgaggcgcaggctgaacagctggctgcctgcccgggcatgacc

SEQ ID NO: 772154 - DNA, 75 bp, synthetic construct
  source 1..75: mol_type = other DNA
tccctaaaattttctcccgtgtaaccaaagtggatgcaccggtgcagggaatgttgaccattgtgattattcaga

SEQ ID NO: 772155 - DNA, 75 bp, synthetic construct
  source 1..75: mol_type = other DNA
gcgaaccattcaccggcagcggtacagggtggcgtgccacagacgtcagcagacggtgatgcggacgtgaaaatg

SEQ ID NO: 772156 - DNA, 75 bp, synthetic construct
  source 1..75: mol_type = other DNA
cacgaccattgcttccgtagcggcccctgtagatgtcagtgcgcaggttactgcagcagtagctgcagagaatag

SEQ ID NO: 772157 - DNA, 75 bp, synthetic construct
  source 1..75: mol_type = other DNA
gtcacgcagacggcaaaaattggttcgattggtgtgatgatggcgcacaccagttacgagaaacaactggcacag

SEQ ID NO: 772158 - DNA, 75 bp, synthetic construct
  source 1..75: mol_type = other DNA
gcgggttggcgctgatgacgattagcccgtcgctaaacagtcagttcaacgtgctggttaacctggccgtggtga

SEQ ID NO: 772159 - DNA, 75 bp, synthetic construct
  source 1..75: mol_type = other DNA
gacgatggtcaacatgatgggttccggcatcattatgctgccgaccaaactagccgaagtcgggacgatctcgat

SEQ ID NO: 772160 - DNA, 75 bp, synthetic construct
  source 1..75: mol_type = other DNA
atcagtttgaagcgttgccggcagaggttcgccaggacatgcagcagcggattgatgcggcgcgccggatgtttg

SEQ ID NO: 772161 - DNA, 75 bp, synthetic construct
  source 1..75: mol_type = other DNA
taccgttctttagcgctgtaggttcctccatcgccatgacgttgtgggctttcctcggtctggagtctgcctgtg

SEQ ID NO: 772162 - DNA, 75 bp, synthetic construct
  source 1..75: mol_type = other DNA
gcaactttatggcgaactacacttacggcgtctcgctgctgattgccaacgtcgccattgctatttccgccgttg

SEQ ID NO: 772163 - DNA, 75 bp, synthetic construct
  source 1..75: mol_type = other DNA
atcgtgaccttccttggttggacactgtatggtctggtatcaccacgctttgaactgaaaaataaacacggttaa

SEQ ID NO: 772164 - DNA, 75 bp, synthetic construct
  source 1..75: mol_type = other DNA
caggaagaaatggctaacgaatttcgtgatctgcttgttgagaaattcaaagacagcaaagtagaaacctttatt

SEQ ID NO: 772165 - DNA, 75 bp, synthetic construct
  source 1..75: mol_type = other DNA
cctgataatgacggttacgatacgctcgtccaggacagccttcgcagggaagatataaaggtggtggttgaagac

SEQ ID NO: 772166 - DNA, 75 bp, synthetic construct
  source 1..75: mol_type = other DNA
tcgcccgtggcctgctgacggtggaggaggatgaccatcacagccgggtggtcttccgtggcgacaccatgtttg

SEQ ID NO: 772167 - DNA, 75 bp, synthetic construct
  source 1..75: mol_type = other DNA
atctttcgtggcgatacgatgtttataccggggcagaaaaccgtgaatgatgcgctgcgcccggtgattgacaag

SEQ ID NO: 772168 - DNA, 75 bp, synthetic construct
  source 1..75: mol_type = other DNA
cggctttttttgccctttgcctttttgctcacatgttcttttctgccttatcccctgattctgtggataaccgta

SEQ ID NO: 772169 - DNA, 75 bp, synthetic construct
  source 1..75: mol_type = other DNA
acggatgcgccgcgtgccggtctggctgagcgccggaatcgccctgctggtgatgctgacgctgtttggccttta

SEQ ID NO: 772170 - DNA, 75 bp, synthetic construct
  source 1..75: mol_type = other DNA
aaggcggcatcaagctgtttcagataattggtcgtctggccgccagcttccaggagcacagcgatgtgctggaaa

SEQ ID NO: 772171 - DNA, 75 bp, synthetic construct
  source 1..75: mol_type = other DNA
atcacctttgcaataaagaaattgaagaaagcaaaatcattacaagaccacttcatttcatgcgtggagttatac

SEQ ID NO: 772172 - DNA, 75 bp, synthetic construct
  source 1..75: mol_type = other DNA
ttattgaataataagtatatatttaaacgcctccctataaatagcccccaatatagcccccaaggtgtagttgtt

SEQ ID NO: 772173 - DNA, 75 bp, synthetic construct
  source 1..75: mol_type = other DNA
cagcacatctgtcgtgatgctgtggaaattcactgggcgaacggtaatattcaggtcatcagacctgtgcggggg

SEQ ID NO: 772174 - DNA, 75 bp, synthetic construct
  source 1..75: mol_type = other DNA
ggaaatggacggatacgttgagcgtgaacgatcaggggcacaggccagtcagttttccggacgtacgggaaattg

SEQ ID NO: 772175 - DNA, 75 bp, synthetic construct
  source 1..75: mol_type = other DNA
aaaattcttactttctgaattatttataaggcatgaacaaatagagtctcaagcgatagagtctatgaagagtgt

SEQ ID NO: 772176 - DNA, 75 bp, synthetic construct
  source 1..75: mol_type = other DNA
cttcacttcatgcacgggattttatcaaaagacgaaccgagaaaatattgcagtgaatcttgtgccgaaaaagac

SEQ ID NO: 772177 - DNA, 75 bp, synthetic construct
  source 1..75: mol_type = other DNA
acgctgacgctgacctttaacagtagcggtgtgttgaccaacattgataacaaacctgcgctgagtggtaactaa

SEQ ID NO: 772178 - DNA, 75 bp, synthetic construct
  source 1..75: mol_type = other DNA
atgaaaaacaaaagcagaagaataaaattgctacacagattagtgaaaaacagaagaaaatagaggagatgaaaa

SEQ ID NO: 772179 - DNA, 75 bp, synthetic construct
  source 1..75: mol_type = other DNA
gcaatagaaactggtaactggcgacctttgtttgtcacgctggagaaaagtgcggtcgatgtaggtgtggcaaaa

SEQ ID NO: 772180 - DNA, 75 bp, synthetic construct
  source 1..75: mol_type = other DNA
cgcggcgtatcgtcagccactacgaacgacgctggctgatagaggaatatcataaggcgtggaaaagtggtggta

SEQ ID NO: 772181 - DNA, 75 bp, synthetic construct
  source 1..75: mol_type = other DNA
cacaagaaaaagcgttgtcagcgggtaacttcaacaacttcgatgaagtaatggacgcatgggatacgcaaatcc

SEQ ID NO: 772182 - DNA, 75 bp, synthetic construct
  source 1..75: mol_type = other DNA
agcactataccgggatgtatcaacaacatctcgacaaacccattccggtacgtcgcgcgctggcgctggcacatc

SEQ ID NO: 772183 - DNA, 75 bp, synthetic construct
  source 1..75: mol_type = other DNA
aacactataccgagatgtatcaacaacatctcgataagccgatcccggtacgtcgcgcgctggcactggcgcatc

SEQ ID NO: 772184 - DNA, 75 bp, synthetic construct
  source 1..75: mol_type = other DNA
ggcagcctgagttcacagataaaatactctccaggaaaaccgggatggttcagttttatcgaacagcagcgctgg

SEQ ID NO: 772185 - DNA, 75 bp, synthetic construct
  source 1..75: mol_type = other DNA
agacaccaccaccattaacttcagccacagtacggcatctgatgaccaggggaataccaccactaacccgaagac

SEQ ID NO: 772186 - DNA, 75 bp, synthetic construct
  source 1..75: mol_type = other DNA
ccagccttgcggctaacgggatgccaacggacatgaccgcactggaaccgacactcacgcttgcacagacctgcg

SEQ ID NO: 772187 - DNA, 75 bp, synthetic construct
  source 1..75: mol_type = other DNA
tgcgggtgctgggcctgcggcagggcggtatcagtgaagaaacacaaaatgacagctgtgagaaaatactgacgc

SEQ ID NO: 772188 - DNA, 75 bp, synthetic construct
  source 1..75: mol_type = other DNA
acgtatcgtcagccattacgagcgacgctggctgatagaggaataccacaaagcgtggaaaagtggtggtacatg

SEQ ID NO: 772189 - DNA, 75 bp, synthetic construct
  source 1..75: mol_type = other DNA
tgccagtcggtttgaccacactcacgtgggtggactggtataacaatcgacgattgctggaaaggcagggccata

SEQ ID NO: 772190 - DNA, 75 bp, synthetic construct
  source 1..75: mol_type = other DNA
atcaatatacaaggagttaatattattagatgttcatcattgggtacttttttttcgatgccgctatctctatct

SEQ ID NO: 772191 - DNA, 75 bp, synthetic construct
  source 1..75: mol_type = other DNA
cagcagaagtacagcgccagtctctgattgatgctgctatggcttccatcagtctgattcagctgaaattgcagg

SEQ ID NO: 772192 - DNA, 75 bp, synthetic construct
  source 1..75: mol_type = other DNA
attatcctgaaaatacaaccactatcgccccgttaacgccatacgataaatgggatggtgagaaatgggtgaccg

SEQ ID NO: 772193 - DNA, 75 bp, synthetic construct
  source 1..75: mol_type = other DNA
atgaataacgctgttgcagtacttgatcagaatggtatcgctacaactgcaggcgatattacagtttataactac

SEQ ID NO: 772194 - DNA, 75 bp, synthetic construct
  source 1..75: mol_type = other DNA
gtcaataacgacggtgacaacgccatcagtaacggcggcaccggcacgcagattaacggtgatgaagccaccgta

SEQ ID NO: 772195 - DNA, 75 bp, synthetic construct
  source 1..75: mol_type = other DNA
tcagtaacggcggcaccggcacgcaggttaacggcgacgaagccaccgtgaacaataacggcagcaccaccgttg

SEQ ID NO: 772196 - DNA, 75 bp, synthetic construct
  source 1..75: mol_type = other DNA
ggcgccaccggaactgaaatcgcgggtaataacgcggtggtgaatcaggacggcgagctggatgtgagcggcggc

SEQ ID NO: 772197 - DNA, 75 bp, synthetic construct
  source 1..75: mol_type = other DNA
cccggaaaacatcagtacaaaaatgcccgccaggagcataccagcctgccgaatctgcttgagcgtcagtttgct

SEQ ID NO: 772198 - DNA, 75 bp, synthetic construct
  source 1..75: mol_type = other DNA
aaaacggcggtgccggaacaccatccgctaccgtggagctttgttttatcgccgggatttttacccattggtggg

SEQ ID NO: 772199 - DNA, 75 bp, synthetic construct
  source 1..75: mol_type = other DNA
ggaccagcgggactatgtgcgctggcgggtgagtgcgaacgaagggcaggtgtggcaggcgtggctgaaccagca

SEQ ID NO: 772200 - DNA, 75 bp, synthetic construct
  source 1..75: mol_type = other DNA
gttatgcaatctgccgttctgcagattttaactcatgggaatatgtgccagaccatcgcggtgaaattgtctatg

SEQ ID NO: 772201 - DNA, 75 bp, synthetic construct
  source 1..75: mol_type = other DNA
ctggttatgcaatctgccgatctgcagattttaactcatgggaatatgtgccagaccatcgcggtgaaatcgtct

SEQ ID NO: 772202 - DNA, 75 bp, synthetic construct
  source 1..75: mol_type = other DNA
ctggattacattgacgcggtgacggcaacagataccagcacagcgccggacgtcatctggcctgaactgccggag

SEQ ID NO: 772203 - DNA, 75 bp, synthetic construct
  source 1..75: mol_type = other DNA
gcagattaatggcgatgaagccactgtaaacaacaacggcaacaccaccgttgatggtcagggctcgaccggtac

SEQ ID NO: 772204 - DNA, 75 bp, synthetic construct
  source 1..75: mol_type = other DNA
aatacatcgctgttaaattacctggtgataaaaaatttaccaatctgaaggagacaatatttagtgatgacttta

SEQ ID NO: 772205 - DNA, 75 bp, synthetic construct
  source 1..75: mol_type = other DNA
gagtgtgaaggtgagccatgtctgtttgttaatcggcaggatgagttcgccgccacctgtcgactgaaaaatttt

SEQ ID NO: 772206 - DNA, 75 bp, synthetic construct
  source 1..75: mol_type = other DNA
aacggtacagaaacccacacctatgttgatgttcccggtctttccaccatgctggaaggtgccagccgtccggga

SEQ ID NO: 772207 - DNA, 75 bp, synthetic construct
  source 1..75: mol_type = other DNA
ttgcaaattcagaggcctttggcataacacagctagaatccttagccctagggactcctgtcattaatactagcc

SEQ ID NO: 772208 - DNA, 75 bp, synthetic construct
  source 1..75: mol_type = other DNA
agagtgctgtagcaggttatagtaaaggtgagcgtttgcgactggaggataaaggaacagagaaagttcagtgga

SEQ ID NO: 772209 - DNA, 75 bp, synthetic construct
  source 1..75: mol_type = other DNA
cgcctcttgataacaagaagggtgctgaacaaagttattttgttacggtcaggggcagggacggtaaagaaacca

SEQ ID NO: 772210 - DNA, 75 bp, synthetic construct
  source 1..75: mol_type = other DNA
agcgcaaagtcgatctggttttcgcaccatccgtaaaagatatctatccgaatggtactgaaacccacacctatg

SEQ ID NO: 772211 - DNA, 75 bp, synthetic construct
  source 1..75: mol_type = other DNA
tgttattacgggtgataatgccacagtaaacaacaatggcaaaaccaccgttgacggcaaggattccaccggcac

SEQ ID NO: 772212 - DNA, 75 bp, synthetic construct
  source 1..75: mol_type = other DNA
tggcacggagatcgccggtaataacgggaaagttattcaggacggtatactggatgtcagcggcggcggtcacgg

SEQ ID NO: 772213 - DNA, 75 bp, synthetic construct
  source 1..75: mol_type = other DNA
aacgggcagtaattctggtagccgcctggcttggcgatgctcgcctgatcgacaacaaaatggtcgaactggcgt

SEQ ID NO: 772214 - DNA, 75 bp, synthetic construct
  source 1..75: mol_type = other DNA
ctttgatattgagattgtcggcgtgccgattatgcgcgcgaaagacggtctggcgctcagttcccgtaacggcta

SEQ ID NO: 772215 - DNA, 75 bp, synthetic construct
  source 1..75: mol_type = other DNA
cattttcgcggcgtgtcgactatcgtcagcaagctgtttaacctggtccagccggacatcgcctgcttcggtgaa

SEQ ID NO: 772216 - DNA, 75 bp, synthetic construct
  source 1..75: mol_type = other DNA
gttcagcaatgcgttgatgatctgctggaacacattaatcgcattgaagataacatcgctgaatatgaccggatc

SEQ ID NO: 772217 - DNA, 75 bp, synthetic construct
  source 1..75: mol_type = other DNA
gaaagggattggccccacaacagcctgtgctctggtcgccagtatcggtaatgcacacgattttaaaaatggacg

SEQ ID NO: 772218 - DNA, 75 bp, synthetic construct
  source 1..75: mol_type = other DNA
tattgatgtttataacgcagaagctgatagccataactccctggtagatgcagctgaaaatatgcagttggatct

SEQ ID NO: 772219 - DNA, 75 bp, synthetic construct
  source 1..75: mol_type = other DNA
cggggcaggattgggcgacgcttggtacgtctgcctggttttctttggggggatttgtattagccctttaccttg

SEQ ID NO: 772220 - DNA, 75 bp, synthetic construct
  source 1..75: mol_type = other DNA
tgtcgcccaggcgctgcgtcccttcccacacgcaactggtcgcgccgcagcgttgcagaacactctacaactggg

SEQ ID NO: 772221 - DNA, 75 bp, synthetic construct
  source 1..75: mol_type = other DNA
tcagcggacaaaaggcgatggctgtcctgcgcatgagtgatggtagttatccaccatttggtgcagaagtgaaaa

SEQ ID NO: 772222 - DNA, 75 bp, synthetic construct
  source 1..75: mol_type = other DNA
cagacggcgttttcgcgtaagcccgaccatcaactggcggcgttacaggaaaaaatcgccgtcacgccacaactg

SEQ ID NO: 772223 - DNA, 75 bp, synthetic construct
  source 1..75: mol_type = other DNA
cgcaactggcaaaaaccacgggcggcaacggctgggtaaaaatgttaaggcagagcgaactgaaactgtaccagt

SEQ ID NO: 772224 - DNA, 75 bp, synthetic construct
  source 1..75: mol_type = other DNA
aatgttaaggcagcgcgagctgaagctgtaccaatggatggcgtcttatttgcccgtattgttgattcgtcttgg

SEQ ID NO: 772225 - DNA, 75 bp, synthetic construct
  source 1..75: mol_type = other DNA
gctcaaaaaaactattaaagatgcaagcgaggcgcgcgtggcatttgctaataaaaaagcagaggttaccgcgct

SEQ ID NO: 772226 - DNA, 75 bp, synthetic construct
  source 1..75: mol_type = other DNA
ggtgtcatagccccacaaagtacagatgccttgcgtcacatggtttctcagcagaagagttctttgccacttcag

SEQ ID NO: 772227 - DNA, 75 bp, synthetic construct
  source 1..75: mol_type = other DNA
tttctgaactcatcgcaggtttacctccctgtgtcattggaatggaagcctgctcgggtgcccactattgggcaa

SEQ ID NO: 772228 - DNA, 75 bp, synthetic construct
  source 1..75: mol_type = other DNA
atatccaggcgcataaggtcatttttccgaagagcaacagcctgttaaagccgttggcggcgaaagcggccacca

SEQ ID NO: 772229 - DNA, 75 bp, synthetic construct
  source 1..75: mol_type = other DNA
cgatgcccgccagatgtgcctgctgtcgaaaccgctgaaaaagcgcgtcaatatccaggcgcataaggtcatttt

SEQ ID NO: 772230 - DNA, 75 bp, synthetic construct
  source 1..75: mol_type = other DNA
cactatctgcccgaagcgcagctacttaacgttgctaacaaaaaccgcgccatctatcgccagtgggtaaaagcg

SEQ ID NO: 772231 - DNA, 75 bp, synthetic construct
  source 1..75: mol_type = other DNA
ggcacattccaggctgagcatgaggaatttgcatttgatatgagcgacagccagaaagagcgactagcggcattt

SEQ ID NO: 772232 - DNA, 75 bp, synthetic construct
  source 1..75: mol_type = other DNA
cgtagcgtttgccccggaaacacgtgggatgtcactggcgcagaccagcaatatgacgatccgcaggcagcgagc

SEQ ID NO: 772233 - DNA, 75 bp, synthetic construct
  source 1..75: mol_type = other DNA
gaaatcatttgaggtgttcgttaaccgtaaggtggtgcgccatcgcggcgatccggttctggcctgggcgattgg

SEQ ID NO: 772234 - DNA, 75 bp, synthetic construct
  source 1..75: mol_type = other DNA
gtagttactatcccatcgcagaataacctgtcaacacggccttttacggtattgtgcgaagtaagcaggaactgg

SEQ ID NO: 772235 - DNA, 75 bp, synthetic construct
  source 1..75: mol_type = other DNA
gcgccgcggcggttatctggcaagcgttagtgacggattattatccttcacagaaagttaaccgaatttttgcga

SEQ ID NO: 772236 - DNA, 75 bp, synthetic construct
  source 1..75: mol_type = other DNA
aaacgccgctacgctgctggtattgcgttttgtacaggctgtgggggtctgcgccgcggcggttatctggcaagc

SEQ ID NO: 772237 - DNA, 75 bp, synthetic construct
  source 1..75: mol_type = other DNA
ggagccgttcccgcaaacctatctgaaattcagtccggtagcgaaatcttttgaggtttttgttaaccgcaaggt

SEQ ID NO: 772238 - DNA, 75 bp, synthetic construct
  source 1..75: mol_type = other DNA
gatatctatacggcggcggtgagccgggatcaggcccgaatcgtgttcgacgatgcccgccagatgtgcctgttg

SEQ ID NO: 772239 - DNA, 75 bp, synthetic construct
  source 1..75: mol_type = other DNA
atgtcaataattaattccacgccagtgcgtgttattgccattgtaggatgtgatggttcaggtaaatcgaccctc

SEQ ID NO: 772240 - DNA, 75 bp, synthetic construct
  source 1..75: mol_type = other DNA
tggccttgtacacggtttttacaaccactgagagcaagtttgtagtttatgatgtgattggtcgcaatatgtttc

SEQ ID NO: 772241 - DNA, 75 bp, synthetic construct
  source 1..75: mol_type = other DNA
taaatgcaggttatcagaaaaaaaacgtaatatgtgatcttagtttacctgaactgcaacgaggaaaaataacaa

SEQ ID NO: 772242 - DNA, 75 bp, synthetic construct
  source 1..75: mol_type = other DNA
gcccgaaatccatctatattactactggatgagccactgagtgcattggacttaaaccaccagtttcatgttatg

SEQ ID NO: 772243 - DNA, 75 bp, synthetic construct
  source 1..75: mol_type = other DNA
cttcattcttaccgaaaatttccatttttcgcgcatcaatactcaatctcagacatttaatgatgaagatgataa

SEQ ID NO: 772244 - DNA, 75 bp, synthetic construct
  source 1..75: mol_type = other DNA
cgtaacaacattatccaggatgctaaggttcagctctgcaaacaggcattcatcaagtcgtctctgatcctggtc

SEQ ID NO: 772245 - DNA, 75 bp, synthetic construct
  source 1..75: mol_type = other DNA
agacgtgaacatgacgccgctgacaagcggcgacgctttgtctggctgactgccgaaggagaaaaggtacttgct

SEQ ID NO: 772246 - DNA, 75 bp, synthetic construct
  source 1..75: mol_type = other DNA
actaccggcagttaagcctccagttgccaaaaggaagccatccggtgtatcagaacgaggatgcaccaagaaaat

SEQ ID NO: 772247 - DNA, 75 bp, synthetic construct
  source 1..75: mol_type = other DNA
cacggcgagcaattcctgaaagcgattgatatcgtgctggtggcagtcagtgaacacattgaacgtttcgctgcc

SEQ ID NO: 772248 - DNA, 75 bp, synthetic construct
  source 1..75: mol_type = other DNA
tgacttccggcgatgcgcacctggcggtcaatttcccgctactgctggaaaaagggcttgatggtctgcgtgaga

SEQ ID NO: 772249 - DNA, 75 bp, synthetic construct
  source 1..75: mol_type = other DNA
aaatcatcaagtatcgagatgaaatgctgcgaattactccacaaattaccgaaatggtagctaaatacgctgggt

SEQ ID NO: 772250 - DNA, 75 bp, synthetic construct
  source 1..75: mol_type = other DNA
acaagttcgtggaaacggttcggccacttgttgatgaagtagctgataaacttcagtctgaaatgccggaagaca

SEQ ID NO: 772251 - DNA, 75 bp, synthetic construct
  source 1..75: mol_type = other DNA
tccgctcatatggtgcacaaggggtgttgaagaaatatccgttttgtggtgcttttttagtcttttggggattta

SEQ ID NO: 772252 - DNA, 75 bp, synthetic construct
  source 1..75: mol_type = other DNA
gatcacctgaagcacaaagccgaaaccagcgggaccagggcgttacccgaaagccgggcgccaccggctgagctg

SEQ ID NO: 772253 - DNA, 75 bp, synthetic construct
  source 1..75: mol_type = other DNA
ccattttccgcgagttccagccggaaggttgggtagagttcttccatgaattgatctgtaaagagatggaaagcc

SEQ ID NO: 772254 - DNA, 75 bp, synthetic construct
  source 1..75: mol_type = other DNA
agccgccttcgaacagatgaaaaatggcgtgatgatcgtcaataccagtcgcggtgcattgattgattctcaggc

SEQ ID NO: 772255 - DNA, 75 bp, synthetic construct
  source 1..75: mol_type = other DNA
tggctttgtggcctggcttacctttaatttttctgcgctggaagaattattttatcgtagaaacagaaaaggaga

SEQ ID NO: 772256 - DNA, 75 bp, synthetic construct
  source 1..75: mol_type = other DNA
cctccagcagtttaataaagtcctggcatacgaagtgcgtatgttgatgaccgacaaactgcaactggaggacgg

SEQ ID NO: 772257 - DNA, 75 bp, synthetic construct
  source 1..75: mol_type = other DNA
gacagactcattcagtcgttgggtttgctcgctagttgagcgcagaggatactggcgtgccgttgtggccatagc

SEQ ID NO: 772258 - DNA, 75 bp, synthetic construct
  source 1..75: mol_type = other DNA
atgagcacttcagcacaaaaccaatcaatcgaaaatgtatctatccctgacgtcctgaatgccggtatcccggcc

SEQ ID NO: 772259 - DNA, 75 bp, synthetic construct
  source 1..75: mol_type = other DNA
gtttctggtcattgcaaaaagtgatcgacaacatccatcgcgccgctgaccggcagaaaatcctgctggtttgca

SEQ ID NO: 772260 - DNA, 75 bp, synthetic construct
  source 1..75: mol_type = other DNA
aaagccgctggggtggaatgcttcgttcagggcgtcccgacagagcctgctgtggacctctttaaattactttga

SEQ ID NO: 772261 - DNA, 75 bp, synthetic construct
  source 1..75: mol_type = other DNA
caaggtcagggtggctgatgaaccggcaacaccagcacaacggcgagcgtcgatgacatgggcgcaacggctcaa

SEQ ID NO: 772262 - DNA, 75 bp, synthetic construct
  source 1..75: mol_type = other DNA
cgtacagggactgggcgagagccagcctgcggcgaccaacgacacgccacagggccgggcagtcaaccggcgtgt

SEQ ID NO: 772263 - DNA, 75 bp, synthetic construct
  source 1..75: mol_type = other DNA
cggcaacgtgcgctaccagctcaagacgccgtaccgggacggcaccacgcacgtcattttcgaaccattggattt

SEQ ID NO: 772264 - DNA, 75 bp, synthetic construct
  source 1..75: mol_type = other DNA
cctgctggggcactcgatcacttaccgtatcgctgtcggttcacaggcggggcgaaaggtgttcactttgcaaac

SEQ ID NO: 772265 - DNA, 75 bp, synthetic construct
  source 1..75: mol_type = other DNA
gtggaaaccagcgacggtgacggctatatctactgcgtgattgaacatcaaagctctgcagaaaagaatatggct

SEQ ID NO: 772266 - DNA, 75 bp, synthetic construct
  source 1..75: mol_type = other DNA
gtttcgactgatgcgttatgccaccgccgccatgcaacgccatctggacaaaggctatgacagagtcccgctagt

SEQ ID NO: 772267 - DNA, 75 bp, synthetic construct
  source 1..75: mol_type = other DNA
gccgccatgcagcgtcacctggataaaggctatgacagagttccgctggtggtgccattgctgttttatcatggc

SEQ ID NO: 772268 - DNA, 75 bp, synthetic construct
  source 1..75: mol_type = other DNA
atgaccgaatcaacaacctcctccccgcatgatgcggtatttaaaacctttatgttcacacccgaaaccgcacgg

SEQ ID NO: 772269 - DNA, 75 bp, synthetic construct
  source 1..75: mol_type = other DNA
gcaggaaggtaaattagaaggtttgcaggaaggcatgcatgaacaagccattaaaattgccttgcgcatgctgga

SEQ ID NO: 772270 - DNA, 75 bp, synthetic construct
  source 1..75: mol_type = other DNA
ggcaggaaggcatgcatgaacaagccattaaaattgctttgcgcatgctggagcagggcattgatcgtgatcagg

SEQ ID NO: 772271 - DNA, 75 bp, synthetic construct
  source 1..75: mol_type = other DNA
tccctcggtaaaagagatctacccgaacggtacagaaacccacacctatgtcgatgttccaggcctttccaccat

SEQ ID NO: 772272 - DNA, 75 bp, synthetic construct
  source 1..75: mol_type = other DNA
atcgttgatgaagaacattttggccagcaggatagcgcaccggttgaagttccttatccgtatagttcagcagcc

SEQ ID NO: 772273 - DNA, 75 bp, synthetic construct
  source 1..75: mol_type = other DNA
gggtcgttgtcactgacgggcaaaggccatgccacggatgtcgccattatcatgggactggcaggaaacagtccg

SEQ ID NO: 772274 - DNA, 75 bp, synthetic construct
  source 1..75: mol_type = other DNA
tagcgttacgaatctaagggctatgattggcagctatcgcaagcaatacactggtattggcatgttatatccata

SEQ ID NO: 772275 - DNA, 75 bp, synthetic construct
  source 1..75: mol_type = other DNA
atggttacacggacagaccgactactaagaaaagcgatgcggagctatctggaacacctcggcaagatgccgctg

SEQ ID NO: 772276 - DNA, 75 bp, synthetic construct
  source 1..75: mol_type = other DNA
gccttcggtaaaagagatctacccgaacggtacagaaacccacacctatgttgatgttcccggtctttccaccat

SEQ ID NO: 772277 - DNA, 75 bp, synthetic construct
  source 1..75: mol_type = other DNA
atgtctcaacaagaatacactatccatatcttcggtcaggacctcaccagtcaagacggattgttccgattggat

SEQ ID NO: 772278 - DNA, 75 bp, synthetic construct
  source 1..75: mol_type = other DNA
tcagctgatttccgccgtcatcattctcggtacggcggcatggatgttctggcgaacctggcgcggcgaaaagct

SEQ ID NO: 772279 - DNA, 75 bp, synthetic construct
  source 1..75: mol_type = other DNA
tatcaccatagcgatagacggcgatgggctgggtaaagcaacagcggatctgatgtacgagtattatggtattac

SEQ ID NO: 772280 - DNA, 75 bp, synthetic construct
  source 1..75: mol_type = other DNA
aatgaccggtatattcaagtacatcaagataaactgggctactgccaccagccgtttcccatggcttgctgatta

SEQ ID NO: 772281 - DNA, 75 bp, synthetic construct
  source 1..75: mol_type = other DNA
gttaggtcatcgggggcatgcgcatgattacgatgtggaattccgtgaacacggtcatgatcacgatcatgacca

SEQ ID NO: 772282 - DNA, 75 bp, synthetic construct
  source 1..75: mol_type = other DNA
atgaaacccggattatagataccggccacggcagcgttgaactctctattttcgaggaaggacagccacctcact

SEQ ID NO: 772283 - DNA, 75 bp, synthetic construct
  source 1..75: mol_type = other DNA
acgaaacccgcatcatcgatacgggccatggcagcgttgaactctcgattttcgaagaaggacaaccccctcact

SEQ ID NO: 772284 - DNA, 75 bp, synthetic construct
  source 1..75: mol_type = other DNA
tggacgtgatgaggttgaacgtgcgacgcggcggaaagtcaagattgccaaaggatggggctggcttgcatgtgt

SEQ ID NO: 772285 - DNA, 75 bp, synthetic construct
  source 1..75: mol_type = other DNA
ccagcacaaatgattgattcactcaccaccttatttaaaaccattaagccggtgaagcgtgcttttatttgttca

SEQ ID NO: 772286 - DNA, 75 bp, synthetic construct
  source 1..75: mol_type = other DNA
atggaatctctattcatttatttttttgttacaatggtgttaattgtttttacgtgtttttttaaacataataat

SEQ ID NO: 772287 - DNA, 75 bp, synthetic construct
  source 1..75: mol_type = other DNA
ttggacgtgatgaggttgaacgtgcaacgcggcggaaagtcaagattgccaaaggatggggctggcttgcatgtg

SEQ ID NO: 772288 - DNA, 75 bp, synthetic construct
  source 1..75: mol_type = other DNA
aactttacccaggctgttgtcgatatttttgggatgttcccctcccaccagcagcagcagatcattcagtcagtg

SEQ ID NO: 772289 - DNA, 75 bp, synthetic construct
  source 1..75: mol_type = other DNA
cggagcatttactgctaatccttgatgaagcatcgggcatatcagataaggcgattaacgtcatgacgggggcgt

SEQ ID NO: 772290 - DNA, 75 bp, synthetic construct
  source 1..75: mol_type = other DNA
ctcagtgtaaattgcctgctgagggccccgtatcttcagaaataaaagttgcgattcttgatggtggtttaccat

SEQ ID NO: 772291 - DNA, 75 bp, synthetic construct
  source 1..75: mol_type = other DNA
aatcacgattgaagcaaaccagaccgctgattttgaagataatgacttcagcggcaaacgctccctgatggaatc

SEQ ID NO: 772292 - DNA, 75 bp, synthetic construct
  source 1..75: mol_type = other DNA
atgccatcttgttagatctcaataaggctattgatgcccattaccagtggctggtgagtatgtttcacagcgtgg

SEQ ID NO: 772293 - DNA, 75 bp, synthetic construct
  source 1..75: mol_type = other DNA
ggtatcagaatttgccagttagtcgataaccatgccatcacacattctgaagggcatatcaacattaccgtgact

SEQ ID NO: 772294 - DNA, 75 bp, synthetic construct
  source 1..75: mol_type = other DNA
gcggtggcgaagcaaattcagcagtaccagacgcagctccagcagtacgaaaacatgctacagaataccgtagcg

SEQ ID NO: 772295 - DNA, 75 bp, synthetic construct
  source 1..75: mol_type = other DNA
aaattcaacaattaataaattgttgcaggtgcaggattcccttaattactacaagaatcaggccgggagtctcga

SEQ ID NO: 772296 - DNA, 75 bp, synthetic construct
  source 1..75: mol_type = other DNA
caattaatcaaattcatgcccttatttctgctcagggtgttaatgaaattatcagtaagattggtgccgatgctg

SEQ ID NO: 772297 - DNA, 75 bp, synthetic construct
  source 1..75: mol_type = other DNA
cactggcagaatggatcgaagactgggccgactaccttgtgggctttgatgctaatggtgatgccattcaggcaa

SEQ ID NO: 772298 - DNA, 75 bp, synthetic construct
  source 1..75: mol_type = other DNA
ttcacccgactggtgcatgtatggagcgcaccgtttgagtactttacccgcaggtatcagattgtgcgctcacgg

SEQ ID NO: 772299 - DNA, 75 bp, synthetic construct
  source 1..75: mol_type = other DNA
tcagtgtgcttaacctgggtactattgatgaaccaggtcacgcagataacaccgccactctcaaactgaaaaaga

SEQ ID NO: 772300 - DNA, 75 bp, synthetic construct
  source 1..75: mol_type = other DNA
ataaccatgccatcacgcattctgaagggcatatcaacattaccgtgacagcaggtgtcagtcgcgcatttcctg

SEQ ID NO: 772301 - DNA, 75 bp, synthetic construct
  source 1..75: mol_type = other DNA
aagagcggaccgggcaatgtatgagggtaagcaaaccggaagaaatcgctgcatgtttattgacgaacacagcag

SEQ ID NO: 772302 - DNA, 75 bp, synthetic construct
  source 1..75: mol_type = other DNA
acgtccgtttaaattacgcctcagcattatcactggcgatcgtcctgtaccgcctgtaaagtgttgcgtgatcaa

SEQ ID NO: 772303 - DNA, 75 bp, synthetic construct
  source 1..75: mol_type = other DNA
aacctggcagatttgcaaactcaggcaaccggggcgcaagggcaaatggaagctattcaggccgctaaccagctt

SEQ ID NO: 772304 - DNA, 75 bp, synthetic construct
  source 1..75: mol_type = other DNA
ctgccctgccagacaaaaggtgccgtcgcgcctgccacctcgcctgacatcaaaccggtgattcaggagcagacg

SEQ ID NO: 772305 - DNA, 75 bp, synthetic construct
  source 1..75: mol_type = other DNA
caaaatgtgacaatgccaactgttactactgccatgtaccaacaaaccgcttaccaaaatgccatggttcaacag

SEQ ID NO: 772306 - DNA, 75 bp, synthetic construct
  source 1..75: mol_type = other DNA
acagaactctggcaacggctggattatggatggggatccagcacgggcatctggtactgcatgatggatttgata

SEQ ID NO: 772307 - DNA, 75 bp, synthetic construct
  source 1..75: mol_type = other DNA
attcaagtaccagccgattgcgttaatgctcttgctgttggtgcttgtgatacagttaatgatacggaatggaaa

SEQ ID NO: 772308 - DNA, 75 bp, synthetic construct
  source 1..75: mol_type = other DNA
gacttgaacgacattatagtcagccctgatggtgttgcccgtatcgtctaccaaggtgaattgaaaccaggaaaa

SEQ ID NO: 772309 - DNA, 75 bp, synthetic construct
  source 1..75: mol_type = other DNA
cttaccgcaggaatgccaggtcaggaggcgcaaacgtgggcatcttaccgcgccgaagtcatggagtccggcatg

SEQ ID NO: 772310 - DNA, 75 bp, synthetic construct
  source 1..75: mol_type = other DNA
gctattcaggccgctaaccagcttgccagtgctcaaacgaaccagttgctgcaaatccgctcgcttctggtagct

SEQ ID NO: 772311 - DNA, 75 bp, synthetic construct
  source 1..75: mol_type = other DNA
tgaaagccggaattcccgttattgatggcactaatgtggttcagaccacaatcagcgcagttaacaacgttcagg

SEQ ID NO: 772312 - DNA, 75 bp, synthetic construct
  source 1..75: mol_type = other DNA
tggcactaatgtggttcagaccacaatcagcgcagttaacaacgttcaagccgtagcaaaacaaatccagcagta

SEQ ID NO: 772313 - DNA, 75 bp, synthetic construct
  source 1..75: mol_type = other DNA
acccgcaagtgcgtaaactgcattaccatattgcagaagtgcaacgtatgcaggcgctgatcagactgaaggaaa

SEQ ID NO: 772314 - DNA, 75 bp, synthetic construct
  source 1..75: mol_type = other DNA
ttatcgtgatcgtcgcaaagacaagcgacgaacaacgaatgccgaccgctgcgtgattctctgtgaaccgggagg

SEQ ID NO: 772315 - DNA, 75 bp, synthetic construct
  source 1..75: mol_type = other DNA
gcaaatccgttcattgcttgttgcacagcaaaacgccgctgcaacattggcacaagtgcaagcagataaagaagc

SEQ ID NO: 772316 - DNA, 75 bp, synthetic construct
  source 1..75: mol_type = other DNA
gagataccgtgatgaaaactgaactgaccctgaatgccctgcagtccatgaacgcacaggaatatgaagatatcc

SEQ ID NO: 772317 - DNA, 75 bp, synthetic construct
  source 1..75: mol_type = other DNA
atatgaagatatccgtgctgcgggaagcgatatgcgccgtaatctcactcacgaggtgatgcgtgaagtggacgc

SEQ ID NO: 772318 - DNA, 75 bp, synthetic construct
  source 1..75: mol_type = other DNA
agaccaactacaacgtgatgatgtcccactatttcaacatgggcagcatccgcaacatgagcgtgtccctgaccg

SEQ ID NO: 772319 - DNA, 75 bp, synthetic construct
  source 1..75: mol_type = other DNA
tattacagaccatgagcgcacaggaatatgaagatatccgtgctgcgggaagcgatatgcgccgtaatctcactc

SEQ ID NO: 772320 - DNA, 75 bp, synthetic construct
  source 1..75: mol_type = other DNA
taccggggggatggtcacgggacatgacgacgttcctttcactcagtcaggaggtgctgttatccctgctcagtt

SEQ ID NO: 772321 - DNA, 75 bp, synthetic construct
  source 1..75: mol_type = other DNA
acgctggcgctcgccgcgacacttgatgcgcagggatacagtgttaacgacatcattcatattttgatggcagaa

SEQ ID NO: 772322 - DNA, 75 bp, synthetic construct
  source 1..75: mol_type = other DNA
atctggaaaacgtagccaacgcgctcgataagcatttgcagtataacgtcgacaaactgatctttttgcgtaatg

SEQ ID NO: 772323 - DNA, 75 bp, synthetic construct
  source 1..75: mol_type = other DNA
gattcctaaagaaggggcgatggcgttctttgatgttttcgccatgccggcagatgccaaaaacaaagacgaagc

SEQ ID NO: 772324 - DNA, 75 bp, synthetic construct
  source 1..75: mol_type = other DNA
ctttcttgaacgccagttgactgcgggagttttccagccgctggacaaaagcaaattgccggagtggaagaatct

SEQ ID NO: 772325 - DNA, 75 bp, synthetic construct
  source 1..75: mol_type = other DNA
atgcccaggaatatgaagatatccgtgctgcgggaagcgatatgcgccgtaatctcactcacgaggtgatgcgtg

SEQ ID NO: 772326 - DNA, 75 bp, synthetic construct
  source 1..75: mol_type = other DNA
atgattttgaacaactccagtcactggccgaccgtcggctttatctcgctaaacaggctgggcgtaatcgggtat

SEQ ID NO: 772327 - DNA, 75 bp, synthetic construct
  source 1..75: mol_type = other DNA
tatgtctcgcgtgctggattttacgtttcgacgcagccgaccttgtttacgcgcaatgtaccaacgcgttattac

SEQ ID NO: 772328 - DNA, 75 bp, synthetic construct
  source 1..75: mol_type = other DNA
gccgtcagccattcactggcactggcggcgtcactggacgcgcaggggtacagcgtcagtgacatcatccatatc

SEQ ID NO: 772329 - DNA, 75 bp, synthetic construct
  source 1..75: mol_type = other DNA
gggtgatgttccacagcgatagtaataatgccggtatcagtttttatcatcactctgtttgctgtttaaccagac

SEQ ID NO: 772330 - DNA, 75 bp, synthetic construct
  source 1..75: mol_type = other DNA
caccatgaaagcgctggaaatggcgtgggaaacccgtggtaagcccggcggggtgatgttccacagcgatagtaa

SEQ ID NO: 772331 - DNA, 75 bp, synthetic construct
  source 1..75: mol_type = other DNA
ctgaatgtattacagaccatgagcgcacaggaatatgaagatatccgggctgccggaagtgatgaacgccgtgag

SEQ ID NO: 772332 - DNA, 75 bp, synthetic construct
  source 1..75: mol_type = other DNA
cagggctggttctggcagcagaacagcgaggggcggtatgtggatgcgttgcggctggtgggggaagataaacat

SEQ ID NO: 772333 - DNA, 75 bp, synthetic construct
  source 1..75: mol_type = other DNA
ccgaacatattgcgccattctatgaacgtcgttggggtggttttttgcgtgactttaaacagaaccggataatct

SEQ ID NO: 772334 - DNA, 75 bp, synthetic construct
  source 1..75: mol_type = other DNA
gaaaaaggaattagccactttattaccgaacatattgcgccattctatgaacgtcgctggggggggtttttgcgt

SEQ ID NO: 772335 - DNA, 75 bp, synthetic construct
  source 1..75: mol_type = other DNA
gcgagtttggcggctttttccccgtccaggtccgtttcacgcctgcccacgaacgttttcacctggcgttatgtt

SEQ ID NO: 772336 - DNA, 75 bp, synthetic construct
  source 1..75: mol_type = other DNA
ggcactggcggcatcactgaatgcgcaggggtacagcgttaacgacatcattcatatcctgatggcggaaggagg

SEQ ID NO: 772337 - DNA, 75 bp, synthetic construct
  source 1..75: mol_type = other DNA
tccagcccatgaacgcacaggaatatgaagatatccgggctgccggaagtgatgaacgccgtgagctgactcacg

SEQ ID NO: 772338 - DNA, 75 bp, synthetic construct
  source 1..75: mol_type = other DNA
tctctcagctctggatgctggttctggtgaatggtggtggacagcctttcgccgtcgttcaggtgcaacatatct

SEQ ID NO: 772339 - DNA, 75 bp, synthetic construct
  source 1..75: mol_type = other DNA
tgcaggccatgaacgcacaggaatatgaagatatccgtgctgcgggaagcgatatgcgccgtaatctcactcacg

SEQ ID NO: 772340 - DNA, 75 bp, synthetic construct
  source 1..75: mol_type = other DNA
cggtttaagtcgcgtttcactggagaaactggttgaggcgtatcgggaactggaccaggcgctggtagtgcgtgg

SEQ ID NO: 772341 - DNA, 75 bp, synthetic construct
  source 1..75: mol_type = other DNA
gatggccgtctctgtcggcacgctcgcggctgaacaaaaaacacttcacatttataactggtctgattatatcgc

SEQ ID NO: 772342 - DNA, 75 bp, synthetic construct
  source 1..75: mol_type = other DNA
ttgatgagaagtcccaagatcaactttatgttatgggcaaagcattgatacacgaatcaattaaatacaaccggc

SEQ ID NO: 772343 - DNA, 75 bp, synthetic construct
  source 1..75: mol_type = other DNA
gctggcgcttgccgcgacacttgatgcgcaggggtacagtgttaacgacatcatccatatcctgatggcagaagg

SEQ ID NO: 772344 - DNA, 75 bp, synthetic construct
  source 1..75: mol_type = other DNA
aataagcgaatatctgaaaacagagaactgcttgaacttataaagaatcaatatcctgaaattctggatgaatat

SEQ ID NO: 772345 - DNA, 75 bp, synthetic construct
  source 1..75: mol_type = other DNA
acggcctgttactgccgtgcaagcaacaaggcactgtgatgcctgcggctccggcagaggttaaaccgataattc

SEQ ID NO: 772346 - DNA, 75 bp, synthetic construct
  source 1..75: mol_type = other DNA
gaattgtggtggacagcctttcgccgtcgttcaggtgcaacatatcttcacgcctgtcgcgatcagtcacacgct

SEQ ID NO: 772347 - DNA, 75 bp, synthetic construct
  source 1..75: mol_type = other DNA
caccggaagccgtcagccattcactggcactggcggcgtcactggatgcgcaggggtacagcgtaacgacatcat

SEQ ID NO: 772348 - DNA, 75 bp, synthetic construct
  source 1..75: mol_type = other DNA
atggacagatttccacgttcagattcaatcgtacaaccccgtgctggcttgcaaacctatatggcgcaggtctat

SEQ ID NO: 772349 - DNA, 75 bp, synthetic construct
  source 1..75: mol_type = other DNA
ttcttggtgcattaacgttgtatctcgacttcatcaacctgttcctgatgttgctgcggatttttggcaaccgcc

SEQ ID NO: 772350 - DNA, 75 bp, synthetic construct
  source 1..75: mol_type = other DNA
acagcctgtggggctgggcgctggtcgcccaggtgtcgtttatgctcatcgggtacccgtggtataccgggaata

SEQ ID NO: 772351 - DNA, 75 bp, synthetic construct
  source 1..75: mol_type = other DNA
taaatttagtttccgtcgcaaaaaaactaggtatcaagaaagtgcttaacttgggtagttcatgcatgtacccca

SEQ ID NO: 772352 - DNA, 75 bp, synthetic construct
  source 1..75: mol_type = other DNA
aggaatgaaacggaagctagtagatatttcattgcttaataaaattggttggtcaagtcactttgaactcagaga

SEQ ID NO: 772353 - DNA, 75 bp, synthetic construct
  source 1..75: mol_type = other DNA
gcgcgatgatattttcccatgcggtacggcacgctttggtcgaacccggcatggcgaaaatcagcgttttgttag

SEQ ID NO: 772354 - DNA, 75 bp, synthetic construct
  source 1..75: mol_type = other DNA
gcgttatgttcaccgggtgatgtctctcaggtctgggtgctggttctggtcaatgccggtggtgagccgtttgcg

SEQ ID NO: 772355 - DNA, 75 bp, synthetic construct
  source 1..75: mol_type = other DNA
gattccgaaagaaggggcgatggcgttctttgatgtcttcgccatgcctgcggatgccaaaaataaagacgaagc

SEQ ID NO: 772356 - DNA, 75 bp, synthetic construct
  source 1..75: mol_type = other DNA
cgtcagccagctttcttgaacgccagttgactgcgggtgtgttccagccgctggataaaagcaaattgccggagt

SEQ ID NO: 772357 - DNA, 75 bp, synthetic construct
  source 1..75: mol_type = other DNA
atgattacaccggaccggctaccgatctgctgttaaagctgcgcccgaacattcgttatttccattcatctcaat

SEQ ID NO: 772358 - DNA, 75 bp, synthetic construct
  source 1..75: mol_type = other DNA
tttcgggtctggttgcgggtgctctgatggccgtctctgtcggcacgctcgcggctgaacaaaaaacactccaca

SEQ ID NO: 772359 - DNA, 75 bp, synthetic construct
  source 1..75: mol_type = other DNA
aaacaaagacgaagcctatcagttcctgaattacctgctacgcccggatgtggtggcacatatctctgaccatgt

SEQ ID NO: 772360 - DNA, 75 bp, synthetic construct
  source 1..75: mol_type = other DNA
ggcgatgtctggcaggcgtcaaaccgcgcgaaggaagcgaagaatggcgtgaatgtctcgttctcgattccaaaa

SEQ ID NO: 772361 - DNA, 75 bp, synthetic construct
  source 1..75: mol_type = other DNA
gctgacagcgggagttttccagccgctggataaaagcaaattgccggagtggaagaatctcgacccggaactgct

SEQ ID NO: 772362 - DNA, 75 bp, synthetic construct
  source 1..75: mol_type = other DNA
gcgtcactggatgcgcaggggtacagcgtcagtgacatcatccatatcctgatggcggaaggaggtcaggcatga

SEQ ID NO: 772363 - DNA, 75 bp, synthetic construct
  source 1..75: mol_type = other DNA
ttatcagcatactcgcagtaacgatgaagagtcgcaagacagcaccgaaagaaactgggactggagccgttacta

SEQ ID NO: 772364 - DNA, 75 bp, synthetic construct
  source 1..75: mol_type = other DNA
atgaccgccttaaataaaaaatggctatcgggtctgattgcgggtgctctgatggccgtctctgtcggcacgctc

SEQ ID NO: 772365 - DNA, 75 bp, synthetic construct
  source 1..75: mol_type = other DNA
ctgaccatgtgttctatgctaatgctaataaagaagccacgccgctggtgagtgcagaagtgcgtgataatccgg

SEQ ID NO: 772366 - DNA, 75 bp, synthetic construct
  source 1..75: mol_type = other DNA
gaagttggttgccaaacacgacccggataataaatttgctatgccctatatgtgggcgacgaccgggattggcta

SEQ ID NO: 772367 - DNA, 75 bp, synthetic construct
  source 1..75: mol_type = other DNA
aaatgccttcatgatgatccataaaccctgggggatcagcggtggtgatgcggagaaaatgcgcacttatgccga

SEQ ID NO: 772368 - DNA, 75 bp, synthetic construct
  source 1..75: mol_type = other DNA
agcgatggaagccagcgtatcacgacggcgaaactggccgcctctgtcggcgtttccgaagcggctctgtatcgc

SEQ ID NO: 772369 - DNA, 75 bp, synthetic construct
  source 1..75: mol_type = other DNA
gcctgatggtgtcggcccgttgcaaagcggtgatgagctgacagtcactttcgatgggcattctttgacaactcg

SEQ ID NO: 772370 - DNA, 75 bp, synthetic construct
  source 1..75: mol_type = other DNA
cgtctgctgaatgaaatgggcaaggagtcatcgccgaccaacaaaaacacaccggcccatatttatgccggaaac

SEQ ID NO: 772371 - DNA, 75 bp, synthetic construct
  source 1..75: mol_type = other DNA
agctggggcgcgagtccacgccatccaataaaaatatcccgactcatatttatgccggtaacgggaacataacag

SEQ ID NO: 772372 - DNA, 75 bp, synthetic construct
  source 1..75: mol_type = other DNA
tggtgatgagggcactatcaatcagaaccccggcatcattaacgtggtgaaagatatggcagaagtaattgttga

SEQ ID NO: 772373 - DNA, 75 bp, synthetic construct
  source 1..75: mol_type = other DNA
gtgaagcaacaaaaaattgaggccagcagccagccttatatgtatcacggccaactaaacggcaatatggatgtg

SEQ ID NO: 772374 - DNA, 75 bp, synthetic construct
  source 1..75: mol_type = other DNA
caggcggatgctgacggaaaggtacaggctttcagctctgttggtattgccagcggtcgtccgacagttgtgctt

SEQ ID NO: 772375 - DNA, 75 bp, synthetic construct
  source 1..75: mol_type = other DNA
tcggatattcatgcaggaaccactgcggcaaccattaatctgggagacagtgatgctgatgcagggaagacggac

SEQ ID NO: 772376 - DNA, 75 bp, synthetic construct
  source 1..75: mol_type = other DNA
ccggaaggtgcggaatataaatacatcaccaccagcgataaaggtgtacctattgcgctggccacgtacgggaat

SEQ ID NO: 772377 - DNA, 75 bp, synthetic construct
  source 1..75: mol_type = other DNA
ccttgaagatgcgtcctgtacgctggaaatggcccgtgaacgcctgcttaaagaaatgggtaagaaccacacacc

SEQ ID NO: 772378 - DNA, 75 bp, synthetic construct
  source 1..75: mol_type = other DNA
tttacatatgccggaaaccattaaaggaatgattacaccgccacagggagcggcaaatattgctggtaatgaaca

SEQ ID NO: 772379 - DNA, 75 bp, synthetic construct
  source 1..75: mol_type = other DNA
aaaggggacccgcacgtattgttgacaacctcagctggtaacatcgaactggagctggataaacaaaaagcgcca

SEQ ID NO: 772380 - DNA, 75 bp, synthetic construct
  source 1..75: mol_type = other DNA
tgacgcgcggtccgtacaccttccgtggctattacaaaagcccgcagcacaatgccagcgcctttgatgccaacg

SEQ ID NO: 772381 - DNA, 75 bp, synthetic construct
  source 1..75: mol_type = other DNA
gtttttactgttccggcgatctgatctctattgatccagaggggtacatcaccgtgcaggggcgcgagaaagatc

SEQ ID NO: 772382 - DNA, 75 bp, synthetic construct
  source 1..75: mol_type = other DNA
accgcgagttacgccccaatatatcgaaagcatcattcttgaagagcatttctttactgcttatgacggcattcg

SEQ ID NO: 772383 - DNA, 75 bp, synthetic construct
  source 1..75: mol_type = other DNA
taccaccggcacaccgaaactgatcccacgcactcacaatgactattactacagcgtacgtcgtagcgtcgagat

SEQ ID NO: 772384 - DNA, 75 bp, synthetic construct
  source 1..75: mol_type = other DNA
ataatctcgcctgtagcttgcgccgtcagggcattaaacccggcgaaaccgcgctggtacagttgggcaatgtcg

SEQ ID NO: 772385 - DNA, 75 bp, synthetic construct
  source 1..75: mol_type = other DNA
ccgcgcactcataacgactattactacagcgtgcgtcgtagcattgagatttgtcagtttacgcaacagacgcgc

SEQ ID NO: 772386 - DNA, 75 bp, synthetic construct
  source 1..75: mol_type = other DNA
tcaggagcgggataacgtttataacggtatgacgctgcgcgagtatgcgcgtatggccctgacagaaaaaggtat

SEQ ID NO: 772387 - DNA, 75 bp, synthetic construct
  source 1..75: mol_type = other DNA
tcaccgagcagatgcagcagaaaaaaccgaatccgccgatcaaaaatgaggctgataacggtctgcgtaacaccc

SEQ ID NO: 772388 - DNA, 75 bp, synthetic construct
  source 1..75: mol_type = other DNA
tcaccgagcagatgcagcagaaaaaaccaaacccgccaatcaaaaatgaagccgataacggcctgcgcaacacgc

SEQ ID NO: 772389 - DNA, 75 bp, synthetic construct
  source 1..75: mol_type = other DNA
tggagggcttcagtgtggatggcgtgacaacgaaagtgcgtattgacgctggtgttgcgccagttgatcaccgcg

SEQ ID NO: 772390 - DNA, 75 bp, synthetic construct
  source 1..75: mol_type = other DNA
cggcagatccgaaaacctggtacctggctgcggcacagggcaccgacaccattgaagtggcctggctcgatggtg

SEQ ID NO: 772391 - DNA, 75 bp, synthetic construct
  source 1..75: mol_type = other DNA
gatggggcgtgcggcgaaggcaacgattggtgacctggtttacaaggtgctgacggataacccgaaactgtcaga

SEQ ID NO: 772392 - DNA, 75 bp, synthetic construct
  source 1..75: mol_type = other DNA
ccgactatatgcaaaacgcgatgagttaaatgagagggttgattttgttaaagagttttccgaactcggaaaata

SEQ ID NO: 772393 - DNA, 75 bp, synthetic construct
  source 1..75: mol_type = other DNA
tgattcctcaacgcgtaaccgccagtggcaaacccggttgctccgacgaggacggagccgcaattgacacctgca

SEQ ID NO: 772394 - DNA, 75 bp, synthetic construct
  source 1..75: mol_type = other DNA
aagagaacccgttcctcggctatcgcgcggtacgtatttacccggaatttgctggcctgtttcgcactcaactgc

SEQ ID NO: 772395 - DNA, 75 bp, synthetic construct
  source 1..75: mol_type = other DNA
cgaacagttgctgcatatcacctggccggaactaaaaccgcgcaataatctggtgcttgaaaaaccgaccattct

SEQ ID NO: 772396 - DNA, 75 bp, synthetic construct
  source 1..75: mol_type = other DNA
gttggctgaacgaaggcgataccatcagcatagggaatgtgactttacaggtgttacattgccctgggcatacgc

SEQ ID NO: 772397 - DNA, 75 bp, synthetic construct
  source 1..75: mol_type = other DNA
acaaagccgcatgtttggtctggatgagtgtcagccactgacgccggatcgttggctgagcgaaggcgataccat

SEQ ID NO: 772398 - DNA, 75 bp, synthetic construct
  source 1..75: mol_type = other DNA
gccgtgcgggtaaccttaagcggcaccgagggggcactggattccctgcgtgtgcgggaagtcacccgccgtcgc

SEQ ID NO: 772399 - DNA, 75 bp, synthetic construct
  source 1..75: mol_type = other DNA
gtatgcggtcgatcgtaataacccgcgcgtatcgccgctgtataacccgattacgccatcgttcctgcgcatgtt

SEQ ID NO: 772400 - DNA, 75 bp, synthetic construct
  source 1..75: mol_type = other DNA
gcaactggcctattctcgtgataataagcggattgatattgcggcgaatattggcaccgctctggaagccccagg

SEQ ID NO: 772401 - DNA, 75 bp, synthetic construct
  source 1..75: mol_type = other DNA
atgttaacgattcaatttctctgtcctttgccaaacggtctgcatgctcgtccggcgtgggaacttaaagaacag

SEQ ID NO: 772402 - DNA, 75 bp, synthetic construct
  source 1..75: mol_type = other DNA
ggcctgccgctggatgcgattgcccgttatgccgggcaaccggcggtgcttgacgcccagtgcggcgtgctggcg

SEQ ID NO: 772403 - DNA, 75 bp, synthetic construct
  source 1..75: mol_type = other DNA
ttccgccagtcgctgttcgccgcgcaagatgcacaaagtattctgacgctgctggaaacggaattaaccttctga

SEQ ID NO: 772404 - DNA, 75 bp, synthetic construct
  source 1..75: mol_type = other DNA
cgcaaactggtgaataaaaacttccgccagtcgctgttcgccgcgcaagatgcacaaagtattctgacgctgctg

SEQ ID NO: 772405 - DNA, 75 bp, synthetic construct
  source 1..75: mol_type = other DNA
cagctagaaacgcggcagactacaatcattatcccctatggttcgaaatcaagtgaaatgcttattactggggaa

SEQ ID NO: 772406 - DNA, 75 bp, synthetic construct
  source 1..75: mol_type = other DNA
ttcgtggggataccgtggtggacgtctggacctgaatggtaataacctgacctttacccgtcttcaggcggctga

SEQ ID NO: 772407 - DNA, 75 bp, synthetic construct
  source 1..75: mol_type = other DNA
tctccgttattcagttccttgatgaagggatataacgctgttctgagtggcaacattacgggtgagcagagtacg

SEQ ID NO: 772408 - DNA, 75 bp, synthetic construct
  source 1..75: mol_type = other DNA
tttgtcaacagcaacctggccctcgaaaaaggagcaaaactaacggctcagggcggtattttcagcaccggggct

SEQ ID NO: 772409 - DNA, 75 bp, synthetic construct
  source 1..75: mol_type = other DNA
tgagggaagtgccacagcaaccacagccggtgaccagagtgattaccgcggaaatgtgacgctggaaaacaaatc

SEQ ID NO: 772410 - DNA, 75 bp, synthetic construct
  source 1..75: mol_type = other DNA
catctgtccagaaacggccagatgcagggagatattaacgccaccaacggaagtaccgttattctgggaagtgac

SEQ ID NO: 772411 - DNA, 75 bp, synthetic construct
  source 1..75: mol_type = other DNA
ccgttattcagctccctgatgaagggatataacgctgttctgaatggcagtattacgggtgagcagagtacggta

SEQ ID NO: 772412 - DNA, 75 bp, synthetic construct
  source 1..75: mol_type = other DNA
gcggtcttgatattaaaacccgtcgcctgagtaaactggtgaccgaagttgctccggctgaagtgtctgatgtgg

SEQ ID NO: 772413 - DNA, 75 bp, synthetic construct
  source 1..75: mol_type = other DNA
ctgcaccacaacagatcacctattcgcgtttgttacgcggtaattgtatcggcaatttaacggggatttataacc

SEQ ID NO: 772414 - DNA, 75 bp, synthetic construct
  source 1..75: mol_type = other DNA
gaaatatctaattttaccgatctgcgaataacatatgtaatgcttcctatcaatagtggagttgcaaatgctaga

SEQ ID NO: 772415 - DNA, 75 bp, synthetic construct
  source 1..75: mol_type = other DNA
aaagcgagctcatattcaccgtttttctccgatctgaacaacagcagtgtctggcagaatgtcggaaaagaccgt

SEQ ID NO: 772416 - DNA, 75 bp, synthetic construct
  source 1..75: mol_type = other DNA
cacgttcagattggtgccgacagaaagcatgaactggacggtgtggatttgttcacgggtgcattactgacctat

SEQ ID NO: 772417 - DNA, 75 bp, synthetic construct
  source 1..75: mol_type = other DNA
atttaattttgattattatcttgttgatgaaattactgcagttggtgatgctagatttaaagaaaaatgtgctaa

SEQ ID NO: 772418 - DNA, 75 bp, synthetic construct
  source 1..75: mol_type = other DNA
atctcgaagaattgaaaaaatatcgcccggatatcctcgatgcctgcgaaaaagcgatgagcgccgtcgatccgg

SEQ ID NO: 772419 - DNA, 75 bp, synthetic construct
  source 1..75: mol_type = other DNA
tcgcgggaacggcaaaagtcactatcaacggtgatatcaaactgcttggtgaaaacgagtccatttatattccgc

SEQ ID NO: 772420 - DNA, 75 bp, synthetic construct
  source 1..75: mol_type = other DNA
tggtatcgttccattcaaacctgaaactgggtatggctatattcgtcgcggtgatgaagtgcctgtagatgagca

SEQ ID NO: 772421 - DNA, 75 bp, synthetic construct
  source 1..75: mol_type = other DNA
agcgtaaacggcgagcaacgccagcaaggtacgactgcggacatgatccataaaatcgttccgctgatcgcttat

SEQ ID NO: 772422 - DNA, 75 bp, synthetic construct
  source 1..75: mol_type = other DNA
ttcccgcggcggaatttaccggcgacccgcaaaatacaacgctgggcctgagcgtaaacggcgagcaacgtcagc

SEQ ID NO: 772423 - DNA, 75 bp, synthetic construct
  source 1..75: mol_type = other DNA
gaaaacgagtctgtctatattcctctgggggcaacgcactgtctggagaatcccgggaaaattccgctcgatctg

SEQ ID NO: 772424 - DNA, 75 bp, synthetic construct
  source 1..75: mol_type = other DNA
tttgaactggcgcgtcagcaaaaagcccagcgtcagttgaccgacaaagtgaaatcagcgttacgttatcccatc

SEQ ID NO: 772425 - DNA, 75 bp, synthetic construct
  source 1..75: mol_type = other DNA
gccgttacaactggcggactttgctcatgccttgcaacaaccacagggactggtgctggtaactggccctaccgg

SEQ ID NO: 772426 - DNA, 75 bp, synthetic construct
  source 1..75: mol_type = other DNA
ggatgtgaaaaaagtggtcgagcagatcaaagccgatggtcgccatgagcatcgggtgcatcgcgaagtgtatcg

SEQ ID NO: 772427 - DNA, 75 bp, synthetic construct
  source 1..75: mol_type = other DNA
gcatacagaagatgctgttgttgtgccaatggatgctgggtggagtgatgttgggggatttgcggcattgtggga

SEQ ID NO: 772428 - DNA, 75 bp, synthetic construct
  source 1..75: mol_type = other DNA
cagcggcgacgcgtgggtgcacaacagcgaaaactgctacatcaacagcgacgagaagctggtggcggccatcgg

SEQ ID NO: 772429 - DNA, 75 bp, synthetic construct
  source 1..75: mol_type = other DNA
ccgcaatacagttgtccctgttgccagaaggtgttcagcggtgaaatgccggcacatatcctcccgaaaagtgcc

SEQ ID NO: 772430 - DNA, 75 bp, synthetic construct
  source 1..75: mol_type = other DNA
gcctgttgagcatgttgatgctggcagggtaattctgatgcctccctcagtggcaaaagacatggtcaggagcgg

SEQ ID NO: 772431 - DNA, 75 bp, synthetic construct
  source 1..75: mol_type = other DNA
ccgcgatggtttccagcatctacgcagaagcggggctcgacccaaccttcgttaacggcgggctgggaaaagcgg

SEQ ID NO: 772432 - DNA, 75 bp, synthetic construct
  source 1..75: mol_type = other DNA
tttatccggcaggagaagcgccgattccgggagcggacagccgctcgttgtgtcgcactattcgtggacgtggga

SEQ ID NO: 772433 - DNA, 75 bp, synthetic construct
  source 1..75: mol_type = other DNA
catttacgttgggcaatgccggaagcgttgttgatatcagtacgtatgaatataccttgctggataatggcaacc

SEQ ID NO: 772434 - DNA, 75 bp, synthetic construct
  source 1..75: mol_type = other DNA
ggtgaaacgggggaatccgttgagcttgcggatgttggtcgggtgattctgattatgtcctcagatgcaaaaaca

SEQ ID NO: 772435 - DNA, 75 bp, synthetic construct
  source 1..75: mol_type = other DNA
aggcatacaggaacaccgatgaggatgccttaggtattctggaacgtatcagacttctgaagtgtttttacctgt

SEQ ID NO: 772436 - DNA, 75 bp, synthetic construct
  source 1..75: mol_type = other DNA
tattggaaaaattgcccgttctttagctgaaatcaaactgaagccgcaaactccggaggaagaacaacatgactg

SEQ ID NO: 772437 - DNA, 75 bp, synthetic construct
  source 1..75: mol_type = other DNA
atgaatacacaacaattggcaaaactgcgttccatcgtgcccgaaatgcgtcgcgttcggcacatacactttgtc

SEQ ID NO: 772438 - DNA, 75 bp, synthetic construct
  source 1..75: mol_type = other DNA
gtacatgaaaaaccctggcaggggattggcgtgggggctgcggttgggctggtattaggattgttgctggcacgc

SEQ ID NO: 772439 - DNA, 75 bp, synthetic construct
  source 1..75: mol_type = other DNA
gtcagaccacgacttacggcttcagcgaagatgccgacgtgcgtgtagaagattatcagcagattggcccgcagg

SEQ ID NO: 772440 - DNA, 75 bp, synthetic construct
  source 1..75: mol_type = other DNA
gtgcgacgatttatcaaccatcgcccggaaaacgtacgtgatgccagcgtggtcgttgtttccagcgcgatttct

SEQ ID NO: 772441 - DNA, 75 bp, synthetic construct
  source 1..75: mol_type = other DNA
tctgcacaacctgccgttttatgggcgtgcggtaatgtgtgttgacgatccggtgatccgcgaattgttaccgcg

SEQ ID NO: 772442 - DNA, 75 bp, synthetic construct
  source 1..75: mol_type = other DNA
gcgtgctggtcttacctttcagggggttttgcgtgcgttattacgtcaggatcccgatgtcatcatgatcggaga

SEQ ID NO: 772443 - DNA, 75 bp, synthetic construct
  source 1..75: mol_type = other DNA
tctcagtgcgctacgagcctatcttacccccggctgctacggccagattgaccgcgaatttcaccagcgcctgca

SEQ ID NO: 772444 - DNA, 75 bp, synthetic construct
  source 1..75: mol_type = other DNA
tactccgccacgcaacagtgctccacgcgtacaggatgatggacctgcagcctcccggacgccagtgcaggcagc

SEQ ID NO: 772445 - DNA, 75 bp, synthetic construct
  source 1..75: mol_type = other DNA
tccgtatgttccaggaaggtcatctgctacgtaatagcatcgctatttttgtgctaaccacgctgttctatttta

SEQ ID NO: 772446 - DNA, 75 bp, synthetic construct
  source 1..75: mol_type = other DNA
ctccgctccggcagctcccgtccgtggtgggaaatccctccctcaacggtgtatgccttcagcttttatatcttc

SEQ ID NO: 772447 - DNA, 75 bp, synthetic construct
  source 1..75: mol_type = other DNA
aaagtggtgcgctgggaaggggatccggaaagcaatccgtttggtctggcgctggactgttatgacgggacgcct

SEQ ID NO: 772448 - DNA, 75 bp, synthetic construct
  source 1..75: mol_type = other DNA
cttgcgggtgatctgcggggtgctggtgctctgcctgttagtggcgtttaccggctggatgcgggcgccggataa

SEQ ID NO: 772449 - DNA, 75 bp, synthetic construct
  source 1..75: mol_type = other DNA
gaaacaggttgatcgtactgaactgaaatgcggtgaagtcggttggttggtgtgtgcaatcaaagacatccacgg

SEQ ID NO: 772450 - DNA, 75 bp, synthetic construct
  source 1..75: mol_type = other DNA
agtttggctctgctgacattttgtgtattgactctacaaaatggcttcaccgtcaccggagagagcgcctgtgca

SEQ ID NO: 772451 - DNA, 75 bp, synthetic construct
  source 1..75: mol_type = other DNA
tacgtcagtggctggcgtcacgcgcatcagtctgaaggagagaacacgatggctattccaaaattacaggcttac

SEQ ID NO: 772452 - DNA, 75 bp, synthetic construct
  source 1..75: mol_type = other DNA
agtggtgccggtactgaacaagattgacctgccggcagccgatcctgaacgcgtggcggaagaaattgaagatat

SEQ ID NO: 772453 - DNA, 75 bp, synthetic construct
  source 1..75: mol_type = other DNA
tgcaccggtaggcgataccttaacactggcgcgtaatccggcagaaaaggcgctgcctggctttaagaaagtcaa

SEQ ID NO: 772454 - DNA, 75 bp, synthetic construct
  source 1..75: mol_type = other DNA
gcgtaagggcgacaaagtgaaagtcatgagtaccgggcagacctataacgccgaccgtctgggcatcttcacgcc

SEQ ID NO: 772455 - DNA, 75 bp, synthetic construct
  source 1..75: mol_type = other DNA
aaagtggtgcgctgggaaggtgatgcggagcgcaacccgttcggtctggcgctggactgttatgctggtgtgcct

SEQ ID NO: 772456 - DNA, 75 bp, synthetic construct
  source 1..75: mol_type = other DNA
atcacctgctggactcgccaacagatggaaggtcacgccagccgctcacaacagacattgcccgtagccgttcag

SEQ ID NO: 772457 - DNA, 75 bp, synthetic construct
  source 1..75: mol_type = other DNA
tccacgttgcaggaactggctgaccgttacggtgtttccgctgagcgtgtgcgccagctggaaaagaacgcgatg

SEQ ID NO: 772458 - DNA, 75 bp, synthetic construct
  source 1..75: mol_type = other DNA
gcgctggctggacgaagacaacaagtccacgttgcaggaactggctgaccgttacggtgtttccgctgagcgtgt

SEQ ID NO: 772459 - DNA, 75 bp, synthetic construct
  source 1..75: mol_type = other DNA
tacgctggtaatagcccagcgtctggtacgcaaactttgcccacattgtcgccggcagcaaggggagcccatcca

SEQ ID NO: 772460 - DNA, 75 bp, synthetic construct
  source 1..75: mol_type = other DNA
tgcggtggtcgatgccccctcacatgagttgctggacgcgccaacaaatggaaggtcacgccagtcgcacacaac

SEQ ID NO: 772461 - DNA, 75 bp, synthetic construct
  source 1..75: mol_type = other DNA
cgacaggcgggtatgcgtacgctttttgaaaacggctgcctggccgtggagcaaggcttaaccacctttgaagag

SEQ ID NO: 772462 - DNA, 75 bp, synthetic construct
  source 1..75: mol_type = other DNA
agaacgatgcccgccgccgtaaggatgcaggggaactgcttgaccgcgtacgtgtggtgtatgaaatccctgagc

SEQ ID NO: 772463 - DNA, 75 bp, synthetic construct
  source 1..75: mol_type = other DNA
gttcgggctggcgctggactgctacagcagtacaccacagcggctggaagcagcctccccggcatccgggaaggg

SEQ ID NO: 772464 - DNA, 75 bp, synthetic construct
  source 1..75: mol_type = other DNA
gcggttaccagtcacagagcgtgaccgtacaggatcgcgatcactggattgcccgcctggacgtggtcgccgatg

SEQ ID NO: 772465 - DNA, 75 bp, synthetic construct
  source 1..75: mol_type = other DNA
atgatacaaaaatcaaaagagatggcccggacaccggagatcattaatgacctggcgtttcatgcatcgcaagtt

SEQ ID NO: 772466 - DNA, 75 bp, synthetic construct
  source 1..75: mol_type = other DNA
agcagaaaaacccgtgggggctggcgctggactgtttctcatcgccgccgcagaagctggaggcggctaaaccat

SEQ ID NO: 772467 - DNA, 75 bp, synthetic construct
  source 1..75: mol_type = other DNA
aaatccggtgaccgtacagggccgggataactggctggtacgtctggacctggtggcggatgagtattttcatac

SEQ ID NO: 772468 - DNA, 75 bp, synthetic construct
  source 1..75: mol_type = other DNA
gcctggcaacgacattggtatcatttacacgagtcatgttgatgcctaaaaaacaacgcgcccgttgggtaagtc

SEQ ID NO: 772469 - DNA, 75 bp, synthetic construct
  source 1..75: mol_type = other DNA
cgtgtgggtgccgtaaccggtaatcctcgtattcgaacacgttctaccctggtgggtaaaattcaggttggcgag

SEQ ID NO: 772470 - DNA, 75 bp, synthetic construct
  source 1..75: mol_type = other DNA
ttcaactctgataagaaaaactgtgctgggaaaacagataaatgcccgcattgatgaagattttttgaaagagct

SEQ ID NO: 772471 - DNA, 75 bp, synthetic construct
  source 1..75: mol_type = other DNA
gccattattgatgcctgcgccgcacgcggtattggcgcaattgccccctggcgcagggagttgcagggtgaagat

SEQ ID NO: 772472 - DNA, 75 bp, synthetic construct
  source 1..75: mol_type = other DNA
aaacaagggattcgccagttgctgccacattcgaaagatgtcggcgtgccaattgcgctggagccactgcacccg

SEQ ID NO: 772473 - DNA, 75 bp, synthetic construct
  source 1..75: mol_type = other DNA
cccagttgaaagataatccatctatctccattatcattccctgttttaatgaggagaaaaacgttgaggaaacta

SEQ ID NO: 772474 - DNA, 75 bp, synthetic construct
  source 1..75: mol_type = other DNA
gcatattaagtgcggcaatcgccacacgtaccgagcggcgtagcggactggcagcgttatttagttcgcggggat

SEQ ID NO: 772475 - DNA, 75 bp, synthetic construct
  source 1..75: mol_type = other DNA
ggtaaaacgaccaccgtggcgaagttgctggcagcgttaattcaaatggccgacggcgaacgctgccgtatccgt

SEQ ID NO: 772476 - DNA, 75 bp, synthetic construct
  source 1..75: mol_type = other DNA
atgagtgagaagaaaacccgaacgggcagtgagaaccggaagaggattgtaaaattcacggcgagattcacggag

SEQ ID NO: 772477 - DNA, 75 bp, synthetic construct
  source 1..75: mol_type = other DNA
tatctttcttggcgatcgcgatcaactggcctcggttgaggcaggggctgtgctgggcgatatctgtgcctatgc

SEQ ID NO: 772478 - DNA, 75 bp, synthetic construct
  source 1..75: mol_type = other DNA
attttgagtgcggcaatcgccacgcgcaccgagcggcgtagcgggctggcagcgttgtttagttcgcgggaataa

SEQ ID NO: 772479 - DNA, 75 bp, synthetic construct
  source 1..75: mol_type = other DNA
gttgtttaatggcgatatcggtattgcgctggatcgtgggcaggggacgcgcgtctggtttgcgatgccggacgg

SEQ ID NO: 772480 - DNA, 75 bp, synthetic construct
  source 1..75: mol_type = other DNA
cttgcctgtgcacgttacgtcaggcgctggactggtgtgatgaactcgatcccgatggtgagtttggcctcggcg

SEQ ID NO: 772481 - DNA, 75 bp, synthetic construct
  source 1..75: mol_type = other DNA
aaggctttacgcaacaaaagaaacagtaaaggcaaaagttgctttcgtagaagaattcgcagagcttggaaaata

SEQ ID NO: 772482 - DNA, 75 bp, synthetic construct
  source 1..75: mol_type = other DNA
gttttggcttaagcatggcctttaaatttgattattatctcgttgatgaagtcatggctgttggagatgcgcggt

SEQ ID NO: 772483 - DNA, 75 bp, synthetic construct
  source 1..75: mol_type = other DNA
gtacgactggccatcttggaacaaagacaaagccattcttggtttgcgcaacccgtcggataagccacaaaccta

SEQ ID NO: 772484 - DNA, 75 bp, synthetic construct
  source 1..75: mol_type = other DNA
tgaaagccgtgctgaaacccgggaactggcaatatctcacgccagcgtattgttgctgcgcgcactggcccaggc

SEQ ID NO: 772485 - DNA, 75 bp, synthetic construct
  source 1..75: mol_type = other DNA
catcttccaacaaccaaaaatggtgctccacgcgatgttccgctatccaggaaagcccgtagttacctgcaaatg

SEQ ID NO: 772486 - DNA, 75 bp, synthetic construct
  source 1..75: mol_type = other DNA
aacaacatggtttactattttgatgatgttgattatgcgattaaacaatatttgattgatgaaaaaataaatcca

SEQ ID NO: 772487 - DNA, 75 bp, synthetic construct
  source 1..75: mol_type = other DNA
atgggtggaaaatgccgatggtgtaaaggatggtcgttttatcgtgacgcacctctgtttgcgatgaagggaaaa

SEQ ID NO: 772488 - DNA, 75 bp, synthetic construct
  source 1..75: mol_type = other DNA
cagccagattaaaagtgctgggaaacctggatattgcggaacatcgcctgccgcaggacgggcaattcactgtcg

SEQ ID NO: 772489 - DNA, 75 bp, synthetic construct
  source 1..75: mol_type = other DNA
gttatttgccattttcatgcccgctaaatactttcgttactgatgctgtccgctttgcaccatttcatcatcact

SEQ ID NO: 772490 - DNA, 75 bp, synthetic construct
  source 1..75: mol_type = other DNA
ggcggcgacccaacggcgcttgccgtgtacggctgggcatcctggagcaaagacaaagccattctcggtttgcgc

SEQ ID NO: 772491 - DNA, 75 bp, synthetic construct
  source 1..75: mol_type = other DNA
gatgccggggcgcttctcggcgctgatgctgattgtgctgtcgctgaccgtttcttgccgttatatctggtggcg

SEQ ID NO: 772492 - DNA, 75 bp, synthetic construct
  source 1..75: mol_type = other DNA
gacgcgctgaagcgggagtggccttaggtgcgactcgcgtaatttatccggcagggcaaaaacaagtgcaacttg

SEQ ID NO: 772493 - DNA, 75 bp, synthetic construct
  source 1..75: mol_type = other DNA
tcgatgagtttgatgcgataggtaaagaacgtggggatagtggggatcatggtgagttaagacgagttgtaaatg

SEQ ID NO: 772494 - DNA, 75 bp, synthetic construct
  source 1..75: mol_type = other DNA
acgctggacacactgaaagaaattgccgcagccattaacaatgacccgaaattcagcgccaccattaacaatgcg

SEQ ID NO: 772495 - DNA, 75 bp, synthetic construct
  source 1..75: mol_type = other DNA
gcaccgacgctggcggagcgcaaactggcgattgatgataaccgccgggcgctggacgatgccgctgtgctaaat

SEQ ID NO: 772496 - DNA, 75 bp, synthetic construct
  source 1..75: mol_type = other DNA
aactcgatcccgatggcgaatttggcctcggcgtggcggtagatgtctaccatgtctggtgggacccggatctcg

SEQ ID NO: 772497 - DNA, 75 bp, synthetic construct
  source 1..75: mol_type = other DNA
gaaaggctataccctggcggcggtgctgcacgatcttaatcaggcctgtcgttacgccagccatttgattgcatt

SEQ ID NO: 772498 - DNA, 75 bp, synthetic construct
  source 1..75: mol_type = other DNA
acatgacctatgcccgtcttggttttaaaggggaaactcaaatcaattccgatctgaccggttatggtcagtggg

SEQ ID NO: 772499 - DNA, 75 bp, synthetic construct
  source 1..75: mol_type = other DNA
acgctggacacgctgaaagaaatagccgcggccataaacaatgacccgaaattcagcaccaccattaacaatgcg

SEQ ID NO: 772500 - DNA, 75 bp, synthetic construct
  source 1..75: mol_type = other DNA
tttgatgattattctgtatcttctaatccaaatggatattttgtcgggaatcagagaacaacagcatatgggata

SEQ ID NO: 772501 - DNA, 75 bp, synthetic construct
  source 1..75: mol_type = other DNA
ttcgcggttgggatgatgggcggggagtggatgcagggagaatcatattagctcagcagggtgatgctattagaa

SEQ ID NO: 772502 - DNA, 75 bp, synthetic construct
  source 1..75: mol_type = other DNA
gcccctcccgaacccaccacagggatggcttaaatataacggtgcaccctttgataaaaacatatatccgaaatt

SEQ ID NO: 772503 - DNA, 75 bp, synthetic construct
  source 1..75: mol_type = other DNA
atacggtcaatttccatcagaaaaacggtaatgactccaacttattgatagtgttttatgttcagataatgcccg

SEQ ID NO: 772504 - DNA, 75 bp, synthetic construct
  source 1..75: mol_type = other DNA
ccattcacgcgaccgaaagtggccttctacaccaattactcgaaatcatggattagttattatcaggcaaaaaac

SEQ ID NO: 772505 - DNA, 75 bp, synthetic construct
  source 1..75: mol_type = other DNA
cttggtttgggagaaggcgctgcaatacatgtaggtacgcgggctaatcggatatctgatatgggtagttttaag

SEQ ID NO: 772506 - DNA, 75 bp, synthetic construct
  source 1..75: mol_type = other DNA
gcatcttaagtgcggcaatcgccacgcgcaccgagcggcgtagcgggctggctgcattgtttggtgcgcgggtat

SEQ ID NO: 772507 - DNA, 75 bp, synthetic construct
  source 1..75: mol_type = other DNA
tgccacgacaatgcttaatgcgctgtcaggtaaacaaccgctggacaatacgcttaccaatttgagtggaaagga

SEQ ID NO: 772508 - DNA, 75 bp, synthetic construct
  source 1..75: mol_type = other DNA
gatctaatgacgttctcgtcattaaggcaaacctgaaagatgcgtttggcatcaaggaacgtctcgtaccgttcc

SEQ ID NO: 772509 - DNA, 75 bp, synthetic construct
  source 1..75: mol_type = other DNA
atattgatgataccaaagtatcattgattgatacgaaatatggtcgctatgtttttaaagtctttgccccgaaaa

SEQ ID NO: 772510 - DNA, 75 bp, synthetic construct
  source 1..75: mol_type = other DNA
agcttataaaagctggagcgacaggtgatgtcgcggccttccgtcgtgtttcggaagtgatcattgaagaagaac

SEQ ID NO: 772511 - DNA, 75 bp, synthetic construct
  source 1..75: mol_type = other DNA
ccggtgataaggaatacgcagaagtgcttgttgccataaccgaacttacaaatacattgcgtaaacagttaatgg

SEQ ID NO: 772512 - DNA, 75 bp, synthetic construct
  source 1..75: mol_type = other DNA
acagcgccatttggcgtcgtttcgatgaagtgattgaatttcctctgccagatcagatgcagttacgcgagttgc

SEQ ID NO: 772513 - DNA, 75 bp, synthetic construct
  source 1..75: mol_type = other DNA
ggatgttgccggtcttctcgcataccttggtttgggagaaggttctccagctattggcgttccgttcttctggcc

SEQ ID NO: 772514 - DNA, 75 bp, synthetic construct
  source 1..75: mol_type = other DNA
tctggctctggatggttcaggataccaagtggttatattgttcagtttggcacttttaggggtaacacggacaga

SEQ ID NO: 772515 - DNA, 75 bp, synthetic construct
  source 1..75: mol_type = other DNA
gcattttaagtgcggcaatcgccacgcgcaccgagcggcgtagcgggctggcagcgttgtttagttcgcggggat

SEQ ID NO: 772516 - DNA, 75 bp, synthetic construct
  source 1..75: mol_type = other DNA
cattcagcatcccttttcctaaaaaagtggactgcgccatgcttactcattctggtgatggtggtgcgcctttag

SEQ ID NO: 772517 - DNA, 75 bp, synthetic construct
  source 1..75: mol_type = other DNA
tggtcgtggtgcggttacgccgacattatcgacgcaaacaatgagaattacattcagcatcccttttcctaaaaa

SEQ ID NO: 772518 - DNA, 75 bp, synthetic construct
  source 1..75: mol_type = other DNA
cgtgatggttgccagccacgtggggcatacaccttcgggtgccggaatactatctgcttccgcaatcacaaaaag

SEQ ID NO: 772519 - DNA, 75 bp, synthetic construct
  source 1..75: mol_type = other DNA
ttgtttattcatggtttttgtgtttctggaagccataagggtcatgattggggacagattcattcttgtattgca

SEQ ID NO: 772520 - DNA, 75 bp, synthetic construct
  source 1..75: mol_type = other DNA
ttggcggcgaaaaattccagaagtgtttctttaataatagtaaagatatagaattagttaattacgttaaaactt

SEQ ID NO: 772521 - DNA, 75 bp, synthetic construct
  source 1..75: mol_type = other DNA
tagaaaacagttttacccagccgaacgcggcgatgaatattcagatgctggaatgggcgctggacgtaaccaaag

SEQ ID NO: 772522 - DNA, 75 bp, synthetic construct
  source 1..75: mol_type = other DNA
acttatcttcgaacgggaaatagagctctggattgttggtatccacttatgaagcgtaatgtgtataatcggtga

SEQ ID NO: 772523 - DNA, 75 bp, synthetic construct
  source 1..75: mol_type = other DNA
cgctgccgcccctcactagtgagaggtagggcagcgcaagtcaatcctggcggattcactacccctgcgcgaagg

SEQ ID NO: 772524 - DNA, 75 bp, synthetic construct
  source 1..75: mol_type = other DNA
gcgagcgctaccttgaaaaattgctgatgaccatcaaaccggtgacacgggctgaagccgtggaggtgtgtcgtt

SEQ ID NO: 772525 - DNA, 75 bp, synthetic construct
  source 1..75: mol_type = other DNA
ccggcatggctactgtaccggaacacctccggggaaatccatcagactgcatggccatcaccatgcaggcgatgc

SEQ ID NO: 772526 - DNA, 75 bp, synthetic construct
  source 1..75: mol_type = other DNA
aaaacggccaaaggaggcggaatctatgagaaaaaagaaacgatcccatgttggaccagtgaagatgagtatggt

SEQ ID NO: 772527 - DNA, 75 bp, synthetic construct
  source 1..75: mol_type = other DNA
ctcctctatattaaaagactggcatttccccggagcatgccaggtattttttgacaaagatacttcggattttgt

SEQ ID NO: 772528 - DNA, 75 bp, synthetic construct
  source 1..75: mol_type = other DNA
tgaacgtctggctctgtttgatcagttcccttatacacaccatatggagtgcggtgtgttactgactgcgaagta

SEQ ID NO: 772529 - DNA, 75 bp, synthetic construct
  source 1..75: mol_type = other DNA
gaagaacgacaaggggaaagaatatcgtgtacctggctggaagctggccgatgaaaacgggatcggagttcgcgt

SEQ ID NO: 772530 - DNA, 75 bp, synthetic construct
  source 1..75: mol_type = other DNA
tggcgcaggccagaacacgtaactcaacgttatgggccgatgatcctcgccagcagcttgcctatctggctctga

SEQ ID NO: 772531 - DNA, 75 bp, synthetic construct
  source 1..75: mol_type = other DNA
ttcagttggcgttggtggaggtgagtttgtatttgttgaaaataaactccgaaatagttcgaattcggaggtttt

SEQ ID NO: 772532 - DNA, 75 bp, synthetic construct
  source 1..75: mol_type = other DNA
tgagtgttaacgatcgtccgttgtgggagattgacctgctgaacttcatttaccggaaggacggcaaggacattg

SEQ ID NO: 772533 - DNA, 75 bp, synthetic construct
  source 1..75: mol_type = other DNA
cacagaaggaagttatacgaataccggaatgctaatggcgtgaaaatttctgtgaagatgaggtcaccggaacat

SEQ ID NO: 772534 - DNA, 75 bp, synthetic construct
  source 1..75: mol_type = other DNA
cattgtcgatattcccaaaggagaaaactcttgtcgtcttgcattcttgtatcagtcagatttaggagagggcgt

SEQ ID NO: 772535 - DNA, 75 bp, synthetic construct
  source 1..75: mol_type = other DNA
agcgaggcgtgtcgggaactggcgcgtcaggcgtacgagtgccgcagcgcgcaggaaattgaagcgttacttacc

SEQ ID NO: 772536 - DNA, 75 bp, synthetic construct
  source 1..75: mol_type = other DNA
ggtggctgaagatttaaccccaagccagtttttgagccttgatttgaaaaatcttgcgggcatgattctggagaa

SEQ ID NO: 772537 - DNA, 75 bp, synthetic construct
  source 1..75: mol_type = other DNA
aaaggccgatgccaaaagttcgctggcgctgattggcaccggcactttatttaatgacagttgcagcctgaacat

SEQ ID NO: 772538 - DNA, 75 bp, synthetic construct
  source 1..75: mol_type = other DNA
gggctgaagacatcagataaccagccgctggcgtatctgcgtaccaatagcatccggaaaaaagatggttcgctg

SEQ ID NO: 772539 - DNA, 75 bp, synthetic construct
  source 1..75: mol_type = other DNA
actacagtaagttaccttccgggaaatacactgcaacgggtgctgcgacggacacctacaacaacacggctgaac

SEQ ID NO: 772540 - DNA, 75 bp, synthetic construct
  source 1..75: mol_type = other DNA
ttgtcgccgtctatacggcactgctgttcccgctttacagccaggctcagctttacaactattcgtataccgaca

SEQ ID NO: 772541 - DNA, 75 bp, synthetic construct
  source 1..75: mol_type = other DNA
gaccacctatatgtgggccaccaacattttcaacctctcattgagggataccagtaataaagtcacaaccctgtc

SEQ ID NO: 772542 - DNA, 75 bp, synthetic construct
  source 1..75: mol_type = other DNA
tgggaagattatgttcctggcatgaccatttatgaaaacccggtaaaattccggttcaaacgccttaaatcggac

SEQ ID NO: 772543 - DNA, 75 bp, synthetic construct
  source 1..75: mol_type = other DNA
gtgggttttcgtgtttatgacaaagctggtaactggactgagacatcgcaccgttctggtattgatcgtaccgtc

SEQ ID NO: 772544 - DNA, 75 bp, synthetic construct
  source 1..75: mol_type = other DNA
aggattatttgcgtcttgataaagccattcgggaaactattgctcctgaagttgacagtttcaggcactcgtatg

SEQ ID NO: 772545 - DNA, 75 bp, synthetic construct
  source 1..75: mol_type = other DNA
cgccggtgtggcgacggtggtaatggcatttgtggcaattattgcgctgatcaacggcattattggtggagttgg

SEQ ID NO: 772546 - DNA, 75 bp, synthetic construct
  source 1..75: mol_type = other DNA
cgttgcttggctggtttaccaaaacgttgatcgacaggaactacaccgcgacggaggtcgtgtatcagaaaattg

SEQ ID NO: 772547 - DNA, 75 bp, synthetic construct
  source 1..75: mol_type = other DNA
gtaaaacaggttagcgatgaagtcagaaaaggggtacagaaaacggacattgcggggctgatgggtgagcgcatg

SEQ ID NO: 772548 - DNA, 75 bp, synthetic construct
  source 1..75: mol_type = other DNA
tcgtattgcgaccttaccatgtcggggtggtgaaaaggtggtattaaggttgttacagcaggtgagccaggcact

SEQ ID NO: 772549 - DNA, 75 bp, synthetic construct
  source 1..75: mol_type = other DNA
tgacattaatatttgtagcgtcgaagatccggttgagatccccatagccggactaaaccagacgcaaatccattc

SEQ ID NO: 772550 - DNA, 75 bp, synthetic construct
  source 1..75: mol_type = other DNA
gcccagcttggtttacgggcgctggcggcggcgacgctttccaacctgatgagcgcgaccattgccgggttcttt

SEQ ID NO: 772551 - DNA, 75 bp, synthetic construct
  source 1..75: mol_type = other DNA
ttgctgaagtatcgcctgatttctgcttgtgttttaatacccgttgtcatcgcggcgttgtttctgttgccgccg

SEQ ID NO: 772552 - DNA, 75 bp, synthetic construct
  source 1..75: mol_type = other DNA
tcaaattaacccacgaacagggcgtcaaatcaccggaaataccgtccgtcttgaacttgcccttttatcatcatt

SEQ ID NO: 772553 - DNA, 75 bp, synthetic construct
  source 1..75: mol_type = other DNA
ctgccgacacagcttaacggtaatatttttcttatacctcttcgggattcaaaagtgcctggcgaacagcacttc

SEQ ID NO: 772554 - DNA, 75 bp, synthetic construct
  source 1..75: mol_type = other DNA
gttattctaccccggttctgcggcaatctggcgaaactccaaaacattgcgcattatctttggtgtattaaccat

SEQ ID NO: 772555 - DNA, 75 bp, synthetic construct
  source 1..75: mol_type = other DNA
gcagtcatctcatggggttatgggatgtgggcgaatctcgatgtcgcgcctgtcaccttgctcatttgctccatt

SEQ ID NO: 772556 - DNA, 75 bp, synthetic construct
  source 1..75: mol_type = other DNA
ctatgacgaaaatcattacagtggcgcgatatggctgctctatgtcatgatcctggtttggggggctgattccgg

SEQ ID NO: 772557 - DNA, 75 bp, synthetic construct
  source 1..75: mol_type = other DNA
gcctggaacaactaataactcagcaaacagcaactcccagaagcgccgccgttgtatttaatgagaaccaaaccc

SEQ ID NO: 772558 - DNA, 75 bp, synthetic construct
  source 1..75: mol_type = other DNA
actagagttttgtcaggaggaggagttacctcaccccggtttccttgttttagattcacctctcctcgcctatta

SEQ ID NO: 772559 - DNA, 75 bp, synthetic construct
  source 1..75: mol_type = other DNA
tccggataaaactaataaattatcaattataaataaacaaaatattatcaatgcaacatggaaaatagccagaaa

SEQ ID NO: 772560 - DNA, 75 bp, synthetic construct
  source 1..75: mol_type = other DNA
ccggataaaaccaataaattatcaattataaataaacaaaatattatcaatgcaacatggaaaatagccagaaag

SEQ ID NO: 772561 - DNA, 75 bp, synthetic construct
  source 1..75: mol_type = other DNA
aatcattacttcagcaactgccgagatgcaaaagaccgaacgacttttggcagagctgaattgtacagtcagaga

SEQ ID NO: 772562 - DNA, 75 bp, synthetic construct
  source 1..75: mol_type = other DNA
ggtggaacggagctcagggaaattacagaattagctgcttatgcagaaataactctcgattttgtcaccagtgat

SEQ ID NO: 772563 - DNA, 75 bp, synthetic construct
  source 1..75: mol_type = other DNA
cgtctgaaatccattcaggagtgtggcttgctcttcatgcatattgacgtgattccttgccctcattgtggagct

SEQ ID NO: 772564 - DNA, 75 bp, synthetic construct
  source 1..75: mol_type = other DNA
aagtctatcgtagcactggtcagacattggcgttaagcgctattccacgtctgctctggttggcgcatcatcgtc

SEQ ID NO: 772565 - DNA, 75 bp, synthetic construct
  source 1..75: mol_type = other DNA
gtacctggctcaatggaatttgaactggagaaaaactggcaactgacttgtgattgcattcgccttgcattacat

SEQ ID NO: 772566 - DNA, 75 bp, synthetic construct
  source 1..75: mol_type = other DNA
aggactgcgtcatcaggccttaatgaccagtctcaacggcgtaagatttagggaaggtgcgaacaagtccctgat

SEQ ID NO: 772567 - DNA, 75 bp, synthetic construct
  source 1..75: mol_type = other DNA
aaattacttaatggttattaatgaatacccttatcgtaacactcatatggtattaacgattttactgagtatcaa

SEQ ID NO: 772568 - DNA, 75 bp, synthetic construct
  source 1..75: mol_type = other DNA
gacagcgataaaataaattggtatctgaagcatcagaatgaaattaaaaatcaacatcccctaccagaaggtagt

SEQ ID NO: 772569 - DNA, 75 bp, synthetic construct
  source 1..75: mol_type = other DNA
aataaaattaaacctagccaattccagttaatcaaagaagagaaaatcttcaagactaaagaagaactggaagaa

SEQ ID NO: 772570 - DNA, 75 bp, synthetic construct
  source 1..75: mol_type = other DNA
ctgttaccggaaaatcagcaggcgctgaaatttatcccttgtacggggcatagtcggatttatttgctgcaaatg

SEQ ID NO: 772571 - DNA, 75 bp, synthetic construct
  source 1..75: mol_type = other DNA
aacctgctaccgcaggtatggaaaatcgtaaaccggtcgtcttgcaggcccacctcgatatggtgccgcagaaaa

SEQ ID NO: 772572 - DNA, 75 bp, synthetic construct
  source 1..75: mol_type = other DNA
aaaaggtttccatgtcgaacgcgatcaagtggggaatatcctgattcgtaaacctgccaccgcaggtatggaaaa

SEQ ID NO: 772573 - DNA, 75 bp, synthetic construct
  source 1..75: mol_type = other DNA
ggaaatggacatggtttctatcgggccaactatcaccggtccacactctccggatgagcaagttcacatcgaaag

SEQ ID NO: 772574 - DNA, 75 bp, synthetic construct
  source 1..75: mol_type = other DNA
aacgataaagctgccctgattgcgaaatctcgcgatacctttattcgtctgctgaacgccaccccgaacggtgtg

SEQ ID NO: 772575 - DNA, 75 bp, synthetic construct
  source 1..75: mol_type = other DNA
tgtcgcagctgataaagtcgacgccctgaaatctctggtgaatacctatcaggagatcctgaaaaacgagctggc

SEQ ID NO: 772576 - DNA, 75 bp, synthetic construct
  source 1..75: mol_type = other DNA
aatgcaaacaaactgctggtgcgcttcctggcaggtcatgcggaagaactggatctgcgccttatcgatttcaac

SEQ ID NO: 772577 - DNA, 75 bp, synthetic construct
  source 1..75: mol_type = other DNA
ggtgacaccagttttacgctggcctggaagccgggcgagaaagggcagcgcgatttgattgcctggtttgacagc

SEQ ID NO: 772578 - DNA, 75 bp, synthetic construct
  source 1..75: mol_type = other DNA
taaaaccttccgtgccacgtcggcgaatcagaatttcgccaccattaccgtgaaggggaacacgatcacggtgaa

SEQ ID NO: 772579 - DNA, 75 bp, synthetic construct
  source 1..75: mol_type = other DNA
gaaagcggggatgtgcgggcctataaaatccgttttccgaacggcacggtggatgtgtttcgtggctgggtcagc

SEQ ID NO: 772580 - DNA, 75 bp, synthetic construct
  source 1..75: mol_type = other DNA
gaagtgatcacccgtacggtgaaagtgaccaacgtgggtaaaccttccgtggcggaagaacgcagcgaaattacg

SEQ ID NO: 772581 - DNA, 75 bp, synthetic construct
  source 1..75: mol_type = other DNA
ggatgtgttccgtggctgggtgagcgccattggtaaatccgtgaccgccaaagaagtgatcacccgcactgtgaa

SEQ ID NO: 772582 - DNA, 75 bp, synthetic construct
  source 1..75: mol_type = other DNA
aatcagaattttgcgaccattaccgtgaaagggaacacgatcaccgtgaaaggtgttgcggcaggtaaagcgcag

SEQ ID NO: 772583 - DNA, 75 bp, synthetic construct
  source 1..75: mol_type = other DNA
ggggctgttcgtccggatactgatattactgaagtggcgaaaaataacacgctgactgatgatgatttttctgcg

SEQ ID NO: 772584 - DNA, 75 bp, synthetic construct
  source 1..75: mol_type = other DNA
agttgatctcagtgctaactaccatgaagggcaatacacctcagcagggatctctttacagggcggggcaacgtt

SEQ ID NO: 772585 - DNA, 75 bp, synthetic construct
  source 1..75: mol_type = other DNA
cacagacccgagaagattttgccatactgtttttcggcaaaccactggcgcttctggcacttgaggatagcgttg

SEQ ID NO: 772586 - DNA, 75 bp, synthetic construct
  source 1..75: mol_type = other DNA
ttgaatgaacatactgtctatcttgatactgaaggaactggcctcgatcctgacgaagatgccatgctggaaatc

SEQ ID NO: 772587 - DNA, 75 bp, synthetic construct
  source 1..75: mol_type = other DNA
cgtccgggtgacctggttgcagatttcttcatggggtcgggttcgacagtcaaagcagcgatggcgctgggacgt

SEQ ID NO: 772588 - DNA, 75 bp, synthetic construct
  source 1..75: mol_type = other DNA
taccgacgtatggacgcataagcctgttcagttttatccaggcaaacatccatgcgaaaaacctgccgatatgct

SEQ ID NO: 772589 - DNA, 75 bp, synthetic construct
  source 1..75: mol_type = other DNA
tacgttgagcgccggaaccagtgaaaatcacaccagtcttgatggttattacagtcatgacggtacgctggcaaa

SEQ ID NO: 772590 - DNA, 75 bp, synthetic construct
  source 1..75: mol_type = other DNA
acctggatgatgaagacgcggactggagcgcgaccgggcagggacagaaatctgcaggtgataccagttttacgc

SEQ ID NO: 772591 - DNA, 75 bp, synthetic construct
  source 1..75: mol_type = other DNA
gccggaaagtgcaaccgacaagacgttcagagcggtttccgccgatccgtcgaaagccaccattagtgtgaaaga

SEQ ID NO: 772592 - DNA, 75 bp, synthetic construct
  source 1..75: mol_type = other DNA
aagacgtgatgacccgcactgtgaaaatcagcggtgtggggcgtccgtatctggcagaggaaggcactgaaacag

SEQ ID NO: 772593 - DNA, 75 bp, synthetic construct
  source 1..75: mol_type = other DNA
aggaagtgatcacccgcacggtgaaggtcaccaatgtgggacgcccgtcgatggcagaagatcgcagcacagtaa

SEQ ID NO: 772594 - DNA, 75 bp, synthetic construct
  source 1..75: mol_type = other DNA
gcagaaaaaactggttcagttgttcgactccggtgaagtctgcgcttttcgtatcaaatatcccaacggtactgt

SEQ ID NO: 772595 - DNA, 75 bp, synthetic construct
  source 1..75: mol_type = other DNA
ggcggtcattgtgcgtatgacgcgctcctcgatgctggaagtgctgggcgaagattacatccgcaccgcgcgtgc

SEQ ID NO: 772596 - DNA, 75 bp, synthetic construct
  source 1..75: mol_type = other DNA
attatcgtccatgcgctgcgcaacgccatgctgccggtggtgaccgtgatcggcctgcaggtgggcacgctgctg

SEQ ID NO: 772597 - DNA, 75 bp, synthetic construct
  source 1..75: mol_type = other DNA
atgctgatcatgctggtttcggtgcactggaacctgacgcctgtctccggtcgtgtgagcgacatggtattcctc

SEQ ID NO: 772598 - DNA, 75 bp, synthetic construct
  source 1..75: mol_type = other DNA
cgtgccgcgctttcaggccacgctggaacttggcgtctgcgcgatgatttttgcgacggcagtcggtattccggt

SEQ ID NO: 772599 - DNA, 75 bp, synthetic construct
  source 1..75: mol_type = other DNA
aagacgtgatgacccgcacagtgaaaatcagcggagtggggcgtccgtatctggcagaggaaggcactgaaacag

SEQ ID NO: 772600 - DNA, 75 bp, synthetic construct
  source 1..75: mol_type = other DNA
gggaaggcaggcacacttactgtggctgtgttgccggataatgcgtctgatccttcattaagggtgtcgaccgtg

SEQ ID NO: 772601 - DNA, 75 bp, synthetic construct
  source 1..75: mol_type = other DNA
tgtgatgttgcgctttttttgggtagagataatgctattcattattatgacgatgttgaacaggccataaaaaaa

SEQ ID NO: 772602 - DNA, 75 bp, synthetic construct
  source 1..75: mol_type = other DNA
cgacgaaaggtgccgggactactttttggatttataccggaactggtgatccctacgatgacccgttaagtgatg

SEQ ID NO: 772603 - DNA, 75 bp, synthetic construct
  source 1..75: mol_type = other DNA
tccggtacggtggcaaaagggaaaacaaccaccctgacggtttcttttgagccggaaagtgcaaccgacaagacg

SEQ ID NO: 772604 - DNA, 75 bp, synthetic construct
  source 1..75: mol_type = other DNA
atccccgtgatttccggaaatggtcagttcgccgcagtggctgaagtcaccgttactgaagcgggcgctgcaggg

SEQ ID NO: 772605 - DNA, 75 bp, synthetic construct
  source 1..75: mol_type = other DNA
atggctgaagatcgcagtacggtgacggcggcaaccggcatgacggtaacgccagccagtgcttccgtagtgaaa

SEQ ID NO: 772606 - DNA, 75 bp, synthetic construct
  source 1..75: mol_type = other DNA
atctggatgatgaggatgccgactgggtatccaccgggcaggggcttaaatcagccggtgacaccagttttacgc

SEQ ID NO: 772607 - DNA, 75 bp, synthetic construct
  source 1..75: mol_type = other DNA
cggtgaaaggggccggaaccaccctgtgggtttataaggggaacggtgacccttatgcgaacccgctttcagacg

SEQ ID NO: 772608 - DNA, 75 bp, synthetic construct
  source 1..75: mol_type = other DNA
gaaaacgacaacccaggggcaaaaatccgtcggtgatacttcggcgacgctggcctggcgtccgggtgacagcgg

SEQ ID NO: 772609 - DNA, 75 bp, synthetic construct
  source 1..75: mol_type = other DNA
ggatgtgttccgtggctgggtgagcgccattggtaaagcggtgaccgccaaagaggtgatcatccgtacggtaaa

SEQ ID NO: 772610 - DNA, 75 bp, synthetic construct
  source 1..75: mol_type = other DNA
tgctaatgtgccggttgaaggtaatggttccgccgtttataccaacatgttcggcaaagcggtggtggcagatgt

SEQ ID NO: 772611 - DNA, 75 bp, synthetic construct
  source 1..75: mol_type = other DNA
agtgaccaacgtgggcaaaccttccgtggcggaagaacgcagcaaaattacgccggtcactgcgattaaggtgac

SEQ ID NO: 772612 - DNA, 75 bp, synthetic construct
  source 1..75: mol_type = other DNA
atcatatgcctgcttaccacctgaactgatagcccagtttggcttcaaagatgattttgcgaagagtttgcaatg

SEQ ID NO: 772613 - DNA, 75 bp, synthetic construct
  source 1..75: mol_type = other DNA
cttccgtagtgaaagggaagagcaccacgctgaccgtggcattccagccggaaggcgcaaccgacaagagcttcc

SEQ ID NO: 772614 - DNA, 75 bp, synthetic construct
  source 1..75: mol_type = other DNA
aaggtcaacattccggtcgtatccggtaatggtgaacttgctgcggttgcagaaatcaacgtcaccgccagttaa

SEQ ID NO: 772615 - DNA, 75 bp, synthetic construct
  source 1..75: mol_type = other DNA
gaactggaaaagccgcaccaccagctggtcagcacatacagtgaactgaaccggcaatatgccagcctgctggaa

SEQ ID NO: 772616 - DNA, 75 bp, synthetic construct
  source 1..75: mol_type = other DNA
aaaagccgcactggcgctcgggcgtcgtgcgattggcgttgaactggagaccggacgttttgagcagacagtcag

SEQ ID NO: 772617 - DNA, 75 bp, synthetic construct
  source 1..75: mol_type = other DNA
cactggggcgtcgtgcgattggtgttgagctggagaccggacgttttgagcagacagtcagggaagttcaggatt

SEQ ID NO: 772618 - DNA, 75 bp, synthetic construct
  source 1..75: mol_type = other DNA
tggccccgctgatttcttacttccgtgatgcgcgtgaatcactggggataacgtcaaaacagatagctgaagcca

SEQ ID NO: 772619 - DNA, 75 bp, synthetic construct
  source 1..75: mol_type = other DNA
aaaagcagcattgtcgctagggcgtcgcgctattggcgtagaactggaagaagagagatttaatcagactgtaag

SEQ ID NO: 772620 - DNA, 75 bp, synthetic construct
  source 1..75: mol_type = other DNA
tggcagctaccgaacgaaagcgattatctgaaattacaggcgctgtttgcccgggtggcagaagagaagcatcag

SEQ ID NO: 772621 - DNA, 75 bp, synthetic construct
  source 1..75: mol_type = other DNA
tcccactggtttggtgccagtcagtggcagttgccgaatgaggctgactaccggaagttacaggcactgttttcc

SEQ ID NO: 772622 - DNA, 75 bp, synthetic construct
  source 1..75: mol_type = other DNA
gcctcgcatctgatatcgagatcatgatgcgtgaacgtttcaacgtgcttaaccatatcatctgggcgaagccgt

SEQ ID NO: 772623 - DNA, 75 bp, synthetic construct
  source 1..75: mol_type = other DNA
gcatcggcgtggtgaactggaaaagctccaccaccagctggtggatacgtatacctcactgaaccggcagtatgc

SEQ ID NO: 772624 - DNA, 75 bp, synthetic construct
  source 1..75: mol_type = other DNA
ggcagaagagaagcatcggcgtggtgaactggaaaagctccaccaccagctggtggatacgtatacctcactgaa

SEQ ID NO: 772625 - DNA, 75 bp, synthetic construct
  source 1..75: mol_type = other DNA
tggccccgctgatttcttactttcgtgatgcgcgagaatctctgggaataacatcaaaacagatagcggaagcca

SEQ ID NO: 772626 - DNA, 75 bp, synthetic construct
  source 1..75: mol_type = other DNA
ggctggaccactgtctggcccagttctggcgggtgttgaaacctgccggaagcctttacctgttctgtggacatc

SEQ ID NO: 772627 - DNA, 75 bp, synthetic construct
  source 1..75: mol_type = other DNA
ccggacgctggaacgggtgcaacaaggaaagcctgcgtgcgtatttcccggccacagagcgcattctgtttgcgg

SEQ ID NO: 772628 - DNA, 75 bp, synthetic construct
  source 1..75: mol_type = other DNA
tttcatcctattgtcgatcccttatcgggtaatgactccaacttattgatagtgttttatgttcagataatgccc

SEQ ID NO: 772629 - DNA, 75 bp, synthetic construct
  source 1..75: mol_type = other DNA
tttgttctgccggggatttattccggcgataaccccgcgccgtctgcgtcggcggatgccctgcatatccgtttc

SEQ ID NO: 772630 - DNA, 75 bp, synthetic construct
  source 1..75: mol_type = other DNA
atggaaaagaatatcagggcgctaataatcagcgcccggcatgaagcattcaatcttgcaacacagttacctcct

SEQ ID NO: 772631 - DNA, 75 bp, synthetic construct
  source 1..75: mol_type = other DNA
tgcgccttatcaccaacctgatccgcaccggcaccgtgaccgaagtggatcgggaaaactggctttgccgggtga

SEQ ID NO: 772632 - DNA, 75 bp, synthetic construct
  source 1..75: mol_type = other DNA
gtatgtcaggggcatcaaatccatggtcattgaggctgccgacaacatcaccctgaaaaccagtgagtttgtgct

SEQ ID NO: 772633 - DNA, 75 bp, synthetic construct
  source 1..75: mol_type = other DNA
attcgaatcagttcgctccaccgtcgacgtcggcggacgcctgcgtgacagaacatcctgacggcggctggtttg

SEQ ID NO: 772634 - DNA, 75 bp, synthetic construct
  source 1..75: mol_type = other DNA
acggcaaaacagattgcggatgccacaggaaagaaaaacatggtgtcgcactggttcagtgccagtcagtggcag

SEQ ID NO: 772635 - DNA, 75 bp, synthetic construct
  source 1..75: mol_type = other DNA
ctgccgaacgaaagcgattatctgaaattacaggcgctgtttgcccgggtggcagaagagaagcatcagcgcggt

SEQ ID NO: 772636 - DNA, 75 bp, synthetic construct
  source 1..75: mol_type = other DNA
aaaggggacgaagattaccttaagtggctggaccactgtcttgcgcagttctggcgggtgctgaaacctgcagga

SEQ ID NO: 772637 - DNA, 75 bp, synthetic construct
  source 1..75: mol_type = other DNA
atgatgcgtgagcgcttcagtgtgctgaaccacattatctgggcgaagccgtccggacgatggaacgggtgcaat

SEQ ID NO: 772638 - DNA, 75 bp, synthetic construct
  source 1..75: mol_type = other DNA
ggcagaagagaaacatcagcggggtgaactggaaaagtcacatcaccaactggtcagcacatacagtgagctgaa

SEQ ID NO: 772639 - DNA, 75 bp, synthetic construct
  source 1..75: mol_type = other DNA
ggcagaagagaagcatcagcgcggtgaactggaaaagccccaccaccagctgctggagacgtatacttcactgaa

SEQ ID NO: 772640 - DNA, 75 bp, synthetic construct
  source 1..75: mol_type = other DNA
gcaggtgccgtacacggatgtgtggacgcataaaccggtgcagtactatcccgggaaacatccgtgcgaaaaacc

SEQ ID NO: 772641 - DNA, 75 bp, synthetic construct
  source 1..75: mol_type = other DNA
agtctttacctgttctgtggtcatcgcctggcatctgacaccgaaatcatgatgcgtgagcgctttaatgtgctg

SEQ ID NO: 772642 - DNA, 75 bp, synthetic construct
  source 1..75: mol_type = other DNA
cagatagcggaagccaccggaaagaaaaacatggtgtcgcactggtttggtacctgtcagtggcagttaccgaac

SEQ ID NO: 772643 - DNA, 75 bp, synthetic construct
  source 1..75: mol_type = other DNA
taccgacgtctggacgcataaacccgttcagttctacccgggtaaacatccgtgtgagaagcccgcggatatgct

SEQ ID NO: 772644 - DNA, 75 bp, synthetic construct
  source 1..75: mol_type = other DNA
tggtcagcacatacagcgaactgaaccggcaatatgccagcctgctggaggaatataaatcactgcggcgttatt

SEQ ID NO: 772645 - DNA, 75 bp, synthetic construct
  source 1..75: mol_type = other DNA
gaactggaaaagccacaccaccagctggtcagcacatacagtgaactgaaccggcaatatgccagcctgctggag

SEQ ID NO: 772646 - DNA, 75 bp, synthetic construct
  source 1..75: mol_type = other DNA
gaactggaaaagccccattaccaactggtcagcacatacagtgagctgaaccggcagtatatggaactgctgagt

SEQ ID NO: 772647 - DNA, 75 bp, synthetic construct
  source 1..75: mol_type = other DNA
tgtgcgattggtgttgagctggagaccgaacgttttgagcagacagtcagggaagttcaggatttaatcgtttgg

SEQ ID NO: 772648 - DNA, 75 bp, synthetic construct
  source 1..75: mol_type = other DNA
agctgcaggcgttgtttgcgcgtgttgcagcagaaaaacatcaacgcggagaactggaaaagccacaccaccatc

SEQ ID NO: 772649 - DNA, 75 bp, synthetic construct
  source 1..75: mol_type = other DNA
cagctaccgaacgaaagcgattatctgaaattacagtcgctgtttgcccgggtggcagaagagaaacatcagcgc

SEQ ID NO: 772650 - DNA, 75 bp, synthetic construct
  source 1..75: mol_type = other DNA
tttttaatggtgtcgcatagcttgaatattcttcatgatttctgtgatgctgcattgtacttaggaaaaaataat

SEQ ID NO: 772651 - DNA, 75 bp, synthetic construct
  source 1..75: mol_type = other DNA
aaaggggacgaagattaccttaagtggatggaccactgtctggcccagttctggcgggtgttaaaacctgccgga

SEQ ID NO: 772652 - DNA, 75 bp, synthetic construct
  source 1..75: mol_type = other DNA
gcccgagggctgggataaccagtggaagggcgacgatgattacctgaaatggctggaccagtgtctggcgcagtt

SEQ ID NO: 772653 - DNA, 75 bp, synthetic construct
  source 1..75: mol_type = other DNA
atggttaatactgtaaaaatatccagctgtgagttagtcaacgctgattgcctggaatttatcctgaccttaccg

SEQ ID NO: 772654 - DNA, 75 bp, synthetic construct
  source 1..75: mol_type = other DNA
cgtgcaattggcgttgagctggagaccgggcgttttgagcagacggtgagggaagttcaggatttagtcagtcag

SEQ ID NO: 772655 - DNA, 75 bp, synthetic construct
  source 1..75: mol_type = other DNA
caaacatgacggctatgcggcaaaggggcgcgagcttaaacagcacgtcatggccccgctgatttcttactttcg

SEQ ID NO: 772656 - DNA, 75 bp, synthetic construct
  source 1..75: mol_type = other DNA
aatccctgcggcgttatttttccgtatcggcagctgttccttatacggatgtctggacgcataaacctgtacagt

SEQ ID NO: 772657 - DNA, 75 bp, synthetic construct
  source 1..75: mol_type = other DNA
aaccggcagtatatggaactgctgagtgaatataagcatctgcggcggtattttggcgtgacggtgcaggtgccg

SEQ ID NO: 772658 - DNA, 75 bp, synthetic construct
  source 1..75: mol_type = other DNA
cactggttcagtgccagtcagtggcagctaccgaacgaaagcgattatctgaaattacagtcgctgtttgcccgg

SEQ ID NO: 772659 - DNA, 75 bp, synthetic construct
  source 1..75: mol_type = other DNA
ggccattgtatttaaggatgataatgtggttagttttcatgaggatgttcaggaagggatagaagagtataaaaa

SEQ ID NO: 772660 - DNA, 75 bp, synthetic construct
  source 1..75: mol_type = other DNA
ggcactggggcgtcgtgcgattggcgttgagctggagactgagcgttttgagcagacggtcagggaagttcagga

SEQ ID NO: 772661 - DNA, 75 bp, synthetic construct
  source 1..75: mol_type = other DNA
aacattatcaggggccataccagccaaaaaatgacggctatgcagcaaaggggcgcgagcttaaacagcacgtga

SEQ ID NO: 772662 - DNA, 75 bp, synthetic construct
  source 1..75: mol_type = other DNA
actgggacgccgtgcgattggcgtggaactggaagaagagagatttaatcagactgtaactgaaataaaaaatat

SEQ ID NO: 772663 - DNA, 75 bp, synthetic construct
  source 1..75: mol_type = other DNA
aaaaacatggtgtcgcactggttcagtgccagtcagtggcagctaccgaacgaaagcgattatctgaaattacag

SEQ ID NO: 772664 - DNA, 75 bp, synthetic construct
  source 1..75: mol_type = other DNA
gtgcagtactatcccgggaagcacccgtgcgaaaaaccggcagaaatgttgcagcagataatcagcgcaagcagc

SEQ ID NO: 772665 - DNA, 75 bp, synthetic construct
  source 1..75: mol_type = other DNA
agtctttacctgttctgtggtcatcgcctggcatctgatatcgaaatcatgatgcgcgaacgctttaacgtgctg

SEQ ID NO: 772666 - DNA, 75 bp, synthetic construct
  source 1..75: mol_type = other DNA
aaccgctgcgatgctcgccgggcttggtgatgccctccccgtttcggcgctgccgccagacggcacctggccgat

SEQ ID NO: 772667 - DNA, 75 bp, synthetic construct
  source 1..75: mol_type = other DNA
atgtttatgtggcgcaaatttctcttggtgcacagctgaaccagacagtgaaagcgattcaggaagcagaagcgt

SEQ ID NO: 772668 - DNA, 75 bp, synthetic construct
  source 1..75: mol_type = other DNA
agatgcgccaactcaccgcaaccggcttctggccgctgtatcgctttgatccacgtcgtgctgatgaaggcaaac

SEQ ID NO: 772669 - DNA, 75 bp, synthetic construct
  source 1..75: mol_type = other DNA
gcgcgatgttgtgtgcggctaacgtccaggaagcgcaagattttgctctcatttcgcacatcgcaacgctgaaga

SEQ ID NO: 772670 - DNA, 75 bp, synthetic construct
  source 1..75: mol_type = other DNA
tgcttgctccggttgtggcgagacgccgtatattaaattgctgactcagctctatggcgaccggatgttgatcgc

SEQ ID NO: 772671 - DNA, 75 bp, synthetic construct
  source 1..75: mol_type = other DNA
acgacactattcttgaactgataccgcaggcagaaattgatgctcatcgcgcccgtgcgctgaatccggaacatc

SEQ ID NO: 772672 - DNA, 75 bp, synthetic construct
  source 1..75: mol_type = other DNA
tggagttactggtcaacgcggggcaggcacgttctgacgcgatggaagccatacgttgtgccgggcaaaaagact

SEQ ID NO: 772673 - DNA, 75 bp, synthetic construct
  source 1..75: mol_type = other DNA
gttggttaccgtttcaatgagcagacagcagcgaaagcaggtgtggcagcgagtgatggcgatgtgtcctacaac

SEQ ID NO: 772674 - DNA, 75 bp, synthetic construct
  source 1..75: mol_type = other DNA
ccgtacagtgtggggaaattcaacgccactgctgccctgggggggtacagtgataaacaggctgttgccgtgggt

SEQ ID NO: 772675 - DNA, 75 bp, synthetic construct
  source 1..75: mol_type = other DNA
gcgtcgaaagcgacaccactgggtgcagtaactaagtttggcgagcacggcaaacgtaaagcacgtaaagatctc

SEQ ID NO: 772676 - DNA, 75 bp, synthetic construct
  source 1..75: mol_type = other DNA
tgattggcggtcgctatggcctttcgtcaaaagaatttggcccggactgcgtactggctgtatttgccgaactca

SEQ ID NO: 772677 - DNA, 75 bp, synthetic construct
  source 1..75: mol_type = other DNA
agggaaatcaactttactgagaatgattggcggtattgaccgccccgatagcggaaagatcatcaccaataaaac

SEQ ID NO: 772678 - DNA, 75 bp, synthetic construct
  source 1..75: mol_type = other DNA
cggtcgcttcagtagcgtttcgtaccagcgaagttatcgccatttaccctattacccccagttccacgatggcgg

SEQ ID NO: 772679 - DNA, 75 bp, synthetic construct
  source 1..75: mol_type = other DNA
ctggtatcagggaatcaataatgcattggctgttctacaagcacagatattaaaacaaccgacgccgccactgac

SEQ ID NO: 772680 - DNA, 75 bp, synthetic construct
  source 1..75: mol_type = other DNA
agcaaccagtaaaccattgattccaataatgaagacactttttacggatgttaccggtactgtaccggatgctga

SEQ ID NO: 772681 - DNA, 75 bp, synthetic construct
  source 1..75: mol_type = other DNA
aaatttgaaaacccggtttactggggcgttgacctctcttccgagcatgaacgttatctggctgaagagcacttt

SEQ ID NO: 772682 - DNA, 75 bp, synthetic construct
  source 1..75: mol_type = other DNA
gagagtgttttatctgtgaactcaggctgccagatcatcgtttccgatggaagcataataagctttttctgcttc

SEQ ID NO: 772683 - DNA, 75 bp, synthetic construct
  source 1..75: mol_type = other DNA
cctcccggcagcaccacgacattaggcctttttgcctgggcggttgcatttatcgtctttactgcattttttaac

SEQ ID NO: 772684 - DNA, 75 bp, synthetic construct
  source 1..75: mol_type = other DNA
aatcaataacgcgctgaatgttttacaagcgcagatattaaaacagccgacgccgccgctgacgtattatccgca

SEQ ID NO: 772685 - DNA, 75 bp, synthetic construct
  source 1..75: mol_type = other DNA
ggttgggttgaagatccagacacttacccgatggcagcaaaacgccacagcattgagtatctgcgtgaagtcgct

SEQ ID NO: 772686 - DNA, 75 bp, synthetic construct
  source 1..75: mol_type = other DNA
gtgtgctgcacgttgttgatattcacactcctgacccggaatcgcctgtgcgaagtccggctgaaggacggatac

SEQ ID NO: 772687 - DNA, 75 bp, synthetic construct
  source 1..75: mol_type = other DNA
atgattaagattgagaatttgacgaagtcatatcgtacgccaacggggcgacactatgtgtttaaggatttaaac

SEQ ID NO: 772688 - DNA, 75 bp, synthetic construct
  source 1..75: mol_type = other DNA
ttcttcggcaaagagtccttcctgaccgtatccggccagttgaacggcgaaacctatgcctgtgcgctgtccaaa

SEQ ID NO: 772689 - DNA, 75 bp, synthetic construct
  source 1..75: mol_type = other DNA
agatgggcctgaacaaagaagattactggtggtatcgcgatctgcgtcgctacggtactgttccgcattccggtt

SEQ ID NO: 772690 - DNA, 75 bp, synthetic construct
  source 1..75: mol_type = other DNA
cgcctacgtgactggcgttcaaaacgtgcgtgacgtaattccgttcccacgcactccacgtaacgccagtttcta

SEQ ID NO: 772691 - DNA, 75 bp, synthetic construct
  source 1..75: mol_type = other DNA
cgtctggacagccagcagcgccagattaatgaaaaccacaaggaaatgaaacgagcagcagcacagtctgcggcc

SEQ ID NO: 772692 - DNA, 75 bp, synthetic construct
  source 1..75: mol_type = other DNA
tgaaagatggcgatattgtgttgctgggtggtctggcagaaaacaaggattcgcaggccagcacaggattatcat

SEQ ID NO: 772693 - DNA, 75 bp, synthetic construct
  source 1..75: mol_type = other DNA
ctgcaatccaccggggcgacggtccggctcggtgggcaggaggtgaccttgccgccgcgcccgttcctggacatc

SEQ ID NO: 772694 - DNA, 75 bp, synthetic construct
  source 1..75: mol_type = other DNA
atgaaaagcgggctcacaattcgggaagacaattacagcagcgttctggatgcgctgaagcagctgtcaggcact

SEQ ID NO: 772695 - DNA, 75 bp, synthetic construct
  source 1..75: mol_type = other DNA
agatattttcactttggatgaattcttaaacacaagtcgaattatgagtgaactttcagaagagataaaagaaaa

SEQ ID NO: 772696 - DNA, 75 bp, synthetic construct
  source 1..75: mol_type = other DNA
acccggcggcagaagtagcgaaagcgcgtgattgggtgaaagcgcgcatggccaaagcaggcatggtggaggcgg

SEQ ID NO: 772697 - DNA, 75 bp, synthetic construct
  source 1..75: mol_type = other DNA
tggcgtcttcaaaaacgtgccgtttggcgaaggcgtagtggatttcgaacgttgcttcgaaacgctcaaacagag

SEQ ID NO: 772698 - DNA, 75 bp, synthetic construct
  source 1..75: mol_type = other DNA
atgaaaaaaatcatgatactgctcagtttactgatgttcctgcctctgacggcaatcagtaagcccttaattcca

SEQ ID NO: 772699 - DNA, 75 bp, synthetic construct
  source 1..75: mol_type = other DNA
tgacgctgaaggtgaacaacaccgtcatgtcggggtggagccatatccgggtgacgcggggtattgagcgcctgc

SEQ ID NO: 772700 - DNA, 75 bp, synthetic construct
  source 1..75: mol_type = other DNA
tacgggcgttccatggcagtgaacgtcacggtggacagctggcgtgacagtgcgggaacgctgtggcagcccaac

SEQ ID NO: 772701 - DNA, 75 bp, synthetic construct
  source 1..75: mol_type = other DNA
gggttcgctctatattttactggaagaaaaactcgctattaaacctttagaagcaacggaagttatctctgcccg

SEQ ID NO: 772702 - DNA, 75 bp, synthetic construct
  source 1..75: mol_type = other DNA
gcttccctcgccccttgagcgtcaattactggaactgactgccgatgacgtcgtattaagttgtacccgcgtcac

SEQ ID NO: 772703 - DNA, 75 bp, synthetic construct
  source 1..75: mol_type = other DNA
aggcagcgtcctgttactctttaccacccgcgagccacggttaattatgataaccaacggccaggttgaaagcgg

SEQ ID NO: 772704 - DNA, 75 bp, synthetic construct
  source 1..75: mol_type = other DNA
tgactgggacgatcttgctttgccgatctatcaggacgctttattgatgagtagtccgtcgcgttcagatactaa

SEQ ID NO: 772705 - DNA, 75 bp, synthetic construct
  source 1..75: mol_type = other DNA
ctcgctgtaatcatcggtttaattggcgctggcggtaagctctcgcaaaatcggctttcgggccttattttcgaa

SEQ ID NO: 772706 - DNA, 75 bp, synthetic construct
  source 1..75: mol_type = other DNA
gcaaaagtacctgggaaccgttctatttcgctatcgtctgcggcgtgatttatcttgttttcaccaccgtttcca

SEQ ID NO: 772707 - DNA, 75 bp, synthetic construct
  source 1..75: mol_type = other DNA
gcgtcgggcagattgatatcgatccgatggtcgctggtattatcactctcggttttatctacggtgcttatttta

SEQ ID NO: 772708 - DNA, 75 bp, synthetic construct
  source 1..75: mol_type = other DNA
gctggcaagtgtttcggcggattatgtttccggcgatgatgcgttatgccctgccggggattggcaacaactggc

SEQ ID NO: 772709 - DNA, 75 bp, synthetic construct
  source 1..75: mol_type = other DNA
gatggttgccggtattatcactctcggttttatctacggcgcttacttcactgaaacatttcgcggtgcgtttat

SEQ ID NO: 772710 - DNA, 75 bp, synthetic construct
  source 1..75: mol_type = other DNA
ctgccaggcattggcaacaactggcaggtgatcctcaaatctaccgcactggtttcgttactcggcctggaagat

SEQ ID NO: 772711 - DNA, 75 bp, synthetic construct
  source 1..75: mol_type = other DNA
tcaacggtgcaggcaagagtaccctgcttaaactcataaccgggacgtccaggccgacgactggagaaattgaaa

SEQ ID NO: 772712 - DNA, 75 bp, synthetic construct
  source 1..75: mol_type = other DNA
aaaacagctggaaatcattatatgccgcagaacatcggcttaagcgtaaattgccagatgtgcgcgcattattaa

SEQ ID NO: 772713 - DNA, 75 bp, synthetic construct
  source 1..75: mol_type = other DNA
gggaaacgttgctgacaagtgcaggaaacctggtgacaatctcctcccgcagttttggcgtagccgataaaataa

SEQ ID NO: 772714 - DNA, 75 bp, synthetic construct
  source 1..75: mol_type = other DNA
ggccattgtgtttaaggacgataatgcggttagtttttatgaggatgttcaggaggggatagaggagtatataga

SEQ ID NO: 772715 - DNA, 75 bp, synthetic construct
  source 1..75: mol_type = other DNA
cgtttgatgatgtgcccgcagaaagtcaaaatctggtgccggagtcgatccgtgcaacctccgtggcagtagcga

SEQ ID NO: 772716 - DNA, 75 bp, synthetic construct
  source 1..75: mol_type = other DNA
attcactacctgttaagtccgaaaggacagcgtattctggccgatgccaatacaggaaaatatccggtgacacca

SEQ ID NO: 772717 - DNA, 75 bp, synthetic construct
  source 1..75: mol_type = other DNA
ctgacagtgacaacggtaaaaacagtgaaaatactgaagacataacagaaagtgtgaaggcccctggtgcggata

SEQ ID NO: 772718 - DNA, 75 bp, synthetic construct
  source 1..75: mol_type = other DNA
cgccactgatccgcagagcagcgattttgcccaattacctggtgaaacggccctgtccgttgcgcccggtgattt

SEQ ID NO: 772719 - DNA, 75 bp, synthetic construct
  source 1..75: mol_type = other DNA
ggttcgttacggaacaacatttatgccggagggcagggtgttgttgcgccatctgaaacagcagcgctacgttca

SEQ ID NO: 772720 - DNA, 75 bp, synthetic construct
  source 1..75: mol_type = other DNA
ccttcgaggggtcttagaccccaccaatgggaaaagcaagaggattcagggaattaaatcatgtattagcactaa

SEQ ID NO: 772721 - DNA, 75 bp, synthetic construct
  source 1..75: mol_type = other DNA
actgaaaacgccaaatgtggacggtttcagagcgtatgtcagggcgtttgtgcatcaggccaaaccgttttactt

SEQ ID NO: 772722 - DNA, 75 bp, synthetic construct
  source 1..75: mol_type = other DNA
attcctgatatagaagaaagtgaagatgaatcggcaaaggacacggaatcccatgtcctggtcaaccaacttcat

SEQ ID NO: 772723 - DNA, 75 bp, synthetic construct
  source 1..75: mol_type = other DNA
caaaaagcacctgctggatctcccgggcccgaaggtcgcagtaacgtatcttccccagacgaggttcaatgtatt

SEQ ID NO: 772724 - DNA, 75 bp, synthetic construct
  source 1..75: mol_type = other DNA
gatcgtgtccccgccaccatcggggcgatggcagtttcacggttcaccaaaacacttaaagaaaacaatatgtct

SEQ ID NO: 772725 - DNA, 75 bp, synthetic construct
  source 1..75: mol_type = other DNA
cgacagagcagggtttgaagcctatgctctgcgggatgccgagattgcggttcgttatgctttacaggttcgcaa

SEQ ID NO: 772726 - DNA, 75 bp, synthetic construct
  source 1..75: mol_type = other DNA
aggactggttcgttacggaacaacatttatgccggagggcagggtgttgctgcgccatcttaagcaacagcagtt

SEQ ID NO: 772727 - DNA, 75 bp, synthetic construct
  source 1..75: mol_type = other DNA
aggactggttcgttacggcacaacatttatgccggagggcagggtgttgctgcgacatcttaagcaacagcagtt

SEQ ID NO: 772728 - DNA, 75 bp, synthetic construct
  source 1..75: mol_type = other DNA
agctgattctatattgcttgctctttatacggggatgcgtattggtgaggtatgtaccctgaaatgggagtactg

SEQ ID NO: 772729 - DNA, 75 bp, synthetic construct
  source 1..75: mol_type = other DNA
caacgccacctgtccaggctctgtgcgtgaagcccccaccacctccggcgtgggcaatgatgccgccgtcgaact

SEQ ID NO: 772730 - DNA, 75 bp, synthetic construct
  source 1..75: mol_type = other DNA
cgttacacattgcgcaaaacggaacggtggtcgccgagggtgattatggattccgcctcacgaccgcaccaggtg

SEQ ID NO: 772731 - DNA, 75 bp, synthetic construct
  source 1..75: mol_type = other DNA
tcatcaggtatgcgatcgcgtttaggctttggtttaagcatggcatttaagtttgattattatatcgtcgatgaa

SEQ ID NO: 772732 - DNA, 75 bp, synthetic construct
  source 1..75: mol_type = other DNA
cgaaacgttctcggtatccgggggggaatcatcagcgaccaggcagccttgagaacgctacaggagtacatcagg

SEQ ID NO: 772733 - DNA, 75 bp, synthetic construct
  source 1..75: mol_type = other DNA
cgtcgaactctctccagttgctggacgaaacgttctcggtatccgggacggaattatccgcgaccaaacagcact

SEQ ID NO: 772734 - DNA, 75 bp, synthetic construct
  source 1..75: mol_type = other DNA
taccgcgataacgccatcacctacaaagcgcagcgcgataaaaaagtcagagagctggagctggcgaacgcgaca

SEQ ID NO: 772735 - DNA, 75 bp, synthetic construct
  source 1..75: mol_type = other DNA
gtgatgctgatgcactcgatgctaaatacacgaaggagttagccgatgcaaaagctgaaaatgatgctctgcagc

SEQ ID NO: 772736 - DNA, 75 bp, synthetic construct
  source 1..75: mol_type = other DNA
atgcgccaggcgctgcataattctggtatcgcgccggaatacattgctgccgtttcggcatgttcgatgcgtgaa

SEQ ID NO: 772737 - DNA, 75 bp, synthetic construct
  source 1..75: mol_type = other DNA
ccaggacaccgttgaaaaatcccgcgagcaaaccaagcagtaaagtcgcgacacaagcaacaggtagtgaatacc

SEQ ID NO: 772738 - DNA, 75 bp, synthetic construct
  source 1..75: mol_type = other DNA
aatcaaagtattacctgatggcgctggatgcaggtaccggaagtattcgggctgtgatattcgacctggaaggca

SEQ ID NO: 772739 - DNA, 75 bp, synthetic construct
  source 1..75: mol_type = other DNA
ttcccttgctgcatttattctggtgagtgaacttttgtctgctcggggggacaaataccttgatatttgccttgt

SEQ ID NO: 772740 - DNA, 75 bp, synthetic construct
  source 1..75: mol_type = other DNA
ccatccttgaaaaacagccgtttgtggtgctggatggcgcgatggcgacggagctggaagcgcgcggctgtaacc

SEQ ID NO: 772741 - DNA, 75 bp, synthetic construct
  source 1..75: mol_type = other DNA
tgaaaaagtcgctcagtgaaatccgccccgcactggatactgctgctctgtttgccgactgtgaaaatgcggatg

SEQ ID NO: 772742 - DNA, 75 bp, synthetic construct
  source 1..75: mol_type = other DNA
tttgttgaaagaagagcactgcctctatcgtcttgccagccgtctgaccaacggcgcaaccagcagcgatctcga

SEQ ID NO: 772743 - DNA, 75 bp, synthetic construct
  source 1..75: mol_type = other DNA
ctcaatgcgtaatgaccttgcacacaatccatcaatacaaagcattgctgattcaaggatccagagcctgaagga

SEQ ID NO: 772744 - DNA, 75 bp, synthetic construct
  source 1..75: mol_type = other DNA
aacccgttgaagtgaatatacagctgacacacagagaagcgcaggctctggcgcaactggttaagcgtctgggat

SEQ ID NO: 772745 - DNA, 75 bp, synthetic construct
  source 1..75: mol_type = other DNA
gaagcagtcaggtctggcgttatcggtgtgtcggaaaccgagccgtccggctggaggtcagggaactctgggcag

SEQ ID NO: 772746 - DNA, 75 bp, synthetic construct
  source 1..75: mol_type = other DNA
aaactggaatccatccctggcttcgacatcttcccagatgacaaccgtttccgcgaaattattaaagacgtcggc

SEQ ID NO: 772747 - DNA, 75 bp, synthetic construct
  source 1..75: mol_type = other DNA
tgccaatatgggctatcaggctttatgcctgtgtatcgataatagctttacgattgccagaatatcgccgctctg

SEQ ID NO: 772748 - DNA, 75 bp, synthetic construct
  source 1..75: mol_type = other DNA
tttcgtcaacaaaccgggattgcgccatttatcgtggttgttcctgacattaatgaaaccagtctcaggaaaaat

SEQ ID NO: 772749 - DNA, 75 bp, synthetic construct
  source 1..75: mol_type = other DNA
ataaggtgtcggataaacgcactcctcgcgagattgctgaatggctactgatgctgatggggcaagagctgcgca

SEQ ID NO: 772750 - DNA, 75 bp, synthetic construct
  source 1..75: mol_type = other DNA
gcaatggttaaatctctatgccccaaacgatcatgcgttggaaggcgatattgtgcagaaaatggtgctggaggc

SEQ ID NO: 772751 - DNA, 75 bp, synthetic construct
  source 1..75: mol_type = other DNA
aagtctctgcgcgaattctggaataatcgcagcagtgatacaaactgggtgccaaattgggagcatcatacggaa

SEQ ID NO: 772752 - DNA, 75 bp, synthetic construct
  source 1..75: mol_type = other DNA
ctggaacgccgcacaacgtgcttcgctggtcactgcgatgatcgaaacgggtgttgccattccgtcaatgtgcct

SEQ ID NO: 772753 - DNA, 75 bp, synthetic construct
  source 1..75: mol_type = other DNA
cgtctttttcaccgcttgctgcgtaaccgacgtgaagatcccgcgctggaatacctatttccaggtctggccggg

SEQ ID NO: 772754 - DNA, 75 bp, synthetic construct
  source 1..75: mol_type = other DNA
tatttgctatgggtatgtttatgtatcgattatacttactgggcgctatgttaaaaaaaacaattgcgcttacaa

SEQ ID NO: 772755 - DNA, 75 bp, synthetic construct
  source 1..75: mol_type = other DNA
ttcataattagtgggtttattataccttacgtagcatatggtggctctcaatcagaaggagaattcaaaatatct

SEQ ID NO: 772756 - DNA, 75 bp, synthetic construct
  source 1..75: mol_type = other DNA
cagagttcgctgaatccattttaaatggatataaaaaattcgaattcaggaagacaatttttcggaacaaagaag

SEQ ID NO: 772757 - DNA, 75 bp, synthetic construct
  source 1..75: mol_type = other DNA
atctatgatcaaccgcttcatctaagttcattaggtgataacataacggccccgcaatcatatcggtacttatga

SEQ ID NO: 772758 - DNA, 75 bp, synthetic construct
  source 1..75: mol_type = other DNA
ttatatcaatggaattgatcatgaagctgtaattcaatcaaaaaacatagataattactttctgttcacgtatag

SEQ ID NO: 772759 - DNA, 75 bp, synthetic construct
  source 1..75: mol_type = other DNA
gtccccactacgattggtgcgatggctgtttcccggtttcttaagaccattaaggaaagcggccagtctcctgaa

SEQ ID NO: 772760 - DNA, 75 bp, synthetic construct
  source 1..75: mol_type = other DNA
ctgaaaggaattcgcagtacagttagcagttttaaaaaccgctacggtattgattttgatgaagtcgaaaatcgt

SEQ ID NO: 772761 - DNA, 75 bp, synthetic construct
  source 1..75: mol_type = other DNA
gacgtgccgtttggcgaaggctgcgtcgatttcgttggcatcttcaaaacgctgcatgaactgaactatcgcggt

SEQ ID NO: 772762 - DNA, 75 bp, synthetic construct
  source 1..75: mol_type = other DNA
gtaggacaaaatcgaagcgatgacgtccttgttcgccttttcctgcgggccctggctcaatatcaatgggggctt

SEQ ID NO: 772763 - DNA, 75 bp, synthetic construct
  source 1..75: mol_type = other DNA
gatattccacgcgacgactataaccgctatatggtggacctctatcttaacagggctccgggtcagaagcttcgc

SEQ ID NO: 772764 - DNA, 75 bp, synthetic construct
  source 1..75: mol_type = other DNA
tgcaacaggtacgcgaaaatcgtaatcgccatgataaagggtctctggaggagaaattctggaaagagatcggaa

SEQ ID NO: 772765 - DNA, 75 bp, synthetic construct
  source 1..75: mol_type = other DNA
tctcgctgtttggcttgttgatttccgtagcgtttgccccggaaacacgtgggatgtcactggcgcagaccagca

SEQ ID NO: 772766 - DNA, 75 bp, synthetic construct
  source 1..75: mol_type = other DNA
caaaaaaattgaagaaatggtttcgatagcaaatcgcaggaacatgcggtctgacgtaacagggatcttactgtt

SEQ ID NO: 772767 - DNA, 75 bp, synthetic construct
  source 1..75: mol_type = other DNA
atggcgatggtatttattttgctaaatcttgatttccgttatcaaaaaaatctctctttatataaattggaatat

SEQ ID NO: 772768 - DNA, 75 bp, synthetic construct
  source 1..75: mol_type = other DNA
ccccaatttaaccaataatgaacctattaataaatggtggggagaagtagccgagagtatccttgaaaaacatta

SEQ ID NO: 772769 - DNA, 75 bp, synthetic construct
  source 1..75: mol_type = other DNA
atcagcgtcattacccaggaagacctgcagcgaaaaccggtacagaatctgaaggatgtcctcaaaagaagtgcc

SEQ ID NO: 772770 - DNA, 75 bp, synthetic construct
  source 1..75: mol_type = other DNA
tacattgtaccttttatggggtttagttttgaagacatgcaaaagaatatagcatatcttttgcttgtagtagta

SEQ ID NO: 772771 - DNA, 75 bp, synthetic construct
  source 1..75: mol_type = other DNA
atgaacgacagtgaatttcatcgcctggctgaccaactgtggctaaccattgaagaacacctggacgactgggat

SEQ ID NO: 772772 - DNA, 75 bp, synthetic construct
  source 1..75: mol_type = other DNA
tcactgactgaaatctggcggggtacggaagatgaccttgcggatgcggtactggttgccacgacgccggggcag

SEQ ID NO: 772773 - DNA, 75 bp, synthetic construct
  source 1..75: mol_type = other DNA
tgaagtaaaggccggggtaagtatcacttcaccagttatccggagtgccgttattcagaacggaaattttcaggt

SEQ ID NO: 772774 - DNA, 75 bp, synthetic construct
  source 1..75: mol_type = other DNA
ggctcggttctccttgagtgggatatgcccaattatcgaggtcattcactgactgaagtctggcggggtacggaa

SEQ ID NO: 772775 - DNA, 75 bp, synthetic construct
  source 1..75: mol_type = other DNA
tgaatctgcgatagtattagcgctttctgttgcttctgtatccggtgtgttatattattacaataatatgcaggg

SEQ ID NO: 772776 - DNA, 75 bp, synthetic construct
  source 1..75: mol_type = other DNA
attttgacagatacgacaatcctgtttacacgcgcaccaacctcgggaacaccgtttcaggagtatgggatgtgg

SEQ ID NO: 772777 - DNA, 75 bp, synthetic construct
  source 1..75: mol_type = other DNA
ggaaggatttatccactgttgtggagaacatggaaattggcaccgggcagcgtggtgacggacgacacgcgtttg

SEQ ID NO: 772778 - DNA, 75 bp, synthetic construct
  source 1..75: mol_type = other DNA
ttgccgccggtagcgttatcgctgcgctttccgactccatctggggaattattctgggccgggcgctacaaggct

SEQ ID NO: 772779 - DNA, 75 bp, synthetic construct
  source 1..75: mol_type = other DNA
cgccatctgacgcaacagacaaatctttcactgttgagtcagatcaccctgatattgtccaggttgatggcacta

SEQ ID NO: 772780 - DNA, 75 bp, synthetic construct
  source 1..75: mol_type = other DNA
ccaggcggtgagttctgcacgtgatgtaggtctgactctgctggaaacgatgggtggcaaagcgccttcagccac

SEQ ID NO: 772781 - DNA, 75 bp, synthetic construct
  source 1..75: mol_type = other DNA
ttgcctgtacatcactaccccgtggcaatacttccgttatctatacactgaccacatatcactatcttatatatt

SEQ ID NO: 772782 - DNA, 75 bp, synthetic construct
  source 1..75: mol_type = other DNA
ggcgaaccccaaagcgaaacgtagtgagtacgtagacgagttggaagtgagagaactttattttgacaaaattaa

SEQ ID NO: 772783 - DNA, 75 bp, synthetic construct
  source 1..75: mol_type = other DNA
aaaaagtgggtggcatatattagcgacgcagggaagcgcattaatctcggatactttaagagtctcgatgatgca

SEQ ID NO: 772784 - DNA, 75 bp, synthetic construct
  source 1..75: mol_type = other DNA
cgccttcagtagcggagcaggaaggacatctgatggaaatggaagccatgcaagcacctaaaaatcaccatcata

SEQ ID NO: 772785 - DNA, 75 bp, synthetic construct
  source 1..75: mol_type = other DNA
tgactcaggccgtttttcagattccatttggcctgctttccgaccgcataggccgcaaaccgcttatcgttggcg

SEQ ID NO: 772786 - DNA, 75 bp, synthetic construct
  source 1..75: mol_type = other DNA
atgaacgattacaaaatgacgccagcggagcggcgcgcgacctggggtttaggaaccgtattttcattgcgcatg

SEQ ID NO: 772787 - DNA, 75 bp, synthetic construct
  source 1..75: mol_type = other DNA
atctggggaattattctgggccgggcgttacaaggttccggtgcaattgccgctgccgttatggcgttgctgtcc

SEQ ID NO: 772788 - DNA, 75 bp, synthetic construct
  source 1..75: mol_type = other DNA
tgatagcactacgttaaaatctaaagtattcgcctgggcatacgaattatctgccgactttcgtttgggtaaagt

SEQ ID NO: 772789 - DNA, 75 bp, synthetic construct
  source 1..75: mol_type = other DNA
cattatctacgctgaagttaagcgcaaaatgaagcaagtctttgtcttctgcgtcgggctgatcgtggttgcgga

SEQ ID NO: 772790 - DNA, 75 bp, synthetic construct
  source 1..75: mol_type = other DNA
tggcggaaccgcggctgctgaaactcaactttggcattatgtgtctgcatattttgctgatgtcgacgtttgttg

SEQ ID NO: 772791 - DNA, 75 bp, synthetic construct
  source 1..75: mol_type = other DNA
ggatgtgggctggtcatataaccccggctcggcggcgttcggcacagaccaggcgctgatccgcaaactgatcga

SEQ ID NO: 772792 - DNA, 75 bp, synthetic construct
  source 1..75: mol_type = other DNA
acaccggtaaaagatgagaagccacaaatgtcccctgaaaacagacagagcacagcccctgaaccggcagtgtcg

SEQ ID NO: 772793 - DNA, 75 bp, synthetic construct
  source 1..75: mol_type = other DNA
taatcgtcagttgaatcttctgctggtccacagcgcagatgagcatctgcagggagtggtccgtctgaacggcac

SEQ ID NO: 772794 - DNA, 75 bp, synthetic construct
  source 1..75: mol_type = other DNA
ggtaatgcccccaatgaactgataccagccatcgcctctgccgataaggacaatcgtcagttgaatcttctgctg

SEQ ID NO: 772795 - DNA, 75 bp, synthetic construct
  source 1..75: mol_type = other DNA
aaaaggccgccagatacgccgctacttcatcgagtgcgaaaagaaacttcgccagagccttttacctgcaccaat

SEQ ID NO: 772796 - DNA, 75 bp, synthetic construct
  source 1..75: mol_type = other DNA
tcgtcacccacagacccacgccggaactcaaccgcctgtcaccggaagagacaacaatggcacaaccggcccccc

SEQ ID NO: 772797 - DNA, 75 bp, synthetic construct
  source 1..75: mol_type = other DNA
gtcctgaaccatcggctaaagataaaccacaggagaacgtagtgtctgctactgataatgacgcagagaacacct

SEQ ID NO: 772798 - DNA, 75 bp, synthetic construct
  source 1..75: mol_type = other DNA
atggttggccctttgacacgccagtgcatccagcaggtacatttcagcaaagcatttattggtattgatggctgg

SEQ ID NO: 772799 - DNA, 75 bp, synthetic construct
  source 1..75: mol_type = other DNA
ctgattgagttccctgccctgatgagtctttgcggactggtgttttttggtttttcctggttttgcagcaagtgt

SEQ ID NO: 772800 - DNA, 75 bp, synthetic construct
  source 1..75: mol_type = other DNA
aaatcttcgcggaagatgaagcgggccgtcagcaactgctctcccgcgtggtggcgttctaccaccacacgctgc

SEQ ID NO: 772801 - DNA, 75 bp, synthetic construct
  source 1..75: mol_type = other DNA
accactgaaccgaccgcagaagataaaccacacgagaacgttgtttccgctgccgataccagagaagaaaatgcc

SEQ ID NO: 772802 - DNA, 75 bp, synthetic construct
  source 1..75: mol_type = other DNA
ctgtcagtgcacagccacagcaacccgacacaccggaggaagagccccccggcaaactcagacccggtgaaagtg

SEQ ID NO: 772803 - DNA, 75 bp, synthetic construct
  source 1..75: mol_type = other DNA
atgggtaaaggctgggatgcctcgctgagagccgggcggcgtgaccgcctgcgtcaggaggttttacatcgtatg

SEQ ID NO: 772804 - DNA, 75 bp, synthetic construct
  source 1..75: mol_type = other DNA
cgatgaactatgttgatcgcaaagttatcagccttgatgcttccgtgctcttcgatatgccaagcccaactatgc

SEQ ID NO: 772805 - DNA, 75 bp, synthetic construct
  source 1..75: mol_type = other DNA
catcactaatgatcaggcagcgctgttacgtcagacgctcgctgcctttgctccggctcgctgccatctggcaag

SEQ ID NO: 772806 - DNA, 75 bp, synthetic construct
  source 1..75: mol_type = other DNA
ggaaattatccgccgttttggcttcggtgaggtggatctgattgaaggcactggccagatcggatacgacggcaa

SEQ ID NO: 772807 - DNA, 75 bp, synthetic construct
  source 1..75: mol_type = other DNA
tactgatggtctgtctcgtcgatatcgtcgacagttccgcgctgccatggctgggcgagcagttctcgctgttcg

SEQ ID NO: 772808 - DNA, 75 bp, synthetic construct
  source 1..75: mol_type = other DNA
acccggattagcacactggattcgtcaaccagtgaatcgcttaatgaggtcgacaagcgcatcactaaactggat

SEQ ID NO: 772809 - DNA, 75 bp, synthetic construct
  source 1..75: mol_type = other DNA
gatggacaggatgagtttaaaggcgggaatagtcatctgatcaatactcacgagggattcgatccgactcctgtc

SEQ ID NO: 772810 - DNA, 75 bp, synthetic construct
  source 1..75: mol_type = other DNA
catggcgatgcagaagcctgggcggtctatcgcgtcatccttcagcagcccattactaacgatcaggcagcactt

SEQ ID NO: 772811 - DNA, 75 bp, synthetic construct
  source 1..75: mol_type = other DNA
atgatgagtgtggatattgatatcattaaggcccgggcaaacaacgaatatcgcctgtccaaagtccgcggcgaa

SEQ ID NO: 772812 - DNA, 75 bp, synthetic construct
  source 1..75: mol_type = other DNA
agctgaatcccgaagccgcggtggcggagcggatttactgggcagaagatgaatctgtcgcccgtctccatctta

SEQ ID NO: 772813 - DNA, 75 bp, synthetic construct
  source 1..75: mol_type = other DNA
aagcccgtgcgaataacgaatatcgcctttctaaagttcgcggagaagccatgatcagcgtgcgcatacctggtg

SEQ ID NO: 772814 - DNA, 75 bp, synthetic construct
  source 1..75: mol_type = other DNA
tgatgaccaccgtttccggtgtcgaaatgtctcgcgacctggcgtatgccaaagtatatgtgacgttcctcaacg

SEQ ID NO: 772815 - DNA, 75 bp, synthetic construct
  source 1..75: mol_type = other DNA
ctgcgtcagacgctcgctgcatttgcaccggcccgctgccatctggccagcctggagtatcagtctgtggccatt

SEQ ID NO: 772816 - DNA, 75 bp, synthetic construct
  source 1..75: mol_type = other DNA
tctatcgcgtcatccttcaacaacccatcactaacgatcaggcggcgctgttacgtcagacgcttgctgcctttg

SEQ ID NO: 772817 - DNA, 75 bp, synthetic construct
  source 1..75: mol_type = other DNA
cacacccgcagcgtcagcggatgtgaacagcgacatgaatcagttctttaataagctgggatttgcttccaatac

SEQ ID NO: 772818 - DNA, 75 bp, synthetic construct
  source 1..75: mol_type = other DNA
aactatctccaaaaaaacatgctttcactatcgaaggagtggaattttttatccatcgtgcacgtactcgcgatc

SEQ ID NO: 772819 - DNA, 75 bp, synthetic construct
  source 1..75: mol_type = other DNA
tggagtgcgacaccctgtgttttatgggcaccaccgtggtgagcggcacggcacaagcaatggtgattgctacag

SEQ ID NO: 772820 - DNA, 75 bp, synthetic construct
  source 1..75: mol_type = other DNA
ttgcagccgcttatccgtcaggcgtgatccctgatatgcgtggctggacgattaagggcaaacctgccagtggtc

SEQ ID NO: 772821 - DNA, 75 bp, synthetic construct
  source 1..75: mol_type = other DNA
agaatttctctggtgctattacgctctattacgactggaacaacgaagaaaataaggcactggcaacacaatatg

SEQ ID NO: 772822 - DNA, 75 bp, synthetic construct
  source 1..75: mol_type = other DNA
caggacgaacgcctgccgttcctgatcgctgaattcctgacggagagcaccacgatgcaggatattcagcggatc

SEQ ID NO: 772823 - DNA, 75 bp, synthetic construct
  source 1..75: mol_type = other DNA
atttgcgccgttatttctggtgcataagactgggagatatagaggattttggggaaacacatcccgatgttttga

SEQ ID NO: 772824 - DNA, 75 bp, synthetic construct
  source 1..75: mol_type = other DNA
atttgcgccgttatttctggtgcataatgctgggaagatatagaggatttggggaaacacatctcgattttttga

SEQ ID NO: 772825 - DNA, 75 bp, synthetic construct
  source 1..75: mol_type = other DNA
ggctatcccgtttgataacgtcgacgatgagcaaattcaaaagccacagcgctggaatccggcggatctggggcg

SEQ ID NO: 772826 - DNA, 75 bp, synthetic construct
  source 1..75: mol_type = other DNA
gtgggtggcggatggtttacgcagccgttcctgatagctgaattcctgacagacagcacgtctatgcaggatatt

SEQ ID NO: 772827 - DNA, 75 bp, synthetic construct
  source 1..75: mol_type = other DNA
tcccgccgtggctcccgaaccggcagcaccggaggataagaatctggaagaaacccgtaagaacgtccagcatct

SEQ ID NO: 772828 - DNA, 75 bp, synthetic construct
  source 1..75: mol_type = other DNA
acgatatttacgttgcaatcggaaattatgcgactggtgtaaatattcaatgggattataccagtaatgccagcg

SEQ ID NO: 772829 - DNA, 75 bp, synthetic construct
  source 1..75: mol_type = other DNA
acaaattttgcctgggttaatacatctggtgatacttacgatatttacgttgcaatcggaaattatgcgactggt

SEQ ID NO: 772830 - DNA, 75 bp, synthetic construct
  source 1..75: mol_type = other DNA
gcacaaccggttggttttatttcccgcattgaacattatatcgatatgttatttgttgaccctgaatacacccgc

SEQ ID NO: 772831 - DNA, 75 bp, synthetic construct
  source 1..75: mol_type = other DNA
ttgccgtcattaatgcacaaccggttggttttattacctgcgttgaacgttatatcgatatgttatttgttgacc

SEQ ID NO: 772832 - DNA, 75 bp, synthetic construct
  source 1..75: mol_type = other DNA
ctgaaacggcagcgggacagagtgcctcagctgcggcaggctcaaaaacagcggctgcgtcgtctgccagtgcag

SEQ ID NO: 772833 - DNA, 75 bp, synthetic construct
  source 1..75: mol_type = other DNA
ttgcgtgcaggtaatggtaatccgaaggggattactggtgctttatggcagcgcacatcgacagggtttacaaat

SEQ ID NO: 772834 - DNA, 75 bp, synthetic construct
  source 1..75: mol_type = other DNA
acagaactgcacaatccagctgaaagcaaaacgtaacagcaccgcggtggtggtgaacacgctggcttcagaaaa

SEQ ID NO: 772835 - DNA, 75 bp, synthetic construct
  source 1..75: mol_type = other DNA
ataaactggatgtgattgttaatgcttaccgggttatcaatatggataagctgaaatcggatatccggggcggaa

SEQ ID NO: 772836 - DNA, 75 bp, synthetic construct
  source 1..75: mol_type = other DNA
taactcataccaggtacaaggggtggttggtctgggcattggcacgatggcgaatacgaactctgctggcgcgca

SEQ ID NO: 772837 - DNA, 75 bp, synthetic construct
  source 1..75: mol_type = other DNA
tcggcggcgtcatcggcatcatctgcgtctgcttcaaaagatgaggcgaccagacaggcgtcagcagcgaggggc

SEQ ID NO: 772838 - DNA, 75 bp, synthetic construct
  source 1..75: mol_type = other DNA
gcgttattctgttggtggagggattcccgccgtcacatgccgggaccatcaccgtgtatgaagattcccgacccg

SEQ ID NO: 772839 - DNA, 75 bp, synthetic construct
  source 1..75: mol_type = other DNA
aacgataaaccgctgacatcagatatccgcttatccgcaacggatgtgaatgcctactccctgggctggtccgga

SEQ ID NO: 772840 - DNA, 75 bp, synthetic construct
  source 1..75: mol_type = other DNA
atgtgcaagggttcctggtcttatggcaataataaaatcattactgatactgactgcggtaatattcatctcgcc

SEQ ID NO: 772841 - DNA, 75 bp, synthetic construct
  source 1..75: mol_type = other DNA
ttgttctgcacgatatatcaggcaatccgatcaaagtttctgaagggatggaatttgtgcaatcaggtactaacg

SEQ ID NO: 772842 - DNA, 75 bp, synthetic construct
  source 1..75: mol_type = other DNA
gatgaagagtcagcgcgctcgctggccagtcgttggcaaaaaatcgatgagattccgtttgatttcgagcgtcgc

SEQ ID NO: 772843 - DNA, 75 bp, synthetic construct
  source 1..75: mol_type = other DNA
tgcactgtttgcgctttcggtcgcggtaggcttaacgccagaaatgttgccgatgattgttacctcgacgctggc

SEQ ID NO: 772844 - DNA, 75 bp, synthetic construct
  source 1..75: mol_type = other DNA
cacgccccgctttgattagggggctgggcgttccgctctacccctttcttggaatgtgcgttatctgcgttctgc

SEQ ID NO: 772845 - DNA, 75 bp, synthetic construct
  source 1..75: mol_type = other DNA
aaaatcagcttcaacgtcagttcgtgcgccagggcggcgtgtggatgccgggcgatgaagtgaaaaaagtgacct

SEQ ID NO: 772846 - DNA, 75 bp, synthetic construct
  source 1..75: mol_type = other DNA
gcggcggtcttgccggattactctgcggcctgcaactacaaaaacacgggctgcgttgtgcgattgtcactcgtg

SEQ ID NO: 772847 - DNA, 75 bp, synthetic construct
  source 1..75: mol_type = other DNA
tatcgaccccttgtctcgccagtttctggtagtcaaaaacccgcaacggcagggcgaacgagatgactttgcggc

SEQ ID NO: 772848 - DNA, 75 bp, synthetic construct
  source 1..75: mol_type = other DNA
atacatacctgggtggtaaagacctgttctttggtaacgatgctggacaaatcactgcctctgaccatgcccggt

SEQ ID NO: 772849 - DNA, 75 bp, synthetic construct
  source 1..75: mol_type = other DNA
atttaatcgcgacgtggcagattgacggagcttattttgaatgtgttgatgatgctgacctgacattacttactg

SEQ ID NO: 772850 - DNA, 75 bp, synthetic construct
  source 1..75: mol_type = other DNA
agccgactggctggaaccctgcggctttgccaccaaccaaacgaaatatttcctttatgaaagacctggtgaggc

SEQ ID NO: 772851 - DNA, 75 bp, synthetic construct
  source 1..75: mol_type = other DNA
gtcaccggatgaactgattaaatcacccattgcggcagcggttcgtgagcaatgcgccactcatatctatctggc

SEQ ID NO: 772852 - DNA, 75 bp, synthetic construct
  source 1..75: mol_type = other DNA
gagcctgatgatactgaaacccggcggcatgggcttaaagcccgtctgaagccctggactcagggagaggaattt

SEQ ID NO: 772853 - DNA, 75 bp, synthetic construct
  source 1..75: mol_type = other DNA
acggtagtgatgatgactaaggctttcgccgcccagcagttcggaacgccggagtcttttccacctgagaggaaa

SEQ ID NO: 772854 - DNA, 75 bp, synthetic construct
  source 1..75: mol_type = other DNA
tgcgtgaactcgaccttgccgttgaaaccgcagaaatagagctgccggaactggatgtcctgcgcaataacgcca

SEQ ID NO: 772855 - DNA, 75 bp, synthetic construct
  source 1..75: mol_type = other DNA
cagtggagggtcaggtcatcaactttagcgtaacgctagaaggtgcgacgttaagtggcggaaaagtgagaacca

SEQ ID NO: 772856 - DNA, 75 bp, synthetic construct
  source 1..75: mol_type = other DNA
accgctggtggaatgcaaacagtagatataacgctggtggctggcccggcagacacctcgcagtccgtccttaag

SEQ ID NO: 772857 - DNA, 75 bp, synthetic construct
  source 1..75: mol_type = other DNA
aagtggcggaaaagtgagaactaactcttcaggtcaggctccagtcgttctgaccagcaataaagtcggtacata

SEQ ID NO: 772858 - DNA, 75 bp, synthetic construct
  source 1..75: mol_type = other DNA
ttaacgtcattaacagcggtgaccgatcaaaacggaatcgcgacaacaagcgtgaaaggagcgataacggggagc

SEQ ID NO: 772859 - DNA, 75 bp, synthetic construct
  source 1..75: mol_type = other DNA
cggtacagtgtcagtcaatggtactgacctaccgacaactacattcccttcgcagggattcaccggggcgtatta

SEQ ID NO: 772860 - DNA, 75 bp, synthetic construct
  source 1..75: mol_type = other DNA
tagtgcaaacctaccgacagcttcattcccttcgcagggatttaccggggcgtattatcagttgaataatgacaa

SEQ ID NO: 772861 - DNA, 75 bp, synthetic construct
  source 1..75: mol_type = other DNA
tatgatcatcgtataagggggaaaaagtctgtccagcctacttttaaaagtaaaatcccatttgttaacagggtg

SEQ ID NO: 772862 - DNA, 75 bp, synthetic construct
  source 1..75: mol_type = other DNA
gtcagagtcaccaatagtccgttttatacatacctgggtggtaaagacctgttctttggtaacgatgctggacaa

SEQ ID NO: 772863 - DNA, 75 bp, synthetic construct
  source 1..75: mol_type = other DNA
gtatgcccttattcttcctggctggtatgccatcaggcgtgtaacacagtttgatgaacgcttttttgaccttct

SEQ ID NO: 772864 - DNA, 75 bp, synthetic construct
  source 1..75: mol_type = other DNA
ggcaacgaactgcgcatcccgttggttggggtaggcacgcgcgacgcctacctagccatccgctccgatgaccag

SEQ ID NO: 772865 - DNA, 75 bp, synthetic construct
  source 1..75: mol_type = other DNA
atgagtactctttttaaagggctgacacgccccgctttaatcaggggattgggtgtaccactctttccctttctt

SEQ ID NO: 772866 - DNA, 75 bp, synthetic construct
  source 1..75: mol_type = other DNA
cccattgcggcagcggttcgtgaacaatgcgccactcatatctatctggcaaacccgaaagccaaacgtagtgaa

SEQ ID NO: 772867 - DNA, 75 bp, synthetic construct
  source 1..75: mol_type = other DNA
aatttaaaagcacccacgactacaataatttcgtacgggaaatgaaaaatgggttaaaatccagcttaattccgg

SEQ ID NO: 772868 - DNA, 60 bp, synthetic construct
  source 1..60: mol_type = other DNA
atgccactgctggataagctgcgtgagcagtacggggtcggaccgctatgcagcgaactg

SEQ ID NO: 772869 - DNA, 75 bp, synthetic construct
  source 1..75: mol_type = other DNA
ctgtggccgttatcaaccgttggtgttgaaaacgatgatacaagttacagtgaattcgatcatattactggtaat

SEQ ID NO: 772870 - DNA, 75 bp, synthetic construct
  source 1..75: mol_type = other DNA
gtatagtgggcaaaccggttctgagcagtattagcgtcaggctaaaagacaatgtgaataacgaggcagcgatta

SEQ ID NO: 772871 - DNA, 75 bp, synthetic construct
  source 1..75: mol_type = other DNA
tctggggcaaataatcctccttggttccgtgcctgcacgagtggttggcattgccagaagcagcgactatagcga

SEQ ID NO: 772872 - DNA, 75 bp, synthetic construct
  source 1..75: mol_type = other DNA
aaaaaatgcgtcgggaaaaacgaaaaattatcccattatgtccatttgcgaaacacgaatttgataaaacgcggg

SEQ ID NO: 772873 - DNA, 75 bp, synthetic construct
  source 1..75: mol_type = other DNA
catttataacggtgatatttatccggtaatcaataaagctaccgttaacggtgttatttctacttactatctgga

SEQ ID NO: 772874 - DNA, 75 bp, synthetic construct
  source 1..75: mol_type = other DNA
gaaacaagagttcctgcaggatgtggagctgttcggtgcccgttatgcgcacatcaacacgccgaagggcgtctt

SEQ ID NO: 772875 - DNA, 75 bp, synthetic construct
  source 1..75: mol_type = other DNA
caacctgcagaatgatgcgggggatgccctccgccacgacggtagcgagcacagtcgttcagaggtgcaaacccg

SEQ ID NO: 772876 - DNA, 75 bp, synthetic construct
  source 1..75: mol_type = other DNA
atatcagctagcaaagaattttgatgttatctggttatggtcagaagatggaaaaaattggtatgaggaattaaa

SEQ ID NO: 772877 - DNA, 75 bp, synthetic construct
  source 1..75: mol_type = other DNA
gcgtgatttctacctactatctggacgatggtatttctactaataccaacgccaatagcctgacaatcaaaaaca

SEQ ID NO: 772878 - DNA, 75 bp, synthetic construct
  source 1..75: mol_type = other DNA
aatgccagcgattacaacggcattgactggaatgctaatgatgtagcattagcgattattgcacatccaaatgct

SEQ ID NO: 772879 - DNA, 75 bp, synthetic construct
  source 1..75: mol_type = other DNA
gtactgacgtagcagctctttacgaaaagtttgatcgcagaactggcaaggtttactaccagtataaaaatcctg

SEQ ID NO: 772880 - DNA, 75 bp, synthetic construct
  source 1..75: mol_type = other DNA
gggatcgggtaaatatcgaaccaggcgtaccttgtggtcactgccgttactgcctggaaggaaaatataacatct

SEQ ID NO: 772881 - DNA, 75 bp, synthetic construct
  source 1..75: mol_type = other DNA
aatttaaaccgggggatcgggtaaatatcgaacctggcgttccttgcggtcactgtcgttactgtctggaaggca

SEQ ID NO: 772882 - DNA, 75 bp, synthetic construct
  source 1..75: mol_type = other DNA
agactttaacgaaggggcgaagaacaacacctattctcgtaacgagaagatgattggttatagcttcgaccacga

SEQ ID NO: 772883 - DNA, 75 bp, synthetic construct
  source 1..75: mol_type = other DNA
acctaatcgtgttgttatgcaaatggttcgtccggtatcaacagaagatggcggatacattacaaaaggaattac

SEQ ID NO: 772884 - DNA, 75 bp, synthetic construct
  source 1..75: mol_type = other DNA
cggctccccgtgtgctcataggccaagcggaatattccgagatcggattcagctttgccttcgccactgtcgcgc

SEQ ID NO: 772885 - DNA, 75 bp, synthetic construct
  source 1..75: mol_type = other DNA
atgcccctggcgaaaatatttacaaagcaagtttctttattaactatgttttcagcgttagcttatgcgatggca

SEQ ID NO: 772886 - DNA, 75 bp, synthetic construct
  source 1..75: mol_type = other DNA
accagcaggaaaaactccgccaacatttcatgaacaacgctctctatcagaacggctgtaccgtgcacagggtat

SEQ ID NO: 772887 - DNA, 75 bp, synthetic construct
  source 1..75: mol_type = other DNA
ttcagtatgttgtgttgggaattcactcacctgaaacttataacgatgatgagcaggaattgattactcgctttc

SEQ ID NO: 772888 - DNA, 75 bp, synthetic construct
  source 1..75: mol_type = other DNA
tatgggttgatatttataaagaagcacagcatgcgggagaagttcctcctggatggaatcctccagaggctaccc

SEQ ID NO: 772889 - DNA, 75 bp, synthetic construct
  source 1..75: mol_type = other DNA
aacggtaagcgtctgccgacagactttaacgaaggggcgaagaacaacacctattctcgtaacgagaagatgatt

SEQ ID NO: 772890 - DNA, 75 bp, synthetic construct
  source 1..75: mol_type = other DNA
ggcaaacagtatgaagtcggcgtgaaatatgtgccagaagatcgcccaattgtggtgactggcgcactgtatcag

SEQ ID NO: 772891 - DNA, 75 bp, synthetic construct
  source 1..75: mol_type = other DNA
aaagtttgatcgcagaactggcaaggtttactaccagtataaaaatccagtgactggaaaatttcacggactcgg

SEQ ID NO: 772892 - DNA, 75 bp, synthetic construct
  source 1..75: mol_type = other DNA
gctgccggtatccgtactacctatcgcaggtattctgctgggcgtcggttccgcgaatttcagctggctgcccgc

SEQ ID NO: 772893 - DNA, 75 bp, synthetic construct
  source 1..75: mol_type = other DNA
aaagagtgccatgacgccagcgtcggcgtgaattgggatgtcatttctgacacggccaacattctgtttccaaag

SEQ ID NO: 772894 - DNA, 75 bp, synthetic construct
  source 1..75: mol_type = other DNA
gaaagcctttggcatggtgatggcttcactctgccttgctcctgtgtacgggaaactctgtgagctggtggtcca

SEQ ID NO: 772895 - DNA, 75 bp, synthetic construct
  source 1..75: mol_type = other DNA
attactacgcccagacatcccgtcagttacttagctatttccgcagtcttgaccgtaaacttgccggtgactggt

SEQ ID NO: 772896 - DNA, 75 bp, synthetic construct
  source 1..75: mol_type = other DNA
ttgcattattgccggacttaccgccgtaacgtgttattaccagggtgaggcggcaaggttacaggaagaagtcac

SEQ ID NO: 772897 - DNA, 75 bp, synthetic construct
  source 1..75: mol_type = other DNA
ttgcatcattgccagccttacagccgtaacatgccattaccagagtgaggcgacaaggttacaggaagaattaac

SEQ ID NO: 772898 - DNA, 75 bp, synthetic construct
  source 1..75: mol_type = other DNA
agacaatgccataacgctgatgtcggcgttaattgggaggttatatcaactacggcgaatgagttgtttccgaac

SEQ ID NO: 772899 - DNA, 75 bp, synthetic construct
  source 1..75: mol_type = other DNA
tataaaggagactcacgggttgtggatgcaaaccatgatgttttcgattatgtgatgctcagaaaggagtttaca

SEQ ID NO: 772900 - DNA, 75 bp, synthetic construct
  source 1..75: mol_type = other DNA
agaaatcgtcttcattgttttcgaaaaagattactgtaaccacgcttttattgttaattacagtaacgttatatt

SEQ ID NO: 772901 - DNA, 75 bp, synthetic construct
  source 1..75: mol_type = other DNA
tgatggttttgcaatcagtatattacagacagatcctgatgaagcaataagaatgttcaggatgtatgttgttta

SEQ ID NO: 772902 - DNA, 75 bp, synthetic construct
  source 1..75: mol_type = other DNA
agcccggaaaatgagtgacctccctttgattgcccatatttcatctaccgttgaagaggacatgctttatctggc

SEQ ID NO: 772903 - DNA, 75 bp, synthetic construct
  source 1..75: mol_type = other DNA
gcgaacgggcaatgctcatcctggaagcccggaaaatgagtgacctccctttgattgcccatatttcatctaccg

SEQ ID NO: 772904 - DNA, 75 bp, synthetic construct
  source 1..75: mol_type = other DNA
gggcagtctgcccttccgtcattcctctggatgacagcggtcagatagacctcacggggctggaaaaacatatgg

SEQ ID NO: 772905 - DNA, 75 bp, synthetic construct
  source 1..75: mol_type = other DNA
cgaagcaaagaggtttcacatccgacacaagttgcaccagactatttgagtcgatcgttttcagcaacgcgagac

SEQ ID NO: 772906 - DNA, 75 bp, synthetic construct
  source 1..75: mol_type = other DNA
gaaggggacagcatcattctgcgccccgtccggccgacctggggctcattcctggagctagaaaaggccgatccg

SEQ ID NO: 772907 - DNA, 75 bp, synthetic construct
  source 1..75: mol_type = other DNA
aaaccaattttactttcctgtcctatttccagaatgaaccagaaacgggttattacggttggttgccgaaagagg

SEQ ID NO: 772908 - DNA, 75 bp, synthetic construct
  source 1..75: mol_type = other DNA
atcaaaataattaccttgatgggctaaaacttcagggcaacttttataacgatgctgtgattgatccttacatgc

SEQ ID NO: 772909 - DNA, 75 bp, synthetic construct
  source 1..75: mol_type = other DNA
tctgggggcttcctgttcaaaatgtacggtctgccagctgccgcaattgctatctggcactctgctaaaccagaa

SEQ ID NO: 772910 - DNA, 75 bp, synthetic construct
  source 1..75: mol_type = other DNA
gacaacatagtgttagtaaaaggactcaaaaaggttgtaaatgttatattctccagaaacaaacatcttatagag

SEQ ID NO: 772911 - DNA, 75 bp, synthetic construct
  source 1..75: mol_type = other DNA
cgcgcagcttgaaaaggccgatccagactttatggcagagcgcgatgacgttgtcaccgacgaaggacgctttga

SEQ ID NO: 772912 - DNA, 75 bp, synthetic construct
  source 1..75: mol_type = other DNA
ccgctgctgtttaccttccgcagtgccaaagaaggcggcgagcaggcgatttccaccgaggcttatattgctctc

SEQ ID NO: 772913 - DNA, 75 bp, synthetic construct
  source 1..75: mol_type = other DNA
gacaggcctttatattcaggatcagtctgagtggaataagtgggtattgacgctgggtggtcgttacgattttgc

SEQ ID NO: 772914 - DNA, 75 bp, synthetic construct
  source 1..75: mol_type = other DNA
tgcgaagtcgacgaagatctacacgcaaaaccatatagattgggttgttgttccccatggagaaattcaaactgg

SEQ ID NO: 772915 - DNA, 75 bp, synthetic construct
  source 1..75: mol_type = other DNA
tttgcttactggcgtggattacctgcgaatgcgtaacgatattgatgcaaactatggtactgctaatccgattag

SEQ ID NO: 772916 - DNA, 75 bp, synthetic construct
  source 1..75: mol_type = other DNA
atggcaacaaccgcgccatccgtctgccccgcgatctggattttgagggggtgagcgagctggagatcgtccggg

SEQ ID NO: 772917 - DNA, 75 bp, synthetic construct
  source 1..75: mol_type = other DNA
gcgtaatttctcgtctggctggtgaagtatttgggtcggcggcaacttttggtgcggtaaaaaagcctctgcgcc

SEQ ID NO: 772918 - DNA, 75 bp, synthetic construct
  source 1..75: mol_type = other DNA
gtcatgttctcttgtgtcgccttttttggcacggcctttgtaaacagcctgaactgggcactggtaccagatacc

SEQ ID NO: 772919 - DNA, 75 bp, synthetic construct
  source 1..75: mol_type = other DNA
ctctgtatctcctcaaattttataccgatgaattagggatgcctgcttactatggcgggattatctttctggtgg

SEQ ID NO: 772920 - DNA, 75 bp, synthetic construct
  source 1..75: mol_type = other DNA
ctcaagaagggtgacatcgaaataccttccgatctcgcaggcgtactttataccgagcttgatgaacatggtgga

SEQ ID NO: 772921 - DNA, 75 bp, synthetic construct
  source 1..75: mol_type = other DNA
agatgattgaacgctgtctgagactgggggcatccatcgatttgctgaatcagtattttggcatgacgtcactgg

SEQ ID NO: 772922 - DNA, 75 bp, synthetic construct
  source 1..75: mol_type = other DNA
tgccattaactgtaaaatgttttggtaaaaaacaggtttatctggctggcatggtgctgtgggcggtgggtgata

SEQ ID NO: 772923 - DNA, 75 bp, synthetic construct
  source 1..75: mol_type = other DNA
acacactcaatgaaaaacggtttgcattgattattgaggaaatcaaccaacgaaaaataaagagatggcgacaga

SEQ ID NO: 772924 - DNA, 75 bp, synthetic construct
  source 1..75: mol_type = other DNA
tggacgcaagccggggacgggccgcttttcagcatgtcatcaacgcccagttagaacacatcggggtttccaccc

SEQ ID NO: 772925 - DNA, 75 bp, synthetic construct
  source 1..75: mol_type = other DNA
gcagcaccaccgtcaccacctgaaaccagcccggaagacacatcgtcagcagaaccggacacgattatctttgcg

SEQ ID NO: 772926 - DNA, 75 bp, synthetic construct
  source 1..75: mol_type = other DNA
tcgtaccagcgtattccggtcaccggtgggaaggatgcccgcattctgaaaggctctgagaaaagcggcaactgg

SEQ ID NO: 772927 - DNA, 75 bp, synthetic construct
  source 1..75: mol_type = other DNA
tcatcttagtatcagtaaatcagacatattcaccaaccaactttggcacacaacgccagacaggaacattcgatt

SEQ ID NO: 772928 - DNA, 75 bp, synthetic construct
  source 1..75: mol_type = other DNA
cagcatgacagcgatacggcttcggatggatcacgctgcggtggtcgttctgccgattctcgtcctggcgggcgt

SEQ ID NO: 772929 - DNA, 75 bp, synthetic construct
  source 1..75: mol_type = other DNA
aaccatgaatgaatcagccgaaccatcaccttcccctgatgcagtcaaagaggaaatgaccgtgatgacggagcc

SEQ ID NO: 772930 - DNA, 75 bp, synthetic construct
  source 1..75: mol_type = other DNA
gaaatcatttgctgaccgagctggtgatggaaatcaaaagcgggaatctgcggcgttgtgaggcactgggactga

SEQ ID NO: 772931 - DNA, 75 bp, synthetic construct
  source 1..75: mol_type = other DNA
tgcgcgaattggaccttaaagttgaaaccgctgaaattgaactgccggaactggatgtgctgcgcaataacgcca

SEQ ID NO: 772932 - DNA, 75 bp, synthetic construct
  source 1..75: mol_type = other DNA
acctggtcgaagccgattcccctggtgatgcagaggaggcttttcggcatcatattgccgacagtgccgacgggc

SEQ ID NO: 772933 - DNA, 75 bp, synthetic construct
  source 1..75: mol_type = other DNA
atgattaacgaacagggcatcgctgtaaataccccggacttaagccgactgtatattatctcaggccgcatgatg

SEQ ID NO: 772934 - DNA, 75 bp, synthetic construct
  source 1..75: mol_type = other DNA
tgaaaataaaaacgtcttacagatagccgtgcgcacccgtctgaagttgttctaccgtccaaaaggtttgccggg

SEQ ID NO: 772935 - DNA, 75 bp, synthetic construct
  source 1..75: mol_type = other DNA
ccgctgcgcccacgatttgcggtgcttgcgagcggcagtttctttagcggcgaactggcaatctatcgacgagct

SEQ ID NO: 772936 - DNA, 75 bp, synthetic construct
  source 1..75: mol_type = other DNA
ggttgaatgaaaaactaccttgttcattgatgcttttgccaacgctgccgccttccgtgctgggcattcgtctgc

SEQ ID NO: 772937 - DNA, 75 bp, synthetic construct
  source 1..75: mol_type = other DNA
aaccgcagaaatagagctgccagaactggatatcctgcgcaataacgccaccgagttccgcgcggtgaatatcgc

SEQ ID NO: 772938 - DNA, 75 bp, synthetic construct
  source 1..75: mol_type = other DNA
ccttccgtgctgggcatccgtctgcaaaaccagttgcagcgccagttcgtgcgccagggcggtgtatggatgccg

SEQ ID NO: 772939 - DNA, 75 bp, synthetic construct
  source 1..75: mol_type = other DNA
acattcacagtggactggaatctttgcgtcagcaggcacctgcccatccttacagcgttctcggcccacagcgcg

SEQ ID NO: 772940 - DNA, 75 bp, synthetic construct
  source 1..75: mol_type = other DNA
atgaaaaaactggcacttatcctggttatgggaacgcttgtttccttttatgccgatgccgggcgcaaaccctgt

SEQ ID NO: 772941 - DNA, 75 bp, synthetic construct
  source 1..75: mol_type = other DNA
tgataggattactgatgtctttttatgctgatgcagggcgaaaaccttgttccggttcgaaaggggggatctctc

SEQ ID NO: 772942 - DNA, 75 bp, synthetic construct
  source 1..75: mol_type = other DNA
gggggaggtagcgtttcgaaaattaaatataacactatcaatgattttgggtcgtcagcggacatgatgactaaa

SEQ ID NO: 772943 - DNA, 75 bp, synthetic construct
  source 1..75: mol_type = other DNA
ttgttgatgttgttttaaaatcactacgtttcattgcaggagttatcggtgataaagctgttgcatgggctaagc

SEQ ID NO: 772944 - DNA, 75 bp, synthetic construct
  source 1..75: mol_type = other DNA
ttatcgaacataccgatgtcgatgaaagcctgaaagggcaagggattggtaaacagctggttgcgaaagtcgtgg

SEQ ID NO: 772945 - DNA, 75 bp, synthetic construct
  source 1..75: mol_type = other DNA
tgggataacgttaaaagaagttattgatgggtgccgagacagaatattaagtccatatctaatccatagtcggca

SEQ ID NO: 772946 - DNA, 75 bp, synthetic construct
  source 1..75: mol_type = other DNA
gaaaatggattatggaaggcagcgcatagaaaagttggcagtgatagtaccccatatcatatgactcaagatgaa

SEQ ID NO: 772947 - DNA, 75 bp, synthetic construct
  source 1..75: mol_type = other DNA
tggtttacaccattctgccgatcatctacgacgttgccattaagaacaacatccgtccggaacgtccgatggcgg

SEQ ID NO: 772948 - DNA, 75 bp, synthetic construct
  source 1..75: mol_type = other DNA
ctctggcggtctggatgttatgctgcaaattgccgaaaaactgctgcgtcgcaatccgaaatatgtttccatcgt

SEQ ID NO: 772949 - DNA, 75 bp, synthetic construct
  source 1..75: mol_type = other DNA
aagtctgaaagggcaggggattggtaaacggctggtggcgaaggtggtggaaaaaatgcgccgggagaagcggaa

SEQ ID NO: 772950 - DNA, 75 bp, synthetic construct
  source 1..75: mol_type = other DNA
tgccgattgctgttttgaccgaaggcctaagcatagcgaacggtctgctgcatggagagattcatacacgctcga

SEQ ID NO: 772951 - DNA, 75 bp, synthetic construct
  source 1..75: mol_type = other DNA
gacgtttacggcgctgaaaatggcgcttgatatgcataaccagtatggcggttgctacaccgttctgactccctc

SEQ ID NO: 772952 - DNA, 75 bp, synthetic construct
  source 1..75: mol_type = other DNA
caagtttgaaaaaggaacaccggggaaagcgacatggaaagctaatggcgatttaatccctccaataccaaaatt

SEQ ID NO: 772953 - DNA, 75 bp, synthetic construct
  source 1..75: mol_type = other DNA
caatcgttggtgttgagtgggatgacgaaactggttatgcaataaaaacggttgattactgtaaaagaccatcag

SEQ ID NO: 772954 - DNA, 75 bp, synthetic construct
  source 1..75: mol_type = other DNA
ggataaatttgataaagggatgccgtcagacggggcgctatcgtggtcaggtattaagaaccaggtcgtgcagga

SEQ ID NO: 772955 - DNA, 75 bp, synthetic construct
  source 1..75: mol_type = other DNA
tgcaacctgaatttctataaccaggtaacggcagcgaatgcgaccgtcaagaagcctaaccgggtagtcatgcag

SEQ ID NO: 772956 - DNA, 75 bp, synthetic construct
  source 1..75: mol_type = other DNA
gataaagacgaagaattccagaaattcatctctgtaccggaaaaccgtgagtatgtttacggtgataccgctacg

SEQ ID NO: 772957 - DNA, 75 bp, synthetic construct
  source 1..75: mol_type = other DNA
ctttgttactccgcatcactgcgcgatcgcggtgtacgcggaaaaataatgccattgccagcggataagtgggat

SEQ ID NO: 772958 - DNA, 75 bp, synthetic construct
  source 1..75: mol_type = other DNA
aactagatataatcgtgtttctgtttttatagttggtgataatgatcaggcaatttatcaggatcttggtgtttc

SEQ ID NO: 772959 - DNA, 75 bp, synthetic construct
  source 1..75: mol_type = other DNA
gggcgcaattagtaagatgattaacaaagacaaaaatgttgtctctgtatctactatacatggttcgaaggggga

SEQ ID NO: 772960 - DNA, 75 bp, synthetic construct
  source 1..75: mol_type = other DNA
ccctctgccacagagacagcatccactgaagcggctgtcagcaatgaccaggcagagacaacgctcacacaacag

SEQ ID NO: 772961 - DNA, 75 bp, synthetic construct
  source 1..75: mol_type = other DNA
aagggcgtttgcgcactggagcacgatgggtttttttcatataaagaggtcactgactggtcccatccatatctg

SEQ ID NO: 772962 - DNA, 75 bp, synthetic construct
  source 1..75: mol_type = other DNA
caatgataacctcctgttcaaatggctcaggctctggcagaatgaagggcgtgtttcacggccgtctcccggtaa

SEQ ID NO: 772963 - DNA, 75 bp, synthetic construct
  source 1..75: mol_type = other DNA
gtgaattccttgcgtccgggaaaggcaaggcgctggttcgtatgggattggttgaaatgaaatctgacccggttg

SEQ ID NO: 772964 - DNA, 75 bp, synthetic construct
  source 1..75: mol_type = other DNA
gacgatatatccaacatggttccggcatgccacccatgcaatctgcacaagcattgcagtagtctggaagattat

SEQ ID NO: 772965 - DNA, 75 bp, synthetic construct
  source 1..75: mol_type = other DNA
ctgccagggttgattggcgtaagcgtatcctgcgtctttggctggatcttcgccgcaatgtacgggttcttgtaa

SEQ ID NO: 772966 - DNA, 75 bp, synthetic construct
  source 1..75: mol_type = other DNA
agaaagaaaaaactaaatgaatgtcctgcggctgatgcaggtacagtaaataaaattatttcaagttttggtcga

SEQ ID NO: 772967 - DNA, 75 bp, synthetic construct
  source 1..75: mol_type = other DNA
cgactggctggaaggattccttaaaaaccttcaatgggacgataattttcatctcccacgaccgttcgtttatcc

SEQ ID NO: 772968 - DNA, 75 bp, synthetic construct
  source 1..75: mol_type = other DNA
atgacaactattaccaaaaagcaacgcgcagagctacgcatgaagtttggcggtcgctgtgcttattgtggatgc

SEQ ID NO: 772969 - DNA, 75 bp, synthetic construct
  source 1..75: mol_type = other DNA
ttaaggctgccagtttgtgttctttggcatttgcgttgaccggatgtatcacctggggattggtttccaatactg

SEQ ID NO: 772970 - DNA, 75 bp, synthetic construct
  source 1..75: mol_type = other DNA
caagctatgactctttttaataattcaggtttacgagatagtattgaaaaacgtgtatatgaagaaaagattcca

SEQ ID NO: 772971 - DNA, 75 bp, synthetic construct
  source 1..75: mol_type = other DNA
tgtcgggaaacgcgcgagctaccgcagatcgaactggtaaaaatgatgctggggcgcgagctggacacccacgcg

SEQ ID NO: 772972 - DNA, 75 bp, synthetic construct
  source 1..75: mol_type = other DNA
gccccggcgagatcgtcggtctggcaggcttgctgggatcaggacgtaccgaaaccgccgaagtgatcttcggta

SEQ ID NO: 772973 - DNA, 75 bp, synthetic construct
  source 1..75: mol_type = other DNA
cgctatcatctgttttatcagtggaacccgctcgcctgcgatcatacgtttaagtgctgggcgcactggagttcc

SEQ ID NO: 772974 - DNA, 75 bp, synthetic construct
  source 1..75: mol_type = other DNA
atgcattatcgttactggcgcggaaacgtccgctcgctgcgtgttttcatcgaccagtcgagcgtggagattttc

SEQ ID NO: 772975 - DNA, 75 bp, synthetic construct
  source 1..75: mol_type = other DNA
cgatggaaatcgatttgcaaacccgcgggggcgatatgttgagcctcgattttggcggcgtattaacccttgagt

SEQ ID NO: 772976 - DNA, 75 bp, synthetic construct
  source 1..75: mol_type = other DNA
agatcgcggcgtcagcctgatcttcgtcactcactttctcgatcaggtataccaggtcagtgatcggatcaccgt

SEQ ID NO: 772977 - DNA, 75 bp, synthetic construct
  source 1..75: mol_type = other DNA
ctgccagttcaatggtcgtaacatggaagaactgcgtcgccagtatcgcctgtcccagccgcagatctaccagat

SEQ ID NO: 772978 - DNA, 75 bp, synthetic construct
  source 1..75: mol_type = other DNA
gttgcttttgacaaaggcgtcgcctggttgcaaaaccaacgtatgggtgcgctggtacatactgctgataattac

SEQ ID NO: 772979 - DNA, 75 bp, synthetic construct
  source 1..75: mol_type = other DNA
cgcgaacccaaacgtttcggctttctacgccgcaaagagatggaaaagcgtgccaccgaactgatgacatcttac

SEQ ID NO: 772980 - DNA, 75 bp, synthetic construct
  source 1..75: mol_type = other DNA
caccccttccacggagcaaccgattgaatttctctctggtggtaatcaacaaaaagtgttgctctcacgctggct

SEQ ID NO: 772981 - DNA, 75 bp, synthetic construct
  source 1..75: mol_type = other DNA
gctttattcgccagcttggcattcgcaccccttccacggagcaaccgattgaatttctctctggtggtaatcaac

SEQ ID NO: 772982 - DNA, 75 bp, synthetic construct
  source 1..75: mol_type = other DNA
gagttggtcttaatgcaggacataatgaataaggttcatttgtcactgactaatgcattacattctttagataca

SEQ ID NO: 772983 - DNA, 75 bp, synthetic construct
  source 1..75: mol_type = other DNA
agtatctgcaagcggcggaagttaacgctttgcttgacgatcccaatgcgttgttcatagatatgcgtaatcact

SEQ ID NO: 772984 - DNA, 75 bp, synthetic construct
  source 1..75: mol_type = other DNA
gaaaatggcaataagatctttaataaatcgcgtggacggctgaacacgacgctggtcattcctgatccaacaaaa

SEQ ID NO: 772985 - DNA, 75 bp, synthetic construct
  source 1..75: mol_type = other DNA
tgtaccgtgcgtaacgtctatatcaaagaagccttcgatacgggcgtgcgttacgactttaaaggcaactttgac

SEQ ID NO: 772986 - DNA, 75 bp, synthetic construct
  source 1..75: mol_type = other DNA
tatctgttcgccggattactggtggttatgattatgcggatgttggcggaaatggcggttgccacgcccgatacc

SEQ ID NO: 772987 - DNA, 75 bp, synthetic construct
  source 1..75: mol_type = other DNA
tttccttggagctgtagcaattagcggtttttacccttatgccgaagtgagcggtatttcaagattgtgggatag

SEQ ID NO: 772988 - DNA, 75 bp, synthetic construct
  source 1..75: mol_type = other DNA
gtgaactattacgcgcctgcgaaagtgtttaaattcctgatcgacagctccggtgctattgccctgctggtttat

SEQ ID NO: 772989 - DNA, 75 bp, synthetic construct
  source 1..75: mol_type = other DNA
caatcagggaactcgcgcaactgcgtgaagctgaacacttctggcaaggaaaagcggatcatgcgccgcatgtcg

SEQ ID NO: 772990 - DNA, 75 bp, synthetic construct
  source 1..75: mol_type = other DNA
caaagcactggcagatgcccactatccttgttggcatctcgctcccgtcaccggactaatgaacgatccaaatgg

SEQ ID NO: 772991 - DNA, 75 bp, synthetic construct
  source 1..75: mol_type = other DNA
agaaaatcgaaagagttaaggaacgagtccagaaaaaaaatcgccaaaaaaatgatagcaatgagagaacggatt

SEQ ID NO: 772992 - DNA, 75 bp, synthetic construct
  source 1..75: mol_type = other DNA
cgagtgcagaaccctttgcgtggtgcaggaagggttcccgacatatggcggcctggaaggcggcgcgatggagcg

SEQ ID NO: 772993 - DNA, 75 bp, synthetic construct
  source 1..75: mol_type = other DNA
gataccccgggcaatacaggcctgcaaaataatctggcgctattgctttttagtagcgatcgccgtgacgaaggt

SEQ ID NO: 772994 - DNA, 75 bp, synthetic construct
  source 1..75: mol_type = other DNA
cgcgtggcgctggcacaggcgcagcttggagataccgcagcggcgcagcagacgtttaataagttgatcccgcag

SEQ ID NO: 772995 - DNA, 75 bp, synthetic construct
  source 1..75: mol_type = other DNA
tattctggtaaatactcaagcgggtaaaccggattatccaaaggcgatttcgctgttagagaacgcctcggaaga

SEQ ID NO: 772996 - DNA, 75 bp, synthetic construct
  source 1..75: mol_type = other DNA
cgttatgctgtcagcgtggtgacccgtaacaaggctgaagctctgcgtctggcacgattgctgtatcagcaagaa

SEQ ID NO: 772997 - DNA, 75 bp, synthetic construct
  source 1..75: mol_type = other DNA
aacgtcacccaggagatgcccgacttgagcgcagtctggcggctattccggttgaagtgaaaagcgttacgacag

SEQ ID NO: 772998 - DNA, 75 bp, synthetic construct
  source 1..75: mol_type = other DNA
agagagattgatcagccagtttgcgcagccagcgttgattccttggctacctggcatgtcgactgccagtacatt

SEQ ID NO: 772999 - DNA, 75 bp, synthetic construct
  source 1..75: mol_type = other DNA
ttgaaaagctgtaccataaatacgaagccgatgattcaattcgcaagaagtcagtacctgccattgagctgttct

SEQ ID NO: 773000 - DNA, 75 bp, synthetic construct
  source 1..75: mol_type = other DNA
ggctggtttgcccaaaacctgtacctcgatgcggcgcaatatatccgccaggatattcaggcgtggacggcagat

SEQ ID NO: 773001 - DNA, 75 bp, synthetic construct
  source 1..75: mol_type = other DNA
ttattgctgcaacgctatcctttccagggcgatgcgcgtgtcagccagacattaatggcgcgactggcgtctctg

SEQ ID NO: 773002 - DNA, 75 bp, synthetic construct
  source 1..75: mol_type = other DNA
accggacgatttattaattactttagacagtattcccgtttcacaattaccagccacaggtaacaaagcaacaat

SEQ ID NO: 773003 - DNA, 75 bp, synthetic construct
  source 1..75: mol_type = other DNA
tgcggcatgttatagtgagttatctgttcagcacaatttggttgttcagggggattttgcacttactcaaacaca

SEQ ID NO: 773004 - DNA, 75 bp, synthetic construct
  source 1..75: mol_type = other DNA
tcagaccagtttcaccagtggttattcggtaacggtgacacctgcggccagtaatgcaaaagtgaatgtttctgc

SEQ ID NO: 773005 - DNA, 75 bp, synthetic construct
  source 1..75: mol_type = other DNA
aaaatcacctggcagtacagcccatatgattttgaaggctgtagtgattacaactgtgaaggatggcgagaatga

SEQ ID NO: 773006 - DNA, 75 bp, synthetic construct
  source 1..75: mol_type = other DNA
aacacaaacggcgacatatgagcataattttaatgactcgtcatgcgtgagtacgaataccatcaaccccatgag

SEQ ID NO: 773007 - DNA, 75 bp, synthetic construct
  source 1..75: mol_type = other DNA
acaattaccagccacaggtaacaaagcaacaataaatagtaaacaaggggatattattctgcgttgtaaaaattt

SEQ ID NO: 773008 - DNA, 75 bp, synthetic construct
  source 1..75: mol_type = other DNA
cgaaacgtgacgatctttttggctatgcagctacggtgcagttgcaaagcaaatacctcgttcaaaaccgtgtta

SEQ ID NO: 773009 - DNA, 75 bp, synthetic construct
  source 1..75: mol_type = other DNA
tattacgctgggcaagacccggaaactgacagccttgctgtcctggggggagtcattgaagagtttatggatctt

SEQ ID NO: 773010 - DNA, 75 bp, synthetic construct
  source 1..75: mol_type = other DNA
aggatacaatgcggaagtcgctcgcatgaaaaaacagaaattacaaatgaaggatgagatgcttaaaatcctgca

SEQ ID NO: 773011 - DNA, 75 bp, synthetic construct
  source 1..75: mol_type = other DNA
atacgccgttaaagattgggccgacgctggttataaatgctattgcttcaactatgatggcgctaatcacggcga

SEQ ID NO: 773012 - DNA, 75 bp, synthetic construct
  source 1..75: mol_type = other DNA
aactatttttcggtggtgtttacccgggaaaccgggatgacgcccagccagtggcgtcatctcaattcgcagaaa

SEQ ID NO: 773013 - DNA, 75 bp, synthetic construct
  source 1..75: mol_type = other DNA
cagcgaaacgttgctggataagctgattacccggctggcggctagcctgaaaagtccctttgcgctggataaatt

SEQ ID NO: 773014 - DNA, 75 bp, synthetic construct
  source 1..75: mol_type = other DNA
cgaatcaatacataacaaattcgcaaggattgaaatcagatttggagggagaacgtgtatctaaagatggagagg

SEQ ID NO: 773015 - DNA, 75 bp, synthetic construct
  source 1..75: mol_type = other DNA
gattcgcggtggcgaagcgttccacaccggttgtattccgttctacaaacatttccagacggcagtgaaatcttg

SEQ ID NO: 773016 - DNA, 75 bp, synthetic construct
  source 1..75: mol_type = other DNA
tttctgccctgaaaggtaaacacgccaggtttgatgccctgtttgaaaaacacaaccgactcgatcatgagatca

SEQ ID NO: 773017 - DNA, 75 bp, synthetic construct
  source 1..75: mol_type = other DNA
agttaattaaagctattaacagtaatttttctttactaaataaaaagctagagtctattacaccccaaatcgctt

SEQ ID NO: 773018 - DNA, 75 bp, synthetic construct
  source 1..75: mol_type = other DNA
gccgctattccggcctgtacctatgccggatgaatgggaagacagcaaacagcacgcgaagttaggaggaaagtc

SEQ ID NO: 773019 - DNA, 75 bp, synthetic construct
  source 1..75: mol_type = other DNA
gccggaagatgacaaacatcctgctttcccggatgtttacccggcgcgcgacgcgtatacaaagaaaacttgtat

SEQ ID NO: 773020 - DNA, 75 bp, synthetic construct
  source 1..75: mol_type = other DNA
cgcgcggctttgcccgtgctgtattcatggctaatgaccgggccatcaatcgtactacgctcaaccgcgttttgc

SEQ ID NO: 773021 - DNA, 75 bp, synthetic construct
  source 1..75: mol_type = other DNA
agagcgaaatctgtggagagttcggcttggtatcgccttggtcatgttattggagcatgaccttagtctgtacta

SEQ ID NO: 773022 - DNA, 75 bp, synthetic construct
  source 1..75: mol_type = other DNA
cggacagactattgagccttacgctcacgttcaggacaacggctatcgtgataaaggcactcagggcgcgcagct

SEQ ID NO: 773023 - DNA, 75 bp, synthetic construct
  source 1..75: mol_type = other DNA
gccgccaataccgctcaggcggcaggaaatggcgcggctcgcgatcgctggcttcagcaggcagaacaacgcggg

SEQ ID NO: 773024 - DNA, 75 bp, synthetic construct
  source 1..75: mol_type = other DNA
atgttcttatgaaaatagagcctgaaacggatattatttcaaaatcagaacaactgaaaaaacgatgtgtattgt

SEQ ID NO: 773025 - DNA, 75 bp, synthetic construct
  source 1..75: mol_type = other DNA
atcagaggggatcttcaccgatccacagtcgtacattacttacgcgaccgcgctggcttatcgtggcgaaaaagc

SEQ ID NO: 773026 - DNA, 75 bp, synthetic construct
  source 1..75: mol_type = other DNA
cacaagagaaaagttggctctatctgttatctaaatacagcggcaaccccgttcaggcgttggcgaattatacgg

SEQ ID NO: 773027 - DNA, 75 bp, synthetic construct
  source 1..75: mol_type = other DNA
agccggatccccgcgtcgaacaagcgttgatggtcactattgccggaattgcagcaggtatgcgtaataccggct

SEQ ID NO: 773028 - DNA, 75 bp, synthetic construct
  source 1..75: mol_type = other DNA
acgctgttccacggtcgcggtggttctattggtcgcggcggcgcaccggctcatgcggcgctgctatcgcaaccg

SEQ ID NO: 773029 - DNA, 75 bp, synthetic construct
  source 1..75: mol_type = other DNA
gcgctggtcggcgaagaaggtgccgcagaaccgtatcgctatctgatgaaaaacctgcgttcccgcctgatggca

SEQ ID NO: 773030 - DNA, 75 bp, synthetic construct
  source 1..75: mol_type = other DNA
ttgttactgcaacgctaccctttccagggcgatgcaagcgccagccatacgttaatgacgcggctggcgtctctg

SEQ ID NO: 773031 - DNA, 75 bp, synthetic construct
  source 1..75: mol_type = other DNA
cgttgtcgcagtgaagtcgggcagaatgccctgcggctggcacaattacctgtcgccagagcgcaactgaacgat

SEQ ID NO: 773032 - DNA, 75 bp, synthetic construct
  source 1..75: mol_type = other DNA
gcgtgaccgaacagggcgagatgatccgctttaaatatggtctgccagaaatcaccgtcagcagcctgtcgctgt

SEQ ID NO: 773033 - DNA, 75 bp, synthetic construct
  source 1..75: mol_type = other DNA
catgttagatgatacaattgatgtgggggggaatgcctggggtagtgatgacaatcgctgggatgaccgttggtg

SEQ ID NO: 773034 - DNA, 75 bp, synthetic construct
  source 1..75: mol_type = other DNA
gctggcgttaacccgcgccgccaaacctattacccatcgtaccgtgctggtgggcaatgcggcgcaaactctgca

SEQ ID NO: 773035 - DNA, 75 bp, synthetic construct
  source 1..75: mol_type = other DNA
acgccggtaaacgcagtgcttatccgctggcgttaacccgcgccgccagatctattacccatcgtaccgtgctgg

SEQ ID NO: 773036 - DNA, 75 bp, synthetic construct
  source 1..75: mol_type = other DNA
aactggcacgtatcggcgtctggcaatctttggctgattgcgcaaccgccatcactaccgtgcatgtcagcgatc

SEQ ID NO: 773037 - DNA, 75 bp, synthetic construct
  source 1..75: mol_type = other DNA
aacggatattgtttcaaaatcagaacagttaaaaaaacgttgtgtattatctgcctgcagggtggccctggtcgt

SEQ ID NO: 773038 - DNA, 75 bp, synthetic construct
  source 1..75: mol_type = other DNA
gcggtcatgctggattcgtcaccctcgccgcagaagattatcaactggcggcactggggcaggttgttgagttgc

SEQ ID NO: 773039 - DNA, 75 bp, synthetic construct
  source 1..75: mol_type = other DNA
tgggcaatgcggcgcaaaccctgcacccgattgccgggcaaggatttaacctcggtatgcgtgatgttatgagcc

SEQ ID NO: 773040 - DNA, 75 bp, synthetic construct
  source 1..75: mol_type = other DNA
tccgggctttgatggacgagcgatagcgctggcggcgggtacctgtcagcaactggcgcgcatcggcgtctggca

SEQ ID NO: 773041 - DNA, 75 bp, synthetic construct
  source 1..75: mol_type = other DNA
ctcggtatgcgagatgtcatgagccttgcggaaaccctgactcaggcgcatgagcgcggagaagacatcggtgat

SEQ ID NO: 773042 - DNA, 75 bp, synthetic construct
  source 1..75: mol_type = other DNA
gatgtgtgttgttccagtaataatagagttaatccggcaactggacttcccatgttaggtggaattgatgtgggg

SEQ ID NO: 773043 - DNA, 75 bp, synthetic construct
  source 1..75: mol_type = other DNA
gcgctggcggcggggacctgtcagcaactggcgcgcatcggcgtctggcaatctctggcggattacgcaaccgcc

SEQ ID NO: 773044 - DNA, 75 bp, synthetic construct
  source 1..75: mol_type = other DNA
cgaccgcgccagagtcacatgcgcatccgggctttgatggacgagctattgcgctggcggcgggtacctgtcagc

SEQ ID NO: 773045 - DNA, 75 bp, synthetic construct
  source 1..75: mol_type = other DNA
ctaacgttgcccgtactcagagtcatgttgaagtgacgctggagtgtggcgagacgctgacgggccgcgtgctgg

SEQ ID NO: 773046 - DNA, 75 bp, synthetic construct
  source 1..75: mol_type = other DNA
tgtgcatatgatccgcacccgtcggatcccgtttattcagagccgtgcttcctggccgttaatggtcatgacggt

SEQ ID NO: 773047 - DNA, 75 bp, synthetic construct
  source 1..75: mol_type = other DNA
caagaagcagcgcgactgcttggttggggacgtaacaccctgacacgtaagttaaaagagttggggatggagtga

SEQ ID NO: 773048 - DNA, 75 bp, synthetic construct
  source 1..75: mol_type = other DNA
tggaactgcgtgtgcaggaaggcaagttccgtgaggatctgttccaccgcctgaacgttatccgtgttcatctgc

SEQ ID NO: 773049 - DNA, 75 bp, synthetic construct
  source 1..75: mol_type = other DNA
gggcagatcgggcgctgcgttccggtcatcaaaacctgctttctgaagcgcagccagagctggagcggacgttac

SEQ ID NO: 773050 - DNA, 75 bp, synthetic construct
  source 1..75: mol_type = other DNA
aacggtgatggccgccgggcaggaagtgttgattcaggatttgcccggtgaactgtttgaatcaacggttgcgga

SEQ ID NO: 773051 - DNA, 75 bp, synthetic construct
  source 1..75: mol_type = other DNA
tcgaacagcgggtgcaggaaggcaagttccgtgaggatcttttccaccgcctgaacgttatccgcgttcatctgc

SEQ ID NO: 773052 - DNA, 75 bp, synthetic construct
  source 1..75: mol_type = other DNA
tcgaacagcgggtacaggaaggcaagttccgtgaggatttgttccaccgcctgaacgttatccgcgttcatctgc

SEQ ID NO: 773053 - DNA, 75 bp, synthetic construct
  source 1..75: mol_type = other DNA
agctggaaaacacctgccgctggctaacggtaatggctgccggacaggaagtgttgattcaggatttgcctggcg

SEQ ID NO: 773054 - DNA, 75 bp, synthetic construct
  source 1..75: mol_type = other DNA
ggtttttacccttatgccgaagtgagcgggatctcaagattgtgggatagcggcggctttatgcccaatggcttc

SEQ ID NO: 773055 - DNA, 75 bp, synthetic construct
  source 1..75: mol_type = other DNA
ggtttttacccgtatgccgacgtgagcggtatttcaagattgtgggatagcggcggctttatgcccaacggcttc

SEQ ID NO: 773056 - DNA, 75 bp, synthetic construct
  source 1..75: mol_type = other DNA
gctggcaagcaaaacgccggatgtactgctttcagatatccgtatgcccggaatggacgggctggcgttgctcaa

SEQ ID NO: 773057 - DNA, 75 bp, synthetic construct
  source 1..75: mol_type = other DNA
cggcgaatccggcaccggtaaagaactggtcgctcatgccctgcatcgccacagcccgcgagccaaagcgccatt

SEQ ID NO: 773058 - DNA, 75 bp, synthetic construct
  source 1..75: mol_type = other DNA
gcgtagaagcaaagttgctacatccagaaactgaaatcgctctgacgcgtctggcatggccaggcaacgtgcgtc

SEQ ID NO: 773059 - DNA, 75 bp, synthetic construct
  source 1..75: mol_type = other DNA
gggtcagtctgccgtcttctacaacggtgaagtgtgcctcggtggcggtattattgagcagcgtctgccgctgcc

SEQ ID NO: 773060 - DNA, 75 bp, synthetic construct
  source 1..75: mol_type = other DNA
tgaattttattcaggaagcgcgctccaccaaagcggcagacgccctgaaagcgatggtcagcaataccgcgacgg

SEQ ID NO: 773061 - DNA, 75 bp, synthetic construct
  source 1..75: mol_type = other DNA
aacagaaagtgatcgtcaaacatctggatgctattcagaactttggcgcaatggatattctgtgcactgataaaa

SEQ ID NO: 773062 - DNA, 75 bp, synthetic construct
  source 1..75: mol_type = other DNA
acaccaaaggtgactggtgggaagcggcactgttcgcactttcggtcgcggtaggcttaacgccagaaatgttgc

SEQ ID NO: 773063 - DNA, 75 bp, synthetic construct
  source 1..75: mol_type = other DNA
atgccgaacaccatcaactggtgtgcaaaggcgcattgcaggaaatcctcaatgtgtgttcgcaagtgcgtcaca

SEQ ID NO: 773064 - DNA, 75 bp, synthetic construct
  source 1..75: mol_type = other DNA
cgagccgttggcagaaagtggatgaaattccgtttgatttcgaacgccgtcggatgtcggtagtggtggcggaga

SEQ ID NO: 773065 - DNA, 75 bp, synthetic construct
  source 1..75: mol_type = other DNA
cccgtggtgctgttcatcaatggttataccaaaggcgactggtgggaagcggcgctgtttgcgctttcggttgct

SEQ ID NO: 773066 - DNA, 75 bp, synthetic construct
  source 1..75: mol_type = other DNA
gaagaattgtggaaaacgttcgacacccatccggaagggttaaatcaggcggaagtggaatctgcccgcgaacaa

SEQ ID NO: 773067 - DNA, 75 bp, synthetic construct
  source 1..75: mol_type = other DNA
gcgtaaattccgcgagttcctgggccgttatctcccggcgcaaccgggcaaaatcattaccgtcgatggcgatga

SEQ ID NO: 773068 - DNA, 75 bp, synthetic construct
  source 1..75: mol_type = other DNA
atgtctgaaaccgcaaaaaaagtgatcgtcggtatgtccggcggtgtcgattcctccgtttctgcctggctgttg

SEQ ID NO: 773069 - DNA, 75 bp, synthetic construct
  source 1..75: mol_type = other DNA
acaccaaaggcgactggtgggaagcggcactgtttgcgctttcggtcgcggtaggcttaacgccggaaatgttgc

SEQ ID NO: 773070 - DNA, 75 bp, synthetic construct
  source 1..75: mol_type = other DNA
ggcggggcgtgttagtgagcaggaaagcgagccgaatgcctttcagcaagggatcagccgcgtcagtatgctgct

SEQ ID NO: 773071 - DNA, 75 bp, synthetic construct
  source 1..75: mol_type = other DNA
tttatgggtctgctatcgcaacccctttaatattttactcaccattctcggcgctatttcttacgccacggaaga

SEQ ID NO: 773072 - DNA, 75 bp, synthetic construct
  source 1..75: mol_type = other DNA
ccgcgatagatagctgcttataccttgccacctgggctgaaggaaaagagatacgcacgctggaaggcgaagcaa

SEQ ID NO: 773073 - DNA, 75 bp, synthetic construct
  source 1..75: mol_type = other DNA
atgaaccacagcgaaacaattaccattgaatgcgtcattaacggaatgccttttcagctccgcgccgcgccgggt

SEQ ID NO: 773074 - DNA, 75 bp, synthetic construct
  source 1..75: mol_type = other DNA
acgccgctctcggaattactccgcgaacaaggactgctaagtgtcaaacaagggtgctgcgtgggtgaatgtggt

SEQ ID NO: 773075 - DNA, 75 bp, synthetic construct
  source 1..75: mol_type = other DNA
gctatccagtcagcctcacagaaatggacgatgccacttcaggactggcggatagccatgagtcgctttattatc

SEQ ID NO: 773076 - DNA, 75 bp, synthetic construct
  source 1..75: mol_type = other DNA
gactggcgggaaatctttgtcgctgcacggggtatcagatgattgtaaatacagttctggattgggtaatgactc

SEQ ID NO: 773077 - DNA, 75 bp, synthetic construct
  source 1..75: mol_type = other DNA
gcctggcgggaaatctttgtcgctgcaccggttatcagatgattgtgaatacagtgctggactgcgaggaaacga

SEQ ID NO: 773078 - DNA, 75 bp, synthetic construct
  source 1..75: mol_type = other DNA
gcagcgagttctgcttccgcagcgaagacatccgaaacgaacgcgaaagcgtcggaaacccgtgcagaatcctca

SEQ ID NO: 773079 - DNA, 75 bp, synthetic construct
  source 1..75: mol_type = other DNA
gtgtgaatacaagtgctgcaggagcgcacactcatagtgtcagcggcacagctgcatctgcaggtgctcacgcac

SEQ ID NO: 773080 - DNA, 75 bp, synthetic construct
  source 1..75: mol_type = other DNA
cagaaacgaatgcggcagcgtcacaacaatcagcagccacttctgcatccaccgcgaccacgaaagcgtcagaag

SEQ ID NO: 773081 - DNA, 75 bp, synthetic construct
  source 1..75: mol_type = other DNA
gacctgcaatgtatgcttgataacggcgagcaaatgacactcagccacgtcagcaataccgtttatatcagtttt

SEQ ID NO: 773082 - DNA, 75 bp, synthetic construct
  source 1..75: mol_type = other DNA
tggaacagcagtatcatcagttaatctggcttcaaaaggtcgggtaaccgcgctgacagacaatacgcagggggc

SEQ ID NO: 773083 - DNA, 75 bp, synthetic construct
  source 1..75: mol_type = other DNA
ccaaagaggcggcaaaatcatcagaaacgaacgcctccacaagcgccagcagtgcagcctcctcggcaacggcgg

SEQ ID NO: 773084 - DNA, 75 bp, synthetic construct
  source 1..75: mol_type = other DNA
aaataccatcctcaacagcattgccaatgccattagcggtctggacaacgctgtcgcggcctggtttatgttgct

SEQ ID NO: 773085 - DNA, 75 bp, synthetic construct
  source 1..75: mol_type = other DNA
gaaattcctgctggcggatctctggtcgagtacgttgacgatatgcgcgagaagctggaagccgcagagaagcgc

SEQ ID NO: 773086 - DNA, 75 bp, synthetic construct
  source 1..75: mol_type = other DNA
ccgcgtgcgcacgatgttcacccattagggccgcagtcggcgaaaattttttgtgagtttcaccggagtatcgtg

SEQ ID NO: 773087 - DNA, 75 bp, synthetic construct
  source 1..75: mol_type = other DNA
ggcagaaatctgaaaagggatatcaggcgctaaacaggagggaaagaagagtatgctttcaacggcttagctact

SEQ ID NO: 773088 - DNA, 75 bp, synthetic construct
  source 1..75: mol_type = other DNA
atggtggttcaggagatgaacaacagcccggagcggcagctggcgttccgtatctgggccaaaaacatcatgaag

SEQ ID NO: 773089 - DNA, 75 bp, synthetic construct
  source 1..75: mol_type = other DNA
acagattttcacgaggattaccaaacggtaatggcatacaaagtttctgaggtcatcgctgcaatccgcgccgct

SEQ ID NO: 773090 - DNA, 75 bp, synthetic construct
  source 1..75: mol_type = other DNA
atggctggcatccacaacacaatccgaatggatggcggctatacgccactggcagcaatccttaacgctgctaaa

SEQ ID NO: 773091 - DNA, 75 bp, synthetic construct
  source 1..75: mol_type = other DNA
atggttttgcctgtggtgttcaacactgtaccaggtcactggaaaacctaaaaggcacaatccatgagaaaaata

SEQ ID NO: 773092 - DNA, 75 bp, synthetic construct
  source 1..75: mol_type = other DNA
gtgaagcgggtgatgccagcgtgttaaataccatcctcaacagcattgccaatgccattagcggtctggacaacg

SEQ ID NO: 773093 - DNA, 75 bp, synthetic construct
  source 1..75: mol_type = other DNA
aatgccattagcggtctggacaatgcggtcgcggcctggtttatgttgctcttccaggcggtatttaatttcttc

SEQ ID NO: 773094 - DNA, 75 bp, synthetic construct
  source 1..75: mol_type = other DNA
gctttactactactggaataacgaagaagaaaaggcacaatccatgagaaaaataaaaacatggattactcaaag

SEQ ID NO: 773095 - DNA, 75 bp, synthetic construct
  source 1..75: mol_type = other DNA
gatggtgccgatgacatcgttaagatgctcaaggatccagctcttaacaggcataatattcaggtcgctgacgac

SEQ ID NO: 773096 - DNA, 75 bp, synthetic construct
  source 1..75: mol_type = other DNA
atgaagttgaattttaagggattttttaaggctgccggtttattcccactggcgctgatgctttcggggtgtatc

SEQ ID NO: 773097 - DNA, 75 bp, synthetic construct
  source 1..75: mol_type = other DNA
caatcccgtggccatcagataccgttccgtctggttatgccctgatgcaggggcaggcttttgacaaatctgcat

SEQ ID NO: 773098 - DNA, 75 bp, synthetic construct
  source 1..75: mol_type = other DNA
acggcggcaggaaattccgcgaaggcggcaaaaacgtccgagacgaacgctaagtcttctgaaacggcagcggaa

SEQ ID NO: 773099 - DNA, 75 bp, synthetic construct
  source 1..75: mol_type = other DNA
agccgccacgtctgcatccaccgcgacctcgaaagcgtcagaagctgccacgtcagccagggatgcggcggtctc

SEQ ID NO: 773100 - DNA, 75 bp, synthetic construct
  source 1..75: mol_type = other DNA
ctggcttcaaaaggtcgggtaaccgcgctgacagacaatacgcagggggcagcaggtcttgagttatacgaggtg

SEQ ID NO: 773101 - DNA, 75 bp, synthetic construct
  source 1..75: mol_type = other DNA
cataccttctgcccgtaaggtgaatggtaaggcgctttcagcggatataacactgacgccgaaagatattggtac

SEQ ID NO: 773102 - DNA, 75 bp, synthetic construct
  source 1..75: mol_type = other DNA
acgcgcgccgagacagcagcaaaacgggcagaggatattgcatccgccgtggcgcttgaggatgcgagcacgacg

SEQ ID NO: 773103 - DNA, 75 bp, synthetic construct
  source 1..75: mol_type = other DNA
cagtgcagcgtcaacaagtgcggggcaggcctcagccagtgctagcgccgccggaaaatcggcagaaagcgctgc

SEQ ID NO: 773104 - DNA, 75 bp, synthetic construct
  source 1..75: mol_type = other DNA
agcagccacttctgcatccaccgcgaccacgaaagcgtcagaagctgccacctcagcccgggatgcggcggcttc

SEQ ID NO: 773105 - DNA, 75 bp, synthetic construct
  source 1..75: mol_type = other DNA
gcggtcagacacgattaagggtttatcgctggctgaagatagtaacggtacgaaaggctatgtttttgttggtga

SEQ ID NO: 773106 - DNA, 75 bp, synthetic construct
  source 1..75: mol_type = other DNA
atgttctacgccgggcaaaaatctgaaaagggagatcaggcgctaaactgggggaaaaaagagtatgctttcaac

SEQ ID NO: 773107 - DNA, 75 bp, synthetic construct
  source 1..75: mol_type = other DNA
tatatcgacttattatttgttgacccgaaatacacccgccgcggtgtcgccagcgccttgttaaaaccatcgatt

SEQ ID NO: 773108 - DNA, 75 bp, synthetic construct
  source 1..75: mol_type = other DNA
tgcctgtgccttgttaaaacctttgattacgtctgaatccgaacttacggtagatgccagcataaccgcaaaacc

SEQ ID NO: 773109 - DNA, 75 bp, synthetic construct
  source 1..75: mol_type = other DNA
ccgtcgatttaaccccagtgtttttaaagatacttatcaatatgttatacaagctcaggtcaaaatacctggggt

SEQ ID NO: 773110 - DNA, 75 bp, synthetic construct
  source 1..75: mol_type = other DNA
acggggtctgccggtgatcatactcatggtaatggtattcgttggccaggaggcggcggttctgcgttagcattt

SEQ ID NO: 773111 - DNA, 75 bp, synthetic construct
  source 1..75: mol_type = other DNA
gcggctgcgtcgtctgccagtgcagcgtcaacaagtgcggggcaggcctcagccagtgctagcgccgccggaaaa

SEQ ID NO: 773112 - DNA, 75 bp, synthetic construct
  source 1..75: mol_type = other DNA
cagcgcagcagcgaggtctgcttccgcagcgaagacatccgagacgaacgcgaaagcgtcggaaaccagcgcaga

SEQ ID NO: 773113 - DNA, 75 bp, synthetic construct
  source 1..75: mol_type = other DNA
tgctcatacgcactccgttgcgattggctcacatggacacaccatcaccgttaacgctgctggtaacgcggaaaa

SEQ ID NO: 773114 - DNA, 75 bp, synthetic construct
  source 1..75: mol_type = other DNA
ttatggcagcgcacatcgacagggtttacaaattttgcctgggtcaatacatctggtgatacttacgatatttac

SEQ ID NO: 773115 - DNA, 75 bp, synthetic construct
  source 1..75: mol_type = other DNA
ttcccgacaaggaccgcttcctgagtaacattaatgtttacagcaaaggtgaagtggataagaaaaaggggatgc

SEQ ID NO: 773116 - DNA, 75 bp, synthetic construct
  source 1..75: mol_type = other DNA
atcgtcgtttgattacggcactaaatccacgaataacaccggggctcatacgcacagtctgagcggctctacaag

SEQ ID NO: 773117 - DNA, 75 bp, synthetic construct
  source 1..75: mol_type = other DNA
cgccaaaagccgttaaggccgcgtatgagctggctaacgggaaatacaccgcacaggatgcaacgacagcacaga

SEQ ID NO: 773118 - DNA, 75 bp, synthetic construct
  source 1..75: mol_type = other DNA
gttcttcaagagacggttatggttttgaggaaggctgggcagaagtttatacctcgaaaaatcttccaccagaaa

SEQ ID NO: 773119 - DNA, 75 bp, synthetic construct
  source 1..75: mol_type = other DNA
gtgcagcctcctcggcaacggcggcaggaaattccgtgaaggcggcaaaaacgtccgagacgaatgctaagtctt

SEQ ID NO: 773120 - DNA, 75 bp, synthetic construct
  source 1..75: mol_type = other DNA
catcagataccgttccgtctggttatgccctgatgcaggggcagacttttgacaaatctgcatacccgaaacttg

SEQ ID NO: 773121 - DNA, 75 bp, synthetic construct
  source 1..75: mol_type = other DNA
ctatgtcattcagcggtggtgctggttggttcaaattagcaacggtaaccatgccgcaggcgagttctgttgttt

SEQ ID NO: 773122 - DNA, 75 bp, synthetic construct
  source 1..75: mol_type = other DNA
taggtgcggcgattccgtggccttctgattcagtgcctacaggctatgccgttatgcaggggcagacttttgata

SEQ ID NO: 773123 - DNA, 75 bp, synthetic construct
  source 1..75: mol_type = other DNA
gaattacagaaatggcgggagaaatatctggatatttacccacaggaccctgttccggtcagccgggcggcaccg

SEQ ID NO: 773124 - DNA, 75 bp, synthetic construct
  source 1..75: mol_type = other DNA
ttctgaccatcctggttgttaaacgtatatcatcccttccgcttcgcctgcttgttgccgcaccatttgtgttac

SEQ ID NO: 773125 - DNA, 75 bp, synthetic construct
  source 1..75: mol_type = other DNA
agccacgcaagcaccttaaaatcaccatcatacactaaatcagtaagttggcagcattaccaaagattactctca

SEQ ID NO: 773126 - DNA, 75 bp, synthetic construct
  source 1..75: mol_type = other DNA
cgtgtgattctgatatcgccaacagaggatgtgatcgctggcgtcgggcaggctccgtactgcacagaaatcaaa

SEQ ID NO: 773127 - DNA, 75 bp, synthetic construct
  source 1..75: mol_type = other DNA
ggcgcaccggaattgtgatggtgattttgctggcgattaccccgctgtgccgccgctggctgaccattttaccgc

SEQ ID NO: 773128 - DNA, 75 bp, synthetic construct
  source 1..75: mol_type = other DNA
tattttatcgtacctgtagctccagactttttttgctggcaagcaattcgctctctctcaaaaatatacctcgct

SEQ ID NO: 773129 - DNA, 75 bp, synthetic construct
  source 1..75: mol_type = other DNA
ccaacaccaccggccatcagggctacgtcgcgccggaaaaggctgtcatgcagcaggtgaaatcatcgctggaac

SEQ ID NO: 773130 - DNA, 75 bp, synthetic construct
  source 1..75: mol_type = other DNA
tctttctcagggagtttagtctccaggattcccggggcggttcaaacagggatcttactgtttaatggttctcat

SEQ ID NO: 773131 - DNA, 75 bp, synthetic construct
  source 1..75: mol_type = other DNA
gagcctgacgcagtctcttttttacttgatgaaataaaggccaatgctctggtgcctgaacaaatcatcgttgaa

SEQ ID NO: 773132 - DNA, 75 bp, synthetic construct
  source 1..75: mol_type = other DNA
catgatgttttcgattatgtgatgctcagaaaggagtttacagaggataagcaaggtaaccccacccctgaaggg

SEQ ID NO: 773133 - DNA, 75 bp, synthetic construct
  source 1..75: mol_type = other DNA
cgggaatttacctgtgaccgtcctgacctgtttaaacgcagccccgtaaaccggcatgcggtactgaaagaaatg

SEQ ID NO: 773134 - DNA, 75 bp, synthetic construct
  source 1..75: mol_type = other DNA
gtatcctcgatgacgggcgcaccacagacatcccgctggggcgttttctgcgggaatttacctgtgaccgtcctg

SEQ ID NO: 773135 - DNA, 75 bp, synthetic construct
  source 1..75: mol_type = other DNA
ctggggctgttttgtatgttacttgggctgcgctggcaggtcgcggaattgatcggcatgacgctggcgctctca

SEQ ID NO: 773136 - DNA, 75 bp, synthetic construct
  source 1..75: mol_type = other DNA
tggatccgccgaacatcttggtttatggcgtaacagtagctcggctatagcttcatatgaactcaattatccaga

SEQ ID NO: 773137 - DNA, 75 bp, synthetic construct
  source 1..75: mol_type = other DNA
tggcgtccgttgaactgagtattgatgccagcacagtgatggcgacgcaggattacgtcgatgacaaaatcgcag

SEQ ID NO: 773138 - DNA, 75 bp, synthetic construct
  source 1..75: mol_type = other DNA
ccatggattaactgttgccggacaagttgtgccaagtaactacggtaatttcgacgggcgttatgtgatggatgt

SEQ ID NO: 773139 - DNA, 75 bp, synthetic construct
  source 1..75: mol_type = other DNA
gagatggtgaaagaacatttcccacatttgcagattattgcccgcgcccgcgatgtcgaccactacattcgtttg

SEQ ID NO: 773140 - DNA, 75 bp, synthetic construct
  source 1..75: mol_type = other DNA
ggcacgcttgctgtatcagcaagaaccggcaaatcttacccgcctggatcaactaacctggcaactgatgcagaa

SEQ ID NO: 773141 - DNA, 75 bp, synthetic construct
  source 1..75: mol_type = other DNA
acgcctccagcattatctcattgaaaataagccgctgtttaccacggacgcacaagagaaaagttggctctatct

SEQ ID NO: 773142 - DNA, 75 bp, synthetic construct
  source 1..75: mol_type = other DNA
tgggcggcttctggatgcgtgagctgggtctgtatgacgatgccggaacactgattgcggtcgctaacatggcgg

SEQ ID NO: 773143 - DNA, 75 bp, synthetic construct
  source 1..75: mol_type = other DNA
tttcagtaattgtaggttttggtttttctgctggagtgcatatttatattacgtgggaaaaaatcatcaactacg

SEQ ID NO: 773144 - DNA, 75 bp, synthetic construct
  source 1..75: mol_type = other DNA
acgcgccgatgtgttccgccgctttaatattcagatggtggaagagatggcaatggttgagaacgacaccaaagc

SEQ ID NO: 773145 - DNA, 75 bp, synthetic construct
  source 1..75: mol_type = other DNA
tgagttacttatcggctggagtggaaccagcggtgctcatgcaccagcatatattcgttcaaggcgggatacaga

SEQ ID NO: 773146 - DNA, 75 bp, synthetic construct
  source 1..75: mol_type = other DNA
ctaccgcttttttatggtgcgtatttcaggaaatccgggaagccgcacgatcacgacaagacgtgtgccaattat

SEQ ID NO: 773147 - DNA, 75 bp, synthetic construct
  source 1..75: mol_type = other DNA
gattccggtacggggcgctcaatgcatgtatggcgcagcactgtaagtaaagcgaattaccgcttttttatggtt

SEQ ID NO: 773148 - DNA, 75 bp, synthetic construct
  source 1..75: mol_type = other DNA
aaaatcagtcaggaattgattaccaatgttcataaaagcgggccacggcaggcaattattcaggcgatcatgaaa

SEQ ID NO: 773149 - DNA, 75 bp, synthetic construct
  source 1..75: mol_type = other DNA
tagcttcgaccacgaatttaacgacacctttaccgtgcgtcagaacttgcgttttgccgaaaataaaacttcgca

SEQ ID NO: 773150 - DNA, 75 bp, synthetic construct
  source 1..75: mol_type = other DNA
gtatcggttatcagtttgacctgctggctaacggtgaaaccgtactgcgtgatgcatccggcgaaaaacgcatca

SEQ ID NO: 773151 - DNA, 75 bp, synthetic construct
  source 1..75: mol_type = other DNA
acacgccggtatccgtctatttcgctcaccgtgctcactggtaatgacaacgtcggtgatgctgccaacttactg

SEQ ID NO: 773152 - DNA, 75 bp, synthetic construct
  source 1..75: mol_type = other DNA
actggcattgctggaacaacaactgcgtgcgctgcgcaaagtggtcacgtcggatacacgtattattgctggtgc

SEQ ID NO: 773153 - DNA, 75 bp, synthetic construct
  source 1..75: mol_type = other DNA
cgtaaatacgtcgttgatgatgagaagctgcaaacttctccgttgatacccagttgcagagcaagtttgccactg

SEQ ID NO: 773154 - DNA, 75 bp, synthetic construct
  source 1..75: mol_type = other DNA
aggcaatacgcctgcacaggtgccaaaacacatggcttcgctgtgggctgactataccttctttgacggtccgct

SEQ ID NO: 773155 - DNA, 75 bp, synthetic construct
  source 1..75: mol_type = other DNA
tggctttcgacacccgcagttgcagtgctgaaatcatgtcagcaacaactgacacagccctcaaaccatgccagc

SEQ ID NO: 773156 - DNA, 75 bp, synthetic construct
  source 1..75: mol_type = other DNA
tcgcattaacactgcttatacgtgtagccgggcatactaaacgctgtcacgatcggatgacgaaagccattgctg

SEQ ID NO: 773157 - DNA, 75 bp, synthetic construct
  source 1..75: mol_type = other DNA
tctgttcgtgcgccgttgaccgggatcatcctagtgcttgagatgacagataactatcagctcattttgccaatg

SEQ ID NO: 773158 - DNA, 75 bp, synthetic construct
  source 1..75: mol_type = other DNA
gttggtgcccgcattaggtgactttacacgccgatatccgtctatttcgctcaccgtgctcactggtaatgacaa

SEQ ID NO: 773159 - DNA, 75 bp, synthetic construct
  source 1..75: mol_type = other DNA
cagttgtggcaacgctgaatgaactgagcgaagaagctttgattcagatcctcaaagagccgaaaaacgccctga

SEQ ID NO: 773160 - DNA, 75 bp, synthetic construct
  source 1..75: mol_type = other DNA
cttgcctcattagaaaaatatcacgaaccatatgctatttttgatgattactattgtggtgcgatatggtcagcc

SEQ ID NO: 773161 - DNA, 75 bp, synthetic construct
  source 1..75: mol_type = other DNA
tcacctggattacttccataaactgaagaaaattttcggcaactgcaccaccatcgccacgaataataaatttgt

SEQ ID NO: 773162 - DNA, 75 bp, synthetic construct
  source 1..75: mol_type = other DNA
ttcagacctgtcatttgcctgttactgatgatgttgttgttcctgctactgctactgctactgctactgctactg

SEQ ID NO: 773163 - DNA, 75 bp, synthetic construct
  source 1..75: mol_type = other DNA
ttcagcagtatgttaagcgggcatctcggggtgggtataaccgtggtgccggtgtggagtccccgtggaatgcgg

SEQ ID NO: 773164 - DNA, 75 bp, synthetic construct
  source 1..75: mol_type = other DNA
ttcagcagtacgttaagcgggcatctcggggtggggtatagccgtggtgctggtgtggaatccccgtggaatgcg

SEQ ID NO: 773165 - DNA, 75 bp, synthetic construct
  source 1..75: mol_type = other DNA
cacgatttcacatatgtatatgaaaggcggggcaatcccgtggcaacgctatccttttgtcaccatgatttccgt

SEQ ID NO: 773166 - DNA, 75 bp, synthetic construct
  source 1..75: mol_type = other DNA
gccgacggaaacgacgctgacgactggcgcacggcctttcgtgcagccggtggtgtcctgagcgatgagctgaaa

SEQ ID NO: 773167 - DNA, 75 bp, synthetic construct
  source 1..75: mol_type = other DNA
atttgtctgttactgatgatgttcctgctactgctactgctactgctactgctactgttcttctttttcctgctg

SEQ ID NO: 773168 - DNA, 75 bp, synthetic construct
  source 1..75: mol_type = other DNA
cttcaactgcgcgcttttacgcgctgcgcctgcttcccgatcaggaagttttctctcaattacgcgccttcgcgc

SEQ ID NO: 773169 - DNA, 75 bp, synthetic construct
  source 1..75: mol_type = other DNA
cgtgcgctgcgcaaagtggtcacgccggatacacgtattattgccggtgccaaagcccgtgacattcacacttcc

SEQ ID NO: 773170 - DNA, 75 bp, synthetic construct
  source 1..75: mol_type = other DNA
agcgaactggcgacgcgcgagaatttacgcctcaacgggattgatgagtcgagcgtgaagtttctcgacagcacc

SEQ ID NO: 773171 - DNA, 75 bp, synthetic construct
  source 1..75: mol_type = other DNA
aaaggttcaccttactccggctcagttgtccatgcttcttgagggcatcaactggaagcacccgaaacgaacgga

SEQ ID NO: 773172 - DNA, 75 bp, synthetic construct
  source 1..75: mol_type = other DNA
tcgaaatcagtcgatacccgcagtatatatcgtgaactgggcgcaacgctgagttacaacatgcgtctggggaac

SEQ ID NO: 773173 - DNA, 75 bp, synthetic construct
  source 1..75: mol_type = other DNA
atgagcagcggtggagccgccaacggcagttatcgcagcaacgggctgggcggtcacattgaaaccgggatgcga

SEQ ID NO: 773174 - DNA, 75 bp, synthetic construct
  source 1..75: mol_type = other DNA
caatcacaaccaggtgccggaaattattctgctcaacagcccggttccagttcttatcagatgctgccagggctg

SEQ ID NO: 773175 - DNA, 75 bp, synthetic construct
  source 1..75: mol_type = other DNA
attcacagcatcgacaccgacattaagctcaaccgcgcattgtgggtgatggctgaaacgctgctggagagtatg

SEQ ID NO: 773176 - DNA, 75 bp, synthetic construct
  source 1..75: mol_type = other DNA
actgacttaccgttatggtgatgaacatcagcccgtcaccaccgccgacatcctgacgccacgacgcagggagga

SEQ ID NO: 773177 - DNA, 75 bp, synthetic construct
  source 1..75: mol_type = other DNA
aacggctgcgtctgtggtcagtctctgggggaagtgcgtgttccgcaccggggaaatgtcgtggatacagttatt

SEQ ID NO: 773178 - DNA, 75 bp, synthetic construct
  source 1..75: mol_type = other DNA
aacggctgcgtctgtggacagtctctgggggaagtgcgtgttccgcaccggggaaatgtcgtggagacagttatt

SEQ ID NO: 773179 - DNA, 75 bp, synthetic construct
  source 1..75: mol_type = other DNA
agcgtgatgccatgcagtcgctgattctgccgccaccagcacgccaggcgctagcacaggcggcactgacttacc

SEQ ID NO: 773180 - DNA, 75 bp, synthetic construct
  source 1..75: mol_type = other DNA
tgccatgcagtcgctggttctgccgccaccggcatgccaggcgctggcacaggctgcactgacttaccgttatgg

SEQ ID NO: 773181 - DNA, 75 bp, synthetic construct
  source 1..75: mol_type = other DNA
ggggcttacgaggtggtgggcgtgtttgaccggatagaggagatgcgtgatgccatgcagtcgctgattctgccg

SEQ ID NO: 773182 - DNA, 75 bp, synthetic construct
  source 1..75: mol_type = other DNA
aagaccggcatacttcccgcagtaaacgatatgcgtacattcccactatcaccgtactggaaagcctgcagcagg

SEQ ID NO: 773183 - DNA, 75 bp, synthetic construct
  source 1..75: mol_type = other DNA
taagaaaaaaactgcgcgataacgctgccgaaccttatcgcattaaaaccgtgcgaaacaaaggctatctgtttg

SEQ ID NO: 773184 - DNA, 75 bp, synthetic construct
  source 1..75: mol_type = other DNA
atgatgcggaagtcggttcactgattgccgcgtacctggcaaaacatgatatgcaggttaccgtagagccgcgcg

SEQ ID NO: 773185 - DNA, 75 bp, synthetic construct
  source 1..75: mol_type = other DNA
atatgaaccacatcctggcactggaaatgggtgcctgcgactatattctcaaaacgacgccccctgctgttttgt

SEQ ID NO: 773186 - DNA, 75 bp, synthetic construct
  source 1..75: mol_type = other DNA
aacggctgcgtctgtgggcagtctctgggggaagtgcgtgttccgcaccggggaaatgtcgtggaaacagttatt

SEQ ID NO: 773187 - DNA, 75 bp, synthetic construct
  source 1..75: mol_type = other DNA
acgcattggtgaagatgctcaccgcaacccattaatgcaaaatgggaaacgcaaaaacctgaccattttgatcgt

SEQ ID NO: 773188 - DNA, 75 bp, synthetic construct
  source 1..75: mol_type = other DNA
gtgttgcaggcgctgccgctggactcgctgcataacgtactggttttcttgtcgatgccggtcgtcgccttcagc

SEQ ID NO: 773189 - DNA, 75 bp, synthetic construct
  source 1..75: mol_type = other DNA
cagcggcttgctgaacgtcagcgaaaaacgaaaccgctgttgaaatccctggaaagctggttgcgtgaaaagatg

SEQ ID NO: 773190 - DNA, 75 bp, synthetic construct
  source 1..75: mol_type = other DNA
ggaatttgccgaacaggaagaaattgcctttaccagtggcgacggcagcaaaaaaccaaaaggttttctggctta

SEQ ID NO: 773191 - DNA, 75 bp, synthetic construct
  source 1..75: mol_type = other DNA
aaaaataaagttgccggtgaacacaaagaagcgtttatcggatttatgcgcaaggggcgtgaagacggtctgcgt

SEQ ID NO: 773192 - DNA, 75 bp, synthetic construct
  source 1..75: mol_type = other DNA
aagtgctgttccacgggctggaagagtacatcaataacctgcagggtgatggcgtgattgtcttacacaccatcg

SEQ ID NO: 773193 - DNA, 75 bp, synthetic construct
  source 1..75: mol_type = other DNA
gaaggggcttacgaggtggtgggcgtttttgaccggattgaggacaagcgtgatgccatgcagtcgctgctactg

SEQ ID NO: 773194 - DNA, 75 bp, synthetic construct
  source 1..75: mol_type = other DNA
gaaggggcttacgaggtggtgggcgtatttgaccggatggaggacaagcgtgatgccatgcagtcgctgctactg

SEQ ID NO: 773195 - DNA, 75 bp, synthetic construct
  source 1..75: mol_type = other DNA
gaaggggcttacgaggtggtgggagtctttgaccggatcgaggacaagcgtgatgccatgcagtcgctgctactg

SEQ ID NO: 773196 - DNA, 75 bp, synthetic construct
  source 1..75: mol_type = other DNA
tgcgtctgcgccgtgacggggagagaaacggacaacatgtccctgaaatcatcctactgaactcccatgacggta

SEQ ID NO: 773197 - DNA, 75 bp, synthetic construct
  source 1..75: mol_type = other DNA
ggccgccggggatacacaaaacacaagctgcgtctgcggcgggccggagagataaacggagaacatgtccctgaa

SEQ ID NO: 773198 - DNA, 75 bp, synthetic construct
  source 1..75: mol_type = other DNA
gaaggggcttacgaggtggtgggcgtgtttgaccggatagaggacaagcgtgatgccatgcagtcgctgctactg

SEQ ID NO: 773199 - DNA, 75 bp, synthetic construct
  source 1..75: mol_type = other DNA
agacgtggtggagaaagttattgaaggggcttacgaggtagtgggcgtttttgaccggattgaggaaaagcgtga

SEQ ID NO: 773200 - DNA, 75 bp, synthetic construct
  source 1..75: mol_type = other DNA
tctgtacccgtattatcgtcgcgacgttgaactcaaccagacgctggatcgcgaacacgccatcgagatgctgca

SEQ ID NO: 773201 - DNA, 75 bp, synthetic construct
  source 1..75: mol_type = other DNA
taacttcaacaacttcgatgaagtaatggacgcgtgggatacgcaaatccgttactacacccgcaaatcaatcga

SEQ ID NO: 773202 - DNA, 75 bp, synthetic construct
  source 1..75: mol_type = other DNA
cgctgggtaaatcggtgatctcgcaagcggaagaatccattgaagaagcacagggcgttagaatgcttgaacagc

SEQ ID NO: 773203 - DNA, 75 bp, synthetic construct
  source 1..75: mol_type = other DNA
tctgctcggcgctggtggatgactgcattgagcgagcgaaaagtatcaagcaaggcggcgcgaaatatgactggg

SEQ ID NO: 773204 - DNA, 75 bp, synthetic construct
  source 1..75: mol_type = other DNA
gtgcataaaggttggcatattcagtacaacatcgtttcccgcgaaacgctgctggaagcgaaaaaacatccggat

SEQ ID NO: 773205 - DNA, 75 bp, synthetic construct
  source 1..75: mol_type = other DNA
gatcctgctgcgcaccttcttcgaggtgcataaaggttggcatattcagtacaacatcgtttcccgcgaaacgct

SEQ ID NO: 773206 - DNA, 75 bp, synthetic construct
  source 1..75: mol_type = other DNA
taaagccactgaagccatgcagcgtgcacaacaggctgtaccgttggcgcatcttccagcgtttcgacagcggca

SEQ ID NO: 773207 - DNA, 75 bp, synthetic construct
  source 1..75: mol_type = other DNA
gacgacctaccagcgaattcaggagaacctgatcaaaggcggtttaaacgggcggacggcaaaaggtggtcgcac

SEQ ID NO: 773208 - DNA, 75 bp, synthetic construct
  source 1..75: mol_type = other DNA
gtgcggtcaatctcgttcgtcgcgaccgcccgttaacccgcgatgagctggcgcactatgtgccaagtgtattca

SEQ ID NO: 773209 - DNA, 75 bp, synthetic construct
  source 1..75: mol_type = other DNA
gccggaattggcggcaccaataaaagcagtgcccaggatgtgctggcaagactgcaacgccaacagggtgagtaa

SEQ ID NO: 773210 - DNA, 75 bp, synthetic construct
  source 1..75: mol_type = other DNA
agttgctgaagaaatcgcgcgtcttgagaatctcattaccgctgaagagcaagtgttgtcgaatctggaagtctc

SEQ ID NO: 773211 - DNA, 75 bp, synthetic construct
  source 1..75: mol_type = other DNA
tgcacgtaaagcgggtctggaagcccgtgcgctggaagcgttaagtaagaacgttaatccatcgttgattaatga

SEQ ID NO: 773212 - DNA, 75 bp, synthetic construct
  source 1..75: mol_type = other DNA
tgctcggcgctggtggatgactgtattgagcgagcgaaaagtatcaagcaaggcggcgcgaaatatgactgggtt

SEQ ID NO: 773213 - DNA, 75 bp, synthetic construct
  source 1..75: mol_type = other DNA
gcaccagctcgtatcagatgctgccgggattattccgcgcggtatgccagaacgggcttgtctgcggtgagtcgt

SEQ ID NO: 773214 - DNA, 75 bp, synthetic construct
  source 1..75: mol_type = other DNA
gaatcgcagatcctctcccctcgccgctggcaggatgagagcaatgacctgtggaccacgtaccagcgtattcag

SEQ ID NO: 773215 - DNA, 75 bp, synthetic construct
  source 1..75: mol_type = other DNA
ttggcgaggtacgggtgccgcacaagggggatgtggtgagccaggtgattgagggagcgtatgaagtgctgggga

SEQ ID NO: 773216 - DNA, 75 bp, synthetic construct
  source 1..75: mol_type = other DNA
ttggcgaggtacgggtgccgcacaagggggacgtggtaagccaggtaatagaaggagcgtatgaggtactgggga

SEQ ID NO: 773217 - DNA, 75 bp, synthetic construct
  source 1..75: mol_type = other DNA
atcattctgcttaactcccatgatggcaccagctcttaccagatgttgcctggcctgttcagggctgtgtgccaa

SEQ ID NO: 773218 - DNA, 75 bp, synthetic construct
  source 1..75: mol_type = other DNA
gaaaacctgattaagggcggactcagtgggcgtaatgctaaaggcggacgaactcatactcgtgccgtgcgtggc

SEQ ID NO: 773219 - DNA, 75 bp, synthetic construct
  source 1..75: mol_type = other DNA
acttaccggcaaacaggtcccggaaattattctgctcaactctcatgatggctccagctcgtatcagatgttgcc

SEQ ID NO: 773220 - DNA, 75 bp, synthetic construct
  source 1..75: mol_type = other DNA
agactttctggcaggcgctgcaactgtgttacttcatccagttgattttgcagattgaatctaacggtcactcgg

SEQ ID NO: 773221 - DNA, 75 bp, synthetic construct
  source 1..75: mol_type = other DNA
tcagcgaccgcattaaagcgcacaaaaatgcgctggtgcatattgtgaaaccgccggtttgtaccgagcgcgcac

SEQ ID NO: 773222 - DNA, 75 bp, synthetic construct
  source 1..75: mol_type = other DNA
tgttgcgcctgcgtcgggagggacagattactggtaaacaggtgcctgaaattatcctacttaactcccatgatg

SEQ ID NO: 773223 - DNA, 75 bp, synthetic construct
  source 1..75: mol_type = other DNA
ggggcttacgaagtgctcggtgtgtttgaccgggtggaggagaagcgtgatgcaatgcagtctctggcgttacca

SEQ ID NO: 773224 - DNA, 75 bp, synthetic construct
  source 1..75: mol_type = other DNA
tgatgccatgcagtcgctggtcctgccgccaccggcacgtcaggcgctggcacaggcagccctgacttaccgtta

SEQ ID NO: 773225 - DNA, 75 bp, synthetic construct
  source 1..75: mol_type = other DNA
gttattgctggccgcatttgtgccagcaatggcgttatcgtcaatggcaaacctacagaagtttcatggcaggtt

SEQ ID NO: 773226 - DNA, 75 bp, synthetic construct
  source 1..75: mol_type = other DNA
cgacagttctcttattatcaggatgcgctagtcagtcgcaggtagagcaattatcaaagcaggttaatacgctaa

SEQ ID NO: 773227 - DNA, 75 bp, synthetic construct
  source 1..75: mol_type = other DNA
aatcagaagtgcctcccctgccccatgttcagcgaccagaaggaggtcaggcctcaatgaccctcctgggcttgc

SEQ ID NO: 773228 - DNA, 75 bp, synthetic construct
  source 1..75: mol_type = other DNA
atgtcgtcctatttttctgctgctactgaccaagaacttaatgcatttagtcaacttagtgtattttctactccc

SEQ ID NO: 773229 - DNA, 75 bp, synthetic construct
  source 1..75: mol_type = other DNA
gttcgttgccatacctgcaatgggcgcgtttccctgtactctttaaggaattgctcaagggcaaaagcacatggc

SEQ ID NO: 773230 - DNA, 75 bp, synthetic construct
  source 1..75: mol_type = other DNA
atgaaaaaccgtgtttatgaaagtttaacgactgtgtttagcgtgctggtagtcagcagctttctctatatctgg

SEQ ID NO: 773231 - DNA, 75 bp, synthetic construct
  source 1..75: mol_type = other DNA
ggcttttataccaccaaacgaaccggcggtatgctggtggattctcaggcgattaagctgatgaagatcggcgct

SEQ ID NO: 773232 - DNA, 75 bp, synthetic construct
  source 1..75: mol_type = other DNA
accgcactggcgcgaagttcatgatgaacaacaacagcctgtttgccatccgtctgctgaaagacagcgagggta

SEQ ID NO: 773233 - DNA, 75 bp, synthetic construct
  source 1..75: mol_type = other DNA
gaacaacaacagcctgtttgccattcgtctgctgaaagacaccgagggtaactatctgtggcgtccggggctgga

SEQ ID NO: 773234 - DNA, 75 bp, synthetic construct
  source 1..75: mol_type = other DNA
aatccagcgacctgaaggtggacaggcttcaatgaccctgtccggacttctgagtcttttgtggactgaagccgg

SEQ ID NO: 773235 - DNA, 75 bp, synthetic construct
  source 1..75: mol_type = other DNA
ttgcttacgatgacgaaccaaacacgaaacgatactcggctgaatttcagacacaggatgagtatgtaaagggat

SEQ ID NO: 773236 - DNA, 75 bp, synthetic construct
  source 1..75: mol_type = other DNA
atgggccagaagtttgcagtttttattgcttacgatgacgaaccaaacacgaaacgatactcggctgaatttcag

SEQ ID NO: 773237 - DNA, 75 bp, synthetic construct
  source 1..75: mol_type = other DNA
catcacgattccagatatttcaagcaatctcgaagcatggattgagtatctaaaagaacaatacatacctcaaga

SEQ ID NO: 773238 - DNA, 75 bp, synthetic construct
  source 1..75: mol_type = other DNA
caaaagaaaaccggtaagaaaatcaagccggaagagtttaaagcagtgcgtacagtccaggatgtcgtcgaggct

SEQ ID NO: 773239 - DNA, 75 bp, synthetic construct
  source 1..75: mol_type = other DNA
agatccgcgaggcggtgctctctttggggatcgattatatgcagggttatcttattggtaagccgcaaccgttaa

SEQ ID NO: 773240 - DNA, 75 bp, synthetic construct
  source 1..75: mol_type = other DNA
atgaacgacatgaaagctgttcgtcaccgatataagcagagatatgattttgctgcgtcagaagtagtgggggcg

SEQ ID NO: 773241 - DNA, 75 bp, synthetic construct
  source 1..75: mol_type = other DNA
ttggtgtaccggttcagtggactaatggcgatgcagaaaagcgcatgactggtgctgactggctgacagcaattg

SEQ ID NO: 773242 - DNA, 75 bp, synthetic construct
  source 1..75: mol_type = other DNA
ctcaggttgtgctggcactactggatgaacgggaagcagacaaaaagcgcattgcagaactggaagctcgggaaa

SEQ ID NO: 773243 - DNA, 75 bp, synthetic construct
  source 1..75: mol_type = other DNA
agatgtacaaaccaacagtacgaatcgtggaagttaatgtgccacgcgccgctggcattcgcatcaaaggaggtg

SEQ ID NO: 773244 - DNA, 75 bp, synthetic construct
  source 1..75: mol_type = other DNA
ataaaagtcaaagagttggtgagaaatttctctctgaacttgataaaagaacgcaacaaattggctttattattt

SEQ ID NO: 773245 - DNA, 75 bp, synthetic construct
  source 1..75: mol_type = other DNA
ggctgaccatgacatggcccggtacagtgcgcacaccggacagttgtttgcagaagcaggctacagcatcagagg

SEQ ID NO: 773246 - DNA, 75 bp, synthetic construct
  source 1..75: mol_type = other DNA
tttaagtgatataatctctttattagaagctgagaatgaaggtcatacggttatttcatggttcgcagaagaagt

SEQ ID NO: 773247 - DNA, 75 bp, synthetic construct
  source 1..75: mol_type = other DNA
agaaaaagagcaaattgtcattcctgatgatatgaagcctaatgtttctcgtttttcttttatatttttacccaa

SEQ ID NO: 773248 - DNA, 75 bp, synthetic construct
  source 1..75: mol_type = other DNA
ttgaagaagataaaacatataaatctgagcgtggtcaggaaattaaacctgatagtgagttaaagcaggatgctc

SEQ ID NO: 773249 - DNA, 75 bp, synthetic construct
  source 1..75: mol_type = other DNA
ttttttgagatgaatactgaaagttactacgcaaaatatacattagattttttggctgtttttatcattatgatt

SEQ ID NO: 773250 - DNA, 75 bp, synthetic construct
  source 1..75: mol_type = other DNA
gcagcggcgcgaagttcatgatgaataacagcagcctgtttgccattcgcctgctgaaggataacgacggaaatt

SEQ ID NO: 773251 - DNA, 75 bp, synthetic construct
  source 1..75: mol_type = other DNA
caaaataaactggccaccgagcataaagaggcgtttgtgggcttcctgcgtaaaggccgtgaagacggtctgcgc

SEQ ID NO: 773252 - DNA, 75 bp, synthetic construct
  source 1..75: mol_type = other DNA
gcaggtggaaaccctgaacggaaaactcagcgagctggaaaatctcaaaagcgatcttgaaaaagagctgcttga

SEQ ID NO: 773253 - DNA, 75 bp, synthetic construct
  source 1..75: mol_type = other DNA
agatgccggatattgccgccgatgcaaaagccattgcgtttggtaacttcaaacgtggctataccatcgttgatc

SEQ ID NO: 773254 - DNA, 75 bp, synthetic construct
  source 1..75: mol_type = other DNA
ctggagcgcaaggcattacaggtgggcaccgatgaagacggcggctatgccgtgccggaagcactggatcgcaac

SEQ ID NO: 773255 - DNA, 75 bp, synthetic construct
  source 1..75: mol_type = other DNA
gtacggcttcgggatgggttggtgaaacggatgcccgcccggaaaccgatgcgtctaagctcggccagattgagc

SEQ ID NO: 773256 - DNA, 75 bp, synthetic construct
  source 1..75: mol_type = other DNA
tggcgccactatcaacaacgctacccagactttatggtttggtaatacggtaaacggcgcggtcacggcgattga

SEQ ID NO: 773257 - DNA, 75 bp, synthetic construct
  source 1..75: mol_type = other DNA
ctcagcgagctggaaaatctcaaaagcgaccttgaaaaagagctgcttgagctgaaacgtccggcaggtggtgtg

SEQ ID NO: 773258 - DNA, 75 bp, synthetic construct
  source 1..75: mol_type = other DNA
gcggtatgctggtggattctcaggcgattaagctgatgaaaattggggccgcaacccgccagaaagccgcggcgt

SEQ ID NO: 773259 - DNA, 75 bp, synthetic construct
  source 1..75: mol_type = other DNA
gggttcctggcgtatgaatccactgatgaaaccgacaaggtccgggcgttcggcaaacttcagcatattgtatcc

SEQ ID NO: 773260 - DNA, 75 bp, synthetic construct
  source 1..75: mol_type = other DNA
tgggcaatgatgaagatggtggttatgccattccggaagaactggatcgtaccatcctgacgctgctgaaagatg

SEQ ID NO: 773261 - DNA, 75 bp, synthetic construct
  source 1..75: mol_type = other DNA
cggataatgctaaaacactggaacagtatgagttaacaaagagacatggtgttatctggctttacgctgaagatg

SEQ ID NO: 773262 - DNA, 75 bp, synthetic construct
  source 1..75: mol_type = other DNA
tttaccagtggcgacggcagcaaaaaaccaaaaggttttctggcttacgagtccaccgatgaagatgacaagacc

SEQ ID NO: 773263 - DNA, 75 bp, synthetic construct
  source 1..75: mol_type = other DNA
gaacttgaacgtaaggcgcttcaggtgggcaatgatgaagatggtggttatgccattccggaagaactggatcgt

SEQ ID NO: 773264 - DNA, 75 bp, synthetic construct
  source 1..75: mol_type = other DNA
gcacatgatcgttgggaaagccgacagatgcttgctaaaggtcgttttagcggcggccatgttttctgtgcagcg

SEQ ID NO: 773265 - DNA, 75 bp, synthetic construct
  source 1..75: mol_type = other DNA
atcacaaatgttgtgttcgatagacattgatgaaactgatgaagcctttgaattgcaaatggctgctagtttggc

SEQ ID NO: 773266 - DNA, 75 bp, synthetic construct
  source 1..75: mol_type = other DNA
attgattatcaggcacaaggccgtgaggcgcgcgtgagtgcagtttcctctgcgggtgaattgttgctggcgcgt

SEQ ID NO: 773267 - DNA, 75 bp, synthetic construct
  source 1..75: mol_type = other DNA
aacgacaagcgcgtggatgcgattgagcaggaaaaaggcaagcttgccgggcaggtggaaaccctgaacgggaaa

SEQ ID NO: 773268 - DNA, 75 bp, synthetic construct
  source 1..75: mol_type = other DNA
atatactccagctttgtttgttgataaacaggttgcagcaccatcggtgaatgttgaaaacttatgtattataag

SEQ ID NO: 773269 - DNA, 75 bp, synthetic construct
  source 1..75: mol_type = other DNA
gaaaaactggatgagtatgtaaataaaggttatttctttgatgatttttcctgtattgtcaatggtaaagaaata

SEQ ID NO: 773270 - DNA, 75 bp, synthetic construct
  source 1..75: mol_type = other DNA
tgaatacttgcagcttccggcatttattaccgtaccgcctcccaccttatggtttgtacaacgacgccgatattt

SEQ ID NO: 773271 - DNA, 75 bp, synthetic construct
  source 1..75: mol_type = other DNA
gatctggagcgcaaggcattgcaggtgggcaccgatgaagacggtggctatgccgtgccggaagcactggatcgc

SEQ ID NO: 773272 - DNA, 75 bp, synthetic construct
  source 1..75: mol_type = other DNA
atttacaccctgcgcaaggcgcatcgcagcggcgcgaagttcatgatgaacaacagcagcctgtttgccattcgt

SEQ ID NO: 773273 - DNA, 75 bp, synthetic construct
  source 1..75: mol_type = other DNA
ctgatgagcaggcaacattagacctgggcgagcgggtagcgaaagcctgcgatggcgcaaccgtaatctatctgt

SEQ ID NO: 773274 - DNA, 75 bp, synthetic construct
  source 1..75: mol_type = other DNA
gctgaactggaaaatctgaaaagcgatcttgaagctgaactggctgaagtcaagcgtccggcaggcggcacgcaa

SEQ ID NO: 773275 - DNA, 75 bp, synthetic construct
  source 1..75: mol_type = other DNA
gtccaccgatgaagatgacaagacccgtgcgtttggcaaacttcgcttccggtgcggcttccggcgtgactgccg

SEQ ID NO: 773276 - DNA, 75 bp, synthetic construct
  source 1..75: mol_type = other DNA
atttccctactggacagcctgcagcgcgaaggctttcagccgttctttgcctgtcagacccgagtgcgagaccct

SEQ ID NO: 773277 - DNA, 75 bp, synthetic construct
  source 1..75: mol_type = other DNA
gatataattccattcgccgtgagcgcccgttaacggatgacgaattaatgcactttgttccatctgtcttttctg

SEQ ID NO: 773278 - DNA, 75 bp, synthetic construct
  source 1..75: mol_type = other DNA
ccgccaccagcacagaaagccttagcacaagcagctttgacgtatcgctttggtgaggagcatcaaccgattaca

SEQ ID NO: 773279 - DNA, 75 bp, synthetic construct
  source 1..75: mol_type = other DNA
gcagcgggacggagccgaatcgcgcctggttccaggtagaagatgacggtccgggaattgcgccggaacaacgta

SEQ ID NO: 773280 - DNA, 75 bp, synthetic construct
  source 1..75: mol_type = other DNA
tggtgacagtgcgcgcactatcagtggcactggcttagggctggcgattgtgcagcggattatcgataaccataa

SEQ ID NO: 773281 - DNA, 75 bp, synthetic construct
  source 1..75: mol_type = other DNA
cactatgtgccgggtattttcggtgaagaccggcatacttcccgaagccagaactatacgtacattcccaccatc

SEQ ID NO: 773282 - DNA, 75 bp, synthetic construct
  source 1..75: mol_type = other DNA
gagcgcatatcagaccatccaggagaatatactgaaaggcggaatttccggccgcagtgcaaaaggaaaacgtat

SEQ ID NO: 773283 - DNA, 75 bp, synthetic construct
  source 1..75: mol_type = other DNA
cactaacgagcagatccagaaacgtgcggaagggatctccagctattacgatgagctgatcgaaatgaccagcta

SEQ ID NO: 773284 - DNA, 75 bp, synthetic construct
  source 1..75: mol_type = other DNA
ccggaagaagttgacgtctcccgcgaccgtatcgattaccaggcactgcctgaacacgaaaaacacatctttatc

SEQ ID NO: 773285 - DNA, 75 bp, synthetic construct
  source 1..75: mol_type = other DNA
gtgcggcgaatagcattcgccgtgaccgcccgttaactctcgaagagttatttcgcaccgtacccagtgtgttct

SEQ ID NO: 773286 - DNA, 75 bp, synthetic construct
  source 1..75: mol_type = other DNA
agacgtggtggagaaagttattgaaggggcttacgaagtggtgggcgtttttgaccggattgaggaaaagcgtga

SEQ ID NO: 773287 - DNA, 75 bp, synthetic construct
  source 1..75: mol_type = other DNA
aatatgctgaaaggcgggatttccggccgcagtgcaaaaggaaaacgtatccacacccgggccattcacagcatc

SEQ ID NO: 773288 - DNA, 75 bp, synthetic construct
  source 1..75: mol_type = other DNA
cgggatgctggagcttggcaccagcgagcggggcgggctttccattcgcgcctggctgcctgtgccggtaacgcg

SEQ ID NO: 773289 - DNA, 75 bp, synthetic construct
  source 1..75: mol_type = other DNA
aaatgtggtggagaaagttattgaaggggcttacgaggtggtgggtgtgtttgaccggatcgaggagaagcgtga

SEQ ID NO: 773290 - DNA, 75 bp, synthetic construct
  source 1..75: mol_type = other DNA
aaagcagctctctttcttctggcgtcccgaagaggttgacgtctcccgcgaccgcatcgattaccaggcgctgcc

SEQ ID NO: 773291 - DNA, 75 bp, synthetic construct
  source 1..75: mol_type = other DNA
ccacacccgtgccattcacaacatcgataccgatattaagcgcaaccgcgcattgtgggtgatggcagaaacgct

SEQ ID NO: 773292 - DNA, 75 bp, synthetic construct
  source 1..75: mol_type = other DNA
agataaccggtcagcatgtgcctgaaattattctgctcaactcccatgacggttcatccagctaccagatgttac

SEQ ID NO: 773293 - DNA, 75 bp, synthetic construct
  source 1..75: mol_type = other DNA
tttgaggttgatttcaaagcccctgatgggagtatctacaaccttgaatttgctttggctccacacggcccaaac

SEQ ID NO: 773294 - DNA, 75 bp, synthetic construct
  source 1..75: mol_type = other DNA
aaatgtggtggagaaagttatcgaaggggcttacgaggtggtgggtgtgtttgaccggatggaggataagcgtga

SEQ ID NO: 773295 - DNA, 75 bp, synthetic construct
  source 1..75: mol_type = other DNA
gaacgtggcgctgctgccgctgatttccattcccgaactggaaacctgggtagaaacctgggcgttttcggaaac

SEQ ID NO: 773296 - DNA, 75 bp, synthetic construct
  source 1..75: mol_type = other DNA
cgccggggatacaccaaacacatgctgcgtctgcgccgtgacggggagataaacggacaacatgtccctgaaatt

SEQ ID NO: 773297 - DNA, 75 bp, synthetic construct
  source 1..75: mol_type = other DNA
tatctgggtacgcgtgccgctgaccgaaattcatcagggcgacttttctccgttattccgctatacgctggcgat

SEQ ID NO: 773298 - DNA, 75 bp, synthetic construct
  source 1..75: mol_type = other DNA
tggattccattcagggacgtagtccaaacgtcgcgctgttgccgctgatctcaattcctgaactggaaacctggg

SEQ ID NO: 773299 - DNA, 75 bp, synthetic construct
  source 1..75: mol_type = other DNA
atgcgattagccagccgttttggtcatgtaaaccagatacgccgtgaccgccccttaactcgtgaagaactgatg

SEQ ID NO: 773300 - DNA, 75 bp, synthetic construct
  source 1..75: mol_type = other DNA
gatgttttttggtcagccggtcaacgtggctcgctacgaccagcaaaaatatgacatcttcgaaaagctgatcga

SEQ ID NO: 773301 - DNA, 75 bp, synthetic construct
  source 1..75: mol_type = other DNA
tgcgtctgcggcgggccggagagataaacggagaacatgtccctgaaattattctgctcaactcccatgacggta

SEQ ID NO: 773302 - DNA, 75 bp, synthetic construct
  source 1..75: mol_type = other DNA
agcatcgataccgacattaagctcaaccgcgcattgtgggtgatggcggaaacgctgctggagagcctgcgctga

SEQ ID NO: 773303 - DNA, 75 bp, synthetic construct
  source 1..75: mol_type = other DNA
tgctgcgtctgcggcgggccggagagataaacggacaacatgtccctgaaatcatcctgctgaactcccatgacg

SEQ ID NO: 773304 - DNA, 75 bp, synthetic construct
  source 1..75: mol_type = other DNA
tggtatgtcggcgcgacctgcgccgatctggtcggctactggctttatgatgtggaaggcggctggcgctggatg

SEQ ID NO: 773305 - DNA, 75 bp, synthetic construct
  source 1..75: mol_type = other DNA
cctccagctaccagatgttacccggatattttcgtgccatttgtaccaatggcctggtctgcggtcagtcgctgg

SEQ ID NO: 773306 - DNA, 75 bp, synthetic construct
  source 1..75: mol_type = other DNA
ggcaatacggcatcgtcatttattgtaactacaatgccaacaacacgcgcaagtgatgtggttactatcccctcg

SEQ ID NO: 773307 - DNA, 75 bp, synthetic construct
  source 1..75: mol_type = other DNA
aaggttttcagccattcttcgcctgccagacccgcgtgcgcgacccgggccgccggggatacaccaaacacatgc

SEQ ID NO: 773308 - DNA, 75 bp, synthetic construct
  source 1..75: mol_type = other DNA
tggtgacgaacatcagcctgtcaccaccgctgacattctgacccctcgacgcggggaggattacggtgaggacct

SEQ ID NO: 773309 - DNA, 75 bp, synthetic construct
  source 1..75: mol_type = other DNA
tggtgacgaacatcagcctgtcaccaccgctgacattctgaccccacgacgctgggaggattacggtgaggacct

SEQ ID NO: 773310 - DNA, 75 bp, synthetic construct
  source 1..75: mol_type = other DNA
ataattacggtatcagtaacacgatgctaatgggggcgggtatctcgctgtttggcttgttgatttccgtagcgt

SEQ ID NO: 773311 - DNA, 75 bp, synthetic construct
  source 1..75: mol_type = other DNA
tctcgctgtttggcctgctgatttctgtggcgtttgctccggagacgcgtgggatgtcgttggcgcagaccagta

SEQ ID NO: 773312 - DNA, 75 bp, synthetic construct
  source 1..75: mol_type = other DNA
tggtgacgaacatcagccggtcaccaccgctgacattctgaccccccgacgcagggaggattacggtgaggacct

SEQ ID NO: 773313 - DNA, 75 bp, synthetic construct
  source 1..75: mol_type = other DNA
tggtgacgaacatcagcccgtcaccaccgctgacattctgaccccgcgacgcagggaggattacggtgaggacct

SEQ ID NO: 773314 - DNA, 75 bp, synthetic construct
  source 1..75: mol_type = other DNA
gcgtgtgctatgcctttccggtcggtaaaaccattatgctgatttcccgtcattatctgccggagttccagctac

SEQ ID NO: 773315 - DNA, 75 bp, synthetic construct
  source 1..75: mol_type = other DNA
ttctgctcaactcccatgacggtacctccagctaccagatgctgccggggtacttcaggttcgtctgccagaacg

SEQ ID NO: 773316 - DNA, 75 bp, synthetic construct
  source 1..75: mol_type = other DNA
gaaggggcttacgaggtggtgggcgtgtttgaccggattgaggaaaagcgtgatgccatgcagtcgctgattctg

SEQ ID NO: 773317 - DNA, 75 bp, synthetic construct
  source 1..75: mol_type = other DNA
gtgataaagcgaacttataccgaggaggaacagaggcagcaggcagagaatgaaaagcaaagcctgttgcaactt

SEQ ID NO: 773318 - DNA, 75 bp, synthetic construct
  source 1..75: mol_type = other DNA
ccgaagagtgcagagctatgacctgtttgttcaggcagctcaagactgggcggattatctgttccgcgacggttc

SEQ ID NO: 773319 - DNA, 75 bp, synthetic construct
  source 1..75: mol_type = other DNA
aatatgctgaaaggcgggatttccggtcgcagtgccagaggaaaacgtatccatacccgtgccattcacagtatc

SEQ ID NO: 773320 - DNA, 75 bp, synthetic construct
  source 1..75: mol_type = other DNA
tgtttgaccggattgaggagatgcgtgatgccatgcagtcgctggttctgccgccaccggcacgccaggcgctgg

SEQ ID NO: 773321 - DNA, 75 bp, synthetic construct
  source 1..75: mol_type = other DNA
agcatcgacaccgatattaagctcaacagcgcattgtgggtgatggcagaaacgctgctggagagcatgcgctga

SEQ ID NO: 773322 - DNA, 75 bp, synthetic construct
  source 1..75: mol_type = other DNA
aatgccggaatcgccaccacaaaagcgcgggaggccgcagcagacgcaacaacggccgggcagaaaaaggatgag

SEQ ID NO: 773323 - DNA, 75 bp, synthetic construct
  source 1..75: mol_type = other DNA
cgccgggaagattacggtaaggacctgtggagtgcttatcagaccattcaggagaatatgctgaaaggcggaatt

SEQ ID NO: 773324 - DNA, 75 bp, synthetic construct
  source 1..75: mol_type = other DNA
ttcgttttcttcagcctgaccgtgctatttgctctgctggctatcggtaacattgccggtaacgaagcgatcatc

SEQ ID NO: 773325 - DNA, 75 bp, synthetic construct
  source 1..75: mol_type = other DNA
gggaagtgcgtgttccacaccggggagacgtagtggagaaagttatcgaaggggcttacgaggtggtgggggttt

SEQ ID NO: 773326 - DNA, 75 bp, synthetic construct
  source 1..75: mol_type = other DNA
accgatgcggcgcttgccgagcgtctggaagagtggatctgcggcgagggcgccagcgcgcagatcgacactctg

SEQ ID NO: 773327 - DNA, 75 bp, synthetic construct
  source 1..75: mol_type = other DNA
aaggaaaacgtatccatacccgggccattcacagcattgataccgacattaagctcaatcgcgcattgtgggtga

SEQ ID NO: 773328 - DNA, 75 bp, synthetic construct
  source 1..75: mol_type = other DNA
ccatacccgggccattcacaacatcgacaccgacattaagctcaatcgcgcattgtgggtgatggcagaaacgct

SEQ ID NO: 773329 - DNA, 75 bp, synthetic construct
  source 1..75: mol_type = other DNA
agcatcgacacggacattaagctcaatcgcgcattgtgggtgatggcagaaacgctgctgaagagcatgcgctga

SEQ ID NO: 773330 - DNA, 75 bp, synthetic construct
  source 1..75: mol_type = other DNA
aggagaatatgctgaaaggcggaatttccggccgcagtgcaaaaggaaaacgtatccacacccgtgccattcaca

SEQ ID NO: 773331 - DNA, 75 bp, synthetic construct
  source 1..75: mol_type = other DNA
cagaccatccaggagaatatgctgaaaggcgggatttccggtcgcagcgctaaaggaaaacgtatccacacccgt

SEQ ID NO: 773332 - DNA, 75 bp, synthetic construct
  source 1..75: mol_type = other DNA
cgcgcgcattcgtatccgcaacccctgagacctgcggtgcatatcagaccatccaagagaacatgctgaaaggcg

SEQ ID NO: 773333 - DNA, 75 bp, synthetic construct
  source 1..75: mol_type = other DNA
caggacctgtggagtgcttatcagaccattcaggagaatatgctgaaaggcggaatttccggtcgcagtgccaga

SEQ ID NO: 773334 - DNA, 75 bp, synthetic construct
  source 1..75: mol_type = other DNA
acccgtgccattcacagcattgacactgacattaagctcaaccgcgcattgtgggtgatggcggaaacgctgctg

SEQ ID NO: 773335 - DNA, 75 bp, synthetic construct
  source 1..75: mol_type = other DNA
cacaggcggcactgacttaccgttatggtgacgaacatcagcagccacaacagcggacatcctcacgcaacgacg

SEQ ID NO: 773336 - DNA, 75 bp, synthetic construct
  source 1..75: mol_type = other DNA
caggcggcactgacttaccgttatggtgacgaacatcagcccgtcaccaccgccgacattctgacaccacgacgc

SEQ ID NO: 773337 - DNA, 75 bp, synthetic construct
  source 1..75: mol_type = other DNA
cgaacatcagcccgtcaccaccgctgacattcttacgccacgacgcagggaggattacggtaaggacctgtggag

SEQ ID NO: 773338 - DNA, 75 bp, synthetic construct
  source 1..75: mol_type = other DNA
taccgttatggtgacgaacatcagccggtcaccaccgctgacattctgacaccacgacgcagggaggattacggt

SEQ ID NO: 773339 - DNA, 75 bp, synthetic construct
  source 1..75: mol_type = other DNA
aaggtggtttccagcggcctgttcctgattgattctgaagccaatatttctggcgcactggagcggatgcgctct

SEQ ID NO: 773340 - DNA, 75 bp, synthetic construct
  source 1..75: mol_type = other DNA
tcacagcatcgacacggacattaagctcaatcgcgcattgtgggtaatgacagaaacgctgctggagaacatgcg

SEQ ID NO: 773341 - DNA, 75 bp, synthetic construct
  source 1..75: mol_type = other DNA
gggaagtgcgtgttccacaccggggaaatgtggtggaaaaagtcatcgaaggggcttacgaagtggtgggggttt

SEQ ID NO: 773342 - DNA, 75 bp, synthetic construct
  source 1..75: mol_type = other DNA
aatgggtgagaaaactgttctggacggctgaaactccctggcaaatgttgattgaagaggctcgtctgatcgcgc

SEQ ID NO: 773343 - DNA, 75 bp, synthetic construct
  source 1..75: mol_type = other DNA
gactacttaccaacgcattcaggagaacttgataaaaggcgggctatcgggacgaacgacgaaaggtaggcgtgc

SEQ ID NO: 773344 - DNA, 75 bp, synthetic construct
  source 1..75: mol_type = other DNA
atacccgggccattcacagcattgataccgacattaagctcaaccgtgcattgtgggtgatggcagaaacgatgc

SEQ ID NO: 773345 - DNA, 75 bp, synthetic construct
  source 1..75: mol_type = other DNA
aagaccggcatacctcctgcagtgaacgctatacgtacatccccaccatcaccgtactggaaagcctgcagcggg

SEQ ID NO: 773346 - DNA, 75 bp, synthetic construct
  source 1..75: mol_type = other DNA
cgatgctgctcattccgtcacaggcgctgattgataccggcagcgaacagcgggtgattaccgttgatgccgacg

SEQ ID NO: 773347 - DNA, 75 bp, synthetic construct
  source 1..75: mol_type = other DNA
cgggaatgaacgcctggttgcaactcaacaccgccagcgaaccgatgctgctcattccgtcacaggcgctgattg

SEQ ID NO: 773348 - DNA, 75 bp, synthetic construct
  source 1..75: mol_type = other DNA
cgagtatcagtttgccattgtgcaggcccgcgccgccgggtttatcgacaaggtgtatccgcttaccgtgggcga

SEQ ID NO: 773349 - DNA, 75 bp, synthetic construct
  source 1..75: mol_type = other DNA
cgcgccattaaaggcatcgacggcgatgtcaggctcaaccgcgccctgtgggtgatggctgaaaacatgttgcaa

SEQ ID NO: 773350 - DNA, 75 bp, synthetic construct
  source 1..75: mol_type = other DNA
aaccggacaacatgtccctgaaattattctgctcaactcccatgacggtacctccagctaccagatgctaccggg

SEQ ID NO: 773351 - DNA, 75 bp, synthetic construct
  source 1..75: mol_type = other DNA
gagaattctgcgtctggtgtgcgtattgacccgacccagacgcagaatctgggggtgaaaacggccaccgtcacg

SEQ ID NO: 773352 - DNA, 75 bp, synthetic construct
  source 1..75: mol_type = other DNA
cagttcgtcgggctatgaactggcaaagcaaatgctggcgcgggaagactatccgaaggcgttgtttgtcgcttc

SEQ ID NO: 773353 - DNA, 75 bp, synthetic construct
  source 1..75: mol_type = other DNA
gcgaaatcagagttccgcacagggggaatgtagttgagaaggttatcaaaggcgcttacgaagtactcggcgtct

SEQ ID NO: 773354 - DNA, 75 bp, synthetic construct
  source 1..75: mol_type = other DNA
acatacccgtgctgtaaaaggtatcgatggtgatgtgaagctcaatcgcgccctgtgggtgatggccgagaatat

SEQ ID NO: 773355 - DNA, 75 bp, synthetic construct
  source 1..75: mol_type = other DNA
acgggcgcacggcaaaaggtggtcgcacgcacacccgcgccattaaaggcatcgacggcgatatcaaactcaacc

SEQ ID NO: 773356 - DNA, 75 bp, synthetic construct
  source 1..75: mol_type = other DNA
aaggctttgagccgttctttgcctgccagacgaaggttcgcgaccagagcaagcgggagcacaccaaacacatgc

SEQ ID NO: 773357 - DNA, 75 bp, synthetic construct
  source 1..75: mol_type = other DNA
cgggcaaccctaaaacaaaagagcaataccagctaacgaaacaatttaacatcaaatggctttatacagaggatg

SEQ ID NO: 773358 - DNA, 75 bp, synthetic construct
  source 1..75: mol_type = other DNA
gcgtaaatcaaatccgtcgcgatcgcccattaacgcatgacgaattgatgcagtatgtccccagcgtatttgggg

SEQ ID NO: 773359 - DNA, 75 bp, synthetic construct
  source 1..75: mol_type = other DNA
aaggctttgagccgttctttgcctgccagacaaaggttcgcgaccagagcaagcgggaacacaccaaacacatgc

SEQ ID NO: 773360 - DNA, 75 bp, synthetic construct
  source 1..75: mol_type = other DNA
actctgctcgacagtttacagcttgaaggctttgagcctttctttgcctgccagacacgtgttcgtgaccagagc

SEQ ID NO: 773361 - DNA, 75 bp, synthetic construct
  source 1..75: mol_type = other DNA
ggtgcttacgaagtggtgggcgtgtttgacctgattgaggaaaagcgtgatgccatgcagtcgctgattctgccg

SEQ ID NO: 773362 - DNA, 75 bp, synthetic construct
  source 1..75: mol_type = other DNA
gatggcgatgtgaagctcaatcgcgccctgtgggtaatggcagaaaacatgctcgatttttttcgggcgttaaac

SEQ ID NO: 773363 - DNA, 75 bp, synthetic construct
  source 1..75: mol_type = other DNA
catcaagctaccagatgctgccggggctgtttcgaggcgtctgtaccaacggcctggtctgcggtcagtcattcg

SEQ ID NO: 773364 - DNA, 75 bp, synthetic construct
  source 1..75: mol_type = other DNA
ggggcttacgaagtgctcggggtctttgaccgggtggatgagaaacgcgatgcaatgcagtcgctggcgttacca

SEQ ID NO: 773365 - DNA, 75 bp, synthetic construct
  source 1..75: mol_type = other DNA
aaggctttgagccgttctttgcctgccagacaaaagttcgcgaccagagcaagcgggagcacaccaaacacatgc

SEQ ID NO: 773366 - DNA, 75 bp, synthetic construct
  source 1..75: mol_type = other DNA
acgctatgcgtacattcccaccatcaccgtactggaaagtctgcagcgggaaggctttcagcccttcttcgcctg

SEQ ID NO: 773367 - DNA, 75 bp, synthetic construct
  source 1..75: mol_type = other DNA
aggcggcgctgacttaccgttatggtaacgaacatcagcccgtcaccaccgccgacattctgacgccacgacgcc

SEQ ID NO: 773368 - DNA, 75 bp, synthetic construct
  source 1..75: mol_type = other DNA
ccagacccgtgtgcgcgacccgggccgccgggggatacacaaaaacatatgctgcgtctgcggcgggccggagag

SEQ ID NO: 773369 - DNA, 75 bp, synthetic construct
  source 1..75: mol_type = other DNA
ggatgcgtctgtggtcagtctctgggggaagtgcgtgttccgcaccggggaaatgtagtggagaaagttatcgaa

SEQ ID NO: 773370 - DNA, 75 bp, synthetic construct
  source 1..75: mol_type = other DNA
aaacgtatccatacccgggccattcacagcattgataccgacattaagctcaaccgcgcattgtgggtgatggca

SEQ ID NO: 773371 - DNA, 75 bp, synthetic construct
  source 1..75: mol_type = other DNA
tgcgtctgcggcgtaacggggagataaccggacaacatgtccctgaaattattctgctcaactcccatgacggtt

SEQ ID NO: 773372 - DNA, 75 bp, synthetic construct
  source 1..75: mol_type = other DNA
gtgtttgacagggtggatgaaaagcgcgatgcgatgcaatcgctggcgctgccagctccagcccgtcacgcgctg

SEQ ID NO: 773373 - DNA, 75 bp, synthetic construct
  source 1..75: mol_type = other DNA
atgacccgtttagccagccgcttcggccgcattaaccagatacggcgtgaccgagcgcttacccatgaagagctg

SEQ ID NO: 773374 - DNA, 75 bp, synthetic construct
  source 1..75: mol_type = other DNA
ggcctggtctgcggtcagtcattcggcgaagtgcgggtaccgcataaaggtaatgtcgtcgagaaggttattgaa

SEQ ID NO: 773375 - DNA, 75 bp, synthetic construct
  source 1..75: mol_type = other DNA
ccacacccgtgccattcacaacatcgacacggacattaagctcaatcgcgcattgtgggtgatggcagaaacact

SEQ ID NO: 773376 - DNA, 75 bp, synthetic construct
  source 1..75: mol_type = other DNA
ctggcaatcctaaaacaaaagagcaataccagctaacaaagcaatttaacatcaaatggctttattcagatgatg

SEQ ID NO: 773377 - DNA, 75 bp, synthetic construct
  source 1..75: mol_type = other DNA
gaccggtcagcaggtgccggaaattatcctgctcaattcgcatgacggttcgtccagttaccagatgttgccggg

SEQ ID NO: 773378 - DNA, 75 bp, synthetic construct
  source 1..75: mol_type = other DNA
ggcgctgactggctgacagcgattgagatgtacaaaccaacagtgcgcatcgtggaagttaatgtgccacgcgcc

SEQ ID NO: 773379 - DNA, 75 bp, synthetic construct
  source 1..75: mol_type = other DNA
caaaaccactaatattcatggcgcgcaactcgtttgcgcagattctctgcaatttatcaaaaccatccctgataa

SEQ ID NO: 773380 - DNA, 75 bp, synthetic construct
  source 1..75: mol_type = other DNA
ggctggaccactgtctggcccagttctggcgggtgttaaaacctgccggaagcctttacctgttctgtgggcatc

SEQ ID NO: 773381 - DNA, 75 bp, synthetic construct
  source 1..75: mol_type = other DNA
tctgatgttgaatacatcaagcgcgatctcgctgaggtaaagtcagatataaaatctgttgattctcgtctgtca

SEQ ID NO: 773382 - DNA, 75 bp, synthetic construct
  source 1..75: mol_type = other DNA
atcaggagctggttaaactggtagccgaacgcagcaaccaaccgctgcatgatgtggacttggataaatacctat

SEQ ID NO: 773383 - DNA, 75 bp, synthetic construct
  source 1..75: mol_type = other DNA
ccagtgcaagtgtcagtgaactgaaaaaaaatccgatggcaaccgtcagtgccggagaggggtatcctgttgcca

SEQ ID NO: 773384 - DNA, 75 bp, synthetic construct
  source 1..75: mol_type = other DNA
atgcatttacgtcatctgttctcatcgcgtctgcgtggttcattactgttaggttcattgctcgttgcttcatcg

SEQ ID NO: 773385 - DNA, 75 bp, synthetic construct
  source 1..75: mol_type = other DNA
gataccagatcgtttgaagaaaatatccatggacgaaacaattattacccgtcattctttacttgaatgggtaag

SEQ ID NO: 773386 - DNA, 75 bp, synthetic construct
  source 1..75: mol_type = other DNA
cattcgttgactgggatgatgcaaagtacatgacagaaagtatgagcttcgtactggaagacgtatcagttatcc

SEQ ID NO: 773387 - DNA, 75 bp, synthetic construct
  source 1..75: mol_type = other DNA
gcctgttctcgcccggatatcagaaatattgcagtaacagggccgtacggggccggtaaaagttcggtattactg

SEQ ID NO: 773388 - DNA, 75 bp, synthetic construct
  source 1..75: mol_type = other DNA
gaaggctaccgcgctcttatggtcacactctgccatgtgttcggggttcatcgcagcagctacagatactggaaa

SEQ ID NO: 773389 - DNA, 75 bp, synthetic construct
  source 1..75: mol_type = other DNA
acttatccgtgagtgtgtttttgaaaaaaaacgtaagaagagttatggcgttgatgtgccactctatttatatgc

SEQ ID NO: 773390 - DNA, 75 bp, synthetic construct
  source 1..75: mol_type = other DNA
ccttaacgtgatggccggaccagtacgtaaatggatattcacctgggaaaaggaacactcatggataaacacaga

SEQ ID NO: 773391 - DNA, 75 bp, synthetic construct
  source 1..75: mol_type = other DNA
gaaaaacccgatggctacagtcagcgccggtgatggtttcccggtcgctatcctgaaccgtaatcagcctgcttt

SEQ ID NO: 773392 - DNA, 75 bp, synthetic construct
  source 1..75: mol_type = other DNA
cgggcaagccactcacaataactgatcctaatatgacccgctttatgatgactcttgaggatgcggtagatttag

SEQ ID NO: 773393 - DNA, 75 bp, synthetic construct
  source 1..75: mol_type = other DNA
aattatatgaggcgttattgagtcgtgaagagatgatcgcagcaatcgatatgggagaatattactgtgttccgc

SEQ ID NO: 773394 - DNA, 75 bp, synthetic construct
  source 1..75: mol_type = other DNA
agatatatgaaaccttacttagccgtgaagaaatggcaaaagcgattgatcatggagattattatcagattcaac

SEQ ID NO: 773395 - DNA, 75 bp, synthetic construct
  source 1..75: mol_type = other DNA
tcagataaattgaaattttatattggtgatgtacgcgattatcagagtgtttcaaatgctatgcgcggcgttgac

SEQ ID NO: 773396 - DNA, 75 bp, synthetic construct
  source 1..75: mol_type = other DNA
tgttgaaggcatgaaagagctcttgctaaaattagcctttattcgagcaattcgtgctggtgaaaaatataatct

SEQ ID NO: 773397 - DNA, 75 bp, synthetic construct
  source 1..75: mol_type = other DNA
gcacctgcagcaactattgacacattagctattgctttaaaggaattactaaatgttcctgaccatccggtaaat

SEQ ID NO: 773398 - DNA, 75 bp, synthetic construct
  source 1..75: mol_type = other DNA
ccataataataccgacgtataattcatctgattacattactgaaactctaacgaaattagaaaaacaaacttacc

SEQ ID NO: 773399 - DNA, 75 bp, synthetic construct
  source 1..75: mol_type = other DNA
atgccagagaacaacaccagaaagccgggtaaaagtgccactgtgcacatagacaccggaacgatggagaagatc

SEQ ID NO: 773400 - DNA, 75 bp, synthetic construct
  source 1..75: mol_type = other DNA
aatatgttctcagcgtaaagctaatcagattaaaagtgaaagaactaaagcaagacatgctgtagtgtttgaatg

SEQ ID NO: 773401 - DNA, 75 bp, synthetic construct
  source 1..75: mol_type = other DNA
attcccataatacatatagactcaatgttgatgaaatgaaaaaattattgttaaaactcaatatcattcaaaatg

SEQ ID NO: 773402 - DNA, 75 bp, synthetic construct
  source 1..75: mol_type = other DNA
agggtctttacttttcgattttttttataaaaaggtcagattccatataggatgcttgggtaatgactccaactt

SEQ ID NO: 773403 - DNA, 75 bp, synthetic construct
  source 1..75: mol_type = other DNA
tctggaagagaataatcttttttttgatgaagatttacgactaggagaagatctggattttatctatcgactgct

SEQ ID NO: 773404 - DNA, 75 bp, synthetic construct
  source 1..75: mol_type = other DNA
tctgacagcgcttttctgggacaggagctggtcggtcaggtttactaccgcgatgagtcgttgcgattcttcccg

SEQ ID NO: 773405 - DNA, 75 bp, synthetic construct
  source 1..75: mol_type = other DNA
ggcgtcagtggcggagcaggcccgaatgcgactcaatattatcaccgagctggaacagcggctggatgagcatgc

SEQ ID NO: 773406 - DNA, 75 bp, synthetic construct
  source 1..75: mol_type = other DNA
tgttttaagcaaccaacagatactggcaggactgaacgatacgctggatattctggaaaaacagtggggtaagaa

SEQ ID NO: 773407 - DNA, 75 bp, synthetic construct
  source 1..75: mol_type = other DNA
tgaaaaaaggagtgctggagcaatgtgataaaattagtaccgaaagggtccttgttataaaacctgatatcaaag

SEQ ID NO: 773408 - DNA, 75 bp, synthetic construct
  source 1..75: mol_type = other DNA
cactggtggcacccgccacacggcaacggtgtgcgtacccgctgttccgatgactatctttggctgccgcttgct

SEQ ID NO: 773409 - DNA, 75 bp, synthetic construct
  source 1..75: mol_type = other DNA
tctttatcttgatgaccgcgcagggggtattaatgagcagcttaaccagcgtattcataccctgaaatcgccggc

SEQ ID NO: 773410 - DNA, 75 bp, synthetic construct
  source 1..75: mol_type = other DNA
gcacggtattccggtcagcgagtctgctgttacaggagcgcgtgccggatgcggtcgatctgtacagtccgcgcc

SEQ ID NO: 773411 - DNA, 75 bp, synthetic construct
  source 1..75: mol_type = other DNA
gtaaagatggtattaaaattgacgactccattattacaagttttaaagcctctaaagacgttggaatttcaaatg

SEQ ID NO: 773412 - DNA, 75 bp, synthetic construct
  source 1..75: mol_type = other DNA
tccgtagcaattgctctaaaaatgtcacggtgaaagatggtgtaagcaccttctcagatgccgctaatgcgcaag

SEQ ID NO: 773413 - DNA, 75 bp, synthetic construct
  source 1..75: mol_type = other DNA
gtaacggtatgttgatgtgtcaggagctatataatcgctctacgagtgaactttctaatgagcaacttcaagccc

SEQ ID NO: 773414 - DNA, 75 bp, synthetic construct
  source 1..75: mol_type = other DNA
tctacccaacgtggtgatggcatggaaatttggctggcaaggtggcgtactctccgggcttttgggcagcatgat

SEQ ID NO: 773415 - DNA, 75 bp, synthetic construct
  source 1..75: mol_type = other DNA
tgaacacccgcctgggaaccatccacggcacgtcggtcggcgaactgctggcgtggatcaaagaagatgaaaacc

SEQ ID NO: 773416 - DNA, 75 bp, synthetic construct
  source 1..75: mol_type = other DNA
tagccgacaaccagataagctggtgatggggatggggcatatgactcgtgcaaacagtgaagattgcttgtttgc

SEQ ID NO: 773417 - DNA, 75 bp, synthetic construct
  source 1..75: mol_type = other DNA
gccgatcgcgtctttgaactggcctggtctcacagtctggtggtattacgccagatgaatgccagtgaagatgat

SEQ ID NO: 773418 - DNA, 75 bp, synthetic construct
  source 1..75: mol_type = other DNA
cctgctcaaggacgagcagagctacctgctcagtatggaacagagccttgaaaaccgcgttgtcgggcaacgccc

SEQ ID NO: 773419 - DNA, 75 bp, synthetic construct
  source 1..75: mol_type = other DNA
tcaagtccatcgaaagcgacagcttacattagctgggcgccggaaccgtggagtctgcgtgtgcagagcaccact

SEQ ID NO: 773420 - DNA, 75 bp, synthetic construct
  source 1..75: mol_type = other DNA
cattccgcagccagccaaatcaacgaactcgcccgccgcattcatctctccccccgccagttgctgcgccagttg

SEQ ID NO: 773421 - DNA, 75 bp, synthetic construct
  source 1..75: mol_type = other DNA
ctctctatcgatttatttgctctcgccctgaataagcgcaagcaattacttcttagtatagtcattaacattctc

SEQ ID NO: 773422 - DNA, 75 bp, synthetic construct
  source 1..75: mol_type = other DNA
catgacggcaagctctatggtctgggcaccgccgacatgaaaggcttctttgcgtttatccttgatgcactacgc

SEQ ID NO: 773423 - DNA, 75 bp, synthetic construct
  source 1..75: mol_type = other DNA
tatgagacgcaatcacagattgattacgatattgctgtgaaggggcggagtgttctatctgatcccaatctgagt

SEQ ID NO: 773424 - DNA, 75 bp, synthetic construct
  source 1..75: mol_type = other DNA
cggacgtctttccgtggcatatcagaaatttggcggctggtttgacggtaacggcgatgccaccctgcttgataa

SEQ ID NO: 773425 - DNA, 75 bp, synthetic construct
  source 1..75: mol_type = other DNA
aggcggtgtggtttatcgtctcgatccggtgactctggaagtcactcaggcaattcataacgatctcaagccgtt

SEQ ID NO: 773426 - DNA, 75 bp, synthetic construct
  source 1..75: mol_type = other DNA
tcacgcggcgatgcagaatattgcgtgacgctggatggtgttctcctccctgatgacagaataccgctgaaggat

SEQ ID NO: 773427 - DNA, 75 bp, synthetic construct
  source 1..75: mol_type = other DNA
tcatgatggcaacgccggttattagcctgtttcctgccatccttgcgcaaaacgtctggcaccgttttccacttt

SEQ ID NO: 773428 - DNA, 75 bp, synthetic construct
  source 1..75: mol_type = other DNA
ttgaataccgccctgctctccccttttatgtcaggcccaataatgctgccgggtttgacctcatttaccggcggc

SEQ ID NO: 773429 - DNA, 75 bp, synthetic construct
  source 1..75: mol_type = other DNA
aggttcattgctcgttgcttcatcgttcagcacgcaggcagcggaagaaatgctgcgtaaagcggtaggtaaagg

SEQ ID NO: 773430 - DNA, 75 bp, synthetic construct
  source 1..75: mol_type = other DNA
ggaggagttggacgcagcctcccccctctggctgacaaaagcgcgttaccagtacctcctccggcttgatgcaca

SEQ ID NO: 773431 - DNA, 75 bp, synthetic construct
  source 1..75: mol_type = other DNA
actctctgcggcgcggcggcgttgtttattgctgcgcttatcagcacagcgcaattatttaagctgcaagtggtc

SEQ ID NO: 773432 - DNA, 75 bp, synthetic construct
  source 1..75: mol_type = other DNA
aactcgagcaatagtatattaataattaagggggcgaataaatttctttccccggaagatatcgatcgagctgca

SEQ ID NO: 773433 - DNA, 75 bp, synthetic construct
  source 1..75: mol_type = other DNA
agaatcgatgctgaaatcgataaaacccaaatccaatgaatttaatattatcaaggcaagacaagcagaaattaa

SEQ ID NO: 773434 - DNA, 75 bp, synthetic construct
  source 1..75: mol_type = other DNA
agtctactctttcaaatatagatgcggtcgaaataaagacaaaaagtagttcaagtaaaacgagtgacacaaaaa

SEQ ID NO: 773435 - DNA, 75 bp, synthetic construct
  source 1..75: mol_type = other DNA
cgttcgttcttcgtcggcaatgaccatatggttgaagatgtcgaacgctttatccgtgagttcccggacgcgtaa

SEQ ID NO: 773436 - DNA, 75 bp, synthetic construct
  source 1..75: mol_type = other DNA
gcgctcattaatccgaacatccgggttaacgggctcattcaactggatcaggcttctgtatatcgcaccgcgttg

SEQ ID NO: 773437 - DNA, 75 bp, synthetic construct
  source 1..75: mol_type = other DNA
tacgttctgattcaggcagccgatacggatctggcttttgccaccagcataacttcgcagacgctggcggccggt

SEQ ID NO: 773438 - DNA, 75 bp, synthetic construct
  source 1..75: mol_type = other DNA
gcgctgattaacccgaacatccgggttaacgggctcattcagctggatcaggcttccgtgtatcgtaccgcgctg

SEQ ID NO: 773439 - DNA, 75 bp, synthetic construct
  source 1..75: mol_type = other DNA
attcgcgagctgctggcgttattgctatgcttattttctggcggactggcaatgtatggctacctgcgctggtta

SEQ ID NO: 773440 - DNA, 75 bp, synthetic construct
  source 1..75: mol_type = other DNA
tgcgccagatttcgccacgcccgtcattcgcgaactgctggcgttgttgttgtgtctgttttccggcgggttagc

SEQ ID NO: 773441 - DNA, 75 bp, synthetic construct
  source 1..75: mol_type = other DNA
ttaccatcgacactgccgacaacaaaatcctgagccgtaaaaagctgctggatgatggcaaagagcatttcttta

SEQ ID NO: 773442 - DNA, 75 bp, synthetic construct
  source 1..75: mol_type = other DNA
tttgttaaaatcacctgccctattcaatttaatgactatagtaaattaaaaaataccgcgaaggatttttgtaaa

SEQ ID NO: 773443 - DNA, 75 bp, synthetic construct
  source 1..75: mol_type = other DNA
atggttatccctaaacctgtgcttatttctccagcgcagaaaggcggggcaattaatgtgcgttattttatgccg

SEQ ID NO: 773444 - DNA, 75 bp, synthetic construct
  source 1..75: mol_type = other DNA
ggtaatccatttagcgaaatcgatctctttaccggagaagagggcgacacatatcgtaatggccgcatccttgag

SEQ ID NO: 773445 - DNA, 75 bp, synthetic construct
  source 1..75: mol_type = other DNA
atttaaaccgggggatcgggtaaatatcgaacctggcgttccttgcggtcactgtcgttactgtctggaaggcaa

SEQ ID NO: 773446 - DNA, 75 bp, synthetic construct
  source 1..75: mol_type = other DNA
gctgaacagtacggtttgaaccctttcactcgggaaatctatgcgtttcctgacaagcaaaatgggatcattccg

SEQ ID NO: 773447 - DNA, 75 bp, synthetic construct
  source 1..75: mol_type = other DNA
gataccatatgtttcagtatggtaaagctgttgaattgatcgaaagtcttcataaagaaaaggcagtttatgctc

SEQ ID NO: 773448 - DNA, 75 bp, synthetic construct
  source 1..75: mol_type = other DNA
atgtgtgagtttgtccgcgaaggggaatcggcatttaacctgaatatcctgattggctgcggtgttgacggatac

SEQ ID NO: 773449 - DNA, 75 bp, synthetic construct
  source 1..75: mol_type = other DNA
acgaacgatttaaatacagcgatctgccacgcttttgtgtatctccgcatgtcgaaattgacccgaaactccgat

SEQ ID NO: 773450 - DNA, 75 bp, synthetic construct
  source 1..75: mol_type = other DNA
gtggatcactattgcaccgttcgtgacatggagttacgcgagttgctttctcccaaggttatgttgaggcggccg

SEQ ID NO: 773451 - DNA, 75 bp, synthetic construct
  source 1..75: mol_type = other DNA
tattatctatagtttgttaaatattattgagtcgctaaaagataaaagttcaacaacggatgctactttacatta

SEQ ID NO: 773452 - DNA, 75 bp, synthetic construct
  source 1..75: mol_type = other DNA
atcaatttcctcaaaaatcaatcgcgaagtcactatccagacagtattccgctatgccaatcgttatccggtcac

SEQ ID NO: 773453 - DNA, 75 bp, synthetic construct
  source 1..75: mol_type = other DNA
ccggggcaggagcaccggaaatctatcgagtgggaggccaagggggtcacccccatcctttacaccgtaccggcg

SEQ ID NO: 773454 - DNA, 75 bp, synthetic construct
  source 1..75: mol_type = other DNA
acacgaccgttggatgtttctgattgagagcgaactagatcgcttagcagcactgatgcgggagcgtaagacttc

SEQ ID NO: 773455 - DNA, 75 bp, synthetic construct
  source 1..75: mol_type = other DNA
cgttgactgcattgaccgctgaaccattcgccactatcgacaccgcgggaattgagctcgttaaatatggttgta

SEQ ID NO: 773456 - DNA, 75 bp, synthetic construct
  source 1..75: mol_type = other DNA
ggctttaacattggcgttcactatcaccgtgacgccacaggcgctcaggaaacgctgaatgccattgtcgccaac

SEQ ID NO: 773457 - DNA, 75 bp, synthetic construct
  source 1..75: mol_type = other DNA
cgtctggtgctggatgatcgtaagcgcacggaagaggtgcgcccgctgcaaccgcgtgagctggtagctgatgat

SEQ ID NO: 773458 - DNA, 75 bp, synthetic construct
  source 1..75: mol_type = other DNA
tgcgcgctgcgctctatcgccgggcggtcgcctgtgcctggctgaccctgtgcgaacgtcagcaccgctacccgc

SEQ ID NO: 773459 - DNA, 75 bp, synthetic construct
  source 1..75: mol_type = other DNA
tggttagtaacgccgggatcgcccgcgatgccgcttttccggctttaagcgatgacgactgggatgcggtgatcc

SEQ ID NO: 773460 - DNA, 75 bp, synthetic construct
  source 1..75: mol_type = other DNA
aagcaacccaggagttgttgaagtcagccagagaacttgggctggaagccgaaggcgagttattccggtataacc

SEQ ID NO: 773461 - DNA, 75 bp, synthetic construct
  source 1..75: mol_type = other DNA
accgtgacgccgctagcgctcaggaaacgctgaatgccattgtcgccaacggtggtaacgggcgtttgctcagtt

SEQ ID NO: 773462 - DNA, 75 bp, synthetic construct
  source 1..75: mol_type = other DNA
agaggaaatgatagcagcggaagatatgggtgattattatcgtgttccaccagatctccgcgatttgaactatgg

SEQ ID NO: 773463 - DNA, 75 bp, synthetic construct
  source 1..75: mol_type = other DNA
actctcataatactgagagattagatgttgagggaatgaaaaaattactgctaaaacttccttttatccgggcac

SEQ ID NO: 773464 - DNA, 75 bp, synthetic construct
  source 1..75: mol_type = other DNA
tgggtatttcaaaagccatgatggaaaaagttatggtagctaaatcgcgtaatgttgatagctccaaaacagtca

SEQ ID NO: 773465 - DNA, 75 bp, synthetic construct
  source 1..75: mol_type = other DNA
actgctggaagatttaatggaagccggaccactcaaagccgcgccgtcgctgtcctttttcgggctggccgtgat

SEQ ID NO: 773466 - DNA, 75 bp, synthetic construct
  source 1..75: mol_type = other DNA
tgtatgaagttctctgtagtcgtgaagaaatggcagtagcagaagatcagggaaattactaccgtatccctgctg

SEQ ID NO: 773467 - DNA, 75 bp, synthetic construct
  source 1..75: mol_type = other DNA
aactgtacgaagcgttattgagccgagaggaaatgattgcagcggaagatatgggtgattattatcgtgttccac

SEQ ID NO: 773468 - DNA, 75 bp, synthetic construct
  source 1..75: mol_type = other DNA
acctctttctcgacagcgactctctgagccagcttcccaaagatctcctcaccattccgtttctccacgatgttc

SEQ ID NO: 773469 - DNA, 75 bp, synthetic construct
  source 1..75: mol_type = other DNA
agggaaagataaccccgttgatagctttgtcctcattcaggcggctgattctgaccgggcattcgctacctcgat

SEQ ID NO: 773470 - DNA, 75 bp, synthetic construct
  source 1..75: mol_type = other DNA
acatcgaacctcgtcccacagagcacatcccacaaatcatcagtatgatcgaacgacttctgcatcgacaatttg

SEQ ID NO: 773471 - DNA, 75 bp, synthetic construct
  source 1..75: mol_type = other DNA
ttgcgatgactggtatcatcgctgcgcttttatttctggttatggaatataggaatggttggcattatacgcaat

SEQ ID NO: 773472 - DNA, 75 bp, synthetic construct
  source 1..75: mol_type = other DNA
ttacactagataatgaactggagtggtatgattctgaactgaaaaatatgtccgccaagatcctatgtgcaaacg

SEQ ID NO: 773473 - DNA, 75 bp, synthetic construct
  source 1..75: mol_type = other DNA
acgttcgtggacttcttgctgaatatggcattgtgttcagtaaaggcgcaacagaattacgccaaaaattaccgg

SEQ ID NO: 773474 - DNA, 75 bp, synthetic construct
  source 1..75: mol_type = other DNA
ttgtcgacggcaagcgggaaatggtggcgaaaaatgagtttgttcacgaagccattaaactgaacagcgccaccg

SEQ ID NO: 773475 - DNA, 75 bp, synthetic construct
  source 1..75: mol_type = other DNA
gcatcgtggccagcgccaggttgctggggtttggctaccagcgattaatgccttcttttgctggcgtacgcttcg

SEQ ID NO: 773476 - DNA, 75 bp, synthetic construct
  source 1..75: mol_type = other DNA
cagccagttaagcaaaacggaaatcagtagtattaagctaaatagtgaaaccatcccggtttatcagttgcgcta

SEQ ID NO: 773477 - DNA, 75 bp, synthetic construct
  source 1..75: mol_type = other DNA
acaattccttttctgcgcgatgttctaagtgaagatttcgttttttattatcagaaccatgctgaccgtctgggg

SEQ ID NO: 773478 - DNA, 75 bp, synthetic construct
  source 1..75: mol_type = other DNA
aaatgagcaacgacggctggcatagctttctggcgttaaatgatgaatccgcgagtgtggatgccagtttcgatt

SEQ ID NO: 773479 - DNA, 75 bp, synthetic construct
  source 1..75: mol_type = other DNA
cgctggcgatgcaaaacaaaacgctgcttttctccctcgatgacacgctggttaataacgcgctgcaaacactga

SEQ ID NO: 773480 - DNA, 75 bp, synthetic construct
  source 1..75: mol_type = other DNA
atgtttgcgacttatcaggacaaaatattggcgttttccagttcggatatgctgtttaaagatgaccaacaggat

SEQ ID NO: 773481 - DNA, 75 bp, synthetic construct
  source 1..75: mol_type = other DNA
tcacccttcagcatcaatggtcgggctggatgctggcgtggctaaactcgccacgctgtcagatggcacagtctt

SEQ ID NO: 773482 - DNA, 75 bp, synthetic construct
  source 1..75: mol_type = other DNA
gtgattactctgtttcaatgcccggttcgccggacgtcgcataatatggccacactatctgatacaataaaaccg

SEQ ID NO: 773483 - DNA, 75 bp, synthetic construct
  source 1..75: mol_type = other DNA
aaaaacctcaaccgggtggcattgaaatggaaatcaccggggaagcgattaacactgaacaggaaaatccgccca

SEQ ID NO: 773484 - DNA, 75 bp, synthetic construct
  source 1..75: mol_type = other DNA
gcgcagaaagatgtcggtgaagcgaagtacaacccattcgctgatttaaaagcgatgatgaataagaagaagtga

SEQ ID NO: 773485 - DNA, 75 bp, synthetic construct
  source 1..75: mol_type = other DNA
catactaataacccggaagatggcagtaactgggaattgctttgtctctattgccacgatcatgagcattcgaaa

SEQ ID NO: 773486 - DNA, 75 bp, synthetic construct
  source 1..75: mol_type = other DNA
tcattgctaatgcgcttatctgttctgcaatagcaatacgcatcgtaaccttccagcgtaatggatctcaacacc

SEQ ID NO: 773487 - DNA, 75 bp, synthetic construct
  source 1..75: mol_type = other DNA
agcggtgagataaattgtactgttcataatcaaaaaagtattattaataagatacttaatgaatttcaagctcaa

SEQ ID NO: 773488 - DNA, 75 bp, synthetic construct
  source 1..75: mol_type = other DNA
actgaaccggtggtgcggctgaatgtggaatcgcgcggcgatgtgctgctgatggaagcgcgaacgcgcactctg

SEQ ID NO: 773489 - DNA, 75 bp, synthetic construct
  source 1..75: mol_type = other DNA
gtagccgaactggtgtgcctgaaagggaaaacactgggtgaactggtgcgtgaccgcatgacggcatttccggca

SEQ ID NO: 773490 - DNA, 75 bp, synthetic construct
  source 1..75: mol_type = other DNA
gacgattgaggtgccggaagcgcgtcacgccattaacaccaatattttctccacgctggtaccgaaccaacaggc

SEQ ID NO: 773491 - DNA, 75 bp, synthetic construct
  source 1..75: mol_type = other DNA
agtttattgagggttactacattgtcggcctgctggcagaagcgttcctggagaaaaatccgggtgcgaaaatta

SEQ ID NO: 773492 - DNA, 75 bp, synthetic construct
  source 1..75: mol_type = other DNA
cgcctgaatgtggaatcgcgcggtgatgtgccgctgatgaaagaaaagacaaaacttatccttgagttactgaat

SEQ ID NO: 773493 - DNA, 75 bp, synthetic construct
  source 1..75: mol_type = other DNA
tccttaatgccgctatctgcggcggcattgcaatccgagtgcttctgttccgccgtgacgggtcacgccatcgct

SEQ ID NO: 773494 - DNA, 75 bp, synthetic construct
  source 1..75: mol_type = other DNA
cggcgttaatgccaaagggaatcaggacacctctggtaatgcggctacagcgaccaaattgcagacagcacgtac

SEQ ID NO: 773495 - DNA, 75 bp, synthetic construct
  source 1..75: mol_type = other DNA
caatttggcatctacatgattaataactcaaggacagccaatggcaccgatggtcaggcgtacatggacaacaat

SEQ ID NO: 773496 - DNA, 75 bp, synthetic construct
  source 1..75: mol_type = other DNA
cccgcgatttttcaatttggcggcctgaaacgaaatgatccgctaaaacgtttgttgttggaacatggcgatgtg

SEQ ID NO: 773497 - DNA, 75 bp, synthetic construct
  source 1..75: mol_type = other DNA
acgcctgggtgtatgcaaacaggtttgctattaatagtggctcaacctcatggattgatatgcgaaaccagaatg

SEQ ID NO: 773498 - DNA, 75 bp, synthetic construct
  source 1..75: mol_type = other DNA
acgtcatcgccgcggtcgtggtcggcggtacggcactttccggcggtcgcggttccctgttcggtacattgcttg

SEQ ID NO: 773499 - DNA, 75 bp, synthetic construct
  source 1..75: mol_type = other DNA
tcggtgtttgctgttggcggtaatgccacggcagcgcagttgtgcggtattaacgttcgtcgggtgcgcattctt

SEQ ID NO: 773500 - DNA, 75 bp, synthetic construct
  source 1..75: mol_type = other DNA
cttacttttgaaaacgactcaatccttgcctggattcgaaatactgactgggcgaagattggttttaaaaatgat

SEQ ID NO: 773501 - DNA, 75 bp, synthetic construct
  source 1..75: mol_type = other DNA
cattgcaatccgagtgcttctgttccgccgtgacgggtcacgtcaccgctggtggggtgggtggctcgcctatct

SEQ ID NO: 773502 - DNA, 75 bp, synthetic construct
  source 1..75: mol_type = other DNA
tccttaacgccgctatctgcggtggcattgcaatccgagtgcttctgttccgccgtgacgggtcacgtcaccgct

SEQ ID NO: 773503 - DNA, 75 bp, synthetic construct
  source 1..75: mol_type = other DNA
gccgcaaggctttcgtgatttgtgccaacgggcagcaacggcggcggggtatcccgatttccagcctgacgcttg

SEQ ID NO: 773504 - DNA, 75 bp, synthetic construct
  source 1..75: mol_type = other DNA
cgatgtggtggtatggggcggtgaatcgcggctgttttatcacggcattcaaccgctgaaagcggggtttcatcc

SEQ ID NO: 773505 - DNA, 75 bp, synthetic construct
  source 1..75: mol_type = other DNA
acaccgggcgggtataccatgtcagtggcgatgactaactgcggacgtctgggctggaccacccatcggcaaggc

SEQ ID NO: 773506 - DNA, 75 bp, synthetic construct
  source 1..75: mol_type = other DNA
acgtggtcgctatcagcaaatcaacctacgcgacgcatatgttgatcacctgttcggttatatcaatgtcaaaaa

SEQ ID NO: 773507 - DNA, 75 bp, synthetic construct
  source 1..75: mol_type = other DNA
atcgattttattcagtggcacaactgttgcaactaagaataatgtattggctcttcaagggtccgcatcaggaac

SEQ ID NO: 773508 - DNA, 75 bp, synthetic construct
  source 1..75: mol_type = other DNA
gcgccggaatatgtgttgattgatggtaaccgctgcccaaaattaccgatgccttcgatggcagtggtgaaaggc

SEQ ID NO: 773509 - DNA, 75 bp, synthetic construct
  source 1..75: mol_type = other DNA
gatattgttttcccgcaatatggttttgcccaacacaaagggtacccaaccgcttttcatctggaaaaactggct

SEQ ID NO: 773510 - DNA, 75 bp, synthetic construct
  source 1..75: mol_type = other DNA
tgaaacaaaatccgttagcagtcctgggcgttttacgcgatttacataaagccgcagtgccactgcgtatcagtt

SEQ ID NO: 773511 - DNA, 75 bp, synthetic construct
  source 1..75: mol_type = other DNA
atggggcaatggggtgtttttcactttgacgcccagttaatctccatcagcgagcgcaaagtgattgcaagaatg

SEQ ID NO: 773512 - DNA, 75 bp, synthetic construct
  source 1..75: mol_type = other DNA
gcgcttcgctcagattgaagtcaacatggggcaatggggtgtttttcactttgacgcccagttaatctccatcag

SEQ ID NO: 773513 - DNA, 75 bp, synthetic construct
  source 1..75: mol_type = other DNA
ccgcaggcacgcaatttcctgttaacggaagctttacgcggcgaaggcgcttatttgaaacgcccggacggcacg

SEQ ID NO: 773514 - DNA, 75 bp, synthetic construct
  source 1..75: mol_type = other DNA
tggaagctgaaagagaaaacgcaaaatatgttacaaataaaatcaatgtaccattaattatcttagaatccccaa

SEQ ID NO: 773515 - DNA, 75 bp, synthetic construct
  source 1..75: mol_type = other DNA
tcacccgttcacaggcggaaccacgctgccctggaaagcttcttctgaaaatgaccagtcatgaggaagtgcggg

SEQ ID NO: 773516 - DNA, 75 bp, synthetic construct
  source 1..75: mol_type = other DNA
gttcgctgtgcgatgatgcgcaaggagagtcgtggcctgcattttacgctggattatccggaactgctcacgcat

SEQ ID NO: 773517 - DNA, 75 bp, synthetic construct
  source 1..75: mol_type = other DNA
gttcgctgcgcgataatgcgcaaagagagtcggggcttgcattacacgctggattacccggagctactcgcgcat

SEQ ID NO: 773518 - DNA, 75 bp, synthetic construct
  source 1..75: mol_type = other DNA
cgtgccgattgtgcctgctgcacattatacctgcggtggtgtaatggtggatgatcatgggcgtacggacgtcga

SEQ ID NO: 773519 - DNA, 75 bp, synthetic construct
  source 1..75: mol_type = other DNA
cccgacggtggagcggcaattacagcgaattattttctcactcgaacgggaagcccgggagaaagcggacaaaat

SEQ ID NO: 773520 - DNA, 75 bp, synthetic construct
  source 1..75: mol_type = other DNA
atgaagttaaaattcatctccatggctgtattttcagctctgaccctgggtgttgcgacaaatgcgtctgctgcc

SEQ ID NO: 773521 - DNA, 75 bp, synthetic construct
  source 1..75: mol_type = other DNA
tgagcaatatgtttgttctgcaaagttcactgcaatggcaggcctggcacgataccttaacccgtttgtataacc

SEQ ID NO: 773522 - DNA, 75 bp, synthetic construct
  source 1..75: mol_type = other DNA
ttagtcagggaagtctgctctcccgcgagaataactctcttgataacgaaattaccgctgcgctggaagttggct

SEQ ID NO: 773523 - DNA, 75 bp, synthetic construct
  source 1..75: mol_type = other DNA
ccggacacgcctttattaaagaacggatgcgcaaggaagacgccatctacggtggcgaaatgagcgcccaccatt

SEQ ID NO: 773524 - DNA, 75 bp, synthetic construct
  source 1..75: mol_type = other DNA
ggcggcacgccggtgatgtcgaaaaccggccacgcctttatcaaggaacgcatgcgcaaagacgacgccatctac

SEQ ID NO: 773525 - DNA, 75 bp, synthetic construct
  source 1..75: mol_type = other DNA
caaattttagattctaaaggtcagcctgtagaattgaattcagatgcagcatccgaatatacattgactgatggc

SEQ ID NO: 773526 - DNA, 75 bp, synthetic construct
  source 1..75: mol_type = other DNA
cagccagcgtaatcatctggaaaacgttgccaacgcgctcgataagcatttgcagtataacgtcgacaaactgat

SEQ ID NO: 773527 - DNA, 75 bp, synthetic construct
  source 1..75: mol_type = other DNA
actcaacagacgacgtaccctgccggtaaatggcgtctctgatgcgttagtcagcgagggggatctgctttctcg

SEQ ID NO: 773528 - DNA, 75 bp, synthetic construct
  source 1..75: mol_type = other DNA
acttgctgcgactggcgcacaactcctcgtcgatggttgaacaggcgatgtatgtctcgcgtgccggattttacg

SEQ ID NO: 773529 - DNA, 75 bp, synthetic construct
  source 1..75: mol_type = other DNA
ctcgtcgatggtcgaacaggcgatgtatgtctcgcgtgccggattttacgtttcgacgcagccgaccttgtttac

SEQ ID NO: 773530 - DNA, 75 bp, synthetic construct
  source 1..75: mol_type = other DNA
atgattttgaacaattgcagtcgttggccgatcgtcggctttatctcgctaaacaggcagggcgtaatcgggtct

SEQ ID NO: 773531 - DNA, 75 bp, synthetic construct
  source 1..75: mol_type = other DNA
actggaagttggttacttgctgcgactggcgcacaactcctcgtcgatggttgaacaggcgatgtatgtctcgcg

SEQ ID NO: 773532 - DNA, 75 bp, synthetic construct
  source 1..75: mol_type = other DNA
gaaagatgatttacattcactgcaagtcgtttgcccagaacccggattactgaaacgatatgacgatattgtttc

SEQ ID NO: 773533 - DNA, 75 bp, synthetic construct
  source 1..75: mol_type = other DNA
gaaaatccttacataaaacaattgaacgaaatcaggtgaaaacagcaaaaaattgcctggaccagttccggcgct

SEQ ID NO: 773534 - DNA, 75 bp, synthetic construct
  source 1..75: mol_type = other DNA
tgccgcgccaccgtccgcgcaaaaaagccctgattcgcggaacatttctggctgctattggttttgaagtgatta

SEQ ID NO: 773535 - DNA, 75 bp, synthetic construct
  source 1..75: mol_type = other DNA
agagagcacctaagaccatctctattagcggtgttgtagtggttgattcgacgggttcaattctattaaccagac

SEQ ID NO: 773536 - DNA, 75 bp, synthetic construct
  source 1..75: mol_type = other DNA
tcagatgccgctaatgagcaagcttcaaaggtgcttaaaggtagtgctttgaagaagtattctgttaatcctaac

SEQ ID NO: 773537 - DNA, 75 bp, synthetic construct
  source 1..75: mol_type = other DNA
acactggtaaagatggcgtttacttccacttaagagataatatagatgccttcttaaccttatcagcaactgaac

SEQ ID NO: 773538 - DNA, 75 bp, synthetic construct
  source 1..75: mol_type = other DNA
acagatgaaaaagaaaccgcacatgagcaggcaagaatgcaggccattgatttaagattacagatgcttcaaata

SEQ ID NO: 773539 - DNA, 75 bp, synthetic construct
  source 1..75: mol_type = other DNA
cgtctgtcaccgctatgcgggtgattgcctccgttaacgccgattttgcgcgtgaactgaaattgccgccgcata

SEQ ID NO: 773540 - DNA, 75 bp, synthetic construct
  source 1..75: mol_type = other DNA
cagatactgctttttatgcctgggatgcccgagggcatggaaaaacgtcagggccgcgtggttatagcccatctc

SEQ ID NO: 773541 - DNA, 75 bp, synthetic construct
  source 1..75: mol_type = other DNA
aaaccgacgtggcggttgattggcctggcgatttccatcttcgccaactatctgcttttcttctggatcttctgg

SEQ ID NO: 773542 - DNA, 75 bp, synthetic construct
  source 1..75: mol_type = other DNA
taaggttaaattgtatatgccgctggcacgtcctgcgctggcgttatggcatcgtctgcgtggtctgtttttatt

SEQ ID NO: 773543 - DNA, 75 bp, synthetic construct
  source 1..75: mol_type = other DNA
actacaacctgttgataaggtgatgttgaataacctgaaaatcaatgcgacaaaatcaacacaggcagcaacgaa

SEQ ID NO: 773544 - DNA, 75 bp, synthetic construct
  source 1..75: mol_type = other DNA
agtggttctattttaagaaccagacaagggcaacttgtagagaactttattagcacagtagaaacatggagagac

SEQ ID NO: 773545 - DNA, 75 bp, synthetic construct
  source 1..75: mol_type = other DNA
tcagatgccgctaatgagcaggcttcaaaagtgcttaagtcgggtaatgctttacggaagtttagcgtgaatccg

SEQ ID NO: 773546 - DNA, 75 bp, synthetic construct
  source 1..75: mol_type = other DNA
aggtgtagaatttcgttcaatcgtagggcaaactgatatttcagcagccactggcaaaatggctaccacaaatga

SEQ ID NO: 773547 - DNA, 75 bp, synthetic construct
  source 1..75: mol_type = other DNA
atagtggcaaagatggcatctatttccacttaagagataatgtagaatcttttcttgccttaacagctactgaac

SEQ ID NO: 773548 - DNA, 75 bp, synthetic construct
  source 1..75: mol_type = other DNA
gggaattaactttaaagctatcgtagggcaaactgatatttcatctgcaactggaaagaccgctaccacgaatga

SEQ ID NO: 773549 - DNA, 75 bp, synthetic construct
  source 1..75: mol_type = other DNA
actggtaacactacaacaagtttaggtaatggtatgttgatgtgtcaggagctatataatcgctctacgagtgaa

SEQ ID NO: 773550 - DNA, 75 bp, synthetic construct
  source 1..75: mol_type = other DNA
tactcagtttaaagcatctaaagagcatactatctctaatggtcttcgtatccagatgactttccaaggtgtgga

SEQ ID NO: 773551 - DNA, 75 bp, synthetic construct
  source 1..75: mol_type = other DNA
gcttcaaaagtgcttaagtcgggtaatgctttacggaagtttagtgtgaatccgaataagaagggcacttattga

SEQ ID NO: 773552 - DNA, 75 bp, synthetic construct
  source 1..75: mol_type = other DNA
acagtggtaaagatggcgtttacttccacttaagagataatgtagatgccttcttaaccttatcagcaactgaaa

SEQ ID NO: 773553 - DNA, 75 bp, synthetic construct
  source 1..75: mol_type = other DNA
agggtcaattagtagaaaacttcatcgacactcttgaaagctggcgtgaccagaagcaaattatttcggtcatct

SEQ ID NO: 773554 - DNA, 75 bp, synthetic construct
  source 1..75: mol_type = other DNA
tctaaggatgttggtatttcaaacggtctaagagtccagctaacttttcaggaaattaacttcaaagccattgta

SEQ ID NO: 773555 - DNA, 75 bp, synthetic construct
  source 1..75: mol_type = other DNA
cgacactcttgaaagctggcgtgaccagaaacagattatttcggtcatctgtaaagacggaattaaaattgacga

SEQ ID NO: 773556 - DNA, 75 bp, synthetic construct
  source 1..75: mol_type = other DNA
tcagcctcagctaatgagcaagcttcaaaggtgcttaagtcgggtaatgctttacggaagtttagcgtgaatccg

SEQ ID NO: 773557 - DNA, 75 bp, synthetic construct
  source 1..75: mol_type = other DNA
ttgagaaaacgctttcaacgtatttaatgaaagatggcaaattgtgcgacagttcgcagatgaatgaagccgggg

SEQ ID NO: 773558 - DNA, 75 bp, synthetic construct
  source 1..75: mol_type = other DNA
tggagtggattgccgaatccaatggcagcgtggcgttaaccgaactggcgcaacaagccggattacccaactcta

SEQ ID NO: 773559 - DNA, 75 bp, synthetic construct
  source 1..75: mol_type = other DNA
gtcgccagtccatctgaaagaagatctcgcccagacacgcaaacggggttattcatttgatgatgaagaacatgc

SEQ ID NO: 773560 - DNA, 75 bp, synthetic construct
  source 1..75: mol_type = other DNA
gggatgcttcgggtacgccgcatctttctgttggctgcgtgcgtaatgactacggtatgccggagcaagtccagt

SEQ ID NO: 773561 - DNA, 75 bp, synthetic construct
  source 1..75: mol_type = other DNA
cggtgagtactgctgcgagaggttatacttacattggtccatcagcaaaacaaacccggtgcccaacggagccgg

SEQ ID NO: 773562 - DNA, 75 bp, synthetic construct
  source 1..75: mol_type = other DNA
cgcgtgaccgagtttggcgcaatggtgattaaagcggcgaaggaagtgacgctggcgtacggtggaatgcgctga

SEQ ID NO: 773563 - DNA, 75 bp, synthetic construct
  source 1..75: mol_type = other DNA
tctgatgcgaatgtccgcgcctatcggcggtaaattgccgatgcacgcttccggtgcgggtaaagcctttttagc

SEQ ID NO: 773564 - DNA, 75 bp, synthetic construct
  source 1..75: mol_type = other DNA
ctggacgcactcgatgccgacgaacaggccgccatgtgtgagaagctgcacgaactcgcggaagaacttcagaac

SEQ ID NO: 773565 - DNA, 75 bp, synthetic construct
  source 1..75: mol_type = other DNA
gaattggctttgcggctcgcaaattattcccggcaattatggtaattttgactcacgctatgttcgtgacgttcg

SEQ ID NO: 773566 - DNA, 75 bp, synthetic construct
  source 1..75: mol_type = other DNA
caggaccatgctgaccgcaaatttatgattggtggactggggaatagggaatttggcatctacatgattaataac

SEQ ID NO: 773567 - DNA, 75 bp, synthetic construct
  source 1..75: mol_type = other DNA
ctgtcatcctgttgtttctggtagtggtggttgatttcaccggacgactgatgtcggtgctgacagatggtgtgc

SEQ ID NO: 773568 - DNA, 75 bp, synthetic construct
  source 1..75: mol_type = other DNA
gtgacggtaaaaatgcgtctggctgtggttgcgctcctgctgtttctggtggtgatggtggacttcagcagccgg

SEQ ID NO: 773569 - DNA, 75 bp, synthetic construct
  source 1..75: mol_type = other DNA
tgcgtgcactgaaattgatggacctgaccaccctgaatgacgacgacaccgacgagaaagtgatcgccctgtgtc

SEQ ID NO: 773570 - DNA, 75 bp, synthetic construct
  source 1..75: mol_type = other DNA
gttcataataaatcattaagcctgcaatctacggggggggttattgagaaatcgttgccgacattcttaatgaaa

SEQ ID NO: 773571 - DNA, 75 bp, synthetic construct
  source 1..75: mol_type = other DNA
acccaataaccgataaagaggtacacgatatggtggtgcatgtggatacgacagaacgacaaccaatagactcaa

SEQ ID NO: 773572 - DNA, 75 bp, synthetic construct
  source 1..75: mol_type = other DNA
tggtgtcctggacagggagttctactgctccgacgctgaaaatggagtcgttcaatacgacttcaaaatctacgt

SEQ ID NO: 773573 - DNA, 75 bp, synthetic construct
  source 1..75: mol_type = other DNA
gggcatcattgagacaaccctgtcgacctatttaatggaaagtcagaagctgtgtgacggtagccagtttgacga

SEQ ID NO: 773574 - DNA, 75 bp, synthetic construct
  source 1..75: mol_type = other DNA
gcagtgtacgttggtgaatataaaagtagtcaatggctcatgactggggaaatattgcaaaatgtgagctggagt

SEQ ID NO: 773575 - DNA, 75 bp, synthetic construct
  source 1..75: mol_type = other DNA
agcaggcaagaatgcaggcacttgatttaagattacaaatgcttcaaatcgaaagaacagaagacacaaatattt

SEQ ID NO: 773576 - DNA, 75 bp, synthetic construct
  source 1..75: mol_type = other DNA
actgcaaccggttgataagcagatgctgaataatttaaaaactaatgcaacaagagcgactcaggcaacaaaata

SEQ ID NO: 773577 - DNA, 75 bp, synthetic construct
  source 1..75: mol_type = other DNA
acgattcaagcgtcacggttacgcccaaccggcaccccattacggacaaacagctacacgacatggtagtgcatg

SEQ ID NO: 773578 - DNA, 75 bp, synthetic construct
  source 1..75: mol_type = other DNA
gtttgttactactgatgtttgcggggacgggcgcgcaggcagcgaaaaagattgccacgttgcatacgttttcgg

SEQ ID NO: 773579 - DNA, 75 bp, synthetic construct
  source 1..75: mol_type = other DNA
cctgactccgtcaaccacggtagctataaaccaccagatagttacgggttgatgacgggatggatggaaaatatc

SEQ ID NO: 773580 - DNA, 75 bp, synthetic construct
  source 1..75: mol_type = other DNA
ccacctgtccgtcaatcccgctgacaacgtatgatgtttcctgggatgagaatacggtggctcataaaaaaacat

SEQ ID NO: 773581 - DNA, 75 bp, synthetic construct
  source 1..75: mol_type = other DNA
tgcgtactgccgctttgtggcagagatgatcacgttctccacctccggctgcgacaattcaagcgttacggttac

SEQ ID NO: 773582 - DNA, 75 bp, synthetic construct
  source 1..75: mol_type = other DNA
ggtatcgaagtcaagctgcacagggcttgatgactatgatgcacgagcgaccagcagtcagtgggaatgttatga

SEQ ID NO: 773583 - DNA, 75 bp, synthetic construct
  source 1..75: mol_type = other DNA
gcgtcagtggatacatattttaatgttatggaagttaatttaattatttacaatgatgatgtaataatgatgagt

SEQ ID NO: 773584 - DNA, 75 bp, synthetic construct
  source 1..75: mol_type = other DNA
caacgccattcgccagcttgctgccgccaacattttccctggtgacatgctatttaaaaactttggcgttactcg

SEQ ID NO: 773585 - DNA, 75 bp, synthetic construct
  source 1..75: mol_type = other DNA
tgtttattgatacctgcctgacgaccaccgccgaagcgagcattgtctttggcttcgcgcgctcctattttatgg

SEQ ID NO: 773586 - DNA, 75 bp, synthetic construct
  source 1..75: mol_type = other DNA
ggctggtcgtggagcaactgcgctgtatcaccaacggcaaaagcacggacgcggcatttttactgcgcgtcaaag

SEQ ID NO: 773587 - DNA, 75 bp, synthetic construct
  source 1..75: mol_type = other DNA
cagaaacctgacttcgcctgataatcgtgttttatcctctgtaagggatgctgccgttcattctgataatggggc

SEQ ID NO: 773588 - DNA, 75 bp, synthetic construct
  source 1..75: mol_type = other DNA
agttttgcgttacaagagaaagtcatagtggttgctttactaatctgttgcacaggctgggatggcctaagggag

SEQ ID NO: 773589 - DNA, 75 bp, synthetic construct
  source 1..75: mol_type = other DNA
cgactactggcgtgcgctacaaaagcgcatccgtgaagggcatgtggaagatgtttatgcgtaccgacgcaggca

SEQ ID NO: 773590 - DNA, 75 bp, synthetic construct
  source 1..75: mol_type = other DNA
cgatgctcagtatggtcgattcctcgaagtgacttccggggcgcagcagcgtttcgaacaggccgactggcatgc

SEQ ID NO: 773591 - DNA, 75 bp, synthetic construct
  source 1..75: mol_type = other DNA
cgcgccgcagaaagagatgtctgccgcgcacgttcgcgcctgctatcaactggtgaaagagcacgatcgcgtagg

SEQ ID NO: 773592 - DNA, 75 bp, synthetic construct
  source 1..75: mol_type = other DNA
ttgcacaaaccattttgcaaggcttcgacgctcagtatggtcgattcctcgaagtgacttccggggcgcagcagc

SEQ ID NO: 773593 - DNA, 75 bp, synthetic construct
  source 1..75: mol_type = other DNA
atatgcacgctgacttgttccgcgccgattattggcgcgccttacaaaaacgtatccgtgaggggcatgtagaag

SEQ ID NO: 773594 - DNA, 75 bp, synthetic construct
  source 1..75: mol_type = other DNA
gtttcgaacaagccgactggcacgctgtccagcaggcgatgaaaaaccgtatccatctttatgatcatcacgttg

SEQ ID NO: 773595 - DNA, 75 bp, synthetic construct
  source 1..75: mol_type = other DNA
gccgggctttgatcgggtattcaaagtcatcaaagacaggttcgcgccgcagaaagagatgtctgccgctcacgt

SEQ ID NO: 773596 - DNA, 75 bp, synthetic construct
  source 1..75: mol_type = other DNA
tgcttcctatgacgaccgggatgattatcgtctggtgcggtcgggtgagaaaagcgatgcgcctgtttttagtag

SEQ ID NO: 773597 - DNA, 75 bp, synthetic construct
  source 1..75: mol_type = other DNA
atggcgataatagagatattattggtattagaatggataaaataaatggagaatcgcttttaaatatttcgtcct

SEQ ID NO: 773598 - DNA, 75 bp, synthetic construct
  source 1..75: mol_type = other DNA
acgatatgtttgacagactggagaaaaaaggaattctttttgttgatacaacagaaacaaatgttttatatgatc

SEQ ID NO: 773599 - DNA, 75 bp, synthetic construct
  source 1..75: mol_type = other DNA
aaaggtggtaatgctgtcgtgtatgaagatatggaagatacaacaaaagtgttgaagatgtttactatatctcaa

SEQ ID NO: 773600 - DNA, 75 bp, synthetic construct
  source 1..75: mol_type = other DNA
tattcatgaaaatgtggatgaacaagcactggagcgactagtccggcaacaacacaaggccttaatcaaaaatgg

SEQ ID NO: 773601 - DNA, 75 bp, synthetic construct
  source 1..75: mol_type = other DNA
ttggcactcccgtaggttgccctcattgccatcaatccggttatcaggggcgcatggcgatccacgaaatgatgg

SEQ ID NO: 773602 - DNA, 75 bp, synthetic construct
  source 1..75: mol_type = other DNA
aactggcgcgtgaaattgcacagcaaaacccgcttatatctgccagggctgggggccgcaacgccaggcaaacgg

SEQ ID NO: 773603 - DNA, 75 bp, synthetic construct
  source 1..75: mol_type = other DNA
ttctctggaagtgatcgctcttcatggcgtggagaagaattttcctgtacttgagaaaatgaccggagagcagtt

SEQ ID NO: 773604 - DNA, 75 bp, synthetic construct
  source 1..75: mol_type = other DNA
tcggggaaaagtgagacgcttcaccgggcgcttgaaacactggcgagcgggcctgaaggtgaacctggtttccgt

SEQ ID NO: 773605 - DNA, 75 bp, synthetic construct
  source 1..75: mol_type = other DNA
tgcgtcgattgctgttgaggatctttctgctctggctggcaatgtctctgtgcagatagccagtattaatacaat

SEQ ID NO: 773606 - DNA, 75 bp, synthetic construct
  source 1..75: mol_type = other DNA
gctgaatacatcgccagtgagcacgactatagaaagaggctctgttcattcgaacagacctgatttacctccagt

SEQ ID NO: 773607 - DNA, 75 bp, synthetic construct
  source 1..75: mol_type = other DNA
tatcgtgttgtggtcactgataataagttttgcgttacaagagaaagtcatagtggttgttttactaatctgttg

SEQ ID NO: 773608 - DNA, 75 bp, synthetic construct
  source 1..75: mol_type = other DNA
gattgtctctggcccgaatacgatttcccctaatacctggctcagtgctatctgggggcgaggtgattaccaccc

SEQ ID NO: 773609 - DNA, 75 bp, synthetic construct
  source 1..75: mol_type = other DNA
ggtatttcacggtgaaagaagtggtgctggatgatgaagatggctaccagatacggctgacgccccaattaacgg

SEQ ID NO: 773610 - DNA, 75 bp, synthetic construct
  source 1..75: mol_type = other DNA
ttacctgggctatgtcccggatgaagacctgccttatctgtacgcggcggccagaacctttgtttatcccctcct

SEQ ID NO: 773611 - DNA, 75 bp, synthetic construct
  source 1..75: mol_type = other DNA
caattaaatacccattaacgggcatcggtcggtattccctggagctggttaagcggctggcggtcgcccgcgaaa

SEQ ID NO: 773612 - DNA, 75 bp, synthetic construct
  source 1..75: mol_type = other DNA
ccagaacctttgtttatccctccttctatgagggattcggtttacctattcttgaagcgatgtcttgcggtgtgc

SEQ ID NO: 773613 - DNA, 75 bp, synthetic construct
  source 1..75: mol_type = other DNA
gctttatgagtggatgcgccagaaaattaaggccgcgcaggacctgaaatgggccaatgaagccaaggctaagca

SEQ ID NO: 773614 - DNA, 75 bp, synthetic construct
  source 1..75: mol_type = other DNA
caggatatcaccaatctggaaaaagcagcggcattaagcattgccagaatgattaacatacccgcgttaatagct

SEQ ID NO: 773615 - DNA, 75 bp, synthetic construct
  source 1..75: mol_type = other DNA
atgcagaaacgagaccccgtcatcatcgcgccagactataccgatgatgaactttatgagtggatgcaccagaaa

SEQ ID NO: 773616 - DNA, 75 bp, synthetic construct
  source 1..75: mol_type = other DNA
gcacagcagaacttaagcgaaatcaccggggaatttacctctgatgatttgctggggcggattttctccagcttc

SEQ ID NO: 773617 - DNA, 75 bp, synthetic construct
  source 1..75: mol_type = other DNA
aacgctgggaatgagcgaagtgaacggtcacgcgttgattcgtctctctgcaaggactggcgaaggcgtggatgt

SEQ ID NO: 773618 - DNA, 75 bp, synthetic construct
  source 1..75: mol_type = other DNA
tctccgacggcaaaattgaagcccaactcaatgatgtaattgccgatctcgacgcggtacgcgcagaagcgcgtc

SEQ ID NO: 773619 - DNA, 75 bp, synthetic construct
  source 1..75: mol_type = other DNA
cagctggcgtggcaggggtatgcgttatatatcggcaccatggagccgcgtaaaaatatccgcggtctgctgcag

SEQ ID NO: 773620 - DNA, 75 bp, synthetic construct
  source 1..75: mol_type = other DNA
gcctctggtacacctgttgtttgttcaaacagttcctcactaccggaagtagttggggatgtcgctttgatgtgt

SEQ ID NO: 773621 - DNA, 75 bp, synthetic construct
  source 1..75: mol_type = other DNA
cccaggccacgcctccaggacgtggcggtgtgggtatcctgcgcatctccggcctcaaagcgcgcgaggttgccg

SEQ ID NO: 773622 - DNA, 75 bp, synthetic construct
  source 1..75: mol_type = other DNA
agagatgtttacattgtttgggccacagtttgtgcgcgaacttcaacagcgtggttttgatatctttcttgacct

SEQ ID NO: 773623 - DNA, 75 bp, synthetic construct
  source 1..75: mol_type = other DNA
ttttattgttctcactcaatattcggtattaatgccatttttagcggaaatctggggattggaacggctaatgcc

SEQ ID NO: 773624 - DNA, 75 bp, synthetic construct
  source 1..75: mol_type = other DNA
ggtcaaattctgccgataatatagctggcgtttattacagaccagttcaaaagtatataaatggcacctggtata

SEQ ID NO: 773625 - DNA, 75 bp, synthetic construct
  source 1..75: mol_type = other DNA
tcaaaaaagccgatgaaaaaggggctgatgtgttggtactgacctccggtcaaactgacaataagatccacggca

SEQ ID NO: 773626 - DNA, 75 bp, synthetic construct
  source 1..75: mol_type = other DNA
cacggcaaagcgggtttttcgggcgatggttatggctgcagaagatggtgtactgccggaagtctccggggcagg

SEQ ID NO: 773627 - DNA, 75 bp, synthetic construct
  source 1..75: mol_type = other DNA
atgaacacacacaaggcaatcagcaaattaccggatacgtgccgggctgtaatcaaacgagaagaagggcgcgta

SEQ ID NO: 773628 - DNA, 75 bp, synthetic construct
  source 1..75: mol_type = other DNA
actcacctttcggaaaaaacaggcatcctgaaaggaacgatttttcccatcctcaaaacgctggttgaacagcgg

SEQ ID NO: 773629 - DNA, 75 bp, synthetic construct
  source 1..75: mol_type = other DNA
ctactggatttgcccctatatttccagacacctgttatcacttaacccattactggcttgctgccgtagatattc

SEQ ID NO: 773630 - DNA, 75 bp, synthetic construct
  source 1..75: mol_type = other DNA
tcatgggatggttatctggctgcggtaacggctgatgcctgtgtgaagtcccaggaaacaggaaacaccgagttt

SEQ ID NO: 773631 - DNA, 75 bp, synthetic construct
  source 1..75: mol_type = other DNA
ctgacttaggcgtgtggatggtgaacgttcatgcctcaggtggggcacgtatgatgaccgcagcacgtgaggcgc

SEQ ID NO: 773632 - DNA, 75 bp, synthetic construct
  source 1..75: mol_type = other DNA
atgaaatggttttatctctcatctcttttcttattctgtctcccggcgactgccgccgtaaacagtaacacactg

SEQ ID NO: 773633 - DNA, 75 bp, synthetic construct
  source 1..75: mol_type = other DNA
cgcccggcattttcagcgatgcggcgtaaactgggaatgcctcggcagttataacgccggcttcagtaaaagtaa

SEQ ID NO: 773634 - DNA, 75 bp, synthetic construct
  source 1..75: mol_type = other DNA
gaaagcggcctggtcgccactgcgataaatcacaataaaaacaaatccggaaaaatcatcagtacggattacgga

SEQ ID NO: 773635 - DNA, 75 bp, synthetic construct
  source 1..75: mol_type = other DNA
taaaaccaagtggtattcaatcaattatgcccagttatgtaagattgaagagacaacattccctgtggccaatcg

SEQ ID NO: 773636 - DNA, 75 bp, synthetic construct
  source 1..75: mol_type = other DNA
ggcggcgaatatcgcaccggctggcgggcagggtttgattacctgatgaagccagaaacactgcgtaaaaccagg

SEQ ID NO: 773637 - DNA, 75 bp, synthetic construct
  source 1..75: mol_type = other DNA
ttcttgcaccggcgcggaaggattgctgaaggtgagaggttaactaaagaacaggttgaagagcgttatgagaga

SEQ ID NO: 773638 - DNA, 75 bp, synthetic construct
  source 1..75: mol_type = other DNA
aaagagcgtgagaagctggaaggttatgcggaagcgaaagcgaagctaattgaacaacaggcggttattgccgcg

SEQ ID NO: 773639 - DNA, 75 bp, synthetic construct
  source 1..75: mol_type = other DNA
gcgattccggcaccggtaaagagctggtcgccagggcgattcacgccagtagcgcacgtagcgaaaaaccgctgg

SEQ ID NO: 773640 - DNA, 75 bp, synthetic construct
  source 1..75: mol_type = other DNA
cgactggccgggaaatattcgtgaactggaaaacgcggtggaacgggcggtggtgctgctgaccggggaatatat

SEQ ID NO: 773641 - DNA, 75 bp, synthetic construct
  source 1..75: mol_type = other DNA
agacagcctcaagcacccgcagcaattctacttaactctcgctttacagcaaaccgttttgcccgatatgggaat

SEQ ID NO: 773642 - DNA, 75 bp, synthetic construct
  source 1..75: mol_type = other DNA
gtctgcaggaatatttgcagggtcgccatctgccgctgccaacttatctggtagtccaggtacgtggcgaagcgc

SEQ ID NO: 773643 - DNA, 75 bp, synthetic construct
  source 1..75: mol_type = other DNA
cttaaaagcggtggatttcgtcgtgagtcgattcttgctgacaccgttgaagcattaattggcggcgtattcctc

SEQ ID NO: 773644 - DNA, 75 bp, synthetic construct
  source 1..75: mol_type = other DNA
gcgcccagatcgccgcaaagccaagtttactcaagatgccatagccccactgcgttttgataagcaacttagtga

SEQ ID NO: 773645 - DNA, 75 bp, synthetic construct
  source 1..75: mol_type = other DNA
aggatgttgaaagagcactggatgcaaacaatgatcctgttggcatcgccagtaaggtattcagcaatgacgatt

SEQ ID NO: 773646 - DNA, 75 bp, synthetic construct
  source 1..75: mol_type = other DNA
gtcacatggcctcaaagcaagtccttcttgatgtcgtcgaaaagtttgtttccccttacatcaacttaactcatg

SEQ ID NO: 773647 - DNA, 75 bp, synthetic construct
  source 1..75: mol_type = other DNA
tgcgtgccgacgtgctggcgaaaccggcggttgaagcggttgagaacggcgacattcagttcgtaccgaagcagt

SEQ ID NO: 773648 - DNA, 75 bp, synthetic construct
  source 1..75: mol_type = other DNA
tgaaaaacaatgaactcgaaattattcttcccgaatggaaagtacctgaccttcccatataccttgtatggcgtc

SEQ ID NO: 773649 - DNA, 75 bp, synthetic construct
  source 1..75: mol_type = other DNA
cgcgataccgcgctggtacgctcctgtggactctattttgcgccgcaacggttgcatattggtgcagatgtttgg

SEQ ID NO: 773650 - DNA, 75 bp, synthetic construct
  source 1..75: mol_type = other DNA
ggtgctaatgggcggtgccgcttttttaatagtcaaaggatggagtgaaagtagcgatgtcgataacgacggcga

SEQ ID NO: 773651 - DNA, 75 bp, synthetic construct
  source 1..75: mol_type = other DNA
gtgaactggtacagaatcgtctggctattggcgttggtaactctgccaacgcttgcggaggagacgccgttacaa

SEQ ID NO: 773652 - DNA, 75 bp, synthetic construct
  source 1..75: mol_type = other DNA
ggcagtggcaccagcaaaacggtactgacccgttatgcgacggcgcttaatcgggttttgccagtgccgacgcaa

SEQ ID NO: 773653 - DNA, 75 bp, synthetic construct
  source 1..75: mol_type = other DNA
ctccccggaagaggtttattgttgtcaggctggggagagcataacgcgcgataccgcgctggtacgttcctgtgg

SEQ ID NO: 773654 - DNA, 75 bp, synthetic construct
  source 1..75: mol_type = other DNA
tttgtactgatgaacactgaaggtcaggattgcggcttcaacggcggcgaaatgacgctgtcgctggcggaccgc

SEQ ID NO: 773655 - DNA, 75 bp, synthetic construct
  source 1..75: mol_type = other DNA
atgacaaaggtccggtttccgttacgaagatcatcgacggcgcagagctgctgatcccgatggctggcctcatca

SEQ ID NO: 773656 - DNA, 75 bp, synthetic construct
  source 1..75: mol_type = other DNA
gtgccgatgtactggcgaaaccggcagttgaagcggttgagaacggcgacattcagttcgtaccgaagcagtacg

SEQ ID NO: 773657 - DNA, 75 bp, synthetic construct
  source 1..75: mol_type = other DNA
atgataaaggtccggtttccgttacaaagatcgtcgacggcgcagaactgctgatcccgatggcaggcctcatca

SEQ ID NO: 773658 - DNA, 75 bp, synthetic construct
  source 1..75: mol_type = other DNA
aaagagcgtgaaaagctggaaggctatgcggaagcaaaagcgaaactgattgagcagcaggcagttatcgccgcg

SEQ ID NO: 773659 - DNA, 75 bp, synthetic construct
  source 1..75: mol_type = other DNA
agcgtcgtgtaaacgaaaaccgtggcttcctgcaaacgctggctcgcctggaaagcatcaccgtgctgcctgccg

SEQ ID NO: 773660 - DNA, 75 bp, synthetic construct
  source 1..75: mol_type = other DNA
tatgagccggatgcgcgccacgctggttcggggcaatacgctggcagaactggcgcgtgaatttgagttaggtga

SEQ ID NO: 773661 - DNA, 75 bp, synthetic construct
  source 1..75: mol_type = other DNA
tcaacggcaaactcgccgctgtacgtatggatgagttcaaatatcatgttctcattcagcaaccatacgcgtata

SEQ ID NO: 773662 - DNA, 75 bp, synthetic construct
  source 1..75: mol_type = other DNA
attcttcttgtattacggtacgcgcggctgccacttcgataactacccgaatgccaaatatgccggtagttctcc

SEQ ID NO: 773663 - DNA, 75 bp, synthetic construct
  source 1..75: mol_type = other DNA
ggatctacctgggaaggcggcgttcgcgttccgactttcgtgtactggaaaggcatgatccaaccgcgtaaatct

SEQ ID NO: 773664 - DNA, 75 bp, synthetic construct
  source 1..75: mol_type = other DNA
ctgcatgatcaaggctatgtcacccaggccatcgggaaatggcacatgggggaaaacaaagagtcgcagccgcag

SEQ ID NO: 773665 - DNA, 75 bp, synthetic construct
  source 1..75: mol_type = other DNA
tgaatggtcaacttgctgccgtgcgtatggatgagttcaaatatcatgttctcattcagcagccatatgcctata

SEQ ID NO: 773666 - DNA, 75 bp, synthetic construct
  source 1..75: mol_type = other DNA
tcaacgctggatggaatatggcgttaagttcctcgacaagatggcgaagagtgataagcctttcttcctctatta

SEQ ID NO: 773667 - DNA, 75 bp, synthetic construct
  source 1..75: mol_type = other DNA
aacaactggtagccactcccgtccctgatgaacggcgcatcagcttctggccgcagcactttggcctcattccac

SEQ ID NO: 773668 - DNA, 75 bp, synthetic construct
  source 1..75: mol_type = other DNA
aaacaatgtcgatccgttttcgcattgacggcgttctgcggacaattttacagccaaacaaaaaactggcagcgt

SEQ ID NO: 773669 - DNA, 75 bp, synthetic construct
  source 1..75: mol_type = other DNA
ccagttgggcaatggcacaaagagtcggttatctctattcagagggggagattatttatctcgccggtacgccat

SEQ ID NO: 773670 - DNA, 75 bp, synthetic construct
  source 1..75: mol_type = other DNA
ggctgtcacttcgataactacccaaatgcgaaatatgcgggtagctctccggcgcgcacctcttacggcgactgc

SEQ ID NO: 773671 - DNA, 75 bp, synthetic construct
  source 1..75: mol_type = other DNA
gcaaccaccattgccgataatatgatgccggtaatgcagcatccggcgcaggataaagaaactcagcagaagctg

SEQ ID NO: 773672 - DNA, 75 bp, synthetic construct
  source 1..75: mol_type = other DNA
cccaaaccagtatctggttaaaccggcgaccactattgccgacaacatgatgccggtgatgcagcatcctgcaca

SEQ ID NO: 773673 - DNA, 75 bp, synthetic construct
  source 1..75: mol_type = other DNA
caccggtacagtaatgcaaacggcgggctctgcggtatttaatctctataccgatccgcaggaaagcgactccat

SEQ ID NO: 773674 - DNA, 75 bp, synthetic construct
  source 1..75: mol_type = other DNA
tgtttccgatgcttgtgcaggctgccggggagggcatgtggcaggcaagtagcgcgggcgtgacgctaaatcatc

SEQ ID NO: 773675 - DNA, 75 bp, synthetic construct
  source 1..75: mol_type = other DNA
cggggaggggatgtggcaggcgagcagtgtgggcgttacgctgaatcaccgtggtgagtcgatgtcgtcagcgcc

SEQ ID NO: 773676 - DNA, 75 bp, synthetic construct
  source 1..75: mol_type = other DNA
gttatcagcttatcggcccgacaccttcaggactgcgggttcgcttgtgttcgcaatctcgttgtgtcgaattag

SEQ ID NO: 773677 - DNA, 75 bp, synthetic construct
  source 1..75: mol_type = other DNA
tgccttacggcggcatgcccgaggcagacagcctcaggcacccgcagcaattctactttactctcgttttactgc

SEQ ID NO: 773678 - DNA, 75 bp, synthetic construct
  source 1..75: mol_type = other DNA
gttatcagcttatcggtccgacacctgcaggactgcgggttcgcttgtgttcacaatctcgttgtgtcgaattag

SEQ ID NO: 773679 - DNA, 75 bp, synthetic construct
  source 1..75: mol_type = other DNA
gaaccgttgcgctttatctgggaagtgccaggcggtgggcggttaattccaccgctaaaagtacaacggaatgaa

SEQ ID NO: 773680 - DNA, 75 bp, synthetic construct
  source 1..75: mol_type = other DNA
gaaatcgcgttgctgggcgcgatttccaggaaaacgccattcagattggtagttacgatgggcggcatacgatta

SEQ ID NO: 773681 - DNA, 75 bp, synthetic construct
  source 1..75: mol_type = other DNA
gcttgtaagtattttacttcgtaatagtgaagatggagtgcttcgtcaaaaacttatccgctattgccatatcaa

SEQ ID NO: 773682 - DNA, 75 bp, synthetic construct
  source 1..75: mol_type = other DNA
atcgtctttacctccgataacggaccggaagcggaagtaccgccgcacggtcgcacgccgttccgcggtgcgaaa

SEQ ID NO: 773683 - DNA, 75 bp, synthetic construct
  source 1..75: mol_type = other DNA
gttatcagcttatcggcccgacaccatcggggctgcgggttcgcttgtgctcgcaatctcgttgtgtcgaattag

SEQ ID NO: 773684 - DNA, 75 bp, synthetic construct
  source 1..75: mol_type = other DNA
gttggaaaaactggctgattacaatgaaaatcggcagaaaatccgcagcaaactcattcagtcgctgatctaccc

SEQ ID NO: 773685 - DNA, 75 bp, synthetic construct
  source 1..75: mol_type = other DNA
cccaggatggtcaaaaattgcaagggatcattgatgctaacgatgaacgtcaggcacgactgcggctgcgtgaag

SEQ ID NO: 773686 - DNA, 75 bp, synthetic construct
  source 1..75: mol_type = other DNA
aaccatttgaaggagtaaaaaaattacagcgaaacagaataaagcctgatccgttatctaaaacagaattcaatg

SEQ ID NO: 773687 - DNA, 75 bp, synthetic construct
  source 1..75: mol_type = other DNA
gctttccgcttattgcagaatctgttgaatgtaccgaaggaagaacgggaagcgatgttctttggcggcctgttc

SEQ ID NO: 773688 - DNA, 75 bp, synthetic construct
  source 1..75: mol_type = other DNA
aactgttaacctgcgcaggtgcttatcgcgataatccgaccgcgctttttcaccagttgtgcggagcacgctctg

SEQ ID NO: 773689 - DNA, 75 bp, synthetic construct
  source 1..75: mol_type = other DNA
tacattcgcatctggttcatgtttcgaggaaaacgatgtcgggaaacattgaaaggctgggagattactaacagt

SEQ ID NO: 773690 - DNA, 75 bp, synthetic construct
  source 1..75: mol_type = other DNA
gtgtccgttaaactcaggctacctcagactcatgatatgtctaaattaccaacaggtgtcgagattcgaggtaaa

SEQ ID NO: 773691 - DNA, 75 bp, synthetic construct
  source 1..75: mol_type = other DNA
aaacagaaaccttattactcggtaagcagtttgggtgcaagatggaatgcagcagtaaaacgtgctggtattcgc

SEQ ID NO: 773692 - DNA, 75 bp, synthetic construct
  source 1..75: mol_type = other DNA
tgacgttacagcgtaaatatccggacatttcaccatcacaccttgatgtggtgaaaactgaaatcgcgaaagcct

SEQ ID NO: 773693 - DNA, 75 bp, synthetic construct
  source 1..75: mol_type = other DNA
cagaacgcgcttttgctgggcgcgtttctcttttccccgtaggtctatacataccatctaattgcttattaattg

SEQ ID NO: 773694 - DNA, 75 bp, synthetic construct
  source 1..75: mol_type = other DNA
tgtctttgatttttatttgctttggtatgctattctctttttattttatagatataacaaaaatgatcagtaact

SEQ ID NO: 773695 - DNA, 75 bp, synthetic construct
  source 1..75: mol_type = other DNA
ccgcacgccttgctgaacttcgccaacagctaaccgaaagcgcaccgccgctaccggtggtttctgtgccgcata

SEQ ID NO: 773696 - DNA, 75 bp, synthetic construct
  source 1..75: mol_type = other DNA
ggtgcggtaggttatttcaccgcgcatggcgatctcgacacctgcattgtgatccgctcggcgctggtagagaac

SEQ ID NO: 773697 - DNA, 75 bp, synthetic construct
  source 1..75: mol_type = other DNA
atgaagagttcggtggcgtagtgcgtttgttgcaaaaagcgattcgcgccggagaaattttccaggtggtgccat

SEQ ID NO: 773698 - DNA, 75 bp, synthetic construct
  source 1..75: mol_type = other DNA
gcggcgcaacggcggtgccagggtttattgatgctcacctgcatattgaatccagcatgatgacgccggtcacct

SEQ ID NO: 773699 - DNA, 75 bp, synthetic construct
  source 1..75: mol_type = other DNA
ggtgagcccattgcagccctgatttctgcctgggagtttgatgcgtctgcgcaggatgtggcgctgctgaaaaat

SEQ ID NO: 773700 - DNA, 75 bp, synthetic construct
  source 1..75: mol_type = other DNA
cggctggcgcaagcgttgtgctggaacgtcctgctgcaggcggggtttatgcgtccctgtttgaaaaaattaatc

SEQ ID NO: 773701 - DNA, 75 bp, synthetic construct
  source 1..75: mol_type = other DNA
tgcactggatatctggcaggatccacaggccatgtcagaagcatctgcagatgaacgtctgacggcagggatgca

SEQ ID NO: 773702 - DNA, 75 bp, synthetic construct
  source 1..75: mol_type = other DNA
tctgccctatgggccggacacggtgccggtacgcagctttaactatgtggaagaagtcaaaggcccggatcacga

SEQ ID NO: 773703 - DNA, 75 bp, synthetic construct
  source 1..75: mol_type = other DNA
gcggcttcctggcgcgtcgtcgtcacctacaggcgctggaacaggcggcagagcatttgcagcaaggtaaagcgc

SEQ ID NO: 773704 - DNA, 75 bp, synthetic construct
  source 1..75: mol_type = other DNA
catatgccgtttattggttcagttggcccggctttcttccagaaagaaaccatggaagaggtggctgccatcaag

SEQ ID NO: 773705 - DNA, 75 bp, synthetic construct
  source 1..75: mol_type = other DNA
gtgatgatcccggaaacccgcgagtttgagttcgccaaccttggctttatcccgctctcttattataagaatcgc

SEQ ID NO: 773706 - DNA, 75 bp, synthetic construct
  source 1..75: mol_type = other DNA
cgccaactggatgccgtgcttcatcatccggaatttcagaaagtggaatccctgtggcggggcgtgaagtctctg

SEQ ID NO: 773707 - DNA, 75 bp, synthetic construct
  source 1..75: mol_type = other DNA
gcgaacagtcgtattaatgcccgtcttccctatatcttcctgctgtcccgcattgcgcattacctgaagatcatt

SEQ ID NO: 773708 - DNA, 75 bp, synthetic construct
  source 1..75: mol_type = other DNA
gcgaacagtcgtattaatgcccgtcttccctatattttcctgttgtcccgcattgcgcattacctgaagatcatt

SEQ ID NO: 773709 - DNA, 75 bp, synthetic construct
  source 1..75: mol_type = other DNA
gacgcgtgctggaactggaactgaacacctggatccgcacgctggtgacggagatgaccgatccgggtgatgaac

SEQ ID NO: 773710 - DNA, 75 bp, synthetic construct
  source 1..75: mol_type = other DNA
cgataccgctgacgccaccgccaacagccgtatcaatgcccgtttgccctatatcttcctgctgtcccgcattgc

SEQ ID NO: 773711 - DNA, 75 bp, synthetic construct
  source 1..75: mol_type = other DNA
gccgaaaacaaaaagctgttcgccgaacgccgcgatcccatcgtggaagagatctgcgagcacgtccattacatc

SEQ ID NO: 773712 - DNA, 75 bp, synthetic construct
  source 1..75: mol_type = other DNA
cgtgacttctacctggagtttaatacctctccggcgattcgtatgctggttaaagcgatggcgaataaatttggt

SEQ ID NO: 773713 - DNA, 75 bp, synthetic construct
  source 1..75: mol_type = other DNA
atttggtgaagaaaaaggtaacagccgctatttataccgactgtttccgaaaggtccggctaagcaagccaccaa

SEQ ID NO: 773714 - DNA, 75 bp, synthetic construct
  source 1..75: mol_type = other DNA
tcgtggaagttcgccctggcacagatgctgatttccagtgttaactggatggcaatgggcgcgatgatctggctg

SEQ ID NO: 773715 - DNA, 75 bp, synthetic construct
  source 1..75: mol_type = other DNA
gtacttccggcgattatcttcgttactgcgctcatcagtctgctgtactacattggcgtgatggggctgctgatt

SEQ ID NO: 773716 - DNA, 75 bp, synthetic construct
  source 1..75: mol_type = other DNA
gtcttacagtgatgccggtagcgccttcatttttggttcgctggttgggccgaaaatggatgtcttgtttgacgg

SEQ ID NO: 773717 - DNA, 75 bp, synthetic construct
  source 1..75: mol_type = other DNA
tttggttctatcggtgttgtcgttggagcgttttcggctatttcgccaaaacgcgcgccggaaatcgcccagctt

SEQ ID NO: 773718 - DNA, 75 bp, synthetic construct
  source 1..75: mol_type = other DNA
acaattatcgccgccctactcgcttatcgtgtgctgtattactttatcccactgctgctggcgctgatctgttac

SEQ ID NO: 773719 - DNA, 75 bp, synthetic construct
  source 1..75: mol_type = other DNA
ggtaatgggagcgataatctggctgttacttggtcaaagcgtgaactatttctttgtactgggcgtgttgctggt

SEQ ID NO: 773720 - DNA, 75 bp, synthetic construct
  source 1..75: mol_type = other DNA
ctgaactcacggataaacttgcagaccttatacagaatgaaaaatcatatttcagaaacagaataattcctgatg

SEQ ID NO: 773721 - DNA, 75 bp, synthetic construct
  source 1..75: mol_type = other DNA
attgccgggcagcaccattacgcggattttctcgctcagtattaccaccaactggctgggatatattttactggg

SEQ ID NO: 773722 - DNA, 75 bp, synthetic construct
  source 1..75: mol_type = other DNA
actgctgctggcgctgatctgttactgttgctggaaagccaggcgaagaagctacgggcgaaaaatgaagcggcg

SEQ ID NO: 773723 - DNA, 75 bp, synthetic construct
  source 1..75: mol_type = other DNA
ctggcgctgatctgttacctgttgctggaaagccaggcgaagaagctacgagcgaaaaatgaagcggcgatgtga

SEQ ID NO: 773724 - DNA, 75 bp, synthetic construct
  source 1..75: mol_type = other DNA
cttatctcaatttctcgccctatctgcaaacgagcggcacgctggatgtcaagaccattgccattatctcgttcg

SEQ ID NO: 773725 - DNA, 75 bp, synthetic construct
  source 1..75: mol_type = other DNA
taattcggttatctggctgattttcgccgcctttatgtttggcacaggctatgaaaaaaccgggctgggacgccg

SEQ ID NO: 773726 - DNA, 75 bp, synthetic construct
  source 1..75: mol_type = other DNA
attagcagatctttggcgttttggaaaagaagagcgcggagatatttatttttctcgactaataaaactattgat

SEQ ID NO: 773727 - DNA, 75 bp, synthetic construct
  source 1..75: mol_type = other DNA
ggcggaaggggtagcaaactcgaacgtttaacgcttggccgttacccggatttgtcgctaaaagcggcgagagaa

SEQ ID NO: 773728 - DNA, 75 bp, synthetic construct
  source 1..75: mol_type = other DNA
cctttatgtttggcacaggctatgaaaaaaccgggctggggcgacgtatcgcgctgattctggtgaaaaaaatgg

SEQ ID NO: 773729 - DNA, 75 bp, synthetic construct
  source 1..75: mol_type = other DNA
cgtgctgtacccgccggtactgaagtctggcgatcaggtgccgcgctgggcagagacggaactgcaggcaatggg

SEQ ID NO: 773730 - DNA, 75 bp, synthetic construct
  source 1..75: mol_type = other DNA
cccgcagggctggagagtcatacctggctctactttgccgtttttactggcgtgatcgttggactgatcctcgaa

SEQ ID NO: 773731 - DNA, 75 bp, synthetic construct
  source 1..75: mol_type = other DNA
ggacatcaacgccaccagtcggataaaggtcagtacggggccgctggcggggcgtgtactgaatatcatcgggca

SEQ ID NO: 773732 - DNA, 75 bp, synthetic construct
  source 1..75: mol_type = other DNA
acgggcgctggcagccgcgacgctctccaacctgatgagtgcgacaattgccgggttctttattggtctggcgta

SEQ ID NO: 773733 - DNA, 75 bp, synthetic construct
  source 1..75: mol_type = other DNA
ttttcggctatttcgccaaaacgcgcccggaaatcgcccagcttggtttacgggcgctggcagcagcaacgcttt

SEQ ID NO: 773734 - DNA, 75 bp, synthetic construct
  source 1..75: mol_type = other DNA
gggatatggatgcctgggtctggacagttcccaaagagcacagcaagggtggcgagaagattgtaagacctgtgc

SEQ ID NO: 773735 - DNA, 75 bp, synthetic construct
  source 1..75: mol_type = other DNA
cgacgacgacccgcaggcatcgaatgagaaaatcctcgaagcgattttgttggtctggctggacgaagccgagtg

SEQ ID NO: 773736 - DNA, 75 bp, synthetic construct
  source 1..75: mol_type = other DNA
atgacaaccatttttattaaacctgcgccgggatgcctgattcgcgatcccgacacgatgactccgctctcacag

SEQ ID NO: 773737 - DNA, 75 bp, synthetic construct
  source 1..75: mol_type = other DNA
ccaccatcagcgtagcgcgtctgcaagcgccagtgcgctggggcgatgatgaagcgcaattcatcattatgttaa

SEQ ID NO: 773738 - DNA, 75 bp, synthetic construct
  source 1..75: mol_type = other DNA
ggtagcgcaggcggcattctgacgccgatctcttctttagatctcaatgcgctgggtaatcttcccgctgccaaa

SEQ ID NO: 773739 - DNA, 75 bp, synthetic construct
  source 1..75: mol_type = other DNA
ctcgctcgccgcatcatgcacgaagaattccgtaacgcgctggttaacgccgcctctgccgacgctatcgccagc

SEQ ID NO: 773740 - DNA, 75 bp, synthetic construct
  source 1..75: mol_type = other DNA
ctgaaatgctctatatggatcgcaccagcgcaccgggcgaaagcgagttgtacaacattttttgtcaggcgctgg

SEQ ID NO: 773741 - DNA, 75 bp, synthetic construct
  source 1..75: mol_type = other DNA
gatttccggggctgacgaacaagcagcacaccagcgcttgagccagtggttacgtgatgaattcccccactgcga

SEQ ID NO: 773742 - DNA, 75 bp, synthetic construct
  source 1..75: mol_type = other DNA
tcactacaacagcctgaatccggcattcttgcgggcgctcgattacgccgtgcaggcggtgcatcgccagggcaa

SEQ ID NO: 773743 - DNA, 75 bp, synthetic construct
  source 1..75: mol_type = other DNA
ctgtgtaatactttttcatcacaaattgagtggcataacctgcgcactgaccgcaagggcaacgccaaaagcgcc

SEQ ID NO: 773744 - DNA, 75 bp, synthetic construct
  source 1..75: mol_type = other DNA
ccgctaacaccgtgcgtctgccctacagtttcagccgtcggtttggcctggtggcatggtgcgaagcgtcgctgg

SEQ ID NO: 773745 - DNA, 75 bp, synthetic construct
  source 1..75: mol_type = other DNA
taactaaaaacgatattattggtggcgtggattccaacactaaagcgaatacggggcttgagttactgtcggatg

SEQ ID NO: 773746 - DNA, 75 bp, synthetic construct
  source 1..75: mol_type = other DNA
gtcactacaacagcctgaatccggcattcttgcgggcgctcgattacgccgtgcaggcggtgcatcgccagggca

SEQ ID NO: 773747 - DNA, 75 bp, synthetic construct
  source 1..75: mol_type = other DNA
gctgacggtatccgcattgaaattgccgctaacatcgctcactccgtggaagcgcaggccgcattcggcaatggt

SEQ ID NO: 773748 - DNA, 75 bp, synthetic construct
  source 1..75: mol_type = other DNA
ctgactgccattcctgatgcccatcactattatcacggtgaaaaagtggcatttggtacactgacgcagctggta

SEQ ID NO: 773749 - DNA, 75 bp, synthetic construct
  source 1..75: mol_type = other DNA
cagtgcgaatcacttttgcgaagagttcgcccgctccagcagcagctatctgcaagaacgtgcgctggatgtgcg

SEQ ID NO: 773750 - DNA, 75 bp, synthetic construct
  source 1..75: mol_type = other DNA
agatgcaatttaccatggccctaatttttatcttccaccaaatgttgaacgatgtgttgtaacatttcatgatct

SEQ ID NO: 773751 - DNA, 75 bp, synthetic construct
  source 1..75: mol_type = other DNA
gcggtaaaacgctacaaaacctctgagatgctgcgttttatttttgccaccatcgcgtatgatcccgacccggat

SEQ ID NO: 773752 - DNA, 75 bp, synthetic construct
  source 1..75: mol_type = other DNA
cagctttatgtcagcaatggcacctgtttgctattcctgcagatgaacggttagcctgctttttcagggcgatga

SEQ ID NO: 773753 - DNA, 75 bp, synthetic construct
  source 1..75: mol_type = other DNA
gaagccgcattctgactgtcagatgcggcttcgcttcattgttaccactcctgttattcctcaacccttttttta

SEQ ID NO: 773754 - DNA, 75 bp, synthetic construct
  source 1..75: mol_type = other DNA
taacgataaactcgatttggcccaggccgaagcaatcgccgatcttatcgacgccagctcggaacaggcggcccg

SEQ ID NO: 773755 - DNA, 75 bp, synthetic construct
  source 1..75: mol_type = other DNA
cattgcatacgatcccgatccagatttaaccccgctgaccgtgagacgtttgtgcaaggcattgtttggtagaag

SEQ ID NO: 773756 - DNA, 75 bp, synthetic construct
  source 1..75: mol_type = other DNA
catctggggacggatgatggcggcctcgctggtgaccgcactaccggtagtgattatgtatgcgctttcggaacg

SEQ ID NO: 773757 - DNA, 75 bp, synthetic construct
  source 1..75: mol_type = other DNA
ttccgtttatccaagaaggacaagcgagccggagaactgatccgctacgacctgccggatggatacgtggaagtg

SEQ ID NO: 773758 - DNA, 75 bp, synthetic construct
  source 1..75: mol_type = other DNA
gtttcttccttcgcgggatcatcaaagccgatgacctgcctgaatatgccttgtgcgaagaagcggggaaggatg

SEQ ID NO: 773759 - DNA, 75 bp, synthetic construct
  source 1..75: mol_type = other DNA
catccccgatgaaatcgaagaagcggcaatgatggatggcctcaatcgtctgcaaattatcttccgtatcaccgt

SEQ ID NO: 773760 - DNA, 75 bp, synthetic construct
  source 1..75: mol_type = other DNA
acgcgctgttcagtacgccagattacatctggggacgcatgatggcggcctcactggtgaccgcattgccggtgg

SEQ ID NO: 773761 - DNA, 75 bp, synthetic construct
  source 1..75: mol_type = other DNA
cgggctgatatccgtgttcgtctactgctttatggtggcgtggaacgactatctgtttgcgtcgattttcctctc

SEQ ID NO: 773762 - DNA, 75 bp, synthetic construct
  source 1..75: mol_type = other DNA
aacatggttgagaatatgctcgatcaggcattcaaaaagcttaatcctcacgagcatcctgttctgcactctgac

SEQ ID NO: 773763 - DNA, 75 bp, synthetic construct
  source 1..75: mol_type = other DNA
atgaaatctaaaaaatctgtttttattgaagggcatatcctgtcaaacagctgtcacggacaggctggccaacct

SEQ ID NO: 773764 - DNA, 75 bp, synthetic construct
  source 1..75: mol_type = other DNA
atgaaatctaaaaaatctgtttttattgaagggcatatcatgtcgaacagctgtcacggacagcctggccaacct

SEQ ID NO: 773765 - DNA, 75 bp, synthetic construct
  source 1..75: mol_type = other DNA
ttcttgagcgcattcctgccggacgctgggggctaccgagcgatcttatggggccggtggtattccttgcctcca

SEQ ID NO: 773766 - DNA, 75 bp, synthetic construct
  source 1..75: mol_type = other DNA
gaaatgaccgatccgggcgatgaacttcaggcttcgcatccactgcgcgacgggaaagttatcgtcgaggacata

SEQ ID NO: 773767 - DNA, 75 bp, synthetic construct
  source 1..75: mol_type = other DNA
gccgcgtgctggaactggagcttaacacctggatccgcacgctggtgacggaaatgaccgatccgggcgatgaac

SEQ ID NO: 773768 - DNA, 75 bp, synthetic construct
  source 1..75: mol_type = other DNA
gaagttgctgcgattaaagatatcggtaactattttgaccgcgcggaatatattaaatggaagtcgttccgcgat

SEQ ID NO: 773769 - DNA, 75 bp, synthetic construct
  source 1..75: mol_type = other DNA
tgtgacgcgcctgatggcgaacgaatgggcaaaacacaacatcaacgttaatgcgattgctccgggttatatggc

SEQ ID NO: 773770 - DNA, 75 bp, synthetic construct
  source 1..75: mol_type = other DNA
attggtctgaaaccgctacgggaaatgaccagtctggcctcctccatgaccgtacacagcctggatcagcgtcta

SEQ ID NO: 773771 - DNA, 75 bp, synthetic construct
  source 1..75: mol_type = other DNA
acgtattggtctgaaaccgctacgggaaatgaccagtctggcttcctccatgaccgtacacagcctggatcagcg

SEQ ID NO: 773772 - DNA, 75 bp, synthetic construct
  source 1..75: mol_type = other DNA
gtgcttcagattatgtgaatggttataccattgccgtggatggcggttggctggctcggttattccttttttttt

SEQ ID NO: 773773 - DNA, 75 bp, synthetic construct
  source 1..75: mol_type = other DNA
gcgcttcagattatgtgaatggttataccattgccgtggatggcggttggctggggcgggttttttttttttttt

SEQ ID NO: 773774 - DNA, 75 bp, synthetic construct
  source 1..75: mol_type = other DNA
aaggcaatggcggcaagattatcaatatcgcgtcaatgctctccttccagggcgggatccgtgtgccttcttata

SEQ ID NO: 773775 - DNA, 75 bp, synthetic construct
  source 1..75: mol_type = other DNA
ctggctgatgcctcacccgatgagcgcgtgacggcggcgattcacgttctgctttcctgtctggcgaaatcaggc

SEQ ID NO: 773776 - DNA, 75 bp, synthetic construct
  source 1..75: mol_type = other DNA
gagtgtttttatcttgatgagttcagtaatataagcgaactgaaggatgctgttacggaatatattgaatactac

SEQ ID NO: 773777 - DNA, 75 bp, synthetic construct
  source 1..75: mol_type = other DNA
ggcagtatcgtatgagaagatatcaaaatatccttaaagaacatggtattaaacaaagcatgtccagaaaaggca

SEQ ID NO: 773778 - DNA, 75 bp, synthetic construct
  source 1..75: mol_type = other DNA
ggaatatattgaatactacaacagcagaagaattagcctgaaattaaaaggtctgactccaattgaatatcggaa

SEQ ID NO: 773779 - DNA, 75 bp, synthetic construct
  source 1..75: mol_type = other DNA
tggaaccttaaagtcggagtgtttttatcttgatgagttcagtaatataagcgagctgaaggatgctgttacgga

SEQ ID NO: 773780 - DNA, 75 bp, synthetic construct
  source 1..75: mol_type = other DNA
cttaaagtcggagtgtttttatcttgatgagttcagtaatataagcgaactgaaggatgctgttacggaatatat

SEQ ID NO: 773781 - DNA, 75 bp, synthetic construct
  source 1..75: mol_type = other DNA
aaatatcaaaatattcttaaagaacatggtattaaacaaagcatgtccagaaaaggcaattgtctggataatgct

SEQ ID NO: 773782 - DNA, 75 bp, synthetic construct
  source 1..75: mol_type = other DNA
aagcaacggacacgttgtggggaaaaatgaagactgctgcagaacagtttaatgcagcatatatggcaaaaatgc

SEQ ID NO: 773783 - DNA, 75 bp, synthetic construct
  source 1..75: mol_type = other DNA
gttaataatccgtttagcccttccggcgatggcttgcttaataacgttttcttcactgtcaacgaagttatagcg

SEQ ID NO: 773784 - DNA, 75 bp, synthetic construct
  source 1..75: mol_type = other DNA
ttcaacagcaggctacagactcgctttggagtaagatgaagaatacagcagagcaatttaactctgcttatatgt

SEQ ID NO: 773785 - DNA, 75 bp, synthetic construct
  source 1..75: mol_type = other DNA
aaatcaggtgattcaggatggcggcgggctgtgtgtggtgcgtgacggtcaggtgcagagccatctaccgttgcc

SEQ ID NO: 773786 - DNA, 75 bp, synthetic construct
  source 1..75: mol_type = other DNA
atattgctgcgggtattgaaaactgccacgaaagttatcagctggaagaaggacgccggaaattacaactcggca

SEQ ID NO: 773787 - DNA, 75 bp, synthetic construct
  source 1..75: mol_type = other DNA
aacaagagcacagggaaagaagtctctgaaattcgcttcaccgcgcgggagaaaatgaccgggcttgaaggctat

SEQ ID NO: 773788 - DNA, 75 bp, synthetic construct
  source 1..75: mol_type = other DNA
ccggttcattatcatggcagtcgcgctaccgaagggacgctttcctggcggcaagccacggcccaggcggggcag

SEQ ID NO: 773789 - DNA, 75 bp, synthetic construct
  source 1..75: mol_type = other DNA
agaggccgccacgaaacggcagttatctgagcaggaaaaatccctgctggcccatgagaaagaaacgctggagta

SEQ ID NO: 773790 - DNA, 75 bp, synthetic construct
  source 1..75: mol_type = other DNA
tatgacatggcccgcaaggcggcaatggatgttgtgaccgggcagatgcgtgatggtggtctgttctccggaggt

SEQ ID NO: 773791 - DNA, 75 bp, synthetic construct
  source 1..75: mol_type = other DNA
tcgggttttgccagtgccgacgcaggttgccagtgggcaatgtgtagaggtggagctgtttgcccgctatccgct

SEQ ID NO: 773792 - DNA, 75 bp, synthetic construct
  source 1..75: mol_type = other DNA
accgttaaatcgttgcttgattcactggcgacgttacctgcgcaaaacaaagcccaggaaatattactggacgtg

SEQ ID NO: 773793 - DNA, 75 bp, synthetic construct
  source 1..75: mol_type = other DNA
aggcgaaaagcacgcctcctgaagcagcgaaagccatgactgtggcgattcgcacttttttacagcaaaatgccg

SEQ ID NO: 773794 - DNA, 75 bp, synthetic construct
  source 1..75: mol_type = other DNA
gcggtgtatgacatggcccgcaagggagcgcaggatgagctccggctgcagttgcgtgatggcggtatgttatca

SEQ ID NO: 773795 - DNA, 75 bp, synthetic construct
  source 1..75: mol_type = other DNA
gtatcggcagcgccatcgggggagccattggtggtgctggcgcatcagcttccacggggacagccattcaggctg

SEQ ID NO: 773796 - DNA, 75 bp, synthetic construct
  source 1..75: mol_type = other DNA
ttgacggccaccagctgacggtggaaatcacggaaagcatgatgatggaacacgataccgaaatctttaagcgca

SEQ ID NO: 773797 - DNA, 75 bp, synthetic construct
  source 1..75: mol_type = other DNA
caaactgaaattgcagtcgcatctcgatcgtgaagagtacgttgccagagttctggatcgcgaggcgaaaagtac

SEQ ID NO: 773798 - DNA, 75 bp, synthetic construct
  source 1..75: mol_type = other DNA
tgccggatgcgatgctgacgcatcttatccggcctacagattgctgcgaaatcgtaggccgcatccggcaaaaat

SEQ ID NO: 773799 - DNA, 75 bp, synthetic construct
  source 1..75: mol_type = other DNA
atgacgcacgataatatcgatattctggtggtggatgatgacattagccactgcactattttgcaggctttgctg

SEQ ID NO: 773800 - DNA, 75 bp, synthetic construct
  source 1..75: mol_type = other DNA
tggcaaaagcgcggcgatgcagcacctgctcagtgaaattgccctcgtcgcgccatcagaagccacagtgttgat

SEQ ID NO: 773801 - DNA, 75 bp, synthetic construct
  source 1..75: mol_type = other DNA
gcgattagcaataaccaactgaaactggtttaccaaccgcaaatcttcgcagaaacgggtgaactgtatggtatc

SEQ ID NO: 773802 - DNA, 75 bp, synthetic construct
  source 1..75: mol_type = other DNA
accaaaaagcattactaccccaaaatagtctaatatatcttgatccaccttattatgttaaaggagcagagttat

SEQ ID NO: 773803 - DNA, 75 bp, synthetic construct
  source 1..75: mol_type = other DNA
cgactgcaggctctggcctgaagatgcagatcgtcgacaaccaggacatgacgatttcggtctgggtattcccgg

SEQ ID NO: 773804 - DNA, 75 bp, synthetic construct
  source 1..75: mol_type = other DNA
gtccagcttgataccctcgggctctggatcggacgcagccgtatagttagccagccgataacgggtgtttatttc

SEQ ID NO: 773805 - DNA, 75 bp, synthetic construct
  source 1..75: mol_type = other DNA
gaagcccttgctcgctggcacgatcccctgcatggtcatgtgcccccttcacggtttattcctctcgcagaagag

SEQ ID NO: 773806 - DNA, 75 bp, synthetic construct
  source 1..75: mol_type = other DNA
gagttggttgccagagcaattcacgccagtagcgcacgtagtgaaaaaccgctggtaacgctcaactgtgcggca

SEQ ID NO: 773807 - DNA, 75 bp, synthetic construct
  source 1..75: mol_type = other DNA
gccccaggcgatggatctgttgattcattacgactggccgggaaatattcgtgaactggaaaacgcggtggaacg

SEQ ID NO: 773808 - DNA, 75 bp, synthetic construct
  source 1..75: mol_type = other DNA
ggctcaaaattctttggttttgatttagataacgaatacatcggcgggttcgatgtaggagcatgggggacttta

SEQ ID NO: 773809 - DNA, 75 bp, synthetic construct
  source 1..75: mol_type = other DNA
ctgagctgcggacacttcaggcccacgccgggtcgaatgaaaaaatcagccagcagcgtcgggagctgtggaagg

SEQ ID NO: 773810 - DNA, 75 bp, synthetic construct
  source 1..75: mol_type = other DNA
cgctggcgtatgcctggtatcagggggactcaaccctgtccagtttcaataaaacgctggtcctttccggtaatc

SEQ ID NO: 773811 - DNA, 75 bp, synthetic construct
  source 1..75: mol_type = other DNA
tgagtcactggcagccctggtgaatgccggtgtgcgtggtggtgaacagtttgatgccatcaaccagagtgtcgc

SEQ ID NO: 773812 - DNA, 75 bp, synthetic construct
  source 1..75: mol_type = other DNA
gagcttagtgagacaattatacataaaaatttcgcattaaatcgcactctaaaaaagagagtcgcttttcattat

SEQ ID NO: 773813 - DNA, 75 bp, synthetic construct
  source 1..75: mol_type = other DNA
atctcagacattgttaacgactggcaggatgcagatacactggaaaaaatactgcttgtcaaacagtatctgaag

SEQ ID NO: 773814 - DNA, 75 bp, synthetic construct
  source 1..75: mol_type = other DNA
aaacgacagttatccgggcaggaaaaatccctgctggcccatgagaaagagacactggagtacaaacgccagctg

SEQ ID NO: 773815 - DNA, 75 bp, synthetic construct
  source 1..75: mol_type = other DNA
taccgcctgatgcggggctatgcggaagggggggtatgtgggtgctgccggaagtccggcgcagatgcggcgggc

SEQ ID NO: 773816 - DNA, 75 bp, synthetic construct
  source 1..75: mol_type = other DNA
gccctggtcagtgccggtgtgcgtggtggtgaacagtttgatgccattaaccagagtgtggcgcgttttgcgtct

SEQ ID NO: 773817 - DNA, 75 bp, synthetic construct
  source 1..75: mol_type = other DNA
tccatgctgacagagatttttctgaagcaggccatggtgggtgttgtcagtagcgtggccggagctatgggattt

SEQ ID NO: 773818 - DNA, 75 bp, synthetic construct
  source 1..75: mol_type = other DNA
ggatttccgtcgggcagtataaagcagccatgcgtaccctgcccgcacagtttacggatatcgccacgcagcttg

SEQ ID NO: 773819 - DNA, 75 bp, synthetic construct
  source 1..75: mol_type = other DNA
gtgaaggtgtctgccggtgagcgtcaggaagaccgggcgcatgcagctatgctggcgcttcaggctgaactccgg

SEQ ID NO: 773820 - DNA, 75 bp, synthetic construct
  source 1..75: mol_type = other DNA
acggccattcaggctgcggcggcgaacttccatttcgcgaccgggggatttacgggaaccggtggcaaatatgag

SEQ ID NO: 773821 - DNA, 75 bp, synthetic construct
  source 1..75: mol_type = other DNA
cggtgagcgccaggaagaccgggcgcatgcagccatgctggcgcttgaaaccgagctcaggacgctggaaaagca

SEQ ID NO: 773822 - DNA, 75 bp, synthetic construct
  source 1..75: mol_type = other DNA
aaatgccggtgtgcgtggtggtgagcagtttgaggcgatcagtcagagtgtggcgcgtttctcctctgcatccgg

SEQ ID NO: 773823 - DNA, 75 bp, synthetic construct
  source 1..75: mol_type = other DNA
acggtattgcacagaatatggcagcgatgctgaccggcagcgaacagagctggcgtggtttcacccgttctgtgc

SEQ ID NO: 773824 - DNA, 75 bp, synthetic construct
  source 1..75: mol_type = other DNA
tccctgaagcgcgccttcaagtcgatgtgggatgcagccctcgatattggccgacctgacaccgcgcaggagatg

SEQ ID NO: 773825 - DNA, 75 bp, synthetic construct
  source 1..75: mol_type = other DNA
atgcggcgtgaacgccttatccgacctacgtccgacaaacaaatttcgtgcgaattaccgctaaaatcgcgtttt

SEQ ID NO: 773826 - DNA, 75 bp, synthetic construct
  source 1..75: mol_type = other DNA
atgcggcgtgaacgctttatccgaacgacgtccgacaaacaaatttcgtgtgaattaccgctaaaatctcgtttt

SEQ ID NO: 773827 - DNA, 75 bp, synthetic construct
  source 1..75: mol_type = other DNA
gaaggtggttatgtgggtggtgccggaagtccggcgcagatgcggcggacggaaggcattaattttaatcagaac

SEQ ID NO: 773828 - DNA, 75 bp, synthetic construct
  source 1..75: mol_type = other DNA
gtgcaaccgtgccgccaggtggcggtacgcctatggttgtcataaccatgacctacaaacaagccctgcgagttg

SEQ ID NO: 773829 - DNA, 75 bp, synthetic construct
  source 1..75: mol_type = other DNA
ctgtggctggcgaaaatctttgaacatgatttgcttgccctgcaacaacgctggttgccgaagctggggatcgtg

SEQ ID NO: 773830 - DNA, 75 bp, synthetic construct
  source 1..75: mol_type = other DNA
gcccgttcatcgcggactggaaacattgatgctggtgctggcggtgttgctgggggcttataccggctttctgct

SEQ ID NO: 773831 - DNA, 75 bp, synthetic construct
  source 1..75: mol_type = other DNA
tctgttgatcctcgtcttccacctgacaagaccgtggaccttctggaagctgatgttccactacagttttacctc

SEQ ID NO: 773832 - DNA, 75 bp, synthetic construct
  source 1..75: mol_type = other DNA
aagcggtgtatgagatggcccgcaagggggcacaggatgaactccggctgcagttgcgtgatggcggtatgttat

SEQ ID NO: 773833 - DNA, 75 bp, synthetic construct
  source 1..75: mol_type = other DNA
ccaccgaccctacgtcggggctgattgcgatggcgcgccagttccgtaacgtgacggcggagcagattgcgtatg

SEQ ID NO: 773834 - DNA, 75 bp, synthetic construct
  source 1..75: mol_type = other DNA
gtggtggggcgtctgcctccacggggacggccattcaggctgcggcggcgaacttccatttcgcgaccggaggat

SEQ ID NO: 773835 - DNA, 75 bp, synthetic construct
  source 1..75: mol_type = other DNA
ccatgatgacagaaatcctgcttaaacaggccatggtgggcattgtcgggcgtatcggcagcgccattggcggtg

SEQ ID NO: 773836 - DNA, 75 bp, synthetic construct
  source 1..75: mol_type = other DNA
acaagaccgtggaccttctggaagctgatgttccactacagttttacttcggtgatgtcgatgggggtgatgctg

SEQ ID NO: 773837 - DNA, 75 bp, synthetic construct
  source 1..75: mol_type = other DNA
tgccatgcgcacactgcccgcacagttcacggatattgtcactcagcttgccggtggtcagaatcccttccttat

SEQ ID NO: 773838 - DNA, 75 bp, synthetic construct
  source 1..75: mol_type = other DNA
ggtggttatgtcggcggtgccggaagtccggcgcagatgcggcgggcggaaggcattaattttaatcagaacaat

SEQ ID NO: 773839 - DNA, 75 bp, synthetic construct
  source 1..75: mol_type = other DNA
tcagaacaatcacgtggtgattcagaacgacggcaccaacggacaggcggggccgcagctgatgaaggcggtgta

SEQ ID NO: 773840 - DNA, 75 bp, synthetic construct
  source 1..75: mol_type = other DNA
acgtagcccgtaaggcggcaatggatgttgtgaccgggcagatgcgcgatggtggtctgttctccggaggtggac

SEQ ID NO: 773841 - DNA, 75 bp, synthetic construct
  source 1..75: mol_type = other DNA
atcgatgtgggatgccatcctggatatcggtcgtccggaatcctcagcggatatgctcgccagtgcgcagaaggc

SEQ ID NO: 773842 - DNA, 75 bp, synthetic construct
  source 1..75: mol_type = other DNA
tcaggctgcggcagcgaactttcattttgcgaccggtggattcaccggcactggcggaaaatatgagcctgcggg

SEQ ID NO: 773843 - DNA, 75 bp, synthetic construct
  source 1..75: mol_type = other DNA
gtatgaaggcaatccgcaggcgctggcaaaggcaacagatgcgctgagacagacatgggattcagaagaccagct

SEQ ID NO: 773844 - DNA, 75 bp, synthetic construct
  source 1..75: mol_type = other DNA
atcgggcgtcctgagtcatctgcagaaatgctgaataaggcacagcaggcattcgatgaggcggataaaaaatgg

SEQ ID NO: 773845 - DNA, 75 bp, synthetic construct
  source 1..75: mol_type = other DNA
caaacgccagctggctgagctgggcgacaaggtggagcaccagaaacgcctgaatgaacttgcacagcaggcagc

SEQ ID NO: 773846 - DNA, 75 bp, synthetic construct
  source 1..75: mol_type = other DNA
aggcggataaaaaatggcagtggtaccagagccggagccagcgccggggaaaaaccgcctctttccgggccaacc

SEQ ID NO: 773847 - DNA, 75 bp, synthetic construct
  source 1..75: mol_type = other DNA
cggtctgaagtccggctggggcgagtgggcagaaagtgcgacggacagtttttcgcaggttaaaagcgtggccac

SEQ ID NO: 773848 - DNA, 75 bp, synthetic construct
  source 1..75: mol_type = other DNA
tatgagcctgcggggatagttcaccgcggggagtttgttttcacgaaagaggcaaccagccggataggtgtgggg

SEQ ID NO: 773849 - DNA, 75 bp, synthetic construct
  source 1..75: mol_type = other DNA
tgacggcggagcagattgcgtatgttgcgcaactgcagcgttccggtgatgaggccggggcattgcaggccgcaa

SEQ ID NO: 773850 - DNA, 75 bp, synthetic construct
  source 1..75: mol_type = other DNA
aaaaccctggttctttccggtaatcagtccggactgactgccgatcgtatgctgactctctcaagagccgggcag

SEQ ID NO: 773851 - DNA, 75 bp, synthetic construct
  source 1..75: mol_type = other DNA
gccacgctgcagtcggatatggaaaaagccggtgaactggctaccagggaccgggccgaacgggacgcatcacag

SEQ ID NO: 773852 - DNA, 75 bp, synthetic construct
  source 1..75: mol_type = other DNA
tgctcgcgcatctgcagaacctggtaatgaccttctcggatatcaccgaagaacggcaaatccgccagcttgaag

SEQ ID NO: 773853 - DNA, 75 bp, synthetic construct
  source 1..75: mol_type = other DNA
acgaaagaggcaaccagccggataggtgtggggaatctttaccgtctgatgcgcggctatgcggaaggtggttat

SEQ ID NO: 773854 - DNA, 75 bp, synthetic construct
  source 1..75: mol_type = other DNA
tattgataccggcaccgcgtatctggcaatgctgaataatgtttatctcggcggcattgataacccaacgtcacg

SEQ ID NO: 773855 - DNA, 75 bp, synthetic construct
  source 1..75: mol_type = other DNA
cgggcagcccattcgctgggaggggcgtgcgagcaaattcgccgattatttgctaaagaaccgactgaaaagtcg

SEQ ID NO: 773856 - DNA, 75 bp, synthetic construct
  source 1..75: mol_type = other DNA
gcaatcccccagacgcttcccgaagctctgcgcctggctgccgagctggctgaacaaaagcagctactggaacag

SEQ ID NO: 773857 - DNA, 75 bp, synthetic construct
  source 1..75: mol_type = other DNA
actatcttgccgccgatcaggtgcccgctttcgtgctgccacaacatccttctggcgtaatgaccctttcggcgg

SEQ ID NO: 773858 - DNA, 75 bp, synthetic construct
  source 1..75: mol_type = other DNA
aagagcgtattcggatcctggtgtggaacatatacaaacagcaacgcgctgaatggttgtcggtattaaagaact

SEQ ID NO: 773859 - DNA, 75 bp, synthetic construct
  source 1..75: mol_type = other DNA
gcggcattgataacccaacgtcgcggcgttatgccgtcatcaccgcctataacggcggcgcaggcagcgtattac

SEQ ID NO: 773860 - DNA, 75 bp, synthetic construct
  source 1..75: mol_type = other DNA
agcagcgccttcgtgaggtgtacggtgataatccggatgcgctggcgaaggccacatctgcactgaagaacacct

SEQ ID NO: 773861 - DNA, 75 bp, synthetic construct
  source 1..75: mol_type = other DNA
tggctaattctgctgcaacagggcgggcagattaaggactcgttcggtgggatgatccccatgttccggggactg

SEQ ID NO: 773862 - DNA, 75 bp, synthetic construct
  source 1..75: mol_type = other DNA
cgccgggcaattatcaaaacgttactgatgggtgacgatccgggttcagtcgatctctattccgatgttgatgat

SEQ ID NO: 773863 - DNA, 75 bp, synthetic construct
  source 1..75: mol_type = other DNA
tgaccacacgtcatccgtctgcggaatctcgccgctatctctataaagtgaacatggcacagaaatcttatcgcc

SEQ ID NO: 773864 - DNA, 75 bp, synthetic construct
  source 1..75: mol_type = other DNA
acgccgggcgatgtttatcagacactgaccacacgtcatccgtctgcggaatctcgccgctatctctataaagtg

SEQ ID NO: 773865 - DNA, 75 bp, synthetic construct
  source 1..75: mol_type = other DNA
actttggcatgttcagcatcgccaaagtgggctatcaggcgcaggtgatcccggcactgttagccgggctggcgc

SEQ ID NO: 773866 - DNA, 75 bp, synthetic construct
  source 1..75: mol_type = other DNA
cccggtaatagccggaaaaaaatcactatgggggatcaccatgcaagggctggcgatggtggttaagcctgatga

SEQ ID NO: 773867 - DNA, 75 bp, synthetic construct
  source 1..75: mol_type = other DNA
atgggggcttctgtcttttcagaacggtcatttgtctgttatccctgtcctggcgagcatgaactggtttcagaa

SEQ ID NO: 773868 - DNA, 75 bp, synthetic construct
  source 1..75: mol_type = other DNA
tcacagctgaagtataccggagaggcgcagaaggggtatgagcgtctgctgacgccgctggagaaatataccgcc

SEQ ID NO: 773869 - DNA, 75 bp, synthetic construct
  source 1..75: mol_type = other DNA
ggccggggccttacaggcggcgaacgatatcgccacgaaaggctttgatgagcagacccgtcgcctgaaagaaaa

SEQ ID NO: 773870 - DNA, 75 bp, synthetic construct
  source 1..75: mol_type = other DNA
gacaagattgaacaccagaagcggctgaatgagctggcacagcaggcggcgcggtttgaacagcagcagagcgcg

SEQ ID NO: 773871 - DNA, 75 bp, synthetic construct
  source 1..75: mol_type = other DNA
atgcggaaggtggttatgtgggcggtgccggaagtccggcgcagatgcggcgggcggaaggcattaattttaatc

SEQ ID NO: 773872 - DNA, 75 bp, synthetic construct
  source 1..75: mol_type = other DNA
gaaatgcatcgtcgtattcataaaaacgtacgcaagatagctcagctgggccacacgtactggcttcaaccagaa

SEQ ID NO: 773873 - DNA, 75 bp, synthetic construct
  source 1..75: mol_type = other DNA
ggtggatgttgcggcatttaccctgtcccggcgagcgtgaactgatatccgtagaggtagccgccggagagcctg

SEQ ID NO: 773874 - DNA, 75 bp, synthetic construct
  source 1..75: mol_type = other DNA
gtgagacgtatcggtgcactaaacggcatgctcagaatggaatgcaaccgtcgtgaaaatgcagatattgacgct

SEQ ID NO: 773875 - DNA, 75 bp, synthetic construct
  source 1..75: mol_type = other DNA
cggggcttggtagtagttttatggttgaaatgaatattaaaaagatcctgaaaaaaatggagatagatgcggaag

SEQ ID NO: 773876 - DNA, 75 bp, synthetic construct
  source 1..75: mol_type = other DNA
cctttggcgtaagctgtgcattggcggagctggcagatacgctcccgcaggcggccaattaccgtgcggcaccac

SEQ ID NO: 773877 - DNA, 75 bp, synthetic construct
  source 1..75: mol_type = other DNA
gaaaaacagtaaaggtaagctcggcgtggattgcgtgttctctaccgaagcattggtgtacccgcagtcagacgg

SEQ ID NO: 773878 - DNA, 75 bp, synthetic construct
  source 1..75: mol_type = other DNA
cagttggcgatgctgctggaaggtatcgactggcgacagcctaagcggctgctgacctccctgaccatgctgtaa

SEQ ID NO: 773879 - DNA, 75 bp, synthetic construct
  source 1..75: mol_type = other DNA
aaaaagtcaaaggagctgggagcgcgaaagctggtactcagcaatatcgcttcattaaaaatgatttctacaatt

SEQ ID NO: 773880 - DNA, 75 bp, synthetic construct
  source 1..75: mol_type = other DNA
tgccgcctcccggcgctgctcttgtacaggaaggcgcatcgctggattctcccctgaatgccagtgaaattcgtg

SEQ ID NO: 773881 - DNA, 75 bp, synthetic construct
  source 1..75: mol_type = other DNA
acggaacccgcctgtggaagctgcccgtcaccccgctgttaacgttttccgttgacggtcgcaccgtcacagcct

SEQ ID NO: 773882 - DNA, 75 bp, synthetic construct
  source 1..75: mol_type = other DNA
ttcgaacagacgctgtcttctgccgacggaacccgcctgtggaagctgcccgtcaccccgctgttaacgttttcc

SEQ ID NO: 773883 - DNA, 75 bp, synthetic construct
  source 1..75: mol_type = other DNA
tgggattgtacgaagccgtgcgcgacggcatggtggtgaatctgttgctggaggcaattccggatctgcatttgc

SEQ ID NO: 773884 - DNA, 75 bp, synthetic construct
  source 1..75: mol_type = other DNA
gtgcaaaacccgcgatgattcgcgtgcgtttgcccgtgaaaccggcattgccattgcctgggatgaaagcctgcg

SEQ ID NO: 773885 - DNA, 75 bp, synthetic construct
  source 1..75: mol_type = other DNA
gaattaccgcaaatgccttccgtcgcctttggcgtgagctgcgcgctggcagagcttactgatacgttgccgcaa

SEQ ID NO: 773886 - DNA, 75 bp, synthetic construct
  source 1..75: mol_type = other DNA
atatgattaacgacgagatcgagacgttcacaaatggcgctgttttcgatttaatgaatgaagcgaaaaaagcca

SEQ ID NO: 773887 - DNA, 75 bp, synthetic construct
  source 1..75: mol_type = other DNA
gggcatcatgcttggctggggtgtggttggtgtctggatgggaatgtttgccgactgggctgtgcgggccgtgct

SEQ ID NO: 773888 - DNA, 75 bp, synthetic construct
  source 1..75: mol_type = other DNA
aaataactggctggcaggtgatagcgagctaccgcaaatgccttccgtcgcctttggcgtaagctgtgcattggc

SEQ ID NO: 773889 - DNA, 75 bp, synthetic construct
  source 1..75: mol_type = other DNA
tcccaggctgcgcgggaattagatattagtatttctgctgtcagtaaatcgcttagtcgccttgagaactctatt

SEQ ID NO: 773890 - DNA, 75 bp, synthetic construct
  source 1..75: mol_type = other DNA
ctgcatttccgtgtgtggaattccccggagaaatattcttcatgggtgagttactacgaagggataaagctgaat

SEQ ID NO: 773891 - DNA, 75 bp, synthetic construct
  source 1..75: mol_type = other DNA
gcctaacttgcttgatgagctaaaacgtgaccgccgctggtgccacggtaacctgatgaacttccgtctgttcct

SEQ ID NO: 773892 - DNA, 75 bp, synthetic construct
  source 1..75: mol_type = other DNA
cggcgttgatcatgcctatctgtaacgaagacgtgaaccgtgtttttgctggcctgcgtgcaacgtgggaatcag

SEQ ID NO: 773893 - DNA, 75 bp, synthetic construct
  source 1..75: mol_type = other DNA
cagattttctatcgccgtcgtcgccgccgcgtgaagcgtaaaagcggcaacattgatgatttctgccgccgctgg

SEQ ID NO: 773894 - DNA, 75 bp, synthetic construct
  source 1..75: mol_type = other DNA
ggcacgtcttgaacaagcctggccggattctctcgctgacgggcacttagtcaaagacgatgaggggcgtgacca

SEQ ID NO: 773895 - DNA, 75 bp, synthetic construct
  source 1..75: mol_type = other DNA
gccgcgctatctggctcgtttgaccaaagaagagcaggagagcgagcaaaagtggcgtaccgtcggtaccatccg

SEQ ID NO: 773896 - DNA, 75 bp, synthetic construct
  source 1..75: mol_type = other DNA
ccgacagcattaatgtgcaggcactgaacatggggcgaattgtcgctgacgtcgatggtgttaatctcactgaac

SEQ ID NO: 773897 - DNA, 75 bp, synthetic construct
  source 1..75: mol_type = other DNA
gcagaaattctttgatgaactggacgccttctttactgaactggagaaatcgggtcgtaaagtgatggtggtcgt

SEQ ID NO: 773898 - DNA, 75 bp, synthetic construct
  source 1..75: mol_type = other DNA
gcaggatctcatctatgcgggcgatccggttcattatcatggcagtcgcgctaccgaagggacgctttcctggcg

SEQ ID NO: 773899 - DNA, 75 bp, synthetic construct
  source 1..75: mol_type = other DNA
atggaatggtatgttttgcaattcaccactacgagatttgcagcagtttttgctcatctcgaacgcctgaacttt

SEQ ID NO: 773900 - DNA, 75 bp, synthetic construct
  source 1..75: mol_type = other DNA
gagaagcttaacccacaaaatgaaacggaagaaaaatgactgctacccggaaaaaaaccgcaacgagacgcaagc

SEQ ID NO: 773901 - DNA, 75 bp, synthetic construct
  source 1..75: mol_type = other DNA
catacaacagctcaggcaaatcttttaaggaaatcaattccacacgattttgctgaaattctactcatggataat

SEQ ID NO: 773902 - DNA, 75 bp, synthetic construct
  source 1..75: mol_type = other DNA
tggggggtatggattgcttacgatctccctggttcttatgaagaactgccgcctaacctgcttgatgagctaaaa

SEQ ID NO: 773903 - DNA, 75 bp, synthetic construct
  source 1..75: mol_type = other DNA
gcccggcgaggtaaaaacgcaattgccggataccgacgaactggcaggcttgctgtattatctgcatcaacaacc

SEQ ID NO: 773904 - DNA, 75 bp, synthetic construct
  source 1..75: mol_type = other DNA
acccggcgaggtaaaaacgcaattgccagataccgacgaactggctggcttgctgtattatttgcatcaacaacc

SEQ ID NO: 773905 - DNA, 75 bp, synthetic construct
  source 1..75: mol_type = other DNA
gggagttttctcattgaacatcagggccagcgttttgttgtgcgtcagccgcacgatcctgatgcgccgcagtcc

SEQ ID NO: 773906 - DNA, 75 bp, synthetic construct
  source 1..75: mol_type = other DNA
acttccatttcgcgaccggaggatttacggggacgggcggcaaatatgagcctgcggggatagttcaccgcgggg

SEQ ID NO: 773907 - DNA, 75 bp, synthetic construct
  source 1..75: mol_type = other DNA
atcggcaatactattctcctttatttcagcaattccggagttttattgaagataaatggaataaacgaccacagg

SEQ ID NO: 773908 - DNA, 75 bp, synthetic construct
  source 1..75: mol_type = other DNA
agcgaagcgatccggcgcggcggacagcggattggctgcgactattaaaacgtctgcgcaaaatacgggaaccac

SEQ ID NO: 773909 - DNA, 75 bp, synthetic construct
  source 1..75: mol_type = other DNA
cggaagagtattcaccgccgcaggtactgcttgataccgatcgtttcctcgagatgaatcgtcaacgctccctcg

SEQ ID NO: 773910 - DNA, 75 bp, synthetic construct
  source 1..75: mol_type = other DNA
tctgcgattcctgttctggctggcgccaattgtcttctcgttgattctgtcaccgtttgtttcggtgatctccag

SEQ ID NO: 773911 - DNA, 75 bp, synthetic construct
  source 1..75: mol_type = other DNA
ccggcagttatttccggtctggccgcagtggcgtcccgaactggcgattgccctgtttgcctcaacgatggtact

SEQ ID NO: 773912 - DNA, 75 bp, synthetic construct
  source 1..75: mol_type = other DNA
gggccagcgttttgttgtgcgtcagccgcacgatcctgatgcgccgcagtccgcgttcttgcgccagtatcgggc

SEQ ID NO: 773913 - DNA, 75 bp, synthetic construct
  source 1..75: mol_type = other DNA
tgatgaaggcggtgtatgacatggcccgcaagggagcgcaggatgagctccggctgcagttgcgtgatggcggta

SEQ ID NO: 773914 - DNA, 75 bp, synthetic construct
  source 1..75: mol_type = other DNA
tgaggatgtgaaccgcgtctttgcaggcttgcgcgcaacgtgggaatcggtaaaagccaccggcaatgctcaaca

SEQ ID NO: 773915 - DNA, 75 bp, synthetic construct
  source 1..75: mol_type = other DNA
gggatgtcatcagtgatcccactgaagctgactggactacgggaaatgtaccattacttgatttgaaaaatttta

SEQ ID NO: 773916 - DNA, 75 bp, synthetic construct
  source 1..75: mol_type = other DNA
caggtaaggggatcgcaaaaacaatggctacagagagggctattgctgttgcagccagaatggcatcaacaacac

SEQ ID NO: 773917 - DNA, 75 bp, synthetic construct
  source 1..75: mol_type = other DNA
ttgaaatgatcccctggcgaggcgtgtttttgactgcggaaggggaaaagctggcgcaggaaagccgtgagcggc

SEQ ID NO: 773918 - DNA, 75 bp, synthetic construct
  source 1..75: mol_type = other DNA
cgcgctgaaccgtctcgtcccgcttctgaccgacaaggatgacagtattcttattatgacgccttcatatggccc

SEQ ID NO: 773919 - DNA, 75 bp, synthetic construct
  source 1..75: mol_type = other DNA
cattatcaaagatgggcggattgttgatgcgcagcggctggctaacacgttgttaccgtggagtcgcgaactgcc

SEQ ID NO: 773920 - DNA, 75 bp, synthetic construct
  source 1..75: mol_type = other DNA
tgggcatcggaacatccagtgctcttggtggtaactcgattgttttgggtgataatgacacgggatttaaacaaa

SEQ ID NO: 773921 - DNA, 75 bp, synthetic construct
  source 1..75: mol_type = other DNA
tgctcttggcggtaactcgattgttttgggtgataatgacacgggatttaaacaaaatggcgacggtaatctgga

SEQ ID NO: 773922 - DNA, 75 bp, synthetic construct
  source 1..75: mol_type = other DNA
gaatcctcagcggatatgctcgccagtgcgcagaaggcatttgatgaggcggataaaaaatggcagtggtaccag

SEQ ID NO: 773923 - DNA, 75 bp, synthetic construct
  source 1..75: mol_type = other DNA
aaaacttgctgatatattgaccgcggaagcaagagaggcaggactcaatatgcgctttgataaaagtactatatc

SEQ ID NO: 773924 - DNA, 75 bp, synthetic construct
  source 1..75: mol_type = other DNA
aaaggtagccaaacgcagactaaagagcagaaagcggatttggcttcggtatttgaaccttatggtatttcgtct

SEQ ID NO: 773925 - DNA, 75 bp, synthetic construct
  source 1..75: mol_type = other DNA
ccagagcaaatagtcctcgggcagcgacaaaaaaactagcagatattgcttacagatttggtgaagtgaggcaag

SEQ ID NO: 773926 - DNA, 75 bp, synthetic construct
  source 1..75: mol_type = other DNA
cgtactgtcgtttttatcgtggagttttaccgttctggtgatcagtcgcattggtgtggcttttgcacatgcgat

SEQ ID NO: 773927 - DNA, 75 bp, synthetic construct
  source 1..75: mol_type = other DNA
agccgaaacagtccggcgtgaaagtgtcagcaggcgatcgtcaggaggacaatacccgtacagcgctgctggcgc

SEQ ID NO: 773928 - DNA, 75 bp, synthetic construct
  source 1..75: mol_type = other DNA
cggcagcgccattggtggtgctttcggtggtggtgcatctgcttcctcggggacggccattgaggctgcggcggc

SEQ ID NO: 773929 - DNA, 75 bp, synthetic construct
  source 1..75: mol_type = other DNA
ctaatagggcttggcttttcaagaactgctgctgtaatgatttcagagcttattcctaatgatagtttagatgag

SEQ ID NO: 773930 - DNA, 75 bp, synthetic construct
  source 1..75: mol_type = other DNA
agctggcactaactctgattgccggcctagctaacagcgaaagcgacgaagaaaaagacgaaattttctataagg

SEQ ID NO: 773931 - DNA, 75 bp, synthetic construct
  source 1..75: mol_type = other DNA
agccgccctgccgatggtgggtctcacttcgctggcagttgccaccggagcgctggcgtatgcctggtatcaggg

SEQ ID NO: 773932 - DNA, 75 bp, synthetic construct
  source 1..75: mol_type = other DNA
cctgaaagaggccgccacgaaacggcagttatctgagcaggaaaaatccctgctggcccatgagaaagagacgct

SEQ ID NO: 773933 - DNA, 75 bp, synthetic construct
  source 1..75: mol_type = other DNA
ctgggccgagtctgaggcatcacggctgaaatataccgaagaggcgcagaaggcttacgaacgcctgcagacacc

SEQ ID NO: 773934 - DNA, 75 bp, synthetic construct
  source 1..75: mol_type = other DNA
aaaacacaatagaaattgggaatgataaatttatttatgcaaataaatttcaatctgaattttgggatagtgctc

SEQ ID NO: 773935 - DNA, 75 bp, synthetic construct
  source 1..75: mol_type = other DNA
gtaaggtcgatgttaaagcggcagcagtgacggtagatgcgcccatgagcacctttaccggcaacgtcacggtga

SEQ ID NO: 773936 - DNA, 75 bp, synthetic construct
  source 1..75: mol_type = other DNA
aataattcagctttcaataaccgcggcgagtttattcttgataacgacaagaatgctgtgcacatcaaccagtcc

SEQ ID NO: 773937 - DNA, 75 bp, synthetic construct
  source 1..75: mol_type = other DNA
atgtcggctggcggggtctttaataatcaaactgacggggcgattatgagaggtgctgcgctgacaggtactgca

SEQ ID NO: 773938 - DNA, 75 bp, synthetic construct
  source 1..75: mol_type = other DNA
cgatggggttggagtgttttcaatttaaagaaaaaacaggaaagacagagcttgtattttttgatggtaaagact

SEQ ID NO: 773939 - DNA, 75 bp, synthetic construct
  source 1..75: mol_type = other DNA
tcgctcaaattgctgagtatatcccgcgtgcgtgccggggtatgcagttgcaggaagccaaagcacgcctggaga

SEQ ID NO: 773940 - DNA, 75 bp, synthetic construct
  source 1..75: mol_type = other DNA
atgaaaggagtaacccgtcaaacggggattatcagcgatattgacgaaaccagcgttcgggtgcgggtcacgctc

SEQ ID NO: 773941 - DNA, 75 bp, synthetic construct
  source 1..75: mol_type = other DNA
cgtttgaaatctataagacccgattttcactcaagttgcctgatattgcgggtaatccatttagcgaaatcgatc

SEQ ID NO: 773942 - DNA, 75 bp, synthetic construct
  source 1..75: mol_type = other DNA
tgctattgatagttgggctttttttctcttcgttgagttatgcgaaaaacacggagatgccttcttatgaagaag

SEQ ID NO: 773943 - DNA, 75 bp, synthetic construct
  source 1..75: mol_type = other DNA
cagaacgcacgcacaccacaaacgacaaattctgccagcgatcacgttcagaacgcctcccaaaacaccggaggt

SEQ ID NO: 773944 - DNA, 75 bp, synthetic construct
  source 1..75: mol_type = other DNA
ccttgcgttaatcgtgtaatcatcactttgtttttaccactgatttgttcaggtgtggctttttactctctctac

SEQ ID NO: 773945 - DNA, 75 bp, synthetic construct
  source 1..75: mol_type = other DNA
aaattcattatcaggttaaaaatgctttcctgcgtgagggagattctgatctgttaatctggaacgtgaccggta

SEQ ID NO: 773946 - DNA, 75 bp, synthetic construct
  source 1..75: mol_type = other DNA
agaatgggcagcacgtatcaccccatcactcacagcggctgttcgcgccccggaaattgcccgtagtggcgtttt

SEQ ID NO: 773947 - DNA, 75 bp, synthetic construct
  source 1..75: mol_type = other DNA
aaactactgggaaaccgtattaacaatgggttggaggggaacgtttctaccaaaagtatcggagacattcttgat

SEQ ID NO: 773948 - DNA, 75 bp, synthetic construct
  source 1..75: mol_type = other DNA
ggtggcgtagaacccaagatttatctcattataattgccaacttcgacgagtctcaatcagcaatattaagggtg

SEQ ID NO: 773949 - DNA, 75 bp, synthetic construct
  source 1..75: mol_type = other DNA
agcctgtagtggatcttttaataatagatgaggctcataaaattggtgattcactcagaggaatattcttacagt

SEQ ID NO: 773950 - DNA, 75 bp, synthetic construct
  source 1..75: mol_type = other DNA
gcgaataaaccaacaggcctgacagatggaactgtatatgtaatttacagttcgcacattaaaccgactgctgct

SEQ ID NO: 773951 - DNA, 75 bp, synthetic construct
  source 1..75: mol_type = other DNA
ctgattagcctaggcttttcacgaacttcagcggttatgatatctgaatatattacaagcgataatttagatgag

SEQ ID NO: 773952 - DNA, 75 bp, synthetic construct
  source 1..75: mol_type = other DNA
atgagcgacctgaatcagtttcgtagtaaagggccggaactgttggtagaactggcacagcatacctctgagacc

SEQ ID NO: 773953 - DNA, 75 bp, synthetic construct
  source 1..75: mol_type = other DNA
aggtcccaaagatgtccgtagagaaatcccatgcaatctcgcgcaggatgtttgcacgcactgctgaagatatgg

SEQ ID NO: 773954 - DNA, 75 bp, synthetic construct
  source 1..75: mol_type = other DNA
tacttatatgagagccgtcacagtgttacagaccatgaagcatgcctaaaaaaacaaggggaagtattccactgc

SEQ ID NO: 773955 - DNA, 75 bp, synthetic construct
  source 1..75: mol_type = other DNA
agaccaaggccatccgcgacaatatggggacgattgagtcttcagcggattccctgaagcgtgcctttaagtcga

SEQ ID NO: 773956 - DNA, 75 bp, synthetic construct
  source 1..75: mol_type = other DNA
actggcacagcatacctctgagaccgttcgcgagattattgatattgagcccgattgccgaccagattggtcagg

SEQ ID NO: 773957 - DNA, 75 bp, synthetic construct
  source 1..75: mol_type = other DNA
ttcctatggggatgagatggaagataagccagcgtgaccgtgaaatctatgaggcgtttaacggacgtaaccacc

SEQ ID NO: 773958 - DNA, 75 bp, synthetic construct
  source 1..75: mol_type = other DNA
ggcgggcagtcggtgtatgccggcgtgtatgacgacttgaatgtgaatggcctgcccggtgaaagcactgccatg

SEQ ID NO: 773959 - DNA, 75 bp, synthetic construct
  source 1..75: mol_type = other DNA
ttgctgtcagcctcctgccctccactgtactggcctggaacacgccgggagaagatttcagcggagagcttaagc

SEQ ID NO: 773960 - DNA, 75 bp, synthetic construct
  source 1..75: mol_type = other DNA
tggaaggggcagtgaccagcacccgtaatccgtgggtgtggaaagtcggacagggaaatgaaggcctggaggtta

SEQ ID NO: 773961 - DNA, 75 bp, synthetic construct
  source 1..75: mol_type = other DNA
ctcgcgaattttcactttcgacaaaggcctgtcgatgcttgcaacctgcaagggcgtaggcgggaaacatttcac

SEQ ID NO: 773962 - DNA, 75 bp, synthetic construct
  source 1..75: mol_type = other DNA
tcaggggtgagtcatttcagtgatgacttcctgcgccaggttgaaggcgtgtatggtgcacagactgtggctggc

SEQ ID NO: 773963 - DNA, 75 bp, synthetic construct
  source 1..75: mol_type = other DNA
gggcagccggtgtatgacggcgtgtatgacgacctgaatgcaaatggcctgcctggtgaaagctcggccatgaaa

SEQ ID NO: 773964 - DNA, 75 bp, synthetic construct
  source 1..75: mol_type = other DNA
tccggttatgagaatttcgtctcgcagcttgatatctccgagaacaaagagaagctgaactggctggggaaaatg

SEQ ID NO: 773965 - DNA, 75 bp, synthetic construct
  source 1..75: mol_type = other DNA
cgccgctttccagcatgactggctcggcccgcgcggactgccagaggacaccaccgtggtgtacctggtgacgga

SEQ ID NO: 773966 - DNA, 75 bp, synthetic construct
  source 1..75: mol_type = other DNA
ggcccgcgtggtctggcagaagataccaccgtggcgtacctggtgacggaaggtccggtttcccgcgccctgctg

SEQ ID NO: 773967 - DNA, 75 bp, synthetic construct
  source 1..75: mol_type = other DNA
cgggcaagggcaaacatccaacatcgatttaagcagtgtgcaaaatgtggaagtgctgcgtggccccttctctgc

SEQ ID NO: 773968 - DNA, 75 bp, synthetic construct
  source 1..75: mol_type = other DNA
atggggagagcattacttgtcgcatcagataaaggcggtgtaggaaaaagcaccacagcaacaaacctggcttct

SEQ ID NO: 773969 - DNA, 75 bp, synthetic construct
  source 1..75: mol_type = other DNA
tatctggtaaataattcacgaacggtcatcattctgaagaccgataaaaacaatgatattcttagctggaacgaa

SEQ ID NO: 773970 - DNA, 75 bp, synthetic construct
  source 1..75: mol_type = other DNA
cgcgaagcctctactgataaagacgctacgcttaatctcatcgaaaaatttaagcatgaaatcagcataattcag

SEQ ID NO: 773971 - DNA, 75 bp, synthetic construct
  source 1..75: mol_type = other DNA
catttaagccttgaaaacgtcaaagcgatcgtggttgctgctggcctcaccgtgggcgatatcatcaagatgacg

SEQ ID NO: 773972 - DNA, 75 bp, synthetic construct
  source 1..75: mol_type = other DNA
tatccgaagaaggccgccgcctgtatcagctcgcgctggggccacttgcgctggcatttgcgggagctactgatc

SEQ ID NO: 773973 - DNA, 75 bp, synthetic construct
  source 1..75: mol_type = other DNA
agaaatacgcgctgccggtgctgctctatctcttccgtcgcattgaagaatcgctggatggtagtcctacactca

SEQ ID NO: 773974 - DNA, 75 bp, synthetic construct
  source 1..75: mol_type = other DNA
gtgcagctcttgttctggcgggatgtggtgagaaaggcgattttgaaaaggctatcaacgcgaaaatttcaaaat

SEQ ID NO: 773975 - DNA, 75 bp, synthetic construct
  source 1..75: mol_type = other DNA
accgttctgcaggatacaatgttagtgatgaaatccttaaaggacttgctgaacaagggttgctcactgtttcac

SEQ ID NO: 773976 - DNA, 75 bp, synthetic construct
  source 1..75: mol_type = other DNA
cttgaacacgttgaaatttcgattcgtgatgaagaactgattgccggtaaccgcaccgtaaaaccacgcgccggg

SEQ ID NO: 773977 - DNA, 75 bp, synthetic construct
  source 1..75: mol_type = other DNA
ggtgtggagaacgtgcgccgcccgttagttaatacgctcaatctggccgacctgatgccaacaagcactatctgg

SEQ ID NO: 773978 - DNA, 75 bp, synthetic construct
  source 1..75: mol_type = other DNA
caatgcagtggcgtcgttatgcagactcccgtatctatgcatttgataaaggtctgtcaatgtacccgacctgta

SEQ ID NO: 773979 - DNA, 75 bp, synthetic construct
  source 1..75: mol_type = other DNA
ttgcgttgttagggctagtcctgctgggcatgatgttcgctgtctaccagcgcatggtgaaggactatcacctga

SEQ ID NO: 773980 - DNA, 75 bp, synthetic construct
  source 1..75: mol_type = other DNA
aagaacgccgcagactgtttgaaaaaatgggccagctttatgagggctgcttcattgtcagctttacctggtttc

SEQ ID NO: 773981 - DNA, 75 bp, synthetic construct
  source 1..75: mol_type = other DNA
attgatggcaacatgggccacctgctcgatgcagaagaagacggtctggatatgagcgatttcatgacgtttgaa

SEQ ID NO: 773982 - DNA, 75 bp, synthetic construct
  source 1..75: mol_type = other DNA
ctctgcaatggcgtcgttatgcaggctcacgcatctatgcgtttgataaaggtctgtcgatgtacccgacctgta

SEQ ID NO: 773983 - DNA, 75 bp, synthetic construct
  source 1..75: mol_type = other DNA
ctgctggaatatgatgacgtggctaacgatcagcgtcgcgccatttactcccagcgtaacgaactgctggatgtc

SEQ ID NO: 773984 - DNA, 75 bp, synthetic construct
  source 1..75: mol_type = other DNA
gttactagttttatcaaatacttaccgattgagaaaataaaaatatcagaaaatattggactaggcaacgcactt

SEQ ID NO: 773985 - DNA, 75 bp, synthetic construct
  source 1..75: mol_type = other DNA
ggtagcgggctgggtagctgaaaaccagaccgcgctgctttacctgatgacccgtgaacaacgagcggtcaggca

SEQ ID NO: 773986 - DNA, 75 bp, synthetic construct
  source 1..75: mol_type = other DNA
tttgtatgtgtttagtgaaattaaattagcgaagctaaaatataagttaaaaacagataatatatatggggtggt

SEQ ID NO: 773987 - DNA, 75 bp, synthetic construct
  source 1..75: mol_type = other DNA
aggccgatgtggaagatgccgccatgaactatcgtggcttcacattcccgttgtggggatttcttgccaataccg

SEQ ID NO: 773988 - DNA, 75 bp, synthetic construct
  source 1..75: mol_type = other DNA
tatggcggcgatctggacgggataagcgaaaaactgccgtatctgaaaaagcttggcgtgacggcgctgtatctc

SEQ ID NO: 773989 - DNA, 75 bp, synthetic construct
  source 1..75: mol_type = other DNA
cggtgcccccatttgttaaacaaagcaaagatcaactgctcattacactgtggctgacgggcgaagacccaccgc

SEQ ID NO: 773990 - DNA, 75 bp, synthetic construct
  source 1..75: mol_type = other DNA
ttctggaggtttctctcgacagaactcgcctggaacagatgccggtcaatgaatatctcgacctgtacgtcattt

SEQ ID NO: 773991 - DNA, 75 bp, synthetic construct
  source 1..75: mol_type = other DNA
ctcaataacccggctgaccgcgaccactgcattcagtacatggtggcgatcccgctgctgttcgggcgcttaacg

SEQ ID NO: 773992 - DNA, 75 bp, synthetic construct
  source 1..75: mol_type = other DNA
ccgcttccagcgcccgtacggttcttacgtcatggaaaatgtgctgttcaaaatctccttcccggcggagttcca

SEQ ID NO: 773993 - DNA, 75 bp, synthetic construct
  source 1..75: mol_type = other DNA
ttaggtatacagttagcgagcataaagatattctgcaatatgcaaagagaagaaatccatttaatcatatgacag

SEQ ID NO: 773994 - DNA, 75 bp, synthetic construct
  source 1..75: mol_type = other DNA
tcaggcggtggatattgaagtcagccgtcacgaagacttttcgtcggtgattcagtcacgacgcgcctggtttag

SEQ ID NO: 773995 - DNA, 75 bp, synthetic construct
  source 1..75: mol_type = other DNA
atgggtcacgcattaaaaaaggcagatcgcttgtacattccgcctcgtgacaaatccacggtggcgaaacctcgt

SEQ ID NO: 773996 - DNA, 75 bp, synthetic construct
  source 1..75: mol_type = other DNA
tctcttatgatccgcagcaaattgacgcccaaacctgtatggcctggatggataattaccgcgcagggctttctc

SEQ ID NO: 773997 - DNA, 75 bp, synthetic construct
  source 1..75: mol_type = other DNA
ctgctggtgaaaaacgtagcccattttgaagaccggatcggctatacaacacgaatgatattaggagtacccaac

SEQ ID NO: 773998 - DNA, 75 bp, synthetic construct
  source 1..75: mol_type = other DNA
cgactggtatgcgttttcactgccgaaaatgaaagccagtaaagaagttacaacggacgatgagttacgtatctg

SEQ ID NO: 773999 - DNA, 75 bp, synthetic construct
  source 1..75: mol_type = other DNA
gttcgatgatatctgcaaagcaatcaccgaagacatcgctgacgatatcggcaatccattaagcaaagaggaagg

SEQ ID NO: 774000 - DNA, 75 bp, synthetic construct
  source 1..75: mol_type = other DNA
catgtttttctttatggcttttaagcggatgctctgtacaggaaatcactgagtggaatcagaaaatcagtgacc

SEQ ID NO: 774001 - DNA, 75 bp, synthetic construct
  source 1..75: mol_type = other DNA
gatacaccaacgcatctggcgctctaccgtcgctatgccgaaattggcggtattgtgcatacccactcgcgccac

SEQ ID NO: 774002 - DNA, 75 bp, synthetic construct
  source 1..75: mol_type = other DNA
atgaccgccgacgatatggtggtggttgagatagccagcggtaaggtggtggaaggcagcaaaaaaccctcttcc

SEQ ID NO: 774003 - DNA, 75 bp, synthetic construct
  source 1..75: mol_type = other DNA
gtttacgccgcaaggcttcagccgtataccgcccgctcgactggaacagtttgccgttgatgcaccggatattgg

SEQ ID NO: 774004 - DNA, 75 bp, synthetic construct
  source 1..75: mol_type = other DNA
atggcgggcggcgatctctccagcggacaaccccggcggcgttatagtttcaaattgctttggcacgatcgccag

SEQ ID NO: 774005 - DNA, 75 bp, synthetic construct
  source 1..75: mol_type = other DNA
aaagcaccgtggaatatggacggttggcggctggatgtggtgcatatgctgggagaagcgggtggggcgcgcaat

SEQ ID NO: 774006 - DNA, 75 bp, synthetic construct
  source 1..75: mol_type = other DNA
agtacggaagaatattggaatggtgcgttaaactggttctcatctggggaaacaaggaacgcattaattattgaa

SEQ ID NO: 774007 - DNA, 75 bp, synthetic construct
  source 1..75: mol_type = other DNA
aaagaaggtcacgggcaactgacggacgggattctggctttgcctgccatttcggctacggtgtggatgaattaa

SEQ ID NO: 774008 - DNA, 75 bp, synthetic construct
  source 1..75: mol_type = other DNA
atgttgcgcgcctgccgctggcggtggtctggctgctcacctggcctggcgtaccctgtatttattacggtgatg

SEQ ID NO: 774009 - DNA, 75 bp, synthetic construct
  source 1..75: mol_type = other DNA
agaggtggcgctggcacgacagaaactgggctggcatcatccgccatttgagatccccaaagagatttatcacgc

SEQ ID NO: 774010 - DNA, 75 bp, synthetic construct
  source 1..75: mol_type = other DNA
gcgattcttgaagcgcaaagcgtaaaagataagccgtcgttgattatctgccgtacggtgattggctttggttca

SEQ ID NO: 774011 - DNA, 75 bp, synthetic construct
  source 1..75: mol_type = other DNA
ccttctaacgttgcggctcgcgtggcgggggaagcaggtattgccgattactggtacaagtatgttggtctgaaa

SEQ ID NO: 774012 - DNA, 75 bp, synthetic construct
  source 1..75: mol_type = other DNA
ttacaactgttaagtgatgcgcttggcgagcagtatgcgcagcatggcaactggcgcttcctgcgcaacaatgat

SEQ ID NO: 774013 - DNA, 75 bp, synthetic construct
  source 1..75: mol_type = other DNA
gctatcgacaaagcattaaaaccggtcggactgagcggcatgttcggtaaaggcggctatatggatggccctggt

SEQ ID NO: 774014 - DNA, 75 bp, synthetic construct
  source 1..75: mol_type = other DNA
ccgtataccgcgacgttcctgatgtttgttgaatacgcccgtaacgccgcgcggatggcggcactgatgaaagcg

SEQ ID NO: 774015 - DNA, 75 bp, synthetic construct
  source 1..75: mol_type = other DNA
tctgtttctgttgtgttttttgtgggagcaattgtgggatggattttggtgtctgaaatatattgcgtattaccg

SEQ ID NO: 774016 - DNA, 75 bp, synthetic construct
  source 1..75: mol_type = other DNA
gggcaacggatgccgccggttttatggcgcggatggataccgttctgcagatgtacggagggaaaaaaggtgcga

SEQ ID NO: 774017 - DNA, 75 bp, synthetic construct
  source 1..75: mol_type = other DNA
actggacggaaatatcgggatattcctgctgaaatgtcgtatgcgccgggagaacaaattaagggagggcaagaa

SEQ ID NO: 774018 - DNA, 75 bp, synthetic construct
  source 1..75: mol_type = other DNA
cgattcgcgcactcagtatggatgcggtgcaaaaagccaattctggtcatcccggcgcgccgatgggcatggccg

SEQ ID NO: 774019 - DNA, 75 bp, synthetic construct
  source 1..75: mol_type = other DNA
cgcatggcgcaccactgggggaagaagaagtggcattggcacggcaaaaactgggctggcatcatccgccatttg

SEQ ID NO: 774020 - DNA, 75 bp, synthetic construct
  source 1..75: mol_type = other DNA
acggttcaacaagcatttaaatgcgacacaagtgcacactctggtcaactgggtgtgtgtctagtaatgaaccag

SEQ ID NO: 774021 - DNA, 75 bp, synthetic construct
  source 1..75: mol_type = other DNA
cgctttgtctttcagatcctgcgttcatttgaacacgataattcggaagataaacccggcccgggtatgccaccg

SEQ ID NO: 774022 - DNA, 75 bp, synthetic construct
  source 1..75: mol_type = other DNA
cgcaccacaaaatacctgaaaactgcagccagcgccgattctgccagcgtacagtttgaaggtagggtgcagcgc

SEQ ID NO: 774023 - DNA, 75 bp, synthetic construct
  source 1..75: mol_type = other DNA
caggatgcagcgcaatccagatggcagcagttatgagccgcgcagggtaacagcacgcagcaaaaaggggcgcat

SEQ ID NO: 774024 - DNA, 75 bp, synthetic construct
  source 1..75: mol_type = other DNA
gcagtttgaaggtaaggtgcagcgcattgcccgtgttcaccattatggactgcgtgatcgtgtcagtaaacgtgg

SEQ ID NO: 774025 - DNA, 75 bp, synthetic construct
  source 1..75: mol_type = other DNA
tgcgcgatcgtgtcagtcgcaaaggacctgaggtccgttacgcagagcgtcgccttctgggtgtaaatgatgatg

SEQ ID NO: 774026 - DNA, 75 bp, synthetic construct
  source 1..75: mol_type = other DNA
gtgtcgcaaaattatccaccaggattttattcaccaactgcgacgaggcgacgccgaccaggtgtttgccttgtt

SEQ ID NO: 774027 - DNA, 75 bp, synthetic construct
  source 1..75: mol_type = other DNA
gtgtcgcaaaattatccaccaggattttatcaaccaactgcaacagggcgacgccgaccaggtgcttgccttgtt

SEQ ID NO: 774028 - DNA, 75 bp, synthetic construct
  source 1..75: mol_type = other DNA
ggtcaaacggctggtggacggcacgcacaaactggcggcgggcgatttcactacccgcgtaacgcccaccagtga

SEQ ID NO: 774029 - DNA, 75 bp, synthetic construct
  source 1..75: mol_type = other DNA
ataacttacttgaaaacagcctgcgctacactgacagcggcggcagcctgaaaatctctgccgagcagcacgaca

SEQ ID NO: 774030 - DNA, 75 bp, synthetic construct
  source 1..75: mol_type = other DNA
tcgataaacaacagcggcaaaccagctggttgattgtcgctctggcaacgttactcgcggcactcgccacttttc

SEQ ID NO: 774031 - DNA, 75 bp, synthetic construct
  source 1..75: mol_type = other DNA
tctgatgaaggcgctctcgcctaccagaaatcgtcggtggatctgatcccgctactggaagtcgcgggtggcgca

SEQ ID NO: 774032 - DNA, 75 bp, synthetic construct
  source 1..75: mol_type = other DNA
ctgacccgcaataccgacatcaattttgacagacaacagaggcaaaccagttggctgattgtcgctttatctacc

SEQ ID NO: 774033 - DNA, 75 bp, synthetic construct
  source 1..75: mol_type = other DNA
cagttacaaaaattgtttgagcgtttttatcgcacggaaggttcccgcaaccgtgccagcggcggctccgggctg

SEQ ID NO: 774034 - DNA, 75 bp, synthetic construct
  source 1..75: mol_type = other DNA
gtctgaaatatattacagccgcatgaccggtctgaatgaatcatcagaaatatcagaggagaccagtaatgaaag

SEQ ID NO: 774035 - DNA, 75 bp, synthetic construct
  source 1..75: mol_type = other DNA
ataacgggattttttacagccacagtggttttttatatgttttatgtcttgatttattactttgatcggatgggg

SEQ ID NO: 774036 - DNA, 75 bp, synthetic construct
  source 1..75: mol_type = other DNA
tggtatttatggataaaaacatgtgggccggttctcctgatttgacgctgtcagtaataacgggattttttacag

SEQ ID NO: 774037 - DNA, 75 bp, synthetic construct
  source 1..75: mol_type = other DNA
tgaatttaactacggtctggattacctgaaaaaatgcgttggcgggagcgaaattcccttatgtaaatgccaacg

SEQ ID NO: 774038 - DNA, 75 bp, synthetic construct
  source 1..75: mol_type = other DNA
ttcaatccgattattcatggttgagtgacaatcacaaatatgacaacacccttattaatggaagtatattatcga

SEQ ID NO: 774039 - DNA, 75 bp, synthetic construct
  source 1..75: mol_type = other DNA
cggttaatataacacataaacctctgaacattgtgattgtacaagttggcctctattttaaaaaagtaggtgtca

SEQ ID NO: 774040 - DNA, 75 bp, synthetic construct
  source 1..75: mol_type = other DNA
atattaaatcttatcccggcgattacatttagtctaaaaatatcattttttcttcgttctcttatgttattgccg

SEQ ID NO: 774041 - DNA, 75 bp, synthetic construct
  source 1..75: mol_type = other DNA
tcaacagtccggcaggttcactggatgttgccgaccgacaaatggttgaaatcatgcgcggattgatgcgcgatt

SEQ ID NO: 774042 - DNA, 75 bp, synthetic construct
  source 1..75: mol_type = other DNA
tcaacgttgatgaaaatcattgctggtattacccctgcagatagcggagtcattgagattgagggcgtccgttgt

SEQ ID NO: 774043 - DNA, 75 bp, synthetic construct
  source 1..75: mol_type = other DNA
gacttgccgtgttgttatcaggctgcggtgaaaaaggcgactttgagaaagcgataaacgagcatatatcaaaat

SEQ ID NO: 774044 - DNA, 75 bp, synthetic construct
  source 1..75: mol_type = other DNA
gcccacaacatgccgccggaacgccggtgctgacactggaaaccgcgaaagataatgccaccctggaacgttatc

SEQ ID NO: 774045 - DNA, 75 bp, synthetic construct
  source 1..75: mol_type = other DNA
tgtagacacaatcatgcacgtggcgtttggtggtcatatgtcagggaagacatcacattcaggagaggttatatg

SEQ ID NO: 774046 - DNA, 75 bp, synthetic construct
  source 1..75: mol_type = other DNA
catcgcgctttctgggaaaacggtagatctgaccactgaagagattatccaggccatcatgcctgtctcacgtac

SEQ ID NO: 774047 - DNA, 75 bp, synthetic construct
  source 1..75: mol_type = other DNA
gtaatttttatactgatctcaatgaattcgtcagaaataagaaggttgatctagttatcctctcagaaaatgttt

SEQ ID NO: 774048 - DNA, 75 bp, synthetic construct
  source 1..75: mol_type = other DNA
cgctcagggattcagccaggtgctggatatgcacgttattttcaggtctgtccgctaatctgtcagccggacagc

SEQ ID NO: 774049 - DNA, 75 bp, synthetic construct
  source 1..75: mol_type = other DNA
gggggaagagtaaaggcatttgcctcgctcagggattcagccaggtgctggatatgcacgttattttcaggtctg

SEQ ID NO: 774050 - DNA, 75 bp, synthetic construct
  source 1..75: mol_type = other DNA
cgctgcaaactggagcctgtttacttcgcacatccgcgagaaaagcatgactgatgaacaggccgaagaggaagc

SEQ ID NO: 774051 - DNA, 75 bp, synthetic construct
  source 1..75: mol_type = other DNA
gtctgaaatatattacagccgcatgaccagcctgaataaattatcagaaatatcagagggaacttatgatgaaag

SEQ ID NO: 774052 - DNA, 75 bp, synthetic construct
  source 1..75: mol_type = other DNA
tctgtttctgttgtgttttttgtggggcaattgtgggatggatttcggtgtctgaaatatattacagccgcagga

SEQ ID NO: 774053 - DNA, 75 bp, synthetic construct
  source 1..75: mol_type = other DNA
gtgcgaaataagcaggtgatgttattcattgccggaatatccggcatatccggcatcgcgacgggaataatcgtc

SEQ ID NO: 774054 - DNA, 75 bp, synthetic construct
  source 1..75: mol_type = other DNA
tcgcaaaggtagcgcaaggaaagaagaggaaggtacgacaaccgagaagctgctcaatgatatgcaagagctgct

SEQ ID NO: 774055 - DNA, 75 bp, synthetic construct
  source 1..75: mol_type = other DNA
tgttttattgataacgagcagagggataatacattattaatgattggcaaagtaattgattataaggaggatgtt

SEQ ID NO: 774056 - DNA, 75 bp, synthetic construct
  source 1..75: mol_type = other DNA
cttctttattacaatctaaatttgttaagattgaattaaaaaagaaatacgccaaattattattggatttattag

SEQ ID NO: 774057 - DNA, 75 bp, synthetic construct
  source 1..75: mol_type = other DNA
gtaaaaaagttgacttaatagttttttccgaaaatgtatttttcggacataaaaatgactatataaaaaagaaaa

SEQ ID NO: 774058 - DNA, 75 bp, synthetic construct
  source 1..75: mol_type = other DNA
atatattcaatacgcccgaagctttagactccccatttatatattatgataaagaaataaaagattctaaatact

SEQ ID NO: 774059 - DNA, 75 bp, synthetic construct
  source 1..75: mol_type = other DNA
agcaccaaagagttcattaattaatgtgcaaaactatggaggtactattgttgtagataaaaactggaatattga

SEQ ID NO: 774060 - DNA, 75 bp, synthetic construct
  source 1..75: mol_type = other DNA
gcgtggtggcaaagaaacctgccgcactaacgctgcaacggtggcggtgattcaggacgccctgaactcttgtgg

SEQ ID NO: 774061 - DNA, 75 bp, synthetic construct
  source 1..75: mol_type = other DNA
gcgtaccgctgggggtgattggcgtgatttatgaagctcgcccgaacgtgacggttgatgtcgcttcgctgtgcc

SEQ ID NO: 774062 - DNA, 75 bp, synthetic construct
  source 1..75: mol_type = other DNA
gaagatagtaaaggaactcagtttcggatatatgatgattgccgagaggaagggcaattctcgcttggattatgg

SEQ ID NO: 774063 - DNA, 75 bp, synthetic construct
  source 1..75: mol_type = other DNA
cactgttagccagttgcgtaccgaagcaacaaagcttgccgcacgcctggacgccgcaaagcacaccgctgatct

SEQ ID NO: 774064 - DNA, 75 bp, synthetic construct
  source 1..75: mol_type = other DNA
tacacgcagatgcagctgcactggcgcagttgcaggcaggccctgcgaaggtggttgctgttaaagccgaagagt

SEQ ID NO: 774065 - DNA, 75 bp, synthetic construct
  source 1..75: mol_type = other DNA
agtggcctgcgtctggagcgccgtcgcgtgccgctgggggtgattggcgtgatttatgaagcgcgtccgaatgtg

SEQ ID NO: 774066 - DNA, 75 bp, synthetic construct
  source 1..75: mol_type = other DNA
gcgggaatatcggaaatgacatggaagtccgctacacgcaaaacggtaaagcgatcggtaacttcccgttagctg

SEQ ID NO: 774067 - DNA, 75 bp, synthetic construct
  source 1..75: mol_type = other DNA
agcaaggccagcagcagaaagcgccaccgcctcaaaataataacgggaataatccgccgccgatggacttcgacg

SEQ ID NO: 774068 - DNA, 75 bp, synthetic construct
  source 1..75: mol_type = other DNA
aacgcactgtcaagggcgcattactgactaacttgctgtttgttttagggatattcctaagccagtgggcagcat

SEQ ID NO: 774069 - DNA, 75 bp, synthetic construct
  source 1..75: mol_type = other DNA
gcaaataatagcctatgcaataggttttattagacgagatatagatggatgtgtgtttgtttcggaagactggag

SEQ ID NO: 774070 - DNA, 75 bp, synthetic construct
  source 1..75: mol_type = other DNA
ttcctttgccagcgtggcgttatttgccgccgccccacccgccgaaagttggctgcggttaatgccggcggctgg

SEQ ID NO: 774071 - DNA, 75 bp, synthetic construct
  source 1..75: mol_type = other DNA
gattactggaacatgccagtttactctggcagcctgaaacaaacgatgccattcgtgcagcacatgagggggtga

SEQ ID NO: 774072 - DNA, 75 bp, synthetic construct
  source 1..75: mol_type = other DNA
agcacgtgtaatacggtagaaacgttgctggtgaataaaaacatcgcagatagcttcctgcccgcattaagcaaa

SEQ ID NO: 774073 - DNA, 75 bp, synthetic construct
  source 1..75: mol_type = other DNA
gaacgtgacgagtttatgcaggagcttgggctggaagagccgggcctgaaccgtgtgatccgtgccggttataag

SEQ ID NO: 774074 - DNA, 75 bp, synthetic construct
  source 1..75: mol_type = other DNA
ctgactaacagcggtgtgttgtacatcaccgatgatggtaaacatatcattcaggggccaatgtatgacgttagc

SEQ ID NO: 774075 - DNA, 75 bp, synthetic construct
  source 1..75: mol_type = other DNA
tgttcaggcggatgatgcggcaatacaacaaacgttagccaaaatgggcatcaaaagcagcgatattcagtccgc

SEQ ID NO: 774076 - DNA, 75 bp, synthetic construct
  source 1..75: mol_type = other DNA
ggcaacagcggcacctgattggggggccttattctcctgaaatacgacaactattgggactcactgcgcgtaacc

SEQ ID NO: 774077 - DNA, 75 bp, synthetic construct
  source 1..75: mol_type = other DNA
ggtcaggcagcggtacaactcgcggcaacgctggacgtagttactcagaaggccaatgagttgggtgtgccggtc

SEQ ID NO: 774078 - DNA, 75 bp, synthetic construct
  source 1..75: mol_type = other DNA
tttgcaggcgttcaatagcgcgacggggctgattcaggaagagcctcagctcgggctggaaacggttttgtgcct

SEQ ID NO: 774079 - DNA, 75 bp, synthetic construct
  source 1..75: mol_type = other DNA
atgtttatgcaatctattaacttccgtaccgcacgcagcaatcttaccgaagtgctcaacaatgttgaagccgga

SEQ ID NO: 774080 - DNA, 75 bp, synthetic construct
  source 1..75: mol_type = other DNA
ccggtaatttcagctccggtcagcagccggaagcagccttttccggaacaagctatgtgcaaaggattggttatt

SEQ ID NO: 774081 - DNA, 75 bp, synthetic construct
  source 1..75: mol_type = other DNA
attgaacaggggcgaagtatatcccgtgatgaggctgttaaagatgcacaacagaaatctgctgaaatttctgcc

SEQ ID NO: 774082 - DNA, 75 bp, synthetic construct
  source 1..75: mol_type = other DNA
acttggcgtccagcttggcgttagcggtactccggcaattgtgctgagcaatggcacacttgttccgggttacca

SEQ ID NO: 774083 - DNA, 75 bp, synthetic construct
  source 1..75: mol_type = other DNA
gccgcgaacagtcgacaatcccggtgatcacaggtggtataggcgtatgccatatttacgttgatgaaagtgtag

SEQ ID NO: 774084 - DNA, 75 bp, synthetic construct
  source 1..75: mol_type = other DNA
gtggtggcggttaaagccgaagagtatgacgatgaatttctgtcattagatttgaacgttaaaatcgtcagcgat

SEQ ID NO: 774085 - DNA, 75 bp, synthetic construct
  source 1..75: mol_type = other DNA
gggaaatggacccggtggcgatgcgaccgatgctggaacgcactgtcaagggagcgttactgactaacctgctgt

SEQ ID NO: 774086 - DNA, 75 bp, synthetic construct
  source 1..75: mol_type = other DNA
aagagctggtctggtggcatggacggagtagttttaaggggcaggttattgcaccggcatgcactctggcaatgg

SEQ ID NO: 774087 - DNA, 75 bp, synthetic construct
  source 1..75: mol_type = other DNA
aagtttaatttatccggtcaggcaaaaggcattaatctgcagatagctgatgccaggggaaatattgcccgggca

SEQ ID NO: 774088 - DNA, 75 bp, synthetic construct
  source 1..75: mol_type = other DNA
aaagagcaatttagctattggcagtacaatgcttacagacacggtcttactatggaacagttgaataggccattt

SEQ ID NO: 774089 - DNA, 75 bp, synthetic construct
  source 1..75: mol_type = other DNA
gcaaaaattctgggcagtgggctgctgcgtggtctgatgatggccggacgggcggtattgtttcttggccgtgcg

SEQ ID NO: 774090 - DNA, 75 bp, synthetic construct
  source 1..75: mol_type = other DNA
tgatattttccgggctgagcacttctcaggttcagatgcttcatcagcctcctggcacgataactgctcatcggg

SEQ ID NO: 774091 - DNA, 75 bp, synthetic construct
  source 1..75: mol_type = other DNA
aaggacttgtctggtggcatggacggacgagttttaaggggcaggtcatcgctccggcctgcacgctggccatgg

SEQ ID NO: 774092 - DNA, 75 bp, synthetic construct
  source 1..75: mol_type = other DNA
gcgcatcccatggcagcgtaaagacctacatgacaggctttatcctgtcgataatcctgacggtaattccgttct

SEQ ID NO: 774093 - DNA, 75 bp, synthetic construct
  source 1..75: mol_type = other DNA
agtgccagtacgttattcagtatgggcatttaccgacgtatcattaaccagaatgctgagccacaacaactggtt

SEQ ID NO: 774094 - DNA, 75 bp, synthetic construct
  source 1..75: mol_type = other DNA
tgcgtttcatctgtatcaggatttaccgaaagccgacatggcctacccgacgctggtcaataacgttctgccagt

SEQ ID NO: 774095 - DNA, 75 bp, synthetic construct
  source 1..75: mol_type = other DNA
aggggctggattataccctgcgggttgtccgtaatggtaagccgttaaaggcgggagattattatgccgcattac

SEQ ID NO: 774096 - DNA, 75 bp, synthetic construct
  source 1..75: mol_type = other DNA
gttcgcgatttgcaggacagtttttccggtcctgagaaacgtttccggttgcgactacgtaactgtgagctggcg

SEQ ID NO: 774097 - DNA, 75 bp, synthetic construct
  source 1..75: mol_type = other DNA
atgagtcattctaccgatggcagcgtaaaaacctacatgacaggctttatcctgtcgatcattctgacggtgatt

SEQ ID NO: 774098 - DNA, 75 bp, synthetic construct
  source 1..75: mol_type = other DNA
cggcatcggctaccgaaggcgaaatcacttctgcgctgaaactgagcctgcacgaactggagaagatgatggagc

SEQ ID NO: 774099 - DNA, 75 bp, synthetic construct
  source 1..75: mol_type = other DNA
tccgctggtcgctcttctggcgttaatcaccgcaggattgctgcaaattctctctaacctcgccaatgattacgg

SEQ ID NO: 774100 - DNA, 75 bp, synthetic construct
  source 1..75: mol_type = other DNA
ggtttcctgattcttggcgggttgtcgatcattgccgctatcacctacaccgtgggcaatcgtccttatggttat

SEQ ID NO: 774101 - DNA, 75 bp, synthetic construct
  source 1..75: mol_type = other DNA
tgacgggaaaggtgcggcctttaaaaagcaatgggaggctgcgggggcaaaaggcgacggtgaagcacagcaaaa

SEQ ID NO: 774102 - DNA, 75 bp, synthetic construct
  source 1..75: mol_type = other DNA
cgtgggcaatcgtccttatggttatatcggtctgggtgatatttccgtactggttttctttggctggttgagcgt

SEQ ID NO: 774103 - DNA, 75 bp, synthetic construct
  source 1..75: mol_type = other DNA
tccgctggtcgccctgctggcactgattaccgccgggctattacagatcctttctaacctcgccaatgattacgg

SEQ ID NO: 774104 - DNA, 75 bp, synthetic construct
  source 1..75: mol_type = other DNA
ggcaacagcggttctgaacattaataacctgcgtgatatcaatagcgaccgcgagaatggcaaaaacacgctggt

SEQ ID NO: 774105 - DNA, 75 bp, synthetic construct
  source 1..75: mol_type = other DNA
aaacaatattcatcgtttgaatcccagctacgcgatatcagtgtcaccggtgatctggattcaaggcaggaacag

SEQ ID NO: 774106 - DNA, 75 bp, synthetic construct
  source 1..75: mol_type = other DNA
gccgtctgtcagcagtatcagccaccggtgatgcgttgaaggctaaccgcctggcgctctatggtcagggtgcag

SEQ ID NO: 774107 - DNA, 75 bp, synthetic construct
  source 1..75: mol_type = other DNA
ccatcaaaggcgcggcatcgacgaccgagggcgaaatcacctctgcgctgaaactgagcctgcacgaacttgaaa

SEQ ID NO: 774108 - DNA, 75 bp, synthetic construct
  source 1..75: mol_type = other DNA
ggctgcgtgatatcgccgtgacgggggatctggacagtaagcaggaggcagcaattggcaatgccattcgtcagg

SEQ ID NO: 774109 - DNA, 75 bp, synthetic construct
  source 1..75: mol_type = other DNA
tggtgattaaagggatgatggcgggttcgctgttgtcggctattggcggaacgcaaaaaaccttaaaagggctgg

SEQ ID NO: 774110 - DNA, 75 bp, synthetic construct
  source 1..75: mol_type = other DNA
gatctgccagcgaagttcaccgacttcggtggccatcttatcgacgggttaataaacggcatcaaaaacaaatgg

SEQ ID NO: 774111 - DNA, 75 bp, synthetic construct
  source 1..75: mol_type = other DNA
atggaccgttccgaaggagcacagcaaaacgaaggtcgcaatattccggcccataccggaagcgatcctgccgtt

SEQ ID NO: 774112 - DNA, 75 bp, synthetic construct
  source 1..75: mol_type = other DNA
gcagtacggcagattagcgcacaggaggctaaaacaccctcaatggtcattgcatgacatccggcgcacctttac

SEQ ID NO: 774113 - DNA, 75 bp, synthetic construct
  source 1..75: mol_type = other DNA
acaatacggcagatttacgcacaaaaaattaaaccatcctcactggtccctgcacgatatacggcgcacgtttac

SEQ ID NO: 774114 - DNA, 75 bp, synthetic construct
  source 1..75: mol_type = other DNA
caacattcgtgaaaccgaagcgatcggccacgttgttcgctgctttgagaatgacaatatcattcacgtttccgg

SEQ ID NO: 774115 - DNA, 75 bp, synthetic construct
  source 1..75: mol_type = other DNA
ctccaggatttccggggcggttcagcctttcttaatgacggtggaaacctgagcgtcaggcattcaaccagtggc

SEQ ID NO: 774116 - DNA, 75 bp, synthetic construct
  source 1..75: mol_type = other DNA
aggctaaaacaccctcactggtcactgcatgacatccggcgcacctttacaacgatgctgaacgatttaggcgtg

SEQ ID NO: 774117 - DNA, 75 bp, synthetic construct
  source 1..75: mol_type = other DNA
gccaagaaaaaatcttcatcgcacctttctccgcgccgtcagtgcgccggagtttctccctgtcaccccgtgagg

SEQ ID NO: 774118 - DNA, 75 bp, synthetic construct
  source 1..75: mol_type = other DNA
taaagagcttggggaattactccgcaccctggatgaaaaaatattcccgccgtactacagcgccttaattcgcct

SEQ ID NO: 774119 - DNA, 75 bp, synthetic construct
  source 1..75: mol_type = other DNA
tttaacttggtatttcacttacaggtcaggaacaggtaggcaggtatctcctgaacgtctgaggctgggcaatta

SEQ ID NO: 774120 - DNA, 75 bp, synthetic construct
  source 1..75: mol_type = other DNA
cagaaagcgttaaagcccgtaacggttggcgatgcgcttacctactggcttgagtcttacgtaaaggaaaaccgc

SEQ ID NO: 774121 - DNA, 75 bp, synthetic construct
  source 1..75: mol_type = other DNA
gatcctcacgtcgtggagcagcttacaggccaccagatgccaggaatgcagcgagtttataatcattcccgttat

SEQ ID NO: 774122 - DNA, 75 bp, synthetic construct
  source 1..75: mol_type = other DNA
aggctagcgtatcgcagtacggcagattagcgcacaggaggctaaaacaccctcaatggtcattgcatgacatcc

SEQ ID NO: 774123 - DNA, 75 bp, synthetic construct
  source 1..75: mol_type = other DNA
gccaaaggcggcgataaagacgcgaaagccgaactggcagtactggaaaaatgccttccacagctggaaaacgcg

SEQ ID NO: 774124 - DNA, 75 bp, synthetic construct
  source 1..75: mol_type = other DNA
agaaactaattaaagaaatcagggagcgaatcggcagcctggacgtgcgagacaatattgagcgtcgggcttatg

SEQ ID NO: 774125 - DNA, 75 bp, synthetic construct
  source 1..75: mol_type = other DNA
atgaccacttttaccgacgaggacaaagaactaattaaagaaatcagagagcgaattggcagcttggacgtgcga

SEQ ID NO: 774126 - DNA, 75 bp, synthetic construct
  source 1..75: mol_type = other DNA
aactgacggagcgtgtgctagtcagcactgacggcagtgtgtcgaacgttgaagcggtagcggaacctgatgaac

SEQ ID NO: 774127 - DNA, 75 bp, synthetic construct
  source 1..75: mol_type = other DNA
tcgccagcggcaaagcgccgttgaccatgaaacaggtgctgaccgcaatgatcaaagcccatgaaattcagggct

SEQ ID NO: 774128 - DNA, 75 bp, synthetic construct
  source 1..75: mol_type = other DNA
cactgacggcagtgtgtcgagtgttgaagctgtagcggaacccgatgaacctgaagaaatgtggacggtaaaacg

SEQ ID NO: 774129 - DNA, 75 bp, synthetic construct
  source 1..75: mol_type = other DNA
cactgacggcagtgtgtcgagcgttgaggctgtagcggaacccgatgaatctgaagaaatgtggacggtgaaacg

SEQ ID NO: 774130 - DNA, 75 bp, synthetic construct
  source 1..75: mol_type = other DNA
gggtatcaggcagttgaattatggctgcgtaaacgcgcgcgattaaattcaaagagtaaacaaaatgacactgag

SEQ ID NO: 774131 - DNA, 75 bp, synthetic construct
  source 1..75: mol_type = other DNA
acggcaaattagcttgcgccatgctggaatcggttcagatggtttacggcgacgcccatgttgaggcagtggaat

SEQ ID NO: 774132 - DNA, 75 bp, synthetic construct
  source 1..75: mol_type = other DNA
gtgagcattcacaatcatgacgagtggctaatcgccgtggatttacagtgcggtagcccgtggaatgcagcagcg

SEQ ID NO: 774133 - DNA, 75 bp, synthetic construct
  source 1..75: mol_type = other DNA
cagcccgatgcaatcaataacccggtgttacgggaaaagttattcacctttgaggtggatattttgcgcaacgat

SEQ ID NO: 774134 - DNA, 75 bp, synthetic construct
  source 1..75: mol_type = other DNA
cactgacgggagtgtgtcgagtgttgaagcggtagcggaacccgatgaacctgatgaaatgtggacggtgaaacg

SEQ ID NO: 774135 - DNA, 75 bp, synthetic construct
  source 1..75: mol_type = other DNA
cagcccgatgccatcaataacccggtgttacgggaaaagctattcacctttgaggtggatattctgcgcaacgat

SEQ ID NO: 774136 - DNA, 75 bp, synthetic construct
  source 1..75: mol_type = other DNA
gcgttacggcgtcaccgctactgaccttttcagtccctgcatcaatctttccgtctacgaaaaaatcatcactga

SEQ ID NO: 774137 - DNA, 75 bp, synthetic construct
  source 1..75: mol_type = other DNA
atgaataacaccaaaaaatcactaaaggtactctttattgaagaatcctggcatattcatatgattcattcaaaa

SEQ ID NO: 774138 - DNA, 75 bp, synthetic construct
  source 1..75: mol_type = other DNA
tggacgcggacgatgcagaagcggcgtcttagcggcaagattgaagatttttcccggcggttgtggggaagcagt

SEQ ID NO: 774139 - DNA, 75 bp, synthetic construct
  source 1..75: mol_type = other DNA
atgtctgccacagctagaaaacgcaggtatgctgcgcgcgctggatttaagcgcagaagagaaagcggctattcg

SEQ ID NO: 774140 - DNA, 75 bp, synthetic construct
  source 1..75: mol_type = other DNA
ttacaatcgcctattccgacttcaaaaatatatagagaagaatttattttctcttgaagaagttgttgagaatac

SEQ ID NO: 774141 - DNA, 75 bp, synthetic construct
  source 1..75: mol_type = other DNA
cagttctggctgatgtgctcccggttacgatgttagatggtgacgatcgtgtcgaaaaaccagagggtgttattg

SEQ ID NO: 774142 - DNA, 75 bp, synthetic construct
  source 1..75: mol_type = other DNA
tgatgtgctcccggttacgatgttagatggtgacgatcgtgtcgaaaaaccagagggtgttattgcacagccatc

SEQ ID NO: 774143 - DNA, 75 bp, synthetic construct
  source 1..75: mol_type = other DNA
taccgtgtgctagttctggtggatgcggataagccgcccaccccggcgacggtcgaggccttccaggccgcgggt

SEQ ID NO: 774144 - DNA, 75 bp, synthetic construct
  source 1..75: mol_type = other DNA
caacgctggacgtggttactcagaaggccaatgagctgggtgtgccggtcggtggtcggactcaagccttactgg

SEQ ID NO: 774145 - DNA, 75 bp, synthetic construct
  source 1..75: mol_type = other DNA
tttgcaggcgttcaacagcgtgacggggctggttcaggaagagccccagttcggactggaaacggttctctgtct

SEQ ID NO: 774146 - DNA, 75 bp, synthetic construct
  source 1..75: mol_type = other DNA
gaaaataatggctttaaatatgatgtcattataagaactcgcccagatatgtttattacgaaagagttcgatata

SEQ ID NO: 774147 - DNA, 75 bp, synthetic construct
  source 1..75: mol_type = other DNA
gcttgcgccagtggattttaggtttaccgggtgatgcaaccgactacaaactggacgaccagtaccgcctgagcg

SEQ ID NO: 774148 - DNA, 75 bp, synthetic construct
  source 1..75: mol_type = other DNA
cagtatcagactcgcggcgcgttcgcttatatttctgaccaacaaaaagtgtacgcccgctttttctggcagcaa

SEQ ID NO: 774149 - DNA, 75 bp, synthetic construct
  source 1..75: mol_type = other DNA
ctacagccggttgtccaaacttcagaaatacgtagagagcaaccttttcattcttgcagatgtagttgatagggt

SEQ ID NO: 774150 - DNA, 75 bp, synthetic construct
  source 1..75: mol_type = other DNA
ggtacgcaagtcagtcgtgaagaggcgcgacggtggcgtgcacagcacccgcttgccgttgatgtgccggagaga

SEQ ID NO: 774151 - DNA, 75 bp, synthetic construct
  source 1..75: mol_type = other DNA
gcaactgcgttatacaccgggtaaagttgtttttaacggacaggagatgagcgaagaagaatttatgtctcgtgc

SEQ ID NO: 774152 - DNA, 75 bp, synthetic construct
  source 1..75: mol_type = other DNA
cacgatgctgaacgatttaggcgtggatccgcatattgtcgagcagcttaccgctcaccagatgccagggatgca

SEQ ID NO: 774153 - DNA, 75 bp, synthetic construct
  source 1..75: mol_type = other DNA
ggaaatgcacgtaaaggaaaaccgtgtcgattacgtatgcctgaaaagccgcctgaataatcacgtcatacagca

SEQ ID NO: 774154 - DNA, 75 bp, synthetic construct
  source 1..75: mol_type = other DNA
tccgcctgctaccgctagcagccctcgtgctcactgcctgttctgttaccacacccaaaggcccaggcaaaagcc

SEQ ID NO: 774155 - DNA, 75 bp, synthetic construct
  source 1..75: mol_type = other DNA
tcattcatgggagttgaagcaaaagccaattataaaaatacagttctggctgatgtgctcccggttacgatgtta

SEQ ID NO: 774156 - DNA, 75 bp, synthetic construct
  source 1..75: mol_type = other DNA
ttatagtcgcttgtctcgtttacagaaatatgtgcaaaaaaatctatttcctttagatgaagtaatagataatgt

SEQ ID NO: 774157 - DNA, 75 bp, synthetic construct
  source 1..75: mol_type = other DNA
atgataaatctcgatatttaaacgcaccaaagcggacagaagtcggtcaccgttcaggtcttgcgggtttgaaaa

SEQ ID NO: 774158 - DNA, 75 bp, synthetic construct
  source 1..75: mol_type = other DNA
caggatgcagcgcaaccctgacggcagcagctatgaaccgcgacgggtaacagcacgcagtaaaaaaggccgtat

SEQ ID NO: 774159 - DNA, 75 bp, synthetic construct
  source 1..75: mol_type = other DNA
ccggtgagttttacaccatcaccgcgccatcgcggttccatgcggtacacagcaaagggggctttgtttcacagt

SEQ ID NO: 774160 - DNA, 75 bp, synthetic construct
  source 1..75: mol_type = other DNA
aatcattgatatagaagaaccctatgctactccaacattcaggctaaacattattgaggatggagatgataatga

SEQ ID NO: 774161 - DNA, 75 bp, synthetic construct
  source 1..75: mol_type = other DNA
tggttggcgtgggtatttggcgcgctgtgctggatgacaacatttacgcgagtgtggagtgggtatctgacgctg

SEQ ID NO: 774162 - DNA, 75 bp, synthetic construct
  source 1..75: mol_type = other DNA
tgggatttgccatcggcgtgctggcactgccttttctggcgctgggctggtatctggcggcgctaatcgtcattt

SEQ ID NO: 774163 - DNA, 75 bp, synthetic construct
  source 1..75: mol_type = other DNA
ttctcatgcggggtagtggtttgagatttggccaggtggcattgatttaccgtaatggccggttgcaagagacac

SEQ ID NO: 774164 - DNA, 75 bp, synthetic construct
  source 1..75: mol_type = other DNA
gggatggatgtacaccgcaggatacccagcgttatttatgtggtgtatgggcgaaagcccgcgcagcgatctccc

SEQ ID NO: 774165 - DNA, 75 bp, synthetic construct
  source 1..75: mol_type = other DNA
ggggaaagtgacattcttattacccgtaaacaggataaatactggcgactggggttttcgcttgatgattcaggt

SEQ ID NO: 774166 - DNA, 75 bp, synthetic construct
  source 1..75: mol_type = other DNA
cagcgtcttgattagcggtgaaagcggcaccgggaaagagttgattgccagagcgattcactacaattcgcggcg

SEQ ID NO: 774167 - DNA, 75 bp, synthetic construct
  source 1..75: mol_type = other DNA
cacctgttggggctgaaagtgggcgataaaaccaccttctcgctggagcccgatgcggcgtttggcgtgccgtca

SEQ ID NO: 774168 - DNA, 75 bp, synthetic construct
  source 1..75: mol_type = other DNA
taacgaagattttgtaaaagcagtcaaagcgacaggtaaaaaacagttaattattgccggtgtggtaaccgaagt

SEQ ID NO: 774169 - DNA, 75 bp, synthetic construct
  source 1..75: mol_type = other DNA
ttctctggataatcctttttccctgagtgacctgctgtatgtttctgccacccataattttccacattacggggg

SEQ ID NO: 774170 - DNA, 75 bp, synthetic construct
  source 1..75: mol_type = other DNA
ctggagggggctgatgcgttaccacactggttgcctttacaaaaaatcgccaacggggcggtcgggcattgcctg

SEQ ID NO: 774171 - DNA, 75 bp, synthetic construct
  source 1..75: mol_type = other DNA
acgtctgcggaaagtggccgcgcgttatgcgctggctgaagatgtcagcgatctcaccttcggaaaggctctgca

SEQ ID NO: 774172 - DNA, 75 bp, synthetic construct
  source 1..75: mol_type = other DNA
tgtccaaaaaaaagacgatttttcgcgtgttcctgaggaactgatgaaaggttttggtcagcctcagttagcgat

SEQ ID NO: 774173 - DNA, 75 bp, synthetic construct
  source 1..75: mol_type = other DNA
ccgtcagccacgcgttgtgtttcctgccagtcagtctttgaagcaaaaaacaaacattaccggagaacggcatga

SEQ ID NO: 774174 - DNA, 75 bp, synthetic construct
  source 1..75: mol_type = other DNA
attttatcctgcacattgacgtgcatctggcagaactggtcgcagagtatggcgtctgggtttatgccatcctgt

SEQ ID NO: 774175 - DNA, 75 bp, synthetic construct
  source 1..75: mol_type = other DNA
ataaacgtcggacgcgcctggcgtctgctgagccgtaaccggggagagacctgggaactgctcagccatgagcgt

SEQ ID NO: 774176 - DNA, 75 bp, synthetic construct
  source 1..75: mol_type = other DNA
ccggcatacaattgctttgatcgtccgggtaaaaaatgtatctcttttacgctacgtactgatgaatcccctaat

SEQ ID NO: 774177 - DNA, 75 bp, synthetic construct
  source 1..75: mol_type = other DNA
accattttctgcacccgactcaatattagtagatactaatgccatcaaaactgcattacaaagtgctcatgttaa

SEQ ID NO: 774178 - DNA, 75 bp, synthetic construct
  source 1..75: mol_type = other DNA
cagcggcgtgattgtagtggcgctgactaaagctgcggagcgggaattaaaacgccagttccgcgagcgcgagcc

SEQ ID NO: 774179 - DNA, 75 bp, synthetic construct
  source 1..75: mol_type = other DNA
aacgccagttccgcgagcgcgagccgaaaaagcagtatgtggcccgcgtctgggggcatccatcccctgcggaag

SEQ ID NO: 774180 - DNA, 75 bp, synthetic construct
  source 1..75: mol_type = other DNA
aggagcgacagacggaatcactgactcgccagattaacgccgctcgggtgaaaccgtgcggcgctgctgcattgg

SEQ ID NO: 774181 - DNA, 75 bp, synthetic construct
  source 1..75: mol_type = other DNA
atggacctgatttatttcctcatcgattttatcctgcacattgatgtgcatctggcggagctggtcgcagagtat

SEQ ID NO: 774182 - DNA, 75 bp, synthetic construct
  source 1..75: mol_type = other DNA
ggagattcgctgctgtttgttgcaggggcactggcctcgcttgaaaccaacgatctcaatgttcatatgatggtc

SEQ ID NO: 774183 - DNA, 75 bp, synthetic construct
  source 1..75: mol_type = other DNA
ttgtacctatcgtcagaacgttcgccccgtttgtcgcggggatgggccacatgtcgtaccgtcatttcgccgctt

SEQ ID NO: 774184 - DNA, 75 bp, synthetic construct
  source 1..75: mol_type = other DNA
atgaaatatccatgagtagtctggattttctgaataacattattaaccccatccgggttgaggcagggaaaccac

SEQ ID NO: 774185 - DNA, 75 bp, synthetic construct
  source 1..75: mol_type = other DNA
gtctggtcagacgggtcaggaaactgctggagctgagccgtaataacagcaatgcccatgaggccgggctggcgc

SEQ ID NO: 774186 - DNA, 75 bp, synthetic construct
  source 1..75: mol_type = other DNA
gatgctgatatttcggtgataaaaacctcatcatcaaagggagcaccgtcagaagcggaaaaagttccggtatgg

SEQ ID NO: 774187 - DNA, 75 bp, synthetic construct
  source 1..75: mol_type = other DNA
ggatggcagtattgctgataattgcatttctactgtcagtgaataaaaaacgtatcagtttacgtaccacaggag

SEQ ID NO: 774188 - DNA, 75 bp, synthetic construct
  source 1..75: mol_type = other DNA
ggtatcgatgatgtattgagactaccagatcctgtctgggtgattggtggcgagcagatttattcgctatttctg

SEQ ID NO: 774189 - DNA, 75 bp, synthetic construct
  source 1..75: mol_type = other DNA
ggcaggggtatgaggccgggaaaaatgcctcactgcatcatggtgtggggggaactgcccgccggatggtgccgg

SEQ ID NO: 774190 - DNA, 75 bp, synthetic construct
  source 1..75: mol_type = other DNA
gctgggttcagggcgttcgtcaggtggtgatgccattcagtgtgacagaagaggaaagccggctgatgcgtctct

SEQ ID NO: 774191 - DNA, 75 bp, synthetic construct
  source 1..75: mol_type = other DNA
atggcctcgattgctggttcgacaatgattggttacgccgcactgggcgtgcctgtggaatatctgctggcggca

SEQ ID NO: 774192 - DNA, 75 bp, synthetic construct
  source 1..75: mol_type = other DNA
atatcatttaaaaacaatgagttgcattcaataaagaccgaaatccaggactgtttgctttttggaaaaaattta

SEQ ID NO: 774193 - DNA, 75 bp, synthetic construct
  source 1..75: mol_type = other DNA
aaacaaaaaataatttattttcttggagtatttaagaatttcggattttttacgtttgatattcgcggatatagt

SEQ ID NO: 774194 - DNA, 75 bp, synthetic construct
  source 1..75: mol_type = other DNA
cactgtgtggttttgccaactttggctccattggtgtggtggtgggtgccttttcagccatatcacctcagcgtg

SEQ ID NO: 774195 - DNA, 75 bp, synthetic construct
  source 1..75: mol_type = other DNA
tggcgctgggtgacctggctaagtatttcaacttaccaactattcttaccaccagttttgaaaccggtcctaacg

SEQ ID NO: 774196 - DNA, 75 bp, synthetic construct
  source 1..75: mol_type = other DNA
ccattttcctcgggcaaaacgaaattccggcaatcgtcaaaccctttatcgatcggctgaatcgcaatgaattat

SEQ ID NO: 774197 - DNA, 75 bp, synthetic construct
  source 1..75: mol_type = other DNA
tatctcgctgaaacgctgatggtgattgaccatcagaaaaaaagcacccgtattcaggccagcctgtttgctccg

SEQ ID NO: 774198 - DNA, 75 bp, synthetic construct
  source 1..75: mol_type = other DNA
tggataacgccctgcctgcgggtgtggaaaatgaacaatcaccaaactgccgtgtgctgcgcttcccccctgtca

SEQ ID NO: 774199 - DNA, 75 bp, synthetic construct
  source 1..75: mol_type = other DNA
atgcaaacacaaaaaccgactctcgaactgttaacctgcgaaggcgcttatcacgacaatccgaccgcgcttttt

SEQ ID NO: 774200 - DNA, 75 bp, synthetic construct
  source 1..75: mol_type = other DNA
atttgcacccccggcagccgctacgtcgccgatctcaccaaagttgaccgttactcttacgtgatgcacctggtc

SEQ ID NO: 774201 - DNA, 75 bp, synthetic construct
  source 1..75: mol_type = other DNA
tgatgttcgcctttctgcacctggctcttttgcccataagattaattttcctgttgaaacgccctgttttcagat

SEQ ID NO: 774202 - DNA, 75 bp, synthetic construct
  source 1..75: mol_type = other DNA
aatcaactggcaatagcagcgccgaaggccgaatttgttgataactatgttgaagcatctggtctgatgggattc

SEQ ID NO: 774203 - DNA, 75 bp, synthetic construct
  source 1..75: mol_type = other DNA
gctagtgcattatataaaagccccaaacaagaatggtcatttctcgacagcacttcggttggagaaaatgataag

SEQ ID NO: 774204 - DNA, 75 bp, synthetic construct
  source 1..75: mol_type = other DNA
acgcgtaccgcttctgtagcggatatttacgcacctattcgttccggtacggacattacgttcctgtctggcgtt

SEQ ID NO: 774205 - DNA, 75 bp, synthetic construct
  source 1..75: mol_type = other DNA
ttatttactggagtctgcaggagctggagttataatgccattagctctgctagaaactgcaaactatgaggagta

SEQ ID NO: 774206 - DNA, 75 bp, synthetic construct
  source 1..75: mol_type = other DNA
tgaagagttcggtggcgtagtgcgttcgctgcaaaaagcgattcgcgccggagaaattttccaggtggtgccatc

SEQ ID NO: 774207 - DNA, 75 bp, synthetic construct
  source 1..75: mol_type = other DNA
acggtctcggagctctctctccagggactcgataatgacaataataaccgctttgataaatcttccgagaccctt

SEQ ID NO: 774208 - DNA, 75 bp, synthetic construct
  source 1..75: mol_type = other DNA
ggaagggatgggacgcctgtttgccatcaacaaaatggcggaaggtccgttcccggaacactacgagccaatcga

SEQ ID NO: 774209 - DNA, 75 bp, synthetic construct
  source 1..75: mol_type = other DNA
gcgtgctgattgcgaagaaaggtcagttgctgagtagctttgcgcatctgcgtgatgacggtacaaccgcatctt

SEQ ID NO: 774210 - DNA, 75 bp, synthetic construct
  source 1..75: mol_type = other DNA
gttattctgatgaatatccgaaagttcaaaaaggaggattttgcgttttaccatcccggcggagcattaggtaaa

SEQ ID NO: 774211 - DNA, 75 bp, synthetic construct
  source 1..75: mol_type = other DNA
atgaccccggcgcaacatagtattcaacactccaatctggacaaactccttaaccggttagattccatctccagt

SEQ ID NO: 774212 - DNA, 75 bp, synthetic construct
  source 1..75: mol_type = other DNA
gtattatcggcggcgttggcggctggtttggttttgaacatgcctcgctggagtccattttaggttacctgctgg

SEQ ID NO: 774213 - DNA, 75 bp, synthetic construct
  source 1..75: mol_type = other DNA
tcttcgcaggtttcctttaataacctctctttcaccgaaacaccgccaaaaagcattattgaagccgccgctaca

SEQ ID NO: 774214 - DNA, 75 bp, synthetic construct
  source 1..75: mol_type = other DNA
ggcgtacagcgacgcgggtagcgcatttatcttcggttcgctggtcgggccgaaaatggacacgctgtttgatgg

SEQ ID NO: 774215 - DNA, 75 bp, synthetic construct
  source 1..75: mol_type = other DNA
attcttttttttcagttactgccctgtttttcaggaacagggtaaaactctgtattaaatgggataaaaactcag

SEQ ID NO: 774216 - DNA, 75 bp, synthetic construct
  source 1..75: mol_type = other DNA
gttaatagctctgtcctgaactatggcataaaagcatcagtatatggtgtatcagccagtgagcatagtgatact

SEQ ID NO: 774217 - DNA, 75 bp, synthetic construct
  source 1..75: mol_type = other DNA
gtgatgataatccgggctcatcggaagatcttctgaatttcgttatttcagatgatcttaagtatgagcttggaa

SEQ ID NO: 774218 - DNA, 75 bp, synthetic construct
  source 1..75: mol_type = other DNA
gggttctttggcggcattgtttcgaaaataacgtcgttcattattaccgtactgcttttaggattggccgcgtat

SEQ ID NO: 774219 - DNA, 75 bp, synthetic construct
  source 1..75: mol_type = other DNA
atgtcgaacgagatggcgggcgttacaacagagcaagttgagcgtattgccgcgatcgttgctcgggaggttgtt

SEQ ID NO: 774220 - DNA, 75 bp, synthetic construct
  source 1..75: mol_type = other DNA
attcctttttttcggttagtgccctgttttttatggacagggtaaaattctgtattaaatgggataaacactccg

SEQ ID NO: 774221 - DNA, 75 bp, synthetic construct
  source 1..75: mol_type = other DNA
tcgcttttggcgtccataaagtgatggcgtacagcgacgcgggtagcgcatttatcttcggttctctggtcggac

SEQ ID NO: 774222 - DNA, 75 bp, synthetic construct
  source 1..75: mol_type = other DNA
acgatgcatctcaggttgatgaagccgcactggccgacaccgagtggctgaagcaggcgatcgttgcggtacgta

SEQ ID NO: 774223 - DNA, 75 bp, synthetic construct
  source 1..75: mol_type = other DNA
aggtaggtgccgtcgccagctggccaattgccgatcgttggtccattgttggggcctactactacgacaccaatg

SEQ ID NO: 774224 - DNA, 75 bp, synthetic construct
  source 1..75: mol_type = other DNA
gccaattgccgatcgttggtcaattgtcggggcctactactacgataccaatgcgaacaaacaggcagactcaat

SEQ ID NO: 774225 - DNA, 75 bp, synthetic construct
  source 1..75: mol_type = other DNA
ttctcgaccgcattccagctggccgttggggactgccgagtgacctgatggggccggtagtgtttcttgcctcca

SEQ ID NO: 774226 - DNA, 75 bp, synthetic construct
  source 1..75: mol_type = other DNA
atgattttaagtgcattttctctcgaaggtaaagttgcggtcgtcactggttgtgatactgggctgggccagggg

SEQ ID NO: 774227 - DNA, 75 bp, synthetic construct
  source 1..75: mol_type = other DNA
atatcgaacagtcgctttacgagcactgggaaaagcagggctactttaagcctaatggcgatgaaagccaggaaa

SEQ ID NO: 774228 - DNA, 75 bp, synthetic construct
  source 1..75: mol_type = other DNA
taactggggcagcatcaatactgaagcgaagttgctggcaacccattatcagcaaactaatcttgactggtataa

SEQ ID NO: 774229 - DNA, 75 bp, synthetic construct
  source 1..75: mol_type = other DNA
tcacgaccggtatcacaactcgcgtatatgatgatgcagccgttgaacgttttaatatttccgttggtcaaatct

SEQ ID NO: 774230 - DNA, 75 bp, synthetic construct
  source 1..75: mol_type = other DNA
tgggtgttgactggagtgatgcgaatcttgccgggagtttgattggacagaaactggcaataaatgaatttgtcg

SEQ ID NO: 774231 - DNA, 75 bp, synthetic construct
  source 1..75: mol_type = other DNA
gggcaggcgacacctactggcgcatttccgaacgttggggactgcgtggcgggattcagtacgacactcgcctgg

SEQ ID NO: 774232 - DNA, 75 bp, synthetic construct
  source 1..75: mol_type = other DNA
caatgatttcgataacaagtacggttccagtactgacggctacgcaacgcaaaaattcagcgttggctatgcggt

SEQ ID NO: 774233 - DNA, 75 bp, synthetic construct
  source 1..75: mol_type = other DNA
tgttaacaccagagacgacatgcctgaagcaacccgtgttcacctggaaccgaccatcaatttgccgctctctaa

SEQ ID NO: 774234 - DNA, 75 bp, synthetic construct
  source 1..75: mol_type = other DNA
agataatctgaattttgttccgtcagatgatctgaagtatgagcttggaatgttattatcatcacgacctttata

SEQ ID NO: 774235 - DNA, 75 bp, synthetic construct
  source 1..75: mol_type = other DNA
aattcaggcccgatcattttttctgaggatcttccgccgcagattcgtcgcagattcgtcagccagtctgtaatg

SEQ ID NO: 774236 - DNA, 75 bp, synthetic construct
  source 1..75: mol_type = other DNA
tcgtatggaacaaaaccgggctgagttgtctcccgaaaaccttagtaggcatcagaaatattacgaagagttgat

SEQ ID NO: 774237 - DNA, 75 bp, synthetic construct
  source 1..75: mol_type = other DNA
aacacaccaagggctatgggaggtggcgggttatgttgcggctttcgataaatacgtaaacccggaaggaaaacc

SEQ ID NO: 774238 - DNA, 75 bp, synthetic construct
  source 1..75: mol_type = other DNA
atgaaatccaacacgaagattgctctcattctgaccgcatccgtaatcagttgcagtgcctttgctcagagcgta

SEQ ID NO: 774239 - DNA, 75 bp, synthetic construct
  source 1..75: mol_type = other DNA
atgaccaaagcggagatcgccagcgctgttaatgaatggttcaacattgaaaattacagcgtcctgcaaaatttg

SEQ ID NO: 774240 - DNA, 75 bp, synthetic construct
  source 1..75: mol_type = other DNA
cactatctgaaggaagccgaggtaaacaacgaagggctgatgctggttcaaattaatctggcagaaacatcaccc

SEQ ID NO: 774241 - DNA, 75 bp, synthetic construct
  source 1..75: mol_type = other DNA
acgccaatttcctgcgcgagctggccgaaagcctgcctcgtattttgcctgaaggcagtacagacaagtctgcac

SEQ ID NO: 774242 - DNA, 75 bp, synthetic construct
  source 1..75: mol_type = other DNA
cgggttcgcgcaaaggttgccgccgcccgcgctgacaagcggccgggcatgagtaccgcgcagctgcgccagcag

SEQ ID NO: 774243 - DNA, 75 bp, synthetic construct
  source 1..75: mol_type = other DNA
attaatattggtccgttctggcgtctgctcagtcgtaacgggggcagaacctggttactgctgagtcacgggcgg

SEQ ID NO: 774244 - DNA, 75 bp, synthetic construct
  source 1..75: mol_type = other DNA
ctttaactctttagcgcaaataccttatgcatacttgcaatctatcggaaagtcaaaaattaccgcatttgtgca

SEQ ID NO: 774245 - DNA, 75 bp, synthetic construct
  source 1..75: mol_type = other DNA
ggtgctgacactggaaaatctgaccggcgaaggtttcaggaatgtcagcctgacgctcaatgccggagaaattct

SEQ ID NO: 774246 - DNA, 75 bp, synthetic construct
  source 1..75: mol_type = other DNA
gcgaaaaccgcgaaagataatgccaccctggaacgttatcgtcgggcgctgaatattaaatttaaccaaccggaa

SEQ ID NO: 774247 - DNA, 75 bp, synthetic construct
  source 1..75: mol_type = other DNA
ctacagtagcggtgcgttgcttaccgtaggttcagagaagctccgctgcacgctgagtggcgaaatcccgacatg

SEQ ID NO: 774248 - DNA, 75 bp, synthetic construct
  source 1..75: mol_type = other DNA
gttgctgctcggcaacatgggtatggccggcggcggcgtgaacgcactgcgcggtcactccaacattcagggcct

SEQ ID NO: 774249 - DNA, 75 bp, synthetic construct
  source 1..75: mol_type = other DNA
gggtatctaccatcacctgcgcgagctgtacaaagctgaaggtggtaaaggcgtagaaccgctgatgaaaatgag

SEQ ID NO: 774250 - DNA, 75 bp, synthetic construct
  source 1..75: mol_type = other DNA
gctatgcgaaacgcgatgatacgctgactcatccgcgctgcgtgtggaacctgctgaaagagcacgtttcccgct

SEQ ID NO: 774251 - DNA, 75 bp, synthetic construct
  source 1..75: mol_type = other DNA
aaaacgctaacgtcgtaatggtgatgggcggtaacgctgctgaagcgcatcccgtcggtttccgctgggcgatgg

SEQ ID NO: 774252 - DNA, 75 bp, synthetic construct
  source 1..75: mol_type = other DNA
gaaaggcattgccaatggcgatcgtgtcactgtctccagcaagcgtggctttatccgcgcggtggctgtggtaac

SEQ ID NO: 774253 - DNA, 75 bp, synthetic construct
  source 1..75: mol_type = other DNA
aaccgcgataactccgacccgtccggtctggggaatacgctgggatgggcctgggcgtggccgctcaaccgtcgc

SEQ ID NO: 774254 - DNA, 75 bp, synthetic construct
  source 1..75: mol_type = other DNA
aagtgaatttccgcgacatcccgccgccgcgctacccggaggacgaacttgccagcgaaccgtggtacagcgtct

SEQ ID NO: 774255 - DNA, 75 bp, synthetic construct
  source 1..75: mol_type = other DNA
taacgctattcgccagcttgccgctgctaacattttccctggcgacatgctgtttaaaaacttcggtgtcacccg

SEQ ID NO: 774256 - DNA, 75 bp, synthetic construct
  source 1..75: mol_type = other DNA
aagcttatgaccacagagttctagaccgtacagttgcagctatcgtagaagctgttaaaagaactggagccgacg

SEQ ID NO: 774257 - DNA, 75 bp, synthetic construct
  source 1..75: mol_type = other DNA
ttgcgctacctgatcgaaaacaacaaaatcaacgccgaatacgttaaacattacaccaacgccagcctgctggtg

SEQ ID NO: 774258 - DNA, 75 bp, synthetic construct
  source 1..75: mol_type = other DNA
tgattcgccatctctatatcgaacgacggatggtgccgcttaatatctggcttgagcaagttgaggggcagcaat

SEQ ID NO: 774259 - DNA, 75 bp, synthetic construct
  source 1..75: mol_type = other DNA
accacttccgaggcaggtacgcgccagcgcactaccattttgcgccagttgtgtcgccgcctttccagctcccca

SEQ ID NO: 774260 - DNA, 75 bp, synthetic construct
  source 1..75: mol_type = other DNA
tacaaaaagcaaaccagtggacatccattatatacaacgattaacctcctgaataaaaaccacaatgaacgctca

SEQ ID NO: 774261 - DNA, 75 bp, synthetic construct
  source 1..75: mol_type = other DNA
tatccgccgcggagaacgcgaggcggcagatgtgctggggctcacactctatgagctgatgcttcgcgctggcga

SEQ ID NO: 774262 - DNA, 75 bp, synthetic construct
  source 1..75: mol_type = other DNA
cgcggagaacgcgaggcggcagatgtgctggggctcacactctatgagctgatgcttcgcgctggcgaggccgca

SEQ ID NO: 774263 - DNA, 75 bp, synthetic construct
  source 1..75: mol_type = other DNA
tgcacgaaatattcaaatacgagcaacatgattctccggatgatattttatttaacgttgtcgaaccagaactcg

SEQ ID NO: 774264 - DNA, 75 bp, synthetic construct
  source 1..75: mol_type = other DNA
catctttatatattggattgtgtggaacgtatgcgtataaacaaccgcgggtgtggtggccttcggcacaggatg

SEQ ID NO: 774265 - DNA, 75 bp, synthetic construct
  source 1..75: mol_type = other DNA
tcagaatataagtaaacaggatacttccctgaaacaatggctatctcagccatcaaacaactattcgccatcaat

SEQ ID NO: 774266 - DNA, 75 bp, synthetic construct
  source 1..75: mol_type = other DNA
tgcgttgccgacatgatgaaagccgcatttttccttatcagtaccagtggctacaggtcagagggtgcggagatt

SEQ ID NO: 774267 - DNA, 75 bp, synthetic construct
  source 1..75: mol_type = other DNA
atgcgtgatgatcgttttaatgccatgaaacaggaatttgatggcgcaccggaagatacagacgatgcgttgtta

SEQ ID NO: 774268 - DNA, 75 bp, synthetic construct
  source 1..75: mol_type = other DNA
agtcctacggtgttggcatcgaaaaatacgctgcgtgggaaaatattggtaaagctgcagggctgaatggcgaaa

SEQ ID NO: 774269 - DNA, 75 bp, synthetic construct
  source 1..75: mol_type = other DNA
tatgagctgatgcttcgcgctggcgaggccgcattccaggtgtgtcgttcggcgtatcctgacgcccgccactgg

SEQ ID NO: 774270 - DNA, 75 bp, synthetic construct
  source 1..75: mol_type = other DNA
atgatactggcattgagtgggagtatctgcacagtggttttggcattgcccgtatcactgctgcaaatggaacta

SEQ ID NO: 774271 - DNA, 75 bp, synthetic construct
  source 1..75: mol_type = other DNA
catctcgatatgcagcaactgctggcgctcattcttcgtcaagaaaatgttcctgtgcaggaacaaattgtcttc

SEQ ID NO: 774272 - DNA, 75 bp, synthetic construct
  source 1..75: mol_type = other DNA
gtgtggtggccttcggcacaggatgatcgcatcctgccgccaagaaagctttacgtcgatttaacagcgccactt

SEQ ID NO: 774273 - DNA, 75 bp, synthetic construct
  source 1..75: mol_type = other DNA
gcaatctaaatcaaaattagagaaagccacagactcaggaaaatggcacacatccattactacatcgccaattga

SEQ ID NO: 774274 - DNA, 75 bp, synthetic construct
  source 1..75: mol_type = other DNA
aaagtcccgtgagtgcgacatttgatgttgctggtctgtcagaggcattgaagccacttcaaaaagcgtgtggat

SEQ ID NO: 774275 - DNA, 75 bp, synthetic construct
  source 1..75: mol_type = other DNA
tcagccgtgagtcgtttcacaaggcggaagaggacctgaaacgggaagggcataccgtcttaaccccggcagtac

SEQ ID NO: 774276 - DNA, 75 bp, synthetic construct
  source 1..75: mol_type = other DNA
ctgtatggcatctcgaaaaggaagatagcaaaagcatacaaaaaagatgagaaattgatacgtatagagatacag

SEQ ID NO: 774277 - DNA, 75 bp, synthetic construct
  source 1..75: mol_type = other DNA
agcgttggggagcatgggcggcgagtgatagttctggagtagactattctcctatagctgctgggtttaaagggc

SEQ ID NO: 774278 - DNA, 75 bp, synthetic construct
  source 1..75: mol_type = other DNA
tgttttttataaaggcaatgacattaacttcatcagaaaactagccaactcaaacaaaatgtatgcaagaataac

SEQ ID NO: 774279 - DNA, 75 bp, synthetic construct
  source 1..75: mol_type = other DNA
gtgagggtgagggtttatatcgccggtccgatgacgggatatgaaaattttaaccgcgaggcatttcacaaagcg

SEQ ID NO: 774280 - DNA, 75 bp, synthetic construct
  source 1..75: mol_type = other DNA
cagccaggacattgatcatgtgctggatgttttcatccgcacgaatagcggggggacaaaacttgagttctccga

SEQ ID NO: 774281 - DNA, 75 bp, synthetic construct
  source 1..75: mol_type = other DNA
gtaattagccagtggttttacatggtacttctgaaagggatctttggaagccaggccgatgcgctactcacgagc

SEQ ID NO: 774282 - DNA, 75 bp, synthetic construct
  source 1..75: mol_type = other DNA
tacatggatatttgcatggcaatgctccgttgcgtggatgcggtttacatgctgaaaggctggcagcagtcggca

SEQ ID NO: 774283 - DNA, 75 bp, synthetic construct
  source 1..75: mol_type = other DNA
gtccgatgacgggatatgaaaatttcaaccgtgaggcgtttcacagggcggaagaagcactgaaacgggaagggc

SEQ ID NO: 774284 - DNA, 75 bp, synthetic construct
  source 1..75: mol_type = other DNA
tgaccgggtataaaaatttcaaccgtgaggcgttccacaatgcggaagaggaactgaaacgggaagggcataccg

SEQ ID NO: 774285 - DNA, 75 bp, synthetic construct
  source 1..75: mol_type = other DNA
cgtcgtgctgaaaccggggatgacgttcaccatcgagccaatggtcaacgcgggtaaaaaagagatccgcaccat

SEQ ID NO: 774286 - DNA, 75 bp, synthetic construct
  source 1..75: mol_type = other DNA
agcggctatgagccgcgccgggtgacagcccgcagcaagaagggacgcatcaaacgccagatgtttgcaaagctt

SEQ ID NO: 774287 - DNA, 75 bp, synthetic construct
  source 1..75: mol_type = other DNA
tacgtgatcgcgtcagtcgcaaaggacctgaggtccgttacgcagagcgtcgccttctgggtgtaaatgatgatg

SEQ ID NO: 774288 - DNA, 75 bp, synthetic construct
  source 1..75: mol_type = other DNA
tctggaaccagccacgagaagccgcatgatgcgccaactggcgcaggaactgcgccggacacagcagcagaatat

SEQ ID NO: 774289 - DNA, 75 bp, synthetic construct
  source 1..75: mol_type = other DNA
attttcatccgatctaccagggtaaaagtggtatgagcggcgagcgtgttgcgggaaaagtgatcttcgaaacgc

SEQ ID NO: 774290 - DNA, 75 bp, synthetic construct
  source 1..75: mol_type = other DNA
agcagttatgaaccgcgcagggtaacagcacgcagcaagaaaggccgcatcaaacgtcagatgtttgcaaagttg

SEQ ID NO: 774291 - DNA, 75 bp, synthetic construct
  source 1..75: mol_type = other DNA
tgatcgcgtcagtcgcaaaggaccggaggtccgttacgcagagcgccgcctgctgggtgtaaatgatgatgttga

SEQ ID NO: 774292 - DNA, 75 bp, synthetic construct
  source 1..75: mol_type = other DNA
tgaaggcattcaactcccggttcccccgaaaaaaaacgtccaagtaccggagaaaacaatcacaagcaaaaatcc

SEQ ID NO: 774293 - DNA, 75 bp, synthetic construct
  source 1..75: mol_type = other DNA
tcgcgttgtctggcctggcgcaatcgtgcgcggggttcctgctcaactgcgccagaaaaaggcagataccgttta

SEQ ID NO: 774294 - DNA, 75 bp, synthetic construct
  source 1..75: mol_type = other DNA
tcagttgccgttcccctgaaaaccgcccctgccagtgactcatcccgtcaccacgtgttctggcccggagtcgtc

SEQ ID NO: 774295 - DNA, 75 bp, synthetic construct
  source 1..75: mol_type = other DNA
gcagtttgaaggcaaggtacagcgcattgcccgtattcatcactacggcttacgtgatcgcgtcagccgcaaagg

SEQ ID NO: 774296 - DNA, 75 bp, synthetic construct
  source 1..75: mol_type = other DNA
cagcacgcagtaaaaaggggcggatcaaacgtcagatgtttacaaagctgcgcactacaaaatacctgaaaactg

SEQ ID NO: 774297 - DNA, 75 bp, synthetic construct
  source 1..75: mol_type = other DNA
actggctgagtgctttgctggcgaatctggaaccagccgcaagaagccgaatgatgcgccagctggcgcaggaac

SEQ ID NO: 774298 - DNA, 75 bp, synthetic construct
  source 1..75: mol_type = other DNA
cttcgctgatccacattaaaggcgagtatgacgaagaggcgtttaacgaagcctttatgatgcataccaccacct

SEQ ID NO: 774299 - DNA, 75 bp, synthetic construct
  source 1..75: mol_type = other DNA
cacgataccgaaatctttaagcgcattcagatcctgcgcgatatgggcatcggtttatcggtagatgattttggt

SEQ ID NO: 774300 - DNA, 75 bp, synthetic construct
  source 1..75: mol_type = other DNA
ccgtggtttgaacatgaccagatgactgtcgctgaaaaaatcctgctgcgatgcacctggcttgacccggcagag

SEQ ID NO: 774301 - DNA, 75 bp, synthetic construct
  source 1..75: mol_type = other DNA
cgttcaacgcagaatttttgaccaaacagaaactacacgacctgattttttaccgcaaaagttttgatatcacga

SEQ ID NO: 774302 - DNA, 75 bp, synthetic construct
  source 1..75: mol_type = other DNA
atgcgcgctagtccattttttcggtcagttaaatatggtattgtattttctatagtaataatgatacttactttt

SEQ ID NO: 774303 - DNA, 75 bp, synthetic construct
  source 1..75: mol_type = other DNA
gccctggtatttatataaagaggcctttaatttatgcactatagatttcataaaagatcatattcaattatgggt

SEQ ID NO: 774304 - DNA, 75 bp, synthetic construct
  source 1..75: mol_type = other DNA
taccggggtatacagcagagagggcgagcggcagaaggcgccgccggaaaatatcggaactgataatccgttaca

SEQ ID NO: 774305 - DNA, 75 bp, synthetic construct
  source 1..75: mol_type = other DNA
ctgtggtggtgtttttcctgtctggtgttattgaaaatattttcagatatatattacctgagagaaagttttacc

SEQ ID NO: 774306 - DNA, 75 bp, synthetic construct
  source 1..75: mol_type = other DNA
cgctgccaacatttatcgctaatgacgtgataaaaatgcctgatgttccccgctacactgaagaatatcgcaagc

SEQ ID NO: 774307 - DNA, 75 bp, synthetic construct
  source 1..75: mol_type = other DNA
ctgaccaaagagagccgcacggtactcgattttctactgatgctttgttccgtagggcaacattaccccggtttt

SEQ ID NO: 774308 - DNA, 75 bp, synthetic construct
  source 1..75: mol_type = other DNA
cgggctgaacaacctggagcgtgtccaacaacgtatgcgtattttcatgaaaggagatcactcaataacttccat

SEQ ID NO: 774309 - DNA, 75 bp, synthetic construct
  source 1..75: mol_type = other DNA
aacctggagcgtgtccatcaacgtacgagttgtacgaaggtgacgctacctacaaagccgctatcgacaaagcat

SEQ ID NO: 774310 - DNA, 75 bp, synthetic construct
  source 1..75: mol_type = other DNA
actttaacgcagaagcggctaccgtaaaacaagctcttagttgtaacccggaagcctgggctgaacaacctggag

SEQ ID NO: 774311 - DNA, 75 bp, synthetic construct
  source 1..75: mol_type = other DNA
tcgaagcgcaagcaagctacggtataggtttgcaggtagggcaacaactgagtgaatctggcctggaagggctgc

SEQ ID NO: 774312 - DNA, 75 bp, synthetic construct
  source 1..75: mol_type = other DNA
taaatctggaatggcaacaaatcgacatgcagcgacgagttgcctgggtgaatccagaagagagcaaatcaaacc

SEQ ID NO: 774313 - DNA, 75 bp, synthetic construct
  source 1..75: mol_type = other DNA
tggccggatggaccgcagttaatggccgagcgattgcagcagcttgcaagcgcgggatttagtctgacgcaagcg

SEQ ID NO: 774314 - DNA, 75 bp, synthetic construct
  source 1..75: mol_type = other DNA
ggggtatcctgcaggcggatgcgttcacaggttacgacaggctgttcagtgccgaacgtgagggcgacgcgttga

SEQ ID NO: 774315 - DNA, 75 bp, synthetic construct
  source 1..75: mol_type = other DNA
gctgatgcaggagaaagaacacacgttatcgaagaaatgtcgtctgggagatgcgttccggtatatcaggaagca

SEQ ID NO: 774316 - DNA, 75 bp, synthetic construct
  source 1..75: mol_type = other DNA
gtgaatctagatttagagtcgtgtgttcttcaccagatgtatgtgaagtaggaggttacaaggttccttttgaca

SEQ ID NO: 774317 - DNA, 75 bp, synthetic construct
  source 1..75: mol_type = other DNA
ctggggctggatggcattggtgaggccggctggcgcgcgctgcatcagactcatcgctttgagcatatcttttcc

SEQ ID NO: 774318 - DNA, 75 bp, synthetic construct
  source 1..75: mol_type = other DNA
taagtatcttgtgctggcaatcatcggtgtgggcggtctgtccggcctggtcgccagccagagcacaggaagaaa

SEQ ID NO: 774319 - DNA, 75 bp, synthetic construct
  source 1..75: mol_type = other DNA
atgagtggtggaaagcaaaattacccttcgtcaccgatggcgtggttgtgcgagcggcgaaagaacccgaatccc

SEQ ID NO: 774320 - DNA, 75 bp, synthetic construct
  source 1..75: mol_type = other DNA
tgagtgttttgtgctggcaatcatcggcgcagggagtctgcccagtctggtcgccagccagagcgcatgaagaaa

SEQ ID NO: 774321 - DNA, 75 bp, synthetic construct
  source 1..75: mol_type = other DNA
ggcagaacaatactgacgcgctaaattcacttggcgtgtttatctgggcgtggccggatggaccgcagttaatga

SEQ ID NO: 774322 - DNA, 75 bp, synthetic construct
  source 1..75: mol_type = other DNA
ggcgcaggcggtctgcccagcctggtcgcccgccagagcgcatgaagaaatttcccgcctgcaacaacaaataaa

SEQ ID NO: 774323 - DNA, 75 bp, synthetic construct
  source 1..75: mol_type = other DNA
aaaccaaattccggatatggcggcgtttgccagttcactttcatcaacgggttttcaaaaactcccttcaggtct

SEQ ID NO: 774324 - DNA, 75 bp, synthetic construct
  source 1..75: mol_type = other DNA
ttttgcatcaggcggggatgaccgccataagcgctaacttaagggttgaaccatctgaagaatgcgacgcctcgg

SEQ ID NO: 774325 - DNA, 75 bp, synthetic construct
  source 1..75: mol_type = other DNA
ggttcctgatgaatgcggtactgatgtgcatcttcatcattcctgtagctgtcgcgttttggttgtcagcttttg

SEQ ID NO: 774326 - DNA, 75 bp, synthetic construct
  source 1..75: mol_type = other DNA
atggaacttgtacgcaaaacacgcaaagagttcttggacctgtatcgcatgggagctttcacttgtgttgtggct

SEQ ID NO: 774327 - DNA, 75 bp, synthetic construct
  source 1..75: mol_type = other DNA
aatttgttagtgcctttctttatcaaaatttaggccttaatgttcccgctgacgatataaccgttcaattatctg

SEQ ID NO: 774328 - DNA, 75 bp, synthetic construct
  source 1..75: mol_type = other DNA
caacttagcgaacctgaattaactgatcgggtactgttacgccatgaactggcgtcagccagtgaatttaatcct

SEQ ID NO: 774329 - DNA, 75 bp, synthetic construct
  source 1..75: mol_type = other DNA
aagccacgctgcgcaaatggcacgaggaattgcaggagaaacgtggcgaacgtgccagtctgcggcgtagtacga

SEQ ID NO: 774330 - DNA, 75 bp, synthetic construct
  source 1..75: mol_type = other DNA
ccgggttgagtaccaatattataggcggaactgaaacccgaccacgcaacatcgcatttaattacatcgtgaggg

SEQ ID NO: 774331 - DNA, 75 bp, synthetic construct
  source 1..75: mol_type = other DNA
ctcattaaccagaagcgcatcgcgccgctgaacctgctgaccgttgacccggtcaataccagccagattatcgcg

SEQ ID NO: 774332 - DNA, 75 bp, synthetic construct
  source 1..75: mol_type = other DNA
tcgaagcgcaggcaagttacggcattggtttgcaggtagggcaacaactgagtgaatctggtctggaagggctgc

SEQ ID NO: 774333 - DNA, 75 bp, synthetic construct
  source 1..75: mol_type = other DNA
ctgctgatgaagcacagccgcagccgtgaccttatgttacagatggacagactggttcagctgatacaggactcc

SEQ ID NO: 774334 - DNA, 75 bp, synthetic construct
  source 1..75: mol_type = other DNA
tcaccgccgtctgggggccctgacgctgctgatgaagcacagccgcagccgtgaccttatgttacagatggacag

SEQ ID NO: 774335 - DNA, 75 bp, synthetic construct
  source 1..75: mol_type = other DNA
gtgacgaaatttatcgcttcgatcagacctatcgtttgttcaatgaatatgctgcaccagtgcacagcaaagggg

SEQ ID NO: 774336 - DNA, 75 bp, synthetic construct
  source 1..75: mol_type = other DNA
tggctgttgaatggggatggcttgacagggcgcccaaaatatcaacaccacgcgttaagaatggacgcattagat

SEQ ID NO: 774337 - DNA, 75 bp, synthetic construct
  source 1..75: mol_type = other DNA
tcgttctgcctcctgctcgttatgtgcgttcctatgcaccgcgcagcaaagtgttgcggcagggagtgaatggac

SEQ ID NO: 774338 - DNA, 75 bp, synthetic construct
  source 1..75: mol_type = other DNA
ggataaagcggcaaacagcaatcagccgctggcgcacacggttgtgctgcttaatagcggtggcgacgctaccca

SEQ ID NO: 774339 - DNA, 75 bp, synthetic construct
  source 1..75: mol_type = other DNA
cttgccgatcatcaaagtgccgccgctaacgacattcgtcagatgattcaggataaccgtctgcggctgatgtaa

SEQ ID NO: 774340 - DNA, 75 bp, synthetic construct
  source 1..75: mol_type = other DNA
tttgcgatctcaacaactgtcgatggtgggcaacgatttgcgttatgccggacgttttcccgtgtcgctggaagg

SEQ ID NO: 774341 - DNA, 75 bp, synthetic construct
  source 1..75: mol_type = other DNA
acattccggtgaccgttgaacgccagttgtatcggcttatccccggtgaagaagagatgagctttactctgcagt

SEQ ID NO: 774342 - DNA, 75 bp, synthetic construct
  source 1..75: mol_type = other DNA
gttggtaacgatttgcgttatgccggacgtttcccggtgtcgctggaaggtagcgacgctgtttctgacgataaa

SEQ ID NO: 774343 - DNA, 75 bp, synthetic construct
  source 1..75: mol_type = other DNA
acattcgcttcttgttgcccattacctatacggtatctctaaaagaaagctcgccaaggctcgtaaaaaagatga

SEQ ID NO: 774344 - DNA, 75 bp, synthetic construct
  source 1..75: mol_type = other DNA
ttcttaagaagagaaaaccgtatgagcactctctgattgtggctcattacctgtatggcatctcgaaaaggaaga

SEQ ID NO: 774345 - DNA, 75 bp, synthetic construct
  source 1..75: mol_type = other DNA
gtctggtcgttccgcatattgctcgcttgttgatcggacacaaccaccagcagcttctgcctgtcgcgatgggga

SEQ ID NO: 774346 - DNA, 75 bp, synthetic construct
  source 1..75: mol_type = other DNA
tttgcgcgctcagcaattatcaatggtcggtaacgatttgcgttatgccggacgtttccccgtgtcgctggaagg

SEQ ID NO: 774347 - DNA, 75 bp, synthetic construct
  source 1..75: mol_type = other DNA
atgctgatgattcgcttccttccagtaactatgcgccgcccgccggggggaacattctttttgcttgctgacagc

SEQ ID NO: 774348 - DNA, 75 bp, synthetic construct
  source 1..75: mol_type = other DNA
accgcacaagctacagcggtgacctggcgtctggcggtaaatccttcaccgttaatttcgataaacccggcaact

SEQ ID NO: 774349 - DNA, 75 bp, synthetic construct
  source 1..75: mol_type = other DNA
ccctgcatggtcatgtgcccccttcacggtttattcctctcgcagaagagattggtgaaatcgaaaatattgggc

SEQ ID NO: 774350 - DNA, 75 bp, synthetic construct
  source 1..75: mol_type = other DNA
acacacctgggcaagttggctggttcaagccggagtcccgttgtcagtgttacaggaaatgggaggctgggagtc

SEQ ID NO: 774351 - DNA, 75 bp, synthetic construct
  source 1..75: mol_type = other DNA
tgaaaaaacaaatagggaatcatcaccgttgggtatttgtgtacaaggaaagctgtaccaaaccagacggaacaa

SEQ ID NO: 774352 - DNA, 75 bp, synthetic construct
  source 1..75: mol_type = other DNA
aagttacattcaacataccgcaattgttgatatcccggaatacgatgctgagctttgtggcctgaccgttcattt

SEQ ID NO: 774353 - DNA, 75 bp, synthetic construct
  source 1..75: mol_type = other DNA
ctaggggatttacctgatgtcacttttgaagaggcctgcctaagatggcttgaggaaaaggctgataaaaaatct

SEQ ID NO: 774354 - DNA, 75 bp, synthetic construct
  source 1..75: mol_type = other DNA
tcgcgcagagaaacaggctcaatggaaagcagatcggattctggcttcaacatttcgcaggaatgcaactaagag

SEQ ID NO: 774355 - DNA, 75 bp, synthetic construct
  source 1..75: mol_type = other DNA
tgaatgatactgcatgtcgcgtattgaaaaaacaaatcgggaatcatcaccgttgggtatttgtgtacaaggaaa

SEQ ID NO: 774356 - DNA, 75 bp, synthetic construct
  source 1..75: mol_type = other DNA
gaagaagacgaggaagacgaagactacgcaccaatctgtttttcttctcacaatagcttctacggttacgatgaa

SEQ ID NO: 774357 - DNA, 75 bp, synthetic construct
  source 1..75: mol_type = other DNA
caatgtttaactacggcaaagaaaccgctcaggaagccccagaacaagatgaagaagacgaggaagacgaagact

SEQ ID NO: 774358 - DNA, 75 bp, synthetic construct
  source 1..75: mol_type = other DNA
tgctgattccgcgggatttgcgtcctgcgcatcctcaatacattcgtcacaaccgtgaaggtggtaaagctcgcg

SEQ ID NO: 774359 - DNA, 75 bp, synthetic construct
  source 1..75: mol_type = other DNA
gccttgctggttgatgaagtactgcctgaacaacccatgcgtcagtgggtgttgagcttcccgtttcagctgcgt

SEQ ID NO: 774360 - DNA, 75 bp, synthetic construct
  source 1..75: mol_type = other DNA
ttttatccaggttacggaattgcacatgtagggcggataaggcgtccacgccgcatccgccagtggcgcggtgca

SEQ ID NO: 774361 - DNA, 75 bp, synthetic construct
  source 1..75: mol_type = other DNA
aattcagtaaaccacaacagtctgaaccatgatgataatctggatatgatgcatgttttcgctaatcgtggttat

SEQ ID NO: 774362 - DNA, 75 bp, synthetic construct
  source 1..75: mol_type = other DNA
ggttatgtcggtggcaccggaagtccggcgcaaatgcggcgttcagagggtatcaggtttgagcagaacaacaac

SEQ ID NO: 774363 - DNA, 75 bp, synthetic construct
  source 1..75: mol_type = other DNA
attaagcccgcagccaggctgggcagagcgcgatatggcagaactgtggcaatgctgcatggctgtcattcgcac

SEQ ID NO: 774364 - DNA, 75 bp, synthetic construct
  source 1..75: mol_type = other DNA
ctttaccaacaaaaataccaacgctatcagcatctcattgccgcacttcagggctttcacgcccgcatcaaggag

SEQ ID NO: 774365 - DNA, 75 bp, synthetic construct
  source 1..75: mol_type = other DNA
atgaaaacactgattaaaatactgggcattaccggcagccttctgctttgtacaggggctcaggcccaaccctat

SEQ ID NO: 774366 - DNA, 75 bp, synthetic construct
  source 1..75: mol_type = other DNA
ccagtcagtgcggaaaaacatcactcacgcaatgtctgcgcggagaagatcttcagtatcagaaaacgcaggcca

SEQ ID NO: 774367 - DNA, 75 bp, synthetic construct
  source 1..75: mol_type = other DNA
ctgaaccttgttcagccgcaggaagtgcaggaggggaaagacgcatttgatgcttatctgaacgggacgtggatc

SEQ ID NO: 774368 - DNA, 75 bp, synthetic construct
  source 1..75: mol_type = other DNA
atgtttttattcgatgacatcatccacccaatggtagtgaatcaaaattacaaacctttcaatgatatttatctt

SEQ ID NO: 774369 - DNA, 75 bp, synthetic construct
  source 1..75: mol_type = other DNA
tggctgcaaagcattttttcacatgttcatttgttgccgttttatccatggtcatctgatgatggcttttcggta

SEQ ID NO: 774370 - DNA, 75 bp, synthetic construct
  source 1..75: mol_type = other DNA
atgaccatagaagaacgcctgaacaacatcgagttgaatcaaaccctgcttgaccagcgactttcagatcttgaa

SEQ ID NO: 774371 - DNA, 75 bp, synthetic construct
  source 1..75: mol_type = other DNA
ccctttgcagtaaaagaaccctgttacaacaatgccgatttggaaaagctttcattgcccacacaggacagccgg

SEQ ID NO: 774372 - DNA, 75 bp, synthetic construct
  source 1..75: mol_type = other DNA
ttgcttggcgatattgatttatcggtcggttcaaccattgcattgattggcacatttgctgcgcttggggcttca

SEQ ID NO: 774373 - DNA, 75 bp, synthetic construct
  source 1..75: mol_type = other DNA
aagtcatgatgacacgctgagcggaatgctgctggcggcctggtattatggcgctttagatgcgcgctccggtcg

SEQ ID NO: 774374 - DNA, 75 bp, synthetic construct
  source 1..75: mol_type = other DNA
aagagcggacgtaattgcccaactcaatgatgccgatggatataacgtttcaacttgggaagacgctgaattgga

SEQ ID NO: 774375 - DNA, 75 bp, synthetic construct
  source 1..75: mol_type = other DNA
cattggagtagtaaccaaagcagatttagccagtatggaacaaatatctttggtgaaatgttggttacgggaagc

SEQ ID NO: 774376 - DNA, 75 bp, synthetic construct
  source 1..75: mol_type = other DNA
atgtgccccttcagaggagcgaaagctcctcctgccgtccacttcacagggtttctccccgcagtggacctttcc

SEQ ID NO: 774377 - DNA, 75 bp, synthetic construct
  source 1..75: mol_type = other DNA
aacaatccagaaatcagtacattattgaataatcctctagtaaatataaatggtggtttaaattccacccatcaa

SEQ ID NO: 774378 - DNA, 75 bp, synthetic construct
  source 1..75: mol_type = other DNA
tcagtgggcataaaacagaaaaccaggtgttgatttatgatcgcaaaacaaaaatcaccccaacactggatttgc

SEQ ID NO: 774379 - DNA, 75 bp, synthetic construct
  source 1..75: mol_type = other DNA
gatcgtttcgtcatcccgacaagccatcgggaaatggcgggcgatgccttcgcagaacgcaacggctgcggtttt

SEQ ID NO: 774380 - DNA, 75 bp, synthetic construct
  source 1..75: mol_type = other DNA
cgctgatgcgggaggtttgccgaaaagcgaaggcgtgctgcccgccatcgaaagcctgcgtattccggtgcaata

SEQ ID NO: 774381 - DNA, 75 bp, synthetic construct
  source 1..75: mol_type = other DNA
ggaccgtagcgacagcccgaaaccgcgccagcgggttcggcggagactggcgggtgcgccagcagctgcctgtcg

SEQ ID NO: 774382 - DNA, 75 bp, synthetic construct
  source 1..75: mol_type = other DNA
tgctgccgcagcctgtgaactcagcctgtatgaatcacagctctacaactggcgcagtaaacagcaaaatcagca

SEQ ID NO: 774383 - DNA, 75 bp, synthetic construct
  source 1..75: mol_type = other DNA
agaagccccgtaaacaacatacgcctgaatttcgtaacgaagccctgaagcttgctgaacgcatcggtgttgctg

SEQ ID NO: 774384 - DNA, 75 bp, synthetic construct
  source 1..75: mol_type = other DNA
cggagcgcacaacgtgttagtaaccagtgcggttaataacaatggagttacagaactttttgccttgctgcatac

SEQ ID NO: 774385 - DNA, 75 bp, synthetic construct
  source 1..75: mol_type = other DNA
gtgatcaatacaaccaaaggcgggaaagtcatagctaaaacgctgaacaactggtggaatcaggctaaacgctca

SEQ ID NO: 774386 - DNA, 75 bp, synthetic construct
  source 1..75: mol_type = other DNA
cccgcatttacagagctggcccccagaacccaaaaagattatcggcaacatcaaagagcgttgctggcggtattc

SEQ ID NO: 774387 - DNA, 75 bp, synthetic construct
  source 1..75: mol_type = other DNA
tctctgtgcggcaaggctcggtgatgtgcttgagttgaaatggcaggatattatggataaagggatctacattga

SEQ ID NO: 774388 - DNA, 75 bp, synthetic construct
  source 1..75: mol_type = other DNA
taaaccatgtctggcgtgaaggctaccgctatatgaaggcaggagtcatgctggctgatttcacaccatcgggta

SEQ ID NO: 774389 - DNA, 75 bp, synthetic construct
  source 1..75: mol_type = other DNA
ttgtgtatgcatatttgacctacatgggactcgggctttgctaccgcgatgacccaacaaccacaatcccgcgcc

SEQ ID NO: 774390 - DNA, 75 bp, synthetic construct
  source 1..75: mol_type = other DNA
cgcggtcagcgcctcgtcgttgttctacgtgcgctatgtgttaaatgataccgggctgttcactgtgctggtact

SEQ ID NO: 774391 - DNA, 75 bp, synthetic construct
  source 1..75: mol_type = other DNA
aactatactaagtagctatcatgagtttttgattaaatgctttaatggtgatggttatgttcgttattacaaaaa

SEQ ID NO: 774392 - DNA, 75 bp, synthetic construct
  source 1..75: mol_type = other DNA
agctggactggctctctttgttgaattttgaagtgctacacgccagccgtttccacgttctcccgtggaacaaac

SEQ ID NO: 774393 - DNA, 75 bp, synthetic construct
  source 1..75: mol_type = other DNA
ttcctttaacgctaaatccgatgaaacagagcaagaataaaccgcgaattcgccaggcggttggtgccacccggc

SEQ ID NO: 774394 - DNA, 75 bp, synthetic construct
  source 1..75: mol_type = other DNA
tttttgattaaatgttttaatggtgatgattatgttctttattacaaaagaatagaaatcagcgcaaataaacag

SEQ ID NO: 774395 - DNA, 75 bp, synthetic construct
  source 1..75: mol_type = other DNA
cctctggtattgctccggatgtcagggtggtgctggagggggttcacgcatttcgtctgcgtttttttgtcaacg

SEQ ID NO: 774396 - DNA, 75 bp, synthetic construct
  source 1..75: mol_type = other DNA
attgcgactcagccgctgacgggcaatgaaacctggcaaaagattatgccaggcgagtggcggttattttgcttc

SEQ ID NO: 774397 - DNA, 75 bp, synthetic construct
  source 1..75: mol_type = other DNA
gatatgaacaggctggcccataagattcataaactacgaaagaaagtagacggtatggcaactgattctgaatca

SEQ ID NO: 774398 - DNA, 75 bp, synthetic construct
  source 1..75: mol_type = other DNA
ggagcaggtgaactggcgcgcaaaaaaaatgatgagtgatgcccgtctgtcggggctggatatcgttgcactggt

SEQ ID NO: 774399 - DNA, 75 bp, synthetic construct
  source 1..75: mol_type = other DNA
gccgaaaagcgtaaaggaagatcggcttctgtagttatcaatgttccatctccagctgcggttcatcaagtagtg

SEQ ID NO: 774400 - DNA, 75 bp, synthetic construct
  source 1..75: mol_type = other DNA
atgaatctgagtggtgcacacgcaccgttctttacgcgtaatattgtgattatcaaagataattctggtccactg

SEQ ID NO: 774401 - DNA, 75 bp, synthetic construct
  source 1..75: mol_type = other DNA
gattgatgatggctggctggtcattagtggcttcaatcccatcagtttaatgggattacgcaaacttgtgccggt

SEQ ID NO: 774402 - DNA, 75 bp, synthetic construct
  source 1..75: mol_type = other DNA
gtgcaacgcgttcctaaagacgtatttatgggcgttgatgaactgcaggtaggtatgcgtttcctggctgaaact

SEQ ID NO: 774403 - DNA, 75 bp, synthetic construct
  source 1..75: mol_type = other DNA
tcgagtaattcggttgttgtggataaaaatacgctcactcaaaaaaacctcctcgaaaacaatacatttttcagt

SEQ ID NO: 774404 - DNA, 75 bp, synthetic construct
  source 1..75: mol_type = other DNA
agaaaaacaaattatccatagttagtttaaatagcaatatcaaaaatgatattgtattgtccggagtaatgaccg

SEQ ID NO: 774405 - DNA, 75 bp, synthetic construct
  source 1..75: mol_type = other DNA
aaacaattacgcagtttgatggaacacggcgcaagtttaagtaatggcgttttacaggtatcgaaaggcctggaa

SEQ ID NO: 774406 - DNA, 75 bp, synthetic construct
  source 1..75: mol_type = other DNA
tctccggtgagtgcgccgctggactacctgcatggtcacggctccctgatctctggcctggaaacggcgctggaa

SEQ ID NO: 774407 - DNA, 75 bp, synthetic construct
  source 1..75: mol_type = other DNA
gccggtcagaacctgaaattcaacgttgaagttgtggcgattcgcgaagcgactgaagaagaactggctcatggt

SEQ ID NO: 774408 - DNA, 75 bp, synthetic construct
  source 1..75: mol_type = other DNA
cttgccaaagaaaaacaattcaaccgcaaggtagagatcaacgccaaactgcggatgttgaaaatagaactggaa

SEQ ID NO: 774409 - DNA, 75 bp, synthetic construct
  source 1..75: mol_type = other DNA
atgggactcgatatttttttccttggtcgtgatcgtgttaccgacgcggtggtatcggtaccggaaacgcgggaa

SEQ ID NO: 774410 - DNA, 75 bp, synthetic construct
  source 1..75: mol_type = other DNA
ttaacccactgattgcctggtttgagaagcattgtggaccgattgaaaatgccgtggagcgtccggtttccagaa

SEQ ID NO: 774411 - DNA, 75 bp, synthetic construct
  source 1..75: mol_type = other DNA
taagaatagttacaagataagtaaatttacatgggaaacgtatggtgatatcgttgtatcacctgaagatagaat

SEQ ID NO: 774412 - DNA, 75 bp, synthetic construct
  source 1..75: mol_type = other DNA
gaggcgtcatcagtacgtttccgttccctaatgaactgactacgatggatctcactggtaaacaattacgtagtt

SEQ ID NO: 774413 - DNA, 75 bp, synthetic construct
  source 1..75: mol_type = other DNA
ttgaattaaaacgcgcctatggtgaatcggcatccctggggaacctggcggcggacgctttactggctgcggcgg

SEQ ID NO: 774414 - DNA, 75 bp, synthetic construct
  source 1..75: mol_type = other DNA
cgataaagtactcaaaagcctcgagacacacgttttcccctttatcggcaacagggatatcaccacactcaatac

SEQ ID NO: 774415 - DNA, 75 bp, synthetic construct
  source 1..75: mol_type = other DNA
tgatttgaatcctgttgccaggtctgacggtctaaaactcaatattacagaaatgataatgcacttgatttggaa

SEQ ID NO: 774416 - DNA, 75 bp, synthetic construct
  source 1..75: mol_type = other DNA
ctaagctgcctgtacggcagtgaacgcgcaaccgttcatgatctgaaatatctggcatttctaagctgcctgtac

SEQ ID NO: 774417 - DNA, 75 bp, synthetic construct
  source 1..75: mol_type = other DNA
gcattgaccacggtaaaacgccagcatcgcccagctcttgatctttcacgcctgcctgaacttctgtcgcgtatt

SEQ ID NO: 774418 - DNA, 75 bp, synthetic construct
  source 1..75: mol_type = other DNA
gcagtggtgggctgattttctggatgccaatcgggaaaggggaattacgccgtttgactatgcgaagatcaaccg

SEQ ID NO: 774419 - DNA, 75 bp, synthetic construct
  source 1..75: mol_type = other DNA
agcggagaacatgaactgattttcaccggcgatcacaatccatggaaacccatgagtgagaacactgtaaataac

SEQ ID NO: 774420 - DNA, 75 bp, synthetic construct
  source 1..75: mol_type = other DNA
ttatctgatatcgataaattgtaggggtgatgccaatatacaaaatatcttatacctaatatgttattattctgt

SEQ ID NO: 774421 - DNA, 75 bp, synthetic construct
  source 1..75: mol_type = other DNA
aaataataaatttttaatctactcttcccgattggtattttcttttatattgagtgttttattaagttattttgt

SEQ ID NO: 774422 - DNA, 75 bp, synthetic construct
  source 1..75: mol_type = other DNA
aagaacgtcgcgggcagcttatccacgcgctggcagcacggatccaaagcgaatttggcgtaacagcggctatcg

SEQ ID NO: 774423 - DNA, 75 bp, synthetic construct
  source 1..75: mol_type = other DNA
accttaccgcagcactaattatcaacaacttaccatcatcatcaaaaaaagggtctgaacctcctccaccccata

SEQ ID NO: 774424 - DNA, 75 bp, synthetic construct
  source 1..75: mol_type = other DNA
attaatccccaccagctcgacgtgtgctttctaagctgcctgtacggcagtgaactcaaatactacacgtttagc

SEQ ID NO: 774425 - DNA, 75 bp, synthetic construct
  source 1..75: mol_type = other DNA
gcggcggctgcttctgccactgcatcagctaacagtcaaaaagcagcaaaaaccagtgaaaccaacgcaaaggtg

SEQ ID NO: 774426 - DNA, 75 bp, synthetic construct
  source 1..75: mol_type = other DNA
gcattgaccacggtaaaacgccagcatcgcccagctcttgatctttcccgcctgcctgaacttatgtcgcgtatt

SEQ ID NO: 774427 - DNA, 75 bp, synthetic construct
  source 1..75: mol_type = other DNA
tcgtattttgggtaaggagaagactcttgcacttggtgtgtatccagaagtttctctctccgaagctcgtgcaaa

SEQ ID NO: 774428 - DNA, 75 bp, synthetic construct
  source 1..75: mol_type = other DNA
gctgcttacattcataaagcagaacatctggaagaacgccgattgatgctacaatggtgggccgattttctggat

SEQ ID NO: 774429 - DNA, 75 bp, synthetic construct
  source 1..75: mol_type = other DNA
cgggagcacatgacccgcataaaccaatcagtgaaaacaccgtaaataaagccctcagagttatggggtatgaca

SEQ ID NO: 774430 - DNA, 75 bp, synthetic construct
  source 1..75: mol_type = other DNA
atctggaagaacggcgattgatgctacagtggtgggcagattatctggatgcgaatagagagaaaggtatcagcc

SEQ ID NO: 774431 - DNA, 75 bp, synthetic construct
  source 1..75: mol_type = other DNA
aatgccatgtggactattccagccgaacgcgaacctctgccaggcgtaaaattctcacaccggggctccaagatg

SEQ ID NO: 774432 - DNA, 75 bp, synthetic construct
  source 1..75: mol_type = other DNA
tccagagggatcaacgagttagcggcagagatagagccgttggcccagagcatggcgacactggcggacgaagcc

SEQ ID NO: 774433 - DNA, 75 bp, synthetic construct
  source 1..75: mol_type = other DNA
cttgctgttatgctgaatttactggtttttattcgttccagtgaactcagatacgcccgttggtctgaaattgat

SEQ ID NO: 774434 - DNA, 75 bp, synthetic construct
  source 1..75: mol_type = other DNA
gcattgaccacggtaaaacgccagcatcgcccggctcttgatctttcgcgcctgcctgaacttgtgtcgcgtatt

SEQ ID NO: 774435 - DNA, 75 bp, synthetic construct
  source 1..75: mol_type = other DNA
gcattgaccacggtaaaacgccagcatcgccccgctcttgatctttcacgcctgcctgaacttatgtcgcgtatt

SEQ ID NO: 774436 - DNA, 75 bp, synthetic construct
  source 1..75: mol_type = other DNA
gcaggtgaaaatggtctgatctttacgggagcacatgacccacgtaaaccaatcagtgaaaacaccgtaaataaa

SEQ ID NO: 774437 - DNA, 75 bp, synthetic construct
  source 1..75: mol_type = other DNA
gtccgttttggcgtagctgcggggagtgcagccacactcaatcagggaacacgtctgtgctcccatgacgatacg

SEQ ID NO: 774438 - DNA, 75 bp, synthetic construct
  source 1..75: mol_type = other DNA
cttgccgttatgctgaatttactggtttttattcgttccagtgaactcagatatgcccgttggtctgaaattgat

SEQ ID NO: 774439 - DNA, 75 bp, synthetic construct
  source 1..75: mol_type = other DNA
cgatccgattttcctcgatcctgaaaaatcgatggagattcagtacgatcttggttcagatatcgtcatgatttt

SEQ ID NO: 774440 - DNA, 75 bp, synthetic construct
  source 1..75: mol_type = other DNA
ggttcctttcatgctaacgccaccagtggcaaaaataggggctaactccggacagcaagtaaaaattaaaatcat

SEQ ID NO: 774441 - DNA, 75 bp, synthetic construct
  source 1..75: mol_type = other DNA
cgtgcgcaccacggaaacacgctatcagtacagtgatgtgaatgtcgtcgctatccaccatgccctgatgcagtc

SEQ ID NO: 774442 - DNA, 75 bp, synthetic construct
  source 1..75: mol_type = other DNA
ctgcggagttaatgcgactttcatcgcggacggggtgccacagtttgctctggttaatgggctgtacgcaatgaa

SEQ ID NO: 774443 - DNA, 75 bp, synthetic construct
  source 1..75: mol_type = other DNA
gtctgttgacgggcgatgtggcgcagaaaaaacgcctgcgtattcttgatgaatttacccgtggcgatctggata

SEQ ID NO: 774444 - DNA, 75 bp, synthetic construct
  source 1..75: mol_type = other DNA
gcgttgacattctgattggcaccacgggtcgtttaattgactatgccaagcagaaccatattaacctcggtgcca

SEQ ID NO: 774445 - DNA, 75 bp, synthetic construct
  source 1..75: mol_type = other DNA
atgttaacgccaccagtggcaaaaataggggcaaattccgggcagcaagtaaaaattaaaattatgccgaataaa

SEQ ID NO: 774446 - DNA, 75 bp, synthetic construct
  source 1..75: mol_type = other DNA
acccaggcaaaccatgaactggcaagtctcagtcgtgtatacgggtggggatatgaacgtggatatgtgaagaat

SEQ ID NO: 774447 - DNA, 75 bp, synthetic construct
  source 1..75: mol_type = other DNA
gcaggatattatggataaagggatctacattgagcaaaacaaaaccggcaccaaacaaatcaaggaatggtcacc

SEQ ID NO: 774448 - DNA, 75 bp, synthetic construct
  source 1..75: mol_type = other DNA
gtgaagaataacccatgcaaaggagtcagaaaattctctcttaaagcccgcactgtttacatcaccgatgaacag

SEQ ID NO: 774449 - DNA, 75 bp, synthetic construct
  source 1..75: mol_type = other DNA
tattttgcagatcgtctaatccagggccgggatgacaatgaattcctgactcgttatatcccgaatgcagaacag

SEQ ID NO: 774450 - DNA, 75 bp, synthetic construct
  source 1..75: mol_type = other DNA
gctgaccgtgaactggcacggcgtcaccggcaacggtgccgacgttcgcctgaactactacaccggtgaagcctt

SEQ ID NO: 774451 - DNA, 75 bp, synthetic construct
  source 1..75: mol_type = other DNA
ttatggataaagggatctacattgagcaaaacaagaccggcaccaaacaaatcaaggaatggtctccacgattac

SEQ ID NO: 774452 - DNA, 75 bp, synthetic construct
  source 1..75: mol_type = other DNA
ggtcactcaattccggtaagcaaatacaatccggacgcattgatgaccgatctgccaaaaccgctgcgcctcacg

SEQ ID NO: 774453 - DNA, 75 bp, synthetic construct
  source 1..75: mol_type = other DNA
aaatggtggcgttggcctggctgttgtggcgtccaaacatttgggttgagtacgcggggattgcacttttcttcg

SEQ ID NO: 774454 - DNA, 75 bp, synthetic construct
  source 1..75: mol_type = other DNA
gaactaccggaatggctgctggcgatagcgtatatggcaattggctggcggattggtcttggtttcgataaacaa

SEQ ID NO: 774455 - DNA, 75 bp, synthetic construct
  source 1..75: mol_type = other DNA
atcttactgcgggcactacgcccgctaccgcaaatcctgctgtcgatttttgctctgctggctatttgtgcgggt

SEQ ID NO: 774456 - DNA, 75 bp, synthetic construct
  source 1..75: mol_type = other DNA
acggtcgcgcacgccgtggtcgcctggttttcgatcgtggcgtagtggaaacgccttgttttatgcctgttggca

SEQ ID NO: 774457 - DNA, 75 bp, synthetic construct
  source 1..75: mol_type = other DNA
ggagtgttgctgccgggattgctgattgcagggctgatgtatgcggatttatcgccggatcagtggcggattgtc

SEQ ID NO: 774458 - DNA, 75 bp, synthetic construct
  source 1..75: mol_type = other DNA
ggcctgtttatggtactgctgacagcgaaagctctgttagaggagctctcatcgaccatcaactcgcttctcacc

SEQ ID NO: 774459 - DNA, 75 bp, synthetic construct
  source 1..75: mol_type = other DNA
cagaaccacattaacctcggcgccattcaagtagtcgtgctggacgaagcagatcgtatgtacgatctgggcttt

SEQ ID NO: 774460 - DNA, 75 bp, synthetic construct
  source 1..75: mol_type = other DNA
gcgattgccgatcgcaaggtgaatcagccgcgtgccttaattatggcaccgacgcgtgaacttgccgtgcagatc

SEQ ID NO: 774461 - DNA, 75 bp, synthetic construct
  source 1..75: mol_type = other DNA
aaaaatgcgtttgctgcaaacgctgatcgaagaagagtggccagacagagcgattattttcgccaacaccaaaca

SEQ ID NO: 774462 - DNA, 75 bp, synthetic construct
  source 1..75: mol_type = other DNA
catggcgatgcaaaccctgcgcttgttcagtattttgctgacggggcctgccattgcacggtttatttcaactta

SEQ ID NO: 774463 - DNA, 75 bp, synthetic construct
  source 1..75: mol_type = other DNA
tattggcttcctcgcggtacatctcccggcagcactattacttgggccgatgatcgccgggatcatcttcagtat

SEQ ID NO: 774464 - DNA, 75 bp, synthetic construct
  source 1..75: mol_type = other DNA
tattggtttcctcgcggtacatctcccggcggcactattacttgggccgatgatcgccgggatcatctttagtat

SEQ ID NO: 774465 - DNA, 75 bp, synthetic construct
  source 1..75: mol_type = other DNA
ccagtcgtcgatgagcaaatacaacccgttcgccatgaaagcagggttccagttcatccgtccggagcgtccgaa

SEQ ID NO: 774466 - DNA, 75 bp, synthetic construct
  source 1..75: mol_type = other DNA
gagctatgagagtgcgttgcgtgttttccagcgccattttcgctccgaccctggagacaacgaagcgatcgtcaa

SEQ ID NO: 774467 - DNA, 75 bp, synthetic construct
  source 1..75: mol_type = other DNA
atgatgaataacatcttaccagcattgcctaccgataaaatacctgcaaaatcaaatggatattttttcatgttg

SEQ ID NO: 774468 - DNA, 75 bp, synthetic construct
  source 1..75: mol_type = other DNA
ttcgcctgcgttacctggagatttttatgtcagatgaacatatactgaacagattgctggcacatttatgtgcgt

SEQ ID NO: 774469 - DNA, 75 bp, synthetic construct
  source 1..75: mol_type = other DNA
tgttacaacccgggcatcatcaccttctttacttaatgtctatattgatgaaattgtctatttttttgattcgac

SEQ ID NO: 774470 - DNA, 75 bp, synthetic construct
  source 1..75: mol_type = other DNA
aacatagatgattttattttgtcggtatatattgaatcggatgaagttgaccgtgttcctgagttactgaattct

SEQ ID NO: 774471 - DNA, 75 bp, synthetic construct
  source 1..75: mol_type = other DNA
cagacagtgataacacccttaaaaccctttcattaaaccagttcatcaagcagctgccgcacgttaccattcatg

SEQ ID NO: 774472 - DNA, 75 bp, synthetic construct
  source 1..75: mol_type = other DNA
ttccaagtaaaaccggagtattccagtctgttaattcacgatgcctgtcgggttagatctgtgatccacaagctg

SEQ ID NO: 774473 - DNA, 75 bp, synthetic construct
  source 1..75: mol_type = other DNA
ttttccagagatgcatttggatatcttgaactgaaccgccccgggtttcctggagagtgttttatctgtgaactc

SEQ ID NO: 774474 - DNA, 75 bp, synthetic construct
  source 1..75: mol_type = other DNA
cagatctctcagctgcgcgtggttgatattctctgcggagaaaatgaaaagggtgaacccttctatgtgttgaat

SEQ ID NO: 774475 - DNA, 75 bp, synthetic construct
  source 1..75: mol_type = other DNA
cccggtgttagcaagaacgtggcgtgtttgctggagggatggaggttaaagggggggcgtaagggggatgcggtt

SEQ ID NO: 774476 - DNA, 75 bp, synthetic construct
  source 1..75: mol_type = other DNA
ggagcatctttccctgtcagatttcatccatgctctgccaaccgttaccattgatgagattgaaaaactcgctga

SEQ ID NO: 774477 - DNA, 75 bp, synthetic construct
  source 1..75: mol_type = other DNA
cgtaggcggtttattgctgctggcaaccggattacgcatctgtggcattaaaatgttcccggtggtcaacatgct

SEQ ID NO: 774478 - DNA, 75 bp, synthetic construct
  source 1..75: mol_type = other DNA
tgggataccgtctgcgaatggggcaacgtcaccacgttagtacatactgccgatgtcatcctcgaatttagcggc

SEQ ID NO: 774479 - DNA, 75 bp, synthetic construct
  source 1..75: mol_type = other DNA
cttgttccataaaactggagaaaacaggaaagataataatacgggggacggagtttctatttgaggctaccggtc

SEQ ID NO: 774480 - DNA, 75 bp, synthetic construct
  source 1..75: mol_type = other DNA
tgggaccgttatcacgggatgacggaggagagttcgtgctgggtgcgtgtgtcgcaggcgtgggcggggccggga

SEQ ID NO: 774481 - DNA, 75 bp, synthetic construct
  source 1..75: mol_type = other DNA
acgcatcccggttatcgaagcgctgttacgacatcccggtgctttcctgaagattattgcgctacgactgtgcga

SEQ ID NO: 774482 - DNA, 75 bp, synthetic construct
  source 1..75: mol_type = other DNA
tttgctggtgggtgggttaagctgtctgacaattccctgttttgcctggcttgccgaccgttttggccgccgtag

SEQ ID NO: 774483 - DNA, 75 bp, synthetic construct
  source 1..75: mol_type = other DNA
aaaatgacctttctgaaagccaaggaagattatcaaaatctcaagatggaatggacggttgcaactaatcaacca

SEQ ID NO: 774484 - DNA, 75 bp, synthetic construct
  source 1..75: mol_type = other DNA
gggacagctggatgcagggggcgtggtcacccgcggtgccggtgatggtattcgcgtggatgtacgggcggtgga

SEQ ID NO: 774485 - DNA, 75 bp, synthetic construct
  source 1..75: mol_type = other DNA
caaccagcgtaatgatgatgaccggcaccgctcaagccaattttaccagcagcggcaccaacgggaaggtcgacc

SEQ ID NO: 774486 - DNA, 75 bp, synthetic construct
  source 1..75: mol_type = other DNA
ggccgcatcggctggtatatgtggtgtcagtggaagtacacgtcggcagttccgtcagcactgcgacagcgttgt

SEQ ID NO: 774487 - DNA, 75 bp, synthetic construct
  source 1..75: mol_type = other DNA
atgaacctgaaaaatatactctccagttccattttacagacgatgacgggataccgtattcagaaacccgctaca

SEQ ID NO: 774488 - DNA, 75 bp, synthetic construct
  source 1..75: mol_type = other DNA
gggtatacagagcgtttttttgtatctagcaaacatgaaattaaagtgaagttgctatttgcgaatgatgatttt

SEQ ID NO: 774489 - DNA, 75 bp, synthetic construct
  source 1..75: mol_type = other DNA
cgatgagggtgaggaagcgccagaaaaatcggtgtgtaaggagtgcctgaaaagggcgcaggaagcagccgccgc

SEQ ID NO: 774490 - DNA, 75 bp, synthetic construct
  source 1..75: mol_type = other DNA
taccaacacccatctggtagaacagatcccacgctacctgagtgagatggtaagctatgagtgtcgtcttatcgg

SEQ ID NO: 774491 - DNA, 75 bp, synthetic construct
  source 1..75: mol_type = other DNA
ccaggcgcaatggcgcgggcggcgaatgttggtgtaatcattgagcgtggcaataatctgaaagaaaataattaa

SEQ ID NO: 774492 - DNA, 75 bp, synthetic construct
  source 1..75: mol_type = other DNA
ccgattgtgctgcaattgcggaaatttataaccacgctgtactgcatacggcagctatctggaacgaccagactg

SEQ ID NO: 774493 - DNA, 75 bp, synthetic construct
  source 1..75: mol_type = other DNA
atggcgtagttacaggatatgcctcgtttggcgactggcgtagtttcgatggttttcgccataccgtggaacatt

SEQ ID NO: 774494 - DNA, 75 bp, synthetic construct
  source 1..75: mol_type = other DNA
ggtaaagattaccctcaaacagccgttctcagcgtttattaatattcttgcccatccggcgaccgcgatgatttc

SEQ ID NO: 774495 - DNA, 75 bp, synthetic construct
  source 1..75: mol_type = other DNA
atgccggatacgcgcgctggcgcaaaaaattgccgctatggcgtggaattatatgaactcaagccgacgcgtgaa

SEQ ID NO: 774496 - DNA, 75 bp, synthetic construct
  source 1..75: mol_type = other DNA
aattcgcattgggaagtactctcatgttttgacatttttacgtcattccgatggagttcatagctataataaatg

SEQ ID NO: 774497 - DNA, 75 bp, synthetic construct
  source 1..75: mol_type = other DNA
gagcttgatgatggccgactggctgccctgttctatccgcaggccgataccaccatctcggcccgccatgttgtg

SEQ ID NO: 774498 - DNA, 75 bp, synthetic construct
  source 1..75: mol_type = other DNA
aaaaacaactacccaccaaacatcccctacactcaggtcggcgtatatggcgactggtttaatgatggcaatcca

SEQ ID NO: 774499 - DNA, 75 bp, synthetic construct
  source 1..75: mol_type = other DNA
gtatgaaagtcgcggagcgtaccggcagcactgacaaactgctggcggtggctgactggcggcaaagcccgctgt

SEQ ID NO: 774500 - DNA, 75 bp, synthetic construct
  source 1..75: mol_type = other DNA
agaatacctgaaagcctggactgtggtggatgctggtatgtcgtggaaggtgacggacaccctggcgctgaatgc

SEQ ID NO: 774501 - DNA, 75 bp, synthetic construct
  source 1..75: mol_type = other DNA
cgctgtggtcagaggatgtcactctgtcgttgaattacacctggacccaaagtgaacaacgtgatggtgataaca

SEQ ID NO: 774502 - DNA, 75 bp, synthetic construct
  source 1..75: mol_type = other DNA
tcgagcgctggatcctggcccgtctacgccatcagaccttcttctcgcttgccgaactcaaccagtgcatccgtg

SEQ ID NO: 774503 - DNA, 75 bp, synthetic construct
  source 1..75: mol_type = other DNA
acgcaaaagccgttcgataatccgaaagtgcgtgaggcgctgaattacgccatcaaccgtcaggcgctggttaag

SEQ ID NO: 774504 - DNA, 75 bp, synthetic construct
  source 1..75: mol_type = other DNA
ggtccggtaaaagtgatgttgcaggcctacgacgaaggccgtctggacaagctttacattgtcagcaacaaattt

SEQ ID NO: 774505 - DNA, 75 bp, synthetic construct
  source 1..75: mol_type = other DNA
atgcaccagcactctctccgctgcctctggagccttatgaatacacggaatacaaagccgtgaaggttggccctg

SEQ ID NO: 774506 - DNA, 75 bp, synthetic construct
  source 1..75: mol_type = other DNA
taatgaaaccttccacacgctcagggcgctgaatgcacgccttcgggagttgctgacggacatgaataaccggcc

SEQ ID NO: 774507 - DNA, 75 bp, synthetic construct
  source 1..75: mol_type = other DNA
ccttggactcctgaaccttcataaaaaatacagtaaagccagacttaatgcagcatgtgcaagagctctgaaaac

SEQ ID NO: 774508 - DNA, 75 bp, synthetic construct
  source 1..75: mol_type = other DNA
tggctcaaaaccacttcaccatcaatgcgtcaggtacataaagctggcgaaaaacttttcgttgattactgtgga

SEQ ID NO: 774509 - DNA, 75 bp, synthetic construct
  source 1..75: mol_type = other DNA
atggtcgccgcttccaagatgcgtaaatcgcaggatcgcatggcggccagccgtccttatgcagaaaccatgcgc

SEQ ID NO: 774510 - DNA, 75 bp, synthetic construct
  source 1..75: mol_type = other DNA
agcgttgatggcatcttgtgcattcgctgccaaagatgtggttgtggcggtgggatcgaacttcaccaccctcga

SEQ ID NO: 774511 - DNA, 75 bp, synthetic construct
  source 1..75: mol_type = other DNA
tcgcaaaactggccaccgacgctgtttaataccgcgttttacagcaataaacaggtggatgacttcctggctcag

SEQ ID NO: 774512 - DNA, 75 bp, synthetic construct
  source 1..75: mol_type = other DNA
atatcccaacggtttcagtaccacgctgtggtcgtcacataaccacagcaccgcgcagaaagtgctgcaatttac

SEQ ID NO: 774513 - DNA, 75 bp, synthetic construct
  source 1..75: mol_type = other DNA
gatcctgacgttaaccctacctaccagcagatgcttgagcattataatgtcgcagttttgctgcgcggccacgta

SEQ ID NO: 774514 - DNA, 75 bp, synthetic construct
  source 1..75: mol_type = other DNA
tgacccagcgaatcatcttaaacgctataacctgtacaagaatattgccaaaactgaagcggtcgacccgacaac

SEQ ID NO: 774515 - DNA, 75 bp, synthetic construct
  source 1..75: mol_type = other DNA
gtcgcgtttgcgggatatgcaacgcccgccactggcgtggtgccgccgagtatcgcctacgcgcaaagttaccaa

SEQ ID NO: 774516 - DNA, 75 bp, synthetic construct
  source 1..75: mol_type = other DNA
ccggtgttgcagctcaacctggcgaacgcttatctgcaaggcggtcaaccacaagaagcggccaatattcttaat

SEQ ID NO: 774517 - DNA, 75 bp, synthetic construct
  source 1..75: mol_type = other DNA
tccaggtgctgcaacgctcggggttcgatccgcaggcgatgccgactttcctcgaaaaattgctcgatcaggcgc

SEQ ID NO: 774518 - DNA, 75 bp, synthetic construct
  source 1..75: mol_type = other DNA
ccgtgctaatcagatgcgcccgatggtggtgcagtcgtcggaagatttctatctggcgaaagcgcgcacactggg

SEQ ID NO: 774519 - DNA, 75 bp, synthetic construct
  source 1..75: mol_type = other DNA
gtgttacggccgggcgatacggttattgtctggaagctggaccgaatggggcgttctctgattcatcttgttgat

SEQ ID NO: 774520 - DNA, 75 bp, synthetic construct
  source 1..75: mol_type = other DNA
cacaaattgcgttgataaactccggcagtttacgtgctgatataaatgcaggcacgattacctttggtgacatta

SEQ ID NO: 774521 - DNA, 75 bp, synthetic construct
  source 1..75: mol_type = other DNA
atattttttatcagaacagcagtaaatcattctgggataagccatataccatcatcgaaaaagacggtgtgaaaa

SEQ ID NO: 774522 - DNA, 75 bp, synthetic construct
  source 1..75: mol_type = other DNA
taaaacgcattgtttttgttttctcgtttttgctggggagcatggtcagtctgttgttttttctgaccggaacag

SEQ ID NO: 774523 - DNA, 75 bp, synthetic construct
  source 1..75: mol_type = other DNA
ttggtcgtatcggtcgactggtgttgcgtcgattacttgaagtcaaaagcaacatagacattgtcgctattaatg

SEQ ID NO: 774524 - DNA, 75 bp, synthetic construct
  source 1..75: mol_type = other DNA
tattcgataaagaatacgttggttctgtcattgtcaatgagtcaaacgggcgatattacgaacctgcgcccgggc

SEQ ID NO: 774525 - DNA, 75 bp, synthetic construct
  source 1..75: mol_type = other DNA
cgatccgcaggcgatgccgaccttcctcgaaaaactgctcgatcaggcgcgctactcttcgcgtccgccggaaat

SEQ ID NO: 774526 - DNA, 75 bp, synthetic construct
  source 1..75: mol_type = other DNA
aagacggatgctcacaccggcaggcgctggcactgctctgtccccgttacggcatttcagaccggtacgcatggc

SEQ ID NO: 774527 - DNA, 75 bp, synthetic construct
  source 1..75: mol_type = other DNA
ttgttgcccctccggagttggcttacggtgatgagggatatcctcccagagtgccgccgggagcaactatgattt

SEQ ID NO: 774528 - DNA, 75 bp, synthetic construct
  source 1..75: mol_type = other DNA
agttgcaccaccgtatggcaagtgcacctggaaattctacttcgatcctactcgtggcctcgacgttatcgaatc

SEQ ID NO: 774529 - DNA, 75 bp, synthetic construct
  source 1..75: mol_type = other DNA
cgccatgatcctacagctcatgcagaaatcatggcgctgcggcagggagggctggtgctgcaaaactatcgcctg

SEQ ID NO: 774530 - DNA, 75 bp, synthetic construct
  source 1..75: mol_type = other DNA
ggcgatgattcacagccgtatcggtcgtgtggtttttggtgcgcgtgacgcgaaaaccggtgctgcgggatcatt

SEQ ID NO: 774531 - DNA, 75 bp, synthetic construct
  source 1..75: mol_type = other DNA
aaggaatactggcggatgagtgcgcggcgttgctcagtgacttctttcgcatgcgccgccaggaaattaaagcgc

SEQ ID NO: 774532 - DNA, 75 bp, synthetic construct
  source 1..75: mol_type = other DNA
ttaacaataattattgtctagcgaccttctctgtttctgtagattttgaagttactgtttctggtccagacttta

SEQ ID NO: 774533 - DNA, 75 bp, synthetic construct
  source 1..75: mol_type = other DNA
tagtgtcatcactgatgttatttatgactggcaacagccagacatgtcagaaaaatgttttttgtccggctatat

SEQ ID NO: 774534 - DNA, 75 bp, synthetic construct
  source 1..75: mol_type = other DNA
atatccttgtaaaagaagagaaactggctctggatcttctcgagcagattaagaacggtgccgatttcggcaagc

SEQ ID NO: 774535 - DNA, 75 bp, synthetic construct
  source 1..75: mol_type = other DNA
gtgctaaccacgctgttctattttattggtgcagagttacggctggttcacgaactttctcttttctggccgctg

SEQ ID NO: 774536 - DNA, 75 bp, synthetic construct
  source 1..75: mol_type = other DNA
ggcaaagagaagatcggacaggacgttggcgccgagtgcattaaaaacaaagtcgcgcctccgtttggcaaatgc

SEQ ID NO: 774537 - DNA, 75 bp, synthetic construct
  source 1..75: mol_type = other DNA
atgtatcgggagaagccactagctgaaatcattgcggctttacaggcaatcgacgaccggagatcaaaagacaat

SEQ ID NO: 774538 - DNA, 75 bp, synthetic construct
  source 1..75: mol_type = other DNA
atcgacgccacgttgtatgtcacgcttgaaccatgtgtaatgtgtgccggagcgatgatccacagtcgcattggt

SEQ ID NO: 774539 - DNA, 75 bp, synthetic construct
  source 1..75: mol_type = other DNA
gaacgaggatattgcgcttacggttgggaagctgcgcgttgagcttgaagcagcaaaatcaaaactcaacgagca

SEQ ID NO: 774540 - DNA, 75 bp, synthetic construct
  source 1..75: mol_type = other DNA
ctgttgcagtgccgtcggtgaatcctgtcgatggcctgctaatggcggaaaaaatccgtaaaggcgttgaactgc

SEQ ID NO: 774541 - DNA, 75 bp, synthetic construct
  source 1..75: mol_type = other DNA
gtcgcttccgcaatgtttgaatatcgtttcggcggtaatggcgaactttccgggcataaccttggaaacctgatg

SEQ ID NO: 774542 - DNA, 75 bp, synthetic construct
  source 1..75: mol_type = other DNA
ttatcatacttccgcttggtggctgtaccgttcatggtaataaatccctagctgatgaaaatcatcagacggtta

SEQ ID NO: 774543 - DNA, 75 bp, synthetic construct
  source 1..75: mol_type = other DNA
catcatataaaagtgggagtgacaaattcgttatacttaatactaagaatactgataattttgaaattaacatgg

SEQ ID NO: 774544 - DNA, 75 bp, synthetic construct
  source 1..75: mol_type = other DNA
ttataaaaaaacatttttttgagattgtgatgattgcttttgtggcatatttctgggcttttttcatttctgaca

SEQ ID NO: 774545 - DNA, 75 bp, synthetic construct
  source 1..75: mol_type = other DNA
cgagattggcacgaaaaaatgaagggctatatctgcgattttttacgtaaatgcaacggcttcagggtgatgtga

SEQ ID NO: 774546 - DNA, 75 bp, synthetic construct
  source 1..75: mol_type = other DNA
atggtagtgtccgctattgccagtacacctcagcatccacagcagcatatttcgatcaatcttgaatccaccgtg

SEQ ID NO: 774547 - DNA, 75 bp, synthetic construct
  source 1..75: mol_type = other DNA
aacccaacaagaaattcttgctgcctttggagagcctcagacacgcgctacgaatgatggacaggagatgtggaa

SEQ ID NO: 774548 - DNA, 75 bp, synthetic construct
  source 1..75: mol_type = other DNA
gtatgttgggggaaatttgtgtattgcgtagaccagggcgagttccatattcagagaacgaagtcatcggactgc

SEQ ID NO: 774549 - DNA, 75 bp, synthetic construct
  source 1..75: mol_type = other DNA
atggaattaaaaggttatatgtatcagggagcaatgggcaatgatgatgttgccgctgagtttcccggtattctt

SEQ ID NO: 774550 - DNA, 75 bp, synthetic construct
  source 1..75: mol_type = other DNA
gaaacgtttaatgtctcatggggtattgatgagaactaccaggttggggctgcgatttcaattgcttcaattctt

SEQ ID NO: 774551 - DNA, 75 bp, synthetic construct
  source 1..75: mol_type = other DNA
gctaacggggcgatacgggagctggaaaaattccgccagcagggttttacccctgagcaggtgattagacacagc

SEQ ID NO: 774552 - DNA, 75 bp, synthetic construct
  source 1..75: mol_type = other DNA
ggggtacttctttttactacggcttcccatggtggattgtaggtgcaggtgttgatgatgttgccagaagtttat

SEQ ID NO: 774553 - DNA, 75 bp, synthetic construct
  source 1..75: mol_type = other DNA
acaagagaacgactgaaactaaagacatacaacagtatcagggaggcagcagatcaacttccggcatggttccca

SEQ ID NO: 774554 - DNA, 75 bp, synthetic construct
  source 1..75: mol_type = other DNA
tcaataatggctgggtgaccagcagcaagaaatattttgtgcgcttccgtattcaggtattccgtcagggcgaag

SEQ ID NO: 774555 - DNA, 75 bp, synthetic construct
  source 1..75: mol_type = other DNA
aacaaaatccgcctcgacgatgagcgcggcaaagagcatatcaaggtcagtaccgagtacggcggcaagagccag

SEQ ID NO: 774556 - DNA, 75 bp, synthetic construct
  source 1..75: mol_type = other DNA
ctcaacctcggtcatctggtggatgccgggaaacagcagcgcggggaaggttttgaactgcgtaccgatctgtgg

SEQ ID NO: 774557 - DNA, 75 bp, synthetic construct
  source 1..75: mol_type = other DNA
aaatgacctgaccgcctcggtgattttgatgcacgcaccgaaaggcgtggcggtcgccagcggcgagcacctgca

SEQ ID NO: 774558 - DNA, 75 bp, synthetic construct
  source 1..75: mol_type = other DNA
cctggggcgatatgcgcaactgcctcaatcaattaatcactgaacctagtgtcgcttctgcgatgtttgaatatc

SEQ ID NO: 774559 - DNA, 75 bp, synthetic construct
  source 1..75: mol_type = other DNA
gaaggtattactgatgagaatgggtatacagaaaattttaatactgattccaaacaaacaattgatgtcagatta

SEQ ID NO: 774560 - DNA, 75 bp, synthetic construct
  source 1..75: mol_type = other DNA
acacgactcggcgcacaccgaccatgtgaccatccagaactacaagcgcaacgtgctgcgtaccccggcgaacaa

SEQ ID NO: 774561 - DNA, 75 bp, synthetic construct
  source 1..75: mol_type = other DNA
gtgaatcaggccatccagtttccggacagagaagagtgggacgagaataaaaaatgtgtatgttttcccgctctc

SEQ ID NO: 774562 - DNA, 75 bp, synthetic construct
  source 1..75: mol_type = other DNA
agtgggctgtcatggctggcatgggcaaccggtattccggtggtgctgataagtggcttcagcctgccgaacagt

SEQ ID NO: 774563 - DNA, 75 bp, synthetic construct
  source 1..75: mol_type = other DNA
cgagacataaaaacacggaccggcaatttgaatgcacccgactgataacaggcacacaggtgaatggcgttatca

SEQ ID NO: 774564 - DNA, 75 bp, synthetic construct
  source 1..75: mol_type = other DNA
gatttttatcagcgccgatgcgcaggataaggcgcaggggcaggtgcgcgaaatggctccggcgatggcaatact

SEQ ID NO: 774565 - DNA, 75 bp, synthetic construct
  source 1..75: mol_type = other DNA
aagcgttaccagaggaagaggaagaggaagaggaagaggaagatctaaatactgatctccccctaaatccccctc

SEQ ID NO: 774566 - DNA, 75 bp, synthetic construct
  source 1..75: mol_type = other DNA
aaaatgcgtttgttttcccgctcttgtaaatggtatgcagctcacttgcgctattactggagagagtctggcgaa

SEQ ID NO: 774567 - DNA, 75 bp, synthetic construct
  source 1..75: mol_type = other DNA
gagcaaagcgcgacgaagctaaaaagcttttagtgcagggcattgatccaaaagccgaacagaaagaagctcagg

SEQ ID NO: 774568 - DNA, 75 bp, synthetic construct
  source 1..75: mol_type = other DNA
aaccggtagcccaatgtttgaagtactcactcattatatgccgcagattgatggttccgatgtactttctcgcct

SEQ ID NO: 774569 - DNA, 75 bp, synthetic construct
  source 1..75: mol_type = other DNA
tggtaacgtggcgaacaaggccaacgaagccgggcagggcgcttatgacgcacaagtcaggaacgatgagcagga

SEQ ID NO: 774570 - DNA, 75 bp, synthetic construct
  source 1..75: mol_type = other DNA
aaagacggctttcttgccacaaatggcagtacgttaaccattcagtcaaatggtgcggcgtttactgccacaacc

SEQ ID NO: 774571 - DNA, 75 bp, synthetic construct
  source 1..75: mol_type = other DNA
atagaaaaatagtagatcatatctctgatatcaatttaccatatagcgcaattgcgagagaacatttactgcgtg

SEQ ID NO: 774572 - DNA, 75 bp, synthetic construct
  source 1..75: mol_type = other DNA
tgggcttgaaaaacacaactattttgttgtcagtgcccacagagaggaaaacattgataacgataaaaacattaa

SEQ ID NO: 774573 - DNA, 75 bp, synthetic construct
  source 1..75: mol_type = other DNA
cttgataagtattgtgaacatattattgttcatacgggtcaaaattatgattacgaacttaatgaaatatttttc

SEQ ID NO: 774574 - DNA, 75 bp, synthetic construct
  source 1..75: mol_type = other DNA
aaatgcggcggaaaccattggtcaggttattattaaggtagatgaagtattagaaatcgaaaaacctgaagcaat

SEQ ID NO: 774575 - DNA, 75 bp, synthetic construct
  source 1..75: mol_type = other DNA
tttgatgaatactgcgagcatattattgtccatactggtcaaaattatgattacgaattaaatgaagtgttcttc

SEQ ID NO: 774576 - DNA, 75 bp, synthetic construct
  source 1..75: mol_type = other DNA
cgattatacaaaacatgccttccacgaaatatccgtagaggatttgtacataacaaggccgtgggttgaatatat

SEQ ID NO: 774577 - DNA, 75 bp, synthetic construct
  source 1..75: mol_type = other DNA
tagaaataagcaataatgtttattttatgaaaccattcggtttcttagattatgtttctttgcaaaagaatgctc

SEQ ID NO: 774578 - DNA, 75 bp, synthetic construct
  source 1..75: mol_type = other DNA
tatgaacttaatgaggttttcttcaaggagttagagatcagaaaaccagattacttccttaatgcagcaggttct

SEQ ID NO: 774579 - DNA, 75 bp, synthetic construct
  source 1..75: mol_type = other DNA
acgacaagtaagtgactacagcatgcctaatgtgtcagataaagtcgtcagaatcgttcattcttatactgatta

SEQ ID NO: 774580 - DNA, 75 bp, synthetic construct
  source 1..75: mol_type = other DNA
atggtagcgcgtgcgttggaatggctggatgtgcaacctgaagatcgcgtactggatctgttctgcggtatgggc

SEQ ID NO: 774581 - DNA, 75 bp, synthetic construct
  source 1..75: mol_type = other DNA
gatattgaattggttaattgtgatattactgcctttaaaggtggtaatggcgcccaaaaagggactgttaagctg

SEQ ID NO: 774582 - DNA, 75 bp, synthetic construct
  source 1..75: mol_type = other DNA
agaattgtgaacgaaatatgtgatgaaagaataaaatatttctatcaaaataacagtggcataagcgtggcatta

SEQ ID NO: 774583 - DNA, 75 bp, synthetic construct
  source 1..75: mol_type = other DNA
ctgttgtaatacctgtatataactgcggaaaaacaataaaagaaactattaactctattttaattcagacgggaa

SEQ ID NO: 774584 - DNA, 75 bp, synthetic construct
  source 1..75: mol_type = other DNA
ttaagcgccgaaactgtacagacgcaaacctatgaattatgcgatggcgtcgccggcggctatgactggcaacgc

SEQ ID NO: 774585 - DNA, 75 bp, synthetic construct
  source 1..75: mol_type = other DNA
cgcccgcggctttcacgttcgcgcattgacgcgtactgcccgcgctcacgtcaatgataatctcatctgggtgcg

SEQ ID NO: 774586 - DNA, 75 bp, synthetic construct
  source 1..75: mol_type = other DNA
gaaaacgggtgaagtttgatggagtcactgagaccggggcttcaaatctgattgatggcgataatacaattcatt

SEQ ID NO: 774587 - DNA, 75 bp, synthetic construct
  source 1..75: mol_type = other DNA
ggaggttataggggagtatctggttcaacttgtgtttttatggtctatggtccagtgacactcaacaaaaaggat

SEQ ID NO: 774588 - DNA, 75 bp, synthetic construct
  source 1..75: mol_type = other DNA
gtttgcgatgatgttagttattctatttatagtgctttatttactgaaagcgaaataaaatgcatttgtattgaa

SEQ ID NO: 774589 - DNA, 75 bp, synthetic construct
  source 1..75: mol_type = other DNA
cagtttctgtgccccggaagaagcacagcgggccaatatcatttctgacatgttgcagataaaacttaactggca

SEQ ID NO: 774590 - DNA, 75 bp, synthetic construct
  source 1..75: mol_type = other DNA
acataactacacactgatgtggaccagtgatcagagccggataccaaaatcttttgcagagttaattaagaaaat

SEQ ID NO: 774591 - DNA, 75 bp, synthetic construct
  source 1..75: mol_type = other DNA
acaaacagcccggcaaatgatgttcaacattttattgatatattaaaaaaacataactgtacactgatgtggacc

SEQ ID NO: 774592 - DNA, 75 bp, synthetic construct
  source 1..75: mol_type = other DNA
cctcccctgccctgccggcgacaggccagtcggctggcctggactacggccgcgcgctttcgctacgcgaaatgg

SEQ ID NO: 774593 - DNA, 75 bp, synthetic construct
  source 1..75: mol_type = other DNA
tatgatgaaccatctacagattatttaaagaagatcatatctgacatggacagattgccggaaaaacgtaccacg

SEQ ID NO: 774594 - DNA, 75 bp, synthetic construct
  source 1..75: mol_type = other DNA
tactggctctgtgtgtgtctcatagtgcagtagcagcaaactatacgttcaataacgataatattgccctctcgt

SEQ ID NO: 774595 - DNA, 75 bp, synthetic construct
  source 1..75: mol_type = other DNA
atgcaaaagagtatgggttcgaaaccgtggacggcaagctggcgctttcgggagcgaactactttaaaaacttca

SEQ ID NO: 774596 - DNA, 75 bp, synthetic construct
  source 1..75: mol_type = other DNA
acaataaacgcggctactacgctattgataatacgctgttgtatgttgaagatgtggaaaataacaagccattaa

SEQ ID NO: 774597 - DNA, 75 bp, synthetic construct
  source 1..75: mol_type = other DNA
tggataaagacggctttcttgccacaaatggcagcacgttaaccattcagtcgaatggtgcgtcgtttactgcca

SEQ ID NO: 774598 - DNA, 75 bp, synthetic construct
  source 1..75: mol_type = other DNA
ctgttattgtgcaggcgacgcggctcgatacatcaatacttccacgcaatatcttctcgcagtcgtatctgcttt

SEQ ID NO: 774599 - DNA, 75 bp, synthetic construct
  source 1..75: mol_type = other DNA
ctggcaggcggcggggttaacactctaccagcatctgcaatcgtggtatcgtttctgctttgctttaccaatccg

SEQ ID NO: 774600 - DNA, 75 bp, synthetic construct
  source 1..75: mol_type = other DNA
gcgcctcagggagcggaaaccactatcactccccctgaattaccccgccgggaaatgaatcaaccgaaaaagtca

SEQ ID NO: 774601 - DNA, 75 bp, synthetic construct
  source 1..75: mol_type = other DNA
cagcgggagctgagcgccctgtccgcagaggcactgaatggctacgcacaggcacagaaccagctacagcgcctg

SEQ ID NO: 774602 - DNA, 75 bp, synthetic construct
  source 1..75: mol_type = other DNA
gggccggttgttaagtggtttcaggatatgtgggacaagctgaagccaattattgagtggtttaccgacagttcc

SEQ ID NO: 774603 - DNA, 75 bp, synthetic construct
  source 1..75: mol_type = other DNA
gcaggcgcgggcgttttccggtgggttactgatgttaatcataacaaacgcagttactacgccattgataatacg

SEQ ID NO: 774604 - DNA, 75 bp, synthetic construct
  source 1..75: mol_type = other DNA
ccgtaccaacctgcaagaagctcaacctcttggcaacggtaaaaaagctgaacagtgggctactggtctgaagta

SEQ ID NO: 774605 - DNA, 75 bp, synthetic construct
  source 1..75: mol_type = other DNA
cgctggtcagcagtattatcggctttgtattctgcctgtttatgttctacgccagtgaaatcaaatatctggcga

SEQ ID NO: 774606 - DNA, 75 bp, synthetic construct
  source 1..75: mol_type = other DNA
atgtcattaatcagggggctgatgtcggcgcaattgccgggaaggcaaatcaggctggtcagggcgcttacgatg

SEQ ID NO: 774607 - DNA, 75 bp, synthetic construct
  source 1..75: mol_type = other DNA
tgcgcaccctgttaccggatatgaccgcccatcagctttaccaacaaaaataccaacgctatcagcacctcattg

SEQ ID NO: 774608 - DNA, 75 bp, synthetic construct
  source 1..75: mol_type = other DNA
gtaaggggctgaaagtactggcctactgggaaaacggctggcgcgatgtcaccaactcgcgtgcaccggtcaaaa

SEQ ID NO: 774609 - DNA, 75 bp, synthetic construct
  source 1..75: mol_type = other DNA
cggtgaatttatcgttcacgaagccagccctacctcttccggcaatctcgaatggtttaccgcgcagtggggaga

SEQ ID NO: 774610 - DNA, 75 bp, synthetic construct
  source 1..75: mol_type = other DNA
ccgtgacgcttttaaccggtattaacctgttttttattccgtttcagcctgttccggctctgtggggggctatcc

SEQ ID NO: 774611 - DNA, 75 bp, synthetic construct
  source 1..75: mol_type = other DNA
ggtgaccagcggtattacatcaggtctgcgtgacggcgaagcgcatccgtatgtctatggccgctacgtcaacga

SEQ ID NO: 774612 - DNA, 75 bp, synthetic construct
  source 1..75: mol_type = other DNA
tcaaccggatgcgcgaacgttttactgatgttcacaccctgcgcgtgactggtggcccggcacactccgatgtct

SEQ ID NO: 774613 - DNA, 75 bp, synthetic construct
  source 1..75: mol_type = other DNA
ttcacgcccgcatcaaggagcacatattatgagccgaccacttctgcaactggcactcgaccactcatcacttga

SEQ ID NO: 774614 - DNA, 75 bp, synthetic construct
  source 1..75: mol_type = other DNA
tacgcaccctgctgccggatatggccgcccatcagctttaccaacaaaaataccaacgctatcaacatctcattg

SEQ ID NO: 774615 - DNA, 75 bp, synthetic construct
  source 1..75: mol_type = other DNA
tacgcaccctgctgccggatatgaccgcccatcagctttaccaacaaaaataccaacgctatcagcatctcattg

SEQ ID NO: 774616 - DNA, 75 bp, synthetic construct
  source 1..75: mol_type = other DNA
aaatatcaacgttatcagcatctcattgccgcacttcagggctttcacgcccgcatcaaggagcacacattatga

SEQ ID NO: 774617 - DNA, 75 bp, synthetic construct
  source 1..75: mol_type = other DNA
aaatatcaacgctatcagcaactcattgccgcactccagggttatcacacccgcattaaggaacacacattatga

SEQ ID NO: 774618 - DNA, 75 bp, synthetic construct
  source 1..75: mol_type = other DNA
cggcgctcgctgcccgtgtcggtacgggcgtttatcgcaacttcagcgaagcgcagcgcaacttgcaacatccgg

SEQ ID NO: 774619 - DNA, 75 bp, synthetic construct
  source 1..75: mol_type = other DNA
attgccgctgaaattctcgcggcgttggatggcaccctggatgactttatcatcgctcgcgaaaccgaaggtcag

SEQ ID NO: 774620 - DNA, 75 bp, synthetic construct
  source 1..75: mol_type = other DNA
tttgctgccagtgtcgggatgggggtgatgacgcagaaggccatcagtgcccttccgcatccggtcaatgccgcc

SEQ ID NO: 774621 - DNA, 75 bp, synthetic construct
  source 1..75: mol_type = other DNA
ggcacagacacagtggcacccggtatggcacgaaccggaaacggaagtggatgcgacggggaacagttggcgctg

SEQ ID NO: 774622 - DNA, 75 bp, synthetic construct
  source 1..75: mol_type = other DNA
aaagagacctacaacattctgaagaagaaagaagcggttggccgccgcctggactttatgatgcaggagttcaac

SEQ ID NO: 774623 - DNA, 75 bp, synthetic construct
  source 1..75: mol_type = other DNA
catcgcgcgcgaaaccgaaggtcaggcgctgaaagtgttgattgagcagcgtctggaaggcgtcaccgccgaagt

SEQ ID NO: 774624 - DNA, 75 bp, synthetic construct
  source 1..75: mol_type = other DNA
gtcgaacactcttgcgtcgaaatctatcaatgccgaagtgacaaactccgccatcgagctgaaagtgttgattga

SEQ ID NO: 774625 - DNA, 75 bp, synthetic construct
  source 1..75: mol_type = other DNA
aaaaggaaaaacgaaaggtggtgtaatggactggaaaattaaagataatgttgatccaaaagatatagtaaatcg

SEQ ID NO: 774626 - DNA, 75 bp, synthetic construct
  source 1..75: mol_type = other DNA
gaagcgcagggagacatacagcgggatgcgcggggtggtaccggagacgttcacggaccggcagtacagctacag

SEQ ID NO: 774627 - DNA, 75 bp, synthetic construct
  source 1..75: mol_type = other DNA
acgcgctgaacgcggtcacggaagtggtgttcaccggggaccggggcggtgaaatccgccaccggctggcgcgtg

SEQ ID NO: 774628 - DNA, 75 bp, synthetic construct
  source 1..75: mol_type = other DNA
gactgccataaacatccttcctcactgactcagttactcgcacaaaaaaaagccgcctttctggatgaccctctg

SEQ ID NO: 774629 - DNA, 75 bp, synthetic construct
  source 1..75: mol_type = other DNA
tatggatagatatttaggtcataattataaaaatatgacaggtgagtcaggccccagcactaagaacttaatgga

SEQ ID NO: 774630 - DNA, 75 bp, synthetic construct
  source 1..75: mol_type = other DNA
gccggggagcgggttttacagccccggcgaaggactggcagtacggcggggggagcaggggcactggcttatcag

SEQ ID NO: 774631 - DNA, 75 bp, synthetic construct
  source 1..75: mol_type = other DNA
ccgcaacattcaattctgttttgcgtgcctgctccagattttgcgatgtttttttgcccagcgcagtgagaacgt

SEQ ID NO: 774632 - DNA, 75 bp, synthetic construct
  source 1..75: mol_type = other DNA
tgtgacatggtggagaaaccggcgaaagtcgcagcactgatggcacagtggctggttaatggctggtgtcgtgaa

SEQ ID NO: 774633 - DNA, 75 bp, synthetic construct
  source 1..75: mol_type = other DNA
gcttgatgaacatggcataaatgctcagattcaggcgcggcagttgtatcacgatcgcgaagaagtgacggtgca

SEQ ID NO: 774634 - DNA, 75 bp, synthetic construct
  source 1..75: mol_type = other DNA
atgaataaggttgtattgttgtgccgtcctggctttgaaaaagagtgtgctgcggaaattaccgataaagccggt

SEQ ID NO: 774635 - DNA, 75 bp, synthetic construct
  source 1..75: mol_type = other DNA
acactgacggtggcttcgacctgagcaagctggacatactgtgtcaggagatcttgaccgaagcagagagtgcgg

SEQ ID NO: 774636 - DNA, 75 bp, synthetic construct
  source 1..75: mol_type = other DNA
aagtcagtcactgagttcaccgcaaggtcagatcgcacagtctgacactgaaatcattgctcaggtatacgacaa

SEQ ID NO: 774637 - DNA, 75 bp, synthetic construct
  source 1..75: mol_type = other DNA
gatggcgataagttaatccgtgagctgccgttcagttcattaatttttgcccgccagtggtttgtagtgggggaa

SEQ ID NO: 774638 - DNA, 75 bp, synthetic construct
  source 1..75: mol_type = other DNA
aaaagaaaatggttaactgaatatacaaccaggcagaatgcaacaatgtctttgcgccgcgtcacgttgcgacct

SEQ ID NO: 774639 - DNA, 75 bp, synthetic construct
  source 1..75: mol_type = other DNA
agtctatcaatgccgaagtgacaaactccgccatcgagctgaaagtgttgattgagcagatgcgcgagcagattc

SEQ ID NO: 774640 - DNA, 75 bp, synthetic construct
  source 1..75: mol_type = other DNA
cgcgagtcgaacactcttgcgtcgaagtctatcaatgccgaagtgacaaactccgccatcgagctgaaagtgttg

SEQ ID NO: 774641 - DNA, 75 bp, synthetic construct
  source 1..75: mol_type = other DNA
ttctttattgccccaggttgctgctataccggttactcctacagccacaataattcgccgttctatatgggcatt

SEQ ID NO: 774642 - DNA, 75 bp, synthetic construct
  source 1..75: mol_type = other DNA
ggaagaggcatttcatgtgtttattcctgcggatgagtgggatgaacgcctggcgaacgggatgtgggcggtgga

SEQ ID NO: 774643 - DNA, 75 bp, synthetic construct
  source 1..75: mol_type = other DNA
gccagatactgctgataatttcagaatgcttattagtgatagcagcaacactgaagttattttctggcatagttt

SEQ ID NO: 774644 - DNA, 75 bp, synthetic construct
  source 1..75: mol_type = other DNA
gtgtgggagacggggtatcaggtctggggtaacacgatacaggagaaggaccacggcggggtggaacagaacctg

SEQ ID NO: 774645 - DNA, 75 bp, synthetic construct
  source 1..75: mol_type = other DNA
tgacgtaacaaaagtcgaattaaatcgcagtactgatgctagtgaggatgaagacaaggaagaaactattgatac

SEQ ID NO: 774646 - DNA, 75 bp, synthetic construct
  source 1..75: mol_type = other DNA
tcaacgaaaagtattttatgtattgcgaagatattgatatatgttggcgagctaaaaaacacttcaatacttcag

SEQ ID NO: 774647 - DNA, 75 bp, synthetic construct
  source 1..75: mol_type = other DNA
atgatttatgtttcggtaatttctcatggtcatttcaaaactcttaaggaattaggagcagtatcaaaattaaat

SEQ ID NO: 774648 - DNA, 75 bp, synthetic construct
  source 1..75: mol_type = other DNA
ggttttggttttgtaggtgcatatagcaaatctgatcgtactaatcgagtaggcagcctggcggctgcggcttgt

SEQ ID NO: 774649 - DNA, 75 bp, synthetic construct
  source 1..75: mol_type = other DNA
ctatctaaaatcaagtccgaacctatcgagcgcttcgaaatatcattactagcaataactgatcctacattgcga

SEQ ID NO: 774650 - DNA, 75 bp, synthetic construct
  source 1..75: mol_type = other DNA
ttggagacagaatcaacgtcgaagcatttttcaaagactcagaaaaatgctgtgactttgcctatcaaattaaag

SEQ ID NO: 774651 - DNA, 75 bp, synthetic construct
  source 1..75: mol_type = other DNA
atttaacctgctggataaagacgatgcagcgattaccgatgccgcaactgatgaccagtttgcagttggtatcgt

SEQ ID NO: 774652 - DNA, 75 bp, synthetic construct
  source 1..75: mol_type = other DNA
ggtatcacatgaataaaaagcactggatttcggtgtatcccggcgaggaaatctccgaagcgttacttcgcgatc

SEQ ID NO: 774653 - DNA, 75 bp, synthetic construct
  source 1..75: mol_type = other DNA
aaattggcggcaagatttttatgttgtcgtcagagctgcgcggcgttccctttatcaatttgaagtccgatccac

SEQ ID NO: 774654 - DNA, 75 bp, synthetic construct
  source 1..75: mol_type = other DNA
gggtagaaattctggcctataaagctgaaatttctgccgaaggcatgtcgcttaaaaaattattacccattacgt

SEQ ID NO: 774655 - DNA, 75 bp, synthetic construct
  source 1..75: mol_type = other DNA
cagtcgtattgacttcatgttacaggcgaggtttcgacctgactgctatattgaagtgaaatcggttacgttagc

SEQ ID NO: 774656 - DNA, 75 bp, synthetic construct
  source 1..75: mol_type = other DNA
actcgtgattacgttccgggcggcgctcgggcaaataaagtctggttccagcgtgaaaacatgctgaaagtgatt

SEQ ID NO: 774657 - DNA, 75 bp, synthetic construct
  source 1..75: mol_type = other DNA
ggggtggcgattcctgggcttccgctgacaacttcatgaacggtcgtaccaacggtgttgcaacctaccgtaact

SEQ ID NO: 774658 - DNA, 75 bp, synthetic construct
  source 1..75: mol_type = other DNA
caggctgtgcgtgacggacgggctggggcgcacgcgttatcatcagtgggacgcgcagaatcaggtgacggcgta

SEQ ID NO: 774659 - DNA, 75 bp, synthetic construct
  source 1..75: mol_type = other DNA
ccggggacgcatcactgaaatcagcggcgagcagcagcgtccgtgcatccgtctgtattacgaactggcggcgca

SEQ ID NO: 774660 - DNA, 75 bp, synthetic construct
  source 1..75: mol_type = other DNA
gcagcggggcacgctgtacctgcgaggccagggtggtgaatgcgccggggaacggggcgtttgtgtcaccggatg

SEQ ID NO: 774661 - DNA, 75 bp, synthetic construct
  source 1..75: mol_type = other DNA
gccccgggctgtctccctgcgccctgctgccgctgaggcactcattgcaggaagaatattaccggcactctgcct

SEQ ID NO: 774662 - DNA, 75 bp, synthetic construct
  source 1..75: mol_type = other DNA
ccgttatgatgcggaacaccggatggtggaagtgacgacagcgcgggagacataccggtatgtgtacgatgcgct

SEQ ID NO: 774663 - DNA, 75 bp, synthetic construct
  source 1..75: mol_type = other DNA
tccagtggaatgaagacgggcagctcatgcggcacacggactgctccggctcgcagacggcgtggttctacgacg

SEQ ID NO: 774664 - DNA, 75 bp, synthetic construct
  source 1..75: mol_type = other DNA
catgcataaactgcgtgagcaggggcatcgcgtggtggtgctttccaatactaaccgcctgcataccaccttctg

SEQ ID NO: 774665 - DNA, 75 bp, synthetic construct
  source 1..75: mol_type = other DNA
tatgctgctgtgatgtacggtgaatctcacaacatgaattccgacgacggtgatgttgtgaacaaaacacaaaac

SEQ ID NO: 774666 - DNA, 75 bp, synthetic construct
  source 1..75: mol_type = other DNA
caaactctgaccgtactgatttccagtctagtgatagtaaaggtgaaaaagcagaagtttgggcactgtcaacaa

SEQ ID NO: 774667 - DNA, 75 bp, synthetic construct
  source 1..75: mol_type = other DNA
tccggagccattcacctccctgcccctggactaccgctacgctttcggcggtgaatgccgcgtggaggcagacag

SEQ ID NO: 774668 - DNA, 75 bp, synthetic construct
  source 1..75: mol_type = other DNA
gaaatgacggcaggtgtccttatgttctcatcgacaggtgaggtgctgatagacaaaaaactgcggataaccggc

SEQ ID NO: 774669 - DNA, 75 bp, synthetic construct
  source 1..75: mol_type = other DNA
tcaatactgacaccctgaccgtggcgctgacctggcgctttctgctgcccaacagcacaccaccggtgcgggtac

SEQ ID NO: 774670 - DNA, 75 bp, synthetic construct
  source 1..75: mol_type = other DNA
cgcaacggagtacgtgccgcgtatattcataaagcagaacatctggaagaacgtcggcttatgctgcaatggtgg

SEQ ID NO: 774671 - DNA, 75 bp, synthetic construct
  source 1..75: mol_type = other DNA
atctggaagaacggcgactgatgttgcaatggtgggccgattttctagatgcgaaccgggagaagggtatcagcc

SEQ ID NO: 774672 - DNA, 75 bp, synthetic construct
  source 1..75: mol_type = other DNA
agtgaaaacaccgtaaataaagccctcagagttatggggtatgacacaacccaggatatctgtgggcatggattc

SEQ ID NO: 774673 - DNA, 75 bp, synthetic construct
  source 1..75: mol_type = other DNA
cgataaagtactcaaaagcctcgagactcacgtttttgaaccgccccgggtttcctggagagtgttttatctgtg

SEQ ID NO: 774674 - DNA, 75 bp, synthetic construct
  source 1..75: mol_type = other DNA
gcagattttctggatgcaaacagggaggagtgtatcagtccgtttgaatatgcaaagattaacaatccattaaaa

SEQ ID NO: 774675 - DNA, 75 bp, synthetic construct
  source 1..75: mol_type = other DNA
gatgagtcatcaggagcgcaacggagtacgtgccgcgtatattcataaagcagaacatctggaagaacgtcggct

SEQ ID NO: 774676 - DNA, 75 bp, synthetic construct
  source 1..75: mol_type = other DNA
tgctgtggaacgtcagatgagccatcaggaacgtaacggtgtacgtgctgcttacattcataaagcagaacatct

SEQ ID NO: 774677 - DNA, 75 bp, synthetic construct
  source 1..75: mol_type = other DNA
agtgcattgattgaatcaggtttgtggtcccgcgatgcagtggaacgtcagatgagtcatcaggagcgtaatggt

SEQ ID NO: 774678 - DNA, 75 bp, synthetic construct
  source 1..75: mol_type = other DNA
gctgcgtatatccataaagccgaacatctggaagaacgtcgacttatgctacagtggtgggcagattttctggat

SEQ ID NO: 774679 - DNA, 75 bp, synthetic construct
  source 1..75: mol_type = other DNA
catcttgtgccactcagcaaacaggttgtagccatactggcagaacttcagacatgggctggtgaaaatggtctg

SEQ ID NO: 774680 - DNA, 75 bp, synthetic construct
  source 1..75: mol_type = other DNA
cacacagcgataaagtactcaaaagcctcgagacacacgttttcccctttatcggcaaccgggatatcacaacac

SEQ ID NO: 774681 - DNA, 75 bp, synthetic construct
  source 1..75: mol_type = other DNA
tggtgggccgattttctggatgcaaacagagaaaaatttatcagtccatttgaatatgcaaagattaataatcca

SEQ ID NO: 774682 - DNA, 75 bp, synthetic construct
  source 1..75: mol_type = other DNA
acgggatgaggcccgaaaactgatttcggagggggttgacccttgcgaacagaaaagagctaaaaaagtagtccc

SEQ ID NO: 774683 - DNA, 75 bp, synthetic construct
  source 1..75: mol_type = other DNA
ctcgctgttatgctgaatttactggtttttattcgttccagtgaactcagataagcccgatggtctgaaattgat

SEQ ID NO: 774684 - DNA, 75 bp, synthetic construct
  source 1..75: mol_type = other DNA
cttgcagttatgctgaatttactggtttttattcgttccagtgaactcagataagcccggtggtctgaaattgat

SEQ ID NO: 774685 - DNA, 75 bp, synthetic construct
  source 1..75: mol_type = other DNA
gcattgaccacggtaaaacgccagcatcgccctgctctcgatctttcgcgcctgcctgaacttatgtcgcgtatt

SEQ ID NO: 774686 - DNA, 75 bp, synthetic construct
  source 1..75: mol_type = other DNA
gaaaatggtctgatctttacgggagcacacgacccacgtaaaccaatcagtgaaaataccgtaaataaggccctc

SEQ ID NO: 774687 - DNA, 75 bp, synthetic construct
  source 1..75: mol_type = other DNA
atgcgaacaccacatcttgtgccactcagccaacaggctgtagccatactggcagaacttcagacatgggcaggt

SEQ ID NO: 774688 - DNA, 75 bp, synthetic construct
  source 1..75: mol_type = other DNA
cggggctccaagatgcgaacaccacatcttgtgccactcagcaaacaggctgtagccatactgacagaactacag

SEQ ID NO: 774689 - DNA, 75 bp, synthetic construct
  source 1..75: mol_type = other DNA
cataaagcagaacatctggaagaacgtcgactgatgctacagtggtgggcagattttctggatgcgaacagagat

SEQ ID NO: 774690 - DNA, 75 bp, synthetic construct
  source 1..75: mol_type = other DNA
tgccgttatgctgaatttactggtttttattcgttccagtgaactcagatacgcccgctggtctgaaattgatat

SEQ ID NO: 774691 - DNA, 75 bp, synthetic construct
  source 1..75: mol_type = other DNA
ggatgtctgtggtcatggattccgggcgatggcatgtagtgcattaatagaatcaggtttgtggtcccgcgatgc

SEQ ID NO: 774692 - DNA, 75 bp, synthetic construct
  source 1..75: mol_type = other DNA
gcattgaccacggtaaaacgccagcatcgccctgctctcgatctttctcgcctgcctgaacttttgtcgcgtatt

SEQ ID NO: 774693 - DNA, 75 bp, synthetic construct
  source 1..75: mol_type = other DNA
gcattgaccacggtaaaacgccagcatcgccctgctctcgatctttcacgcctgcctgaacttgtgtcgcgtatt

SEQ ID NO: 774694 - DNA, 75 bp, synthetic construct
  source 1..75: mol_type = other DNA
gcattgaccacggtaaaacgccagcatcgccctgctctagatctttcccgcctgcctgaacttctgtcgcgtatt

SEQ ID NO: 774695 - DNA, 75 bp, synthetic construct
  source 1..75: mol_type = other DNA
acgcatgttttcccttttatcggcaaccgagatatcacaaaactcaacactccggacctgcttatcccagttcgc

SEQ ID NO: 774696 - DNA, 75 bp, synthetic construct
  source 1..75: mol_type = other DNA
attgaatcaggtttgtggtcccgcgatgctgtggaacgtcagatgagccatcaggagcgtaatggtgtacgtgct

SEQ ID NO: 774697 - DNA, 75 bp, synthetic construct
  source 1..75: mol_type = other DNA
gaccacggtaaaacgccagcatcgccccgctcttgatctttctcgcctgcctgaacttttgtcgcgtattagcag

SEQ ID NO: 774698 - DNA, 75 bp, synthetic construct
  source 1..75: mol_type = other DNA
tcgactgatgctacagtggtgggcagattttctgggtgcgaacagagaacaatgtatcagcccgtttgaatatgc

SEQ ID NO: 774699 - DNA, 75 bp, synthetic construct
  source 1..75: mol_type = other DNA
aatatctgctgtaatgcgttatgccgtacagtctggcatcatcagatataacccggctctggatatggctggtgc

SEQ ID NO: 774700 - DNA, 75 bp, synthetic construct
  source 1..75: mol_type = other DNA
gattttctggatgcaaatcgagaagagcacatcagtccctttgaatatgcaaagattaacaatccattaaaatag

SEQ ID NO: 774701 - DNA, 75 bp, synthetic construct
  source 1..75: mol_type = other DNA
gaatcaggtttgtggtcccgcgatgctgtggaacgtcagatgagccatcaggaacgtaacggtgtacgtgctgct

SEQ ID NO: 774702 - DNA, 75 bp, synthetic construct
  source 1..75: mol_type = other DNA
gccatactggcagaacttcagacatgggctggtgaaaatggtctgatctttacgggagcacatgacccacgtaaa

SEQ ID NO: 774703 - DNA, 75 bp, synthetic construct
  source 1..75: mol_type = other DNA
cagatgagccatcaggaacgtaacggtgtacgcgctgcgtatatccataaagccgaacatctggaagaacgccgg

SEQ ID NO: 774704 - DNA, 75 bp, synthetic construct
  source 1..75: mol_type = other DNA
gattaaaaaagttgatgccagtggtaaacacgacgtcgctcagcgcctacaacagcgcgtcacggccattatgcg

SEQ ID NO: 774705 - DNA, 75 bp, synthetic construct
  source 1..75: mol_type = other DNA
ttaatagaatcaggtttgtggtcccgcgatgctgttgaacgtcagatgagccatcaggaacgtaacggtgtacgt

SEQ ID NO: 774706 - DNA, 75 bp, synthetic construct
  source 1..75: mol_type = other DNA
ctcaggtgaaaggtgatcgcaccgcgcaggccatcgctagacagctcaaggccatgggctgtgaccggtacgaca

SEQ ID NO: 774707 - DNA, 75 bp, synthetic construct
  source 1..75: mol_type = other DNA
acatgacccacgtaaaccaatcagtgaaaacaccgtaaataaagccctgagggttatggggtatgacacaaccca

SEQ ID NO: 774708 - DNA, 75 bp, synthetic construct
  source 1..75: mol_type = other DNA
caatggtgggccgattttctggatgcaaacagagaaaaatttatcagtccatttgaatatgcaaagattaataat

SEQ ID NO: 774709 - DNA, 75 bp, synthetic construct
  source 1..75: mol_type = other DNA
ggaagaacgtcgacttatgctacagtggtgggcagattttctggatgcgaacagagaacaatgtatcagcccgtt

SEQ ID NO: 774710 - DNA, 75 bp, synthetic construct
  source 1..75: mol_type = other DNA
tggtgggcagattttctgaatgcgaacagagagaaatgtatcagtccgtttgattatgcaaagatcaacaatcca

SEQ ID NO: 774711 - DNA, 75 bp, synthetic construct
  source 1..75: mol_type = other DNA
cgtattaacagttataaaggtcagcctgtcacccggcttgctgttatgctgaatttactggtttttattcgctcc

SEQ ID NO: 774712 - DNA, 75 bp, synthetic construct
  source 1..75: mol_type = other DNA
gcgactgatgctacagtggtgggctgattttctggatgcgaacagagagaagggtatcagtccgtttgactatgc

SEQ ID NO: 774713 - DNA, 75 bp, synthetic construct
  source 1..75: mol_type = other DNA
gtaacggtgtacgtgctgcttacattcataaagcagaacatctggaagaacgccgcttgatgctacaatggtggg

SEQ ID NO: 774714 - DNA, 75 bp, synthetic construct
  source 1..75: mol_type = other DNA
gctggtgaaaatggtctgatctttacgggagcacatgacccgcgtaaaccaatcagtgaaaataccgtaaataag

SEQ ID NO: 774715 - DNA, 75 bp, synthetic construct
  source 1..75: mol_type = other DNA
tccgcaatgaagcaggtatgccggtcgcggaacgtgtggtaggccatatttgcatctccggtcccagtctgatga

SEQ ID NO: 774716 - DNA, 75 bp, synthetic construct
  source 1..75: mol_type = other DNA
ttgatcagtaaaaatcgcggcaccgtttccgttgcgccgccgtttggctatgaattgtgccagcgccgcgtgaat

SEQ ID NO: 774717 - DNA, 75 bp, synthetic construct
  source 1..75: mol_type = other DNA
cggttgttatcgctaaacctgaaaaaaggcgatcgcgtggcgctgattgccgaaaccagtagcgggttcgtagag

SEQ ID NO: 774718 - DNA, 75 bp, synthetic construct
  source 1..75: mol_type = other DNA
acatctggaagaacgtcggcttatgctgcaatggtgggcagattttctggatgcaaacagggaggagtgtatcag

SEQ ID NO: 774719 - DNA, 75 bp, synthetic construct
  source 1..75: mol_type = other DNA
ttgctgactggtttagtgaacaattctcaacaggcgtgttgattgtgccttgtatgctgacgctggcaattcctg

SEQ ID NO: 774720 - DNA, 75 bp, synthetic construct
  source 1..75: mol_type = other DNA
tcaatctgccgtaatgcgttatgccgtacagtctggcatcatcagatataatcctgctctggatatggctggcgc

SEQ ID NO: 774721 - DNA, 75 bp, synthetic construct
  source 1..75: mol_type = other DNA
aaaggagatgatgctaaaacttccgagaaagctatggaagtttttaatagagcaaaagaaaaagcattcataatt

SEQ ID NO: 774722 - DNA, 75 bp, synthetic construct
  source 1..75: mol_type = other DNA
aatcagagttattctgcatattttgaagcccatttacttggtccttcacctaagaaagaacttgaagagttagaa

SEQ ID NO: 774723 - DNA, 75 bp, synthetic construct
  source 1..75: mol_type = other DNA
ttagagaaaaaggttacttggacggagtaggaaatcaagtattagtattagggaaagatgaaaatgggaaaacgg

SEQ ID NO: 774724 - DNA, 75 bp, synthetic construct
  source 1..75: mol_type = other DNA
attatccattctctgatgctgacaacacccgcaagtcaactgacgctggtgattgttccgactatcagccttgct

SEQ ID NO: 774725 - DNA, 75 bp, synthetic construct
  source 1..75: mol_type = other DNA
catggctattatgacgcattacagtgcgcccgcgctcatggacttcttccgttacgtttgccgctcaaggaggtt

SEQ ID NO: 774726 - DNA, 75 bp, synthetic construct
  source 1..75: mol_type = other DNA
ctccttatgctccaacgtgctggcttcttgagcctgcgttttgcggcaccggatctcgagcagtttgcctcagac

SEQ ID NO: 774727 - DNA, 75 bp, synthetic construct
  source 1..75: mol_type = other DNA
gtaagaggagattcatgtgctgcagggtctagggatagcgcctttattgcaacaactgcagacataaatgagact

SEQ ID NO: 774728 - DNA, 75 bp, synthetic construct
  source 1..75: mol_type = other DNA
atgatggatggccgcatcggtcatatcagacaagcgtttgaaacgaatggactgcttaatatccagataatggcg

SEQ ID NO: 774729 - DNA, 75 bp, synthetic construct
  source 1..75: mol_type = other DNA
taaatcgctgatggcagacgcttcgtgggatccatccggtttagtaccgcgagctgtaagggcgctgaaaaaggc

SEQ ID NO: 774730 - DNA, 75 bp, synthetic construct
  source 1..75: mol_type = other DNA
cgaaataacgaaggtcgtttgtttgtccatctttttatttggactcaccctgattcagatcattgtgatggggtg

SEQ ID NO: 774731 - DNA, 75 bp, synthetic construct
  source 1..75: mol_type = other DNA
ttactttatggtcttttggttcatatgctgtacaatttgtatatcgtattgattcaagacctcctgatgttgttt

SEQ ID NO: 774732 - DNA, 75 bp, synthetic construct
  source 1..75: mol_type = other DNA
tggcattgttatcaggtgcagttaatgcgactgattttgtgtatcgtgtagactcacgtcctccaggagaagttt

SEQ ID NO: 774733 - DNA, 75 bp, synthetic construct
  source 1..75: mol_type = other DNA
ttgagattctcaggagaatcccgctgacccggcggcgtgtttgccgttgttccgtgtcagtggtggcgcattata

SEQ ID NO: 774734 - DNA, 75 bp, synthetic construct
  source 1..75: mol_type = other DNA
cgctttatgcagacaatttttgtgcctggtaacactgttttcgatgatatggcaatgccatttcaggaagctcgt

SEQ ID NO: 774735 - DNA, 75 bp, synthetic construct
  source 1..75: mol_type = other DNA
gcaaagatgagcggcaaaacgccagccgtagtggtggtgcatgagaatcgtggactgaatccgtatatcgaagat

SEQ ID NO: 774736 - DNA, 75 bp, synthetic construct
  source 1..75: mol_type = other DNA
tcggcgcagctggatgcactggatgaacgtaaggggagatatctgaccggttcggaactaaaaacggcggtgtac

SEQ ID NO: 774737 - DNA, 75 bp, synthetic construct
  source 1..75: mol_type = other DNA
gatatctattagaatagctgatattatcatttcagataatcaagcaatagctgattatgtggaaaataagtacaa

SEQ ID NO: 774738 - DNA, 75 bp, synthetic construct
  source 1..75: mol_type = other DNA
tttgtttattcaaaaggccagatgttgttttaatattgggggtatctggttgtttatttctaccaatttataaac

SEQ ID NO: 774739 - DNA, 75 bp, synthetic construct
  source 1..75: mol_type = other DNA
ccgctggccactggagcagggatatcgccagctacgccagcttgatgccctgttgtcaacgccaagattattggc

SEQ ID NO: 774740 - DNA, 75 bp, synthetic construct
  source 1..75: mol_type = other DNA
tggtgaaccgcagaattatatgctgatggcatttggtttgacacatcgcgattacgatgcaagatttcaatattc

SEQ ID NO: 774741 - DNA, 75 bp, synthetic construct
  source 1..75: mol_type = other DNA
ttcgttcgatgttcatgcgatgatttatagtgatgatgcaccatcattagaaaatcatctgcataaagtcttcaa

SEQ ID NO: 774742 - DNA, 75 bp, synthetic construct
  source 1..75: mol_type = other DNA
atattggttcatttggcgaagatgtatataaaattggaatgacacgccgccttgaaccacttgatcgtgttcgtg

SEQ ID NO: 774743 - DNA, 75 bp, synthetic construct
  source 1..75: mol_type = other DNA
caaccagacccgctcagcaaaccgataaggataacagtccatccgtgccatcccctgaaatctcccggcagcgga

SEQ ID NO: 774744 - DNA, 75 bp, synthetic construct
  source 1..75: mol_type = other DNA
cagaaaatactgccaatgatttgttgaggtattgtccagtacctgaaagtaaaatcgaaatcattcacaatgggg

SEQ ID NO: 774745 - DNA, 75 bp, synthetic construct
  source 1..75: mol_type = other DNA
attgatggtatatcatttataaatagaaatcgaaatcaaattattaagaaaggtttatctcaagcacaacgtttt

SEQ ID NO: 774746 - DNA, 75 bp, synthetic construct
  source 1..75: mol_type = other DNA
taaagacttcagtatccggctgcagtgcagcggtggtctgagtgagtccggctatgccagtattcatatttcttt

SEQ ID NO: 774747 - DNA, 75 bp, synthetic construct
  source 1..75: mol_type = other DNA
atgcgtgaagaaagccctttactcagcccggagatgacgcgggaatttttacaaagccagctcacgggtgaggag

SEQ ID NO: 774748 - DNA, 75 bp, synthetic construct
  source 1..75: mol_type = other DNA
tcgttattataatgacactatgggtgtcattgataataaaatagagtctatttaccatttagactggccccctga

SEQ ID NO: 774749 - DNA, 75 bp, synthetic construct
  source 1..75: mol_type = other DNA
gtctgccggttgatgcgttaaccatgatggggctggatttcccgttacgcccgctgcggctgtggtcagcatggc

SEQ ID NO: 774750 - DNA, 75 bp, synthetic construct
  source 1..75: mol_type = other DNA
aaaagccccgtaagcaacactcgcctgaatttcgcaatgaagccctgaagcttgcagaatgcatcggtgttgctg

SEQ ID NO: 774751 - DNA, 75 bp, synthetic construct
  source 1..75: mol_type = other DNA
taccgagattgcacgtctcaaacgccagctggcagaacgggatgaagagctggctatcctcccaaaggccgctac

SEQ ID NO: 774752 - DNA, 75 bp, synthetic construct
  source 1..75: mol_type = other DNA
cgtgcgaatgcgtgaagaaagcccactacttagcccagagatgacgcgtgaatttttacaaagccaattgactgg

SEQ ID NO: 774753 - DNA, 75 bp, synthetic construct
  source 1..75: mol_type = other DNA
tcggcggggattgacccttgcgaacagaaaagagctaaaaaagtagcccctggtttacaactctcttttgaacat

SEQ ID NO: 774754 - DNA, 75 bp, synthetic construct
  source 1..75: mol_type = other DNA
acggtaaaacgccagcatcgccctgcactggatctttcacgcctgcctgaacttctgtcgcgtattgacggttat

SEQ ID NO: 774755 - DNA, 75 bp, synthetic construct
  source 1..75: mol_type = other DNA
gttccagtgaactcagatatgcccgctggtctgaaattgatattgacaatgccatgtggactattccagccgaac

SEQ ID NO: 774756 - DNA, 75 bp, synthetic construct
  source 1..75: mol_type = other DNA
cattgttgaccctgacctggtcgtcattggtggtggcttatcgaatttcccggcaatcacaacgcaactggcgga

SEQ ID NO: 774757 - DNA, 75 bp, synthetic construct
  source 1..75: mol_type = other DNA
ttggcggcgggctgattttcaacggcaaaccgattaccggtaaaagctacattaccggcgagtttggccatatgc

SEQ ID NO: 774758 - DNA, 75 bp, synthetic construct
  source 1..75: mol_type = other DNA
gccggaaacagaagatggtacgctgtatgccgccaatgtccccgctgccagcggtaaaccgctgcgtgccgacct

SEQ ID NO: 774759 - DNA, 75 bp, synthetic construct
  source 1..75: mol_type = other DNA
gtgagtaaactctcagtcagaggtgactcacaagacaaaacagtttcaaccagtaaaaaacgtaaacagcattcg

SEQ ID NO: 774760 - DNA, 75 bp, synthetic construct
  source 1..75: mol_type = other DNA
ggataacatccgtaacgccatgaatatgctgatggaagtggcgctgctggtcggttcgattttcgcagcaattaa

SEQ ID NO: 774761 - DNA, 75 bp, synthetic construct
  source 1..75: mol_type = other DNA
aaccaggcggcgctggcggaatttatgcgcgggctgggctttgtgccgttgattgccaccaccgcgttagcaaca

SEQ ID NO: 774762 - DNA, 75 bp, synthetic construct
  source 1..75: mol_type = other DNA
gtttgaagagcgcacgtcgcggattatcaaaaacttaccttatatcgccatcgtgggagcattgattgccgccgt

SEQ ID NO: 774763 - DNA, 75 bp, synthetic construct
  source 1..75: mol_type = other DNA
cattgacctggtttctgccggaacaggggaaatgaaaaagcgctacggaatgatttatgtcgataaagacaacga

SEQ ID NO: 774764 - DNA, 75 bp, synthetic construct
  source 1..75: mol_type = other DNA
gcaaaacttctcctggttttattcagaattaaaacatcaccgtattgcacattacatttattatctggctacgga

SEQ ID NO: 774765 - DNA, 75 bp, synthetic construct
  source 1..75: mol_type = other DNA
agtgaagtgtcgatcttcacccttgagaaagcatattccgcaggcgtaacgccggaacaatcacaaacgctgatt

SEQ ID NO: 774766 - DNA, 75 bp, synthetic construct
  source 1..75: mol_type = other DNA
gttcgccggtagtttctgcttttgcacttttcccgctggtggcgattttctaccagtttggctggaagcaaagcc

SEQ ID NO: 774767 - DNA, 75 bp, synthetic construct
  source 1..75: mol_type = other DNA
taccagtttggctggaagcaaagtctggtcgccgccgtggtggtactgatgacccgtgtagtggtggtgcgctat

SEQ ID NO: 774768 - DNA, 75 bp, synthetic construct
  source 1..75: mol_type = other DNA
gctgctggggatcgcgataactcacgacctgcgtcatcgtgatgaaaatgacattgatgccagcgggctttcggt

SEQ ID NO: 774769 - DNA, 75 bp, synthetic construct
  source 1..75: mol_type = other DNA
gtttgaagaacgcacgtcgcggattatcaaaaacttaccgtatatcgctattgtcggggcgctgattgccgccgt

SEQ ID NO: 774770 - DNA, 75 bp, synthetic construct
  source 1..75: mol_type = other DNA
aaccaggcagctctggcggaatttatgcgcggactgggttttgtgccgttgattgccaccaccgcgttagccacc

SEQ ID NO: 774771 - DNA, 75 bp, synthetic construct
  source 1..75: mol_type = other DNA
agtgaagtgtcgatcttcactctggagaaagcgtactccgcaggcgtaacgccggaacaatcgcaaacactaatc

SEQ ID NO: 774772 - DNA, 75 bp, synthetic construct
  source 1..75: mol_type = other DNA
ctggctcttgcgggtacattcctctggcgagcctttcacaaaacagataccgaagaagcggcaaagccggttgat

SEQ ID NO: 774773 - DNA, 75 bp, synthetic construct
  source 1..75: mol_type = other DNA
tcggggcgatcccttcaattgacgacgaacgcgctaatgttgacctgagcggtgagcgtggtaaacgtgcctcaa

SEQ ID NO: 774774 - DNA, 75 bp, synthetic construct
  source 1..75: mol_type = other DNA
atttatgcagcgaaattagcaggcgctcatgattttatttctgaattgcgtgaggggtataacaccattgtcggg

SEQ ID NO: 774775 - DNA, 75 bp, synthetic construct
  source 1..75: mol_type = other DNA
cttcgcggatacctgctcatctcagggagcaggcaagagagctggcgaaaatatggcaggagaatattccggtca

SEQ ID NO: 774776 - DNA, 75 bp, synthetic construct
  source 1..75: mol_type = other DNA
atattaatcagggtgaattgatttcaatcatcgtaccgcgtgatacttatttcaataatgtttatgaacttcatt

SEQ ID NO: 774777 - DNA, 75 bp, synthetic construct
  source 1..75: mol_type = other DNA
acgataatacgacgctgttactggaagcgggaaccatgttttatggagaacaaacgaaagcgcttgttcaagggc

SEQ ID NO: 774778 - DNA, 75 bp, synthetic construct
  source 1..75: mol_type = other DNA
ggcagcgatgcgaacgtttacctgtctccggtaaccctgactgaagttaaagcggcagcagcggatacttacctg

SEQ ID NO: 774779 - DNA, 75 bp, synthetic construct
  source 1..75: mol_type = other DNA
tctctaactgccaggctgctgatggcactaaacaggatgacgtaagcaaactgggcgtgaactggaccggcggta

SEQ ID NO: 774780 - DNA, 75 bp, synthetic construct
  source 1..75: mol_type = other DNA
gataaggtacttgttcatagaggtttctctaccctcaatgtcattgttattgctttggtcgtcgttgttctgtgc

SEQ ID NO: 774781 - DNA, 75 bp, synthetic construct
  source 1..75: mol_type = other DNA
tggtcagattgttgcaccggttattcgccttgcacaaatctggcaggatttccagcaggttggtatatcagttac

SEQ ID NO: 774782 - DNA, 75 bp, synthetic construct
  source 1..75: mol_type = other DNA
ggttggcggcggcattgtgatacatggcatcgcgccgctgcatcatgcgattgaacatttcgccgggcagcagag

SEQ ID NO: 774783 - DNA, 75 bp, synthetic construct
  source 1..75: mol_type = other DNA
aaattacgacgcgtcagaaaatgaaatgtttaaagttcttaaactggcaaatctttctgtcgttaacaatcaacc

SEQ ID NO: 774784 - DNA, 75 bp, synthetic construct
  source 1..75: mol_type = other DNA
tcaggtaacagttgcaggccaagaacatcgcgcattcctgcacatctgcgggagcagtcaaaagagctggcgaaa

SEQ ID NO: 774785 - DNA, 75 bp, synthetic construct
  source 1..75: mol_type = other DNA
cgaaagcaaccgctggctgctgaatgacgtgtgccgtctggcggtggagaatctgctgtatgccgcccggaaacg

SEQ ID NO: 774786 - DNA, 75 bp, synthetic construct
  source 1..75: mol_type = other DNA
ccggaaccagtggcgaaagtgtgctatgcacaaatggtgaaacagttcctgagtcgtgacccgttcgaatgcgtg

SEQ ID NO: 774787 - DNA, 75 bp, synthetic construct
  source 1..75: mol_type = other DNA
cggcgaaatcagtcgtccgctgtcagactttagttatatggaacatagcccggcgcgggttattgcccagcgagt

SEQ ID NO: 774788 - DNA, 75 bp, synthetic construct
  source 1..75: mol_type = other DNA
agacatcgactataccgaagatgttgagtatctctttatgaacgctctaatcgattctgcttatcgaaataattt

SEQ ID NO: 774789 - DNA, 75 bp, synthetic construct
  source 1..75: mol_type = other DNA
tctgcgggttataccttagtgctggcgcaaagcagcggcacgacggtaaaaatgaccatcatcagcgaagcgggt

SEQ ID NO: 774790 - DNA, 75 bp, synthetic construct
  source 1..75: mol_type = other DNA
gccatccacacgtatggccgtcgtctcaactggcatccgcatgtacatgtgtctgtaacctgtggaggtctgaat

SEQ ID NO: 774791 - DNA, 75 bp, synthetic construct
  source 1..75: mol_type = other DNA
atggaaaaattaaatagcatggagcgttttctaattctttttgaacgtttcgtgaagaaactcgaagagtctgga

SEQ ID NO: 774792 - DNA, 75 bp, synthetic construct
  source 1..75: mol_type = other DNA
aatgtgcgctgacccgacggtgaaattaatgatcactgagggaattaattacagcataacgattaatgatacacg

SEQ ID NO: 774793 - DNA, 75 bp, synthetic construct
  source 1..75: mol_type = other DNA
gaagatggcacacataaagagcttatctccaaaaaagacagtttatatgcatatttatatcagttgcaggcataa

SEQ ID NO: 774794 - DNA, 75 bp, synthetic construct
  source 1..75: mol_type = other DNA
ggaacaaggtcgccacggtgacgtcacctggctgctggaacagggcgcgattggcggagttccactgctggaatt

SEQ ID NO: 774795 - DNA, 75 bp, synthetic construct
  source 1..75: mol_type = other DNA
catcggaagctgcagatttgattgctgatggcgcagttgtcaccgtctcctcctccagtggaatgggttgcccgg

SEQ ID NO: 774796 - DNA, 75 bp, synthetic construct
  source 1..75: mol_type = other DNA
ccgggcttactggcaaaagtgatcgctggctcctacccctccggtccatcatcaatgacgcctccgttaatctgg

SEQ ID NO: 774797 - DNA, 75 bp, synthetic construct
  source 1..75: mol_type = other DNA
aggtaaaaaaaacaattgaccgattaaactttatttctttgcccgcattagtctggagagaggatggacgtcatt

SEQ ID NO: 774798 - DNA, 75 bp, synthetic construct
  source 1..75: mol_type = other DNA
tctttgtccgcaatgagctgatgccattgcagaaacgactgcaggaactgaatgattgggccggagatgaaatta

SEQ ID NO: 774799 - DNA, 75 bp, synthetic construct
  source 1..75: mol_type = other DNA
taaaagccagactacagccgaagcattcagcttcggtgatcccgttcctgttctggaccgccgcgaactgctgga

SEQ ID NO: 774800 - DNA, 75 bp, synthetic construct
  source 1..75: mol_type = other DNA
attaacggcagtcatgcaggcttcatcatgtatatgaccgacgccgcgcagaaccaggaagatgtgaacaacctc

SEQ ID NO: 774801 - DNA, 75 bp, synthetic construct
  source 1..75: mol_type = other DNA
tcctttgcaaaaacgatttatggaaataaacgcatggctcggggagaaacttatagaattttctccatatgagct

SEQ ID NO: 774802 - DNA, 75 bp, synthetic construct
  source 1..75: mol_type = other DNA
ggggatgtggagaaggccagtctcgtttttgttcgtaatgagttaataccattgcagaaacgactaaaggaacta

SEQ ID NO: 774803 - DNA, 75 bp, synthetic construct
  source 1..75: mol_type = other DNA
ttgacggacttgcgcgaaccttccgcgctgccgtgcatcacagctcaccgattgcagtaaagtgcaatattctga

SEQ ID NO: 774804 - DNA, 75 bp, synthetic construct
  source 1..75: mol_type = other DNA
tgtcagaagttgcggcgaaggatgagtttctaaatatcaagaacgtgagccgggatgacatgatggcagcacatc

SEQ ID NO: 774805 - DNA, 75 bp, synthetic construct
  source 1..75: mol_type = other DNA
gtttctgaatatcaaaaatgtcagtcgcgatgacatgatggcagcacaccgcgtaccgccgcaaatgatggggat

SEQ ID NO: 774806 - DNA, 75 bp, synthetic construct
  source 1..75: mol_type = other DNA
atttctgaacatcaagagcgtgagtcgtgatgacatgatggccgcgcatcgtgttccgccacagatgatggggat

SEQ ID NO: 774807 - DNA, 75 bp, synthetic construct
  source 1..75: mol_type = other DNA
ccattccatccgccctgctcaacgagtccgccacgctgttccgtcgaaagtattacattaacggcagtcatgctg

SEQ ID NO: 774808 - DNA, 75 bp, synthetic construct
  source 1..75: mol_type = other DNA
ttgacggactggcgcgaacattccgcgctgccgtacaccacagctcaccgatcgcagtgaaatgcaacattctga

SEQ ID NO: 774809 - DNA, 75 bp, synthetic construct
  source 1..75: mol_type = other DNA
cgttggtatgagccgcccgtcagctttgacggactggcgcgcaccttccgcgctgccgtgcatcacagttccccg

SEQ ID NO: 774810 - DNA, 75 bp, synthetic construct
  source 1..75: mol_type = other DNA
tgtcagaagtcgcggcgaaggatgaatttctgagcatcaagaacgtcagccgtgatgacatgatggcggcacacc

SEQ ID NO: 774811 - DNA, 75 bp, synthetic construct
  source 1..75: mol_type = other DNA
gcggcatggcccttgctgccacagcgcttccggccatcaccctgatacgtatactggcctgcctgttactgatga

SEQ ID NO: 774812 - DNA, 75 bp, synthetic construct
  source 1..75: mol_type = other DNA
ctcagaatgtaaatgcttatttcgaacctaatgcgaacacggattacaccactggtaatttaactaatacggctt

SEQ ID NO: 774813 - DNA, 75 bp, synthetic construct
  source 1..75: mol_type = other DNA
atgaacatgccagcccgtactcctgttatgccattagcgcaaactcgtgaggaaataaatgctacggcggcatcg

SEQ ID NO: 774814 - DNA, 75 bp, synthetic construct
  source 1..75: mol_type = other DNA
atggaaaaagggaaaattgttgaacagggtaaacataaggaactgctttctgaaccggaaagtttatacagttac

SEQ ID NO: 774815 - DNA, 75 bp, synthetic construct
  source 1..75: mol_type = other DNA
ttgatttcagctggtttatacctgtcgtaataaaatatcgacgtatctttatcgaggtaattgtcgcttccattg

SEQ ID NO: 774816 - DNA, 75 bp, synthetic construct
  source 1..75: mol_type = other DNA
cgctggttatgcttgcgcagtatcacggtattgctgtttcacctaaagatatagaacatcagtttgatcctgaaa

SEQ ID NO: 774817 - DNA, 75 bp, synthetic construct
  source 1..75: mol_type = other DNA
attcggtaatccggttgcttgaagacaccatagagcgggaagggtattcggctgagtttgaaattcagcgttcca

SEQ ID NO: 774818 - DNA, 75 bp, synthetic construct
  source 1..75: mol_type = other DNA
tgattaaagaaatcaaagagcgcataggtagcctggacgttcgagacaatattgaacgccgtgcttatgaaattg

SEQ ID NO: 774819 - DNA, 75 bp, synthetic construct
  source 1..75: mol_type = other DNA
caggagcgtcaggataacctgctggcagctatctggcaggacagcaaagggttcggctacgcgacgttggatatc

SEQ ID NO: 774820 - DNA, 75 bp, synthetic construct
  source 1..75: mol_type = other DNA
acgcgggtttattgtcaggtaagttgctgacggatgtttgctggtcatgcatttttcctatccgggttgcagggc

SEQ ID NO: 774821 - DNA, 75 bp, synthetic construct
  source 1..75: mol_type = other DNA
actgaaagtgctcatgttatcggtgaaagcaccatgaaatggggagagtggcgaacgatccccggtgccggtgaa

SEQ ID NO: 774822 - DNA, 75 bp, synthetic construct
  source 1..75: mol_type = other DNA
cattgcccggagtcggctgcgcaacccgactattccagttgtcacgaacggtgcaatagtgatccacacccaacg

SEQ ID NO: 774823 - DNA, 75 bp, synthetic construct
  source 1..75: mol_type = other DNA
actttaaacgacaaccatattgcacatttaaacgcgaaaaccactacaaaactggaatatttaaacttaagcaat

SEQ ID NO: 774824 - DNA, 75 bp, synthetic construct
  source 1..75: mol_type = other DNA
gtggagcgaattaaagaagcttacaattcgaacatggcatctcttgatttgtcatatcttgatttgagtgaattg

SEQ ID NO: 774825 - DNA, 75 bp, synthetic construct
  source 1..75: mol_type = other DNA
tagacgccgcaactgggacgaagttagtaaaactatcgtaagtaatcttcgtcatattcccttgcatcccatcag

SEQ ID NO: 774826 - DNA, 75 bp, synthetic construct
  source 1..75: mol_type = other DNA
atgaaaaaactgttactgatctgtttgccggtgcttctcaccggctgtagcgcgttcaatcaactggttgagcgc

SEQ ID NO: 774827 - DNA, 75 bp, synthetic construct
  source 1..75: mol_type = other DNA
atgaaaaaactgttactgatctgtttgccggtgcttctcaccggcaccggctgtagcgcgttcaatcaactggtt

SEQ ID NO: 774828 - DNA, 75 bp, synthetic construct
  source 1..75: mol_type = other DNA
caaactgaataatccgcgccaggaagtcagttttgtttacgataatcaactactgcatctcaaacagggcatttc

SEQ ID NO: 774829 - DNA, 75 bp, synthetic construct
  source 1..75: mol_type = other DNA
ccctggttgatgaaagcattatccattgtcgggacgctggcaatgtttctggtgggcggcggcattgtggtgcat

SEQ ID NO: 774830 - DNA, 75 bp, synthetic construct
  source 1..75: mol_type = other DNA
tgcatatgctggaggcgcgtaaacataaagaagatccggcgcagagccagcagcgtctggagaaactggcggcgc

SEQ ID NO: 774831 - DNA, 75 bp, synthetic construct
  source 1..75: mol_type = other DNA
ggtggcgatgatattaccgactgttttaaatctgattcttggatttatcatcggcggcatcgtggtgctgggagt

SEQ ID NO: 774832 - DNA, 75 bp, synthetic construct
  source 1..75: mol_type = other DNA
ggcgatatttcaggactccaatcgttcccttctgccgaattgcttatcggatgctatccttgccagggatttagc

SEQ ID NO: 774833 - DNA, 75 bp, synthetic construct
  source 1..75: mol_type = other DNA
caaggtggggcaaggaaggcagatagaaagattaatacactatatttagagtttgcccgtgctttgagtaaaatt

SEQ ID NO: 774834 - DNA, 75 bp, synthetic construct
  source 1..75: mol_type = other DNA
ttgaacatttcgccgggcagcaaagtgcagtggtggcgatgatattaccgactgttttaaatctgattcttggat

SEQ ID NO: 774835 - DNA, 75 bp, synthetic construct
  source 1..75: mol_type = other DNA
acaggcgtgctgggcggactgaatgcagggaatccggggcaggtactggctggcggtctgaatccggcagtggca

SEQ ID NO: 774836 - DNA, 75 bp, synthetic construct
  source 1..75: mol_type = other DNA
tcatagcgttgccgatcctgttgccgcaattgaaaatgcggaaatcgtgattgtcggcggtggcaacactttcca

SEQ ID NO: 774837 - DNA, 75 bp, synthetic construct
  source 1..75: mol_type = other DNA
cgacgctaccgggcaaggcctggctggaacatgcgctgccgctgattgctgaacagttgcaaggtcgccattccg

SEQ ID NO: 774838 - DNA, 75 bp, synthetic construct
  source 1..75: mol_type = other DNA
gcacaactgggcggaaacaatgcggcttccggtgctgcaggggcattcagtggtgaacttgctgcccggtatatc

SEQ ID NO: 774839 - DNA, 75 bp, synthetic construct
  source 1..75: mol_type = other DNA
gttgataaggcgttaaaactgcttgatgaagctgaacgcctggggtcaacatctgcccgttccacctttatcagc

SEQ ID NO: 774840 - DNA, 75 bp, synthetic construct
  source 1..75: mol_type = other DNA
cggaaagttattttaataccgcgatcaaaaacgctgtcgcgaaaggtgatgttgataaggcgttaaaactgcttg

SEQ ID NO: 774841 - DNA, 75 bp, synthetic construct
  source 1..75: mol_type = other DNA
ggaaggcgttatgcgcctgacaccggcgttggggcagcagaaactttatgtactggtctttaccacggaaaaaga

SEQ ID NO: 774842 - DNA, 75 bp, synthetic construct
  source 1..75: mol_type = other DNA
gcgcagaccctgagctacgaagtgttcctcgggctttccctgatgggcgtggtggcgcaggtcggttcattcaac

SEQ ID NO: 774843 - DNA, 75 bp, synthetic construct
  source 1..75: mol_type = other DNA
gtcgcgatggtacccggggaccggggcatgtgctgaatggcgacaatacagacgaaaacaaacagccgaatctgg

SEQ ID NO: 774844 - DNA, 75 bp, synthetic construct
  source 1..75: mol_type = other DNA
ccgataatctgagtgaacaggaacgtcagcaaatcagcatgctggccaccattgcctcaggtattgcgggcgggc

SEQ ID NO: 774845 - DNA, 75 bp, synthetic construct
  source 1..75: mol_type = other DNA
tttgatgaactgagtaaaatatatgataaaagtcacccggtcggagagttaacagtggatgggcagactatcagg

SEQ ID NO: 774846 - DNA, 75 bp, synthetic construct
  source 1..75: mol_type = other DNA
tcagcgggtatggccggcggtattgccagtggcgatgtggctggcgcggctgctggggctggtgccgggaagaac

SEQ ID NO: 774847 - DNA, 75 bp, synthetic construct
  source 1..75: mol_type = other DNA
agcggcaggcatatctggcaaaactgcgtgatacgccggaatacaaaaaggaacaggaaaagtatggtaccggca

SEQ ID NO: 774848 - DNA, 75 bp, synthetic construct
  source 1..75: mol_type = other DNA
acggtggtaggtgcggacggctttggctatgccaacgatcgtggtaactgggtgaagatccctcagattggtcgc

SEQ ID NO: 774849 - DNA, 75 bp, synthetic construct
  source 1..75: mol_type = other DNA
ggagattttgcgccgctttgttccgctccttaaacccgacggattgctgtttgcgggtcactctgaaaactttag

SEQ ID NO: 774850 - DNA, 75 bp, synthetic construct
  source 1..75: mol_type = other DNA
aatcagcacagcggtgagtggcaggcgtttatcaattcgctgaccacgaatctgacggcatttttccgtgaggca

SEQ ID NO: 774851 - DNA, 75 bp, synthetic construct
  source 1..75: mol_type = other DNA
tcttgataaaatccccccctggtcaatgtatcaaactttccacggtgtaaattatctgttctgtatttcatcgat

SEQ ID NO: 774852 - DNA, 75 bp, synthetic construct
  source 1..75: mol_type = other DNA
tttatcttgatggcatggtagaaagactgaagaaaaatccacagctttatcacctttatgggccgtggtggcctg

SEQ ID NO: 774853 - DNA, 75 bp, synthetic construct
  source 1..75: mol_type = other DNA
catttattaactcgctgactaccaacctgacggcatttttccgtgaagagcatcatttcccactgctcgcggctc

SEQ ID NO: 774854 - DNA, 75 bp, synthetic construct
  source 1..75: mol_type = other DNA
ctacttaagcccgacggattgctgtttgcgggtcactctgaaaactttagccatcttgagcgcagcttcacgttg

SEQ ID NO: 774855 - DNA, 75 bp, synthetic construct
  source 1..75: mol_type = other DNA
aagaatatttatattcgcttggtttcagaactcacgcagatgagtgaagaaactataaaatcgcaaatgttataa

SEQ ID NO: 774856 - DNA, 75 bp, synthetic construct
  source 1..75: mol_type = other DNA
tcttccatccccatgaaaaaacaccattcatgctctctattgtaagcaaagtagaagatacagaacttggattga

SEQ ID NO: 774857 - DNA, 75 bp, synthetic construct
  source 1..75: mol_type = other DNA
atgaacaatatcaaaatgatcacactcttccatccacatgacaaaacaccattcatgatctccattgtaagcaaa

SEQ ID NO: 774858 - DNA, 75 bp, synthetic construct
  source 1..75: mol_type = other DNA
gaagacgaatatggattgcaggacgttctcgattgcagtggtggcgatctcgggaatcgtgacctggcgcaggca

SEQ ID NO: 774859 - DNA, 75 bp, synthetic construct
  source 1..75: mol_type = other DNA
gggataaggattttgaagacgatctcaacgttgtcgccagcgtgtttttcccccacgagccaacgctatggtctg

SEQ ID NO: 774860 - DNA, 75 bp, synthetic construct
  source 1..75: mol_type = other DNA
cggataagctgtagtccggcactgaatatagcactccccaataagctgttctccagactgggcctgccagaagta

SEQ ID NO: 774861 - DNA, 75 bp, synthetic construct
  source 1..75: mol_type = other DNA
ggcgaggaagcgactgtctataaacgcgaccgcatcgtcttgaataactgtcagttacaaaatccacagcgttga

SEQ ID NO: 774862 - DNA, 75 bp, synthetic construct
  source 1..75: mol_type = other DNA
gcgcttatccgtttgcctacgctcaaaaaggagttacacggccaggactttgccgacatgctggaaaactacaag

SEQ ID NO: 774863 - DNA, 75 bp, synthetic construct
  source 1..75: mol_type = other DNA
ccggtttgtatcgatactgatccacttaacccgacattttctaactataaggcgctgaacgttcgccagctggat

SEQ ID NO: 774864 - DNA, 75 bp, synthetic construct
  source 1..75: mol_type = other DNA
ttggcggcggttcagtatttttaaatacaagttatgataagtatgttttagctgatattaattcagatctgataa

SEQ ID NO: 774865 - DNA, 75 bp, synthetic construct
  source 1..75: mol_type = other DNA
tgcactggtgatgaacattgatgacatgagcaagcgtctgaaagcgcttgagcgcaaagttaatcagcaagacta

SEQ ID NO: 774866 - DNA, 75 bp, synthetic construct
  source 1..75: mol_type = other DNA
gtgaagaatccctacctgacttacgcgcgcatggcgcaaattttagataccacgccacagcccgcgcagaacatt

SEQ ID NO: 774867 - DNA, 75 bp, synthetic construct
  source 1..75: mol_type = other DNA
ggcgcggtggagtcggatcagggtgtgccttttgaacagtcagaagcctatctgttaaataaagataagattgat

SEQ ID NO: 774868 - DNA, 75 bp, synthetic construct
  source 1..75: mol_type = other DNA
ccggggcgacatcagcaacagcggggcgtactttgagcagccgcagcggctgccggggcagtactttgacgaaga

SEQ ID NO: 774869 - DNA, 75 bp, synthetic construct
  source 1..75: mol_type = other DNA
acggggcgcggagagagccagaaaatctggtattaccacacggacctgacgggcacggtacacgaggtaaccgcg

SEQ ID NO: 774870 - DNA, 75 bp, synthetic construct
  source 1..75: mol_type = other DNA
aaaccacggtattgcaagatttacgtaaaatttgcacgccacaggcgtcattatcagacgaagcgtgggaaaagt

SEQ ID NO: 774871 - DNA, 75 bp, synthetic construct
  source 1..75: mol_type = other DNA
gcgccgttccagcgttctctacaggtcgtcacgggtggcgatgttctcgtttactgcgatccgccttacctgcct

SEQ ID NO: 774872 - DNA, 75 bp, synthetic construct
  source 1..75: mol_type = other DNA
atgacgcacacactgaatccggtcatcactgtcactgtgtccggtcctgtgggcagcggtaaaagttacgtactg

SEQ ID NO: 774873 - DNA, 75 bp, synthetic construct
  source 1..75: mol_type = other DNA
cctgaaaaaaccgtcgaacaatatggcaatgaggctgtatatattcagtactcttcggggattgttggcggcaat

SEQ ID NO: 774874 - DNA, 75 bp, synthetic construct
  source 1..75: mol_type = other DNA
ctaaccatcgccagattggtaacggcccgatgctggtgttaagcgacaagtcgctgattgcgccgccaaaactta

SEQ ID NO: 774875 - DNA, 75 bp, synthetic construct
  source 1..75: mol_type = other DNA
caccggcgtacccacggtggtgatggggccagcgacgcgccacggacattgtgcggcatcgattgccgattgccg

SEQ ID NO: 774876 - DNA, 75 bp, synthetic construct
  source 1..75: mol_type = other DNA
tctgtgcgcatatggacgaagtgggatttatggtgcgcagcatctcccgcgaaggggcgattgatgtgctgccgg

SEQ ID NO: 774877 - DNA, 75 bp, synthetic construct
  source 1..75: mol_type = other DNA
gacattggcgcacgttcttatgacgaagtcatgcaggcgggagttcgtccgggcgatcgcgtcaccttcgatact

SEQ ID NO: 774878 - DNA, 75 bp, synthetic construct
  source 1..75: mol_type = other DNA
cactggcgtacccacagtggtgatggggcctgcaaacccgccacggacattgcgccgcatcgattgccgactgcc

SEQ ID NO: 774879 - DNA, 75 bp, synthetic construct
  source 1..75: mol_type = other DNA
gccgatgctggtgttaagcgataaatcgctgattgcgccgccaaaacttaccgcgtggattgaaaccgtggcggc

SEQ ID NO: 774880 - DNA, 75 bp, synthetic construct
  source 1..75: mol_type = other DNA
gccatggtgaatgccggtgtgcgtggtggtgaacagtttgatgccatcaaccagagtgtcgcgcgttttgcttct

SEQ ID NO: 774881 - DNA, 75 bp, synthetic construct
  source 1..75: mol_type = other DNA
atgctcgaaaccgatcaggcatgggcattctttgaaaaactggaagacagctacttccggcaaaaagaacagcaa

SEQ ID NO: 774882 - DNA, 75 bp, synthetic construct
  source 1..75: mol_type = other DNA
gcgaaaaactttgattatggcgcggctaaccatcgtcagattggtaacggcccgatgctggtgttaagcgataaa

SEQ ID NO: 774883 - DNA, 75 bp, synthetic construct
  source 1..75: mol_type = other DNA
gcgagtgggcagaaagtgcgacggacagtttttcgcaggttaaaagcgtggccacgcagacctttgacggtattg

SEQ ID NO: 774884 - DNA, 75 bp, synthetic construct
  source 1..75: mol_type = other DNA
gtaaggcgtcatttttccggactggagactgacgccagaaaaaccgccagtgctgttgaacagggcctgagccgc

SEQ ID NO: 774885 - DNA, 75 bp, synthetic construct
  source 1..75: mol_type = other DNA
ggcgtgctcgaagtgtatatgggccattatatgcgtgaatggctggcagaacaggggatggtgaaatcgggggaa

SEQ ID NO: 774886 - DNA, 75 bp, synthetic construct
  source 1..75: mol_type = other DNA
atacctttagcgcgaagtatcaacaagaaccaggtgtttccgggccgctgaaagtcggcaactcgctggtagatg

SEQ ID NO: 774887 - DNA, 75 bp, synthetic construct
  source 1..75: mol_type = other DNA
agaaccaggtgtttccgggccgctgaaagtcggcaactcgctggtagatgcgtttactttgcaatactacgaagg

SEQ ID NO: 774888 - DNA, 75 bp, synthetic construct
  source 1..75: mol_type = other DNA
cattcagcgagcaggcagtggcagcaatggaaaaagagttgagtaaactccagcttaccgacagctaccagctac

SEQ ID NO: 774889 - DNA, 75 bp, synthetic construct
  source 1..75: mol_type = other DNA
atggataaatttgatagcgtgttgaatgaagcggtgaaatatcaaaaaacccccccgggaaaaggggggggagtc

SEQ ID NO: 774890 - DNA, 75 bp, synthetic construct
  source 1..75: mol_type = other DNA
actatatgcgtgagtggctggcagagcaggggatggttaaaacgggtgaatgcccgccgcctgacaccgtttatg

SEQ ID NO: 774891 - DNA, 75 bp, synthetic construct
  source 1..75: mol_type = other DNA
tttacggatatcgccacgcagcttgccggtggtcagaatccctggctgatccctgctgcaacgagggcggtcagg

SEQ ID NO: 774892 - DNA, 75 bp, synthetic construct
  source 1..75: mol_type = other DNA
ttcctgtgcatcaccaggaaaaaatgggcactatggacccaacctttaacccggtgatcaccgatgattccgccg

SEQ ID NO: 774893 - DNA, 75 bp, synthetic construct
  source 1..75: mol_type = other DNA
attacatgcgtgaatggctggcagagcaggggatggtgaaatcgggggaatgcccgccgccggacaccgtttatg

SEQ ID NO: 774894 - DNA, 75 bp, synthetic construct
  source 1..75: mol_type = other DNA
acgtgcgccgctggcaaataatggcagcgtgcttgagcagtcgacgccgaataaatggccggaatgggatgttcc

SEQ ID NO: 774895 - DNA, 75 bp, synthetic construct
  source 1..75: mol_type = other DNA
caattaacctcaaccgaaaaacaggttggtaacgagctcgcgccgcttaagggaaaggggtatttcgtttttcac

SEQ ID NO: 774896 - DNA, 75 bp, synthetic construct
  source 1..75: mol_type = other DNA
tatgacatggcccgtaagggggagcaggatgaactccggctgcagttgcgtgatggcggtatgttatcagggagc

SEQ ID NO: 774897 - DNA, 75 bp, synthetic construct
  source 1..75: mol_type = other DNA
cactgaaggcggtttatgacgtagcccgtaaggcggcaatggatgttgtgaccgggcagatgcgcgatggtggtc

SEQ ID NO: 774898 - DNA, 75 bp, synthetic construct
  source 1..75: mol_type = other DNA
tgacgtttaaccaggcgagagagtcactggcagccctggtgaatgccggtgtgcgtggtggtgaacagtttgatg

SEQ ID NO: 774899 - DNA, 75 bp, synthetic construct
  source 1..75: mol_type = other DNA
cggcaaatatgaacctgcggggattgttcatcgcggggagtttgtcttcacgaaggaggcgaccagccggattgg

SEQ ID NO: 774900 - DNA, 75 bp, synthetic construct
  source 1..75: mol_type = other DNA
ggtttcacccgttccgtgctctccatgctgacagagatttttctgaagcaggcgatggtggggattgtcgggagt

SEQ ID NO: 774901 - DNA, 75 bp, synthetic construct
  source 1..75: mol_type = other DNA
gaacaggggctgagccgacaggcgctggctgcacaaaaagccgggatatcagtcggacagtataaggctgccatg

SEQ ID NO: 774902 - DNA, 75 bp, synthetic construct
  source 1..75: mol_type = other DNA
tgtcgggaacctgtaccgcctgatgcggggctatgccaccggcggttatgtcggtggcaccggaagtccggcgca

SEQ ID NO: 774903 - DNA, 75 bp, synthetic construct
  source 1..75: mol_type = other DNA
acactgcccagggaatgctggagaaagcagaaaaggcttttgatgaggcggacaaaaaatggcagtggtatcaga

SEQ ID NO: 774904 - DNA, 75 bp, synthetic construct
  source 1..75: mol_type = other DNA
gccagtgcgcagaaggcattcgatgaggcggataaaaaatggcagtggtaccagagccggagccagcgccgggga

SEQ ID NO: 774905 - DNA, 75 bp, synthetic construct
  source 1..75: mol_type = other DNA
ctggcgtggtttcacccgttctgtgctctccatgctgacagagatttttctgaagcaggccatggtggggattgt

SEQ ID NO: 774906 - DNA, 75 bp, synthetic construct
  source 1..75: mol_type = other DNA
gaaaaagccgaagtcgtcaggcgtgaaagtgtcagccggtgagcgtcaggaagaccaggcgcatgccgccctgct

SEQ ID NO: 774907 - DNA, 75 bp, synthetic construct
  source 1..75: mol_type = other DNA
caattagcctcaaccgaaacgcaggttggtcacgagctcgcgccgctcaaggggaaaggttatttcgtttttcac

SEQ ID NO: 774908 - DNA, 75 bp, synthetic construct
  source 1..75: mol_type = other DNA
gcctccggtgtggaggtggacaaggttgcagaggctttcggaaaactgaccaccgacccgacgtcggggctgatt

SEQ ID NO: 774909 - DNA, 75 bp, synthetic construct
  source 1..75: mol_type = other DNA
caggcgctggctgcgcaaaaagccgggatttccgtcgggcagtataaagcggccatgcgaaccctgcccgcacag

SEQ ID NO: 774910 - DNA, 75 bp, synthetic construct
  source 1..75: mol_type = other DNA
gaaaaagccgaagtcgtcaggcgtaaaagtgtcagccggtgagcgtcaggaagaccagccgcatgccgcactgct

SEQ ID NO: 774911 - DNA, 75 bp, synthetic construct
  source 1..75: mol_type = other DNA
gaaaaagccgaagtcgtcaggcgtaaaagtgtcagccggtgagcgtcaggaagaccagacgcatgccgccctgct

SEQ ID NO: 774912 - DNA, 75 bp, synthetic construct
  source 1..75: mol_type = other DNA
gaaaaagccgaagtcgtcaggcgtgaaagtgtcagccggtgagcgtcaggaagaccagccgcatgccgcgctgct

SEQ ID NO: 774913 - DNA, 75 bp, synthetic construct
  source 1..75: mol_type = other DNA
gaaaaagccgaagtcgtcaggcgtcaaagtgtcagccggtgagcgtcaggaagaccagccgcatgccgccctgct

SEQ ID NO: 774914 - DNA, 75 bp, synthetic construct
  source 1..75: mol_type = other DNA
gaaaaagccgaagtcgtcaggcgttaaagtgtcagccggtgagcgtcaggaagaccagccgcatgccgctctgct

SEQ ID NO: 774915 - DNA, 75 bp, synthetic construct
  source 1..75: mol_type = other DNA
tattaatcaggagctgtacggcctgccggaatatctcagcgcccttaacgtaagcgactcgtcagaaccgtattg

SEQ ID NO: 774916 - DNA, 75 bp, synthetic construct
  source 1..75: mol_type = other DNA
cgtcaggcattaaatgaagaaacagatgcgcagggcgcaacgtactaccacgtaattctgatgcgggaaccgggg

SEQ ID NO: 774917 - DNA, 75 bp, synthetic construct
  source 1..75: mol_type = other DNA
attatcaggattacagctattactcggcaccatcgtgcggtaactgtgatgatacttgtgcgtcggaacctggtg

SEQ ID NO: 774918 - DNA, 75 bp, synthetic construct
  source 1..75: mol_type = other DNA
ttggtaggtaatcaggtgagtttgcactggtcaatgtcgatgattggttatgtgggcgcggtgcctgcttttgcc

SEQ ID NO: 774919 - DNA, 75 bp, synthetic construct
  source 1..75: mol_type = other DNA
gtattaggtttacctctcgggcgcattgtggggcagtatttcggttggcgaatgaccttcttcgcgattggtatc

SEQ ID NO: 774920 - DNA, 75 bp, synthetic construct
  source 1..75: mol_type = other DNA
aacaacatccgccaggccatgaaaagcgccaaagggccaggcaacttccgcaacctgtttatgtattcgcccaac

SEQ ID NO: 774921 - DNA, 75 bp, synthetic construct
  source 1..75: mol_type = other DNA
gcaaaatggcgatttgagaaggacaagccgcgtaaaggcgtgaagaaaacatttatctttagtccttcagcaccc

SEQ ID NO: 774922 - DNA, 75 bp, synthetic construct
  source 1..75: mol_type = other DNA
ggccctgagcatgaaagacaaggattataacccactgattggccgtaccggtgttgacgtgggaagaaccttctc

SEQ ID NO: 774923 - DNA, 75 bp, synthetic construct
  source 1..75: mol_type = other DNA
tggtatgccggtgcagaggtcgggtatcgttaccacctgtcggaagagtcctgggtggagccacagatggagctg

SEQ ID NO: 774924 - DNA, 75 bp, synthetic construct
  source 1..75: mol_type = other DNA
cttgagcctgcactggcaaaatacacccgacgcgggttagacctggatacctactggtttgtgcaatacggtatg

SEQ ID NO: 774925 - DNA, 75 bp, synthetic construct
  source 1..75: mol_type = other DNA
attgcagtgaagtgcaacattctgaccagcacctacatccctcacccgctgctcagccagcaggctttttcgcgt

SEQ ID NO: 774926 - DNA, 75 bp, synthetic construct
  source 1..75: mol_type = other DNA
ttaagtttccgcgtacccggcgtttagttattgcggatgatgatattgaagctcggctgattggttcattgtcgc

SEQ ID NO: 774927 - DNA, 75 bp, synthetic construct
  source 1..75: mol_type = other DNA
ctggtgggcaatcaggtaagtctgcactggtcgatgtcgatgattggttatgtgggggcagttccggcactcgcc

SEQ ID NO: 774928 - DNA, 75 bp, synthetic construct
  source 1..75: mol_type = other DNA
cgtacatcatagctccccgattgcagtaaagtgcaacattctgaccagtacctacatccctcatccgctgctcag

SEQ ID NO: 774929 - DNA, 75 bp, synthetic construct
  source 1..75: mol_type = other DNA
actccaacaacgaattagagaggtgaataattggctgaatgataaagtaataaaattccaagcctattcgttatc

SEQ ID NO: 774930 - DNA, 75 bp, synthetic construct
  source 1..75: mol_type = other DNA
cccgacgcggattagatctggatacctactggtttgtgcaatacggcatgactacgcagccgtatcagttcacga

SEQ ID NO: 774931 - DNA, 75 bp, synthetic construct
  source 1..75: mol_type = other DNA
ggggatgtggagaaggccagccgcgtttttgttcgaaatgaactgatccccctacagaagcgttttgaggaactg

SEQ ID NO: 774932 - DNA, 75 bp, synthetic construct
  source 1..75: mol_type = other DNA
actccaaaaaagaataatggaagttaatgaatggttaggtgagaaaactatccgatttcagcattatgatttata

SEQ ID NO: 774933 - DNA, 75 bp, synthetic construct
  source 1..75: mol_type = other DNA
aaggcagcattttccatctgatggaaccggacataaatcaggagatctatggcctgcccggctatctttctgcta

SEQ ID NO: 774934 - DNA, 75 bp, synthetic construct
  source 1..75: mol_type = other DNA
cgctggtatgagccgccagtgagtttcgacggtctggctcgcaccttccgcgccgccgtgcatcacagttccccg

SEQ ID NO: 774935 - DNA, 75 bp, synthetic construct
  source 1..75: mol_type = other DNA
tgaaggtccggagggtaagagaatgtattatggcatgtaccattgtgaagagggatatgttgaatatgcgaatga

SEQ ID NO: 774936 - DNA, 75 bp, synthetic construct
  source 1..75: mol_type = other DNA
gtgtgccgccgcagatgatgggaataatgcctaataatgttgggggatttggagatgtggagaaggctagtaagg

SEQ ID NO: 774937 - DNA, 75 bp, synthetic construct
  source 1..75: mol_type = other DNA
tcatcatgtacatgaccgacgccgcgcagaatcaggaggacgtgaacaacctccgcaatgcgatgaaaaatgcta

SEQ ID NO: 774938 - DNA, 75 bp, synthetic construct
  source 1..75: mol_type = other DNA
tttgtgcaggactatctggtatttggcaacgcctacctggagaaacgcacgaaccgcttcggtgaagtgctcgcc

SEQ ID NO: 774939 - DNA, 75 bp, synthetic construct
  source 1..75: mol_type = other DNA
caacacgctgatggcgtcggcgaaaaaggattatgaatcgacgctgaaaaaaccgaagtcgtcaggtgcgaaggt

SEQ ID NO: 774940 - DNA, 75 bp, synthetic construct
  source 1..75: mol_type = other DNA
gctgaccggtgcagaggcagactggcggggattcacccgttcggtgctgtccatgatgacagaaatcctgcttaa

SEQ ID NO: 774941 - DNA, 75 bp, synthetic construct
  source 1..75: mol_type = other DNA
atgagccgggtaaggcgtcatttttccggactggagactgacgccagaaaaaccgccggtgtcgttgagcagaac

SEQ ID NO: 774942 - DNA, 75 bp, synthetic construct
  source 1..75: mol_type = other DNA
accagcaaaacatgcgtggcatcaccaattctcaggcagaatggatgaagtacggcgaacagatgtcgacgggta

SEQ ID NO: 774943 - DNA, 75 bp, synthetic construct
  source 1..75: mol_type = other DNA
tcgtgaccagttgctgaatctggcgaacaccactgacggtaacgggcgctacatttttgccggttataaaacaga

SEQ ID NO: 774944 - DNA, 75 bp, synthetic construct
  source 1..75: mol_type = other DNA
ggggagtcgctggttaaacgtttttacgttcgatggtctgttcgccccaaaaaagcgaatctttatcggtcttag

SEQ ID NO: 774945 - DNA, 75 bp, synthetic construct
  source 1..75: mol_type = other DNA
gccgcagggctgacgtttaaccaggcgagagagtcactggcagccctggtgaatgccggtgtgcgtggtggtgaa

SEQ ID NO: 774946 - DNA, 75 bp, synthetic construct
  source 1..75: mol_type = other DNA
gatcaccctgccgatggtcggggtcaccttcgctggcggtggcgacaggtgcgctggcgtacgcctggtaccagg

SEQ ID NO: 774947 - DNA, 75 bp, synthetic construct
  source 1..75: mol_type = other DNA
ggcgacaaaatttttaatagcattaccagtaatgcagtagcggaaccagacggtagcgattctgaaaccaatctt

SEQ ID NO: 774948 - DNA, 75 bp, synthetic construct
  source 1..75: mol_type = other DNA
atgttaattgtcgtctgtgtgacgatactgtgttttgtctggatggtgagggattcgctttgcggattccgtgtc

SEQ ID NO: 774949 - DNA, 75 bp, synthetic construct
  source 1..75: mol_type = other DNA
acgcggcgcagcccgccacgctaaaatgctcgaaaccgatcaggcatgggcattctttgaaaaactggaagacag

SEQ ID NO: 774950 - DNA, 75 bp, synthetic construct
  source 1..75: mol_type = other DNA
ccagagccggagccagcgccggggaaaaaccgcctcttttcgtgccaaccttcagggcgcatgggatgaccggga

SEQ ID NO: 774951 - DNA, 75 bp, synthetic construct
  source 1..75: mol_type = other DNA
tactaccacgtgattctgatgcgggaaccggggagtaacggcaatatgcacgccagcgcggatatttatcgctag

SEQ ID NO: 774952 - DNA, 75 bp, synthetic construct
  source 1..75: mol_type = other DNA
atggtgagggattcgctttgcggactccggctccagcagggaaacacagtgcttgtggcaacgttagcctacgaa

SEQ ID NO: 774953 - DNA, 75 bp, synthetic construct
  source 1..75: mol_type = other DNA
gggggcatgggagaagagagagaatgcgcgacttgggctttcagccgccacgttgcaggcagatcttgaaaaggc

SEQ ID NO: 774954 - DNA, 75 bp, synthetic construct
  source 1..75: mol_type = other DNA
cgaaagggtttgatgaccagacccgtaaactgaaagataacatgggtacgctggagacctgggcagacaagactg

SEQ ID NO: 774955 - DNA, 75 bp, synthetic construct
  source 1..75: mol_type = other DNA
cgggcaaaacgggcagccattgaggcgaaaaaccgggggctgactgaccggcaggcagcgcgggacgccacggaa

SEQ ID NO: 774956 - DNA, 75 bp, synthetic construct
  source 1..75: mol_type = other DNA
tgtcgggaacctgtaccgcctgatgcggggctatgcggaaggggggtatgtgggtgctgccggaagtccggcgca

SEQ ID NO: 774957 - DNA, 75 bp, synthetic construct
  source 1..75: mol_type = other DNA
ctctctgtttatcagcagggttgctggcaagcgcatctggaatcagccttgccgatgttaactacgtaccgcaaa

SEQ ID NO: 774958 - DNA, 75 bp, synthetic construct
  source 1..75: mol_type = other DNA
tacgctggacgatgacggcgacagccggacgcttgatcttgattctgatgatttcgaatacatcccgccagtgac

SEQ ID NO: 774959 - DNA, 75 bp, synthetic construct
  source 1..75: mol_type = other DNA
gcctttatcgaagaaatcttgctcgacagaagccgtgaggagagccgccgtgagcgttctctgcgccgtctggag

SEQ ID NO: 774960 - DNA, 75 bp, synthetic construct
  source 1..75: mol_type = other DNA
cggtatcatgctctctacgcgtttgttgaatgatgttaatcagcccgaagaagtgctgcgtaaaaaaagggcctg

SEQ ID NO: 774961 - DNA, 75 bp, synthetic construct
  source 1..75: mol_type = other DNA
cgatagcttacggcgacgtcaacaaaaccgctgatgctaatgtgaaacagcagtatctggaattccgtagtgaag

SEQ ID NO: 774962 - DNA, 75 bp, synthetic construct
  source 1..75: mol_type = other DNA
taacctggtcatcagcgacaacgtcaaggtaaataccgggttcagtgcaggtactgccgatacgactgttgtgat

SEQ ID NO: 774963 - DNA, 75 bp, synthetic construct
  source 1..75: mol_type = other DNA
gggggcggatcccgtttatcttttatctggtgtcgatgtttgtcggctggctggagcgcaaacgctcaccgctgg

SEQ ID NO: 774964 - DNA, 75 bp, synthetic construct
  source 1..75: mol_type = other DNA
tgtacttgtttagcgagcgatttatgacctatggcaaggcttatggcttatggcttatggcttatgcgaatggtt

SEQ ID NO: 774965 - DNA, 75 bp, synthetic construct
  source 1..75: mol_type = other DNA
gacctatggcaaggcttatggcttatggcttatggcttatggcttatgcgaatggttcgaggtagagcagtttca

SEQ ID NO: 774966 - DNA, 75 bp, synthetic construct
  source 1..75: mol_type = other DNA
taaagtgattttcttctatggaggaaatatcgggcatgcacaggatatggcaaatcttatgcgtcttgcccgaag

SEQ ID NO: 774967 - DNA, 75 bp, synthetic construct
  source 1..75: mol_type = other DNA
aaagattaatgacaatgcttttgatggcattgtttattattccccatctatattttttgggcatttaatcgataa

SEQ ID NO: 774968 - DNA, 75 bp, synthetic construct
  source 1..75: mol_type = other DNA
taaagacgtagggttattaaaaagagcaattaatgaatcattgctctcttatagagcttggaaagcgattaaact

SEQ ID NO: 774969 - DNA, 75 bp, synthetic construct
  source 1..75: mol_type = other DNA
gccttagagttatcaagaaatggtaatgaggtgacgatattaaccccaaactctaatttgacccaatgcttgaga

SEQ ID NO: 774970 - DNA, 75 bp, synthetic construct
  source 1..75: mol_type = other DNA
atctgagctatgtgaaaagtcaacgtactgcgagtatttcgggcgcgggaagccagcgtttcaacattgacgatg

SEQ ID NO: 774971 - DNA, 75 bp, synthetic construct
  source 1..75: mol_type = other DNA
ttacctatcaggcagtttgcgccaatcactaccggaccctgaataacggcaccgtggcaaatacgggtattcgcg

SEQ ID NO: 774972 - DNA, 75 bp, synthetic construct
  source 1..75: mol_type = other DNA
acactgactgaatatcagaatctgagtctggaatacggtattgcgcgtctggatggtaatggttcagataccgca

SEQ ID NO: 774973 - DNA, 75 bp, synthetic construct
  source 1..75: mol_type = other DNA
ttatgaaagtgcatcacagttcagccgcgaatttaaacgttacttcggtgtgacgccgggtgaagatgcagcaag

SEQ ID NO: 774974 - DNA, 75 bp, synthetic construct
  source 1..75: mol_type = other DNA
ggatcacgccgggtgagcacattatcagtgccaactctgcgctcagcagaaatatccggcattgtttctgccttt

SEQ ID NO: 774975 - DNA, 75 bp, synthetic construct
  source 1..75: mol_type = other DNA
atgataaagcttttgcaaagcggtccattagttgtagttatggcattcatattatggggactcacacctttgttt

SEQ ID NO: 774976 - DNA, 75 bp, synthetic construct
  source 1..75: mol_type = other DNA
gctatacaggaagcacattccggcgcggagatgcaacgattaagcctggtaatggtattgagcaagcaactcact

SEQ ID NO: 774977 - DNA, 75 bp, synthetic construct
  source 1..75: mol_type = other DNA
aatgggatctaaatgattgggtttggacggtacctaaagagcacagcaaaggtggtgagaaaatactacggccta

SEQ ID NO: 774978 - DNA, 75 bp, synthetic construct
  source 1..75: mol_type = other DNA
gcgatacatcgcttcgtaaaatgctgggaagggagagccccggagacagcttctatgctgatggctatgggctaa

SEQ ID NO: 774979 - DNA, 75 bp, synthetic construct
  source 1..75: mol_type = other DNA
cgtttgttgtatggcgagacgcctttcgcacgtacaccggtgatgtacgagcctggcatcataattctcttttcc

SEQ ID NO: 774980 - DNA, 75 bp, synthetic construct
  source 1..75: mol_type = other DNA
gagcgaccgctggatgcgcgcattctcggcaagcagatcatccgcgaaattctttactacgtgctgaccggacct

SEQ ID NO: 774981 - DNA, 75 bp, synthetic construct
  source 1..75: mol_type = other DNA
ttctgcctgtctgcgaagcagcgcccatacccgacgataaccatacgtgggcagctctccgataacatggtatag

SEQ ID NO: 774982 - DNA, 75 bp, synthetic construct
  source 1..75: mol_type = other DNA
agcagcccgacgcggtattcattgccgactgatgctcgattccgccggtagcgtcgcgttcttccgcagtccgtg

SEQ ID NO: 774983 - DNA, 75 bp, synthetic construct
  source 1..75: mol_type = other DNA
tatcacattattcagtctaaaatagctattggctccggcggattacgcggcaaaggctggctgcacggcactcag

SEQ ID NO: 774984 - DNA, 75 bp, synthetic construct
  source 1..75: mol_type = other DNA
ccctatctctatatcatctgtattattttgctggtagcagtagatgcctttggcgccatctccaaaggtgctcaa

SEQ ID NO: 774985 - DNA, 75 bp, synthetic construct
  source 1..75: mol_type = other DNA
atgacggataatccgaataaaaaaacattctgggataaagtccatctcgatcccacaatgctgctgattttactg

SEQ ID NO: 774986 - DNA, 75 bp, synthetic construct
  source 1..75: mol_type = other DNA
acgatccgtagcaatatggatgttttgacggattgccggggcatcgggttcttgatgaatcctttgatcatcagt

SEQ ID NO: 774987 - DNA, 75 bp, synthetic construct
  source 1..75: mol_type = other DNA
gggatctcaagcgtaagttttggtttggttttgcagatatccaattattaccgccagttttacaaacatttatgc

SEQ ID NO: 774988 - DNA, 75 bp, synthetic construct
  source 1..75: mol_type = other DNA
atggaatggttaagtgagattcgcacacttcgggagaacgtacctgtcggtatccaggctgccaggcgtttgtta

SEQ ID NO: 774989 - DNA, 75 bp, synthetic construct
  source 1..75: mol_type = other DNA
agtgcaactgctacctacgtttctgttatcgatacggcggtcagaacggcattttctacaggcaaccagtgggat

SEQ ID NO: 774990 - DNA, 75 bp, synthetic construct
  source 1..75: mol_type = other DNA
cgctttgcagccaggagagaacgtcaacaatattgacgttggtgatccacgcgtaacggtatctccttcaatcac

SEQ ID NO: 774991 - DNA, 75 bp, synthetic construct
  source 1..75: mol_type = other DNA
cagaacgattgtcgatggtctgtttgacaaagcgtatctcgtgatcggcgtcggttcgagccaggaaaaagtgac

SEQ ID NO: 774992 - DNA, 75 bp, synthetic construct
  source 1..75: mol_type = other DNA
cagttaagcggcggccagctccagcgcgtctgcctggctcgcgcgctggcggtcgaaccgaaactgctgattctg

SEQ ID NO: 774993 - DNA, 75 bp, synthetic construct
  source 1..75: mol_type = other DNA
gatgaagccgtttctaaccttgacctcgtattacaggcgggcgtcattcgtctgctgaaaaagctgcaacagcaa

SEQ ID NO: 774994 - DNA, 75 bp, synthetic construct
  source 1..75: mol_type = other DNA
atagcaaagacggcattcatcaataatgtttgtatgttgaaggcaggccagctatggaaaaaatcgcatgagagt

SEQ ID NO: 774995 - DNA, 75 bp, synthetic construct
  source 1..75: mol_type = other DNA
acgatccgtagcaatatggatgttttgacgggattgccgggcgtcgggttcttgatgaatcctttgatcatcagt

SEQ ID NO: 774996 - DNA, 75 bp, synthetic construct
  source 1..75: mol_type = other DNA
aagatgatcatgatcgataattacatcgcgtacaccggcagcatgaatatggtcgatcctcgctacttcaaacaa

SEQ ID NO: 774997 - DNA, 75 bp, synthetic construct
  source 1..75: mol_type = other DNA
gaaccattgttactgaatccacataaagttggctctatgcgaagtagaatttttaattgcatggcggataaggca

SEQ ID NO: 774998 - DNA, 75 bp, synthetic construct
  source 1..75: mol_type = other DNA
atgaatagtcaaaatgctttaagtaatatgagacttgctgttaaaggggatatatactgtaactctacattggtt

SEQ ID NO: 774999 - DNA, 75 bp, synthetic construct
  source 1..75: mol_type = other DNA
tacttgatgcgcggttgtgggcgaaacgaccactctggcaacgcgttgccgagcgactgttttacttcttcagcc

SEQ ID NO: 775000 - DNA, 75 bp, synthetic construct
  source 1..75: mol_type = other DNA
acctgatggcgcgcatggaaggtcctattgctactgcaatggggattatttattcctgtgactgggagattgaaa

SEQ ID NO: 775001 - DNA, 75 bp, synthetic construct
  source 1..75: mol_type = other DNA
cggcaccgttaaccttgatatgcgcagcctgtggttaaactttgaaatcacgctggcgatcgacgataaaggttt

SEQ ID NO: 775002 - DNA, 75 bp, synthetic construct
  source 1..75: mol_type = other DNA
tactccgcttacctgcggtaatccaaaaaactggtatggcaagggcaacaatctacgactggttgaaccccaaat

SEQ ID NO: 775003 - DNA, 75 bp, synthetic construct
  source 1..75: mol_type = other DNA
aaccatcgaccgcatgggcgatgcctatagctgggtagggtacgcggtgctgctggcactggcgctgaacatttg

SEQ ID NO: 775004 - DNA, 75 bp, synthetic construct
  source 1..75: mol_type = other DNA
ggtattcgtaccatcatgctgactggtcatatcatgttccagcaggcggggctgattgccgttacgggtgatgct

SEQ ID NO: 775005 - DNA, 75 bp, synthetic construct
  source 1..75: mol_type = other DNA
accggcaacgccgctgcaggataaaacgaacacagtacacaacgagaagcctcttcgggtgaggaatcaaacacc

SEQ ID NO: 775006 - DNA, 75 bp, synthetic construct
  source 1..75: mol_type = other DNA
gtcttgtggaactctggcctgagttattcaaccgggaaaaaccaaaaccacttaaagtggggatacctgacgacc

SEQ ID NO: 775007 - DNA, 75 bp, synthetic construct
  source 1..75: mol_type = other DNA
gccgtcagggggctggcattcgggccgggggtattacgtgcgacgctggcatcctatgcgcagtctccgcgctat

SEQ ID NO: 775008 - DNA, 75 bp, synthetic construct
  source 1..75: mol_type = other DNA
ggcacccagaatggggcagctacataaagggattagtggtgtatccgggcagggaaaaacaaatctacttggtaa

SEQ ID NO: 775009 - DNA, 75 bp, synthetic construct
  source 1..75: mol_type = other DNA
ccccgacctgaagccggaagagagcgtcagttatgaggctggggtgtattacgataaccccgccggtatgaatgc

SEQ ID NO: 775010 - DNA, 75 bp, synthetic construct
  source 1..75: mol_type = other DNA
gacgtactaatctactcggtaaccccgaactgaagccggaagagagtgtaagttatgaggcgggggtatattacg

SEQ ID NO: 775011 - DNA, 75 bp, synthetic construct
  source 1..75: mol_type = other DNA
agttatgaagcgggcgtgtattacgataatcatgccggtctgaacgccaatatcacgggctttatgacagaattc

SEQ ID NO: 775012 - DNA, 75 bp, synthetic construct
  source 1..75: mol_type = other DNA
catgaatacgggttttatgccacctctggccgccatcgaacgtattgagattatcaggggccccatgtccactct

SEQ ID NO: 775013 - DNA, 75 bp, synthetic construct
  source 1..75: mol_type = other DNA
ggcacccagaatggggcagctacataaagggattagtggtgtatccgggcagggaaaacaaatctacttggtaac

SEQ ID NO: 775014 - DNA, 75 bp, synthetic construct
  source 1..75: mol_type = other DNA
tacctacgcacggtgacggtcattatctgggaacggaaacagagtctcgtccggttgatcacggttatctgcaac

SEQ ID NO: 775015 - DNA, 75 bp, synthetic construct
  source 1..75: mol_type = other DNA
tcaacagccgtatccgccactttactttggcggatcgtccgacgtcactcaggatctggctgccgaacaggttga

SEQ ID NO: 775016 - DNA, 75 bp, synthetic construct
  source 1..75: mol_type = other DNA
cacctaccgttgccgcccgccaggccgccacgctcgaccgtctgtcgaatggccgtgcgttgtttaacctggtaa

SEQ ID NO: 775017 - DNA, 75 bp, synthetic construct
  source 1..75: mol_type = other DNA
gtcagggctcatcggtcacatcactgagcgacacatcagccacgcgtattccttatcccacggagtcacagaatt

SEQ ID NO: 775018 - DNA, 75 bp, synthetic construct
  source 1..75: mol_type = other DNA
agttttgtcctttctggctatccacatctggaagaagcgtatcgggttggcgagttgttgttcccacatctggat

SEQ ID NO: 775019 - DNA, 75 bp, synthetic construct
  source 1..75: mol_type = other DNA
aggcgttggtctggtacgcggcggtgcggggacggcgctggtaggcgatggtccgacagtcgccgcacgaatcaa

SEQ ID NO: 775020 - DNA, 75 bp, synthetic construct
  source 1..75: mol_type = other DNA
gggtgattacttccagacgggggcatcgacaacgggttatgtgatacctgagagaaattactggatgtcgctgaa

SEQ ID NO: 775021 - DNA, 75 bp, synthetic construct
  source 1..75: mol_type = other DNA
gccatccctccggggaggctgaacccagcaaggcagaccgtcaggtcactacgcgtattcagcaggcgctggacc

SEQ ID NO: 775022 - DNA, 75 bp, synthetic construct
  source 1..75: mol_type = other DNA
cagctgaccatggaggaaagagaggcatttgttctgctgcttctggataaccaacaccggctgattacgcacgaa

SEQ ID NO: 775023 - DNA, 75 bp, synthetic construct
  source 1..75: mol_type = other DNA
tattttactggcgatggccagtccgcaggcggggatggcggcgctgaccggtacactggcgggaacgcgccaggg

SEQ ID NO: 775024 - DNA, 75 bp, synthetic construct
  source 1..75: mol_type = other DNA
gtatgaaagtcgccgagcgcactggcagcaccgataaactgctggcagtagctgactggcggcaaagcccgctct

SEQ ID NO: 775025 - DNA, 75 bp, synthetic construct
  source 1..75: mol_type = other DNA
gaagtgttttcgataatccgattcagcgcctgattatgttgcgtgtttggatgtcggggtcttcagacggggaag

SEQ ID NO: 775026 - DNA, 75 bp, synthetic construct
  source 1..75: mol_type = other DNA
tgccgatgatattcagaaaattgtcgataccactgccgaggtgctcggtaaacggtacagcgttaacgtattctc

SEQ ID NO: 775027 - DNA, 75 bp, synthetic construct
  source 1..75: mol_type = other DNA
ctgaactggcagatcaccgaagaggtggcatcatggctgggtgcccgttatcgcgggaaaacaccacgtttcacc

SEQ ID NO: 775028 - DNA, 75 bp, synthetic construct
  source 1..75: mol_type = other DNA
gcatcttacggatgctcttgcgctgactgcaggcagtcgctatgaacatcatgagcagttcgggggacacttcag

SEQ ID NO: 775029 - DNA, 75 bp, synthetic construct
  source 1..75: mol_type = other DNA
gaatctcatctggttactgtggggggagagtatcagagttcgtccatgaaagatggggttgtccttgccagcaca

SEQ ID NO: 775030 - DNA, 75 bp, synthetic construct
  source 1..75: mol_type = other DNA
gagagcctggacgtaatccttagtgcatttatcgacggcactgacactacgaccagcaacgccttttgtgcaatg

SEQ ID NO: 775031 - DNA, 75 bp, synthetic construct
  source 1..75: mol_type = other DNA
taagtttagaagatagatttcaacgacaaatagatttttttatggctaaccctgagttagatgttgttggtgggt

SEQ ID NO: 775032 - DNA, 75 bp, synthetic construct
  source 1..75: mol_type = other DNA
tttaatgagtttaaagaggcttttgacagtattattaatcaaacatactctaactttgttttctttatttatgcc

SEQ ID NO: 775033 - DNA, 75 bp, synthetic construct
  source 1..75: mol_type = other DNA
atgagcagttcgggggacacttcagtccgcgtgcatatctggtctgggacgtgaccgatgcctggacgctgaaag

SEQ ID NO: 775034 - DNA, 75 bp, synthetic construct
  source 1..75: mol_type = other DNA
cgcgcacaggttgggactattgcatagccatgctgtggctaaagagattgttgaagcttggttacagcccgaagg

SEQ ID NO: 775035 - DNA, 75 bp, synthetic construct
  source 1..75: mol_type = other DNA
tcatgatgattcacatcagtctcctattgcgaaaatcgatgtagatattttgattgaatggtgcaggaccactaa

SEQ ID NO: 775036 - DNA, 75 bp, synthetic construct
  source 1..75: mol_type = other DNA
tttggctacatttattctttcgaagacgctatcggtatcaccgctgcatggatgccaaaagaatttctcagtcgc

SEQ ID NO: 775037 - DNA, 75 bp, synthetic construct
  source 1..75: mol_type = other DNA
ccgcatagaggcgtttggaccggaggtagctgaacagcttttgattcgtcgcttcccccgtataggccatcacaa

SEQ ID NO: 775038 - DNA, 75 bp, synthetic construct
  source 1..75: mol_type = other DNA
ggacagggatattcaggctggcagccatacggtgcgtggagtaatcctcccaatggcgtcgtagacactctaatc

SEQ ID NO: 775039 - DNA, 75 bp, synthetic construct
  source 1..75: mol_type = other DNA
cagttacttgcatatgaatcgaaatactttgaacgatgcattaagctcttaatccgtatcgcagaccaggaaagc

SEQ ID NO: 775040 - DNA, 75 bp, synthetic construct
  source 1..75: mol_type = other DNA
cgtcgaacttggagcggaagattattccaccgtggcgcgctataacggcaaacctgctgccgggatcgccatcaa

SEQ ID NO: 775041 - DNA, 75 bp, synthetic construct
  source 1..75: mol_type = other DNA
aaaccttcgccgggttcaaacagtcacgctatgccagtggtgaatattttagccaatatctgcaagggaactggc

SEQ ID NO: 775042 - DNA, 75 bp, synthetic construct
  source 1..75: mol_type = other DNA
cagttaaactaaagacagtgtttgtaatattagtaacatttttggtacttgcggttattgctgtctcagtgttaa

SEQ ID NO: 775043 - DNA, 75 bp, synthetic construct
  source 1..75: mol_type = other DNA
gatgcgtttacgcccaatcctcatgacctctctggcctttattctcggcgtactgccgctggttatcagtcatgg

SEQ ID NO: 775044 - DNA, 75 bp, synthetic construct
  source 1..75: mol_type = other DNA
acaacggcaacctggggcacgaaaagctgactcaggcgagaaacgagttgctgtcactggcagcacaatcgcctg

SEQ ID NO: 775045 - DNA, 75 bp, synthetic construct
  source 1..75: mol_type = other DNA
atcaggtcaccggggtacgcccgaacggcctggaagatacgccgatgttcaaagtgaacgtcaacgccgcgaaag

SEQ ID NO: 775046 - DNA, 75 bp, synthetic construct
  source 1..75: mol_type = other DNA
ggggtaagatcaagaggctttatcagccatacctgtctggtacacaggcctctttagaccagcgccttgcaattt

SEQ ID NO: 775047 - DNA, 75 bp, synthetic construct
  source 1..75: mol_type = other DNA
ccgactgtgctgcaattgcggaaatttataaccacgccgtgttgtatacggcggctatctggaatgaccaaacgg

SEQ ID NO: 775048 - DNA, 75 bp, synthetic construct
  source 1..75: mol_type = other DNA
tatagagctttcacatatttatcaggaaatatcttggatgacgtaacccactggatgccgctgccagaaccgccg

SEQ ID NO: 775049 - DNA, 75 bp, synthetic construct
  source 1..75: mol_type = other DNA
tgaaaacgatccagtgaaattactgattgtgctggctgcaaccgacagtccagccacattgaagcgatttctcaa

SEQ ID NO: 775050 - DNA, 75 bp, synthetic construct
  source 1..75: mol_type = other DNA
tcatactttcaccttcggaacatggaaatcgtatctgaactggaacgagacagaaaataaaggtcgtgagctcgt

SEQ ID NO: 775051 - DNA, 75 bp, synthetic construct
  source 1..75: mol_type = other DNA
tattacaggctttataacagacttctccaacaagattgtctcttattccattgatgataacaccaacagctatac

SEQ ID NO: 775052 - DNA, 75 bp, synthetic construct
  source 1..75: mol_type = other DNA
tgctgcggtgaataacctgctcaacaaggattacagtgacgtgagcctgtacagtgccggtaagagtacgcttta

SEQ ID NO: 775053 - DNA, 75 bp, synthetic construct
  source 1..75: mol_type = other DNA
tttttcaacctcaataaagaaccctataaaaacagccctgagttacaggaattgatttgggagaagttggttgta

SEQ ID NO: 775054 - DNA, 75 bp, synthetic construct
  source 1..75: mol_type = other DNA
ggcacgaatttgcagtatcttcccatggacttgatgagttgtgccctaatctttttttgcgggatggaatgccgt

SEQ ID NO: 775055 - DNA, 75 bp, synthetic construct
  source 1..75: mol_type = other DNA
ttgctaacaagttggcagcatctgcacttaatagtattccgattgatcaacttagaacgacctttgaagctccgg

SEQ ID NO: 775056 - DNA, 75 bp, synthetic construct
  source 1..75: mol_type = other DNA
atgttaaaaaatctattaaatacagaggtcgttcaggtcgtggaacaggtcaaagactggcgggaagccgtggcg

SEQ ID NO: 775057 - DNA, 75 bp, synthetic construct
  source 1..75: mol_type = other DNA
aggtcgttcaggtcgtggaacaggtcaaagactggcgggaagccgtggcgatttcatgccggccgttgattgaaa

SEQ ID NO: 775058 - DNA, 75 bp, synthetic construct
  source 1..75: mol_type = other DNA
gatgaagccgtttctaaccttgatctcgtgttacaagcgggcgtcattcgcctgctgaaaaagctacaacaacag

SEQ ID NO: 775059 - DNA, 75 bp, synthetic construct
  source 1..75: mol_type = other DNA
caaagccaccattacaggcggcggagagggtatcgcaacgctgatccctgtattgaatggtgttcatcaagctgg

SEQ ID NO: 775060 - DNA, 75 bp, synthetic construct
  source 1..75: mol_type = other DNA
gtgccctatgtgcaaatcagcacaattgattacactcaaaatttatacggtgagtataaagccactgttacaggc

SEQ ID NO: 775061 - DNA, 75 bp, synthetic construct
  source 1..75: mol_type = other DNA
gtgcggcaggctgatgaaggttcccgcgccgtcagtgaaagtgcggatcgtgtgtggcaggatacgcagaatgtt

SEQ ID NO: 775062 - DNA, 75 bp, synthetic construct
  source 1..75: mol_type = other DNA
gtttccaatttcccttggtgttgctatctggcaatgaaatggaagttttgcatgaaggaaaaaaagcctgcaaaa

SEQ ID NO: 775063 - DNA, 75 bp, synthetic construct
  source 1..75: mol_type = other DNA
gtggcgtttgtcattccgaaagagagcgacagtctggaagaccgtgaggtggcgcactcgcaagagaaggcgatt

SEQ ID NO: 775064 - DNA, 75 bp, synthetic construct
  source 1..75: mol_type = other DNA
acgcgatccgggggatctgacgaccattgatgatccggcgtcgttggatcagatccgccaggcgatggaagagta

SEQ ID NO: 775065 - DNA, 75 bp, synthetic construct
  source 1..75: mol_type = other DNA
tcaaaagctgaatataaagatttccttaaaaatggttttgtatttgatccaacagatcctcgaggaggaataagc

SEQ ID NO: 775066 - DNA, 75 bp, synthetic construct
  source 1..75: mol_type = other DNA
ctggggtggattgatccgttaggtttacgaagaacgtggtgtggacgtcctcaaaataaatcaactcgccattcc

SEQ ID NO: 775067 - DNA, 75 bp, synthetic construct
  source 1..75: mol_type = other DNA
atttattagttggttggttgttgttcttgttctgtatgtatataaacactatcgacatattatgaccgggaacat

SEQ ID NO: 775068 - DNA, 75 bp, synthetic construct
  source 1..75: mol_type = other DNA
actcaaagcacagtccgcagtggcaggttgctcaatgattcaggtgttgagcgctaaggtccatcaactggcgga

SEQ ID NO: 775069 - DNA, 75 bp, synthetic construct
  source 1..75: mol_type = other DNA
cattggtgtggtgccactggcgttgccgttgatggcggggccaggggcgatcagttctaccatcgtctgggggac

SEQ ID NO: 775070 - DNA, 75 bp, synthetic construct
  source 1..75: mol_type = other DNA
ggcgctggaagctgataccgtagaatacggtgaatacctgaccggcgtgcgaattgaagggctcacctattcact

SEQ ID NO: 775071 - DNA, 75 bp, synthetic construct
  source 1..75: mol_type = other DNA
attgatgatgttattgaaaatatgaaagagagtgcatcaaaatggtctgggaaagttgatatgtatcttaaaata

SEQ ID NO: 775072 - DNA, 75 bp, synthetic construct
  source 1..75: mol_type = other DNA
atgggagactaactcagccagccgcgcaaacttccagagtgttgattactcactgccagaaaattcggggttccg

SEQ ID NO: 775073 - DNA, 75 bp, synthetic construct
  source 1..75: mol_type = other DNA
ccctcagcgggagatgttggtgcatacatagactggccccctgaatctccagacaaccaatatcacttaaataag

SEQ ID NO: 775074 - DNA, 75 bp, synthetic construct
  source 1..75: mol_type = other DNA
ggtgctcatgctccggcatatattcgttcccgacgagataccacagatgctaactggtctggatgggcgcaacta

SEQ ID NO: 775075 - DNA, 75 bp, synthetic construct
  source 1..75: mol_type = other DNA
gtgctggactccgggggctttgccgtggtgttcgacatgggggatggctacaagtccctgtgtgagaacatgggg

SEQ ID NO: 775076 - DNA, 75 bp, synthetic construct
  source 1..75: mol_type = other DNA
atgccctaacacatcgtggcgagcagatttctctaataagatctgcaatcactacggggttagtgctaaataatc

SEQ ID NO: 775077 - DNA, 75 bp, synthetic construct
  source 1..75: mol_type = other DNA
gccagacaggttttgtcttacctgaatcagactactggctcacgctaccaggtatgcagcacgtcgctggagaat

SEQ ID NO: 775078 - DNA, 75 bp, synthetic construct
  source 1..75: mol_type = other DNA
gcagtgaatccgcgtccggcattgcagcagaaagccgccgggcagcagcgtctgcagcggcacgtctgagtcagg

SEQ ID NO: 775079 - DNA, 75 bp, synthetic construct
  source 1..75: mol_type = other DNA
gctacatgtcgcatgaaaaccacttcggttatgccgcctgcgccgctcttttgcgcgaacaagggctggcagcga

SEQ ID NO: 775080 - DNA, 75 bp, synthetic construct
  source 1..75: mol_type = other DNA
ttttgccgattacgagattatgccgccagttcgtcaactgacacggcgcacggtgcttctcacgcctgacgaggc

SEQ ID NO: 775081 - DNA, 75 bp, synthetic construct
  source 1..75: mol_type = other DNA
ccgcacaggacgctaccacagcgcgaaaaggtattgtccagctcagtagtgcgaccagcagcgcgtctgaaacgc

SEQ ID NO: 775082 - DNA, 75 bp, synthetic construct
  source 1..75: mol_type = other DNA
gctcaacgctatgtcaatcttgcccaaaaattagatggaattacgtgggggaagaggtcacggaaaaacggggac

SEQ ID NO: 775083 - DNA, 75 bp, synthetic construct
  source 1..75: mol_type = other DNA
agccaggtacgatcgctctatcagggcgcaggcacagcagataccccggccgctctcacctgggatcagaaacag

SEQ ID NO: 775084 - DNA, 75 bp, synthetic construct
  source 1..75: mol_type = other DNA
accaacgaagtcaacagcgaagttcacgatgcgttattgcaagtggttgatatgcgtcgcgaattgctggatcag

SEQ ID NO: 775085 - DNA, 75 bp, synthetic construct
  source 1..75: mol_type = other DNA
cgctttatgcgtgaaaacagtcgtggtccgcaggttccggcaggattaccgatgaccgaagagcagctcaaaaaa

SEQ ID NO: 775086 - DNA, 75 bp, synthetic construct
  source 1..75: mol_type = other DNA
atttacattgatgggacttttggtcgcggtggtcattcacgtttgatcctctcgcagcttagcgaagaggggcgt

SEQ ID NO: 775087 - DNA, 75 bp, synthetic construct
  source 1..75: mol_type = other DNA
ccgccccgcagacgatgatgaagcgtaccgcagcaacgcgagtaacgaacaccattgttaaagatgccggtaaag

SEQ ID NO: 775088 - DNA, 75 bp, synthetic construct
  source 1..75: mol_type = other DNA
ctacaacgcgtagcgcgttacaccatgatcttgctgatgctgacagaattcggagcgtggatatggttacgttag

SEQ ID NO: 775089 - DNA, 75 bp, synthetic construct
  source 1..75: mol_type = other DNA
taccattcacccgctggcggggcagggggtaaatctcggctttatggatgctgcagagctgattgctgaactgaa

SEQ ID NO: 775090 - DNA, 75 bp, synthetic construct
  source 1..75: mol_type = other DNA
atggcaggtttatcaccgccgctaacaacgcgcgttcggggcttcggccccgttttttatggtacaggtagcatg

SEQ ID NO: 775091 - DNA, 75 bp, synthetic construct
  source 1..75: mol_type = other DNA
aacagtgccgccgcgttgctggaaaaaatcaaagctgaacgcgcagccagctggggtaaaaaagcctcgcgtaaa

SEQ ID NO: 775092 - DNA, 75 bp, synthetic construct
  source 1..75: mol_type = other DNA
tttgcggtgtaccttctggctggcgaagtgaagggaccggttcccgccgaatgccagcgcattaaacattctgaa

SEQ ID NO: 775093 - DNA, 75 bp, synthetic construct
  source 1..75: mol_type = other DNA
accggaaggccgaaacaatgcgacgcttattcaggaacatgaagagcaactccggaaatatcccacattcccggt

SEQ ID NO: 775094 - DNA, 75 bp, synthetic construct
  source 1..75: mol_type = other DNA
tttcgcgcattacggtgcgcaaggcgatgcaggcgctggaagaagagggtgtggtgacgcgttcgcgtggttacg

SEQ ID NO: 775095 - DNA, 75 bp, synthetic construct
  source 1..75: mol_type = other DNA
aattaattgagcaaaatatcaatgggttactttcaatccatgatagctggttacgtatttcaatggattccgtag

SEQ ID NO: 775096 - DNA, 75 bp, synthetic construct
  source 1..75: mol_type = other DNA
catgatgtggttggattgactcattggagagaatataaattcagtgaaattgtcgatattataggcggtagtcaa

SEQ ID NO: 775097 - DNA, 75 bp, synthetic construct
  source 1..75: mol_type = other DNA
gcttatcctgcccgcgcagaccattttgccgatctatagcgcggcgacctttttctgccttattgcgctaaaggc

SEQ ID NO: 775098 - DNA, 75 bp, synthetic construct
  source 1..75: mol_type = other DNA
gccgttgagcgtgaggatcctgcagcactggtgaaattacctggcataggtaaaaaaactgccgaacggctgatt

SEQ ID NO: 775099 - DNA, 75 bp, synthetic construct
  source 1..75: mol_type = other DNA
acttgaggacgagacgttggttctcggaccgtttcagggcaaaattgcttgtgtacgcatccccgtcgggcgcgg

SEQ ID NO: 775100 - DNA, 75 bp, synthetic construct
  source 1..75: mol_type = other DNA
ttcacgcattcgatggacatattgcctgtgatgcggcgagtaattctgaaattgttctaccgttggtggtgaaaa

SEQ ID NO: 775101 - DNA, 75 bp, synthetic construct
  source 1..75: mol_type = other DNA
aacatgcgccagggcgcgtcgtatgccattaccactatccttaactacatcattattgccattggtgcgatgacg

SEQ ID NO: 775102 - DNA, 75 bp, synthetic construct
  source 1..75: mol_type = other DNA
tggctgaaagcgtatcaacagaaactggcttccgctgtgggttccctgcgtaacgacagccagctcaacacacca

SEQ ID NO: 775103 - DNA, 75 bp, synthetic construct
  source 1..75: mol_type = other DNA
gacaaaagcggacctgcaggcacaacttgactcactaaataaacaaaaagatctttctgctcaggacaaactggt

SEQ ID NO: 775104 - DNA, 75 bp, synthetic construct
  source 1..75: mol_type = other DNA
tcgggccgttggccggattgcgcgttgtcttctccggtatcgaaatcgccggaccgtttgccgggcaaatgttcg

SEQ ID NO: 775105 - DNA, 75 bp, synthetic construct
  source 1..75: mol_type = other DNA
ccggtgatcggaatgctgaccggcttactgaccaatttactctggggattgctgaccaacccgatcgccgccgca

SEQ ID NO: 775106 - DNA, 75 bp, synthetic construct
  source 1..75: mol_type = other DNA
ccgggctgtggctggtacacggtagctggctgacagaatggctaagcggcacgccacgctcgcctgaacggtgga

SEQ ID NO: 775107 - DNA, 75 bp, synthetic construct
  source 1..75: mol_type = other DNA
gcgtacggatccccgtcgggcgcggcgtgtgtggcaccgcggttgcccgtaacgaagtacagcgaatcgaggatg

SEQ ID NO: 775108 - DNA, 75 bp, synthetic construct
  source 1..75: mol_type = other DNA
atgcttattttaataggctggcagttccaggtaagacaaccaagtgattatataatgaacaaaacagaattttac

SEQ ID NO: 775109 - DNA, 75 bp, synthetic construct
  source 1..75: mol_type = other DNA
aattaatggaaaccaccgatatcttcatcgaagccagtaaaggtccggcctttgcccgtcgtggcattaccgatg

SEQ ID NO: 775110 - DNA, 75 bp, synthetic construct
  source 1..75: mol_type = other DNA
gcgatgaagccatcaaagcatttgtggtgctgaatgaaggtgaaacattgagcgaagaggaatttttccgcttct

SEQ ID NO: 775111 - DNA, 75 bp, synthetic construct
  source 1..75: mol_type = other DNA
tggcgataaacggcgctggccgtcgattggtcgggcgggcttttgctacgaagcggagatccgcgacgatcacaa

SEQ ID NO: 775112 - DNA, 75 bp, synthetic construct
  source 1..75: mol_type = other DNA
cgagatgctgccgctggtgagtagtcaccgcacccgcatatttgaagcgattatggccggtaagccggaagaagc

SEQ ID NO: 775113 - DNA, 75 bp, synthetic construct
  source 1..75: mol_type = other DNA
gtcttatgggatgacggaaaccatcgtcggcattatcggcgatcgccccggcgataagcgtcgctggccgtcgat

SEQ ID NO: 775114 - DNA, 75 bp, synthetic construct
  source 1..75: mol_type = other DNA
agtgatgttttatctcaacctgtcagagcaggaaaaagacgctttttgtgaacgcttcggcgtccgcttgctgac

SEQ ID NO: 775115 - DNA, 75 bp, synthetic construct
  source 1..75: mol_type = other DNA
atgtattccgatgatgatccgtaccctgatggtacaaccaccttctgtgaatgacaggcaacactgcctgcggga

SEQ ID NO: 775116 - DNA, 75 bp, synthetic construct
  source 1..75: mol_type = other DNA
ggctggaagaaaaccgcgaacaagtggagatgattgaagaacgcatcaaagcgcgttgcgttggcgctgcgctgc

SEQ ID NO: 775117 - DNA, 75 bp, synthetic construct
  source 1..75: mol_type = other DNA
ttgggggtagtcaaccgcgtggttagccaggcggagctgatggataacgcccgcgaactggcacaacaactggtt

SEQ ID NO: 775118 - DNA, 75 bp, synthetic construct
  source 1..75: mol_type = other DNA
tcaacagccctatcctccgctttactttggcggctcgtcagacgtcgcccaggatctggccgctgaacaggttga

SEQ ID NO: 775119 - DNA, 75 bp, synthetic construct
  source 1..75: mol_type = other DNA
gcggctgggcagctggtggcgcgcgccgtgtttctctcgccaccctattcggttgcagaagaggaactgtcagtt

SEQ ID NO: 775120 - DNA, 75 bp, synthetic construct
  source 1..75: mol_type = other DNA
ttcgctttgagtgccagacgtatccgcgtccatacaaggcagccatgttgatgcaagcaccatattcctttcagg

SEQ ID NO: 775121 - DNA, 75 bp, synthetic construct
  source 1..75: mol_type = other DNA
gcgctgaccgaacagggcgcgcagtggctggaagaaaaccgcgaacaggtggagatgattgaagaacgcatcaaa

SEQ ID NO: 775122 - DNA, 75 bp, synthetic construct
  source 1..75: mol_type = other DNA
gcacccgaaaattcaggacatcgtggttgtgggtattaaagattcgattcgcgatgaagccatcaaagcatttgt

SEQ ID NO: 775123 - DNA, 75 bp, synthetic construct
  source 1..75: mol_type = other DNA
agcttatcgttaccattaacaaatatgccagtcagttggcagcagaacctatagcgcctaatgacgttcgagagc

SEQ ID NO: 775124 - DNA, 75 bp, synthetic construct
  source 1..75: mol_type = other DNA
aagtgaagtcggactgcaaattaccggataaagcgatggactacctgaagcgaaatggactggtaagcgcggcgg

SEQ ID NO: 775125 - DNA, 75 bp, synthetic construct
  source 1..75: mol_type = other DNA
ggaggagaagggagggagtgctaactgtactgccagtcatggtgcaaccgacaatccaccagtaccaggcaaaca

SEQ ID NO: 775126 - DNA, 75 bp, synthetic construct
  source 1..75: mol_type = other DNA
tgttgaaggtgctatgtttaccaaaaccgtgttggatcaggtttctcatacctcaaatgcgatgggtaatcagat

SEQ ID NO: 775127 - DNA, 75 bp, synthetic construct
  source 1..75: mol_type = other DNA
cataatcttcctgtagccgggcaagcaacaatggaatacggcgatatattcgataacagtctgaacgcgattatg

SEQ ID NO: 775128 - DNA, 75 bp, synthetic construct
  source 1..75: mol_type = other DNA
aagtgaagccggactgtaaattgccggataaggcgatggactacctgaagcggaacgaactgataagtgcggagg

SEQ ID NO: 775129 - DNA, 75 bp, synthetic construct
  source 1..75: mol_type = other DNA
aggcgtgcctgctggtgaccagtgcgcaattctatcctatgtatcaacagattcagcaggaagatgccactcagt

SEQ ID NO: 775130 - DNA, 75 bp, synthetic construct
  source 1..75: mol_type = other DNA
agtgccttcttatctggagatcagaaaagatctgccgcgtaattgctcggggaaaataatcagaaagaatctgaa

SEQ ID NO: 775131 - DNA, 75 bp, synthetic construct
  source 1..75: mol_type = other DNA
agtgctggaagccgatggctggctacatactggcgataccggataccgcgacgaagagggctttttttatttcgt

SEQ ID NO: 775132 - DNA, 75 bp, synthetic construct
  source 1..75: mol_type = other DNA
agttggcagtagagccggtagtacctgatgacgttctggaacagacagtagcgtcgccagcgctaggtaaccagg

SEQ ID NO: 775133 - DNA, 75 bp, synthetic construct
  source 1..75: mol_type = other DNA
accgccgttatcgaccgacgatacggcggaaattctttttacctccggtacaacctcccgcccgaaaggggtggt

SEQ ID NO: 775134 - DNA, 75 bp, synthetic construct
  source 1..75: mol_type = other DNA
gggaaaaccatcttcaaagaatattttctcaatccgcaggccaccgccagagtcctggaagccgatggctggttg

SEQ ID NO: 775135 - DNA, 75 bp, synthetic construct
  source 1..75: mol_type = other DNA
agcgagcgctacgaagcctcggcagaatttacccaggtctggcgacgtttattgcagggagaaaccgtcgatttc

SEQ ID NO: 775136 - DNA, 75 bp, synthetic construct
  source 1..75: mol_type = other DNA
cattcagggtgaacaaccaggctttatcaataaagtcccgtataacttcctggaagtgaatatgcagggcatcca

SEQ ID NO: 775137 - DNA, 75 bp, synthetic construct
  source 1..75: mol_type = other DNA
cgcgcgcctgaatttcagcctgcgggttttggctgtatcagccgcacctggctgccacgtttgccgctggcaggc

SEQ ID NO: 775138 - DNA, 75 bp, synthetic construct
  source 1..75: mol_type = other DNA
gttatcgccatgaaaacaggttttcgactggcacaggatgcagaaggacactggcaggcgcaactgatggaatac

SEQ ID NO: 775139 - DNA, 75 bp, synthetic construct
  source 1..75: mol_type = other DNA
aatacctcagctctcggcactgctctttctactgctggcggtagcttcggtatctttaacggtaacattctggcg

SEQ ID NO: 775140 - DNA, 75 bp, synthetic construct
  source 1..75: mol_type = other DNA
aatcggctggcttttccgcagccattcagactcgaaagatgatcgcactatgttcgttttgcttactgctcacgt

SEQ ID NO: 775141 - DNA, 75 bp, synthetic construct
  source 1..75: mol_type = other DNA
ttcaaggtttcgcggtcggcggtgaatgggggggagcggcattattatcggtagaaaacgcgccaaaaaggaaaa

SEQ ID NO: 775142 - DNA, 75 bp, synthetic construct
  source 1..75: mol_type = other DNA
cggggtatctggcgttcgccgcttgcctggcaggtcacattgtttcttgggatcaactcactggtctattacgtg

SEQ ID NO: 775143 - DNA, 75 bp, synthetic construct
  source 1..75: mol_type = other DNA
tctggacgaaatgattgttctgctggatcaatataccgccggcggcacttacggccggtattttaactctgatga

SEQ ID NO: 775144 - DNA, 75 bp, synthetic construct
  source 1..75: mol_type = other DNA
ggcggtgtggcagctggcgtggaagaagtcagggccggagatggcttcgctggaagcctggctggaagaacatga

SEQ ID NO: 775145 - DNA, 75 bp, synthetic construct
  source 1..75: mol_type = other DNA
ttgatctgtgctggtatcgcaattcgctctctcccttcgccttacttattatttggcggtacagcggtcattggc

SEQ ID NO: 775146 - DNA, 75 bp, synthetic construct
  source 1..75: mol_type = other DNA
accactaatgggtgttgcaatactttcactactgatggcgattttcggactttgcgccggaagagacaaagaaat

SEQ ID NO: 775147 - DNA, 75 bp, synthetic construct
  source 1..75: mol_type = other DNA
accactgatgggtgttgcaatactttcactactgatggcgattttcggactttgcgccgggagagacaaagaaat

SEQ ID NO: 775148 - DNA, 75 bp, synthetic construct
  source 1..75: mol_type = other DNA
ccctcgcatcctcacgcagtccggccagagtggttatatttcagttggccagaatgttccttttgtgacaggtaa

SEQ ID NO: 775149 - DNA, 75 bp, synthetic construct
  source 1..75: mol_type = other DNA
aaagatttcaaacttaagggcggagtgttacctggcgagcaagaaatcgacactgttcgtgcattgaagaaacgc

SEQ ID NO: 775150 - DNA, 75 bp, synthetic construct
  source 1..75: mol_type = other DNA
aagatccgtgcggcgctgagcagggtttctccggtcgtgaagtgatggcggagtttcgacgggcgaccggcttgc

SEQ ID NO: 775151 - DNA, 75 bp, synthetic construct
  source 1..75: mol_type = other DNA
gcgtccggcgtcgcttctcaagttcgttggttccacggcatcttatctaacaaccttgccattccacaaaaaccg

SEQ ID NO: 775152 - DNA, 75 bp, synthetic construct
  source 1..75: mol_type = other DNA
tagagctggcgcagcagtctggcgatctggacgcggaatcaaacgccgtactccagtatcagattgccgtcaccg

SEQ ID NO: 775153 - DNA, 75 bp, synthetic construct
  source 1..75: mol_type = other DNA
gttgcaggagccagacctcccggaaaagggcgtgcgctatacccgccacgttacgcaaatctggtgcggcttttt

SEQ ID NO: 775154 - DNA, 75 bp, synthetic construct
  source 1..75: mol_type = other DNA
ggtttacgtacgctgacgccggatattccggtcctttctgaagaagatcctcccggctgggaagttcgccagcac

SEQ ID NO: 775155 - DNA, 75 bp, synthetic construct
  source 1..75: mol_type = other DNA
gacgtatcgtcagccattacgagcgacgctggctgatagaggaataccacaaggcgtggaaaagtggtggtacat

SEQ ID NO: 775156 - DNA, 75 bp, synthetic construct
  source 1..75: mol_type = other DNA
accttgagcgcatggtggttatcaaggcgtttatcgcggtacgggtgctgggcctgcggcagggaggtatcagtg

SEQ ID NO: 775157 - DNA, 75 bp, synthetic construct
  source 1..75: mol_type = other DNA
tgtttctgcgcctgacgagctgctgccggttctgtccgattttatcaattctgtggatgttgcccgcgatcaggt

SEQ ID NO: 775158 - DNA, 75 bp, synthetic construct
  source 1..75: mol_type = other DNA
ataacattcgcaccctccgtgcgatggctcgcgaattctccattgacgttcttgaagaaatgctcgaaaaattca

SEQ ID NO: 775159 - DNA, 75 bp, synthetic construct
  source 1..75: mol_type = other DNA
tttgacaggaaaggtgactggcgaatgaaatgggctacttacatcccggggcatcctgacgctaatgatgggtgg

SEQ ID NO: 775160 - DNA, 75 bp, synthetic construct
  source 1..75: mol_type = other DNA
gtttcaacgtacaaattaaccgatagcgagcgcgatattgctgccgaaatatggaacgcctgccgcgccgccatg

SEQ ID NO: 775161 - DNA, 75 bp, synthetic construct
  source 1..75: mol_type = other DNA
agcaaatcagccgcatttcacagcaaattggctactacctgcatcgtgccagtatgcgcggcgggacattgctca

SEQ ID NO: 775162 - DNA, 75 bp, synthetic construct
  source 1..75: mol_type = other DNA
gccggggatcccattaagcaaacgtgaggtaatattcgatcgcggtcaacgtattgatacgttacgtcctgggca

SEQ ID NO: 775163 - DNA, 75 bp, synthetic construct
  source 1..75: mol_type = other DNA
agcttaaaagttcctatatggtgtggagctggtttgtctatgtgctctcagccaacctgctgttagtgatccctc

SEQ ID NO: 775164 - DNA, 75 bp, synthetic construct
  source 1..75: mol_type = other DNA
gaagtcattttcgaccgcggccaacgtatagatactttgcgtcccggacaaggtgttggtctggctgtcgcccgt

SEQ ID NO: 775165 - DNA, 75 bp, synthetic construct
  source 1..75: mol_type = other DNA
gcaacgtactggataacgcctgtaaatactgtcttgagttcgtggaaatttcagcgaggcaaaccgaagatcatc

SEQ ID NO: 775166 - DNA, 75 bp, synthetic construct
  source 1..75: mol_type = other DNA
cacaacgcgagaactgaccagtctggtacgaaacctgaaccgattgttaaaaagtgaacgcgaacgttacgacaa

SEQ ID NO: 775167 - DNA, 75 bp, synthetic construct
  source 1..75: mol_type = other DNA
taataaagttataacagctatcaatcttggtcccgcaagaattgcagaacaattaggtcatcataatgccataga

SEQ ID NO: 775168 - DNA, 75 bp, synthetic construct
  source 1..75: mol_type = other DNA
tacctatgccggacagtggctggaagatgcaaaaaatagcgtcagaaaaagtggattaattatcaccggtatttc

SEQ ID NO: 775169 - DNA, 75 bp, synthetic construct
  source 1..75: mol_type = other DNA
aggaggttttgtcttcttttttattcttaacatgatatctgccatctacagtatcagcgacatgctgaagcaata

SEQ ID NO: 775170 - DNA, 75 bp, synthetic construct
  source 1..75: mol_type = other DNA
tctataccctcgcgaagtgggaaaacaacaaattgcatgtcgaattgccagaaaatatcgacaagcaaagcccta

SEQ ID NO: 775171 - DNA, 75 bp, synthetic construct
  source 1..75: mol_type = other DNA
tttacgtcccattgaagcgctggcgagggaagttcgcgaactggaagaacatcatcgcgaacagcttaaccccac

SEQ ID NO: 775172 - DNA, 75 bp, synthetic construct
  source 1..75: mol_type = other DNA
gtaaagtctcatctattcatattttcagggtaaatgaatctggcaatatactaatactgagagaatttgaaaaca

SEQ ID NO: 775173 - DNA, 75 bp, synthetic construct
  source 1..75: mol_type = other DNA
aaatgaatttattcgactccctgaacagcgcacgtcgcctgaccgagcttgccggtgcggtactggaacgcagta

SEQ ID NO: 775174 - DNA, 75 bp, synthetic construct
  source 1..75: mol_type = other DNA
ggtaggaatgaaagaggcggtgagagcacttgatgaagtggcacttcttgcaactttgcatcattatcagaacca

SEQ ID NO: 775175 - DNA, 75 bp, synthetic construct
  source 1..75: mol_type = other DNA
agtgtacggcgatccgcagctcaccgcgcactttgacgcggtgcgtcgcgagattatgacgctgccgcgtgaagg

SEQ ID NO: 775176 - DNA, 75 bp, synthetic construct
  source 1..75: mol_type = other DNA
cgaaggcgtctatgctaacgagttgcgtgcgatgctgcgcccgtttgttttccgtcgttacatcgatttcagcgt

SEQ ID NO: 775177 - DNA, 75 bp, synthetic construct
  source 1..75: mol_type = other DNA
tgaatgccagcagacaggtattgtaattgatactcaaaaacatactgtccgtattttcaataaagataaagacag

SEQ ID NO: 775178 - DNA, 75 bp, synthetic construct
  source 1..75: mol_type = other DNA
cccatgtggaaagttaatgttcccctaaaaaataaaagcacttcaaatcacgaactttgcgagcgatggatgctg

SEQ ID NO: 775179 - DNA, 75 bp, synthetic construct
  source 1..75: mol_type = other DNA
aagaccaaagatgggcaagacaaccctgtacgggcagatggcgatcaactgcgcgattcgcgagaaaaagccagc

SEQ ID NO: 775180 - DNA, 75 bp, synthetic construct
  source 1..75: mol_type = other DNA
cctggcggctgggtttcattggagagaaaagtattgcgaagatgtacgccaccccagacggtggaatagcggtta

SEQ ID NO: 775181 - DNA, 75 bp, synthetic construct
  source 1..75: mol_type = other DNA
tgttttcgttatgcgcccaactaacaatgatggtcaaacggcactattcactttgagcctgtgttcagagatgtg

SEQ ID NO: 775182 - DNA, 75 bp, synthetic construct
  source 1..75: mol_type = other DNA
atcaccgttaagaccaacggcctgcgccgccgtgtaaaagccacccgcatcagcggctgcacggtttactgggaa

SEQ ID NO: 775183 - DNA, 75 bp, synthetic construct
  source 1..75: mol_type = other DNA
gctgaatttttcctcagatatcgatctgatttttgcctggccggaacatggttgcacgcagggcggacgcaggga

SEQ ID NO: 775184 - DNA, 75 bp, synthetic construct
  source 1..75: mol_type = other DNA
cgttgcaggaagatgacaccacgccagtgctggcgcatcttagcgaggatgatcgcaaacaggtgctaatgctga

SEQ ID NO: 775185 - DNA, 75 bp, synthetic construct
  source 1..75: mol_type = other DNA
tgctcgtcctccccttcgcctcaagtgcaaccacattcacctgtaaggccattcaggaagggcagatagattctg

SEQ ID NO: 775186 - DNA, 75 bp, synthetic construct
  source 1..75: mol_type = other DNA
atgaaatttctggaaaaactcaacaacaccgacattgagctgacagcactgactgtctggatagccagaaaaacc

SEQ ID NO: 775187 - DNA, 75 bp, synthetic construct
  source 1..75: mol_type = other DNA
atacgctgactcatttgagtggaaaggatgttgccggtcttctcgcataccttggtttaggagaaggctcagcat

SEQ ID NO: 775188 - DNA, 75 bp, synthetic construct
  source 1..75: mol_type = other DNA
ggcgcccgtcagccacactcacccgtggagtcagataacgggagtgcctgctgcctcgctgacggcaaaaggcac

SEQ ID NO: 775189 - DNA, 75 bp, synthetic construct
  source 1..75: mol_type = other DNA
tcagttcgctcggctctacacaatacggatttggtgacgctttaacctctaatcaactgggggtcttaaatggca

SEQ ID NO: 775190 - DNA, 75 bp, synthetic construct
  source 1..75: mol_type = other DNA
tggagaagcaccgccatattgttgttgccaacgatggttatgattcaggtgaagaatgggagttggctacaattt

SEQ ID NO: 775191 - DNA, 75 bp, synthetic construct
  source 1..75: mol_type = other DNA
caagtgttggacgtgcaattcttagtaagcctagcacacagggggttcttgattaccttggtttgggggaaggct

SEQ ID NO: 775192 - DNA, 75 bp, synthetic construct
  source 1..75: mol_type = other DNA
actggcggtagagccgattaattttgcgctgatcccttcggtgatttacacccaaccggaagttgcgtgggtagg

SEQ ID NO: 775193 - DNA, 75 bp, synthetic construct
  source 1..75: mol_type = other DNA
aaatgacttctccatttcgctgccggtagaccgactctcttttctgctggcagttgccacgctgaacggcgagcg

SEQ ID NO: 775194 - DNA, 75 bp, synthetic construct
  source 1..75: mol_type = other DNA
gtagaccgtctctcttttctgctggctgtggccacgctgaatggagagcgtctggatggtgagatgagtgaaggc

SEQ ID NO: 775195 - DNA, 75 bp, synthetic construct
  source 1..75: mol_type = other DNA
gaacgctgcgtgaattgcaggatacgctggaagcggcaggcgataaattgcaggccaacctgttacgcattcagg

SEQ ID NO: 775196 - DNA, 75 bp, synthetic construct
  source 1..75: mol_type = other DNA
gctgcgtgaattgcaggatacgctggaagcggcaggcgacaaattgcaggctaatctgttgcgcattcaggatgc

SEQ ID NO: 775197 - DNA, 75 bp, synthetic construct
  source 1..75: mol_type = other DNA
tcggcatcggcattactgactactacatccgtcagcgcgagttttctacgctgcgtctttctatgcagttgtcga

SEQ ID NO: 775198 - DNA, 75 bp, synthetic construct
  source 1..75: mol_type = other DNA
atctgcagagcaaacttgaccgtattatcagttggggccagcaatccatcgacttgtggattggctacgaccgcc

SEQ ID NO: 775199 - DNA, 75 bp, synthetic construct
  source 1..75: mol_type = other DNA
tgcattcacgaggaagtattggtaacacgggcgggagcgaaacacgaccgcgcaatattgcatttaactttattg

SEQ ID NO: 775200 - DNA, 75 bp, synthetic construct
  source 1..75: mol_type = other DNA
ggaatcagataacgggagtgcctgctgcctcgctgacggcaaaaggcaccgtacaattgagcagtgccatcaaca

SEQ ID NO: 775201 - DNA, 75 bp, synthetic construct
  source 1..75: mol_type = other DNA
catcctctaaaggtgcacgaagatatgactggtgggcttatgtatcagctcgcccccgcaatatcgcatttaact

SEQ ID NO: 775202 - DNA, 75 bp, synthetic construct
  source 1..75: mol_type = other DNA
ggtagatttaccagtcaatacagaacggaatcctcagatgggaatgaaaaccgcccacgcaatattgccttcaat

SEQ ID NO: 775203 - DNA, 75 bp, synthetic construct
  source 1..75: mol_type = other DNA
aaagtccttgcagccatgtcagagcttgtcatcggctatggtctgtggatcagtggtgccatcatcacgcttgtc

SEQ ID NO: 775204 - DNA, 75 bp, synthetic construct
  source 1..75: mol_type = other DNA
ctctatcagacttttcatggtgtgaattatctgttcagcatatcgtcaatgctgcagataaatattccgctttca

SEQ ID NO: 775205 - DNA, 75 bp, synthetic construct
  source 1..75: mol_type = other DNA
cacaaaagatgaatgggaactggctgcgattttcaaaaagacatacacacaaggacggggacttgatgccacaaa

SEQ ID NO: 775206 - DNA, 75 bp, synthetic construct
  source 1..75: mol_type = other DNA
gatcggttgccttattttaccggagcagaccgcgcagcactgacaacccttacagctattggtcgcgctattatc

SEQ ID NO: 775207 - DNA, 75 bp, synthetic construct
  source 1..75: mol_type = other DNA
atgtttacagcaatcgatcagcgtgatgaaccgttagccgcgctggttaataacgcaggaattttgtttacccaa

SEQ ID NO: 775208 - DNA, 75 bp, synthetic construct
  source 1..75: mol_type = other DNA
accgtaatcgatagctggtccagcatggtgtttttgaagttcaacggcgcgaaattctctgccactgattaccct

SEQ ID NO: 775209 - DNA, 75 bp, synthetic construct
  source 1..75: mol_type = other DNA
ggtgtacctgttccgtggcccactgccacaccgccagcaggctggttacagtgcaacggagctacgttcaccaaa

SEQ ID NO: 775210 - DNA, 75 bp, synthetic construct
  source 1..75: mol_type = other DNA
tgttctggccagagtctacccgaccctccgtcttcccgatttacgcggtgagtttatccgtggatgggacgacgg

SEQ ID NO: 775211 - DNA, 75 bp, synthetic construct
  source 1..75: mol_type = other DNA
cccaatctggcaaaggcctaccccaccaataaattaccggatttacgcggtgaatttatccgtggctgggatgat

SEQ ID NO: 775212 - DNA, 75 bp, synthetic construct
  source 1..75: mol_type = other DNA
aacgaactggacggtctgtttcaacaggatgccaccagtatcagcggtaaattacgcatcgacatcccgccagga

SEQ ID NO: 775213 - DNA, 75 bp, synthetic construct
  source 1..75: mol_type = other DNA
acgcactggcgcgttaccggaagatggcgttatcgcccgtcccctcggcaaactgaccatggtcaactgtgccag

SEQ ID NO: 775214 - DNA, 75 bp, synthetic construct
  source 1..75: mol_type = other DNA
cttaaatctaacttctgatgcggatctgattaagaaattgccaaaaaatcataaggggcattacttagtcacaat

SEQ ID NO: 775215 - DNA, 75 bp, synthetic construct
  source 1..75: mol_type = other DNA
actgagcttggtgagtggggcgattatttccggatgcagagcttcagtgatgtgtggatggatgcgcagtttgcc

SEQ ID NO: 775216 - DNA, 75 bp, synthetic construct
  source 1..75: mol_type = other DNA
agtgcttcttaaacatagaatatgaaaaatacatatctcatttatacgaaaccgcacaagaagaacgcaaagaaa

SEQ ID NO: 775217 - DNA, 75 bp, synthetic construct
  source 1..75: mol_type = other DNA
ttggaaattatactctccgttttggtgatgatgttttgctagactattatgatgaaattgttttcccctcttttt

SEQ ID NO: 775218 - DNA, 75 bp, synthetic construct
  source 1..75: mol_type = other DNA
taagaatgaataaattttataaaggctctttctatccggaagcactaaaagatgtatatatcagcgccggctcat

SEQ ID NO: 775219 - DNA, 75 bp, synthetic construct
  source 1..75: mol_type = other DNA
cttttgaacaatggttcgccagcgtctctgatgagttgacagctaacagtagcctaagacaatatggtaaccatc

SEQ ID NO: 775220 - DNA, 75 bp, synthetic construct
  source 1..75: mol_type = other DNA
caacacattgagccactggccccggtggcaggctctgatttgtatgtgttcaggccggtggcgcatacggtggat

SEQ ID NO: 775221 - DNA, 75 bp, synthetic construct
  source 1..75: mol_type = other DNA
cttgtggcgcacgacgaaaaagcctgcattcttgatgaactagttgtagctcagtatgaaggcgagcttaaagcg

SEQ ID NO: 775222 - DNA, 75 bp, synthetic construct
  source 1..75: mol_type = other DNA
tccaagtcttgacggcggcgcaacaaataatgcaatagcccttactagaatgcaggatattggcggatgtagagc

SEQ ID NO: 775223 - DNA, 75 bp, synthetic construct
  source 1..75: mol_type = other DNA
gctggtccgttcattgctgaaaagtgaacgtccttccggactgactcaggcaatcattgaagtggggcgcatcaa

SEQ ID NO: 775224 - DNA, 75 bp, synthetic construct
  source 1..75: mol_type = other DNA
aacagcaccggacgctgatgaattatctgctggtctgggagctaccggatccggatgaagagtatgtatgcggag

SEQ ID NO: 775225 - DNA, 75 bp, synthetic construct
  source 1..75: mol_type = other DNA
gtgccaatgcccgttatatcgcggctatcccaccaaaagttgcgctggcgctactggataaaattaagcacctgg

SEQ ID NO: 775226 - DNA, 75 bp, synthetic construct
  source 1..75: mol_type = other DNA
atgaaaaagactggaaccttccggttaccaaagggcgagggttgcagaaggtttccgtggcatgggccggatcgc

SEQ ID NO: 775227 - DNA, 75 bp, synthetic construct
  source 1..75: mol_type = other DNA
tcaaccatgcgttgaacgatgcgcggatggcgcgcgcccgtatggggctgatggcaccgacgatggggctggaca

SEQ ID NO: 775228 - DNA, 75 bp, synthetic construct
  source 1..75: mol_type = other DNA
agtttccggaataccgtgcgccaggttctgataaatggcaacaaatcagttgggaagaggcgtttgatcgcatcg

SEQ ID NO: 775229 - DNA, 75 bp, synthetic construct
  source 1..75: mol_type = other DNA
ccgaatttcagagcttgagactaatctcgcggcgctggtggcagagaacgccgggctgaaacacgcaatggccgt

SEQ ID NO: 775230 - DNA, 75 bp, synthetic construct
  source 1..75: mol_type = other DNA
ctgacccagaaatttgcccgctccctcgggatgctgacccagaaatttgcccgctccctcgggatgctggcggta

SEQ ID NO: 775231 - DNA, 75 bp, synthetic construct
  source 1..75: mol_type = other DNA
atcaatcaggcttgtcttgctactggtgaggaaatattcagcggtgacgagatccgcgaagctgccggatacgat

SEQ ID NO: 775232 - DNA, 75 bp, synthetic construct
  source 1..75: mol_type = other DNA
ggaaggtatttccggatgtcacgaacggtgcaatagtgatccacacccaacgcctgaaatcagatccagggggta

SEQ ID NO: 775233 - DNA, 75 bp, synthetic construct
  source 1..75: mol_type = other DNA
ccccgccttggctggctgacaacccgtcagagcaaacctgttctgaccgaaggaatgaaaacgctcctgaataat

SEQ ID NO: 775234 - DNA, 75 bp, synthetic construct
  source 1..75: mol_type = other DNA
agtgacgaaaggtgtaggcattgccaaatttacccctgtatgggctggtgctcttacaccgaaggacttcgaaga

SEQ ID NO: 775235 - DNA, 75 bp, synthetic construct
  source 1..75: mol_type = other DNA
aaacccggatagcgataactacggtctgccgacatggtgggaatacaaagaacgcatcaacagcaagaccatcgc

SEQ ID NO: 775236 - DNA, 75 bp, synthetic construct
  source 1..75: mol_type = other DNA
tatgccggactattgattcacgtcaaagataaccagccgtgggatcgtccagtaacaaaaggggtaggcatcgct

SEQ ID NO: 775237 - DNA, 75 bp, synthetic construct
  source 1..75: mol_type = other DNA
agaatcaacggaaacggcggcaaggctgcatatcgagccactggccccggtggcaggctctgatttgtatgtgtt

SEQ ID NO: 775238 - DNA, 75 bp, synthetic construct
  source 1..75: mol_type = other DNA
caatgaatatgctgcctgacctgtgcgatgagtcctggctggcgcgacatgctgcgatgaaacggtgtccgcgca

SEQ ID NO: 775239 - DNA, 75 bp, synthetic construct
  source 1..75: mol_type = other DNA
gatgggaacgggaactgtcggtgtgatgattgccagcagtgacctgattaatcccattccggaagaatcaacgga

SEQ ID NO: 775240 - DNA, 75 bp, synthetic construct
  source 1..75: mol_type = other DNA
gcagctcctgatttgcttgaagctctgcaagcgatgctaaacaaggcatacaagcaaaactggaatgaccattat

SEQ ID NO: 775241 - DNA, 75 bp, synthetic construct
  source 1..75: mol_type = other DNA
gaggtcctgcaggcccgcaaggtcctaaaggtgaacgaggagaagccggaccacagggaccgatgggagcacgag

SEQ ID NO: 775242 - DNA, 75 bp, synthetic construct
  source 1..75: mol_type = other DNA
tgagaagggcgaacagggggagcgaggaccgcagggaataccaggcctgaagggggataccggagagcgggggcc

SEQ ID NO: 775243 - DNA, 75 bp, synthetic construct
  source 1..75: mol_type = other DNA
ctgcgtgatggttatccgcagggagaactgaaggtatcgcgtatcagtgaggcgatttccggtgcgaacggggaa

SEQ ID NO: 775244 - DNA, 75 bp, synthetic construct
  source 1..75: mol_type = other DNA
atgctgtcaccgaaaggtctggtgaaaggctctctgtttgtcattggcgctcgccctaagatggggaaaacgacg

SEQ ID NO: 775245 - DNA, 75 bp, synthetic construct
  source 1..75: mol_type = other DNA
attaagcgcgagaaaggctgcgtaggcatgattttggttgactacctgacgctgatgactgccgaaaaagcagac

SEQ ID NO: 775246 - DNA, 75 bp, synthetic construct
  source 1..75: mol_type = other DNA
acgatactcctggcctgtcactggcgcacatcgttagcgaaagccgccgaatcaagcgcgagaagggctgcgtag

SEQ ID NO: 775247 - DNA, 75 bp, synthetic construct
  source 1..75: mol_type = other DNA
cgatcgcctgctcaactgcaggcgcggtcggtaacgctgacgacggtacggcattaatcctggtcacgccggtga

SEQ ID NO: 775248 - DNA, 75 bp, synthetic construct
  source 1..75: mol_type = other DNA
cgggatggtcatccgaaggggacgcttgaactttcccgtacaaacgaggcgatttctatagctgccggtgagcac

SEQ ID NO: 775249 - DNA, 75 bp, synthetic construct
  source 1..75: mol_type = other DNA
caacatatcgggccactggccccggtggcaggctctgatttatatgtattcaggccggtggcgcataaagtggat

SEQ ID NO: 775250 - DNA, 75 bp, synthetic construct
  source 1..75: mol_type = other DNA
atttgaccagccttactggatgatgaaggcatcactgcttgcggaatttaataaggtcatcacggatgtcggacc

SEQ ID NO: 775251 - DNA, 75 bp, synthetic construct
  source 1..75: mol_type = other DNA
tgaaagcggcaatggatgtggcaaatgaagcgaaaacaaaggcagaagaggctgcagcaggaggtggtgttcccg

SEQ ID NO: 775252 - DNA, 75 bp, synthetic construct
  source 1..75: mol_type = other DNA
tgacaggggcgagcaaggaccggcaggtcccacaggtccgaaaggtgagcgcggtgaacccggacctcagggacc

SEQ ID NO: 775253 - DNA, 75 bp, synthetic construct
  source 1..75: mol_type = other DNA
atgacgatggagccgggggagtatgcggtttcagtgacggtgagagggaagactgctgtctacggacgtgtgcgt

SEQ ID NO: 775254 - DNA, 75 bp, synthetic construct
  source 1..75: mol_type = other DNA
cgacggttggcaaacgtcggttggtttaattgctcaggatgcacaaaaagccttgcctgaactggtaactgaaga

SEQ ID NO: 775255 - DNA, 75 bp, synthetic construct
  source 1..75: mol_type = other DNA
ccacagggtccaaagggagataccggtgcggcaggcccggcaggcccacagggaccgaaaggagaaacaggtgcg

SEQ ID NO: 775256 - DNA, 75 bp, synthetic construct
  source 1..75: mol_type = other DNA
tggatgatgaaggcatcactgcctgcggtactcaataaagtcatcacggatgtcggaccgggaaaactcaatctg

SEQ ID NO: 775257 - DNA, 75 bp, synthetic construct
  source 1..75: mol_type = other DNA
aggtgacaggggcgagcaaggaccggcaggtcccacaggtccgaaaggtgagcgcggtgaacccggacctcaggg

SEQ ID NO: 775258 - DNA, 75 bp, synthetic construct
  source 1..75: mol_type = other DNA
ctcatggatggtgtgtaatgaaattacgtcgacaaatgacaatgaaggcatcgggctgttccagcgcgcatactg

SEQ ID NO: 775259 - DNA, 75 bp, synthetic construct
  source 1..75: mol_type = other DNA
aaaaacaaaccggatacggtcagccagcgggatgccagcacgacgcagaaaggtgtggtgcagttaagcagtgat

SEQ ID NO: 775260 - DNA, 75 bp, synthetic construct
  source 1..75: mol_type = other DNA
aacaacgaggaatgagcacagggatcccatcgctggacaggatgctgtcaccgaaaggtctggtgaaaggctctc

SEQ ID NO: 775261 - DNA, 75 bp, synthetic construct
  source 1..75: mol_type = other DNA
ggcaaaaacacagcggacactctgggatgtgggcagctttattctggcggcaacggatgccgaaggggagtggcc

SEQ ID NO: 775262 - DNA, 75 bp, synthetic construct
  source 1..75: mol_type = other DNA
agggagagcgcggacctcagggacctcgtggggagccaggcccggcgggcagcgcagcaaatgtggcagatgcga

SEQ ID NO: 775263 - DNA, 75 bp, synthetic construct
  source 1..75: mol_type = other DNA
cgctaaaacaaattcaatcgaactattccggcagatgctacgactacggtcatgaattctcgtatgttatcggaa

SEQ ID NO: 775264 - DNA, 75 bp, synthetic construct
  source 1..75: mol_type = other DNA
aggatgaatgctttagcgtgctgcatgactactggactaaaggccatgtagttaacccacgcaaagctaaaaagg

SEQ ID NO: 775265 - DNA, 75 bp, synthetic construct
  source 1..75: mol_type = other DNA
atgaaacccaccgtcaggtgggttttttgtttaggaaagaaaggacttcgctatgacgatgcatacaatatggtt

SEQ ID NO: 775266 - DNA, 75 bp, synthetic construct
  source 1..75: mol_type = other DNA
cctggtaccggaaaagcgtcaggaagtaacaaccgaaggcggcctggacgtcgcagggcagcgtgaaaaaatgcg

SEQ ID NO: 775267 - DNA, 75 bp, synthetic construct
  source 1..75: mol_type = other DNA
ctctgtttatcgacgccgatgaagagcagatcaaagctgcggcagaggttggcgcaccgtttatcgagatccaca

SEQ ID NO: 775268 - DNA, 75 bp, synthetic construct
  source 1..75: mol_type = other DNA
tgatattaatgagccagacggaccaacgaatcgttccgcatggatgagacttaagaataaagaattacctccttc

SEQ ID NO: 775269 - DNA, 75 bp, synthetic construct
  source 1..75: mol_type = other DNA
catgtggtcgtcactgaaatcccattttggatgttcgtacaaagaaatcagtgaggagcagtttacagaagcact

SEQ ID NO: 775270 - DNA, 75 bp, synthetic construct
  source 1..75: mol_type = other DNA
ccgctggccgtagagtacatccacagggtagtgcttgaaggtgaattcatcggcaaacaagagaagaaaaccaac

SEQ ID NO: 775271 - DNA, 75 bp, synthetic construct
  source 1..75: mol_type = other DNA
tccttgccgcaaagatgctcgggcaaggtgttgatgaaggtaagataagtgacgcacaggcaagacttgagcttc

SEQ ID NO: 775272 - DNA, 75 bp, synthetic construct
  source 1..75: mol_type = other DNA
tggtctttacccggttctttcctggctgacctggccgatgtctgtgggtaaatggacgcttgaagggatagaaac

SEQ ID NO: 775273 - DNA, 75 bp, synthetic construct
  source 1..75: mol_type = other DNA
aatggcggtgagctcaaaccgcaagaaaacccgaacgcgcaagcgattcaggatgatttaaaagatatcgattct

SEQ ID NO: 775274 - DNA, 75 bp, synthetic construct
  source 1..75: mol_type = other DNA
aaagaaatcagtgaggagcagtttaccgaagcactgtcacttgcagctcgagttccacttgaaggtgaattcatc

SEQ ID NO: 775275 - DNA, 75 bp, synthetic construct
  source 1..75: mol_type = other DNA
atgcataaagatccatacactgatgactcatccttggatcaggtccgtgtaaaaactatgctcactagcaccatt

SEQ ID NO: 775276 - DNA, 75 bp, synthetic construct
  source 1..75: mol_type = other DNA
tttggagtatttcaaatacctggaagatcaattttgtgcggcagcttttaattttctacgcaatgctgatatgac

SEQ ID NO: 775277 - DNA, 75 bp, synthetic construct
  source 1..75: mol_type = other DNA
ctggaaaaaccttcatttttacgcccgtaaggtgatgcgcatgtggcgttaccggataacgcgattactgtcccg

SEQ ID NO: 775278 - DNA, 75 bp, synthetic construct
  source 1..75: mol_type = other DNA
gttacgcgaagcaaataagcaaggccacgcgtcttgccagcgatatgcgtctcgctggttatccttatgtgaaca

SEQ ID NO: 775279 - DNA, 75 bp, synthetic construct
  source 1..75: mol_type = other DNA
aaaaatgccgcgtcaggaacccttgccgacgcgcacaaagcgaaggtgcaaaaagccacaaaagtggcaatgaat

SEQ ID NO: 775280 - DNA, 75 bp, synthetic construct
  source 1..75: mol_type = other DNA
tttacaaaacgcccgtactgacagctatctcaatcaggaaatagcgcaacgtgcatgtcagcaggcagggtttac

SEQ ID NO: 775281 - DNA, 75 bp, synthetic construct
  source 1..75: mol_type = other DNA
tcgcgccttagattcatggatgcgagatgggtatagtgccgcgcaaatttatgacttagccatttcaaaaggcga

SEQ ID NO: 775282 - DNA, 75 bp, synthetic construct
  source 1..75: mol_type = other DNA
gtaattagtttgtcgaccaagaatagttacatatactcagaatctgagttggtaacaactattggcattgaaaat

SEQ ID NO: 775283 - DNA, 75 bp, synthetic construct
  source 1..75: mol_type = other DNA
ttatactgtgtggagggaatggtactcgattatggccactttcacggggtttatatcctaagcagtttctgaatc

SEQ ID NO: 775284 - DNA, 75 bp, synthetic construct
  source 1..75: mol_type = other DNA
atgaaactctcaacctgctgtgccgcgcttctgctcgccctcgcctcacccgtggtactcgccgcgccgggatcc

SEQ ID NO: 775285 - DNA, 75 bp, synthetic construct
  source 1..75: mol_type = other DNA
ccagtgcagagaagttgaaacgcttttagaacaacaacaagccccagccctgcccggaaaagatgctcattccac

SEQ ID NO: 775286 - DNA, 75 bp, synthetic construct
  source 1..75: mol_type = other DNA
gataacgctcatcttcatttacgtattgctgcagccttagggcatctggatgcgcttaaaatgatcgccaggatg

SEQ ID NO: 775287 - DNA, 75 bp, synthetic construct
  source 1..75: mol_type = other DNA
ttaaatgaaaatgagtctgtgcatattcctgtaggtgtaaaacattatttagaaaatattggtaatacgcctctc

SEQ ID NO: 775288 - DNA, 75 bp, synthetic construct
  source 1..75: mol_type = other DNA
atgaaaaaatcactgttaattatcccgcttctgctggctgggtgcgcaaaagtaagtgactatcaagcaagttgc

SEQ ID NO: 775289 - DNA, 75 bp, synthetic construct
  source 1..75: mol_type = other DNA
ccattcacgacatcatgaatcccaaagagaaaggcaaagggatacccggcggcattacggatgttttcggctccg

SEQ ID NO: 775290 - DNA, 75 bp, synthetic construct
  source 1..75: mol_type = other DNA
ccctatgaactgatgatggaaatcctcaaacgggctaaatacgacccgctgaaacttcaggatgtgtttgatcag

SEQ ID NO: 775291 - DNA, 75 bp, synthetic construct
  source 1..75: mol_type = other DNA
gatgcggtcaataacatgatggacaggctgtattcgcagttcgcagtggggtctgtcagcgttgccgatgttgcc

SEQ ID NO: 775292 - DNA, 75 bp, synthetic construct
  source 1..75: mol_type = other DNA
agtagcggtaacgatgaatacagcctgaccattcctgatgttggcctggacaaagttgtcactggtgatgttgca

SEQ ID NO: 775293 - DNA, 75 bp, synthetic construct
  source 1..75: mol_type = other DNA
ctttaactggacctcggatgaaatagccaatggtttaccgatgaccgttgccctgcgtgaaacaaccgcagggca

SEQ ID NO: 775294 - DNA, 75 bp, synthetic construct
  source 1..75: mol_type = other DNA
aatagcagcaaaagagcatctggaaaagcaatacgccctgccgggcgagattgacagccttacaaaatccgttgc

SEQ ID NO: 775295 - DNA, 75 bp, synthetic construct
  source 1..75: mol_type = other DNA
tacggctctcgtctgatcactatatggtctatatccgtgcgcatcatatcatagtcgacggtttcggcatggcgt

SEQ ID NO: 775296 - DNA, 75 bp, synthetic construct
  source 1..75: mol_type = other DNA
ataatctgttttgctttgaaaatagcatccttgacttaagcttctccagacccccgatcaacagctcactggaag

SEQ ID NO: 775297 - DNA, 75 bp, synthetic construct
  source 1..75: mol_type = other DNA
tggcgcaagtgtgtcagcgactgttagctgaaacggagcgactggacgcgctggtcaatgcggcgggaattttac

SEQ ID NO: 775298 - DNA, 75 bp, synthetic construct
  source 1..75: mol_type = other DNA
cgattttctgaccacgcaatacgccctgccgggtgaggttgacagtctcactaaatccgttgccggtgatgccag

SEQ ID NO: 775299 - DNA, 75 bp, synthetic construct
  source 1..75: mol_type = other DNA
cgccagcccgtgggagcgcgagttcgcacaacaaagccaggacaaccagaaagcactggaatccgtctggcgtaa

SEQ ID NO: 775300 - DNA, 75 bp, synthetic construct
  source 1..75: mol_type = other DNA
ttttgcgccgttcatacgaacggcaggggatcccctgcccgtggcgttactacaacgatcgcgatgtacgcacaa

SEQ ID NO: 775301 - DNA, 75 bp, synthetic construct
  source 1..75: mol_type = other DNA
tgactatcccaacggttgggctggataaaattgccaatgctcatgctgatgctcaagccaattttcaattggtgg

SEQ ID NO: 775302 - DNA, 75 bp, synthetic construct
  source 1..75: mol_type = other DNA
accggatctgaaatcagcgattgatcgctatcgaaatattgtcagagatgcgggattagtggggaaatatgcgcc

SEQ ID NO: 775303 - DNA, 75 bp, synthetic construct
  source 1..75: mol_type = other DNA
tcctaatcatgaaaaattaagtaattcagctctcggattagcagatgccagtcgtgacggtactaaagtcgcaat

SEQ ID NO: 775304 - DNA, 75 bp, synthetic construct
  source 1..75: mol_type = other DNA
ttacgctggcaagacagggaggtggtgggttcaagactatcgcagatcgttcaaagattgcctctcgtgtagcgg

SEQ ID NO: 775305 - DNA, 75 bp, synthetic construct
  source 1..75: mol_type = other DNA
ggggcataagagccgttgcggttactaacccctactccgcaaagcgggcgcgactcagcaataacgcacaagtta

SEQ ID NO: 775306 - DNA, 75 bp, synthetic construct
  source 1..75: mol_type = other DNA
taaactggccgatcccagtcacattaacctgagtaatcaggcgctcggtatttctggtgctaaccgggatggaac

SEQ ID NO: 775307 - DNA, 75 bp, synthetic construct
  source 1..75: mol_type = other DNA
ccgcgacgaagctgaagcattagtctctatggatttggggcatggagatggtcggggtcgttatattaaacaggt

SEQ ID NO: 775308 - DNA, 75 bp, synthetic construct
  source 1..75: mol_type = other DNA
cctacaggttctgatccgctgcaaggtacacgttcggatatgaactggcaggatgttagcggtaaatctgccgcc

SEQ ID NO: 775309 - DNA, 75 bp, synthetic construct
  source 1..75: mol_type = other DNA
aagcccgccgccgggcaaacctggcatagctttaacgattacattaatttcagcgacaaaacaggctgggataaa

SEQ ID NO: 775310 - DNA, 75 bp, synthetic construct
  source 1..75: mol_type = other DNA
cgctgatgaatgacgtgtgctcaacgtctcagaatgtatcagtttgcatgtatcaattttcggcagccgtaaaag

SEQ ID NO: 775311 - DNA, 75 bp, synthetic construct
  source 1..75: mol_type = other DNA
tttcaggtgccagcagggctggcacccgtaccgcgatatcggacgagcgctttcacggagcgctcgcccggattg

SEQ ID NO: 775312 - DNA, 75 bp, synthetic construct
  source 1..75: mol_type = other DNA
acctccatggatttagggcatggtgacggtcgtggcgattatattaaacgggtttatagtcagaaaggagatatt

SEQ ID NO: 775313 - DNA, 75 bp, synthetic construct
  source 1..75: mol_type = other DNA
cagaatctaccactgcttctggtctgccggtgttctataaaaacaaaccggatactcacgcaaaatctgtcgacg

SEQ ID NO: 775314 - DNA, 75 bp, synthetic construct
  source 1..75: mol_type = other DNA
gaaacttttcggttatgccaaaactggcctgctctcctcctctgccacttcaggcgtgccgcaggtggagaatct

SEQ ID NO: 775315 - DNA, 75 bp, synthetic construct
  source 1..75: mol_type = other DNA
gaaacttttcggttatgccaaaactggcctgctctcctcctctgccgcttcgggcgtgccgcaggtggagaatct

SEQ ID NO: 775316 - DNA, 75 bp, synthetic construct
  source 1..75: mol_type = other DNA
atgattgcctgcggtttcgactacaaaatgtctgtcgaaaaagcctactctacggactccaacatgcttggtgca

SEQ ID NO: 775317 - DNA, 75 bp, synthetic construct
  source 1..75: mol_type = other DNA
cagcgacaccaaaatctgttaaggcggtaatggatgaaacgaacaagaaagcaccattaaacagcccggcactga

SEQ ID NO: 775318 - DNA, 75 bp, synthetic construct
  source 1..75: mol_type = other DNA
agagcctacccgaccctccgtcttcctgatttacgcggtgagtttatccgtgaatgggacgacgggcgcaaagtt

SEQ ID NO: 775319 - DNA, 75 bp, synthetic construct
  source 1..75: mol_type = other DNA
atgacgacgattctcaagcatctcccggtaggtcaacgtattggtatcgctttttctggcggtctggacaccagt

SEQ ID NO: 775320 - DNA, 75 bp, synthetic construct
  source 1..75: mol_type = other DNA
aagtgaaggctaagcgtctggaagacaaccgcctggccagtattgactacgacgccatcaaattgcagcaggaac

SEQ ID NO: 775321 - DNA, 75 bp, synthetic construct
  source 1..75: mol_type = other DNA
tgaccagccgatcacggtcgacaagcacgacgtcatcattactggtcacggtcgtcgcgaggcggcacttctggc

SEQ ID NO: 775322 - DNA, 75 bp, synthetic construct
  source 1..75: mol_type = other DNA
aacaccaggtgtgattgctaccgcaatctttgataaagcattcttacaaccgggtgaaaaaactgagctgtatat

SEQ ID NO: 775323 - DNA, 75 bp, synthetic construct
  source 1..75: mol_type = other DNA
atgattgcctgcggtttcgactataaaatgtcggtcgaaaaagcctactccaccgattccaacatgctcggcgca

SEQ ID NO: 775324 - DNA, 75 bp, synthetic construct
  source 1..75: mol_type = other DNA
ccacagccacaggaaagattcaatctattctgggtggcatggcagaaatggtaagcattttaggcaccgttgtcc

SEQ ID NO: 775325 - DNA, 75 bp, synthetic construct
  source 1..75: mol_type = other DNA
cagacacaaagggcaaaaaactttgaatcgcctaaagaggaagaatacagtctattaaatgtatacggttcgata

SEQ ID NO: 775326 - DNA, 75 bp, synthetic construct
  source 1..75: mol_type = other DNA
tatggtgcttctgtatggacattcgacgcctctcgctcagttcgcacagcatctgaaacacgcccccataacatt

SEQ ID NO: 775327 - DNA, 75 bp, synthetic construct
  source 1..75: mol_type = other DNA
gtctgcccagccgattaactatggctatcaaccgctgtttgaagatcgccgaccgcgcaatattggtgacacgct

SEQ ID NO: 775328 - DNA, 75 bp, synthetic construct
  source 1..75: mol_type = other DNA
cagcctggtccgtggcgtaaacgctatatactggcgcactcgatgggcggtgcaatctccacgctgtttctgcaa

SEQ ID NO: 775329 - DNA, 75 bp, synthetic construct
  source 1..75: mol_type = other DNA
tgaagaggaacgcgtggtagataaccgtatgcacgaccgtttttgtgaactccgcgccgcagcgggccatcctgt

SEQ ID NO: 775330 - DNA, 75 bp, synthetic construct
  source 1..75: mol_type = other DNA
gcattactgactattacatccgtcagcgcgagttttctacgctgcgtctttctatgcagttgtcgattgtggcgg

SEQ ID NO: 775331 - DNA, 75 bp, synthetic construct
  source 1..75: mol_type = other DNA
cactggcaccgcaatgtctatgctccgctgaaatattcggtagcagaaattttcgacagcatcgatctaacgcaa

SEQ ID NO: 775332 - DNA, 75 bp, synthetic construct
  source 1..75: mol_type = other DNA
gtccgctaatgccagtcgcgatggcaaaaccagtttcggctttgataccgtgccgcgctatttgcagggcctgtt

SEQ ID NO: 775333 - DNA, 75 bp, synthetic construct
  source 1..75: mol_type = other DNA
ctggtttattacgcctataaagatctggtgaagatccgtattccacgtacagctaacgaaatgtatcacctgcgt

SEQ ID NO: 775334 - DNA, 75 bp, synthetic construct
  source 1..75: mol_type = other DNA
caaattggtaagccatatcgttggggtggcagctcaccgcgtaccggttttgattgcagcggcctggtttattac

SEQ ID NO: 775335 - DNA, 75 bp, synthetic construct
  source 1..75: mol_type = other DNA
caaaaaccgcagcaaacaagttgtgaataaaacagcggcagccagctttacggaaaagtgcactaaacgtaaggg

SEQ ID NO: 775336 - DNA, 75 bp, synthetic construct
  source 1..75: mol_type = other DNA
gggacgctccggtcgtctgttagccgatccgcatctcggacacgtgaaccagtttaatgattatgtcgatgacct

SEQ ID NO: 775337 - DNA, 75 bp, synthetic construct
  source 1..75: mol_type = other DNA
ccgacgcgcacaaagcaaaagtacaaaaagccacaaaagtggcaatgaataaactgatgcagcaaattggcaagc

SEQ ID NO: 775338 - DNA, 75 bp, synthetic construct
  source 1..75: mol_type = other DNA
aaaaaagccgccagtaaaagtacgaccaaaagcaaaaccgcttcttccgttaaaaaatcttccattaccgcttct

SEQ ID NO: 775339 - DNA, 75 bp, synthetic construct
  source 1..75: mol_type = other DNA
taatcacattaaacgtgctggctccatttgttcatgcagatgaaccgttcagtattccggcgtcggcagtgaata

SEQ ID NO: 775340 - DNA, 75 bp, synthetic construct
  source 1..75: mol_type = other DNA
ccgcacggcgggcagaaactctctggttatggcaaggacatgtcactttatggcctggaagattatacggtggtc

SEQ ID NO: 775341 - DNA, 75 bp, synthetic construct
  source 1..75: mol_type = other DNA
gcatttgccgaatgggggcaaaccacgccgaaagtgcgtgcggaatgcctgctgaaactggcggatgttatcgaa

SEQ ID NO: 775342 - DNA, 75 bp, synthetic construct
  source 1..75: mol_type = other DNA
cagtatggacaaagatgttggtcgggcgcatcgcgtcagtgctcgcctgcaatatggttgtacatggattaatac

SEQ ID NO: 775343 - DNA, 75 bp, synthetic construct
  source 1..75: mol_type = other DNA
gtcgatgcgctgaacagcgataccgacggcccggtaacttttgccgccaccagcaataatgactcggcgaccgtt

SEQ ID NO: 775344 - DNA, 75 bp, synthetic construct
  source 1..75: mol_type = other DNA
atgattaacccaagaactattgcacagcaaattgcctatgccgacgtcgccactcaggcggcaaacttgcaggaa

SEQ ID NO: 775345 - DNA, 75 bp, synthetic construct
  source 1..75: mol_type = other DNA
cctgaaattaaaggggagcgccgtcgccttcattctgagatacaaagtggaagtctggctaataacatcaaaaaa

SEQ ID NO: 775346 - DNA, 75 bp, synthetic construct
  source 1..75: mol_type = other DNA
caacgccggaatttccgtgaaaaaacgcggcgatattctcgaccaggaaccagacagcttcgaccaaaacattgc

SEQ ID NO: 775347 - DNA, 75 bp, synthetic construct
  source 1..75: mol_type = other DNA
gctcgtggcggatttaacctgctgattaacgatcgtcccgatgccgacagcgtagaaaaactgcatatcacacaa

SEQ ID NO: 775348 - DNA, 75 bp, synthetic construct
  source 1..75: mol_type = other DNA
acttctctcagtgaagactactggcagcgccactatgttggcgctcgccgggtaatgaccccaaaaacacttcgc

SEQ ID NO: 775349 - DNA, 75 bp, synthetic construct
  source 1..75: mol_type = other DNA
ggctattactatgcgccgacgctgctggctggcgcattacaggacgatgccatcgtgcaaaaagaggtatttggt

SEQ ID NO: 775350 - DNA, 75 bp, synthetic construct
  source 1..75: mol_type = other DNA
gacagccagtacgggttggcctcttcggtatggacgaaagatgttggtcgggcgcatcgcgtcagcgcgcgtctg

SEQ ID NO: 775351 - DNA, 75 bp, synthetic construct
  source 1..75: mol_type = other DNA
agaactgccgcaccgctcgattattttcgtcagttccatcaacgccatcatgctggcgatgaatcgcggcgaata

SEQ ID NO: 775352 - DNA, 75 bp, synthetic construct
  source 1..75: mol_type = other DNA
ttaatgctcctcatgtgataaattatagaaaaatgctcatgaaaaactacatagggaatttgacaggaatctata

SEQ ID NO: 775353 - DNA, 75 bp, synthetic construct
  source 1..75: mol_type = other DNA
cccccgtctgggctatcgccatcgagcgtgagaactccggcgatagcgtaacctgctatctaacggaggctgcca

SEQ ID NO: 775354 - DNA, 75 bp, synthetic construct
  source 1..75: mol_type = other DNA
atcgtcgccagcaatgagcatcatgcacgtctttcactggtccatgagtatgggctttgccttgctgctcgcctg

SEQ ID NO: 775355 - DNA, 75 bp, synthetic construct
  source 1..75: mol_type = other DNA
tctttgtgtttgccgcaatccgccgtgctgacacccaaccccgcatttgtatgcttcgcactgtagcctgcgatg

SEQ ID NO: 775356 - DNA, 75 bp, synthetic construct
  source 1..75: mol_type = other DNA
tcccgcaaatccttacctctctggcagctctgataactgccatcaccggcctggttaaagtgctgcgtgaaaaag

SEQ ID NO: 775357 - DNA, 75 bp, synthetic construct
  source 1..75: mol_type = other DNA
cagcagcacctttaaagtggtgtggaaagcgcaggacggcctgccgctgaattacctgctgcgggttgaacaggg

SEQ ID NO: 775358 - DNA, 75 bp, synthetic construct
  source 1..75: mol_type = other DNA
atgaacacgcaggggctgacggtcaatccggactttatccgcgccctgaaccgcctgcgcgacgtggccgatacc

SEQ ID NO: 775359 - DNA, 75 bp, synthetic construct
  source 1..75: mol_type = other DNA
agcgttccgcgcgtctttcgctggtccgtgattatgtgctctccctttctgcacgcctgcctgcccgggaggtga

SEQ ID NO: 775360 - DNA, 75 bp, synthetic construct
  source 1..75: mol_type = other DNA
tttattgattttcccgagataagcttctatgcagtaatgatttggtacctgattgtatattttattttaataaca

SEQ ID NO: 775361 - DNA, 75 bp, synthetic construct
  source 1..75: mol_type = other DNA
aaaaatgattgtggatgcgtggctgggcgcacagtacgaaggcggtcgtcatcaacaacgcgtggaggcgattac

SEQ ID NO: 775362 - DNA, 75 bp, synthetic construct
  source 1..75: mol_type = other DNA
cattaataacgctggcggggtgtacggttactcgccaggcccatgtgagcgaagttgacgcggcaacaggtattg

SEQ ID NO: 775363 - DNA, 75 bp, synthetic construct
  source 1..75: mol_type = other DNA
gggatggcgtttgcgctgcactatcgtcaggcgccgcagcacgaagacgccttattgagattagcgcaacgcatt

SEQ ID NO: 775364 - DNA, 75 bp, synthetic construct
  source 1..75: mol_type = other DNA
cggacgtctggcgctggcttgaaatgataacccatgcattacaaaaaagagcaaatgacaggagtgataacgatg

SEQ ID NO: 775365 - DNA, 75 bp, synthetic construct
  source 1..75: mol_type = other DNA
cggatccgaccgctgagcaactggcagaaatcgcgattcagtctgctgattctgcaactgctttcggtatcgaac

SEQ ID NO: 775366 - DNA, 75 bp, synthetic construct
  source 1..75: mol_type = other DNA
agctacggcgctggacatacgctggcggtaagcaatggaaagggctgatgacccgtcgtgatattgagcgtgaag

SEQ ID NO: 775367 - DNA, 75 bp, synthetic construct
  source 1..75: mol_type = other DNA
catcagagtgccactgaccgaaccccagaaagcgggtattgcgtcattctgtccgtacaacattggtcccggtaa

SEQ ID NO: 775368 - DNA, 75 bp, synthetic construct
  source 1..75: mol_type = other DNA
ggcagagactgccgtattcgttcaaacaactgctacggtcaggtatcccgtcgtgaccaggagagcgcgctggcg

SEQ ID NO: 775369 - DNA, 75 bp, synthetic construct
  source 1..75: mol_type = other DNA
tttcttctgtaaatgatgttctgcgtcgtttgcctggcgttgcaatttctcagcatgggggagaagggcagctct

SEQ ID NO: 775370 - DNA, 75 bp, synthetic construct
  source 1..75: mol_type = other DNA
tcggactgggttacatcgggctgcctacagcagctgcgtttgcctcaaggcaaaaacaggtgattggtgtcgata

SEQ ID NO: 775371 - DNA, 75 bp, synthetic construct
  source 1..75: mol_type = other DNA
gtatgttacgggcatacaggaaaagacattatgctcggtaaaacgtataccgaagcagaatgcaaagctctcctg

SEQ ID NO: 775372 - DNA, 75 bp, synthetic construct
  source 1..75: mol_type = other DNA
atatccatgaacgcaaaaatcagatacggcctgtcggctgccgttctggcgctgattgccgcaggtgcgcctgcg

SEQ ID NO: 775373 - DNA, 75 bp, synthetic construct
  source 1..75: mol_type = other DNA
ggcgaaaaacatcaaagtgccactgactgaaccccagaaagcgggtattgcgtcattctgtccttacaacattgg

SEQ ID NO: 775374 - DNA, 75 bp, synthetic construct
  source 1..75: mol_type = other DNA
ggtaaaacgtataccaaagcagaatgcaaagcactcttgaataaagaccttgccactgtcgccagacaaattaac

SEQ ID NO: 775375 - DNA, 75 bp, synthetic construct
  source 1..75: mol_type = other DNA
cctgaaatcctcgaccagtttcttgacgaaaaagaaggtaaccacaccacggcataccgtgatggtgcggggatc

SEQ ID NO: 775376 - DNA, 75 bp, synthetic construct
  source 1..75: mol_type = other DNA
tgtcggctgccgttctggcgctgattgccgcaggtgcgtctgcgcctgaaatcctcgaccagtttctggatgaaa

SEQ ID NO: 775377 - DNA, 75 bp, synthetic construct
  source 1..75: mol_type = other DNA
agagactgccgtattcgctcaaataactgttatggtcaggtatcccgtcgtgaccaggagagcgctctggcgtgc

SEQ ID NO: 775378 - DNA, 75 bp, synthetic construct
  source 1..75: mol_type = other DNA
acctcccgtgagaatactggcactgaaatttcagcaggatggggaagtaatagttatcaaaattacgatatttcc

SEQ ID NO: 775379 - DNA, 75 bp, synthetic construct
  source 1..75: mol_type = other DNA
tcagcgaaagaagagttggctaatgaagcgcatccgattgatggcctgtctggtgaatatgcggagaaatccctt

SEQ ID NO: 775380 - DNA, 75 bp, synthetic construct
  source 1..75: mol_type = other DNA
acctataaatcacaggataaaatttctgataaaggcagcgtagtcattaaactggacactaattcaggtcaagcg

SEQ ID NO: 775381 - DNA, 75 bp, synthetic construct
  source 1..75: mol_type = other DNA
tctccaccgactggtttatgacctgggaacaaaatgttcatgcgtcgatgttttgtaatgcatggcagtttttgc

SEQ ID NO: 775382 - DNA, 75 bp, synthetic construct
  source 1..75: mol_type = other DNA
cgattgatggcctgtctggtgaatatgcggagaaatcccttgaagagtgggcggagcagattcgtaaaggaggcg

SEQ ID NO: 775383 - DNA, 75 bp, synthetic construct
  source 1..75: mol_type = other DNA
gcatttatttcgccgggcaaacacggcacgtacgctgtgcacacaccaggagataatcatcacggagatattgtc

SEQ ID NO: 775384 - DNA, 75 bp, synthetic construct
  source 1..75: mol_type = other DNA
acgcagagaacaacgctcgttatatcgcagctttcaacccagaagtagtgcaggcgttgctgaatgaacgggaag

SEQ ID NO: 775385 - DNA, 75 bp, synthetic construct
  source 1..75: mol_type = other DNA
gaagctgacgaaggaaaaatgcgctcaggttaatgccattgaacgggataaggcactggcatgggtggagaaaaa

SEQ ID NO: 775386 - DNA, 75 bp, synthetic construct
  source 1..75: mol_type = other DNA
attgtcgggggagctgttgctgttggttctcttgtctacgtgggagtctgttggattatttctcgtatgtccggg

SEQ ID NO: 775387 - DNA, 75 bp, synthetic construct
  source 1..75: mol_type = other DNA
atccgccagttaacagcgaaagttcgcagcaaggaatacccgttgtgacagataccggagctaaacaaggaaata

SEQ ID NO: 775388 - DNA, 75 bp, synthetic construct
  source 1..75: mol_type = other DNA
aatggagttgattaccctcggcgctcgtttgcagatgctggaaagcgaaacacagttaagtcgtggccgcctgat

SEQ ID NO: 775389 - DNA, 75 bp, synthetic construct
  source 1..75: mol_type = other DNA
tttgttgaaagtggattactgcaactttccagctgcaactgctgcggcggcaattttattacccacgctcaccag

SEQ ID NO: 775390 - DNA, 75 bp, synthetic construct
  source 1..75: mol_type = other DNA
cgaattaatgcaggtgatcgcaggggagcatgcgaagcgattcgctggtggattaaggacggtggcagagactgc

SEQ ID NO: 775391 - DNA, 75 bp, synthetic construct
  source 1..75: mol_type = other DNA
gtgaaaatctgcttaattgatgaaacaggcgtcggagacggcgccttatctattctggcggcccgctgggggctg

SEQ ID NO: 775392 - DNA, 75 bp, synthetic construct
  source 1..75: mol_type = other DNA
gtttcgccaggcatggttgatgcgcacacccatatttctgaaccgggtcgtagccactgggaaggttatgaaacg

SEQ ID NO: 775393 - DNA, 75 bp, synthetic construct
  source 1..75: mol_type = other DNA
tggtgcactgcgaaaacgcgctgatctgtgacgcactgggcgaagaagcgaaacgtgaaggtcgcgtaaccgctc

SEQ ID NO: 775394 - DNA, 75 bp, synthetic construct
  source 1..75: mol_type = other DNA
tcgttgcgacctgtggcgatcgcggtatcgacaacgacttccgtgatgtaaacgactggcagttcttcaaaggcg

SEQ ID NO: 775395 - DNA, 75 bp, synthetic construct
  source 1..75: mol_type = other DNA
tattaaagtaacactgaccgaaccacaaaaagcgggtatcgcgtcattttgtccctataacattggccccgctaa

SEQ ID NO: 775396 - DNA, 75 bp, synthetic construct
  source 1..75: mol_type = other DNA
cgcatacgttcaaataactgctatggacaggttattcgccgtgaccaggaaagcgcattagcctgttgggggata

SEQ ID NO: 775397 - DNA, 75 bp, synthetic construct
  source 1..75: mol_type = other DNA
atgtcttttgatttaattattaaaaacggcactgtcattttagaaaatgaagctcgcgttgtagatatcgccgtt

SEQ ID NO: 775398 - DNA, 75 bp, synthetic construct
  source 1..75: mol_type = other DNA
cgggataaggcgctggcatgggtggagcgtaatataaaagttccactgaccgagccacaaaaagcaggtatcgcg

SEQ ID NO: 775399 - DNA, 75 bp, synthetic construct
  source 1..75: mol_type = other DNA
gactgccgtattcgctcaaataactgttatggtcaggtatcccgtcgtgaccaggagagcgcgctggcgtgctgg

SEQ ID NO: 775400 - DNA, 75 bp, synthetic construct
  source 1..75: mol_type = other DNA
ggcatgaagttgtcgaaggaaaaatgcgaccgggttaacgccattgagcgtgataaggcgctggcatgggtggcg

SEQ ID NO: 775401 - DNA, 75 bp, synthetic construct
  source 1..75: mol_type = other DNA
ctgggcgaactgggtcagccggtgctggtgcactgcgaaaacgcgctgatctgtgacgaactgggcgaagaagcg

SEQ ID NO: 775402 - DNA, 75 bp, synthetic construct
  source 1..75: mol_type = other DNA
gaagctgtcgaaggaaaaatgcgaccaggttaacgccattgagcgtgataaggcgctggcatgggtggagaaaaa

SEQ ID NO: 775403 - DNA, 75 bp, synthetic construct
  source 1..75: mol_type = other DNA
cattgaacgtgataaggcgctggcatgggtggagaaaaacatcaaagtgccactgaccgaaccccagaaagcggg

SEQ ID NO: 775404 - DNA, 75 bp, synthetic construct
  source 1..75: mol_type = other DNA
acgaaccgggaactcgccgttctctgcgtgaatggttacacgacagccagatggatctgcacgacattcatatcg

SEQ ID NO: 775405 - DNA, 75 bp, synthetic construct
  source 1..75: mol_type = other DNA
aagcttggtggcatctttgttgattttgttggcggagcgatggcgcaccgtcgcaaattcggcggtggtcgcggt

SEQ ID NO: 775406 - DNA, 75 bp, synthetic construct
  source 1..75: mol_type = other DNA
ctggcgaatgtcgccacgccaaacgcggtagtcactaaagggcataggtttgatatttatgccggaacgccagtg

SEQ ID NO: 775407 - DNA, 75 bp, synthetic construct
  source 1..75: mol_type = other DNA
aaacttggcggcatctttgttgattttgttggcggagcgatggcgcaccgacgcaaattcggcggtggtcgcggt

SEQ ID NO: 775408 - DNA, 75 bp, synthetic construct
  source 1..75: mol_type = other DNA
gagcacgatgaagacaacctgatggcgctggtattaacgccggagcatctggaactgcgcaagcgtgatgagcca

SEQ ID NO: 775409 - DNA, 75 bp, synthetic construct
  source 1..75: mol_type = other DNA
ctggcgaatgtcgccacgccaaacgcggtagtcactaaagggcatcgctttgatatttatgccggaacgccggtg

SEQ ID NO: 775410 - DNA, 75 bp, synthetic construct
  source 1..75: mol_type = other DNA
tcgcaaatttggcggtggacgcggtgaggcggtggcgaaagcggtgggcattaaaggcgattatttgccggacgt

SEQ ID NO: 775411 - DNA, 75 bp, synthetic construct
  source 1..75: mol_type = other DNA
cacaacctgtttggtgataccgaagcggttgatgtgttcgtcttccctgacggtagcgtagaagtggaactgtct

SEQ ID NO: 775412 - DNA, 75 bp, synthetic construct
  source 1..75: mol_type = other DNA
atgtgggaaacctggctggagatgcacgagccgggaactcgccgttcactgcgcgagtggctgcatgacagccag

SEQ ID NO: 775413 - DNA, 75 bp, synthetic construct
  source 1..75: mol_type = other DNA
atcatcggcgtggaacgtaacgaatacacggtgctgatgaatcccctaatgatttttatcaaaatcattaagtta

SEQ ID NO: 775414 - DNA, 75 bp, synthetic construct
  source 1..75: mol_type = other DNA
actggtccgagtggtgacgatggcctggaaggtgtcagctacataccatacaaagatatcgttggcgtatggact

SEQ ID NO: 775415 - DNA, 75 bp, synthetic construct
  source 1..75: mol_type = other DNA
ttgctgctgctattggtggcggggctattgctatagcatctgtgttaatcacgggtccaagtggtaacgatggtc

SEQ ID NO: 775416 - DNA, 75 bp, synthetic construct
  source 1..75: mol_type = other DNA
atgaacgtaaaaatcagatacagcctgtcggctgctgttctggcactgattgccgccagtgctcctgcccctgac

SEQ ID NO: 775417 - DNA, 75 bp, synthetic construct
  source 1..75: mol_type = other DNA
tggtgcatgcccggcggtgtgcgcctgcggagtcgtgcggcttcgtgataagcacgccggagggggagcggtatc

SEQ ID NO: 775418 - DNA, 75 bp, synthetic construct
  source 1..75: mol_type = other DNA
tggctcgggttcttgatatctctcgacaggcaatatcatctttcgagaaggggttaaaaaaaccttcaccagaga

SEQ ID NO: 775419 - DNA, 75 bp, synthetic construct
  source 1..75: mol_type = other DNA
gcgttaaccaaaatgcgcgccgcggcgctggatgcgcaaaaagcaacgccgccgaagctggaaggtaaatcgcca

SEQ ID NO: 775420 - DNA, 75 bp, synthetic construct
  source 1..75: mol_type = other DNA
atatattcagtattagcatgtatgatgcatagcttcgccataccaatggttattctattattctctatgccactt

SEQ ID NO: 775421 - DNA, 75 bp, synthetic construct
  source 1..75: mol_type = other DNA
gaaatcgacagaaatatttcgcatagatgtgctcaatgtatctgtcagtgcaggcccgggcgtgatcaatagcga

SEQ ID NO: 775422 - DNA, 75 bp, synthetic construct
  source 1..75: mol_type = other DNA
accgtgaatggggaattaccagcgaaaacgaacaccggtttatggtctttgggaaggtcttaatcagtcagtcac

SEQ ID NO: 775423 - DNA, 75 bp, synthetic construct
  source 1..75: mol_type = other DNA
caacaacggcgcggaccattatttgtcggcggaattagtgatggtggtcgccagtgacaaagaagcggaaaaaat

SEQ ID NO: 775424 - DNA, 75 bp, synthetic construct
  source 1..75: mol_type = other DNA
ttcaactgcgaccaaaaaggctcgagttacagggaaaacacgtgggcgttgggcggcattaatattggatgaatg

SEQ ID NO: 775425 - DNA, 75 bp, synthetic construct
  source 1..75: mol_type = other DNA
gggttgaagtctccctctgctgatacactttctgcaatagccaaggtgttaggatttccagaacgatttttctta

SEQ ID NO: 775426 - DNA, 75 bp, synthetic construct
  source 1..75: mol_type = other DNA
attgcctacccacattctgcgataaagatttagtagcagaaatgtattcatcttttgtcaacatgattcgtggac

SEQ ID NO: 775427 - DNA, 75 bp, synthetic construct
  source 1..75: mol_type = other DNA
ggtctgccgggctaccgcccattgcacaggcattaaaaaatcatttagctgcctatgagcaatcgaagaaaggat

SEQ ID NO: 775428 - DNA, 75 bp, synthetic construct
  source 1..75: mol_type = other DNA
tccacagtcatcccggtggtctgccctggctgagcgaggccgaccggcggctgcagataaaaagtgcactgtcct

SEQ ID NO: 775429 - DNA, 75 bp, synthetic construct
  source 1..75: mol_type = other DNA
ttatgagacagtctatggctaccaaactgcaggacgggaatacaccttgtctggcagctacaccttcagaaccac

SEQ ID NO: 775430 - DNA, 75 bp, synthetic construct
  source 1..75: mol_type = other DNA
aagagtgccctgccctggtggctggtctgccggggggacattcataaattccgctgtgtgccgcacctgaccggg

SEQ ID NO: 775431 - DNA, 75 bp, synthetic construct
  source 1..75: mol_type = other DNA
aggcggtaatcgtctttactggaatatcgacgaagtaaacgactacctatccagccaggtaaaagcctatgcgta

SEQ ID NO: 775432 - DNA, 75 bp, synthetic construct
  source 1..75: mol_type = other DNA
tcgcggggatgactggtggcgtcacggccagaatctctatcttgacaatatggaggcaacgggtttttaccgtgt

SEQ ID NO: 775433 - DNA, 75 bp, synthetic construct
  source 1..75: mol_type = other DNA
ggtcactctcgagggtctggcgaagcagttgacgcctgttatccaccagcagcagacaatgctgcacatcattcc

SEQ ID NO: 775434 - DNA, 75 bp, synthetic construct
  source 1..75: mol_type = other DNA
atgctgacagcagcacaagagcatcatcagaccggattattatcgacgctgttttcgacccgttcgcgcctgctg

SEQ ID NO: 775435 - DNA, 75 bp, synthetic construct
  source 1..75: mol_type = other DNA
gacaggcatcgggggcatcccgacctttaccgcccattgcacaggcattaaaagagcacttggctgcctatgaaa

SEQ ID NO: 775436 - DNA, 75 bp, synthetic construct
  source 1..75: mol_type = other DNA
taccgattctggatcgttttgaagaaaatgaccaaaagtgcatttttttgcgctcaaatctggacggttttaatc

SEQ ID NO: 775437 - DNA, 75 bp, synthetic construct
  source 1..75: mol_type = other DNA
tagttatcagaactatgatgtctctacgcagcaacaactgggggataagacacgggtaacgctgttgggcgatta

SEQ ID NO: 775438 - DNA, 75 bp, synthetic construct
  source 1..75: mol_type = other DNA
cacaaatcttcggtgctatctcgatggaaccggccctgcaaaacgcgatccatcagggtatgccagtgctgatag

SEQ ID NO: 775439 - DNA, 75 bp, synthetic construct
  source 1..75: mol_type = other DNA
aattagaatggaaagcaaacagagaattatatgacatgattagagacgcttggaattggcaatcaaaaaatcctc

SEQ ID NO: 775440 - DNA, 75 bp, synthetic construct
  source 1..75: mol_type = other DNA
tccagcgaaatataaattcaccgacttcaatggtgaaacaaaaacctggaccggtcagggtcgtacgccgaagcc

SEQ ID NO: 775441 - DNA, 75 bp, synthetic construct
  source 1..75: mol_type = other DNA
cggcagacgggagctggggagtcagcgtaatgcagacatgtggggaaatatctacccccgttccggttttgtcag

SEQ ID NO: 775442 - DNA, 75 bp, synthetic construct
  source 1..75: mol_type = other DNA
gtaatccttggaaagagatgtcgctggtcagccggaccgcaggtggcccggagaatgccatcactgacggcctgt

SEQ ID NO: 775443 - DNA, 75 bp, synthetic construct
  source 1..75: mol_type = other DNA
ggaagcggcgaagcagaatgctgacaccctgaagggagaagcggacagtgccgtgaaggcgttgccggatacagc

SEQ ID NO: 775444 - DNA, 75 bp, synthetic construct
  source 1..75: mol_type = other DNA
ctcagctggatattacgcgattttttagaagcaccgatgcccaagcatgggagtatttgtggaactatcgagaac

SEQ ID NO: 775445 - DNA, 75 bp, synthetic construct
  source 1..75: mol_type = other DNA
tgttcccaccattaatcttagcgactttactagaaaaccagatggttttgtgctggtctttgatgatgtcgagag

SEQ ID NO: 775446 - DNA, 75 bp, synthetic construct
  source 1..75: mol_type = other DNA
tcacgtctatcagtcactgaaaggcagaaaaacggatggctactggccaccggatgcggtggaagaaaataccgg

SEQ ID NO: 775447 - DNA, 75 bp, synthetic construct
  source 1..75: mol_type = other DNA
ctcagtttggctatgtctgcgccccgtcgtcacagccttttctcccctacttcctcagcacactggatgcgctcg

SEQ ID NO: 775448 - DNA, 75 bp, synthetic construct
  source 1..75: mol_type = other DNA
gcccggtatcgctgaagccggtggcgataccaacccccgcgccgtcggccagcacagtaaagtccgcttcaagaa

SEQ ID NO: 775449 - DNA, 75 bp, synthetic construct
  source 1..75: mol_type = other DNA
atggtacctgttttcaatggcaacattattcgcacctgggtgacctcgatcattttgttcggtggtggtctgtat

SEQ ID NO: 775450 - DNA, 75 bp, synthetic construct
  source 1..75: mol_type = other DNA
atggaactgatcacgcaatttataaacgatctgggaaattttatatttatcccggtcatcttcctggtactgatg

SEQ ID NO: 775451 - DNA, 75 bp, synthetic construct
  source 1..75: mol_type = other DNA
gtgcggcaatcggcggttatgcgttggataacattggtctgacttcgccgctgatgttgtccggcacattgatgt

SEQ ID NO: 775452 - DNA, 75 bp, synthetic construct
  source 1..75: mol_type = other DNA
acgcggcggaagatctggttgcaaaagcagaggaagccgagaaggttgcagaagatgcactgaaggcagcaggcg

SEQ ID NO: 775453 - DNA, 75 bp, synthetic construct
  source 1..75: mol_type = other DNA
atccagccatatcctgattacctgtctgcttatgtcaaaacgcttgtttcagccagttgcgaccaggtactttca

SEQ ID NO: 775454 - DNA, 75 bp, synthetic construct
  source 1..75: mol_type = other DNA
ctgtaagttgtgagcagacactgaaaggtgattcgaaatctgaggatgtattgataaagcaagcaacacagggga

SEQ ID NO: 775455 - DNA, 75 bp, synthetic construct
  source 1..75: mol_type = other DNA
aagtgattggtactttgatatcatcagcacaatcgcaagcctcagaaccaaaaccaaaggtagcaacttctgacg

SEQ ID NO: 775456 - DNA, 75 bp, synthetic construct
  source 1..75: mol_type = other DNA
tttatgcggcatccgtcagtgatccggatacgatgttttgggtgatgttagtcaatgcaatggcatttatgccga

SEQ ID NO: 775457 - DNA, 75 bp, synthetic construct
  source 1..75: mol_type = other DNA
cacttgatggactaatgtcttcagcaaaatcgcaagttaccgatagtaaaccaaaagagccagcttctgatgatg

SEQ ID NO: 775458 - DNA, 75 bp, synthetic construct
  source 1..75: mol_type = other DNA
gttgccgctgatgacaaaattggtggtcgtaaggtggaagtgaccggaactgttcaggacataacaaaaaatttc

SEQ ID NO: 775459 - DNA, 75 bp, synthetic construct
  source 1..75: mol_type = other DNA
aataacctgttattattacatgacaaaccatcacgacagcagcgggaacataaaggccgaatatcggtgaaggaa

SEQ ID NO: 775460 - DNA, 75 bp, synthetic construct
  source 1..75: mol_type = other DNA
tggttgatgaggtgacaggtctggttccggatggggtggaagctgaccgttcaggcgatgatttaattctacgta

SEQ ID NO: 775461 - DNA, 75 bp, synthetic construct
  source 1..75: mol_type = other DNA
acggatgcgaacggtaacggcaaggcagacacagccgagcaggccgtggccgatgcggaagctgcggtcaaggca

SEQ ID NO: 775462 - DNA, 75 bp, synthetic construct
  source 1..75: mol_type = other DNA
gtgagcaaaagcggataaaaaacaccaacaaatataaatcacaatctgaagcgcaaaaacaaaagcatgcagttc

SEQ ID NO: 775463 - DNA, 75 bp, synthetic construct
  source 1..75: mol_type = other DNA
tgccagtgagttctggcctaagaccggagaaccgcctttgagctatgatactgttgttagtttgctacgtagttg

SEQ ID NO: 775464 - DNA, 75 bp, synthetic construct
  source 1..75: mol_type = other DNA
tggctggccattgactggctgaaaacgcaatacggcgcaccgttacgtacggtcgaagtgtggcgatggcagaag

SEQ ID NO: 775465 - DNA, 75 bp, synthetic construct
  source 1..75: mol_type = other DNA
atgaagctctcaatttgtggggtgataaagccgagattattctcgctcaacatcactggccaacctggggcaacg

SEQ ID NO: 775466 - DNA, 75 bp, synthetic construct
  source 1..75: mol_type = other DNA
gagtatatgggcggtgctgatgccattttacagaaagccaaacaggattatgaccagggtaatttccgctgggtt

SEQ ID NO: 775467 - DNA, 75 bp, synthetic construct
  source 1..75: mol_type = other DNA
tgtgcatataaatggcgagaaagcggcagacgctaaagcagtattgaattttgatttcggtgaagatggcggcac

SEQ ID NO: 775468 - DNA, 75 bp, synthetic construct
  source 1..75: mol_type = other DNA
gtggttgatgaagctgacgttaagtcaggaaaaacaaaaatttatgcgccagccggatttttagaagaggctgtt

SEQ ID NO: 775469 - DNA, 75 bp, synthetic construct
  source 1..75: mol_type = other DNA
gataacaccgatttcactgatgctcataaaggattcattgcccccatacctcaggaggtgattaagggtgaacaa

SEQ ID NO: 775470 - DNA, 75 bp, synthetic construct
  source 1..75: mol_type = other DNA
gtctgctagtcatgggattattcaccaccagttcacttcctctcattgccgcggaagcaccaaaagaggccacct

SEQ ID NO: 775471 - DNA, 75 bp, synthetic construct
  source 1..75: mol_type = other DNA
tggaagaagttaaccgcgaactgtctgctaagcaggaaacagaagaagaaaatgatgaagaaaaaccgcaaccat

SEQ ID NO: 775472 - DNA, 75 bp, synthetic construct
  source 1..75: mol_type = other DNA
ttttacagaaagccaaacaggattatgaccagggtaatttccgctgggttgcccaagttgttagtaaggtggtgt

SEQ ID NO: 775473 - DNA, 75 bp, synthetic construct
  source 1..75: mol_type = other DNA
aaccagctatattgcacgttttgacatagatgcggcagaacgtttgtggaaacgcttaaggacttgcgtcctgcc

SEQ ID NO: 775474 - DNA, 75 bp, synthetic construct
  source 1..75: mol_type = other DNA
ggcgttaactgtacaggctcctgtagctggaaaatctacgttaaaaatggtctggtgacctgggaaatccaacag

SEQ ID NO: 775475 - DNA, 75 bp, synthetic construct
  source 1..75: mol_type = other DNA
gtgcggtactgacgatattaaccttcctggtgcatatcaccctcggcgtgtggtggtggaatatgctgatcggct

SEQ ID NO: 775476 - DNA, 75 bp, synthetic construct
  source 1..75: mol_type = other DNA
tacatcaccaaaaccggacaaaaagagactatcgacgggctgagctatgattttttgatggcgcccggttccgaa

SEQ ID NO: 775477 - DNA, 75 bp, synthetic construct
  source 1..75: mol_type = other DNA
tcttgaaagcaaacgtgaagtgtcaggagacgctgccttcagtaaccagcgcctgttaatcgccaatttctttgt

SEQ ID NO: 775478 - DNA, 75 bp, synthetic construct
  source 1..75: mol_type = other DNA
atgaaatatcgccagttccacatccatgcgcaatcagtggtactcagtgatagtgcggtcatggcaatgcttaag

SEQ ID NO: 775479 - DNA, 75 bp, synthetic construct
  source 1..75: mol_type = other DNA
gattaaggacggtggcagagactgccgtattcgctcaaataattgctacggtcaggtctcacggcgtgaccagga

SEQ ID NO: 775480 - DNA, 75 bp, synthetic construct
  source 1..75: mol_type = other DNA
gcattctggtagaaatattcagcttaagcctgattccgcaaatgaacgcggtacgctggtcgccgcaagtcgaac

SEQ ID NO: 775481 - DNA, 75 bp, synthetic construct
  source 1..75: mol_type = other DNA
atgagcaggaaactccgctatggtttatcggctgtcgttctggcgctgattgccgcaggggcttctgcgcctgaa

SEQ ID NO: 775482 - DNA, 75 bp, synthetic construct
  source 1..75: mol_type = other DNA
ttcagaatattttatataactgtatctacgtgctctttattattatcatgtgtaccaaacaagtacggtatgatt

SEQ ID NO: 775483 - DNA, 75 bp, synthetic construct
  source 1..75: mol_type = other DNA
gtgcctgcgaagcgattcgctggtggattaaggacggtggcagagactgccgtattcgttcaaacaactgttacg

SEQ ID NO: 775484 - DNA, 75 bp, synthetic construct
  source 1..75: mol_type = other DNA
aagataacgatatggtctatggcatgtatgaacgtctgggttatgaacatgccgatgtgctgagtctgggcaagc

SEQ ID NO: 775485 - DNA, 75 bp, synthetic construct
  source 1..75: mol_type = other DNA
atcattcatatgaacgcgggggaaaaacaattatgtccgcgctgtgcaaatccagaatggacgaaggcaagtcgg

SEQ ID NO: 775486 - DNA, 75 bp, synthetic construct
  source 1..75: mol_type = other DNA
ccagcaatacggtgctggttacggaatttggcggcgtgcgtgctgtgcatttctgtctgcatgaaaaattaagcg

SEQ ID NO: 775487 - DNA, 75 bp, synthetic construct
  source 1..75: mol_type = other DNA
gtgtttcccgtcgacgttttacagacgaattaatgctggtgatcgcaggggagcatgcgaagcgattcgctggtg

SEQ ID NO: 775488 - DNA, 75 bp, synthetic construct
  source 1..75: mol_type = other DNA
gcgacaaggcgctggcgtgggttgaccgaaatatcaaagtaccactgaccgaaccacagaaagcgggtatcgctt

SEQ ID NO: 775489 - DNA, 75 bp, synthetic construct
  source 1..75: mol_type = other DNA
ctatatcattctgtaccgtgtagccgcttcgagtgttgaaatagtaagtgtcacccactccagacgacaatttcc

SEQ ID NO: 775490 - DNA, 75 bp, synthetic construct
  source 1..75: mol_type = other DNA
ggatcaaattatggcaccgaaaccagcatccgctcccgccgctgttgagacagatgatgtgcatccggaagtaac

SEQ ID NO: 775491 - DNA, 75 bp, synthetic construct
  source 1..75: mol_type = other DNA
cagcgtcccagcgatcgtgttgaaattcgcctgctggttaataccggttcgctcgccgaaagtacacaacagagc

SEQ ID NO: 775492 - DNA, 75 bp, synthetic construct
  source 1..75: mol_type = other DNA
tctctgaatacagcggcagcggctttggcgtcatgaaatggggtatcagcctgaaacagctggtggtgttgcaga

SEQ ID NO: 775493 - DNA, 75 bp, synthetic construct
  source 1..75: mol_type = other DNA
acatgaaaggattgcaggccgcctgggatcaaatcatggcaccatctactgcggctgccgccacatctgtagccg

SEQ ID NO: 775494 - DNA, 75 bp, synthetic construct
  source 1..75: mol_type = other DNA
gcgccgaagcggtaagcattatgactgacgcagtgcgtcaggaccggttatccattatgtgggatacgccgtggc

SEQ ID NO: 775495 - DNA, 75 bp, synthetic construct
  source 1..75: mol_type = other DNA
cgctgcaaagtcaggacatggtggcaccctggcctgccgatactaaagagggctggtggcgctatcgtctgaaag

SEQ ID NO: 775496 - DNA, 75 bp, synthetic construct
  source 1..75: mol_type = other DNA
gtctggtcccgacacgtaagcaccagtttgctcaatctctgaactacgaaatcgccaaaacgctgaacgcggaaa

SEQ ID NO: 775497 - DNA, 75 bp, synthetic construct
  source 1..75: mol_type = other DNA
gctgcagggtatgcgcaagccggttaacgacctgtcccgtggcgcactggttgacgatatcgtctacaccatcgc

SEQ ID NO: 775498 - DNA, 75 bp, synthetic construct
  source 1..75: mol_type = other DNA
cgcaaagcgggcaaacgtatcgttctgccggaaggtgacgaaccgcgtaccgttaaagcagccgctatctgtgct

SEQ ID NO: 775499 - DNA, 75 bp, synthetic construct
  source 1..75: mol_type = other DNA
ctgtatctctttgccatcgcgcgtttcttctttgctatttctggtctggataccggtagcccgtttaccgctatc

SEQ ID NO: 775500 - DNA, 75 bp, synthetic construct
  source 1..75: mol_type = other DNA
ccaacacctggcagacttctctgagcctgcagagcttcaacctcgaagttccggttgacgatcacgagcgtatcg

SEQ ID NO: 775501 - DNA, 75 bp, synthetic construct
  source 1..75: mol_type = other DNA
tgacaccccggaacagctgaaagagcgtatcgaactgactcgcaacagcttcggcggtgccaaaaacaccaacat

SEQ ID NO: 775502 - DNA, 75 bp, synthetic construct
  source 1..75: mol_type = other DNA
ggatcaaatcatggcaccatctactgcggctgccgccacatctgtagccgcagatgatgtgcatcctgaagtgac

SEQ ID NO: 775503 - DNA, 75 bp, synthetic construct
  source 1..75: mol_type = other DNA
gagcagactgaaagctatggcagattcaccggtgaaccggatgagcttcagctggctctgttgcaaaaatcgtga

SEQ ID NO: 775504 - DNA, 75 bp, synthetic construct
  source 1..75: mol_type = other DNA
gcaggacgtgttgataacctacaaaggaaagctaccgggaagaattactggttctctgaagatgcctccgtcaac

SEQ ID NO: 775505 - DNA, 75 bp, synthetic construct
  source 1..75: mol_type = other DNA
tgttgctgccgggttatgtgaaggggatggtccgttgccggaaaagcggcccatcattttagaggcgcaggacgt

SEQ ID NO: 775506 - DNA, 75 bp, synthetic construct
  source 1..75: mol_type = other DNA
ctgcacgtgatgatttacgtcagatagtagcctatattgctaaagaaaaccctcccgctgcacgtagactaaaaa

SEQ ID NO: 775507 - DNA, 75 bp, synthetic construct
  source 1..75: mol_type = other DNA
ctacataatactgtacaaagtagctgcctcaagcattgaaattgtaagcgtggcacatgctcgccaacaatatcc

SEQ ID NO: 775508 - DNA, 75 bp, synthetic construct
  source 1..75: mol_type = other DNA
aggcaccacggcagcggcactgggctttgcacccagcgtagcactcgcggaaacaaggcagtataaactgctgcg

SEQ ID NO: 775509 - DNA, 75 bp, synthetic construct
  source 1..75: mol_type = other DNA
accacagatcctggacttactgcatcgtctgaattctccatgggcagaacaagcccgacagttggttgatgctaa

SEQ ID NO: 775510 - DNA, 75 bp, synthetic construct
  source 1..75: mol_type = other DNA
gctgcgctactggcgtgcggacctggcccgtgaggcgctgttctggcatgttcagcaagcgttaagcgccagtaa

SEQ ID NO: 775511 - DNA, 75 bp, synthetic construct
  source 1..75: mol_type = other DNA
agtttgcccaataaccgtaacgatttgctgaaagaggcgctctcttatctggcaaatgccactggcaaactgacc

SEQ ID NO: 775512 - DNA, 75 bp, synthetic construct
  source 1..75: mol_type = other DNA
ttatcgcctgcacggtgaatcatggcgtgaaaaagttatcgaacgtccggtcgtccataaagattatgacgaaca

SEQ ID NO: 775513 - DNA, 75 bp, synthetic construct
  source 1..75: mol_type = other DNA
taatgctggccgtcagcgaagaaggattgctcgaagatatgatcatcgcgctgctggcctcaccacagctagtgg

SEQ ID NO: 775514 - DNA, 75 bp, synthetic construct
  source 1..75: mol_type = other DNA
ttttaagccagcagtttcgtggcggcaccgatcttgccagttgttttcgcgccattatggaacgcttgcaaagca

SEQ ID NO: 775515 - DNA, 75 bp, synthetic construct
  source 1..75: mol_type = other DNA
gccgtattcgctcaaataactgttatggtcaggtctcacggcgtgaccaggagagcgcgctggcgtgctggggaa

SEQ ID NO: 775516 - DNA, 75 bp, synthetic construct
  source 1..75: mol_type = other DNA
agcgcaatataaaagttccactgaccgagccacagaaagccggtatcgcgtcattctgtccctataacattggcc

SEQ ID NO: 775517 - DNA, 75 bp, synthetic construct
  source 1..75: mol_type = other DNA
atggtggacggtaaacctgttattccgggaatgaaactgtcgaaggaaaaatgcgcccaggttaacgccattgag

SEQ ID NO: 775518 - DNA, 75 bp, synthetic construct
  source 1..75: mol_type = other DNA
tggattaaggacggtggcagggactgccgtattcgctcaaataactgttacggtcaggtatcccgtcgtgaccag

SEQ ID NO: 775519 - DNA, 75 bp, synthetic construct
  source 1..75: mol_type = other DNA
agcacctgaaaggtctggcacatccgctcaagccggtagttctgcttggcagcaatggtttgaccgaaggggtac

SEQ ID NO: 775520 - DNA, 75 bp, synthetic construct
  source 1..75: mol_type = other DNA
catgtctttcgccgggcagtttgctttcttcacatatattcgcccggtgtatatgaacctggcgggattcagcgt

SEQ ID NO: 775521 - DNA, 75 bp, synthetic construct
  source 1..75: mol_type = other DNA
cgctggcggtaagcaatggaaagggctgatgactcgccgtgagattgagcgtgaagtctgtttgtgggggcagca

SEQ ID NO: 775522 - DNA, 75 bp, synthetic construct
  source 1..75: mol_type = other DNA
ccgtgatggtgcgggtatctggaccatctgccgaggtgccacccgggtggatggtaagcctgtgattcctggcat

SEQ ID NO: 775523 - DNA, 75 bp, synthetic construct
  source 1..75: mol_type = other DNA
aacatcgacgcttcttcgcaaaataaaccagggcgatatcaaaggcgcatgtgatcagctacggcgctggacata

SEQ ID NO: 775524 - DNA, 75 bp, synthetic construct
  source 1..75: mol_type = other DNA
aataaagaccttgccacggtcgccagacaaattaacccgtacatcaaagtcgatataccggaaacaacgcgcggt

SEQ ID NO: 775525 - DNA, 75 bp, synthetic construct
  source 1..75: mol_type = other DNA
aaggtgtcagctacataccatacaaagatattgttggtgtatggactgtatgtcacgggcatacaggaaaagaca

SEQ ID NO: 775526 - DNA, 75 bp, synthetic construct
  source 1..75: mol_type = other DNA
attaaggacggtggcagggactgccgtattcgctcaaataactgctacgggcaggttatacgtcgtgaccaggaa

SEQ ID NO: 775527 - DNA, 75 bp, synthetic construct
  source 1..75: mol_type = other DNA
atgaagttgtcgaaggaaaaatgcgaccaggttaacgccattgaacgtgataaggcgctggagtgggtggagcgc

SEQ ID NO: 775528 - DNA, 75 bp, synthetic construct
  source 1..75: mol_type = other DNA
cggaaccgctcaaataactgttacgggcaggtgtcgcggcgtgaccaggaaagtgcgctggcgtgctggggaatt

SEQ ID NO: 775529 - DNA, 75 bp, synthetic construct
  source 1..75: mol_type = other DNA
caggttaacgccattgaacgtgataaggcgctggagtgggtggagcgcaatattaaagtaccgctgaccgaaccc

SEQ ID NO: 775530 - DNA, 75 bp, synthetic construct
  source 1..75: mol_type = other DNA
gtatggactgtatgtcacgggcatacaggaaaagacatcatgctcggtaaaacgtataccaaagcagaatgcaaa

SEQ ID NO: 775531 - DNA, 75 bp, synthetic construct
  source 1..75: mol_type = other DNA
attctcgaccagtttctggatgaaaaagaaggtaaccacaccacagcataccgtgatggttctggtatatggacc

SEQ ID NO: 775532 - DNA, 75 bp, synthetic construct
  source 1..75: mol_type = other DNA
atctgccgcggtgccatcctggtggatggtaaacctgtcgtcccgggcatgaagttgtcgaaggaaaaatgcgac

SEQ ID NO: 775533 - DNA, 75 bp, synthetic construct
  source 1..75: mol_type = other DNA
gtgtttcccgtcgacgttttataaacgaattaatgcaggcgatcgcagaggagcgtgtgaagcgattcgctggtg

SEQ ID NO: 775534 - DNA, 75 bp, synthetic construct
  source 1..75: mol_type = other DNA
ttgaacgtgataaggcgctggcatgggtggagaaaaacatccgggtgccgctgaccgaaccccagaaagcgggga

SEQ ID NO: 775535 - DNA, 75 bp, synthetic construct
  source 1..75: mol_type = other DNA
tgcaggtgatcgcaggggagcgtgtgaggcgattcgctggtggattaaggacggtggcagagactgccgtattcg

SEQ ID NO: 775536 - DNA, 75 bp, synthetic construct
  source 1..75: mol_type = other DNA
cgaattaatgcaggcgatcgcaggggagcatgtgaggcgattcgctggtggattaaggacggtggcagagactgc

SEQ ID NO: 775537 - DNA, 75 bp, synthetic construct
  source 1..75: mol_type = other DNA
cagaaagcgggtattgcgtcattctgcccgtataacattggccccggtaagtgtttcccgtcgacgttttataaa

SEQ ID NO: 775538 - DNA, 75 bp, synthetic construct
  source 1..75: mol_type = other DNA
attctcgaccagtttctggatgaaaaggaaggtaaccacaccacggcataccgtgatggtgcaggtatctggacc

SEQ ID NO: 775539 - DNA, 75 bp, synthetic construct
  source 1..75: mol_type = other DNA
tttctggatgaaaaggaaggtaaccacaccacagcataccgtgatggtgcgggtatctggaccatctgccgtgga

SEQ ID NO: 775540 - DNA, 75 bp, synthetic construct
  source 1..75: mol_type = other DNA
ctgactgaaccccagaaagcgggtattgcgtcattctgtccttacaacattggcccaggtaagtgtttcccgtcg

SEQ ID NO: 775541 - DNA, 75 bp, synthetic construct
  source 1..75: mol_type = other DNA
atgagttatgaaattgccgcaacggggctgaatgccgttaacgaacaactggacgggatcagtaacaacatcgcc

SEQ ID NO: 775542 - DNA, 75 bp, synthetic construct
  source 1..75: mol_type = other DNA
aggcgctggcatgggtggagaaaaacatcagagtgccactgactgaaccccagaaagcggggatcgcgtcattct

SEQ ID NO: 775543 - DNA, 75 bp, synthetic construct
  source 1..75: mol_type = other DNA
ggattatcaaatcattgccttcgctgccaggcgaaccctcgcatcagaaacaaaatactttccgcttattacaac

SEQ ID NO: 775544 - DNA, 75 bp, synthetic construct
  source 1..75: mol_type = other DNA
accaaaaccagcgacaacacctgggaagtgcagtacaccttcgacggtcagcagcagaccggcgttccggcgacg

SEQ ID NO: 775545 - DNA, 75 bp, synthetic construct
  source 1..75: mol_type = other DNA
agctcgtacaccgacagctacaccaccacggtatatgactcattaggcaacgaacattcggtatgccagtacttc

SEQ ID NO: 775546 - DNA, 75 bp, synthetic construct
  source 1..75: mol_type = other DNA
cagcgtaactatcaggccaacaccaaagttatcgccaccagcacgcagctcgatgacgcgctgttccaggcaatg

SEQ ID NO: 775547 - DNA, 75 bp, synthetic construct
  source 1..75: mol_type = other DNA
tggtctgacttcgccgttaatattgtccggcacgttgatgttgcttaccgcgctgttggttactgcaaaagtgaa

SEQ ID NO: 775548 - DNA, 75 bp, synthetic construct
  source 1..75: mol_type = other DNA
taaaaccaccctggtagacaagctgctccaacaatctggtacgttcgactctcgtgccgaaacccaagagcgcgt

SEQ ID NO: 775549 - DNA, 75 bp, synthetic construct
  source 1..75: mol_type = other DNA
gaagacgctgatgcgttccgcgtttctggtcgtggcgaactgcacctgtctgttcttatcgaaaacatgcgtcgt

SEQ ID NO: 775550 - DNA, 75 bp, synthetic construct
  source 1..75: mol_type = other DNA
tgtcggctgccgttctggcgctgattgccgcaggtgcgcctgcgcctgaaatcctcgatcagtttctggatgaaa

SEQ ID NO: 775551 - DNA, 75 bp, synthetic construct
  source 1..75: mol_type = other DNA
ggcgcggatgccatcacccgaccgaactggtcagccgttttctcggtggcgttttgcgtcgcctgtctgattatc

SEQ ID NO: 775552 - DNA, 75 bp, synthetic construct
  source 1..75: mol_type = other DNA
gtccgtacaacattggccccggtaagtgtttcccgtcgacgttttataagcggctgaatgccggtgatcgtaagg

SEQ ID NO: 775553 - DNA, 75 bp, synthetic construct
  source 1..75: mol_type = other DNA
gcagaccattgagtttcagaccgacgccgccgcgcccatcgatttaaccgtcgattactcgacctgtacgcaata

SEQ ID NO: 775554 - DNA, 75 bp, synthetic construct
  source 1..75: mol_type = other DNA
cgttttgctgacgctctcttgcttactggtttcctttgccagctcgttcagaatgttattaatcggtcgagcctg

SEQ ID NO: 775555 - DNA, 75 bp, synthetic construct
  source 1..75: mol_type = other DNA
aggcgctggcatgggtggagaaaaacatcaaagtgccattgagcgaaccccagaaagcggggatcgcgtcattct

SEQ ID NO: 775556 - DNA, 75 bp, synthetic construct
  source 1..75: mol_type = other DNA
aagagggtaaccacactacggcataccgcgatggttccggcaactggaccatctgtcggggggccacgatggtgg

SEQ ID NO: 775557 - DNA, 75 bp, synthetic construct
  source 1..75: mol_type = other DNA
ggcagagactgccgtattcgctcaaataactgttatggtcaggtatcccgtcgtgaccaggagagcgcgctggcg

SEQ ID NO: 775558 - DNA, 75 bp, synthetic construct
  source 1..75: mol_type = other DNA
cgcgaaaaacgccagagaagcgatttatcacattgaaggtgacccggatcatccggtaagtcgtggcgcgctgtg

SEQ ID NO: 775559 - DNA, 75 bp, synthetic construct
  source 1..75: mol_type = other DNA
atgggcgatatcaccgttatcgctgacgcgggtgacgataatcgccgccgcggtggagagcagcagggaagggat

SEQ ID NO: 775560 - DNA, 75 bp, synthetic construct
  source 1..75: mol_type = other DNA
tggtgcaggggcgtctgcgcctgaaatcctcgaccagtttctggatgaaaaggaaggtaaccacaccacagcata

SEQ ID NO: 775561 - DNA, 75 bp, synthetic construct
  source 1..75: mol_type = other DNA
tgtcggctgccgttctggcactgattgccgtcggtgcgcccgcgcctgatattctcgatcagtttctggatgaaa

SEQ ID NO: 775562 - DNA, 75 bp, synthetic construct
  source 1..75: mol_type = other DNA
cccgaatgaaaacggcctggaggcagtgagcggcaccgcatgggtacatggatatcgatcgcctgaagctggtgg

SEQ ID NO: 775563 - DNA, 75 bp, synthetic construct
  source 1..75: mol_type = other DNA
cgggcatgaagttgtcgaaggaaaaatgcgaccgggttaacgccattgagcgtgataaggcgctggcatgggtgg

SEQ ID NO: 775564 - DNA, 75 bp, synthetic construct
  source 1..75: mol_type = other DNA
cagaaagcgggtatcgcgtcattttgcccctataacattggccccggtaagtgtttcccgtcgacgttttataag

SEQ ID NO: 775565 - DNA, 75 bp, synthetic construct
  source 1..75: mol_type = other DNA
ctgcgcctgaaatcctcgaccagtttctggatgaaaaggaaggtaaccacaccacggcataccgtgatggtgcgg

SEQ ID NO: 775566 - DNA, 75 bp, synthetic construct
  source 1..75: mol_type = other DNA
ccccgcgtttccaggtgttcggcgctgacgcaatgcgcggcccgcgcggcctgaaagcggttggcccgtatgtgg

SEQ ID NO: 775567 - DNA, 75 bp, synthetic construct
  source 1..75: mol_type = other DNA
gtcaaagtttcattacttgaggcgctcaaagatattgcttatgcgccagaacttatagatcttgttaaggatgag

SEQ ID NO: 775568 - DNA, 75 bp, synthetic construct
  source 1..75: mol_type = other DNA
cgtgcgcgattcgatccgtggctggttgccgaagccgaaaaagaaggtgtcgaatgcatccccggtacgacggtg

SEQ ID NO: 775569 - DNA, 75 bp, synthetic construct
  source 1..75: mol_type = other DNA
ctgattgcaggttccggcggcggctccccgcgtttccaggtgttcggcgctgacgcaatgcgcggcccgcgcggc

SEQ ID NO: 775570 - DNA, 75 bp, synthetic construct
  source 1..75: mol_type = other DNA
gctacggcgcaacgtctgatggcgcagacatggttgctccatctggcgaaggcgcagtgcgctgcatgaagatgg

SEQ ID NO: 775571 - DNA, 75 bp, synthetic construct
  source 1..75: mol_type = other DNA
ttcgacgcaatgggcgcgctgtctaccaaatacaacgacaccccggaaaaagcctcccgtacttatgacgctcat

SEQ ID NO: 775572 - DNA, 75 bp, synthetic construct
  source 1..75: mol_type = other DNA
agttgcgtcaatactggaatttcagtgcgcggcatggacatggcgctgactggtgcgcaggcagcagcgcaaacg

SEQ ID NO: 775573 - DNA, 75 bp, synthetic construct
  source 1..75: mol_type = other DNA
cgggcaattcggcgcgctggcggcgtggctggcaattgactggttgaaaacgcaatacggcgcgccgttacgtac

SEQ ID NO: 775574 - DNA, 75 bp, synthetic construct
  source 1..75: mol_type = other DNA
catcggaaacacgccaatagataccctcacagctcgccgctttgttgagatactcacacccattaaagcacgcgg

SEQ ID NO: 775575 - DNA, 75 bp, synthetic construct
  source 1..75: mol_type = other DNA
ttgccgaagccgaaaaagaaggtgtcgaatgcatccccggtgcgacggtggatgcgctgtatgaagaaaacggca

SEQ ID NO: 775576 - DNA, 75 bp, synthetic construct
  source 1..75: mol_type = other DNA
cgctttaaagcgcatccggcagtgcgcccgcttatcaaaaacacggaatcactggagtatggtgcgcatctggtg

SEQ ID NO: 775577 - DNA, 75 bp, synthetic construct
  source 1..75: mol_type = other DNA
acccatgcactcgcggaactcctccctcagtttcacctgaccgcgcctcttgaacgacgcatcactcacgaaagc

SEQ ID NO: 775578 - DNA, 75 bp, synthetic construct
  source 1..75: mol_type = other DNA
atgacgtcacagcagacagccatgctggcaccggctgcggattatatctggacagagccccggaggcgtgaatga

SEQ ID NO: 775579 - DNA, 75 bp, synthetic construct
  source 1..75: mol_type = other DNA
cctccgaacccagagtgtattttcatttattgatgaaatttgctgtttgcgcaattttcctgttttggtgtattt

SEQ ID NO: 775580 - DNA, 75 bp, synthetic construct
  source 1..75: mol_type = other DNA
cagggctgggggtgggtaaggtgaaatctatcaatcagtaccggcttacgccgggcttcggcggttttactccgg

SEQ ID NO: 775581 - DNA, 75 bp, synthetic construct
  source 1..75: mol_type = other DNA
aactcggattaactacacgccagagcagaaggcaattatctgggacagatataagcaaggtgattctctacatga

SEQ ID NO: 775582 - DNA, 75 bp, synthetic construct
  source 1..75: mol_type = other DNA
atgatgaaaaaaagtattctggcatttgtattgcttaccagttcggcagcggcgctggcggcaccgcaggtgatt

SEQ ID NO: 775583 - DNA, 75 bp, synthetic construct
  source 1..75: mol_type = other DNA
agtgggaagactaaagcccaacccatttcggtgattcagattgatgatcctaacaatcccggcgaaaaaatgagt

SEQ ID NO: 775584 - DNA, 75 bp, synthetic construct
  source 1..75: mol_type = other DNA
gcgggaaaggcgaagaatattcagatgttacttttattgcttcactatataaatacggtaaaaacaaactaaaga

SEQ ID NO: 775585 - DNA, 75 bp, synthetic construct
  source 1..75: mol_type = other DNA
atggcgcgtggctgcattctgaccgttctgctgacgctggcaggcagtggcatgtgtcaggctgttgcgcggacc

SEQ ID NO: 775586 - DNA, 75 bp, synthetic construct
  source 1..75: mol_type = other DNA
ttatcaccatcctgccggtggaaagccggccgcccgttacaccgccgtggtcagacgtcatctggaccggctgaa

SEQ ID NO: 775587 - DNA, 75 bp, synthetic construct
  source 1..75: mol_type = other DNA
aacgaatgcggtatcggtgacgtggttgaaatccgcgaatgccgcccgctgtccaagaccaaatcctggacgctg

SEQ ID NO: 775588 - DNA, 75 bp, synthetic construct
  source 1..75: mol_type = other DNA
tattactgaataaaaatattaagtggtactattatactatgagtctgataattaacaaattaaagaggatggtat

SEQ ID NO: 775589 - DNA, 75 bp, synthetic construct
  source 1..75: mol_type = other DNA
gattgccggtgcaccggaaccgtcatatctgtacgccgccacactgtgtgccgttgccagccaggcgctttccat

SEQ ID NO: 775590 - DNA, 75 bp, synthetic construct
  source 1..75: mol_type = other DNA
ctgaccagtcactgatgcaactggtcaccgcattctgggcaacgctggcacttatgtatatgtcgtttgcggcag

SEQ ID NO: 775591 - DNA, 75 bp, synthetic construct
  source 1..75: mol_type = other DNA
gctttatccgtatcggcaacagaacggcaaaccaggctacttattgagtggcagctactgaccgtaacccgtcca

SEQ ID NO: 775592 - DNA, 75 bp, synthetic construct
  source 1..75: mol_type = other DNA
atgggaaatatcagccttacgaccagtgagccagatttcgaatttgacccgtatttagttacagaggaattttaa

SEQ ID NO: 775593 - DNA, 75 bp, synthetic construct
  source 1..75: mol_type = other DNA
tggaagtgggcaatattagccttacgaccagtgaaccagactttgagtttgacccgtatattttggaggaatttt

SEQ ID NO: 775594 - DNA, 75 bp, synthetic construct
  source 1..75: mol_type = other DNA
ctgcttgaaccaaaaatcaaacaggcagtggcgttgcgtcagcaagaagcaaaacatggccgacgttcacgataa

SEQ ID NO: 775595 - DNA, 75 bp, synthetic construct
  source 1..75: mol_type = other DNA
atccaccgcgacaaatcatcttcagcgtcaagcaacccgattaagccatgagctgccaactgatgcctattgtgc

SEQ ID NO: 775596 - DNA, 75 bp, synthetic construct
  source 1..75: mol_type = other DNA
aataagctttttctgcttctgccggaggagtatggcccagccttcccagcaatcgtcgattgttataccagtcca

SEQ ID NO: 775597 - DNA, 75 bp, synthetic construct
  source 1..75: mol_type = other DNA
attacgccacgagacagatttatgtcagcacgcaaagaaaaagagaatactttaaaaactttcttgatgggcttt

SEQ ID NO: 775598 - DNA, 75 bp, synthetic construct
  source 1..75: mol_type = other DNA
acgatccgaaaatcattgacggtaaacatttccttccgcagcaccgtgaacgcatcgtgctggtgggttttcgtc

SEQ ID NO: 775599 - DNA, 75 bp, synthetic construct
  source 1..75: mol_type = other DNA
agggtaaaacgttccgcatcatcatgcagacgctggacgaactgggctatgacgtggctgatgcagaagataacg

SEQ ID NO: 775600 - DNA, 75 bp, synthetic construct
  source 1..75: mol_type = other DNA
taacttaaccaccatttgcatgaaagttattgaggcaatcaatcatcatgcggaaatgggaaatatcagccttac

SEQ ID NO: 775601 - DNA, 75 bp, synthetic construct
  source 1..75: mol_type = other DNA
gcagacgctggacgaactgggctatgacgttgccgacgcagaagataacgggccggacgatccgaaaatcatcga

SEQ ID NO: 775602 - DNA, 75 bp, synthetic construct
  source 1..75: mol_type = other DNA
cgacatcactctcagccacaaagagggtataggtgatgacgcggcggcggaacatatccgtcaacatattcctga

SEQ ID NO: 775603 - DNA, 75 bp, synthetic construct
  source 1..75: mol_type = other DNA
ctttgccgcggtggcaaaactgcttgagccaaaaatcaaacaggcggtggcgttgcgtcagcaagaggcacaaca

SEQ ID NO: 775604 - DNA, 75 bp, synthetic construct
  source 1..75: mol_type = other DNA
ttaattggtgttgttgagcatcatattgccgttggaaatattgagccaatggaaaacgagcaaccagatttcgag

SEQ ID NO: 775605 - DNA, 75 bp, synthetic construct
  source 1..75: mol_type = other DNA
catcgtgaatatgtttttccgagtcggaatgacccaaagaaaccaatgaacagtcagactgcaaatgcagcttta

SEQ ID NO: 775606 - DNA, 75 bp, synthetic construct
  source 1..75: mol_type = other DNA
catattcagcacagcggcgaacgaagaaggatttgagccggacgtaatcgaggccgcactcgcacacgtggacac

SEQ ID NO: 775607 - DNA, 75 bp, synthetic construct
  source 1..75: mol_type = other DNA
attttgctgccaacagtgggctgattgacatcaacaccgccgcgaacgtccgcaaggcattcccctcccccacca

SEQ ID NO: 775608 - DNA, 75 bp, synthetic construct
  source 1..75: mol_type = other DNA
ttgctgagttttggatcgcttgatgatgtttccctggctgatgccagaaaacgccgtagcgagtacagggcgtta

SEQ ID NO: 775609 - DNA, 75 bp, synthetic construct
  source 1..75: mol_type = other DNA
attacgccgccaacagtgggctgattgatgccaatccggctatgaatgtgcgtaaggcgttcccctcccctgtaa

SEQ ID NO: 775610 - DNA, 75 bp, synthetic construct
  source 1..75: mol_type = other DNA
tggaaaaagatgtattccccgccgttggtgagatgcccgttcagcagatcaaagctagaacattggtcgaagcac

SEQ ID NO: 775611 - DNA, 75 bp, synthetic construct
  source 1..75: mol_type = other DNA
ttcttgaagaatccaagagacgcaacagaagcaacggttacagctacacagacacccccaccagctacgaagtcc

SEQ ID NO: 775612 - DNA, 75 bp, synthetic construct
  source 1..75: mol_type = other DNA
catattgccgttggtaatattgagccaatggaaaacgagcaaccagatttcgaatttgacccgtatttagttacc

SEQ ID NO: 775613 - DNA, 75 bp, synthetic construct
  source 1..75: mol_type = other DNA
aatacaacaaaaaactattttatcttctaaagaatcttgacgaaattaacgcagccagcgtgacaaatcatcttc

SEQ ID NO: 775614 - DNA, 75 bp, synthetic construct
  source 1..75: mol_type = other DNA
cgtaaggcgtttccctcacctgtaaaaaaacatatgccaacaatccgccccgaacagctgccggagcttatgcag

SEQ ID NO: 775615 - DNA, 75 bp, synthetic construct
  source 1..75: mol_type = other DNA
attttgctgccaacagtgggctgattgacatcaacaccgccgcgaacgtccgcaaggcattcccttcccccacta

SEQ ID NO: 775616 - DNA, 75 bp, synthetic construct
  source 1..75: mol_type = other DNA
gctggtgggcgatgcgttgcgcagttgcgtcaataccggaatttccgtgcgcggcatggatatggcgctaactgg

SEQ ID NO: 775617 - DNA, 75 bp, synthetic construct
  source 1..75: mol_type = other DNA
ttcatgtcactggcaggtaagcattgctgctctgatggttatatcgggaaaaggttacagaaggctgagggcata

SEQ ID NO: 775618 - DNA, 75 bp, synthetic construct
  source 1..75: mol_type = other DNA
ccggaagatgcggaccatattacttttattcgcgggcgtattggttttgaactgcctgactggtttatcccgaag

SEQ ID NO: 775619 - DNA, 75 bp, synthetic construct
  source 1..75: mol_type = other DNA
ccggaagatgcggaacatattccttttattcgcgggcgtattggttttgaactgcctgactggtttatcccgaag

SEQ ID NO: 775620 - DNA, 75 bp, synthetic construct
  source 1..75: mol_type = other DNA
acaaagccgtggcctgacagcattgttgatggcgctgctggccatttcattaagtcgggtaaaaccgcggcaagg

SEQ ID NO: 775621 - DNA, 75 bp, synthetic construct
  source 1..75: mol_type = other DNA
gtgcggtggcagcgggagtagcctgggaaaatgctcctgcaaacagcgccgctgtggcggtaaaaatcaatgtct

SEQ ID NO: 775622 - DNA, 75 bp, synthetic construct
  source 1..75: mol_type = other DNA
gctgcggtggtggtcggcagtatggtggccgtggccattaccgatattcctgccggtgaggccggtgacggtttt

SEQ ID NO: 775623 - DNA, 75 bp, synthetic construct
  source 1..75: mol_type = other DNA
gcatttagtcaaggtgaaatcgtggccgcatattggaactgggttgcaaatccaattgattacaaaaaatataga

SEQ ID NO: 775624 - DNA, 75 bp, synthetic construct
  source 1..75: mol_type = other DNA
gctggaagcaaaaccaataggtgctttccacattgcagaacagcaagttgacggcacaagtgactatctcaagga

SEQ ID NO: 775625 - DNA, 75 bp, synthetic construct
  source 1..75: mol_type = other DNA
caggcggccaaaagacacagaacaaagcccatagtatcattggcgcagaaaaatatcactcatgggatgaccaga

SEQ ID NO: 775626 - DNA, 75 bp, synthetic construct
  source 1..75: mol_type = other DNA
ccggaagatgccgatcatatttcttttattcgcgggcgtattggttttgaactgcctgactggtttatcccgaag

SEQ ID NO: 775627 - DNA, 75 bp, synthetic construct
  source 1..75: mol_type = other DNA
ccggaagatgcagagcatattgcttttattcgcgggcgtattggttttgaactgcctgactggtttatcccgaag

SEQ ID NO: 775628 - DNA, 75 bp, synthetic construct
  source 1..75: mol_type = other DNA
acaattttctggcacgtcgtgagcggtgcttaccgaaaagcagcaagcgcgctgcatcgggtgaagagtggtatc

SEQ ID NO: 775629 - DNA, 75 bp, synthetic construct
  source 1..75: mol_type = other DNA
ttgcactggagatgttgttacctgttggactgtatgtgtcagttggcgtgacgctagggcagatgtataccgact

SEQ ID NO: 775630 - DNA, 75 bp, synthetic construct
  source 1..75: mol_type = other DNA
gaaactgtggtgcaaagataccgttggcgagttgctgacggctaaccggcagctgcaatcggcgctggtggaaac

SEQ ID NO: 775631 - DNA, 75 bp, synthetic construct
  source 1..75: mol_type = other DNA
tcatcacaacgtagagcgcagcctgctgtgggatgttctacagcgttatcagcatgttccggcgcttttgcaacg

SEQ ID NO: 775632 - DNA, 75 bp, synthetic construct
  source 1..75: mol_type = other DNA
acctgttccaccgctgcgccagttattctggcgtcatttacgtcgtcatggcctgtggcatctggcgggcgatgt

SEQ ID NO: 775633 - DNA, 75 bp, synthetic construct
  source 1..75: mol_type = other DNA
gaaactgtggtgcaaagataccgttagcgagttgctgacggctaaccgacagctgcaatcggcgctggtggaaac

SEQ ID NO: 775634 - DNA, 75 bp, synthetic construct
  source 1..75: mol_type = other DNA
acaattcaacgactcactgcgttttgattaccgtctggcggagcaggatattgttggctctgtggcctggtccaa

SEQ ID NO: 775635 - DNA, 75 bp, synthetic construct
  source 1..75: mol_type = other DNA
cctggctggactgcctgcatatggcggcgctggtgctggacggcattcaggtgaaacgcccacgttgccaggaag

SEQ ID NO: 775636 - DNA, 75 bp, synthetic construct
  source 1..75: mol_type = other DNA
gggtcgtgacgacaacgaacagatctaccgtaatctgcaattgcatctcaatccgctggatcaaagtgccaacgt

SEQ ID NO: 775637 - DNA, 75 bp, synthetic construct
  source 1..75: mol_type = other DNA
cgctaagtatttttgtcacccttctgtcgatgtatggtcgtccctgggcttatgcgcagatttatcaactggagc

SEQ ID NO: 775638 - DNA, 75 bp, synthetic construct
  source 1..75: mol_type = other DNA
ccgatcatgctgaactgcaatggcgacaaagccgtggcctgacagcgttgttgatggcgctgctggccatctctt

SEQ ID NO: 775639 - DNA, 75 bp, synthetic construct
  source 1..75: mol_type = other DNA
gagctttccgtttcctatcttatccatcattgaacctgcagtagaagatgtgattcgccagcaatataaaaatgt

SEQ ID NO: 775640 - DNA, 75 bp, synthetic construct
  source 1..75: mol_type = other DNA
tgatgaaatcgacaactacgatagtatcattagtcggggcgcagaaagggccgagaaggttcagttgtctttaag

SEQ ID NO: 775641 - DNA, 75 bp, synthetic construct
  source 1..75: mol_type = other DNA
aatcttgcaatgttaattgaggaaggtaatcttaatgctcctgcaatattgaataatatcaaaaacatgttaacc

SEQ ID NO: 775642 - DNA, 75 bp, synthetic construct
  source 1..75: mol_type = other DNA
cggtcatctttacactggtgccatatctttacacctgtgcggcgttactactgctcggccacggtcactttggta

SEQ ID NO: 775643 - DNA, 75 bp, synthetic construct
  source 1..75: mol_type = other DNA
ttgttaacgtggtcggcggcgtgaaggtgacggaaaccagtgccgatttagcgttactgctggcgatggtttcca

SEQ ID NO: 775644 - DNA, 75 bp, synthetic construct
  source 1..75: mol_type = other DNA
cgacatcagccttgaagagctgccgcgtttttccaccggatttaaagagttcgaccgcgtattaggcggcggggt

SEQ ID NO: 775645 - DNA, 75 bp, synthetic construct
  source 1..75: mol_type = other DNA
attgactccatccaggtgatgcatatggcggatgtacaatcatcgcctggcagcgtggcgcaggtgcgtgaaacg

SEQ ID NO: 775646 - DNA, 75 bp, synthetic construct
  source 1..75: mol_type = other DNA
caaaaattttcaaaaagatgaatagtgatgctccgaagtttgagcagaatccaaatcctagtttagatgaattat

SEQ ID NO: 775647 - DNA, 75 bp, synthetic construct
  source 1..75: mol_type = other DNA
ggtctggcagaacgtcagctggcgggcccgtttccggcgatgcagcttttcagcatcctcaataagggacgctgc

SEQ ID NO: 775648 - DNA, 75 bp, synthetic construct
  source 1..75: mol_type = other DNA
aagagtcgccgcaggggagcgattcatgtcattagtgcgttctcaacaatgcatagtctggtcctcggacagatc

SEQ ID NO: 775649 - DNA, 75 bp, synthetic construct
  source 1..75: mol_type = other DNA
ggtcgtactccggctgtaatcaaaaaagcaatggatgagcaaggtaaatccctcgacgatttcctgatcaagtaa

SEQ ID NO: 775650 - DNA, 75 bp, synthetic construct
  source 1..75: mol_type = other DNA
aaacgatatcgcacaaaaggaagtagccagcgggaagactaaagcccagcccatttcggtgatccagattgatga

SEQ ID NO: 775651 - DNA, 75 bp, synthetic construct
  source 1..75: mol_type = other DNA
atgatgaaaaaaagtattctggcgtttctgttactcaccagttctgcagcggcgctggcggctccacaggtgata

SEQ ID NO: 775652 - DNA, 75 bp, synthetic construct
  source 1..75: mol_type = other DNA
gccaacggtggcgcgtaacgagcgtctcagtggctatgccggtagcgccggagtggcaaaagtccagaaactctc

SEQ ID NO: 775653 - DNA, 75 bp, synthetic construct
  source 1..75: mol_type = other DNA
attgggttttcatggtttcgcgtgcctggtactccccggcagtagaactgcttatgtgcccaacagcgacgttac

SEQ ID NO: 775654 - DNA, 75 bp, synthetic construct
  source 1..75: mol_type = other DNA
gaattgttatcagtaaaatacctgttatgcaagcagggctaaaagaggtcatgaggactcacttccctgaatatg

SEQ ID NO: 775655 - DNA, 75 bp, synthetic construct
  source 1..75: mol_type = other DNA
cgcgtggtacgggtaacgaaaccaactatgtaatgcaaaaatttgcgcgcgccgttattggtaccaataacgttg

SEQ ID NO: 775656 - DNA, 75 bp, synthetic construct
  source 1..75: mol_type = other DNA
atgatctcatatcagggacttgttcgcaccttccctaagtcgtcagccatttatctgttaaggccaacaaataaa

SEQ ID NO: 775657 - DNA, 75 bp, synthetic construct
  source 1..75: mol_type = other DNA
ttcatgatacctggccacaggcattaattgccagagaagcagaattccctaccgggataatgcttgagcagcacg

SEQ ID NO: 775658 - DNA, 75 bp, synthetic construct
  source 1..75: mol_type = other DNA
tcctattccggaagcccggaggaaaatatttcccggtgtgacgttatgtgttgaatgtcagacatatcaggaaaa

SEQ ID NO: 775659 - DNA, 75 bp, synthetic construct
  source 1..75: mol_type = other DNA
ctccggaacgttctcatgatgaactggtagctgacgctgaacagaaaaaacagtcgctgattgataccgcaatgg

SEQ ID NO: 775660 - DNA, 75 bp, synthetic construct
  source 1..75: mol_type = other DNA
agtatctggcaaaagtcgggatagacgaacgtgcgcaggggaaatacccggtgcacctgtccggtggtcagcaac

SEQ ID NO: 775661 - DNA, 75 bp, synthetic construct
  source 1..75: mol_type = other DNA
ttcagcaagcggatgatgataacgacgtggaggtgtcgttggttattgcgttgattgtggaaaatccgggtgatg

SEQ ID NO: 775662 - DNA, 75 bp, synthetic construct
  source 1..75: mol_type = other DNA
caggtgctttcttcgctggtgctattgctgttttcgacaagacctggaagggaccggcaatcagctacatagggc

SEQ ID NO: 775663 - DNA, 75 bp, synthetic construct
  source 1..75: mol_type = other DNA
caatcagctacatcgggcgcgatgaacttgaggcatgtggtgaggcctttctggtgcaggttcgccagcaggcag

SEQ ID NO: 775664 - DNA, 75 bp, synthetic construct
  source 1..75: mol_type = other DNA
taaccgtctggatgtgatgtgtacaccggacctggttaaccagttccgcttcatggccgcgcagatccgtttcat

SEQ ID NO: 775665 - DNA, 75 bp, synthetic construct
  source 1..75: mol_type = other DNA
ctgcgcagattgcccgtaaggtggatgccctgaaccagctgctggaagcacgtactcagcttgccaacctgcaaa

SEQ ID NO: 775666 - DNA, 75 bp, synthetic construct
  source 1..75: mol_type = other DNA
ggctggatggtcatcccgatgggcaggtctcagaaactgaagcacagagtgctggtcaaagactggcgataatag

SEQ ID NO: 775667 - DNA, 75 bp, synthetic construct
  source 1..75: mol_type = other DNA
acgcttatctttttgttgattctcaagagcaagcgcaactattgaggtggtgcgtgagatttctccaaggattat

SEQ ID NO: 775668 - DNA, 75 bp, synthetic construct
  source 1..75: mol_type = other DNA
gttcctctcgaaccaaccttctatcgacagatttcgttgctggctaaagaaaagccggtagaaggcagtccactg

SEQ ID NO: 775669 - DNA, 75 bp, synthetic construct
  source 1..75: mol_type = other DNA
ctgaacaggtcggcaaatgggctgcccgccatatcgtcaatcgtatcaatgcgttcaaaccaactgccgatcgtc

SEQ ID NO: 775670 - DNA, 75 bp, synthetic construct
  source 1..75: mol_type = other DNA
cactggcgctgcaggccgccgttgaaggttgcgtgaaccatatgtggaccatcagctgtctgcaactgcatccga

SEQ ID NO: 775671 - DNA, 75 bp, synthetic construct
  source 1..75: mol_type = other DNA
gctgtgggttgagcaccaggacaaggggcggctggagctgaacttcctgatcccgaacacggagctgctgaccgg

SEQ ID NO: 775672 - DNA, 75 bp, synthetic construct
  source 1..75: mol_type = other DNA
gcgcatggtcagccagacgtggctgaccatcgtcctggtgtccacgctgctgatagcctcgagcgcgggcattct

SEQ ID NO: 775673 - DNA, 75 bp, synthetic construct
  source 1..75: mol_type = other DNA
agaggcgatgatgcagcacaggagggacgtgttaaagctggcagggaatacgggcatgatgttactggggatagt

SEQ ID NO: 775674 - DNA, 75 bp, synthetic construct
  source 1..75: mol_type = other DNA
ccgtagtcggaatcgcgccggaagagctatctgcatgggctggcccagacgctgaacgtctgaccgttacggctc

SEQ ID NO: 775675 - DNA, 75 bp, synthetic construct
  source 1..75: mol_type = other DNA
aactttgccagcttcgacaaactgcgtagcgcactggcggcagattatgttgtgcaacaggacgcgttacagaaa

SEQ ID NO: 775676 - DNA, 75 bp, synthetic construct
  source 1..75: mol_type = other DNA
gagcagaatttaccgatttcactaactgtggtcggcattgcaccggaagaactgtctgcatgggctggtgcggac

SEQ ID NO: 775677 - DNA, 75 bp, synthetic construct
  source 1..75: mol_type = other DNA
attgctggatgccgaagaagtgatgattctggtgctgggtagccagaaagcactggcactgcaggccgccgttga

SEQ ID NO: 775678 - DNA, 75 bp, synthetic construct
  source 1..75: mol_type = other DNA
gcagaaaacatcaaccttctcaacggcaacgccccggatatcgacgccgagtgccgccagtatgaagaaaaaatc

SEQ ID NO: 775679 - DNA, 75 bp, synthetic construct
  source 1..75: mol_type = other DNA
gctatctgcatgggctggcccagacgctgaacgtctgaccgttacggctctgcccgctattaccacttatggcga

SEQ ID NO: 775680 - DNA, 75 bp, synthetic construct
  source 1..75: mol_type = other DNA
ctccagccgtattacgaccgcgccgaccgtccgcgcattgatgcctggcagaccatcgtgaacggcaggctgggg

SEQ ID NO: 775681 - DNA, 75 bp, synthetic construct
  source 1..75: mol_type = other DNA
aagcactctctggtttcgagcttgctcaaactggccaagtgctggctggaaggctaaagattcaggagcgagtta

SEQ ID NO: 775682 - DNA, 75 bp, synthetic construct
  source 1..75: mol_type = other DNA
caataattacaaatcattagagcatctgcaaacacgagcagagaattatctgaggtatcgcaaagcagaagagaa

SEQ ID NO: 775683 - DNA, 75 bp, synthetic construct
  source 1..75: mol_type = other DNA
ggatgtctattccttgtgggtttatggctggcgatgcgcaacgggttatctgccgcatcgatgaatgccggggat

SEQ ID NO: 775684 - DNA, 75 bp, synthetic construct
  source 1..75: mol_type = other DNA
acagactggccaagtgttggctggaaggctaaaaattcaggagcgaatgacattccgcgcaaacaatcgcgttga

SEQ ID NO: 775685 - DNA, 75 bp, synthetic construct
  source 1..75: mol_type = other DNA
cgctgccgagcattttggtaagacatgggccgctccaggcttaagccaagcagaaggatgcaaagctatctcgga

SEQ ID NO: 775686 - DNA, 75 bp, synthetic construct
  source 1..75: mol_type = other DNA
acccgcacaccaacaggcatggatctttctcaagatatcggcacaattatgcgtgataaagctgggctaccggtc

SEQ ID NO: 775687 - DNA, 75 bp, synthetic construct
  source 1..75: mol_type = other DNA
gctgaaaagcattgcaggtgaattgtgttccgttcctctcgaaccaactttctatcgacagatttcgttgctggc

SEQ ID NO: 775688 - DNA, 75 bp, synthetic construct
  source 1..75: mol_type = other DNA
gcaggaagccgcccaggcgattacgcgcggcctactttcccttgcctcatccggggagctgaaaacccgtcagga

SEQ ID NO: 775689 - DNA, 75 bp, synthetic construct
  source 1..75: mol_type = other DNA
gtcgttcgcggaggctgagctgccgcccgggcagcgggagcagatcatggccagctttgagcgggttctgatgcc

SEQ ID NO: 775690 - DNA, 75 bp, synthetic construct
  source 1..75: mol_type = other DNA
agacaaactgtttaaagggcgtcgtatgccattggcgatgatttgtatggcgctgattttcatttgcctgattgg

SEQ ID NO: 775691 - DNA, 75 bp, synthetic construct
  source 1..75: mol_type = other DNA
ctggtgttatgtgccatcgttaacgttggcctgggattcagcaccgcattctggatttttgcggcattggttatt

SEQ ID NO: 775692 - DNA, 75 bp, synthetic construct
  source 1..75: mol_type = other DNA
tctatcgacagatttcgttgctggctaaagaaaagccggtagaaggcagtccactgtttttactacaaatgtgta

SEQ ID NO: 775693 - DNA, 75 bp, synthetic construct
  source 1..75: mol_type = other DNA
caggtgcgattgaggatataacggcgttgtttgaatatctggccgagaatgcatctctttgggatgcaaggaacg

SEQ ID NO: 775694 - DNA, 75 bp, synthetic construct
  source 1..75: mol_type = other DNA
cctgcggcctctgttcctgtgcctgatgatgtggctgagcgggtgcgccgggccgtctgtgaaatacgtgcctgt

SEQ ID NO: 775695 - DNA, 75 bp, synthetic construct
  source 1..75: mol_type = other DNA
cctgaaggttataacgatcgccatgcggtaaacggcagcttctacaagctcaccttcgccccgacctttaaggtt

SEQ ID NO: 775696 - DNA, 75 bp, synthetic construct
  source 1..75: mol_type = other DNA
ttcttatcgctttgctaaccggcgccgcctcagcccatgcacaaacggatctcagcagtatcgaagcccgtttaa

SEQ ID NO: 775697 - DNA, 75 bp, synthetic construct
  source 1..75: mol_type = other DNA
ctttctctgacgcaccacgcctattcgccacttctggtggtgatcaacaaagcgaagtttgatggcttaagcccg

SEQ ID NO: 775698 - DNA, 75 bp, synthetic construct
  source 1..75: mol_type = other DNA
ctttattaattgccggagtggcggcgttcagcacatcttctctggcggcacaatcattacgtttcggttatgaaa

SEQ ID NO: 775699 - DNA, 75 bp, synthetic construct
  source 1..75: mol_type = other DNA
ggcaaatcagcagcacaccctgcaactcatttcacaaatcagtgaggcggccacgaatgaaaagcaacagaacat

SEQ ID NO: 775700 - DNA, 75 bp, synthetic construct
  source 1..75: mol_type = other DNA
atgcgtagcgccgctgtaattaacaacggcctacggagatatgtcgctttgaatctgtttgtagagtattggctt

SEQ ID NO: 775701 - DNA, 75 bp, synthetic construct
  source 1..75: mol_type = other DNA
tgaaggaatagataatgacatcatatttacgtcaaatctgaaagacgttgaggaatatggtgtgcaggttttcca

SEQ ID NO: 775702 - DNA, 75 bp, synthetic construct
  source 1..75: mol_type = other DNA
aggcgtagatcggctggttgaagatattcacatctacgcggagtattactgtgcaatggcattgggaaaagaaag

SEQ ID NO: 775703 - DNA, 75 bp, synthetic construct
  source 1..75: mol_type = other DNA
gagttccggctgttcaacattcagcaatgcgaagatctgccggaggcgttttcacaacctgtcgtgatggtcgat

SEQ ID NO: 775704 - DNA, 75 bp, synthetic construct
  source 1..75: mol_type = other DNA
ctaccggacacgcttcacggctaaatcgggacggcatcacagccggaaaccatacctttggtgatccgacgtata

SEQ ID NO: 775705 - DNA, 75 bp, synthetic construct
  source 1..75: mol_type = other DNA
ctaccggacacgcttcacgattgaaccgggacggcatcactgccggaaagcataccttcggcgatccgacgtaca

SEQ ID NO: 775706 - DNA, 75 bp, synthetic construct
  source 1..75: mol_type = other DNA
caggtccgtgacatgtttgttaaagatgttccccagggtgctgatctgctgaaagccgtggatgaggtgcaataa

SEQ ID NO: 775707 - DNA, 75 bp, synthetic construct
  source 1..75: mol_type = other DNA
ggtcggcattgcaccggaagaactgtctgcatgggctggtgcggacgccgaacgcctgaccgttacggctctgcc

SEQ ID NO: 775708 - DNA, 75 bp, synthetic construct
  source 1..75: mol_type = other DNA
gcatctctttgggatgcaaggaacgtgacagagcgtctgatctctgcaaccgatcacctggcagattatcctcgg

SEQ ID NO: 775709 - DNA, 75 bp, synthetic construct
  source 1..75: mol_type = other DNA
gcatctctttgggatgcaaggaacgtgacagagcgtctgatcactgcaaccgatcgccaggctgattaccctcgg

SEQ ID NO: 775710 - DNA, 75 bp, synthetic construct
  source 1..75: mol_type = other DNA
cgtgactgagagtctgatcactgcaaccgagcgcctggccgattaccctcgcctgtatgaaactgatgaacgcta

SEQ ID NO: 775711 - DNA, 75 bp, synthetic construct
  source 1..75: mol_type = other DNA
ctgaaaaaatatcgcccacaggccgacgatacccggctgctcgcagaattgtcagcgatcgccagtaccctgaaa

SEQ ID NO: 775712 - DNA, 75 bp, synthetic construct
  source 1..75: mol_type = other DNA
gctgcaaactgatgcgattcgactctacattcctggcgaatggatcagcgtctggcaggttgaactgcctgatgt

SEQ ID NO: 775713 - DNA, 75 bp, synthetic construct
  source 1..75: mol_type = other DNA
atgacggtaatcggcgcactggtggcaacctatgttcgtttaagcaccacgctggaaatcacggcgggcgacgca

SEQ ID NO: 775714 - DNA, 75 bp, synthetic construct
  source 1..75: mol_type = other DNA
gattacgggcaaaagataatgatgatcgaaaagatgccaatggtgatctcattcaaactgatgctgcaaatactg

SEQ ID NO: 775715 - DNA, 75 bp, synthetic construct
  source 1..75: mol_type = other DNA
tgttccgcgataccgcccacgcgcataaaacgctcgacggcaaagtcggtgatgacctgaaagtctcccttgaag

SEQ ID NO: 775716 - DNA, 75 bp, synthetic construct
  source 1..75: mol_type = other DNA
aggggcatatgggtttcttcaatacccatccgtttctggtgacgtttgttatcggcattatccttgcgatggagc

SEQ ID NO: 775717 - DNA, 75 bp, synthetic construct
  source 1..75: mol_type = other DNA
gcgttccatgctgttacaagcgtcttttaactacgaacgtatgcaggcttctggctggttgtacggtctgctgcc

SEQ ID NO: 775718 - DNA, 75 bp, synthetic construct
  source 1..75: mol_type = other DNA
tctatttcggtgcagaacacgcaaaaaccattattgatgtcctgccgcaacgcttaatcgacggcctcggcgtcg

SEQ ID NO: 775719 - DNA, 75 bp, synthetic construct
  source 1..75: mol_type = other DNA
catctggtgaagctgaaaaccagcccgcaggcacgaaaaaagtggccgggactgggaaatgaggtgacagcccgc

SEQ ID NO: 775720 - DNA, 75 bp, synthetic construct
  source 1..75: mol_type = other DNA
tcttgcaagtatgggacaacttgtgaaattaccgacgagaagggaaagggccttcccgagagtggtaaaggagag

SEQ ID NO: 775721 - DNA, 75 bp, synthetic construct
  source 1..75: mol_type = other DNA
cgtgagtggaaccacgacgccagccttgactggcacctgctggaaggcggcgacaactggcaccacggtgtccaa

SEQ ID NO: 775722 - DNA, 75 bp, synthetic construct
  source 1..75: mol_type = other DNA
ttatagatgttggagtaaaagaatctgaaaatggtgtagagcgagtactaataaaagaaatgaatagtaatgctc

SEQ ID NO: 775723 - DNA, 75 bp, synthetic construct
  source 1..75: mol_type = other DNA
cggacaacgatttctaaaaaaagcgtttgaccatgcattttcatcaaaatctgatgatatttatgttactgtttt

SEQ ID NO: 775724 - DNA, 75 bp, synthetic construct
  source 1..75: mol_type = other DNA
aatatatatatgcagaatgcatgacgtaaaaaaaataaaaagacatgacattttagttatttacagaacaagtga

SEQ ID NO: 775725 - DNA, 75 bp, synthetic construct
  source 1..75: mol_type = other DNA
gaatttggcgggcgcgagaatcttgaagcgattgaattcttgcgtaataccaaccgtattcttggtgagcaggtt

SEQ ID NO: 775726 - DNA, 75 bp, synthetic construct
  source 1..75: mol_type = other DNA
gagaatgctgatgacattgcagggcgcttcaccgggacgtataccggagctgatgcgcgatcttgcaagtatggg

SEQ ID NO: 775727 - DNA, 75 bp, synthetic construct
  source 1..75: mol_type = other DNA
gttattactcaccaggactgttaaatacctggagcctggcgggagaacaccgccactggatgatccctctcagaa

SEQ ID NO: 775728 - DNA, 75 bp, synthetic construct
  source 1..75: mol_type = other DNA
ttgactgggtgccggggcacttcccgactgatgactttgcacttgccgaatttgacggaacaaatctgtatgaac

SEQ ID NO: 775729 - DNA, 75 bp, synthetic construct
  source 1..75: mol_type = other DNA
ggtatgcaccaaactgatgctggacttgaagtccgcgccctattacctgacgccaccgaagtgtgggtgatcgaa

SEQ ID NO: 775730 - DNA, 75 bp, synthetic construct
  source 1..75: mol_type = other DNA
cggtattaaccagccgggtaaatggcgtgaaatcctcaataccgattccatgcactatcacggcagtaatgcagg

SEQ ID NO: 775731 - DNA, 75 bp, synthetic construct
  source 1..75: mol_type = other DNA
acagtatacggctgaaaaaccgatgggattgtctcctaaatttccgtttatcgtcgtgactgacacttacggtca

SEQ ID NO: 775732 - DNA, 75 bp, synthetic construct
  source 1..75: mol_type = other DNA
ggcaaggagcgtccgccaagaccagaggtaatcaaggagctggccaagatactagcagctgaccctgacgtgctg

SEQ ID NO: 775733 - DNA, 75 bp, synthetic construct
  source 1..75: mol_type = other DNA
gtccgttcgaaacagaagttagttttcgtgttgttcagggggagagtgtacttgttgaagatgtatttcatggaa

SEQ ID NO: 775734 - DNA, 75 bp, synthetic construct
  source 1..75: mol_type = other DNA
tatgtactcgggatttcttccggcacagttcttaatcttcatttcagtgaaccggttacaggacagtcagcctag

SEQ ID NO: 775735 - DNA, 75 bp, synthetic construct
  source 1..75: mol_type = other DNA
atgaacgacagagaatttagagcgatgcttcaggcatcaagagaacgcaacagacacaacggttacagccacaca

SEQ ID NO: 775736 - DNA, 75 bp, synthetic construct
  source 1..75: mol_type = other DNA
ttgtcgcagttttggaagggataactatcaccggaagattttctatttgcttcgaagccttgataagattagctc

SEQ ID NO: 775737 - DNA, 75 bp, synthetic construct
  source 1..75: mol_type = other DNA
attacgccacgagacagatatatgtcagtacgcaaagaaaaagaaaatactttaaaaactttcttgatgggcttt

SEQ ID NO: 775738 - DNA, 75 bp, synthetic construct
  source 1..75: mol_type = other DNA
tccgggagtgcctgattcaccggtgattgcagatgaaagcggttatcaggacttggtgggggaaggctggtttta

SEQ ID NO: 775739 - DNA, 75 bp, synthetic construct
  source 1..75: mol_type = other DNA
ccaacagcgagttcctgcatcattacccgcagtttgctcatttcctgctaaaccaggtggtggcgaatctgtccg

SEQ ID NO: 775740 - DNA, 75 bp, synthetic construct
  source 1..75: mol_type = other DNA
gcgatgatgaagcgcaattcatcattatgttaaccctgaacaaacacgctgcgggcgatcagcatatgcgcattt

SEQ ID NO: 775741 - DNA, 75 bp, synthetic construct
  source 1..75: mol_type = other DNA
atggcagtccggcggggattttcagggagccgtggaattcggggggccatcacgccctatgatgattcacttcct

SEQ ID NO: 775742 - DNA, 75 bp, synthetic construct
  source 1..75: mol_type = other DNA
gacaggggctgcttgttctgccactgagcgtcaccggggacactcagacagcaggcacactggcagcagaagttc

SEQ ID NO: 775743 - DNA, 75 bp, synthetic construct
  source 1..75: mol_type = other DNA
atcacccagacgctggggaataacagtgctgacgcttatgtgtttaatggcggcgtacccgacagcagtacgtgg

SEQ ID NO: 775744 - DNA, 75 bp, synthetic construct
  source 1..75: mol_type = other DNA
ctggacatcatgctgccgggcaatcgccccttcgttgcccccagtgccgttattcagacccgccagcgtctggga

SEQ ID NO: 775745 - DNA, 75 bp, synthetic construct
  source 1..75: mol_type = other DNA
tataaagatccgagctataacgatgactatggtattgaaacaccctcagcgttagataactttactcaggccatc

SEQ ID NO: 775746 - DNA, 75 bp, synthetic construct
  source 1..75: mol_type = other DNA
ccgtcatgttgctgagcggatgcttaaccgccccaccaaaagaagccgccaagccaacattaatgcctcgagccc

SEQ ID NO: 775747 - DNA, 75 bp, synthetic construct
  source 1..75: mol_type = other DNA
ccgacaagaagggaaagggccttcccgagagtggtaaaggagaggcctggaaataccccacagccccgaaaaaga

SEQ ID NO: 775748 - DNA, 75 bp, synthetic construct
  source 1..75: mol_type = other DNA
accggagctgatgcgcgatcttgcaagtatgggacaacttgtgaaattaccgacaagaagggaaagggccttccc

SEQ ID NO: 775749 - DNA, 75 bp, synthetic construct
  source 1..75: mol_type = other DNA
aaatgatggtctggtgtattgttggcatggcgcttgagcgtaaagaacctcttcaccagattgtgaatcgcctgg

SEQ ID NO: 775750 - DNA, 75 bp, synthetic construct
  source 1..75: mol_type = other DNA
tgcggaatggtgatgagaatgctgatgacattgcagggcgcttcaccgggacgtataccggagctgatgcgcgat

SEQ ID NO: 775751 - DNA, 75 bp, synthetic construct
  source 1..75: mol_type = other DNA
tgccatctgctgacgtcgatgacggacgccatacgcttcaccgggacgtataccggagctgatgcgcgatcttgc

SEQ ID NO: 775752 - DNA, 75 bp, synthetic construct
  source 1..75: mol_type = other DNA
atggcgcttgagcgtaaagaacctcttcaccaggttgtgaatcacctggacatcatgctgccgggcaatcgcccc

SEQ ID NO: 775753 - DNA, 75 bp, synthetic construct
  source 1..75: mol_type = other DNA
aagcaatgcagcagctgcttgatcttccacaaccgcctactgctgtcttctgccatagcgatgtgatggcgctcg

SEQ ID NO: 775754 - DNA, 75 bp, synthetic construct
  source 1..75: mol_type = other DNA
tggttcagaagaaccaaaacctggttcaccattttacggtagtcgtggactaaaattatctgatagtgcccgttc

SEQ ID NO: 775755 - DNA, 75 bp, synthetic construct
  source 1..75: mol_type = other DNA
aacgatatttgtatccgggtagcactgtcaccctctgaggtgttccagccattcagcaaaaacacgaaccagtaa

SEQ ID NO: 775756 - DNA, 75 bp, synthetic construct
  source 1..75: mol_type = other DNA
tccacaaccgcctactgctgtcttctgccatagcgatgtgatggcgctcggcgcactttctcaggcaaaacgcca

SEQ ID NO: 775757 - DNA, 75 bp, synthetic construct
  source 1..75: mol_type = other DNA
acagacgatgcaactgagcaggctgacgctgagaagtaaaaagccggagcttgtggagcaagagctgtggggtgt

SEQ ID NO: 775758 - DNA, 75 bp, synthetic construct
  source 1..75: mol_type = other DNA
gttaaatgcctggagcctggcgggagaacaccgccactggatgatacctctcagaaagggagcgcaatatgaaag

SEQ ID NO: 775759 - DNA, 75 bp, synthetic construct
  source 1..75: mol_type = other DNA
aggatggtgttctgcacatttatatcggcggtcggcgttatctgctggctgtcacgaaggggcagaaaggtaagg

SEQ ID NO: 775760 - DNA, 75 bp, synthetic construct
  source 1..75: mol_type = other DNA
gaaaatgagcttgctgagcaacttatagaacaaaccggcgataacactctgacgttaatggataaaggttattac

SEQ ID NO: 775761 - DNA, 75 bp, synthetic construct
  source 1..75: mol_type = other DNA
gaaggtaacggctttaaccgcgtcaaagaagagttcgaccatgaacgtttcctggtagccctcaccaactacggt

SEQ ID NO: 775762 - DNA, 75 bp, synthetic construct
  source 1..75: mol_type = other DNA
tggtatcccgttacaattctctgcgtaacccactgacttctctgggggattacctcgaccccgaactcatctctc

SEQ ID NO: 775763 - DNA, 75 bp, synthetic construct
  source 1..75: mol_type = other DNA
tgtgatgttgacgaactggcgcatttcatcgagaaagaaactggtcgtgaaacccgtgcaactgtgttgggccac

SEQ ID NO: 775764 - DNA, 75 bp, synthetic construct
  source 1..75: mol_type = other DNA
gtgtgttatggcgcacaccggatacaccagagaacgatgcagccttcccccgccagacacatgccgggaacccgg

SEQ ID NO: 775765 - DNA, 75 bp, synthetic construct
  source 1..75: mol_type = other DNA
atctgaaaggttactggccgaatcaactgagtttctcagaatcatgcggaatggtgatgagaatgctgatgacat

SEQ ID NO: 775766 - DNA, 75 bp, synthetic construct
  source 1..75: mol_type = other DNA
accgggacgtataccggagctgatgcacgatcttgcaagtatgggacaacttgtgaaattaccgacaagaaggga

SEQ ID NO: 775767 - DNA, 75 bp, synthetic construct
  source 1..75: mol_type = other DNA
cgcgggcggcgaagccctgtctgtcgccagtagctgtctggcaaatgttactgacacgcctgcttggacagcact

SEQ ID NO: 775768 - DNA, 75 bp, synthetic construct
  source 1..75: mol_type = other DNA
tgtgggcggctaaaccatgcctgtcaccagtgatcgtatggcaaatgcttctttcacgcctgctggatcagcact

SEQ ID NO: 775769 - DNA, 75 bp, synthetic construct
  source 1..75: mol_type = other DNA
gaacatatcgatgccggtatatctttggccgatgccgtgaattttctggtggaaaagtacgaactggttcgtatt

SEQ ID NO: 775770 - DNA, 75 bp, synthetic construct
  source 1..75: mol_type = other DNA
cgcacaaaacaatcaggacgcggtgatgccaggttacactcacctgcaacgcgcccagccggtgacgttcgcgca

SEQ ID NO: 775771 - DNA, 75 bp, synthetic construct
  source 1..75: mol_type = other DNA
actgggtgattactggtgtgccgttcgatatggccacttctggtcgtgcggggggacgccacggtccggcagcta

SEQ ID NO: 775772 - DNA, 75 bp, synthetic construct
  source 1..75: mol_type = other DNA
gttctgaaacggcggtgggatgtgacaccggcaatcatctgcgcagtggaatacctttcctgggtaccggtatcg

SEQ ID NO: 775773 - DNA, 75 bp, synthetic construct
  source 1..75: mol_type = other DNA
tataaccattacctgtaatcagtccggttttcatttaaccagggatggacaacgactgttcactgaacgttatat

SEQ ID NO: 775774 - DNA, 75 bp, synthetic construct
  source 1..75: mol_type = other DNA
ctcgcctgctggactcactgggcaaagcagaaggtattctgggcaccatcgctggcgatgacaccatctttacca

SEQ ID NO: 775775 - DNA, 75 bp, synthetic construct
  source 1..75: mol_type = other DNA
acttaaagaagagaaatttagctcccagggcgaaatcgtcgccgcgttgcaggagcaaggctttgacaatattaa

SEQ ID NO: 775776 - DNA, 75 bp, synthetic construct
  source 1..75: mol_type = other DNA
tgatcctgatgcgcgtaccagaaattgcctctcgttggggagatggtatttctgcgggcattcaggagttaatcc

SEQ ID NO: 775777 - DNA, 75 bp, synthetic construct
  source 1..75: mol_type = other DNA
ttggatctcgccgttcgtgacgttcatttcctgctggaaggtggcgaaatgccagtaaaaacgggggcaaccaat

SEQ ID NO: 775778 - DNA, 75 bp, synthetic construct
  source 1..75: mol_type = other DNA
agtagcaaccgggcaaagattgaccagacaggagattataaccttgcatatattgatcaggcgggcagtgccaac

SEQ ID NO: 775779 - DNA, 75 bp, synthetic construct
  source 1..75: mol_type = other DNA
tattgattaactacggactggtagctgatttggcaaatgttaactatgtaggtgatacaaccagggaaagatcat

SEQ ID NO: 775780 - DNA, 75 bp, synthetic construct
  source 1..75: mol_type = other DNA
gttctgaaacggcagtgggatgtgacaccggcaatcatccgcgcagtggaatatctttcccggggccaggtatca

SEQ ID NO: 775781 - DNA, 75 bp, synthetic construct
  source 1..75: mol_type = other DNA
actgcggcaggcgcagcaaaaatcgtttttgtcgttggaattattctgttcctggtgagtttgtttatgggccga

SEQ ID NO: 775782 - DNA, 75 bp, synthetic construct
  source 1..75: mol_type = other DNA
gtggcggcgtttattggccttgtctggcagatgaaaatggctaacctggcggtcgcggcgatggctcccattggt

SEQ ID NO: 775783 - DNA, 75 bp, synthetic construct
  source 1..75: mol_type = other DNA
tgttcgttaccacaccgtacgtggtgcgcttgactgctccggtgttaaagaccgtaagcaggctcgttccaagta

SEQ ID NO: 775784 - DNA, 75 bp, synthetic construct
  source 1..75: mol_type = other DNA
tgaccttgagcatatcagccagagtatcggcgatatcctgcgcacgccggtcggctcacgggtgatgcgtcgtga

SEQ ID NO: 775785 - DNA, 75 bp, synthetic construct
  source 1..75: mol_type = other DNA
ccactgaacgcagttttgacgggcgaatgactgtcactttgaccggccagcacaacgacaccggccagccacttt

SEQ ID NO: 775786 - DNA, 75 bp, synthetic construct
  source 1..75: mol_type = other DNA
ggacgcgttgatcgcgttaagtcgaacatccccatgcagcgcggtgggcaggcggaagaggtcgcgcaggccatc

SEQ ID NO: 775787 - DNA, 75 bp, synthetic construct
  source 1..75: mol_type = other DNA
cgggcgaatgacggtcacgttaaccggccagcacaacgacaccggccagccactttcgttaaccatccctgtgag

SEQ ID NO: 775788 - DNA, 75 bp, synthetic construct
  source 1..75: mol_type = other DNA
cctcgcggcggcagaagcgagtatcggccttgcgctgctgctgcaacttcaccgtcgtcgccagaacctgaacat

SEQ ID NO: 775789 - DNA, 75 bp, synthetic construct
  source 1..75: mol_type = other DNA
tggatgtggagctctggccagtcgatgtggcgcatcaccccagacgtatcgacctgtatacccgttttgaaaatt

SEQ ID NO: 775790 - DNA, 75 bp, synthetic construct
  source 1..75: mol_type = other DNA
aaaaaggcgggttatgacctgaccaagcgtgatatcttcgggcgcatccctgaagaagcatacctcgatggcacc

SEQ ID NO: 775791 - DNA, 75 bp, synthetic construct
  source 1..75: mol_type = other DNA
cactgctgccctgcattgaacaggccagggaagatatccgtacactgcgccaactgcagtttctgcaacagaacc

SEQ ID NO: 775792 - DNA, 75 bp, synthetic construct
  source 1..75: mol_type = other DNA
acttccaaccgtcgttgcgtctaccgcaactggtatcgctgtttccggcgctcagaagttcaagccgcaggcgta

SEQ ID NO: 775793 - DNA, 75 bp, synthetic construct
  source 1..75: mol_type = other DNA
agctcatcgggacgttaggtttattgatttgccaccgtctagtggcattagctatcaacaaattaaccgggacat

SEQ ID NO: 775794 - DNA, 75 bp, synthetic construct
  source 1..75: mol_type = other DNA
cgcaaaatagctggcgggatgaatatcctgactacctgttgcatgaggacagcgtaatcatcgatccggctccgg

SEQ ID NO: 775795 - DNA, 75 bp, synthetic construct
  source 1..75: mol_type = other DNA
ggatctacgtagatgggcaacaaacgaacacaccgcccggcaactacacactgaccctgaccgggggttactggg

SEQ ID NO: 775796 - DNA, 75 bp, synthetic construct
  source 1..75: mol_type = other DNA
aactaacaaaaatatattaggatattattatgctactttacaaggaactgaacgatggcttgaacaaggcttaat

SEQ ID NO: 775797 - DNA, 75 bp, synthetic construct
  source 1..75: mol_type = other DNA
tgtatctagtgaatatggacaaagcaaaaaaaacggtgccttatttgacttgatattgaatgaattgaaggtttc

SEQ ID NO: 775798 - DNA, 75 bp, synthetic construct
  source 1..75: mol_type = other DNA
gataatgtggcgacatgttcttcttcgataggaatgcaggccgtcgttctaaatcgggatatgaaaacatacggc

SEQ ID NO: 775799 - DNA, 75 bp, synthetic construct
  source 1..75: mol_type = other DNA
aaagcgacacactcgctacagaaccgcccaaaaatgacgggacaacagtaacaccgactacaccgaatcaactta

SEQ ID NO: 775800 - DNA, 75 bp, synthetic construct
  source 1..75: mol_type = other DNA
ctcaggttgaacgtgtagtttgctcaattactgcagcgataaaatatcaggttccggctaacattatgttagcta

SEQ ID NO: 775801 - DNA, 75 bp, synthetic construct
  source 1..75: mol_type = other DNA
tctccaacgcaaaaagattatcttgagaaatctgtttggaaacaaggagccgcggcagtttatgcccagaaagtt

SEQ ID NO: 775802 - DNA, 75 bp, synthetic construct
  source 1..75: mol_type = other DNA
acgttatcgtcggaggtgagttgttcactgattactccgatcatccccgcaaacttgtcacgctaaatccgaaac

SEQ ID NO: 775803 - DNA, 75 bp, synthetic construct
  source 1..75: mol_type = other DNA
caaccgacacgtaatcacggttatgacgttatcgtcggaggtgagttgttcactgattactccgatcaccctcgc

SEQ ID NO: 775804 - DNA, 75 bp, synthetic construct
  source 1..75: mol_type = other DNA
aagatttttcgccagaaagccaggacgctgtagcgctgcagcagattaaagagcgtggcgcattaccaatgattg

SEQ ID NO: 775805 - DNA, 75 bp, synthetic construct
  source 1..75: mol_type = other DNA
cacctagagttgcggatacaatattaactaatgatgtggttagcagtcttaaagctaagtggccaaatctcatat

SEQ ID NO: 775806 - DNA, 75 bp, synthetic construct
  source 1..75: mol_type = other DNA
tccgtgagtatgtagatcttaataagattactgaccaggttagtatccctgaagatggtgaagtcgttaatcttt

SEQ ID NO: 775807 - DNA, 75 bp, synthetic construct
  source 1..75: mol_type = other DNA
atgagcgagaagctgcaggcgcacgccgagaagctgctggctgccggtaagcgtatgctctccttcggtggtgac

SEQ ID NO: 775808 - DNA, 75 bp, synthetic construct
  source 1..75: mol_type = other DNA
tggccgctatttatgttgatgtgattagcccgctaggcccgcgcattcaggtcaccggatctcctgctgtactgc

SEQ ID NO: 775809 - DNA, 75 bp, synthetic construct
  source 1..75: mol_type = other DNA
acacttacaggtaaatggcgtcacccttcaatggattgttgggtaaactacagtacaccgggcgatcatgaatgg

SEQ ID NO: 775810 - DNA, 75 bp, synthetic construct
  source 1..75: mol_type = other DNA
gcggacaatgccagaactcatagagaacaaacttatcgaggttaaagcggtgccaggcaaatcaaaccattaccg

SEQ ID NO: 775811 - DNA, 75 bp, synthetic construct
  source 1..75: mol_type = other DNA
gaaaataacgcaaaggatgacttcagagtcaagaaagaacaagaaaatgacgagaagacggtcctgacaaaaacc

SEQ ID NO: 775812 - DNA, 75 bp, synthetic construct
  source 1..75: mol_type = other DNA
ggacgaattccgggcggtgatgtgaaacccggaggctcatcaggtctcgctccatccatgcctccgggatggggg

SEQ ID NO: 775813 - DNA, 75 bp, synthetic construct
  source 1..75: mol_type = other DNA
atggataactggctaaagcagagagccctaaaaaatcagcttgccggcgcatcacgtacatttgttagctgtgat

SEQ ID NO: 775814 - DNA, 75 bp, synthetic construct
  source 1..75: mol_type = other DNA
tacctaccggctgacacgtcagttaactaactgcctcttgagattgatgaacctcgtgaaaatggatcagcacag

SEQ ID NO: 775815 - DNA, 75 bp, synthetic construct
  source 1..75: mol_type = other DNA
agtttgaagactcagacctccatcaggaactggtcacgtttgaggtgcccaataatgaccttaaggagctcattt

SEQ ID NO: 775816 - DNA, 75 bp, synthetic construct
  source 1..75: mol_type = other DNA
caatacgataactcactggtttccaacgcctttggttttttacgcctgccgatgaacttccagccgtatgacagc

SEQ ID NO: 775817 - DNA, 75 bp, synthetic construct
  source 1..75: mol_type = other DNA
tcaatgcgtaccgcgccaaattatttacgtcgaggtgtcgccagtctgattttacgccacattttgcaggtcgcc

SEQ ID NO: 775818 - DNA, 75 bp, synthetic construct
  source 1..75: mol_type = other DNA
ttcgttgattgcgaaccgtttgctgattatcaacttgatccacacagtcgatttttgtcattgacgctatgctaa

SEQ ID NO: 775819 - DNA, 75 bp, synthetic construct
  source 1..75: mol_type = other DNA
ttgaacttagagatatttggcctgcatccataacagcagttggtgcaatgaaaaatagtagcattataaaacttc

SEQ ID NO: 775820 - DNA, 75 bp, synthetic construct
  source 1..75: mol_type = other DNA
aggggcgattgatacgttaaccaccggattatcgctggaagtcgccgcgcagggaattcgcgttaacggcgtgcg

SEQ ID NO: 775821 - DNA, 75 bp, synthetic construct
  source 1..75: mol_type = other DNA
cttgaagtggaaaatatgcaacttcgcgacaaattacgcaaccaggccgcaatgatggaaagccagggcgaagat

SEQ ID NO: 775822 - DNA, 75 bp, synthetic construct
  source 1..75: mol_type = other DNA
tgttttgggattgcaaagcgtagcgggtctggtcgatattctttgaccgatgaatataagcaggcaactttctaa

SEQ ID NO: 775823 - DNA, 75 bp, synthetic construct
  source 1..75: mol_type = other DNA
ggtggagctgaacctggcggtggtgattgtcacccacgatttaggcgtcgcccgcctgctggcggaccgtttgct

SEQ ID NO: 775824 - DNA, 75 bp, synthetic construct
  source 1..75: mol_type = other DNA
gccgaccaccttttccggcggtatgcagcagcgtttgcagattgcccgcaacctggtgacgcatccgaagctggt

SEQ ID NO: 775825 - DNA, 75 bp, synthetic construct
  source 1..75: mol_type = other DNA
ttacggcgatattcgcgccaccgcgcagaagtggctggaagaggtggagattcccgctaaccgtatcgacgacct

SEQ ID NO: 775826 - DNA, 75 bp, synthetic construct
  source 1..75: mol_type = other DNA
tatcaaaatccatcgtaattttttctttggcgataaagggcctggttctgggggcggcctgtatggcgatctgaa

SEQ ID NO: 775827 - DNA, 75 bp, synthetic construct
  source 1..75: mol_type = other DNA
gtcgatcataaacgctgtattggctgtagcgcctgtactacggcatgcccgtggatgatggccaccgtaaatacc

SEQ ID NO: 775828 - DNA, 75 bp, synthetic construct
  source 1..75: mol_type = other DNA
gcggcggcctgtatggcgatctcaactataccgcggacacctgccgtcaatgcaaagagccgcaatgcatgaacg

SEQ ID NO: 775829 - DNA, 75 bp, synthetic construct
  source 1..75: mol_type = other DNA
cgctgaacgggattatttcatcctcagagaacggttgatgaccatgcagaagcagctggaaggggcacaggacta

SEQ ID NO: 775830 - DNA, 75 bp, synthetic construct
  source 1..75: mol_type = other DNA
aatgcaaccggtccccgactggcagaagccgctgaacgggattatttcatcctcagagaacggctgatggcaatg

SEQ ID NO: 775831 - DNA, 75 bp, synthetic construct
  source 1..75: mol_type = other DNA
ggtggagctgaacctggcggtggtgattgttacccacgatctgggcgtcgcccgcctgctggcggaccgtttgct

SEQ ID NO: 775832 - DNA, 75 bp, synthetic construct
  source 1..75: mol_type = other DNA
ggctggaactggcgggtagcggggtgcgctgtaatgtggtttcgccgggctccaccgacaccgatatgcaacgca

SEQ ID NO: 775833 - DNA, 75 bp, synthetic construct
  source 1..75: mol_type = other DNA
gcgctgtaatgtggtttcgccgggctccaccgacaccgatatgcaacgcacgctgtgggtgagcgatgacgccga

SEQ ID NO: 775834 - DNA, 75 bp, synthetic construct
  source 1..75: mol_type = other DNA
gccatcgaagaaccagaaaacagcctgtcaccgttctttttatctcgcatcatcaagcaggcgagagagattggc

SEQ ID NO: 775835 - DNA, 75 bp, synthetic construct
  source 1..75: mol_type = other DNA
atgaaagcactggctcggtttggcaagacttttggcggctacaggatgattgatgtcccacaacccatttgtggc

SEQ ID NO: 775836 - DNA, 75 bp, synthetic construct
  source 1..75: mol_type = other DNA
catgaagcactacaatgtcgatagcggttctgatgagtttaactctatccgcggccatgagttcgcaggttgtat

SEQ ID NO: 775837 - DNA, 75 bp, synthetic construct
  source 1..75: mol_type = other DNA
cagacccggaccgccgttctgaataacgaactgcaggataaatttgtctgctggtatccggggtttcaaagtgac

SEQ ID NO: 775838 - DNA, 75 bp, synthetic construct
  source 1..75: mol_type = other DNA
gcagttgaaatggttggtttgtttcgaaaggaatcattgaaatctggttttggtgatgcaagatggcttaggttt

SEQ ID NO: 775839 - DNA, 75 bp, synthetic construct
  source 1..75: mol_type = other DNA
tgaaagattctggttatagaagctttcatatggtctattcattccaaaataaaaaatttccatctttaaatgggt

SEQ ID NO: 775840 - DNA, 75 bp, synthetic construct
  source 1..75: mol_type = other DNA
ataacctgacccacctttatgccccgggcaaaggtttcagcgatgtctcttttgatttatggccgggagaagttc

SEQ ID NO: 775841 - DNA, 75 bp, synthetic construct
  source 1..75: mol_type = other DNA
agggcctgcgtgccggtatggtagcgggtgttatcgttaaccgcacccagcaagagatcccgaatgctgagacga

SEQ ID NO: 775842 - DNA, 75 bp, synthetic construct
  source 1..75: mol_type = other DNA
gagcaattgaggaggatatacgctggataagagccctggatgataattttgaatgggatgactgttccagggttc

SEQ ID NO: 775843 - DNA, 75 bp, synthetic construct
  source 1..75: mol_type = other DNA
gaactgcgccagacggcgctggctgcggtggcatcagccattatggcggggatttccgaaccggcgttatacggc

SEQ ID NO: 775844 - DNA, 75 bp, synthetic construct
  source 1..75: mol_type = other DNA
atgagccgaaaacactggacacacagagtgccgcgaacggcggcgaaatgggcactggtagcgatactggtgcct

SEQ ID NO: 775845 - DNA, 75 bp, synthetic construct
  source 1..75: mol_type = other DNA
tgctgttcttcatcctgtttaacctggtgcgtctggcaacccgttactacggcgtagcgtatggttactccaaag

SEQ ID NO: 775846 - DNA, 75 bp, synthetic construct
  source 1..75: mol_type = other DNA
atggttgatacaactcaaactaccaccgagaaaaaactcactcaaagtgatattcgtggcgtcttcctgcgttct

SEQ ID NO: 775847 - DNA, 75 bp, synthetic construct
  source 1..75: mol_type = other DNA
ttgttgcaatctggttgtttgcatcatgtatacctatcatcgcaacagcggaggagatggaggaagttgatgtct

SEQ ID NO: 775848 - DNA, 75 bp, synthetic construct
  source 1..75: mol_type = other DNA
atctatgcccatcatcttcacagcaaggtatatggaaaaagttgatgttttgggtgatgctgccaacttactgat

SEQ ID NO: 775849 - DNA, 75 bp, synthetic construct
  source 1..75: mol_type = other DNA
tactactgtccagactattctggaccagttaatgccaggcctggtaccactgctgctgacctttgcttgtatgtg

SEQ ID NO: 775850 - DNA, 75 bp, synthetic construct
  source 1..75: mol_type = other DNA
cgtcgcctctatcctgagaacaacgatgcccgtaaacaggcgattaaacgtcacctcgaattctttaacacccaa

SEQ ID NO: 775851 - DNA, 75 bp, synthetic construct
  source 1..75: mol_type = other DNA
ccacggcgcgcagctttgacgggcgaatgacggtcacgttgaccggccagcacaacgacaccggccagccacttt

SEQ ID NO: 775852 - DNA, 75 bp, synthetic construct
  source 1..75: mol_type = other DNA
atgatggcgcgctatcagggtatgaaccgaaataccggcctcggcatcagcgacaccgagcacatcagccagagc

SEQ ID NO: 775853 - DNA, 75 bp, synthetic construct
  source 1..75: mol_type = other DNA
ctacggcgcgcagttttgacgggcgaatgacggtcacgttaaccggtcagcacaacgacaccggtcagccacttt

SEQ ID NO: 775854 - DNA, 75 bp, synthetic construct
  source 1..75: mol_type = other DNA
cgaaaggggcgattgatacgttaaccacagggctgtcgctggaagtcgctgcgcaaggaattcgcgttaatggcg

SEQ ID NO: 775855 - DNA, 75 bp, synthetic construct
  source 1..75: mol_type = other DNA
tgagtaaagagaggtttaatgcttttgttgattggaccagaatgccaaatactgaacttttaggctatgagtttg

SEQ ID NO: 775856 - DNA, 75 bp, synthetic construct
  source 1..75: mol_type = other DNA
cgtcgttaatatggattaactttcgtcaagtccatgttaataacagggttgctgccatgcaactattaaagagat

SEQ ID NO: 775857 - DNA, 75 bp, synthetic construct
  source 1..75: mol_type = other DNA
atggaaggcgttcgctgggcgcgtccttaccgttcggatactcagcagggaccgacgccgcgtaaagtgaccgat

SEQ ID NO: 775858 - DNA, 75 bp, synthetic construct
  source 1..75: mol_type = other DNA
cacaaacaatcattgcccaatatacaaatatagtacaaacgttcaggtataaaatggattcaaataataatgaga

SEQ ID NO: 775859 - DNA, 75 bp, synthetic construct
  source 1..75: mol_type = other DNA
gtacttctcgcttgtttactgctatcagctcttgaaaacactaggattagaaaatatgaatactgatgcggcagt

SEQ ID NO: 775860 - DNA, 75 bp, synthetic construct
  source 1..75: mol_type = other DNA
cgacagaagacagccgcttctacgagcatcacggcgttgacccggtggggatcttccgtgcggcaagcgtggcgc

SEQ ID NO: 775861 - DNA, 75 bp, synthetic construct
  source 1..75: mol_type = other DNA
cgtcaaaaagtacgtaattgtgcagatttcaaaccgcttccggcggaaattcgctcgcttttcccaagtgaattt

SEQ ID NO: 775862 - DNA, 75 bp, synthetic construct
  source 1..75: mol_type = other DNA
atttgaggaaacggagttgggttgggtgcctgaaggttgggaaacaaaccgactggaaaatattttagaactagc

SEQ ID NO: 775863 - DNA, 75 bp, synthetic construct
  source 1..75: mol_type = other DNA
gaacgttcagcccatttatttatgggaaagctattaataaacaatctcaattgaaaagcgggtttcctgtatatg

SEQ ID NO: 775864 - DNA, 75 bp, synthetic construct
  source 1..75: mol_type = other DNA
aactatcacgcaccggagatcgccttctcagcgccgtatctcaccgaaatggtacgtcaggagatgtataaccgt

SEQ ID NO: 775865 - DNA, 75 bp, synthetic construct
  source 1..75: mol_type = other DNA
cctgccgcggtcacccgcgccaacccgcaggaagcgacagcaatgctggcggacggaacatctgtaacgctgcga

SEQ ID NO: 775866 - DNA, 75 bp, synthetic construct
  source 1..75: mol_type = other DNA
tcaacccgctctactctatggatcgtgccgttgcgcgacggaacgtcgtgctgtcgcgaatgttggacgaagggt

SEQ ID NO: 775867 - DNA, 75 bp, synthetic construct
  source 1..75: mol_type = other DNA
ctttgacgatcaccgtcgtaatctcggtcacaccacggcttccggggcgattaaagatcagatctccggttacga

SEQ ID NO: 775868 - DNA, 75 bp, synthetic construct
  source 1..75: mol_type = other DNA
agcgtcgcgatatcggcgggaaaacgggaccactaacagttcgaaagatgcgtggttctcgggttacggtccggg

SEQ ID NO: 775869 - DNA, 75 bp, synthetic construct
  source 1..75: mol_type = other DNA
gcgttgtgacctcggtatggattggctttgacgatcaccgccgcaatctcggccacaccacggcttccggcgcga

SEQ ID NO: 775870 - DNA, 75 bp, synthetic construct
  source 1..75: mol_type = other DNA
gccactgatctggcggtagagctgaacggcataacgtatcaggcctgccgtggggattttgtggtgcgtctcgac

SEQ ID NO: 775871 - DNA, 75 bp, synthetic construct
  source 1..75: mol_type = other DNA
acagaccgatttcttactggtaccagtttcgagaagacgtacgatctatatctttttgacaaaaaactgcgtctt

SEQ ID NO: 775872 - DNA, 75 bp, synthetic construct
  source 1..75: mol_type = other DNA
aaggattcccacgagagagattctctcaggacttaggttttgttatcgccgacaacgaccctgtagctgaagggc

SEQ ID NO: 775873 - DNA, 75 bp, synthetic construct
  source 1..75: mol_type = other DNA
tcgcaacgctgaactgcgcaagcaactggcagaagctaccaaccccgtagcaattggtcgtctgctggaacgtat

SEQ ID NO: 775874 - DNA, 75 bp, synthetic construct
  source 1..75: mol_type = other DNA
ctgctgcgtaaactcaacgtccgctcacgcgtggcggccaccattctgttcctgcaacaacgcggggcacaataa

SEQ ID NO: 775875 - DNA, 75 bp, synthetic construct
  source 1..75: mol_type = other DNA
gctggggaccggccaaaatgtctgacggcgtgctgtggctggcacataccggcacgtttggtgaggtgcaggcat

SEQ ID NO: 775876 - DNA, 75 bp, synthetic construct
  source 1..75: mol_type = other DNA
gttcagatggaacggtcgtatctggaatgcgggtccagactcactggcacggctgtctccggtggtgatggcatc

SEQ ID NO: 775877 - DNA, 75 bp, synthetic construct
  source 1..75: mol_type = other DNA
atgagggatttacagaccagcggcatagtggggttgtcagccagtaaggtgggatacaggcatagtgatcgacat

SEQ ID NO: 775878 - DNA, 75 bp, synthetic construct
  source 1..75: mol_type = other DNA
ggtgaggtcaacgacaaaaaaaatgttgccgttctgccaacagttcctgccagcattcgggcaacgaagggttct

SEQ ID NO: 775879 - DNA, 75 bp, synthetic construct
  source 1..75: mol_type = other DNA
cggataataacaacgtcgtactgaccagggagaaacttattgcgctgaacgatgccatgatggtggccatggtga

SEQ ID NO: 775880 - DNA, 75 bp, synthetic construct
  source 1..75: mol_type = other DNA
aatgccggaactggaagaactggcgacagcaatggcgcaggctcaggtcgatcgcaatgacgagatttatcagcg

SEQ ID NO: 775881 - DNA, 75 bp, synthetic construct
  source 1..75: mol_type = other DNA
acgaaatttatcgtcgccagcgggagatgaaagagaggttgagcggcctggatgatttggtttcaattcgagcgc

SEQ ID NO: 775882 - DNA, 75 bp, synthetic construct
  source 1..75: mol_type = other DNA
atgcgtcagtctcagaaacccgtcgagcagcagccggtaatcactcaaccaccgcgaatgccaaaactggatgat

SEQ ID NO: 775883 - DNA, 75 bp, synthetic construct
  source 1..75: mol_type = other DNA
atgtcagctgtaacctcccgtgggccgtcgccgctgcaacgccgggtgctgattatgctggctgcccttgatgaa

SEQ ID NO: 775884 - DNA, 75 bp, synthetic construct
  source 1..75: mol_type = other DNA
cgatccgctggaagtggcgcagtggctgcaggcctgtcatgacgcaggaatggaggttcgcgtacagataaatga

SEQ ID NO: 775885 - DNA, 75 bp, synthetic construct
  source 1..75: mol_type = other DNA
aagacctgccggtggagctgggcggcatgacgtatcagacctgccgtggggattttgtggtacgtctcgacggca

SEQ ID NO: 775886 - DNA, 75 bp, synthetic construct
  source 1..75: mol_type = other DNA
gcagcaaaagcgttatttgccgatccccagcagcctcgcacccgacagttcctcgagaagtttctgctgcaataa

SEQ ID NO: 775887 - DNA, 75 bp, synthetic construct
  source 1..75: mol_type = other DNA
ccgccaccgggaaaaacggcaacccggatatcagcgccagtatcgcggggatgggcgatctgcaatacaaataca

SEQ ID NO: 775888 - DNA, 75 bp, synthetic construct
  source 1..75: mol_type = other DNA
tatggaataaagaaggcagggtggtacgccgggagggagatccgctggacgtggcgcagtggctgcaggcctgtc

SEQ ID NO: 775889 - DNA, 75 bp, synthetic construct
  source 1..75: mol_type = other DNA
agaacaggaccgcctccgggcagaacagcgcgcggcagaagtcgtcgttctgccgctagtcccggtatcaggtct

SEQ ID NO: 775890 - DNA, 75 bp, synthetic construct
  source 1..75: mol_type = other DNA
gtgaaactggatgaaatcgctcggctggcgggagtgtcgcggaccactgcaagctatgttattaacggcaaagcg

SEQ ID NO: 775891 - DNA, 75 bp, synthetic construct
  source 1..75: mol_type = other DNA
atgagccgcgtaagccaaaaccgggcttaacgcgcatcaaacgaaatctctatcgccgtggcatcctcagccgta

SEQ ID NO: 775892 - DNA, 75 bp, synthetic construct
  source 1..75: mol_type = other DNA
agaacagggccgcctccgggcagaacagcgtgcggcagaagtcgtcgtactgccgctggtcccggcagcaggtct

SEQ ID NO: 775893 - DNA, 75 bp, synthetic construct
  source 1..75: mol_type = other DNA
agaacaggaccgcctccgggcagaacagcgtgcggcagaagtcgtcgtactgccgctgatcccggcagcaggtct

SEQ ID NO: 775894 - DNA, 75 bp, synthetic construct
  source 1..75: mol_type = other DNA
tgtcagttccgcccgcagaaggcacttctgccaaagacctgccggtggagctgggcggcatgacgtatcaggcct

SEQ ID NO: 775895 - DNA, 75 bp, synthetic construct
  source 1..75: mol_type = other DNA
cagacgtcaggaaattgaagcatggcgcacagaacaggaggcgaagccgttcacgtttgaatggaatggtcgtat

SEQ ID NO: 775896 - DNA, 75 bp, synthetic construct
  source 1..75: mol_type = other DNA
ggagggctttaaaatccacgaacgccagcgcgagatgaaagagcaactttccctgctgtccacactgagcgatat

SEQ ID NO: 775897 - DNA, 75 bp, synthetic construct
  source 1..75: mol_type = other DNA
cggagggctttaaaatccacgaacgccagcgcgagatgaaggaacaactgaataatctgaatgacttggcttcaa

SEQ ID NO: 775898 - DNA, 75 bp, synthetic construct
  source 1..75: mol_type = other DNA
cggataataacaacgtcatactgaccagggagaaacttattgcgctgaacgatgccatgatggtggccatggtgg

SEQ ID NO: 775899 - DNA, 75 bp, synthetic construct
  source 1..75: mol_type = other DNA
aactggccagcaaatctggcaggagctgcaaagcggcaaatggggcgaaatcgccccgttcactgttacgcctga

SEQ ID NO: 775900 - DNA, 75 bp, synthetic construct
  source 1..75: mol_type = other DNA
gtttaaaatccatgaacgccagcgccggatgaaagaagaagtggcagggctgaccgcactgccggatatacgtgc

SEQ ID NO: 775901 - DNA, 75 bp, synthetic construct
  source 1..75: mol_type = other DNA
acgtcagcggaagatgaaagaggaactgagtagcctggaggatttacgctcaatcagagcgatggcgattagtgg

SEQ ID NO: 775902 - DNA, 75 bp, synthetic construct
  source 1..75: mol_type = other DNA
gtgaagcgtccgcgttgccaggaagccgcacaacagggttacgctaatgccactgagctggctgattatctggtc

SEQ ID NO: 775903 - DNA, 75 bp, synthetic construct
  source 1..75: mol_type = other DNA
accgcagaagagcaggcgcaactggaagaggcgctgaacgtgctgctggaagatgttcgcgccaggccacaacaa

SEQ ID NO: 775904 - DNA, 75 bp, synthetic construct
  source 1..75: mol_type = other DNA
ggcgagttgctgacggctaaccgccagttgcaatcggcgctggtagaaaccgcgcagaataatcaggacgcggtg

SEQ ID NO: 775905 - DNA, 75 bp, synthetic construct
  source 1..75: mol_type = other DNA
attgtgaagtgcttttggaggggcaggaggtacatctaccttataccgctgttgagaatgatgttgcggaaatgg

SEQ ID NO: 775906 - DNA, 75 bp, synthetic construct
  source 1..75: mol_type = other DNA
cgattgcccgttcagaacggttttctgccaccgtgcgtggctggttccgggatgatggccggttatgggatgtca

SEQ ID NO: 775907 - DNA, 75 bp, synthetic construct
  source 1..75: mol_type = other DNA
gattaccgtctggcggagcaggatattgttggctctgtggcctggtccaaagccctggtcacggtaggcgtgtta

SEQ ID NO: 775908 - DNA, 75 bp, synthetic construct
  source 1..75: mol_type = other DNA
tgggatggtggaaaagtgtctcatgatcgtctgtccccggttattgccgtggcacagtgcggtgaattaccggag

SEQ ID NO: 775909 - DNA, 75 bp, synthetic construct
  source 1..75: mol_type = other DNA
gcgttactgctggcgatggtttccagcctgcgtgacagaccgctaccgcaggatctggtggtgtttggtgaagtc

SEQ ID NO: 775910 - DNA, 75 bp, synthetic construct
  source 1..75: mol_type = other DNA
gcgttactgctggcgatggtttccagcctgcgtgacagaccgctgccacaggatctggtggtgtttggtgaagtc

SEQ ID NO: 775911 - DNA, 75 bp, synthetic construct
  source 1..75: mol_type = other DNA
gatgaaggatgaactgaataatctggaggatttgcgctcaatcagagagatggcgattagcggcaatcacgctcg

SEQ ID NO: 775912 - DNA, 75 bp, synthetic construct
  source 1..75: mol_type = other DNA
ccgataatcaacaggtgaaactgtcgatgccggaactggaagaactggcagcagcaatggcgcaggcgcaggtcg

SEQ ID NO: 775913 - DNA, 75 bp, synthetic construct
  source 1..75: mol_type = other DNA
ccagcgtgaaatgaaggaagaactgaataacctgaatgatttacgttcaatcagagcgatggtaattagtcggta

SEQ ID NO: 775914 - DNA, 75 bp, synthetic construct
  source 1..75: mol_type = other DNA
tggcggatgtacaatcatcgccaggcagcgtggcgcaggtacgtgaaacggcggcttatttgacacgtttcgcca

SEQ ID NO: 775915 - DNA, 75 bp, synthetic construct
  source 1..75: mol_type = other DNA
tttgcgcgtttatcatcgcgcagcaggtgccaactgactatcagcagttgcgtcaacaactgacccgtatggggc

SEQ ID NO: 775916 - DNA, 75 bp, synthetic construct
  source 1..75: mol_type = other DNA
tggagagaccatgagcgacgattttacgccgctcttctcccttcacggtgagcgacagcctgatgtttccaccac

SEQ ID NO: 775917 - DNA, 75 bp, synthetic construct
  source 1..75: mol_type = other DNA
caaagcggaagatggggtgagattaccccgtttaccgtcacgcctgaacttatcgtagcggcaaaagatgccaaa

SEQ ID NO: 775918 - DNA, 75 bp, synthetic construct
  source 1..75: mol_type = other DNA
gttcgaatggaacagacgtacctggaacgctggccccgactcactggctcgcctttatccggtagtaatggcagc

SEQ ID NO: 775919 - DNA, 75 bp, synthetic construct
  source 1..75: mol_type = other DNA
tcacgtttgaatggaacggtcgtgtctggaatgctggccccaactcactgggccgcctgtccccggtggtcatgc

SEQ ID NO: 775920 - DNA, 75 bp, synthetic construct
  source 1..75: mol_type = other DNA
attgttaacgcgcggcccttataccatttcgggctattaccgcgccggagaaaaaatagccgcggctgaagtgga

SEQ ID NO: 775921 - DNA, 75 bp, synthetic construct
  source 1..75: mol_type = other DNA
gagcgtggcgctttaccgatgattgatcgcggcgatattcgtcaggctatcgatcgttgcagcaatatctgggcg

SEQ ID NO: 775922 - DNA, 75 bp, synthetic construct
  source 1..75: mol_type = other DNA
gtttggtcagggttccatgctggcactgatggcagatgcattcctgaacgctaaccgcgtggcggagctgtggtg

SEQ ID NO: 775923 - DNA, 75 bp, synthetic construct
  source 1..75: mol_type = other DNA
tcaaatcaacagctgcaggccgttatcaacttctttcacgctggtgggatgcttaccgcaagcagcttgggttga

SEQ ID NO: 775924 - DNA, 75 bp, synthetic construct
  source 1..75: mol_type = other DNA
ttttcacttaaaaaggttatatggttttataacgtatataattatttagttttaaattcaaaagctaaagatgct

SEQ ID NO: 775925 - DNA, 75 bp, synthetic construct
  source 1..75: mol_type = other DNA
agggggtcttaacggaaagaggattatcttctttgttacgtcgcgtacagtctactgaaaaccttgattatagta

SEQ ID NO: 775926 - DNA, 75 bp, synthetic construct
  source 1..75: mol_type = other DNA
ttgcaggaacgctggggaccggtcaatcaggctgatggctttgccgtgacagtgctgtccggcacgtatggggat

SEQ ID NO: 775927 - DNA, 75 bp, synthetic construct
  source 1..75: mol_type = other DNA
ttatccacaaacgcgctgaagtgctggagctggtagcaaaggttaaaccgcttaatagttccaggcctatgctaa

SEQ ID NO: 775928 - DNA, 75 bp, synthetic construct
  source 1..75: mol_type = other DNA
ggcgcagatcccattatttttagcccgtattgctcaccctaataaaaagcacaagtggcaattcgaaggctttaa

SEQ ID NO: 775929 - DNA, 75 bp, synthetic construct
  source 1..75: mol_type = other DNA
tatgctggcggattctgacgttggcgcatcgaaaggcggtctgtttgatgacagcaaaacgcttagcaaattgat

SEQ ID NO: 775930 - DNA, 75 bp, synthetic construct
  source 1..75: mol_type = other DNA
gctgactacggcgatgaagccgcactgacatctgcgcttcagggagtggaaaaactactgctgatctcttccagc

SEQ ID NO: 775931 - DNA, 75 bp, synthetic construct
  source 1..75: mol_type = other DNA
atgacgcgcgccgctgttccggcaattccgtatcggaggtgctggaaaatatcaagaataatctcgacgcgtttc

SEQ ID NO: 775932 - DNA, 75 bp, synthetic construct
  source 1..75: mol_type = other DNA
acgttatcgtcggaggtgagttgttcactgattactccgatcaccctcgcaaacttgtcacgctaaactcgaagc

SEQ ID NO: 775933 - DNA, 75 bp, synthetic construct
  source 1..75: mol_type = other DNA
cgtcgtgctgctggcctgggtactgtggcgtttgctgcgtattatcagccgtcgtcgtcttaacccggataacga

SEQ ID NO: 775934 - DNA, 75 bp, synthetic construct
  source 1..75: mol_type = other DNA
gcggtgattggcttccagtcaccgtataacgaccagcgcagtgtgattgcgctgctggcggacagccctcgcggt

SEQ ID NO: 775935 - DNA, 75 bp, synthetic construct
  source 1..75: mol_type = other DNA
atgcgccgaactgggtgcgtaccgatcgtcccggtcacctttggtgaactgaaaacctatgaagaacaattacaa

SEQ ID NO: 775936 - DNA, 75 bp, synthetic construct
  source 1..75: mol_type = other DNA
atttatctcacctcgcaatggtttccgcagcgtaatcgcgccagcattatggggctgttctatatgggcgcaccg

SEQ ID NO: 775937 - DNA, 75 bp, synthetic construct
  source 1..75: mol_type = other DNA
tatcagtgtgatattgctggcgtgggtactgtggcgtctgctgcgtattattagtcgtcgtcgtcttaacccgga

SEQ ID NO: 775938 - DNA, 75 bp, synthetic construct
  source 1..75: mol_type = other DNA
ggcgacgtttattacgtaggtcatctgccgtggttcgagcgcttgtggtatgcgctggcaaaccatccgattctg

SEQ ID NO: 775939 - DNA, 75 bp, synthetic construct
  source 1..75: mol_type = other DNA
agtatgaacataaaatcagtgacctgatttcccggtttaaagaggcaggtggggtggtaaatgaagttgagctat

SEQ ID NO: 775940 - DNA, 75 bp, synthetic construct
  source 1..75: mol_type = other DNA
atttctttcggcagccatggcatgggccgatactgaagcgaaatttctgatagttcgcactctgcttggtgctgc

SEQ ID NO: 775941 - DNA, 75 bp, synthetic construct
  source 1..75: mol_type = other DNA
cggccggacttcctgcgcgatcatccggcggtaaaagccccggtgattgagatgatcaaccatccgcagaatcct

SEQ ID NO: 775942 - DNA, 75 bp, synthetic construct
  source 1..75: mol_type = other DNA
tgtggtattgctggcctgggtactgtggcgtctgctgcgaattatcagccgtcgtcgtcttaacccggataacga

SEQ ID NO: 775943 - DNA, 75 bp, synthetic construct
  source 1..75: mol_type = other DNA
gggatgtgaagctgacttttgcgcaaatcgcgccgccgccgggcagcatggtgctacgtggtatcaacccgaacg

SEQ ID NO: 775944 - DNA, 75 bp, synthetic construct
  source 1..75: mol_type = other DNA
atttggctttaaatctgaactgttagcagatgccttacagctgaacgccaaccacagcgaagaagacctctatac

SEQ ID NO: 775945 - DNA, 75 bp, synthetic construct
  source 1..75: mol_type = other DNA
tatggtcgcgcgcttgctctgctcaaacgcgaaggccggtgcccgtctgacgttgaacaccgacagattaagtac

SEQ ID NO: 775946 - DNA, 75 bp, synthetic construct
  source 1..75: mol_type = other DNA
ggctgtaagcgaacagggagatgtacagccgcaggcgcaagccacggcaataatggcggggatccaaccgctacc

SEQ ID NO: 775947 - DNA, 75 bp, synthetic construct
  source 1..75: mol_type = other DNA
cgcctacgataatgaactggtggaagccgttaaacgttttcaggcatggcaaggattgggggcagatggtgctat

SEQ ID NO: 775948 - DNA, 75 bp, synthetic construct
  source 1..75: mol_type = other DNA
cctttgcaacatccggtttttcattagttttcttcctgctattaggcgggattttatggtttatccccgttggac

SEQ ID NO: 775949 - DNA, 75 bp, synthetic construct
  source 1..75: mol_type = other DNA
ggtattgaggtgatgcgtgcactacgcaaaggccaggcctcagcattttatatggtgatcccctgggcgaaatgc

SEQ ID NO: 775950 - DNA, 75 bp, synthetic construct
  source 1..75: mol_type = other DNA
catggcaaactgaaacggataatcggcgccacgctgggatttaaatccatgaagacggcggtgatgctgccaact

SEQ ID NO: 775951 - DNA, 75 bp, synthetic construct
  source 1..75: mol_type = other DNA
aggggcggatagtcgagcagggggtagcaaaagcgttatttgctgatcctcagcagcctcgcacccgccagttcc

SEQ ID NO: 775952 - DNA, 75 bp, synthetic construct
  source 1..75: mol_type = other DNA
cgcgagctgttggcgaaagttgggctggccggtaaagaaaccagctatccacgtcgtttgtctggcggtcaacag

SEQ ID NO: 775953 - DNA, 75 bp, synthetic construct
  source 1..75: mol_type = other DNA
gccgcaaaagcgttatttgccgatccccagcagcctcgcacccgccagttcctcgagaagtttctgctgcaataa

SEQ ID NO: 775954 - DNA, 75 bp, synthetic construct
  source 1..75: mol_type = other DNA
acgtaacgcccgcccagcgtgctggcgtgttggcactcaacatccagcgattgcgcttgctgccaacagagcttt

SEQ ID NO: 775955 - DNA, 75 bp, synthetic construct
  source 1..75: mol_type = other DNA
aacagcaggaacgcagtcgataaacaaacaaacgacgaaccacagtaaacctgcaccagccgtccgcgcggccta

SEQ ID NO: 775956 - DNA, 75 bp, synthetic construct
  source 1..75: mol_type = other DNA
ctgctggaacaaccggaggctgggacgattaaagtgggcgatatcatgattgatactgcgcgttcattaggtcag

SEQ ID NO: 775957 - DNA, 75 bp, synthetic construct
  source 1..75: mol_type = other DNA
agaacgcaccaaaaggtcacttcttcctgcacccgcgtgcacgttcaccacactatattgtgatgaatgacaaga

SEQ ID NO: 775958 - DNA, 75 bp, synthetic construct
  source 1..75: mol_type = other DNA
gattttcatatttcctattttgctacagaaataaaaacaaaccttgacaagacaatgttccaagaagcggccgcg

SEQ ID NO: 775959 - DNA, 75 bp, synthetic construct
  source 1..75: mol_type = other DNA
aagcatggtaaaccgctggcactgtacagcgataaagccggtgtttttcgtgttaacaataaacacgccacaggc

SEQ ID NO: 775960 - DNA, 75 bp, synthetic construct
  source 1..75: mol_type = other DNA
atgcaaacagaagctgaagtcttaaccgatcatagcgagctaatttgctcgaccagcattgagcgcatcgtcaca

SEQ ID NO: 775961 - DNA, 75 bp, synthetic construct
  source 1..75: mol_type = other DNA
gagcaagcgtcaaagtatgcaaaacagtttgcgcaatgggcagttttcatcgttacgggatttaccagaagagct

SEQ ID NO: 775962 - DNA, 75 bp, synthetic construct
  source 1..75: mol_type = other DNA
taccgcaactgcaaagaacgatttagtaagctggttaataacctcacagagcaaaaactacgtgcacaacaactg

SEQ ID NO: 775963 - DNA, 75 bp, synthetic construct
  source 1..75: mol_type = other DNA
gagggtgatgaattgttagcagagttagtggatctgcttaatgagtataaaaagtctgtagagtttgatcttatc

SEQ ID NO: 775964 - DNA, 75 bp, synthetic construct
  source 1..75: mol_type = other DNA
tgtcggtctgctgacttcaattatggcgtttattgtttccttcctgccgccggataacatccagggtgactctac

SEQ ID NO: 775965 - DNA, 75 bp, synthetic construct
  source 1..75: mol_type = other DNA
tgccctttattctctatgctgttcatgatcgtaaaggcaaagcgaataccggcgtcactctggagccaatcaaca

SEQ ID NO: 775966 - DNA, 75 bp, synthetic construct
  source 1..75: mol_type = other DNA
cgcatttattttgattgcattagcagcgatttatctgcactccggtgcgccagttgctatcgaaatggatgcaaa

SEQ ID NO: 775967 - DNA, 75 bp, synthetic construct
  source 1..75: mol_type = other DNA
cctgacccgcttccacggggtgtttgccccgaacgccgccctgcgcgcacagctgacgccatcggggcgcggcag

SEQ ID NO: 775968 - DNA, 75 bp, synthetic construct
  source 1..75: mol_type = other DNA
ctggagggcgaagccggcaaggtcggcggcttctcactgcatgccggcgtggcggccgaagcacacgaaagccac

SEQ ID NO: 775969 - DNA, 75 bp, synthetic construct
  source 1..75: mol_type = other DNA
gcgctgcaggcgacgacagcatggatgggctgcggatgagttcgatcacctaccgcatcgccaccggccgcgacg

SEQ ID NO: 775970 - DNA, 75 bp, synthetic construct
  source 1..75: mol_type = other DNA
ggcccgcccggctccaccgccgccgacaagtgggcaggtatctggatcatcccggtctttaccgcccattgctca

SEQ ID NO: 775971 - DNA, 75 bp, synthetic construct
  source 1..75: mol_type = other DNA
tggtcatccagcgggctaatccggggctgtatgacgcactgactaatggggtattacaggcgaatgtggcgttcg

SEQ ID NO: 775972 - DNA, 75 bp, synthetic construct
  source 1..75: mol_type = other DNA
ttgttaataccagtgacggtgatgccgttaaaggtgatgacgccggacgccaggcaacggggaaagaggggcaga

SEQ ID NO: 775973 - DNA, 75 bp, synthetic construct
  source 1..75: mol_type = other DNA
atgacgatgaaggtaaagactctggtgatgatggtgatgctgtcctgtagtacgccggtcatggcagacagtatt

SEQ ID NO: 775974 - DNA, 75 bp, synthetic construct
  source 1..75: mol_type = other DNA
tctcagccatcagtgcagcactttctccgttcttttcctggtgtttgcggtatcctgatgaggagattaatgaag

SEQ ID NO: 775975 - DNA, 75 bp, synthetic construct
  source 1..75: mol_type = other DNA
taccattagtcgggtatctggttgccgagttatgtccgggcgaaacgccgcctatgtttaccacttcagcgattg

SEQ ID NO: 775976 - DNA, 75 bp, synthetic construct
  source 1..75: mol_type = other DNA
gagaaattagtaaccgagattaatgccgcacgtaaagtgagttatcaacaactggcaaagcaaaataatgtatcg

SEQ ID NO: 775977 - DNA, 75 bp, synthetic construct
  source 1..75: mol_type = other DNA
ctttgcagtgggtttctgaactgacagatgaactcatggcaaaaatcagaacccacgaatacaaccgctcaatgg

SEQ ID NO: 775978 - DNA, 75 bp, synthetic construct
  source 1..75: mol_type = other DNA
tcttaagcttgtagcggccagtgagtgtagtgatgaagagaagagactggctatccagtgggtttctgagctgac

SEQ ID NO: 775979 - DNA, 75 bp, synthetic construct
  source 1..75: mol_type = other DNA
gcgttattctgatggtggaaggcttcccgccatcgcatgccgggaccatcaccgtgtatgaagactcacaaccgg

SEQ ID NO: 775980 - DNA, 75 bp, synthetic construct
  source 1..75: mol_type = other DNA
tgaagctccagcgcattgatttttttatcaagcttgtagcggctagtgagtgcagcgatgaagaaaagcggctgg

SEQ ID NO: 775981 - DNA, 75 bp, synthetic construct
  source 1..75: mol_type = other DNA
ctttcctactatactgtttgtataaacagtgggtatatgtacagtatttgtgtatccgtgtaatgataggaggga

SEQ ID NO: 775982 - DNA, 75 bp, synthetic construct
  source 1..75: mol_type = other DNA
tgtttaacatttcgtgctttattgactggagtcagtacatccaattgactgacaaaaaagagttttacatttttt

SEQ ID NO: 775983 - DNA, 75 bp, synthetic construct
  source 1..75: mol_type = other DNA
acatgagagtaaaacaggtgataaccacctttagtaaggggtattcacaggtattattacagaacaatgttgttt

SEQ ID NO: 775984 - DNA, 75 bp, synthetic construct
  source 1..75: mol_type = other DNA
tacggtaacgcgatttgtcagtctgcaaataccgaaggccagaacattcacggtaagtgtgcaacgtctgcgatt

SEQ ID NO: 775985 - DNA, 75 bp, synthetic construct
  source 1..75: mol_type = other DNA
gcaatagccgcccgtggaagccgttaggtaaggctcagagctatagcaacgaagagctgaataatgcgccgcagt

SEQ ID NO: 775986 - DNA, 75 bp, synthetic construct
  source 1..75: mol_type = other DNA
tttacgctgaatacgatcccggatctggctgcgctggctaagaatcataacgtcaaccacttcacgctggcgttt

SEQ ID NO: 775987 - DNA, 75 bp, synthetic construct
  source 1..75: mol_type = other DNA
acgaacctcagagttaaacaggctgcggtggcggcgatgtttaaaccgtatcatccggtctgtatcgtgtctgct

SEQ ID NO: 775988 - DNA, 75 bp, synthetic construct
  source 1..75: mol_type = other DNA
cagcacgccttcagcgcagcaacggacaaatcttcaggaaaagctgaccgccattaccgcaatgtttaagccgca

SEQ ID NO: 775989 - DNA, 75 bp, synthetic construct
  source 1..75: mol_type = other DNA
tcatcctgtctgcatggtgtccgcgctggccggatggggcactgaggagatggtgggcaccatgatgcgctgtct

SEQ ID NO: 775990 - DNA, 75 bp, synthetic construct
  source 1..75: mol_type = other DNA
atgtatgaggagcgtgtgacatttttcatgatagtaaaacaggtgataacctcctttcgtaaggggaattcacag

SEQ ID NO: 775991 - DNA, 75 bp, synthetic construct
  source 1..75: mol_type = other DNA
atgtatgaggagtgtgtgacatttttcatgaaagtaaaacaggtgataacctcctttcgtaagggggattcacag

SEQ ID NO: 775992 - DNA, 75 bp, synthetic construct
  source 1..75: mol_type = other DNA
caccccgaaatactgtatttctcagccatcagtgcagcactttctccgttctttgcctggtgtttgcggtatcct

SEQ ID NO: 775993 - DNA, 75 bp, synthetic construct
  source 1..75: mol_type = other DNA
agcacaatgaacaagccaagcaatgctgggatgtcattggaaaagttatgcttggccgcgcaagcaaagagcgcg

SEQ ID NO: 775994 - DNA, 75 bp, synthetic construct
  source 1..75: mol_type = other DNA
atgtatgaggagggtgtgacatttttcatgacagtaaaacaggtgataacctcctttcgtaaggggtattcacag

SEQ ID NO: 775995 - DNA, 75 bp, synthetic construct
  source 1..75: mol_type = other DNA
atgtatgaggagcgtgtgacatttttcatgagagtaaaacaggtgataacctcctttcgtaaggggtattcacag

SEQ ID NO: 775996 - DNA, 75 bp, synthetic construct
  source 1..75: mol_type = other DNA
aaatagtgccggtgcgcaccaacacaagagttccggtgcatttggtggcacgaacacgagcattttccctaatgg

SEQ ID NO: 775997 - DNA, 75 bp, synthetic construct
  source 1..75: mol_type = other DNA
ccggcacatctgcccgtgaggcggcaacctatgcgactgatgctgcagattcagcacgtgcagccagcacgtcag

SEQ ID NO: 775998 - DNA, 75 bp, synthetic construct
  source 1..75: mol_type = other DNA
aatattaacttgcctggtgttaatacgactggtaaccagagcactacaggcaatgcagctactgccacgaagttg

SEQ ID NO: 775999 - DNA, 75 bp, synthetic construct
  source 1..75: mol_type = other DNA
tcgctggccgcaacgccaaaggcagttaaagcagtcaatgacaatgcgaacagcagggtgccatctgaccgaaaa

SEQ ID NO: 776000 - DNA, 75 bp, synthetic construct
  source 1..75: mol_type = other DNA
tcaggcgtgatccctgatatgcgtggctggacgattaagggcaagcccgccagtggtcgtgccgtattatctcag

SEQ ID NO: 776001 - DNA, 75 bp, synthetic construct
  source 1..75: mol_type = other DNA
tgtaaatattcaatgggattataccagtaatgccagcgtgacgattcatacgtcaccagcatattctgctaataa

SEQ ID NO: 776002 - DNA, 75 bp, synthetic construct
  source 1..75: mol_type = other DNA
gcgcagcttcctcggcaacggcggcaggaaattccgcgaaggcggcaaaaacgttcgagacgaacgccaggtctt

SEQ ID NO: 776003 - DNA, 75 bp, synthetic construct
  source 1..75: mol_type = other DNA
accgatttactcggccaggttgcggatgcgtatattgagccttcctttcgttgcgactatggctataacattttc

SEQ ID NO: 776004 - DNA, 75 bp, synthetic construct
  source 1..75: mol_type = other DNA
atcacggagttgaccagctcagcagaccccaggttttcaacgtgtcttttactgacaggtcaaaattatctaaga

SEQ ID NO: 776005 - DNA, 75 bp, synthetic construct
  source 1..75: mol_type = other DNA
ggctctggtgtccttttacgctaccatgctaataatcagcacaataatcagcccaaccacggagttgaccagctc

SEQ ID NO: 776006 - DNA, 75 bp, synthetic construct
  source 1..75: mol_type = other DNA
gccgcgaagaagtcagccagcgatgccagcacatctgccagtgaggcggcaatccatgcgactgatgctgcagac

SEQ ID NO: 776007 - DNA, 75 bp, synthetic construct
  source 1..75: mol_type = other DNA
tcccatcgaccctgtagcacgtaatagcggtgctgaactggggaaacccgtcaccatcggtaataacgtctggat

SEQ ID NO: 776008 - DNA, 75 bp, synthetic construct
  source 1..75: mol_type = other DNA
ggcgttcatatctacacggcaacacatcccatcgaccctgtagcacgtaatagcggtgctgaactggggaaaccc

SEQ ID NO: 776009 - DNA, 75 bp, synthetic construct
  source 1..75: mol_type = other DNA
gcatcaacaaaggccactgaagcctcaaaaagtgctgccgctgcagagtcctcaaaaagcgcggcagctaccagt

SEQ ID NO: 776010 - DNA, 75 bp, synthetic construct
  source 1..75: mol_type = other DNA
gtccgtggtggcacagaacacggcagccgcaaagaagtcagccagtgattccagcacatctgcccgtgaggcggc

SEQ ID NO: 776011 - DNA, 75 bp, synthetic construct
  source 1..75: mol_type = other DNA
gttcctgtaaactttaacgcttccagaacctggtctggtgccacaagcactacaggtaaccatgcgcactctgtt

SEQ ID NO: 776012 - DNA, 75 bp, synthetic construct
  source 1..75: mol_type = other DNA
gaatgacaatgcgaatggcagggtaccatctaaccgaaaagttaacgggaaagcactgactgcggatataacatt

SEQ ID NO: 776013 - DNA, 75 bp, synthetic construct
  source 1..75: mol_type = other DNA
ctatccagtgggtttctgagttaacggatgagctgatggcaaagattcgtgctcatgaatacaaccgctcaatgg

SEQ ID NO: 776014 - DNA, 75 bp, synthetic construct
  source 1..75: mol_type = other DNA
cttccagcgttaccggtggtgttgtttatacgatgtatagctcacatcagaaacctacaccatcagatattggag

SEQ ID NO: 776015 - DNA, 75 bp, synthetic construct
  source 1..75: mol_type = other DNA
taacttctataccggagtcggaagttgccggaccttgcagatgaaggcgcattacagaaatggtggtctgttcta

SEQ ID NO: 776016 - DNA, 75 bp, synthetic construct
  source 1..75: mol_type = other DNA
tgttgagtttgatggttccaaagatattactttaaccgctgcgcatgtggctgcttttgccagaagggcaactga

SEQ ID NO: 776017 - DNA, 75 bp, synthetic construct
  source 1..75: mol_type = other DNA
tgtcaaggattcacagtatcaagtaagcccggggacttcttccagtagatcgtattatcaacgtattcagacaca

SEQ ID NO: 776018 - DNA, 75 bp, synthetic construct
  source 1..75: mol_type = other DNA
ttgttatgcctggtggctggactgacagggggcgttatgcttatggcatgttctggcaatatcaaaacaatgaac

SEQ ID NO: 776019 - DNA, 75 bp, synthetic construct
  source 1..75: mol_type = other DNA
tcagcacgtgcagccagcacgtcagccggacaggccgcgacgtcggctcaggaggctttttccagcgcaggaacg

SEQ ID NO: 776020 - DNA, 75 bp, synthetic construct
  source 1..75: mol_type = other DNA
tatagctcacatcagaaacctacaccatcagatattggagcgctgccaacaactggagggactatttcaggtccg

SEQ ID NO: 776021 - DNA, 75 bp, synthetic construct
  source 1..75: mol_type = other DNA
ggatgggtgatgtgctctctggtattattggcgcattgcttgggcaaaaactgtcgccgtatgatgcagcgtgcg

SEQ ID NO: 776022 - DNA, 75 bp, synthetic construct
  source 1..75: mol_type = other DNA
attgaaatggtggttaacgacaccgatggtgcgcaaaccctccagcaactgctggcgcaggtaagccatttatga

SEQ ID NO: 776023 - DNA, 75 bp, synthetic construct
  source 1..75: mol_type = other DNA
tctctcagctctttacgatctcaacgcgctggcgttattacgtcaggtttccgcgccgctggtattaattgtggt

SEQ ID NO: 776024 - DNA, 75 bp, synthetic construct
  source 1..75: mol_type = other DNA
agccgggttaaccggagaaaaactgatcctgttaaccgccgatcgcccgccggagctaattgactgcggcgcgaa

SEQ ID NO: 776025 - DNA, 75 bp, synthetic construct
  source 1..75: mol_type = other DNA
acggctcctgcaatggcaggcaagctgtgaaccagaagagtactggattgttgatgacattgaagggcgacttga

SEQ ID NO: 776026 - DNA, 75 bp, synthetic construct
  source 1..75: mol_type = other DNA
ttgataacatcgaagggcgactcgacccggcgcatcaccgtggacgtcggctgattgccaatattactgactggc

SEQ ID NO: 776027 - DNA, 75 bp, synthetic construct
  source 1..75: mol_type = other DNA
cggagctaattgactgcggcgcgaatcaggcgattcgtcagccgggaatgttcgcctctcaccccacgcacagta

SEQ ID NO: 776028 - DNA, 75 bp, synthetic construct
  source 1..75: mol_type = other DNA
gggtctccactctggaacagactacagaaaatcagcggcgtgaaattgaaacggcgggttttgccatcagacccc

SEQ ID NO: 776029 - DNA, 75 bp, synthetic construct
  source 1..75: mol_type = other DNA
gctttattttattggaatcaagcaaaaatatttaatcaagcatcattaggattacctagcctatccgcaccttta

SEQ ID NO: 776030 - DNA, 75 bp, synthetic construct
  source 1..75: mol_type = other DNA
tagcttgtgcacaagggatggtgatagtagagagaatcgatatatctgttactactgaaaattttaagcatatta

SEQ ID NO: 776031 - DNA, 75 bp, synthetic construct
  source 1..75: mol_type = other DNA
tggagctgcatccggctgaaaaacgccagccttggtgcgtggagatccctcgtctggctgaacaggcaatgcagg

SEQ ID NO: 776032 - DNA, 75 bp, synthetic construct
  source 1..75: mol_type = other DNA
ttcgcttctcaccctgcgcatagtatttcactaccgcgcccgactcaggatattcctgcgcgttggctggtatcc

SEQ ID NO: 776033 - DNA, 75 bp, synthetic construct
  source 1..75: mol_type = other DNA
tgtatagcaaccgtggggccagcggtatcgacggactgctttctactgccgccggcgttcagcgtgccagtggca

SEQ ID NO: 776034 - DNA, 75 bp, synthetic construct
  source 1..75: mol_type = other DNA
aaccgacactggcgattgttggcgatctctcggcgctttacgacctgaacgcgctggccttgttgcgccaggttt

SEQ ID NO: 776035 - DNA, 75 bp, synthetic construct
  source 1..75: mol_type = other DNA
cgatggggcagattcagggcgctctggtcggtatcgcgatggtactgtcagcggtattcgtaccgatggccttct

SEQ ID NO: 776036 - DNA, 75 bp, synthetic construct
  source 1..75: mol_type = other DNA
acgaattactatctgaccaaagaaaagaacaacgttgagtcggtgttcgccgttaacggcttcggctttgcggga

SEQ ID NO: 776037 - DNA, 75 bp, synthetic construct
  source 1..75: mol_type = other DNA
cgatttttgcgtgggtgatcgccattatcatcatgttggcaggggggctggcgatcctcaaactgccggtggcgc

SEQ ID NO: 776038 - DNA, 75 bp, synthetic construct
  source 1..75: mol_type = other DNA
aagtacagcagcaaggggtgagcgttgagaaatcatccagcagcttcctgatggttgtcggcgttatcaacaccg

SEQ ID NO: 776039 - DNA, 75 bp, synthetic construct
  source 1..75: mol_type = other DNA
ggcaatcttcttcgttccggtattctttgtggtggtggttcgccgccgctttagccgcaagaatgaagatatcga

SEQ ID NO: 776040 - DNA, 75 bp, synthetic construct
  source 1..75: mol_type = other DNA
tcgtcagttctctattaccattgtttcagcaatggcgctgtcggtactggtggcgttgatcctgactccggctct

SEQ ID NO: 776041 - DNA, 75 bp, synthetic construct
  source 1..75: mol_type = other DNA
cccggttttgccagactacttgatcgcatggaaaatgatgatgtgctgatagtgaccaaacttgatcgcctgggc

SEQ ID NO: 776042 - DNA, 75 bp, synthetic construct
  source 1..75: mol_type = other DNA
tgtaagtataagtgccattgcccgggaattcaaaacctcgcggcaaaccattttaagaaccaaagcaaaacttca

SEQ ID NO: 776043 - DNA, 75 bp, synthetic construct
  source 1..75: mol_type = other DNA
tccggcacaccatcgtggacgccgcttaattgccaatattgccgactggctggagctgcatccggcagaaaaacg

SEQ ID NO: 776044 - DNA, 75 bp, synthetic construct
  source 1..75: mol_type = other DNA
cctggttttaatcggttgcttgatcgtctggaaagtggcgatgtattgatagtcacaaaactggatcgcctcggt

SEQ ID NO: 776045 - DNA, 75 bp, synthetic construct
  source 1..75: mol_type = other DNA
caaggaatggcggtgaaagagattgccgccgaactgggcttgtcaccgaaaacggtacacgtccatcgcgccaat

SEQ ID NO: 776046 - DNA, 75 bp, synthetic construct
  source 1..75: mol_type = other DNA
gtctggaaagtggcgatgtattgatagtcacaaaactggatcgcctcggtcgtaatgcaatggatatcaggaaaa

SEQ ID NO: 776047 - DNA, 75 bp, synthetic construct
  source 1..75: mol_type = other DNA
tataagctatggccatacgaggcagagttaaggctcagagagttgggccttaaacttggtgatgcagatccttct

SEQ ID NO: 776048 - DNA, 75 bp, synthetic construct
  source 1..75: mol_type = other DNA
tttcgcccgaagaccatcccaccgctggcgatccctgaacgtttgaatgcgcattgtgaagagttgtatgagctt

SEQ ID NO: 776049 - DNA, 75 bp, synthetic construct
  source 1..75: mol_type = other DNA
gacgggcagctacatctctggtttcactgcgtggggatccgcgtcagcgatcagctggaaaggctgctgtggcgc

SEQ ID NO: 776050 - DNA, 75 bp, synthetic construct
  source 1..75: mol_type = other DNA
ccaacgtggcattgcaggatcagatctacagcaaagatttaccgctgctgaaaaagatcattcccgatcttaaat

SEQ ID NO: 776051 - DNA, 75 bp, synthetic construct
  source 1..75: mol_type = other DNA
acttttatcgcaaggtgatgcaggcgtatcagcgccgggtgctgttcgtagttaatcaggctgacaaggccgagc

SEQ ID NO: 776052 - DNA, 75 bp, synthetic construct
  source 1..75: mol_type = other DNA
ttcatctgttcagcacgcagccgcgaacgctgtacgatctgctcgacgttcgcgcattgctggagggtgaatcgg

SEQ ID NO: 776053 - DNA, 75 bp, synthetic construct
  source 1..75: mol_type = other DNA
gctgatcgaacatgcgcagttggatcacgctttccatctcgccatttgtcaggcttctcacaatcaggtgctggt

SEQ ID NO: 776054 - DNA, 75 bp, synthetic construct
  source 1..75: mol_type = other DNA
cgcaatcttctggtgcgccggtaaccaaatgggcgacgcgggaagaacgcgacgggcagctacatctctggtttc

SEQ ID NO: 776055 - DNA, 75 bp, synthetic construct
  source 1..75: mol_type = other DNA
atggcattaaccgccgcgcttaaagcgcaaattgccgcctggtataaggcgcttcagggacagatccccgacttt

SEQ ID NO: 776056 - DNA, 75 bp, synthetic construct
  source 1..75: mol_type = other DNA
cgacgaactgacgccgaacaatcaggaagagcaaaagcgttgtgcaaagttgaagggcgatctcgacacttataa

SEQ ID NO: 776057 - DNA, 75 bp, synthetic construct
  source 1..75: mol_type = other DNA
cgcgttgagccttccatcgacaacgaagagcagcatattgccgaaatggcggcctttttccgtgagcaggtggag

SEQ ID NO: 776058 - DNA, 75 bp, synthetic construct
  source 1..75: mol_type = other DNA
ggcgtcgtttaagtaccgacaaagccagctgcctcaaccgcaactgttactactatcgcgaatgcccgttttttg

SEQ ID NO: 776059 - DNA, 75 bp, synthetic construct
  source 1..75: mol_type = other DNA
gtttaacctgattcagcaggttgggcgactgattcgaagccacggttgctggggcgaagtggtgatttacgataa

SEQ ID NO: 776060 - DNA, 75 bp, synthetic construct
  source 1..75: mol_type = other DNA
tcccgatacgcttcgccagcttattcttgaacgtattcagaatctcacccactacgagccggtgattggtatcat

SEQ ID NO: 776061 - DNA, 75 bp, synthetic construct
  source 1..75: mol_type = other DNA
atttttccgacagtaaccagcgtcatgaagtctcacttgagggtcaggaacgcatctggtcttcaccatatttga

SEQ ID NO: 776062 - DNA, 75 bp, synthetic construct
  source 1..75: mol_type = other DNA
ctggaacgcctctctcaccgcgttccattacgggcaatgaaaaatggtgttacaggcaacagtgctcaggcttat

SEQ ID NO: 776063 - DNA, 75 bp, synthetic construct
  source 1..75: mol_type = other DNA
tttgaggcaagtcatttgttatggcgtagctatgaaaatagctgggagcaaatcttcagcgcaggtgttggtgcc

SEQ ID NO: 776064 - DNA, 75 bp, synthetic construct
  source 1..75: mol_type = other DNA
gtgaaattcgcggcgaccttgccggagggttagttcaggccataaaaattgtcagaagtcgttctgaaatgacaa

SEQ ID NO: 776065 - DNA, 75 bp, synthetic construct
  source 1..75: mol_type = other DNA
cttaacgagcttgatctcgatgtcgaggccgacctttgcgagaaactccacgatgatgcggagcatcttttccgt

SEQ ID NO: 776066 - DNA, 75 bp, synthetic construct
  source 1..75: mol_type = other DNA
aaactccacgatgatgcggagcatcttttccgtacactgtcctcgagattggatgcattacaggatggtaactga

SEQ ID NO: 776067 - DNA, 75 bp, synthetic construct
  source 1..75: mol_type = other DNA
ggcgtatgctgccggagctggacctggtgttgtgggtcattaaggccgatgaccgggcgctgtcggtggacgagc

SEQ ID NO: 776068 - DNA, 75 bp, synthetic construct
  source 1..75: mol_type = other DNA
tcgctctgtaatgaactattccggggggaagtctcccccgtcagtgatgtgaacgcctgtactcgtgaggtgctg

SEQ ID NO: 776069 - DNA, 75 bp, synthetic construct
  source 1..75: mol_type = other DNA
gaaaaaggtgattcgtaccgtgcgtgatgcggtggtgtcggtcgcacgagccgtctgggactggatattcttctg

SEQ ID NO: 776070 - DNA, 75 bp, synthetic construct
  source 1..75: mol_type = other DNA
caagatcccggcgttgtacgtttaaaacgtgcggttgatgtacataatcttgcagagcttcgtatcgctggctca

SEQ ID NO: 776071 - DNA, 75 bp, synthetic construct
  source 1..75: mol_type = other DNA
cggttcattcggcagctggtgtgcagatctgaatttgcattgtatcaccgctgaattcccacccatctcttctga

SEQ ID NO: 776072 - DNA, 75 bp, synthetic construct
  source 1..75: mol_type = other DNA
aacgcggcgcatttccgcccggaacagaacattacggacgttcattattgggcgcgccgttaatctggtttccgg

SEQ ID NO: 776073 - DNA, 75 bp, synthetic construct
  source 1..75: mol_type = other DNA
atgcgcttctggggccgaacggagccgggaaatcgaccaccatcggtattattagctcgctggtgaataaaacct

SEQ ID NO: 776074 - DNA, 75 bp, synthetic construct
  source 1..75: mol_type = other DNA
ttgcaggtcgaagcgggtgatttttatgcgcttctcgggccgaacggggccgggaaatcgaccactattggtatt

SEQ ID NO: 776075 - DNA, 75 bp, synthetic construct
  source 1..75: mol_type = other DNA
aagctgaaatcggaaacctttattctcgatctggcaccgaaaagcccgttgccgaagctcgatggctatcagtat

SEQ ID NO: 776076 - DNA, 75 bp, synthetic construct
  source 1..75: mol_type = other DNA
cgataacgacacggtcattcttgatggtgaaacaggccgtttgtggctacagccggatgaggtcacccgcctgga

SEQ ID NO: 776077 - DNA, 75 bp, synthetic construct
  source 1..75: mol_type = other DNA
agaacaatattgtcaggcagagacactgtatttacgtgaacgcgaggcggatatccgcgatcttacgcgccaggt

SEQ ID NO: 776078 - DNA, 75 bp, synthetic construct
  source 1..75: mol_type = other DNA
atgaacgcttatgaactccaggcacttcgccatatttttgccatgactattgatgaatgcgcgacctggattgcc

SEQ ID NO: 776079 - DNA, 75 bp, synthetic construct
  source 1..75: mol_type = other DNA
atcggcgctatcgttgcttttatggaccacagccatgtgcaggtgacatttttagtcgaaaaactttcacccgcc

SEQ ID NO: 776080 - DNA, 75 bp, synthetic construct
  source 1..75: mol_type = other DNA
agggcggtgcggctaaaaaagagttttccatgacgtacacaacgccagcaacgctcgatttagtatcgctgactg

SEQ ID NO: 776081 - DNA, 75 bp, synthetic construct
  source 1..75: mol_type = other DNA
attcgggaccgaggaggaccgggactggactatcaacacactgagtctgacgctcgctgaaaacggtttttcggt

SEQ ID NO: 776082 - DNA, 75 bp, synthetic construct
  source 1..75: mol_type = other DNA
tttggccgtgacaagccggctttcatcattgcccgtcctggcaatggtgaagcgccatccagcaatggtgtgaca

SEQ ID NO: 776083 - DNA, 75 bp, synthetic construct
  source 1..75: mol_type = other DNA
gttgagggatattgcggttcagtaccacggaacgcagcaattgcgggagaagattgccagagcagtgaacaactc

SEQ ID NO: 776084 - DNA, 75 bp, synthetic construct
  source 1..75: mol_type = other DNA
cgcaatccccactagcctgattatcgcattgctggaattgcgccatttataccggcagttaacaagtgcccccag

SEQ ID NO: 776085 - DNA, 75 bp, synthetic construct
  source 1..75: mol_type = other DNA
ctggcgaatattggtgatctgcaagacattgatgccgcactatctcacggcgctgagggcgtgggtttactgcgt

SEQ ID NO: 776086 - DNA, 75 bp, synthetic construct
  source 1..75: mol_type = other DNA
gagtatccagtgagattgcaaggtatcgatgaatcatatgcttcacaattaatgagaatattggcaaaaataaga

SEQ ID NO: 776087 - DNA, 75 bp, synthetic construct
  source 1..75: mol_type = other DNA
attcaaagttgattatgagaaattttgcgggattttacgcagagtgaaacctgatataccacccaatcaggcaac

SEQ ID NO: 776088 - DNA, 75 bp, synthetic construct
  source 1..75: mol_type = other DNA
atgaaacattttatagcaacagcagtcatggcatcatcccttcttttcggctctaatgctctggctgcctcatcg

SEQ ID NO: 776089 - DNA, 75 bp, synthetic construct
  source 1..75: mol_type = other DNA
aaccggatgcggcgctggtgcagcatacgcgccagcagccgcaggacagctacgtgctggcagatgtgctggcgg

SEQ ID NO: 776090 - DNA, 75 bp, synthetic construct
  source 1..75: mol_type = other DNA
tcttctggtgcatgacgcgcctgtttacccgacgacacgggttattattgagcagatggggctgacgcttattac

SEQ ID NO: 776091 - DNA, 75 bp, synthetic construct
  source 1..75: mol_type = other DNA
aaaatgttctttcactcatagaattagatattaaaaactctagtgaacataatataaaaatatttaaagatacac

SEQ ID NO: 776092 - DNA, 75 bp, synthetic construct
  source 1..75: mol_type = other DNA
acacaaattgatgccagtgctgctgagaagactgggatggtgaatgtgcagcggctggagtttggacgggggtaa

SEQ ID NO: 776093 - DNA, 75 bp, synthetic construct
  source 1..75: mol_type = other DNA
tggtgtttaatgacctgctgaactggttaaacgcgctggatgaaaagtatgcgctgcgggtgacacaaattgatg

SEQ ID NO: 776094 - DNA, 75 bp, synthetic construct
  source 1..75: mol_type = other DNA
acaccagactgaggagcgccgcgccggatattattgcggcgcgaaaatccgccacaacaacgcctgcgcaggtat

SEQ ID NO: 776095 - DNA, 75 bp, synthetic construct
  source 1..75: mol_type = other DNA
attttcagcaatggcgtgaacgccagttaagccgtggcgaacactggctggcacaacacctggcggggcgttcgc

SEQ ID NO: 776096 - DNA, 75 bp, synthetic construct
  source 1..75: mol_type = other DNA
gcgctgcgggtgacacaaattgatgtcagtgcagatgaaaaggctggaatggtgaacgtgcagcggctggagttt

SEQ ID NO: 776097 - DNA, 75 bp, synthetic construct
  source 1..75: mol_type = other DNA
ggatattacgtcctcatctggcagccgttgagcgaacggattgagcaacaggagacgatgttgcagcagctggtg

SEQ ID NO: 776098 - DNA, 75 bp, synthetic construct
  source 1..75: mol_type = other DNA
tgcgccgggaagccgctggtgatatcaggcgcgtgaacaaagttaaacaaaaaaaggtggaaaccaatgaccgtt

SEQ ID NO: 776099 - DNA, 75 bp, synthetic construct
  source 1..75: mol_type = other DNA
ccgggatggatgaaccattcagtttcatggcaacagttggcggagtaaacattcaggcaactctgccatataata

SEQ ID NO: 776100 - DNA, 75 bp, synthetic construct
  source 1..75: mol_type = other DNA
gctattgatggagtggctccggcgggtaaaaacggagccgacgaagccacttacgtttatctgaacggcacgcga

SEQ ID NO: 776101 - DNA, 75 bp, synthetic construct
  source 1..75: mol_type = other DNA
cacagcttattgttattgattattattatcatgctgtggttatgttgtcatgcatcagtacactgacaaaagtgc

SEQ ID NO: 776102 - DNA, 75 bp, synthetic construct
  source 1..75: mol_type = other DNA
tggactggatagcacttggtatttacggtgttgaaagacctttactacaggtttcagaggaggctattgcgcgcg

SEQ ID NO: 776103 - DNA, 75 bp, synthetic construct
  source 1..75: mol_type = other DNA
cacggccagaatcggagaatatgaaacattcgcccgcgttccgtttaatctgtatgcaaatcgttattacctgga

SEQ ID NO: 776104 - DNA, 75 bp, synthetic construct
  source 1..75: mol_type = other DNA
atgctgtgccgcaatatcggcattattcaacacggtgagctggtggaaaatacttcgatgaaggcgctgctggcg

SEQ ID NO: 776105 - DNA, 75 bp, synthetic construct
  source 1..75: mol_type = other DNA
ggagaacgcaggccccctttatttcatcgtggacgactgctaccgcgtggacttcacaccacacggtctggccct

SEQ ID NO: 776106 - DNA, 75 bp, synthetic construct
  source 1..75: mol_type = other DNA
gcctcgctgagtgaatacaccgctgaatttaaccgcctttccaccatcttcttgcaggagtggcagcgcgtgacg

SEQ ID NO: 776107 - DNA, 75 bp, synthetic construct
  source 1..75: mol_type = other DNA
acttcacaccacacggactggcgttgcactgcctgacaccgcacggcgaatcactgctggcgtattacgactccc

SEQ ID NO: 776108 - DNA, 75 bp, synthetic construct
  source 1..75: mol_type = other DNA
aagttgaagtgctgcgtgagcaggggatcaacagcgtatttacgcagttaagtgagcagggcattcaggtattaa

SEQ ID NO: 776109 - DNA, 75 bp, synthetic construct
  source 1..75: mol_type = other DNA
ggttcttacatgattaatacccttcatttcaccggcgctaatgttggcatggtttacagttccaaagggatcgcc

SEQ ID NO: 776110 - DNA, 75 bp, synthetic construct
  source 1..75: mol_type = other DNA
atgtttgtcaaacctgttaaagggcggtcagtgcctgaccctgcccgcggcgaccttttgcccgccgaagggcga

SEQ ID NO: 776111 - DNA, 75 bp, synthetic construct
  source 1..75: mol_type = other DNA
aaaaatcagcttctcctcggcaaccacttcttcagagaggaagcagacggaagaaatatataaattaaattcacc

SEQ ID NO: 776112 - DNA, 75 bp, synthetic construct
  source 1..75: mol_type = other DNA
ttttcgaggtattttagctggagttggcgctcttggtagtacattggctgatatttggattcgaatggggtgggg

SEQ ID NO: 776113 - DNA, 75 bp, synthetic construct
  source 1..75: mol_type = other DNA
atgtttgtgaaacctgttaaagggcggtcagttcctgaccctgcccgtggcgaccttttgcccgccgaggggcga

SEQ ID NO: 776114 - DNA, 75 bp, synthetic construct
  source 1..75: mol_type = other DNA
tgctccttttcatctgttttcttccggcacacacgcaggctgccatgcaaccctctgcgggaatgtgtttttcca

SEQ ID NO: 776115 - DNA, 75 bp, synthetic construct
  source 1..75: mol_type = other DNA
gccggaaagctggtttattccggctgatgcactgcaaggtatggtgctgggttatttgagtcatattcttgccga

SEQ ID NO: 776116 - DNA, 75 bp, synthetic construct
  source 1..75: mol_type = other DNA
gcgctgcgggtgacacaaattgatgtcagcgtaggtgagaagccagggatggtgaatgtgcagcggctggaattt

SEQ ID NO: 776117 - DNA, 75 bp, synthetic construct
  source 1..75: mol_type = other DNA
tgcgtcattgctgctgtcggtgaaccgccccgggtttcctggagagtgttttatctgtgaactcaggctgccaga

SEQ ID NO: 776118 - DNA, 75 bp, synthetic construct
  source 1..75: mol_type = other DNA
ggatatgatgttttgggtgatgttagtcaatgcgatggcgtttatgccgactattgcgttatcgaacagcgtctc

SEQ ID NO: 776119 - DNA, 75 bp, synthetic construct
  source 1..75: mol_type = other DNA
tcggaatatctaatcattgatgctgctgatgggactgtggcttctggtaatcaagctcgtattcgtcgtaaagaa

SEQ ID NO: 776120 - DNA, 75 bp, synthetic construct
  source 1..75: mol_type = other DNA
tttgagcgcatacgtggacgattacatcctaccgtgcaaggactgcgcctgtttgaagaagtgcaacgatcctgg

SEQ ID NO: 776121 - DNA, 75 bp, synthetic construct
  source 1..75: mol_type = other DNA
aaaatccgccacaacaacgcctgcacaggtatcgcgggtcatcagcgatagtgcttctgcgcactcagtggttat

SEQ ID NO: 776122 - DNA, 75 bp, synthetic construct
  source 1..75: mol_type = other DNA
gcgttgacgctgacctcaagcacgcctttcttagggctgctaaagcgaacgatcgctcggcctccgtgcttatcc

SEQ ID NO: 776123 - DNA, 75 bp, synthetic construct
  source 1..75: mol_type = other DNA
tgggtacgctccggtagcgcggcgcagggcttccagttgcttgatgaagccgagctgaaatcgctgctggaagat

SEQ ID NO: 776124 - DNA, 75 bp, synthetic construct
  source 1..75: mol_type = other DNA
ttcatcctgatgaccggtgaactggcagcattaatccaaaacctgatcgaaggattaggtggcgaagcacaacgt

SEQ ID NO: 776125 - DNA, 75 bp, synthetic construct
  source 1..75: mol_type = other DNA
atgctgcgttttatcacggtgctggtcagtgctttattacttatgcaatccgcatttgccgacgaagcccgatcg

SEQ ID NO: 776126 - DNA, 75 bp, synthetic construct
  source 1..75: mol_type = other DNA
cagagtggctcccgaccgtaaatccggcagccgggaatggtggcaactgtttcgtctggtctctcagtggcacgg

SEQ ID NO: 776127 - DNA, 75 bp, synthetic construct
  source 1..75: mol_type = other DNA
gaaacgtcagcggcgtgacctgctgctggaagaggtgctgaaacaggcgggtatcccgctgttgcgtggcgataa

SEQ ID NO: 776128 - DNA, 75 bp, synthetic construct
  source 1..75: mol_type = other DNA
tggactggaaatggttcttcatctacccggaacaaggcattgctaccgtaaatgaaatcgctttcccggcgaaca

SEQ ID NO: 776129 - DNA, 75 bp, synthetic construct
  source 1..75: mol_type = other DNA
taacgccggaagattttcagggtgagaattacatcagcctttcccgtactgatagctatcgccagttgttggatc

SEQ ID NO: 776130 - DNA, 75 bp, synthetic construct
  source 1..75: mol_type = other DNA
gacagctatcgccagttgctggatcaattgtttactgagaatcaggttaaacgacgcatgatcgtagaaacccac

SEQ ID NO: 776131 - DNA, 75 bp, synthetic construct
  source 1..75: mol_type = other DNA
agcagcgcgttcagtttgtgatgtgtgacgatggttcgcttaagcgcctgaagttctgcgacgaactgcgagatc

SEQ ID NO: 776132 - DNA, 75 bp, synthetic construct
  source 1..75: mol_type = other DNA
caacgtgaaaccagacttgtttgccgatgtgattaacaagtttatggctcacggtaagagcatgaacatgaccca

SEQ ID NO: 776133 - DNA, 75 bp, synthetic construct
  source 1..75: mol_type = other DNA
tgggggccttattacttatgcaatctgcgttcgccgatacggcccgaccggaaatcggtaagtatgtttttggtt

SEQ ID NO: 776134 - DNA, 75 bp, synthetic construct
  source 1..75: mol_type = other DNA
aatcaaccatttgggacagtatttaaagtttatttccccgagttttatgatatcattcgtatgcttcaacccgat

SEQ ID NO: 776135 - DNA, 75 bp, synthetic construct
  source 1..75: mol_type = other DNA
catttttaatggaaagtcaatggcattaactgactatagccacttcaatgttgaaacatacaaacaaactttaaa

SEQ ID NO: 776136 - DNA, 75 bp, synthetic construct
  source 1..75: mol_type = other DNA
aaacgtatctcaatctattaattacaatatccaggcgagaatatattactccttttgtttttattgatgaaccag

SEQ ID NO: 776137 - DNA, 75 bp, synthetic construct
  source 1..75: mol_type = other DNA
ttgtaggccagataagacgcgtcagcgtcgcatctggcataaacaaagcgcactttgcgggtcttttcccctcac

SEQ ID NO: 776138 - DNA, 75 bp, synthetic construct
  source 1..75: mol_type = other DNA
tgaccacgcaaaaatacctgcatagtccacgaggcatttttgaactgaagtatttcttttccagtcacgtcaata

SEQ ID NO: 776139 - DNA, 75 bp, synthetic construct
  source 1..75: mol_type = other DNA
cgctgtcccgtaatgtggctgatgccagctatctgcagcaggtggcggaatcattgatgtttctgcgacttaatg

SEQ ID NO: 776140 - DNA, 75 bp, synthetic construct
  source 1..75: mol_type = other DNA
tacgttggtcaggaggcgcgctttggcggcaaagtggtcgcggtgcaaaaccaacaagggaaaacccgtctggaa

SEQ ID NO: 776141 - DNA, 75 bp, synthetic construct
  source 1..75: mol_type = other DNA
aggtggttttgttatttcggatttgacgcacacgaaggataatgaagttatgtccggtacatggttctttaagaa

SEQ ID NO: 776142 - DNA, 75 bp, synthetic construct
  source 1..75: mol_type = other DNA
tcagtgctttattacttatgcaatcggcgtttgccgatacagcccgaccggaaattggtaagtatgtctttggtt

SEQ ID NO: 776143 - DNA, 75 bp, synthetic construct
  source 1..75: mol_type = other DNA
ccagcgtattcaaactcttcaataccttacatgtatttatttgatgccgataaggccatatctttaaaaggtgtg

SEQ ID NO: 776144 - DNA, 75 bp, synthetic construct
  source 1..75: mol_type = other DNA
caatctggtgctgggggataacgggccgatcattctgccgccgaacgccattgcttcgtttggcagcgacggcac

SEQ ID NO: 776145 - DNA, 75 bp, synthetic construct
  source 1..75: mol_type = other DNA
ataaatttatggttatgcaggtaacgggctataagcgttggcatttaacccagcaggtgattatgccgccgcagc

SEQ ID NO: 776146 - DNA, 75 bp, synthetic construct
  source 1..75: mol_type = other DNA
ggattatgcggcaagcggtttagtggtgcggcggttcagtattgcggttccgttcaccgtcagcctgatccgccc

SEQ ID NO: 776147 - DNA, 75 bp, synthetic construct
  source 1..75: mol_type = other DNA
ataaatttatggtgatgcaagtaacgggttacaaacgttggcatttaacccagcaggtgattatgccgcctcagc

SEQ ID NO: 776148 - DNA, 75 bp, synthetic construct
  source 1..75: mol_type = other DNA
ctggggccgctagtactggtcgccctgggcttctccggtgcttggatcggcaacctgacggtgctggaaccctat

SEQ ID NO: 776149 - DNA, 75 bp, synthetic construct
  source 1..75: mol_type = other DNA
atatgtgtttttaacaagcgttttaaaaattattgttctgaatctgaacgttataagtttatgtcatttaccagg

SEQ ID NO: 776150 - DNA, 75 bp, synthetic construct
  source 1..75: mol_type = other DNA
tcggttgtctacgctaaaacgctatgttgcggctttaggtggggaattgagtatcgacgttaaactgccgaatgg

SEQ ID NO: 776151 - DNA, 75 bp, synthetic construct
  source 1..75: mol_type = other DNA
tacgttggtcaggaggcacgctttggcggcaaagtggttgcggtacaaaaccagcaagggaaaacccgcctggaa

SEQ ID NO: 776152 - DNA, 75 bp, synthetic construct
  source 1..75: mol_type = other DNA
aaggcatactggcaggtacgtttgcgctaatgctgagcggttgtgttactgtgccggacgccattaaaggcagca

SEQ ID NO: 776153 - DNA, 75 bp, synthetic construct
  source 1..75: mol_type = other DNA
cgcgtgctgaaagaaaccaacggcgtggttgccgggcctaaaggcgctgcgcaacgtctggggctgaaacgcacg

SEQ ID NO: 776154 - DNA, 75 bp, synthetic construct
  source 1..75: mol_type = other DNA
ctgcccaccagcctcgttatcgcattctttgaactgcgtcatttatatcaactcatcacgcgtagcaattctcta

SEQ ID NO: 776155 - DNA, 75 bp, synthetic construct
  source 1..75: mol_type = other DNA
cgttctataaaattcaaaaatgtggttactaccgttacggtgttgtaagccctgcatttggtggttgtgacgagt

SEQ ID NO: 776156 - DNA, 75 bp, synthetic construct
  source 1..75: mol_type = other DNA
ttttgccagcatcattattcttatctgtataattaaaaagacatatgcaaacagagttgtttttattcaacgaaa

SEQ ID NO: 776157 - DNA, 75 bp, synthetic construct
  source 1..75: mol_type = other DNA
atgagtaaccagacagttcgatgccccttctgctttaaggaaagtccccacggcgtaaaaatatgcaccggatgc

SEQ ID NO: 776158 - DNA, 75 bp, synthetic construct
  source 1..75: mol_type = other DNA
cgtctggggctaaaacgcaccaccctgctgtcacggatgaaacggctgggaattgataaagcggcgttggtttaa

SEQ ID NO: 776159 - DNA, 75 bp, synthetic construct
  source 1..75: mol_type = other DNA
gtcagcccttatcgacagctatctgtccgcccgttacacgctgccgctggaggttattccggccgttcttgttca

SEQ ID NO: 776160 - DNA, 75 bp, synthetic construct
  source 1..75: mol_type = other DNA
gtggtgaaaatcagaaaactgaacaatgcatacaggaatttcaagttacgaatcaattcaagaaaatgatgaagg

SEQ ID NO: 776161 - DNA, 75 bp, synthetic construct
  source 1..75: mol_type = other DNA
acatcattaggtatcactggaaaagctaaagaagctttgtcaagattatttgagaaagagcaagatgatgacaac

SEQ ID NO: 776162 - DNA, 75 bp, synthetic construct
  source 1..75: mol_type = other DNA
aagatttccccaaaaaagtacaaacttcgctatttgaagtagattgtaatgacggatactcatttgtagatgtct

SEQ ID NO: 776163 - DNA, 75 bp, synthetic construct
  source 1..75: mol_type = other DNA
taccgcagctcctgcaaccctttctggcacgttatcccgatgtcagcttaaatatcgtgccccaggaatcaccgc

SEQ ID NO: 776164 - DNA, 75 bp, synthetic construct
  source 1..75: mol_type = other DNA
atcctaccgtgcaaggactgcgtctgtttgaagaagtgcaacgatcctggtacggactggatcgcattgtcagcg

SEQ ID NO: 776165 - DNA, 75 bp, synthetic construct
  source 1..75: mol_type = other DNA
gtgcatttgatatgcaccactgccagggtggatcgtagttttggcgatattccgttagttcacggcatgcctttt

SEQ ID NO: 776166 - DNA, 75 bp, synthetic construct
  source 1..75: mol_type = other DNA
cgcttcggttgctgggcttgccaggctgttgggttggataagtcaatggagacgttgcttgccacggaccctgaa

SEQ ID NO: 776167 - DNA, 75 bp, synthetic construct
  source 1..75: mol_type = other DNA
gatttaaaaatcacctctgccaaaagagcgaaggcagcttatatgcgagagcttcccaaagaggttcgacagaaa

SEQ ID NO: 776168 - DNA, 75 bp, synthetic construct
  source 1..75: mol_type = other DNA
gtgtgcctccttttggggagccgtgatgctgaaagcgctattcgtgcagccaacattgcaaagcagcgaggaagc

SEQ ID NO: 776169 - DNA, 75 bp, synthetic construct
  source 1..75: mol_type = other DNA
cgccggcaacgctgggtttaaaagccagtcgctcggcaaattatcagcgcaaaaaacaaggttttttatgcgcgc

SEQ ID NO: 776170 - DNA, 75 bp, synthetic construct
  source 1..75: mol_type = other DNA
tggagcgacatgtcagaacgatgatcaaggcggttcaacgcttacatcgccgcgacgacacagagttgcaaagag

SEQ ID NO: 776171 - DNA, 75 bp, synthetic construct
  source 1..75: mol_type = other DNA
atgaagtgaaagtcgatcccgactccgctgcgttcatcatctggaacgaatacccgcgactaagggagtctgtac

SEQ ID NO: 776172 - DNA, 75 bp, synthetic construct
  source 1..75: mol_type = other DNA
aatatcctactattgcaccgccggcagtgacgatctccgctacctatcccggtgctgatgcgaaaacggtgcagg

SEQ ID NO: 776173 - DNA, 75 bp, synthetic construct
  source 1..75: mol_type = other DNA
caacggttggctccggtgttcagcagattggcggtcttgggttcaatggcggaacgctgatttttggttccgtta

SEQ ID NO: 776174 - DNA, 75 bp, synthetic construct
  source 1..75: mol_type = other DNA
ctcagggtaactatggtattgcagctacggacgccggcgtggttgatgttacaaatagcggtactattactattg

SEQ ID NO: 776175 - DNA, 75 bp, synthetic construct
  source 1..75: mol_type = other DNA
caatgctgatcatactggcgcgctggggatcggtgatgtggcaaactacgctacgttgaatctgaatgctgcggg

SEQ ID NO: 776176 - DNA, 75 bp, synthetic construct
  source 1..75: mol_type = other DNA
gcatgtcggtgggcagtctgacggtaacttcagactgcagaaccgcgcggtggcaggggcatgggaatatttcct

SEQ ID NO: 776177 - DNA, 75 bp, synthetic construct
  source 1..75: mol_type = other DNA
gtggggttttatgtctacggtgatggttccaccattcataataccgggaacagtgttatggatgtttccaccgaa

SEQ ID NO: 776178 - DNA, 75 bp, synthetic construct
  source 1..75: mol_type = other DNA
gctctgttgcgattgaggttgcgcaaggggcaacccgtgttattaatgaagggacaattctcctgggggaagggg

SEQ ID NO: 776179 - DNA, 75 bp, synthetic construct
  source 1..75: mol_type = other DNA
atgtctgaaatcacagtctcccgtccggaagtggtcaacgggcatacggacgttatttgctcagccagtatccgc

SEQ ID NO: 776180 - DNA, 75 bp, synthetic construct
  source 1..75: mol_type = other DNA
atgattagggaagcgcaacgttcagaactccccgcgatcctcgaactgtggctggaaagtacaacctggggccat

SEQ ID NO: 776181 - DNA, 75 bp, synthetic construct
  source 1..75: mol_type = other DNA
gtatcggtaaggctttgatgcaacatatgcaacagcgccatcctcatttattgctggaggtttaccagaaaaacc

SEQ ID NO: 776182 - DNA, 75 bp, synthetic construct
  source 1..75: mol_type = other DNA
gcgtcactggctgggatggcaaaaccctgactaaagcgggcgacggcacacttacccttaatgttgccaacacct

SEQ ID NO: 776183 - DNA, 75 bp, synthetic construct
  source 1..75: mol_type = other DNA
tacaggtctgacagatatcacaattggccagatttcagaaccagaagaagaaagtgtgaatattctctatgcgga

SEQ ID NO: 776184 - DNA, 75 bp, synthetic construct
  source 1..75: mol_type = other DNA
attaaccaaaaaatcagccgcaggaaaagcatctgttcaggccagaagaagcagaaaggaagcagatgttcaaac

SEQ ID NO: 776185 - DNA, 75 bp, synthetic construct
  source 1..75: mol_type = other DNA
atccggattgatttatgtcaataccggagaaaaaacaaaaaccattaaagtattggatgaaactactggcgcata

SEQ ID NO: 776186 - DNA, 75 bp, synthetic construct
  source 1..75: mol_type = other DNA
ggctacaaaatcgcacaacgacttggcggatatcgtgccgtcgggccattgatacaaggacttgccgcgccgatg

SEQ ID NO: 776187 - DNA, 75 bp, synthetic construct
  source 1..75: mol_type = other DNA
aggacttgccgcgccgatgcacgatctctctcgtggttgtagcgtgcaggaaattatcgaactggcgctggtggc

SEQ ID NO: 776188 - DNA, 75 bp, synthetic construct
  source 1..75: mol_type = other DNA
caatggtcagcgccggtaaagcggatgtctgtatcgcgggcaacctctcttccacggcaaatgtgctgcgtgccg

SEQ ID NO: 776189 - DNA, 75 bp, synthetic construct
  source 1..75: mol_type = other DNA
gtctgtcggttattgccttttgtccctttcgatccaatcagctatgctgccggtttgacttcaatacgttttcgc

SEQ ID NO: 776190 - DNA, 75 bp, synthetic construct
  source 1..75: mol_type = other DNA
ttctggtttgtcaccggactgtttattctgtttgccctgaccgtggtgatttttatggcgaagaaaatatggctt

SEQ ID NO: 776191 - DNA, 75 bp, synthetic construct
  source 1..75: mol_type = other DNA
ggcggtactttctggtttgtcaccggactgtttattctgtttgccctgaccgtggtgatttttatggcgaagaaa

SEQ ID NO: 776192 - DNA, 75 bp, synthetic construct
  source 1..75: mol_type = other DNA
gacggtaacttcagactggagaatcgtgctgtggccggggcatgggaatatttcctgcataaaggtaatgcgggt

SEQ ID NO: 776193 - DNA, 75 bp, synthetic construct
  source 1..75: mol_type = other DNA
ataacctgaatgtctggggcaatgttggtgttcaggctggcgataaagggtacagtgatgcccaggcaatgctgg

SEQ ID NO: 776194 - DNA, 75 bp, synthetic construct
  source 1..75: mol_type = other DNA
tgaatttagtaaggcccttattgtcactaagcataattacaatgtggatatgactgctgggggacgcatagactc

SEQ ID NO: 776195 - DNA, 75 bp, synthetic construct
  source 1..75: mol_type = other DNA
ccgttacgatattgcactggaaaatcaacacacgctcagcctgacgccacaggcacaggtcgtctggcagcgtta

SEQ ID NO: 776196 - DNA, 75 bp, synthetic construct
  source 1..75: mol_type = other DNA
ccatcaacatagaacaaggcgcccaggtaattagcgagacgaccaaccttggccgcggggatatcgtggttgacg

SEQ ID NO: 776197 - DNA, 75 bp, synthetic construct
  source 1..75: mol_type = other DNA
agtgtcctgagtatcaatcttgggacggatgccagcagtccgatcattaccgctcatgacgcctcgctgggtggc

SEQ ID NO: 776198 - DNA, 75 bp, synthetic construct
  source 1..75: mol_type = other DNA
cggaagtggtcaacgggcatacggacgttatttgctcagtcagtatccgccacattctggctgtacgaaagagta

SEQ ID NO: 776199 - DNA, 75 bp, synthetic construct
  source 1..75: mol_type = other DNA
atggcatgacatggacacatcaggcaccgtccgggtgtgtatataccggcattattgttcaggataccggctcaa

SEQ ID NO: 776200 - DNA, 75 bp, synthetic construct
  source 1..75: mol_type = other DNA
tttactcagttaagcagtgcgatcaacagcacgtctgaaacactggccgcaacgccgaaagcggtaaaggccgcg

SEQ ID NO: 776201 - DNA, 75 bp, synthetic construct
  source 1..75: mol_type = other DNA
gcaatggggttcggaagccttgccgataaagtcaatactatcgcattaggaaattggcagccaggctctggcaga

SEQ ID NO: 776202 - DNA, 75 bp, synthetic construct
  source 1..75: mol_type = other DNA
gaccgttgccgccgttatcgaatacctcggtttacaggaaacggtaaacagggctggtaacgccgtgcaaaaaaa

SEQ ID NO: 776203 - DNA, 75 bp, synthetic construct
  source 1..75: mol_type = other DNA
ttggagcaacaaattcaacaaccatgtcttttagtggtggtacaggatggttcaggctggcaactgtaaccatgc

SEQ ID NO: 776204 - DNA, 75 bp, synthetic construct
  source 1..75: mol_type = other DNA
aggcaggcatctctgagctggttctgcgtgccggaaatgggaatccaaaaggtattactggtgcattatggcgac

SEQ ID NO: 776205 - DNA, 75 bp, synthetic construct
  source 1..75: mol_type = other DNA
taatccactaaaactggttaactgtgacgaactgaattttcaggacagaatgtggatttatatgacacttaattc

SEQ ID NO: 776206 - DNA, 75 bp, synthetic construct
  source 1..75: mol_type = other DNA
attgaactgctggcaacagaaacagacaaatgccgtaatatgaactcagttaatccactaaaactggttggtgat

SEQ ID NO: 776207 - DNA, 75 bp, synthetic construct
  source 1..75: mol_type = other DNA
atgttattgtgccaggaggggcagggtaaggggctgtatcgatatgctttggcaattgcgtgtgccgcagatgga

SEQ ID NO: 776208 - DNA, 75 bp, synthetic construct
  source 1..75: mol_type = other DNA
gagcactatgtgacgacattccgagatgtctcaacgcaggaaggagatgaaagaacgttccagttatacaacccg

SEQ ID NO: 776209 - DNA, 75 bp, synthetic construct
  source 1..75: mol_type = other DNA
gccagatacaccacctgcttcaaagacatcacccctgaccacggggagaacaagacgtggttcatgtacaatccg

SEQ ID NO: 776210 - DNA, 75 bp, synthetic construct
  source 1..75: mol_type = other DNA
acaaatgccgcaatatgaattcggttaatccacttaaactggttaactgtgacgaactggatttctacaacagaa

SEQ ID NO: 776211 - DNA, 75 bp, synthetic construct
  source 1..75: mol_type = other DNA
aaaccgttatcaccgatacgggtgcaaaaaaattagctcaggcagccgcgccagatggtaagccagtccgcctga

SEQ ID NO: 776212 - DNA, 75 bp, synthetic construct
  source 1..75: mol_type = other DNA
catcgaaagcggttaaggcagtaatggatgaaacaaataagaaagccccattaaacagcccggcgctgaccggaa

SEQ ID NO: 776213 - DNA, 75 bp, synthetic construct
  source 1..75: mol_type = other DNA
atgcgttaggtggtagctctattgttcttggtgataatgacaccggatttaaacagaatggagacggtattctgg

SEQ ID NO: 776214 - DNA, 75 bp, synthetic construct
  source 1..75: mol_type = other DNA
acgtcacccggacgcctcgctgaccgcaaaaggctttgttcaactcagtagcgccactaacagcgattctgaaac

SEQ ID NO: 776215 - DNA, 75 bp, synthetic construct
  source 1..75: mol_type = other DNA
cactgctgcaaatcgacacacttatccggcaactggctgaaatctcagttatgacggaaagtattggcggaaaac

SEQ ID NO: 776216 - DNA, 75 bp, synthetic construct
  source 1..75: mol_type = other DNA
atgatgtcagatatcacaatcccccgtccggaagtggtcaacgggcatatggacgttatctgctcaaccagtatc

SEQ ID NO: 776217 - DNA, 75 bp, synthetic construct
  source 1..75: mol_type = other DNA
atgagtaccacaacacgaaaatttaaaaccgttatcaccgatacgggcgcaaaaaaattagctcaggcagccgcg

SEQ ID NO: 776218 - DNA, 75 bp, synthetic construct
  source 1..75: mol_type = other DNA
ctcagtagtgccaccaacagcacgtctgaaacactggccgcgacatcgaaagcggttaaggcggtaatggatgaa

SEQ ID NO: 776219 - DNA, 75 bp, synthetic construct
  source 1..75: mol_type = other DNA
cgtgttaacccctcggattacggtaactttgattctcgttatgtgaaagatgttcgacttggttcacagcaatat

SEQ ID NO: 776220 - DNA, 75 bp, synthetic construct
  source 1..75: mol_type = other DNA
tgatgtcgccagcctggcaaccctgacaaaagtcgggcgggatattcttgcgaaatcgaccgttgccgctgttat

SEQ ID NO: 776221 - DNA, 75 bp, synthetic construct
  source 1..75: mol_type = other DNA
cgcgcttgcgggtaagcaaccgaaagatgccaccctgacggcgctggccgggcttgctactgcggcagacaagtt

SEQ ID NO: 776222 - DNA, 75 bp, synthetic construct
  source 1..75: mol_type = other DNA
aataaattgcctgatttacgcggtgaattcattcgcggctgggatgacgggcgcggtgcggataatggtcgcgtt

SEQ ID NO: 776223 - DNA, 75 bp, synthetic construct
  source 1..75: mol_type = other DNA
cgggagcctcaaagcctaccttcagcagtaagagctgtcagcactcgtggggttgcttctgacaatgcagcgaat

SEQ ID NO: 776224 - DNA, 75 bp, synthetic construct
  source 1..75: mol_type = other DNA
gcagctaacggttccggtattaccgatcagattgcttttcgtattatcggagatggtgcaaccattaaaacgaat

SEQ ID NO: 776225 - DNA, 75 bp, synthetic construct
  source 1..75: mol_type = other DNA
tatccggaaaaatcagtcttgccggtacgggggctgtgggggtttttgctaaagatggcggcagtctgaccctgt

SEQ ID NO: 776226 - DNA, 75 bp, synthetic construct
  source 1..75: mol_type = other DNA
attcgattgacgggttcacctttttcatttcgcctcacggtcagggatgtagactgtctgtcgaacctgaatacc

SEQ ID NO: 776227 - DNA, 75 bp, synthetic construct
  source 1..75: mol_type = other DNA
agatggtgctgtcgtgaagagtggtgcaagtgtcaatgttacacaggccgatggcggttccgctctggtggttaa

SEQ ID NO: 776228 - DNA, 75 bp, synthetic construct
  source 1..75: mol_type = other DNA
gctggcagtgatttccagatcctgggggctcaggctcagggattatatgtaactggtggtgcgacagcgacgctg

SEQ ID NO: 776229 - DNA, 75 bp, synthetic construct
  source 1..75: mol_type = other DNA
atcgcccgtaatggggccactctaaataataccggtaatatcatctttactggaaagaatacagtgggcgtccgg

SEQ ID NO: 776230 - DNA, 75 bp, synthetic construct
  source 1..75: mol_type = other DNA
tctcgcaaaaagggcaattcgttctgcctcctgctcgttatgtgcgttcctatgcacctgcacagcaaagtgttg

SEQ ID NO: 776231 - DNA, 75 bp, synthetic construct
  source 1..75: mol_type = other DNA
agccgcagcaaggggtaaaactggaaggcgcatccagcaatttcatttcgccgcagccgggcaacatctatattc

SEQ ID NO: 776232 - DNA, 75 bp, synthetic construct
  source 1..75: mol_type = other DNA
ggcatttcggtcaataaacccaaccccgcgaaacagcaggggcaattgctggaaaaagcgcgaaatgaaatgggc

SEQ ID NO: 776233 - DNA, 75 bp, synthetic construct
  source 1..75: mol_type = other DNA
aacgagcttgtgctgttgttggtgggcaatcagcaatggccagacttttaggggtatcgcctccaagcgtaaatc

SEQ ID NO: 776234 - DNA, 75 bp, synthetic construct
  source 1..75: mol_type = other DNA
tcatgttattcgcagaatatgtcgatgaagcaaccaaatgacgaaaacgatcatacccgaagcatcaagaggcaa

SEQ ID NO: 776235 - DNA, 75 bp, synthetic construct
  source 1..75: mol_type = other DNA
ctgacagcagttttagcagcagtgaagaggcgaaagtgcgactggaagcgccggggcgtgattatcggcgctatc

SEQ ID NO: 776236 - DNA, 75 bp, synthetic construct
  source 1..75: mol_type = other DNA
ttcctgcagttgcaggcaactttacctttgatccactgttaacaggcaaaggaacactgtctgcccgtcttgatg

SEQ ID NO: 776237 - DNA, 75 bp, synthetic construct
  source 1..75: mol_type = other DNA
ttgcattgaaagagcttgagaggaagttagtccagtctatttctgatcgtaaacgccttattgctcgttacgggg

SEQ ID NO: 776238 - DNA, 75 bp, synthetic construct
  source 1..75: mol_type = other DNA
ttgcattgaaagagcttgagaaaaagttagtccagtctatttctgatcgtaaacaacttattgctcgttacgggg

SEQ ID NO: 776239 - DNA, 75 bp, synthetic construct
  source 1..75: mol_type = other DNA
ttgcgctgaaagagttcgaaagaaagctggtgcaatccatttctgatcgtaaacggctggcggcacgttatgagg

SEQ ID NO: 776240 - DNA, 75 bp, synthetic construct
  source 1..75: mol_type = other DNA
gtcggggaatcgctacagatttctcacggtgcggctatctggctactggtaattttgcttggtctggcgggaatt

SEQ ID NO: 776241 - DNA, 75 bp, synthetic construct
  source 1..75: mol_type = other DNA
tgcgcgtagcattctggaacgtgacgtacgcatcaacagcaacgaagaactggcactgccgaaagagaagttgca

SEQ ID NO: 776242 - DNA, 75 bp, synthetic construct
  source 1..75: mol_type = other DNA
atgaaaaacgaaattaaagatctgcaaattgatattcagcgtgatgagcatgatttagaaacggtacgacaaatc

SEQ ID NO: 776243 - DNA, 75 bp, synthetic construct
  source 1..75: mol_type = other DNA
ttcgacaggtaaactgacaggcgtattgcccgcatatggttatggggctggcatcgttgcgcgcacaggtgctac

SEQ ID NO: 776244 - DNA, 75 bp, synthetic construct
  source 1..75: mol_type = other DNA
ttcagccattaataatggtgttattaatattcgcccatttaaaaatgctttcgctccagaggggattaacaccgc

SEQ ID NO: 776245 - DNA, 75 bp, synthetic construct
  source 1..75: mol_type = other DNA
ggactgtacataggctatgggctgaagtcgctggatttacagggaaccggtgataaagcgctggtgctgacaccg

SEQ ID NO: 776246 - DNA, 75 bp, synthetic construct
  source 1..75: mol_type = other DNA
agtttgcccggaaaagggctgaacactgccaccggcgctgccggggaagggtgtaacgaaaaaagcagctttcat

SEQ ID NO: 776247 - DNA, 75 bp, synthetic construct
  source 1..75: mol_type = other DNA
ctggaagtcagtggacgctggatggaagcggcagaagcatggcgacgggctgccggtgttgcaccccggacagac

SEQ ID NO: 776248 - DNA, 75 bp, synthetic construct
  source 1..75: mol_type = other DNA
ttggcgcaacaggtaatctgaacgtcgccagcaatgccgtcttcagaacaaacggatacagccagactgtcggtg

SEQ ID NO: 776249 - DNA, 75 bp, synthetic construct
  source 1..75: mol_type = other DNA
atatttcgctgacgcagaatattcagcaatctggcttgttaagtgcagaactgcaacaaaatgggcaagtgcagg

SEQ ID NO: 776250 - DNA, 75 bp, synthetic construct
  source 1..75: mol_type = other DNA
atgtgtgaggacgtaccgtgtgccaaagtgtgcccgagtggtgcgctggatcgtgaaatcgaatcgatcgacgac

SEQ ID NO: 776251 - DNA, 75 bp, synthetic construct
  source 1..75: mol_type = other DNA
ccggcaatcaaggtgttgccgttgtctctggcgaaaggggagttaggtcaccactaccgcttcggttggctggag

SEQ ID NO: 776252 - DNA, 75 bp, synthetic construct
  source 1..75: mol_type = other DNA
actccttcttccactggggtatcagcgcctgggctacctatacgctggcctctttaatcatggcctatcactttc

SEQ ID NO: 776253 - DNA, 75 bp, synthetic construct
  source 1..75: mol_type = other DNA
gcctcattaatcatggcttaccactttcatgtgcggaaaaataaagggctgagtctttccggcattattgctgct

SEQ ID NO: 776254 - DNA, 75 bp, synthetic construct
  source 1..75: mol_type = other DNA
atcgtataagcatccgtgccaaggtggagcacccgtttcgcatcatcaagcggcagttcggcttcgtgaaagcca

SEQ ID NO: 776255 - DNA, 75 bp, synthetic construct
  source 1..75: mol_type = other DNA
atgccatcacgcaaaatctggtactaccgtgccgccctcatcatcctgttgtttgctacgctgctcgcatgggcg

SEQ ID NO: 776256 - DNA, 75 bp, synthetic construct
  source 1..75: mol_type = other DNA
accgtacagccatcatcatcctgttgttcgctacgctgctcgcatgggcgctggttcctggcgtccatgacttta

SEQ ID NO: 776257 - DNA, 75 bp, synthetic construct
  source 1..75: mol_type = other DNA
gcacacaggctgcactggtctcattctttttaatgatattacaggccattgttgcgccgcttccggcatttttga

SEQ ID NO: 776258 - DNA, 75 bp, synthetic construct
  source 1..75: mol_type = other DNA
tatgcagcatctgctcaaagaagtagacaaaatgctgcaactgaatgttgacgagcgcccgctaatttgcggtgt

SEQ ID NO: 776259 - DNA, 75 bp, synthetic construct
  source 1..75: mol_type = other DNA
cgttgtctggtgattttgtcgcgtaacgatgaagcgcttaacagccagcggacatctgaagagttgcatcattat

SEQ ID NO: 776260 - DNA, 75 bp, synthetic construct
  source 1..75: mol_type = other DNA
gccaggtgatcttcaaccccaatttgttcccttatgagaacatggaaggaagattgatcgcccggaagagtatgc

SEQ ID NO: 776261 - DNA, 75 bp, synthetic construct
  source 1..75: mol_type = other DNA
aagttctgatgtcgttgccagccggtaaattgttcctcgccgcatacctgggcgtgatgattattttccttgcct

SEQ ID NO: 776262 - DNA, 75 bp, synthetic construct
  source 1..75: mol_type = other DNA
caactgacaatggacaaactggcagccctgtatcgggtttccgccgcccagattcatcatcacctctctgccatt

SEQ ID NO: 776263 - DNA, 75 bp, synthetic construct
  source 1..75: mol_type = other DNA
caaggcgctggaatacccttagcggcggtgaacgccagatggcattaatcgcccgcgccctgcttcagcaaccac

SEQ ID NO: 776264 - DNA, 75 bp, synthetic construct
  source 1..75: mol_type = other DNA
agtaacacaaggcttaccgaccgaacagttaacaacgaacaaactggctgccctgtatcgggtttctgccgacca

SEQ ID NO: 776265 - DNA, 75 bp, synthetic construct
  source 1..75: mol_type = other DNA
ggcggcgtttttgtctccgagaactttttctacgaaagcgaaatctacaacacccgcttgtatatctttaccgat

SEQ ID NO: 776266 - DNA, 75 bp, synthetic construct
  source 1..75: mol_type = other DNA
aaggcaatctttaagtgctcatgatgaagttgttgaagcatatagaacaaagaaaagtttgtccaatttgaaaaa

SEQ ID NO: 776267 - DNA, 75 bp, synthetic construct
  source 1..75: mol_type = other DNA
caatttaatacctcaattattgtatatttaattgaccccaaatactttgctgatctgccgacgtcacagttttgg

SEQ ID NO: 776268 - DNA, 75 bp, synthetic construct
  source 1..75: mol_type = other DNA
cacgacgctggaatacgcttagcggcggtgaacgtcagctggctttaatcgcccgtgcactcgtccagcaaccgc

SEQ ID NO: 776269 - DNA, 75 bp, synthetic construct
  source 1..75: mol_type = other DNA
tgcgcgtagcattctggaacgtgacgtgcgcatcaacagcaacgaagaactggcgctgccgaaagagaagttgca

SEQ ID NO: 776270 - DNA, 75 bp, synthetic construct
  source 1..75: mol_type = other DNA
accattgaatcgttaattgaattaacctgggattgcgcctgtaagcgtccgaagaaatcaacagcgaccaaaggc

SEQ ID NO: 776271 - DNA, 75 bp, synthetic construct
  source 1..75: mol_type = other DNA
tgtttctcaaggcttaccaactgagcaactgacaacagacaaactggcaacgctgtaccgggtttctgccgacca

SEQ ID NO: 776272 - DNA, 75 bp, synthetic construct
  source 1..75: mol_type = other DNA
cagttaacaacaaacaaactggctgccctgtatcgggtttctgccgaccagattcatcatcacctctctgcaatt

SEQ ID NO: 776273 - DNA, 75 bp, synthetic construct
  source 1..75: mol_type = other DNA
gtgactttgcttgccgtccgtcatgcgtctctgggttactcccgccatccggtgctacgcgacgtgtccttcacc

SEQ ID NO: 776274 - DNA, 75 bp, synthetic construct
  source 1..75: mol_type = other DNA
gtcaggatccgctgaccaaacgcgaacgtcaggtagcggaaaagctggcgcaagggatggcggtgaaagagattg

SEQ ID NO: 776275 - DNA, 75 bp, synthetic construct
  source 1..75: mol_type = other DNA
atgatcaccgttgcccttatagacgatcacctcatcgtccgctccggctttgcgcagctgccggggcgcggtgtg

SEQ ID NO: 776276 - DNA, 75 bp, synthetic construct
  source 1..75: mol_type = other DNA
ttcattagactttaataatcattatgagccatcattttatataaaaaatggggaaaaaatatatctaacaacaaa

SEQ ID NO: 776277 - DNA, 75 bp, synthetic construct
  source 1..75: mol_type = other DNA
aaggcagaaggcaagcaaccagaaactatcgccaacatggttgccagcctcaaagataaagacaatcgctctaaa

SEQ ID NO: 776278 - DNA, 75 bp, synthetic construct
  source 1..75: mol_type = other DNA
ctgaatgaatgcaatcttcgcgaaaatgataggtattctcgattattgagaacatatcttttcaggagtatggca

SEQ ID NO: 776279 - DNA, 75 bp, synthetic construct
  source 1..75: mol_type = other DNA
acagaaagtattaaccataaacaaaaagactggcgcagacagttaccagatggaaatccgtattccattcattgc

SEQ ID NO: 776280 - DNA, 75 bp, synthetic construct
  source 1..75: mol_type = other DNA
tctccggcgtcagttggggggcgagcgcgattgttgctaaacgtctgtatgcccgccatccgcgcgtggatttat

SEQ ID NO: 776281 - DNA, 75 bp, synthetic construct
  source 1..75: mol_type = other DNA
tgcttttttcctggtggctgctcggcgagaatcccggcacagttgaaggcagcggtattgtgctgattgtgttgg

SEQ ID NO: 776282 - DNA, 75 bp, synthetic construct
  source 1..75: mol_type = other DNA
gcccgccatccacgtgtggatttattatccctaaccgcctggcagatgctttatgcggcactggtgatgagcgta

SEQ ID NO: 776283 - DNA, 75 bp, synthetic construct
  source 1..75: mol_type = other DNA
tacagcatgaagtataaacaattaagtttagccgatcttgaatcaattgattttgattttggtgtttcaataaac

SEQ ID NO: 776284 - DNA, 75 bp, synthetic construct
  source 1..75: mol_type = other DNA
gaacagaaaaaacattaaaacaaaaggttgcttttgctcaactagaacttaatcgtcttaagtctctggagaaat

SEQ ID NO: 776285 - DNA, 75 bp, synthetic construct
  source 1..75: mol_type = other DNA
tgaaaaccccggcgcggttgaaggcagcggtattgtgctgattgtgctggcactggcgctggtaagccgtaagaa

SEQ ID NO: 776286 - DNA, 75 bp, synthetic construct
  source 1..75: mol_type = other DNA
ggagaatccgacgacggacggaaaatccaatatctcagtgtttgtgttcagaagaatgacggtactgaaaataaa

SEQ ID NO: 776287 - DNA, 75 bp, synthetic construct
  source 1..75: mol_type = other DNA
tgcttgagtggctctccggtgccggcagacaccctgaattccggaacatcccggaagaaatcatggcgctgaagg

SEQ ID NO: 776288 - DNA, 75 bp, synthetic construct
  source 1..75: mol_type = other DNA
atgagcagtccaaatattctcttaacccgtattgataaccgtctggttcacggccaggttggcgtgacctggaca

SEQ ID NO: 776289 - DNA, 75 bp, synthetic construct
  source 1..75: mol_type = other DNA
gtttcattaaacaacgcggcgtgaatgtttttattcaggatgtccccggcgatcaaaaagaacaaatccctgact

SEQ ID NO: 776290 - DNA, 75 bp, synthetic construct
  source 1..75: mol_type = other DNA
gagcatcagttaggcatcgaacgacgcgaaatcctctttcacaccctgtttgtcggccttcccggcctgcctgaa

SEQ ID NO: 776291 - DNA, 75 bp, synthetic construct
  source 1..75: mol_type = other DNA
aggctttcaggtggtgagaggatttgagcatcagttcggcatcgaacgacgcgaaatcctctttcacaccctgtt

SEQ ID NO: 776292 - DNA, 75 bp, synthetic construct
  source 1..75: mol_type = other DNA
gtgaacacaacagaacatcccgtgcgccagttactctggtgcgcccttaatgccctgcatgccgctcaggaaaac

SEQ ID NO: 776293 - DNA, 75 bp, synthetic construct
  source 1..75: mol_type = other DNA
tacagctggtcgcattttaatatcagctggctgtggtatttactcccgagtttgctgctggttcgcccgtttaat

SEQ ID NO: 776294 - DNA, 75 bp, synthetic construct
  source 1..75: mol_type = other DNA
gatatcagcacagcagctgcagaataccctgcagaaagtatcggacctgatagaggctgctgacatatccctgcg

SEQ ID NO: 776295 - DNA, 75 bp, synthetic construct
  source 1..75: mol_type = other DNA
tgccgcctcatcagtacttctgacgatggtaaatatgctttgttgagcagccccggaggttcggcctgttatgac

SEQ ID NO: 776296 - DNA, 75 bp, synthetic construct
  source 1..75: mol_type = other DNA
cagacatcagagccacaggaagaaaggaaagaatcaaaagaaaatgtgcctggtaaatcaggaatgaaagtgact

SEQ ID NO: 776297 - DNA, 75 bp, synthetic construct
  source 1..75: mol_type = other DNA
gctggcgattattttcctctttgactggctgatcggtgaagcacgtatttcccgttctaaagccaaaaaccaggc

SEQ ID NO: 776298 - DNA, 75 bp, synthetic construct
  source 1..75: mol_type = other DNA
tggactacaccctgacgctggataactttatcaagctatttggtcagggaatgagcgacggcgcgtggccttcac

SEQ ID NO: 776299 - DNA, 75 bp, synthetic construct
  source 1..75: mol_type = other DNA
tgagaatccgggggccgttgaaggtagcggtattgtgctgattgtgctggcactggcgctggtgagccgtaagaa

SEQ ID NO: 776300 - DNA, 75 bp, synthetic construct
  source 1..75: mol_type = other DNA
tttggaggtgcaacatgaccgtgttttacaggaaaatatgctaattaaatataatgcgtataaatttggtatcaa

SEQ ID NO: 776301 - DNA, 75 bp, synthetic construct
  source 1..75: mol_type = other DNA
gtcggtaaagcgcaggcgggcgcagacagtgcggatgaaaacgagccgtcattcgggtacaccctgcgccgtaaa

SEQ ID NO: 776302 - DNA, 75 bp, synthetic construct
  source 1..75: mol_type = other DNA
gggcgacaacctgatgctgcattacgtcggtaaagcgcaggcgggcgcagacagtgcggatgaaaacgagccgtc

SEQ ID NO: 776303 - DNA, 75 bp, synthetic construct
  source 1..75: mol_type = other DNA
acgatctggcagcaccggtggattaccgcgaacaggcggagtccatgtttaacgaagagagcaaggccatccgtc

SEQ ID NO: 776304 - DNA, 75 bp, synthetic construct
  source 1..75: mol_type = other DNA
tcggctacaccctgcgtcgtaaggggatgcctgttgccgacaaatacgacggagccggtggcaaggtgaagtact

SEQ ID NO: 776305 - DNA, 75 bp, synthetic construct
  source 1..75: mol_type = other DNA
ccgggcacgtcaaaaaactgacagccagtgatcgctgggtcggtggtaagggggaccccatcggggtgattgaag

SEQ ID NO: 776306 - DNA, 75 bp, synthetic construct
  source 1..75: mol_type = other DNA
gccgccggatgcgctggaaaaacttaccgaccctctgatgttcgccgcagcaatggtcagcgccggtaaagcgga

SEQ ID NO: 776307 - DNA, 75 bp, synthetic construct
  source 1..75: mol_type = other DNA
attatgcagggagaagcctctctgtcgacgctgaatcaaccggaattttatgatccagaaatagtcttctttgca

SEQ ID NO: 776308 - DNA, 75 bp, synthetic construct
  source 1..75: mol_type = other DNA
acggcaaccggttttgactttgagttgattgaccaggccggcctcggtcacgaaaaactgactcaggcacgtaac

SEQ ID NO: 776309 - DNA, 75 bp, synthetic construct
  source 1..75: mol_type = other DNA
ggcgtgtttgcggtctatgagacgaaacgcgccgtgggggctgacagtaacgtcatgatccgcgagaagaccggt

SEQ ID NO: 776310 - DNA, 75 bp, synthetic construct
  source 1..75: mol_type = other DNA
gggcgctttttggcgagaaacctcgtatcttgctggaaaatagtgattttactgtcacgtcttttcgatatgaca

SEQ ID NO: 776311 - DNA, 75 bp, synthetic construct
  source 1..75: mol_type = other DNA
gattacgcattatcggcttgcagccaggctgtaaaacgctctcttccattttcctgatgttgccacagtacagcg

SEQ ID NO: 776312 - DNA, 75 bp, synthetic construct
  source 1..75: mol_type = other DNA
gggacatggcctgatgatggaatcgaaattgacgacactactgccgctgaatttatgaaggaagcaccagaagga

SEQ ID NO: 776313 - DNA, 75 bp, synthetic construct
  source 1..75: mol_type = other DNA
tttaaaaatgttagtactgaggataaggcaaggttcaaattgcgaggaaaaaggtttcttaacaatatttctact

SEQ ID NO: 776314 - DNA, 75 bp, synthetic construct
  source 1..75: mol_type = other DNA
gtctgtttgaagcaacagccgaacagaccaaaaaatttgaagaattaatgcttaactttctgtaccagaaaacaa

SEQ ID NO: 776315 - DNA, 75 bp, synthetic construct
  source 1..75: mol_type = other DNA
accgcgagacgctgttgaaagaggccaacaaaatcattcgtgagcatgaggatacgctcgcagggattgaagcca

SEQ ID NO: 776316 - DNA, 75 bp, synthetic construct
  source 1..75: mol_type = other DNA
attgtgctgattgtgctggcactggcgctggtgagccgtaagaaaaaagaagctgtcagtgtaaaaagcatctga

SEQ ID NO: 776317 - DNA, 75 bp, synthetic construct
  source 1..75: mol_type = other DNA
tcctcgaatattagcattgaagataaagcaaggttaaaattaagaggaaaaatatttcttgaggatatggttggg

SEQ ID NO: 776318 - DNA, 75 bp, synthetic construct
  source 1..75: mol_type = other DNA
ataattttaggtgcggaagttgccaaagctcttgattgtgatgtttttacagttgataaagaacttgttttaggt

SEQ ID NO: 776319 - DNA, 75 bp, synthetic construct
  source 1..75: mol_type = other DNA
gagcgccactggcagacctggaaattcccggacgaaaccccggaatttgccgcacatatcaatgtgaatcaggaa

SEQ ID NO: 776320 - DNA, 75 bp, synthetic construct
  source 1..75: mol_type = other DNA
tggcactgttgcgtccatagtaatgccttatattactatgcgtatatcaaaactaactggtagaaattatgcgca

SEQ ID NO: 776321 - DNA, 75 bp, synthetic construct
  source 1..75: mol_type = other DNA
atgcagaaatatattttcagtgccgataaaaatgcgtttttccctgtggagcttaaaatcgcttatcaggaatac

SEQ ID NO: 776322 - DNA, 75 bp, synthetic construct
  source 1..75: mol_type = other DNA
tgcactgcctcctgcacccatgccgcagattcctccaccacagcagcaggttactcatgttaatccgcagacact

SEQ ID NO: 776323 - DNA, 75 bp, synthetic construct
  source 1..75: mol_type = other DNA
ctcgcggcgctgttcaagtttttgttcgattgttttcatatggcaaaaaaaaggcggcctaatggccgccaatga

SEQ ID NO: 776324 - DNA, 75 bp, synthetic construct
  source 1..75: mol_type = other DNA
tcccgttgccgagcgatcgctcgttctctggctgccttctgccacttgcggcactgttcaattttttgttcgatt

SEQ ID NO: 776325 - DNA, 75 bp, synthetic construct
  source 1..75: mol_type = other DNA
ggtattttccctgggtgtctggttccatattgttgcccgtctggttaacagcaaaccctggatggcatatatcct

SEQ ID NO: 776326 - DNA, 75 bp, synthetic construct
  source 1..75: mol_type = other DNA
taccccggcttgatattacgggaatgtgggtattttccctgggtgtctggtttcatatcgtcgcccgtcttgttc

SEQ ID NO: 776327 - DNA, 75 bp, synthetic construct
  source 1..75: mol_type = other DNA
ccgggaggaaagggaagcgctggaagcccgtcaggccgccattcttgctgcggaaaaggagagcagacatgtctc

SEQ ID NO: 776328 - DNA, 75 bp, synthetic construct
  source 1..75: mol_type = other DNA
gccgttctgacgcgtattagtgcgatcatcgatagcgatgaagtatacgcttttctccgtaagaatttgcagcgc

SEQ ID NO: 776329 - DNA, 75 bp, synthetic construct
  source 1..75: mol_type = other DNA
cgcttgttgtgagtctttgtgattttacgggggcaatggttgccccctggctggaatacggtgtcgatgccgcta

SEQ ID NO: 776330 - DNA, 75 bp, synthetic construct
  source 1..75: mol_type = other DNA
atgataagtaaacacagattctctttaccccgactggatattacggggatgtgggtattttccctgggtgtctgg

SEQ ID NO: 776331 - DNA, 75 bp, synthetic construct
  source 1..75: mol_type = other DNA
ctaccctcatgttctggcgaacttttgtgaaacggtaagagttaaaccgatggtcaaccaggtcgagttgcatcc

SEQ ID NO: 776332 - DNA, 75 bp, synthetic construct
  source 1..75: mol_type = other DNA
tggatacatggatagcccgcgtcagccgggaggaaagggaagcgctggaagcccgtcaggccgccattcttgctg

SEQ ID NO: 776333 - DNA, 75 bp, synthetic construct
  source 1..75: mol_type = other DNA
atggcaaaacatttaaacaggagtgaaataaaaacaattacaaatattatattggcttgggacggcaaaatcaca

SEQ ID NO: 776334 - DNA, 75 bp, synthetic construct
  source 1..75: mol_type = other DNA
gttctgtttggcgcataccagatactggatacatggatagcccgcgtcagccgggaggaaagggaagcgctggaa

SEQ ID NO: 776335 - DNA, 75 bp, synthetic construct
  source 1..75: mol_type = other DNA
gtcagccgggaagagcgtgaggcactggaagccaggcaacaggccatgatggaagggcagcaggagggcggacat

SEQ ID NO: 776336 - DNA, 75 bp, synthetic construct
  source 1..75: mol_type = other DNA
atcttaaaatgccgatggtcggttttggggtttttcaggttaccgataaagaagagtgtaaacagtcggtgttga

SEQ ID NO: 776337 - DNA, 75 bp, synthetic construct
  source 1..75: mol_type = other DNA
tcaccacgtcagtaataaacccggactggtcacattatccccccgaaccttccgggcgcaaatgaaatggctggc

SEQ ID NO: 776338 - DNA, 75 bp, synthetic construct
  source 1..75: mol_type = other DNA
ggatacagtatctgctgagtctggttcccgactgcccgtggcagcatattgtgttcacacttccgtgccaatact

SEQ ID NO: 776339 - DNA, 75 bp, synthetic construct
  source 1..75: mol_type = other DNA
ttcagcagggaaaccgctggcttaactggctggagaagcagccggaaggttcagtgcgtcctgtggtgactgagt

SEQ ID NO: 776340 - DNA, 75 bp, synthetic construct
  source 1..75: mol_type = other DNA
aaatcgattgatcttctaaaagaacaccgcacatcgctgatcaacgcggctgtcacaggaaaaatagacgtcagg

SEQ ID NO: 776341 - DNA, 75 bp, synthetic construct
  source 1..75: mol_type = other DNA
atgcttccccgttttgccgatatttttcagcagggaaaccgctggcttaactggctggagaagcagccggaaggg

SEQ ID NO: 776342 - DNA, 75 bp, synthetic construct
  source 1..75: mol_type = other DNA
gtgtaaaagtcgctcctgcccgcactgcggggtgaaggctggcgcacagtggatacagtatctgctgagtctggc

SEQ ID NO: 776343 - DNA, 75 bp, synthetic construct
  source 1..75: mol_type = other DNA
ttcagcagggaaaccgctgggttaactggctggagaagcagccggaagggtctgtgcgtccggtggtgattgagt

SEQ ID NO: 776344 - DNA, 75 bp, synthetic construct
  source 1..75: mol_type = other DNA
tcatgccgcctggttgttaatgttgccaaccataaatatccagggcgaggcgttactggtgttatttcttttggc

SEQ ID NO: 776345 - DNA, 75 bp, synthetic construct
  source 1..75: mol_type = other DNA
gctgatgaggttatgctccgctggtcagaagtccgggagatgcaccgtagtggccttgttgagtttcactcgcac

SEQ ID NO: 776346 - DNA, 75 bp, synthetic construct
  source 1..75: mol_type = other DNA
atgtgtgaaaatatcaaaaaggagttgtacgtacgacatctcccggtattaatgtatcaccacgtcagtaataaa

SEQ ID NO: 776347 - DNA, 75 bp, synthetic construct
  source 1..75: mol_type = other DNA
ttatacctttgtctgggtttctgatattagccacctggcgagtttttgtgggtgaaccctccggttttctgcata

SEQ ID NO: 776348 - DNA, 75 bp, synthetic construct
  source 1..75: mol_type = other DNA
ccgtgagcgccattttttggggctggataatgaccgttttcgccttgagtcatgccgcctggttattaatgttgc

SEQ ID NO: 776349 - DNA, 75 bp, synthetic construct
  source 1..75: mol_type = other DNA
caaccacaaatacccagggcggggcgttactggtgttatttcttttggcgttaacagagtcaaacgatattgcac

SEQ ID NO: 776350 - DNA, 75 bp, synthetic construct
  source 1..75: mol_type = other DNA
atgtgcaaatataaattctctttaccccgacttgatattacgggaatgtgggtattttccctgggtgtctggttc

SEQ ID NO: 776351 - DNA, 75 bp, synthetic construct
  source 1..75: mol_type = other DNA
cctgctctatggcagcattttctacggcagcttcactgtgaactggggcgttgactacaccctgacgctggataa

SEQ ID NO: 776352 - DNA, 75 bp, synthetic construct
  source 1..75: mol_type = other DNA
tctcgcaggcacatattgttcaggtgatcgtcaactctatcgtcttgtcgatagcggtggggataggctgtgctt

SEQ ID NO: 776353 - DNA, 75 bp, synthetic construct
  source 1..75: mol_type = other DNA
tggcgttaaaagcattgaccgaaaaagatcgtaatattcccatcatcggaacgctgaatacgctctttctcagct

SEQ ID NO: 776354 - DNA, 75 bp, synthetic construct
  source 1..75: mol_type = other DNA
gtgaggcgctgtaccagacagcccgtcatggagggtttatggccgtcatcggtgagtccggtgcgggtaaatcca

SEQ ID NO: 776355 - DNA, 75 bp, synthetic construct
  source 1..75: mol_type = other DNA
actcaaaaaacaggtgttatttccagcaaccaaaaaagcgtttggtcttttccgtgacccattcgccgacgaagc

SEQ ID NO: 776356 - DNA, 75 bp, synthetic construct
  source 1..75: mol_type = other DNA
attggccagccggaactggcgacaaaactgtctgaacgcaatatggaagtccgtgaagtcgttcagcgttgtgag

SEQ ID NO: 776357 - DNA, 75 bp, synthetic construct
  source 1..75: mol_type = other DNA
tggccgtcagtaacctggtgatagccgccatgaatctggccgctgaaatcggggttccacaggtcaatgctgacg

SEQ ID NO: 776358 - DNA, 75 bp, synthetic construct
  source 1..75: mol_type = other DNA
aaagagcagtttagctattggcagtataatgcttatagacatggtctcactatggaacaattgaatagaccattt

SEQ ID NO: 776359 - DNA, 75 bp, synthetic construct
  source 1..75: mol_type = other DNA
ggctttcaggtggtgagaggatttgagcatcagttcggcatcgaacgacgtgaaatcctctttcacaccctgttt

SEQ ID NO: 776360 - DNA, 75 bp, synthetic construct
  source 1..75: mol_type = other DNA
atcataacgcgtggccccgcaccagtcccggagaagtacgccggcgtcttgcgtcctggctggaaactcagggga

SEQ ID NO: 776361 - DNA, 75 bp, synthetic construct
  source 1..75: mol_type = other DNA
caaaaaactgctgtccatcgtgctgattggccagcctgaactggcagacaaactgtccgaacgcaacatggaagt

SEQ ID NO: 776362 - DNA, 75 bp, synthetic construct
  source 1..75: mol_type = other DNA
gccgaggccatcatcagcaccatcgcgccgctggagagtatcaaacgcagccaggacgcccgcttccgccagttg

SEQ ID NO: 776363 - DNA, 75 bp, synthetic construct
  source 1..75: mol_type = other DNA
attgttatcgagccatacatcatcgcaatggaagacaacgatgtgaaagggaaaaccctgaaggcagcagcgatt

SEQ ID NO: 776364 - DNA, 75 bp, synthetic construct
  source 1..75: mol_type = other DNA
tggtaaccatgctgacctggctttgttgctataacgacgcgttaccgcagggggcgccaacttcgcctgccattt

SEQ ID NO: 776365 - DNA, 75 bp, synthetic construct
  source 1..75: mol_type = other DNA
tcgaaaactttttcgatagcattagctggttacaggtctggcgtgtgtttcgccaggcccagttgccacgcaatg

SEQ ID NO: 776366 - DNA, 75 bp, synthetic construct
  source 1..75: mol_type = other DNA
aaactggttattgcaaatcaatcctgaggatgagggttttaaacaggcgagggagggtgtaaagcgaatgctggt

SEQ ID NO: 776367 - DNA, 75 bp, synthetic construct
  source 1..75: mol_type = other DNA
ttccatattgttgcccgtctggttaacagcaaaccctggatggcatatatcctggctcaggttatttcggctgtt

SEQ ID NO: 776368 - DNA, 75 bp, synthetic construct
  source 1..75: mol_type = other DNA
gtgggtattttccctgggtgtctggttccatattgttgcccgtctggttaacagcaaaccctggatggcatatat

SEQ ID NO: 776369 - DNA, 75 bp, synthetic construct
  source 1..75: mol_type = other DNA
agttaatttggcatattgcttgcgatgaatctggcattgatggacaacgtttctacggctttggcagtctgtgga

SEQ ID NO: 776370 - DNA, 75 bp, synthetic construct
  source 1..75: mol_type = other DNA
aggcggggttcagccacgttctggtgattgaggatgcccacagtctgccctttccgacactgaaacacctcaaac

SEQ ID NO: 776371 - DNA, 75 bp, synthetic construct
  source 1..75: mol_type = other DNA
aggcggggttcagccacgttctggtgattgaggaagcccacagtctgcccgttccgacactgaaacacctcaaac

SEQ ID NO: 776372 - DNA, 75 bp, synthetic construct
  source 1..75: mol_type = other DNA
tcaggacgcccgctttcgccagctgcatcgcgtcctgaaagacagccgccaggcggggttcagccacgttctggt

SEQ ID NO: 776373 - DNA, 75 bp, synthetic construct
  source 1..75: mol_type = other DNA
cctctcccgtcagaacctggcgcagcaagaacgtactgaagagcagctggcgaacatcgcgcgtggtggttatgt

SEQ ID NO: 776374 - DNA, 75 bp, synthetic construct
  source 1..75: mol_type = other DNA
ctaaactgcaggctaacccggcgaaaatcgccagccgtaaagcgtctcagaatgctatcgaagctttcggtccgc

SEQ ID NO: 776375 - DNA, 75 bp, synthetic construct
  source 1..75: mol_type = other DNA
gagtggtggtgatgtgttgattatcggcgtatatgcgcacaggacgcgctatgacgatgttttatgcgggtacac

SEQ ID NO: 776376 - DNA, 75 bp, synthetic construct
  source 1..75: mol_type = other DNA
tctggcgtcaccgccactggtccgcatctgccttcacggggatttacaacgatttggcagccgcctcagcctgta

SEQ ID NO: 776377 - DNA, 75 bp, synthetic construct
  source 1..75: mol_type = other DNA
ggatgagtggtggcgcaacggccagaacctgtacctggacaatatggaggccacgggcttttaccgggtgcccct

SEQ ID NO: 776378 - DNA, 75 bp, synthetic construct
  source 1..75: mol_type = other DNA
cgggatgcataccatctggcggggattttgttgccggatttttttcgtgaggatgactggtggcgcaacggtcag

SEQ ID NO: 776379 - DNA, 75 bp, synthetic construct
  source 1..75: mol_type = other DNA
cagcggaagccatccgggcgctgtcgttacaggtgccgggattccgccgtcagatgaacgaaggctggtaccaga

SEQ ID NO: 776380 - DNA, 75 bp, synthetic construct
  source 1..75: mol_type = other DNA
tcgcggggatgactggtggcgtcacggccagaatctttacctggacaatatggaggccaccggcttttatcgggt

SEQ ID NO: 776381 - DNA, 75 bp, synthetic construct
  source 1..75: mol_type = other DNA
cgcacctgaccggacggcgctttgaacacggtgtgacggactgttacaccctgttccgggatgcataccatctgg

SEQ ID NO: 776382 - DNA, 75 bp, synthetic construct
  source 1..75: mol_type = other DNA
ggtgacggactgttacacgctgttccgggatgcataccatctggcaggcattgatatgccggattttcaccgtga

SEQ ID NO: 776383 - DNA, 75 bp, synthetic construct
  source 1..75: mol_type = other DNA
tgatggtggggggtatcacgcagatgctcacccccagggcgaaaacaccgtctgccacgacaacagataatggta

SEQ ID NO: 776384 - DNA, 75 bp, synthetic construct
  source 1..75: mol_type = other DNA
gggagattgtggcactggtccacagtcatcccggtggtctgccctggctgagcgaggctgaccggcggctgcaga

SEQ ID NO: 776385 - DNA, 75 bp, synthetic construct
  source 1..75: mol_type = other DNA
ctgttccgggatgcttaccatctggcggggattgagatgccggattttcatcgcggggatgactggtggcgtaac

SEQ ID NO: 776386 - DNA, 75 bp, synthetic construct
  source 1..75: mol_type = other DNA
aaagtacggataacggtaaacagaacacgtatttttcgtcactggacaacatgattgcccagggtaacccgatgc

SEQ ID NO: 776387 - DNA, 75 bp, synthetic construct
  source 1..75: mol_type = other DNA
gaactgcttcaccatctgcctgaacaactgagtaaacgggagaggtattctgaaaaatggcaacgacgaacgcat

SEQ ID NO: 776388 - DNA, 75 bp, synthetic construct
  source 1..75: mol_type = other DNA
aacctgtacctggacaatatggaggcaacgggcttttaccgggtgcccctgttctcagcacagccgggcgatatc

SEQ ID NO: 776389 - DNA, 75 bp, synthetic construct
  source 1..75: mol_type = other DNA
tccggtgagccggaggattatttccggatgtcgccggaggactggctgcaggcagagatgcagggtgagattgtg

SEQ ID NO: 776390 - DNA, 75 bp, synthetic construct
  source 1..75: mol_type = other DNA
atgctggttggctcccggcgaatctcccaggacatcagcacccgtgatgaaggcgggggcgggaaggtggtggtt

SEQ ID NO: 776391 - DNA, 75 bp, synthetic construct
  source 1..75: mol_type = other DNA
gacgtgctgctgtgctgttttggttcatcggtgccgaatcatgccgccatttactgtggcgacggcgagctgctg

SEQ ID NO: 776392 - DNA, 75 bp, synthetic construct
  source 1..75: mol_type = other DNA
cacaggcgggcgatatcctgctgtgctgctttggcgcatcggtggccaatcatgccgccatatactgcggcaacg

SEQ ID NO: 776393 - DNA, 75 bp, synthetic construct
  source 1..75: mol_type = other DNA
ccggattttgagcgtgaggatgactggtggcgcaacggtcagaacctttacctggacaatatggcggtcaccggc

SEQ ID NO: 776394 - DNA, 75 bp, synthetic construct
  source 1..75: mol_type = other DNA
cgcacacactccctctggcgtcacccggcatggcccgcatctgcctttacggggatttgcaacgatttggccgcc

SEQ ID NO: 776395 - DNA, 75 bp, synthetic construct
  source 1..75: mol_type = other DNA
gtgaccgatcccgaaacgtttaatgctctgttactcaacgggcttgccagcctgttacatcaccgtgaagccgcc

SEQ ID NO: 776396 - DNA, 75 bp, synthetic construct
  source 1..75: mol_type = other DNA
atctgctggtgccatcagcatgttccagtgagcttcatgccgccctgcccgatagccagaaaatggtgatgccct

SEQ ID NO: 776397 - DNA, 75 bp, synthetic construct
  source 1..75: mol_type = other DNA
gtgaacacggcagcggaagccattcgcgccctgtcgatgcagatgccgggctttcgccgtcagatgaccgaaggc

SEQ ID NO: 776398 - DNA, 75 bp, synthetic construct
  source 1..75: mol_type = other DNA
cgcctgaccatgccggttggatatacaaatgtcgaaaactatataccactccgccagcgccgatagcgttagagg

SEQ ID NO: 776399 - DNA, 75 bp, synthetic construct
  source 1..75: mol_type = other DNA
acaatcaaccagtacgcggcaaccaggctgccgaatccaatcgcggtaatgagtggaccggcaatcctgatattg

SEQ ID NO: 776400 - DNA, 75 bp, synthetic construct
  source 1..75: mol_type = other DNA
tgccttacggtgaaatgctggttggctcacggcgaatctcccaggacatcagtacccgtgatgaaggcggtgacg

SEQ ID NO: 776401 - DNA, 75 bp, synthetic construct
  source 1..75: mol_type = other DNA
gtcagcggcgcagccgggcgatgtgctgctgtgctggtttggttcatcggtgccgaatcatgccgcaatttactg

SEQ ID NO: 776402 - DNA, 75 bp, synthetic construct
  source 1..75: mol_type = other DNA
acgaacgcattctgtctggcgtcaccgccactggtccgcatctgccttcacggggatttacaacgatttggtcgt

SEQ ID NO: 776403 - DNA, 75 bp, synthetic construct
  source 1..75: mol_type = other DNA
taatctggaggccacagggctgtatcaggtgccgttgtcatcagcacaaccgggcgatgtgctgctgtgctgttt

SEQ ID NO: 776404 - DNA, 75 bp, synthetic construct
  source 1..75: mol_type = other DNA
ggtggtgtggcccagatgctggccccgaaggcaaagacgccggagtacaaaagcacggataacggtaaacagaac

SEQ ID NO: 776405 - DNA, 75 bp, synthetic construct
  source 1..75: mol_type = other DNA
tgagaacgccggagggggagcggtatatcccttgtgtgaatatctctgcagagccggaggcgtattttcgtattg

SEQ ID NO: 776406 - DNA, 75 bp, synthetic construct
  source 1..75: mol_type = other DNA
gcgccctgtcgctgcaggtgccgggattccgccgtcagatgaacgaaggctggtaccagatacgcattgccggtg

SEQ ID NO: 776407 - DNA, 75 bp, synthetic construct
  source 1..75: mol_type = other DNA
ggagagccgtgattcatattgtaccgaggctggcaggggccgggggaaatggtgtttttcaggtggtgctggggg

SEQ ID NO: 776408 - DNA, 75 bp, synthetic construct
  source 1..75: mol_type = other DNA
ccggaagactggttgcgggcggatatgcagggggagattgtggcgctggtccacagtcatcccggcggtctgccc

SEQ ID NO: 776409 - DNA, 75 bp, synthetic construct
  source 1..75: mol_type = other DNA
gaaatgccgctcgcccaggcattacatctgggtcgttatcaccctttagatatctaccgccgtggcgattcacat

SEQ ID NO: 776410 - DNA, 75 bp, synthetic construct
  source 1..75: mol_type = other DNA
cgggatgcataccatctggcggggataacgctgccggattttgtgcgtgaggatgactggtggcgcaacggtcag

SEQ ID NO: 776411 - DNA, 75 bp, synthetic construct
  source 1..75: mol_type = other DNA
aaggcttttttgcctggtttaaccagatgtttaaccgcaacgccgaacgctacgaaaaaggggtggcgaaaattc

SEQ ID NO: 776412 - DNA, 75 bp, synthetic construct
  source 1..75: mol_type = other DNA
tatcctgatcaggttgagcgctattacggaatcattaaccaaacacaagatctggcgtatgaaatcagcataacg

SEQ ID NO: 776413 - DNA, 75 bp, synthetic construct
  source 1..75: mol_type = other DNA
ctcagcaatctttactgcttcaaatggcgcaccaggtgagccagaataattactcagaaagagacgtcgatgttc

SEQ ID NO: 776414 - DNA, 75 bp, synthetic construct
  source 1..75: mol_type = other DNA
tttgaagagacaacgctttcagccatcgccagccgtatcgcgcaaactcacggcctgacgctggtgggcaaaatc

SEQ ID NO: 776415 - DNA, 75 bp, synthetic construct
  source 1..75: mol_type = other DNA
gtggctgattgataaatcgactcacagttttgtgcgcagcggctatatcactgaaatcgacatttcacgcgggcc

SEQ ID NO: 776416 - DNA, 75 bp, synthetic construct
  source 1..75: mol_type = other DNA
gttgatgtgattaaccagttgaaggtacagaacgatcagatcgctgccggacagttgggcggaacgccagcgtta

SEQ ID NO: 776417 - DNA, 75 bp, synthetic construct
  source 1..75: mol_type = other DNA
tggtgtttttcaggtggtgctgggggttgcagcgattgtcgggtcattcttcactggtggtgcaacactggcggc

SEQ ID NO: 776418 - DNA, 75 bp, synthetic construct
  source 1..75: mol_type = other DNA
gcagccatcgtgggctctttcttcactgccggagccacgatggcgttatggggttcagccctggcagccggtggt

SEQ ID NO: 776419 - DNA, 75 bp, synthetic construct
  source 1..75: mol_type = other DNA
gggcatcaatggcgttatggggttcagccctggcagccggtggtttttctgccaccacgatgctgttttcactgg

SEQ ID NO: 776420 - DNA, 75 bp, synthetic construct
  source 1..75: mol_type = other DNA
ttgcatctaacggctgcgaatctgcgctccttataccgcttacctttggcaaccatacaccgggtgcattgttgc

SEQ ID NO: 776421 - DNA, 75 bp, synthetic construct
  source 1..75: mol_type = other DNA
ccttctcggcagtagtggaatggcggagctacgctttattcgtacccacggcagccgttttactccccaggattg

SEQ ID NO: 776422 - DNA, 75 bp, synthetic construct
  source 1..75: mol_type = other DNA
ccgtttactgccgacgctaaatgaagattcagcgcttcgcagttcaatggcgcagttgctgcacccgacgacgcc

SEQ ID NO: 776423 - DNA, 75 bp, synthetic construct
  source 1..75: mol_type = other DNA
gtgaaaaagatcgaccgcaaagacgtttcgcatttcaccttcaaagataccattaaccgtatctacaaaaacgcc

SEQ ID NO: 776424 - DNA, 75 bp, synthetic construct
  source 1..75: mol_type = other DNA
aatggtgggcagttactgacgatggggaagaaccggcatcgaaagtaacccactggatgccgctaccggagccgc

SEQ ID NO: 776425 - DNA, 75 bp, synthetic construct
  source 1..75: mol_type = other DNA
ccagctgattttctctcatctggccacgctgcgcgatcaggagccggtaaaacagttgaagccacaggatgtggc

SEQ ID NO: 776426 - DNA, 75 bp, synthetic construct
  source 1..75: mol_type = other DNA
tgaactggtgggctttggtcagttatccgggccatggctgataactactgcccgccatgagtttgaccgtaacaa

SEQ ID NO: 776427 - DNA, 75 bp, synthetic construct
  source 1..75: mol_type = other DNA
gctaccatcacgcgatacgacaaaagcacgttcacctgctcatcggcctgttctgacgcggtgaatgcgccggaa

SEQ ID NO: 776428 - DNA, 75 bp, synthetic construct
  source 1..75: mol_type = other DNA
cagggcaacaccatcaccggcgcaatgggcggcagggtcaaaaacccggagctgaccgccaagaaagaacaggag

SEQ ID NO: 776429 - DNA, 75 bp, synthetic construct
  source 1..75: mol_type = other DNA
cgaaaaacgcatcattatggaagtgctggaacaacaagaaggaaaccgaacccgcactgctttaatgctgggcat

SEQ ID NO: 776430 - DNA, 75 bp, synthetic construct
  source 1..75: mol_type = other DNA
cccccgttttcaccctgttttacgggcagaaagatatcacccacgatattgcgccttttgtcctgagcgtgacgt

SEQ ID NO: 776431 - DNA, 75 bp, synthetic construct
  source 1..75: mol_type = other DNA
cagcttttccctgcgtgacaccatcaaccgcgtctacaaatccgcaaaggtaaaacaccagaagagcagcgataa

SEQ ID NO: 776432 - DNA, 75 bp, synthetic construct
  source 1..75: mol_type = other DNA
aaaaacaaaaaactcagaaactcacggtttatcacccggatggcagtacatcgacggtgattaaggagaagaaaa

SEQ ID NO: 776433 - DNA, 75 bp, synthetic construct
  source 1..75: mol_type = other DNA
ttgctgaagtagaaaaacaaaaaaaagaccatctgattttcatcaaatggcttttttttgacccaagccgttttc

SEQ ID NO: 776434 - DNA, 75 bp, synthetic construct
  source 1..75: mol_type = other DNA
cagcagctctggctccggcaaacgtaagaataaaaagcccgacaccctgaccgtttatcaccctgacggtacaac

SEQ ID NO: 776435 - DNA, 75 bp, synthetic construct
  source 1..75: mol_type = other DNA
gacactgccgggcgctggcgggatgcctggtatccgggcaaaggcgatatgctgatgctgaagttaggttatcag

SEQ ID NO: 776436 - DNA, 75 bp, synthetic construct
  source 1..75: mol_type = other DNA
ctcccggcgaatatcccaggacgtcagcacccgtgatgaaggcgctggcgggaaggtggtggttatcgggcggca

SEQ ID NO: 776437 - DNA, 75 bp, synthetic construct
  source 1..75: mol_type = other DNA
tgcggagtcgtggggcttcgtggtgagaacgccggagggggagcggtatatcccttgtgtgaatatctctgcaga

SEQ ID NO: 776438 - DNA, 75 bp, synthetic construct
  source 1..75: mol_type = other DNA
gcagcgacgcacacactccctctggcggcaccgggcatggcacgcctctgtctttacggggatttgcaacgattt

SEQ ID NO: 776439 - DNA, 75 bp, synthetic construct
  source 1..75: mol_type = other DNA
tggcgcatgcccggcggtgtgcgccagcggagtcgtgcggctttgtggtgagaacgccggagggaaaaaggtatt

SEQ ID NO: 776440 - DNA, 75 bp, synthetic construct
  source 1..75: mol_type = other DNA
cggataacggtaagcagaacacgtatttctcgtcactggataacatggttcccgccatcgcatgccgggaccatc

SEQ ID NO: 776441 - DNA, 75 bp, synthetic construct
  source 1..75: mol_type = other DNA
gggtacagccctgagtgccggcggtttttctgccaccacgatgctgttttcactgggtgccagcatgatactggg

SEQ ID NO: 776442 - DNA, 75 bp, synthetic construct
  source 1..75: mol_type = other DNA
gtgtgaatatctctgcagagccggaggcgtattttcgtatcgcaccggaagactggctgcgggcagagatgcagg

SEQ ID NO: 776443 - DNA, 75 bp, synthetic construct
  source 1..75: mol_type = other DNA
gggcgctgtcgttacaggtgccgggattccgccgtcagatgaacgaaggctggtaccagatacgtattgccggtg

SEQ ID NO: 776444 - DNA, 75 bp, synthetic construct
  source 1..75: mol_type = other DNA
tggtaccagatacgtattgccggtgatgacacggcaccggaggcggtgtacgcccgccttcacgaacagctgggt

SEQ ID NO: 776445 - DNA, 75 bp, synthetic construct
  source 1..75: mol_type = other DNA
attccgctgtcagatgaacgaaggctggtaccagatacgcattgccggtgaggatacggcaccggaggcggtgta

SEQ ID NO: 776446 - DNA, 75 bp, synthetic construct
  source 1..75: mol_type = other DNA
actggataacatgattgcccaggggaacccgatgccggtgccttatggtgaaatgctggttggttcacgacggat

SEQ ID NO: 776447 - DNA, 75 bp, synthetic construct
  source 1..75: mol_type = other DNA
gagggaacggtcatccacattgtgccgcgactggccggggccggaaagggtggactgcagattgtgctgggggca

SEQ ID NO: 776448 - DNA, 75 bp, synthetic construct
  source 1..75: mol_type = other DNA
aagttccgctgtgtgccgcatcttaccgggcggcgctttgagcacggggtgacggactgttacacgctgttccgg

SEQ ID NO: 776449 - DNA, 75 bp, synthetic construct
  source 1..75: mol_type = other DNA
agggaacggtcatccacattgtgccgcgactggccggagccggaaagggtggactgcagattgtgctgggggcgg

SEQ ID NO: 776450 - DNA, 75 bp, synthetic construct
  source 1..75: mol_type = other DNA
ggctttcgccgtcagatgaacgaaggctggtaccagatacgtattgccggtgatgacacggcaccggaggcggtg

SEQ ID NO: 776451 - DNA, 75 bp, synthetic construct
  source 1..75: mol_type = other DNA
ggggatttacaacgatttggccgccgcctcagcctgtatgtgaacacggcagcggaagccatccgggcgctgtcg

SEQ ID NO: 776452 - DNA, 75 bp, synthetic construct
  source 1..75: mol_type = other DNA
cacgtacttttcctcgctggataacatgattgcccaggggaacccgatgccggtgccttacggggaaatgctggt

SEQ ID NO: 776453 - DNA, 75 bp, synthetic construct
  source 1..75: mol_type = other DNA
cagccattgtgggctctttcttcactgccggggcatcgatggcgttatggggttcagccctggctgccggtggtt

SEQ ID NO: 776454 - DNA, 75 bp, synthetic construct
  source 1..75: mol_type = other DNA
gcgactggccggtgccggaaagggcggactgcagattgtgctgggggcagcagccattgtgggctctttcttcac

SEQ ID NO: 776455 - DNA, 75 bp, synthetic construct
  source 1..75: mol_type = other DNA
taaaaagcgcactgtcctggtggctggtctgccggggagacattcataaattccgctgtgttccacacctgaccg

SEQ ID NO: 776456 - DNA, 75 bp, synthetic construct
  source 1..75: mol_type = other DNA
agggaacggtcatccacattgtgccgcgactggccggtgccggaaagggtggactgcagattgtgctgggggctg

SEQ ID NO: 776457 - DNA, 75 bp, synthetic construct
  source 1..75: mol_type = other DNA
agggaacggtcatccacattgtgccgcgactggccggtgccggaaagggaggactgcagattgtgctgggggcgg

SEQ ID NO: 776458 - DNA, 75 bp, synthetic construct
  source 1..75: mol_type = other DNA
agggaacggtcatccacattgtgccgcgactggccggagccggaaaggggggactgcagattgtgctgggggctg

SEQ ID NO: 776459 - DNA, 75 bp, synthetic construct
  source 1..75: mol_type = other DNA
agggaacggtcatccacattgtgccgcgactggccggggccggaaagggtggactgcagattgtgctgggggcag

SEQ ID NO: 776460 - DNA, 75 bp, synthetic construct
  source 1..75: mol_type = other DNA
agggaacggtcatccacattgtgccgcgactggccggggccggaaagggaggactgcagattgtgctgggggctg

SEQ ID NO: 776461 - DNA, 75 bp, synthetic construct
  source 1..75: mol_type = other DNA
agggaacggtcatccacattgtgccgcgactggccggtgccggaaaggggggactgcagattgtgctgggggcag

SEQ ID NO: 776462 - DNA, 75 bp, synthetic construct
  source 1..75: mol_type = other DNA
atgaccacttacaccgataaggaacagattaaagaaatcaaagaacgaatcggcagcctagacgtgcgagacaat

SEQ ID NO: 776463 - DNA, 75 bp, synthetic construct
  source 1..75: mol_type = other DNA
agcacctcagcaaagctgtttactgcaaaggtggcagtgatagcggagcaaaagagcaggcccgcgcaactgaaa

SEQ ID NO: 776464 - DNA, 75 bp, synthetic construct
  source 1..75: mol_type = other DNA
tggaggcgactggtttttaccgtgtcgcactgacagaggcgcagccgggcgatgtgctgctgtgctgttttggtt

SEQ ID NO: 776465 - DNA, 75 bp, synthetic construct
  source 1..75: mol_type = other DNA
atgccgcagaagctcagaagtatgccgcagacctgcagaatcagcagtggcagacgatcatgaaaaaccttgctc

SEQ ID NO: 776466 - DNA, 75 bp, synthetic construct
  source 1..75: mol_type = other DNA
ttgggtggtggcatagccagtgctctcgagctatcaactccgtggggggctgcgatcggtggcggtcttggtctg

SEQ ID NO: 776467 - DNA, 75 bp, synthetic construct
  source 1..75: mol_type = other DNA
ttaaccagtattacaactctcagcagtacaaagaccttgcaggtcaggctcgctatcagagtctggcggcagcgg

SEQ ID NO: 776468 - DNA, 75 bp, synthetic construct
  source 1..75: mol_type = other DNA
gcgcagcgatgacttacaagcattctcccgcaaaaaatgaacccgttgcttgttatagcgcattgcttaatgcat

SEQ ID NO: 776469 - DNA, 75 bp, synthetic construct
  source 1..75: mol_type = other DNA
ctcattcttaaatacgcaagaacctgaacttattgcaattccagagttcaatgaaagcgaggcggaaaatgataa

SEQ ID NO: 776470 - DNA, 75 bp, synthetic construct
  source 1..75: mol_type = other DNA
aataagaaagatataagaggttttctgatatcaaggatgttgattgatgataatgtgatttattttatggaaata

SEQ ID NO: 776471 - DNA, 75 bp, synthetic construct
  source 1..75: mol_type = other DNA
agaacctgtacctggataatatggaggcgactggtttttgccgggtgtccctgtcccgtgcacaggcgggcgata

SEQ ID NO: 776472 - DNA, 75 bp, synthetic construct
  source 1..75: mol_type = other DNA
cagatgctcgtccgtctttaaataatggcatagtcggttttgatgaaggctggaacgcctgccgcgccgccatgc

SEQ ID NO: 776473 - DNA, 75 bp, synthetic construct
  source 1..75: mol_type = other DNA
ccgcaataaaaaaaatcctgattgcaccaccgtctgtttatctggcgtggctgggctgcggtgaaggccgcaccc

SEQ ID NO: 776474 - DNA, 75 bp, synthetic construct
  source 1..75: mol_type = other DNA
ccggcgcgcgccgcgttccctcgcctcattacgattgtcgcccggatgacgaagttcccaccctgctggtggtgc

SEQ ID NO: 776475 - DNA, 75 bp, synthetic construct
  source 1..75: mol_type = other DNA
agcggagtcgtgcggcttcgtggtgagaacgccggagggggaaagctattttccctgcgtgaatatttccggtga

SEQ ID NO: 776476 - DNA, 75 bp, synthetic construct
  source 1..75: mol_type = other DNA
tagtattcgccttagttccttatactattataacgaacagcaaaaagactatttcattatgtttctttgccttgc

SEQ ID NO: 776477 - DNA, 75 bp, synthetic construct
  source 1..75: mol_type = other DNA
ctacttagttgttttgatggtccttaaatatgaaaatagcgatgataataccatctttaaaaaataccgcgccaa

SEQ ID NO: 776478 - DNA, 75 bp, synthetic construct
  source 1..75: mol_type = other DNA
aagatacgccgctgattggtgttacccagagctactcctgttcgctggagcaaatctctgatttccgccatgaaa

SEQ ID NO: 776479 - DNA, 75 bp, synthetic construct
  source 1..75: mol_type = other DNA
gccggaggcgtatttccggatgtcgccggatgactggctgcaggcaacactgcacggtcagattgtggcgctggt

SEQ ID NO: 776480 - DNA, 75 bp, synthetic construct
  source 1..75: mol_type = other DNA
gcgaaattcaggaagactgggaagcggtctgggatcaactcgacgacctgaacctcgaaggtaaaattgttgcgc

SEQ ID NO: 776481 - DNA, 75 bp, synthetic construct
  source 1..75: mol_type = other DNA
ggcccagaactggtgaccttacataacctcaaggacgactccccgaaattaatggagcagtacgatgtgctcatt

SEQ ID NO: 776482 - DNA, 75 bp, synthetic construct
  source 1..75: mol_type = other DNA
tgctcatttgcgcgtttccgcccactgtttgattcgccgtgatggtgaaattgtccagtatgttcctttcgataa

SEQ ID NO: 776483 - DNA, 75 bp, synthetic construct
  source 1..75: mol_type = other DNA
tcgagatgaagcagtgtcattgtcaattgcgttgaatatttcacaatacatagctccgagatttcgtgcgcttcc

SEQ ID NO: 776484 - DNA, 75 bp, synthetic construct
  source 1..75: mol_type = other DNA
gcaccgttcacgccacttgctcagcagtatgtatcagagttgcagaatctttcctctcttcaggggcaaggtcag

SEQ ID NO: 776485 - DNA, 75 bp, synthetic construct
  source 1..75: mol_type = other DNA
gcagaggcaacgggtggattaggctctacagcaacaggaaaccagttagcatcaatcgcacctacactcggtcaa

SEQ ID NO: 776486 - DNA, 75 bp, synthetic construct
  source 1..75: mol_type = other DNA
catatacctcaaagtagctccctggtttaaaggaaaggccagaattaaagtcaaaggtttctggctgggaaataa

SEQ ID NO: 776487 - DNA, 75 bp, synthetic construct
  source 1..75: mol_type = other DNA
ttaaagcaccgtgggtaacgctggcaacagaagattgtggactgaaattctctgcccgcaaccagtttgccggca

SEQ ID NO: 776488 - DNA, 75 bp, synthetic construct
  source 1..75: mol_type = other DNA
acagcaaattcggggtatttacgatcaataataaagtcgtcagctcaaggacgactgtaaaggattttgaaaaca

SEQ ID NO: 776489 - DNA, 75 bp, synthetic construct
  source 1..75: mol_type = other DNA
ggtggcttccgcagcaaaagttaaaggttacggactaacgtataagattctgggctttcacattcagacaaagtt

SEQ ID NO: 776490 - DNA, 75 bp, synthetic construct
  source 1..75: mol_type = other DNA
ccgctgtgtgccacatctgacaggacggcgctttgagcacggggtgacggactgttacacgctgttccgggatgc

SEQ ID NO: 776491 - DNA, 75 bp, synthetic construct
  source 1..75: mol_type = other DNA
aactgacgctggcaggtggtgcaaagctggtggcaattgtgactcacagcagccagcaggctctgggtctggcga

SEQ ID NO: 776492 - DNA, 75 bp, synthetic construct
  source 1..75: mol_type = other DNA
tgaaatgaaactcaccactggctcgcgcgtcattgcgttgatcaaagcatcagcaatcctgattgcgaccaaagc

SEQ ID NO: 776493 - DNA, 75 bp, synthetic construct
  source 1..75: mol_type = other DNA
cattgcacaggcattaaaagatcacttggctgcctatgaaaaatcgaaaggtcctgaggctttaggttttaagcc

SEQ ID NO: 776494 - DNA, 75 bp, synthetic construct
  source 1..75: mol_type = other DNA
ttggtatctgggtcatcccggtctttaccgcccattgctcaggcgctaaaagatcatttggctgcctatgaaaaa

SEQ ID NO: 776495 - DNA, 75 bp, synthetic construct
  source 1..75: mol_type = other DNA
gacccgatcgagaaagacgagatgaaccgggtgttcatattcggtaaggtcattggaagcatgccgcagacgtac

SEQ ID NO: 776496 - DNA, 75 bp, synthetic construct
  source 1..75: mol_type = other DNA
gtatgagtcagatggcgacttcatttactcctactcgcccggcaccaccgccaccgacaagtggacaggcatccg

SEQ ID NO: 776497 - DNA, 75 bp, synthetic construct
  source 1..75: mol_type = other DNA
acaggcatccgagtctggtggactaccgcccattgcacaggcattaaaagatcatttagctgcctatgaactatc

SEQ ID NO: 776498 - DNA, 75 bp, synthetic construct
  source 1..75: mol_type = other DNA
tctggtggactaccgcccattgcacaggcattaaaagatcatttagctgcctatgagcaatcgaaaaaagtataa

SEQ ID NO: 776499 - DNA, 75 bp, synthetic construct
  source 1..75: mol_type = other DNA
atagaatggtttttgattgcggaatcaatattaaccgcatgtgctggcgtatattttctccgtaaaaataaaaaa

SEQ ID NO: 776500 - DNA, 75 bp, synthetic construct
  source 1..75: mol_type = other DNA
cgatggcgtctatgctaacgaattgcgttcgatgctgcgtccgtttgttttccgccgttacatcgatttcagcgt

SEQ ID NO: 776501 - DNA, 75 bp, synthetic construct
  source 1..75: mol_type = other DNA
atgaacttcatcatctggcattacaggaattgccgggccatgtgtcggaggattgcttcaccgcagagcgtgaac

SEQ ID NO: 776502 - DNA, 75 bp, synthetic construct
  source 1..75: mol_type = other DNA
aaaagctgaacaagggagcaggcaagcctgtagtaatgttccagttcggcatataaaaaatccggatgaaccttt

SEQ ID NO: 776503 - DNA, 75 bp, synthetic construct
  source 1..75: mol_type = other DNA
tagttcgggtgttggaagaacacgggcgctgtatgacttacgtcgtgaccaactggcttagggataaatatcgca

SEQ ID NO: 776504 - DNA, 75 bp, synthetic construct
  source 1..75: mol_type = other DNA
ggccagaatctctatctggataatatggaggcaacggggttgtatcaggtgccgttgtcagcggcccagccgggc

SEQ ID NO: 776505 - DNA, 75 bp, synthetic construct
  source 1..75: mol_type = other DNA
acggggcggataaaaacgatattttgtttgatgttcatcgtctttatcataaacgactatcccgctctgaaactc

SEQ ID NO: 776506 - DNA, 75 bp, synthetic construct
  source 1..75: mol_type = other DNA
ttatctgatgaaccgtcgccgctatgagcactttgcgaccacgcgtatgatgagtgtcaattgggtggcgattct

SEQ ID NO: 776507 - DNA, 75 bp, synthetic construct
  source 1..75: mol_type = other DNA
gtcgtggccttactgacaacatcaaacttggtgccggtggcattcgtgaaattgaatttatcgtccaggtgtttc

SEQ ID NO: 776508 - DNA, 75 bp, synthetic construct
  source 1..75: mol_type = other DNA
actgaatttctcctctgatatcgatctgatttttgcctggccggaacatggttgcacgcagggcggacgccgcga

SEQ ID NO: 776509 - DNA, 75 bp, synthetic construct
  source 1..75: mol_type = other DNA
aaattatgatgctgccgcgtgaaagtaaaactctgcaaacggaagtacgggaaatgcgtgagaaaatgcgcgctc

SEQ ID NO: 776510 - DNA, 75 bp, synthetic construct
  source 1..75: mol_type = other DNA
agtagccatagtgcatggctgacattcatgtatcctcgtttatatgtagctcgtgagctcttaaaagatgatgga

SEQ ID NO: 776511 - DNA, 75 bp, synthetic construct
  source 1..75: mol_type = other DNA
taattttactagcgaagcattgaaagcgttgctccaaaagctggattcagatgaagattttgccccaaacaaagt

SEQ ID NO: 776512 - DNA, 75 bp, synthetic construct
  source 1..75: mol_type = other DNA
tatgatgccctattgactacatggtgtgtatatgatggtagcttgttaacaacacctattgaagatgttgatctt

SEQ ID NO: 776513 - DNA, 75 bp, synthetic construct
  source 1..75: mol_type = other DNA
aagaccataaccaacgtgaagagaacaagaacagtcagaatctattgatcaaaggggataatctcgaagtattga

SEQ ID NO: 776514 - DNA, 75 bp, synthetic construct
  source 1..75: mol_type = other DNA
gtgcgaaacagatggaacttaatgaagcactaaaaagttatgctaataaaaaatctattgatttagatttggtgg

SEQ ID NO: 776515 - DNA, 75 bp, synthetic construct
  source 1..75: mol_type = other DNA
acaccaattgaagatgtagatcttaacggctacaaagcacacttatgcgatggtcgtttgtatctgattgcacct

SEQ ID NO: 776516 - DNA, 75 bp, synthetic construct
  source 1..75: mol_type = other DNA
gtggctggtctgccgggggacgatttataaataccgctgtgtgccgcatcttaccggacggcgctttgagcacgg

SEQ ID NO: 776517 - DNA, 75 bp, synthetic construct
  source 1..75: mol_type = other DNA
aacggataacggtaaacagaacacgtatttttcgtcactggacaatatgattgcccaggggaacccgatgccggt

SEQ ID NO: 776518 - DNA, 75 bp, synthetic construct
  source 1..75: mol_type = other DNA
ggtgaaatgctggttggctcccggcgaatctcccaggacatcagcacccgtgatgaaggtggtggcgggaaggtg

SEQ ID NO: 776519 - DNA, 75 bp, synthetic construct
  source 1..75: mol_type = other DNA
ttatatccgtagagatataggagcatttatactcgggcaaataaaagtttgcaaaaaatgcgaagatagcgtttt

SEQ ID NO: 776520 - DNA, 75 bp, synthetic construct
  source 1..75: mol_type = other DNA
tttaaataatggcatagtcggttttgatgaaggctggaacgcctgccgcgccgccatgcttcatggtgccgaacc

SEQ ID NO: 776521 - DNA, 75 bp, synthetic construct
  source 1..75: mol_type = other DNA
agaaactgggccgcatttgcaataaatatcaataaatatgataatagtgatattagggattgttttgtggagatg

SEQ ID NO: 776522 - DNA, 75 bp, synthetic construct
  source 1..75: mol_type = other DNA
gaacttacgctttctaatcttagtttctttgacgatgctgtattgacaccagagcagtatgacactctattgacg

SEQ ID NO: 776523 - DNA, 75 bp, synthetic construct
  source 1..75: mol_type = other DNA
acgaccagaaagacggtatggaacgtcagatgacccaactggcgcagctcggtctgctgagccgctttgtcggta

SEQ ID NO: 776524 - DNA, 75 bp, synthetic construct
  source 1..75: mol_type = other DNA
tatgacatctggttgaaaggtgatcactacaaatggcgtgcaatgcgtaccaatggcgtggctgaacgcttgtgt

SEQ ID NO: 776525 - DNA, 75 bp, synthetic construct
  source 1..75: mol_type = other DNA
cccgtgcagcacagcgcgcgggaacaagtcaacgcccaggtactgaatgccgccagccaaaaaattgaatcgctg

SEQ ID NO: 776526 - DNA, 75 bp, synthetic construct
  source 1..75: mol_type = other DNA
ctgctgtgctgctttggtgcatcggtgccgaatcatgccgccatttactgtggcaacggtgaactgcttcaccat

SEQ ID NO: 776527 - DNA, 75 bp, synthetic construct
  source 1..75: mol_type = other DNA
gccggaggcgtattttcgtattgcgccggaagactggctgcaggcacagatgcagggggagattgtggcgctggt

SEQ ID NO: 776528 - DNA, 75 bp, synthetic construct
  source 1..75: mol_type = other DNA
tgtggtgatgtttgccgaagcgagcgaagctgaactggatagcatcctggcacgtcgtctggcgggcgaaaccct

SEQ ID NO: 776529 - DNA, 75 bp, synthetic construct
  source 1..75: mol_type = other DNA
agagcctgttctgtatcagtcctgcactcgtcccacctggaatagcggtgttccgtggacggaatggaaagaacg

SEQ ID NO: 776530 - DNA, 75 bp, synthetic construct
  source 1..75: mol_type = other DNA
cacgtggacgaccataaaatccatctgggataaaggtattgcgtattttgcagtagaaccgaggcaggaggttaa

SEQ ID NO: 776531 - DNA, 75 bp, synthetic construct
  source 1..75: mol_type = other DNA
gtaacggctccgtttctcttggtgatgtttttgtttccagctggggttatgagcagacaaatacctgtttttatc

SEQ ID NO: 776532 - DNA, 75 bp, synthetic construct
  source 1..75: mol_type = other DNA
cccgtgcaacacagcgcgcgggaacaagtcaacgcccaggtgctgaatgccgccagccaacagattgaatcgctg

SEQ ID NO: 776533 - DNA, 75 bp, synthetic construct
  source 1..75: mol_type = other DNA
ttagatactatgttgtacaagtttgatgacaatgaaattataacttccgctattgataagctgaagcgttcatag

SEQ ID NO: 776534 - DNA, 75 bp, synthetic construct
  source 1..75: mol_type = other DNA
gataatgtttttaatattttgaacaatatggcattgaatgataagagcgcttgcgttcgagctacggcaatcgag

SEQ ID NO: 776535 - DNA, 75 bp, synthetic construct
  source 1..75: mol_type = other DNA
atgtcgccggaggactggctgcgggcagaaatgcagggtgagattgtggtgctggcccacagccaccccggtgga

SEQ ID NO: 776536 - DNA, 75 bp, synthetic construct
  source 1..75: mol_type = other DNA
ggcgtcaccactattgtggtcgatattattgtgatgatcggttacgccacccttgctcaacggattgctctatgg

SEQ ID NO: 776537 - DNA, 75 bp, synthetic construct
  source 1..75: mol_type = other DNA
acgaacgcattctgtctggcgtcaccgccactggcacgcatctgccttcacggggatttacaacgatttggtcgc

SEQ ID NO: 776538 - DNA, 75 bp, synthetic construct
  source 1..75: mol_type = other DNA
ttgttgccacatgtggcgattagtcttgaccgtactgaaggtgccacgctggagttttacgaagctgaggcgaaa

SEQ ID NO: 776539 - DNA, 75 bp, synthetic construct
  source 1..75: mol_type = other DNA
gatggtccgttgccggaaaagcggcccatcattttagaggcgcaggacgtgttgataacctacagaggaaagcgg

SEQ ID NO: 776540 - DNA, 75 bp, synthetic construct
  source 1..75: mol_type = other DNA
ataaaagggccaaaacagatgaaggcattgaataagattttcggctcgttgtttatgctggtaggagcgttgttg

SEQ ID NO: 776541 - DNA, 75 bp, synthetic construct
  source 1..75: mol_type = other DNA
acctgctgacatcaatcattttaagcctgtcgccaggctctggtgcaatcaacactatgaccacctcgctcaacc

SEQ ID NO: 776542 - DNA, 75 bp, synthetic construct
  source 1..75: mol_type = other DNA
ccggattttgtgcgtgaggatgactggtggcgcaacggtcagaacctttacctggacaatatggcggcgactggt

SEQ ID NO: 776543 - DNA, 75 bp, synthetic construct
  source 1..75: mol_type = other DNA
tttaaataatggcatagtcggctttgatgaaggctggaacgcctgccgcgccgtcatgcttcatggtgccgaacc

SEQ ID NO: 776544 - DNA, 75 bp, synthetic construct
  source 1..75: mol_type = other DNA
ccgccatgcttcatggtgccgaacctgtaagccagacttacaagttgaacgagctgtcgggtaactctccggtaa

SEQ ID NO: 776545 - DNA, 75 bp, synthetic construct
  source 1..75: mol_type = other DNA
ttccgctgtgtgccgcatcttaccgggcggcgctttgagcacggggcgacggactgttacacgctgttccgggat

SEQ ID NO: 776546 - DNA, 75 bp, synthetic construct
  source 1..75: mol_type = other DNA
tgcagagcgatttgccttggtggctggtctgccggggtgagattcataaattccgctgtgtgccgcatcttaccg

SEQ ID NO: 776547 - DNA, 75 bp, synthetic construct
  source 1..75: mol_type = other DNA
tgttgctgccgggttatgtgaaggggatggtccgttaccggaaaagcgtcccgtaattttagaggcgcaggatgt

SEQ ID NO: 776548 - DNA, 75 bp, synthetic construct
  source 1..75: mol_type = other DNA
tggtaccagatacgcattgccggtgaggatacggcaccggaggcggtgtatgcccgccttcacgaaccactgggt

SEQ ID NO: 776549 - DNA, 75 bp, synthetic construct
  source 1..75: mol_type = other DNA
acgaacgcattctgtctggcgtcaccgccactggtccgcatctgccttcacggggatttacaacgatttggccgc

SEQ ID NO: 776550 - DNA, 75 bp, synthetic construct
  source 1..75: mol_type = other DNA
tttaaataatggcatagtcggttttgatgaaggctggaacgcctgccgagctgccatgctctatggtgccgtacc

SEQ ID NO: 776551 - DNA, 75 bp, synthetic construct
  source 1..75: mol_type = other DNA
ccgcgactggccggggccggaaagggtggactgcagattgtgctgggggcggcggccatcgtggggtcgttcttc

SEQ ID NO: 776552 - DNA, 75 bp, synthetic construct
  source 1..75: mol_type = other DNA
cgtatatcccaggacatcagcacccgtgatgaaggcgggggcggaacggtcgtggttatcgggcgacagggataa

SEQ ID NO: 776553 - DNA, 75 bp, synthetic construct
  source 1..75: mol_type = other DNA
ggatgactggtggcgcaacggccagaacctgtacctggacaatatggaggccactggcttttgccgggtgtccct

SEQ ID NO: 776554 - DNA, 75 bp, synthetic construct
  source 1..75: mol_type = other DNA
ggataccggtggtatagatgcgcaggtcgtttataaccgctcgctgaaactcggtccgctgtgggtcattccaat

SEQ ID NO: 776555 - DNA, 75 bp, synthetic construct
  source 1..75: mol_type = other DNA
gtgtctgttcgcaaatcagctcgtctcggttatacaaaaatactcgtcgcggcgctgctctatttcgctgagcac

SEQ ID NO: 776556 - DNA, 75 bp, synthetic construct
  source 1..75: mol_type = other DNA
ttaccgggcggcgctttgagcacggggtgacggactgttacacgctgttccgggacgcttaccatctggcgggga

SEQ ID NO: 776557 - DNA, 75 bp, synthetic construct
  source 1..75: mol_type = other DNA
gctcatacggtcagccagtcgtaaatatgccgcgtacacgtaacgcgaataaagtctatttgtcgttaatcggta

SEQ ID NO: 776558 - DNA, 75 bp, synthetic construct
  source 1..75: mol_type = other DNA
ccgctcgctgaaactcggtccgctgtgggtcattccaatcaagggcgcgagctcatacggccagccggtcgtaaa

SEQ ID NO: 776559 - DNA, 75 bp, synthetic construct
  source 1..75: mol_type = other DNA
ttttggttcgacgccgaccgttactggcaaaagccatatagaaatgttggaagacgcggctgatctgacgtttcg

SEQ ID NO: 776560 - DNA, 75 bp, synthetic construct
  source 1..75: mol_type = other DNA
tccgagatgagcagcacgggggcaatgctcggactcgaccccggcagccgccagcgtctgattggcctggcgggg

SEQ ID NO: 776561 - DNA, 75 bp, synthetic construct
  source 1..75: mol_type = other DNA
aaagttattttctatgagttgaacatcaacaatgaaaaagaagttaatcaaattctaaaaaaacacaaatttgat

SEQ ID NO: 776562 - DNA, 75 bp, synthetic construct
  source 1..75: mol_type = other DNA
tacctattactgaaaattgtgctataggtggtactttaaatccttacgggacatcgaaatatatatcagagctaa

SEQ ID NO: 776563 - DNA, 75 bp, synthetic construct
  source 1..75: mol_type = other DNA
ttcagatattatgaagaataccaaaaagcagatgacttaaaaaaaacagacttaagttatctaagctttataagc

SEQ ID NO: 776564 - DNA, 75 bp, synthetic construct
  source 1..75: mol_type = other DNA
aacttcattgggaagctaagcgtagtcttgaggatatggttattgatgcttggaactggcaaaataataatccaa

SEQ ID NO: 776565 - DNA, 75 bp, synthetic construct
  source 1..75: mol_type = other DNA
ctggttatataggttctcatacaattttaatgttgctaaatgaaggttatgatatagttgttatagataattttt

SEQ ID NO: 776566 - DNA, 75 bp, synthetic construct
  source 1..75: mol_type = other DNA
aactagaaaaacttatggtgtttggggggattaccctacaaaggatggaaccggtgttcgtgattatatacatgt

SEQ ID NO: 776567 - DNA, 75 bp, synthetic construct
  source 1..75: mol_type = other DNA
cagcgtactacaggcacgaggactaccacgagctgcggagacagaattaaaaaaagctgagctgcttgaacccag

SEQ ID NO: 776568 - DNA, 75 bp, synthetic construct
  source 1..75: mol_type = other DNA
ctacaaggttattcatttctttcggccgccgaacaatacgataatgatttgccacaagccgaaagaataacccga

SEQ ID NO: 776569 - DNA, 75 bp, synthetic construct
  source 1..75: mol_type = other DNA
agaaataaaatttacaatttttgctgactggatcactgagtttggtaaggctgtccggacagataactggcgtcc

SEQ ID NO: 776570 - DNA, 75 bp, synthetic construct
  source 1..75: mol_type = other DNA
agatattttaatcctgtaggtgctcataagactggattaattggagaagatcctttaggaactcctaataacctg

SEQ ID NO: 776571 - DNA, 75 bp, synthetic construct
  source 1..75: mol_type = other DNA
gcggtgaagtcagcgtggaaatgcagctaccgaagatcctttggcttaagcgccatttgccggatcgctacgcgc

SEQ ID NO: 776572 - DNA, 75 bp, synthetic construct
  source 1..75: mol_type = other DNA
gctgattgtcgattttcaacccacaatttattacggacagaatacaaaaaataatacaccttattttaacccgaa

SEQ ID NO: 776573 - DNA, 75 bp, synthetic construct
  source 1..75: mol_type = other DNA
gttatattggatctcataccgtagttgaattgctatctcgtggttatgaagtgattattttggataacttctcta

SEQ ID NO: 776574 - DNA, 75 bp, synthetic construct
  source 1..75: mol_type = other DNA
gtggtctggtgggagactcgggggcttcagcggtagccggcgcacagtcgggtaagacaacggttgagaataatc

SEQ ID NO: 776575 - DNA, 75 bp, synthetic construct
  source 1..75: mol_type = other DNA
tggtcaacgccactcaaagcaaaaaaagagttaggctgggaagctaaatatagtttagaaaatatgatagaagat

SEQ ID NO: 776576 - DNA, 75 bp, synthetic construct
  source 1..75: mol_type = other DNA
ataatctaggtacaggcaaggggtattctgttttagaattagtcaatacgtttgaacaggtttctggtattaaaa

SEQ ID NO: 776577 - DNA, 75 bp, synthetic construct
  source 1..75: mol_type = other DNA
taatgagatcaacaattctgttgagcaacaaatagaaaaaataaaatcgtctggagtagatcttcctgaagatgc

SEQ ID NO: 776578 - DNA, 75 bp, synthetic construct
  source 1..75: mol_type = other DNA
attatgttgagatcctcgatggcggcacggcgggaatggagctgcttggtgacatggcaaatcgcgatcatctga

SEQ ID NO: 776579 - DNA, 75 bp, synthetic construct
  source 1..75: mol_type = other DNA
ggtaatgcgggtggtagtttatcatctgagtttggaagctccattatccagaaaaagaaagatgcaatggaggct

SEQ ID NO: 776580 - DNA, 75 bp, synthetic construct
  source 1..75: mol_type = other DNA
gcgtccggcggcgaggcgattctgcaagccgagttcgttcgtgactggttccgtgcctgtaaaaaagaaggtatt

SEQ ID NO: 776581 - DNA, 75 bp, synthetic construct
  source 1..75: mol_type = other DNA
accgttcatctacaatttgtttaacgttggcctgacctggaacaccgcgtccaaatctgcaacgctggtatcagc

SEQ ID NO: 776582 - DNA, 75 bp, synthetic construct
  source 1..75: mol_type = other DNA
tctggagtattacagcaacaatgtagctggaacattaaatttgattgaatgcgtgttacgctatagaattaataa

SEQ ID NO: 776583 - DNA, 75 bp, synthetic construct
  source 1..75: mol_type = other DNA
tacctataacagaaaaagatagaataggaggtacaacgaatccctatggaagttcaaagtttttttctgaagtga

SEQ ID NO: 776584 - DNA, 75 bp, synthetic construct
  source 1..75: mol_type = other DNA
cgatactttaatccggtaggagcacatcccagtggaatgataggtgaggctccgaatgggattcctaataatctt

SEQ ID NO: 776585 - DNA, 75 bp, synthetic construct
  source 1..75: mol_type = other DNA
ccaaaaatttcgtacgactatattaagatattttaatccagtgggagctcacaaatccggtgagattggggaaga

SEQ ID NO: 776586 - DNA, 75 bp, synthetic construct
  source 1..75: mol_type = other DNA
cgcaggtactctttcctgcgggagctatggctgtgaaactgtctgatatatcgtttaatctgaacagattcagtc

SEQ ID NO: 776587 - DNA, 75 bp, synthetic construct
  source 1..75: mol_type = other DNA
atggggaagacgccgatgagtgaactgctgcaaaagctgacccgtagctgttttgctgaccgggatgcactggat

SEQ ID NO: 776588 - DNA, 75 bp, synthetic construct
  source 1..75: mol_type = other DNA
ttaccccgtttctggcccggggattttttcccggtattctacgcctgtcatctggctgtgctgggcgttctggcg

SEQ ID NO: 776589 - DNA, 75 bp, synthetic construct
  source 1..75: mol_type = other DNA
gaatatcctgtttgcctttgcagtcgcagcacaggtgctgacgtggtgtgaaacgcgcagtgggtggcgtacagc

SEQ ID NO: 776590 - DNA, 75 bp, synthetic construct
  source 1..75: mol_type = other DNA
tgattacgtggtggaagactacgccgccggttgtctggtggaaaaaattaaggtcggtgatttctccacactggc

SEQ ID NO: 776591 - DNA, 75 bp, synthetic construct
  source 1..75: mol_type = other DNA
ttacctccgttgatgttgaagactggacaccggagcgtcgattctcagttgttcttgagacggctacgctgtcag

SEQ ID NO: 776592 - DNA, 75 bp, synthetic construct
  source 1..75: mol_type = other DNA
acgcacgggattgtttgttgaacaggttaaagaatggcgggctatctcaattcaggcgcatgaaaagaaattgac

SEQ ID NO: 776593 - DNA, 75 bp, synthetic construct
  source 1..75: mol_type = other DNA
agtcagtttacgcccggaaaaattacaggaacagcaccagccagaaagattactctttacgcaaaacttggatat

SEQ ID NO: 776594 - DNA, 75 bp, synthetic construct
  source 1..75: mol_type = other DNA
aaacttcgatattgtatttagcagtaaagaaataccaattgttaatgaatattctgctgatttatcagacgaaca

SEQ ID NO: 776595 - DNA, 75 bp, synthetic construct
  source 1..75: mol_type = other DNA
tcaccgcgttaattctgctgctgctctgttttctgctgtttaccgtgattgaaaaactaccggggcgaaatgtta

SEQ ID NO: 776596 - DNA, 75 bp, synthetic construct
  source 1..75: mol_type = other DNA
gtgggtgcacgaagcagtgtttttaaatcgctccctgttaacgtggtttgtcggggtaatcccgcggttgtgata

SEQ ID NO: 776597 - DNA, 75 bp, synthetic construct
  source 1..75: mol_type = other DNA
tatcagcagggcgttgagtgcgctacgccgcagagggaacaggcacgctataccactacgcttgatcatcaatcg

SEQ ID NO: 776598 - DNA, 75 bp, synthetic construct
  source 1..75: mol_type = other DNA
tagtattggtaacgcagtcactttaggaagtcagtttacgcccggaaaaatcacgggagtagggctgtctaaaaa

SEQ ID NO: 776599 - DNA, 75 bp, synthetic construct
  source 1..75: mol_type = other DNA
tgaacgacgagatccaccaaaatctggttggagtttccaaccaccgcacgctggagttcgctaaatatctggcga

SEQ ID NO: 776600 - DNA, 75 bp, synthetic construct
  source 1..75: mol_type = other DNA
gtcatcagagttaccgtcgattgctttcccgcgcccgtgaatatgtgctggaaaacatgtccgaaccagtgacgg

SEQ ID NO: 776601 - DNA, 75 bp, synthetic construct
  source 1..75: mol_type = other DNA
tagccagtcggcgctggaagtgaaagagcagcataaagccgcgctgtggggctttgtccaacaggcgctggcgac

SEQ ID NO: 776602 - DNA, 75 bp, synthetic construct
  source 1..75: mol_type = other DNA
tattcaccttgagtatttcaaccttaataatgcattttatatacaacatttagaccatgaactcatatcctatac

SEQ ID NO: 776603 - DNA, 75 bp, synthetic construct
  source 1..75: mol_type = other DNA
tcgcctgaacgccgtgcgtagagaattaattagcccgtggtcgaaaagtatgaccgtaaaagacgccgccatgca

SEQ ID NO: 776604 - DNA, 75 bp, synthetic construct
  source 1..75: mol_type = other DNA
cgtcaggctaactttttgcataacccggaaagggtgctgcatatgttacgtaaccagtcggcgctggaagtgaaa

SEQ ID NO: 776605 - DNA, 75 bp, synthetic construct
  source 1..75: mol_type = other DNA
ccgcacgctacaaaacgcgtttcacgctattttaggcattggcccgaacgcgtggctgaaacgcattcgcctgaa

SEQ ID NO: 776606 - DNA, 75 bp, synthetic construct
  source 1..75: mol_type = other DNA
agcgaccagcgaccagcgaccagcgaccagcgaccagcgaccagcgaccagcgaccagcgaccagcgaccagcga

SEQ ID NO: 776607 - DNA, 75 bp, synthetic construct
  source 1..75: mol_type = other DNA
cagcgaccagcagtaaatcaagaaagtctgtaaaatctgttgagccggaaattaccgaactggcgaactcatggc

SEQ ID NO: 776608 - DNA, 75 bp, synthetic construct
  source 1..75: mol_type = other DNA
agaagtgattttattgggtttaatggtagtaaacaggtaggttatgttttattaactttatttttaacgaaagta

SEQ ID NO: 776609 - DNA, 75 bp, synthetic construct
  source 1..75: mol_type = other DNA
aaaccaccgaagaaagagaccatggaacgcgtgaaaggcattcttgagcagtacggtcataaggtcatgttctaa

SEQ ID NO: 776610 - DNA, 75 bp, synthetic construct
  source 1..75: mol_type = other DNA
ttgggaaaacaggagaaaaattccctgcggacgcatttattctcaatcctccgtattcagctaaaggtaacggca

SEQ ID NO: 776611 - DNA, 75 bp, synthetic construct
  source 1..75: mol_type = other DNA
tttaccagaatgaaaaggggcttggtgaaagcgatcgtgtttaccttgttgtggctaccgttattgcaacgttgg

SEQ ID NO: 776612 - DNA, 75 bp, synthetic construct
  source 1..75: mol_type = other DNA
aatactgccggaggtgagtcagctggcggtagcgttggatgttatccagaagctcagcgcgtttgttgcagagca

SEQ ID NO: 776613 - DNA, 75 bp, synthetic construct
  source 1..75: mol_type = other DNA
ggaggctattatgccactgacccgcgccgctgacggatcgctgggcgtgcgtgctatgggaatctcaggcttaac

SEQ ID NO: 776614 - DNA, 75 bp, synthetic construct
  source 1..75: mol_type = other DNA
aataaactggtaaatgattacgatatttactctatcgtcatgactacggacctctttcatgattacgcctgccaa

SEQ ID NO: 776615 - DNA, 75 bp, synthetic construct
  source 1..75: mol_type = other DNA
cgccgcgctgctggtcgcctttgtggccacattcgccgtgtactggtatatcgggcgcaccggtcgccagcagag

SEQ ID NO: 776616 - DNA, 75 bp, synthetic construct
  source 1..75: mol_type = other DNA
ttcacatcagacccgcgatatgacccgcagggaagaggtcaacatcaatcatgcgacagataaagcgcgtgattt

SEQ ID NO: 776617 - DNA, 75 bp, synthetic construct
  source 1..75: mol_type = other DNA
tttactggtttgtccgggtgatgtcaccttttacggaaaaaatggtgagtcagcctgtctatactatccgttatt

SEQ ID NO: 776618 - DNA, 75 bp, synthetic construct
  source 1..75: mol_type = other DNA
cagcaggaacaggtgaatttgttaacgtcatcaaagaaatgggcttaaacgtaaatgactttacaaagtacgtag

SEQ ID NO: 776619 - DNA, 75 bp, synthetic construct
  source 1..75: mol_type = other DNA
aatcattcgaaaagcgtaaagcggcaattactgccaaatatgcacaacgtgccgtagaaatacagcaccaagaaa

SEQ ID NO: 776620 - DNA, 75 bp, synthetic construct
  source 1..75: mol_type = other DNA
aacatggcccgcgcggtggtgatgaaattaatatcccgcaaaaaggcaaaaactacggctggccgctggcaacct

SEQ ID NO: 776621 - DNA, 75 bp, synthetic construct
  source 1..75: mol_type = other DNA
cagataatgatcaacaattccaggagaaactaaagaaacataaagacagtattgtacaggccgttcgtgattcac

SEQ ID NO: 776622 - DNA, 75 bp, synthetic construct
  source 1..75: mol_type = other DNA
tcagcaaaatagtctattagctagtggacaagttggggcagcaggtcaagcattcttaggtaatcagattgatga

SEQ ID NO: 776623 - DNA, 75 bp, synthetic construct
  source 1..75: mol_type = other DNA
acattaggactatcagatgagaaactacgccagctattaaatgatcaagttacagcaggtgcagcaagtagacta

SEQ ID NO: 776624 - DNA, 75 bp, synthetic construct
  source 1..75: mol_type = other DNA
tcgggcgcaccggtcgccagcagagtgaggatgaaatcatcgggggccgcgctctcagtgagtcaccaaaagacg

SEQ ID NO: 776625 - DNA, 75 bp, synthetic construct
  source 1..75: mol_type = other DNA
gcgctggcggcggagaatgagctggctcgtaaagcagttcaggcattctgcgatgttgttggcgacaacactgag

SEQ ID NO: 776626 - DNA, 75 bp, synthetic construct
  source 1..75: mol_type = other DNA
ctgaaaactcaaagcacggatataaacaaaatggaagaatacctatatcgctaggtaaatttagtggtgatcatc

SEQ ID NO: 776627 - DNA, 75 bp, synthetic construct
  source 1..75: mol_type = other DNA
agctcatatcacaaaggaagattctggcgatttgcaaatgaaaaaatgaaagcgcgatggggagatcgggctgca

SEQ ID NO: 776628 - DNA, 75 bp, synthetic construct
  source 1..75: mol_type = other DNA
gcactgcctgacaccacacggagaatcactgctggcgtattacgactccccggcctccgtatttgcggcaatgct

SEQ ID NO: 776629 - DNA, 75 bp, synthetic construct
  source 1..75: mol_type = other DNA
atgagtgcggtaaacatcgcgcttaacgccccaatctctcgatttatggtgctccaaggattatttgatctttac

SEQ ID NO: 776630 - DNA, 75 bp, synthetic construct
  source 1..75: mol_type = other DNA
tacaccgctgaatttaaccgcctttccaccctcttctcgcaggagtggcagcgcgtgacgggataccagccatga

SEQ ID NO: 776631 - DNA, 75 bp, synthetic construct
  source 1..75: mol_type = other DNA
gatctatcgggccgggcaaggggcgcgcttttctaatcattgatgaaggtgattctttgggagcatcccgtagcc

SEQ ID NO: 776632 - DNA, 75 bp, synthetic construct
  source 1..75: mol_type = other DNA
tccacactggttgacggcaagattgagaagacagccatctctatccggagcgtactgacaaactacgttaaagct

SEQ ID NO: 776633 - DNA, 75 bp, synthetic construct
  source 1..75: mol_type = other DNA
tcgcactgaagaagaacggcacaggtttgccggcctgttcgagggggaatcattaattcaggctgttccgggggg

SEQ ID NO: 776634 - DNA, 75 bp, synthetic construct
  source 1..75: mol_type = other DNA
ttttaccgctctgcaagctcgttgctgagcagtatccgcttgttatttttcatggtgatgtaggaacaggtaaaa

SEQ ID NO: 776635 - DNA, 75 bp, synthetic construct
  source 1..75: mol_type = other DNA
aatgtcaagagcgtttcctgaacgggctttaagttttaatgatttgatggaattattgaaaataatgaggccttc

SEQ ID NO: 776636 - DNA, 75 bp, synthetic construct
  source 1..75: mol_type = other DNA
atggtacaggtcacgaagtacgataattttccggaaatcatcgaagcgaacattctgagcacatttgaacaactg

SEQ ID NO: 776637 - DNA, 75 bp, synthetic construct
  source 1..75: mol_type = other DNA
tcgtgacgttcgcactggacccgacggttatttatacgttctcaccgacgagcccaacggggaattactcaaagt

SEQ ID NO: 776638 - DNA, 75 bp, synthetic construct
  source 1..75: mol_type = other DNA
aactccatcgaggcaacttcgcggccatcggccagcagattcagccattgctggatgccgggcagtacttccgcc

SEQ ID NO: 776639 - DNA, 75 bp, synthetic construct
  source 1..75: mol_type = other DNA
tcggctacgaaagcaaagaccgtgtagatgtcgtgtccggcgaggtcaccaccgtccaatccctccgccatacgt

SEQ ID NO: 776640 - DNA, 75 bp, synthetic construct
  source 1..75: mol_type = other DNA
aactgcatcgcggtaacttcaccgctatcggtcagcagctccagccttatttggaagacggcaagtgctttcgca

SEQ ID NO: 776641 - DNA, 75 bp, synthetic construct
  source 1..75: mol_type = other DNA
gtgaaactgatcctgccttttcctccgagcgtgaacacttactggcgcgcccctaacaaggggccgctggccggt

SEQ ID NO: 776642 - DNA, 75 bp, synthetic construct
  source 1..75: mol_type = other DNA
atgctggtggaatggggacccgttgtgccgaaaggtcgggtagagataacgatcagcagatatgaaccggcgggt

SEQ ID NO: 776643 - DNA, 75 bp, synthetic construct
  source 1..75: mol_type = other DNA
cgagcgtgaacacttactggcgcgcccctaacaaggggccgctggccggtcgtcacctcattagcgctgatggtc

SEQ ID NO: 776644 - DNA, 75 bp, synthetic construct
  source 1..75: mol_type = other DNA
gcgcagcctgtctcaaaatagcttaagccacatgtggtacaccgaaatcagcgaatacctcatcagccggggtaa

SEQ ID NO: 776645 - DNA, 75 bp, synthetic construct
  source 1..75: mol_type = other DNA
catcggccagcagattcagccattgctggatgccgggcaatgcttacgcctgcaggttaagccgtggcgcgagaa

SEQ ID NO: 776646 - DNA, 75 bp, synthetic construct
  source 1..75: mol_type = other DNA
aagagcctgataagcgcggcggggcgaaaatttcagagcgcggcgtgtgcagcaatagttgagcagttacgtcgt

SEQ ID NO: 776647 - DNA, 75 bp, synthetic construct
  source 1..75: mol_type = other DNA
gaccggttatcccggaggggaaggtcgagatcactatcagtaagtacgaaaaagcgagttgcaaattagcaactc

SEQ ID NO: 776648 - DNA, 75 bp, synthetic construct
  source 1..75: mol_type = other DNA
ctgagataatcgaccctgaactaattgaaaaaagacctcatcaggcaagaaaattgatgaggggaatcttaaaaa

SEQ ID NO: 776649 - DNA, 75 bp, synthetic construct
  source 1..75: mol_type = other DNA
ccccaacaaaggggcgtttgcaggtaagagcctgataagcgcggcggggcgcaaattccagagcgcggcgtgctc

SEQ ID NO: 776650 - DNA, 75 bp, synthetic construct
  source 1..75: mol_type = other DNA
catcatgtgcatatgttcccgcagattttcccgattgttgccaggtttgcggcagagcagggcattgcgttgcgg

SEQ ID NO: 776651 - DNA, 75 bp, synthetic construct
  source 1..75: mol_type = other DNA
gcaaaaactctaggactatcagacgagaaactacgccagatacttaacgatcaagttacagcaggtgcagccgga

SEQ ID NO: 776652 - DNA, 75 bp, synthetic construct
  source 1..75: mol_type = other DNA
atatctgtattttcactattaagaataaaccagtacatgtcagagagcggtttaacctgaattctggccggatgt

SEQ ID NO: 776653 - DNA, 75 bp, synthetic construct
  source 1..75: mol_type = other DNA
atgaagctgatcgtgcctttcccccccagcgtgaacacgtactggcgacaccccaacaaaggggtgtttgctggt

SEQ ID NO: 776654 - DNA, 75 bp, synthetic construct
  source 1..75: mol_type = other DNA
tcgtgatgttcgcagcggacccgacggttatttatacgttctgaccgacgagtccaatggagaattactcaaagt

SEQ ID NO: 776655 - DNA, 75 bp, synthetic construct
  source 1..75: mol_type = other DNA
ccgtttttcgccagacaccaaaactttctaccggcaaccattttggcgggcggctggtcttcgacggtaacggtt

SEQ ID NO: 776656 - DNA, 75 bp, synthetic construct
  source 1..75: mol_type = other DNA
atcaccctgcgcggtggcgagttgcgtcactggcaagcaggaaaaggattatctgcgccgcttgtcggtgtgccg

SEQ ID NO: 776657 - DNA, 75 bp, synthetic construct
  source 1..75: mol_type = other DNA
atgaagctgatcatgcctttccctcccagcgtgaacacgtactggcgacaccccaacaaaggggagtttgctggt

SEQ ID NO: 776658 - DNA, 75 bp, synthetic construct
  source 1..75: mol_type = other DNA
aagagcctgataagcacggcggggcgaaaattccagagcgcggcgtgcgcagcaatagttgagcagttacgtcgt

SEQ ID NO: 776659 - DNA, 75 bp, synthetic construct
  source 1..75: mol_type = other DNA
catcgaccatgcggtgcagttgagtcgtgatgagccgagcctggccgtcgggatgcattttgtcctcaccctggg

SEQ ID NO: 776660 - DNA, 75 bp, synthetic construct
  source 1..75: mol_type = other DNA
atgaagctgatcctgcctttcccgcccagcgtgaacacgtactggcgacaccccaacaaaggggtgtttgctggt

SEQ ID NO: 776661 - DNA, 75 bp, synthetic construct
  source 1..75: mol_type = other DNA
atgaagctgatcttgcctttcccgcccagcgtgaacacgtactggcgacaccccaacaaaggggcgtttgctggt

SEQ ID NO: 776662 - DNA, 75 bp, synthetic construct
  source 1..75: mol_type = other DNA
atgaagctgatcttgcctttcccccccagcgtgaacacgtactggcgacaccccaacaaaggggggtttgctggt

SEQ ID NO: 776663 - DNA, 75 bp, synthetic construct
  source 1..75: mol_type = other DNA
ttaactactggcagtcaagtttatccggtataaccatgagagatcatgcatggatgaaaatcatctctggcgaaa

SEQ ID NO: 776664 - DNA, 75 bp, synthetic construct
  source 1..75: mol_type = other DNA
cataagaaaagatggagatatgttcctcctacgacaaattgaagcagagaaaggtcatagcctattagctgctct

SEQ ID NO: 776665 - DNA, 75 bp, synthetic construct
  source 1..75: mol_type = other DNA
gaccgtctcatcggcaaactggagtatgacgcccgattactgcgggagccggacacgaagcccctgggcgacgga

SEQ ID NO: 776666 - DNA, 75 bp, synthetic construct
  source 1..75: mol_type = other DNA
gttgcacgctggctggaggcggagaacgatccacgtctgagcgagattgtcagccatctgaatcatgttgttgaa

SEQ ID NO: 776667 - DNA, 75 bp, synthetic construct
  source 1..75: mol_type = other DNA
gttgcacgctggctggaagcggaaaacgatccgcgtctgaacgagattgtcagccatctgaatcatgttgttgaa

SEQ ID NO: 776668 - DNA, 75 bp, synthetic construct
  source 1..75: mol_type = other DNA
gaccgactggttctgggaaatccacaacactgaaaaatctgttagaacttctttatgttgaaagaagacaaaaag

SEQ ID NO: 776669 - DNA, 75 bp, synthetic construct
  source 1..75: mol_type = other DNA
tagcggtggccactgaacgctacatcatggcgaacgctgaaaagcgggaatatatacagggctaccgtgatcgtc

SEQ ID NO: 776670 - DNA, 75 bp, synthetic construct
  source 1..75: mol_type = other DNA
atgacgcccgattactgcgggaaccggacacaaagcccctgggtgatggactttttgagatccgcacgatgggga

SEQ ID NO: 776671 - DNA, 75 bp, synthetic construct
  source 1..75: mol_type = other DNA
ttgctgaggattttcattaaaaaatcccccaaaactccaccggcagagatagagctggcatttcgcagacttgag

SEQ ID NO: 776672 - DNA, 75 bp, synthetic construct
  source 1..75: mol_type = other DNA
ttgtttgaaatccggacaatgggcaccgatatcgcacgaggattgtgggtatatcagagcggagagcgcattttt

SEQ ID NO: 776673 - DNA, 75 bp, synthetic construct
  source 1..75: mol_type = other DNA
cctgggtcacgcgactatccagcaaacaatggcgtatgcacattttgcgccggattatttgcaggatgcggtggc

SEQ ID NO: 776674 - DNA, 75 bp, synthetic construct
  source 1..75: mol_type = other DNA
ataatcgtgtgacgtttcttgagaccaaaaacggtcgtaagagaacggtgccaatctcgcaggcggtttgtgagg

SEQ ID NO: 776675 - DNA, 75 bp, synthetic construct
  source 1..75: mol_type = other DNA
gtttcttcatgtcatatgaagcatcatctggtacagatgttacgtgaaatcgcaacaagaaaagggtatccaaac

SEQ ID NO: 776676 - DNA, 75 bp, synthetic construct
  source 1..75: mol_type = other DNA
gcttttgccaggataagcatttgaccttgggtgaagggatcgagttgctaatccaacaggagaaggaacgagcga

SEQ ID NO: 776677 - DNA, 75 bp, synthetic construct
  source 1..75: mol_type = other DNA
agcgttaacggcttttctgctctggggctggtggaaatgacgcgtaaacgcacccgcgaaagcattgagcacgta

SEQ ID NO: 776678 - DNA, 75 bp, synthetic construct
  source 1..75: mol_type = other DNA
agcgttaatggtttttcggcgctggggctggtggagatgacgcgtaaacgcacccgcgaaagcattgagcacgta

SEQ ID NO: 776679 - DNA, 75 bp, synthetic construct
  source 1..75: mol_type = other DNA
gcccaattatgaataatgccctgtcaggaattgatatggctttatgggatctaaaaggaaaagttgccggactcc

SEQ ID NO: 776680 - DNA, 75 bp, synthetic construct
  source 1..75: mol_type = other DNA
acttatagccagtaaattagccagagcaaaaaatattcaaccaaaacgttcacccaccaataaaacgcctggcat

SEQ ID NO: 776681 - DNA, 75 bp, synthetic construct
  source 1..75: mol_type = other DNA
ctgcaccccaggctgggggccattgtattcatgatgctggagtcaccggcctttgcctggactgtcgaagagctg

SEQ ID NO: 776682 - DNA, 75 bp, synthetic construct
  source 1..75: mol_type = other DNA
aaatttacagcagattgaaaaatcagctatataacattattgacgttgatgaggaactaagcaaatattcagtat

SEQ ID NO: 776683 - DNA, 75 bp, synthetic construct
  source 1..75: mol_type = other DNA
taatgtcagtaatattattccagtagatgaggaattaagaaaaaattcaattcttttttctaatggtgatttttt

SEQ ID NO: 776684 - DNA, 75 bp, synthetic construct
  source 1..75: mol_type = other DNA
tcacttaacccattacaagcccgctgccgcagatattcccgtggcgagcgataacccagcgcactatgcggatgc

SEQ ID NO: 776685 - DNA, 75 bp, synthetic construct
  source 1..75: mol_type = other DNA
ccgatgccgcttatctgaaacgcgtctggaccaaagttatggagcgtaaaaaacgcccgcagacccgttatcagc

SEQ ID NO: 776686 - DNA, 75 bp, synthetic construct
  source 1..75: mol_type = other DNA
cgtgaacgcctgaaaaaagtggtcgcagagtattgcgacgagcagggcggatttatcatccgtactgcggcggaa

SEQ ID NO: 776687 - DNA, 75 bp, synthetic construct
  source 1..75: mol_type = other DNA
gttcgcttccctaatgttaacgggtgtccagaatgttttcatggatatatcgggcgtaccattgttgcagaagtt

SEQ ID NO: 776688 - DNA, 75 bp, synthetic construct
  source 1..75: mol_type = other DNA
ccgacttacccaaagggcaggccacgcatgtcatgcggcacacgttcgccacgcatttcatgatgaacggcggga

SEQ ID NO: 776689 - DNA, 75 bp, synthetic construct
  source 1..75: mol_type = other DNA
atattgggctggataaagccgcgtttcttcatgcatctgacatcatgccgcacactgaatgtgtggcgggtgaag

SEQ ID NO: 776690 - DNA, 75 bp, synthetic construct
  source 1..75: mol_type = other DNA
acggtcgcggaacggtgaaaaccgtggaaacggtatgctatgaaatcatgcgcgagattgttcgtgtccaccatg

SEQ ID NO: 776691 - DNA, 75 bp, synthetic construct
  source 1..75: mol_type = other DNA
atattaagaaagcattactcaaaaggagagtggctccgaatggcttcccttcaaaagttgcctcctgttataccg

SEQ ID NO: 776692 - DNA, 75 bp, synthetic construct
  source 1..75: mol_type = other DNA
aaaagcaaaggcagtcaacttactcatactgaattgttcgctgtgaagcgacaattggaagagcttcgcagaaac

SEQ ID NO: 776693 - DNA, 75 bp, synthetic construct
  source 1..75: mol_type = other DNA
tcgcctgctgacatacctcgatggtaaaagtccagacagcgatccaaccctgacagaaatgcatgtaatcaaacg

SEQ ID NO: 776694 - DNA, 75 bp, synthetic construct
  source 1..75: mol_type = other DNA
ccaggtctcagagcttcgcttgcatttaattaccgctgacctgtggagagcttcccatgaaggggatgcagaaga

SEQ ID NO: 776695 - DNA, 75 bp, synthetic construct
  source 1..75: mol_type = other DNA
agcttgggcggcaggcttgtctcagttaaatgtatttcggagatttcgtttattcgtcgtcaccggattgagtgc

SEQ ID NO: 776696 - DNA, 75 bp, synthetic construct
  source 1..75: mol_type = other DNA
ccataacaaaacgcagcaacaaatttacgtattttttaacatcattgtagcaggtgatttttttcaggcgattat

SEQ ID NO: 776697 - DNA, 75 bp, synthetic construct
  source 1..75: mol_type = other DNA
ctccccccaaaagagagtattttcttgatctgtgacacgcttttgttaatccataacaaaaacacagcaataatt

SEQ ID NO: 776698 - DNA, 75 bp, synthetic construct
  source 1..75: mol_type = other DNA
tccggctatacccgcgattaatatcaaagcctggaaagctttaactgatatatcgcaaaagctaaatcgaatttc

SEQ ID NO: 776699 - DNA, 75 bp, synthetic construct
  source 1..75: mol_type = other DNA
cattattcgaaaggagagtggcttcgtatggcttcccttcaaaaattacctcatgttatacctgcgattaatacc

SEQ ID NO: 776700 - DNA, 75 bp, synthetic construct
  source 1..75: mol_type = other DNA
atggtgttaatgatatactattatatgattatctagggacaacttatacaaatcttaaaaatattccttttgaat

SEQ ID NO: 776701 - DNA, 75 bp, synthetic construct
  source 1..75: mol_type = other DNA
gcaaggttatggcgaagataacgaagagcaggaggaggggctgcgctgtatcgcagttccggtatttgaccgctt

SEQ ID NO: 776702 - DNA, 75 bp, synthetic construct
  source 1..75: mol_type = other DNA
ttttcaccaatgcgttaatggcaatcccttatgcgctgaaagtgctggaaaacccgatgcgcgatatcaccgccc

SEQ ID NO: 776703 - DNA, 75 bp, synthetic construct
  source 1..75: mol_type = other DNA
tccgcttcgttgaatggccgtggttacggcgacaaatcccgccggttgctgcgctgatctttatgctctgtttcg

SEQ ID NO: 776704 - DNA, 75 bp, synthetic construct
  source 1..75: mol_type = other DNA
tttgctggcgcacgtattttttaatctgccgatggcgagccgcttattgctccaggcactggaaaacattcccgg

SEQ ID NO: 776705 - DNA, 75 bp, synthetic construct
  source 1..75: mol_type = other DNA
tggcaggcaaggcccgccgatcaacggcggttatcagaactgattgaggtgtggtggatgcttgatggtcgtaat

SEQ ID NO: 776706 - DNA, 75 bp, synthetic construct
  source 1..75: mol_type = other DNA
gacgttataaggttgatgtaagaccacagggtgctgagggtaagcggattcgaaaaaccttcaccctgaaatcga

SEQ ID NO: 776707 - DNA, 75 bp, synthetic construct
  source 1..75: mol_type = other DNA
atgactgctattaatcgcatccttattgtggatgatgaagataatgttcgccgtatgctgagcaccgcttttgca

SEQ ID NO: 776708 - DNA, 75 bp, synthetic construct
  source 1..75: mol_type = other DNA
cgacgaactcacaccgaacaatcaggaagaacaaaaacgctgtgcgaagctgaagggcgatctcgacacttataa

SEQ ID NO: 776709 - DNA, 75 bp, synthetic construct
  source 1..75: mol_type = other DNA
acagttagggcagggcgaagaacaggttgcacgctggctggaagcggaaaacgatccgcgtctgaacgagattgt

SEQ ID NO: 776710 - DNA, 75 bp, synthetic construct
  source 1..75: mol_type = other DNA
acgccaacggtattccggtcccgatgacggtggatgaatccatcgccagcatgaaggcgtcgttactgaaaaaaa

SEQ ID NO: 776711 - DNA, 75 bp, synthetic construct
  source 1..75: mol_type = other DNA
accacggcagccaccggcaaagtgaccgcgtccacgacagcaacaggcagcacgtctgccagcacggcgaaaggg

SEQ ID NO: 776712 - DNA, 75 bp, synthetic construct
  source 1..75: mol_type = other DNA
accgacaagaagggaaagggccttcccgagagtggtaaaggagaggccctggaaataccccacagccccgaaaaa

SEQ ID NO: 776713 - DNA, 75 bp, synthetic construct
  source 1..75: mol_type = other DNA
ggaaaacgctctcctatttgatccccggcatcgccattgcccgcgaagagcaaaaaacgctggtggtaagtaccg

SEQ ID NO: 776714 - DNA, 75 bp, synthetic construct
  source 1..75: mol_type = other DNA
atgccggttattaacacgcatcagaatatcgccgcctttctcgacatgctggccgtgtccgaagggacggcaaac

SEQ ID NO: 776715 - DNA, 75 bp, synthetic construct
  source 1..75: mol_type = other DNA
aatggctgacagatgatcagctgttcggggtgatggtggcgctgacaaaagacgccagaaaacgagccagagcag

SEQ ID NO: 776716 - DNA, 75 bp, synthetic construct
  source 1..75: mol_type = other DNA
tcagtattatccaaaattgaagcgttgctggctgatgccggtcgttcctgggcgtatgcggaaggactggcatct

SEQ ID NO: 776717 - DNA, 75 bp, synthetic construct
  source 1..75: mol_type = other DNA
tgccctgcctgatttcagtccgttgtcacaggacagactcgccattcagttgatccgcgaacgcggtgcactgga

SEQ ID NO: 776718 - DNA, 75 bp, synthetic construct
  source 1..75: mol_type = other DNA
gcgacaaaaagagtgcgggttttctctcttaatataaccaaaaacgggaacattaaaggcaacctagaagggtgt

SEQ ID NO: 776719 - DNA, 75 bp, synthetic construct
  source 1..75: mol_type = other DNA
tctatcactgatgaaattataaagagaatatctattaacgataatggtgatgcaataatagataatatcacggat

SEQ ID NO: 776720 - DNA, 75 bp, synthetic construct
  source 1..75: mol_type = other DNA
ctggaaatgccagcggggcagacctttacgttgcacccgggtaacgtggttcttctgccacaaaattcagctcat

SEQ ID NO: 776721 - DNA, 75 bp, synthetic construct
  source 1..75: mol_type = other DNA
tgcactgtgtagccagatctgcgctacattctttaccctcgcggtgcgtgagtggattgcacaggttaatactga

SEQ ID NO: 776722 - DNA, 75 bp, synthetic construct
  source 1..75: mol_type = other DNA
cgcagtggcattgcagcagattaaagagcgtggtgctttacctatgattgatcgcggtgatatccgtcaggcaat

SEQ ID NO: 776723 - DNA, 75 bp, synthetic construct
  source 1..75: mol_type = other DNA
ataagctgggtaatcgctctaacgccagctgcgaagtggagtttcaggatgccattggctggttgttggggcagg

SEQ ID NO: 776724 - DNA, 75 bp, synthetic construct
  source 1..75: mol_type = other DNA
tcggctgcaacgttcggcgcgttattttttgacctctttgccggaagctctgtttttggcaccggaaagtgacag

SEQ ID NO: 776725 - DNA, 75 bp, synthetic construct
  source 1..75: mol_type = other DNA
cctttcacaaggcctttgtccgcgagtttggctgtactccaggggaatatcgggaaagcgtcaggcaacttcagg

SEQ ID NO: 776726 - DNA, 75 bp, synthetic construct
  source 1..75: mol_type = other DNA
cacccactgacgaaaaacaacgggtacgacgtcatcgtcactggcttcgatggcaaaccggagatttttaacgac

SEQ ID NO: 776727 - DNA, 75 bp, synthetic construct
  source 1..75: mol_type = other DNA
tttcgccctacggcctgcaaggcattttgctggcgcacgtattttttaatctgccgatggcgagccgcttattac

SEQ ID NO: 776728 - DNA, 75 bp, synthetic construct
  source 1..75: mol_type = other DNA
tatgcggcaatcccttcagagtctattcgtcgactactggccttacgtgaagcgggaatcattcatattctcgcc

SEQ ID NO: 776729 - DNA, 75 bp, synthetic construct
  source 1..75: mol_type = other DNA
ccttgcccgggttttcatcgataattatgcggcaatcccttcagagtctattcgtcgactactggccttacgtga

SEQ ID NO: 776730 - DNA, 75 bp, synthetic construct
  source 1..75: mol_type = other DNA
aacccgatgcgcgatatcaccgcccgctacagcatgttgtgtcagtcgttgggcattgaaggctggtcacgctta

SEQ ID NO: 776731 - DNA, 75 bp, synthetic construct
  source 1..75: mol_type = other DNA
atcgaactggctatttatcaggcgctgagttacgactacgatcccacccgcgcggcgatgctggcgctgatccag

SEQ ID NO: 776732 - DNA, 75 bp, synthetic construct
  source 1..75: mol_type = other DNA
ctgggcggcaatctggcaggacagctacctgtggcatgtggtgcgcttctccttctggcaggcgtttctctcggc

SEQ ID NO: 776733 - DNA, 75 bp, synthetic construct
  source 1..75: mol_type = other DNA
taccgaaagggttccggggcagcaatgctattaaagtgcaattgtggtgggcggtacaggcaacaatatttgcct

SEQ ID NO: 776734 - DNA, 75 bp, synthetic construct
  source 1..75: mol_type = other DNA
ggtgcaaaaataggaaaaaacgtagtcattcggccttcaataaaaatcacttacccgtggaaattaaccctggga

SEQ ID NO: 776735 - DNA, 75 bp, synthetic construct
  source 1..75: mol_type = other DNA
ttatccgcgagcgcggcgcgctggaagatttgcagcaggggcgcatcgagcgcgcggtttcccgctgtcgcaata

SEQ ID NO: 776736 - DNA, 75 bp, synthetic construct
  source 1..75: mol_type = other DNA
gtacgcaaggaaggctggacaacgtcaccaaaaccaggcgtccagggtggcaaagcccgactggttcacgtcaat

SEQ ID NO: 776737 - DNA, 75 bp, synthetic construct
  source 1..75: mol_type = other DNA
gaacaggttcgtgaatatattcgcaatgcagaacgcccggagggtcagggagaaatacccaccctgtctggcgat

SEQ ID NO: 776738 - DNA, 75 bp, synthetic construct
  source 1..75: mol_type = other DNA
tcaatttatataccctcggtgaaataaccattggcgcacattcggtgatatcgcaaaaaagttatttatgcaccg

SEQ ID NO: 776739 - DNA, 75 bp, synthetic construct
  source 1..75: mol_type = other DNA
atgtgctgcgcgttctcaataagcaagcgggcgtatacgacttattgtcggaagcgtttgtggaagtgaaagggc

SEQ ID NO: 776740 - DNA, 75 bp, synthetic construct
  source 1..75: mol_type = other DNA
aaaggtggtcgtattttctctttcacagctctgactgtagttggcgatggtaacggtcgcgttggttttggttac

SEQ ID NO: 776741 - DNA, 75 bp, synthetic construct
  source 1..75: mol_type = other DNA
cacagcaagacaactgatggggtttggtattactaacaatgtgcttattaaaaagccgaatgaaatatttgccgg

SEQ ID NO: 776742 - DNA, 75 bp, synthetic construct
  source 1..75: mol_type = other DNA
cttttcacaaggcgtttgtccgcgagtttggttgtactccgggagaatatcgggaaagggtcagacagcttgcac

SEQ ID NO: 776743 - DNA, 75 bp, synthetic construct
  source 1..75: mol_type = other DNA
ggacaccctgacggcacgcggtgctgaagtcattttttgcgaatgttatcaacgatgcgccattcattacgatgg

SEQ ID NO: 776744 - DNA, 75 bp, synthetic construct
  source 1..75: mol_type = other DNA
ggtgaaggcgatctgttgtttgccctttcgcaacacgccgttgcttatgcccaatcgcaactgcatcagcaagct

SEQ ID NO: 776745 - DNA, 75 bp, synthetic construct
  source 1..75: mol_type = other DNA
ggtgaaggcgatctactgtttgcgctttcgcaacatgccgtcgcttttgcccaatcacagttgcatcagcaaagc

SEQ ID NO: 776746 - DNA, 75 bp, synthetic construct
  source 1..75: mol_type = other DNA
gcgctggcacgcgaagcatggttaaacgcgggaggcgagatccatgcctcgaatattgtctggcccgagtcggta

SEQ ID NO: 776747 - DNA, 75 bp, synthetic construct
  source 1..75: mol_type = other DNA
gcaccggattgcagcaagcaccccgcgaatctgttagccaattaatcgaccatgctaattcccatccggcgccga

SEQ ID NO: 776748 - DNA, 75 bp, synthetic construct
  source 1..75: mol_type = other DNA
gcatgggcgatgtgctctctggtattattggcgcattgcttgggcaaaaactgtcgccgtatgatgccgcctgtg

SEQ ID NO: 776749 - DNA, 75 bp, synthetic construct
  source 1..75: mol_type = other DNA
tttttaacgtctttgccggaaacgctgtttttagcaccggttaaccacagcgtggaatataactggctgagggag

SEQ ID NO: 776750 - DNA, 75 bp, synthetic construct
  source 1..75: mol_type = other DNA
accaggtttgttaaccggcaaagcacgggatgttaccgggcaactgcattttgactcgctgggactggacagttg

SEQ ID NO: 776751 - DNA, 75 bp, synthetic construct
  source 1..75: mol_type = other DNA
catgctaattcctgtcctgcgccgattgtggcgattgatatcccttccggcctgctggcacaagccggagccgcg

SEQ ID NO: 776752 - DNA, 75 bp, synthetic construct
  source 1..75: mol_type = other DNA
tattaactatgaattaaaagacaaagttgataatccagtcaatgatgacaccgtgtttatacactatgtgggacc

SEQ ID NO: 776753 - DNA, 75 bp, synthetic construct
  source 1..75: mol_type = other DNA
tcgcccgagctatcatgccgagtctgcgaaagacggttggcagcgtatgctggaatggtttaagcagtatggtgg

SEQ ID NO: 776754 - DNA, 75 bp, synthetic construct
  source 1..75: mol_type = other DNA
atgacaacaacacaacactctggatttgcacctgctgcatcccccctcgcctcaaccatcgttcagaccccggac

SEQ ID NO: 776755 - DNA, 75 bp, synthetic construct
  source 1..75: mol_type = other DNA
gcctgacgccgaggaaatcgacggcgagaatgtgcgagttttccactacctcagcgccgtgacggcgatggcgac

SEQ ID NO: 776756 - DNA, 75 bp, synthetic construct
  source 1..75: mol_type = other DNA
cgataaccatgacctttgccgccacgccattgttgttacagatgctgccagcgccgtttcaggactggaccacgc

SEQ ID NO: 776757 - DNA, 75 bp, synthetic construct
  source 1..75: mol_type = other DNA
gaggaagtgaaaatgcaggctgccggaaaggtggcagaggtttctgaagcggctcagtccgggctcagcgaggtg

SEQ ID NO: 776758 - DNA, 75 bp, synthetic construct
  source 1..75: mol_type = other DNA
tcgcccgagctatcatgctgagtccgcaaaagacggttggcagcgtatgctggaatggtttaagcagtatggtgg

SEQ ID NO: 776759 - DNA, 75 bp, synthetic construct
  source 1..75: mol_type = other DNA
atggcaacaataaaagatgtagcgaaacgagcaaacgtttccactacaactgtgtcacacgttataaacaaaacg

SEQ ID NO: 776760 - DNA, 75 bp, synthetic construct
  source 1..75: mol_type = other DNA
gcgcgtagcctgaaggttaaccacaccaagtctatcggtttgctggcgaccagcagcgaagcagcctattttgcc

SEQ ID NO: 776761 - DNA, 75 bp, synthetic construct
  source 1..75: mol_type = other DNA
tttgatgccctagcgttacagtataaaaccagaataaaaatatatctgattaatggtgaccgactacgctcattg

SEQ ID NO: 776762 - DNA, 75 bp, synthetic construct
  source 1..75: mol_type = other DNA
tacgagtaccgcgaacagaaaattgccgccggttttacgcgtctggcggacgttccggcggacgacatcgacggt

SEQ ID NO: 776763 - DNA, 75 bp, synthetic construct
  source 1..75: mol_type = other DNA
ggcgctgcgggctgctaatgcgaaagcagagattatcgtctacccggatgccgggcatgcattcaacgctgatta

SEQ ID NO: 776764 - DNA, 75 bp, synthetic construct
  source 1..75: mol_type = other DNA
gccagacgtaaggtcatcaaagagacaatccttagctggcttttggttgacccttcatctaccgcgcgcgaataa

SEQ ID NO: 776765 - DNA, 75 bp, synthetic construct
  source 1..75: mol_type = other DNA
tgaaagcaccgccaaaagaatggctcgctgacatcaagaaaaaagaggcggttgtgcgaaacgatgatagtgaag

SEQ ID NO: 776766 - DNA, 75 bp, synthetic construct
  source 1..75: mol_type = other DNA
tttccaatcattctggtcgatgagtaccaggacactgataaaaactggattgaggcaattaaacggcattttctt

SEQ ID NO: 776767 - DNA, 75 bp, synthetic construct
  source 1..75: mol_type = other DNA
cggatgtttgcgatatgggaatgcagttgctgtattttgtgtttctgcttctgccagttgttgctgaatttaacc

SEQ ID NO: 776768 - DNA, 75 bp, synthetic construct
  source 1..75: mol_type = other DNA
cattttctctgcccgcgatgctggttttacttcctgccgccttatggtccgggatagcggtatggatggcagcag

SEQ ID NO: 776769 - DNA, 75 bp, synthetic construct
  source 1..75: mol_type = other DNA
attgaaggggcctgtccaaaaaattgtggcccttgctgacatatgtacagatgaacttgatgcttacagtcgcta

SEQ ID NO: 776770 - DNA, 75 bp, synthetic construct
  source 1..75: mol_type = other DNA
gacccaattgctcgaagccatgtctattctgcgcccggacttgggtttaaccactgtgctcgatagcgattctgg

SEQ ID NO: 776771 - DNA, 75 bp, synthetic construct
  source 1..75: mol_type = other DNA
ggtgaaaaaagcttaaagtcactcgggttttcacatgaaacatccttcattatggctcacaaagacatgattcat

SEQ ID NO: 776772 - DNA, 75 bp, synthetic construct
  source 1..75: mol_type = other DNA
aaatgttcaacttgatatttgctaatatcggcagagtcaaaaatggccttccagacttatacgcatattttttta

SEQ ID NO: 776773 - DNA, 75 bp, synthetic construct
  source 1..75: mol_type = other DNA
cagatggttcagatgtatgtactttatttgatgccgctgcattttctcgtttgactggtgaagacttaccccacc

SEQ ID NO: 776774 - DNA, 75 bp, synthetic construct
  source 1..75: mol_type = other DNA
taatccagaaatagcgcctgcaccttttatttctctcattgaaactaaccagtgtgccttggctgtcagaaaata

SEQ ID NO: 776775 - DNA, 75 bp, synthetic construct
  source 1..75: mol_type = other DNA
gttatttctggatgatgacaatctacctaaagatggagcaattcaagatgccatcaaattctcattgtcagataa

SEQ ID NO: 776776 - DNA, 75 bp, synthetic construct
  source 1..75: mol_type = other DNA
ccgactgctgcgccttttccggtaactatcaacttgagtccaacccggaaagacacgacaaagcgccactggcag

SEQ ID NO: 776777 - DNA, 75 bp, synthetic construct
  source 1..75: mol_type = other DNA
attcttcgtccgaacgaaaatcttgcagcagctctcaacgatgattcggagttcagcaatagcatgcagttcagg

SEQ ID NO: 776778 - DNA, 75 bp, synthetic construct
  source 1..75: mol_type = other DNA
cttttttattctgttaataactaaattcctttatcatgtgttttcaaaaaattatggtagcgctggtgctgcgat

SEQ ID NO: 776779 - DNA, 75 bp, synthetic construct
  source 1..75: mol_type = other DNA
atctaacaataacagcggaaacaacaggggatgtaattccagttccagtaattgctctcatggtaatgctgcatc

SEQ ID NO: 776780 - DNA, 75 bp, synthetic construct
  source 1..75: mol_type = other DNA
gaagaaaaaataaaatccaataccagaattgcaaataagtttaactcaaggaacaatcgcaacacagacaatgct

SEQ ID NO: 776781 - DNA, 75 bp, synthetic construct
  source 1..75: mol_type = other DNA
cggaacggatgttagcacggttgatgttacattttctggtacaccagacgctacgcagactaacatgctggccat

SEQ ID NO: 776782 - DNA, 75 bp, synthetic construct
  source 1..75: mol_type = other DNA
aggtcattaaaaaaagtcagagatgatatctcatttcatttcgaaaatcatgctccagaaaaaatcacgtatagt

SEQ ID NO: 776783 - DNA, 75 bp, synthetic construct
  source 1..75: mol_type = other DNA
aaagtaaaagttcaaaaaaacctactcaaagaggctttgatattaacgagtggagagtacagtgggagagaaatg

SEQ ID NO: 776784 - DNA, 75 bp, synthetic construct
  source 1..75: mol_type = other DNA
cttcgcccgaacgaaaatcttgcagcagctctcggcaatgattcggaattcagcaatggcatgcagttcaggcta

SEQ ID NO: 776785 - DNA, 75 bp, synthetic construct
  source 1..75: mol_type = other DNA
ggctctgacgtgggtgacaaaccatgctgaatactcattacgaacccccgcccgccgctgtgcgaaagaatttgc

SEQ ID NO: 776786 - DNA, 75 bp, synthetic construct
  source 1..75: mol_type = other DNA
ttaatcctggcaaagactgttgatacaggagccccggttccagcggatctggctctgacgtgggtgacaaaccat

SEQ ID NO: 776787 - DNA, 75 bp, synthetic construct
  source 1..75: mol_type = other DNA
tggaaagattgtacagaagttagttgattatcgacagaaagcagaagagcatcgccgctggttgtattcccgtgc

SEQ ID NO: 776788 - DNA, 75 bp, synthetic construct
  source 1..75: mol_type = other DNA
cgcgaaatcgctgcaggcgatggatttcagtacaattgcagacaagactgcttacgacaatattggctggcctga

SEQ ID NO: 776789 - DNA, 75 bp, synthetic construct
  source 1..75: mol_type = other DNA
atggatatttatagtagctatttatttgatttatattctttttttaaaaagaagaaaactaagtccgcgggctct

SEQ ID NO: 776790 - DNA, 75 bp, synthetic construct
  source 1..75: mol_type = other DNA
gcctttactgtcgatattgaaaaacttcaatgtcctggtgatgcgcttcaatgtccaattacactggagcagcct

SEQ ID NO: 776791 - DNA, 75 bp, synthetic construct
  source 1..75: mol_type = other DNA
cattcggtagcggtgcgaatgccattgcggacttttctcttgctctgggaggagctacctatactggaggtctct

SEQ ID NO: 776792 - DNA, 75 bp, synthetic construct
  source 1..75: mol_type = other DNA
cgaactgatgggcgatgaatttattccgctgatcaacaaaggcggcggcgcaggcgtgcaggtcacggcctacac

SEQ ID NO: 776793 - DNA, 75 bp, synthetic construct
  source 1..75: mol_type = other DNA
cctattttatggctgaacgacagcgaaaccacggagaaacagaccgatgataccccggacacaccgccagctcgt

SEQ ID NO: 776794 - DNA, 75 bp, synthetic construct
  source 1..75: mol_type = other DNA
cacgtacaaattaaccgatagcgagcgcgatattgctgccgaaatatggaacgcctgccgcgccgctatgcttca

SEQ ID NO: 776795 - DNA, 75 bp, synthetic construct
  source 1..75: mol_type = other DNA
atcgctggctggccgaagctaggcgtcatgatgacccaaggcactttggtggatgccaccatcattgaggcaccc

SEQ ID NO: 776796 - DNA, 75 bp, synthetic construct
  source 1..75: mol_type = other DNA
aaataaaattgatatcacagaatttactaatttgatggaaaatgcttatctattaaaaaatgaagtgattaaact

SEQ ID NO: 776797 - DNA, 75 bp, synthetic construct
  source 1..75: mol_type = other DNA
atgataaaccgaagcatccccctcatccccgaaaaatcgccagaggctcgtcaaccgtctttattgacggcctgc

SEQ ID NO: 776798 - DNA, 75 bp, synthetic construct
  source 1..75: mol_type = other DNA
aggctgtaggccattggttgattcaggattaagagtagccaaagcacaagacatatttgagtttgtatctgatat

SEQ ID NO: 776799 - DNA, 75 bp, synthetic construct
  source 1..75: mol_type = other DNA
aagcaggaacgccagcttatgaaagagcgttaaataatgctgcaaatgcgatacgccctatactttcaagccaaa

SEQ ID NO: 776800 - DNA, 75 bp, synthetic construct
  source 1..75: mol_type = other DNA
tttcaccttgaactggagaatggccatgtatggaaatcagaaggcgtttttgagaacatagtgctcgaagataat

SEQ ID NO: 776801 - DNA, 75 bp, synthetic construct
  source 1..75: mol_type = other DNA
gccactggctcgggcagtaaaactgaaaattgcaacagatgaagagattgcattgctggaagcatgggaactcta

SEQ ID NO: 776802 - DNA, 75 bp, synthetic construct
  source 1..75: mol_type = other DNA
gaagaaagaacacagttaactacactgaaaaaatatcgcgtgcttttaagccgggttgatacttccaaggcacct

SEQ ID NO: 776803 - DNA, 75 bp, synthetic construct
  source 1..75: mol_type = other DNA
ggaacgataccctggatgaacgaaacagttggggaatgtcggctggaatacaatccgatcgcccggataacggtg

SEQ ID NO: 776804 - DNA, 75 bp, synthetic construct
  source 1..75: mol_type = other DNA
gaaatggttatcagaatataactatgaacgcccgcatgaatcactgaacaatatgacaccggaggaataccgact

SEQ ID NO: 776805 - DNA, 75 bp, synthetic construct
  source 1..75: mol_type = other DNA
ctgatcccgcttgcgcgggccatcggcggtttgctctctgttgcactggtcgtgggtttcccccccaggcgttac

SEQ ID NO: 776806 - DNA, 75 bp, synthetic construct
  source 1..75: mol_type = other DNA
ccattatgcgtctcagtttgtctcatctatcttacgcaaaaaaaaatagaactaatatcaagcggcgctatattg

SEQ ID NO: 776807 - DNA, 75 bp, synthetic construct
  source 1..75: mol_type = other DNA
ataatggaaacattggagatgcacaatttttcattgaagattcattaaaactagaaccatgcaggaacaaaatag

SEQ ID NO: 776808 - DNA, 75 bp, synthetic construct
  source 1..75: mol_type = other DNA
gttctaaaagataatatcattgaaaaagtatggcgaacggttgtcgtaagtgatgagtccttaaccagatgcata

SEQ ID NO: 776809 - DNA, 75 bp, synthetic construct
  source 1..75: mol_type = other DNA
atgagtagtattaagatattttactggccggatacgctggtgactgcggcaattatagaagaccgtccgcatctg

SEQ ID NO: 776810 - DNA, 75 bp, synthetic construct
  source 1..75: mol_type = other DNA
aggtgcaagtgttactattgtaggtgactcttcaaagggggaattaaatatagatggtggtagcactctatatac

SEQ ID NO: 776811 - DNA, 75 bp, synthetic construct
  source 1..75: mol_type = other DNA
gtggatgccactaacagcacgatttccctcgccgcttatcgtttctccgatcgtcattttcacagctacgccaac

SEQ ID NO: 776812 - DNA, 75 bp, synthetic construct
  source 1..75: mol_type = other DNA
caacttattgtttttaaagaagttgaagctgaccgataagccgggttctgtcgtggacagtcattcatctaggcc

SEQ ID NO: 776813 - DNA, 75 bp, synthetic construct
  source 1..75: mol_type = other DNA
aagctatcgtaattaatagtaaaaatggtgaaatactgtacatgggtgtccagaatgatgacttaaaaacagttg

SEQ ID NO: 776814 - DNA, 75 bp, synthetic construct
  source 1..75: mol_type = other DNA
tttaatatcaagattagacgtgtaattaaaaacattattgtaaaacgctatagtgatgctatatttttagttgtt

SEQ ID NO: 776815 - DNA, 75 bp, synthetic construct
  source 1..75: mol_type = other DNA
atgaccttaacgcagataaataattatcttcttaataataagaaagctactgacaatgaaattaatgacatcaaa

SEQ ID NO: 776816 - DNA, 75 bp, synthetic construct
  source 1..75: mol_type = other DNA
gcgcaaaggcctgattaaaggcaaaggttacattctcaccgagcaggaatactgtgtggtggtggggacaatcaa

SEQ ID NO: 776817 - DNA, 75 bp, synthetic construct
  source 1..75: mol_type = other DNA
ttttaaacacaaaggtatcacattacttagattggatgtttttgatgacagaacaagcgaatgtctttctgaaga

SEQ ID NO: 776818 - DNA, 75 bp, synthetic construct
  source 1..75: mol_type = other DNA
tggtcgaagacgcgcacggagcgggaaacgtgctaccagtacgatgcccgcgaccagataaccagcgtactgcgg

SEQ ID NO: 776819 - DNA, 75 bp, synthetic construct
  source 1..75: mol_type = other DNA
agttagcggagctggaccaacgggacagtaatgccgaaacagtggagagtattgctaccacaggacatattgcca

SEQ ID NO: 776820 - DNA, 75 bp, synthetic construct
  source 1..75: mol_type = other DNA
cgccattattttgacgccgtcgtcgctgccgatcacgtcaaacaccataaacccgcgccagacacatttttgttg

SEQ ID NO: 776821 - DNA, 75 bp, synthetic construct
  source 1..75: mol_type = other DNA
tgatgccagatctggagcatgtacggggggagtttgtggtgttctttcacgtataataggaccaagtaaatttga

SEQ ID NO: 776822 - DNA, 75 bp, synthetic construct
  source 1..75: mol_type = other DNA
cactggagatgtatgaacttaacgagcaaaagatccagtatttgactacccctaatattaatataaataaactat

SEQ ID NO: 776823 - DNA, 75 bp, synthetic construct
  source 1..75: mol_type = other DNA
taccaggataaaaaatttgcgctgtgaagatattatgcctggtcgatggaccactcaacttgtcaataagcactt

SEQ ID NO: 776824 - DNA, 75 bp, synthetic construct
  source 1..75: mol_type = other DNA
aaaatcagcttactgctcaactgaaaacacaatcaccaataaatttgatgttgtcttttcttactgcggaaataa

SEQ ID NO: 776825 - DNA, 75 bp, synthetic construct
  source 1..75: mol_type = other DNA
tcaacgagtctatgttccttatgaaaaaaaatatctcatcaagattaaaacaccccaaaaaagaagtaatttcag

SEQ ID NO: 776826 - DNA, 75 bp, synthetic construct
  source 1..75: mol_type = other DNA
tgcctgatgcgctacgcttatcaggcctacaattctcgggccatccgtaggccggataaggcgttcacaccgcat

SEQ ID NO: 776827 - DNA, 75 bp, synthetic construct
  source 1..75: mol_type = other DNA
tccgggcagtcctcctccacagatagtggaagggagcaaaattatttccgtcaacagcctgccgctggcgcgtaa

SEQ ID NO: 776828 - DNA, 75 bp, synthetic construct
  source 1..75: mol_type = other DNA
agaatatgacatcaggtggactaatttatgccgtatctggtgtacctggattgattgctgcaaacagcattacta

SEQ ID NO: 776829 - DNA, 75 bp, synthetic construct
  source 1..75: mol_type = other DNA
tgggctgaaggggggatggaacctgtatgcgtatccgctgaacccggtgcagcggggggatcctcttgggttgtc

SEQ ID NO: 776830 - DNA, 75 bp, synthetic construct
  source 1..75: mol_type = other DNA
ggtgcgccaatatccgtcatccgccaatacattgaacaacagcaaacacctggtcaggtggaaaaccgcgcctta

SEQ ID NO: 776831 - DNA, 75 bp, synthetic construct
  source 1..75: mol_type = other DNA
taaaactttccagcccacgtcaaccaccgtctccctggcaggttatcgatactctaccagcggctatcgtgatct

SEQ ID NO: 776832 - DNA, 75 bp, synthetic construct
  source 1..75: mol_type = other DNA
gtttttcacaaactaccgtcggattgaacgctgaaccgccccggaaatcctggagactaaactccctgagaaaga

SEQ ID NO: 776833 - DNA, 75 bp, synthetic construct
  source 1..75: mol_type = other DNA
atcgctggcgttcatgaattatattgccaactattacaacgttgcctattcagggcagaatgctcatagccagcg

SEQ ID NO: 776834 - DNA, 75 bp, synthetic construct
  source 1..75: mol_type = other DNA
gaactgttgatcaccgactacgccgccgatcccgatacgctgatggtgccgctggtcggctggatgtcgcttcac

SEQ ID NO: 776835 - DNA, 75 bp, synthetic construct
  source 1..75: mol_type = other DNA
cggcatggcaaaaacagggcgcagagcggctggcaggcagtcaccagagcgtggcgtcgtggcgaccgctgggcg

SEQ ID NO: 776836 - DNA, 75 bp, synthetic construct
  source 1..75: mol_type = other DNA
gccgcaaatgagcgtatcagtcaggggttcagcgatccggtggataccggaacgggtgaatatctggattaccga

SEQ ID NO: 776837 - DNA, 75 bp, synthetic construct
  source 1..75: mol_type = other DNA
caatacctccggattccgtgaacaggtcgctgcatggctggaaaaactcagtgcctctgcggagcttcgacagca

SEQ ID NO: 776838 - DNA, 75 bp, synthetic construct
  source 1..75: mol_type = other DNA
atggtatttcaggagatattattatcttttgaaatattttctttttaagggcgttcgcagattcgatggtcaaaa

SEQ ID NO: 776839 - DNA, 75 bp, synthetic construct
  source 1..75: mol_type = other DNA
gccgttgacacgacagtagccatttatcgttgggattggtctatagagcgtaaagctttattttatcctgaccat

SEQ ID NO: 776840 - DNA, 75 bp, synthetic construct
  source 1..75: mol_type = other DNA
ccctcctcatcgatagatgataaccagggaataatgtggcagaactttaaaactagcaatattgcatattcacaa

SEQ ID NO: 776841 - DNA, 75 bp, synthetic construct
  source 1..75: mol_type = other DNA
tggtgaacacggtggcatctgaaaatccggatgaagcagggcgttacagcatggacgttgagtacggtcagtaca

SEQ ID NO: 776842 - DNA, 75 bp, synthetic construct
  source 1..75: mol_type = other DNA
gtaatggaggcgataccagaagctgtgggatcgtttactcattacggtgaagagttgcagggaccaacggttgac

SEQ ID NO: 776843 - DNA, 75 bp, synthetic construct
  source 1..75: mol_type = other DNA
ttaagccgctttggtcaaaatgaatcaacaactcgtatgtatggtccaactggtgatcgtttctttgaaatccat

SEQ ID NO: 776844 - DNA, 75 bp, synthetic construct
  source 1..75: mol_type = other DNA
tgcagccacttctgcatccaccgcgaccacgaaagcgtcagaagctgccacctcatcccgggatgcggcggcctc

SEQ ID NO: 776845 - DNA, 75 bp, synthetic construct
  source 1..75: mol_type = other DNA
cagacacccggatcagcactctggaaaatcaggtaagcgaactggttgcacttgtccggcagttaacaggaagcg

SEQ ID NO: 776846 - DNA, 75 bp, synthetic construct
  source 1..75: mol_type = other DNA
taccgcgctggaagaggaaaacacaacgctacgtcaaaatctggcaacagcagacacccggatcagcactctgga

SEQ ID NO: 776847 - DNA, 75 bp, synthetic construct
  source 1..75: mol_type = other DNA
cagctacgccgcccgccagatggtccggtggcgcagcctgaggcagacactatccgcagccagtttccgcgcctg

SEQ ID NO: 776848 - DNA, 75 bp, synthetic construct
  source 1..75: mol_type = other DNA
cgcccgtatgaatcactaaacaatatgatgccagaggaatatcgtcagcaccattatttggccgggatctcaaaa

SEQ ID NO: 776849 - DNA, 75 bp, synthetic construct
  source 1..75: mol_type = other DNA
atatgctgaacatgtggtgaaaaatatttacccgaaaattaaacatgattactttaatgaatcacccaatatata

SEQ ID NO: 776850 - DNA, 75 bp, synthetic construct
  source 1..75: mol_type = other DNA
gccgcgaagaaatcagccagcgatgccagcacatcagcccgtgaggcggcaacccatgcgactgatgctgcagat

SEQ ID NO: 776851 - DNA, 75 bp, synthetic construct
  source 1..75: mol_type = other DNA
ccgtttaatatccggatagggaaaacccatctggctcaggagctgtggacgcagattgataacggtcagcttgcg

SEQ ID NO: 776852 - DNA, 75 bp, synthetic construct
  source 1..75: mol_type = other DNA
tatcacaactggaagaatggggtgcagtaaaggccacgggcgatcagggaagggtagccgattatatgtacccac

SEQ ID NO: 776853 - DNA, 75 bp, synthetic construct
  source 1..75: mol_type = other DNA
tcgacaaatttagaccaattgcaggcagtacaaacggcccggcaggctctatggttcttggcggcattcatgttc

SEQ ID NO: 776854 - DNA, 75 bp, synthetic construct
  source 1..75: mol_type = other DNA
gcaattgaaatctgatgtcagtaatagccgtctgatgattgccaaccctacgcacattgccatagggatatactt

SEQ ID NO: 776855 - DNA, 75 bp, synthetic construct
  source 1..75: mol_type = other DNA
ttgatttctgtaagagaaactaatgaggtagcattagccgtaaggaaatatgcaaaggaaatcggaataccaatt

SEQ ID NO: 776856 - DNA, 75 bp, synthetic construct
  source 1..75: mol_type = other DNA
atttggcttaaaaaccgtaaaagaatttgttaaagcaattctttatattattttttttttttgcattggcgaaca

SEQ ID NO: 776857 - DNA, 75 bp, synthetic construct
  source 1..75: mol_type = other DNA
ctggtgctatatctcgctttaccagtgcgttaaaagcaaagcttgaacacgataagcatattaaaactcaacgaa

SEQ ID NO: 776858 - DNA, 75 bp, synthetic construct
  source 1..75: mol_type = other DNA
tgtatcgtgagttaaaaggcaacagtttgaaaaaacagagtagagacagggattttagtggtcgtaatgtgaaag

SEQ ID NO: 776859 - DNA, 75 bp, synthetic construct
  source 1..75: mol_type = other DNA
cgacacagccctgcgtctgaaggctgaaaagatgctgattgtgaccgaactggcgaccgttgccgggactgaagc

SEQ ID NO: 776860 - DNA, 75 bp, synthetic construct
  source 1..75: mol_type = other DNA
cttggctgttcagtcggtgtaagtaagatgttatcgctaaaaaatgtttttagcggggctgaggtgttgttaaat

SEQ ID NO: 776861 - DNA, 75 bp, synthetic construct
  source 1..75: mol_type = other DNA
caattcaggaatggaagaaattactaacagtagacgatctcaattcatctaccgatcttgctgtcaggtcattaa

SEQ ID NO: 776862 - DNA, 75 bp, synthetic construct
  source 1..75: mol_type = other DNA
gatgctgacggtcaatggggggcatttaatcctaaagccaccaaatggcaaccgctcgccattgctcaaggtggc

SEQ ID NO: 776863 - DNA, 75 bp, synthetic construct
  source 1..75: mol_type = other DNA
tattttttatttatgaaagatatgaaaatggataaacaagaagttaaaagagaatacaaggaacaagaaggaaat

SEQ ID NO: 776864 - DNA, 75 bp, synthetic construct
  source 1..75: mol_type = other DNA
caatccgtaaaatgaacggatacacctacacgctcagggaaaacgggatgccttatgctggcgttattgcacagg

SEQ ID NO: 776865 - DNA, 75 bp, synthetic construct
  source 1..75: mol_type = other DNA
catacaagactgttagcaactgacagcactgtgcgtcttggtgctgatatgtatgttgagactttatcaaatgag

SEQ ID NO: 776866 - DNA, 75 bp, synthetic construct
  source 1..75: mol_type = other DNA
gtgaaaaacattgttaattccggcagcgctcttgagcgcctgaagaaactcattccgccaggcgtacagccgaag

SEQ ID NO: 776867 - DNA, 75 bp, synthetic construct
  source 1..75: mol_type = other DNA
gtggtgtaatcaccaatggtaatgactccaacttattgatagtgttttatgttcagataatgcccgatgactttg

SEQ ID NO: 776868 - DNA, 75 bp, synthetic construct
  source 1..75: mol_type = other DNA
catttccgctctgtttgctgctggcgctcgatcactctgcgcaaccggctattgctggcaaactggtggcgttta

SEQ ID NO: 776869 - DNA, 75 bp, synthetic construct
  source 1..75: mol_type = other DNA
gggttcgcgagcttcgtgtttagcggtggccctggtaccgggaaaaaccatctcgctgcagcaatcggaaatcat

SEQ ID NO: 776870 - DNA, 75 bp, synthetic construct
  source 1..75: mol_type = other DNA
tcttcgggcgttctggcatccagggcctgcaccgcagctgcacgttcgccaactacgaagtatccggtgagcaac

SEQ ID NO: 776871 - DNA, 75 bp, synthetic construct
  source 1..75: mol_type = other DNA
cattccgccaggcgtacagccgaagttcaccaatgcagcagaactgctggcgtggcagcgggaagaaggcttgaa

SEQ ID NO: 776872 - DNA, 75 bp, synthetic construct
  source 1..75: mol_type = other DNA
ttcaaaacattcttcagagcattaagcccttacgactacacactgtattgcaggaagtgggtaaaaccaaatctg

SEQ ID NO: 776873 - DNA, 75 bp, synthetic construct
  source 1..75: mol_type = other DNA
atgtccacggcgcagatgaacctattgatttccacgaaccggattggcacggaggccagtgccaatccggtacgt

SEQ ID NO: 776874 - DNA, 75 bp, synthetic construct
  source 1..75: mol_type = other DNA
gggattgatgtaaaaaataatgacacaataatgtttgatcatgaatattatcggtgtgatatagaaaatgcagct

SEQ ID NO: 776875 - DNA, 75 bp, synthetic construct
  source 1..75: mol_type = other DNA
gctttaccctcaaagtgtgctgctgcttagcagcgcactgctcggtggagtggggatcggcatcattcaggcggt

SEQ ID NO: 776876 - DNA, 75 bp, synthetic construct
  source 1..75: mol_type = other DNA
tcaatggcgaagaaaacctcgttcgtggtcgtggtggtgattgcgctactgacgatttacggggcgttggtgtaa

SEQ ID NO: 776877 - DNA, 75 bp, synthetic construct
  source 1..75: mol_type = other DNA
cggatgcatcgggaaacttactttactgcagattttttgataccgctaactaaagccgtatcaagtaagagatgg

SEQ ID NO: 776878 - DNA, 75 bp, synthetic construct
  source 1..75: mol_type = other DNA
tactgcaccagattgttgatcgccggacagcgtcgatccgcagcgtggggatgctgacaaacctgaactatgagg

SEQ ID NO: 776879 - DNA, 75 bp, synthetic construct
  source 1..75: mol_type = other DNA
aatcaaggctctccgatgggatgaaaaaccctctaaagaaagatcgtatgtatatttggtaaattcgcagggtaa

SEQ ID NO: 776880 - DNA, 75 bp, synthetic construct
  source 1..75: mol_type = other DNA
ttatcaaaaaagatatatgatgatttccttcaaaagaaaatcgacgaaactttagagcgttatcaacaagaggga

SEQ ID NO: 776881 - DNA, 75 bp, synthetic construct
  source 1..75: mol_type = other DNA
tattcggtgcggcattgtccgagatagcgacgaattcatataatgctggtatcggtcacaaagagtcagagttgt

SEQ ID NO: 776882 - DNA, 75 bp, synthetic construct
  source 1..75: mol_type = other DNA
tatccacggtatggctgatttcatcagccagtatcctggtgttgatagcacccgtattggtttgttggggatttg

SEQ ID NO: 776883 - DNA, 75 bp, synthetic construct
  source 1..75: mol_type = other DNA
tctttacatcgctacgacagcgcccagggatgttagcattcagcgctatgtaagaacactcaatgatgccagaca

SEQ ID NO: 776884 - DNA, 75 bp, synthetic construct
  source 1..75: mol_type = other DNA
gcattttttcgctatttaataaaatatgttacttcggttttaaaacacttgcaataattctgattactcgttcct

SEQ ID NO: 776885 - DNA, 75 bp, synthetic construct
  source 1..75: mol_type = other DNA
tgccggcttttccagaaagccacaacagataaaacgacgctatcagtatgcgtcaaaagttcgtctgcattaccg

SEQ ID NO: 776886 - DNA, 75 bp, synthetic construct
  source 1..75: mol_type = other DNA
tccccctgtaccactgcgaccatcgcggcctgccgctggcgctcatcagcacggaaggggcaacagcgtggtgcg

SEQ ID NO: 776887 - DNA, 75 bp, synthetic construct
  source 1..75: mol_type = other DNA
taacatttaacgccaacctatccgaaaccgagctaaggaaactcccctacgggggcgtatggaatgcgcagatgc

SEQ ID NO: 776888 - DNA, 75 bp, synthetic construct
  source 1..75: mol_type = other DNA
taaatcagatataatttataaagttgatgggctttctatcatagcgagaaatttctttactcttctggtaatgac

SEQ ID NO: 776889 - DNA, 75 bp, synthetic construct
  source 1..75: mol_type = other DNA
caaatagataacgattttggcctgcatatcatctatttcctgcaacatggtcactggaaggtaaatgatcgtagt

SEQ ID NO: 776890 - DNA, 75 bp, synthetic construct
  source 1..75: mol_type = other DNA
agcagcttgttcccgtcgatatcaaccgtgtgtatgtttgtgatgcgcatccgtcctttattcaggagaaagaag

SEQ ID NO: 776891 - DNA, 75 bp, synthetic construct
  source 1..75: mol_type = other DNA
caccggcaagccgggcgaaagtaaatatcgccggaccggatgatgttgatccgctggcagagcttttaaaagcga

SEQ ID NO: 776892 - DNA, 75 bp, synthetic construct
  source 1..75: mol_type = other DNA
cattttgatgttagacctcagggagaatttaattacttaagccgtaggggaatggcaacgattaatattttgaat

SEQ ID NO: 776893 - DNA, 75 bp, synthetic construct
  source 1..75: mol_type = other DNA
cgccttattgctcaggttgccgatctgctggcaaaacgcgaacaaggtgaggatcttaccgcagaagagagtgag

SEQ ID NO: 776894 - DNA, 75 bp, synthetic construct
  source 1..75: mol_type = other DNA
gggaaaaaatgcagatgcaccgctttattacctttggcttgcttgggcatggcaaaacttttatctcgtctgcgc

SEQ ID NO: 776895 - DNA, 75 bp, synthetic construct
  source 1..75: mol_type = other DNA
gcgtggggcggtggtacatttcgccatgtccgactctgaaatcatgatggcgaccaagctggatggagaaaacac

SEQ ID NO: 776896 - DNA, 75 bp, synthetic construct
  source 1..75: mol_type = other DNA
gtggtgcagatcgcgttacggagatcgaccgactgcttgagcaaaagccacgcttaactgctgatcaggcatggg

SEQ ID NO: 776897 - DNA, 75 bp, synthetic construct
  source 1..75: mol_type = other DNA
tcgatggtgagaaaggcaaggcgttgtcaatgggaaaaataaaatctttcttccagctcatgtttcagaatcctg

SEQ ID NO: 776898 - DNA, 75 bp, synthetic construct
  source 1..75: mol_type = other DNA
actttatcaaaaagtagaaaaagccagtgaaaatttacgcaataagatttgtaacctgtcgccgctggaagaaaa

SEQ ID NO: 776899 - DNA, 75 bp, synthetic construct
  source 1..75: mol_type = other DNA
cgtcggagccagcattggtattgaagtcggtgccaatatgaagggcgacagtattaaaggtataccggggaaagc

SEQ ID NO: 776900 - DNA, 75 bp, synthetic construct
  source 1..75: mol_type = other DNA
agtaagccccgccagtaatgaaaagcaaccctgcgaggggccgggcggcactatgagcgcccgcaagctggctat

SEQ ID NO: 776901 - DNA, 75 bp, synthetic construct
  source 1..75: mol_type = other DNA
cccagggatgagcggattgaggaaatgccatctcccccaaaaggtgacttacgtcgcgtacaatttcagaatttc

SEQ ID NO: 776902 - DNA, 75 bp, synthetic construct
  source 1..75: mol_type = other DNA
caggtcggccaagaaatctttgttcaactccttaataaacaacaggaactgaacattatgaaggccggtaccatc

SEQ ID NO: 776903 - DNA, 75 bp, synthetic construct
  source 1..75: mol_type = other DNA
gggcgtatcatcatcccaaatgaatatggtcagccggtcctttctgaccccctgccgctttctgaagaagaatca

SEQ ID NO: 776904 - DNA, 75 bp, synthetic construct
  source 1..75: mol_type = other DNA
cgcggcagaaccttgcattagttctggaaacagcggcgacaggtactccggtaacgatcacgaggcgtgggcata

SEQ ID NO: 776905 - DNA, 75 bp, synthetic construct
  source 1..75: mol_type = other DNA
acgatgaacttaaagcgcgttcttacgccgcgcttgaaaaaatgggcgtaactccttctgaagcgcttcgtctca

SEQ ID NO: 776906 - DNA, 75 bp, synthetic construct
  source 1..75: mol_type = other DNA
cttgatatacacggggtagttcctgaggaaatgagattccttggtaaaagagcaaaagcatccatttataatata

SEQ ID NO: 776907 - DNA, 75 bp, synthetic construct
  source 1..75: mol_type = other DNA
attgcatcaataatgttgttttatatttctccatttattacgaaatattttcttggtgaggaatttggcgaatcg

SEQ ID NO: 776908 - DNA, 75 bp, synthetic construct
  source 1..75: mol_type = other DNA
gcagcgcccccaaaagccgtaacgatagctttgaagcactcgccgtacagttatttaggaaaacctgtcgagtac

SEQ ID NO: 776909 - DNA, 75 bp, synthetic construct
  source 1..75: mol_type = other DNA
gctgataggtggcagtactgaagaagacctgccgttgcttgatgatgaacatgcaggaaagttgcttcgcctgct

SEQ ID NO: 776910 - DNA, 75 bp, synthetic construct
  source 1..75: mol_type = other DNA
gctggttgctggagctggatccccgggagcgtaatcgacgtcaccattttggtgaacccgaaccggtactcatgc

SEQ ID NO: 776911 - DNA, 75 bp, synthetic construct
  source 1..75: mol_type = other DNA
tctgacaacaacattgatatggctggcggtgatgatattctgtcatctgttggtgcagttttggatggagccaat

SEQ ID NO: 776912 - DNA, 75 bp, synthetic construct
  source 1..75: mol_type = other DNA
ctccaagaattgtacttgaaacgggttcaaaaccttacgatcaaggccatgcttacggggtcagagatgctggag

SEQ ID NO: 776913 - DNA, 75 bp, synthetic construct
  source 1..75: mol_type = other DNA
agccacacctgtttgggtagatcttgctccaggatctacttgtatcaatatagatgaagttgaaaagcagatcac

SEQ ID NO: 776914 - DNA, 75 bp, synthetic construct
  source 1..75: mol_type = other DNA
cggaggatatatccaggggaaaaacacaattgagatgggttccggtgatgatacggtttctgtttccactcgtat

SEQ ID NO: 776915 - DNA, 75 bp, synthetic construct
  source 1..75: mol_type = other DNA
aacaaggaaattatactgattcatggtataaaggagatactgtggacggatacacaacgtatactcctgtaggtg

SEQ ID NO: 776916 - DNA, 75 bp, synthetic construct
  source 1..75: mol_type = other DNA
tgaagtagttgatgagataatccctagtgaacatgtggatattaaaggaaaaaatattattgttaaagatcaact

SEQ ID NO: 776917 - DNA, 75 bp, synthetic construct
  source 1..75: mol_type = other DNA
tgcgccactgacccttaccggtagcactcaacaggctgagacaggacaaaccgtcacagtaaccctggctggaca

SEQ ID NO: 776918 - DNA, 75 bp, synthetic construct
  source 1..75: mol_type = other DNA
cagcggacttacccgtactgtatcaatggtggcgttagtggggctacgttcgcgtaggccggtttcctttgtgtc

SEQ ID NO: 776919 - DNA, 75 bp, synthetic construct
  source 1..75: mol_type = other DNA
ccagccgggcgtaggaacccgtttaatcagtacaaggcgacacagacgcgcccagcgtctttttttgtgtcatgc

SEQ ID NO: 776920 - DNA, 75 bp, synthetic construct
  source 1..75: mol_type = other DNA
cagccagcaatttcatgcgttgcgccgaagctgtcggagcgcgcattacaaacatcccggtagacctcaacacgc

SEQ ID NO: 776921 - DNA, 75 bp, synthetic construct
  source 1..75: mol_type = other DNA
aagccgacacctgaccgggctcgctatcagcctgagcaccaccgggcgcgcttatgtgggcgcaagctgctacga

SEQ ID NO: 776922 - DNA, 75 bp, synthetic construct
  source 1..75: mol_type = other DNA
actggcgctcaggcgggcgatatcgtcaccgtgacgctgaataatgtggattacaccacggtggtggatggttcc

SEQ ID NO: 776923 - DNA, 75 bp, synthetic construct
  source 1..75: mol_type = other DNA
gcaaaacaggtgcattaccattgctggattgcccttccgcatcgacaggtcagacgccttgggacacccacaagt

SEQ ID NO: 776924 - DNA, 75 bp, synthetic construct
  source 1..75: mol_type = other DNA
atagcagaacagcttgatgcaatgctgtccatttacagccgggtttacttcactcgtttcgatttacgcttacct

SEQ ID NO: 776925 - DNA, 75 bp, synthetic construct
  source 1..75: mol_type = other DNA
taaagttcgcgggaagtatcaaacaggaaaatacgatcgagtgcattcaacctcgcaacttcgtaacaaaataac

SEQ ID NO: 776926 - DNA, 75 bp, synthetic construct
  source 1..75: mol_type = other DNA
tgccagcgtcaccgccccttatgagtgtgagaactcaggcggtgactccttaaatttgcaaaaggaggctgccat

SEQ ID NO: 776927 - DNA, 75 bp, synthetic construct
  source 1..75: mol_type = other DNA
aacgctagagggtccttttctgtgggtatcgtatctggcgaaagagcgtgggaagtatcagaccggaaatggcga

SEQ ID NO: 776928 - DNA, 75 bp, synthetic construct
  source 1..75: mol_type = other DNA
gaaagtatcagaccggagatggggatcgggtccactcaacatcaaaattgaggggtgaaaaaatgaaatcgctaa

SEQ ID NO: 776929 - DNA, 75 bp, synthetic construct
  source 1..75: mol_type = other DNA
acggggtgagtttatccgtggctgggatgacggacgtggcgtggatgcggggcgagccttgctaagtcttcagga

SEQ ID NO: 776930 - DNA, 75 bp, synthetic construct
  source 1..75: mol_type = other DNA
tatcatgccttacaccaacatttattgagagcggattggaaggtagtagaatatttcacagagactggaggatat

SEQ ID NO: 776931 - DNA, 75 bp, synthetic construct
  source 1..75: mol_type = other DNA
aaatggtcaggtgtttaaaactgtatttggtgggaagaacggaaaagagatagaggggatgttatctattctcga

SEQ ID NO: 776932 - DNA, 75 bp, synthetic construct
  source 1..75: mol_type = other DNA
ctggtaaacattccgttcgatgtgctgcagggcggtgcaagcctgattaacgctattagtcaggggttaggcggg

SEQ ID NO: 776933 - DNA, 75 bp, synthetic construct
  source 1..75: mol_type = other DNA
agcctggaactccggcatatgagcgagcgttaaatcaggctgctaacgccgttcgccctctcctgcgtattaccg

SEQ ID NO: 776934 - DNA, 75 bp, synthetic construct
  source 1..75: mol_type = other DNA
gcaaccagactggcacacagcctgccgccttttttcaagaatgacggtttccaagaggagcaggagttcaggatg

SEQ ID NO: 776935 - DNA, 75 bp, synthetic construct
  source 1..75: mol_type = other DNA
ttaatttccttttacggtattccgttcccgtctttgctggcggggatacctccccagatatcagcaggatccatg

SEQ ID NO: 776936 - DNA, 75 bp, synthetic construct
  source 1..75: mol_type = other DNA
atttgccaaagaaaatggttggaaagttatccctaaacatccattatccaccagttctgttatagacctcttaga

SEQ ID NO: 776937 - DNA, 75 bp, synthetic construct
  source 1..75: mol_type = other DNA
tttgacgcgataagtgaagatgtcagtctaaattgtactgtaccgatgttcatttcgatggacacgttacgggac

SEQ ID NO: 776938 - DNA, 75 bp, synthetic construct
  source 1..75: mol_type = other DNA
catggaccgtttttttattgatgattccggtggtcgtgagcaactaggtaattatagcgttatcatattcgcatt

SEQ ID NO: 776939 - DNA, 75 bp, synthetic construct
  source 1..75: mol_type = other DNA
ttattcaataatgaatcttcaaaaattgataaaatactagaaataaatagcaatcgagatctactcggtatgttt

SEQ ID NO: 776940 - DNA, 75 bp, synthetic construct
  source 1..75: mol_type = other DNA
tcttgaactctgctgtggtaaggcaaggctggtgctgacgaaggacggaagcatatttctcaatggtacgcacat

SEQ ID NO: 776941 - DNA, 75 bp, synthetic construct
  source 1..75: mol_type = other DNA
gcgtaaaggcgtgctgaacgatattgatttcacgctctatcgaggtgagatcctcggctttgccggtctgatggg

SEQ ID NO: 776942 - DNA, 75 bp, synthetic construct
  source 1..75: mol_type = other DNA
gtaacatttccagttcatcactttatctttgtgggctagaacaactggagatctggcttaagcgtttccccgatg

SEQ ID NO: 776943 - DNA, 75 bp, synthetic construct
  source 1..75: mol_type = other DNA
atggattcaaattaagcggaaggtattacgcatttacccgtatattagaagtgctacctttgtttaatgaagagt

SEQ ID NO: 776944 - DNA, 75 bp, synthetic construct
  source 1..75: mol_type = other DNA
aattctgccgcccatcaggacatggctgaaatgcataaaaaaatgatgaaagccaaacctgagaacacccaagaa

SEQ ID NO: 776945 - DNA, 75 bp, synthetic construct
  source 1..75: mol_type = other DNA
aaaggtataagtactacaggtcaattttcgcaacaagcgggaggtcaagcaggtaatattgctcaaagcggtgtg

SEQ ID NO: 776946 - DNA, 75 bp, synthetic construct
  source 1..75: mol_type = other DNA
cttcattcgaccttatcattatcgcgatagggtcccccacacaagaacgcatgtttcatgattatctgattaaag

SEQ ID NO: 776947 - DNA, 75 bp, synthetic construct
  source 1..75: mol_type = other DNA
tccagcatttgtgtcatgcccaaaaacagtcgcgttatggttaaatctaaacagtaaatatccttggttagagat

SEQ ID NO: 776948 - DNA, 75 bp, synthetic construct
  source 1..75: mol_type = other DNA
gagggggaggctgagtctctttctgtttttaagcctcgtaaaaacgccaaagctggacttaatacatatttttta

SEQ ID NO: 776949 - DNA, 75 bp, synthetic construct
  source 1..75: mol_type = other DNA
caacaccgctctgatgaacggcgtcaaactttccggtgctgtgacagaaaacaaaaacaacatcgaacagaaccg

SEQ ID NO: 776950 - DNA, 75 bp, synthetic construct
  source 1..75: mol_type = other DNA
ctgatgaacggcgtcaaactttccggtgctgtgacagaaaacaaaaacaacatcgaacagaaccgcagcgatatt

SEQ ID NO: 776951 - DNA, 75 bp, synthetic construct
  source 1..75: mol_type = other DNA
aattctgccgctcaccaggacatggctgaaatgcataaaaaaatgatgaatgctaaaccaggggctaccaacgaa

SEQ ID NO: 776952 - DNA, 75 bp, synthetic construct
  source 1..75: mol_type = other DNA
tatgtggaaacaaagggatcaggggcagacgaaggataaaaaactcctttcagatattgcgtggataggaagtgc

SEQ ID NO: 776953 - DNA, 75 bp, synthetic construct
  source 1..75: mol_type = other DNA
tcgatcccctgtcggccagatttacgtcagttacgttttgaggttcagcggacgtttattgaaaaccgtgcgctg

SEQ ID NO: 776954 - DNA, 75 bp, synthetic construct
  source 1..75: mol_type = other DNA
cgctgtatgccagagggatgactacccgcgaaattacctcagtcttcaaagaaatgtacgatgcagacgtctctc

SEQ ID NO: 776955 - DNA, 75 bp, synthetic construct
  source 1..75: mol_type = other DNA
atactgagcgaaaggtatcacgcgttcaatcgttccttggaagtattacccttgtacaatcctgaatgtgatata

SEQ ID NO: 776956 - DNA, 75 bp, synthetic construct
  source 1..75: mol_type = other DNA
ggaacgctggaggctgacggcgggcagcaggatgaagtgattgccacgctgatggtgtgggcgattgactgcggc

SEQ ID NO: 776957 - DNA, 75 bp, synthetic construct
  source 1..75: mol_type = other DNA
tcagttacaggatgtggaaagcggggaaatcctgttgctggatgtgacggccactgccggtaaagggaagctgga

SEQ ID NO: 776958 - DNA, 75 bp, synthetic construct
  source 1..75: mol_type = other DNA
ggccacgccgctggccgcctggagtgtggcaaatcgcgccgtcgtggctgtccgtctgcaaaacaccgccagccg

SEQ ID NO: 776959 - DNA, 75 bp, synthetic construct
  source 1..75: mol_type = other DNA
ggaggtggaattaaagaatgcgatggatggtatatttacgaaaaaataattgatgataattttgccatagtcata

SEQ ID NO: 776960 - DNA, 75 bp, synthetic construct
  source 1..75: mol_type = other DNA
ttgccgttattgaacaatccatcacaccgcttgccgggaagctggggcagcaaaaatatgtgattgccatccggg

SEQ ID NO: 776961 - DNA, 75 bp, synthetic construct
  source 1..75: mol_type = other DNA
aggcgcctgcccatcagatgcaatcatccgctgaaaaaagtgcagttcagggggagagcatgaaaatgatggata

SEQ ID NO: 776962 - DNA, 75 bp, synthetic construct
  source 1..75: mol_type = other DNA
ttatttatggctggatatttgccagggatcttaatgggtcttgcggtaatgatagtctgcggcattattgaaccg

SEQ ID NO: 776963 - DNA, 75 bp, synthetic construct
  source 1..75: mol_type = other DNA
taaagcagcacagcgtagcattacagcaccagacaggataggagaaggaaaaacatgggtttatcaacgagatac

SEQ ID NO: 776964 - DNA, 75 bp, synthetic construct
  source 1..75: mol_type = other DNA
taatcaattacaaaaagctagagcagcatataatataataatccaaaaatatcatggtcgtgaaagaatgatttt

SEQ ID NO: 776965 - DNA, 75 bp, synthetic construct
  source 1..75: mol_type = other DNA
tcagcgagctggaagatttcaccctgcaaatggcgcaccacatttccgaaaaagcaccgctggcgatcgcggtaa

SEQ ID NO: 776966 - DNA, 75 bp, synthetic construct
  source 1..75: mol_type = other DNA
attatcctgcgagcgccgagtggatcgaaagttttctccgcaggccatgatattcatgaactgccatcaggcggt

SEQ ID NO: 776967 - DNA, 75 bp, synthetic construct
  source 1..75: mol_type = other DNA
aatgccttaagtaaagtctttattgatgatcttatgcaggcgttaagcgatctcaaccggccggaaattcgctgt

SEQ ID NO: 776968 - DNA, 75 bp, synthetic construct
  source 1..75: mol_type = other DNA
gtattattataatgcagaattggccagaaatattttcactagcgatcgagatagagaaaccttaagtgttttgta

SEQ ID NO: 776969 - DNA, 75 bp, synthetic construct
  source 1..75: mol_type = other DNA
cgcatcctccgaggaacgctatgataaattcaagaattcttctaaggaaattaaaaatacctacaagcaaattgt

SEQ ID NO: 776970 - DNA, 75 bp, synthetic construct
  source 1..75: mol_type = other DNA
agtatcgaaagcaaagaagggtttctttcacaaagaacaataaatttaaatgaatatgaaactgcaattaacatc

SEQ ID NO: 776971 - DNA, 75 bp, synthetic construct
  source 1..75: mol_type = other DNA
cacatggcttgatttcgaataggtcacaggttttggactgggcaaaccaggctgagagatataagctaagaaatt

SEQ ID NO: 776972 - DNA, 75 bp, synthetic construct
  source 1..75: mol_type = other DNA
tcaatggggcagccctactgattattgatgaaattaacaggggtccagctgtacaggtgttcggtggcgctattg

SEQ ID NO: 776973 - DNA, 75 bp, synthetic construct
  source 1..75: mol_type = other DNA
ccgatggcctgtgtaccgccagggtcaacggcctggaggaaaccatcctctacagccgggacgccgcaggccgcc

SEQ ID NO: 776974 - DNA, 75 bp, synthetic construct
  source 1..75: mol_type = other DNA
gttatggtttcgtaccaataagacattttgtcgagcatgtcataacgtataaaaatgaatttgcagcggattatg

SEQ ID NO: 776975 - DNA, 75 bp, synthetic construct
  source 1..75: mol_type = other DNA
atgaaacctcgtttactcatatcagccacactactttctgcgcttactttcataccacctgccagttccaaaata

SEQ ID NO: 776976 - DNA, 75 bp, synthetic construct
  source 1..75: mol_type = other DNA
ctgagagggttaattaccggagcctggtacagtgccttagggttggaactggaagatcaccagggattagttcat

SEQ ID NO: 776977 - DNA, 75 bp, synthetic construct
  source 1..75: mol_type = other DNA
tcactgcataccaacgcctttgacgaagcgcttggtttgcctaccgatttctcagcacgcattgcccgcaatacc

SEQ ID NO: 776978 - DNA, 75 bp, synthetic construct
  source 1..75: mol_type = other DNA
aacagatgctgctgggctggggaactgttggggttatctacaactttagcgactacctgcaaggtgagggatatc

SEQ ID NO: 776979 - DNA, 75 bp, synthetic construct
  source 1..75: mol_type = other DNA
ttacaggggagcaacaaggggatatttctgcaggatgcgggacgcaagtctctgtcgggaatcggtatcaacagg

SEQ ID NO: 776980 - DNA, 75 bp, synthetic construct
  source 1..75: mol_type = other DNA
tgctggcggcaaacctggcgcttcccgttcatcatctggtgacgttcacctggggcaatgtcagcgcgatggacg

SEQ ID NO: 776981 - DNA, 75 bp, synthetic construct
  source 1..75: mol_type = other DNA
tatatgcgcgatgactacggcacccatgcacgcatgacgctgatgccgcctgaagcattctccgttcagccatat

SEQ ID NO: 776982 - DNA, 75 bp, synthetic construct
  source 1..75: mol_type = other DNA
ttcatgaacaatgaactaggtgaaatatttgaagatgaatatcaaaaagaagtagatattatccaactagaacaa

SEQ ID NO: 776983 - DNA, 75 bp, synthetic construct
  source 1..75: mol_type = other DNA
cgtaacggcatggctgtctttagcgaagggttacgtgaatttgaagtcatcggtgaagagaagaaaacctttgcc

SEQ ID NO: 776984 - DNA, 75 bp, synthetic construct
  source 1..75: mol_type = other DNA
tatatttatgtcagtgcttattgttctcagcctctctgttaacgtcattcagggggtgaataactaccgtcttaa

SEQ ID NO: 776985 - DNA, 75 bp, synthetic construct
  source 1..75: mol_type = other DNA
cgttgggctaagtaccatcccattaagggcagcagctccactactggcgatctgttcaggcaatccacacaggcg

SEQ ID NO: 776986 - DNA, 75 bp, synthetic construct
  source 1..75: mol_type = other DNA
ggcatgagtttttctactcccacgattgtacgaagattgaagccccagcttggaaggatttagatcagttttgcc

SEQ ID NO: 776987 - DNA, 75 bp, synthetic construct
  source 1..75: mol_type = other DNA
gaagttaaatcacctccagtacagaagcctaaagcaaatagggacagtaatagacgtggacatggctggtttggg

SEQ ID NO: 776988 - DNA, 75 bp, synthetic construct
  source 1..75: mol_type = other DNA
cgacgatacggccgctcaaagccattgagcgtcacgattgattcctggcgcgataaagcgggaaaactctgggag

SEQ ID NO: 776989 - DNA, 75 bp, synthetic construct
  source 1..75: mol_type = other DNA
ttttatgtttatttggcatggtcgcgggggggcacgctacgccaaatgtgacggctgaaattacttatgatttgg

SEQ ID NO: 776990 - DNA, 75 bp, synthetic construct
  source 1..75: mol_type = other DNA
cgacatcgaacgacggttacagcaactcgaggcaatacaagcacaatggcatcgtcgtgccaagactcaacaact

SEQ ID NO: 776991 - DNA, 75 bp, synthetic construct
  source 1..75: mol_type = other DNA
cctccgcgattcgtgggcgctggagcaggggcttattaagcccgtatatggtttttatgacgaaatcactgctgc

SEQ ID NO: 776992 - DNA, 75 bp, synthetic construct
  source 1..75: mol_type = other DNA
gagtcgccgcaggaaatacttgaacgggtctcccgctggtcagctctgctctattacgatcagcctgacggcaat

SEQ ID NO: 776993 - DNA, 75 bp, synthetic construct
  source 1..75: mol_type = other DNA
ggaaatgctgattgctgaggtgacctacatcagagacagcgacggcactcacgccagaatgtacctgctaccgcc

SEQ ID NO: 776994 - DNA, 75 bp, synthetic construct
  source 1..75: mol_type = other DNA
taacccacgcgtggcgggcgacgtcggcaaagcgggcgtcgctatcgacaccgtggaagatatgaaagtcctgtt

SEQ ID NO: 776995 - DNA, 75 bp, synthetic construct
  source 1..75: mol_type = other DNA
cgtgtaattggcggtctggcgaatattgctgaggaatatgcgactaaacgttaccgttctaacgtcatcaactgg

SEQ ID NO: 776996 - DNA, 75 bp, synthetic construct
  source 1..75: mol_type = other DNA
ttgtgaaaggggcgactcagcaaccgctgatttacggaccgaacattaaagactggccggaattgggtgcgctga

SEQ ID NO: 776997 - DNA, 75 bp, synthetic construct
  source 1..75: mol_type = other DNA
cgcgtcattggcggtctggcgaatatcgccgaggaatacgccactaaacgctaccgttctaacgtcatcaattgg

SEQ ID NO: 776998 - DNA, 75 bp, synthetic construct
  source 1..75: mol_type = other DNA
gagaaaaattgttgctaaacatggtcatcaggttcatccaacaaaaactaaactttatggggcaaagcttcctaa

SEQ ID NO: 776999 - DNA, 75 bp, synthetic construct
  source 1..75: mol_type = other DNA
tctcaacgcgagataaatcatacaatttaattgattccccgctatataaactgaaaaacaaaaaaagactggcac

SEQ ID NO: 777000 - DNA, 75 bp, synthetic construct
  source 1..75: mol_type = other DNA
gggatatcgactatccgggagttgttgcggtgcatctgaccggaaaaccagcgccgtatgtggggccgcaggatg

SEQ ID NO: 777001 - DNA, 75 bp, synthetic construct
  source 1..75: mol_type = other DNA
tgccaaaaagctctttggccgtttgcattcaatgggagtgattgagcaacgttacaaatcgaaggtgcttacttt

SEQ ID NO: 777002 - DNA, 75 bp, synthetic construct
  source 1..75: mol_type = other DNA
tataataggaagtcttattataaatatttctctgataaagcatgtctgcattattttagaaatatattacgagaa

SEQ ID NO: 777003 - DNA, 75 bp, synthetic construct
  source 1..75: mol_type = other DNA
tttagtctgtctgataacgactttcaggaaagtcgaatgatgtacttcgaaacgatggatgaaatcaggagagat

SEQ ID NO: 777004 - DNA, 75 bp, synthetic construct
  source 1..75: mol_type = other DNA
gaaattgagtccgggcgcgtggcgcacggtaaagcgaagctctcgctgctggataaagtggaaaacggtcgcctg

SEQ ID NO: 777005 - DNA, 75 bp, synthetic construct
  source 1..75: mol_type = other DNA
catattgcagtcattcatcaatatatgcgtgagatgatggcgggcggcggcaaaatgatcctcggttcagacagt

SEQ ID NO: 777006 - DNA, 75 bp, synthetic construct
  source 1..75: mol_type = other DNA
gcgcttgctggaaatgggcgatgataccgcgtgtgcgctgggcgtcagcgtcgaacgttcgcgtctgttaatgat

SEQ ID NO: 777007 - DNA, 75 bp, synthetic construct
  source 1..75: mol_type = other DNA
ggcggagtcgcatatcaggcaggaggtcacgggagcaatgctatctccggagcgctggggataaaatacagcttc

SEQ ID NO: 777008 - DNA, 75 bp, synthetic construct
  source 1..75: mol_type = other DNA
cgaccagatcccgctggataaaatgtcggtttcgatgaccatgaatggcgcagtgctaccagtactggcgtttta

SEQ ID NO: 777009 - DNA, 75 bp, synthetic construct
  source 1..75: mol_type = other DNA
atgaacgtcgccatgttgcgtgcggcacgttatttatggagcgaagcggtcagtggatttggcgcacaggacccg

SEQ ID NO: 777010 - DNA, 75 bp, synthetic construct
  source 1..75: mol_type = other DNA
cgctaccacagtggggcgctgaaaacgcaaccggattagcccgcagaaatcagccgtatttcactcgcatggtca

SEQ ID NO: 777011 - DNA, 75 bp, synthetic construct
  source 1..75: mol_type = other DNA
tgatgtacttgagatcgacaacgtaatggtgcgtaacgagcaaattgcttcactggaacgcattcgcgccgcccg

SEQ ID NO: 777012 - DNA, 75 bp, synthetic construct
  source 1..75: mol_type = other DNA
gtcagcggattcggcgcccaggacccgaaatcgctggcgctgcgcacccattgtcagacctccggctggagtctg

SEQ ID NO: 777013 - DNA, 75 bp, synthetic construct
  source 1..75: mol_type = other DNA
tacgccttcctgcaagagcgcggcgtggcggcgatttatggtccaggtacacctatgctcgacagcgtgcgcggc

SEQ ID NO: 777014 - DNA, 75 bp, synthetic construct
  source 1..75: mol_type = other DNA
atggcacgatgattaaggccggaagttcactcgtagaggggggactgcgaatggaacaatcattgatggtggcag

SEQ ID NO: 777015 - DNA, 75 bp, synthetic construct
  source 1..75: mol_type = other DNA
ataatctcaatggtattaattgcacggtcacatataacatctattgacaacaaagaaaaaactttatcttcatac

SEQ ID NO: 777016 - DNA, 75 bp, synthetic construct
  source 1..75: mol_type = other DNA
tctgtagaaggaaattctgatgcagcattctctctgaagaaccgcgtggttgccggagcttatgattacacactg

SEQ ID NO: 777017 - DNA, 75 bp, synthetic construct
  source 1..75: mol_type = other DNA
gcgcggacaggagacaactcacactttaccttgaacaggctgaaatgaagaagctaccgatcggtggcgtctgga

SEQ ID NO: 777018 - DNA, 75 bp, synthetic construct
  source 1..75: mol_type = other DNA
aaaagctgtagttcagggaattgaaggaaccattaatattcctataggtaaagatacctactggagtaataatat

SEQ ID NO: 777019 - DNA, 75 bp, synthetic construct
  source 1..75: mol_type = other DNA
taccgttgagccacagttattactttctaatattactgcgggcgcgactgccagtgctgtggtcagatttaatct

SEQ ID NO: 777020 - DNA, 75 bp, synthetic construct
  source 1..75: mol_type = other DNA
agcgcaatgctggggcgcttttttatccggctggctctcctgctggttctcagtatctggatgtttgccagctga

SEQ ID NO: 777021 - DNA, 75 bp, synthetic construct
  source 1..75: mol_type = other DNA
taaaatgcgtaatcagttaattgaacaggcgaatcaaagctctgaattgatttctgtgcgtgccaatgacctgcc

SEQ ID NO: 777022 - DNA, 75 bp, synthetic construct
  source 1..75: mol_type = other DNA
atgcgatggcaaaaatggaagccttggcgaacaaccttccggcaggaacaacctgggcctggagtggtttgtcat

SEQ ID NO: 777023 - DNA, 75 bp, synthetic construct
  source 1..75: mol_type = other DNA
ttagagatcgcagcgagtacattggttttatcgaaaaatgttttgcaaatgcgcatcaatgctacgttgtccatt

SEQ ID NO: 777024 - DNA, 75 bp, synthetic construct
  source 1..75: mol_type = other DNA
atttcaaatggcctgccgtgcttttgaggttattcgcggttctgatgtgatggacgccgttgccgacctggagga

SEQ ID NO: 777025 - DNA, 75 bp, synthetic construct
  source 1..75: mol_type = other DNA
gtgaattgcgcgatgaagacggatttacaccggacgtccttcaggcgcaaatacttcatggtttttcccacggga

SEQ ID NO: 777026 - DNA, 75 bp, synthetic construct
  source 1..75: mol_type = other DNA
cggcgaccatctccagtattgaggtgattggcaaccgtgcagtggcggatggcaaaaccaaacagacgtataaag

SEQ ID NO: 777027 - DNA, 75 bp, synthetic construct
  source 1..75: mol_type = other DNA
caaggagggtaaagcggaactgaaagtggtctccgtgactgccggaacgtatgagatcacggcgtcggcaggaaa

SEQ ID NO: 777028 - DNA, 75 bp, synthetic construct
  source 1..75: mol_type = other DNA
aagatcatgaagaatctgtccgggctagattatgctatcaaatcggagcgtttacacctgttatagtattgtcag

SEQ ID NO: 777029 - DNA, 75 bp, synthetic construct
  source 1..75: mol_type = other DNA
tgatatgcaatctctggtggcggatgggaaatcgactgcgaagctggaggtgacactgatgtcggcaaacaaccc

SEQ ID NO: 777030 - DNA, 75 bp, synthetic construct
  source 1..75: mol_type = other DNA
agcagagttgcaggtggtttcagtgactgccggaacgtatgagatcacggcatcggcggggaatagccagccttc

SEQ ID NO: 777031 - DNA, 75 bp, synthetic construct
  source 1..75: mol_type = other DNA
gcaggggaacttgaaatcgcggccgcggtgaaaaactctcagaagacggtcacggtgaaattcaacgcggatgcc

SEQ ID NO: 777032 - DNA, 75 bp, synthetic construct
  source 1..75: mol_type = other DNA
cattaaaaatggaacaatatcatggcgacagggttaaaatggagaaatacaattcaaatccatttcaattcaatg

SEQ ID NO: 777033 - DNA, 75 bp, synthetic construct
  source 1..75: mol_type = other DNA
ttcgccaacaaaacgcaagacgttctgttagttgcgcaataccagttcgatttcggtctgcgtccgtccatcgct

SEQ ID NO: 777034 - DNA, 75 bp, synthetic construct
  source 1..75: mol_type = other DNA
gaagtatgggatgcagatgctatccacaagcatgaaacccaaatgctgggattgtttattaaggattctgaggga

SEQ ID NO: 777035 - DNA, 75 bp, synthetic construct
  source 1..75: mol_type = other DNA
gctgaccgctacgttgctggctattttctttgttcctctgttttttgtactggtgaagcgtttgtttgccggtaa

SEQ ID NO: 777036 - DNA, 75 bp, synthetic construct
  source 1..75: mol_type = other DNA
agtatatcagaaatgaatctggtgctaatatattgttttataaaattttgtcttatttacctcatgcattattca

SEQ ID NO: 777037 - DNA, 75 bp, synthetic construct
  source 1..75: mol_type = other DNA
atggtgcagctgaccgtaccaacctgcaagaagctcaacggtaaaaaagctgaacagtgggctactggtctgaag

SEQ ID NO: 777038 - DNA, 75 bp, synthetic construct
  source 1..75: mol_type = other DNA
tagaaggtatcggtgatgttgatctggtgaactactttgaagtgggcgcaacctactacttcaacaaaaacatgt

SEQ ID NO: 777039 - DNA, 75 bp, synthetic construct
  source 1..75: mol_type = other DNA
gacctacccgtgcatcgaaagagcgcaggctggtatcgaaagcacaaaaatcaaccgtgaaggcgttgcgtggca

SEQ ID NO: 777040 - DNA, 75 bp, synthetic construct
  source 1..75: mol_type = other DNA
ctatccccgatggtgagcttgagatcaccgccattcgtgcgcagggcgcgggcgggcagcatgttaataagacct

SEQ ID NO: 777041 - DNA, 75 bp, synthetic construct
  source 1..75: mol_type = other DNA
tgacgcatggaaaagtcgagtttaattctgagcaattatctaaactcatggcagaaataacctctttcgagtcca

SEQ ID NO: 777042 - DNA, 75 bp, synthetic construct
  source 1..75: mol_type = other DNA
actaccccggacgtttcaagggggcccacgggcagaactttgcccgctggcagatggacggctggcgaaacaatg

SEQ ID NO: 777043 - DNA, 75 bp, synthetic construct
  source 1..75: mol_type = other DNA
gtagatgttgttggtcaaacctctgccatcggcattaacttaattggtgactatacccatgctgacttaggcaca

SEQ ID NO: 777044 - DNA, 75 bp, synthetic construct
  source 1..75: mol_type = other DNA
tggggtgatagtcattaaggcacaggaataccgcagccaggagctgaaccgcgaagcggcgctgacccggctggt

SEQ ID NO: 777045 - DNA, 75 bp, synthetic construct
  source 1..75: mol_type = other DNA
ggttcgtttgtgctgggctctatggtaacgggcgctattgtcggtgcgatgaatatcggcctttcgacacccggt

SEQ ID NO: 777046 - DNA, 75 bp, synthetic construct
  source 1..75: mol_type = other DNA
caacagcagatcccttgcaggtgagaaagcgggttttctacatcgacggtaaaaatagcgagcttcccggtgaaa

SEQ ID NO: 777047 - DNA, 75 bp, synthetic construct
  source 1..75: mol_type = other DNA
atccaacaggcagcgttaacggcagcaactacgcgcaagatctgaccatgttggacatgtgcctgtacgatggct

SEQ ID NO: 777048 - DNA, 75 bp, synthetic construct
  source 1..75: mol_type = other DNA
aatggatcaccagcaatagtagaaattaagtcagtcatcgatcctatcccaacgattgtcattgacggggaaaga

SEQ ID NO: 777049 - DNA, 75 bp, synthetic construct
  source 1..75: mol_type = other DNA
agtcatacacctgccgcaccagaggagccgctgaaatcccttgtttacacgccccgttaccggacagtggagtat

SEQ ID NO: 777050 - DNA, 75 bp, synthetic construct
  source 1..75: mol_type = other DNA
tttaaatcgatggcgcctgcatcacgtgaaaaaattttgcaacaggcgctggtgttagtggcagaggatttgtcc

SEQ ID NO: 777051 - DNA, 75 bp, synthetic construct
  source 1..75: mol_type = other DNA
gatacaactgtttcgcacaatgaaaccggcctccagggataaacttttacagcaggctctgactcaggttgcgag

SEQ ID NO: 777052 - DNA, 75 bp, synthetic construct
  source 1..75: mol_type = other DNA
cgcacctgcaggcgcatatcaagaccctgcgcctgggcgcgggtgctttgctgctggtggccctgatcatgggga

SEQ ID NO: 777053 - DNA, 75 bp, synthetic construct
  source 1..75: mol_type = other DNA
aaagtggtgcgctgggagggcgatccggaaagtaatccgtttggtctggccctggactgctatgacgggctgcct

SEQ ID NO: 777054 - DNA, 75 bp, synthetic construct
  source 1..75: mol_type = other DNA
ttgacgaagttagtaattgtgagattacggatgaaggtaatccaataaaattagccgaagcacgtaccagtacct

SEQ ID NO: 777055 - DNA, 75 bp, synthetic construct
  source 1..75: mol_type = other DNA
aatggatcacaaactatagtggaaattaagtcagtcatcgatcctatcccaactattgtcattgacggggaaaaa

SEQ ID NO: 777056 - DNA, 75 bp, synthetic construct
  source 1..75: mol_type = other DNA
gttactctatctggcgcaaggtggcaaaaaaatgctggtctggcaggaaaaagaggaattactcgccccagaggt

SEQ ID NO: 777057 - DNA, 75 bp, synthetic construct
  source 1..75: mol_type = other DNA
gtacattttcataaaaagaaatattgcgatataaagaaagccacaatgttagagttttgggattttttatcgtat

SEQ ID NO: 777058 - DNA, 75 bp, synthetic construct
  source 1..75: mol_type = other DNA
attattggcggcacgctgaccgctacattactggccattttcttcgttcctctgttttttgtactggtgaaacgt

SEQ ID NO: 777059 - DNA, 75 bp, synthetic construct
  source 1..75: mol_type = other DNA
cagcagcgcaacagacagtgactcagaagaactggcagccacaccaaaggcaataaaggcgttagcacaaaaaat

SEQ ID NO: 777060 - DNA, 75 bp, synthetic construct
  source 1..75: mol_type = other DNA
atacgccggatcaattgtttcacgatggtgacccgactcagggcattgagggcactattgtttatgcagagcaca

SEQ ID NO: 777061 - DNA, 75 bp, synthetic construct
  source 1..75: mol_type = other DNA
ctaaaaccatactaagctcaattttgtcatattttatcttgttatttatccataacaaatccatggacgaactga

SEQ ID NO: 777062 - DNA, 75 bp, synthetic construct
  source 1..75: mol_type = other DNA
attgagaccgggaaatccacctggctgttagggctggcaggtattaccgaaggggcgatcccgatggcgattgaa

SEQ ID NO: 777063 - DNA, 75 bp, synthetic construct
  source 1..75: mol_type = other DNA
ttataagcattatttatatgttgagtattattttttatacttttactttttcatactttgatgatgcgaaagaac

SEQ ID NO: 777064 - DNA, 75 bp, synthetic construct
  source 1..75: mol_type = other DNA
aagggtaagcctgccagtggtcgtgccgtattgtctcaggaacaggatggcatcaagtcgcatacccacagtgcc

SEQ ID NO: 777065 - DNA, 75 bp, synthetic construct
  source 1..75: mol_type = other DNA
caacaaatcagcgtttatatcctgaattattacaatagtgttaggtctcaccattccaagtgtcaactccacgat

SEQ ID NO: 777066 - DNA, 75 bp, synthetic construct
  source 1..75: mol_type = other DNA
tggcgtggtgggggaattttgtagaggctgctgccagcgggagcgtaagcgccacgggtggctatcgtgggttaa

SEQ ID NO: 777067 - DNA, 75 bp, synthetic construct
  source 1..75: mol_type = other DNA
ttccattgtcagatgaagcaattgcgatactagagatgatgaagccgttaagtggaaatcgagaatttatctttc

SEQ ID NO: 777068 - DNA, 75 bp, synthetic construct
  source 1..75: mol_type = other DNA
aagaaataagaactttttattgttgcaagatatgttgccaaaaacattagaaatatcaaagtcagaaaataactg

SEQ ID NO: 777069 - DNA, 75 bp, synthetic construct
  source 1..75: mol_type = other DNA
tggatgaagcccatctctggtttggccttaatgcgatcaagataaaagatttgcgcggacgcattcgtgggcaac

SEQ ID NO: 777070 - DNA, 75 bp, synthetic construct
  source 1..75: mol_type = other DNA
ctacgcggacgcattcgtggacgacgtgttcgtcatcatgatctccgtgatccggtaaccgggcggtttatcaaa

SEQ ID NO: 777071 - DNA, 75 bp, synthetic construct
  source 1..75: mol_type = other DNA
tctgcaccgcgtgaaaagttggtacttaaccgctggcagatgcatatggctggcctcctggtacaggttgaggtg

SEQ ID NO: 777072 - DNA, 75 bp, synthetic construct
  source 1..75: mol_type = other DNA
gcagcaaagaagcgaactcgctggaaatcgccgttaaaacgcgaattaagcttttctggagaccggcatctatcc

SEQ ID NO: 777073 - DNA, 75 bp, synthetic construct
  source 1..75: mol_type = other DNA
caattctgcgggtaaccaaatgacctggcgattcataaatgattatggcgcgataagcgaaccgctaaaaaacgc

SEQ ID NO: 777074 - DNA, 75 bp, synthetic construct
  source 1..75: mol_type = other DNA
aaataaagacgacatcgttattaacgatatcgcggtttccctttcaaatatctgtcgctttgcagggcatctttc

SEQ ID NO: 777075 - DNA, 75 bp, synthetic construct
  source 1..75: mol_type = other DNA
tggcctttaatacctggctgttgctgaaagcgtctttagaaacggcgctaacagcaggtttgtggaatgccggat

SEQ ID NO: 777076 - DNA, 75 bp, synthetic construct
  source 1..75: mol_type = other DNA
tcctgctatgttgcttatttggagtgctggcctgcacgctttttgcgtggaatcgcaactacttcattctcctct

SEQ ID NO: 777077 - DNA, 75 bp, synthetic construct
  source 1..75: mol_type = other DNA
aaagtaagtagagagcagtcattatctaatttaaatggtataggggaactaactgaaaatatagaacttctacct

SEQ ID NO: 777078 - DNA, 75 bp, synthetic construct
  source 1..75: mol_type = other DNA
gaaagcattctggcgctgagcggtatggcactgacagtggcgacagagggggatgacgtgaaggaggggctgacg

SEQ ID NO: 777079 - DNA, 75 bp, synthetic construct
  source 1..75: mol_type = other DNA
atgtttcctggtacttttgagaatgagtttgacaaaaaagaaaaatatagactagaacacgacgaaaatggaaat

SEQ ID NO: 777080 - DNA, 75 bp, synthetic construct
  source 1..75: mol_type = other DNA
taattcttcgggtagccaaatgacctggcgatttattaatgactacggcgcgataagcgagccaataaagcaagc

SEQ ID NO: 777081 - DNA, 75 bp, synthetic construct
  source 1..75: mol_type = other DNA
tatttagcaaagaagaaaaaataccttatctcatccaggcttgggtagatccatttaataaagaggataaaagca

SEQ ID NO: 777082 - DNA, 75 bp, synthetic construct
  source 1..75: mol_type = other DNA
tactggtacgccggatgcgcttgctggaaatgggcgatgataccgcgtgtgcgctgggcgtcagcgtcgaacgtt

SEQ ID NO: 777083 - DNA, 75 bp, synthetic construct
  source 1..75: mol_type = other DNA
cgcaggaatttgcttttgaagcgttaatgcatgatgcaacagaagcatattgccaggacatccccgcaccactga

SEQ ID NO: 777084 - DNA, 75 bp, synthetic construct
  source 1..75: mol_type = other DNA
ctgacaagaacagcgagattgctgatgaatcgctttgggatgatgggcttaatgcgttgatatttaattatcagg

SEQ ID NO: 777085 - DNA, 75 bp, synthetic construct
  source 1..75: mol_type = other DNA
ctcaagaatggtcagtcgtttaatttcccaaaagttccaattcctgatttctcgccagcatcaaataaaggagca

SEQ ID NO: 777086 - DNA, 75 bp, synthetic construct
  source 1..75: mol_type = other DNA
cgcgggcgtcgattcgctggtcgggcgcaacgacctgccggatattcccattattcgtctgtccgatccggatat

SEQ ID NO: 777087 - DNA, 75 bp, synthetic construct
  source 1..75: mol_type = other DNA
gagctaccgttttagggcttcctggtataaaaactgattttagaggttatacattctctagttcactaatgccat

SEQ ID NO: 777088 - DNA, 75 bp, synthetic construct
  source 1..75: mol_type = other DNA
gaacatttggtgcgaactacaactatagtaacactcatcgtgaagttggcttagcactctcaggtggtattttag

SEQ ID NO: 777089 - DNA, 75 bp, synthetic construct
  source 1..75: mol_type = other DNA
atttacgcgaactatcaattgacttcatcgtctgataataaaacaatgcatgatataggtctcaacggcatggca

SEQ ID NO: 777090 - DNA, 75 bp, synthetic construct
  source 1..75: mol_type = other DNA
tggagcggcgtgctggtggcgatggtgctgtttggtcaggatctgacggctatcgcgctggcagcaatggcgggc

SEQ ID NO: 777091 - DNA, 75 bp, synthetic construct
  source 1..75: mol_type = other DNA
tcccgcgtaaaggcggtccggggatcaccaaatccgacttcctcgtgatcaataaaactgaccttgcaccatacg

SEQ ID NO: 777092 - DNA, 75 bp, synthetic construct
  source 1..75: mol_type = other DNA
caccaccacaacccttaccggcatacgctgcagcaccgcacatatcacggaaacagacaacgcctggttgtactc

SEQ ID NO: 777093 - DNA, 75 bp, synthetic construct
  source 1..75: mol_type = other DNA
ttacgtcaccgtgtcggtactctcccgcgaaggcaacgggctggccagcgcagaactgctggcgatagtcgattc

SEQ ID NO: 777094 - DNA, 75 bp, synthetic construct
  source 1..75: mol_type = other DNA
tgtagccatcgcatctattctattaaacaatagagatatctcttgtgaatttcatgttttcacagattatatcag

SEQ ID NO: 777095 - DNA, 75 bp, synthetic construct
  source 1..75: mol_type = other DNA
tcaatgtcctgcgcgggggatcccataccgttagcaccagaaacggttgcggaacgagctgctgtgctttgctgc

SEQ ID NO: 777096 - DNA, 75 bp, synthetic construct
  source 1..75: mol_type = other DNA
ggaactattaagcgagctggcggcaggtataagtttgattcatcgctcaacgtcaacggagtcggttggattgaa

SEQ ID NO: 777097 - DNA, 75 bp, synthetic construct
  source 1..75: mol_type = other DNA
gtgggaacgatggtggcgccttacccggccagtgccacggcgacggtgaagaatacctgtgccatcagcggtgta

SEQ ID NO: 777098 - DNA, 75 bp, synthetic construct
  source 1..75: mol_type = other DNA
gcctgtgtaagtatatcaccatattccctgtgcagcgccggaaatgggtatatctaaagtttttatgccgtggga

SEQ ID NO: 777099 - DNA, 75 bp, synthetic construct
  source 1..75: mol_type = other DNA
cgcatgtacttgctgtaacgcaaaccagattcctgattcgaaagaacgtgctgttcatgactggaaccagcgcga

SEQ ID NO: 777100 - DNA, 75 bp, synthetic construct
  source 1..75: mol_type = other DNA
gacagctgttatttcaaggattgtgtttgaatcattgcaacgttataggcggctatataataaatctttacctac

SEQ ID NO: 777101 - DNA, 75 bp, synthetic construct
  source 1..75: mol_type = other DNA
attgaatccgatatcagacatcgaccccctgggtttatctatgtgggaggatgcaaaatcgggggcatgtactaa

SEQ ID NO: 777102 - DNA, 75 bp, synthetic construct
  source 1..75: mol_type = other DNA
tgtctgaccgcgattacacctggaacgacaacggcgaactcatccgcatcagcagcccgcgccagacccggagtt

SEQ ID NO: 777103 - DNA, 75 bp, synthetic construct
  source 1..75: mol_type = other DNA
agatcttggattgttaagtgaagcgaccgatacgttgaataggcgctggataaattgtagcaaaaaacttcctat

SEQ ID NO: 777104 - DNA, 75 bp, synthetic construct
  source 1..75: mol_type = other DNA
attttctctaagaaaaataagttagagagaaatttaccaactgatgaaatagctgagttattgtatactgagatt

SEQ ID NO: 777105 - DNA, 75 bp, synthetic construct
  source 1..75: mol_type = other DNA
cgaccgggcaatgggcgcacgtccgatggcgcgtgtcatccaggacaacctgaaaaaaccgctcgccaacgaact

SEQ ID NO: 777106 - DNA, 75 bp, synthetic construct
  source 1..75: mol_type = other DNA
gccgctgccgctatccgcgtaaactggaagccgacttgtgggcgcgcgaggccgttttctctaccggtctgggct

SEQ ID NO: 777107 - DNA, 75 bp, synthetic construct
  source 1..75: mol_type = other DNA
acttagtcagatgtcaattaaacaagtacaacaaatggctaaaatgtatcaagaagtaggtttgactatggaaca

SEQ ID NO: 777108 - DNA, 75 bp, synthetic construct
  source 1..75: mol_type = other DNA
tagggatcacattagatgcagatactactggatttactaaaggtgtaaacgaagcccaaagtaaattagaaagtt

SEQ ID NO: 777109 - DNA, 75 bp, synthetic construct
  source 1..75: mol_type = other DNA
attgaaccggctaccggcggcgccgacatcgaaaatgaagaagattttcgacagcgggggctgctggcgttccag

SEQ ID NO: 777110 - DNA, 75 bp, synthetic construct
  source 1..75: mol_type = other DNA
ttgcccatgatggcacggtcaacattagcggatcgtttcgccgtaatacatgcgtgctggcacaggatagcaagc

SEQ ID NO: 777111 - DNA, 75 bp, synthetic construct
  source 1..75: mol_type = other DNA
acggaatgcagagcgaaatgctgtccattgaaagtggtacggatgcagccagtgggctggctattgcgattctgg

SEQ ID NO: 777112 - DNA, 75 bp, synthetic construct
  source 1..75: mol_type = other DNA
agcgggctggcaattgcgattctggatgatgcgaagatattgattccgcttaaccaggcgagtaaagactacagc

SEQ ID NO: 777113 - DNA, 75 bp, synthetic construct
  source 1..75: mol_type = other DNA
caattatctgttcttttatattccggtgtcattatatcttagttattactatggatataatttttttaatctata

SEQ ID NO: 777114 - DNA, 75 bp, synthetic construct
  source 1..75: mol_type = other DNA
tgctttagtgaagcaattagctgctgatcctactgtcgaaaccgtgactttaggaaatgagaaactaacacgaca

SEQ ID NO: 777115 - DNA, 75 bp, synthetic construct
  source 1..75: mol_type = other DNA
tgctggcaaagacggcgtttggacgcagtttttatgccacgggcgataatttacagggcgctcgtcaactgggtg

SEQ ID NO: 777116 - DNA, 75 bp, synthetic construct
  source 1..75: mol_type = other DNA
atttatggatgactttactatttttgacaatgacattgaaacactaaataatgatttcatcagaatacagcagtt

SEQ ID NO: 777117 - DNA, 75 bp, synthetic construct
  source 1..75: mol_type = other DNA
actttttagaatatcaattgttttggattggagcaatagttgaagactatctattaggtgtaggtgagtatggct

SEQ ID NO: 777118 - DNA, 75 bp, synthetic construct
  source 1..75: mol_type = other DNA
tctgttccgttcattaaaacaaccttctctcacatcgctctgttacataatgtcatacagaatctcagtctgcaa

SEQ ID NO: 777119 - DNA, 75 bp, synthetic construct
  source 1..75: mol_type = other DNA
tgctgcaactgggagagaaagtggctgttaagtatgccaatgaagtgatcgttatttcagaggtgattaatcaac

SEQ ID NO: 777120 - DNA, 75 bp, synthetic construct
  source 1..75: mol_type = other DNA
gcagttccatataaagacgggaatagtgaactgaaaacaggtagtttctctgctgcagctaacataagcataaga

SEQ ID NO: 777121 - DNA, 75 bp, synthetic construct
  source 1..75: mol_type = other DNA
atgattattgagagaatagaatgtgagaaaagtaaacgcagattgagagccttggttttttttggcttattattg

SEQ ID NO: 777122 - DNA, 75 bp, synthetic construct
  source 1..75: mol_type = other DNA
acacatttctggttaacaaattaaaagcgcaaggaattatattctatgcaggtttgagtgaggctgagattactg

SEQ ID NO: 777123 - DNA, 75 bp, synthetic construct
  source 1..75: mol_type = other DNA
attggcatcctcaaagaattttgggggaagtcagagccagagaaggaagcatgagggcgctggcccgtaaagctg

SEQ ID NO: 777124 - DNA, 75 bp, synthetic construct
  source 1..75: mol_type = other DNA
atggtagtgtccgctattgccagtacacctcagacttctgcaacagcgaaaccgcaatgcgagattactcatgag

SEQ ID NO: 777125 - DNA, 75 bp, synthetic construct
  source 1..75: mol_type = other DNA
gccatttctgaattactgaatatttccaccagcaaaatagagagcacatcagagaagattaacggcttatcaggt

SEQ ID NO: 777126 - DNA, 75 bp, synthetic construct
  source 1..75: mol_type = other DNA
tgaatcaaccgcaagattaatatttgccgtttctgaattactggatagttcaaccagcaaaatagagagcatatc

SEQ ID NO: 777127 - DNA, 75 bp, synthetic construct
  source 1..75: mol_type = other DNA
ggctggtcgatgtcactgcgaatgaaagcacaactggcctgtgatgcactgcaaatggcgttgtggcggagaaga

SEQ ID NO: 777128 - DNA, 75 bp, synthetic construct
  source 1..75: mol_type = other DNA
ccggaactggcaacggctggcccgcaggaacggtatcagcaacccgttgtttgttcccggtggtgtcagtattga

SEQ ID NO: 777129 - DNA, 75 bp, synthetic construct
  source 1..75: mol_type = other DNA
attgttcgtgatgatgacgttgggcgatgaccgttcgatctaccgcacctacgttgatggtcgtctggtgtacga

SEQ ID NO: 777130 - DNA, 75 bp, synthetic construct
  source 1..75: mol_type = other DNA
tattcttcagtggggctcaatcggcgcaccaggcattgcacaggatgtagtaacccatttcccgattgcatttcc

SEQ ID NO: 777131 - DNA, 75 bp, synthetic construct
  source 1..75: mol_type = other DNA
aatacataatttcatacctgatatgatatttaccaaagtagagataaattattcgctgtatgattttacctatta

SEQ ID NO: 777132 - DNA, 75 bp, synthetic construct
  source 1..75: mol_type = other DNA
ggtttttatggaagcaatatcttcctcagtggctttgcaggagctgctaaataacgcctcaacactgaactttaa

SEQ ID NO: 777133 - DNA, 75 bp, synthetic construct
  source 1..75: mol_type = other DNA
ttttgttccacctgattgggatgaacttattgaatacatgaatgctgattttaaaaaatggtacacgttatgcag

SEQ ID NO: 777134 - DNA, 75 bp, synthetic construct
  source 1..75: mol_type = other DNA
ggtggcaagcaaacggtatatggattagccactgaggcaaatatcgaaagtggtgaacaaattgttgatggtggg

SEQ ID NO: 777135 - DNA, 75 bp, synthetic construct
  source 1..75: mol_type = other DNA
ttctatttccctaatgtgctgaagtacgaccctgatcaatttgagattaggctttctaatcaagacggcgctggt

SEQ ID NO: 777136 - DNA, 75 bp, synthetic construct
  source 1..75: mol_type = other DNA
tttcgctacagaaaatagttaatgaaaaaaacaacacacaacaaataaaatgcatcatattcaattcattacgtg

SEQ ID NO: 777137 - DNA, 75 bp, synthetic construct
  source 1..75: mol_type = other DNA
gaaagcagtccagttattccccataaatactggcggacactggatattagggaaggtgcgaataagcggggaaat

SEQ ID NO: 777138 - DNA, 75 bp, synthetic construct
  source 1..75: mol_type = other DNA
caatattcttacggacatcacttgttagcatatctaataatgttttttattacaaaggtgcgagcattccatcag

SEQ ID NO: 777139 - DNA, 75 bp, synthetic construct
  source 1..75: mol_type = other DNA
taccacacccagcgtcctcaggtaattttcaatgattaccctgatgggctggcgaatttaccaacgcgcgtggtg

SEQ ID NO: 777140 - DNA, 75 bp, synthetic construct
  source 1..75: mol_type = other DNA
tgtccccgaggtattccccggaagtaatgcgtcagaaaaattacaggcagctgtaaattatgcggttgcaaacaa

SEQ ID NO: 777141 - DNA, 75 bp, synthetic construct
  source 1..75: mol_type = other DNA
cggataattcagatgatctcctgttcaaaaagctattctccccttcgaaattaatgacaattatcggtgatgaaa

SEQ ID NO: 777142 - DNA, 75 bp, synthetic construct
  source 1..75: mol_type = other DNA
gttatcgcagcaacgggctgggcggtcacattgaaaccgggatgcgatttaccgatggtaactggaacctgacgc

SEQ ID NO: 777143 - DNA, 75 bp, synthetic construct
  source 1..75: mol_type = other DNA
gatctattctggtggtacgcaaattattgataacaccagctcctcggatgttattgaagtttattccggcggcgt

SEQ ID NO: 777144 - DNA, 75 bp, synthetic construct
  source 1..75: mol_type = other DNA
aattatctcaaacccaactcagtcagacatttgcagaaaaatttactgtgaccgaggaattactgcagtctttaa

SEQ ID NO: 777145 - DNA, 75 bp, synthetic construct
  source 1..75: mol_type = other DNA
ttgttatttagataaatatggcgatgcaaatatcaatcattattatagaaacttagaaataaaacactcacaacc

SEQ ID NO: 777146 - DNA, 75 bp, synthetic construct
  source 1..75: mol_type = other DNA
cccctatacgttattaaaaaactatgctgacagatttaaaaaatattcagcagaagagcagtacgaaattgattt

SEQ ID NO: 777147 - DNA, 75 bp, synthetic construct
  source 1..75: mol_type = other DNA
gagcgtcgccgcgagctgctaaattcactggcagtagatgctaacgacaccggtcagattattgccgagcagatc

SEQ ID NO: 777148 - DNA, 75 bp, synthetic construct
  source 1..75: mol_type = other DNA
cgatctctgcgcccaacaactgtttatgccgtatcaacttccggttggcgtcgttaccgtcagcctcggcggtat

SEQ ID NO: 777149 - DNA, 75 bp, synthetic construct
  source 1..75: mol_type = other DNA
ccgttgtctggatgaccaccggcaccacacatgtggcccgcgccgaagagtggcgattatgccgaccgaatgggt

SEQ ID NO: 777150 - DNA, 75 bp, synthetic construct
  source 1..75: mol_type = other DNA
atggacccggtggtaaaaccgaatactgccggtggcccacgcaccagtaccatgcaagttaatcagtacaacatc

SEQ ID NO: 777151 - DNA, 75 bp, synthetic construct
  source 1..75: mol_type = other DNA
tccgatggtggcggtgaatgcgggcgatcgttttgaagcccatattgaaggcataggttcagttgctgcgacatt

SEQ ID NO: 777152 - DNA, 75 bp, synthetic construct
  source 1..75: mol_type = other DNA
aaagaaacgcagaatagatctctatgtaatgatatggaatactctggtattgtctgtaaagatactaatggaaaa

SEQ ID NO: 777153 - DNA, 75 bp, synthetic construct
  source 1..75: mol_type = other DNA
gcaggaagggagtgagaacggccacggcgtggtgttcccggctgaactggtgcggctgctggacaggctggagga

SEQ ID NO: 777154 - DNA, 75 bp, synthetic construct
  source 1..75: mol_type = other DNA
ttctgctgaaacgccgtcacgagctgacagatgcggaacacatgcgcttctctggctggacgttgaactatccag

SEQ ID NO: 777155 - DNA, 75 bp, synthetic construct
  source 1..75: mol_type = other DNA
ctcgcgcttactctttccttggtcatgattaattttatattcataatatacttaattgagatatatgagttttat

SEQ ID NO: 777156 - DNA, 75 bp, synthetic construct
  source 1..75: mol_type = other DNA
tatgttgttgatatatatatcaacaatgaactaaaagaaacaacagaaatatattttagaaataaaggtaataat

SEQ ID NO: 777157 - DNA, 75 bp, synthetic construct
  source 1..75: mol_type = other DNA
cccagttcgcgccggacgagtggatctatcatcgtttaagctttatggacaagcagctttgggtaacgcgttatc

SEQ ID NO: 777158 - DNA, 75 bp, synthetic construct
  source 1..75: mol_type = other DNA
cgctcaatggcctgacgtgggcaaaaacctcgccttccgcacccatcattatattaatgttaattgccgccgcct

SEQ ID NO: 777159 - DNA, 75 bp, synthetic construct
  source 1..75: mol_type = other DNA
aagtgcaaagttaatatttttaggtcgttcattagtcaggctattacctaaacaattattatcatctatctataa

SEQ ID NO: 777160 - DNA, 75 bp, synthetic construct
  source 1..75: mol_type = other DNA
gtatgctgagcgagtttgtcctcagtgcgttttttgtccggagcgacagaaaaacgcgctcctgcgggctttgcg

SEQ ID NO: 777161 - DNA, 75 bp, synthetic construct
  source 1..75: mol_type = other DNA
aaagagagatgatgatccaaaattttataactgatgagtacaaattatctaaaaatgacattatcaaatccgatc

SEQ ID NO: 777162 - DNA, 75 bp, synthetic construct
  source 1..75: mol_type = other DNA
gcttgacaaaataaaagaggtcaaccctactcacgatacatatttgtcgttatatactgatttcacctgcgcatt

SEQ ID NO: 777163 - DNA, 75 bp, synthetic construct
  source 1..75: mol_type = other DNA
aaaagacacaaagtcagcattagaaattagtgataatcttatagctcttgatgaatttaatataaattacgccct

SEQ ID NO: 777164 - DNA, 75 bp, synthetic construct
  source 1..75: mol_type = other DNA
ctaaaaagtttcattttatagatatcagcctacccaaaggaataaagatttcgtctaataatgatattataatag

SEQ ID NO: 777165 - DNA, 75 bp, synthetic construct
  source 1..75: mol_type = other DNA
tggtcaggagtatcttttaatatcgaatcaattcgattttatctgaatggcgctgagaacattgtcggtaccatt

SEQ ID NO: 777166 - DNA, 75 bp, synthetic construct
  source 1..75: mol_type = other DNA
ggagagaagagatatacacaagactatccaatcaagaatatgtcgatgccgaagaagctaaaaaatggctatcca

SEQ ID NO: 777167 - DNA, 75 bp, synthetic construct
  source 1..75: mol_type = other DNA
agcagcagggcgcgaagcaggcggcaatcagtgcccaggcgcggggcctcaccgaccgtcaggcgcagcgggagt

SEQ ID NO: 777168 - DNA, 75 bp, synthetic construct
  source 1..75: mol_type = other DNA
aaacaggctgcggtgacggaggcgatgtccctgtttgcggatgtcatgaatgcacgtctggagcaacttgataaa

SEQ ID NO: 777169 - DNA, 75 bp, synthetic construct
  source 1..75: mol_type = other DNA
gaatatgcactacaagggcatcgattattctgcaaatggcttctcgaaaactcaccattccttaacagcatcacc

SEQ ID NO: 777170 - DNA, 75 bp, synthetic construct
  source 1..75: mol_type = other DNA
gtgtatattaatgaaaataatgagagctacctgaaagctcagtttgaaaaattatctcaacgtgatatgaagaag

SEQ ID NO: 777171 - DNA, 75 bp, synthetic construct
  source 1..75: mol_type = other DNA
tcagcgatcgccgacgcacggatggcggcaggggtggtaaacgctattgctgcatatcatctggaactgctgcag

SEQ ID NO: 777172 - DNA, 75 bp, synthetic construct
  source 1..75: mol_type = other DNA
aaagatgctgctacaggtataattaatattaacagtggcacaggcatggcatcgggagtcggaattcaggtagcc

SEQ ID NO: 777173 - DNA, 75 bp, synthetic construct
  source 1..75: mol_type = other DNA
ataaaaacacctcctttaggagatctatatagaagatatcttgaaataagtgagtacaacaggaatacaaatata

SEQ ID NO: 777174 - DNA, 75 bp, synthetic construct
  source 1..75: mol_type = other DNA
ttagtatggtatttagctttttagtgccaattgttggcttgattatgtcatttttgtcattagataaaaaaagca

SEQ ID NO: 777175 - DNA, 75 bp, synthetic construct
  source 1..75: mol_type = other DNA
acaggaaaaggttcaggcaattgtccgcaaactggctcgacaaaattgttccgcagacagtaagaacatttgcag

SEQ ID NO: 777176 - DNA, 75 bp, synthetic construct
  source 1..75: mol_type = other DNA
agcaaagcggaacttgaaaagaccaccgccgacgtcgccaaattcaaacaggcggtaatggccaaagcagctgat

SEQ ID NO: 777177 - DNA, 75 bp, synthetic construct
  source 1..75: mol_type = other DNA
ttttattcacgaagcaaagttaggttcgctgttttttcatgtttatcgctattaatgcatttttccatgattttt

SEQ ID NO: 777178 - DNA, 75 bp, synthetic construct
  source 1..75: mol_type = other DNA
tcctgttttcctccttaattacagcactactgattttaaattatatcttaaagatattgataatgacggttactg

SEQ ID NO: 777179 - DNA, 75 bp, synthetic construct
  source 1..75: mol_type = other DNA
cgcttggtatacagcagttgattgatgctgagaacgacgggaagatttggctaaacagtattccggtcgtgaacg

SEQ ID NO: 777180 - DNA, 75 bp, synthetic construct
  source 1..75: mol_type = other DNA
ccagatgaaagcatatattatgaaacaggacgattactggggggatgatgccgacattacctatgatgatgcctt

SEQ ID NO: 777181 - DNA, 75 bp, synthetic construct
  source 1..75: mol_type = other DNA
tgaaagcaaatagtggaacaaaaataaaatacggcgtaatcaacgattatggagctgttcaagagtatgagggag

SEQ ID NO: 777182 - DNA, 75 bp, synthetic construct
  source 1..75: mol_type = other DNA
tattgctggaccgcaagcaaggtaagtgggttcattaccgcttatcgccgcatattccagcatgggcggcgaaaa

SEQ ID NO: 777183 - DNA, 75 bp, synthetic construct
  source 1..75: mol_type = other DNA
tgttcaaaattcttgctgatgaaacccgtctgggcatcgttttactgcttagcgaactgggagagttatgcgtct

SEQ ID NO: 777184 - DNA, 75 bp, synthetic construct
  source 1..75: mol_type = other DNA
tacgggtgcttccctggtatattgcgctggcaatatccggaagttatgccagtgcctgggctgatgatgatattc

SEQ ID NO: 777185 - DNA, 75 bp, synthetic construct
  source 1..75: mol_type = other DNA
gtatcagattataattgtgcctggttacagaaaaagtatggtggaaatctggcttcactggagaggctttataac

SEQ ID NO: 777186 - DNA, 75 bp, synthetic construct
  source 1..75: mol_type = other DNA
atttgtctgttactgatgatgttgttgttcctgctactgctactgctactgctactgttcttcttttttctactg

SEQ ID NO: 777187 - DNA, 75 bp, synthetic construct
  source 1..75: mol_type = other DNA
tctccttgctggcaaacgccccactatttatgctcggcgctgatgaatcccctaatgatttttatcaaaatcatt

SEQ ID NO: 777188 - DNA, 75 bp, synthetic construct
  source 1..75: mol_type = other DNA
gagattccgggacgacgtgatgagcctgaccggttcagcaccggtatcaggatcacatgacgacagaaaaaaaag

SEQ ID NO: 777189 - DNA, 75 bp, synthetic construct
  source 1..75: mol_type = other DNA
tttcattcaatcaaagcgtagtgagtcttttgatttaggtgattttttaaagtttaaagcttccgtttttagatt

SEQ ID NO: 777190 - DNA, 75 bp, synthetic construct
  source 1..75: mol_type = other DNA
agtccggatgtaaaacttcaagggagtattttacatctagaaaattttcagatagttaatggctgtcagacatca

SEQ ID NO: 777191 - DNA, 75 bp, synthetic construct
  source 1..75: mol_type = other DNA
caaatgccagtactgtagagtttaacggttctgctctgaaaactgatggtctgaaattccaagcaaaactgaaag

SEQ ID NO: 777192 - DNA, 75 bp, synthetic construct
  source 1..75: mol_type = other DNA
tgatgagttgatgggtgtattcaatggtgataaggatagctttgaaagctacttcaagaaaaaattattgcttgg

SEQ ID NO: 777193 - DNA, 75 bp, synthetic construct
  source 1..75: mol_type = other DNA
caaaaaagagaatgcggataatgttgatgctcaaattctaatgttcttgtcatttcttaaaccacaagaaaaaca

SEQ ID NO: 777194 - DNA, 75 bp, synthetic construct
  source 1..75: mol_type = other DNA
aatatttatcagtttactatgcgaggatatcttgagttttataatgtaatagatgtattatttttttacttagag

SEQ ID NO: 777195 - DNA, 75 bp, synthetic construct
  source 1..75: mol_type = other DNA
tgggttgccagaaagatattgcagagaagatacaaaaacagggaggtgattatttattcgctgtaaaaggaaacc

SEQ ID NO: 777196 - DNA, 75 bp, synthetic construct
  source 1..75: mol_type = other DNA
cgaaggccttttattgttcgaaatacagctaaaaattcaccttgtaggcaacgctttgatattgctcatgaggtt

SEQ ID NO: 777197 - DNA, 75 bp, synthetic construct
  source 1..75: mol_type = other DNA
aagaacataatccagatgaaaaagtttggaacgcacattatgagtatcttaaaccttttttcaaagatgaacgat

SEQ ID NO: 777198 - DNA, 75 bp, synthetic construct
  source 1..75: mol_type = other DNA
actacaagtcattcagagatagagtcgagttttcaatggtttcgagtaaagttcgaagccatccatcacatgtcg

SEQ ID NO: 777199 - DNA, 75 bp, synthetic construct
  source 1..75: mol_type = other DNA
cattgaatacactagagaaagcgagtgctcttgggcgatctttagtgatttttaaaatagccctgtcacgcagtt

SEQ ID NO: 777200 - DNA, 75 bp, synthetic construct
  source 1..75: mol_type = other DNA
tatatgaaaattagcgcaattgattacagtcaaaatatcaacggtgattacaaagccaccattacaggcggcgga

SEQ ID NO: 777201 - DNA, 75 bp, synthetic construct
  source 1..75: mol_type = other DNA
attttttacttgatatcgctaacaattatgtcttttcttttaaaaaagagatgttattatcagaaccacacttac

SEQ ID NO: 777202 - DNA, 75 bp, synthetic construct
  source 1..75: mol_type = other DNA
ttttactcaatcgatagatgatccctgcttttacgaaccgtgcaatttacattttttacttgatatcgctaacaa

SEQ ID NO: 777203 - DNA, 75 bp, synthetic construct
  source 1..75: mol_type = other DNA
atgacattcttatttatgaaagaagtaatacaactcactttaaatttgaaaacataaaatttaaaaatgaagaag

SEQ ID NO: 777204 - DNA, 75 bp, synthetic construct
  source 1..75: mol_type = other DNA
agctgaaacccgatcccagcgatcgtcgtactggtcgttctcgtcaatcttctgaacgttctgaacgtggcgaac

SEQ ID NO: 777205 - DNA, 75 bp, synthetic construct
  source 1..75: mol_type = other DNA
ttgatcccggtaacggcgtccgtgcccgccagcgtgccagccgataaaaccgaaagccagcgcatccgcgaaacc

SEQ ID NO: 777206 - DNA, 75 bp, synthetic construct
  source 1..75: mol_type = other DNA
gccgaaccaaagaagcatttgctacgccagtaactggtggtgtagatggaattcctcatattgcatttactgact

SEQ ID NO: 777207 - DNA, 75 bp, synthetic construct
  source 1..75: mol_type = other DNA
aacgcattacccactctgtttaatacgtttaaattcgataaaaaaaatatgaagcccctcctcctggcaaataat

SEQ ID NO: 777208 - DNA, 75 bp, synthetic construct
  source 1..75: mol_type = other DNA
tggctttacggataaccctcgatacattgcggagaaaaataagatggaaactttactcaaaaagccatctccaca

SEQ ID NO: 777209 - DNA, 75 bp, synthetic construct
  source 1..75: mol_type = other DNA
atgtcattagtgcgttctcaacaatgcacagtctggtcatcggacagatcaagacggataagaaatccaatgaga

SEQ ID NO: 777210 - DNA, 75 bp, synthetic construct
  source 1..75: mol_type = other DNA
atgcggtaaccgccatcatgctgggcgcgttaacgttacagggaatgcaaccaggcccgctgatgtttaccgacc

SEQ ID NO: 777211 - DNA, 75 bp, synthetic construct
  source 1..75: mol_type = other DNA
tgcgtctgtggttcgcgtggcattactgtcaccaaaagcttccgtttccatttttctggtcaccagcgtctgacc

SEQ ID NO: 777212 - DNA, 75 bp, synthetic construct
  source 1..75: mol_type = other DNA
ttcctttttattttcctcaattttatgcaacgaaagaaaatgatatgtggtgggggaaaggttttactgattggg

SEQ ID NO: 777213 - DNA, 75 bp, synthetic construct
  source 1..75: mol_type = other DNA
taaaccgagattcatctcataccttgaggaaaattcagcgtgttccccgcgccagcggggataaaccggcgctga

SEQ ID NO: 777214 - DNA, 75 bp, synthetic construct
  source 1..75: mol_type = other DNA
taatgcctggaatgaatggtctgaaggggcatatttagaaccggatattaatagtggatgtaaatatctggaaac

SEQ ID NO: 777215 - DNA, 75 bp, synthetic construct
  source 1..75: mol_type = other DNA
ctggtaagcacaaatatttcccgggagccatatcgtatctgtaagcgtcgtctcagcaccgtctggcagatcctg

SEQ ID NO: 777216 - DNA, 75 bp, synthetic construct
  source 1..75: mol_type = other DNA
cgtttccgccattatccagccggaactggtaagcacaaatatttcccgggagccatatcgtatctgtattgtgaa

SEQ ID NO: 777217 - DNA, 75 bp, synthetic construct
  source 1..75: mol_type = other DNA
aaccgtctttcagaaacgtttgctgtgatgaatgcgccaggaattaaagatgcttatgtcaatgggcaaaaatat

SEQ ID NO: 777218 - DNA, 75 bp, synthetic construct
  source 1..75: mol_type = other DNA
ctgaagattataagaccggacgtaccataaggcgcgctcttcccgacgtggcgatccgtttattgaaagagcata

SEQ ID NO: 777219 - DNA, 75 bp, synthetic construct
  source 1..75: mol_type = other DNA
ctattgttaaatcaattcagcaatgctgggagagaattgataatatagaaagacgtatcgaagaactagagatga

SEQ ID NO: 777220 - DNA, 75 bp, synthetic construct
  source 1..75: mol_type = other DNA
acgtctcttttagcagtggtgatttagaagctagcggtaaacgctatccgattgatgtgaaaatgattgcaccat

SEQ ID NO: 777221 - DNA, 75 bp, synthetic construct
  source 1..75: mol_type = other DNA
ccgacgtcctgactcctgagcaggtaaaacagcgtcaggatgaggacagtcgtcgccagcaggaatgggatgccc

SEQ ID NO: 777222 - DNA, 75 bp, synthetic construct
  source 1..75: mol_type = other DNA
cattaccagaggtgcgacttacccggtactgatagacagcattgcggtggaagtgaacagcacagacactgcggc

SEQ ID NO: 777223 - DNA, 75 bp, synthetic construct
  source 1..75: mol_type = other DNA
ttaatacccatcgtggtcgttttgaaattgccgatggcggcacgttgtttctcgatgaaattggcgatctgccgt

SEQ ID NO: 777224 - DNA, 75 bp, synthetic construct
  source 1..75: mol_type = other DNA
atatggccagccgggcctgaccatcagaacaatgggactgaagatgccggacggctccgtgtataccgccgaccc

SEQ ID NO: 777225 - DNA, 75 bp, synthetic construct
  source 1..75: mol_type = other DNA
tatttctacgcccctgacgggtacggatgccgctgccgtatccgggcgcgttcggcgtctgatgtggagaaatat

SEQ ID NO: 777226 - DNA, 75 bp, synthetic construct
  source 1..75: mol_type = other DNA
acagaacggacggttgctgcattcggagatggtgccggcggggccgttctccatcacggatgtgccgctgtacac

SEQ ID NO: 777227 - DNA, 75 bp, synthetic construct
  source 1..75: mol_type = other DNA
gagatggtgccggcgggtccgttctccatcacggatgtgccgctgtacaccagtggtgatgtgaccatgaaaatc

SEQ ID NO: 777228 - DNA, 75 bp, synthetic construct
  source 1..75: mol_type = other DNA
ttaccggcaatggaaaaggcaaaaccaccgcggcatttggtacggcaacacgcgcagttggtcacggaaaaaagt

SEQ ID NO: 777229 - DNA, 75 bp, synthetic construct
  source 1..75: mol_type = other DNA
ctgtcgcgtaaaccggaggtgacgtggtatggctgggacggagacaggctgacgacggtgcagactgacaccaca

SEQ ID NO: 777230 - DNA, 75 bp, synthetic construct
  source 1..75: mol_type = other DNA
ggggcgagcacgcgaaaaggcaaaagcatatctgattgagattactgataaattaagagtagtaaagacaacagc

SEQ ID NO: 777231 - DNA, 75 bp, synthetic construct
  source 1..75: mol_type = other DNA
gttcaatttttcaatacagttttcattcctaatgacttaagtcgtgttgaatatagggttgatcgtaaacttggt

SEQ ID NO: 777232 - DNA, 75 bp, synthetic construct
  source 1..75: mol_type = other DNA
tctggtgtggctcctctccgggcagaacggcacccgcgccgtgcgtggtgtgcagtctgacgatggctggcgtct

SEQ ID NO: 777233 - DNA, 75 bp, synthetic construct
  source 1..75: mol_type = other DNA
cccgcggtgaaaaccatcgccatcagcgcgatcaccaccgatatgggcttgatcactaacgattttgtcaccagc

SEQ ID NO: 777234 - DNA, 75 bp, synthetic construct
  source 1..75: mol_type = other DNA
gcagcagcgtttccatgacctgggccgatttcgatggtgacggcgatatggatctcttcctgcccgccagccagg

SEQ ID NO: 777235 - DNA, 75 bp, synthetic construct
  source 1..75: mol_type = other DNA
agtgtggtgccggtgacggcctgaaactggttgaaaaggtgtttggtgtctccccgtccgagcggccacaaaggt

SEQ ID NO: 777236 - DNA, 75 bp, synthetic construct
  source 1..75: mol_type = other DNA
aaacattccggacacatcacaaacgggaagggtaacgggcgacgcgccagcgtggcccgcttcccttccggcagg

SEQ ID NO: 777237 - DNA, 75 bp, synthetic construct
  source 1..75: mol_type = other DNA
gccttttgcggggatgccaggagcgcaggccacggcgcgacagaggcggcgcgaccggaacggtcgctgcaagcc

SEQ ID NO: 777238 - DNA, 75 bp, synthetic construct
  source 1..75: mol_type = other DNA
gccttttgcagggatgccgggagcgcaggccacggcgcgacagaggcggcgcgaccggaacggtcgctgcaagcc

SEQ ID NO: 777239 - DNA, 75 bp, synthetic construct
  source 1..75: mol_type = other DNA
ccagatggctccttctatctggttcaactcatcaaggtttatcaccaaacattttaaggttgatgcaatttcaga

SEQ ID NO: 777240 - DNA, 75 bp, synthetic construct
  source 1..75: mol_type = other DNA
atcagttttcccggtttgatgaaacagctcagcaactggcgcaagggaccgggtgttttatccggatagacctca

SEQ ID NO: 777241 - DNA, 75 bp, synthetic construct
  source 1..75: mol_type = other DNA
acagcccgacccgccaggggggcgcccgggaaagccataaacaggagaagaacggaaagaacaggaagaacaaca

SEQ ID NO: 777242 - DNA, 75 bp, synthetic construct
  source 1..75: mol_type = other DNA
ccgggaattacagttctacaggtacaaatgtcggcctcggaaatggatgggattcaatagtttctcttgatggcg

SEQ ID NO: 777243 - DNA, 75 bp, synthetic construct
  source 1..75: mol_type = other DNA
ttgccatgtccggttgtggttctgctgttgcagacagaagcacagtattttatacatttaatgatacattgaata

SEQ ID NO: 777244 - DNA, 75 bp, synthetic construct
  source 1..75: mol_type = other DNA
agagacaacgatgagatggtacagtgcaggtacacaaaacctgaccatcggcagtcgcctctatggtgaatcttc

SEQ ID NO: 777245 - DNA, 75 bp, synthetic construct
  source 1..75: mol_type = other DNA
acgacgtgaagcgcggtttgcgaaacggcgttgctccttacataccggcggccttttgcagggatgccaggagcg

SEQ ID NO: 777246 - DNA, 75 bp, synthetic construct
  source 1..75: mol_type = other DNA
acgacgtgaagcgcggtttgcgaaacggcgttgctccttacatacccgcggccttttgcggggatgccgggagcg

SEQ ID NO: 777247 - DNA, 75 bp, synthetic construct
  source 1..75: mol_type = other DNA
acgacgtgaagcgcggtttgcgaaacggcgttgctccttacatacctgcggccttttgccgggatgcctggagcg

SEQ ID NO: 777248 - DNA, 75 bp, synthetic construct
  source 1..75: mol_type = other DNA
atctcaacaagaagaactgatagcagggaaagatttttgtttaccagcggtactaatctttttggttcatatcat

SEQ ID NO: 777249 - DNA, 75 bp, synthetic construct
  source 1..75: mol_type = other DNA
agtctgagggcgaatttgttcaggctggtcgtatcgttgcgggggcgtatgactacactctcgcgcgtggacaag

SEQ ID NO: 777250 - DNA, 75 bp, synthetic construct
  source 1..75: mol_type = other DNA
ggagcgcaataccgtgcgcatgacttatattcataaggcagagcacctagaagcccgcaaagcgatgatgcagtg

SEQ ID NO: 777251 - DNA, 75 bp, synthetic construct
  source 1..75: mol_type = other DNA
agctgaagcgccagtcgaaggatgatttcaagggcaggcatttcgaggcctggctgattgtacaggcggttgcct

SEQ ID NO: 777252 - DNA, 75 bp, synthetic construct
  source 1..75: mol_type = other DNA
gggaatattgctttccatactttgattgaagaagcgcataagcgtggaataaaaattatgttggatgcagtattt

SEQ ID NO: 777253 - DNA, 75 bp, synthetic construct
  source 1..75: mol_type = other DNA
aattgatggttttaaatcaatgacgcttgagaataatagaaaatgtatgatatgggatgaaaacaaacaagatct

SEQ ID NO: 777254 - DNA, 75 bp, synthetic construct
  source 1..75: mol_type = other DNA
atcactggtttgcagtgttcaaacctcaaaaacgccgttgccgttacggttttatactttttgggaaagagggag

SEQ ID NO: 777255 - DNA, 75 bp, synthetic construct
  source 1..75: mol_type = other DNA
cgggccaggaatcgatgattcagttgatttatccagatattccccagaactcgatagtcacggacaatactcact

SEQ ID NO: 777256 - DNA, 75 bp, synthetic construct
  source 1..75: mol_type = other DNA
aagaaatatcgttgctgacagcctggaagaagtatcgggtattgctgaaccgtgttgatattcttgagccagttt

SEQ ID NO: 777257 - DNA, 75 bp, synthetic construct
  source 1..75: mol_type = other DNA
cgggctgagtatctggaacaacaggaaacagccacagaactcgccgggctgattactgaaaaagaagatcagctg

SEQ ID NO: 777258 - DNA, 75 bp, synthetic construct
  source 1..75: mol_type = other DNA
atcacccggagttggcgacccagtttttactttacggcagcctcgccaccatgttcggctcgctttgctcctcac

SEQ ID NO: 777259 - DNA, 75 bp, synthetic construct
  source 1..75: mol_type = other DNA
gggccatcccgttcggcatcgtctgcgtgctgaccttctacacgccggacttctccgcacagggcaagatcatct

SEQ ID NO: 777260 - DNA, 75 bp, synthetic construct
  source 1..75: mol_type = other DNA
gttgttacctgaatgtagcaacttttgggtaaactctctgcatggacaaggggcgaaggtcgttagcccacggtt

SEQ ID NO: 777261 - DNA, 75 bp, synthetic construct
  source 1..75: mol_type = other DNA
gtgcgttttttgtatgttcatccgctggaatggtatctgcgggtggagtcgccacgtgatgttatcgaactgccc

SEQ ID NO: 777262 - DNA, 75 bp, synthetic construct
  source 1..75: mol_type = other DNA
aactctggcttttgactcttttaaagaaaggcttgagtctaccatggcggcactcactttctttatatcaacggg

SEQ ID NO: 777263 - DNA, 75 bp, synthetic construct
  source 1..75: mol_type = other DNA
gaaaggctgcagtctaccatgacagcactcactttctttatatcaacgggtcaatgtgcctgcgatgaaatagca

SEQ ID NO: 777264 - DNA, 75 bp, synthetic construct
  source 1..75: mol_type = other DNA
attccgaccagaaaaaatgaccaatttgatcaatataaaaaacaggttggttattcactatttaaaaacgatata

SEQ ID NO: 777265 - DNA, 75 bp, synthetic construct
  source 1..75: mol_type = other DNA
ctccagatagttaacgatagtgaactgcgtatcagacttgctaaatggtgtaaaaatggtgcgtattcctgggca

SEQ ID NO: 777266 - DNA, 75 bp, synthetic construct
  source 1..75: mol_type = other DNA
caacggcgaatatgcctgggcggtggattccccccggaataccttcaatccactgcatcataaaaaagtgggttt

SEQ ID NO: 777267 - DNA, 75 bp, synthetic construct
  source 1..75: mol_type = other DNA
gctgcaatccgtggcaactggcagaaggcccggaatctcctgtctggcacagacttctcgcatttctgaaacgct

SEQ ID NO: 777268 - DNA, 75 bp, synthetic construct
  source 1..75: mol_type = other DNA
atgaaattaaaaagcatggctgttttattatcgagttataatggggagaaatatattaaagaacaattggactca

SEQ ID NO: 777269 - DNA, 75 bp, synthetic construct
  source 1..75: mol_type = other DNA
aaaaaaatgagagtctcctaaagtttccttcgataatatcaatgcttaatactgatgaatcccctaatgattttg

SEQ ID NO: 777270 - DNA, 75 bp, synthetic construct
  source 1..75: mol_type = other DNA
tgttataggtaaaaaatctgggttgctgcctatctttagatccaagtataagcaattcatcaaagaatgtaaaag

SEQ ID NO: 777271 - DNA, 75 bp, synthetic construct
  source 1..75: mol_type = other DNA
atgttttctacaaacttaatacagagtgattatggtaatttaaatattaaaaaccttgccttcgactcttttaaa

SEQ ID NO: 777272 - DNA, 75 bp, synthetic construct
  source 1..75: mol_type = other DNA
atgtaaaacgtatggcatgggtgctaaaatggatggatagtaaaggtgatacatatacatgcccattttttaggt

SEQ ID NO: 777273 - DNA, 75 bp, synthetic construct
  source 1..75: mol_type = other DNA
aatactttgtctcaattcttctcagcagcgctatgtaaatgacaagggattgatgaatacagaaattatccctca

SEQ ID NO: 777274 - DNA, 75 bp, synthetic construct
  source 1..75: mol_type = other DNA
gtattgtctcaggaacaggacggcattaaatcgcacacccacagcgccagcgcatccagtacagatttggggacg

SEQ ID NO: 777275 - DNA, 75 bp, synthetic construct
  source 1..75: mol_type = other DNA
gtattctctcaggaacaggacggcattaaatcgcaaacccacagcgccagcgcatccagtaccgatttggggacg

SEQ ID NO: 777276 - DNA, 75 bp, synthetic construct
  source 1..75: mol_type = other DNA
tcagttagcggattctgctgagcaaacagtgacctttaaagttgattatatcgctacggggaaagcgacttctgg

SEQ ID NO: 777277 - DNA, 75 bp, synthetic construct
  source 1..75: mol_type = other DNA
ttcgattgaaggacttaccctatacacgagtagcaaaagttaatatggaaatagtctctttaatgagacacgcat

SEQ ID NO: 777278 - DNA, 75 bp, synthetic construct
  source 1..75: mol_type = other DNA
atatcccattgattggtaacctgtttaaatcgacggcggataaaaaagaaaaacgtaacctgatggtgtttatcc

SEQ ID NO: 777279 - DNA, 75 bp, synthetic construct
  source 1..75: mol_type = other DNA
gggcaatcctgccagtggtcgggccgtattgtctcaggaacaggacggcattaaatcgcatacccacagcgccag

SEQ ID NO: 777280 - DNA, 75 bp, synthetic construct
  source 1..75: mol_type = other DNA
gggcaaacctgccagtggtcgggccgtattatctcaggaacaggacggcattaaatcgcacacccacagcgccag

SEQ ID NO: 777281 - DNA, 75 bp, synthetic construct
  source 1..75: mol_type = other DNA
acgttggcagtagttgcagcaaatgacagtggcgatggcggttctcataacacctcaaccaccacgtccactacg

SEQ ID NO: 777282 - DNA, 75 bp, synthetic construct
  source 1..75: mol_type = other DNA
gtattatctcaggaacaggacggcattaaatcgcacacccacagcgccagcgcatccagtacggatttggggacg

SEQ ID NO: 777283 - DNA, 75 bp, synthetic construct
  source 1..75: mol_type = other DNA
gggcaagcctgccagtggtcgggccgtattttctcaggaacaggacggcattaaatcgcatacccacagcgccag

SEQ ID NO: 777284 - DNA, 75 bp, synthetic construct
  source 1..75: mol_type = other DNA
gggcaaccctgccagtggtcgggccgtattctctcaggaacaggacggcattaaatcgcagacccacagcgccag

SEQ ID NO: 777285 - DNA, 75 bp, synthetic construct
  source 1..75: mol_type = other DNA
tggagcagtctctggcgttaaaactgatgtaccaattgccttagaaggttgtgatgttactgtaactaaaaatgc

SEQ ID NO: 777286 - DNA, 75 bp, synthetic construct
  source 1..75: mol_type = other DNA
ctggatgctggccgtttccggcgctggtaattttgaatttaaagctgttccccgtcgtggccatagcggagacag

SEQ ID NO: 777287 - DNA, 75 bp, synthetic construct
  source 1..75: mol_type = other DNA
cggtcgagtccgtccagttccaggagttcctgcgcaccgaactggtgaagcgctccgctgcgatgggtatccccg

SEQ ID NO: 777288 - DNA, 75 bp, synthetic construct
  source 1..75: mol_type = other DNA
agcatattataaatcacacgaattttctaaagtggtaaataggttatctaaagaccatgatttagttctacctca

SEQ ID NO: 777289 - DNA, 75 bp, synthetic construct
  source 1..75: mol_type = other DNA
ggactctcgtgaaggacttcttgactccagaaagatggagtgtatcgatggtgaagtcgtcgtaacagttaacga

SEQ ID NO: 777290 - DNA, 75 bp, synthetic construct
  source 1..75: mol_type = other DNA
ttctgttagcgcgaacgccattacccgaggggccgccagtgaagtgatcggcgtcctcaaattgtgtagcggctg

SEQ ID NO: 777291 - DNA, 75 bp, synthetic construct
  source 1..75: mol_type = other DNA
atgatccgcccgttcatcaaatgggcagggggtaaaacccgtgtccttcctgacctgctgccacaccttcctaca

SEQ ID NO: 777292 - DNA, 75 bp, synthetic construct
  source 1..75: mol_type = other DNA
cggaaggaatgaacccctggcctgaactggtggatgcggttctgccaaaagttctggcgtgcaacacagcggagg

SEQ ID NO: 777293 - DNA, 75 bp, synthetic construct
  source 1..75: mol_type = other DNA
gattcaatagtcacattgccaaatgtcagtgcaacgaagttgcaaagtaatggcgcagtctctggtgtaaaaact

SEQ ID NO: 777294 - DNA, 75 bp, synthetic construct
  source 1..75: mol_type = other DNA
ttataactgtggtatgtacaacttccagcgttatggcggctgatgataatgccatcacggacggtacagtaacgt

SEQ ID NO: 777295 - DNA, 75 bp, synthetic construct
  source 1..75: mol_type = other DNA
gtttggtcgtagttcccgctggattgaacgtgaagtaaaagaatggttagaagcccgcattaatgactcgagagc

SEQ ID NO: 777296 - DNA, 75 bp, synthetic construct
  source 1..75: mol_type = other DNA
tgatactttgcctgatgttcagcctgccgtttggcgtggctgtcatctttacaggtgaagtcatgttgaacttcg

SEQ ID NO: 777297 - DNA, 75 bp, synthetic construct
  source 1..75: mol_type = other DNA
tttaatatagaattagaccatctaaacgcgattagaaagtttggcctcatctggtttttatcttttatgtggctt

SEQ ID NO: 777298 - DNA, 75 bp, synthetic construct
  source 1..75: mol_type = other DNA
accggggctgaagcaagcacgacagcaggcactaccagcgcaacaacgactgcgacaactggcggcgtggctgct

SEQ ID NO: 777299 - DNA, 75 bp, synthetic construct
  source 1..75: mol_type = other DNA
cgatgagatttatcgccgtcagcgtgaaatgaaagaggagctgagcggtctggatgatttggcttcaattcgggc

SEQ ID NO: 777300 - DNA, 75 bp, synthetic construct
  source 1..75: mol_type = other DNA
caatctttagagaaaataaaactattttttccgatgcaccaagagatggcattcctgttgtcttaaatttatact

SEQ ID NO: 777301 - DNA, 75 bp, synthetic construct
  source 1..75: mol_type = other DNA
attgcggtgccgaagactcaggctcaattgaagtcacatgtgatgtttgtggtgctgaatggcctgaagaggaaa

SEQ ID NO: 777302 - DNA, 75 bp, synthetic construct
  source 1..75: mol_type = other DNA
ctgttccgcgctgattactggcgcgcactacaaaaccgcatacgtgaagggcatgtggaagatgtttatgcgtat

SEQ ID NO: 777303 - DNA, 75 bp, synthetic construct
  source 1..75: mol_type = other DNA
atggctttgatgtctattttatgccatcattatctataccacctctattaaaaaaaggctgtttgacaatcacaa

SEQ ID NO: 777304 - DNA, 75 bp, synthetic construct
  source 1..75: mol_type = other DNA
aaatggtcaggcgtcggacgcgtgccggttgtaattcagcaagaacttgacgccggaaaacctcttgaatccttc

SEQ ID NO: 777305 - DNA, 75 bp, synthetic construct
  source 1..75: mol_type = other DNA
atggctacgaccccaaccccgttacacactgaatttacctttcactttcttgccgttcgccgttccgacctgaac

SEQ ID NO: 777306 - DNA, 75 bp, synthetic construct
  source 1..75: mol_type = other DNA
taaaggcgtttcggcgggcgctggagcttggcgccggtgaacgggctgacgggtgccgtcattttcctcgatgga

SEQ ID NO: 777307 - DNA, 75 bp, synthetic construct
  source 1..75: mol_type = other DNA
atgccagtacgaccacaaagggagttgtcaagctcagtaaccgtactgacagcacttcgcagacagaggccgcca

SEQ ID NO: 777308 - DNA, 75 bp, synthetic construct
  source 1..75: mol_type = other DNA
ctggttcaaattcaggcacaggagaatggagaaaacgattgtccaccatttatagccctgccagcagtattcaga

SEQ ID NO: 777309 - DNA, 75 bp, synthetic construct
  source 1..75: mol_type = other DNA
ggaacttcgccagttcaaagaaacaccggaacagcgcttcgcgctggagcaggaacatctgcagccgttaccgga

SEQ ID NO: 777310 - DNA, 75 bp, synthetic construct
  source 1..75: mol_type = other DNA
tcctgccacgggcatgccgtccacgcagggccagaacaaaaggtaaggttgagcggatggtgaaatacctcaagg

SEQ ID NO: 777311 - DNA, 75 bp, synthetic construct
  source 1..75: mol_type = other DNA
gcggcgagaacggaagcgtgcgcatggactcgttgctggtcattcagcgggcattcaccaaagtggagtttttcg

SEQ ID NO: 777312 - DNA, 75 bp, synthetic construct
  source 1..75: mol_type = other DNA
tgatcctgaggaattagccaatatttttaataaaaaacataaagaacacatggatgatcctctattccatctaat

SEQ ID NO: 777313 - DNA, 75 bp, synthetic construct
  source 1..75: mol_type = other DNA
catacggttaccgcaacgctgagtaataacaataccagtgattcacagccggtaacgtttgtggcggacaaaacc

SEQ ID NO: 777314 - DNA, 75 bp, synthetic construct
  source 1..75: mol_type = other DNA
cgtggcggataaggacagcgcggttgtcgttctgcaaacatcgaaagcggaaatcattgggaatggcgtagatga

SEQ ID NO: 777315 - DNA, 75 bp, synthetic construct
  source 1..75: mol_type = other DNA
ttggcacctgggtacagcgcgccattattccgctgaaaagtgaactggtaatgggagacggcaatacaggaagtg

SEQ ID NO: 777316 - DNA, 75 bp, synthetic construct
  source 1..75: mol_type = other DNA
atagcggagaactgtacgataaatggcacgctgaaagcggagaacattattggtgatcttgtgaaatgtgcaggg

SEQ ID NO: 777317 - DNA, 75 bp, synthetic construct
  source 1..75: mol_type = other DNA
gcaatcagggggcaggcaatatcaccgactgtacggtgattgtgaccaaaaaagccgcttccggcatcagtattc

SEQ ID NO: 777318 - DNA, 75 bp, synthetic construct
  source 1..75: mol_type = other DNA
acagttatatcgaggttggcggtaatcgttacagcgttcccgaagcgctgtgtggtcagccggtatcgatacgaa

SEQ ID NO: 777319 - DNA, 75 bp, synthetic construct
  source 1..75: mol_type = other DNA
gtcttcctggccagttagttgaggctgttcgaatacgtacaattaatgcgcgattgccggaggcattgccagcat

SEQ ID NO: 777320 - DNA, 75 bp, synthetic construct
  source 1..75: mol_type = other DNA
gatgctgttgttttacgttcaaaaaacggtattgaaattcatttgcaaagcgatgatgtcactgcgctcgggcag

SEQ ID NO: 777321 - DNA, 75 bp, synthetic construct
  source 1..75: mol_type = other DNA
attgaagctagcctggaaaatggtagctccacgcttagcacgtccattcaagtcgacgctgatgcgtctacggca

SEQ ID NO: 777322 - DNA, 75 bp, synthetic construct
  source 1..75: mol_type = other DNA
ccagcagaacaaaatctgccgaaatgacgaacggcggccaagccgtgacgaacgaacagggtaaagctaccgtca

SEQ ID NO: 777323 - DNA, 75 bp, synthetic construct
  source 1..75: mol_type = other DNA
atgctgagcatacctatgaatcactggttcgcgccttccgctacttcggtggttgtgtgaaaacggtgctggttg

SEQ ID NO: 777324 - DNA, 75 bp, synthetic construct
  source 1..75: mol_type = other DNA
gtattgatggtgaaaatattgacctgtctgtattctcacatcccggaggtggaattgaaggagatcaggacgtca

SEQ ID NO: 777325 - DNA, 75 bp, synthetic construct
  source 1..75: mol_type = other DNA
tccgcagggacctaagggggatactggagccacaggcccggctggaccacagggaccgaagggagaaccgggagc

SEQ ID NO: 777326 - DNA, 75 bp, synthetic construct
  source 1..75: mol_type = other DNA
atgatggacattatttttgtggagccggaggaaacagaccagacggttcagatgaggcgcttactggcagtcaga

SEQ ID NO: 777327 - DNA, 75 bp, synthetic construct
  source 1..75: mol_type = other DNA
aacccaacgccttattatgtttccttctcgtctgtcgatgtgcagtcgggaaataaaaaatataccgtagacgcc

SEQ ID NO: 777328 - DNA, 75 bp, synthetic construct
  source 1..75: mol_type = other DNA
aaaggctctcgcccattgctggtgcagtcctggcttgataccggtgatgacaatgtagacccggctttgatcaaa

SEQ ID NO: 777329 - DNA, 75 bp, synthetic construct
  source 1..75: mol_type = other DNA
cggctgacagtgagcagtggaggaaaacagtgccatgttgattttagcctgccactggataaaaagcagtccggc

SEQ ID NO: 777330 - DNA, 75 bp, synthetic construct
  source 1..75: mol_type = other DNA
gtgttgccgattgttctgatatttcaggtttttttcgctgtatcgtacctggggcaataacaatatatttcagta

SEQ ID NO: 777331 - DNA, 75 bp, synthetic construct
  source 1..75: mol_type = other DNA
ttaggattactgtaacagttcttgaatttattaatgggtttagtgtggtagtgcgaattgacgagttttattgcg

SEQ ID NO: 777332 - DNA, 75 bp, synthetic construct
  source 1..75: mol_type = other DNA
atggtggatttgctgggctggggcgtaaaccggcttgaacgtgaagcatgggatgcggtgggttcattaacggat

SEQ ID NO: 777333 - DNA, 75 bp, synthetic construct
  source 1..75: mol_type = other DNA
ttacctccggattttttcggttcaggaagcctctggttaaacggcactcggagagatggattgccaacagaaaag

SEQ ID NO: 777334 - DNA, 75 bp, synthetic construct
  source 1..75: mol_type = other DNA
ggtactggatgcggtcgggatctcgcgctccaatcttgagaagcgttttaaagaagaggtgggtgaaaccatcca

SEQ ID NO: 777335 - DNA, 75 bp, synthetic construct
  source 1..75: mol_type = other DNA
atggttatgcaatttctgacgggattattttttttttgcctgatgatgctcccccttgcagccgtcgccggggga

SEQ ID NO: 777336 - DNA, 75 bp, synthetic construct
  source 1..75: mol_type = other DNA
cgggaaagcaacgtcaggaaaggtacatttctccgcgattaatgattttggcggcgcaattgaaggcgatgtcaa

SEQ ID NO: 777337 - DNA, 75 bp, synthetic construct
  source 1..75: mol_type = other DNA
gtacccgacgctgtgggtgctgttcgctggggtgatgatggcgatcctgtttgaattctgtatgcgcatggtgcg

SEQ ID NO: 777338 - DNA, 75 bp, synthetic construct
  source 1..75: mol_type = other DNA
aagtggtaggcaacgcatcaccacaagcagcaaagctcatcgaggttataaaaaattcatccaaacccattcaaa

SEQ ID NO: 777339 - DNA, 75 bp, synthetic construct
  source 1..75: mol_type = other DNA
ggaaatttcaaaatattggttaaggaagaatatttccgggttagataaaataattgcgctagcaagaagcaaaaa

SEQ ID NO: 777340 - DNA, 75 bp, synthetic construct
  source 1..75: mol_type = other DNA
gtggcattattttgcattcaaatacaacaactagacgtgaaatgaaggcattattttatctttctgaaaaaaact

SEQ ID NO: 777341 - DNA, 75 bp, synthetic construct
  source 1..75: mol_type = other DNA
atgtataccctggcggttattatgacggcttgtttttttgttcataagaggattgatacagtggtcacttatgcg

SEQ ID NO: 777342 - DNA, 75 bp, synthetic construct
  source 1..75: mol_type = other DNA
tggctatcaggtcagaacattttcgcacgtagatacggacgcaaaaattaacgaggtatgcgagttcatcaaaga

SEQ ID NO: 777343 - DNA, 75 bp, synthetic construct
  source 1..75: mol_type = other DNA
cttcaccggaataccttccgacgctccggccgcactgaaatggtcctggactacatccggcggcaaagcggcgct

SEQ ID NO: 777344 - DNA, 75 bp, synthetic construct
  source 1..75: mol_type = other DNA
cccaaagatcgggaaagtgtgttctggttcaatgtcctggaagttccaccaaaacccgacgcggaaaaaatggct

SEQ ID NO: 777345 - DNA, 75 bp, synthetic construct
  source 1..75: mol_type = other DNA
ggctcgcgcccattactggtccagtcatggctggatacgggtgacgataatgccgatccggcgaccattaaagtt

SEQ ID NO: 777346 - DNA, 75 bp, synthetic construct
  source 1..75: mol_type = other DNA
ttttaacaataccaccgggcgcagttatatttgaccgactggtatatgaaaaagaatgtaaggcctataccgggc

SEQ ID NO: 777347 - DNA, 75 bp, synthetic construct
  source 1..75: mol_type = other DNA
ataaggacatcattatgaccaggacgcgtcagttactccttgcttcacttttcacctgcgcaggtgcattagcca

SEQ ID NO: 777348 - DNA, 75 bp, synthetic construct
  source 1..75: mol_type = other DNA
cgtttcatcgggcaaagtcgtgttccaggccataaatgactttggcggcaatatcgatggttcagcaacattcta

SEQ ID NO: 777349 - DNA, 75 bp, synthetic construct
  source 1..75: mol_type = other DNA
acaaggcattggtatacacagtaaagaaagagaatattgaatggattatccgaagaaaagagttttgtttaaggc

SEQ ID NO: 777350 - DNA, 75 bp, synthetic construct
  source 1..75: mol_type = other DNA
catccggcgatgacaatggctggcttgatggtattttgggctggttaaaaacaatatgggtgtcagtgaatgatt

SEQ ID NO: 777351 - DNA, 75 bp, synthetic construct
  source 1..75: mol_type = other DNA
agccagcgccgggaaccacgtctgcggaaaatactcagcaggatgtttctctgccaccgatctcttctacgccga

SEQ ID NO: 777352 - DNA, 75 bp, synthetic construct
  source 1..75: mol_type = other DNA
ctggttgatgacggtgttatcgaatggaatgacccggaggtcgtgagggcgctcaggggtgcattaaaacacggt

SEQ ID NO: 777353 - DNA, 75 bp, synthetic construct
  source 1..75: mol_type = other DNA
tgatggtactggctggtgtttgctttgcagaacctggtgattacaggctgacaaaaggagacaaggagatgatag

SEQ ID NO: 777354 - DNA, 75 bp, synthetic construct
  source 1..75: mol_type = other DNA
aatttatacttttattaccctataataaatctctggagatgcatgaacttaacgagcaaaacatccagtatttga

SEQ ID NO: 777355 - DNA, 75 bp, synthetic construct
  source 1..75: mol_type = other DNA
gcggtggcagttcctccggcgatggctggcttggtgatattcttggctggttgcagcgtatttgggtttcagtga

SEQ ID NO: 777356 - DNA, 75 bp, synthetic construct
  source 1..75: mol_type = other DNA
gtggatcactattgcaccgttcgtgacagctacctcaaataccctgaacctccagccagaaagacccgccacaaa

SEQ ID NO: 777357 - DNA, 75 bp, synthetic construct
  source 1..75: mol_type = other DNA
ccggacggccggttacagcgatgccgtcagtgttctggcacaggatcgcccgtcgctggccattgtgtccgggca

SEQ ID NO: 777358 - DNA, 75 bp, synthetic construct
  source 1..75: mol_type = other DNA
ttagacggcaaataattaataaggaaaacataaggaaaccactgaatatacctatttctattatttattcaataa

SEQ ID NO: 777359 - DNA, 75 bp, synthetic construct
  source 1..75: mol_type = other DNA
tcgacggctatgcactggatggtcagctcgataacgacaccggcaggccgctgaaagacactgcagcggctgtta

SEQ ID NO: 777360 - DNA, 75 bp, synthetic construct
  source 1..75: mol_type = other DNA
gaaaccgttttcaggcaaaacaccttaaccggggcggtgctgcgggatatatcgcgaaatacatttcaaaaaaca

SEQ ID NO: 777361 - DNA, 75 bp, synthetic construct
  source 1..75: mol_type = other DNA
cacgtgctttcaatatttccccgctctactggaaaaaataccgtaaaggacagatgaccacgaggcaggcatatt

SEQ ID NO: 777362 - DNA, 75 bp, synthetic construct
  source 1..75: mol_type = other DNA
gcgacgtttaatggcataccctcagtaaatcataataattttgatgtggatacatataacacatatataaaaaat

SEQ ID NO: 777363 - DNA, 75 bp, synthetic construct
  source 1..75: mol_type = other DNA
ttcagaattttcgctcaatacggcaggcagaatggtttccaggttcagggctgaattgtctgatagggcctggag

SEQ ID NO: 777364 - DNA, 75 bp, synthetic construct
  source 1..75: mol_type = other DNA
cgcggatgtcacaaggaccacgcttaacgagagtgaactggcagccttgtacgcctgtgtggaagcggcaaaatg

SEQ ID NO: 777365 - DNA, 75 bp, synthetic construct
  source 1..75: mol_type = other DNA
gtggaattgatctcatctggcagcgtaacagacaccctggatttcaggaacggggggtttttgccgtagatggca

SEQ ID NO: 777366 - DNA, 75 bp, synthetic construct
  source 1..75: mol_type = other DNA
gcgggttcttatcgtagcgctgccgactcaggtaactgggttcattccaatggcaccatttactaccttatatcg

SEQ ID NO: 777367 - DNA, 75 bp, synthetic construct
  source 1..75: mol_type = other DNA
tgcaaatgagttaggcgttcaggttggagaacttaaagcgcttctggacgtgaatggtgtctccctgtctaacag

SEQ ID NO: 777368 - DNA, 75 bp, synthetic construct
  source 1..75: mol_type = other DNA
tcttcgtggtttcaatagcgaaacaaaggaaatccatgatgaacctctggcaggagatgaaaccgtactcacact

SEQ ID NO: 777369 - DNA, 75 bp, synthetic construct
  source 1..75: mol_type = other DNA
ttttcaaagtattttgaaagtattaaatggtgttctgaatcagctaaagagttttatgaggactggaatgtatat

SEQ ID NO: 777370 - DNA, 75 bp, synthetic construct
  source 1..75: mol_type = other DNA
agttttaccgatcatgtatcgattcaggttctattatttcatgtgtgaatggaatattgatttttaaaggtcgtt

SEQ ID NO: 777371 - DNA, 75 bp, synthetic construct
  source 1..75: mol_type = other DNA
atgctgcattttaaaatactgagattatttaacagagtgttgtttttttttaaatttttacttttgaaagttttt

SEQ ID NO: 777372 - DNA, 75 bp, synthetic construct
  source 1..75: mol_type = other DNA
aaaaaataagagagttggcatttgtgagcaatcataaagaatggaataaatatgacttattaattttaaaatctg

SEQ ID NO: 777373 - DNA, 75 bp, synthetic construct
  source 1..75: mol_type = other DNA
catgggggaggtgatggtcccccatctttttgtctgttattcctgtgcccagccaaccctgtatgccaggatctc

SEQ ID NO: 777374 - DNA, 75 bp, synthetic construct
  source 1..75: mol_type = other DNA
gtactgaaccagctgcccctgtggcgagcacgaaggcaccggctgcgacttctacgccagccgcaacgccagcac

SEQ ID NO: 777375 - DNA, 75 bp, synthetic construct
  source 1..75: mol_type = other DNA
cttcgcgtttacacacccgtttacagctttgccgggagaattatcgaacgcttacatcaaacaaattttcgcaac

SEQ ID NO: 777376 - DNA, 75 bp, synthetic construct
  source 1..75: mol_type = other DNA
catgagcgttgaacaggcccgggcgattctggccgcggcggcaccacagcagccggtggcatccgcgcagagtga

SEQ ID NO: 777377 - DNA, 75 bp, synthetic construct
  source 1..75: mol_type = other DNA
tgctgccggggaaacaattgaagatataggaaaaggaacagcctggctgggtaaatcaaatgttgtttttcatga

SEQ ID NO: 777378 - DNA, 75 bp, synthetic construct
  source 1..75: mol_type = other DNA
cggcaacgctggcggcgatgccggatatgacggtggaaaaagcccgccctgtcctggcggctgcaccacaggcgg

SEQ ID NO: 777379 - DNA, 75 bp, synthetic construct
  source 1..75: mol_type = other DNA
gttcataggattcttaatggccatcttttcaaattatttatcagattatatatttaatagcccaaattacagtta

SEQ ID NO: 777380 - DNA, 75 bp, synthetic construct
  source 1..75: mol_type = other DNA
ttgcttttttaacattaattattcctactagtgtagatgcaaatgtgcaagagttaggtgttgctgtcgatccac

SEQ ID NO: 777381 - DNA, 75 bp, synthetic construct
  source 1..75: mol_type = other DNA
atcagtgagcatcgacgcaaccagtgctcagctgcttactggtgaaatcggcattcacacggaagagttcattaa

SEQ ID NO: 777382 - DNA, 75 bp, synthetic construct
  source 1..75: mol_type = other DNA
acttaccgaatactcaaatgcatggcttcttgaaagaagaatttagtggcctaccacctgtttctgtatataatt

SEQ ID NO: 777383 - DNA, 75 bp, synthetic construct
  source 1..75: mol_type = other DNA
gacaaacaggcttgcggaatgagtatgtttatcgttctgcactcacacacaatcttttgcttgggaagcattcat

SEQ ID NO: 777384 - DNA, 75 bp, synthetic construct
  source 1..75: mol_type = other DNA
ttaattgccatggtaactaatcagtcaattatatttataactgtggtgtggcgattaagaaaacatccaattatt

SEQ ID NO: 777385 - DNA, 75 bp, synthetic construct
  source 1..75: mol_type = other DNA
ccatgtattcattatggagaaatgtatacttattacaacgtatggacaaataaaacaaagtcatttgttagccaa

SEQ ID NO: 777386 - DNA, 75 bp, synthetic construct
  source 1..75: mol_type = other DNA
gagcgtgatttttattcttatttaaaagaaaatacaagcgaacacaaggaattgatagaaacacttaacaagaaa

SEQ ID NO: 777387 - DNA, 75 bp, synthetic construct
  source 1..75: mol_type = other DNA
gatccagaatgtgggccgttgcataggacgctggagcttcagcctataatcaatgcgcttaagcaggatcaaagt

SEQ ID NO: 777388 - DNA, 75 bp, synthetic construct
  source 1..75: mol_type = other DNA
acgcgttagccatgctggcaatgacagccttcacactcatgacccgacgtggtatctgcgaaatgcagaacgtgg

SEQ ID NO: 777389 - DNA, 75 bp, synthetic construct
  source 1..75: mol_type = other DNA
tattgcagatttcgatggctttttccagcaacagaatgttgatcctatgccggatgtttcgtcagaaacacgtgt

SEQ ID NO: 777390 - DNA, 75 bp, synthetic construct
  source 1..75: mol_type = other DNA
ggctgaagcaccttaatgtgggtggaaacaatctcttcatgtccaccgggctggagctgcccaccgggctggagg

SEQ ID NO: 777391 - DNA, 75 bp, synthetic construct
  source 1..75: mol_type = other DNA
aagaaaacacaaatgaacaaaaagaattgatagaaacacttaacaagaaaaagctgtacaacgcactctttgatg

SEQ ID NO: 777392 - DNA, 75 bp, synthetic construct
  source 1..75: mol_type = other DNA
tggatgtatatcatgcggtccacattcagtaagtaattcaggatgcaaaattcgattaattaaacctgatggctc

SEQ ID NO: 777393 - DNA, 75 bp, synthetic construct
  source 1..75: mol_type = other DNA
gcgtgaaatcgagttgcgccagaaacaatacgagtactatcgtgatttactgttcagtttcccaaaacctgaaac

SEQ ID NO: 777394 - DNA, 75 bp, synthetic construct
  source 1..75: mol_type = other DNA
atgggaaatatattgattgcaatgtcaggtgccactacaggaaaagtggggatttataaaaaagaaataaaatgt

SEQ ID NO: 777395 - DNA, 75 bp, synthetic construct
  source 1..75: mol_type = other DNA
attacgatgaacgagattggggctgatcaatttcaaggtaaggatgcaggctatattcacgacgcttattcaaat

SEQ ID NO: 777396 - DNA, 75 bp, synthetic construct
  source 1..75: mol_type = other DNA
cagtattatcttctctttttatgagtgcagggaatgctgcggaagggaatcaacagggcgagttgattattaccg

SEQ ID NO: 777397 - DNA, 75 bp, synthetic construct
  source 1..75: mol_type = other DNA
atgattctgtttttatcaccgttatcgtttctgatccccggttatgccacagctcccgcactgatgtacgtgggt

SEQ ID NO: 777398 - DNA, 75 bp, synthetic construct
  source 1..75: mol_type = other DNA
cgatcattgaggctgtggcccaggaaaatcagcgcgtgatggagatcctgaattgtcaggaggcaaaaggacgcg

SEQ ID NO: 777399 - DNA, 75 bp, synthetic construct
  source 1..75: mol_type = other DNA
tcaggttcgatcaggagctggctgccaagttcgaagcggaccacgaaatggctctactgatgaacaaggattttg

SEQ ID NO: 777400 - DNA, 75 bp, synthetic construct
  source 1..75: mol_type = other DNA
tgatgcctgcgacgagctgcgcgatgcgacccgccgcccactcaccgaatgggaagccgagcaggaacgcattaa

SEQ ID NO: 777401 - DNA, 75 bp, synthetic construct
  source 1..75: mol_type = other DNA
ccaggcagaacaggctcagcgtgaacgtgacgaacgactgaagcaggaagcggcagaacaagcccgccgcgatgc

SEQ ID NO: 777402 - DNA, 75 bp, synthetic construct
  source 1..75: mol_type = other DNA
gtgagtgactcctttcttgtttcaagagataaactaccttctcttggagacatagttaaaatttcttcattttta

SEQ ID NO: 777403 - DNA, 75 bp, synthetic construct
  source 1..75: mol_type = other DNA
ggtacacagaatattaataatcatggtattgccacgggtaccaatatcaacagcggaacacaaaatatcaagagc

SEQ ID NO: 777404 - DNA, 75 bp, synthetic construct
  source 1..75: mol_type = other DNA
atcaagatgttggaaggaataacaattatatggggcagtctaataatacaaccattaacggaggaagacagacaa

SEQ ID NO: 777405 - DNA, 75 bp, synthetic construct
  source 1..75: mol_type = other DNA
tcaaagcacacttgatggcgtgtgagaaacaaaaaatgatgccattgccgatgatatgcgcaaatattgttttta

SEQ ID NO: 777406 - DNA, 75 bp, synthetic construct
  source 1..75: mol_type = other DNA
agggaatgatgtcaccgtcaatgtcaacgacgcctctggatatgcaaaaggaatcattattcagggcaaaacagc

SEQ ID NO: 777407 - DNA, 75 bp, synthetic construct
  source 1..75: mol_type = other DNA
gattttgaagagttaaactatatatcacacgaattaaaattaaaattttcattggatggtttcaataatttccat

SEQ ID NO: 777408 - DNA, 75 bp, synthetic construct
  source 1..75: mol_type = other DNA
gaagaaatccttcaaaaggttgaacgtgaagttatgtcctttgtgcctgatatcacaacggcaaagggcagaaag

SEQ ID NO: 777409 - DNA, 75 bp, synthetic construct
  source 1..75: mol_type = other DNA
tcatgctttgtattttcttctgttattcagtttatactatatatacctctaattataaaaaaagatagtgtatat

SEQ ID NO: 777410 - DNA, 75 bp, synthetic construct
  source 1..75: mol_type = other DNA
agtttcttgccggtaatgatagcctctattatatccgttaccttttatatattattgggtttctttagaatagac

SEQ ID NO: 777411 - DNA, 75 bp, synthetic construct
  source 1..75: mol_type = other DNA
gtgggtaaatacatcagactacgcagagttagccgtagcgctgttcttctacgattgaccaacctgccgctgtca

SEQ ID NO: 777412 - DNA, 75 bp, synthetic construct
  source 1..75: mol_type = other DNA
gcatcggtaacggagaatgatggtaaagcctttcctcagccagccggcattgcgttaccagtacaggaagctgca

SEQ ID NO: 777413 - DNA, 75 bp, synthetic construct
  source 1..75: mol_type = other DNA
agaactggctgcgcgacttgatatcagtcgtgaagaagtgctgaacgagctgtgggaactgaaaaaggctggttt

SEQ ID NO: 777414 - DNA, 75 bp, synthetic construct
  source 1..75: mol_type = other DNA
ctcagccagccggtgttgcgttaccagcacaggaagcggcaacacaggaagaaattaaaacagatactatggggg

SEQ ID NO: 777415 - DNA, 75 bp, synthetic construct
  source 1..75: mol_type = other DNA
aatggcattgccattctgccggtgagcggcacgctggtgcataaactgggtaccctgcggccttactccggcatg

SEQ ID NO: 777416 - DNA, 75 bp, synthetic construct
  source 1..75: mol_type = other DNA
tcaaacccaggaagtttggtttggttggtccagacatggactgaggatgagaacaaaagtcgatacgctgatgtt

SEQ ID NO: 777417 - DNA, 75 bp, synthetic construct
  source 1..75: mol_type = other DNA
cgaagcatccccctcatccccgaaaaatcgccagaggctcgtcaaccgtctttattgacggcctgcccgccgcca

SEQ ID NO: 777418 - DNA, 75 bp, synthetic construct
  source 1..75: mol_type = other DNA
ttaaacttgggccacaacgcgtggcttggaaacgcaaagatgttatggaatggcttgaaagccgccagcaagtac

SEQ ID NO: 777419 - DNA, 75 bp, synthetic construct
  source 1..75: mol_type = other DNA
tatcattgccctatgtgggtaatgactccaacttattgatagtgttttatgttcagataatgcccgatgactttg

SEQ ID NO: 777420 - DNA, 75 bp, synthetic construct
  source 1..75: mol_type = other DNA
ctgattatctcaaatgaggtttatcaagggcaaaaacgaagtgaggatttcattatagagagtaaggtttggaag

SEQ ID NO: 777421 - DNA, 75 bp, synthetic construct
  source 1..75: mol_type = other DNA
cacacttgctcatggtggggcaatgaccaccgctgagattgcaattgctgtggggcgtgctgattgcgtcaggtc

SEQ ID NO: 777422 - DNA, 75 bp, synthetic construct
  source 1..75: mol_type = other DNA
ccgcgataccacgctctatcgcggcgggacggcgtcggtgcttcaacgatgcagtcacattttgtacaggctttt

SEQ ID NO: 777423 - DNA, 75 bp, synthetic construct
  source 1..75: mol_type = other DNA
atgacaaacaatgttcttaccatacataatcgcttgtttatcaaccagttacatttctatagaatgaatttcact

SEQ ID NO: 777424 - DNA, 75 bp, synthetic construct
  source 1..75: mol_type = other DNA
gtgggcagtaaccagatcattaaagtgggctctgttcaggtggaaacgattggacttgttcgtgcgctgactgtg

SEQ ID NO: 777425 - DNA, 75 bp, synthetic construct
  source 1..75: mol_type = other DNA
atgtcgataaagaaaatcactaataaatttatacccccttatcactcacatattcatgaaaatattatctggctt

SEQ ID NO: 777426 - DNA, 75 bp, synthetic construct
  source 1..75: mol_type = other DNA
gggaagctaacagcgatattcctgacgtctggctgcccttcatgatgaaacggctaaaagacaaattgccggaaa

SEQ ID NO: 777427 - DNA, 75 bp, synthetic construct
  source 1..75: mol_type = other DNA
acaggagaggcgctggactggctgaacatcggacggatccccctgctgatcgtcctctgtatgctggcagttttt

SEQ ID NO: 777428 - DNA, 75 bp, synthetic construct
  source 1..75: mol_type = other DNA
ggtagcaccactcgcgctaacagcgaagactgcctttttgcagtgaaaggaaatctgcctgaacgcattaacgcc

SEQ ID NO: 777429 - DNA, 75 bp, synthetic construct
  source 1..75: mol_type = other DNA
atggtgccctcagtgagccagagagttcagtgtacgggaattcgtttgcgagctgaactgataatattcctttgt

SEQ ID NO: 777430 - DNA, 75 bp, synthetic construct
  source 1..75: mol_type = other DNA
ggagaatgacacataaatcagttgaagaactgatggaaatgtcaaaagaagatctgtattcatatttccacgatc

SEQ ID NO: 777431 - DNA, 75 bp, synthetic construct
  source 1..75: mol_type = other DNA
tttctggaagaacaatatcagattgagcattccactatacaaatagagtcccttgtctgcaggaaagctgaatgt

SEQ ID NO: 777432 - DNA, 75 bp, synthetic construct
  source 1..75: mol_type = other DNA
caacagaacgaggacccgatttatctggcctataactctgcggcctttggctttaccggtcgcagcgtttaccag

SEQ ID NO: 777433 - DNA, 75 bp, synthetic construct
  source 1..75: mol_type = other DNA
caacgtctgaagcgccttatgcctggttcagtcatctgccagcctcaacactgcgcccccttgccacacagcgca

SEQ ID NO: 777434 - DNA, 75 bp, synthetic construct
  source 1..75: mol_type = other DNA
tatttctcaggctatggttgttcttaaacctttttcagcctggttgctcaaggtagacaaaaactatgtgagtga

SEQ ID NO: 777435 - DNA, 75 bp, synthetic construct
  source 1..75: mol_type = other DNA
agacctgggagctcagcaaagaaaaatctaaccgagttcacaataagtgagataagtgatattggcatgtatcgt

SEQ ID NO: 777436 - DNA, 75 bp, synthetic construct
  source 1..75: mol_type = other DNA
gcgtaaaggctttaccattgcaggttgcggcacgattgccatgggccaacgcaaacccgaagatgcgcgcaatga

SEQ ID NO: 777437 - DNA, 75 bp, synthetic construct
  source 1..75: mol_type = other DNA
acctaaaagagcttgccgataaaaaaggccaatttattgctatttaccgcggctttttattgagcttgaaagata

SEQ ID NO: 777438 - DNA, 75 bp, synthetic construct
  source 1..75: mol_type = other DNA
ggtctgtatctctatagcgccgccgaaacactgggctgcgccagagaagacatctaccaaaaaatgctcgacgga

SEQ ID NO: 777439 - DNA, 75 bp, synthetic construct
  source 1..75: mol_type = other DNA
atggaacgaggcactgcgtctggcggtgcctctttacttaaggaatttcatcctgtgcaaacccttcagcaagtt

SEQ ID NO: 777440 - DNA, 75 bp, synthetic construct
  source 1..75: mol_type = other DNA
cgcacaaaaggaacattatatttaccagacataaacggctggaaaatagaattcccacacaaaaatggcggaatg

SEQ ID NO: 777441 - DNA, 75 bp, synthetic construct
  source 1..75: mol_type = other DNA
aatacactacactcagaaaaatagtaaaaagatgctcactaaaaatttttattggcacgttaaaagtgccatatt

SEQ ID NO: 777442 - DNA, 75 bp, synthetic construct
  source 1..75: mol_type = other DNA
ccatagctgaaggagcactgaaacgcattagcgaactgtacaccatcgaggatgaaatgcgcggtgccagcgtct

SEQ ID NO: 777443 - DNA, 75 bp, synthetic construct
  source 1..75: mol_type = other DNA
tgtgttagccagtatcggtagcgacattgcgcttatgttgcttaatggcattgcgcaaaagattaaattcgttgc

SEQ ID NO: 777444 - DNA, 75 bp, synthetic construct
  source 1..75: mol_type = other DNA
agttaaagaagtcgatgaattgatttccatttcagacagtgttggtaacgcccgcaatccacttatttcaatcca

SEQ ID NO: 777445 - DNA, 75 bp, synthetic construct
  source 1..75: mol_type = other DNA
tgtagcaaagcactacatccgtgcgaccccagccttggcattgatccgcgctaaagcactcggttctaaccctgt

SEQ ID NO: 777446 - DNA, 75 bp, synthetic construct
  source 1..75: mol_type = other DNA
tcaatgaatactggattatggggcactcaaggatatttttcccttctgtgcctctatctgaaattaaacacataa

SEQ ID NO: 777447 - DNA, 75 bp, synthetic construct
  source 1..75: mol_type = other DNA
accgtcagggcatgaccgcattggttgatatggtgtatgacctgctgcgcgaaggcaaagacatcgatctgggta

SEQ ID NO: 777448 - DNA, 75 bp, synthetic construct
  source 1..75: mol_type = other DNA
cagcaggtaatctgctccagcgcacgcgctgcccctatttttacgacaccaatcagccctgcaataagcggctgc

SEQ ID NO: 777449 - DNA, 75 bp, synthetic construct
  source 1..75: mol_type = other DNA
cgcccgatcaagatggcgatgaacgagtcgcgcacggttcacatttcgcaggcgtatggcattgagcagcgtctc

SEQ ID NO: 777450 - DNA, 75 bp, synthetic construct
  source 1..75: mol_type = other DNA
atcatcaggggattactattgatggtgatttcacaattaaaaataccgtacatcttactgatatcaatggtgttt

SEQ ID NO: 777451 - DNA, 75 bp, synthetic construct
  source 1..75: mol_type = other DNA
gtggcaatatccggacagggagctatggtaaacccgctggaaatcaactaattgttaacggtgactaccacggga

SEQ ID NO: 777452 - DNA, 75 bp, synthetic construct
  source 1..75: mol_type = other DNA
ttatcttttacgtacacagatgtatttgcattaagtattactgattataccagacttacatcttcacaatcgatc

SEQ ID NO: 777453 - DNA, 75 bp, synthetic construct
  source 1..75: mol_type = other DNA
aacagaatattcgttcacttgaatttgatggtggtcgattaaaatttaccggcgtaacacctggtaaaatatcag

SEQ ID NO: 777454 - DNA, 75 bp, synthetic construct
  source 1..75: mol_type = other DNA
ttaatggatatagtgctgggatatatgctacctggtatgccaatgatgaatctcatcaggggacttatcttgata

SEQ ID NO: 777455 - DNA, 75 bp, synthetic construct
  source 1..75: mol_type = other DNA
aaaatattaggggaaaaacctggatacacgggtctccagataattaatgcatataatgatggaatttcagtaaaa

SEQ ID NO: 777456 - DNA, 75 bp, synthetic construct
  source 1..75: mol_type = other DNA
ttgaccagcccggaaacctgtgtggcggctattggtcaggctggggaaaaccttattcctctctctggcatgttg

SEQ ID NO: 777457 - DNA, 75 bp, synthetic construct
  source 1..75: mol_type = other DNA
atgtatgagcgaggtctcttgaaagagctcgaagagttgaagataaaaaatattgagttgaatgatattgtgagc

SEQ ID NO: 777458 - DNA, 75 bp, synthetic construct
  source 1..75: mol_type = other DNA
tggatgttgcggcaaaatcctgcattatcttgggcaaccaaacttatcccctaccgtttgcaacgatatgtgaaa

SEQ ID NO: 777459 - DNA, 75 bp, synthetic construct
  source 1..75: mol_type = other DNA
tccagagaacactctggatatctccagtctttcttctaatgctgtttctttaattattagtgtagccgttctact

SEQ ID NO: 777460 - DNA, 75 bp, synthetic construct
  source 1..75: mol_type = other DNA
aaggataatagtggcagatatttctcaacagcacctaaccgaggagaaagaaaaggatcatatccattcaatagc

SEQ ID NO: 777461 - DNA, 75 bp, synthetic construct
  source 1..75: mol_type = other DNA
atatataccttgccctttagaatcagcaatgttacgcatggatttgattatgatccgaatatagaatatggttat

SEQ ID NO: 777462 - DNA, 75 bp, synthetic construct
  source 1..75: mol_type = other DNA
tttcaagcataccgacttcggcaagatcattttgccgtttactctgctgcgtcgattggagtgcgcactggagtc

SEQ ID NO: 777463 - DNA, 75 bp, synthetic construct
  source 1..75: mol_type = other DNA
gattacttccttgagcgtctgaagttttatcgcgagaagtcgatagatttaccaagggcatccgatccgcggtac

SEQ ID NO: 777464 - DNA, 75 bp, synthetic construct
  source 1..75: mol_type = other DNA
ctgcggtgaaaaacatggacgcgcttaattttatggaaggggaagccctgcccgtccattttcgggataaccgcg

SEQ ID NO: 777465 - DNA, 75 bp, synthetic construct
  source 1..75: mol_type = other DNA
atcgttcagctgcaggctgaacaggatgcgttagtggaaaaggctgtgctgccagtgtccatcagccatgagctg

SEQ ID NO: 777466 - DNA, 75 bp, synthetic construct
  source 1..75: mol_type = other DNA
gtgtcgcctgccgtggtacagggggctccggatatcacccgggaaatccagcaggatattgcccggcgaatgaga

SEQ ID NO: 777467 - DNA, 75 bp, synthetic construct
  source 1..75: mol_type = other DNA
aaacttacctgaaaatatcccaccattctcggcacagcatcatcactatctaaaatggcatcgagaaaatatatt

SEQ ID NO: 777468 - DNA, 75 bp, synthetic construct
  source 1..75: mol_type = other DNA
gagaacatgcagcgcctcggctttgtcgctgctgacaataacattcgtaatgcgctactgctgtctatgctttgt

SEQ ID NO: 777469 - DNA, 75 bp, synthetic construct
  source 1..75: mol_type = other DNA
gaaaataggccagtggtctgaaccgcgccatatgtatcagaatcgaataggccagttaatgacagcctctgcacg

SEQ ID NO: 777470 - DNA, 75 bp, synthetic construct
  source 1..75: mol_type = other DNA
gtaacctcttcctgatctcaccaagcagcaactcgatacttagtaattattcgccagcagacaagaaaaaattct

SEQ ID NO: 777471 - DNA, 75 bp, synthetic construct
  source 1..75: mol_type = other DNA
ggactccttgggatggcgatttactgccatggtattgtaaagatggcagtgtcacattaacgtggatatctaagt

SEQ ID NO: 777472 - DNA, 75 bp, synthetic construct
  source 1..75: mol_type = other DNA
gacgtggcaaaactgacgcaggtgatggcaccacagggtatgtttttccagtacggcgcgctcgatagccgtgac

SEQ ID NO: 777473 - DNA, 75 bp, synthetic construct
  source 1..75: mol_type = other DNA
ccttcaggctggtcagaatgtcgtgatccgcgcagcatcaagcagcgtgggtctggctgccatacagattgctaa

SEQ ID NO: 777474 - DNA, 75 bp, synthetic construct
  source 1..75: mol_type = other DNA
cacgcaagtagatatagatttgtttcatgcgcgctttacgctgaacgatcgtcgtgaaaaagagaatcgtgtcat

SEQ ID NO: 777475 - DNA, 75 bp, synthetic construct
  source 1..75: mol_type = other DNA
caaggctcgcaaggttctgcagtgggctgaagaatatagcttgcaggataacgatgaaacaattcttgcggtaac

SEQ ID NO: 777476 - DNA, 75 bp, synthetic construct
  source 1..75: mol_type = other DNA
gtgtatcaccatgaggggcaccgtatacgtctgacaaagaacggccggatcattgtgacctgtaagacgctggag

SEQ ID NO: 777477 - DNA, 75 bp, synthetic construct
  source 1..75: mol_type = other DNA
accgaaacagcgctggcctatgcctggaaacttattgaccaacaacttgcggatagtgttatttttgccctccct

SEQ ID NO: 777478 - DNA, 75 bp, synthetic construct
  source 1..75: mol_type = other DNA
gaaatgttggacgaatacttgtcgccacgcaagtcgtggaacaatcgctcgacgttgattttgattggttaatta

SEQ ID NO: 777479 - DNA, 75 bp, synthetic construct
  source 1..75: mol_type = other DNA
ccacccaggtcgtggaacaatcgctcgatgtagattttgattggttaattacccagcattgtcccgctgatttgc

SEQ ID NO: 777480 - DNA, 75 bp, synthetic construct
  source 1..75: mol_type = other DNA
gcactgcgcaatttatcgttacagccatgcgcggcgagatcaaacgccgccagcgtcgcaaagccaaagaatcag

SEQ ID NO: 777481 - DNA, 75 bp, synthetic construct
  source 1..75: mol_type = other DNA
gcggtgtgaattcctctatcaacaatcacacttctttgagaatagcttcctggtgaaagaagggctgattaaccc

SEQ ID NO: 777482 - DNA, 75 bp, synthetic construct
  source 1..75: mol_type = other DNA
taggttcaaactttttagttttacccttcgctctagaagtaaaaagcagatagcatcattcttctctagtgctga

SEQ ID NO: 777483 - DNA, 75 bp, synthetic construct
  source 1..75: mol_type = other DNA
gtgttgcgacctacgggtatgtttacttctctaatcattcaaaaaatcagatggtgtacaccgtaccgtctacag

SEQ ID NO: 777484 - DNA, 75 bp, synthetic construct
  source 1..75: mol_type = other DNA
ccagctggcttcgtggctattttcaacagtgatgaggcgtcctggcatctcgttgaagatcatcgtggtaaaacg

SEQ ID NO: 777485 - DNA, 75 bp, synthetic construct
  source 1..75: mol_type = other DNA
tggatggatgggtctggcagggtaacagtattgttattacctatacaggggatgaagggatgaccagagtcatcc

SEQ ID NO: 777486 - DNA, 75 bp, synthetic construct
  source 1..75: mol_type = other DNA
aagcccgggatgcgcatactctggcactctccgtgctggcagaagtcgcctctgtacgtctccatcaggaggagg

SEQ ID NO: 777487 - DNA, 75 bp, synthetic construct
  source 1..75: mol_type = other DNA
gaaatacccataagtgtatcggctggcgtcagtccccggaggttgcgccttatcgctggccatttgaagaaaacg

SEQ ID NO: 777488 - DNA, 75 bp, synthetic construct
  source 1..75: mol_type = other DNA
tgaaagacacgcagggccatgaaacgcggtatgaatacaacatcgccggtgacctgaccaccgtcattgccccgg

SEQ ID NO: 777489 - DNA, 75 bp, synthetic construct
  source 1..75: mol_type = other DNA
gccggatggtgtggagacatacggggtgtggggactctccctgccgtcactgcgtcgtcgcctgttccgctgtgt

SEQ ID NO: 777490 - DNA, 75 bp, synthetic construct
  source 1..75: mol_type = other DNA
taccagttgaggataaacagcagacattaaaattatggaaaatgaatgtcgctccatacgcgctacatagctcgc

SEQ ID NO: 777491 - DNA, 75 bp, synthetic construct
  source 1..75: mol_type = other DNA
ttatccgatgtgaacaaggagtacagtactattcagattatttataaacgtaagcaggttggtcgtcgctattgt

SEQ ID NO: 777492 - DNA, 75 bp, synthetic construct
  source 1..75: mol_type = other DNA
ctggtagggcgcaagctggcgggaggggtatcgctggcagacgcagaagctttttatgaccgtaccgacgggccg

SEQ ID NO: 777493 - DNA, 75 bp, synthetic construct
  source 1..75: mol_type = other DNA
gacgggccgaatgttcgccgggtgctggaagagagtctgcctgcaaatttgaccttaatgatgaccgctacgggt

SEQ ID NO: 777494 - DNA, 75 bp, synthetic construct
  source 1..75: mol_type = other DNA
gcgccggatttactgaagcaggcacgttaaaggacatcggtttcaagcatggccgctggctggacacggttttgc

SEQ ID NO: 777495 - DNA, 75 bp, synthetic construct
  source 1..75: mol_type = other DNA
gtcatccattcagggggcgtggacatcgtcgggccgaaaatcaatctcaatagcggcggtagtccgggaacgccg

SEQ ID NO: 777496 - DNA, 75 bp, synthetic construct
  source 1..75: mol_type = other DNA
gtgaatgcaaagcgtgtttaccggataatgagcgaaaatagtctgttgttgttacatgacaaaccatcacgacgg

SEQ ID NO: 777497 - DNA, 75 bp, synthetic construct
  source 1..75: mol_type = other DNA
gcgatcgagcattacaatgaaaaccatccgcatagtgcgttgggttatcgctctccgcgagaatatcgacgtcag

SEQ ID NO: 777498 - DNA, 75 bp, synthetic construct
  source 1..75: mol_type = other DNA
tctctctttatctctactctgcagagctataccccactcgcctgagagcgattggaacggcattttccagtgcct

SEQ ID NO: 777499 - DNA, 75 bp, synthetic construct
  source 1..75: mol_type = other DNA
gaacactggcatcgattaaccgcaaagcggcaattgcccgctatgtgcattcagccgctggcagacaatcacgca

SEQ ID NO: 777500 - DNA, 75 bp, synthetic construct
  source 1..75: mol_type = other DNA
gtaacgccttcctcgaagtccgtgccggaaccggtggcgacgaagcggcgctgttcgcaggcgatctgttccgta

SEQ ID NO: 777501 - DNA, 75 bp, synthetic construct
  source 1..75: mol_type = other DNA
acgacattctacccttctcaaaaatcccctttttaattttcattgaaaaaatggcaattgatactatgaatccag

SEQ ID NO: 777502 - DNA, 75 bp, synthetic construct
  source 1..75: mol_type = other DNA
ggccgcgctggcgcgaatggtcttttcaccacaacgcaattcattcgccagaccagcacagaacgggaggaaaca

SEQ ID NO: 777503 - DNA, 75 bp, synthetic construct
  source 1..75: mol_type = other DNA
gagaccaccatcgccgacatactcaacaggcggccgggcagcgagagccatagctggactgtcgtcattcgtccg

SEQ ID NO: 777504 - DNA, 75 bp, synthetic construct
  source 1..75: mol_type = other DNA
ggccgcgctggcgggaatggtcttttcaccacaacgcaattcattcgccaggccgacacaacaccggagaacacc

SEQ ID NO: 777505 - DNA, 75 bp, synthetic construct
  source 1..75: mol_type = other DNA
aattgcagagatctcagaccacttacaagcgatgttgatggggcgtgttgatattactcaaaatcagcattatca

SEQ ID NO: 777506 - DNA, 75 bp, synthetic construct
  source 1..75: mol_type = other DNA
atgagattaaccggctaaaaggaatcgatgaacactatactgtatccgatacttatcagttgtttatgaaagcca

SEQ ID NO: 777507 - DNA, 75 bp, synthetic construct
  source 1..75: mol_type = other DNA
ccggccaactggcggtcacggaacacatgactttggacaataccatcaaagccaacctgcatacttttgacgatc

SEQ ID NO: 777508 - DNA, 75 bp, synthetic construct
  source 1..75: mol_type = other DNA
aaattatattgaacaagaatctcttggaggaaaatatctaacacatgatttgtcaataaagatagcggatatttc

SEQ ID NO: 777509 - DNA, 75 bp, synthetic construct
  source 1..75: mol_type = other DNA
accagacataataaacaaaaaaaccaaaacgacattctacccttcgcaaaaatcccctttttaattttcattgaa

SEQ ID NO: 777510 - DNA, 75 bp, synthetic construct
  source 1..75: mol_type = other DNA
ggaatgaagatctcgatggttatatcaataacattataaaaatgattgatacattgccagataatgcaatgatat

SEQ ID NO: 777511 - DNA, 75 bp, synthetic construct
  source 1..75: mol_type = other DNA
ctgcaagaatcaacaccgacagaagcgcattcatcgttgccgtgcgccctcgtcgcgccatatcagagcctgaac

SEQ ID NO: 777512 - DNA, 75 bp, synthetic construct
  source 1..75: mol_type = other DNA
tttgctggcattgacggtacttgttttgatttggttactcttaagcttaaggttacaaaagaaacacaatctatt

SEQ ID NO: 777513 - DNA, 75 bp, synthetic construct
  source 1..75: mol_type = other DNA
ctactggtatgaatagcagagagtttatcaaaataatgattgatggaaaggtaataaaggggaattcaaaagtcg

SEQ ID NO: 777514 - DNA, 75 bp, synthetic construct
  source 1..75: mol_type = other DNA
cagaagatcgtgtttcaattgaactaaacgtaccatctgatgatggttctaaaactgaaaaagtaggaccaataa

SEQ ID NO: 777515 - DNA, 75 bp, synthetic construct
  source 1..75: mol_type = other DNA
tataaaacgctttttcacttaccactggaaaccagtctggcttatggttggattacttcctcctgtggagttttt

SEQ ID NO: 777516 - DNA, 75 bp, synthetic construct
  source 1..75: mol_type = other DNA
tctgctgatgatatgcaatatggtgatatggtagaacaagattttctctcactcggcctaagcgatatctcagca

SEQ ID NO: 777517 - DNA, 75 bp, synthetic construct
  source 1..75: mol_type = other DNA
tttataatgggtgtcgtttacatgatctattactgtctcatgactatgacactaatctatgtcttgaaatgtcat

SEQ ID NO: 777518 - DNA, 75 bp, synthetic construct
  source 1..75: mol_type = other DNA
gcagctatattgagcttaataacccaacaccactgaatatctctttcacctccatcagcattggggctacgaagg

SEQ ID NO: 777519 - DNA, 75 bp, synthetic construct
  source 1..75: mol_type = other DNA
ggtgaaggtgatgcatacattccacctcatacaggtctgcctgcaaatagtactgatattgctccgccagatatt

SEQ ID NO: 777520 - DNA, 75 bp, synthetic construct
  source 1..75: mol_type = other DNA
gacgagcagggtgctcctgctgcgctttctcattcagcgcagcgtgttcatcagcgattgagtgtgctttctgat

SEQ ID NO: 777521 - DNA, 75 bp, synthetic construct
  source 1..75: mol_type = other DNA
ctattggaagcagagattttataaaaataaagatagatgggaaaatcgtaaagggaaattcaaaatacaataaaa

SEQ ID NO: 777522 - DNA, 75 bp, synthetic construct
  source 1..75: mol_type = other DNA
tccatcatctgatggtaaaagtacggaaaagttaggaccaataacgtatagtttagagaaacagacacttatata

SEQ ID NO: 777523 - DNA, 75 bp, synthetic construct
  source 1..75: mol_type = other DNA
gcagcgaatttgttaaaataacaatagatgacaagataataaagggaaactcaaaagttaataaccgtgatgact

SEQ ID NO: 777524 - DNA, 75 bp, synthetic construct
  source 1..75: mol_type = other DNA
acccgcgcctggccctggcgaagacgtcaacactcactgcccctgtcgtgtgtcatcactgtgaggaagcccctt

SEQ ID NO: 777525 - DNA, 75 bp, synthetic construct
  source 1..75: mol_type = other DNA
tatatccagtctgctgtttactttgcggccacttgaatattgcatttatatagcattaggttacgaattaggtaa

SEQ ID NO: 777526 - DNA, 75 bp, synthetic construct
  source 1..75: mol_type = other DNA
ggttactggccgaatcaactgagtttctcagaatcatgcggaatggtgatgagaatgctgatgacattgcagggc

SEQ ID NO: 777527 - DNA, 75 bp, synthetic construct
  source 1..75: mol_type = other DNA
caaaaggtctttgccattggcaatcccttcgggctcgactggacgctcaccaccggcatcgtctcggcgcttgac

SEQ ID NO: 777528 - DNA, 75 bp, synthetic construct
  source 1..75: mol_type = other DNA
caatgtcttttccgtgccgcgcggcaccggctccggcttcatctgggacgatgccggccacgtggtgaccaactt

SEQ ID NO: 777529 - DNA, 75 bp, synthetic construct
  source 1..75: mol_type = other DNA
gcccggcgccggaccgcttcatccggcgctggctcgtcatcactggctgcatcgccgcactcatgctgctgtggc

SEQ ID NO: 777530 - DNA, 75 bp, synthetic construct
  source 1..75: mol_type = other DNA
caggatgacgatgaagaagattttcaggaagtagcggaacctgagtttgtggtcctgaaagggaactgcattcgc

SEQ ID NO: 777531 - DNA, 75 bp, synthetic construct
  source 1..75: mol_type = other DNA
atacgaaaaattgggaatataaaggagatgaataccagtttcagtatcaaggagattaaatcttttaaggggtta

SEQ ID NO: 777532 - DNA, 75 bp, synthetic construct
  source 1..75: mol_type = other DNA
gaagaccgcccaaaaatataatgtgatcataggtatacgtaagccaaatcctctgggcgaaactttgttgaaaga

SEQ ID NO: 777533 - DNA, 75 bp, synthetic construct
  source 1..75: mol_type = other DNA
gaagtaaaaaaccggagcttgtggagcaagagctgtggggtgtcttactggcttataatctggtgagatatcaga

SEQ ID NO: 777534 - DNA, 75 bp, synthetic construct
  source 1..75: mol_type = other DNA
aatcttaaaatctttgatttaacacacgaaattccaccgtataacatctgggaaggcgcttatcgtctgtatcag

SEQ ID NO: 777535 - DNA, 75 bp, synthetic construct
  source 1..75: mol_type = other DNA
gaaggactgagcgcgagaattggcgagaggacatcaaaatattttttgggcatgaatggaaattccccctgttct

SEQ ID NO: 777536 - DNA, 75 bp, synthetic construct
  source 1..75: mol_type = other DNA
cttgcgcagttatcgcatcaattacaagcactgtgatagctagctggattctttcgttatggacttgggctaact

SEQ ID NO: 777537 - DNA, 75 bp, synthetic construct
  source 1..75: mol_type = other DNA
atgattttgcccatcaccctgtttgtcgccagtggctttgagcactgtatcgccaatttgtttgtgattccgttc

SEQ ID NO: 777538 - DNA, 75 bp, synthetic construct
  source 1..75: mol_type = other DNA
gtacctctgccgcaacacctatatttacccaccaaaaccgtcaatgcgcattatcgccgacatcatcgcctggtg

SEQ ID NO: 777539 - DNA, 75 bp, synthetic construct
  source 1..75: mol_type = other DNA
gaaggcatcgccatttttaatgccctgaaaaatcagggggcaccattaccgtgtatgtggatggcgttgccgcct

SEQ ID NO: 777540 - DNA, 75 bp, synthetic construct
  source 1..75: mol_type = other DNA
ctgcgcgacgttatcgctggatgaaattagcgctgccggttaaacgtaatcttgatcgtacctttgaaatattaa

SEQ ID NO: 777541 - DNA, 75 bp, synthetic construct
  source 1..75: mol_type = other DNA
ggaagatattgcttcagtgtatgaatgggcgaaagattctaaaaaagccactattcataaagatgccgccgtttt

SEQ ID NO: 777542 - DNA, 75 bp, synthetic construct
  source 1..75: mol_type = other DNA
atggcccgggtacgccgtcatttttccagtctggaggcggatgccagaaaaaccgccagtactgttgaacagggg

SEQ ID NO: 777543 - DNA, 75 bp, synthetic construct
  source 1..75: mol_type = other DNA
caccagggaagagtacgacgcggttatggacgatgatgaacgtcgttggcaggaaatgatgaaacgcgaaaatta

SEQ ID NO: 777544 - DNA, 75 bp, synthetic construct
  source 1..75: mol_type = other DNA
ttttgtgcgcgaggcattgctctcggctattaacgtcattcagtcatgctgtgacgaggacgtttctgaattgac

SEQ ID NO: 777545 - DNA, 75 bp, synthetic construct
  source 1..75: mol_type = other DNA
ggcggggacttatcaagagacacaagtaaaactaataacacggctcctgttgtatcaggggtaaatgctaaggtt

SEQ ID NO: 777546 - DNA, 75 bp, synthetic construct
  source 1..75: mol_type = other DNA
aagaatttgatatcggcgttaaaagaaactataagaatagtggcgccaagaaaacttgtaaaaatattcaaaaaa

SEQ ID NO: 777547 - DNA, 75 bp, synthetic construct
  source 1..75: mol_type = other DNA
ttattactgagaatattttagatcttgatttacagaataataaaaaatccagatattatcctgtaagtttttctg

SEQ ID NO: 777548 - DNA, 75 bp, synthetic construct
  source 1..75: mol_type = other DNA
atttagttcgtcagaagttaagtgaacaaagtataaagaaatttcaaatagctaaaaagataggttcaatatatt

SEQ ID NO: 777549 - DNA, 75 bp, synthetic construct
  source 1..75: mol_type = other DNA
taaagcctttctggtggcagaaactcatgccgccagcaaaagaagcaatgaaatttgaccaggtagtatgcccga

SEQ ID NO: 777550 - DNA, 75 bp, synthetic construct
  source 1..75: mol_type = other DNA
agtaaccagatcattaacgtgggttctgttcaggtggaaacgattggacttgttcgtgcgctgaccgtgggcgtg

SEQ ID NO: 777551 - DNA, 75 bp, synthetic construct
  source 1..75: mol_type = other DNA
aatgccctcaaacgccatgttgatagaatagacagcacgccagtattatttaaacatgtttcaactgaggctttg

SEQ ID NO: 777552 - DNA, 75 bp, synthetic construct
  source 1..75: mol_type = other DNA
ttgatttcaaaaacgctacccgtctttcttctcgagaactagaagccctttgcgatcaagctgaagagattgcga

SEQ ID NO: 777553 - DNA, 75 bp, synthetic construct
  source 1..75: mol_type = other DNA
catacccgtctaataagagctgcctgcaacgatgccatgcataaattacagcttcaatatggtcggcgttttata

SEQ ID NO: 777554 - DNA, 75 bp, synthetic construct
  source 1..75: mol_type = other DNA
cctagtaatattatagagtatgagtatcaggaagaaataagaccatttttccaaaaagctgggcttaataaacat

SEQ ID NO: 777555 - DNA, 75 bp, synthetic construct
  source 1..75: mol_type = other DNA
ttaagtattgacgatctgcaatcactgcttgaacgtcggctggatattgtctttccctacaataaagcgggaagt

SEQ ID NO: 777556 - DNA, 75 bp, synthetic construct
  source 1..75: mol_type = other DNA
tggcgcgatagcgacgctggacggcgtacaggctaatagcggcataattgatgatgatggctcgctctatatggc

SEQ ID NO: 777557 - DNA, 75 bp, synthetic construct
  source 1..75: mol_type = other DNA
gcaatcgctgggggaaactaacgtgctgattgcagcaccaggcgcagagaatactcgtgtggcgaacagcaccgg

SEQ ID NO: 777558 - DNA, 75 bp, synthetic construct
  source 1..75: mol_type = other DNA
tgctgccacccgcaccctgacactggaccgtgaggtgaccctgccggagacaggtgccgccacggtgaacctgat

SEQ ID NO: 777559 - DNA, 75 bp, synthetic construct
  source 1..75: mol_type = other DNA
gtcacatcacaacggaagatccagcaactttacgcctgccctttaaagagaaactctcttacggtattggcgacc

SEQ ID NO: 777560 - DNA, 75 bp, synthetic construct
  source 1..75: mol_type = other DNA
gaactttactggttatgtgtggtgcatttcgctgcgagccaggtcgttttaccaatttaaccttgaaaaaactgc

SEQ ID NO: 777561 - DNA, 75 bp, synthetic construct
  source 1..75: mol_type = other DNA
acttgatgcggcgtcgttaaaacgtaacgtggatcttgaaaatgcagtagtcaacgtggttcccaccaaaggggc

SEQ ID NO: 777562 - DNA, 75 bp, synthetic construct
  source 1..75: mol_type = other DNA
ctaagctgattcattatgttggcgtaacgaagccctggaacgactggacgaattatccctgccagaactatttta

SEQ ID NO: 777563 - DNA, 75 bp, synthetic construct
  source 1..75: mol_type = other DNA
ttaccagcagatccgaaagccgcgccggtaacggaaaatgatggtaaggcctttcctcagccagcaggtgctgcg

SEQ ID NO: 777564 - DNA, 75 bp, synthetic construct
  source 1..75: mol_type = other DNA
agcggtccgtctgagtccacacatctatatgatggctgccagcacaaccgggcagtggctggtgctcggctggcc

SEQ ID NO: 777565 - DNA, 75 bp, synthetic construct
  source 1..75: mol_type = other DNA
cattgccagaaatatggcatctgtcaccggaaatatttatgctgatgatgcagcaaccattactctgggacagcc

SEQ ID NO: 777566 - DNA, 75 bp, synthetic construct
  source 1..75: mol_type = other DNA
tgttacttttgttagcctctcagaacaagcgttgaaagagggcaagaaaacatatctgaaaccagggcagcaata

SEQ ID NO: 777567 - DNA, 75 bp, synthetic construct
  source 1..75: mol_type = other DNA
tacgcgatgccgtttctgttccgctggttttgcacggtgcatcggggatcagtgatgccgacattaaaactgcaa

SEQ ID NO: 777568 - DNA, 75 bp, synthetic construct
  source 1..75: mol_type = other DNA
attttttgcttttgcaaaaggggctggtgtttttggtgaggctggtccggaagccattatgccattaacacgaac

SEQ ID NO: 777569 - DNA, 75 bp, synthetic construct
  source 1..75: mol_type = other DNA
tcagtatcaaaaatgcccctctggtaatgcagggccatgcgactgatcacgccattttcagaacaacaaaaacaa

SEQ ID NO: 777570 - DNA, 75 bp, synthetic construct
  source 1..75: mol_type = other DNA
atcaaacatacggttctacgcaatatactcaaataaacagaatgacaactggaaacgatttttccattcagcgat

SEQ ID NO: 777571 - DNA, 75 bp, synthetic construct
  source 1..75: mol_type = other DNA
gagttcgtcaccgacactatgtttgtagaggacagcgaggcggatgaacttccgctgctggtcagcatcgattat

SEQ ID NO: 777572 - DNA, 75 bp, synthetic construct
  source 1..75: mol_type = other DNA
atacaatgataaactggttagtgagttaaaagatacctatagtcataaaataaatctgaatggcaataatgtaac

SEQ ID NO: 777573 - DNA, 75 bp, synthetic construct
  source 1..75: mol_type = other DNA
gagtataccgcaactttcgccggccttggcaccagagactacagctcccactcctggtatgccggtgcggaagtc

SEQ ID NO: 777574 - DNA, 75 bp, synthetic construct
  source 1..75: mol_type = other DNA
ttcatcattatccattgccagaaatgcagatgttgaaggtaacatccaggctaaaaactctgtgataaatatcgg

SEQ ID NO: 777575 - DNA, 75 bp, synthetic construct
  source 1..75: mol_type = other DNA
aaaacattttgttcatatatacggaaaattgcgagatttttttatacgaaaacagtaacaataattactcttatc

SEQ ID NO: 777576 - DNA, 75 bp, synthetic construct
  source 1..75: mol_type = other DNA
atgagccggttaaccgccattatcagcgccattgcgatctgcctggttgtttgccttggttggctggcaatgcat

SEQ ID NO: 777577 - DNA, 75 bp, synthetic construct
  source 1..75: mol_type = other DNA
tggcctgtcaaagcgcatcggcaatatcggatctgaaatcgtcgtgaagaataccgtttggactgagtatgcact

SEQ ID NO: 777578 - DNA, 75 bp, synthetic construct
  source 1..75: mol_type = other DNA
gagtctgttttctggtttagtttcagtcaactaccttatctgaataagaatgataaaagtcagaaccagctcatc

SEQ ID NO: 777579 - DNA, 75 bp, synthetic construct
  source 1..75: mol_type = other DNA
aactctggttcactcacgcaacgtctgagcgcgttgacggtttatccccgctggcgcggggaactcagggccgcc

SEQ ID NO: 777580 - DNA, 75 bp, synthetic construct
  source 1..75: mol_type = other DNA
gcctatctggcggagcgcggcgtcgataaaacgatcctcaaaaaactctgtatcgataatcccggacgattattg

SEQ ID NO: 777581 - DNA, 75 bp, synthetic construct
  source 1..75: mol_type = other DNA
cccaatctgctgttgttgccggcgactgttctgctggggatcgccgtaacggtgaccactgcgtcgttcaagaag

SEQ ID NO: 777582 - DNA, 75 bp, synthetic construct
  source 1..75: mol_type = other DNA
aagcttaatattaataattcaggtggtttaggcaaaatatcatttacaacgtcaacaggaaaagaagttggcatc

SEQ ID NO: 777583 - DNA, 75 bp, synthetic construct
  source 1..75: mol_type = other DNA
tgatattctcaggttgcgaagccggtgatggttactctttaagatatgatgagatgttatgtttcattatctcag

SEQ ID NO: 777584 - DNA, 75 bp, synthetic construct
  source 1..75: mol_type = other DNA
gccttggtgatgattttgtttattactatgacataaccacattgccagcaactggcagtacgttatcaggacaaa

SEQ ID NO: 777585 - DNA, 75 bp, synthetic construct
  source 1..75: mol_type = other DNA
aatggagattttgctgtaacacgacttgataagtttgttgttgaaacaacaggggtaaaaaattcagtagatttt

SEQ ID NO: 777586 - DNA, 75 bp, synthetic construct
  source 1..75: mol_type = other DNA
attgtatggtgcttttttaagcgcatctcaggctgctcaactaaatattgataatgtatgggctagagattattt

SEQ ID NO: 777587 - DNA, 75 bp, synthetic construct
  source 1..75: mol_type = other DNA
agtgatgtgcttagaaaggagctggctgaacctggtggtgctggcatgatgggttatgacgactttgagtcttat

SEQ ID NO: 777588 - DNA, 75 bp, synthetic construct
  source 1..75: mol_type = other DNA
tatccccgctggcgcggggaactccacgacgggcaggcgatcaccggcatgacccacggtttatccccgctggcg

SEQ ID NO: 777589 - DNA, 75 bp, synthetic construct
  source 1..75: mol_type = other DNA
gctgggtcaggtggatattgtcgccaactacaacggtcgccgcttccacggcgtcggcctggccaccgatattgt

SEQ ID NO: 777590 - DNA, 75 bp, synthetic construct
  source 1..75: mol_type = other DNA
atggtgccaaaaatggcggtgctggtcgcctccattccgcaatttgtgctgggcggtgctgggctggtgatgttc

SEQ ID NO: 777591 - DNA, 75 bp, synthetic construct
  source 1..75: mol_type = other DNA
ggatgtcggatcgtattcagtcaggtgggccgcgatctgcaaatcttcaactcgctgaaagtaaatatggcagat

SEQ ID NO: 777592 - DNA, 75 bp, synthetic construct
  source 1..75: mol_type = other DNA
ctcttggtgtcagagctattaatagtaaaagtggtaatggaggcggagatattacctatgcccctgtataccaaa

SEQ ID NO: 777593 - DNA, 75 bp, synthetic construct
  source 1..75: mol_type = other DNA
ccgttccggttactccggtcggtgcacgaattaagtttatccgatctgagattttggaattctataaaaacaaag

SEQ ID NO: 777594 - DNA, 75 bp, synthetic construct
  source 1..75: mol_type = other DNA
acgattgaagagcagtcgctgcgggcctatcagcaattcctggatatcaagtcggatattgcccgtcatatcttt

SEQ ID NO: 777595 - DNA, 75 bp, synthetic construct
  source 1..75: mol_type = other DNA
gcgcggggaacactggtcgaaatatagacagcatgttccgtaccacggtttatccccgctggcgcggggaacaca

SEQ ID NO: 777596 - DNA, 75 bp, synthetic construct
  source 1..75: mol_type = other DNA
tgaatgcgcctgttccggctgaattctgggcagaaatgcgccgtcaaaatctggttgcggaaaacgctccgctgc

SEQ ID NO: 777597 - DNA, 75 bp, synthetic construct
  source 1..75: mol_type = other DNA
aaagcagctgcgctgcagttcgcgctggcaaacccggccgttgcagcggttattcctggctccagccgtcctggc

SEQ ID NO: 777598 - DNA, 75 bp, synthetic construct
  source 1..75: mol_type = other DNA
cgttccgcgattgaacaagatgtggtgttgcactgccgaagcggcggcagctacgacgtgcattacagtattacg

SEQ ID NO: 777599 - DNA, 75 bp, synthetic construct
  source 1..75: mol_type = other DNA
tgaaacatcagtggcgccccggaataggtggttttgtcgaccttaattgtgggtggtattgtcaggatgcattac

SEQ ID NO: 777600 - DNA, 75 bp, synthetic construct
  source 1..75: mol_type = other DNA
agtacaggtgtgctggcaggtctgtgcggaccactgttgttaacgttaatgaacgcctgtcatcgtggatttgta

SEQ ID NO: 777601 - DNA, 75 bp, synthetic construct
  source 1..75: mol_type = other DNA
gggtgatacagaagccagaaattattgccggagaggggtattcagttcgctatgaagaattgctttgttttataa

SEQ ID NO: 777602 - DNA, 75 bp, synthetic construct
  source 1..75: mol_type = other DNA
ttggagctattatgcgggcaaagcgctccatcgtggtaggtgacccgttgcaaatcccacctgtagtttcacttc

SEQ ID NO: 777603 - DNA, 75 bp, synthetic construct
  source 1..75: mol_type = other DNA
cagttacagcaactcgaccaggaaatttccagcaaatgtcaggctgtctcgaaattgaaggcaaccgaggcagag

SEQ ID NO: 777604 - DNA, 75 bp, synthetic construct
  source 1..75: mol_type = other DNA
ggtatcatcggtgtcaatgggccaccgggtactggaaagaccactcttctgcgagatattgtcgttgggtgcatt

SEQ ID NO: 777605 - DNA, 75 bp, synthetic construct
  source 1..75: mol_type = other DNA
taccctgctgtggcataaacggaacagccataatccgaagatcgtctggttacgggaaaccattaaaaaccttta

SEQ ID NO: 777606 - DNA, 75 bp, synthetic construct
  source 1..75: mol_type = other DNA
tctggttacgcaaagatcatccggcactgcatgaaacgtggaatctggacacctttttacgttatccgcatatca

SEQ ID NO: 777607 - DNA, 75 bp, synthetic construct
  source 1..75: mol_type = other DNA
atgttgtcattacaacaaggcggctatatgacgctcgcgcagtttgccatgactttctggcacgacctggcagca

SEQ ID NO: 777608 - DNA, 75 bp, synthetic construct
  source 1..75: mol_type = other DNA
acaatgactacacaggtaacggggtcacgacatcattcccatataccttccgaatttttcataagtctgatctgg

SEQ ID NO: 777609 - DNA, 75 bp, synthetic construct
  source 1..75: mol_type = other DNA
aacgctttatactttatagctaatactgatgtgaatccatcatctgggcaaggcatcaacaatgggatgttcaat

SEQ ID NO: 777610 - DNA, 75 bp, synthetic construct
  source 1..75: mol_type = other DNA
gattcaccattacttcgcaaagccatcattagtttaataagaactggatatgcaagattttgcattaacgctggc

SEQ ID NO: 777611 - DNA, 75 bp, synthetic construct
  source 1..75: mol_type = other DNA
gatcagtggtcattgcaatcaaaattcccaaagcataaaattgtctatattcctcatcctatacaatctgcaagt

SEQ ID NO: 777612 - DNA, 75 bp, synthetic construct
  source 1..75: mol_type = other DNA
gtccgctctcttagccgcgatacccgacaacttcttctgacccgtattcctgctcttgcacaagcccaggctgcc

SEQ ID NO: 777613 - DNA, 75 bp, synthetic construct
  source 1..75: mol_type = other DNA
taatggacctacacttataactacattgtcatcacaaggaatatatgagtttcttagtgtaggatctacttatta

SEQ ID NO: 777614 - DNA, 75 bp, synthetic construct
  source 1..75: mol_type = other DNA
cgtttctaccgcagagttgcaggatgccacgcccgctgcgctggtggcacatgtgacctcgcgcaaatgctacgg

SEQ ID NO: 777615 - DNA, 75 bp, synthetic construct
  source 1..75: mol_type = other DNA
aaactatgccatatgccagcaatataagtattgcggtattagatgataatgtattggaaagtcaggcaattgaaa

SEQ ID NO: 777616 - DNA, 75 bp, synthetic construct
  source 1..75: mol_type = other DNA
aatgcgcctctcctgaaataagaagtagcgtcctgaacgatctttatagcattgctaatttcctcccggacaata

SEQ ID NO: 777617 - DNA, 75 bp, synthetic construct
  source 1..75: mol_type = other DNA
atgaagcaaccgtgggagctaaacccagctttaacaacagagcgacttaaacaacttgcgtccctaattcgaaat

SEQ ID NO: 777618 - DNA, 75 bp, synthetic construct
  source 1..75: mol_type = other DNA
gactaaatggttttgattatggattgctttgttatgactcatggggccatgaatctgtgctttactctgaagatg

SEQ ID NO: 777619 - DNA, 75 bp, synthetic construct
  source 1..75: mol_type = other DNA
attaagagttatcgtcgtatatgaccagaatggaagtcagatcacatggttttatagcccaaatagtagtgggca

SEQ ID NO: 777620 - DNA, 75 bp, synthetic construct
  source 1..75: mol_type = other DNA
agatgggtttaatatgctggatgccgcttccggatactgccctctgccaacgtatggatttaatcgacttatgcg

SEQ ID NO: 777621 - DNA, 75 bp, synthetic construct
  source 1..75: mol_type = other DNA
atcagccagttccgctacagcgcacaaatccgcccttcttccgtggtgaccaaagactacacctttaaacgcccc

SEQ ID NO: 777622 - DNA, 75 bp, synthetic construct
  source 1..75: mol_type = other DNA
atgtctttcaggacagaggcacgattgccggttcggtgcatgttgacgctgtaaacaatggtggcgaaggcgacg

SEQ ID NO: 777623 - DNA, 75 bp, synthetic construct
  source 1..75: mol_type = other DNA
atggcggcggaggaaggcatcttcttttatgaggagcatgcttacaaaagtaccgaccagagcctggtgctgtgc

SEQ ID NO: 777624 - DNA, 75 bp, synthetic construct
  source 1..75: mol_type = other DNA
gccgaaaacaaaaagctgttcgccgaacgccgcgatcccatcgtggaagagatctgcgagcacgtccactacatc

SEQ ID NO: 777625 - DNA, 75 bp, synthetic construct
  source 1..75: mol_type = other DNA
atggatacggcagccgcatccgtccgtggccccgcagtgggtgacgcggacgaatcatgcggtgagcgacctgac

SEQ ID NO: 777626 - DNA, 75 bp, synthetic construct
  source 1..75: mol_type = other DNA
ctgtacagcatgaaggtgcacccgccgctgtggcgtgccggtctgcgccagaacttccgtatcttccagaacgag

SEQ ID NO: 777627 - DNA, 75 bp, synthetic construct
  source 1..75: mol_type = other DNA
gaagtattactcatctctggtaaatcgggttgcggtaaaagtacgttagtaaaaataattcttggcttattaccg

SEQ ID NO: 777628 - DNA, 75 bp, synthetic construct
  source 1..75: mol_type = other DNA
ttcatactctgaacaattttgccgccgctcgatgaaaataattgatttcatgatgcagggctatatgtctggagt

SEQ ID NO: 777629 - DNA, 75 bp, synthetic construct
  source 1..75: mol_type = other DNA
catcatttattatgttgatgatttatgataagtctttagcattaatagtgatgctcatgctatttctgtatgcac

SEQ ID NO: 777630 - DNA, 75 bp, synthetic construct
  source 1..75: mol_type = other DNA
gtcttgtagatgtggtaaataatcaggctaaagtaggttatattcagatcgtttttaccggagcaaatttatttt

SEQ ID NO: 777631 - DNA, 75 bp, synthetic construct
  source 1..75: mol_type = other DNA
ttgtaatgtgagcacgcttaaatcaagagcgaggcaacagggggctgttattgaaagtgttaagaatcatcaact

SEQ ID NO: 777632 - DNA, 75 bp, synthetic construct
  source 1..75: mol_type = other DNA
caatataaaaagggagtgaacctgaatgatgtctatgacattctttcttctgcgggaatgaatgtaagagtatta

SEQ ID NO: 777633 - DNA, 75 bp, synthetic construct
  source 1..75: mol_type = other DNA
aaggggatgctttctcctgaaatgtatgaggagctttctggaaaacttcgtgctatgcggagtgagcttgaggtt

SEQ ID NO: 777634 - DNA, 75 bp, synthetic construct
  source 1..75: mol_type = other DNA
ctgaaaggtgtcgggcgtattaatcagcagacgttcgttgatacgtactcgaaagtggctcactgtaaactttac

SEQ ID NO: 777635 - DNA, 75 bp, synthetic construct
  source 1..75: mol_type = other DNA
agggaaaaatgtgcaatgggcggacgccaatggaaacgttacttgatggaaagcgcatctgggccgggaaaaatt

SEQ ID NO: 777636 - DNA, 75 bp, synthetic construct
  source 1..75: mol_type = other DNA
tgccagggctatatacagaaaaccagctttgcttatccttgatgaagcaacgagtaatcttgaccgtgaatcaga

SEQ ID NO: 777637 - DNA, 75 bp, synthetic construct
  source 1..75: mol_type = other DNA
agcactacgaattgcagataaaatcttgtatctagatagagcaacatcgtattgcaagagtaatattcacaacaa

SEQ ID NO: 777638 - DNA, 75 bp, synthetic construct
  source 1..75: mol_type = other DNA
atgtcgggggattttagtattggtatgttggtcgcttttatttcatactctgaacaattttgccgtcgctcaatg

SEQ ID NO: 777639 - DNA, 75 bp, synthetic construct
  source 1..75: mol_type = other DNA
atgactcccgcgacatgggggcgtttatccaggggtgtgacgcgataaagcaggccacgggggccacggttctgg

SEQ ID NO: 777640 - DNA, 75 bp, synthetic construct
  source 1..75: mol_type = other DNA
ctgattatatcccttgtaacgaacccagtgtattgaacaacagcgaattacgtttagagcgtattgattttgtcg

SEQ ID NO: 777641 - DNA, 75 bp, synthetic construct
  source 1..75: mol_type = other DNA
taactatatctaatctatctaaaaatataggttcattaaataagaataagaattatggtttacgtataagtatcg

SEQ ID NO: 777642 - DNA, 75 bp, synthetic construct
  source 1..75: mol_type = other DNA
gcgctggaaacaatacaagaatccattttacaaggaaatattgcataagtacgggaacgcagggaaagtatgagt

SEQ ID NO: 777643 - DNA, 75 bp, synthetic construct
  source 1..75: mol_type = other DNA
tgttagaaatggcggataagataaacaaccacgaagtagccatcatcgacaattgcctctgtatgcgccgtatcg

SEQ ID NO: 777644 - DNA, 75 bp, synthetic construct
  source 1..75: mol_type = other DNA
tacgaacaagggagccaaatggcgctgttagaaatggctgacaagataaacaaccacgaagtcgccatcatcgac

SEQ ID NO: 777645 - DNA, 75 bp, synthetic construct
  source 1..75: mol_type = other DNA
cctgaatgaagatctgccagtcggtggctatgatgccgttgacctccagggtatcgccctgagcaatctccttgc

SEQ ID NO: 777646 - DNA, 75 bp, synthetic construct
  source 1..75: mol_type = other DNA
cttctgtgatgaacatggccgcgtgcgggtgaaatttaactgggaccgctataacccgtcaaaccaggaaagttc

SEQ ID NO: 777647 - DNA, 75 bp, synthetic construct
  source 1..75: mol_type = other DNA
atccagatgttacgtgatgacatgaaaaagctggggtatgaaatgaaaaacttccggcgctggctgtacaagctg

SEQ ID NO: 777648 - DNA, 75 bp, synthetic construct
  source 1..75: mol_type = other DNA
gcgcgctaccagactccgcatcatcgtttacagtcgggggttgatgccgtgcttcacgtagtggattgggtgcca

SEQ ID NO: 777649 - DNA, 75 bp, synthetic construct
  source 1..75: mol_type = other DNA
ttttggtagaggaaaaatccataacggatagcacaaaaaaagaacttcgtacgataccaaataccacatatgcag

SEQ ID NO: 777650 - DNA, 75 bp, synthetic construct
  source 1..75: mol_type = other DNA
attcttgcttttgataaaatcaactctactgagagtttttatttctcaaattacgtaagttctcttgaaaaagct

SEQ ID NO: 777651 - DNA, 75 bp, synthetic construct
  source 1..75: mol_type = other DNA
gttattaagagagaaagggatatttgagtttattgaagccgcaaagttcgttaagacaacttatccaagttctga

SEQ ID NO: 777652 - DNA, 75 bp, synthetic construct
  source 1..75: mol_type = other DNA
ttacctgtttcagagactgtccattaaagtcgtctcaagaaagttgccaacagagttagtcaccaaattttatga

SEQ ID NO: 777653 - DNA, 75 bp, synthetic construct
  source 1..75: mol_type = other DNA
ccatttttgcattctcatcaaggtttgaagggttcgggatggtgttattggaagcaatggaatgtggtttgccat

SEQ ID NO: 777654 - DNA, 75 bp, synthetic construct
  source 1..75: mol_type = other DNA
atagattcctctaaagggcgtgtttatatttccccttattcatcgattgtaagttctggtggcaatatatacata

SEQ ID NO: 777655 - DNA, 75 bp, synthetic construct
  source 1..75: mol_type = other DNA
gccattatattgatagggtggtggtttattgctaatcctaaagtgagtactaaaaggtctaagttaatactttca

SEQ ID NO: 777656 - DNA, 75 bp, synthetic construct
  source 1..75: mol_type = other DNA
gcgtttggtaataaggtcgatgagagcttggccagactatcgaaggtgattcagggaactttatctattgaaaga

SEQ ID NO: 777657 - DNA, 75 bp, synthetic construct
  source 1..75: mol_type = other DNA
aaatacttagatctgtgtatattgatggtattggtgattgtgttttgataaataataatatagctaatgatatca

SEQ ID NO: 777658 - DNA, 75 bp, synthetic construct
  source 1..75: mol_type = other DNA
tcatggattttggcttctttaggcgtatttttgagagacgttagccaaactacagtcatcataacgacggttttg

SEQ ID NO: 777659 - DNA, 75 bp, synthetic construct
  source 1..75: mol_type = other DNA
ctactggctagcattaagtgttcatgaatcagagatgactcccgatgctgctgatgatattcatgatgaatatga

SEQ ID NO: 777660 - DNA, 75 bp, synthetic construct
  source 1..75: mol_type = other DNA
acatataaaagccggtagcaagttagcatggcgatatgctatttatatggagctgctttctgagatcgcaagtca

SEQ ID NO: 777661 - DNA, 75 bp, synthetic construct
  source 1..75: mol_type = other DNA
ctgacacggactacccgcagtgtggctcccacagaagcctgtctcttgatcagatctcctgatcaagagacttca

SEQ ID NO: 777662 - DNA, 75 bp, synthetic construct
  source 1..75: mol_type = other DNA
agcgtgtaaaaattgaagttgttcttctgattatatgtgtgggaggaatgctgtgttcaatttatgcattttatc

SEQ ID NO: 777663 - DNA, 75 bp, synthetic construct
  source 1..75: mol_type = other DNA
ggcgctgttaagtaaaaagcagaaccacgacgaccagcaacgggacgacgtgcatctggcggtggaggaagtagc

SEQ ID NO: 777664 - DNA, 75 bp, synthetic construct
  source 1..75: mol_type = other DNA
caatacaggaaatttccatgtaatgaaagataatgacattaaattatcagttgatgataaaggtattatcgctaa

SEQ ID NO: 777665 - DNA, 75 bp, synthetic construct
  source 1..75: mol_type = other DNA
atttgacacctcactggaaggaaaaattaacgcctcaaaatcaactctatccatgaatgatgcattgtggaaagt

SEQ ID NO: 777666 - DNA, 75 bp, synthetic construct
  source 1..75: mol_type = other DNA
tgtcagctacgcaccggatatcagaaatggttcttttgtactgattgatggctgggaaggagaacgcatcaccac

SEQ ID NO: 777667 - DNA, 75 bp, synthetic construct
  source 1..75: mol_type = other DNA
agggatttggacaaacaaactattcatatatagacagaatgagtaaaggtgactttgcagtaactcgagttaaca

SEQ ID NO: 777668 - DNA, 75 bp, synthetic construct
  source 1..75: mol_type = other DNA
tttcaaatatgaagaaagatttaacaacgaaactaacgaagatattcagtcaggcgaatcaggcgataattccgc

SEQ ID NO: 777669 - DNA, 75 bp, synthetic construct
  source 1..75: mol_type = other DNA
atctaactggtcgtagagtagattcagtatatgaaatgagtggaagtgatatgaaaattcgcaattcaaaaaaat

SEQ ID NO: 777670 - DNA, 75 bp, synthetic construct
  source 1..75: mol_type = other DNA
atggtaataaaaatattgatggcctgatttctgcgacaggttctaaagtttcaaatattcgactttctaaatgtg

SEQ ID NO: 777671 - DNA, 75 bp, synthetic construct
  source 1..75: mol_type = other DNA
ccaaaaacagcagcgtaacgtaccaaacaatcaatgactatggggcggaaacgccgcaactcaactgtaaatcgt

SEQ ID NO: 777672 - DNA, 75 bp, synthetic construct
  source 1..75: mol_type = other DNA
ttgtgaccgtaagtttaacggcaatattactcagctgttcgtccacatgggcggcaggtaaaggtggggtcggac

SEQ ID NO: 777673 - DNA, 75 bp, synthetic construct
  source 1..75: mol_type = other DNA
gcaggtagaccttagggacggagttgcgtttaaattatacacagttgttgatgacaatccccgccagtctgcaag

SEQ ID NO: 777674 - DNA, 75 bp, synthetic construct
  source 1..75: mol_type = other DNA
gcgcgtcctctgctcagctttaccggtgaggatgtgcagatgattgaagagattatcctgactcaccttgagcgt

SEQ ID NO: 777675 - DNA, 75 bp, synthetic construct
  source 1..75: mol_type = other DNA
ccggggaaactgctgcaaatagcgcagggaaagtgaccaaggcaacagaagatgagaagaacgcgctcgcaaaat

SEQ ID NO: 777676 - DNA, 75 bp, synthetic construct
  source 1..75: mol_type = other DNA
ccaaaaatagcagcgtaacgtaccgaaccatcaatgactacggggcggaaacgccgcaactcaactgtaaatcgt

SEQ ID NO: 777677 - DNA, 75 bp, synthetic construct
  source 1..75: mol_type = other DNA
aagccgccgcttgagccttcaggtttatggcgcgcggaatccttccagatatctacccacggcaacaaaaaatac

SEQ ID NO: 777678 - DNA, 75 bp, synthetic construct
  source 1..75: mol_type = other DNA
caggacctgcacttcccacaaatgcaccaatccctatcccggtaccaggtacagcacccgcagtatctttgatga

SEQ ID NO: 777679 - DNA, 75 bp, synthetic construct
  source 1..75: mol_type = other DNA
aacatcatcagaaatgagtaaataccttaaaagcatcaacgagtgcatgctccttataaaaaatatagttcatca

SEQ ID NO: 777680 - DNA, 75 bp, synthetic construct
  source 1..75: mol_type = other DNA
atctggatacctgggctcagtacggctggttcgataaccatgtgaaaggtgacggactgccgggtgaatcctgga

SEQ ID NO: 777681 - DNA, 75 bp, synthetic construct
  source 1..75: mol_type = other DNA
aactggcgcgccagccatccgctgaccgccgcatggttcgccgcttttgatgcgcacccggccatggtcgccacg

SEQ ID NO: 777682 - DNA, 75 bp, synthetic construct
  source 1..75: mol_type = other DNA
ctggccaaagtcccggcactgcgcaccgaaagcgggctatgcctttacgacagtcgggtcatttgcgaatacctc

SEQ ID NO: 777683 - DNA, 75 bp, synthetic construct
  source 1..75: mol_type = other DNA
cgcacacgaatcgtcggtaaatatcgacgctcttgccgatgatttccgcgagcgcatcgaggcagcacaggatgt

SEQ ID NO: 777684 - DNA, 75 bp, synthetic construct
  source 1..75: mol_type = other DNA
taatgcggttgttaccaacatgtcgcctacaaaagatcgccttcattacgattggtttggcccatgggaaaacat

SEQ ID NO: 777685 - DNA, 75 bp, synthetic construct
  source 1..75: mol_type = other DNA
aaaccagatgcctgcatggctgtggtcatgcaggccgcacgatggggtatggacccctttgccgtagctcagaag

SEQ ID NO: 777686 - DNA, 75 bp, synthetic construct
  source 1..75: mol_type = other DNA
gtaccgtacataagaataacgcagcgtcgggtacatttacttcctttcacttcgccgcgtaccatgtagaaaaag

SEQ ID NO: 777687 - DNA, 75 bp, synthetic construct
  source 1..75: mol_type = other DNA
gtaccgtacataagaacaatgcagaatctggtacgtttactgctttccacttcgcagcgtaccatgtagaaaaag

SEQ ID NO: 777688 - DNA, 75 bp, synthetic construct
  source 1..75: mol_type = other DNA
aaaaaaagcaacatatttggaacatcgttcactaataccaggataaaaaatttgtgctgtgaagatattatgcct

SEQ ID NO: 777689 - DNA, 75 bp, synthetic construct
  source 1..75: mol_type = other DNA
ggggaattcagcagcaactatggcaatctgaacgaatggtatgttcagcctcaggcccagcttgtctggatgggg

SEQ ID NO: 777690 - DNA, 75 bp, synthetic construct
  source 1..75: mol_type = other DNA
gtggtctgtttgtggatggtatgaccggataccgggagctgtctgaagattacactattcagggagagctgagtg

SEQ ID NO: 777691 - DNA, 75 bp, synthetic construct
  source 1..75: mol_type = other DNA
ggatagcctggtgttgggtgaacattctcaaatcgccagcctgaaagcgcagctcgcggaagcaaaatataacct

SEQ ID NO: 777692 - DNA, 75 bp, synthetic construct
  source 1..75: mol_type = other DNA
gagatggcggcgaatactcagcaggcaaaggccacgcgggataaattcgctaaagagtatcagcgttacgcacgc

SEQ ID NO: 777693 - DNA, 75 bp, synthetic construct
  source 1..75: mol_type = other DNA
actctgacagtaaacagtacaagcagtaaaataccacacggcatactggtgaatatggggaaaaggctggcggct

SEQ ID NO: 777694 - DNA, 75 bp, synthetic construct
  source 1..75: mol_type = other DNA
atattgacgttatggcagacgggatccgtaacgggctgggaattgggcgcttgtttgagcctgtctggcagttac

SEQ ID NO: 777695 - DNA, 75 bp, synthetic construct
  source 1..75: mol_type = other DNA
ttctcacaatgaacaaggccaccactttaccttttatcgtaaaggctccgcggcctctacgatgacggtcgatga

SEQ ID NO: 777696 - DNA, 75 bp, synthetic construct
  source 1..75: mol_type = other DNA
gggagcgagcggatttatctaaggtgaagatagaattacacttgcctcagcttctactaaagggattcgtgaagg

SEQ ID NO: 777697 - DNA, 75 bp, synthetic construct
  source 1..75: mol_type = other DNA
atgaaagaattctcatcagaaaaaatatatgattacatcgatataatcattgaagattatgaaaatatcaaagaa

SEQ ID NO: 777698 - DNA, 75 bp, synthetic construct
  source 1..75: mol_type = other DNA
ttaattacaatacagatttagacatagaggactctagctcagaggaattccttccagataatatacccgagaaag

SEQ ID NO: 777699 - DNA, 75 bp, synthetic construct
  source 1..75: mol_type = other DNA
cattcgggcgtccagcctgccagagtattacaaagagcgtctgctcgccgccagccatcatttgatcagcatgat

SEQ ID NO: 777700 - DNA, 75 bp, synthetic construct
  source 1..75: mol_type = other DNA
acagactattgagccttacgctcacgttcaggacaacggctatcgtgataaaggcactcagggcgcgcagcttgg

SEQ ID NO: 777701 - DNA, 75 bp, synthetic construct
  source 1..75: mol_type = other DNA
acatacagtcattatatttaaacaatctgatggttcgactaatcgttatgaagggaagtcttttgaaagaaaaga

SEQ ID NO: 777702 - DNA, 75 bp, synthetic construct
  source 1..75: mol_type = other DNA
cacgatctcagccagcaatgccattttcaacgtgcaggctttaacccagcttcagtctgtcgccgggttgatggc

SEQ ID NO: 777703 - DNA, 75 bp, synthetic construct
  source 1..75: mol_type = other DNA
acagttccagcacctggatgcaagccccgatccggaatggggtgatcgctggcgttatttctggcgtgtgacgtt

SEQ ID NO: 777704 - DNA, 75 bp, synthetic construct
  source 1..75: mol_type = other DNA
tgagtactgattttcgtgggtatgcaatactgccagtgcagccataccgaagagacgatgttattctggatgaaa

SEQ ID NO: 777705 - DNA, 75 bp, synthetic construct
  source 1..75: mol_type = other DNA
gttgtaacggcatcgatgttttcctcggttccttcagtatgattaaacaacagaccgagaaagacactgaagttc

SEQ ID NO: 777706 - DNA, 75 bp, synthetic construct
  source 1..75: mol_type = other DNA
atgtatcaggttatataggtggcgtaaaacaaataccaacaaaacctaaaaatcaggaaatagattataaagaat

SEQ ID NO: 777707 - DNA, 75 bp, synthetic construct
  source 1..75: mol_type = other DNA
acaagtatggcgaccaaccgataagaatcactactgtgcgagtggttgaggaacagttcagaggggcggcaactg

SEQ ID NO: 777708 - DNA, 75 bp, synthetic construct
  source 1..75: mol_type = other DNA
gtgacgctaccggcggagctggcggtgatgctgggaaggctggagcgggagctgcgtgcgggagcggtgagtgcg

SEQ ID NO: 777709 - DNA, 75 bp, synthetic construct
  source 1..75: mol_type = other DNA
tagatttagatccgaagctatttagaaaagtttccgcaccaaaagtattttatacgtataagaataatatgtttt

SEQ ID NO: 777710 - DNA, 75 bp, synthetic construct
  source 1..75: mol_type = other DNA
agtaaccagataattaaagtgggttctgttcaggtggaaacgattggacttgttcgtgcgctgaccgtgggcgtg

SEQ ID NO: 777711 - DNA, 75 bp, synthetic construct
  source 1..75: mol_type = other DNA
ccgggaatggcaggtggtggcaagtgaactgcacggcgagcagccgcaggcggtgccgggacgcagtggttcagg

SEQ ID NO: 777712 - DNA, 75 bp, synthetic construct
  source 1..75: mol_type = other DNA
accttaaaaacgcaactattacgttgaatgtcataatgcccgaaactaaatttactttattgaatataacaaaat

SEQ ID NO: 777713 - DNA, 75 bp, synthetic construct
  source 1..75: mol_type = other DNA
catgtacttggttacttagatgatgattatgattcttcgtctccgtatgttggagatattagtgggttgatgaat

SEQ ID NO: 777714 - DNA, 75 bp, synthetic construct
  source 1..75: mol_type = other DNA
gtaagaattggtgcgccaactggtgtggcgtgctcggtgtgtccgggcgggatgacctcgggcaacccggtgaac

SEQ ID NO: 777715 - DNA, 75 bp, synthetic construct
  source 1..75: mol_type = other DNA
gttaaacaggttaaagaatggcgggctatctcaattcaggtagatgaaaaaagaactgacggaaaatatccgagc

SEQ ID NO: 777716 - DNA, 75 bp, synthetic construct
  source 1..75: mol_type = other DNA
tggacagaacgcgaagcgcgtaaccattgcccgtccggttgtgtcgctgtattcgccgcccgtattcgtcagggg

SEQ ID NO: 777717 - DNA, 75 bp, synthetic construct
  source 1..75: mol_type = other DNA
actctattcaagtccttagagggatcgcggtacttctagtcattgcgtttcactttagagtatatttaaatggag

SEQ ID NO: 777718 - DNA, 75 bp, synthetic construct
  source 1..75: mol_type = other DNA
ccgacatattgttcagcgggaagaacaggttgcaagtcctggccaaaacatcaggtggtgctggttttggtgctc

SEQ ID NO: 777719 - DNA, 75 bp, synthetic construct
  source 1..75: mol_type = other DNA
acttaagactgagcaatttgaattgatttgtcgcggctatgtacaggcgctatacaaaggcgcgccattgacaga

SEQ ID NO: 777720 - DNA, 75 bp, synthetic construct
  source 1..75: mol_type = other DNA
gagcccggacttccattgcccgggccaggaccggcgctgcccacaaatgcgccaatccctatccctgaaccaggt

SEQ ID NO: 777721 - DNA, 75 bp, synthetic construct
  source 1..75: mol_type = other DNA
ggtcgcgtctgtatctgctgcgacgcagcaagctgacaaataaaaccccgcagcttgccagagattatgcccgtg

SEQ ID NO: 777722 - DNA, 75 bp, synthetic construct
  source 1..75: mol_type = other DNA
gctgaatttggccgcgactattgggaagaaaaaaacggtatcttaactgcggatgatttgttgcatatcgcctgc

SEQ ID NO: 777723 - DNA, 75 bp, synthetic construct
  source 1..75: mol_type = other DNA
attaaagtgggttctgttcaggtggaaacgattggacttgttcgtgcgctgaccgtgggcgtggcgtatcagacg

SEQ ID NO: 777724 - DNA, 75 bp, synthetic construct
  source 1..75: mol_type = other DNA
gcctgctgttcaccggtaaacagggcgatgccctgacattcgcaaccattaccgatcgggtaatgactccaactt

SEQ ID NO: 777725 - DNA, 75 bp, synthetic construct
  source 1..75: mol_type = other DNA
accaaatgtgataatacaataaagttatttatgtatttggcttggctaccaagttctattgcagcaggaatattt

SEQ ID NO: 777726 - DNA, 75 bp, synthetic construct
  source 1..75: mol_type = other DNA
tgccaggaacatgatgacaacagcttaaaattatttgcttcgctgttaatttcactttcatattctagtgcctac

SEQ ID NO: 777727 - DNA, 75 bp, synthetic construct
  source 1..75: mol_type = other DNA
ccggaacaagtatgaagacacatctggagcaggaaggatgtcgaactcgggttactgttgtgccgcctggctttg

SEQ ID NO: 777728 - DNA, 75 bp, synthetic construct
  source 1..75: mol_type = other DNA
gctgattctggcgatttatccgctgcttcagtcagaattttctctgacatttatgcagattggcatgataaccct

SEQ ID NO: 777729 - DNA, 75 bp, synthetic construct
  source 1..75: mol_type = other DNA
gtacgggcgcagccgtttcgccacgctcacaactgacggaaaggcgaacaccgtgacagaccaggaggccagccg

SEQ ID NO: 777730 - DNA, 75 bp, synthetic construct
  source 1..75: mol_type = other DNA
gctactggtgcgcgatggcaggcagctacggtcagcgctggcgaactggattatcggacagaagcccgcgacgcg

SEQ ID NO: 777731 - DNA, 75 bp, synthetic construct
  source 1..75: mol_type = other DNA
cgtggaacttcgcagatttccggcatcataatgcccaatacgggatacataaagttccctcagactggagactcc

SEQ ID NO: 777732 - DNA, 75 bp, synthetic construct
  source 1..75: mol_type = other DNA
gtgccataggcctgaagccgcttcacgtcacgcgcttgtttctgacagaaggcatttttattggtgtgattggcg

SEQ ID NO: 777733 - DNA, 75 bp, synthetic construct
  source 1..75: mol_type = other DNA
aagtgaccttcttatcggaccgcgtgtgtgggatttgcggttttgcccacagtgtggcctataccaactcggttg

SEQ ID NO: 777734 - DNA, 75 bp, synthetic construct
  source 1..75: mol_type = other DNA
aaagcggagcggcgggcattgtctgctccgtaggaacgatcatcgccattgtgatgaatgcgggccatgtcagga

SEQ ID NO: 777735 - DNA, 75 bp, synthetic construct
  source 1..75: mol_type = other DNA
tcatcctctggacagaacgcggagcagcccgtcatgcaaaaatgctcgaaaccgatcaggcgtgggaagtattcg

SEQ ID NO: 777736 - DNA, 75 bp, synthetic construct
  source 1..75: mol_type = other DNA
aaagctagaatcttatgaattattgataggtatgttagtatttattaccttccctcagatctcctatcaattaga

SEQ ID NO: 777737 - DNA, 75 bp, synthetic construct
  source 1..75: mol_type = other DNA
agatgcagccggaaaaccttcacggatactccacagccggagcacacgccagagcgcttacccgtgcgtgcaacg

SEQ ID NO: 777738 - DNA, 75 bp, synthetic construct
  source 1..75: mol_type = other DNA
ccggaagcagaaattatcatcgccgccgataacgataacaccgggaagggcaaaaacaccgggaaggtggccgcc

SEQ ID NO: 777739 - DNA, 75 bp, synthetic construct
  source 1..75: mol_type = other DNA
catggaacggaacagcgaacgggatacagggcaacgcagccgcccgttgtgatagttttctctggcttgatgagc

SEQ ID NO: 777740 - DNA, 75 bp, synthetic construct
  source 1..75: mol_type = other DNA
atggacgcaccgcagaactctgtcggtgaattctcagtcggtagtgcggatggtcaacgtcagatcactaacgtc

SEQ ID NO: 777741 - DNA, 75 bp, synthetic construct
  source 1..75: mol_type = other DNA
agaatctggataagctgacaacccgtatcaaaggtactatcgctgatggtctgaatccactcgtgggggcaatga

SEQ ID NO: 777742 - DNA, 75 bp, synthetic construct
  source 1..75: mol_type = other DNA
gaacgccgatgttactaatgaagcagccgaaaagtacgcggaatttgataagaatctaactaagctaaccactaa

SEQ ID NO: 777743 - DNA, 75 bp, synthetic construct
  source 1..75: mol_type = other DNA
aagctgactaagtttctcgatactcaggacaaaggcggtagtactgctggtgacatcaccgttaacgctccctta

SEQ ID NO: 777744 - DNA, 75 bp, synthetic construct
  source 1..75: mol_type = other DNA
gaaagataccaatgctcttattggttccggtctactcaatgacaatcagaaggggtatctggcacagcaacagaa

SEQ ID NO: 777745 - DNA, 75 bp, synthetic construct
  source 1..75: mol_type = other DNA
gcaggtaaatcacagagtgaaatagttaacgtaatggaaacgttagccagtgactcaagccacatgattagtact

SEQ ID NO: 777746 - DNA, 75 bp, synthetic construct
  source 1..75: mol_type = other DNA
gatagtgctcaagtactcggtatcaatcctgatgaaatgctaaagaacgctactgcatatggtgctaaacaacgt

SEQ ID NO: 777747 - DNA, 75 bp, synthetic construct
  source 1..75: mol_type = other DNA
gagcacaacaccgactacggcaccgagcacatcaccaccgggatcgacatgtccctcgagactatccagtcgatt

SEQ ID NO: 777748 - DNA, 75 bp, synthetic construct
  source 1..75: mol_type = other DNA
ttgcctccgacattagcgagttttgcgcctatcattcatggcgttgctaataccaacgccaaagtcactatgaag

SEQ ID NO: 777749 - DNA, 75 bp, synthetic construct
  source 1..75: mol_type = other DNA
atataaataacgaaaaagccgttctgcttgccagggatgaaacactcggcaattgccttaatttgacggaaatta

SEQ ID NO: 777750 - DNA, 75 bp, synthetic construct
  source 1..75: mol_type = other DNA
tactggtctatcagtagtacagctacaacagctatcatcggcgtttagtggtcttggtcttgaaatggataagtt

SEQ ID NO: 777751 - DNA, 75 bp, synthetic construct
  source 1..75: mol_type = other DNA
gaagagtacgacagtgttgcggaggcttacttagctaaacaaatggccagaagggccaataccaatcagaggagt

SEQ ID NO: 777752 - DNA, 75 bp, synthetic construct
  source 1..75: mol_type = other DNA
gcctctcagttaacaatgaccgaatttcagatgctgctggcggcaaaatatcccgaccagaaaggcttcacgcgc

SEQ ID NO: 777753 - DNA, 75 bp, synthetic construct
  source 1..75: mol_type = other DNA
aaaatatcgttgcttgcaccctatgatgagtggtatttcaattttttctaccctgattccctaccagcagaagtt

SEQ ID NO: 777754 - DNA, 75 bp, synthetic construct
  source 1..75: mol_type = other DNA
tagataaaaatctgaccttcaggattcgcggattaaataacattcatgtccttgactgctttgttaatgttgatc

SEQ ID NO: 777755 - DNA, 75 bp, synthetic construct
  source 1..75: mol_type = other DNA
ttcagggcagaactgagtgcgaacccggcagaaacggttgttgagggaccgtttagtaaagacgtcatcctcaaa

SEQ ID NO: 777756 - DNA, 75 bp, synthetic construct
  source 1..75: mol_type = other DNA
aagctacagccgccgagtttggcattgaactgacggcgattggcgaactggtgccagcgcgcggcggtcgtgcca

SEQ ID NO: 777757 - DNA, 75 bp, synthetic construct
  source 1..75: mol_type = other DNA
gagcgggaactgcgcgcgggagcggtgagtgcggagagtgaggcatggcttgcgcagtgcgggctgacggcggaa

SEQ ID NO: 777758 - DNA, 75 bp, synthetic construct
  source 1..75: mol_type = other DNA
tgatacggatgcacgacgagcggacccaccactaccactacgacagccagcaccgtctggtgttctacacgcgga

SEQ ID NO: 777759 - DNA, 75 bp, synthetic construct
  source 1..75: mol_type = other DNA
gacgtggccgcttacagcttcaccagtaagccggtggcagcggcgctcgtcgctgctaaaaatcgcggggtgtct

SEQ ID NO: 777760 - DNA, 75 bp, synthetic construct
  source 1..75: mol_type = other DNA
catttggtgcagccaccagcattacgctgactatcgtaatgggcctgatgttgctggtttactggcgcgcttctc

SEQ ID NO: 777761 - DNA, 75 bp, synthetic construct
  source 1..75: mol_type = other DNA
tgctgcacgcagtctggtctggccgaagttaaaatcgttcctcagagaatatcccgaaatcaatgtcgaactggt

SEQ ID NO: 777762 - DNA, 75 bp, synthetic construct
  source 1..75: mol_type = other DNA
tggcgggacagttttttcactgaccggtagcaaatggaacctttcaggagatgcaggacatctgcaggactctgt

SEQ ID NO: 777763 - DNA, 75 bp, synthetic construct
  source 1..75: mol_type = other DNA
caggtggaaacgattggacttgttcgtgcgctgactgtgggcgtggcgtatcagacgacggtaggtggcattatg

SEQ ID NO: 777764 - DNA, 75 bp, synthetic construct
  source 1..75: mol_type = other DNA
caggaggtgattgtggacttcctcaacggcgatccggaccagccgatcattatggggcgcacctaccaccaggaa

SEQ ID NO: 777765 - DNA, 75 bp, synthetic construct
  source 1..75: mol_type = other DNA
cgggcaggactgcgtcagaacttccgtatcttccagaacgaggacatcagaagcatcctcggcaccatactgcag

SEQ ID NO: 777766 - DNA, 75 bp, synthetic construct
  source 1..75: mol_type = other DNA
tcgtcagggagtcagccgaatgttgggaaggatttgacggatgaagagaagaactgcctggccggcggcagtacg

SEQ ID NO: 777767 - DNA, 75 bp, synthetic construct
  source 1..75: mol_type = other DNA
ttaggtatttcacttgtggatatactcaatcatgggatagattacgatgaagattttattattagcattattttt

SEQ ID NO: 777768 - DNA, 75 bp, synthetic construct
  source 1..75: mol_type = other DNA
ttcacttagttcaggagagtttgcaaaattaaaccttttcaatcaactttatgattctatagaacatagcaacag

SEQ ID NO: 777769 - DNA, 75 bp, synthetic construct
  source 1..75: mol_type = other DNA
cagcaaaaactatattagagactttagatgaatttaacgttaatgttaaatttcagtcaaaaatagaaatgttat

SEQ ID NO: 777770 - DNA, 75 bp, synthetic construct
  source 1..75: mol_type = other DNA
aacatgggtattcttatccggaaagtacaaaaaactttatcaaagataaaaatatccctatggcaactggtagtt

SEQ ID NO: 777771 - DNA, 75 bp, synthetic construct
  source 1..75: mol_type = other DNA
ttcttgctttgatgacgtgtggtgtcgcaaatgccgctgaaacagctataggtgatgttgctactgttcaggctc

SEQ ID NO: 777772 - DNA, 75 bp, synthetic construct
  source 1..75: mol_type = other DNA
tcgctgaagacagccttcagcgtgacaacagttatcttcgtggtgctgcagatgccagagtcatgctgatgctgg

SEQ ID NO: 777773 - DNA, 75 bp, synthetic construct
  source 1..75: mol_type = other DNA
cactggcgtctggacgtggtaatgaatgaagacgactgcaaaataagaagagaaaacgcagaagaactattttta

SEQ ID NO: 777774 - DNA, 75 bp, synthetic construct
  source 1..75: mol_type = other DNA
tgtttaatgacctgctgaactggttaccgtcagtaggtggactgaaaactccctgtcatatcgccagtgctcgcg

SEQ ID NO: 777775 - DNA, 75 bp, synthetic construct
  source 1..75: mol_type = other DNA
ggatcccattgggctgaaggggggatggaacctgtatgcgtatccgctgaacccggtgcagcggggggatcctct

SEQ ID NO: 777776 - DNA, 75 bp, synthetic construct
  source 1..75: mol_type = other DNA
aagtggacgggatcacagttgcagggcagatatatttcaaataatcagcgcaactggggccagacgtttcagggg

SEQ ID NO: 777777 - DNA, 75 bp, synthetic construct
  source 1..75: mol_type = other DNA
tgttaacggtgatccaggtgattttaatcaggctgttgagtatttaaaacaagattcacaaatgaaagaaactat

SEQ ID NO: 777778 - DNA, 75 bp, synthetic construct
  source 1..75: mol_type = other DNA
cccgctgggccgccggacgggaaaacgggtatggcggcgggagcgtgacctgacgggggggatgtcactgtcgcg

SEQ ID NO: 777779 - DNA, 75 bp, synthetic construct
  source 1..75: mol_type = other DNA
caataagaaggtgcttaccgatccggcctttgcctatctgtggactggttacatcaaagttattgccgtgcattc

SEQ ID NO: 777780 - DNA, 75 bp, synthetic construct
  source 1..75: mol_type = other DNA
ttggtactggaatccgctactgcttgtataacggaaatacagaagagctccacgcaaaaatgaaaacagtgcagg

SEQ ID NO: 777781 - DNA, 75 bp, synthetic construct
  source 1..75: mol_type = other DNA
ggcgttacaaacccgcagttgcgtgaacatctcgcgcaacaaatgggggctgattgtgggaaaccgggctcattc

SEQ ID NO: 777782 - DNA, 75 bp, synthetic construct
  source 1..75: mol_type = other DNA
cctgggtttcattttcctgtttttcacggcgtagttccccacttcaacactcgccagctgttcagtgaagtcatt

SEQ ID NO: 777783 - DNA, 75 bp, synthetic construct
  source 1..75: mol_type = other DNA
tgtacttaacaaggatatcggttttatacaacctggacaggaggtcgttattaaagtagatgcatatccatatac

SEQ ID NO: 777784 - DNA, 75 bp, synthetic construct
  source 1..75: mol_type = other DNA
gaaaaggtggtggcagtggtccggttgattacctgctgggaagggagcgaaaccgggaaggggcaacggtgcttc

SEQ ID NO: 777785 - DNA, 75 bp, synthetic construct
  source 1..75: mol_type = other DNA
aatacagctaattttactgataacaccacagagttaactttaaatgttaatggcgatgccgggaagattggtgtt

SEQ ID NO: 777786 - DNA, 75 bp, synthetic construct
  source 1..75: mol_type = other DNA
cccagctggaatgcggttgacggcattatgatccgggcagttaagcgaggccttgcccggataaaaaagccatta

SEQ ID NO: 777787 - DNA, 75 bp, synthetic construct
  source 1..75: mol_type = other DNA
gagctggaattaaaagaaggcatgtttggcgtcagtgcctttcattactggcgcgatcttaaccggggtaaagga

SEQ ID NO: 777788 - DNA, 75 bp, synthetic construct
  source 1..75: mol_type = other DNA
cctggtttattattcccgccacgctgaccgcgttcggactggttgtcgccatgtgcgcggtaatgcagttcagcg

SEQ ID NO: 777789 - DNA, 75 bp, synthetic construct
  source 1..75: mol_type = other DNA
ttatggttgggtcggatggtgagttgtacggcgcatccgactcgcgcttggtggatgatttaacggcggggtatt

SEQ ID NO: 777790 - DNA, 75 bp, synthetic construct
  source 1..75: mol_type = other DNA
gcagctttattttttacaggtatcaaacctctatattcaataataaaaggctgtgcggagatattttacgattgg

SEQ ID NO: 777791 - DNA, 75 bp, synthetic construct
  source 1..75: mol_type = other DNA
actttctttcgatgttttttatagccatattattttttcctgcattcaatgcatctttattttttactggtgtta

SEQ ID NO: 777792 - DNA, 75 bp, synthetic construct
  source 1..75: mol_type = other DNA
gctattggggagatggctaacagtcgtaccaatagatttctagttattatactcaatacaaatggtggctctgtt

SEQ ID NO: 777793 - DNA, 75 bp, synthetic construct
  source 1..75: mol_type = other DNA
aggatctctactggttccaggttgatatgccggaacggatgcattcagacaggctgcgccgggagtacaggaatt

SEQ ID NO: 777794 - DNA, 75 bp, synthetic construct
  source 1..75: mol_type = other DNA
ataactttgacctatcggatgagcagatagatcgaattctgcgtattgctatgaacggcgacagtcacggttatc

SEQ ID NO: 777795 - DNA, 75 bp, synthetic construct
  source 1..75: mol_type = other DNA
ctcggctgggatgttaccgcttttggtggcaacaactttgcagcacaggggctgacgctgtttaccctacgtaat

SEQ ID NO: 777796 - DNA, 75 bp, synthetic construct
  source 1..75: mol_type = other DNA
tacttaatgaactcaaagcgatgacaggaaactaccgttatgtttttcctggacgaaatgatccgaataagccaa

SEQ ID NO: 777797 - DNA, 75 bp, synthetic construct
  source 1..75: mol_type = other DNA
caagaactgcgggcagaactccatgaagcccggaaaaacattccatcaaaaaatcctgtcgatgccgataagttg

SEQ ID NO: 777798 - DNA, 75 bp, synthetic construct
  source 1..75: mol_type = other DNA
caggaagatgatccggaggaaatagaaggcgctgaacatccgaacaatgagaatgctggtaacgatcagcatcac

SEQ ID NO: 777799 - DNA, 75 bp, synthetic construct
  source 1..75: mol_type = other DNA
aacagggcgcttttatctccggcagtggtgtcctttctgtctggttacgccataaccttgagaatttcaaaaaac

SEQ ID NO: 777800 - DNA, 75 bp, synthetic construct
  source 1..75: mol_type = other DNA
aaagcggctaaccgttttgcggtgccaccaccaccccgcctggtggtgaataacgataatgagggcaacggatga

SEQ ID NO: 777801 - DNA, 75 bp, synthetic construct
  source 1..75: mol_type = other DNA
gtcgccacagaagttcagtattaagcttgaaaattgcccggcaacgtacactcaagcagccgttcgttttgatgg

SEQ ID NO: 777802 - DNA, 75 bp, synthetic construct
  source 1..75: mol_type = other DNA
actttatcaagcgtggtgtaacggaatacctgtgcccacattgttctgcgttactggaagtgcgtgccggtgtgt

SEQ ID NO: 777803 - DNA, 75 bp, synthetic construct
  source 1..75: mol_type = other DNA
gccagccactgatacgtatctgttgcgccagtgtggcgtttattctggtctgtgaatacgcgctgctgaaggcgc

SEQ ID NO: 777804 - DNA, 75 bp, synthetic construct
  source 1..75: mol_type = other DNA
aaaggggatgccggtaaaaaatcggcaaaaggtgatgccgcgaaaaaagcggctaaccgttttgcggtgccacca

SEQ ID NO: 777805 - DNA, 75 bp, synthetic construct
  source 1..75: mol_type = other DNA
ccggtcattcaatacgccttcctcgcccatggagatttgagctaaaaatagcattaactcatgctggattaaatg

SEQ ID NO: 777806 - DNA, 75 bp, synthetic construct
  source 1..75: mol_type = other DNA
cgctccttttcacaccaaggtcatcaatgccactgtgcgagacgctacacacgtcctggacgggctgctgtatca

SEQ ID NO: 777807 - DNA, 75 bp, synthetic construct
  source 1..75: mol_type = other DNA
atataaaaagcaataaatgtagtacgaatagttcaacggtcactgtgctatctaatcgtgaagtgaccatattac

SEQ ID NO: 777808 - DNA, 75 bp, synthetic construct
  source 1..75: mol_type = other DNA
agcgactatgctaaccatattgcccgacggatggtcgtaccgccatatcgcaccggcggtcaggcgcagtttatt

SEQ ID NO: 777809 - DNA, 75 bp, synthetic construct
  source 1..75: mol_type = other DNA
agtcggtcattctgcccgccctcaacgccgtcgagcgggcgagtgccgaggcgatcacccgtgctaaccggcgca

SEQ ID NO: 777810 - DNA, 75 bp, synthetic construct
  source 1..75: mol_type = other DNA
gccattacttgatttagttaactgcacgccaaaattgaaagatatttccattagggttaacaaatgtctttcttc

SEQ ID NO: 777811 - DNA, 75 bp, synthetic construct
  source 1..75: mol_type = other DNA
agggcgtaggtaactatattaaagctcgctccagctcttatgagtttaataacatgaatgttatctacggtgaaa

SEQ ID NO: 777812 - DNA, 75 bp, synthetic construct
  source 1..75: mol_type = other DNA
cccggtgattatccgccacctgctaaccaccttttccgaccagaacaaagcaaaggcactgttacttgagcagcg

SEQ ID NO: 777813 - DNA, 75 bp, synthetic construct
  source 1..75: mol_type = other DNA
acccaatacggacaattcaatggtcgtaacttcaaactctaacgtggggataaaaatttacgacaaaaataataa

SEQ ID NO: 777814 - DNA, 75 bp, synthetic construct
  source 1..75: mol_type = other DNA
cgacgctggcgcgtcttatcaggcctacaagtcccgagcacagaaccgtaggccggataaggcgttttacgccgc

SEQ ID NO: 777815 - DNA, 75 bp, synthetic construct
  source 1..75: mol_type = other DNA
cctcgtgttgccgtaatgggcgcaaaagttgttgatgccttcgttaaaaatgaagcagtaactaaatatcttgat

SEQ ID NO: 777816 - DNA, 75 bp, synthetic construct
  source 1..75: mol_type = other DNA
cccgctttcctgacgttcacctagacagcaattcgctgtatacccgcgacgaacggctgattacctctgccggca

SEQ ID NO: 777817 - DNA, 75 bp, synthetic construct
  source 1..75: mol_type = other DNA
cgcacgaccgttggttcctcgaccatatcgccacccacgtcctggactaccaggatgaaggtaaagttgagttct

SEQ ID NO: 777818 - DNA, 75 bp, synthetic construct
  source 1..75: mol_type = other DNA
agcaatttttaaacaaatattttgagcacattaattctctgttctgttctgttggatctagtaaattttctataa

SEQ ID NO: 777819 - DNA, 75 bp, synthetic construct
  source 1..75: mol_type = other DNA
gaggacgtggtaatgccggaaggatttgcccgcagcgagcaggagcaagtgggcaaatattactgtgatcgcgca

SEQ ID NO: 777820 - DNA, 75 bp, synthetic construct
  source 1..75: mol_type = other DNA
tgcgtaacagtgcatttgtctatcccgatcatgggcgaatctggctgacgcagcgtgtgctgcgtgagcaaggtg

SEQ ID NO: 777821 - DNA, 75 bp, synthetic construct
  source 1..75: mol_type = other DNA
cgtctggctgaggagtctgtttccctgtggctggctacctgtattgacggtgtggtgaagccttatgccaccggt

SEQ ID NO: 777822 - DNA, 75 bp, synthetic construct
  source 1..75: mol_type = other DNA
catggagcgagtggattcacgcaacgagaacacctctcactcccgatgttatcttggccggacgtgatgaagaac

SEQ ID NO: 777823 - DNA, 75 bp, synthetic construct
  source 1..75: mol_type = other DNA
gaacgtctattagataactacagcatttctgcaaaatataatgagattagcaaggacgttgaggttttagtacct

SEQ ID NO: 777824 - DNA, 75 bp, synthetic construct
  source 1..75: mol_type = other DNA
gtctggttgatagtgttatggatattcagttccccccgcaaaattatattcggatgggaacagatcctaacgttt

SEQ ID NO: 777825 - DNA, 75 bp, synthetic construct
  source 1..75: mol_type = other DNA
aggttgataaagcaacatgaattgaaattagaaccatacaaagttggagaatataaaagcctgctatatgcaagc

SEQ ID NO: 777826 - DNA, 75 bp, synthetic construct
  source 1..75: mol_type = other DNA
gggtgggtactatattgggatataaggttcaaagtatcgctgaaattagaagcgcgttcatccctttatcaataa

SEQ ID NO: 777827 - DNA, 75 bp, synthetic construct
  source 1..75: mol_type = other DNA
tccactcagcgaaaagagcatgtggaaatacggtatgaaaaagtcaatgctttgattaaagagatgcttaatgat

SEQ ID NO: 777828 - DNA, 75 bp, synthetic construct
  source 1..75: mol_type = other DNA
caccgccgttgatgatttgcgccaggcttctgaagatgccggtgccgggcatcttggtgaaaccggattcggttc

SEQ ID NO: 777829 - DNA, 75 bp, synthetic construct
  source 1..75: mol_type = other DNA
ggagatgcctccgcccgcggtgatatctcatggtattgaatatatggaggatggtcttcccgatccggtgaaagc

SEQ ID NO: 777830 - DNA, 75 bp, synthetic construct
  source 1..75: mol_type = other DNA
ttatcgtctattccggcaaatacactgacagcgacggcacagaaaaatatttccttgagcctgatttgctggtcc

SEQ ID NO: 777831 - DNA, 75 bp, synthetic construct
  source 1..75: mol_type = other DNA
agaccaaaatcaagctgtttttccgcccgaaagccattgaggcaaaacccaatgcagtctggcaggaccagctgg

SEQ ID NO: 777832 - DNA, 75 bp, synthetic construct
  source 1..75: mol_type = other DNA
aaaaaacgctgatggcggtagcgtgcctgagcgcagtaccggcagcccaggctgccatctccctggaccgtacgc

SEQ ID NO: 777833 - DNA, 75 bp, synthetic construct
  source 1..75: mol_type = other DNA
tccaatcatttcccgttcttaaaggctgatgagatacctgattttctacgtgctttaaacggttacaccggaagt

SEQ ID NO: 777834 - DNA, 75 bp, synthetic construct
  source 1..75: mol_type = other DNA
atggggcaatccgcaggtgcgatggtggtaaataagccatcttctggcggtcccgtgccttcagaatatagtctg

SEQ ID NO: 777835 - DNA, 75 bp, synthetic construct
  source 1..75: mol_type = other DNA
aggtgttgaaagtgatgttagaccgcacataattggcgcagattgtattgttttaccttccttctatagagaagg

SEQ ID NO: 777836 - DNA, 75 bp, synthetic construct
  source 1..75: mol_type = other DNA
cgagtgatgattgcgatggcgctgtcatgccgcccggcggtgctgattgccgatgagccaaccaccgcgctggat

SEQ ID NO: 777837 - DNA, 75 bp, synthetic construct
  source 1..75: mol_type = other DNA
gaattgaaaaataacaaggtagatgttccttttttttctagagaacttaatgagcatttaactaaatggttgttt

SEQ ID NO: 777838 - DNA, 75 bp, synthetic construct
  source 1..75: mol_type = other DNA
acgcctggcgattgagcatatcaaagcacacgttacggcagaaacgccaaagggcaagcacgatatcgaaggcaa

SEQ ID NO: 777839 - DNA, 75 bp, synthetic construct
  source 1..75: mol_type = other DNA
ctactgctcacaatgcagcgaccttgaattctgcgccctggtagagcatgagctttaccacattgcccaggccac

SEQ ID NO: 777840 - DNA, 75 bp, synthetic construct
  source 1..75: mol_type = other DNA
tcattaccatttcccaaaatggcgtggccgcactgtctgataagtacgcattgctagcgaaaacgaataccgaag

SEQ ID NO: 777841 - DNA, 75 bp, synthetic construct
  source 1..75: mol_type = other DNA
atccgagcgactggaagcaactcaccaggccaaccttgcgaaaatccgtgccgatcaggctgtcagcccactgca

SEQ ID NO: 777842 - DNA, 75 bp, synthetic construct
  source 1..75: mol_type = other DNA
atcggcgaattgaccggtcgcctgtatgacatgaagaccggcgttgaaaatggcgcaaagggtactggtagctgg

SEQ ID NO: 777843 - DNA, 75 bp, synthetic construct
  source 1..75: mol_type = other DNA
aatgcaacgtgcaacaggggtaaccagtgcgccttatgtgaagttaacaacagcttattatgtccgtggcttcca

SEQ ID NO: 777844 - DNA, 75 bp, synthetic construct
  source 1..75: mol_type = other DNA
agcaaagcactacagcagaccattgagagcgcggcaatgaatatcatccgtcgggaatctcaacgccccggcggt

SEQ ID NO: 777845 - DNA, 75 bp, synthetic construct
  source 1..75: mol_type = other DNA
tggtcgcgtcattcctggtcgggatattggcggcggtggcggcctcacactgaacgtaacaaacaacatccagag

SEQ ID NO: 777846 - DNA, 75 bp, synthetic construct
  source 1..75: mol_type = other DNA
caacggctggactgaggaagactcaaaagcattgcaaaagaccatagaaaacacagcaatgcgcctgatgcagcg

SEQ ID NO: 777847 - DNA, 75 bp, synthetic construct
  source 1..75: mol_type = other DNA
agtggtggcggcatcacactgaacgtaacaaacaacatccaggcgacaaacggctggactgaagacgactcaaaa

SEQ ID NO: 777848 - DNA, 75 bp, synthetic construct
  source 1..75: mol_type = other DNA
acagcttaatgagcaatttaatcccgttgatgcgctcaaacaacgccacgccctggaaatgcaacaggctgatga

SEQ ID NO: 777849 - DNA, 75 bp, synthetic construct
  source 1..75: mol_type = other DNA
cgatgatcgcaatgtcagctattagcgctttgatggctggcattactggcttgttcggcggtgggcgctacaacg

SEQ ID NO: 777850 - DNA, 75 bp, synthetic construct
  source 1..75: mol_type = other DNA
acaatcagcaaactggcggcggcggttaacgttggcctgctaatgatggcggctaaacgctttattgaaatcgcg

SEQ ID NO: 777851 - DNA, 75 bp, synthetic construct
  source 1..75: mol_type = other DNA
ccaatatggcaggtgttcctttcggtaaagatggcaatgatttacatctaccacgtaaaacctatttagatgtgg

SEQ ID NO: 777852 - DNA, 75 bp, synthetic construct
  source 1..75: mol_type = other DNA
gaaaatatcgccaggctgagcttaagtgcaggaagttgggatcgttatcgtggagaagtggacgttggggggcta

SEQ ID NO: 777853 - DNA, 75 bp, synthetic construct
  source 1..75: mol_type = other DNA
agcggacaagcggcaacagcagcggcaacaggcgcatcaatcgcatcatcaatggccccggcagcagcggcgaca

SEQ ID NO: 777854 - DNA, 75 bp, synthetic construct
  source 1..75: mol_type = other DNA
aatggccccggcagcagcggcgacagctaccgcgacaatggggacggccccgatgatcgcaatgtcagctatcag

SEQ ID NO: 777855 - DNA, 75 bp, synthetic construct
  source 1..75: mol_type = other DNA
gacaacgtaaaactactacgcgcccgtgtatcccggctatccggtagtctggttgaagctaaggctaattttagc

SEQ ID NO: 777856 - DNA, 75 bp, synthetic construct
  source 1..75: mol_type = other DNA
tggacgcagcaaatcaacctgcagaggtggcaaaacttaacatcgccagagcgtgcgggacgtgcatgctgaaac

SEQ ID NO: 777857 - DNA, 75 bp, synthetic construct
  source 1..75: mol_type = other DNA
cgagaaatcttaagttagatgataatttttcgaaatgcgtagagagtataaagaaagggaccgattcttcattta

SEQ ID NO: 777858 - DNA, 75 bp, synthetic construct
  source 1..75: mol_type = other DNA
aatgtgattacaatcggtggcggcggcacagttggtgtggcggcctcagtccggaacaatttgaaaacaagaacc

SEQ ID NO: 777859 - DNA, 75 bp, synthetic construct
  source 1..75: mol_type = other DNA
ttaaaaaacctgttcgcgtcaatttgcccgttgttggtgacctcccaccagaaggcgtgtttgatacggaattct

SEQ ID NO: 777860 - DNA, 75 bp, synthetic construct
  source 1..75: mol_type = other DNA
tcaatagcgatataaaagatttttataatactgagacaaagattaaggaagaatataataacgcattttcagagc

SEQ ID NO: 777861 - DNA, 75 bp, synthetic construct
  source 1..75: mol_type = other DNA
aaaaggtatgtttaaaggttgttttatttctaaatgcgaaattgaaaattatagatgtgagacgtctaaagtcta

SEQ ID NO: 777862 - DNA, 75 bp, synthetic construct
  source 1..75: mol_type = other DNA
agaggcgttaaataataagattgctgactgtgacaatgagatacgttctaagcttactattattcgaaataatag

SEQ ID NO: 777863 - DNA, 75 bp, synthetic construct
  source 1..75: mol_type = other DNA
cccgaacaacgaaataacgtgatccgtatggagatggacacagaagacagttaccttcagagcctgcttactgct

SEQ ID NO: 777864 - DNA, 75 bp, synthetic construct
  source 1..75: mol_type = other DNA
aaggccataaagcggaacaacacagtccaaatgcgcaacaaaacgagccagaaacgaaacagcctgaaccagtag

SEQ ID NO: 777865 - DNA, 75 bp, synthetic construct
  source 1..75: mol_type = other DNA
gctggctacgacgaagatgatttcaaaaaaacagttcgcgtccatttgcctgttgtaaatgacctgccacctgaa

SEQ ID NO: 777866 - DNA, 75 bp, synthetic construct
  source 1..75: mol_type = other DNA
caaggaaaacactggcaaccatccgcatcacaattgcagtgatgaaactggtgaagcgtcagctcctgtagcaac

SEQ ID NO: 777867 - DNA, 75 bp, synthetic construct
  source 1..75: mol_type = other DNA
atatcaggaactgagggcagaactccatgaagcccggaaaaacattccgccccaaaatcctgtcgatgcagacaa

SEQ ID NO: 777868 - DNA, 75 bp, synthetic construct
  source 1..75: mol_type = other DNA
ctcagtcacaggtaaatgctgttgatgcgaaatatcagaaactgcggacagaactccatgaagcccggaaaaaca

SEQ ID NO: 777869 - DNA, 75 bp, synthetic construct
  source 1..75: mol_type = other DNA
gatttcttaaaaaaggtaagtgctatcaatagagatgtgacatatttttataattccgagtcaaagactaaggga

SEQ ID NO: 777870 - DNA, 75 bp, synthetic construct
  source 1..75: mol_type = other DNA
gcatttaataagcgagcaattatgaatcctgccgttaaaaggaattcagatacagtacctgctatccgaactaaa

SEQ ID NO: 777871 - DNA, 75 bp, synthetic construct
  source 1..75: mol_type = other DNA
aagatacgcgaggaatatctcgctgatactacagttactgttgtgcttatcgggagagagaccgcccaacgtcca

SEQ ID NO: 777872 - DNA, 75 bp, synthetic construct
  source 1..75: mol_type = other DNA
gatgctatacttttctgggctggaatatgtagggttgatgtacggttctgaaaaagagaaagagattacaggtat

SEQ ID NO: 777873 - DNA, 75 bp, synthetic construct
  source 1..75: mol_type = other DNA
aatccgaaagcagattcagctgcgtatgaaaccagcgctgatatgattttgtctgagcttatcagccacggtgaa

SEQ ID NO: 777874 - DNA, 75 bp, synthetic construct
  source 1..75: mol_type = other DNA
ctcaaggaattacagcaaaacacgccacgcaatgatatttgggcgaagttttttctgaggcaggaaaacagttcc

SEQ ID NO: 777875 - DNA, 75 bp, synthetic construct
  source 1..75: mol_type = other DNA
gagaaagacgggggcgacgactatcaccttctttgctggcattcgctggatgtagccgcgatgggctatttaatg

SEQ ID NO: 777876 - DNA, 75 bp, synthetic construct
  source 1..75: mol_type = other DNA
gtagggttgagttttttatttttaaagatatgcaggaaaatgcacaaaatatcattaacaatatgatagaaagtg

SEQ ID NO: 777877 - DNA, 75 bp, synthetic construct
  source 1..75: mol_type = other DNA
tagagtcgtttttgtctacactttatgttgaaaataaatcgtaccaagagaaatatcattttaataatggtaggg

SEQ ID NO: 777878 - DNA, 75 bp, synthetic construct
  source 1..75: mol_type = other DNA
ggttgttttatttctaaatgcaaaattgaaaattatagatgtgagacgtctaaaatctacaccgttacacaacct

SEQ ID NO: 777879 - DNA, 75 bp, synthetic construct
  source 1..75: mol_type = other DNA
aagagcaactgaacagatctcgacgtctctgtgatgctgctctggctaatgagcgggcatgggaaacagccatga

SEQ ID NO: 777880 - DNA, 75 bp, synthetic construct
  source 1..75: mol_type = other DNA
gacgatggcgacatcgttacggtgaaagaagcgacggactccctgctgcattgtgcggagcagcttcgcaaagga

SEQ ID NO: 777881 - DNA, 75 bp, synthetic construct
  source 1..75: mol_type = other DNA
tgatgctcatgggatggattttttggcaaacgcattcaataagtctggtgataacgaaaccagggcgcaggatca

SEQ ID NO: 777882 - DNA, 75 bp, synthetic construct
  source 1..75: mol_type = other DNA
ctcttttagcaagagatatggcttttagtcaatccaattatggcattgtttcaaaaattggaaactatcctttct

SEQ ID NO: 777883 - DNA, 75 bp, synthetic construct
  source 1..75: mol_type = other DNA
gatgacaaaatagacctgcttcatcaccaaaataaaacgctggaatctatggctgaaacactgtttaggcaatgg

SEQ ID NO: 777884 - DNA, 75 bp, synthetic construct
  source 1..75: mol_type = other DNA
ctaaattgctgcctaaaaactcaaccgttataagtgctcgtggtacagtgggaaagtatgctcttttagcaagag

SEQ ID NO: 777885 - DNA, 75 bp, synthetic construct
  source 1..75: mol_type = other DNA
agcagtagaaacccccgccacagatcgcttcgtagtcgggattaaggctgatggggtggaagagtttgcagcgat

SEQ ID NO: 777886 - DNA, 75 bp, synthetic construct
  source 1..75: mol_type = other DNA
cgctggcgagctgtcgatcagagagcggaagtatctggacgttatgcgctgggcgattcgtgttgctggcgagcg

SEQ ID NO: 777887 - DNA, 75 bp, synthetic construct
  source 1..75: mol_type = other DNA
ctattgaccaaaccaaaggcaactcatatggaatgaatgcaatatatagtatgtttgcagggcatattgttttag

SEQ ID NO: 777888 - DNA, 75 bp, synthetic construct
  source 1..75: mol_type = other DNA
tggtgcgcgaaggggctcgcccgatcagcggtgataccggactgcgcgatgtccagcgcctggctgaagccaacg

SEQ ID NO: 777889 - DNA, 75 bp, synthetic construct
  source 1..75: mol_type = other DNA
tttatacagactggaaatctcttgaacttgatgatatgttgcgatggactgccagtgatactctcgaatttatat

SEQ ID NO: 777890 - DNA, 75 bp, synthetic construct
  source 1..75: mol_type = other DNA
gtgcttggtatgctggcggcaaggaggcggcaggagcagcgacagaacgcggccccgtaccagtggcataagccg

SEQ ID NO: 777891 - DNA, 75 bp, synthetic construct
  source 1..75: mol_type = other DNA
tatcctttcttcatatatcttctggttggatttattgtcgatgatttgctgacagcagcttatggcagcgtattt

SEQ ID NO: 777892 - DNA, 75 bp, synthetic construct
  source 1..75: mol_type = other DNA
tatttttaccgagtccgccattattaccgatgaagtcattgataatatccgtcgcgtttctccactggcacccct

SEQ ID NO: 777893 - DNA, 75 bp, synthetic construct
  source 1..75: mol_type = other DNA
attattgaagcagccaggaagaaattacttgttgcatggattttatgtactcttttgttctttctatttgtgtac

SEQ ID NO: 777894 - DNA, 75 bp, synthetic construct
  source 1..75: mol_type = other DNA
gttgatatgcccgacgagcaagtcagagagattttggaagagattgaagctagtattctctcagagagtgtaaac

SEQ ID NO: 777895 - DNA, 75 bp, synthetic construct
  source 1..75: mol_type = other DNA
tcgtgggacaccgaacgggttggctgggatcagggggtctggcagggaccatatgacccaaacgacggttttatc

SEQ ID NO: 777896 - DNA, 75 bp, synthetic construct
  source 1..75: mol_type = other DNA
agcttatcagccgtcattatttgaaagcgaaagtaaacaatacgacagtgataaaagccagaaacatggcaaaat

SEQ ID NO: 777897 - DNA, 75 bp, synthetic construct
  source 1..75: mol_type = other DNA
tggcctaattttaaatggcagcgtgacaacagcagatatttcgtaccagcttatctttggactatggtttatagg

SEQ ID NO: 777898 - DNA, 75 bp, synthetic construct
  source 1..75: mol_type = other DNA
catacagcgtaaaaatgaagtggttaattttttacgcttgaattgtcaaaccaagtgcaacgattttttgaagta

SEQ ID NO: 777899 - DNA, 75 bp, synthetic construct
  source 1..75: mol_type = other DNA
accaaaacattggttcatgacgcacagcagcacacagattttgtccgtaccatacagcgtaaaaatgaagtggtt

SEQ ID NO: 777900 - DNA, 75 bp, synthetic construct
  source 1..75: mol_type = other DNA
atgagcaaatacaccgaactaatcacaaactaccacgccaccaaacctaaatttcttgcacatgttgatctgatg

SEQ ID NO: 777901 - DNA, 75 bp, synthetic construct
  source 1..75: mol_type = other DNA
aagcattgcggtgtttctgcgctggtttgcgaagagtgtgacgcgccaatacctgctgcccgtcgtgcggcttat

SEQ ID NO: 777902 - DNA, 75 bp, synthetic construct
  source 1..75: mol_type = other DNA
tttccgacatcgaaatgcgtggtttcacctttgatcaaaaacgccagacgcttcaccttcagctacgggctgcga

SEQ ID NO: 777903 - DNA, 75 bp, synthetic construct
  source 1..75: mol_type = other DNA
atgatcactattaccagagagcgactgctgacaatcaagcagtggcgcgaaacatacggaccgggtagcaacgtt

SEQ ID NO: 777904 - DNA, 75 bp, synthetic construct
  source 1..75: mol_type = other DNA
atgcaccacgcctgacggatgtactgcgtgctcagggttactattttaacgtaaaaaccgtggcggcaagcctgc

SEQ ID NO: 777905 - DNA, 75 bp, synthetic construct
  source 1..75: mol_type = other DNA
aaaaggcagcagctgataagaaagcagcggcagaaaaagccgccgcagacaaaaaagcggcagctgcaaaagcag

SEQ ID NO: 777906 - DNA, 75 bp, synthetic construct
  source 1..75: mol_type = other DNA
cgacaaaaaataggcttgactatttgacaaaaacagttgagtctattatcaatgataacgttgatgttcatgcat

SEQ ID NO: 777907 - DNA, 75 bp, synthetic construct
  source 1..75: mol_type = other DNA
atatgtatcttgtttcattgaaactttttgggctggggtgataagtgtagtagcgggtctgatgacgggcggtgt

SEQ ID NO: 777908 - DNA, 75 bp, synthetic construct
  source 1..75: mol_type = other DNA
tttgtttttgactacaaacttaaagcggaagatgagcgtgatgcactgttaaaacaggccagcatcatgaccagc

SEQ ID NO: 777909 - DNA, 75 bp, synthetic construct
  source 1..75: mol_type = other DNA
atacaagctggtgctaacggttttgtcagtaaatgcaatgatcagaatgatatttttcatgccgttcagatgatc

SEQ ID NO: 777910 - DNA, 75 bp, synthetic construct
  source 1..75: mol_type = other DNA
ataaatctaatatttatggcaagctaggtttgcattcaattgtagagcttatcgactacgccaaattatacgaat

SEQ ID NO: 777911 - DNA, 75 bp, synthetic construct
  source 1..75: mol_type = other DNA
tgggaaatatcgcaacaagacatcgccacaatcttaaaaaactttttccaggaattattgttttttctatgtctt

SEQ ID NO: 777912 - DNA, 75 bp, synthetic construct
  source 1..75: mol_type = other DNA
tagtcttccgcacctcccccgcagacacgcaactgagtctgaaggcgcttaatactaatgagaacggtattgctg

SEQ ID NO: 777913 - DNA, 75 bp, synthetic construct
  source 1..75: mol_type = other DNA
aggaagacaacacggttgaagtcacccttgaaaatggcgtgaaacaaacgttaatcgtcagttttgtcggcgact

SEQ ID NO: 777914 - DNA, 75 bp, synthetic construct
  source 1..75: mol_type = other DNA
aatggttgctggattgcggatggtaaatcgctggatatgaaagttgctcatccggtccatggtcgcccattcacg

SEQ ID NO: 777915 - DNA, 75 bp, synthetic construct
  source 1..75: mol_type = other DNA
taaaggctccagccgccgtggcgtgggggaaagaacactccaggaatggctgtctgtttacctttcaacccgccc

SEQ ID NO: 777916 - DNA, 75 bp, synthetic construct
  source 1..75: mol_type = other DNA
gtaaacgcagccgccttgaagacggttatcgctcgctggagaacaagaaattccaggactacacagacgaagaca

SEQ ID NO: 777917 - DNA, 75 bp, synthetic construct
  source 1..75: mol_type = other DNA
ctgaggttgaaaaagataaggaaactaaagtcggatttgttccggaaggcagtagacaggctgataaagaaatga

SEQ ID NO: 777918 - DNA, 75 bp, synthetic construct
  source 1..75: mol_type = other DNA
ataaaaagagaaagtactcttgatgacgaacaggttgatagatggcttgatgtcaggatcccaagacttttgaac

SEQ ID NO: 777919 - DNA, 75 bp, synthetic construct
  source 1..75: mol_type = other DNA
ggccaaacgcgcgggcatctctggtgctgacatgcgagatgctttcggtggaggcgttgcgcacctgcacgagct

SEQ ID NO: 777920 - DNA, 75 bp, synthetic construct
  source 1..75: mol_type = other DNA
agtgataaattccgccggttcgcttattaatatccatcttgatttccttcaaaagaaaccatggcgacaatgtca

SEQ ID NO: 777921 - DNA, 75 bp, synthetic construct
  source 1..75: mol_type = other DNA
ccatattattaagcccgggagcgttggccgtacatcccacaagatcattgtaccgatgagccagtacgatgctga

SEQ ID NO: 777922 - DNA, 75 bp, synthetic construct
  source 1..75: mol_type = other DNA
gttttctaccgcctttatgaaataaccaataacattgaatatctctcatattgcttgtggctgtatgaagattat

SEQ ID NO: 777923 - DNA, 75 bp, synthetic construct
  source 1..75: mol_type = other DNA
ataatgtaaataagttaccgacagatttaagagattttttaacttctaaaggtgttattgttcaagatgacattt

SEQ ID NO: 777924 - DNA, 75 bp, synthetic construct
  source 1..75: mol_type = other DNA
ggctgtcagccagatggatcaggtgacacagcagaacgcctcgctggtagaagaagcggcggtggcaacggaaca

SEQ ID NO: 777925 - DNA, 75 bp, synthetic construct
  source 1..75: mol_type = other DNA
aatggctgaaatgctggcctatgcatcgcttgtggatgcgggtgttggtgtgcgtctttctggtgaagactcagg

SEQ ID NO: 777926 - DNA, 75 bp, synthetic construct
  source 1..75: mol_type = other DNA
gtggataatgtatttgttaaagcaaaaggtcctaggaaaaaaccatattttaagattgtctcagatcatactctt

SEQ ID NO: 777927 - DNA, 75 bp, synthetic construct
  source 1..75: mol_type = other DNA
aaatgctgttcctgttaatctgtcatttgctgttggtaaatctgtggtacatcttttagataagataaataaaag

SEQ ID NO: 777928 - DNA, 75 bp, synthetic construct
  source 1..75: mol_type = other DNA
tacggtatcgacgtctgatgcagaggcattactggaagcatcaatgcgttttaattcggtagtcgctgttgggta

SEQ ID NO: 777929 - DNA, 75 bp, synthetic construct
  source 1..75: mol_type = other DNA
acatgggcgcgagaatcaatgcatcaaattgactgatgcagttaaaaccatcgcattagttaatcggataaaaaa

SEQ ID NO: 777930 - DNA, 75 bp, synthetic construct
  source 1..75: mol_type = other DNA
gtgtgattctatatgaaaatgataaaataagaaaattatcgtatatgttacgtggattacgggatggtattaagg

SEQ ID NO: 777931 - DNA, 75 bp, synthetic construct
  source 1..75: mol_type = other DNA
atgggggcgacctttttactgttgcgcgcgttgcatgggctattgttcaacgtcccgacgctggtggtgtggctg

SEQ ID NO: 777932 - DNA, 75 bp, synthetic construct
  source 1..75: mol_type = other DNA
tgagaacgacctcgcatcgctacgtctcgcagttagggggcgatctgttaaccggtggttttaccgatagtgaca

SEQ ID NO: 777933 - DNA, 75 bp, synthetic construct
  source 1..75: mol_type = other DNA
atctgcattatggcgacctgagtgatacctccaacctgacgcgcattttgcgtgaagtacagccggatgaagtgt

SEQ ID NO: 777934 - DNA, 75 bp, synthetic construct
  source 1..75: mol_type = other DNA
tttctttatggcgcttgaagcacaatctattttctggatagttttcttctccataatgctggcaaacattgcgca

SEQ ID NO: 777935 - DNA, 75 bp, synthetic construct
  source 1..75: mol_type = other DNA
attggtttgctggtaggtggattaagctgcttgacaattccctgttttgcctggcttgccgatcgttttggtcgc

SEQ ID NO: 777936 - DNA, 75 bp, synthetic construct
  source 1..75: mol_type = other DNA
tgagtatggattgacttttggacaacctgtttatgactcagctgctctggtagatactaatggtgaagcaggtat

SEQ ID NO: 777937 - DNA, 75 bp, synthetic construct
  source 1..75: mol_type = other DNA
attcggaagcgttccctttaatggcgttaagctggcgtcatcagatgatatggttccgtactatgacagagcgtt

SEQ ID NO: 777938 - DNA, 75 bp, synthetic construct
  source 1..75: mol_type = other DNA
atggctaaagtcgctctcattactggcataaccggacaagacggttcttacctggcagagtttctgctggaaaaa

SEQ ID NO: 777939 - DNA, 75 bp, synthetic construct
  source 1..75: mol_type = other DNA
tttccggcaaagcctcgtcagcacaagtaaataaagcactacggcaatcctctacaattgctgccgtccttgcgc

SEQ ID NO: 777940 - DNA, 75 bp, synthetic construct
  source 1..75: mol_type = other DNA
caggcgtgggaagtgttcgaaaaactggaagactgctatttcagccagtgcgagaaaaatactggcaaacaagag

SEQ ID NO: 777941 - DNA, 75 bp, synthetic construct
  source 1..75: mol_type = other DNA
agaaaatgatgtttatgatagtctaaatttttcaagcaaagatttaacgaattcttatatgaatggaatgggaaa

SEQ ID NO: 777942 - DNA, 75 bp, synthetic construct
  source 1..75: mol_type = other DNA
atgtacatcgttactgcctttgcacttaattattcaacccagaatatggggctaccgcgcgaacttttccttaat

SEQ ID NO: 777943 - DNA, 75 bp, synthetic construct
  source 1..75: mol_type = other DNA
gcttttttggctgcaggcattaatgcgtcaaaaaatcgtgactaccaagctgatatcactttagaagcccaccat

SEQ ID NO: 777944 - DNA, 75 bp, synthetic construct
  source 1..75: mol_type = other DNA
cctgttccgcgtaactacggtgctgcctctgatgtggcggttaatgggggttgggtccgccaatgtgatggtgca

SEQ ID NO: 777945 - DNA, 75 bp, synthetic construct
  source 1..75: mol_type = other DNA
actttagttacagcacgtcgttatttaatcgtgcaagtttaacagtggggtgggacaggtttcttgagtcctatt

SEQ ID NO: 777946 - DNA, 75 bp, synthetic construct
  source 1..75: mol_type = other DNA
ataagttgcgggctttagctaatgaactagccaaaagtctcaaaaatcctgaagatctcagtcagtttgattgga

SEQ ID NO: 777947 - DNA, 75 bp, synthetic construct
  source 1..75: mol_type = other DNA
caacggcgacccggaccagccgattattatggggcgtacctaccaccatgaaaaccgcacacccggcagcctgcc

SEQ ID NO: 777948 - DNA, 75 bp, synthetic construct
  source 1..75: mol_type = other DNA
aggcagtaacgccgcttttgacatcgtttatagcgatgcgcaaggcgtgaaaaagccgtgtcgggcttgcaggtg

SEQ ID NO: 777949 - DNA, 75 bp, synthetic construct
  source 1..75: mol_type = other DNA
gaaagcccgacactcacggaaatactttggtcgtggtaaaggcctggtggcctacactctgttgtgtaaccatat

SEQ ID NO: 777950 - DNA, 75 bp, synthetic construct
  source 1..75: mol_type = other DNA
gcaaaagtgaacggctggcggttttaaatagcgccgagcaggaggcactgtatggtcttcctgatttcgatgatg

SEQ ID NO: 777951 - DNA, 75 bp, synthetic construct
  source 1..75: mol_type = other DNA
tattacaacattcaactccgcggcgcgctcttatcagcaatcaatcacctgtttacggagaacaatctggataca

SEQ ID NO: 777952 - DNA, 75 bp, synthetic construct
  source 1..75: mol_type = other DNA
ggatggtaaggctgggcttaaacatccttttggagcaaagggggatggtattcatgatgatacaaatactttgaa

SEQ ID NO: 777953 - DNA, 75 bp, synthetic construct
  source 1..75: mol_type = other DNA
cttccaggtgaatacttggtttcagtatatcttaatgattcgaaaaaaagcatcggagaattcaaggtcgatttt

SEQ ID NO: 777954 - DNA, 75 bp, synthetic construct
  source 1..75: mol_type = other DNA
acattaactgatgtaccagccgctgaaggcgaagacttggaggttacggtaacagatagtagtggtacagttcag

SEQ ID NO: 777955 - DNA, 75 bp, synthetic construct
  source 1..75: mol_type = other DNA
gtgttcgtttctgggctggctatagctggcaggacaacagcgacggtagcggcgcagtgcgacccgaccgtgtca

SEQ ID NO: 777956 - DNA, 75 bp, synthetic construct
  source 1..75: mol_type = other DNA
gctggaatcgggcggtcgcccggtgacgcgccgcgctgagcaggctatctggcctgccgatgcattgccggggat

SEQ ID NO: 777957 - DNA, 75 bp, synthetic construct
  source 1..75: mol_type = other DNA
gcagctggaaaatgataaaaacgcggcattactgttggcgcgtaaagacggtcagacaacgctactcgatttaaa

SEQ ID NO: 777958 - DNA, 75 bp, synthetic construct
  source 1..75: mol_type = other DNA
tgcgcatcgctggaaagtgatgaaagcatgctgccgccagatttacagggttatgcgccacaaattaccggtatc

SEQ ID NO: 777959 - DNA, 75 bp, synthetic construct
  source 1..75: mol_type = other DNA
cgccttccagaccagcatattagctgtggtggtgacatgcgcaggtgagtccgagggagtggagttgtataccga

SEQ ID NO: 777960 - DNA, 75 bp, synthetic construct
  source 1..75: mol_type = other DNA
atcataccgggtgcagtattcaaaggactttcagaccaccgataccagcttcacgctggcggcgtaccgctattc

SEQ ID NO: 777961 - DNA, 75 bp, synthetic construct
  source 1..75: mol_type = other DNA
acccgtgtcgggcggcgtgtgctcatgacgctgctgtaccgtgggctgccagtcccctttggcgcagaggcgaag

SEQ ID NO: 777962 - DNA, 75 bp, synthetic construct
  source 1..75: mol_type = other DNA
cttcttctaaaaggtctggaatgcgaccactcggtgatactagatgcgggaaatatgggggcaactgatttgtat

SEQ ID NO: 777963 - DNA, 75 bp, synthetic construct
  source 1..75: mol_type = other DNA
atggcatttaaatcaaagcttcagaatggcgaagatttgaaaaatgttaccctgcatcctgatgatgaatacggt

SEQ ID NO: 777964 - DNA, 75 bp, synthetic construct
  source 1..75: mol_type = other DNA
aacttcccaacagaagtcagggttgaagatatctggctatattttaaacttctcaacacaggttataagtttatt

SEQ ID NO: 777965 - DNA, 75 bp, synthetic construct
  source 1..75: mol_type = other DNA
tgggagacagtatcgcatggacgcttctcgaaaaacggaggtcaattcactccgttcaccgaagatgacttgact

SEQ ID NO: 777966 - DNA, 75 bp, synthetic construct
  source 1..75: mol_type = other DNA
tcaaaaaatcacgcctgtaaaaaaaatgatgtatcactaagttatttttctcttagtttaaaaaagttattacat

SEQ ID NO: 777967 - DNA, 75 bp, synthetic construct
  source 1..75: mol_type = other DNA
ggttcagccctggcagccggtggttttttctgccaccacgatgctgttttcacttggagccagcatgattctggg

SEQ ID NO: 777968 - DNA, 75 bp, synthetic construct
  source 1..75: mol_type = other DNA
cagaaatggcaacggagtcgcacaagactatgcgctggcatttttctggtacaaacaagctgcattacaaggcca

SEQ ID NO: 777969 - DNA, 75 bp, synthetic construct
  source 1..75: mol_type = other DNA
gtaaatgccagtgcagaaatgctgtggccgttctggaatgagagagacgtgagaacggttgaagggcttgccacg

SEQ ID NO: 777970 - DNA, 75 bp, synthetic construct
  source 1..75: mol_type = other DNA
acttttatggacaactgtcttggggccgccgtcgggcttgccatcactggtctggggatatccatcattttcccg

SEQ ID NO: 777971 - DNA, 75 bp, synthetic construct
  source 1..75: mol_type = other DNA
tcttattctttctattcaggatgaattgacgtttgataaaatgagtaaaagagctaaggattttttagataattt

SEQ ID NO: 777972 - DNA, 75 bp, synthetic construct
  source 1..75: mol_type = other DNA
aaatagcggcctttctaaaagtggatgtagtcacgctcattttaccaatgcaaatcatgacgagttttggccgaa

SEQ ID NO: 777973 - DNA, 75 bp, synthetic construct
  source 1..75: mol_type = other DNA
taccggtgaaaactggtcacgtttttttcgtttaataccgcgtggcagtggggagaacgtgaagaacaggcggta

SEQ ID NO: 777974 - DNA, 75 bp, synthetic construct
  source 1..75: mol_type = other DNA
acggcagcggttacctggcaggcatgaaactcggcgacacaccgctggtggagtacacccgcgaccgcctgcacc

SEQ ID NO: 777975 - DNA, 75 bp, synthetic construct
  source 1..75: mol_type = other DNA
ggtcagaaagtcccggatgcatcactgacgcaaaaaggcgtggtgcagcttaacagtgctgttaacagtgaatca

SEQ ID NO: 777976 - DNA, 75 bp, synthetic construct
  source 1..75: mol_type = other DNA
ctggtgggataagcgcgaaggctttgtattcacaaaggatacgctggataaaatcgacgataatgatcatgcccg

SEQ ID NO: 777977 - DNA, 75 bp, synthetic construct
  source 1..75: mol_type = other DNA
atgctggtttaggtatgttgttgatggtaaccatgtatcctattctgattcgtacaggagttagtcctttatcat

SEQ ID NO: 777978 - DNA, 75 bp, synthetic construct
  source 1..75: mol_type = other DNA
gatgcagtggctgacagatgatggttcggcctatacggctcatgaaacacggcagttcgcgactgagctgaggag

SEQ ID NO: 777979 - DNA, 75 bp, synthetic construct
  source 1..75: mol_type = other DNA
aactcaaataatttggtgggcctgggtctttcggttgacgatattttcaagccctgcatcaacctgcgcgcgagc

SEQ ID NO: 777980 - DNA, 75 bp, synthetic construct
  source 1..75: mol_type = other DNA
aactcaaataatttagtgggcctgggtctttcggttgacgatattttcaaaccctgcatcaacctgcgggcgagc

SEQ ID NO: 777981 - DNA, 75 bp, synthetic construct
  source 1..75: mol_type = other DNA
ccaagtgcaaagatgaatgcttggaatgatattgcaaatagtagcgtaatgttaatattgcaagcaaatgaaaaa

SEQ ID NO: 777982 - DNA, 75 bp, synthetic construct
  source 1..75: mol_type = other DNA
aatctcgctttttatgctcgtcgccaggaaatgacaggaaacgcaattatgcagaattcgacggctgtaggcaat

SEQ ID NO: 777983 - DNA, 75 bp, synthetic construct
  source 1..75: mol_type = other DNA
tcagatccggttcttgtaccgccagcaggggacctctcagtgaggaaaatgcgtgacgccgccagttttctgaaa

SEQ ID NO: 777984 - DNA, 75 bp, synthetic construct
  source 1..75: mol_type = other DNA
ccccgagcaaatggtgtacggagagagtcctcattgcatcaacagggctcaagcctggcaccatcgagcgggcca

SEQ ID NO: 777985 - DNA, 75 bp, synthetic construct
  source 1..75: mol_type = other DNA
gctggtggaagtgaatatctggttcctggtcgttacaatttccggaagccattatctaatgccgcgctgaactct

SEQ ID NO: 777986 - DNA, 75 bp, synthetic construct
  source 1..75: mol_type = other DNA
taatattaataattcctcagttgcttatattgatattggctccaatgatacagaccatattactattggtatcgg

SEQ ID NO: 777987 - DNA, 75 bp, synthetic construct
  source 1..75: mol_type = other DNA
cgtgatacttcgacagcgaattggtctggttgggcgcaggtctataccactgctcataaacccacagcgaaagat

SEQ ID NO: 777988 - DNA, 75 bp, synthetic construct
  source 1..75: mol_type = other DNA
tcatcagggttgaaaccgccaccggtgagctggcgaaaacgcagcgccgcagcctggcggatgcgcttcagcagt

SEQ ID NO: 777989 - DNA, 75 bp, synthetic construct
  source 1..75: mol_type = other DNA
cgcatcccgtatgccacggacccggcaggtaaccgcctgcccgacccggagctgcacccggacagcaccctcagc

SEQ ID NO: 777990 - DNA, 75 bp, synthetic construct
  source 1..75: mol_type = other DNA
atgatgcaccaggggactcgtcgtttttctcaacctcagcgcctgtctgaacgcttttaccacattttctgtctg

SEQ ID NO: 777991 - DNA, 75 bp, synthetic construct
  source 1..75: mol_type = other DNA
tccaacgcttgacggcatgacaggtcacgctggcgagttcccgaattgtcgttgttataaagaaattgtttttcc

SEQ ID NO: 777992 - DNA, 75 bp, synthetic construct
  source 1..75: mol_type = other DNA
agggtgtacgacatccagaatcgggcgacagaagctgttgtgaccggcgggagagcagaacattttgctaaagaa

SEQ ID NO: 777993 - DNA, 75 bp, synthetic construct
  source 1..75: mol_type = other DNA
ggtcgcggtaagtaccgcgcgtgaaatcagcctggcacctgtcaataaactgatcgacgatatcgtaaaagctaa

SEQ ID NO: 777994 - DNA, 75 bp, synthetic construct
  source 1..75: mol_type = other DNA
gggctaagttgctgagtgagcaagttaccgccattaacagccagctcaatgccaactctgacaaagagaaaggcg

SEQ ID NO: 777995 - DNA, 75 bp, synthetic construct
  source 1..75: mol_type = other DNA
gaatccgctgcgacccgtgcggaagctgctgctgatcgtgctgaagagattgccggtgcagttgcgatggaagac

SEQ ID NO: 777996 - DNA, 75 bp, synthetic construct
  source 1..75: mol_type = other DNA
cgcatcagcttcatggggttacaacctgccatcggcatccggtagcgcttgaaagcatccatgtcccttcttcac

SEQ ID NO: 777997 - DNA, 75 bp, synthetic construct
  source 1..75: mol_type = other DNA
aagcatcctcggcacgattttgcaggaaaacggggtgaccgattggagcccgctgttcagcgagccacatccttc

SEQ ID NO: 777998 - DNA, 75 bp, synthetic construct
  source 1..75: mol_type = other DNA
aagcatcctcggcacgattttgcaggaaaacggggtgaccgaatggagcccgctgttcagcgagcctcatccttc

SEQ ID NO: 777999 - DNA, 75 bp, synthetic construct
  source 1..75: mol_type = other DNA
gcacatcactcatttcggcgtacacgatcatggctttaatcaaatcagcacttatggacagttactgcgcctgat

SEQ ID NO: 778000 - DNA, 75 bp, synthetic construct
  source 1..75: mol_type = other DNA
atgacatctgaaacagacaacgccatccgcgccgccttccgacgctgcaccgaggaaatccagcaggccatgcgc

SEQ ID NO: 778001 - DNA, 75 bp, synthetic construct
  source 1..75: mol_type = other DNA
aagcatcctcggcacgattttgcaggaaaacggggtgaccgagtggagtccgctgttcagcgagccgcatccttc

SEQ ID NO: 778002 - DNA, 75 bp, synthetic construct
  source 1..75: mol_type = other DNA
cctcacctgacgcaacgcgccgacagtagacacctgttcgtgacgtaccacggcaaaggactgaaccggggaaca

SEQ ID NO: 778003 - DNA, 75 bp, synthetic construct
  source 1..75: mol_type = other DNA
cctcacctgacgcaacgcgccgacagcgggcatctgttcgtgacgtaccacggcaaggggctgaaccggggaacg

SEQ ID NO: 778004 - DNA, 75 bp, synthetic construct
  source 1..75: mol_type = other DNA
gctaccgtaaggccgacggtaacacgctggcggtgggcgggcagcttagccgcttaagcgcagtgaagaacttct

SEQ ID NO: 778005 - DNA, 75 bp, synthetic construct
  source 1..75: mol_type = other DNA
ccggcaggttcccctgacaacggcgctgaagcgtattctgccgccgggctggcagccacatctgatgcccggagt

SEQ ID NO: 778006 - DNA, 75 bp, synthetic construct
  source 1..75: mol_type = other DNA
gcgactacattttccgggacatggatgatgcaggtaccgagatcgtctcgatcatgttcgagatgaagaacgaag

SEQ ID NO: 778007 - DNA, 75 bp, synthetic construct
  source 1..75: mol_type = other DNA
tgacctatcaggagcgtgaagcattgaaggggtttactgacaaacgcgcattacagggcgacacccaaagcctgc

SEQ ID NO: 778008 - DNA, 75 bp, synthetic construct
  source 1..75: mol_type = other DNA
cggaagatagttactgttatgagattaaaattccttgtgatattcaaaggtataagcaggctcttttaaaacatg

SEQ ID NO: 778009 - DNA, 75 bp, synthetic construct
  source 1..75: mol_type = other DNA
agcaaacgctattgcagcactcatagctgatgtgaaaatgataacggattgtcaaaaaattgttcttggagggag

SEQ ID NO: 778010 - DNA, 75 bp, synthetic construct
  source 1..75: mol_type = other DNA
tactgtcaagtgaaacaggccttgctggtcatatagggcatcttatttcagatataaatggtcctttatgcggat

SEQ ID NO: 778011 - DNA, 75 bp, synthetic construct
  source 1..75: mol_type = other DNA
acgcaagagatccggaaaatatggcctataaggacatctgttgtagagtcaacgatgatgatgaaattaatctat

SEQ ID NO: 778012 - DNA, 75 bp, synthetic construct
  source 1..75: mol_type = other DNA
attgggcaaagggtacttccagaggctgaatggatcgttggtgacgctctccagtactccaccagtgaacgatac

SEQ ID NO: 778013 - DNA, 75 bp, synthetic construct
  source 1..75: mol_type = other DNA
aagtagaggccgcgagagcgcttttaagagaacatcccagtgagaagaatgctcaaaaagcattgaaagcaattg

SEQ ID NO: 778014 - DNA, 75 bp, synthetic construct
  source 1..75: mol_type = other DNA
ttgagttcattacattccagattaaaaaatgttcttattgtagcgttccaagataaagaaggtgtatatgggaac

SEQ ID NO: 778015 - DNA, 75 bp, synthetic construct
  source 1..75: mol_type = other DNA
ccactctcaaacaagacaacaatcaacaaatcagaggcggtgatttcaaagcgaccgccgttttctctatcactt

SEQ ID NO: 778016 - DNA, 75 bp, synthetic construct
  source 1..75: mol_type = other DNA
tggtaccagacccttggtgggttagttgctagtatcgacattgatttttataacgacgccacatttgaccccaac

SEQ ID NO: 778017 - DNA, 75 bp, synthetic construct
  source 1..75: mol_type = other DNA
ggcgacggttattccacaaccaccttcaccaccggtaacagtcagattgttatcggccgcgccactacgctgcaa

SEQ ID NO: 778018 - DNA, 75 bp, synthetic construct
  source 1..75: mol_type = other DNA
attcccagactgcggcaaggcaaattctgaaggatgcattttatttccagaatagtgatgactactcaaaatact

SEQ ID NO: 778019 - DNA, 75 bp, synthetic construct
  source 1..75: mol_type = other DNA
agcaatgcttatagttatttcgaatccatcggagcatacggcgaagatgcagcagaacaattgcgcacagatttt

SEQ ID NO: 778020 - DNA, 75 bp, synthetic construct
  source 1..75: mol_type = other DNA
ttaaatccgcatccgccagcaccagaaaacatctttatgatttttatgtcgcctataaccagtggttaaaaaacg

SEQ ID NO: 778021 - DNA, 75 bp, synthetic construct
  source 1..75: mol_type = other DNA
cgggatgcggtatcgatacttcaatctataaggacgaatggcacggtacgagcgttgtgtgcgaggtggttactg

SEQ ID NO: 778022 - DNA, 75 bp, synthetic construct
  source 1..75: mol_type = other DNA
taaataatcagggtgcattttcaaacaaatattggattgcacggtgctcatggtattacgccaacaataattata

SEQ ID NO: 778023 - DNA, 75 bp, synthetic construct
  source 1..75: mol_type = other DNA
atgagcaagatagcttatggattggcgggatttttggcttttgtattttgtttgggagcggccaatggcgcttcg

SEQ ID NO: 778024 - DNA, 75 bp, synthetic construct
  source 1..75: mol_type = other DNA
cccttgcaggggtgtccacttacgcatggatgtttagtgttgtgagtattatcttagtgtttattggatggtttg

SEQ ID NO: 778025 - DNA, 75 bp, synthetic construct
  source 1..75: mol_type = other DNA
ggcctattattgtgtctggtaaaatcttgatttgccagctattagtaataaatctgaaggatttggaaggagtgt

SEQ ID NO: 778026 - DNA, 75 bp, synthetic construct
  source 1..75: mol_type = other DNA
actggtaacggtcgaccataacgatcagtcaggagagcctcgtctgcgtcttaactacaacggcgttatcggcat

SEQ ID NO: 778027 - DNA, 75 bp, synthetic construct
  source 1..75: mol_type = other DNA
tttgacctgccggacgagccaacaggctatggcgcgccttcatggctgactgagccgacgccacagattaacggg

SEQ ID NO: 778028 - DNA, 75 bp, synthetic construct
  source 1..75: mol_type = other DNA
gcaggattttactattcggcatggtgtttctgctgttatctggttgtgataataacctggaagaattaaaactgg

SEQ ID NO: 778029 - DNA, 75 bp, synthetic construct
  source 1..75: mol_type = other DNA
ctggaaagacgttcgcgccgtcacccactgggtgaaggagacgctggagacgtttgattttgagcgagacaagct

SEQ ID NO: 778030 - DNA, 75 bp, synthetic construct
  source 1..75: mol_type = other DNA
ctgaaatcgtgcgaattctggacaaattcgacacactgaccaactccatcaccgaaggtctcccgcgtgaaatcg

SEQ ID NO: 778031 - DNA, 75 bp, synthetic construct
  source 1..75: mol_type = other DNA
attcaaggcggaattcaggaagttggtgaggggggaagtgcaagtgctacgactataaatgatggttttcagatc

SEQ ID NO: 778032 - DNA, 75 bp, synthetic construct
  source 1..75: mol_type = other DNA
aactgaaacggtcattaacggaggtatccagacgatttacgatggaggctcagcttcggagatcacaatcaacag

SEQ ID NO: 778033 - DNA, 75 bp, synthetic construct
  source 1..75: mol_type = other DNA
ggcaggaggcaaaagactattgccagtgggtgggtaaaacgactggccggaaggtggatttacccactgaggctc

SEQ ID NO: 778034 - DNA, 75 bp, synthetic construct
  source 1..75: mol_type = other DNA
tcagcctcggcattatgtgcaatctgatggtttgcctggcgctgtggatgagttattgcgggcgttcgttatgcg

SEQ ID NO: 778035 - DNA, 75 bp, synthetic construct
  source 1..75: mol_type = other DNA
taatgtggacactgtcaaaccctacctgaccccagacgggcttactcccctcggcgaagagatgcgggataatgt

SEQ ID NO: 778036 - DNA, 75 bp, synthetic construct
  source 1..75: mol_type = other DNA
gctccccatgctgaatgataattttgacattaccggcgcggatatacaaaagtttctgtttgcaaaaatcgacga

SEQ ID NO: 778037 - DNA, 75 bp, synthetic construct
  source 1..75: mol_type = other DNA
ccctggttctgagtgcgctcagtattcagtcagcactggccgctgaatacagtgagaaaacgcagtacctgggtg

SEQ ID NO: 778038 - DNA, 75 bp, synthetic construct
  source 1..75: mol_type = other DNA
acgctattgggtgtcagagaggaaatagactcactgattaaactgtatcaggccagaatggcagaagaaatcgaa

SEQ ID NO: 778039 - DNA, 75 bp, synthetic construct
  source 1..75: mol_type = other DNA
tagtgaatggtcaggtggtggggaacagcgtggtgaaagtcacccgcacccctactgacccggtgttgtaccgga

SEQ ID NO: 778040 - DNA, 75 bp, synthetic construct
  source 1..75: mol_type = other DNA
agggtatccgtcgggcatatcgcgatacactggcgacaagtccgtactcctcataccgcaatcctgtacgcaggc

SEQ ID NO: 778041 - DNA, 75 bp, synthetic construct
  source 1..75: mol_type = other DNA
cttgcgatttgcctgttctcccggtgaggtgagcgtgctttatgccgtcgctccgaaagccggacgcagccagat

SEQ ID NO: 778042 - DNA, 75 bp, synthetic construct
  source 1..75: mol_type = other DNA
atgagttaggattacatatttataaagatattgaatctaatggcagcaattttagattaaaaggtaattaccgcc

SEQ ID NO: 778043 - DNA, 75 bp, synthetic construct
  source 1..75: mol_type = other DNA
ccaatgatgagatgcgggatttaatcaatccacgtaggggtgatgatcgcgctttgagcaaagccatgcttaatg

SEQ ID NO: 778044 - DNA, 75 bp, synthetic construct
  source 1..75: mol_type = other DNA
ttaaaagcgccattcaggaagagaagtacagatatgtcatccgggatgagagtggcgaggtttatgtagaaataa

SEQ ID NO: 778045 - DNA, 75 bp, synthetic construct
  source 1..75: mol_type = other DNA
ccctgttaaaaccgtccgttatatcgcgctgacgttgctgtttttcgtttggggcatattatcagcaaagcaaat

SEQ ID NO: 778046 - DNA, 75 bp, synthetic construct
  source 1..75: mol_type = other DNA
ccggaaaaccaccgatgaaattgccgccatgctggcggatgaaacctggatgtccggtgccgaatgtctggcaca

SEQ ID NO: 778047 - DNA, 75 bp, synthetic construct
  source 1..75: mol_type = other DNA
acatttgaattgcttcttattgtatcagtaccattttctttatttctaggtgggttttctaaagatattgttact

SEQ ID NO: 778048 - DNA, 75 bp, synthetic construct
  source 1..75: mol_type = other DNA
tgcatccggcacggtatcgctggctgctgaaagttgaagtcccggataaagatgccgggcggtttacctgtattg

SEQ ID NO: 778049 - DNA, 75 bp, synthetic construct
  source 1..75: mol_type = other DNA
aatcagaggttgaacgcctgctgaattgtgcaaagaatacttctaattctgaaagagattattgcttcttatata

SEQ ID NO: 778050 - DNA, 75 bp, synthetic construct
  source 1..75: mol_type = other DNA
ccttggaaaccaatcgctggataagtgtccacatttgctaaaaaagtcttttgcctatcctgatttattaatcag

SEQ ID NO: 778051 - DNA, 75 bp, synthetic construct
  source 1..75: mol_type = other DNA
ggcggcacgattgacagcacgctgctgcgttttgcggtgaatactacaccgatgcagaaagcgacctgtatgaag

SEQ ID NO: 778052 - DNA, 75 bp, synthetic construct
  source 1..75: mol_type = other DNA
aattttttagttagcgatagcttaactgcatttattccactttataaacagtttaaagaggaggatattaacaaa

SEQ ID NO: 778053 - DNA, 75 bp, synthetic construct
  source 1..75: mol_type = other DNA
ccggtcatgaaaagcgtctgcggcgggccgggataagttcttttgccggtcgtaaaagcccggaatatgcgttcg

SEQ ID NO: 778054 - DNA, 75 bp, synthetic construct
  source 1..75: mol_type = other DNA
aggggcttgaaaaggttacagttttttccggcatcaatattttttctaagattttgattgtgcctcttgtcttta

SEQ ID NO: 778055 - DNA, 75 bp, synthetic construct
  source 1..75: mol_type = other DNA
atgtccggtgccgaatgtctggcacacggatttgctgaccaggtgacacccgctgttgaggcaatggcatgtatt

SEQ ID NO: 778056 - DNA, 75 bp, synthetic construct
  source 1..75: mol_type = other DNA
tgaatggcagcggcgtcagcgtctcgtcacttccacaggacagggcattctaccggcctgatcttgaccgtatcg

SEQ ID NO: 778057 - DNA, 75 bp, synthetic construct
  source 1..75: mol_type = other DNA
gaaatcgaatcctctgtttaatgtggggcagtgtgacggtttacctgaacatctgatggtgaaggcggaaggcag

SEQ ID NO: 778058 - DNA, 75 bp, synthetic construct
  source 1..75: mol_type = other DNA
attgccggtgacgtacagcacgaaagttatattgacggatggcttaacgtcctgaagtctgacaaaaaagcgctg

SEQ ID NO: 778059 - DNA, 75 bp, synthetic construct
  source 1..75: mol_type = other DNA
ataacggaacaggggtttctgtactttcagcaactgatagcagcaatccaacatggataaagtctactgggaatt

SEQ ID NO: 778060 - DNA, 75 bp, synthetic construct
  source 1..75: mol_type = other DNA
cccgcagatccagcagcgaagagaggctgcgcgtgagcgtattcagtccgcctctcctgagcagcgccaggcagt

SEQ ID NO: 778061 - DNA, 75 bp, synthetic construct
  source 1..75: mol_type = other DNA
tttttaccgctgtttaccggttttttaggtctgtggtttctggcgcagcatgtgaaacggctaacgctaaaaagt

SEQ ID NO: 778062 - DNA, 75 bp, synthetic construct
  source 1..75: mol_type = other DNA
gcgcaaagtgtcacgccagccaggaatgccatcgtggtcagtgttaaagatctggcagatagaacaccccgaact

SEQ ID NO: 778063 - DNA, 75 bp, synthetic construct
  source 1..75: mol_type = other DNA
cgttaaccctaacagcgaagatttcaaggaacgccttgagcttgctaaagcaaaagcggcaacgctactcggcgc

SEQ ID NO: 778064 - DNA, 75 bp, synthetic construct
  source 1..75: mol_type = other DNA
gtcatcaacgggtatctggcctggaaagtggcaaacccgcctctggctgtcgtggccagcgataacggacgcatt

SEQ ID NO: 778065 - DNA, 75 bp, synthetic construct
  source 1..75: mol_type = other DNA
cctttcactacttcgttgaatacactggatccattaatacttaatcaggaattagtgcaaatcatttcaaataaa

SEQ ID NO: 778066 - DNA, 75 bp, synthetic construct
  source 1..75: mol_type = other DNA
actctaaatatcaatattcctgggcgtagcgctcttcttttagggaaaacaggagaaccgccgaactatctctat

SEQ ID NO: 778067 - DNA, 75 bp, synthetic construct
  source 1..75: mol_type = other DNA
aatgtcgcgtatgtcggctgattccaagtccatgcgcagttggttgactgcgctggatgaggtgacaatcgagcg

SEQ ID NO: 778068 - DNA, 75 bp, synthetic construct
  source 1..75: mol_type = other DNA
atcatgcctttatcgttgctggcggagaaattactaaacaggcgaggaactggctgggcgggaaacttgatgcca

SEQ ID NO: 778069 - DNA, 75 bp, synthetic construct
  source 1..75: mol_type = other DNA
ataaccctcatcggcccttaacgcctcacgaagtagaatgcagaaggttactgaccgcgtttcttgatacctgct

SEQ ID NO: 778070 - DNA, 75 bp, synthetic construct
  source 1..75: mol_type = other DNA
aggctctcgcggaatgtatcataggagataataaggcatttctgtatcgttcaagcagtcacatcactgaatttt

SEQ ID NO: 778071 - DNA, 75 bp, synthetic construct
  source 1..75: mol_type = other DNA
aaccattgatataagaagtgaggataatagcgtcttcatttctgctttccgcctgcccgcaggacgtagcgccga

SEQ ID NO: 778072 - DNA, 75 bp, synthetic construct
  source 1..75: mol_type = other DNA
acgtcgcagaagtcgaacgtctggcacgcatattccccattgccggggtgacaactaacccgagcattatcgctg

SEQ ID NO: 778073 - DNA, 75 bp, synthetic construct
  source 1..75: mol_type = other DNA
accaggcagaaagcgttaagcgcgccagcatgccgccaatagtaaagcacagccagaccaaaacccaccagccac

SEQ ID NO: 778074 - DNA, 75 bp, synthetic construct
  source 1..75: mol_type = other DNA
cacttgaaagagatatcgaaaaatacgatgtcgcaggaatagaaaacatgagagatatttataaaaaatatcagt

SEQ ID NO: 778075 - DNA, 75 bp, synthetic construct
  source 1..75: mol_type = other DNA
atatggtcaggcatgaacgcgatgcagcttccttcatcgtgttcacgaacattctgccattttctgttctgccat

SEQ ID NO: 778076 - DNA, 75 bp, synthetic construct
  source 1..75: mol_type = other DNA
agccatcactgcttctggtaatctgggaggctggcctaatgctgttgtggagatcgacaaagagggggcgacggt

SEQ ID NO: 778077 - DNA, 75 bp, synthetic construct
  source 1..75: mol_type = other DNA
gaaataccaccttcggacaacggaaggtacggtttgataacgtgcgatgtagcaatcacagcctctggtaatctg

SEQ ID NO: 778078 - DNA, 75 bp, synthetic construct
  source 1..75: mol_type = other DNA
gatttcctgtcggtgattaacccggaatcgctggtgatcaaacagggctttgctgaaccgtcgctgaaagatgcg

SEQ ID NO: 778079 - DNA, 75 bp, synthetic construct
  source 1..75: mol_type = other DNA
ccgccagccggacttttcagacaagtaaagggcaaaatggacgcccaacaaaatacaatgaccgcatagcaaaac

SEQ ID NO: 778080 - DNA, 75 bp, synthetic construct
  source 1..75: mol_type = other DNA
atggttggcgagtatatcggttcagtatttctggggccgttattacttcccgtgcttgtgtcaggtattctgtgc

SEQ ID NO: 778081 - DNA, 75 bp, synthetic construct
  source 1..75: mol_type = other DNA
aaactatacaatatggcccaactggaggatggtgtgccggtttcagagctgctgactacaaaaaaatctcattct

SEQ ID NO: 778082 - DNA, 75 bp, synthetic construct
  source 1..75: mol_type = other DNA
ttattaaatctattgctaataaggctgaatccgagataattatttttaataataactctacagattctacagtct

SEQ ID NO: 778083 - DNA, 75 bp, synthetic construct
  source 1..75: mol_type = other DNA
caagccattaaaattgccttgcgcatgctggagcagggctttgaacgtgagattgtgctggcgacaacccaactc

SEQ ID NO: 778084 - DNA, 75 bp, synthetic construct
  source 1..75: mol_type = other DNA
gatgcgctgctccacacctcagcacagcgaattggcctttctgccactgtgcgctggcagcatttcttggtggcg

SEQ ID NO: 778085 - DNA, 75 bp, synthetic construct
  source 1..75: mol_type = other DNA
ctggcgattcagttgctgaatgaaggcggtattctcctgactttctcctgttccggtctgatgaccagcgattta

SEQ ID NO: 778086 - DNA, 75 bp, synthetic construct
  source 1..75: mol_type = other DNA
cagagtatggcccacagttgggccgaccctttgcagacacggttaatgattcgcagtttccaaacatgaaagaat

SEQ ID NO: 778087 - DNA, 75 bp, synthetic construct
  source 1..75: mol_type = other DNA
tatattgctgttttacttgtttagattgggaattggtaatttaccggtttataaaaataaaaaattttacgcgtt

SEQ ID NO: 778088 - DNA, 75 bp, synthetic construct
  source 1..75: mol_type = other DNA
ttctgaacctgttgtggatgatgtcctccctgcctctaagtatgctcacaaaagcgctgttttcgttactgtctc

SEQ ID NO: 778089 - DNA, 75 bp, synthetic construct
  source 1..75: mol_type = other DNA
tacaaaaaaatgataatggagagccgtataaattgtcacaaagaatggctctattggcttatactataggtgctg

SEQ ID NO: 778090 - DNA, 75 bp, synthetic construct
  source 1..75: mol_type = other DNA
gcgataacgccatgacaccattctctgcttttgcgaccacccgctggctgtatggaccggaaagactggtgcgct

SEQ ID NO: 778091 - DNA, 75 bp, synthetic construct
  source 1..75: mol_type = other DNA
gtatttcaggcgggttatttcaacctggccttgccatgattattgtgggggtggtatcagggggctttatcggga

SEQ ID NO: 778092 - DNA, 75 bp, synthetic construct
  source 1..75: mol_type = other DNA
tttaacaaagcaatgagtctcgccgtggtggctattgctttaattttccgaacaaaatctatatcttttgatcag

SEQ ID NO: 778093 - DNA, 75 bp, synthetic construct
  source 1..75: mol_type = other DNA
ggagtacgatgctgccggacgtgtcatcagtctgactaacgagaacggcagccacagcgacttcagctacgatgc

SEQ ID NO: 778094 - DNA, 75 bp, synthetic construct
  source 1..75: mol_type = other DNA
aatgttgtgcatatccgatttgacagcaactcccccgtgatggcagatgtgcaggaagaaggcaagccgcagctg

SEQ ID NO: 778095 - DNA, 75 bp, synthetic construct
  source 1..75: mol_type = other DNA
gactgccatgcaactatcggcatcgactgtaaaggaaaatcggtgtccaggtcgtcgattgctaaaatcgagttt

SEQ ID NO: 778096 - DNA, 75 bp, synthetic construct
  source 1..75: mol_type = other DNA
gcagggtaaggcgggaaaaattaatgtaccgcctgctaagcagctataagcgacgatgggacttatttgatctcc

SEQ ID NO: 778097 - DNA, 75 bp, synthetic construct
  source 1..75: mol_type = other DNA
tgaagcgtgataatgatctgtgtcagaactgcctgcgcaatgggagagccgttgaagccagaactgtggaccaca

SEQ ID NO: 778098 - DNA, 75 bp, synthetic construct
  source 1..75: mol_type = other DNA
ccctcccatttctggctggcggctgaccagtttgaacgtgcgaacggttcgacctatcgggaacttgaaattgca

SEQ ID NO: 778099 - DNA, 75 bp, synthetic construct
  source 1..75: mol_type = other DNA
tgaatgatggcattgaacgtacaccggaacagtatttccggcgctataacgccaggtatcccgagcggggaggtg

SEQ ID NO: 778100 - DNA, 75 bp, synthetic construct
  source 1..75: mol_type = other DNA
ttttcgctttcgaaggatgttcagagtccgaagttactgaactattaggaaaaaaaccaacaggttataatgatt

SEQ ID NO: 778101 - DNA, 75 bp, synthetic construct
  source 1..75: mol_type = other DNA
ataataaggagaacaatagaagttagcgactattacattttagtattagggttaagatatggttcaaaaacatct

SEQ ID NO: 778102 - DNA, 75 bp, synthetic construct
  source 1..75: mol_type = other DNA
ctgcaagtttttggggctgaatatgctatgcgcatctggcttgaccccgccaaactggcctcatactcgctgatg

SEQ ID NO: 778103 - DNA, 75 bp, synthetic construct
  source 1..75: mol_type = other DNA
gtcagcaccccgttggaccgcgtgtcgatgctggacatgaagggcaacccggactccggcggcatctgggcgccg

SEQ ID NO: 778104 - DNA, 75 bp, synthetic construct
  source 1..75: mol_type = other DNA
cgacgtcactccaccaaaagagcccaaaatcttcaataacagtgtcacattcgacgaagacaaaggcacgctgca

SEQ ID NO: 778105 - DNA, 75 bp, synthetic construct
  source 1..75: mol_type = other DNA
ggcgcagcgcgtggtgattatggggaccacatggcactggtcagtggtggttcgtaccgatgctacccggttgtt

SEQ ID NO: 778106 - DNA, 75 bp, synthetic construct
  source 1..75: mol_type = other DNA
tgtgcgtcaggtagctggagaacggcacgcctatagctttgccattcacaatccaaaagcgagcattgacggagg

SEQ ID NO: 778107 - DNA, 75 bp, synthetic construct
  source 1..75: mol_type = other DNA
tacgaggagggacagggtagaaccatcaaagttatccagctcgaccacaacgtgccgtcgtggccgctgcacgag

SEQ ID NO: 778108 - DNA, 75 bp, synthetic construct
  source 1..75: mol_type = other DNA
accgtggtcgtgtgaaaaaagtctacattcagggcgacagtgaatttcgttccgcgccgtcagacttaggtaaat

SEQ ID NO: 778109 - DNA, 75 bp, synthetic construct
  source 1..75: mol_type = other DNA
tcctgtgttgatccttccgcgacagatgatgtcgccgactggcttgacgcgaacgggtggactctgtcagtcagc

SEQ ID NO: 778110 - DNA, 75 bp, synthetic construct
  source 1..75: mol_type = other DNA
gggagcttgaatctctggaaggtcattactgggatgaagaaagtagcaggggatacattgccccatataatgcac

SEQ ID NO: 778111 - DNA, 75 bp, synthetic construct
  source 1..75: mol_type = other DNA
gctaagattacgtactatagacagtgatatagaagggaagttgggagtgtttctgtctggtctgtcagtaacgct

SEQ ID NO: 778112 - DNA, 75 bp, synthetic construct
  source 1..75: mol_type = other DNA
aatcctggataatccgcctgtgccagcaatgacttatcaacaaattgttaacgcaatactggcagaagcaggaat

SEQ ID NO: 778113 - DNA, 75 bp, synthetic construct
  source 1..75: mol_type = other DNA
ggatgtagaaattaaccagaagcatattactcgcattttgaaagaaagaacaaaacgtgaagcagtgaaactaaa

SEQ ID NO: 778114 - DNA, 75 bp, synthetic construct
  source 1..75: mol_type = other DNA
ggtgaccaggtatgtgatcttagccgaccgccatatcagtgcatgatggatatgaagtcgttcaaaaacctgatg

SEQ ID NO: 778115 - DNA, 75 bp, synthetic construct
  source 1..75: mol_type = other DNA
ttcggtaccgtgctggtatccgccaacgccgccagcgttatgccgcaggcagaaatggcgatattctggagcgag

SEQ ID NO: 778116 - DNA, 75 bp, synthetic construct
  source 1..75: mol_type = other DNA
gtgcgggagaaatattcgctgcgggactgtggcttcatattgatggtctgggcggtttgttcctcgccattcttg

SEQ ID NO: 778117 - DNA, 75 bp, synthetic construct
  source 1..75: mol_type = other DNA
cccgcgaacacgatctgtcgctgacggttatctggaacctgctgcgccagtggactcaggagaagctgctgcatg

SEQ ID NO: 778118 - DNA, 75 bp, synthetic construct
  source 1..75: mol_type = other DNA
cttaccgatgtcatcctaaaatcattcaattttgtaataagcagttttatgataatgctctgataccgttaacgg

SEQ ID NO: 778119 - DNA, 75 bp, synthetic construct
  source 1..75: mol_type = other DNA
ccgggccagttgtgactttgttgtttactataaggtcgggaaggctccattaggggttattgaagtggatggagg

SEQ ID NO: 778120 - DNA, 75 bp, synthetic construct
  source 1..75: mol_type = other DNA
gctgcttcacaaggttatgaaataacagaagacagatataatgctgcaataaaagccgaggatgaatgtctggct

SEQ ID NO: 778121 - DNA, 75 bp, synthetic construct
  source 1..75: mol_type = other DNA
aaagactggtgcgctacaacggttctgcagcctatgaaattcagggggaaaatgcgactggctttagttccggcg

SEQ ID NO: 778122 - DNA, 75 bp, synthetic construct
  source 1..75: mol_type = other DNA
ataaataccgtcctgtcgtgctacgggcctggcagggactgacagaatgtgtcgacgaacaggggaagttaggat

SEQ ID NO: 778123 - DNA, 75 bp, synthetic construct
  source 1..75: mol_type = other DNA
ttcgaagaaagaaataatgattttaacagctctcatgcttgccttaaactcttagaatccataaagcatgaaaaa

SEQ ID NO: 778124 - DNA, 75 bp, synthetic construct
  source 1..75: mol_type = other DNA
aattgataacattagaacgaaccatgatccagatatcttttataaaaaaatattaaatatcatcgatgaaaaacg

SEQ ID NO: 778125 - DNA, 75 bp, synthetic construct
  source 1..75: mol_type = other DNA
taagactacttggtgagttgttttcgtctgaacaatatggtttggtcgtcaaactgtactccggaaataatgtat

SEQ ID NO: 778126 - DNA, 75 bp, synthetic construct
  source 1..75: mol_type = other DNA
caccaggaaacaaacagcgttcgcgccgcgtatattcacaaggctgaatatctggaggaacggatcgagatgatg

SEQ ID NO: 778127 - DNA, 75 bp, synthetic construct
  source 1..75: mol_type = other DNA
accgtgataccagcagcgatgcggcgaaaggctttggcattcagttaatggattccagcacttctggtaacccag

SEQ ID NO: 778128 - DNA, 75 bp, synthetic construct
  source 1..75: mol_type = other DNA
atgaacactcgtctataagacggttacctataaatagaaatactgacaatctgacaatatttaatatacatgatt

SEQ ID NO: 778129 - DNA, 75 bp, synthetic construct
  source 1..75: mol_type = other DNA
ccggaatcatttgacctggatggagtaataccgtttgtgcggatcctgtccgaaaaagtgcgtgcggacgcggac

SEQ ID NO: 778130 - DNA, 75 bp, synthetic construct
  source 1..75: mol_type = other DNA
aacctgctgaatgaggaaaacccgcatcacctgcaccagccgtaccgtctgccagggcagcaacacgatgaggag

SEQ ID NO: 778131 - DNA, 75 bp, synthetic construct
  source 1..75: mol_type = other DNA
tacaaattagttctatttgtagcgattggaatgacaagtgcaccttgggtttttatttatttacgcgactatatt

SEQ ID NO: 778132 - DNA, 75 bp, synthetic construct
  source 1..75: mol_type = other DNA
catcatctttcctcgttgatatcagtttctctgataaggcaggaacgtcagggtagaacgctcttttgccatgct

SEQ ID NO: 778133 - DNA, 75 bp, synthetic construct
  source 1..75: mol_type = other DNA
tatatacggtataaattcaagcgcgcaggattgtctcaagcatctttttctatgttgccaagaaatataacagaa

SEQ ID NO: 778134 - DNA, 75 bp, synthetic construct
  source 1..75: mol_type = other DNA
ttttcccgaaaatggaagccttcactgcagagtggaccttccagttggcgctgaatgttgcaacgccgtttgtgc

SEQ ID NO: 778135 - DNA, 75 bp, synthetic construct
  source 1..75: mol_type = other DNA
aaatatattccagccagtttatgtcgtaccaacgcttctggtacgcccgttaatggctattttctgaccctggtg

SEQ ID NO: 778136 - DNA, 75 bp, synthetic construct
  source 1..75: mol_type = other DNA
atgggtatttgttgcatttattgcagtcgttcgcctggcgcagaaatataaaccagagtatgtctttattcgtaa

SEQ ID NO: 778137 - DNA, 75 bp, synthetic construct
  source 1..75: mol_type = other DNA
ttatcactatcgacgccagtgtgatgaaggggcgcatgacgtggtcaacaaaaactggccaccgaattagagttt

SEQ ID NO: 778138 - DNA, 75 bp, synthetic construct
  source 1..75: mol_type = other DNA
cggccagcctgccgctcattgtttctaacctggtgaatatcgtctcggcggacttcttcggtctgagctttgcgc

SEQ ID NO: 778139 - DNA, 75 bp, synthetic construct
  source 1..75: mol_type = other DNA
cgactctcggcattggtgatatgaacaatctctataaatggctgttgaatcttaactcggtagtgatgccgctgc

SEQ ID NO: 778140 - DNA, 75 bp, synthetic construct
  source 1..75: mol_type = other DNA
aactggcaggtgtggtacgagtgcgtgctgccggaagatcgccagcatgccgaaaaagtgattcgtgattcgttg

SEQ ID NO: 778141 - DNA, 75 bp, synthetic construct
  source 1..75: mol_type = other DNA
agcttctttgcaatctaataaccctccccaagtattattcaatctactacataaatgtgaattattacattctga

SEQ ID NO: 778142 - DNA, 75 bp, synthetic construct
  source 1..75: mol_type = other DNA
atccccttggaaatcaatgtctattgatgacaacaaaggttgttattatgcagcagcgattaaagctactaaccc

SEQ ID NO: 778143 - DNA, 75 bp, synthetic construct
  source 1..75: mol_type = other DNA
tgaaaacttaattaaagccataaagaaaaccgacataaataaattacaactcgatgggatgtttaaatcaattca

SEQ ID NO: 778144 - DNA, 75 bp, synthetic construct
  source 1..75: mol_type = other DNA
accgttcacggaacaggatgtggcgcagcgggcctacaataacggtatggcggcctcaggttttggaacgggagg

SEQ ID NO: 778145 - DNA, 75 bp, synthetic construct
  source 1..75: mol_type = other DNA
tttttgaaaaatggcgttttgaggagtgctctgaactaatgcaagctgttcagtgcggagatataatattcttta

SEQ ID NO: 778146 - DNA, 75 bp, synthetic construct
  source 1..75: mol_type = other DNA
tcggataacctacgaatacctgaaaagtatgactgggacgacttccgccaaaaaaaaatttacctgacgcctgcc

SEQ ID NO: 778147 - DNA, 75 bp, synthetic construct
  source 1..75: mol_type = other DNA
aaccgatacaaaactgcagaattccaccgcaaattcattacacgccattcttcaaagcatggataccgccgtttg

SEQ ID NO: 778148 - DNA, 75 bp, synthetic construct
  source 1..75: mol_type = other DNA
agtacagatggtaatcatagccactcactgtccggcacagcagcatctgcaggtgcacacgcgcatactgtcggt

SEQ ID NO: 778149 - DNA, 75 bp, synthetic construct
  source 1..75: mol_type = other DNA
gatgtatttgcggactatgacccattaaacctgactcatcgcctcgtcaggatggatgagcaaaatggtatcatt

SEQ ID NO: 778150 - DNA, 75 bp, synthetic construct
  source 1..75: mol_type = other DNA
tcgaatatggcgatttcctgaggctgataaacagtaaaaatgaggcttacagaaaaatggaccttgttgatcttg

SEQ ID NO: 778151 - DNA, 75 bp, synthetic construct
  source 1..75: mol_type = other DNA
ttgcgacttaagttttagtttcatcaaacaccgtcgccatgtagagcagcatactttgtctgaaagtatcgagtt

SEQ ID NO: 778152 - DNA, 75 bp, synthetic construct
  source 1..75: mol_type = other DNA
ccgatccagattattggaatgcttgaacgtgatgcgccgtatgggaagcacttcttcccgactgccggtgcagtg

SEQ ID NO: 778153 - DNA, 75 bp, synthetic construct
  source 1..75: mol_type = other DNA
tagatgcggatgttatggtttcagaatctaaccttacagtgaaaatggatgggataaatagctctcttctcgaga

SEQ ID NO: 778154 - DNA, 75 bp, synthetic construct
  source 1..75: mol_type = other DNA
tcagcaaaaggcctgactgctcatgatttttataactcagatatatctataccaattgaaatgtgcggaattttc

SEQ ID NO: 778155 - DNA, 75 bp, synthetic construct
  source 1..75: mol_type = other DNA
aatggactgctatgcgcagcctctgtagaggctaagcctcgactacaaaatgaaccgccccgggtttcctggaga

SEQ ID NO: 778156 - DNA, 75 bp, synthetic construct
  source 1..75: mol_type = other DNA
tattcgctggaaaaacaacgcgtttctggcgtccttcagggttcacaaccttcagaaattggtgttgtcagatta

SEQ ID NO: 778157 - DNA, 75 bp, synthetic construct
  source 1..75: mol_type = other DNA
tcatacgcactccgttgcgattggctcacatggacacaccatcaccgttaacgctgctggtaacgcggaaaacac

SEQ ID NO: 778158 - DNA, 75 bp, synthetic construct
  source 1..75: mol_type = other DNA
cgtggctggacgattaagggcaaacctgccagtggtcgggccgtattgtctcaggaacaggacggcattaaatcg

SEQ ID NO: 778159 - DNA, 75 bp, synthetic construct
  source 1..75: mol_type = other DNA
cgcgaatccgtctttttcctgaatgttctcgacattccgcccagacctgaaaatctgcaaaatcagaataccgtt

SEQ ID NO: 778160 - DNA, 75 bp, synthetic construct
  source 1..75: mol_type = other DNA
acagatgttgacacaattggcatcgaaaatggtgttatggagttccatcgaggggaggagatgacttcctgtaaa

SEQ ID NO: 778161 - DNA, 75 bp, synthetic construct
  source 1..75: mol_type = other DNA
ggtgctggtgcagatgctcgaccggctggaaagtgaaatcctggctgaccgggtgagtgaggaaagccgccgctg

SEQ ID NO: 778162 - DNA, 75 bp, synthetic construct
  source 1..75: mol_type = other DNA
gcttcaactacaccccagccgctctgctgaccacctttggacgccgtattacgaactatcaggcatatatgcttg

SEQ ID NO: 778163 - DNA, 75 bp, synthetic construct
  source 1..75: mol_type = other DNA
ccaggtgccgcagggcagccaggtggtgattatcgatgaaaacagctcgggtctgagccagcttgccgacgcgct

SEQ ID NO: 778164 - DNA, 75 bp, synthetic construct
  source 1..75: mol_type = other DNA
gctttccgtctcgccgtaatcttggtgggcgttctgtaggttggctgctgtccgaggttatggaatgggttaaaa

SEQ ID NO: 778165 - DNA, 75 bp, synthetic construct
  source 1..75: mol_type = other DNA
cacttattgttcgccagcagcggctgaaattaaacctgtccggaaggctggcgataaagattattgcagagccac

SEQ ID NO: 778166 - DNA, 75 bp, synthetic construct
  source 1..75: mol_type = other DNA
gccgcagcctggcggatacccttcagcagtccggcggcgaagacggtggcagtgtggtgttcccgccggtgctgg

SEQ ID NO: 778167 - DNA, 75 bp, synthetic construct
  source 1..75: mol_type = other DNA
tgctccgcagcggttacgacattcgaaccgtgcaggatctgctcggccattccgacgtctctacgacgatgattt

SEQ ID NO: 778168 - DNA, 75 bp, synthetic construct
  source 1..75: mol_type = other DNA
ccgcgttgaaacatccatgccacgagcactggaacgggaagagattccgggcatcgtcaatgatttccgccaggc

SEQ ID NO: 778169 - DNA, 75 bp, synthetic construct
  source 1..75: mol_type = other DNA
gtccgtgtaacgcagatcattaacggtggccagaatggactggctgacagaaatagtcgttataacaaagcgcgg

SEQ ID NO: 778170 - DNA, 75 bp, synthetic construct
  source 1..75: mol_type = other DNA
cggaaaccgcaagtgacctggtacggctgggacggcgaccggctgaccacaatacagaacgacagaacccgcatc

SEQ ID NO: 778171 - DNA, 75 bp, synthetic construct
  source 1..75: mol_type = other DNA
gcagtccggcggcgaagacggtggcagtgtggtgttcccgccggtgctggtgcagatgctcgaccggctggaaag

SEQ ID NO: 778172 - DNA, 75 bp, synthetic construct
  source 1..75: mol_type = other DNA
ggcgcagtccgataccgtccacgtcacgctgaacattaccccgcagaaccaggcgccgacccttagcggcagcgg

SEQ ID NO: 778173 - DNA, 75 bp, synthetic construct
  source 1..75: mol_type = other DNA
agacttaatctgaaaaatgatctttcatattttcctgtaccgttttttgacccgcgagataaccgcactaataca

SEQ ID NO: 778174 - DNA, 75 bp, synthetic construct
  source 1..75: mol_type = other DNA
aattgagtttggtatgcgtagcgatgaaatagtatcagaagcaaaactaaaacttgaatacactccatcaccgtc

SEQ ID NO: 778175 - DNA, 75 bp, synthetic construct
  source 1..75: mol_type = other DNA
gacgatactattggtaatattcagcaggcgattaatgacgcttataaccctgaccgtgggcgagactatgaagat

SEQ ID NO: 778176 - DNA, 75 bp, synthetic construct
  source 1..75: mol_type = other DNA
tcgttatattgctctcgggccgtccgtagctggtactgcaaacgctgatgcgaccttcaaagttcaatatctata

SEQ ID NO: 778177 - DNA, 75 bp, synthetic construct
  source 1..75: mol_type = other DNA
ccaacgtagcgtaattgctttaatgtccgagggatcacgcggcgatacgctactcaacaatgcgttaattaatag

SEQ ID NO: 778178 - DNA, 75 bp, synthetic construct
  source 1..75: mol_type = other DNA
aagaacaactggggaaaaaaacgttgacggaaatatctctcaatccattgtatttctccgattttaaccgcttgc

SEQ ID NO: 778179 - DNA, 75 bp, synthetic construct
  source 1..75: mol_type = other DNA
cccggccaccgacgatttcctggctgaagtgcgggctcagggtgtggagatgttggcggaacatttatccggaat

SEQ ID NO: 778180 - DNA, 75 bp, synthetic construct
  source 1..75: mol_type = other DNA
tttcagtaacgccgaccgcgctattaccggcgtcaccaacggcgcgcacggcacggtgaccattgaaaacggcaa

SEQ ID NO: 778181 - DNA, 75 bp, synthetic construct
  source 1..75: mol_type = other DNA
cggcaccattaccctgaccgtgcgcccggtggatgacgacccgactctggacaacgtaacgctgcacgcgcaggt

SEQ ID NO: 778182 - DNA, 75 bp, synthetic construct
  source 1..75: mol_type = other DNA
aaacgaccgtgcggcagaaactcagtcaacgctgacctcttctggcgcgatggcagcggtgattggcttccagtc

SEQ ID NO: 778183 - DNA, 75 bp, synthetic construct
  source 1..75: mol_type = other DNA
ctgccgcgtaagccatacgacgcgccgaactgggtgcgtaccgatcgtcctgtcacttttggtgaactgaaaact

SEQ ID NO: 778184 - DNA, 75 bp, synthetic construct
  source 1..75: mol_type = other DNA
ttatctgcatatgtccgaacctgactgggcaggcggcaaaccatataccgaggctttccgcgaaaaagtacgcgc

SEQ ID NO: 778185 - DNA, 75 bp, synthetic construct
  source 1..75: mol_type = other DNA
acgaaaagggcgttatcaacctgtcagcggttatctggtgaaaagccgcagtctgttcagcggaaaagggctccc

SEQ ID NO: 778186 - DNA, 75 bp, synthetic construct
  source 1..75: mol_type = other DNA
tcagtaacgaaatcttccgcgttccggcgcgccgccagcgcaagcccgcggttaagccgtccgaaatcccgacca

SEQ ID NO: 778187 - DNA, 75 bp, synthetic construct
  source 1..75: mol_type = other DNA
gctgcagtccactatcgacgccgagatgcgttacggactgaagtatgtggaagaacaggaaattctctttggcga

SEQ ID NO: 778188 - DNA, 75 bp, synthetic construct
  source 1..75: mol_type = other DNA
atgtctgaagtaaacgaaattctgaaaaaagtcactgccagcattgaagaggcaaccggcaaattcaacgcgaaa

SEQ ID NO: 778189 - DNA, 75 bp, synthetic construct
  source 1..75: mol_type = other DNA
cgacagattgcttttctgcggatggggatggatatcaatgcctggctggtttcccgctcactgtggaatgcggaa

SEQ ID NO: 778190 - DNA, 75 bp, synthetic construct
  source 1..75: mol_type = other DNA
acgcatccgttattacaacatggtcgtatgatgccctgggtgcgggggcggagatggttctgtcgctgagcggta

SEQ ID NO: 778191 - DNA, 75 bp, synthetic construct
  source 1..75: mol_type = other DNA
ctgaagccatccgaaataccaacactgctagggtataccgccagcctggttgataaaaaatggttgcgactggca

SEQ ID NO: 778192 - DNA, 75 bp, synthetic construct
  source 1..75: mol_type = other DNA
agtacataaaaagagatgatattagtatagatatcgccttggatgtgctgagaatatcttccatctattataata

SEQ ID NO: 778193 - DNA, 75 bp, synthetic construct
  source 1..75: mol_type = other DNA
aaaaggatcgcgttaatggtattaacaacctctttgcgatgtttggtggtaaacacgccgaactgcaggcgcagt

SEQ ID NO: 778194 - DNA, 75 bp, synthetic construct
  source 1..75: mol_type = other DNA
gtgcgtgccgggggcgcaatccgggatgaggtcaaacgtcgccgcaaggctgaaattgatgaaaacagcagactg

SEQ ID NO: 778195 - DNA, 75 bp, synthetic construct
  source 1..75: mol_type = other DNA
gggaggagatgtcaggatcaagttccggattgaggtcatctattatggaactgcaccgggttttatgaccacagg

SEQ ID NO: 778196 - DNA, 75 bp, synthetic construct
  source 1..75: mol_type = other DNA
tcacactggtgaaatctccggcatcaggggcggcggacaaactgcaactgacaggcatatcaaaggcggcgacat

SEQ ID NO: 778197 - DNA, 75 bp, synthetic construct
  source 1..75: mol_type = other DNA
gccgaatgcgaagctggatacgttcggggtctttgataacggatggcacacactggcttttgagtttgccggaaa

SEQ ID NO: 778198 - DNA, 75 bp, synthetic construct
  source 1..75: mol_type = other DNA
caattttacatttacagcagtaccttataaaaatgggaatgctgtacttactgcaggaaaatttagtgcgacagt

SEQ ID NO: 778199 - DNA, 75 bp, synthetic construct
  source 1..75: mol_type = other DNA
cggcggccagtgctgccgcagcagcaaaaagcgccaatgccgctggagaaaaagcctctcaagcgtctcaaagtg

SEQ ID NO: 778200 - DNA, 75 bp, synthetic construct
  source 1..75: mol_type = other DNA
cgccgatcgagagaaatcgcccccggtccggtaattgccaacagcaggaatgcgccagcgatactgacattcttc

SEQ ID NO: 778201 - DNA, 75 bp, synthetic construct
  source 1..75: mol_type = other DNA
cgcctggggagagaacgctcgtggcgaatggccagccgataatttcctcattcgcggcacccgctttaatcaggg

SEQ ID NO: 778202 - DNA, 75 bp, synthetic construct
  source 1..75: mol_type = other DNA
gcgacagggacaggtgattgtaatctgctgaacgtacaaggaaaatccctatccgacagccagcttcgcaacgga

SEQ ID NO: 778203 - DNA, 75 bp, synthetic construct
  source 1..75: mol_type = other DNA
ctgcatacgtttctagctgtagggcgagactttaccacctggatgaaagcacgcatcaaacagtatgggtttgtt

SEQ ID NO: 778204 - DNA, 75 bp, synthetic construct
  source 1..75: mol_type = other DNA
ggctaactacgttcgtggcgtggtgaaacatctgcaactgcgtaacaacagcttcggcggcgtggacatggtgat

SEQ ID NO: 778205 - DNA, 75 bp, synthetic construct
  source 1..75: mol_type = other DNA
ttgtagcgaaaatcagtaattacatagacaatccagacattatcaacgatcaccgcggagaaaaagttattgcaa

SEQ ID NO: 778206 - DNA, 75 bp, synthetic construct
  source 1..75: mol_type = other DNA
ccacctggaaggtttcacgtgactacctgaaagaaaccttctggttcgagccacagggcaacctgcgccacattc

SEQ ID NO: 778207 - DNA, 75 bp, synthetic construct
  source 1..75: mol_type = other DNA
aaacattaaaatcactaggtgtagatcctaatatatcgcattatttttcccgttcagcccgttttttgccaggtg

SEQ ID NO: 778208 - DNA, 75 bp, synthetic construct
  source 1..75: mol_type = other DNA
tcgtctgatgaaattgtgattacgttacacgatgagggagagaaaggtcgaatcttcaaaatgagggcatggtaa

SEQ ID NO: 778209 - DNA, 75 bp, synthetic construct
  source 1..75: mol_type = other DNA
aatcagggtttacaggtaataacttactttcaaaagaccagcctttttttagttatgcagcagtcataactgatg

SEQ ID NO: 778210 - DNA, 75 bp, synthetic construct
  source 1..75: mol_type = other DNA
ttgataaccaatatttcattatatggaataggaatgtatcttttccaaaaagatatttatgaaatggtaaggttt

SEQ ID NO: 778211 - DNA, 75 bp, synthetic construct
  source 1..75: mol_type = other DNA
aacgggatgaccctgcgtgaatgggctcgcatgtcactgacggagcgcggtattggggtggccagttataacccc

SEQ ID NO: 778212 - DNA, 75 bp, synthetic construct
  source 1..75: mol_type = other DNA
tccgggacttctggtcactgaatgcgtgtataacccgcatatgacgaagttattgcagcaggcgcaacaagctgg

SEQ ID NO: 778213 - DNA, 75 bp, synthetic construct
  source 1..75: mol_type = other DNA
aattgccgatgccggttccccgttggtgaaaaaatatcttcactggggctgtacgactcaggatctgctggacac

SEQ ID NO: 778214 - DNA, 75 bp, synthetic construct
  source 1..75: mol_type = other DNA
aaaagaatatctacagcggttcgcttacggttctaacttcaagctacccttaagcatggttgagtacaatgccat

SEQ ID NO: 778215 - DNA, 75 bp, synthetic construct
  source 1..75: mol_type = other DNA
atccgccatatcctgttccgacccagtttgtacgtgtagacactttggacacttggatcaaaaccgaactaaaca

SEQ ID NO: 778216 - DNA, 75 bp, synthetic construct
  source 1..75: mol_type = other DNA
acgttggtgatttcgatgtttttgcatactggccggaaagcaatttgctcgtgacagtagagtgtaagtacaacc

SEQ ID NO: 778217 - DNA, 75 bp, synthetic construct
  source 1..75: mol_type = other DNA
gtcaaagatgaaaattctaatgacttttatattataagtaaaagatgtcatgggaaaggaaaatatatttctcat

SEQ ID NO: 778218 - DNA, 75 bp, synthetic construct
  source 1..75: mol_type = other DNA
aaaacctggcgcggcaggctggcgggtcgcacaagattgtccatgaccgtatcgccacggcaggacggttctgtg

SEQ ID NO: 778219 - DNA, 75 bp, synthetic construct
  source 1..75: mol_type = other DNA
caatatggggtgatgagcatgcccctacagatatgcttattaaagccctttaccgtgatagtggggcttttgttt

SEQ ID NO: 778220 - DNA, 75 bp, synthetic construct
  source 1..75: mol_type = other DNA
tgcccatcgatgcgaaatactatcgcgagcagccgctgccggagctgaaaaccccgacgccatggaagcccagcg

SEQ ID NO: 778221 - DNA, 75 bp, synthetic construct
  source 1..75: mol_type = other DNA
cgttatttcccgtctgaaagtgcgtatcaacgaagtttataccgcgctgaacatgatcgactacggtctggataa

SEQ ID NO: 778222 - DNA, 75 bp, synthetic construct
  source 1..75: mol_type = other DNA
aaagatccggtaagtatcttacggcatttttatgttgtgcatttttgagcataaattctcttgctattaatcctg

SEQ ID NO: 778223 - DNA, 75 bp, synthetic construct
  source 1..75: mol_type = other DNA
ccgctgatggacagacattccttgccgaaacacgttcgttgctgacacacgccaaccgcctggagtcgttaggca

SEQ ID NO: 778224 - DNA, 75 bp, synthetic construct
  source 1..75: mol_type = other DNA
ccaataatgtaatagcattgtttacaaccctggtattattaaaaataaagacaaacatacatcttgagaaaatac

SEQ ID NO: 778225 - DNA, 75 bp, synthetic construct
  source 1..75: mol_type = other DNA
ctgcacggaagctgaatatgcccgctttggcggaaccgatgtctgccctgccgtgggcgagctgccgggcggaga

SEQ ID NO: 778226 - DNA, 75 bp, synthetic construct
  source 1..75: mol_type = other DNA
atctggaaaatattaccctgttgttgttatgcgttctgctggctcagtaagcgaactggcatcaagggtcattat

SEQ ID NO: 778227 - DNA, 75 bp, synthetic construct
  source 1..75: mol_type = other DNA
ggcgattctattcgtgcggctgtcatggcgcgcgccggatatgctgaagcagaaaaagacaatgcctataacggc

SEQ ID NO: 778228 - DNA, 75 bp, synthetic construct
  source 1..75: mol_type = other DNA
gttcccatgcgcactgatgaatccgccggactgaatcagggggtttttcttgatgagtggggaagaccgaaaaaa

SEQ ID NO: 778229 - DNA, 75 bp, synthetic construct
  source 1..75: mol_type = other DNA
caccgcagccagcccagcaaccgctggcgggaaatatcgacattaccgcgctggccgcccagctccagcagcaga

SEQ ID NO: 778230 - DNA, 75 bp, synthetic construct
  source 1..75: mol_type = other DNA
cccttatagccaccctgagtggaacggcatgccaggctcatgcttattcagtcaccgtcgtcgccagccgccccg

SEQ ID NO: 778231 - DNA, 75 bp, synthetic construct
  source 1..75: mol_type = other DNA
cttcggaagatggtcttttatctaatacattaaaaaaatgcccaggagacctcctgaataaatatatagtattac

SEQ ID NO: 778232 - DNA, 75 bp, synthetic construct
  source 1..75: mol_type = other DNA
taaagaatgaaataaccagtttatggtgcaaggaactccataaactacctgaacttgaagtaagaaccatctcca

SEQ ID NO: 778233 - DNA, 75 bp, synthetic construct
  source 1..75: mol_type = other DNA
agcacatctcttcaagccatcaagataagcattcagatcaagttaacaatcatcaacaccatggcaaggttgata

SEQ ID NO: 778234 - DNA, 75 bp, synthetic construct
  source 1..75: mol_type = other DNA
tgaacgacatgacctgtacggaagcacaggcccgtgaaaaactgttgcaggcgctggcagccggaacgacaccaa

SEQ ID NO: 778235 - DNA, 75 bp, synthetic construct
  source 1..75: mol_type = other DNA
ttcgcgggacgatgattaatccccgcgccagccttgcgggggtggatgccgctaatggtcagtgctggtatgaaa

SEQ ID NO: 778236 - DNA, 75 bp, synthetic construct
  source 1..75: mol_type = other DNA
atgatggaggcggaaacctggatggatggcaatgagtgtaaggctaacggcttcgcagatgaggttatacccgcg

SEQ ID NO: 778237 - DNA, 75 bp, synthetic construct
  source 1..75: mol_type = other DNA
atactgctggttgttgatcagccagctaccatcggtgcgttacctgtcgccgttgcccgctcagaaggagtcctt

SEQ ID NO: 778238 - DNA, 75 bp, synthetic construct
  source 1..75: mol_type = other DNA
tgaacaactaccagagctaatgtcagcattacagggcgtcaacatcgagcgtcaaacatactgtttactgcaatg

SEQ ID NO: 778239 - DNA, 75 bp, synthetic construct
  source 1..75: mol_type = other DNA
gctcagcgtattaatgaagtcatgtactacgcggttaacgtcggtttcattgatgctaacccagccgctaaaatc

SEQ ID NO: 778240 - DNA, 75 bp, synthetic construct
  source 1..75: mol_type = other DNA
cacgcagtatgaagtgtatgactaccccggacgtttcaagggtgcccacgggcagaactttgcccgctggcagat

SEQ ID NO: 778241 - DNA, 75 bp, synthetic construct
  source 1..75: mol_type = other DNA
gcagtggttcaggtaccacgctgaataaccactttgcggtaataccggcagaccggacatggcggccacagccgt

SEQ ID NO: 778242 - DNA, 75 bp, synthetic construct
  source 1..75: mol_type = other DNA
cagagcaaccgctttacgctgccgcaggcggtgaagctggtgactaaaaatccagcgcaggcgcttaatctccag

SEQ ID NO: 778243 - DNA, 75 bp, synthetic construct
  source 1..75: mol_type = other DNA
tggttttcgtgggatgttcagcgctgatggcgatggtctgctacctcttcgtagttggcgacattaaacgtatgg

SEQ ID NO: 778244 - DNA, 75 bp, synthetic construct
  source 1..75: mol_type = other DNA
agtattggcgggggcaaagcgaatgaatggggagtgcggcaataccgttacgactgctggctgatggagaaaccc

SEQ ID NO: 778245 - DNA, 75 bp, synthetic construct
  source 1..75: mol_type = other DNA
tataacttacctgccataccgcataacgatgccgatgccgacatccatcgtcattatgtggcgacgctgtgcctg

SEQ ID NO: 778246 - DNA, 75 bp, synthetic construct
  source 1..75: mol_type = other DNA
acagggagcgacactaactcgaatattttgtttggcaagctacaaactattgcagccagtaaattacatatcgac

SEQ ID NO: 778247 - DNA, 75 bp, synthetic construct
  source 1..75: mol_type = other DNA
gactattctcggcggttttattcagggggcttcagcacgcggtatgctggaagtttttgtcaaaaccgtgctcca

SEQ ID NO: 778248 - DNA, 75 bp, synthetic construct
  source 1..75: mol_type = other DNA
atcaagatgtaggaaggcataacaattatatggggcagtctaataatacaaccattaacgggggcagacagtcaa

SEQ ID NO: 778249 - DNA, 75 bp, synthetic construct
  source 1..75: mol_type = other DNA
gaaactgattacgactttctgtgccggatggcggcggaggaaggcatcttcttttatgaggagcacgcgcagaaa

SEQ ID NO: 778250 - DNA, 75 bp, synthetic construct
  source 1..75: mol_type = other DNA
ggacgttttgaccaggaaggccagcaccaggattaccagcgcacacagtatgaagtgcatgactatcccggacgt

SEQ ID NO: 778251 - DNA, 75 bp, synthetic construct
  source 1..75: mol_type = other DNA
cgttcgccggagatatggccgggacggcgaattgtgctgacggggcatccgcaggcgaacctgaaccgggaatgg

SEQ ID NO: 778252 - DNA, 75 bp, synthetic construct
  source 1..75: mol_type = other DNA
aacaacgcagaagtggcgcgcggaacaagccgttcgccggagatatggccgggacggcgaattgtgctgacgggg

SEQ ID NO: 778253 - DNA, 75 bp, synthetic construct
  source 1..75: mol_type = other DNA
ccagtgattaactggaactgtggtgccacacaacctgtaccggatgcgcctgtgccgaaagatttaccccccgga

SEQ ID NO: 778254 - DNA, 75 bp, synthetic construct
  source 1..75: mol_type = other DNA
cggttttggccacctggcgataccgcgtgtgggtcaggaggtcattgtggacttcctcaacggcgatccggacca

SEQ ID NO: 778255 - DNA, 75 bp, synthetic construct
  source 1..75: mol_type = other DNA
ctcacaggtagggctgcataaatcactgatggtgggaatgggctacagcgtcaatgtggggaataacgtcacctt

SEQ ID NO: 778256 - DNA, 75 bp, synthetic construct
  source 1..75: mol_type = other DNA
aattatactcatgagtatcgtttatttgatgaatatgttgcgaaaataaatgaagggaactatgccttccttgat

SEQ ID NO: 778257 - DNA, 75 bp, synthetic construct
  source 1..75: mol_type = other DNA
gacactgattttaatagtgtttggcatgatatttacagagatattcgagcatctgacagcaatagtacaaaaata

SEQ ID NO: 778258 - DNA, 75 bp, synthetic construct
  source 1..75: mol_type = other DNA
tttgtcgtcatgcccgcgacctgctgctggcgcagggctggccggaagagacggatgttgaccagcgtaacctga

SEQ ID NO: 778259 - DNA, 75 bp, synthetic construct
  source 1..75: mol_type = other DNA
atgatgaattagacaagctaataatagaatataaaaataataataatccattagatgacattgaaaaatgttttg

SEQ ID NO: 778260 - DNA, 75 bp, synthetic construct
  source 1..75: mol_type = other DNA
ttagatgacattgaaaaatgttttgatacaggtcttagtacacaagcaaggtcttatgtaatatctaaattagcg

SEQ ID NO: 778261 - DNA, 75 bp, synthetic construct
  source 1..75: mol_type = other DNA
atgaaagagcttgggaacgttctatcatgagagacttaaataatgatgatgatatttttattcttccaaagttta

SEQ ID NO: 778262 - DNA, 75 bp, synthetic construct
  source 1..75: mol_type = other DNA
tataacttacctgccataccgcataatgatgccgatgccgacatccatcgtcattatgtggcgacgctgtgtctg

SEQ ID NO: 778263 - DNA, 75 bp, synthetic construct
  source 1..75: mol_type = other DNA
tttaacgcattacccactctgtttaatacgtttaaattcgataaaaaaaatatgaagcccctcctcctggcaaat

SEQ ID NO: 778264 - DNA, 75 bp, synthetic construct
  source 1..75: mol_type = other DNA
tggcaattggtcagaatcaccaacttacgcaactgatgattcagctccagaaaatgccagaactacatagaacag

SEQ ID NO: 778265 - DNA, 75 bp, synthetic construct
  source 1..75: mol_type = other DNA
agtcattgaggacggtaaaggtaatattcttaagccgaatgacagtaatagcttattagaaatgaacccaggctc

SEQ ID NO: 778266 - DNA, 75 bp, synthetic construct
  source 1..75: mol_type = other DNA
ggttatgacgtcaaagtcggaaataacgttaccttcaccgttggtaaaacgaaaaaggatgataccgggcagacc

SEQ ID NO: 778267 - DNA, 75 bp, synthetic construct
  source 1..75: mol_type = other DNA
ttccgtggtgaccaaagactacacctttaaacgccccggctgggccggacgttttgaacaggaaggccagcacca

SEQ ID NO: 778268 - DNA, 75 bp, synthetic construct
  source 1..75: mol_type = other DNA
cttttgaattgggtcaccgggttattgctgaattaatccttaatacattaaataagatggctgaaagctttggct

SEQ ID NO: 778269 - DNA, 75 bp, synthetic construct
  source 1..75: mol_type = other DNA
cccgcgtcaccagaagctcaaggaactcagtgaggggattgtagagatgttccgtgtcgacccagacctgaccgc

SEQ ID NO: 778270 - DNA, 75 bp, synthetic construct
  source 1..75: mol_type = other DNA
cgcactcgcaggaatcacagagctaccgcgcaaccatccaaaatggcaggaatgggaaagacgcgggaaggagct

SEQ ID NO: 778271 - DNA, 75 bp, synthetic construct
  source 1..75: mol_type = other DNA
aaggccatgatgcagtggtggtcggattatctggatgtgtgccgcgaggggtatgttgcgccgtacatttatgcc

SEQ ID NO: 778272 - DNA, 75 bp, synthetic construct
  source 1..75: mol_type = other DNA
atagcagtggttcttcaaagctagatacatcagagcttctgcgtgttttcggatcatttactggtcagcaacttg

SEQ ID NO: 778273 - DNA, 75 bp, synthetic construct
  source 1..75: mol_type = other DNA
ccaaatggattagagtttgaactattgcaggatgttctatcgtcaacggataacgtttattacaaaccacgacgc

SEQ ID NO: 778274 - DNA, 75 bp, synthetic construct
  source 1..75: mol_type = other DNA
ttgttagaatcgaaaaagccactcgcgccagcaaacgtaaatacacctcttctctacaagacctcgcacgagagt

SEQ ID NO: 778275 - DNA, 75 bp, synthetic construct
  source 1..75: mol_type = other DNA
ccgcgatttactccgccggtgagcatctggagctctgctgtggtaaggcaaggctggtgctgacgaaggacggac

SEQ ID NO: 778276 - DNA, 75 bp, synthetic construct
  source 1..75: mol_type = other DNA
tgacggttttgctaaagtgttggcacagcgttttgcccaacctgttgaacacgttcgattacagcgtccacttgg

SEQ ID NO: 778277 - DNA, 75 bp, synthetic construct
  source 1..75: mol_type = other DNA
atttgctgtacgtgctgatataacaataacgtaccagctcaaatcatcagataaaaaataccaaccgaaagaagt

SEQ ID NO: 778278 - DNA, 75 bp, synthetic construct
  source 1..75: mol_type = other DNA
ggctcaaacaggagtggcgacgctttaccgatcgatttgttaacagtcaggcgcacattattatgtgcgggcgtg

SEQ ID NO: 778279 - DNA, 75 bp, synthetic construct
  source 1..75: mol_type = other DNA
gtttgtgattaagtattttcagaagggaactgcacacatcgtattcaagcgacctgagctggtcgataagctgaa

SEQ ID NO: 778280 - DNA, 75 bp, synthetic construct
  source 1..75: mol_type = other DNA
cagcatatggcgagacctgatgaagaagtcgggcatgctttcgctcatggatgctcaggctcgtgagcagtggta

SEQ ID NO: 778281 - DNA, 75 bp, synthetic construct
  source 1..75: mol_type = other DNA
atgtcagacatcacaatctcccgtccggaagtggccaacgggcatacggacgttatctgctcaacctcagtcagc

SEQ ID NO: 778282 - DNA, 75 bp, synthetic construct
  source 1..75: mol_type = other DNA
atgcgctgggtattgaagcaaagaaaaacatgctaccgctacagcctggtgatgtgctggaaaccagcgcggaca

SEQ ID NO: 778283 - DNA, 75 bp, synthetic construct
  source 1..75: mol_type = other DNA
atgcttattaccggtttgtcgccttaaccgattacgaccgttttccggagaatatcgacagcgagggtgatggtt

SEQ ID NO: 778284 - DNA, 75 bp, synthetic construct
  source 1..75: mol_type = other DNA
aaacaaccgatggtaataatttgatcaaaagacagcgtaaatctaagccgaaccgcgttccatcagaatcggagt

SEQ ID NO: 778285 - DNA, 75 bp, synthetic construct
  source 1..75: mol_type = other DNA
tgaagcggaaagcagcggttccgtaatgatcatcgactccatcagtcacttctggaccggattatgcgacgagta

SEQ ID NO: 778286 - DNA, 75 bp, synthetic construct
  source 1..75: mol_type = other DNA
tccatgtatatggtcattctgctgcagggtgtgcgcatgatggtgggcgaaattaacggttcgtttaaaggctgg

SEQ ID NO: 778287 - DNA, 75 bp, synthetic construct
  source 1..75: mol_type = other DNA
atttggtcggtatactggtgccaaagggatatttttgacagggaataccggtgtttcacattctcaggcggtatt

SEQ ID NO: 778288 - DNA, 75 bp, synthetic construct
  source 1..75: mol_type = other DNA
actaagcacaaacacttcatgctattatctttaataacattccttttatccagtataattttaactgtagaagcc

SEQ ID NO: 778289 - DNA, 75 bp, synthetic construct
  source 1..75: mol_type = other DNA
gcgctggacagaccgataacggttctgtttggtgagtcggccagcgggttcagcagcggcgaggaagataacaaa

SEQ ID NO: 778290 - DNA, 75 bp, synthetic construct
  source 1..75: mol_type = other DNA
atgacgagaaaaaatatcgttggtcgtctgaatgatggcctggttagcttaatgacttcgctcggcgagaagatt

SEQ ID NO: 778291 - DNA, 75 bp, synthetic construct
  source 1..75: mol_type = other DNA
ttgcgcaaggcgggtgtgtaatagacgggaggggatcgatccggcgatccagcctgtggatagtccgtctattac

SEQ ID NO: 778292 - DNA, 75 bp, synthetic construct
  source 1..75: mol_type = other DNA
agtgccacagaaaattacctgaactgcgtcaactcggagtctggccgcgtgcgcgtggaagcaaagcgggcgagc

SEQ ID NO: 778293 - DNA, 75 bp, synthetic construct
  source 1..75: mol_type = other DNA
cattttatctgatggttttttttggtatggagaatccggtaaaaaaatcatgagctactggggcggggtgttttt

SEQ ID NO: 778294 - DNA, 75 bp, synthetic construct
  source 1..75: mol_type = other DNA
aaagcattatcttatattgagaaattacctacgctttttatgtcagaactttattcccgagacaatgttgaatac

SEQ ID NO: 778295 - DNA, 75 bp, synthetic construct
  source 1..75: mol_type = other DNA
atgtggagttcggcaattaacacccgcaacaacgtgaccactgatgcgggcgctggctttgagcaaacattgacc

SEQ ID NO: 778296 - DNA, 75 bp, synthetic construct
  source 1..75: mol_type = other DNA
aagggcggtgattctggtattaacactttaatgaatgaaggattcttaactaaaaaggatttgaaagactttgcc

SEQ ID NO: 778297 - DNA, 75 bp, synthetic construct
  source 1..75: mol_type = other DNA
gtcgctgaacagcttaacctgcacagcacaactgctgtggtaaaaggctgccgcacagtacaaaaagccgatatg

SEQ ID NO: 778298 - DNA, 75 bp, synthetic construct
  source 1..75: mol_type = other DNA
aacgaatcaggattcgttgaggatactctgactgccatcggcgggcgcactatccataccttccatacagaaggt

SEQ ID NO: 778299 - DNA, 75 bp, synthetic construct
  source 1..75: mol_type = other DNA
tcttattatttgggaataatgctgtttatcccgatttagtttcaaaccctgatgatgctatgcaagagtttaaag

SEQ ID NO: 778300 - DNA, 75 bp, synthetic construct
  source 1..75: mol_type = other DNA
cacaatgcgttctttattttcagaagaactcagcttggatatttataagcatgatattcattttgatcagaaggc

SEQ ID NO: 778301 - DNA, 75 bp, synthetic construct
  source 1..75: mol_type = other DNA
gatgaaagattttgggttatcgattctgctcatgaatactgatttggaactagctccagaagacttcatcattcc

SEQ ID NO: 778302 - DNA, 75 bp, synthetic construct
  source 1..75: mol_type = other DNA
acatgatcaacaactcacgtaccgcaaacggcacggatgcgaacgcatacctccagaatgatggtacttgggttt

SEQ ID NO: 778303 - DNA, 75 bp, synthetic construct
  source 1..75: mol_type = other DNA
aaggctgggacggaagtcactgtcgttctcaaaatcggtggagctgcatgacaaggtctggatttgcccctatat

SEQ ID NO: 778304 - DNA, 75 bp, synthetic construct
  source 1..75: mol_type = other DNA
gcgagccgcttcagtgggaaggcgttgatggcccggaagcagttgatttagtggtgctgctggcgattcccccca

SEQ ID NO: 778305 - DNA, 75 bp, synthetic construct
  source 1..75: mol_type = other DNA
agaattttttcgaaaacatagcaacggacttactcagcggtcttcttgacgccaatgataatgaacagaatgcgc

SEQ ID NO: 778306 - DNA, 75 bp, synthetic construct
  source 1..75: mol_type = other DNA
gcaacattctctcttggcgttgcctatccatccaactttggcttttcttcgaccttatcgtcccgaatggctctc

SEQ ID NO: 778307 - DNA, 75 bp, synthetic construct
  source 1..75: mol_type = other DNA
atgaacatgccagcccgtgctcctgttatgccattagcgcaaacccgtgaggaaataaatgcaacggcggcagcg

SEQ ID NO: 778308 - DNA, 75 bp, synthetic construct
  source 1..75: mol_type = other DNA
atgcagcagctgcttgatcttccacaaccgcctactgctgtcttctgccatagcgatgtgatggcgctcggcgca

SEQ ID NO: 778309 - DNA, 75 bp, synthetic construct
  source 1..75: mol_type = other DNA
atatcttacgaaaatcttaatggttcagtatttgaaaattgtttttttgagggctgtaaatttgagaatgtgtca

SEQ ID NO: 778310 - DNA, 75 bp, synthetic construct
  source 1..75: mol_type = other DNA
aagtcactgtcgttctcaaaatcggtggagctgcatgacaaggtctggatttgcccctatatttccagacacctg

SEQ ID NO: 778311 - DNA, 75 bp, synthetic construct
  source 1..75: mol_type = other DNA
gcatgataaactttcttgaagagtataaagttgtcaataccgacaggctgcatgtggcaattttagcatctctgc

SEQ ID NO: 778312 - DNA, 75 bp, synthetic construct
  source 1..75: mol_type = other DNA
accaaagcattgcgagtgcagtttttggcagtagaccctaccggtaaaaaccttactggaaacccaaccacctgg

SEQ ID NO: 778313 - DNA, 75 bp, synthetic construct
  source 1..75: mol_type = other DNA
ggtgtgagctcttcggcttacagcacgctggcgtcactcaagctgccgaaaccggaaaaagggccggaaaccatt

SEQ ID NO: 778314 - DNA, 75 bp, synthetic construct
  source 1..75: mol_type = other DNA
gcagaagagttgggtttaaccacttccgccattagctacaccatcaagcgtatggagacggggctggatgaaccg

SEQ ID NO: 778315 - DNA, 75 bp, synthetic construct
  source 1..75: mol_type = other DNA
tcgaccggctggaaagtgaaatccaggctgaccgggtgagtgaggaaagccgccgctggctggcatcgtgcggcc

SEQ ID NO: 778316 - DNA, 75 bp, synthetic construct
  source 1..75: mol_type = other DNA
atctttatcactgcgaccaccggggactgccgctggcgcttatcagcgaagacggcaatacggcgtggagcgcgg

SEQ ID NO: 778317 - DNA, 75 bp, synthetic construct
  source 1..75: mol_type = other DNA
ggcgtaaaggtgctgggccaaaatataacttagaaatggcactagctttaaaaaaagaaggctatgacgtatatg

SEQ ID NO: 778318 - DNA, 75 bp, synthetic construct
  source 1..75: mol_type = other DNA
ggtacggctgggacggcgaccggctgaccacgatacagaacgacaggagccgcatccagacgatttatcagccgg

SEQ ID NO: 778319 - DNA, 75 bp, synthetic construct
  source 1..75: mol_type = other DNA
ttcgcctgaagccctggtgcgcacagcgccatctgacctgcccgagtgtttccaccatcggcagaatgatcgcca

SEQ ID NO: 778320 - DNA, 75 bp, synthetic construct
  source 1..75: mol_type = other DNA
atgcttaatcgcctgaaaaaactgcttcccggtaacagcaataccagtagtgctgagacaaccgccccggaaacc

SEQ ID NO: 778321 - DNA, 75 bp, synthetic construct
  source 1..75: mol_type = other DNA
gcgaagagcctgaaaacagaagtcgttttaaaacgctaaaaggttatctggtaaaaggcaggcagctcctggatg

SEQ ID NO: 778322 - DNA, 75 bp, synthetic construct
  source 1..75: mol_type = other DNA
ccggtgtatggaatgcagtggtgttctggtcggctctgttttatcacctgccacttcttacacacctggaggggg

SEQ ID NO: 778323 - DNA, 75 bp, synthetic construct
  source 1..75: mol_type = other DNA
acctggacatccgcatcccgtatgccaccgacccggcgggaaaccgcctgccggacccggagctacacccggaca

SEQ ID NO: 778324 - DNA, 75 bp, synthetic construct
  source 1..75: mol_type = other DNA
gaatttacgctacagtcctttgtttcaggaaccgatggggcagaagtggaagtccgggatacgttgcagtctgca

SEQ ID NO: 778325 - DNA, 75 bp, synthetic construct
  source 1..75: mol_type = other DNA
agaggagctgacgtccacaccacgcaggaaacagtgcctgaagcagttatgggaaaacagcagtatgccatctga

SEQ ID NO: 778326 - DNA, 75 bp, synthetic construct
  source 1..75: mol_type = other DNA
cgttacgattacagcaaatgaaacttatcggattcgcaccggaagagaacaaatcagcatcggaaggtttgctct

SEQ ID NO: 778327 - DNA, 75 bp, synthetic construct
  source 1..75: mol_type = other DNA
acaagatgaacaattagcaatggcatatatagccgctctgccgttcagcaggcctttagtttactgggatggcca

SEQ ID NO: 778328 - DNA, 75 bp, synthetic construct
  source 1..75: mol_type = other DNA
acatctctaaggatgaatgggaaaacctccatgcattaaaagaaaagcgtttaaatggaatgcctaaaacaacac

SEQ ID NO: 778329 - DNA, 75 bp, synthetic construct
  source 1..75: mol_type = other DNA
aaggcgagtctgccatcattcaaatgcccaccagcgctggcaaaacgaaggcaacggagctgatccttcgaagcg

SEQ ID NO: 778330 - DNA, 75 bp, synthetic construct
  source 1..75: mol_type = other DNA
agggttctcacattcctgctgatgaagcatttaactatattgccgggtatagctgttatatggatggttccgttc

SEQ ID NO: 778331 - DNA, 75 bp, synthetic construct
  source 1..75: mol_type = other DNA
gcaggtaaaaaagccgattaccatcagggcgaagtgacttttctgcccgtaattactcgaccaaataaaatcatc

SEQ ID NO: 778332 - DNA, 75 bp, synthetic construct
  source 1..75: mol_type = other DNA
tgctgcttggcgtctcccggtcaaaggcaaagatgcttgagttcagcattccggaagagcatcacatcaaaataa

SEQ ID NO: 778333 - DNA, 75 bp, synthetic construct
  source 1..75: mol_type = other DNA
gtatccggcaggaacaacaccggttgtgccggaaaacccgtggcagaaatgggatggtaaaacatgggttgatga

SEQ ID NO: 778334 - DNA, 75 bp, synthetic construct
  source 1..75: mol_type = other DNA
accgccacagagcttggtaccatcgtaccgaaagggatggacgattactggctgcgcccaattcgattttatgaa

SEQ ID NO: 778335 - DNA, 75 bp, synthetic construct
  source 1..75: mol_type = other DNA
gaaaaaaatctcctcgatttggccatgaagctgcgggacgccgtctatgaattcggcacgcccaggcagcttctt

SEQ ID NO: 778336 - DNA, 75 bp, synthetic construct
  source 1..75: mol_type = other DNA
gaccttgccgccgccatcaaccgggtggagccagatcccgattccctcgcagagctaaaaaacaatctgctattt

SEQ ID NO: 778337 - DNA, 75 bp, synthetic construct
  source 1..75: mol_type = other DNA
tcgacagcgggactcggggcatcacatacgagctacttctgacgtcactacgcactatgattcctgaaggaaccc

SEQ ID NO: 778338 - DNA, 75 bp, synthetic construct
  source 1..75: mol_type = other DNA
ttaaggaaaaaatccataatggtagccatacagagtacatcacagatcaaaaaaacagtaataataaagatcgtg

SEQ ID NO: 778339 - DNA, 75 bp, synthetic construct
  source 1..75: mol_type = other DNA
caagcacatacttcatgttgaccgattcgggtaacagcctgggaacctataatagtttaaggccgcttatcatta

SEQ ID NO: 778340 - DNA, 75 bp, synthetic construct
  source 1..75: mol_type = other DNA
tcacagttcaaaaccacagtaataataaagagcgtgaaaaaaatatcgcgatggagacaaaaaaaatggagagca

SEQ ID NO: 778341 - DNA, 75 bp, synthetic construct
  source 1..75: mol_type = other DNA
aacagcgtcgtctgatgggaagcgtaatggttgatgacagccggatcacacagtcacagcctggaagttccggtc

SEQ ID NO: 778342 - DNA, 75 bp, synthetic construct
  source 1..75: mol_type = other DNA
tatgcacaaagtaatggcgatgccccacccacacccgcacagcgtcgtctgatgggaagtgtaatggttgatgac

SEQ ID NO: 778343 - DNA, 75 bp, synthetic construct
  source 1..75: mol_type = other DNA
agcacaacgttgggtattgactgagcaagatgaacgacaagggcaacgacatcagcctcatgatgagcaagaaaa

SEQ ID NO: 778344 - DNA, 75 bp, synthetic construct
  source 1..75: mol_type = other DNA
ttaatgtttcggaatctaaattaacttcagatactatcgatttaactaacggttcttcgctgaacattggtgaag

SEQ ID NO: 778345 - DNA, 75 bp, synthetic construct
  source 1..75: mol_type = other DNA
gatgactatgaagctctttacttcactgacacacatctcgatggtgataaatctaagtcaaccaatgaaacgttc

SEQ ID NO: 778346 - DNA, 75 bp, synthetic construct
  source 1..75: mol_type = other DNA
cgccgaagaggccgacgatccgtgggccgcccactggctaaagcaactgcgcatccgcctgaacctgatcgcaca

SEQ ID NO: 778347 - DNA, 75 bp, synthetic construct
  source 1..75: mol_type = other DNA
taaagagcgtgaaaaaaaatatcgcgatggagacaaaaaaaatggagagcaggcccatttattagatattactaa

SEQ ID NO: 778348 - DNA, 75 bp, synthetic construct
  source 1..75: mol_type = other DNA
ctacattggggaaaaagaatgggcaaatgaagtctattgacaacaaatcatctctccaggttgacaggaatccct

SEQ ID NO: 778349 - DNA, 75 bp, synthetic construct
  source 1..75: mol_type = other DNA
accgaatctactgggtggggggctgattacaacctgtacgccaatactatcaccgtaactaacggtggtgtattg

SEQ ID NO: 778350 - DNA, 75 bp, synthetic construct
  source 1..75: mol_type = other DNA
aggtaaaagagcaggagaaggttgctgccactcttgggcaacttgattcagagttttcccgattaaagcaaaatt

SEQ ID NO: 778351 - DNA, 75 bp, synthetic construct
  source 1..75: mol_type = other DNA
tgcgacggaagacgatgttatgccggaggcactgcgccgttttgaggtgatggtggaagaggcggcgcgtaatgc

SEQ ID NO: 778352 - DNA, 75 bp, synthetic construct
  source 1..75: mol_type = other DNA
ggtagtgcaacaacttttcttggcgatgcgtacattgatacgcaaacgcttgaaattaatatgacaggtggggct

SEQ ID NO: 778353 - DNA, 75 bp, synthetic construct
  source 1..75: mol_type = other DNA
agtacaacaacctttgctggcagaaaatacacaaacagcgatatgccttcgccgaaaaaaatgaaactaatggca

SEQ ID NO: 778354 - DNA, 75 bp, synthetic construct
  source 1..75: mol_type = other DNA
tggtatgccgcaaaagagacgtcgctgcactacaccggcccggtgaaaaattttgccttctggctgcgcgatctg

SEQ ID NO: 778355 - DNA, 75 bp, synthetic construct
  source 1..75: mol_type = other DNA
tattaaatggccgccgatatcttttattacaaggaccgatgggcccctgctttgcacgtctggcgacctggctgc

SEQ ID NO: 778356 - DNA, 75 bp, synthetic construct
  source 1..75: mol_type = other DNA
cagaggctgcggcaagcgcagtaacagccgggcagaaaaaggatgaagccgtcacagctgcaacacgttcggaag

SEQ ID NO: 778357 - DNA, 75 bp, synthetic construct
  source 1..75: mol_type = other DNA
aaaaattgagtttgttcttggtaagaaaataatgaatctatatgaaatagacgatctctgtgcaaaaagaataat

SEQ ID NO: 778358 - DNA, 75 bp, synthetic construct
  source 1..75: mol_type = other DNA
caacgaaccagacgtgtttgcggtctgtcgtttagtctcaggtttcccctataccgatcggcagcagaaacggct

SEQ ID NO: 778359 - DNA, 75 bp, synthetic construct
  source 1..75: mol_type = other DNA
acaactgggggatgggcaatgtagacaaaaagttaaaatacatatccagtaccgggtttgattcaccatcatcca

SEQ ID NO: 778360 - DNA, 75 bp, synthetic construct
  source 1..75: mol_type = other DNA
ggatatgggggtgaaagacaaagcagccggagtatcagcagaaatggcacagcaacgtgtaaaagaattccactc

SEQ ID NO: 778361 - DNA, 75 bp, synthetic construct
  source 1..75: mol_type = other DNA
gcgacagggttgatgaaatcaatacttattattcatttttggtatttatggaaagtggattatctagcggctcaa

SEQ ID NO: 778362 - DNA, 75 bp, synthetic construct
  source 1..75: mol_type = other DNA
caataaattctcggatttaagactaactcttgtagataaaaacagctcgaatataaacaacaaggggacttccat

SEQ ID NO: 778363 - DNA, 75 bp, synthetic construct
  source 1..75: mol_type = other DNA
gagttcgaccgcctctggaaaaaaatgatgctactgctggataagctgcgtgagcagtacggggtcggaccgcta

SEQ ID NO: 778364 - DNA, 75 bp, synthetic construct
  source 1..75: mol_type = other DNA
ccagactacagccgggttacgtcatttatttggtcatgtcaggaatttcagaatatggcacaaggcattgactga

SEQ ID NO: 778365 - DNA, 75 bp, synthetic construct
  source 1..75: mol_type = other DNA
gcagcgccgcgtgtttttgacaccggcggtcatcaaaccggagccgctattattcttggcttcggttcttcagca

SEQ ID NO: 778366 - DNA, 75 bp, synthetic construct
  source 1..75: mol_type = other DNA
tgattacggggttttcgccgtcatataaaaagattgttattggtgatgatgaaataacgatgcctggcgataagg

SEQ ID NO: 778367 - DNA, 75 bp, synthetic construct
  source 1..75: mol_type = other DNA
aactaaaaccataactactcatgttccttttgccaatcctaatattgattgcgatgttaatttgtctcaacatca

SEQ ID NO: 778368 - DNA, 75 bp, synthetic construct
  source 1..75: mol_type = other DNA
tccaaatctcatggtaaatatgcgcttttcccaatttttactgcgagttggcgagctactcgtataaagaatata

SEQ ID NO: 778369 - DNA, 75 bp, synthetic construct
  source 1..75: mol_type = other DNA
ataagattgtaaagtttaaacgcgcatcaaaagcaacttacattaataaatctggtgtgctgacagaggctgcca

SEQ ID NO: 778370 - DNA, 75 bp, synthetic construct
  source 1..75: mol_type = other DNA
agttcggacacaattaaaacaaatattgtacttgcatcagcctttgcctttttcggatattaagttaaatatttt

SEQ ID NO: 778371 - DNA, 75 bp, synthetic construct
  source 1..75: mol_type = other DNA
aaacaccagtggaattttctttctgagaagcactgtgtcaggaaaaacatcgcatgtgcttcgggcatataaaac

SEQ ID NO: 778372 - DNA, 75 bp, synthetic construct
  source 1..75: mol_type = other DNA
aatatctggaaaaagccggacgcaaactcggcgtaaatgtttacgtgaaaaacaaggcgctaacggcattgaagg

SEQ ID NO: 778373 - DNA, 75 bp, synthetic construct
  source 1..75: mol_type = other DNA
cccaactgaaaataatatctataatagaccgcttacgtgtcttgtcgaggtgaatagaaattggggcgatattcc

SEQ ID NO: 778374 - DNA, 75 bp, synthetic construct
  source 1..75: mol_type = other DNA
gctgacgcttcactcagccaaaggttgcgaatatgacgtggtcatcatggtcggtttggatctggggaatttgcc

SEQ ID NO: 778375 - DNA, 75 bp, synthetic construct
  source 1..75: mol_type = other DNA
aactaaacctgtctgagaaaaaaataagtataattagaccagtaatagatattgatttgaacaaaattttaaaaa

SEQ ID NO: 778376 - DNA, 75 bp, synthetic construct
  source 1..75: mol_type = other DNA
cagtattattatgcccgcttataaccgcgaagagacgatacccgctgctattgcatcagttctggcacaaacata

SEQ ID NO: 778377 - DNA, 75 bp, synthetic construct
  source 1..75: mol_type = other DNA
ccgtaatgatggatcgaacacatatttcatgctaacagcatcaggagacacattaggttcatggaacggtttgcg

SEQ ID NO: 778378 - DNA, 75 bp, synthetic construct
  source 1..75: mol_type = other DNA
cttaccaacccattagtttggctcattatcctcggggatatgtcggtctatattgcacgcaccatcctcaatgac

SEQ ID NO: 778379 - DNA, 75 bp, synthetic construct
  source 1..75: mol_type = other DNA
tccgggtgtaatctcactgattatggggattgttgccttgtttacgataaaagatcgtcccggcacgctcggttt

SEQ ID NO: 778380 - DNA, 75 bp, synthetic construct
  source 1..75: mol_type = other DNA
atctgaatcaagaaaactcaaagcgtttcgcaagttggccatttcaaagtcatttcaacactggcgatttgagtg

SEQ ID NO: 778381 - DNA, 75 bp, synthetic construct
  source 1..75: mol_type = other DNA
gttcgccacttagaaaatgcgcctgagtttgacaagaacatagatagtagatgtatgcaggtctactctctgatc

SEQ ID NO: 778382 - DNA, 75 bp, synthetic construct
  source 1..75: mol_type = other DNA
gatataaacgcaccaaccgctgccgccggatggttaaatagtggtaacggaacagcatttacgactgctcagttt

SEQ ID NO: 778383 - DNA, 75 bp, synthetic construct
  source 1..75: mol_type = other DNA
tggaagctgtattgtaaaaaccccgctaaaggcgttgtcataaaatcaaagaaaaaaacctccaaagccaacttg

SEQ ID NO: 778384 - DNA, 75 bp, synthetic construct
  source 1..75: mol_type = other DNA
atggtaaatctccctcctgagctggggtcacctgatgtatgggctggtggaggtgttgggctgattgcaggcctg

SEQ ID NO: 778385 - DNA, 75 bp, synthetic construct
  source 1..75: mol_type = other DNA
acctgactcgattttcagcagcccgacgtcatgcaattctggtgtgtgtcctggaagatgccagagctacgctga

SEQ ID NO: 778386 - DNA, 75 bp, synthetic construct
  source 1..75: mol_type = other DNA
tatgacccgctgcaggggcggtatatcactcaggatccgattgggcttaaggggggatggaatttttatcagtat

SEQ ID NO: 778387 - DNA, 75 bp, synthetic construct
  source 1..75: mol_type = other DNA
tgctacgatgatactgaatatagtttttacattgatattgataacgaccatagctcatgtgtatatcaaggaaaa

SEQ ID NO: 778388 - DNA, 75 bp, synthetic construct
  source 1..75: mol_type = other DNA
tctaattgcaaaaaaagaagaaaaagtaatttcttcaatcatattagaaaattcagataaaggtaaaaacataaa

SEQ ID NO: 778389 - DNA, 75 bp, synthetic construct
  source 1..75: mol_type = other DNA
gcgacacagtccgccatctgcccgaatcttttgaaatcccctggaatccgaacacccgtaccgaggtgagcaccc

SEQ ID NO: 778390 - DNA, 75 bp, synthetic construct
  source 1..75: mol_type = other DNA
cgcgctgccataaagatttttatactgatgctttagaagactttcaaaaacaaaagatattaactaatgaattga

SEQ ID NO: 778391 - DNA, 75 bp, synthetic construct
  source 1..75: mol_type = other DNA
aaacattgatcttgaaccacttcaatattggtcaaatcatccaataataaattatcagctatctaacagttctat

SEQ ID NO: 778392 - DNA, 75 bp, synthetic construct
  source 1..75: mol_type = other DNA
agtgaacataaggtgactgatgcaaaaacgggactttcttttctgccggaaattatgggacagaaatcaggggag

SEQ ID NO: 778393 - DNA, 75 bp, synthetic construct
  source 1..75: mol_type = other DNA
tgaattacgacttgttgatctactggacgatgacctatggattcgacatccaagatggtcatttattcaaggatt

SEQ ID NO: 778394 - DNA, 75 bp, synthetic construct
  source 1..75: mol_type = other DNA
cccaggtaacctccagccagtccggcaacgccaaccagctgccgagcgtggcgctcgaggcgcgcatgatctcca

SEQ ID NO: 778395 - DNA, 75 bp, synthetic construct
  source 1..75: mol_type = other DNA
tgagtgtcatggttctcctgaggaagggatgtttttccctggaattaaaaagtatatctcctggggggagatgaa

SEQ ID NO: 778396 - DNA, 75 bp, synthetic construct
  source 1..75: mol_type = other DNA
taccaaacacctatctgaaatattatctcttcccggattacgtcgttcagcattccaaccctgaacatatccgca

SEQ ID NO: 778397 - DNA, 75 bp, synthetic construct
  source 1..75: mol_type = other DNA
ttgcccggaccacgccaggctgtgagcgcgtttgatctggcctttttgagcaatcgtgggctttatattccgtca

SEQ ID NO: 778398 - DNA, 75 bp, synthetic construct
  source 1..75: mol_type = other DNA
aatgcaggaggtccgggcggatagcgagacggctgtcggctggctatccgcccggaatgatgctgaacaggggcg

SEQ ID NO: 778399 - DNA, 75 bp, synthetic construct
  source 1..75: mol_type = other DNA
atagagagggtcggttaagcattcatagtgataaaagcatggggtgtgagttttggttataccctccgttgtgtt

SEQ ID NO: 778400 - DNA, 75 bp, synthetic construct
  source 1..75: mol_type = other DNA
aacgccgcgaccaggagaatgaggatattgcgctaacggtagggaagctgcgtgttgagctggaaggcaaagaca

SEQ ID NO: 778401 - DNA, 75 bp, synthetic construct
  source 1..75: mol_type = other DNA
atggtcattagccagatattctctagtttcataatgtttataattgataaggaatttatgtctaggctggctaaa

SEQ ID NO: 778402 - DNA, 75 bp, synthetic construct
  source 1..75: mol_type = other DNA
cgcacggcaggaagtgattgccgaagcctgtaaagttattcttaaagagaaagcgccggagattgagtttagcta

SEQ ID NO: 778403 - DNA, 75 bp, synthetic construct
  source 1..75: mol_type = other DNA
gaatgaggtgaatggaacatcgcgagaaacaggttttcgatgcttgccgcgccattacagcggcaggaaattcag

SEQ ID NO: 778404 - DNA, 75 bp, synthetic construct
  source 1..75: mol_type = other DNA
accgccatgttggcagtttacatgctgccgatgagcggatggcactggaaaatgcccgtgatgcttacacccgtc

SEQ ID NO: 778405 - DNA, 75 bp, synthetic construct
  source 1..75: mol_type = other DNA
tccgacaccggctggcatctgcctggaggaattctgcaggaaactggcacgcttaatttattcctgaaaaccacc

SEQ ID NO: 778406 - DNA, 75 bp, synthetic construct
  source 1..75: mol_type = other DNA
gatttacggtgtcaccctgccccgcatgaagccgtttgttaccgcctgtttaggcggcgcggcgggcggtttgtt

SEQ ID NO: 778407 - DNA, 75 bp, synthetic construct
  source 1..75: mol_type = other DNA
tccattgaactggtggacgcgctgaaagctatggaactggccttcgaagaagcgattacaccgtatttacaggcg

SEQ ID NO: 778408 - DNA, 75 bp, synthetic construct
  source 1..75: mol_type = other DNA
gtatttttagtcatcctgtttacctctttctcagggggtttagtctccaggattccggggcggttcaagacgtcg

SEQ ID NO: 778409 - DNA, 75 bp, synthetic construct
  source 1..75: mol_type = other DNA
ggtacaagggaacttacagctcagattcaaatcgtcagataaatcgtggtgacctgtatcccggctcacgtctta

SEQ ID NO: 778410 - DNA, 75 bp, synthetic construct
  source 1..75: mol_type = other DNA
agtcagcaacaatcaccctacccgctgaagtcatgaaagcccgccgcgcgcatgtagtaccgctatcccggcaag

SEQ ID NO: 778411 - DNA, 75 bp, synthetic construct
  source 1..75: mol_type = other DNA
tggagtctggcggagaaccgagcgcaagttactccttcggctactgccgtgttgaatatggcggcggcacaaccg

SEQ ID NO: 778412 - DNA, 75 bp, synthetic construct
  source 1..75: mol_type = other DNA
aaggcgtgaaggtggtgaaagacagcgccagtctgtggccgcagatatttactgccggtgctgcattcggtggtg

SEQ ID NO: 778413 - DNA, 75 bp, synthetic construct
  source 1..75: mol_type = other DNA
ctttctcagggggtttagtctccaggattccggggcggttcaagacgtcgctgagagggcacttacggaactggt

SEQ ID NO: 778414 - DNA, 75 bp, synthetic construct
  source 1..75: mol_type = other DNA
ctggtactttgccgtgttgcgcaatttgcccggaccacgccaggctgtgagcgcgtttgatctggcctttttgag

SEQ ID NO: 778415 - DNA, 75 bp, synthetic construct
  source 1..75: mol_type = other DNA
tatggccggagataatgagcctcctgtgtggcttggggagcagcagttatccgaactggataagctgcaaattgt

SEQ ID NO: 778416 - DNA, 75 bp, synthetic construct
  source 1..75: mol_type = other DNA
cgtgagcaactagttggtaaaagtctgattattttaccggaccaacctaaatattttggtgaaggtaatggtatt

SEQ ID NO: 778417 - DNA, 75 bp, synthetic construct
  source 1..75: mol_type = other DNA
gggccaaagcaactggcagacctggtgaatatccgcattgtcgacgatgaacgccgctttgcgcgtgtctatctc

SEQ ID NO: 778418 - DNA, 75 bp, synthetic construct
  source 1..75: mol_type = other DNA
ttcgtatatctccccgcgaggccaggtcgttaattgaacaggctgaaaaacggcagaaggatgcgcagaacgcag

SEQ ID NO: 778419 - DNA, 75 bp, synthetic construct
  source 1..75: mol_type = other DNA
gctgtattttgtagcacccaccccggtttgcctgtcggtccagttgctgaaaaggaacagtggggcacgatatgc

SEQ ID NO: 778420 - DNA, 75 bp, synthetic construct
  source 1..75: mol_type = other DNA
ccaataacgttgccttatcatcaagtagcaaaggtggagtatgtggctggtattctgaagcaatctcgccatctg

SEQ ID NO: 778421 - DNA, 75 bp, synthetic construct
  source 1..75: mol_type = other DNA
ccagcatgaaaatggaagaaatatctattctcgagagctgattaataaggctgccgtggcaggaattagtggcaa

SEQ ID NO: 778422 - DNA, 75 bp, synthetic construct
  source 1..75: mol_type = other DNA
ccggcctggataatctttactgggcgtcacagcgcaccggcgcgacagtccagggaattcagtctattggctatg

SEQ ID NO: 778423 - DNA, 75 bp, synthetic construct
  source 1..75: mol_type = other DNA
cgacgatctttaccggcgtcggccagcgtcttagcagcatgccgtattaccgcgcgaaccagtacgctcagatgc

SEQ ID NO: 778424 - DNA, 75 bp, synthetic construct
  source 1..75: mol_type = other DNA
atcagccgaaggataaattcaccgaggtaatcatttttgccgggacggacgcttactcccatgctcaacactgga

SEQ ID NO: 778425 - DNA, 75 bp, synthetic construct
  source 1..75: mol_type = other DNA
gttcagcacatcagcatccgcgaccggctgaataattttatgcagcagcacagcactggcggcggcactggcacc

SEQ ID NO: 778426 - DNA, 75 bp, synthetic construct
  source 1..75: mol_type = other DNA
cagattttccaggacggtgatggtgggaatgtacgcataccgttcactgcgggaggtgtgccggtcttctccaaa

SEQ ID NO: 778427 - DNA, 75 bp, synthetic construct
  source 1..75: mol_type = other DNA
actgatggtaaagtaggaaaaatagaaatttatacagatacaggcgagcttatttttgaacggtataaaaccaag

SEQ ID NO: 778428 - DNA, 75 bp, synthetic construct
  source 1..75: mol_type = other DNA
caacctaaacgactattgcaatatatgtcaaaggattgtaaacaccaatatatcagtaaccgattttaatggtga

SEQ ID NO: 778429 - DNA, 75 bp, synthetic construct
  source 1..75: mol_type = other DNA
gtaatctgagtgagcaggatatctggctgctgaccgcagcggattatgcccagctgacggatgcctttaatgttt

SEQ ID NO: 778430 - DNA, 75 bp, synthetic construct
  source 1..75: mol_type = other DNA
acaccgaccgacagtctgtgctgcgagctggttctgccggccggaactctcaggcttaaaggtaaacagcatctc

SEQ ID NO: 778431 - DNA, 75 bp, synthetic construct
  source 1..75: mol_type = other DNA
ttcgcttctgttttgggcttctttatcggtctggcgagactttcggataactggctgctacgaaagctttccaca

SEQ ID NO: 778432 - DNA, 75 bp, synthetic construct
  source 1..75: mol_type = other DNA
aagaaggttcaggtaacggtaatggacgtaaacttgctaaagagaacggcgacggttcagtatgtccacttccta

SEQ ID NO: 778433 - DNA, 75 bp, synthetic construct
  source 1..75: mol_type = other DNA
acgtaaacttgctaaagagaacggcgacggttcagtatgtccacttcctatgactttgactttgactttggttta

SEQ ID NO: 778434 - DNA, 75 bp, synthetic construct
  source 1..75: mol_type = other DNA
gatgaaaaaaacagaggcccgaaagaacgaattattcatctgaaagatcttgctgatggtaagcgtacagcctga

SEQ ID NO: 778435 - DNA, 75 bp, synthetic construct
  source 1..75: mol_type = other DNA
tatattgtttaacagagtggattgaaaaaaacctgcattccgatataaacattgactccgttgccaaaaaaagtg

SEQ ID NO: 778436 - DNA, 75 bp, synthetic construct
  source 1..75: mol_type = other DNA
atgcaatgggacattggagggatattattttttttctcgccatatctttaatatactcaacttaaatatttatcc

SEQ ID NO: 778437 - DNA, 75 bp, synthetic construct
  source 1..75: mol_type = other DNA
cggtaactcagcaaattgagcttcgtgcggagataaaaaaggcaggcaggccacctcacgctgacttctgggttc

SEQ ID NO: 778438 - DNA, 75 bp, synthetic construct
  source 1..75: mol_type = other DNA
ttatcgcacagagttgctacgtgtttgatggcgagcaggatgagctatctgatgcgtatatctgcgcaatagacg

SEQ ID NO: 778439 - DNA, 75 bp, synthetic construct
  source 1..75: mol_type = other DNA
gggaaaaaatgaaacaaatgtcactaattgagatggatggttttctgaaaggtaaatgcatcccacgagatttaa

SEQ ID NO: 778440 - DNA, 75 bp, synthetic construct
  source 1..75: mol_type = other DNA
ccccagaccggcacgccagccaccgatctggatgatgactactttgacatgttgcaggaggagctttgcagcgtg

SEQ ID NO: 778441 - DNA, 75 bp, synthetic construct
  source 1..75: mol_type = other DNA
atgaaaaaggttggcgaatacatgataccggataacgctaaattagccggaatcggtcaatttggttgttattac

SEQ ID NO: 778442 - DNA, 75 bp, synthetic construct
  source 1..75: mol_type = other DNA
attcacccccatgcgcggctttagcaattgtcatctacaaaccatgctgccgcgtctgttccgtcgcaaggccgt

SEQ ID NO: 778443 - DNA, 75 bp, synthetic construct
  source 1..75: mol_type = other DNA
taatgttccaggcttgctttccctgataactgcacatctcaaagacctgcctgatgatggaagaaatgaagatgt

SEQ ID NO: 778444 - DNA, 75 bp, synthetic construct
  source 1..75: mol_type = other DNA
ccacagactggcacacctgccaccgatctggatgatgactactttgatatgttgcaggaagaactctgcagcgtg

SEQ ID NO: 778445 - DNA, 75 bp, synthetic construct
  source 1..75: mol_type = other DNA
taccgcgctttgtgcgctgctgttaagtcgtaaaaatccgtttggcgatatcaaatcggatggcactgtgcaaac

SEQ ID NO: 778446 - DNA, 75 bp, synthetic construct
  source 1..75: mol_type = other DNA
aaataaatactatcaatatcagctacctggtgccgggaaaccgcacctgtatcgccggttcggtcaacatttgat

SEQ ID NO: 778447 - DNA, 75 bp, synthetic construct
  source 1..75: mol_type = other DNA
ttactcaagacaacgggttgtattttgagtgtaataatcttaatagtaggtattggcttttatactggaacatta

SEQ ID NO: 778448 - DNA, 75 bp, synthetic construct
  source 1..75: mol_type = other DNA
tacgaccgccacggcaacctgctggcctggacggacggtaacggtgttgtctggacaatggaatacggcccgttt

SEQ ID NO: 778449 - DNA, 75 bp, synthetic construct
  source 1..75: mol_type = other DNA
cttgtcacccagcgcgccggatttttcccggaggaaaccacatggggcgggctggttccgtcactggtacgggag

SEQ ID NO: 778450 - DNA, 75 bp, synthetic construct
  source 1..75: mol_type = other DNA
ggcaaaacgcagtatgcctatgacaaatccggcaggctgacgggtatcttcagcccggacggcacatcacagcgc

SEQ ID NO: 778451 - DNA, 75 bp, synthetic construct
  source 1..75: mol_type = other DNA
ctaaaaacagaaggaatacttgctaatacaaaattccaagtgacttttaaacaagatgataatgatgagttagca

SEQ ID NO: 778452 - DNA, 75 bp, synthetic construct
  source 1..75: mol_type = other DNA
gtttactgcaaaagtgacggaagcgtacttgtctttattagcgcatggcgcgaaagcgaccgtggcgaaatattc

SEQ ID NO: 778453 - DNA, 75 bp, synthetic construct
  source 1..75: mol_type = other DNA
gcataaacgtgctgatgaccttttcgattgttatacctacggattgatcatcgcgcacggtaattacgcggcgtt

SEQ ID NO: 778454 - DNA, 75 bp, synthetic construct
  source 1..75: mol_type = other DNA
gctggcgacccgtcaggagccggacggcctgccgccggtggagtggctgacgtatggcagcggttatcttgcggg

SEQ ID NO: 778455 - DNA, 75 bp, synthetic construct
  source 1..75: mol_type = other DNA
actggtcagtcagaaggatgcgcaggggcgtgaaatccgttatgagtacagcgccgcaggcgacctgacagcaac

SEQ ID NO: 778456 - DNA, 75 bp, synthetic construct
  source 1..75: mol_type = other DNA
aaaggcctctgaggtggtcatcgccaccgatgccgaccgcgagggagaagttatcgcgcgtgagctgctggaata

SEQ ID NO: 778457 - DNA, 75 bp, synthetic construct
  source 1..75: mol_type = other DNA
tggaggttgtcaggggatggcgtgcgctttttgtgtcagattcggcgggagaggaagaggatgttgcagacgatg

SEQ ID NO: 778458 - DNA, 75 bp, synthetic construct
  source 1..75: mol_type = other DNA
aaatagccaggatatccaatttgatacaatgctatcgtactatgtaaaaaaagtttttgatgaactcaaacaacg

SEQ ID NO: 778459 - DNA, 75 bp, synthetic construct
  source 1..75: mol_type = other DNA
attctgccgcaatgggtattgggcaaaatatgctgtggcttggtgcgctgtcgtttgatgtcacgtgggccagta

SEQ ID NO: 778460 - DNA, 75 bp, synthetic construct
  source 1..75: mol_type = other DNA
aacggtggtcgggttggctatgacatgcaaaacagtagccacagcaccatacaccgcatgtcgtggaacgatacg

SEQ ID NO: 778461 - DNA, 75 bp, synthetic construct
  source 1..75: mol_type = other DNA
acgccccacaaattagcggtattgcacagaccaatgccacggtgacgatcagtcaatcaggtcgcgtcatttacc

SEQ ID NO: 778462 - DNA, 75 bp, synthetic construct
  source 1..75: mol_type = other DNA
accggaccaggacgcccgcgccggtgggggtgtttggtcccggctggaaagcgcccttcgatatccgcttacaga

SEQ ID NO: 778463 - DNA, 75 bp, synthetic construct
  source 1..75: mol_type = other DNA
ataacctcgaatttattaatacccacccgaatctggtcggattcctgatggggttattaatttcgatggaagaaa

SEQ ID NO: 778464 - DNA, 75 bp, synthetic construct
  source 1..75: mol_type = other DNA
gcgtatttgatgactacatatccacacctagcggttcaaaaggatttataaaatcgctaagcacaactaacctaa

SEQ ID NO: 778465 - DNA, 75 bp, synthetic construct
  source 1..75: mol_type = other DNA
tataaagattttgatgattatctgaaggcatatctttgtgatgacgtgagtgcctgttctcgttcctggcgagca

SEQ ID NO: 778466 - DNA, 75 bp, synthetic construct
  source 1..75: mol_type = other DNA
tgatgggccaatattaggatttattggggctattagctcatataaaatcaattttttattgctggagaagatagc

SEQ ID NO: 778467 - DNA, 75 bp, synthetic construct
  source 1..75: mol_type = other DNA
caaggtaaaacgaggttgcagattcaggaagagctaggaatctctagagcaacttattacagacttgctaaataa

SEQ ID NO: 778468 - DNA, 75 bp, synthetic construct
  source 1..75: mol_type = other DNA
tttttgttttagctttccaatcagccagttaatggctacggcgatcccagtcagaggagccaaatttctgaaaag

SEQ ID NO: 778469 - DNA, 75 bp, synthetic construct
  source 1..75: mol_type = other DNA
gataccggcatggaaaatcagcgctggatgcaatagcagttaccagaaaacgttgctggcaatacgactggtgtc

SEQ ID NO: 778470 - DNA, 75 bp, synthetic construct
  source 1..75: mol_type = other DNA
gctgccggagtggataaccagacgctgaaagattttgagcgggatctgaaaggaaatctgtacaaaatctggaac

SEQ ID NO: 778471 - DNA, 75 bp, synthetic construct
  source 1..75: mol_type = other DNA
gaataaactggcaaaacgttttcaggaatgtggactggaattacatccggagaaaacgaaaatagtttactgcaa

SEQ ID NO: 778472 - DNA, 75 bp, synthetic construct
  source 1..75: mol_type = other DNA
ttcacaaatttatgaatatatctcgagtactcattggattgataaatgaaacgttaagatactttcctttgggac

SEQ ID NO: 778473 - DNA, 75 bp, synthetic construct
  source 1..75: mol_type = other DNA
aatgatatcgatatgcataaaatagccaatgactggtataaaaaattttaccgtactgattatcagggtgaagaa

SEQ ID NO: 778474 - DNA, 75 bp, synthetic construct
  source 1..75: mol_type = other DNA
gctttcttaaccgcgtacgcggggctctttccgtcacggatacaccggcgctgaacgtttcggcgtcgtacctgg

SEQ ID NO: 778475 - DNA, 75 bp, synthetic construct
  source 1..75: mol_type = other DNA
atgggccatggccttcggcggcggtgtcgggaaggtgtgttggccggacggatactgttgaactacgttgtctgg

SEQ ID NO: 778476 - DNA, 75 bp, synthetic construct
  source 1..75: mol_type = other DNA
cttatcatactcatggtgcagatagtcatggagaatattgggacgaaatattttcaggtaaagatgagaaaatag

SEQ ID NO: 778477 - DNA, 75 bp, synthetic construct
  source 1..75: mol_type = other DNA
gtggtatttaatcactaacaccaaacgatttgtattatccgcggccgaaaactcaatggcatttgagcttgagaa

SEQ ID NO: 778478 - DNA, 75 bp, synthetic construct
  source 1..75: mol_type = other DNA
agctcgacaatatacatatcaatcgagaacaaaaaaaatgctagatttaattgagaataacgataattctattta

SEQ ID NO: 778479 - DNA, 75 bp, synthetic construct
  source 1..75: mol_type = other DNA
gtgatttaaaaattgagcaatctccggaactgagcgccaaagtggtagaaaaactgaatcaggtttgcgctaaag

SEQ ID NO: 778480 - DNA, 75 bp, synthetic construct
  source 1..75: mol_type = other DNA
atgaaatcaaaacggtttatccccgctggcgcggggaacacacaacccgatcgccgtagtcctcggcgcgggacg

SEQ ID NO: 778481 - DNA, 75 bp, synthetic construct
  source 1..75: mol_type = other DNA
atgctccccacgtcgggcgatgaagcgtatccggtttatccccgctggcgcggggaacactctaaacataaccta

SEQ ID NO: 778482 - DNA, 75 bp, synthetic construct
  source 1..75: mol_type = other DNA
gccggaaacacgcagtatgactatgacgccgcaggccggatggtcatccggacaaaacaccgtgacggctaccgc

SEQ ID NO: 778483 - DNA, 75 bp, synthetic construct
  source 1..75: mol_type = other DNA
tctggaagctgccggtggtaaagtggttacaacgggtaaagatattctggttaccctgccggcgtaccggttcac

SEQ ID NO: 778484 - DNA, 75 bp, synthetic construct
  source 1..75: mol_type = other DNA
caataaagtcatattcagaaacatccagccatttaatggtatccagtgataaccatgataaatgggatgtttttg

SEQ ID NO: 778485 - DNA, 75 bp, synthetic construct
  source 1..75: mol_type = other DNA
cttatagtaaagtaatttatcattgcgttgacgaaataaaagcacaaccaggaatgccaatagatattcttgaaa

SEQ ID NO: 778486 - DNA, 75 bp, synthetic construct
  source 1..75: mol_type = other DNA
atgtgataaactagattttttgcggtctattgatgctgttttacgaggagatatagtttctctagaagagagatt

SEQ ID NO: 778487 - DNA, 75 bp, synthetic construct
  source 1..75: mol_type = other DNA
gttatgttgtttatcattgtgttgatgagattaaggctcaaccaggaatgccggtttcaattttagaagaatcag

SEQ ID NO: 778488 - DNA, 75 bp, synthetic construct
  source 1..75: mol_type = other DNA
aaagccctcatggctcaatactggtatgaagtagaaaaaatagcgcatttgcttgaacgggatagcattgtgaat

SEQ ID NO: 778489 - DNA, 75 bp, synthetic construct
  source 1..75: mol_type = other DNA
caaggtcagcgtggagcccggagaacgtgcgtgggatacccttgagcgtgcagctgctgcacgcgggttatggcc

SEQ ID NO: 778490 - DNA, 75 bp, synthetic construct
  source 1..75: mol_type = other DNA
tctcgataaaccgatccttggttttatcggagcagtaagtggatacaaagtcgactttaatttattaagtttcat

SEQ ID NO: 778491 - DNA, 75 bp, synthetic construct
  source 1..75: mol_type = other DNA
atacggcgaaagcgttcacctatctgctgaagcaatgggacgccctgaacgaatactgcagtaatggctgggtgg

SEQ ID NO: 778492 - DNA, 75 bp, synthetic construct
  source 1..75: mol_type = other DNA
ggcgcagaagtggtcaatacggcccgcaaactttacccgcacctgacgctgctactcatcagcggtcaggattta

SEQ ID NO: 778493 - DNA, 75 bp, synthetic construct
  source 1..75: mol_type = other DNA
cgctgacgctggagattgaagcacagtctccggcgtggcctgcgtggattgacgtcagccaactggaaaacgcca

SEQ ID NO: 778494 - DNA, 75 bp, synthetic construct
  source 1..75: mol_type = other DNA
aaaaaagtagcaacctttgacggtcagaatttaagagatgctagttcaaaaattatcctgagtgccgatgctgag

SEQ ID NO: 778495 - DNA, 75 bp, synthetic construct
  source 1..75: mol_type = other DNA
atgctgtattgtttaaccctcttgccaattatcatggggaatattgatgaaaacgaagagttcaacgattggagc

SEQ ID NO: 778496 - DNA, 75 bp, synthetic construct
  source 1..75: mol_type = other DNA
ttagtcggtttgccatgggtagtgaaatttttatgggcttcgtttattgataaccattgggggaaacgtttaggt

SEQ ID NO: 778497 - DNA, 75 bp, synthetic construct
  source 1..75: mol_type = other DNA
ctgtgaaatggtttcgcctggcagcagagcaaggtcgtgacagcggccagcaaagtatgggagatgcatattttg

SEQ ID NO: 778498 - DNA, 75 bp, synthetic construct
  source 1..75: mol_type = other DNA
tcctccaccgctggataaatttgataaggatttttgttctgtcacctataaaaatggtattttaattaaaagaac

SEQ ID NO: 778499 - DNA, 75 bp, synthetic construct
  source 1..75: mol_type = other DNA
tactacagagactgtttcctgatggtcctccaccgctggataaatttgataaggatttttgttctgtcacctata

SEQ ID NO: 778500 - DNA, 75 bp, synthetic construct
  source 1..75: mol_type = other DNA
actttctggcatctgaagagatgcagagaatatctgtaaacatggttggcaggccttacaacatctgcattccat

SEQ ID NO: 778501 - DNA, 75 bp, synthetic construct
  source 1..75: mol_type = other DNA
atgaagaaaatagtagttattgaacctggatatttaaattattctgcagaagaaaatattttacaggattgggat

SEQ ID NO: 778502 - DNA, 75 bp, synthetic construct
  source 1..75: mol_type = other DNA
ccggaacgcgcggtaaagatgtattaaccctggcaaaagagatgttggagaatttcggctctctttatggcttgt

SEQ ID NO: 778503 - DNA, 75 bp, synthetic construct
  source 1..75: mol_type = other DNA
acaacagtattaatgttagtcgatttttgtttaggcgcagatgctaaaggcatttatactgacccagaaactaaa

SEQ ID NO: 778504 - DNA, 75 bp, synthetic construct
  source 1..75: mol_type = other DNA
gctttccagtacggtgatggtggggatgtacgtatagttctggcttcgggacgtgtgtttatcttccccgaaaat

SEQ ID NO: 778505 - DNA, 75 bp, synthetic construct
  source 1..75: mol_type = other DNA
tgcccgccagacgggtttacatccctaaaagcaacggcaaactgcgaccactgggtatcccgcgttgcgggatcg

SEQ ID NO: 778506 - DNA, 75 bp, synthetic construct
  source 1..75: mol_type = other DNA
accacttcattgaataccctggatccattaatacttaatcaggaattagtgcaaaacatttcggataaaaaaatc

SEQ ID NO: 778507 - DNA, 75 bp, synthetic construct
  source 1..75: mol_type = other DNA
tcggttttggcgcgaaagccgggatgatgccgttgcacagctggttgccgcgcgctcaccctgccgcaccatcgc

SEQ ID NO: 778508 - DNA, 75 bp, synthetic construct
  source 1..75: mol_type = other DNA
attttgatagcaacaaccaatattattttatccttatgcgcagtttttgcgttcaaaaacatatcaagtctattc

SEQ ID NO: 778509 - DNA, 75 bp, synthetic construct
  source 1..75: mol_type = other DNA
tctttgggctgcggactcgtgaacacagccaggcaggtcagctatccggcaaagcgcaatgtatcggctatttga

SEQ ID NO: 778510 - DNA, 75 bp, synthetic construct
  source 1..75: mol_type = other DNA
gatgtaccaggttgcagggatgcgatagtggcaaatgttactgggatgttagtcgcagttcgagatcctgtatcg

SEQ ID NO: 778511 - DNA, 75 bp, synthetic construct
  source 1..75: mol_type = other DNA
aataaccctaacacttgttgaggatttagatgatccgctagctaagaccatcgtcattgagcgaaattttctctc

SEQ ID NO: 778512 - DNA, 75 bp, synthetic construct
  source 1..75: mol_type = other DNA
atcaaaagaattacctgtaataactagtgagattagtaaaactcaagaagatttaactatacttcttgccaaaga

SEQ ID NO: 778513 - DNA, 75 bp, synthetic construct
  source 1..75: mol_type = other DNA
tatgcggatgccattcgttataatgctcgaacgcctctgcaaggttctttgctgccgttaacccgtctggtttgg

SEQ ID NO: 778514 - DNA, 75 bp, synthetic construct
  source 1..75: mol_type = other DNA
tataaggcgattgttaaaccgaaaaggggtttctgaaatagttcgcctctcttacagattcaacaatacaccatc

SEQ ID NO: 778515 - DNA, 75 bp, synthetic construct
  source 1..75: mol_type = other DNA
acgatgccggacaggcgctgcattatgagattttcgacgacgccaattttatggtgctggtggaaccggagatta

SEQ ID NO: 778516 - DNA, 75 bp, synthetic construct
  source 1..75: mol_type = other DNA
agttatgcccgtggcacgataaccgtcacggtttacgatgaccagggcttcgaccggcagattatcattccaccg

SEQ ID NO: 778517 - DNA, 75 bp, synthetic construct
  source 1..75: mol_type = other DNA
ttatattcacacactggattggttacatgctattaacctttctttgcgcgttcttatgctacaaagcaataagaa

SEQ ID NO: 778518 - DNA, 75 bp, synthetic construct
  source 1..75: mol_type = other DNA
agcaaaacaaactccattaattcctgttccaggcctttcctgcaccttgcggcgggaggccttcgcacatctgta

SEQ ID NO: 778519 - DNA, 75 bp, synthetic construct
  source 1..75: mol_type = other DNA
tggtggggcgtacagggccagcatcagctgggccgggtcctctgttagccggtagttccaaccctgtacgtctca

SEQ ID NO: 778520 - DNA, 75 bp, synthetic construct
  source 1..75: mol_type = other DNA
cttcacgctgtgatgatgatggctatgtgcagttctgtccgtcactttgtcacaacaacccacatgaaaatacaa

SEQ ID NO: 778521 - DNA, 75 bp, synthetic construct
  source 1..75: mol_type = other DNA
ggtcacggttttaggttccgtgctgtttcgtggtttcctggcaattatcccgattttaattggcgtgctggtggg

SEQ ID NO: 778522 - DNA, 75 bp, synthetic construct
  source 1..75: mol_type = other DNA
aaaaataagttaaatagagcaattattatattttttgcaattttagtggctgttattgcgtcttttgtgtcaggt

SEQ ID NO: 778523 - DNA, 75 bp, synthetic construct
  source 1..75: mol_type = other DNA
ttgctgggaaggctgggtcatatccctccggtagaagcagaaaaagcttattatgcttccatcagaaacgatgat

SEQ ID NO: 778524 - DNA, 75 bp, synthetic construct
  source 1..75: mol_type = other DNA
gggattccggctcactggagcaggatgcggatttggttttatttttataccgcgatgaggtgtatcacgaacact

SEQ ID NO: 778525 - DNA, 75 bp, synthetic construct
  source 1..75: mol_type = other DNA
agtatccgccatatccggcgctggttcgtcacggaacggggatgtcatctccggctaaccaggcatttgaacagt

SEQ ID NO: 778526 - DNA, 75 bp, synthetic construct
  source 1..75: mol_type = other DNA
cccacagtttcgcagctctggatggtgagttttcacaacttactacacaaggggccacaccatggcaaaccgcaa

SEQ ID NO: 778527 - DNA, 75 bp, synthetic construct
  source 1..75: mol_type = other DNA
cggtttttttgtgcgtactgtatcgccacgtctttttcgcgtcagaattatggtggggcgtatggggccgacttc

SEQ ID NO: 778528 - DNA, 75 bp, synthetic construct
  source 1..75: mol_type = other DNA
caccggctggtgcactacacgcggacacaatatgaagagccgctggtcgaaagccgctatctttacgacccgctg

SEQ ID NO: 778529 - DNA, 75 bp, synthetic construct
  source 1..75: mol_type = other DNA
atgctcactggtttgcgctgccaaccctctatacgccgcgcttcgagtggttcgctattctgactattctgccag

SEQ ID NO: 778530 - DNA, 75 bp, synthetic construct
  source 1..75: mol_type = other DNA
gaacatttcaagagattatatccacagacaatacagagatcttatgataatcttaatgctagaacattttattct

SEQ ID NO: 778531 - DNA, 75 bp, synthetic construct
  source 1..75: mol_type = other DNA
agtgtgctgtacgtgatccgagtcgcgatggtacccggggaccggggcatgtgctgaatggtgacaatacagacg

SEQ ID NO: 778532 - DNA, 75 bp, synthetic construct
  source 1..75: mol_type = other DNA
atcccccgacgttctccctgacgccggagggcaggctgacggcccgcaatgcggatatcagcggagctgtgacag

SEQ ID NO: 778533 - DNA, 75 bp, synthetic construct
  source 1..75: mol_type = other DNA
cagtgtgaactggccttccggaacgcgcacgttcactgtgtatgatgatcacccgtttgaccgccagatagtggt

SEQ ID NO: 778534 - DNA, 75 bp, synthetic construct
  source 1..75: mol_type = other DNA
actgtacatgctgaaggtgcagaaaacaaaaaacggcattccgtatgttgccggtattggtgcggggattgagga

SEQ ID NO: 778535 - DNA, 75 bp, synthetic construct
  source 1..75: mol_type = other DNA
cgcctatatgcgtggacgtacatttgaaaatgcggtcgtcattcttgatgaggcgcagaatgtgactgccgcaca

SEQ ID NO: 778536 - DNA, 75 bp, synthetic construct
  source 1..75: mol_type = other DNA
ggatggttggataagctgtagtgagcgaatgccccctcaagatgattggattttaatttattcaaagcacggcga

SEQ ID NO: 778537 - DNA, 75 bp, synthetic construct
  source 1..75: mol_type = other DNA
aaactggcgactggctttacgatgacccgctggagctggctaaagctatcagaaaaggtcctgacatgcccgagt

SEQ ID NO: 778538 - DNA, 75 bp, synthetic construct
  source 1..75: mol_type = other DNA
caggtaatgccagtaaggataccgggaatgataatagctgggatattggtggtggttgtgaaggctcacgggaag

SEQ ID NO: 778539 - DNA, 75 bp, synthetic construct
  source 1..75: mol_type = other DNA
accgggcaaatatctcgaaagtgttcggtgaactgattacgttaattgagccggataaacgccttggaatgcctg

SEQ ID NO: 778540 - DNA, 75 bp, synthetic construct
  source 1..75: mol_type = other DNA
tgacgcctagtaactggacgcaaacctatcccttccgttgcgaaatgaagcctggtgatatcgtgattgtccctt

SEQ ID NO: 778541 - DNA, 75 bp, synthetic construct
  source 1..75: mol_type = other DNA
ggagcagcctgcccgcagacacagactacccggacccgcgcggggagcgggacgcggaagccgaccccggcctgc

SEQ ID NO: 778542 - DNA, 75 bp, synthetic construct
  source 1..75: mol_type = other DNA
acaagcgcctgcggaaagaaagctcgcatctggcggttgttagcgatctgcaaaacgccgtcaagggtgctttac

SEQ ID NO: 778543 - DNA, 75 bp, synthetic construct
  source 1..75: mol_type = other DNA
ttctataatctcagggaagatgtaaagacgttatttggcgttgatctacaatctgacaaccaaattcaggggcag

SEQ ID NO: 778544 - DNA, 75 bp, synthetic construct
  source 1..75: mol_type = other DNA
atatcgtcattgcgggagtactgagaaccacccttgctaaccagcgcgtgaagcgcagtgagttagggaaggtgc

SEQ ID NO: 778545 - DNA, 75 bp, synthetic construct
  source 1..75: mol_type = other DNA
tacactgcaacaccggtagctgatagaaccgtgtccgctcccacgcagttcggcgaaacacaacgtctagtcgaa

SEQ ID NO: 778546 - DNA, 75 bp, synthetic construct
  source 1..75: mol_type = other DNA
aaaacgattggcgataaagtaagggatatgattgccaaagagaggggaaccactctaattgaacaaaattataga

SEQ ID NO: 778547 - DNA, 75 bp, synthetic construct
  source 1..75: mol_type = other DNA
ctttactggcgctgtcaatttctctggtctgccaccaggcggcagcaaacagccgtttgaacgcgtcggcaattc

SEQ ID NO: 778548 - DNA, 75 bp, synthetic construct
  source 1..75: mol_type = other DNA
tttatccggtgctggttgataaaacaatgacacttgcaggtatttctgactgggaactccggcgttttcagattg

SEQ ID NO: 778549 - DNA, 75 bp, synthetic construct
  source 1..75: mol_type = other DNA
atggttgataaaaaaacgatcgaggctcttgttgatacggcattctataatctcagggaagatgtaaagacgtta

SEQ ID NO: 778550 - DNA, 75 bp, synthetic construct
  source 1..75: mol_type = other DNA
ggtgctggctaacgcctcgtatgaatattaccgcgccttcgaagatgcttggatggcgaaggattacagcgcctt

SEQ ID NO: 778551 - DNA, 75 bp, synthetic construct
  source 1..75: mol_type = other DNA
agattgagcaggcgtgggatatcatggtgaaaaccgcctaccatcgccgcaaagaccgtcagcgggcggaagact

SEQ ID NO: 778552 - DNA, 75 bp, synthetic construct
  source 1..75: mol_type = other DNA
ttggttataattattttcaaccatcaggcagtggagaaattaacattccaataaatgttgtgttgaaatcggaaa

SEQ ID NO: 778553 - DNA, 75 bp, synthetic construct
  source 1..75: mol_type = other DNA
cagcacaaacaaacttaaacgtttacagtaaagaagctggagacgctcgttatctgaaagcgacatctaacctga

SEQ ID NO: 778554 - DNA, 75 bp, synthetic construct
  source 1..75: mol_type = other DNA
atgggtatatacaaatccctccagtgacaactttccgcgccgacggaccagaaactcccgaagaagaaaagggtt

SEQ ID NO: 778555 - DNA, 75 bp, synthetic construct
  source 1..75: mol_type = other DNA
gtggcattcaccgcgaaaattgccagcggtctcgacgacctgtactgggcctctcagcgcacaggcgcgacggtg

SEQ ID NO: 778556 - DNA, 75 bp, synthetic construct
  source 1..75: mol_type = other DNA
cgaggtgtttggggcgctaatgattgcctggcgtctcctgaatagtgcctttgcgatgtcgcctattgggcgcgt

SEQ ID NO: 778557 - DNA, 75 bp, synthetic construct
  source 1..75: mol_type = other DNA
ggcaatgcgtcgcggtatcggccagtttagtggcgaatacaccgcgatggcgaaggcgatcggctataacgccga

SEQ ID NO: 778558 - DNA, 75 bp, synthetic construct
  source 1..75: mol_type = other DNA
catgtgaccgctgcagtctacgaaatcatggtgaccaccaaagcaatgcaggaatatgagctgcaagtggtggct

SEQ ID NO: 778559 - DNA, 75 bp, synthetic construct
  source 1..75: mol_type = other DNA
cctggcatatcagccgtccgctggtggattttggtatgcgccagccggtaggtgttggtgatgtgacgagcggtt

SEQ ID NO: 778560 - DNA, 75 bp, synthetic construct
  source 1..75: mol_type = other DNA
atcagttgattcatggaacctccaaataaaagcacctacatgtaaatactctgacatttctatcgattttggaaa

SEQ ID NO: 778561 - DNA, 75 bp, synthetic construct
  source 1..75: mol_type = other DNA
atgatgattaaatatgtaatggatgctccatctagggaaccgactcgaaacaaaaaagggtcagtgaaagttaag

SEQ ID NO: 778562 - DNA, 75 bp, synthetic construct
  source 1..75: mol_type = other DNA
agtacaaattatcctgaacgaaatttattgagtcaatcttgggtagaactttcgcctaaattttttcaactaata

SEQ ID NO: 778563 - DNA, 75 bp, synthetic construct
  source 1..75: mol_type = other DNA
gccgaagaagtacaactataaaggtcagccagcggttggcccggaaaccaaagaaatcagtccttacagcattgt

SEQ ID NO: 778564 - DNA, 75 bp, synthetic construct
  source 1..75: mol_type = other DNA
tttgtgaacagtggcggcaaaaggatccccggactggttaaccggcgcacagactttaaggcatggtgcctgaag

SEQ ID NO: 778565 - DNA, 75 bp, synthetic construct
  source 1..75: mol_type = other DNA
atattagctcattatcatgatgagtttaatttgataaaaaatatagcattttcattacctacaggttattcattg

SEQ ID NO: 778566 - DNA, 75 bp, synthetic construct
  source 1..75: mol_type = other DNA
cagagcgttatctggttcgggaagtgtactgatgggcgacaacaacactattgtggggttatttgtgcgggtacg

SEQ ID NO: 778567 - DNA, 75 bp, synthetic construct
  source 1..75: mol_type = other DNA
tgagcttatcacctggtgtatgcagacgccgccagggcgctaccttgtggagcagagaaacaatccagattttaa

SEQ ID NO: 778568 - DNA, 75 bp, synthetic construct
  source 1..75: mol_type = other DNA
gagcgtcaccgttccgacagccgatctccaggcgttgggcaatggcgatttgaccattaccgcctcggtcaccaa

SEQ ID NO: 778569 - DNA, 75 bp, synthetic construct
  source 1..75: mol_type = other DNA
cagcgtcagcaatgttaacggcaacagcgccaccactacccacgcttacagcgtcgatgctaccgcgccaacggt

SEQ ID NO: 778570 - DNA, 75 bp, synthetic construct
  source 1..75: mol_type = other DNA
atttttaagcaagttgttaaaaatgcgcaatataaaaacagtcatggcggctataaaacatagtcttatgaaaag

SEQ ID NO: 778571 - DNA, 75 bp, synthetic construct
  source 1..75: mol_type = other DNA
ggcgccttttgtggtgacaccgccgttgttccgtcttgatggtcagcagtcgagtcgtctgcgtattgtcaggac

SEQ ID NO: 778572 - DNA, 75 bp, synthetic construct
  source 1..75: mol_type = other DNA
cacattgcccatgcgtttaccaataccccttccgtcactgtcgccagcggaatggcacttgtacccggcacgttt

SEQ ID NO: 778573 - DNA, 75 bp, synthetic construct
  source 1..75: mol_type = other DNA
cgctaggcattggcgggccgctgggaatttttgccgcgctgctgcacaccttaaaccacagtctggcaaaaacgc

SEQ ID NO: 778574 - DNA, 75 bp, synthetic construct
  source 1..75: mol_type = other DNA
gatagcgtgaaattacaaagaaatatttatgaccgaactgcagggatgggcgcattacctggcgcatttggtttt

SEQ ID NO: 778575 - DNA, 75 bp, synthetic construct
  source 1..75: mol_type = other DNA
accgccatcagcaggttaaacgctcaggcagataatcttctgtactttaattcggacgggaacgcatcgctgaca

SEQ ID NO: 778576 - DNA, 75 bp, synthetic construct
  source 1..75: mol_type = other DNA
gattgagtcaattaagcaggctgattcggctgttaagttggcacacgagaagttttcggctctggcggcggagaa

SEQ ID NO: 778577 - DNA, 75 bp, synthetic construct
  source 1..75: mol_type = other DNA
cagccaaacaggctgtcgccggaacgctggaggacgatgactcgcgccgagagcctggagtggcttttattcgca

SEQ ID NO: 778578 - DNA, 75 bp, synthetic construct
  source 1..75: mol_type = other DNA
gaacagggaaatcactgttcgcctgaatgagcttggggagtcatccatgaattttgtagtacgggtatggagcag

SEQ ID NO: 778579 - DNA, 75 bp, synthetic construct
  source 1..75: mol_type = other DNA
aaatgcaaatgaaagacctatctgaatttgcaaggatagataatggtaatatacaaataagtgcagcacagttta

SEQ ID NO: 778580 - DNA, 75 bp, synthetic construct
  source 1..75: mol_type = other DNA
aaattctcgattcagttagcggatttttacgctttagttagaagcaatgataaagatcttgagcaaatacgcttg

SEQ ID NO: 778581 - DNA, 75 bp, synthetic construct
  source 1..75: mol_type = other DNA
tgatctgtacgctagaattgacacaacatcattattcgcacctgcggcaacaaaattggctaaatccacggccca

SEQ ID NO: 778582 - DNA, 75 bp, synthetic construct
  source 1..75: mol_type = other DNA
aatcaagaacgagggcgatataacttacaatgtttatactcatgcatctgcacctaatatcagcgtgttaatcga

SEQ ID NO: 778583 - DNA, 75 bp, synthetic construct
  source 1..75: mol_type = other DNA
aatcaatataattacaatggtcatacaggttctgatgttatatcaattatcgattctttaggaggattagataga

SEQ ID NO: 778584 - DNA, 75 bp, synthetic construct
  source 1..75: mol_type = other DNA
ttacattatacagaaatcatatatttatcccgatgtcaatactttgtcttgttgctgtattgggattgtatcaga

SEQ ID NO: 778585 - DNA, 75 bp, synthetic construct
  source 1..75: mol_type = other DNA
ccggctcgggcgttggatgtcggatgcggtgtaaccgccttatccaacctatggggtgccgcacttcacagcggt

SEQ ID NO: 778586 - DNA, 75 bp, synthetic construct
  source 1..75: mol_type = other DNA
ctacggggtggagcacttcacagcggtgtaggcctgataagacgcgccagcgtcgcatcaggcaaccggctcggg

SEQ ID NO: 778587 - DNA, 75 bp, synthetic construct
  source 1..75: mol_type = other DNA
agacgaccgcctcacagcgcacagccggaaagccggacagcacgccggtcacggcgtcattttccattccgggcc

SEQ ID NO: 778588 - DNA, 75 bp, synthetic construct
  source 1..75: mol_type = other DNA
aggccagtgtgaaggaagcactgagcagtattcttccgggggaaaaaacagccctgctgtatgatgccggcaagg

SEQ ID NO: 778589 - DNA, 75 bp, synthetic construct
  source 1..75: mol_type = other DNA
atttatcgctgatgtcaggacggcgaagatagcggagctggtcgttagccaggataacgcggtggcagacggtgc

SEQ ID NO: 778590 - DNA, 75 bp, synthetic construct
  source 1..75: mol_type = other DNA
gagactctcaccacgcgacgctgaagttgtctgagtggggcagcagtaaacaatcagagagttattccatccaca

SEQ ID NO: 778591 - DNA, 75 bp, synthetic construct
  source 1..75: mol_type = other DNA
gatcgctatgacatacagtccggttctccggcgcaagccacatcaactatcgccacggataaaaacgcatacacc

SEQ ID NO: 778592 - DNA, 75 bp, synthetic construct
  source 1..75: mol_type = other DNA
cagaaccaggagacattctctggtgtaagtttcctcatagcgaggacttaggcaacccggggccataccctcgcc

SEQ ID NO: 778593 - DNA, 75 bp, synthetic construct
  source 1..75: mol_type = other DNA
caagtactcagctcatgggagtacacgagaaatttaatcctgaaactggtatatcagagcttgggacaggaaagt

SEQ ID NO: 778594 - DNA, 75 bp, synthetic construct
  source 1..75: mol_type = other DNA
cattaaggatggttcagaggcggacggttcgacggcgaacacgctgcgggcgagggtgaccgatgcgttcggtaa

SEQ ID NO: 778595 - DNA, 75 bp, synthetic construct
  source 1..75: mol_type = other DNA
tagaattagcgcagcggccaagcggcggggtagtaccgcgaaaagtaggtacgttgtggggcgaatatggtaatt

SEQ ID NO: 778596 - DNA, 75 bp, synthetic construct
  source 1..75: mol_type = other DNA
gagtcagaacgtgacatttatcgccgatgtcaggacggcgaagatagcggatctggtggttattaaggatggttc

SEQ ID NO: 778597 - DNA, 75 bp, synthetic construct
  source 1..75: mol_type = other DNA
tcaggacggcgcagatcgcgagtctggaggtgaggcaggataactcagtggcagacggcgcaatggcgaacacgc

SEQ ID NO: 778598 - DNA, 75 bp, synthetic construct
  source 1..75: mol_type = other DNA
cgtcagaaacgggaagctgggttgaatcaggtggcgtgtataccacaacccgaatggcgacgattgccagtacca

SEQ ID NO: 778599 - DNA, 75 bp, synthetic construct
  source 1..75: mol_type = other DNA
atgaacatattgatgagttaattctcggtcatggtgttgatcctgaaaatttcaaagagaaacctgccgaaccac

SEQ ID NO: 778600 - DNA, 75 bp, synthetic construct
  source 1..75: mol_type = other DNA
cgttcaggaggatggtctgaaaccgccggtgtttatactgctacatggtcggcgcaaatggcgggagactctcac

SEQ ID NO: 778601 - DNA, 75 bp, synthetic construct
  source 1..75: mol_type = other DNA
ttgatggcaaagccgattttaacaaagggatctattatgttacacgctggcaacctttcgaatgcagtcttgtaa

SEQ ID NO: 778602 - DNA, 75 bp, synthetic construct
  source 1..75: mol_type = other DNA
agccatgacatgataaaaatctgcgaagatgttagtggtatggcacgtaagaaaaactgggaattccataatatt

SEQ ID NO: 778603 - DNA, 75 bp, synthetic construct
  source 1..75: mol_type = other DNA
agcgaagcgacatttcgaacaaatcttgtgcagcataataagcaggcagaactgattgcgctaagcaatgctgag

SEQ ID NO: 778604 - DNA, 75 bp, synthetic construct
  source 1..75: mol_type = other DNA
aacctctccatgacgccacctcacacggtgctgacggcttccgttacttcgcagtgacgaagaacaaccgcaagc

SEQ ID NO: 778605 - DNA, 75 bp, synthetic construct
  source 1..75: mol_type = other DNA
ccgacggcgttgatagcagcaccatcacttcacgagtagaagatgattacggattcccggttgaaggtgtcgatg

SEQ ID NO: 778606 - DNA, 75 bp, synthetic construct
  source 1..75: mol_type = other DNA
caaatatcggcgatcaaacgtcagtcacaataagcgctgttccccgacaaggaggtacaacctaccagaccttaa

SEQ ID NO: 778607 - DNA, 75 bp, synthetic construct
  source 1..75: mol_type = other DNA
gaaagggaggatgttatgctattgacgtatatgttgctggagaaatattatttaatgactttggacaaatagttt

SEQ ID NO: 778608 - DNA, 75 bp, synthetic construct
  source 1..75: mol_type = other DNA
atcctgaaagcccggcagctcggtttcaccaccgaggtgtgcatcatccagctggacgcggcgctgttcgagtcg

SEQ ID NO: 778609 - DNA, 75 bp, synthetic construct
  source 1..75: mol_type = other DNA
cctgagttttccgcattcctgacgcgccacatcagcgatacagtaaaaagctgggatgctcgggatatgtcgcgg

SEQ ID NO: 778610 - DNA, 75 bp, synthetic construct
  source 1..75: mol_type = other DNA
atcggaaaacatctaaatatctccgaagacgtgattgaagctgcaattaaagatagtgccgtgactattgaaaat

SEQ ID NO: 778611 - DNA, 75 bp, synthetic construct
  source 1..75: mol_type = other DNA
cgaaatcccgcaaagagctggcgcgcgaaggttacgaaatcgatggtcagatgtactcgctgaatttcaaagtgg

SEQ ID NO: 778612 - DNA, 75 bp, synthetic construct
  source 1..75: mol_type = other DNA
aataagcggatcggccagattccggataactcacacctcccggttcacacgttctgggatatcggcgtgggcgac

SEQ ID NO: 778613 - DNA, 75 bp, synthetic construct
  source 1..75: mol_type = other DNA
ggcgggcgggttacttcttcgattactgccagacggcagagaaagcgttgctgcaggggaagcccttatccgcgc

SEQ ID NO: 778614 - DNA, 75 bp, synthetic construct
  source 1..75: mol_type = other DNA
gtgtggaagtttgcccacaacgggcctgtactattgacgaatccagcctgccgaaggtcgatgctggccgctgta

SEQ ID NO: 778615 - DNA, 75 bp, synthetic construct
  source 1..75: mol_type = other DNA
gacagaacggaaaaggtggatatattttgttgtgaatataaacaatgtcagcggtgtaatcggtaaatcactcct

SEQ ID NO: 778616 - DNA, 75 bp, synthetic construct
  source 1..75: mol_type = other DNA
gaataaaggcaaagcacaactggatgtgaaggttggggttgtgaacggacgtctggaaggggacagaagtaaagt

SEQ ID NO: 778617 - DNA, 75 bp, synthetic construct
  source 1..75: mol_type = other DNA
ctggtggacaatatccggcagaaagtaataaataatggcggaagtgttctattattatctggtggtgatattaac

SEQ ID NO: 778618 - DNA, 75 bp, synthetic construct
  source 1..75: mol_type = other DNA
atgtcgctgtcgcgtaaaccggaggagacatggtacgggtgggacggcgacaggctgacgacggtgcagactgac

SEQ ID NO: 778619 - DNA, 75 bp, synthetic construct
  source 1..75: mol_type = other DNA
tatgaattgaaacaagccatacacgcccaatctcctgatacagatccttattatgtgaatatggccatctggcat

SEQ ID NO: 778620 - DNA, 75 bp, synthetic construct
  source 1..75: mol_type = other DNA
cggtatttaccggaggcgcatttccgcaaaaactgcgtttttgtctggattataaggggatgactctggggggcg

SEQ ID NO: 778621 - DNA, 75 bp, synthetic construct
  source 1..75: mol_type = other DNA
tcgtatttgaatcgacgacagtaaatacaggtgataaatcaggtgggttaatgccttgttttaatcaggcactcc

SEQ ID NO: 778622 - DNA, 75 bp, synthetic construct
  source 1..75: mol_type = other DNA
gaattccatcgatgttgaaaaaaatattagcagcgttgtgccgacgcaaggcgcgttggttcgtgccaattttga

SEQ ID NO: 778623 - DNA, 75 bp, synthetic construct
  source 1..75: mol_type = other DNA
cgattacgacggtgagcatcgggatgaaccgataatcgtgaattaccacaatttacgctttagccgtaaagaccg

SEQ ID NO: 778624 - DNA, 75 bp, synthetic construct
  source 1..75: mol_type = other DNA
gacgttactgaccggatgccccggacgcggggattattatcggtttgatgaaacagtaacggtcagcacaagagg

SEQ ID NO: 778625 - DNA, 75 bp, synthetic construct
  source 1..75: mol_type = other DNA
gggcgtggctcagtaatgagcgaccgggtctgatgtttgattttgccactgcatggttacttcaaaataaggtat

SEQ ID NO: 778626 - DNA, 75 bp, synthetic construct
  source 1..75: mol_type = other DNA
accagaaaaagaattacggttgttatgctgcagaacctaatgacgtgcaactggcgcgctattttcatcttgatg

SEQ ID NO: 778627 - DNA, 75 bp, synthetic construct
  source 1..75: mol_type = other DNA
tactcaaacttaccggctctgaagatttcaaaaaaatgtgcgctgaagttgccgcagagcaggacatgaagatta

SEQ ID NO: 778628 - DNA, 75 bp, synthetic construct
  source 1..75: mol_type = other DNA
gccttcaacaatcaatccatcttgaaagaacgcgcgcggcaggcgattgagaacccaccaaagcagccagaacag

SEQ ID NO: 778629 - DNA, 75 bp, synthetic construct
  source 1..75: mol_type = other DNA
cgtttctcttgcctgtttattgaacagatattgtgaggattatatcagagataaccaggacgatatcgataacgt

SEQ ID NO: 778630 - DNA, 75 bp, synthetic construct
  source 1..75: mol_type = other DNA
gcggtaccactaccggcgaacctgaccgctgaaaccccacagccagctattcctgatccgctgacttacagagat

SEQ ID NO: 778631 - DNA, 75 bp, synthetic construct
  source 1..75: mol_type = other DNA
gcggtaccgttgccagcaagcctgactactgaaactccccagccagtcattcccgagccgctgacctatggggcc

SEQ ID NO: 778632 - DNA, 75 bp, synthetic construct
  source 1..75: mol_type = other DNA
ccaattccgcttccagctactctgactttggaaacgccagtaccgcacataccagataccctgacctatggtgac

SEQ ID NO: 778633 - DNA, 75 bp, synthetic construct
  source 1..75: mol_type = other DNA
ataccttattccttaatcaacgcctggaatagcagcccaggacctgatccgcaaaacagcgatgaggtacgttat

SEQ ID NO: 778634 - DNA, 75 bp, synthetic construct
  source 1..75: mol_type = other DNA
gacaggcttgcgagggttgagatcgaatatatagcgacattgtgcaagccggtggctttggtgattatttacgac

SEQ ID NO: 778635 - DNA, 75 bp, synthetic construct
  source 1..75: mol_type = other DNA
cgggggctgccgctggcgctcatcagtaccgaaggagcaacggaatggcgtggggagtatgacgagtgggggaat

SEQ ID NO: 778636 - DNA, 75 bp, synthetic construct
  source 1..75: mol_type = other DNA
agaatagagaaaggtgatgcattgaaggagcaggccaccgaacaggaacaggctacagaacaggcgcaggctaca

SEQ ID NO: 778637 - DNA, 75 bp, synthetic construct
  source 1..75: mol_type = other DNA
ggaatgggcgcatttcctacggaagacgaactggacgccgacatgattaatgccggtaaacaaaccgttaccgcg

SEQ ID NO: 778638 - DNA, 75 bp, synthetic construct
  source 1..75: mol_type = other DNA
gttttattgattcgcatgaacttgtcaagataaacgcatcgaaactatttctttatcttgtgttaaaaacaaatt

SEQ ID NO: 778639 - DNA, 75 bp, synthetic construct
  source 1..75: mol_type = other DNA
aagttggcagcatcacccatatggacatggaattatttgaagggaaaaaatattgcactggaaaaactggccagt

SEQ ID NO: 778640 - DNA, 75 bp, synthetic construct
  source 1..75: mol_type = other DNA
tatggggccagctgtagacacgctggagtctctgatgcttaacgggcgcgtaaggcatggcatgcacccagtatt

SEQ ID NO: 778641 - DNA, 75 bp, synthetic construct
  source 1..75: mol_type = other DNA
gaagggatttcaccagtgctcccgttcagtctctggagctaagagaacatatttcatcggtcctgaatacgctgt

SEQ ID NO: 778642 - DNA, 75 bp, synthetic construct
  source 1..75: mol_type = other DNA
gtcgataaaacaaaggaagagcgactcgggcagcgcatggatacggcgcttatcaacttgatgacgatcctggcg

SEQ ID NO: 778643 - DNA, 75 bp, synthetic construct
  source 1..75: mol_type = other DNA
ggaagatgaagcacgcgatgacttcatcaaattccagcctcgtttctggactcaaggaagttttcagtacgatac

SEQ ID NO: 778644 - DNA, 75 bp, synthetic construct
  source 1..75: mol_type = other DNA
tctgttttgttcacaatttgttgatttagtttacagaactattggggttaacatttttaatcgtgaggaaagcaa

SEQ ID NO: 778645 - DNA, 75 bp, synthetic construct
  source 1..75: mol_type = other DNA
aaagtaccgctgtaaacaccactcatgttgcactaagtttaggtgatggtatttttatacatgctgatacttctt

SEQ ID NO: 778646 - DNA, 75 bp, synthetic construct
  source 1..75: mol_type = other DNA
tagcgcctgctgctttagcgttcgttagtgaaaaaggtgaaacctcggtcggtgaactgcctgcgccgggaagcc

SEQ ID NO: 778647 - DNA, 75 bp, synthetic construct
  source 1..75: mol_type = other DNA
gtaccagagggattgagcgccagatgacgcagggtgagttaaaacgacttgcggaacggcaactgacgaaatggg

SEQ ID NO: 778648 - DNA, 75 bp, synthetic construct
  source 1..75: mol_type = other DNA
aagtatcattaatacttggtatactactattggctggttgtggttcagggactgttattaagaatgatggtacaa

SEQ ID NO: 778649 - DNA, 75 bp, synthetic construct
  source 1..75: mol_type = other DNA
gtacccaatatcagcccctggcagggatggctttttcttactgtcgcagtaataaccattgctgccggatgtatt

SEQ ID NO: 778650 - DNA, 75 bp, synthetic construct
  source 1..75: mol_type = other DNA
atgagtaaacttgatacttttatccaacatgctgtcaacgctgttcctgtcagtggcacatctttgatctcctct

SEQ ID NO: 778651 - DNA, 75 bp, synthetic construct
  source 1..75: mol_type = other DNA
gccgggaagcctgtattttcaacgttttggcggtttgaatattgaacaggaggcgttatgccaatttaccagata

SEQ ID NO: 778652 - DNA, 75 bp, synthetic construct
  source 1..75: mol_type = other DNA
aagcgttacgtaaaatcaacgaagcatttggtaaacgtgtgactaatgccctattaatcacgtcaagtgctgcag

SEQ ID NO: 778653 - DNA, 75 bp, synthetic construct
  source 1..75: mol_type = other DNA
tgggatttgttggacagtaccgggcgcagaacgacgaacgtcgtgaagacgtggtgcgtgcgctgggggaacgag

SEQ ID NO: 778654 - DNA, 75 bp, synthetic construct
  source 1..75: mol_type = other DNA
aaagttatcaaaacgtactgattcccgcagagccgggaaccagcgaatacctgcaacttatccccgtagggcaac

SEQ ID NO: 778655 - DNA, 75 bp, synthetic construct
  source 1..75: mol_type = other DNA
taatacttggggaaacgctgcaactcaagacttaagctattgctcatctttgttaaccagaattcaagcagtaac

SEQ ID NO: 778656 - DNA, 75 bp, synthetic construct
  source 1..75: mol_type = other DNA
cgctttcgcaacctgaatatctcttttgctgacacgctggtaaagcgtaacagccggcgcacccgcgacatcatc

SEQ ID NO: 778657 - DNA, 75 bp, synthetic construct
  source 1..75: mol_type = other DNA
gaacaagctatcaacagtagcgtgaatcttgtccccgtcggtttatctgcatcggactggaaagtgcatcgtggc

SEQ ID NO: 778658 - DNA, 75 bp, synthetic construct
  source 1..75: mol_type = other DNA
actggagagaacggcggttttgttgcggcggaaaaatagctggcagacagccgccgcgaaggcatttttgcacat

SEQ ID NO: 778659 - DNA, 75 bp, synthetic construct
  source 1..75: mol_type = other DNA
tcaccggggatatgcacagtgttaacaaggcaaattttgcgatactgcactggtttggccttcgttttgagcctc

SEQ ID NO: 778660 - DNA, 75 bp, synthetic construct
  source 1..75: mol_type = other DNA
tggtgagccgggtactttctgatgagcggcgacggctggagcgtattctggcggaacacctggatgatccgacta

SEQ ID NO: 778661 - DNA, 75 bp, synthetic construct
  source 1..75: mol_type = other DNA
ggatgatgacgctcgtaatgacttcatcaatctacagcccagattctggacgcagggaagctttcagtatgatac

SEQ ID NO: 778662 - DNA, 75 bp, synthetic construct
  source 1..75: mol_type = other DNA
tttggccgccactgcgcaatactaggagctacaggtggggggaaaagctggacaactgcaaaaatattagaagaa

SEQ ID NO: 778663 - DNA, 75 bp, synthetic construct
  source 1..75: mol_type = other DNA
tttctggcagtatcgctggcgtgccatattgcaagcggtacgtcatggggtggaaggcgagtcaatcaaggagca

SEQ ID NO: 778664 - DNA, 75 bp, synthetic construct
  source 1..75: mol_type = other DNA
aagggttctctttttcagagataattagctttcttaatattacttcgagggtattaattaattatattgggatgt

SEQ ID NO: 778665 - DNA, 75 bp, synthetic construct
  source 1..75: mol_type = other DNA
cttcagatatgagtcagcaagggcttgctgacttggaccatctggcaatgaatctcaattcttttgagaaaatta

SEQ ID NO: 778666 - DNA, 75 bp, synthetic construct
  source 1..75: mol_type = other DNA
tgggggaatgtcggtgtgcaactaggtgataaaggctatagcgatactcagggtatgctgggtgtgaaatatagc

SEQ ID NO: 778667 - DNA, 75 bp, synthetic construct
  source 1..75: mol_type = other DNA
ccatgtatgaattggggaaatattatttaaccaacaatgatgatcctgaaaataacgcagaggctactcaatggc

SEQ ID NO: 778668 - DNA, 75 bp, synthetic construct
  source 1..75: mol_type = other DNA
aatcttcccgtttaagaagtatgcaggaaaaaagccagtatcaaactgttgatgaaaatggtcggccagtcggcg

SEQ ID NO: 778669 - DNA, 75 bp, synthetic construct
  source 1..75: mol_type = other DNA
tcaccagcgtgacgatggtaaacagcgtgagttccagccttacattgaagcgaattggatcaacaacagcaaagt

SEQ ID NO: 778670 - DNA, 75 bp, synthetic construct
  source 1..75: mol_type = other DNA
ggtcagttaaaaacgcaggccaaccgctatgtattgcagttaggcggcgatttggcgcagtggagtagcaacgcg

SEQ ID NO: 778671 - DNA, 75 bp, synthetic construct
  source 1..75: mol_type = other DNA
cgtaacgccgccggatactcctgaccccattgataatccacctgttgtggatccggaaggcccatcagtggttcg

SEQ ID NO: 778672 - DNA, 75 bp, synthetic construct
  source 1..75: mol_type = other DNA
agaagctgctggccgttgtgacctcgttgaaaccgataatagttgtgtggagaactgtttaaaagggaagtttaa

SEQ ID NO: 778673 - DNA, 75 bp, synthetic construct
  source 1..75: mol_type = other DNA
agtatccgttgaatccgatctcaaatatagatccattaggattagaaacactaaaatgcattaagccactgcatt

SEQ ID NO: 778674 - DNA, 75 bp, synthetic construct
  source 1..75: mol_type = other DNA
cctaccagacattaattaagctgaaaggctggtgggtgaatcatgggaatcaaaccaatatctggctaactgcca

SEQ ID NO: 778675 - DNA, 75 bp, synthetic construct
  source 1..75: mol_type = other DNA
tttacggggatatctatttttacctgccgcccggtacccgcttttacaggagtgcgccggaaaacaacgcagtag

SEQ ID NO: 778676 - DNA, 75 bp, synthetic construct
  source 1..75: mol_type = other DNA
gggcaaatttgttacactggcaaaagcagaattcagtaattctgctaattcaaatgtgcaaaaatggagtgctta

SEQ ID NO: 778677 - DNA, 75 bp, synthetic construct
  source 1..75: mol_type = other DNA
acagataaagcggcgcaacaaggcatatcaaacagtcctctttgtgccagtgcagataatgccaataaaaccaaa

SEQ ID NO: 778678 - DNA, 75 bp, synthetic construct
  source 1..75: mol_type = other DNA
atctcggtgaagtacgtaccggggttgaggcgaaagtaaataacaaccttagcctgtgggggaatgtcggtgtgc

SEQ ID NO: 778679 - DNA, 75 bp, synthetic construct
  source 1..75: mol_type = other DNA
aggaagcccctatccttgcgttgtgttacatttaggaatttcctagtagaaagagcctcacaactcaaggatact

SEQ ID NO: 778680 - DNA, 75 bp, synthetic construct
  source 1..75: mol_type = other DNA
tgtggcgctgatttcggaaagcggggccaatccatttggcctgacggtggatgctgtgatggaggagtatcgtcg

SEQ ID NO: 778681 - DNA, 75 bp, synthetic construct
  source 1..75: mol_type = other DNA
gcaaagccggtgaagcacaggataacgcccgcgctgccttgcgtatgcttaccgaaaacggtcatcagccattac

SEQ ID NO: 778682 - DNA, 75 bp, synthetic construct
  source 1..75: mol_type = other DNA
atttagctcatcttatttttctgaattatacgacgtacctaaattaaaacctgttttatcattgctatctattaa

SEQ ID NO: 778683 - DNA, 75 bp, synthetic construct
  source 1..75: mol_type = other DNA
ttgcaaatgcaatacattttattccatgtattatattcacgatgaaaacaataaaatcaaatgttttaagcatat

SEQ ID NO: 778684 - DNA, 75 bp, synthetic construct
  source 1..75: mol_type = other DNA
ataaataaatatggaataccctccaatccattcagtttaaagcatcataactgtttatacgcatcttctcttgtt

SEQ ID NO: 778685 - DNA, 75 bp, synthetic construct
  source 1..75: mol_type = other DNA
ccggcgaacagtttgttgctgcctgaattcatttttacagtggcgttgcttaataagatttcagatatccagcaa

SEQ ID NO: 778686 - DNA, 75 bp, synthetic construct
  source 1..75: mol_type = other DNA
ttattcagaggtgaattaaagaagaaaaaacatttggaagctttgctagctagaattgatggtatattatgcaaa

SEQ ID NO: 778687 - DNA, 75 bp, synthetic construct
  source 1..75: mol_type = other DNA
ctataccggaaacaatggcctgatgacgttcaacgcgacgctgggcggcgataattcgcccaccgataagatgaa

SEQ ID NO: 778688 - DNA, 75 bp, synthetic construct
  source 1..75: mol_type = other DNA
tcctgcatctggcggaaagaacgtgaaatgggctgcgatcaatgattatggcggcagttccgggacagaaactcg

SEQ ID NO: 778689 - DNA, 75 bp, synthetic construct
  source 1..75: mol_type = other DNA
attttcgtgactatctgttggttttggacaaacatcaggcgctgaggcagcaaaaaatgcagggtgaaatcttga

SEQ ID NO: 778690 - DNA, 75 bp, synthetic construct
  source 1..75: mol_type = other DNA
tgaaggttatcattctatgttattaccttccccagccgtagtgataaaaaaatcctcttcagtgatgtttcctga

SEQ ID NO: 778691 - DNA, 75 bp, synthetic construct
  source 1..75: mol_type = other DNA
ccagaatggctacgtgatttatcagtcagccgttccacaaggtgcttttgaaattaccgatctcaacaccgccag

SEQ ID NO: 778692 - DNA, 75 bp, synthetic construct
  source 1..75: mol_type = other DNA
tcaatgaggtggatgaaacactctgtcttgatcctgcaccacgtattgaaggctcatcctggcagttcgacagcg

SEQ ID NO: 778693 - DNA, 75 bp, synthetic construct
  source 1..75: mol_type = other DNA
acagcaccttaaatacgaccgatggcagtgcagaatacaactctataagcacctggatacaacgtgatatagctg

SEQ ID NO: 778694 - DNA, 75 bp, synthetic construct
  source 1..75: mol_type = other DNA
ccgatctcaacaccgccagtacaggtggcgatttggacgtaaccatcaaagaagaagacggtagcgaacaacgat

SEQ ID NO: 778695 - DNA, 75 bp, synthetic construct
  source 1..75: mol_type = other DNA
ctacggttcgctgaacggcagttataattacagccaaaattcccagcgactcaattacggtattaagggcggtat

SEQ ID NO: 778696 - DNA, 75 bp, synthetic construct
  source 1..75: mol_type = other DNA
tcaccttatatggaggtatgcaggctgctgaaaagtatggttctgccgctttgggtgtcggtaaagatcttggcg

SEQ ID NO: 778697 - DNA, 75 bp, synthetic construct
  source 1..75: mol_type = other DNA
acctacgtttacacctttaaggttaagcagaacgggacttactggtaccacagccattccggtctgcaggaacag

SEQ ID NO: 778698 - DNA, 75 bp, synthetic construct
  source 1..75: mol_type = other DNA
ttgttgcgcataaagttaccaacacaacagataatgggcaacttggttcagtagcaacactggctcagaaagctg

SEQ ID NO: 778699 - DNA, 75 bp, synthetic construct
  source 1..75: mol_type = other DNA
agtctacatatattggcttataacctgaaaaggatgatatcgatatggggtactacaggattgatatttcagctt

SEQ ID NO: 778700 - DNA, 75 bp, synthetic construct
  source 1..75: mol_type = other DNA
gtgagcagatctacatgctctctttatctgttcctttatcgggctggtggggtaatagttacgccacctattctg

SEQ ID NO: 778701 - DNA, 75 bp, synthetic construct
  source 1..75: mol_type = other DNA
aaaaacgaagaaatgtaaaaaaattgctaaaagcacttcgagatcaaaataaacctaatggtgaaatgggcgtta

SEQ ID NO: 778702 - DNA, 75 bp, synthetic construct
  source 1..75: mol_type = other DNA
tgccgctctggaccttaagcttcaggtcgtaagctggaggggtaaaaaaactcttctgatggctgggagcaggag

SEQ ID NO: 778703 - DNA, 75 bp, synthetic construct
  source 1..75: mol_type = other DNA
atgtcagattatgtccaacatttggggtgcagttcagtcagtgtattcaatccggcgcttctggaaatcgaccat

SEQ ID NO: 778704 - DNA, 75 bp, synthetic construct
  source 1..75: mol_type = other DNA
ttgttgagaataactcgctcagtgaggccgctgattatctggtaacaggtaaaaagccggaagacagataccgtg

SEQ ID NO: 778705 - DNA, 75 bp, synthetic construct
  source 1..75: mol_type = other DNA
cacttgaacgaaacgatttttcgatggatgacttccatcactacttaagggagtttgataaagctgtatgtgaag

SEQ ID NO: 778706 - DNA, 75 bp, synthetic construct
  source 1..75: mol_type = other DNA
cggtcgccgctgtgctgctggtatcgtattttggttcagcacgttccgatctcggtgcgtcgtttctgatgcccg

SEQ ID NO: 778707 - DNA, 75 bp, synthetic construct
  source 1..75: mol_type = other DNA
cccattcaggaataggtcaacttatcatctacagcagtatagccatcagattttggagcacagtgctcctgacag

SEQ ID NO: 778708 - DNA, 75 bp, synthetic construct
  source 1..75: mol_type = other DNA
atctcgggcctggggtgtatttattacaaaattacccaaaagaaactgagggcctgattgcagagaagggttata

SEQ ID NO: 778709 - DNA, 75 bp, synthetic construct
  source 1..75: mol_type = other DNA
atattaaaatgacctggcttattagtccgaattcagacaaatataaacaaatcccgctcaatattaaaaatacta

SEQ ID NO: 778710 - DNA, 75 bp, synthetic construct
  source 1..75: mol_type = other DNA
taatatttattttatgggttaattttacctgggctggatgtcgtaccactgcatcattaaatattactgatagta

SEQ ID NO: 778711 - DNA, 75 bp, synthetic construct
  source 1..75: mol_type = other DNA
agaaaaccaacctggtttctttctgatactgtgattgcaaatattggcggtgagtcatctacatccatcgacttt

SEQ ID NO: 778712 - DNA, 75 bp, synthetic construct
  source 1..75: mol_type = other DNA
tgagctttatctctcgggtctgtcagataaagggcaggtcactttatcctggggaggagacgcagtcacgaaatg

SEQ ID NO: 778713 - DNA, 75 bp, synthetic construct
  source 1..75: mol_type = other DNA
agttaaccgtaccttatgtgcgctctatgccatgacggggctggcgtctgcggtcgccgctgtgctgctggtatc

SEQ ID NO: 778714 - DNA, 75 bp, synthetic construct
  source 1..75: mol_type = other DNA
tctcataacgcttaccttgttgaagggcctggtattatagttggcagaaaaggctcaattggtacaatttattgg

SEQ ID NO: 778715 - DNA, 75 bp, synthetic construct
  source 1..75: mol_type = other DNA
aagctatggtaattcattcaattacattaaagtcaagagtttacactgtcatcaaacattcatctccacacacta

SEQ ID NO: 778716 - DNA, 75 bp, synthetic construct
  source 1..75: mol_type = other DNA
catcgaaacgcgatccaaggcgtatacggcgttgggttcatgaagctgaaatggaagaaatgcatgcgaggcttg

SEQ ID NO: 778717 - DNA, 75 bp, synthetic construct
  source 1..75: mol_type = other DNA
tggtgccgggcagtgagagccatgctgacaccagtcgtctgaacctgacgtggtacgggacatatggtgaactga

SEQ ID NO: 778718 - DNA, 75 bp, synthetic construct
  source 1..75: mol_type = other DNA
agctaacgtctatatatgggctaccatacggatttactgtttttggtggcgtgcagatggccgaacattacctgg

SEQ ID NO: 778719 - DNA, 75 bp, synthetic construct
  source 1..75: mol_type = other DNA
ctaaatatcgggctgaaatgcgggcgcaactggttgtcagtggatatacaccggagcaggccgatacaactctga

SEQ ID NO: 778720 - DNA, 75 bp, synthetic construct
  source 1..75: mol_type = other DNA
attgcccggacccaggccaggattgaggtgcgccagaatggttatctgattgacagccggacggtggccccgggc

SEQ ID NO: 778721 - DNA, 75 bp, synthetic construct
  source 1..75: mol_type = other DNA
ttttatctttatattgcgtaaaaacaaaaattacagcggttgctctctctgtgatggcggcctgtacccttcttt

SEQ ID NO: 778722 - DNA, 75 bp, synthetic construct
  source 1..75: mol_type = other DNA
ggtcaggctgcgggctcagccggtgtggtgggagaccgtggtgaggtgtacctgagcgggctgaaggaaagcggt

SEQ ID NO: 778723 - DNA, 75 bp, synthetic construct
  source 1..75: mol_type = other DNA
cgttatttgcgcgtaactatattgagagagcgggaaaacatatccgttccacgcaactgggaagagaactggtgg

SEQ ID NO: 778724 - DNA, 75 bp, synthetic construct
  source 1..75: mol_type = other DNA
tgaatgtggtgacgggctggcgaggcctgttttccggggaagcagcagaagatgctgaaggcgaagatgaacaga

SEQ ID NO: 778725 - DNA, 75 bp, synthetic construct
  source 1..75: mol_type = other DNA
acccgaagctgaaaaaagtgctgagggagaatgccggtctggggacggaggccacgcgggccggtgtgctggagg

SEQ ID NO: 778726 - DNA, 75 bp, synthetic construct
  source 1..75: mol_type = other DNA
taaattaaactgtgaacataccggaatcatagctattggcgaggacaatgctctttgcgaaagtattggcacaag

SEQ ID NO: 778727 - DNA, 75 bp, synthetic construct
  source 1..75: mol_type = other DNA
tgccaattctactacagtctacaacgaagccgaggttgaaataaataatcttggttggaaagaaactgatattgt

SEQ ID NO: 778728 - DNA, 75 bp, synthetic construct
  source 1..75: mol_type = other DNA
gctggtgagcagggaaacagcaggggcaggaaaagaaaaattaatttttctcataaacaaaaacctggtgatgtc

SEQ ID NO: 778729 - DNA, 75 bp, synthetic construct
  source 1..75: mol_type = other DNA
gaatacagatttgacagcggcgagatatcagtatacgtcctcaggcttccacacattgtccgatgtgctgagtac

SEQ ID NO: 778730 - DNA, 75 bp, synthetic construct
  source 1..75: mol_type = other DNA
acaagaattaacggtagcatttaataatattgtgcctaaaaatattatttcagaatttatttcagaatttgaaaa

SEQ ID NO: 778731 - DNA, 75 bp, synthetic construct
  source 1..75: mol_type = other DNA
gtattgcattttcagcacaggcagtggatacgacgattactgtgacgggtaatgttttgcaaagaacatgtacga

SEQ ID NO: 778732 - DNA, 75 bp, synthetic construct
  source 1..75: mol_type = other DNA
caaagcgtccaggacacgatctgggccgcttcggtcttggactcaaaaccgcctccttttcgcaatgtcgtcgcc

SEQ ID NO: 778733 - DNA, 75 bp, synthetic construct
  source 1..75: mol_type = other DNA
gatgcaaagcgaaccggacgacccggatatcaccctgcaaccctactgaagttgtacatttacggatatctcaac

SEQ ID NO: 778734 - DNA, 75 bp, synthetic construct
  source 1..75: mol_type = other DNA
cgcgttatgtcatgaagctggcccagatggaacccggtgccgcctggcagtggctacccataacctggcagccgc

SEQ ID NO: 778735 - DNA, 75 bp, synthetic construct
  source 1..75: mol_type = other DNA
actggatttcacctctctgcgtaatgctgtaaccgagttcgaacagcatcgcgacgagcacgcctggcaaattga

SEQ ID NO: 778736 - DNA, 75 bp, synthetic construct
  source 1..75: mol_type = other DNA
tttttatccttatccccaagaaaaacagtaagtccacgctggccgcggggatcatgatgacggcgctgttactga

SEQ ID NO: 778737 - DNA, 75 bp, synthetic construct
  source 1..75: mol_type = other DNA
agcggatagctcccggaagtgaaaataatgtagacagtagccgactgaatttgaggtggtttggtacctatggtg

SEQ ID NO: 778738 - DNA, 75 bp, synthetic construct
  source 1..75: mol_type = other DNA
gtagatctcgagatcgcaacggaggaagaaaaatcgttactggccgcatggaagaggtatcgggtgttgctgaac

SEQ ID NO: 778739 - DNA, 75 bp, synthetic construct
  source 1..75: mol_type = other DNA
tggcgctggcattagcaggatgcgctactcccgcacccaaagccccgcatccagacaaagccgcgatagaggcag

SEQ ID NO: 778740 - DNA, 75 bp, synthetic construct
  source 1..75: mol_type = other DNA
tgcggaagcagaaaaactcttccggatccgggaggcggaagagaaaaagacaagattaatccaggaagcgactga

SEQ ID NO: 778741 - DNA, 75 bp, synthetic construct
  source 1..75: mol_type = other DNA
caccggtactacgatccgttgcaggggcggtatattactcaggacccgatggggttgaaagggggatggaattta

SEQ ID NO: 778742 - DNA, 75 bp, synthetic construct
  source 1..75: mol_type = other DNA
tcgctgtcgcgtaaaccggaggagacatggtacggctgggacggcgacaggctgacgacggtacagaccgacacc

SEQ ID NO: 778743 - DNA, 75 bp, synthetic construct
  source 1..75: mol_type = other DNA
cgggtatggcggcgggagcgtgacctgacggggtggatgtcgctgtcgcgtaaaccggagatgacgtggtacggg

SEQ ID NO: 778744 - DNA, 75 bp, synthetic construct
  source 1..75: mol_type = other DNA
atgagtaagccatttttgaaatgggctggtggaaagtatacccagctggcggacgttaacccggacctgattaat

SEQ ID NO: 778745 - DNA, 75 bp, synthetic construct
  source 1..75: mol_type = other DNA
cagcgaaaagcacgcagattacctgctggcggacgttaacccggacctgattaatctgtatcagatgttagcggt

SEQ ID NO: 778746 - DNA, 75 bp, synthetic construct
  source 1..75: mol_type = other DNA
ataccagcgggtcaaagctaatcgaggtgcggcaggtgtcgatgggcagtcagtcgaggcgtttgaggttaccaa

SEQ ID NO: 778747 - DNA, 75 bp, synthetic construct
  source 1..75: mol_type = other DNA
aatttgaaaatactagcaagtattgccttgcacagcgatataattcttttgtggattacgaagtaaaaaaaataa

SEQ ID NO: 778748 - DNA, 75 bp, synthetic construct
  source 1..75: mol_type = other DNA
gggagtatgacgagtgggggaaccagcttaatgaggagaacccgcatcacctgtaccagccgtaccggctgccgg

SEQ ID NO: 778749 - DNA, 75 bp, synthetic construct
  source 1..75: mol_type = other DNA
aggtgtgatgaaaacgctctgggaaatagagatggaaatcactgatactccagtggcgcggtttgaacatcgctg

SEQ ID NO: 778750 - DNA, 75 bp, synthetic construct
  source 1..75: mol_type = other DNA
ggcgcttatcagtgaagacggcaatacggcgtggagcgcggaatatgatgaatggggcaaccagcttaatgaaga

SEQ ID NO: 778751 - DNA, 75 bp, synthetic construct
  source 1..75: mol_type = other DNA
ttgggtttcgaattatgatagcctgttaactttgcgggagttctttcgttgcgcaactcagattgataaagatag

SEQ ID NO: 778752 - DNA, 75 bp, synthetic construct
  source 1..75: mol_type = other DNA
agctggcgtcttcgggacaacaccagctggagttacagtgccggaaaggggtacagccagaataactggcagcac

SEQ ID NO: 778753 - DNA, 75 bp, synthetic construct
  source 1..75: mol_type = other DNA
aaaaaatggttatcttgacagaatggttgccgttctcgcgggccagctgggtgaaaaattcaccaacgatattgc

SEQ ID NO: 778754 - DNA, 75 bp, synthetic construct
  source 1..75: mol_type = other DNA
cgctcacggttacattccgcctgaagagtgggatgaaggtattcctgctttactcctgaattataatttcaccgg

SEQ ID NO: 778755 - DNA, 75 bp, synthetic construct
  source 1..75: mol_type = other DNA
ccgctggctgacgttccatcaggtcagcgcgctcggcgggcaggtgcgccggggggagaaatcctctctggcggt

SEQ ID NO: 778756 - DNA, 75 bp, synthetic construct
  source 1..75: mol_type = other DNA
aagcaatatgagttcatatgttactccagagaattattatgctggcataaactatctgttaaatagatttcaaca

SEQ ID NO: 778757 - DNA, 75 bp, synthetic construct
  source 1..75: mol_type = other DNA
cgcgcagtcagttagccgacgacagtcgtcatgagggggattccattcgcttcctctatgcgaaatcgatgaaca

SEQ ID NO: 778758 - DNA, 75 bp, synthetic construct
  source 1..75: mol_type = other DNA
agctggctggctggcaggtgtaggtgggaccttactggaaggccacaacctgagttatcacgtaagccagggtga

SEQ ID NO: 778759 - DNA, 75 bp, synthetic construct
  source 1..75: mol_type = other DNA
tcacaatcacttaatgactttggctcgctttatatctctggtacccatcaaaaatactggaatacttcggattaa

SEQ ID NO: 778760 - DNA, 75 bp, synthetic construct
  source 1..75: mol_type = other DNA
gcattgataacgggaataagctgaacagggaggagcgtcggcagcttatggaccgcgcgattgttctgacagtga

SEQ ID NO: 778761 - DNA, 75 bp, synthetic construct
  source 1..75: mol_type = other DNA
gaagcgttccgcatgacgcagaaagatattgatgatgcgccaatggtgccgagcatcccgccgctgctggcggaa

SEQ ID NO: 778762 - DNA, 75 bp, synthetic construct
  source 1..75: mol_type = other DNA
tcagtgtccaattacactggagcagcctgaaaaaggtatttttgtgaagaattcagatggttcagatgtatgtac

SEQ ID NO: 778763 - DNA, 75 bp, synthetic construct
  source 1..75: mol_type = other DNA
tggcgcgatgactgagcagcaaatccggcaggtctgccgccagtgcatggaccgctgccgggcgggtgaaacatg

SEQ ID NO: 778764 - DNA, 75 bp, synthetic construct
  source 1..75: mol_type = other DNA
caaactgcgcgattggcgttgcgctgaatgatactgcatgtcgtgtattgaaaaaacaaatcgggaatcacaccg

SEQ ID NO: 778765 - DNA, 75 bp, synthetic construct
  source 1..75: mol_type = other DNA
attaaagtctgttgttgaatttgcactggcaacaggtttaagacgctcgaacatcatcaaccttgaatggcaaca

SEQ ID NO: 778766 - DNA, 75 bp, synthetic construct
  source 1..75: mol_type = other DNA
atgaaaaaaattgaatgcgcttgcaattttctgatggataaagatgcgcaggggtatatcgacctgtctgatttg

SEQ ID NO: 778767 - DNA, 75 bp, synthetic construct
  source 1..75: mol_type = other DNA
cttaccggtgactacatctggcaccagaacaagcaggttgagcaaggcaagttccgaccattacgaatgcctggt

SEQ ID NO: 778768 - DNA, 75 bp, synthetic construct
  source 1..75: mol_type = other DNA
gctttccgtacctgatgatcaccccgggttttattttgctggtctttgtggtgatctttccgattctttttggtt

SEQ ID NO: 778769 - DNA, 75 bp, synthetic construct
  source 1..75: mol_type = other DNA
atgacgcagaaagatattgatgacgcgccaatggtgccgagcattccgccgctgctggcggaaggtaagcgctaa

SEQ ID NO: 778770 - DNA, 75 bp, synthetic construct
  source 1..75: mol_type = other DNA
caagcaagtccgtgagatcaaggcgcttttgcgtgatcctgatattcaggtcgccgacgtggcgaaacgctatgg

SEQ ID NO: 778771 - DNA, 75 bp, synthetic construct
  source 1..75: mol_type = other DNA
actttccagtaataatggaaatatcacaatcagccataacatgtcaggaagtaacagtggttcaaacgccatatt

SEQ ID NO: 778772 - DNA, 75 bp, synthetic construct
  source 1..75: mol_type = other DNA
agtagaaccctgccgatatatttgaacgggacaaacatcacggcagaaggcaatatcaccctgaatgccatgtct

SEQ ID NO: 778773 - DNA, 75 bp, synthetic construct
  source 1..75: mol_type = other DNA
tcaccattctgacaaacagcaccactgcgggtggcaaccagagcggtaacatcactgttaatgcggacattaata

SEQ ID NO: 778774 - DNA, 75 bp, synthetic construct
  source 1..75: mol_type = other DNA
tcaataatttcaacatcatctatctgttcaataacggcgggccggcggtggtggggtcgaatgcgggcggcaccg

SEQ ID NO: 778775 - DNA, 75 bp, synthetic construct
  source 1..75: mol_type = other DNA
taccgcaacgcgtctggcatttgcaggtttaggctttggtcagaatggtactttcgactatggtcgtaactacgg

SEQ ID NO: 778776 - DNA, 75 bp, synthetic construct
  source 1..75: mol_type = other DNA
ggtggtcaggtggagacctcttcgcacggtaacctgcaggcatttggtacggtcagtgcatccgcgaagaaaggc

SEQ ID NO: 778777 - DNA, 75 bp, synthetic construct
  source 1..75: mol_type = other DNA
aaaccgtgctgaattaattgatacaactcaggcaaggccaattcagtattgcattaatgggacgtggtataacgc

SEQ ID NO: 778778 - DNA, 75 bp, synthetic construct
  source 1..75: mol_type = other DNA
tctaatgaacatattaagtctattccgctgtttagacctgagcataaagcccaaaaatacatcggggataaagtt

SEQ ID NO: 778779 - DNA, 75 bp, synthetic construct
  source 1..75: mol_type = other DNA
ttctgattccgattgacatagcgaagaatagagaaataggaagtaagctgagactagccgttactacggcagcat

SEQ ID NO: 778780 - DNA, 75 bp, synthetic construct
  source 1..75: mol_type = other DNA
tactaaaagtttctttttcagtgacatacaaagtaaaaaaagctatgagatgaattataaaaatatattttcccg

SEQ ID NO: 778781 - DNA, 75 bp, synthetic construct
  source 1..75: mol_type = other DNA
aagagaaaacctcgacgtatatgagcggttttatcgcatcgacacctcccgggcaagaagtgatgcccatcatgg

SEQ ID NO: 778782 - DNA, 75 bp, synthetic construct
  source 1..75: mol_type = other DNA
gtcgagcgtgcagcagcattcctttacctcaatcggcactgcttcaacggcctgattcgttacaacctggacggt

SEQ ID NO: 778783 - DNA, 75 bp, synthetic construct
  source 1..75: mol_type = other DNA
cgccggccgcggatgtcgaaaatcggcccccctcagttgagagcgaagctttacatgtccgccctgtgcggaaaa

SEQ ID NO: 778784 - DNA, 75 bp, synthetic construct
  source 1..75: mol_type = other DNA
accgtaatggtgtgccctatcatgatcaggatatggcaaagcggtttcatcaaaccgatgtcaacggcggaatga

SEQ ID NO: 778785 - DNA, 75 bp, synthetic construct
  source 1..75: mol_type = other DNA
tgagttgcggcgatatatagaggaaattgaaagcgcacttggaatatccggtcgtcgccgtggccctgcaggagt

SEQ ID NO: 778786 - DNA, 75 bp, synthetic construct
  source 1..75: mol_type = other DNA
taagcataaaagaagtttttaatttttgctgtccaattatgataacaactttgttcatttggtttcaaagctctg

SEQ ID NO: 778787 - DNA, 75 bp, synthetic construct
  source 1..75: mol_type = other DNA
gcaatgttcttcatcaatgtggttatgaacttcaaaaattaagtatttttttatctgaacatcgctttgtcaggt

SEQ ID NO: 778788 - DNA, 75 bp, synthetic construct
  source 1..75: mol_type = other DNA
ttagatatcgcaaaatggtcgggtagagtcagtgtgatgcaaaaccgagactacaaccatacttcgcaggaagag

SEQ ID NO: 778789 - DNA, 75 bp, synthetic construct
  source 1..75: mol_type = other DNA
tcctcgccggataaattttatagacactcgctttgccctgaagtaagtgaagataaaccccttgatgttattcag

SEQ ID NO: 778790 - DNA, 75 bp, synthetic construct
  source 1..75: mol_type = other DNA
tctggtccgccagcgcctttatcaccaaagtactgctggtaccgttaatcatgacttacgctgcacgaaatattc

SEQ ID NO: 778791 - DNA, 75 bp, synthetic construct
  source 1..75: mol_type = other DNA
ttcccgattaaacggcgaatataagagaaccagtgattacataaaaaatacggcagctaatgtgcagcaacaggt

SEQ ID NO: 778792 - DNA, 75 bp, synthetic construct
  source 1..75: mol_type = other DNA
cagtaacggggaaccattcaccgtcagcgtgctctatgcacaagatgaacagatcgtttctgccatcgaggccac

SEQ ID NO: 778793 - DNA, 75 bp, synthetic construct
  source 1..75: mol_type = other DNA
cgccgctggtgcgctatggctggacgccacgcggcgaactggcggtggtgtatgaccgtagtggcaaacaggtgc

SEQ ID NO: 778794 - DNA, 75 bp, synthetic construct
  source 1..75: mol_type = other DNA
tggtgtatccggatgtatttttctcccattgtttaggctaatgtcagatgctttgatcataacgaatatagatgg

SEQ ID NO: 778795 - DNA, 75 bp, synthetic construct
  source 1..75: mol_type = other DNA
aagagaaccggcgctggatgttctttggtgatgttcaggcgcgtggccagtatcccggctatatgcagcgtttct

SEQ ID NO: 778796 - DNA, 75 bp, synthetic construct
  source 1..75: mol_type = other DNA
cagacggttttgccgcatggcgagagctgccgtggagtgcatttgctcctgctgcatgcgaacatgattacatgg

SEQ ID NO: 778797 - DNA, 75 bp, synthetic construct
  source 1..75: mol_type = other DNA
ttgtttttatatcattttctgtttcagcaaacgatttctttagagcagactccagaacacctgatgaaataagac

SEQ ID NO: 778798 - DNA, 75 bp, synthetic construct
  source 1..75: mol_type = other DNA
ctggtgcagagataaaaaatacgggcaccattaacgtgaaacctggcactgaagcgtacgcaagagctggcgtta

SEQ ID NO: 778799 - DNA, 75 bp, synthetic construct
  source 1..75: mol_type = other DNA
gcgaacagaagcatcttttctaagcatttttggtggcacgtaagtagtattgtgaaatttttatactttaaatat

SEQ ID NO: 778800 - DNA, 75 bp, synthetic construct
  source 1..75: mol_type = other DNA
tttggttttttcaagggctagagaaaatgaaaaatataacgttttctctaattatatccaaatcggtttatgtaa

SEQ ID NO: 778801 - DNA, 75 bp, synthetic construct
  source 1..75: mol_type = other DNA
taaaacgcaggctggcgttaacgtttttcatgagcgaagatgattttattggtgtgcatggagaaagagatgagc

SEQ ID NO: 778802 - DNA, 75 bp, synthetic construct
  source 1..75: mol_type = other DNA
gaggaagaaatccgggcagaccgcgtgagcagtgaaagccgggcgtggcttgcgcagtgcgggctgacggtggag

SEQ ID NO: 778803 - DNA, 75 bp, synthetic construct
  source 1..75: mol_type = other DNA
gctctttaacagtgaaggtaaaaccgtctggcgaccgggacagaccagcctgtgggggctggcactcagcctgcc

SEQ ID NO: 778804 - DNA, 75 bp, synthetic construct
  source 1..75: mol_type = other DNA
gaaaaattactgtaagtaaaacatcgacatctaatactggctcctggagcgtgttcgagccgagggttactaaat

SEQ ID NO: 778805 - DNA, 75 bp, synthetic construct
  source 1..75: mol_type = other DNA
tgctataaccggttccggtattacgagccggaaaccggaatgtacctggtgagtgatccgctggggttgggaggg

SEQ ID NO: 778806 - DNA, 75 bp, synthetic construct
  source 1..75: mol_type = other DNA
agccggaaaccggaatgtacctggtgagtgatccgctggggttgctgggggggggagcagacttaccggtatgtg

SEQ ID NO: 778807 - DNA, 75 bp, synthetic construct
  source 1..75: mol_type = other DNA
gcggtgacagcctcaggcaccgggctgggctatggcgaaggcgatgagtcctatggctatgacagttgtggctac

SEQ ID NO: 778808 - DNA, 75 bp, synthetic construct
  source 1..75: mol_type = other DNA
ttgtctggacaatggaatacggcccgttcgatttgccggtggcgcgaacggacggtgaaggccaccgctggcagt

SEQ ID NO: 778809 - DNA, 75 bp, synthetic construct
  source 1..75: mol_type = other DNA
gcgatggtcgccagccagatgaaacgggcagccaacgacaaagccattgcacagatgctggcatcaaaaaagtcc

SEQ ID NO: 778810 - DNA, 75 bp, synthetic construct
  source 1..75: mol_type = other DNA
gtgaccgtcaccggggcggagggctattacaacgccacgctggactatggtgacggctgcaccaccgtgacggac

SEQ ID NO: 778811 - DNA, 75 bp, synthetic construct
  source 1..75: mol_type = other DNA
aaattcaaaggttctgccgcccgtcatattgttgcttgggatgacccgtgctttaggcgcaagaaaaattctgga

SEQ ID NO: 778812 - DNA, 75 bp, synthetic construct
  source 1..75: mol_type = other DNA
tgaattccatcacctgctggcccgccactcccctgccgggcgggtggagaagtttgaatacaacgccgcacacgg

SEQ ID NO: 778813 - DNA, 75 bp, synthetic construct
  source 1..75: mol_type = other DNA
aacccgtatcacgcccagtacattctgcgccgccgtgatgattatctggagctgttcgacagggatgcactgagc

SEQ ID NO: 778814 - DNA, 75 bp, synthetic construct
  source 1..75: mol_type = other DNA
tctactcggacacaaattaagaagacaattgagctggctgaagaacaggggaaagaggctcagttttggtttaaa

SEQ ID NO: 778815 - DNA, 75 bp, synthetic construct
  source 1..75: mol_type = other DNA
gtggacagcatcgtcgggttgaaactggattacgcaggtaaagacggctggagcgctagcgctacgctggaaggc

SEQ ID NO: 778816 - DNA, 75 bp, synthetic construct
  source 1..75: mol_type = other DNA
tcgcaaccggaacacgccagcaatactgaaccgcaggttaccgtcagtgttccggtagacagtgaaaactactgg

SEQ ID NO: 778817 - DNA, 75 bp, synthetic construct
  source 1..75: mol_type = other DNA
ccgtttatcgatagcacacattccagtcaccgataacgacaacgaaacgcagtatcacttttttcgccagtcatg

SEQ ID NO: 778818 - DNA, 75 bp, synthetic construct
  source 1..75: mol_type = other DNA
gctgacggataatggttcatgctaccgggctaatgaaacacggcagtttgcccggatgttggggcttgaaccgaa

SEQ ID NO: 778819 - DNA, 75 bp, synthetic construct
  source 1..75: mol_type = other DNA
acaaacactaaatttattaggttgattgattctgtccgtgctctttctcccgaactacaatgtaaagtattagat

SEQ ID NO: 778820 - DNA, 75 bp, synthetic construct
  source 1..75: mol_type = other DNA
atattgaggataatgacaaacaagagcaatcaagtaagttacaaaaagaaaaagaaagtatcactaataaaatta

SEQ ID NO: 778821 - DNA, 75 bp, synthetic construct
  source 1..75: mol_type = other DNA
agataatttgacgatgagacaacagaacattatggaggcctttctaagagtctttacatcaatgtacaatgcctc

SEQ ID NO: 778822 - DNA, 75 bp, synthetic construct
  source 1..75: mol_type = other DNA
aatcatgtacccaaagaccgtttaatacgaacatatcaagtcggacaacaagctgaaaaattaaaaatttattta

SEQ ID NO: 778823 - DNA, 75 bp, synthetic construct
  source 1..75: mol_type = other DNA
cctccgggccgttgcttcgcaacgttcaaatccgctcccggcggatttgtcctactcaggagagcgttcaccgac

SEQ ID NO: 778824 - DNA, 75 bp, synthetic construct
  source 1..75: mol_type = other DNA
gccagcaaaccagttcacctggcacccggtatcgcgcgcggtgggtaatgttaaaaaccagggcgcggagttaat

SEQ ID NO: 778825 - DNA, 75 bp, synthetic construct
  source 1..75: mol_type = other DNA
gggggctgagggcaaaggcctcccggaagttcatcccggtcagttaccgtgcatatggcctgcctgtgtcagaaa

SEQ ID NO: 778826 - DNA, 75 bp, synthetic construct
  source 1..75: mol_type = other DNA
aaagctgaaaagctggccgagaccgacaagcgcgatgccaagcagaacgaggagctcagcgccctgctggcctac

SEQ ID NO: 778827 - DNA, 75 bp, synthetic construct
  source 1..75: mol_type = other DNA
gctgttaaatgaccagcaagtcgatactaaagcgattgaagccgatatttcagctgaggcatcgcaaggagcaac

SEQ ID NO: 778828 - DNA, 75 bp, synthetic construct
  source 1..75: mol_type = other DNA
tgccaaggccgaggctagcatgagcatcctttttgaagatcttgtccaattacagagtaaagaaacaattaactc

SEQ ID NO: 778829 - DNA, 75 bp, synthetic construct
  source 1..75: mol_type = other DNA
atatctggtgagaataataccgtttcggttgaaggcggtattaatatcgatagtacgcaaaatacaagtgactgg

SEQ ID NO: 778830 - DNA, 75 bp, synthetic construct
  source 1..75: mol_type = other DNA
aacgtggtggcgaaaggcgatccgcgcgcggagctggggaacaataccgagtacgacatgcttgcactgcgtaaa

SEQ ID NO: 778831 - DNA, 75 bp, synthetic construct
  source 1..75: mol_type = other DNA
agtacagatttcgggggacgatgcatcaataagacaaaaaggtgatatatttgttagtgaaggtgcctatggatt

SEQ ID NO: 778832 - DNA, 75 bp, synthetic construct
  source 1..75: mol_type = other DNA
gtgatgaatatcagtggtcattcacaaatgaactcgcggcaagtcagaggagccttcacattagtgagcgtagcg

SEQ ID NO: 778833 - DNA, 75 bp, synthetic construct
  source 1..75: mol_type = other DNA
gtgcgcaaaatgcggcaactgcaattaaaattgttggtgataattccagtatcgcccttgccgggcttgttgaaa

SEQ ID NO: 778834 - DNA, 75 bp, synthetic construct
  source 1..75: mol_type = other DNA
actcgtttgcattcagcgtgctgggtacagaaggtcacgtggttaacaacggcacggtggtgatcgccgatgggg

SEQ ID NO: 778835 - DNA, 75 bp, synthetic construct
  source 1..75: mol_type = other DNA
tacgctgtttatcccggtgcgagcattgccgggttatggcgatggagaaattcaggccaccattagcgggttagc

SEQ ID NO: 778836 - DNA, 75 bp, synthetic construct
  source 1..75: mol_type = other DNA
aggatatggcgatactaaacggagtaacaatgccgggagacatattctggcggcgcaatttttctcaggatcaac

SEQ ID NO: 778837 - DNA, 75 bp, synthetic construct
  source 1..75: mol_type = other DNA
aacaaaatacagacaaaccagaagaccaaactcggataaaatcaaaagaagatatggcaaatgcgaaaaccaagc

SEQ ID NO: 778838 - DNA, 75 bp, synthetic construct
  source 1..75: mol_type = other DNA
ggtcggtatcctgaccggtgacgacattactatcaataataatggtgaaaccgaagtcgatggtggaacggcggt

SEQ ID NO: 778839 - DNA, 75 bp, synthetic construct
  source 1..75: mol_type = other DNA
gatcgtgaacaagtgaatttgagcggtgatataaatgtcattcaggagcgtgacgtcagcagtactttccagggc

SEQ ID NO: 778840 - DNA, 75 bp, synthetic construct
  source 1..75: mol_type = other DNA
gcaggcgcaaacctctttctcagctgagccgctgacaggcgagaaagcgcaaaacagcaatctgaatagcgatca

SEQ ID NO: 778841 - DNA, 75 bp, synthetic construct
  source 1..75: mol_type = other DNA
tctccagtgcgttagagctggggcgcaagacgctggtcacgcttggcatgcatccgcatcaggcacagcgagcgc

SEQ ID NO: 778842 - DNA, 75 bp, synthetic construct
  source 1..75: mol_type = other DNA
gacagtgacgcagcccaccgtacctggcctgtctggctggaaagttcagttgatcttcagcgcattaaccgtgac

SEQ ID NO: 778843 - DNA, 75 bp, synthetic construct
  source 1..75: mol_type = other DNA
tgacaccggcagcacaaaagaatattcgtctgatacgggcggtaatgcagagtgctgccgtggtggcccaggcac

SEQ ID NO: 778844 - DNA, 75 bp, synthetic construct
  source 1..75: mol_type = other DNA
aattagtgcggcggaaagagcatgtaaatcaggttatggctcgcattgaaatggcaaaggccggaggactattta

SEQ ID NO: 778845 - DNA, 75 bp, synthetic construct
  source 1..75: mol_type = other DNA
attttaaatcatccacttctcaaggaattagtgcggcggaaagagcatgtaaatcaggttatggctcgcattgaa

SEQ ID NO: 778846 - DNA, 75 bp, synthetic construct
  source 1..75: mol_type = other DNA
ccagtcagttgttttgctcattaccaacaaaacacgacatcagaaaaaatagcgcaatctattattctgaacgga

SEQ ID NO: 778847 - DNA, 75 bp, synthetic construct
  source 1..75: mol_type = other DNA
aaaaacagcctgagtggtacgtgaaagctgtcagaaaaacgatcgcggcgttgccgggtggttacgctgaagcgg

SEQ ID NO: 778848 - DNA, 75 bp, synthetic construct
  source 1..75: mol_type = other DNA
gaacgcaacttcaagatgtggatcttgtttgtgtaccatcggatcgtgaaccattaggacgggtcatttttgaaa

SEQ ID NO: 778849 - DNA, 75 bp, synthetic construct
  source 1..75: mol_type = other DNA
tcctttgcctttacgctctatggcctggcggcagcgctttccacctgggtttccggcgtagttgccgaaattatt

SEQ ID NO: 778850 - DNA, 75 bp, synthetic construct
  source 1..75: mol_type = other DNA
gcaattggtatcagcgtaaactcagctgctcagcttgctggaaaagatcctttcagttatgtggatgcgataatt

SEQ ID NO: 778851 - DNA, 75 bp, synthetic construct
  source 1..75: mol_type = other DNA
atgaagccaactaccccatttaaaaatcccggcgcggtccgggatacctccgcccctcgtcagcagcctgatatt

SEQ ID NO: 778852 - DNA, 75 bp, synthetic construct
  source 1..75: mol_type = other DNA
cccccctcatcagcagcctgatattaaacctgatcttctcgcagagtcggaagctgtgaatatccaggaacaggt

SEQ ID NO: 778853 - DNA, 75 bp, synthetic construct
  source 1..75: mol_type = other DNA
acgacgcgcaacgtcccgttcctggtggaactcagcaatgtgccatttaaacagcaggaacaggcgctgttttat

SEQ ID NO: 778854 - DNA, 75 bp, synthetic construct
  source 1..75: mol_type = other DNA
ggcgattggtatgttatatggacgtagtctggagttatggttttctggcgacgaagaaattacgcttctgctggg

SEQ ID NO: 778855 - DNA, 75 bp, synthetic construct
  source 1..75: mol_type = other DNA
gtcgctatgaagtggatgtaaggccgcgcgggcgcgacggaaagcgtatccggcggaagtttgagagaaaagcgg

SEQ ID NO: 778856 - DNA, 75 bp, synthetic construct
  source 1..75: mol_type = other DNA
ctaagcctaacctgccagacgggcaagctgttcacgtccttaggcacacctttgctactcatttcatgatgaacg

SEQ ID NO: 778857 - DNA, 75 bp, synthetic construct
  source 1..75: mol_type = other DNA
tgacagataaaatgattaagtatgtatcagacctgctcatcaaagaaggtggtttcggtgatgcttgcaatccaa

SEQ ID NO: 778858 - DNA, 75 bp, synthetic construct
  source 1..75: mol_type = other DNA
tgcagactgaatttattgatcccagaaaagttaattttagctttgccgataatactgtttatgtaaatggggcta

SEQ ID NO: 778859 - DNA, 75 bp, synthetic construct
  source 1..75: mol_type = other DNA
ttatgaaatccagaaagctgcaaaggatgcacctatagtcattccgtttgactcaagatacgagcgaatgtttat

SEQ ID NO: 778860 - DNA, 75 bp, synthetic construct
  source 1..75: mol_type = other DNA
aagatcgctttgttgatatggctttcatcacccgcctgctgggggtcagtgataagtggatttaccgactcatca

SEQ ID NO: 778861 - DNA, 75 bp, synthetic construct
  source 1..75: mol_type = other DNA
aatgacgggctgtaccggcgtatctgtcaggtgcgcggcatggtgtggtcaccggaggccgaggcggaatggaaa

SEQ ID NO: 778862 - DNA, 75 bp, synthetic construct
  source 1..75: mol_type = other DNA
aatccgatgttctgctgccgtatcagaaacgctgggttgcggatgattcaaaactgaaaatcgccgagaaatccc

SEQ ID NO: 778863 - DNA, 75 bp, synthetic construct
  source 1..75: mol_type = other DNA
gtacgctaatatcatcagtgattaacggtttggagaactttcgccgatacattattttaataatggtgtctgtcc

SEQ ID NO: 778864 - DNA, 75 bp, synthetic construct
  source 1..75: mol_type = other DNA
cctcgacaggagttttaactctagctaaaatggcaatgggatttgccatttcgaaaattattgcgatatataccg

SEQ ID NO: 778865 - DNA, 75 bp, synthetic construct
  source 1..75: mol_type = other DNA
gtgtgtccaccagcgagcagaccacagaaaaccaaatcatggcgattcgtcaggctggctatgatgtgctcgata

SEQ ID NO: 778866 - DNA, 75 bp, synthetic construct
  source 1..75: mol_type = other DNA
ggccgcagctcccgctggctgaaaagtgaagtggaagcctggctgcaggcgcgtattgcacagccccgcccgtaa

SEQ ID NO: 778867 - DNA, 75 bp, synthetic construct
  source 1..75: mol_type = other DNA
gtcgttctggtggtataaaaaagtaattgccagtaacggggaggatttaatggaagcaaccgtgccggatacggc

SEQ ID NO: 778868 - DNA, 75 bp, synthetic construct
  source 1..75: mol_type = other DNA
tttttactaaaattacgtgagagcgcgctgtcatccggctccatgtctgaagaacaattttttttactgataggt

SEQ ID NO: 778869 - DNA, 75 bp, synthetic construct
  source 1..75: mol_type = other DNA
tcctcgcccgtatctcccgtggtcgtaccgtgcgtgaactgtgcttcggcatggtgctgggactaacagcgtcca

SEQ ID NO: 778870 - DNA, 75 bp, synthetic construct
  source 1..75: mol_type = other DNA
tgaacatttacatgccattcttgatagggctagtgataaaaaaatagatattgatataacactaggcaattcttt

SEQ ID NO: 778871 - DNA, 75 bp, synthetic construct
  source 1..75: mol_type = other DNA
gaaaatcaagattttgtgattgcttgccaaaattggcaagcaaaaggtagaggcggtcacaaccgcaaggaatac

SEQ ID NO: 778872 - DNA, 75 bp, synthetic construct
  source 1..75: mol_type = other DNA
cagaggcggtcacaaccgcaaggactaccacctcacactggacacagccaaagagctggcgatggttgacgactg

SEQ ID NO: 778873 - DNA, 75 bp, synthetic construct
  source 1..75: mol_type = other DNA
ggaaggattccgctatgaccgccacggcaacctgctggcgtacacggacggtaacggcgttgtctggacaatgga

SEQ ID NO: 778874 - DNA, 75 bp, synthetic construct
  source 1..75: mol_type = other DNA
tgctataaccggttccggtattacgagccggaaaccgggatgtacctggtgagtgatccgctggggttgcaggga

SEQ ID NO: 778875 - DNA, 75 bp, synthetic construct
  source 1..75: mol_type = other DNA
cagccagcgcgccggacttttcccggaggaagccacgtgggcgggctggttccgtcactggtgcgggagtaccgt

SEQ ID NO: 778876 - DNA, 75 bp, synthetic construct
  source 1..75: mol_type = other DNA
cacactcactacagcggaagacgaaacgccagttttagatattattattaagctgagtaatcgactcaatttgat

SEQ ID NO: 778877 - DNA, 75 bp, synthetic construct
  source 1..75: mol_type = other DNA
ctataatttcttaggttgcatcaccctgatgcgtggggaaacatgtatggtattcaacaaaaaaatgtttgtact

SEQ ID NO: 778878 - DNA, 75 bp, synthetic construct
  source 1..75: mol_type = other DNA
cacggaaaatgtccctggcagaagaaattaagaaaggaatgtcatccggagaattttctgtgcattatcaaccag

SEQ ID NO: 778879 - DNA, 75 bp, synthetic construct
  source 1..75: mol_type = other DNA
ccgtctgcagcaggctgccagcgacccgatggtggacggcattctgctggatatggacacgcccggcggaatggt

SEQ ID NO: 778880 - DNA, 75 bp, synthetic construct
  source 1..75: mol_type = other DNA
acgcttggtatcgacagccgtttctcccgtgaagaaagcagcacaactcaggcgggtgtggtctggacgttctga

SEQ ID NO: 778881 - DNA, 75 bp, synthetic construct
  source 1..75: mol_type = other DNA
cgaagccactgaacaggccagcgcagcagcgagttctgcttccgcagcgaagacatccgaaacgaacgcgaaagc

SEQ ID NO: 778882 - DNA, 75 bp, synthetic construct
  source 1..75: mol_type = other DNA
gtgcagcctcctcggcaacggcggcaggaaattccgcgaaggcggcaaagacgtctgagacaaacgctaagtctt

SEQ ID NO: 778883 - DNA, 75 bp, synthetic construct
  source 1..75: mol_type = other DNA
taccccagtttcgctgatggatgaccagatggtcgatatggcgtttatcactcagctgaccggcctgaccgataa

SEQ ID NO: 778884 - DNA, 75 bp, synthetic construct
  source 1..75: mol_type = other DNA
tgccgcctttgttaaagtatcgacaccattagtggtcacggcaggtgctgctcatgtgaatgttcaaacagacct

SEQ ID NO: 778885 - DNA, 75 bp, synthetic construct
  source 1..75: mol_type = other DNA
acacagataccactgaaaaactgactgtattacctgataccgagtatcaggataaagaaattagttcggttataa

SEQ ID NO: 778886 - DNA, 75 bp, synthetic construct
  source 1..75: mol_type = other DNA
aaagaggatattaaacactattctctgatggattttatgaatgtagattatagcctcctgaaatggtcaaatgat

SEQ ID NO: 778887 - DNA, 75 bp, synthetic construct
  source 1..75: mol_type = other DNA
atatctgaaagtctttcggagtcagatgttattattttccttgtaagttcaagctttatttcatcagactattgt

SEQ ID NO: 778888 - DNA, 75 bp, synthetic construct
  source 1..75: mol_type = other DNA
tcattgcagcaggagtattactctcctgtatgagcagcattgcctggggtgccatcatcccggatcgtaatgaat

SEQ ID NO: 778889 - DNA, 75 bp, synthetic construct
  source 1..75: mol_type = other DNA
gttcggcggcgtcatcggcatcatctgcgtctgcttcaaaagatgaggcgaccagacaggcgtcagcagcgaggg

SEQ ID NO: 778890 - DNA, 75 bp, synthetic construct
  source 1..75: mol_type = other DNA
gcggctgcgtcgtctgccagtaccgcgtcaacaagtgccgggcaggcctcagccagtgccaccgccgccggaaaa

SEQ ID NO: 778891 - DNA, 75 bp, synthetic construct
  source 1..75: mol_type = other DNA
ttttttacgtttctccctggttgttatgccggtgaaggtggtgcgtcgttttcatcaccaacgccggttgagatt

SEQ ID NO: 778892 - DNA, 75 bp, synthetic construct
  source 1..75: mol_type = other DNA
catcagagacatttattgctaataacggaaataaatataaatttacatcacatagcagggcgaggtttattctta

SEQ ID NO: 778893 - DNA, 75 bp, synthetic construct
  source 1..75: mol_type = other DNA
cagctctaaggggttccagtaccttcacacccgcgactttgttagcgcgctgcgccagcatggcatccacttttc

SEQ ID NO: 778894 - DNA, 75 bp, synthetic construct
  source 1..75: mol_type = other DNA
taagcggattgtcgtgcgcactgccaggtccagcggtgaaggttgcgttacttacaagcagctatggcacgccct

SEQ ID NO: 778895 - DNA, 75 bp, synthetic construct
  source 1..75: mol_type = other DNA
cgttttctcgatagtggcgcgttaatcgagaagaaagtggtcgcccaaactctctttgaacccgtctggattggc

SEQ ID NO: 778896 - DNA, 75 bp, synthetic construct
  source 1..75: mol_type = other DNA
ccccgttatctggcgcaacgttttctcgatagtggtgcgttaatcgagaagaaagtggtcgcccaaaccctcttt

SEQ ID NO: 778897 - DNA, 75 bp, synthetic construct
  source 1..75: mol_type = other DNA
gggacactgcacaggccggcgcttctacggcctcacaacttctcgacgaacaagaagctattaccgttttcgatt

SEQ ID NO: 778898 - DNA, 75 bp, synthetic construct
  source 1..75: mol_type = other DNA
acatttaccagttagttttaaaaaaagcacatttgttgaactatgggagaaagagcctgagataatggaaaaaac

SEQ ID NO: 778899 - DNA, 75 bp, synthetic construct
  source 1..75: mol_type = other DNA
acgcagacctcgccaactattacgaccgggtgagctcattgcaggaacgccgcttacggatgccgatgcgtcgga

SEQ ID NO: 778900 - DNA, 75 bp, synthetic construct
  source 1..75: mol_type = other DNA
atgcagaccttgccaactattacgaccgggtgagctcgttgcaggaacgccgcttacggatgccgatgcgtcgga

SEQ ID NO: 778901 - DNA, 75 bp, synthetic construct
  source 1..75: mol_type = other DNA
ccgccgctcactcatgacgatggttagtaatgggctaatcaggaaacaaggccgcgctttcgtagctgaaagaca

SEQ ID NO: 778902 - DNA, 75 bp, synthetic construct
  source 1..75: mol_type = other DNA
aattacgccgccaaagagttaacagtaagcggattgtcgtgcgcactggattatcttgtcggtgaaggttgcgtt

SEQ ID NO: 778903 - DNA, 75 bp, synthetic construct
  source 1..75: mol_type = other DNA
ctaatgccttggccgaagtttgtaggtatcaaagatactcatcttccaattccttatcttaagtcaacatttgat

SEQ ID NO: 778904 - DNA, 75 bp, synthetic construct
  source 1..75: mol_type = other DNA
ccgttgttccttgacgagcaatcgcaccagttcctgcaacttgaatcaggatcgccatatagctacatcgccaat

SEQ ID NO: 778905 - DNA, 75 bp, synthetic construct
  source 1..75: mol_type = other DNA
catcacgattttactcgcgaagttgcagaagatcgtcttgaacaacagttcgtacaggaaaaagcagaacagcaa

SEQ ID NO: 778906 - DNA, 75 bp, synthetic construct
  source 1..75: mol_type = other DNA
tgagaaaccctacgaaatcctggctgattcatacaaggaatacacccgtacacctgtatatgttgtttcgttccc

SEQ ID NO: 778907 - DNA, 75 bp, synthetic construct
  source 1..75: mol_type = other DNA
aataccaggttgaaagatcttgtaatggataaacaagaaaccaagattgtttatcgtgaccaaaaaacagagtcc

SEQ ID NO: 778908 - DNA, 75 bp, synthetic construct
  source 1..75: mol_type = other DNA
atgcttattcagacctccacaggttacagacacatgtacatggggatgccagttgagacgacgaccatacgtgtg

SEQ ID NO: 778909 - DNA, 75 bp, synthetic construct
  source 1..75: mol_type = other DNA
tcgctctgattattatggttattgcgctttgctttacaacggacaaggatcctgatgttcctggtgatacgggta

SEQ ID NO: 778910 - DNA, 75 bp, synthetic construct
  source 1..75: mol_type = other DNA
aaatcgagtaaaacgcgtgagcactataaggcgcttagtgagccggaaaagaaaagttttctaaaaaacaggatt

SEQ ID NO: 778911 - DNA, 75 bp, synthetic construct
  source 1..75: mol_type = other DNA
tgagctgggaaagctgaatcgccgtcagattagcgcactgattggtgttgccccgtttaaccgggattccggtca

SEQ ID NO: 778912 - DNA, 75 bp, synthetic construct
  source 1..75: mol_type = other DNA
aaaatctcaatagaaattactatggaaatctattgttttcagttaacttttataagttgcgacgctcatataaag

SEQ ID NO: 778913 - DNA, 75 bp, synthetic construct
  source 1..75: mol_type = other DNA
gagctctggcaagggcaatgaaacgggctaacagaaacctagctaagagtgccggatacatgaatcgagcttggt

SEQ ID NO: 778914 - DNA, 75 bp, synthetic construct
  source 1..75: mol_type = other DNA
gtctgatgcaaaaaaattcttgcttaaaacatatggagaacaactgtctgaagaaacgtttgagccggtagtaac

SEQ ID NO: 778915 - DNA, 75 bp, synthetic construct
  source 1..75: mol_type = other DNA
cccggacggaacttatgtttccgaaaagggcggtgatatttatcaaattcgcagccagatatctgactatgcaga

SEQ ID NO: 778916 - DNA, 75 bp, synthetic construct
  source 1..75: mol_type = other DNA
aatcgggatgcgtctatggttatcgcaaaatccatctggatctgcgggacagcgggcaacagtgcggagtgaaca

SEQ ID NO: 778917 - DNA, 75 bp, synthetic construct
  source 1..75: mol_type = other DNA
gattgatgacgcgtaaggcggcaatgaccgacctgcgcgaaaactctgacgtcaccggcatcggggcatccatta

SEQ ID NO: 778918 - DNA, 75 bp, synthetic construct
  source 1..75: mol_type = other DNA
ggcaggataaagcgttaagtctcgccattgaaaaccgcttatttattaacggtgaatatactgctgcggcggaaa

SEQ ID NO: 778919 - DNA, 75 bp, synthetic construct
  source 1..75: mol_type = other DNA
tgctatgactatgctttgtaaaaataaatgtataataaaaagaggtcttagatatacagtatatagaagatcttg

SEQ ID NO: 778920 - DNA, 75 bp, synthetic construct
  source 1..75: mol_type = other DNA
ccaccgcgtaaaaccattgggaagaaatcttgcgggtggttgttaagtgaccttctgtggtggattactaaacgt

SEQ ID NO: 778921 - DNA, 75 bp, synthetic construct
  source 1..75: mol_type = other DNA
gaaaaagaaaaactgaaacatttccgtaaaggattaaaagattctcagcgtgtaatggctattgcggtgaagcga

SEQ ID NO: 778922 - DNA, 75 bp, synthetic construct
  source 1..75: mol_type = other DNA
agatgtgcctgcaggtacgccatgtgcgctgagatgctgcaactgattaacgaggtgggagagaaactggtcggg

SEQ ID NO: 778923 - DNA, 75 bp, synthetic construct
  source 1..75: mol_type = other DNA
cttagcaataaaacaattagtgcgcataaatctaatatttatggcaaactcggtttgcattcaattgtagaactt

SEQ ID NO: 778924 - DNA, 75 bp, synthetic construct
  source 1..75: mol_type = other DNA
aaattttgctggccgtggaggaaagcaaaattgcgctgacgccggatggcattcagctacaggtcggggaatcga

SEQ ID NO: 778925 - DNA, 75 bp, synthetic construct
  source 1..75: mol_type = other DNA
ccgaggtgctgaataaccgcaccactgatgtgataaacaaccatgctgaaaccattggcaacaatcagatgattg

SEQ ID NO: 778926 - DNA, 75 bp, synthetic construct
  source 1..75: mol_type = other DNA
ctgatcctagaacatacgatttcaaaagtgatagatatcagaagatcaatgaccctgtaactaaggatcatcata

SEQ ID NO: 778927 - DNA, 75 bp, synthetic construct
  source 1..75: mol_type = other DNA
agaacccgcacttccaagagatctgcagatgaggtcaaacgcattgaaacatctcttcgtctgatccgtttcgtc

SEQ ID NO: 778928 - DNA, 75 bp, synthetic construct
  source 1..75: mol_type = other DNA
gagttttcaggggataccgaatatctgttgaacaactcccgggagaagtacagtttcaaaggtaatggctggaat

SEQ ID NO: 778929 - DNA, 75 bp, synthetic construct
  source 1..75: mol_type = other DNA
atccgcatatcaacgcctcgcgtccgcgtccgctggacccggtccgttatctcattcaaacatgctggttactga

SEQ ID NO: 778930 - DNA, 75 bp, synthetic construct
  source 1..75: mol_type = other DNA
agttcttcaataactcccaattcacctattcagctttatatggtgctggtattctggataatgcaaagatctcta

SEQ ID NO: 778931 - DNA, 75 bp, synthetic construct
  source 1..75: mol_type = other DNA
ctcaccgcatttgatttttattttgaagataatgagctaatcccgttgccttcgccattaactaacaacgatcac

SEQ ID NO: 778932 - DNA, 75 bp, synthetic construct
  source 1..75: mol_type = other DNA
ttttttacagtcagaaatcactcagcaagagttagccaggcgaattggcaacccgaatgtagtcaacccaaaata

SEQ ID NO: 778933 - DNA, 75 bp, synthetic construct
  source 1..75: mol_type = other DNA
ccaggcgcaataaccgtgtattttttcgaagcggcaatgcatatgaagtcgaactgtggataccaacacgtaaag

SEQ ID NO: 778934 - DNA, 75 bp, synthetic construct
  source 1..75: mol_type = other DNA
tctcggcaaacctgagttttacgacgtggtgaccactgccacgggcattccagcctggcgcatccatcacagccg

SEQ ID NO: 778935 - DNA, 75 bp, synthetic construct
  source 1..75: mol_type = other DNA
cgtcaggcggaaatccggtatcgaaccagcctacgcaggatagcgcgggcggtcggagacatcgtaaatggtcgc

SEQ ID NO: 778936 - DNA, 75 bp, synthetic construct
  source 1..75: mol_type = other DNA
cgcaataccattgccatgtgtctggcgctgacggttgcctattatttgaatctggatgaaccctattgggcgatg

SEQ ID NO: 778937 - DNA, 75 bp, synthetic construct
  source 1..75: mol_type = other DNA
agtacagatgcctgaggattctgcatggaataagcttaaggaacaactaaataaggctgaattgatagaagatga

SEQ ID NO: 778938 - DNA, 75 bp, synthetic construct
  source 1..75: mol_type = other DNA
tcagttcgtttctgtgcgagtacagatgcctgaggattcagcatggaataagcttaaggaacaactcaataaggc

SEQ ID NO: 778939 - DNA, 75 bp, synthetic construct
  source 1..75: mol_type = other DNA
catgggggaaaagggattgccccacaaatcgattataataaagccgctgatgtggattatatggataaggggaat

SEQ ID NO: 778940 - DNA, 75 bp, synthetic construct
  source 1..75: mol_type = other DNA
cggaaaaacaatcccgcatcgacagggctaacgcgtttataaatagtaagcagtggccaggaaaggcggctattg

SEQ ID NO: 778941 - DNA, 75 bp, synthetic construct
  source 1..75: mol_type = other DNA
gctaccagcctgaatgcgcctgagatagcaccggcagtctctgccataccgcaggcgtacttatcgcctgtgaac

SEQ ID NO: 778942 - DNA, 75 bp, synthetic construct
  source 1..75: mol_type = other DNA
atgaagcgcgccacgctggagttgcacaaccaaccgcagcaccttttcttacgcaacatcaaggtcatgcagcaa

SEQ ID NO: 778943 - DNA, 75 bp, synthetic construct
  source 1..75: mol_type = other DNA
ttttcagaaagattaatttatatattctttcattatcactcctttttttcttttttatagttatcaccatagata

SEQ ID NO: 778944 - DNA, 75 bp, synthetic construct
  source 1..75: mol_type = other DNA
aagccggtgcgacgctgtttccagcacatatctacaccgataacaacggtgaattaatgacgctgatgcaacggg

SEQ ID NO: 778945 - DNA, 75 bp, synthetic construct
  source 1..75: mol_type = other DNA
aattgattaaccaggccaacgaatacataaacagtaaacaatggccaggtaaagcatcaattggtcgtctgaaag

SEQ ID NO: 778946 - DNA, 75 bp, synthetic construct
  source 1..75: mol_type = other DNA
ttgaactgctactttctagtcctgacgatcttcgaataattgaaattcctgacatcatcggtgatgtttttgatg

SEQ ID NO: 778947 - DNA, 75 bp, synthetic construct
  source 1..75: mol_type = other DNA
tttgtcatcaggctcgaaacaaattatccctgtcccccgagtctccggcaggttggtttgaatcaggatgctgcg

SEQ ID NO: 778948 - DNA, 75 bp, synthetic construct
  source 1..75: mol_type = other DNA
ccagcagcgtggaaattgtgttatccgtgccgtatgtcaccgcatcaggacagacgatcacgcacgtcaccatgc

SEQ ID NO: 778949 - DNA, 75 bp, synthetic construct
  source 1..75: mol_type = other DNA
tatgtgcgcacgagtcagcggggtaaaaagtggcggcatttacgccggacatgacaatcatttctatgggcatcg

SEQ ID NO: 778950 - DNA, 75 bp, synthetic construct
  source 1..75: mol_type = other DNA
cgaatacccctgttctgggtacaaccgcgacagcgaataaccgtgtcgttgaggatatccgtcagcaattgggtg

SEQ ID NO: 778951 - DNA, 75 bp, synthetic construct
  source 1..75: mol_type = other DNA
gctgtgtacttcatcgccagtaaaatcttccgcgatcgcggcgctggcccgacaattatcatctctcctttgctt

SEQ ID NO: 778952 - DNA, 75 bp, synthetic construct
  source 1..75: mol_type = other DNA
aagaccacgacgaaggcacccggcaacgttttgctgaagggctggcgtgggcagtcgaacaggcggcggcatcac

SEQ ID NO: 778953 - DNA, 75 bp, synthetic construct
  source 1..75: mol_type = other DNA
ctgttattcgaggcctgtctgccagagaaactgacgatggtgttaatcgcagcgccgatctgcagatcactgata

SEQ ID NO: 778954 - DNA, 75 bp, synthetic construct
  source 1..75: mol_type = other DNA
gacagcgacgaagtgctgcgcctgaagcaaattaacggcctgcaagagttgtttgccgaccgtcaatattcccgc

SEQ ID NO: 778955 - DNA, 75 bp, synthetic construct
  source 1..75: mol_type = other DNA
gtgagtgccgtcagagtgaggttatgcagcgtgtactggcgttctatcagggagattttcaggaggtgatggagt

SEQ ID NO: 778956 - DNA, 75 bp, synthetic construct
  source 1..75: mol_type = other DNA
gtgcaacaggtaatgcaactgctcaaaacgcagtcatgagtttcagttctatgtacaataactctaaccagggta

SEQ ID NO: 778957 - DNA, 75 bp, synthetic construct
  source 1..75: mol_type = other DNA
gattgaggataatgcgtggatcacaacgctggaatttccgctgctcattcgtagttactggatgccagaggacgc

SEQ ID NO: 778958 - DNA, 75 bp, synthetic construct
  source 1..75: mol_type = other DNA
gatattagcaggcggtgtacgacagccatgctgaagctggaacaacccgaggttgttaatacatcaatatcttta

SEQ ID NO: 778959 - DNA, 75 bp, synthetic construct
  source 1..75: mol_type = other DNA
tacgtggtcgcggaatgcgcccgacaccgtttaaatacaccttagccattgccctgttacaaacctgcgggatgg

SEQ ID NO: 778960 - DNA, 75 bp, synthetic construct
  source 1..75: mol_type = other DNA
gaaagagataaggtgacctctaaagtatggggtcacactgcgcgcggtaatttggtcggaaagactacaaattgt

SEQ ID NO: 778961 - DNA, 75 bp, synthetic construct
  source 1..75: mol_type = other DNA
ttctggcagcgtcctgtttttctgctggtaatgcaatggctgtggatggtggtgaaataaatatcaacggtctgg

SEQ ID NO: 778962 - DNA, 75 bp, synthetic construct
  source 1..75: mol_type = other DNA
aaatggcgaatttgacgccagttttgttgctgaatggtgcgcactggagcacaacgtagatatctggtttttgtt

SEQ ID NO: 778963 - DNA, 75 bp, synthetic construct
  source 1..75: mol_type = other DNA
tcccaagtgtgccattccgatcaggctgtttatgtgttaactcaggagcgagtgaacgagcgtgacgacatcgtc

SEQ ID NO: 778964 - DNA, 75 bp, synthetic construct
  source 1..75: mol_type = other DNA
aagttcggtatgccatgattcacgatgagtcacggtgcaatggttgtaatatttgcgcccgtgcatgtcgcaaga

SEQ ID NO: 778965 - DNA, 75 bp, synthetic construct
  source 1..75: mol_type = other DNA
tcccgggtaaacacctcagaggtggtgatgcgcacagttgccgacgtggtgacaggaaactgtggcgagtactgt

SEQ ID NO: 778966 - DNA, 75 bp, synthetic construct
  source 1..75: mol_type = other DNA
ctgcctggatcattctggctgtaaagccagataatttctggttagtggattcgccagaaatggatgtagggacaa

SEQ ID NO: 778967 - DNA, 75 bp, synthetic construct
  source 1..75: mol_type = other DNA
tcctggggcggattgtttgttgccaatattgatgctgagaaagcggctaagtgccgaaaatatatggggcgtttt

SEQ ID NO: 778968 - DNA, 75 bp, synthetic construct
  source 1..75: mol_type = other DNA
agagagaccatgcacagcagcccataatgcagccatctcgtatgcaaaccgcttacctgcgcctgttgataatca

SEQ ID NO: 778969 - DNA, 75 bp, synthetic construct
  source 1..75: mol_type = other DNA
tttgctgcgcgaaatcaaattgaattactcttgaatattgaagatggaaatgaaatcaattccgacaagaccaat

SEQ ID NO: 778970 - DNA, 75 bp, synthetic construct
  source 1..75: mol_type = other DNA
attgtagaattaacacctccattgatagaaaagattgctgagggggctcgtattcgttgggggctaacacctgat

SEQ ID NO: 778971 - DNA, 75 bp, synthetic construct
  source 1..75: mol_type = other DNA
caatgccattttcgtaaaagacagacaacacctgccagtgttaaagagcgggttcaggcatacagtactattctt

SEQ ID NO: 778972 - DNA, 75 bp, synthetic construct
  source 1..75: mol_type = other DNA
ccagcaggcacagaaaatcgtcattgatgacgctgcttatgtgtacctgttccagaaaaactaccaactggcgat

SEQ ID NO: 778973 - DNA, 75 bp, synthetic construct
  source 1..75: mol_type = other DNA
caatgcaatacaaccatgacgaaacgaaagccaaagccgaatgggataaagtgacgagcaaacccaccagcctga

SEQ ID NO: 778974 - DNA, 75 bp, synthetic construct
  source 1..75: mol_type = other DNA
tgacgaaacgaaagccaaagccgaatgggataaagtgacgagcaaacccaccagcctgacgtttctctactccga

SEQ ID NO: 778975 - DNA, 75 bp, synthetic construct
  source 1..75: mol_type = other DNA
gaagctgagcgccagataaacccgttcgggctggatgtgctctcataccgtgttgatccagaggtggtgaaatga

SEQ ID NO: 778976 - DNA, 75 bp, synthetic construct
  source 1..75: mol_type = other DNA
gcgctatctggagaaccgcgaaggttacgaatggtacacaattcagaacatgctgaataccgttgaactgatgtc

SEQ ID NO: 778977 - DNA, 75 bp, synthetic construct
  source 1..75: mol_type = other DNA
gtcatacttcttctgcaaaccctgataatctgctagaacctgataatagaaatagtcaaattggtttaaaaaatc

SEQ ID NO: 778978 - DNA, 75 bp, synthetic construct
  source 1..75: mol_type = other DNA
actctgcgtaaaaccatctttgctagctgaaatatctggcattgattatattcaagaccaaagcgatgactttga

SEQ ID NO: 778979 - DNA, 75 bp, synthetic construct
  source 1..75: mol_type = other DNA
acccgctgcaggggcgatatatcactcaggatccgattgggctgaaagggggatggaatttttatcagtatccgt

SEQ ID NO: 778980 - DNA, 75 bp, synthetic construct
  source 1..75: mol_type = other DNA
cttcactcaactacaacccagaaacaggcgtcttcacttggaagatagcttctggtagctccagtatcggaaagg

SEQ ID NO: 778981 - DNA, 75 bp, synthetic construct
  source 1..75: mol_type = other DNA
tttatgctttacggactgtttttcagcatgatgaactgctcctacggcgcaatggttcccgctatcaccaaaaac

SEQ ID NO: 778982 - DNA, 75 bp, synthetic construct
  source 1..75: mol_type = other DNA
ttcagaacgtatcagcaataaagcgcttggcctgggtaacgccagccgggccggaactcaccgggcgctgacgcc

SEQ ID NO: 778983 - DNA, 75 bp, synthetic construct
  source 1..75: mol_type = other DNA
ttcgttccgacgaccagcttcctggacagtgttgaaccccagtcagctcccggtcaacagggagatgatgtgata

SEQ ID NO: 778984 - DNA, 75 bp, synthetic construct
  source 1..75: mol_type = other DNA
gcacaggaataacagacaaaaagatgggggaccatcacctcccccatgaactgagtcaattatacacttgtgaag

SEQ ID NO: 778985 - DNA, 75 bp, synthetic construct
  source 1..75: mol_type = other DNA
tggctctgacgctggagcttgccagagcaatgggtttgcgttcacaggaagcggtgcagtgttgccagtctctga

SEQ ID NO: 778986 - DNA, 75 bp, synthetic construct
  source 1..75: mol_type = other DNA
ggaaccaataaactgctgctgaccatgtttatttcatacattgtgggtattgttcttattatcgccgctaatcaa

SEQ ID NO: 778987 - DNA, 75 bp, synthetic construct
  source 1..75: mol_type = other DNA
cctgcgcagcgccatgaattactggcgctcaagcgcctcccgtgccgggttaaccgggccatatgcccctcacag

SEQ ID NO: 778988 - DNA, 75 bp, synthetic construct
  source 1..75: mol_type = other DNA
gtcgccggttatcgactgctttgatggccaggttgtaagctggtcgataggaacacgcccggacgcgactgaatc

SEQ ID NO: 778989 - DNA, 75 bp, synthetic construct
  source 1..75: mol_type = other DNA
ggaagcggtcgcctgaatgggcgcaaggtattaattaccggtggggattcagggattggtcgtgctgttgctatt

SEQ ID NO: 778990 - DNA, 75 bp, synthetic construct
  source 1..75: mol_type = other DNA
acgctggcgatggagatcatggattacccgttgatgaactccatcagtaaggcgttgggttacacgcactatctc

SEQ ID NO: 778991 - DNA, 75 bp, synthetic construct
  source 1..75: mol_type = other DNA
aaccagtccggcaataatcaccgtctggattatatcgccgatggttatcccgagcatgtcgccgaaaagaatatg

SEQ ID NO: 778992 - DNA, 75 bp, synthetic construct
  source 1..75: mol_type = other DNA
attttcggtgcttcccaattaataataacaaaaacagcgacaatacctctcaatacaaaaaaacagatcccggtc

SEQ ID NO: 778993 - DNA, 75 bp, synthetic construct
  source 1..75: mol_type = other DNA
aacctcaaaaaacacctccacttaccgatgccgaactggaaaagttatctcccgaagaactgcggacagatctcc

SEQ ID NO: 778994 - DNA, 75 bp, synthetic construct
  source 1..75: mol_type = other DNA
cgaaagccgggtttggtccgactctcacttttttatttgtttccccattacttaatcccattatcgtcgggttaa

SEQ ID NO: 778995 - DNA, 75 bp, synthetic construct
  source 1..75: mol_type = other DNA
cattagcggcaccaccaccgccgaagtgggtcagacggtgaccgttacctttaacgggcaaacctggagcgcaac

SEQ ID NO: 778996 - DNA, 75 bp, synthetic construct
  source 1..75: mol_type = other DNA
cacggtgcaggcagacggcagttggagcttaacgctgcccgccagcgacttaaccgcactggccaataacggcta

SEQ ID NO: 778997 - DNA, 75 bp, synthetic construct
  source 1..75: mol_type = other DNA
ctcagcggagacggtaatatccagagtcgtctgggcgtcagaacttacctgaaaggtaagagtgcgtctgatgat

SEQ ID NO: 778998 - DNA, 75 bp, synthetic construct
  source 1..75: mol_type = other DNA
ggataccgatgcgctgacagtttccgcgaccgcctataccgttactgcgcaggtaaaaagttcggcgggtaacgg

SEQ ID NO: 778999 - DNA, 75 bp, synthetic construct
  source 1..75: mol_type = other DNA
caactatctctatcaggtgcgggtgattgacgcagcgggcaacgttggcgcgaccgacagccagaatgtggtgat

SEQ ID NO: 779000 - DNA, 75 bp, synthetic construct
  source 1..75: mol_type = other DNA
gcagacgggcggtagctggagctacaccctcggcagcgccgatgtcaccgcgctggcggacggcaacgcctacgt

SEQ ID NO: 779001 - DNA, 75 bp, synthetic construct
  source 1..75: mol_type = other DNA
tatccgctgagcccggtgaatagcatggatccattaggattatatgaatttaaatcaaaaaatatagatgatatt

SEQ ID NO: 779002 - DNA, 75 bp, synthetic construct
  source 1..75: mol_type = other DNA
ttctcatcgctggtgtttgcccgtctgatgaccggcgtcgggctgggcgccaacaaatatgttgttcactcaggg

SEQ ID NO: 779003 - DNA, 75 bp, synthetic construct
  source 1..75: mol_type = other DNA
cagatagcgagtctggaggtgatgcaggataacgcgatcgcagacggcgcaatggcgaatacgctgcgggtgagg

SEQ ID NO: 779004 - DNA, 75 bp, synthetic construct
  source 1..75: mol_type = other DNA
gtttaaaaacgtcagcgatgattgcatccattgctgatgaaggccaggccaccgtcgccgcgccgtttggcgtcg

SEQ ID NO: 779005 - DNA, 75 bp, synthetic construct
  source 1..75: mol_type = other DNA
ggcagcctggggttgttgatgaccttaatgggattgttgatcgtgctgtgctggctgccgctggcgacgcggatg

SEQ ID NO: 779006 - DNA, 75 bp, synthetic construct
  source 1..75: mol_type = other DNA
caatttgcatatcggcggcgacgggaaagatggcgtctacgtggtggtcgatgcgagcgacgggcaggtaagtct

SEQ ID NO: 779007 - DNA, 75 bp, synthetic construct
  source 1..75: mol_type = other DNA
acctggtcgaagaccgcgctgacgctgtatcagagcggcaacaactacgccaccagctccatcgccgattacgac

SEQ ID NO: 779008 - DNA, 75 bp, synthetic construct
  source 1..75: mol_type = other DNA
tacataattatatcgacataatcattgaagattatgaaaatataaaagaaaatgcttatctggtaattccccaaa

SEQ ID NO: 779009 - DNA, 75 bp, synthetic construct
  source 1..75: mol_type = other DNA
ggtgggcaccaccattacggtgacgctgaacgggcaaaattacaccgctacaaccgattcttccggcaactggag

SEQ ID NO: 779010 - DNA, 75 bp, synthetic construct
  source 1..75: mol_type = other DNA
ccacgctggatgccgccggcaactggagcgtcggcgttccggcggcagacgttactgcgcttggcagcggcccgc

SEQ ID NO: 779011 - DNA, 75 bp, synthetic construct
  source 1..75: mol_type = other DNA
cagcggcccgcaaaccgtgactgcgaccgttaccgatgccgccggtaacagcgatagtgagacgcacacggtcac

SEQ ID NO: 779012 - DNA, 75 bp, synthetic construct
  source 1..75: mol_type = other DNA
tatcactcaacttaccggcttaaccgataagtggttttacaaactcatcaaagatgggggctttcctgcccccat

SEQ ID NO: 779013 - DNA, 75 bp, synthetic construct
  source 1..75: mol_type = other DNA
cggcggtaaccgcactgggccaggccaactacacggtaacggcggcggtaaccagcagtatcggcaacagcaaca

SEQ ID NO: 779014 - DNA, 75 bp, synthetic construct
  source 1..75: mol_type = other DNA
gataaatggttttacaagctcatcaaggatggtgcctttcctgcccccatcaaactgggccgcagttcccgctgg

SEQ ID NO: 779015 - DNA, 75 bp, synthetic construct
  source 1..75: mol_type = other DNA
tggcgaatggcacggtgaccatcaatgccagcgtcaccgatgccggaggaaacagcggcagcgctacccatcagg

SEQ ID NO: 779016 - DNA, 75 bp, synthetic construct
  source 1..75: mol_type = other DNA
tcttcctgccagccagccagggaagagctaactacggctcgctgttattcaacaccaacggcgtactgggtagcc

SEQ ID NO: 779017 - DNA, 75 bp, synthetic construct
  source 1..75: mol_type = other DNA
ataccagctaacgaaacaatttaacatcaaatggctttatacagaggatgggaaaaactggtatgagaacaaaag

SEQ ID NO: 779018 - DNA, 75 bp, synthetic construct
  source 1..75: mol_type = other DNA
agcgttgtcctcgcggcttttacccggtcaaaacagcgttacggtgcaccacgcctgacggatgaactgcgtgct

SEQ ID NO: 779019 - DNA, 75 bp, synthetic construct
  source 1..75: mol_type = other DNA
ccacggagaacactttatcagccgggaaataatgcgggcaacggtgtttaattatatcgaatgtgattacaatcg

SEQ ID NO: 779020 - DNA, 75 bp, synthetic construct
  source 1..75: mol_type = other DNA
tgacggtgcaatggcgaacacgctgcgggtgagggtgaccgatgcgttcgggaatgcgctgaatgggcagacggt

SEQ ID NO: 779021 - DNA, 75 bp, synthetic construct
  source 1..75: mol_type = other DNA
gctttggtatcaccgttgatgaattacgtcgcctgaatcagtttcgtacctttgcgcggggctttgacaatgtgc

SEQ ID NO: 779022 - DNA, 75 bp, synthetic construct
  source 1..75: mol_type = other DNA
ctggggtttatggattagcattcgctagtagtatttattctttgataaatatgtcggttatgtttttaattatca

SEQ ID NO: 779023 - DNA, 75 bp, synthetic construct
  source 1..75: mol_type = other DNA
gtacaggataataaaatatttaaacattggttaatgacgagggtttttattttatttgcctttggtttggttcta

SEQ ID NO: 779024 - DNA, 75 bp, synthetic construct
  source 1..75: mol_type = other DNA
gatggaaaatcaacctcaacgctgacctataccgcgcgagattccagcggcaagccaatccccggtatgacgtta

SEQ ID NO: 779025 - DNA, 75 bp, synthetic construct
  source 1..75: mol_type = other DNA
tggcgcgattacctgaaactgagcggcaacggttatctgcgcctgagtaactggcgtagtgcaccggaactcgac

SEQ ID NO: 779026 - DNA, 75 bp, synthetic construct
  source 1..75: mol_type = other DNA
ccgacggtcaccacgcagccggacggtacggtggaaatcagtgtcaccagccagacggcgggcaccagttcggtc

SEQ ID NO: 779027 - DNA, 75 bp, synthetic construct
  source 1..75: mol_type = other DNA
tctactgtgggttaatggagaaaattttagcacactaaagcaggccgggttgctttacggcggttgggcagagcg

SEQ ID NO: 779028 - DNA, 75 bp, synthetic construct
  source 1..75: mol_type = other DNA
tggtgatattagtgctaaagatgcaaaaagcacacagaaagcctggaattgtcgtcactccagacagtcaaacga

SEQ ID NO: 779029 - DNA, 75 bp, synthetic construct
  source 1..75: mol_type = other DNA
ggagccgcatccagacgatttatcagccggggagcttcacgccactcatcagagttgaaactgccaccggtgagc

SEQ ID NO: 779030 - DNA, 75 bp, synthetic construct
  source 1..75: mol_type = other DNA
tttacaaactcattctctttctgttgctattattggtggaagtaatgatgagattcatcaagcatgtgaatattt

SEQ ID NO: 779031 - DNA, 75 bp, synthetic construct
  source 1..75: mol_type = other DNA
tcggcacatctgccggttaatccgccccctgatgtacaggttgtgttgctcgacgggccacagcaactgcaggat

SEQ ID NO: 779032 - DNA, 75 bp, synthetic construct
  source 1..75: mol_type = other DNA
tttccgttccgacagaaggggctgagtctccctggggaagcgcacaattgacattcattgccgatcggcggcagt

SEQ ID NO: 779033 - DNA, 75 bp, synthetic construct
  source 1..75: mol_type = other DNA
cagacgttgagcgcggattcccattcaaccgccacactgacttttattgctcatgatgcagcaggtaatcctgtt

SEQ ID NO: 779034 - DNA, 75 bp, synthetic construct
  source 1..75: mol_type = other DNA
tatcactcaactgaccggcttaaccgataagtggttttacaaactcatcaaagttgggggctttcctgcccccat

SEQ ID NO: 779035 - DNA, 75 bp, synthetic construct
  source 1..75: mol_type = other DNA
tggcagcaggcgctggtcgtcatgttgctttcgctggtagtggatattattgttttctgggcagagtttttagtg

SEQ ID NO: 779036 - DNA, 75 bp, synthetic construct
  source 1..75: mol_type = other DNA
ttcactcccacatggatgtcgggcatcaacttctttttcgaccacgaccttagccgttaccactcccgcgccggc

SEQ ID NO: 779037 - DNA, 75 bp, synthetic construct
  source 1..75: mol_type = other DNA
gacggcgaatacgctgcaggtgaaggtcaccgatgcgttcgggaatgcgctgaatggacagacggtcagcgtgat

SEQ ID NO: 779038 - DNA, 75 bp, synthetic construct
  source 1..75: mol_type = other DNA
gaatggcagcgatcgacatacggtgaatgtccgggtggaagatcagtttggcaatgtgctgccggagcagaccgt

SEQ ID NO: 779039 - DNA, 75 bp, synthetic construct
  source 1..75: mol_type = other DNA
tagtcacccgggataactcagtggcagacggtgcaatggcgaacacgctgcgggtgagggtcacagatgcgttcg

SEQ ID NO: 779040 - DNA, 75 bp, synthetic construct
  source 1..75: mol_type = other DNA
ccattccgcagcaactgattttgcccgccactgttcgtaaagggattgtggttaacgtcgctgaaatgcgtcttt

SEQ ID NO: 779041 - DNA, 75 bp, synthetic construct
  source 1..75: mol_type = other DNA
ttgcgggtgataaagataccgccaaaatcgctgcgatgcagatcaccgcgaataacgcagttgccagacgcgatc

SEQ ID NO: 779042 - DNA, 75 bp, synthetic construct
  source 1..75: mol_type = other DNA
tggtaaggatgaacggcaaagtgatccttattccatcactgcgggattaagctacacaccagttccgctcatctc

SEQ ID NO: 779043 - DNA, 75 bp, synthetic construct
  source 1..75: mol_type = other DNA
gcgtcaacaacagcagccagagccgggatgtgacgtttatcgccgatgtcaggacggcgcagatcgctgatctgg

SEQ ID NO: 779044 - DNA, 75 bp, synthetic construct
  source 1..75: mol_type = other DNA
catgcgcgtgcggataccgccgcgtcacagatcctgccgaatgttaaaactatcccatacaccctcggggcattg

SEQ ID NO: 779045 - DNA, 75 bp, synthetic construct
  source 1..75: mol_type = other DNA
atgcgttcgggaatgcacttgccgggcagacggttagcgtgttggcaggcaacggcgcaacgactgctccgacgg

SEQ ID NO: 779046 - DNA, 75 bp, synthetic construct
  source 1..75: mol_type = other DNA
gaagcgatggtgttgtgtaccgcatcaccggctctgcgaccggaaaagccggaacactgaatgttaatgtggagg

SEQ ID NO: 779047 - DNA, 75 bp, synthetic construct
  source 1..75: mol_type = other DNA
cggttatggcatcttcaagacaaaataagctggaagtcccacgtgatgtgatggatgttttgtgcgagcaggatt

SEQ ID NO: 779048 - DNA, 75 bp, synthetic construct
  source 1..75: mol_type = other DNA
acagtggggcatgggcgcacaggaggtactggatatcgcccagcgcctgtatgaaacccataaagccaccaccta

SEQ ID NO: 779049 - DNA, 75 bp, synthetic construct
  source 1..75: mol_type = other DNA
tgtcaccacatcggcagcgaccaccattcctgccggtacacgctggcagcgtgctgatggtgtggtttacagcct

SEQ ID NO: 779050 - DNA, 75 bp, synthetic construct
  source 1..75: mol_type = other DNA
aagctgaccaataagccggtggcgtttgagatcaggattgtacccaaaacgccggaaaatcaggctgccgtaaaa

SEQ ID NO: 779051 - DNA, 75 bp, synthetic construct
  source 1..75: mol_type = other DNA
gccatcagggggaacacagtatgattttgaacgctgggcacgggaagtaccgggcgtgacgcgggcatggtgtaa

SEQ ID NO: 779052 - DNA, 75 bp, synthetic construct
  source 1..75: mol_type = other DNA
tcgggtggggcttatgtcgcttgtgatggtgtctggcaatattccgacaagctggtcgcagatgctaaaaaaaat

SEQ ID NO: 779053 - DNA, 75 bp, synthetic construct
  source 1..75: mol_type = other DNA
gtggggtaggcaacatcaataatgcggtaatggcgcgtctcggggataacccggatattccaccgtttatgatgt

SEQ ID NO: 779054 - DNA, 75 bp, synthetic construct
  source 1..75: mol_type = other DNA
cggatggtcgagtctggttaaccagcgggattggtaatgccccaacctggttattgcgagcgaagaaagtgatca

SEQ ID NO: 779055 - DNA, 75 bp, synthetic construct
  source 1..75: mol_type = other DNA
cgtgatgccaccgcccgcctgcaacaggccggaaccgcgctggtaatggacgtgaccacccggcgggagaaaacg

SEQ ID NO: 779056 - DNA, 75 bp, synthetic construct
  source 1..75: mol_type = other DNA
ataaggccatgctgctttgtaagtgggggttttatttaacatgtgttgtcgctgtaatgtttgtattcgcagcga

SEQ ID NO: 779057 - DNA, 75 bp, synthetic construct
  source 1..75: mol_type = other DNA
tctggtagggcttacatcgctgatgatggtgtctggcaatattccgacaagttggtcgcagatgctaaaaaaaat

SEQ ID NO: 779058 - DNA, 75 bp, synthetic construct
  source 1..75: mol_type = other DNA
acccagtgtttctggtcaggtacagttgattaataacttcgtcaatcaaggttataacgccattattcgtttctg

SEQ ID NO: 779059 - DNA, 75 bp, synthetic construct
  source 1..75: mol_type = other DNA
ttcaaatttctggccggaccagaaaccgtgctggcgctgctggatgagctggaagccaaagacaagcggattgct

SEQ ID NO: 779060 - DNA, 75 bp, synthetic construct
  source 1..75: mol_type = other DNA
ctcgtctcggaatttcccctcgatgttccaccccttgcttacaatttcccacgaagaaatcgcattatcagtggt

SEQ ID NO: 779061 - DNA, 75 bp, synthetic construct
  source 1..75: mol_type = other DNA
tttatgcatctttgatagagatgaaaaaaatatagtaaatgagatgagtggttctccgggtaattacagagatca

SEQ ID NO: 779062 - DNA, 75 bp, synthetic construct
  source 1..75: mol_type = other DNA
ttgcctacaacaaatttgtgagccaaacgtcgacacgttttggtctggcggcctggcgttattcgtcgcgtgatt

SEQ ID NO: 779063 - DNA, 75 bp, synthetic construct
  source 1..75: mol_type = other DNA
catggtcatgcagcagcacctgatcgccgccaccatggtgcaaccgatgctggtggcgctggtgttgagcatggg

SEQ ID NO: 779064 - DNA, 75 bp, synthetic construct
  source 1..75: mol_type = other DNA
atgaaccgccaacgactggattcgcccttggtttatattggtgcgcataatgtatattatgttaaattgattatg

SEQ ID NO: 779065 - DNA, 75 bp, synthetic construct
  source 1..75: mol_type = other DNA
aaatttctttgcttgatgaccacctggtggatatgcggttcatcacgaaactaacggggctgacagataagtggt

SEQ ID NO: 779066 - DNA, 75 bp, synthetic construct
  source 1..75: mol_type = other DNA
taaccaacaatgatgatcctgaaaataacgcagaggctactcaatggcttactggtgcagcgcagcgtggtcgaa

SEQ ID NO: 779067 - DNA, 75 bp, synthetic construct
  source 1..75: mol_type = other DNA
tgcatggtattcagcccagtctgttgtttagtggaaaaaacaataccaggaaggaagtctcactgctgttgctgc

SEQ ID NO: 779068 - DNA, 75 bp, synthetic construct
  source 1..75: mol_type = other DNA
ctgctgaagaatattggaagaaagaaatagaaaaatctaataaatttgatggtcaaccgccacaaatgagattgg

SEQ ID NO: 779069 - DNA, 75 bp, synthetic construct
  source 1..75: mol_type = other DNA
ctccattttgctttgctaaatccccggcaaatactgtagcgcgtctttgcacaaaagatgggcgtttaccacaag

SEQ ID NO: 779070 - DNA, 75 bp, synthetic construct
  source 1..75: mol_type = other DNA
tggatatcagcaaacaatttgatcagggcgttgatgatctgaaccagcaagttgaaaaagcgttggaggatttag

SEQ ID NO: 779071 - DNA, 75 bp, synthetic construct
  source 1..75: mol_type = other DNA
gctctgaacgtgggtctggagtttgatatttacggacatgccaactcaacgcatgttgccggagttaatttgatg

SEQ ID NO: 779072 - DNA, 75 bp, synthetic construct
  source 1..75: mol_type = other DNA
ggactgctgacgccggagctggaacaggcgaaaaacggcgacctgatgattgtcatcaatggtaaatcgggtgcg

SEQ ID NO: 779073 - DNA, 75 bp, synthetic construct
  source 1..75: mol_type = other DNA
tatgaactggtgtcgcgtgggcgttttccctggcaaaatttcatacgtcaatggagcgacgccgacgagcaggcg

SEQ ID NO: 779074 - DNA, 75 bp, synthetic construct
  source 1..75: mol_type = other DNA
atgctatctcccgataacgatttctctttggtttattatatgggccaatgccagatgggcttaaaaaacattaaa

SEQ ID NO: 779075 - DNA, 75 bp, synthetic construct
  source 1..75: mol_type = other DNA
tggccgttgtgacctcgttgaaaccgataatagttgtgtggagaactgtttaaaagggaagtttaaagaggtaag

SEQ ID NO: 779076 - DNA, 75 bp, synthetic construct
  source 1..75: mol_type = other DNA
gcgaccggctgaccacaatacagaacgacagaacccgcatccagacgatttatcagccggggagcttcacaccac

SEQ ID NO: 779077 - DNA, 75 bp, synthetic construct
  source 1..75: mol_type = other DNA
ggctatcacgtatttaaattaggtagctatatcggatacttgcaaagtccggatggagaagggattgaaatttta

SEQ ID NO: 779078 - DNA, 75 bp, synthetic construct
  source 1..75: mol_type = other DNA
aggcgaagggaatcaggcggtgctggtcagtgggaaagacgccacaggcaatacggtcaccggcgcgcagctgct

SEQ ID NO: 779079 - DNA, 75 bp, synthetic construct
  source 1..75: mol_type = other DNA
gcagcggttcgcgagatattactatcgacgccaacctgccgggtctgcgcgtcgataccgtggcgggcgatgatg

SEQ ID NO: 779080 - DNA, 75 bp, synthetic construct
  source 1..75: mol_type = other DNA
ctgccagccataacgtgctggtcgacagcgcgctgcccggtgtgaccattaatccggtggcaaccgacgatatta

SEQ ID NO: 779081 - DNA, 75 bp, synthetic construct
  source 1..75: mol_type = other DNA
gatctgaagccctggaagtggcccgtcgtcagtatccggatgacagtcgtctgcatcatgtcctgaaatcggcag

SEQ ID NO: 779082 - DNA, 75 bp, synthetic construct
  source 1..75: mol_type = other DNA
gtatgatatctataacgtctgcctgatactttgccccaacgatgacttctcgactgtttactatatgggacaatg

SEQ ID NO: 779083 - DNA, 75 bp, synthetic construct
  source 1..75: mol_type = other DNA
gaaactgggacgcagttcccgctggttaaaaagtgaagtggaagcctggcttcaggagcgtattaaccagtcccg

SEQ ID NO: 779084 - DNA, 75 bp, synthetic construct
  source 1..75: mol_type = other DNA
ttcagtgtgtcgattccgggtctcccgtctctgcaggtgagcgtaccgaaaggtgttccggcagcgaaagccccg

SEQ ID NO: 779085 - DNA, 75 bp, synthetic construct
  source 1..75: mol_type = other DNA
gacggtgggaacaagagaatcaagacatattattgggcgagtccagcttacggaaaatgatatttgtaatgaggg

SEQ ID NO: 779086 - DNA, 75 bp, synthetic construct
  source 1..75: mol_type = other DNA
tctttgcgaaaggaaaggcggcaggaattattccaaaagatgtgacattaggcggttcctggagtacggtcaccg

SEQ ID NO: 779087 - DNA, 75 bp, synthetic construct
  source 1..75: mol_type = other DNA
aaagcaaaaaaagatcgctatcctaccaagcaggtgtatttggacttgttgccgatatttaattctgcggtttcg

SEQ ID NO: 779088 - DNA, 75 bp, synthetic construct
  source 1..75: mol_type = other DNA
tgacaatctctgccgattcactgcgtaagatttacgacaatatggactacttctccagccgcattgtgttacgtc

SEQ ID NO: 779089 - DNA, 75 bp, synthetic construct
  source 1..75: mol_type = other DNA
ccctgcgcaagatttacgacaatatggattactttgccagccgcattgtgttgcgtccgcaggagatttccaata

SEQ ID NO: 779090 - DNA, 75 bp, synthetic construct
  source 1..75: mol_type = other DNA
gctgcctgatttattagccgaggtcttagataggaaagcggcggatcttttcgctaaagcgcctgagagcatatt

SEQ ID NO: 779091 - DNA, 75 bp, synthetic construct
  source 1..75: mol_type = other DNA
cagaaaaaatgaccgttctggttggggcaaacggctgtggaaagtcgacgttgctcagcaccattgcacgtatct

SEQ ID NO: 779092 - DNA, 75 bp, synthetic construct
  source 1..75: mol_type = other DNA
tctgagattgcaaaagatgatccgaaaatgatgtcaaaaattatgacgtcattaccggccgatacggtgacggag

SEQ ID NO: 779093 - DNA, 75 bp, synthetic construct
  source 1..75: mol_type = other DNA
aataaagatgattttgtgacttacaacccgcctcatgaatatggctccgggtggcaggaccaggttcgctatctt

SEQ ID NO: 779094 - DNA, 75 bp, synthetic construct
  source 1..75: mol_type = other DNA
actcatctggtagacagctcatcggtttttgcgcaagactcgggaagctttagccgacttgaacaattcttcaac

SEQ ID NO: 779095 - DNA, 75 bp, synthetic construct
  source 1..75: mol_type = other DNA
accacgcagaagaccgcgaacacgccgaagcggtcgcaaccaaagagattgaattaactcatctggagaaataca

SEQ ID NO: 779096 - DNA, 75 bp, synthetic construct
  source 1..75: mol_type = other DNA
tcagcccatatcgtgaaaaccgggtaggtctgaacattgaaacactggaaaacgatgttgaactgaaaagtacca

SEQ ID NO: 779097 - DNA, 75 bp, synthetic construct
  source 1..75: mol_type = other DNA
tctaattcaatgcgatttgaaaaaatgtgggggagaggtgacgcaaaaaagcaacattttgacccaaaatgtaaa

SEQ ID NO: 779098 - DNA, 75 bp, synthetic construct
  source 1..75: mol_type = other DNA
caatgattttgttggcggcgcttgctgcatcatggtttgcccaacgttttacgccgcgcgaagagtggaaattat

SEQ ID NO: 779099 - DNA, 75 bp, synthetic construct
  source 1..75: mol_type = other DNA
atggattgaggcgcgaaggctggagagtgattatttattcatttctacaatgggtaagaatatatcaagacagca

SEQ ID NO: 779100 - DNA, 75 bp, synthetic construct
  source 1..75: mol_type = other DNA
ggcatggcggagtgaaggggcaagaagggttattgactggctctgctgttcagttgattaccgatccagccaaca

SEQ ID NO: 779101 - DNA, 75 bp, synthetic construct
  source 1..75: mol_type = other DNA
tcatctgcagcagaagaagagagggactggctgtttatttcccgatcagggcgtccgcttacccgtcaacgattt

SEQ ID NO: 779102 - DNA, 75 bp, synthetic construct
  source 1..75: mol_type = other DNA
tccggccatccggtcaatcccctgctcggtgcaaaggtccttcccggtgaaaccgacatcgccctgcccgccccg

SEQ ID NO: 779103 - DNA, 75 bp, synthetic construct
  source 1..75: mol_type = other DNA
agcgtttaaatgaaataactagtctagataaaatggctagctcagacaatctttctgttatagcaatttattcaa

SEQ ID NO: 779104 - DNA, 75 bp, synthetic construct
  source 1..75: mol_type = other DNA
ggtggttggtctgctggcagtggcatggatgattctggtcaccgaaaggggattaataaaattgcccgcattact

SEQ ID NO: 779105 - DNA, 75 bp, synthetic construct
  source 1..75: mol_type = other DNA
ctggttcgtaaaccgttctttttcacctcactgttgccgcgcgttattgcttatgcttcgtatgccttcctcgga

SEQ ID NO: 779106 - DNA, 75 bp, synthetic construct
  source 1..75: mol_type = other DNA
gggcatttattactgcctatacctactggttcgtaaacctgttctttttcacctcactgttgccgcgcgttattg

SEQ ID NO: 779107 - DNA, 75 bp, synthetic construct
  source 1..75: mol_type = other DNA
ttgcatggcctgctgggctgggtggcacggcggggccacgaggaatcgttcgtgctcgtctccttgtgcgtggtg

SEQ ID NO: 779108 - DNA, 75 bp, synthetic construct
  source 1..75: mol_type = other DNA
cagacatacagtgatctacactgcctccaattcagccagattcgcacgtctctggaaaaaacaaaggaaggagaa

SEQ ID NO: 779109 - DNA, 75 bp, synthetic construct
  source 1..75: mol_type = other DNA
tcgcttgagcttgagcaaacttgctggggttatccagggcaaaatcccactgaaaattatgtttttgtcgctgca

SEQ ID NO: 779110 - DNA, 75 bp, synthetic construct
  source 1..75: mol_type = other DNA
aggagattaaagtgattacttttcagactataagagataagtatattgaaatcgttcggttacagagagaggaaa

SEQ ID NO: 779111 - DNA, 75 bp, synthetic construct
  source 1..75: mol_type = other DNA
gcatcacattgtgtcgcacctggtataatggtttttgaaagagatcagtctataaacattgttatgcaggaagtt

SEQ ID NO: 779112 - DNA, 75 bp, synthetic construct
  source 1..75: mol_type = other DNA
tctgtacccgtcacgccacacactttccggcacagctacgccatgcacctgctttactgcggggccgatcctatg

SEQ ID NO: 779113 - DNA, 75 bp, synthetic construct
  source 1..75: mol_type = other DNA
tataatctgctttacacagagccggataaacagtggaaactgaatgatgtgtcctcagctatttttatgagtgcc

SEQ ID NO: 779114 - DNA, 75 bp, synthetic construct
  source 1..75: mol_type = other DNA
atgagtgtttattcgttaaaaacgattaatggaaataacattataaaaaaaacagatgaacagaacatcagtatt

SEQ ID NO: 779115 - DNA, 75 bp, synthetic construct
  source 1..75: mol_type = other DNA
gtgtacccgcaaaagtcattgtgctgaaacagacgaataatgcacaagaagagatgctaattgcggatatttcgc

SEQ ID NO: 779116 - DNA, 75 bp, synthetic construct
  source 1..75: mol_type = other DNA
tattgatcaggatgaaggatggaaagcggtgataaattctttcgaaaacatgagtatgtactcagaatggcaaaa

SEQ ID NO: 779117 - DNA, 75 bp, synthetic construct
  source 1..75: mol_type = other DNA
aatgaatttgagatttcgaattttcgagatgataatgttgcttattcagtaaatgaatataattatataaaccat

SEQ ID NO: 779118 - DNA, 75 bp, synthetic construct
  source 1..75: mol_type = other DNA
ggcggtagtcaccattgtggcgatgggttgcttctacagcctgaacgagaagatgtatgtccgcattgtggaaga

SEQ ID NO: 779119 - DNA, 75 bp, synthetic construct
  source 1..75: mol_type = other DNA
gataaattaaaagatgtatctgtcggcattgtatgtttgacacaagaaaataaaaataaaccatggattttgttt

SEQ ID NO: 779120 - DNA, 75 bp, synthetic construct
  source 1..75: mol_type = other DNA
caagttcatcaagtattttgctgacgagctgaagtccaagcgccagcctgggatctgggtgcgcatggactacgg

SEQ ID NO: 779121 - DNA, 75 bp, synthetic construct
  source 1..75: mol_type = other DNA
gcttgacgccacgctgacggcattggcagggctcacaaccggtgcaaataaactcccgtatttcactggaactga

SEQ ID NO: 779122 - DNA, 75 bp, synthetic construct
  source 1..75: mol_type = other DNA
cgcgtgttgctgcgctggttgagtatgaagatcgggcgattttagccaatgaagtgaaaatccgcgtgcgtttcg

SEQ ID NO: 779123 - DNA, 75 bp, synthetic construct
  source 1..75: mol_type = other DNA
tgattattgaaagccgaccaagtgcacttgatattcacgaattaactttgcgtgaatcttttgatagagcttggc

SEQ ID NO: 779124 - DNA, 75 bp, synthetic construct
  source 1..75: mol_type = other DNA
tgatttgaagttgaagctacaacgccgatatttccaagctattaaagactctcaagaagcaatgagaagtgttta

SEQ ID NO: 779125 - DNA, 75 bp, synthetic construct
  source 1..75: mol_type = other DNA
cagcaacgccctcatgcgccgaccgattacatggaagcgttgcaaaccgatggtcagttcgattacgcagcaagc

SEQ ID NO: 779126 - DNA, 75 bp, synthetic construct
  source 1..75: mol_type = other DNA
gtcagagggaacagggcgtgtttgatgtggtggctgatggcagccagcgtgtggaggcggatgaatatatttact

SEQ ID NO: 779127 - DNA, 75 bp, synthetic construct
  source 1..75: mol_type = other DNA
aagcgattcacaaatcggtagatatacaactgacagtaatactctgaaggatggattgtgtagccaagcccacat

SEQ ID NO: 779128 - DNA, 75 bp, synthetic construct
  source 1..75: mol_type = other DNA
atctggagaaaatctggtcagttttatccgatgatgaaattaagacattcgaaatagttagcagaaaattactgt

SEQ ID NO: 779129 - DNA, 75 bp, synthetic construct
  source 1..75: mol_type = other DNA
ggctcttttatttatggctttattccctcagagtggattgccgctcatgcaggggcagataatcccttcgccatc

SEQ ID NO: 779130 - DNA, 75 bp, synthetic construct
  source 1..75: mol_type = other DNA
taatggcattaatcatcggcagtgccggcgcaagcctgacggaagtgataggtgatgctgccaacttactgattt

SEQ ID NO: 779131 - DNA, 75 bp, synthetic construct
  source 1..75: mol_type = other DNA
gcaaaagaatttgaagatgagttatttgatgatgttgtaagagctacgactacaatggctcctgtctcagatagt

SEQ ID NO: 779132 - DNA, 75 bp, synthetic construct
  source 1..75: mol_type = other DNA
atgaccgcaaaaacgatcggattctgggtgttgatcagggaatcgatcgtgacaagtaccgcaactatcatctga

SEQ ID NO: 779133 - DNA, 75 bp, synthetic construct
  source 1..75: mol_type = other DNA
ggaacaatcatctcggacgagactacattgcgcgcagttccggacatgaagtttttgtacttaatgcggatacag

SEQ ID NO: 779134 - DNA, 75 bp, synthetic construct
  source 1..75: mol_type = other DNA
gtacgaccgttgaatgggtgaacgatagcggtaaaacagtcttatccggggaactggtcgttaaagacaatctga

SEQ ID NO: 779135 - DNA, 75 bp, synthetic construct
  source 1..75: mol_type = other DNA
tcaatgggatttgtacccggcaagaaagcgttcttacatggcaatatgcctttagcacagaacatccctgggttt

SEQ ID NO: 779136 - DNA, 75 bp, synthetic construct
  source 1..75: mol_type = other DNA
cgattgcgccctaccccagccagtggtacgcccatcgtggaacgatccggtgcaaatcaaacaactgctggacgt

SEQ ID NO: 779137 - DNA, 75 bp, synthetic construct
  source 1..75: mol_type = other DNA
ctcgatgacatttctaagtgcggatgccgtgatggtctgcctgaaggctttgtcaatactgcaaaagggcttttc

SEQ ID NO: 779138 - DNA, 75 bp, synthetic construct
  source 1..75: mol_type = other DNA
agctttatagctgcagcgctggcgcagtacaccgccaacaaaagcggtctggatgtacttgatgatggtgacctg

SEQ ID NO: 779139 - DNA, 75 bp, synthetic construct
  source 1..75: mol_type = other DNA
ggtttattgattgcttgtgtgattgcgtcagtaatgtcgcggacgttacatcgtgactctatctaccgccagcac

SEQ ID NO: 779140 - DNA, 75 bp, synthetic construct
  source 1..75: mol_type = other DNA
aaaaattccataagggcactaactgatgacaactacaaactgtcccatgcattggctaagtgggaaatagtaagt

SEQ ID NO: 779141 - DNA, 75 bp, synthetic construct
  source 1..75: mol_type = other DNA
tatgctgcgtactggtatagagggatggacagaaaacgatattctgcgttattgccgcctttcgtctggaaggaa

SEQ ID NO: 779142 - DNA, 75 bp, synthetic construct
  source 1..75: mol_type = other DNA
acctcgcgaacgctacctaaacgtattacctggttgctggataaccaaaaaagagttgtcgtgcctgactgggaa

SEQ ID NO: 779143 - DNA, 75 bp, synthetic construct
  source 1..75: mol_type = other DNA
cgggcaatgcgctggtgggaaccgtatgggcagcggcagaaaccagcgatgctaccgtgtgtgtgcgtctcggtt

SEQ ID NO: 779144 - DNA, 75 bp, synthetic construct
  source 1..75: mol_type = other DNA
catttttattggggttaggacgtaatttagggcgcctgggtgcggtgtcgttagatgtaacacatgctcgtagtc

SEQ ID NO: 779145 - DNA, 75 bp, synthetic construct
  source 1..75: mol_type = other DNA
tatgctgcgtactggtatagagggatggacagaaaatgacattcttcgctactgccgtctgtcttctggtcgtaa

SEQ ID NO: 779146 - DNA, 75 bp, synthetic construct
  source 1..75: mol_type = other DNA
gatattgccgcctttcgtctggaaggaactacgccagcgagttagagcgcaggcttgatattcagcttgagcgta

SEQ ID NO: 779147 - DNA, 75 bp, synthetic construct
  source 1..75: mol_type = other DNA
gggcggctttgacgggcggacgcaacgttatcattatgacctgaccggaaaactcacgcagagtgaagatgaggg

SEQ ID NO: 779148 - DNA, 75 bp, synthetic construct
  source 1..75: mol_type = other DNA
tgcagccgacaaaaaagcagcagaaaaagcggctgctgaaaaggcagcagctgataagaaagcagcggcagaaaa

SEQ ID NO: 779149 - DNA, 75 bp, synthetic construct
  source 1..75: mol_type = other DNA
atgagctactctgataatgttagggcaaagctaatgggggcttgtcttgggtcatataagcaagattttaagctg

SEQ ID NO: 779150 - DNA, 75 bp, synthetic construct
  source 1..75: mol_type = other DNA
aatagaatggaaaaaacaaattgccaaacagaacgttatctatttatcagatactttcgaaaactcccttaagca

SEQ ID NO: 779151 - DNA, 75 bp, synthetic construct
  source 1..75: mol_type = other DNA
acacaagaccccattgggctggcggggggatggaacctgtataattacccactgaatccgataataaggatggat

SEQ ID NO: 779152 - DNA, 75 bp, synthetic construct
  source 1..75: mol_type = other DNA
cacatacacccccgcaggccagttacagagccagcacctgaacagcctggtgtatgaccgtgcctacgggtggaa

SEQ ID NO: 779153 - DNA, 75 bp, synthetic construct
  source 1..75: mol_type = other DNA
atcaggctgagttcagcattaaagccatgtgtcgggtgcttaagattgcccgaagtggctggtatgcctggctta

SEQ ID NO: 779154 - DNA, 75 bp, synthetic construct
  source 1..75: mol_type = other DNA
ggcaaaacagccacaggtgcattacgttcctggtcagtagctttaagtaattatggtgccaaaagcggtaacggg

SEQ ID NO: 779155 - DNA, 75 bp, synthetic construct
  source 1..75: mol_type = other DNA
tcgtgctgatggtcgcctttatactggtgaatacttacaactggaaagaactgccgttgctggcgcatcatgttc

SEQ ID NO: 779156 - DNA, 75 bp, synthetic construct
  source 1..75: mol_type = other DNA
ataactccgttgaaatagatgcgatcgttacaagatttaattccttcacggggaatgggcgacttcttgctgatg

SEQ ID NO: 779157 - DNA, 75 bp, synthetic construct
  source 1..75: mol_type = other DNA
gtctggcggatatggtcactatcctgacggaaaacccgctggccggggtgaaagccggacgctcagagaggcaac

SEQ ID NO: 779158 - DNA, 75 bp, synthetic construct
  source 1..75: mol_type = other DNA
atttttatcatacttccgcttggtggctgtaccgttcatggtaataaatccctagctgatgaaaatcatcagacg

SEQ ID NO: 779159 - DNA, 75 bp, synthetic construct
  source 1..75: mol_type = other DNA
ctcatgaaccgcgtaagtttcttgcaaaaattgaggatgagctagagcttgatggaaccggaaaaaattccggtt

SEQ ID NO: 779160 - DNA, 75 bp, synthetic construct
  source 1..75: mol_type = other DNA
tcaaaataccctgagttcaccagtaagctgattgagtgtggttctgaagtaatgacagtaacctatgcacaaacg

SEQ ID NO: 779161 - DNA, 75 bp, synthetic construct
  source 1..75: mol_type = other DNA
aagcacagcccgaaatgtgttgggccagcagccggtgatggcaacgccggactgaccgaagatgaaaagctgttg

SEQ ID NO: 779162 - DNA, 75 bp, synthetic construct
  source 1..75: mol_type = other DNA
tcgatcccggcggcgctgatgctcggcctgctgctggggttgttcaacggcgcgctggtggcctttgccggatta

SEQ ID NO: 779163 - DNA, 75 bp, synthetic construct
  source 1..75: mol_type = other DNA
gggcttggcgatccggccgcgcaggccgagcaggcgatgaaaaacgttaaacagttgctggaagaggcgggcagc

SEQ ID NO: 779164 - DNA, 75 bp, synthetic construct
  source 1..75: mol_type = other DNA
gcgcaccgttacgcgggaaggccggagatgcgctaccgctacgacgatacggggcgggtggtggagcaactgaac

SEQ ID NO: 779165 - DNA, 75 bp, synthetic construct
  source 1..75: mol_type = other DNA
gtggcgcaccgttatgcaggcaggccggagatgcgctaccgctacgacgatgcggggcgggtggtggagcagctg

SEQ ID NO: 779166 - DNA, 75 bp, synthetic construct
  source 1..75: mol_type = other DNA
tcgtctgaatcactccgcaacgcacctgatgcacgctgcgctgcgccaggttctgggtactcatgtatcgcagaa

SEQ ID NO: 779167 - DNA, 75 bp, synthetic construct
  source 1..75: mol_type = other DNA
ctgaagaggctgggagaattatctttagtattacgttagctcgtgccggatttactatagcagagtcaattatta

SEQ ID NO: 779168 - DNA, 75 bp, synthetic construct
  source 1..75: mol_type = other DNA
ttacaacaacttgttgaactaggtttaggttttactctaaaacagtgtatatcacatgcttataaaattgaaaat

SEQ ID NO: 779169 - DNA, 75 bp, synthetic construct
  source 1..75: mol_type = other DNA
cattttgaccggcgggatcgatctttctgtaggttcaattctcggcaccacggcggtagcggcgatggtcgtctc

SEQ ID NO: 779170 - DNA, 75 bp, synthetic construct
  source 1..75: mol_type = other DNA
atgacgacctctgcaaaaacctctgccaaaaaaatgctgatgagcgatctgatgcaaacggtcggcatcttgccc

SEQ ID NO: 779171 - DNA, 75 bp, synthetic construct
  source 1..75: mol_type = other DNA
atctggctgataaagtgcgctcagtactggaacgtacgcgtcagctggaaaaagagttacaacagcttaaagaac

SEQ ID NO: 779172 - DNA, 75 bp, synthetic construct
  source 1..75: mol_type = other DNA
gcccacgcctgttcaccgtcagctttgatgaatccttaaaaccgtttgtgcgcgaagcttccggcaaccgtctga

SEQ ID NO: 779173 - DNA, 75 bp, synthetic construct
  source 1..75: mol_type = other DNA
aaccgtaaaaaatgaccagacggtcacgatccaggaaggtaaccgccttcttacggtggaaaaaggccacaagat

SEQ ID NO: 779174 - DNA, 75 bp, synthetic construct
  source 1..75: mol_type = other DNA
cggtgatcggtattctcgcggctcttgccgtcgcagggtttcatcatgcgatgctgttgctggagtggttgttcc

SEQ ID NO: 779175 - DNA, 75 bp, synthetic construct
  source 1..75: mol_type = other DNA
aaaaatgagcgatgtacagcgagcaagactagctgaaatagattctcagattgcagaatataaaaaacagtggat

SEQ ID NO: 779176 - DNA, 75 bp, synthetic construct
  source 1..75: mol_type = other DNA
acttcgccaaagaagtcgaggtggagctgaaaggtgatccgatggtgcttcctaacggggccacgctttacttcc

SEQ ID NO: 779177 - DNA, 75 bp, synthetic construct
  source 1..75: mol_type = other DNA
aagacatcaatcatctgttctccaatgactagtctaaaaactagtattaagactatcacttatttaagtgatact

SEQ ID NO: 779178 - DNA, 75 bp, synthetic construct
  source 1..75: mol_type = other DNA
ccagcctgacacacagtgcttatccgttctggtccggtgcgctgttcaaccgtgggcgcaacaaagccgataagg

SEQ ID NO: 779179 - DNA, 75 bp, synthetic construct
  source 1..75: mol_type = other DNA
tctgtccccgtcactccgcacacgttccggcacagctacgcgatgcacctgctttactgcggtatcgagccgctg

SEQ ID NO: 779180 - DNA, 75 bp, synthetic construct
  source 1..75: mol_type = other DNA
ggcaccatgatgctggcctctctcggtccggtggtaatttccgccgtagtggcactgcttgtcagccatcttctt

SEQ ID NO: 779181 - DNA, 75 bp, synthetic construct
  source 1..75: mol_type = other DNA
tctggacgttatggctcttgaagcaaccattggcggtacgcgggcggtacggtttggaatgagccgcgaagatgc

SEQ ID NO: 779182 - DNA, 75 bp, synthetic construct
  source 1..75: mol_type = other DNA
tgcttgcccttcaggatgaagatccacgccgcaaagcccgctatctgtactggcagggttttcgcatcgcgcgga

SEQ ID NO: 779183 - DNA, 75 bp, synthetic construct
  source 1..75: mol_type = other DNA
tacgcggcggtgcatcgcggtattcataccttaagcgcccaggcgaccgagaaaatggagaacgtgcgcaagcgg

SEQ ID NO: 779184 - DNA, 75 bp, synthetic construct
  source 1..75: mol_type = other DNA
gcgagcgtttttctcttggtaatatggacgataaagaactctctgcctttggagataaagcccgccgtctgaacc

SEQ ID NO: 779185 - DNA, 75 bp, synthetic construct
  source 1..75: mol_type = other DNA
tccaggagctgcgtaaagtggcttccggtatggctattcacaagaaatggcgacagacctatttttccacgccat

SEQ ID NO: 779186 - DNA, 75 bp, synthetic construct
  source 1..75: mol_type = other DNA
gatcgcccctggtctcagctctctgagacagaaaaaagcagcagcgatttgcagcgctgggctggtcgccaggca

SEQ ID NO: 779187 - DNA, 75 bp, synthetic construct
  source 1..75: mol_type = other DNA
gcgccactgtcgggctggacgtccttgctgctatcggcagtgacatcgcactgatgcagcttaacggcattgcgc

SEQ ID NO: 779188 - DNA, 75 bp, synthetic construct
  source 1..75: mol_type = other DNA
ataccgctttgcacttatccatctacgaaagaaacgctaaaactgttgcatttctattgtgccgaacttgactgg

SEQ ID NO: 779189 - DNA, 75 bp, synthetic construct
  source 1..75: mol_type = other DNA
cttacgggtttgttagatgttcttaacagcgaccccctcgataattttccgcagaaaatcgctaaactccccgcc

SEQ ID NO: 779190 - DNA, 75 bp, synthetic construct
  source 1..75: mol_type = other DNA
aaattgtctttgacttagtgcaatgtgctaattacccagaaatggaatggttggatatcgttgccacagatccgc

SEQ ID NO: 779191 - DNA, 75 bp, synthetic construct
  source 1..75: mol_type = other DNA
tttgctaaagatatctcgttatggtcactcttatgggaaaacaaatatgaggaatactattttcttgcacaatta

SEQ ID NO: 779192 - DNA, 75 bp, synthetic construct
  source 1..75: mol_type = other DNA
gaagggaaagatttcaaagagattgacctgctggcgcgccatgcgcggatcggcaagtttaacaatggcggcaac

SEQ ID NO: 779193 - DNA, 75 bp, synthetic construct
  source 1..75: mol_type = other DNA
gttgcaacgtcgatcgggaatgcctgtgcaaattagttctggttcaagacagatgttttgtaagcgtcaacggag

SEQ ID NO: 779194 - DNA, 75 bp, synthetic construct
  source 1..75: mol_type = other DNA
cctttccgccagcaaggcacaggcccacgtctttaagcagtacatcatcgacttcgctaaagaagtggaggtgga

SEQ ID NO: 779195 - DNA, 75 bp, synthetic construct
  source 1..75: mol_type = other DNA
gacgccgcgcaaatcggtttatcccttctctgtgctcgacggcatcaccgccagcgaactcattaacgacattga

SEQ ID NO: 779196 - DNA, 75 bp, synthetic construct
  source 1..75: mol_type = other DNA
gtaactgggtgactaccgttgaacgtaaacaagaagcaccaacctggacgccaacgccgaacacccggcgcgaat

SEQ ID NO: 779197 - DNA, 75 bp, synthetic construct
  source 1..75: mol_type = other DNA
attgtacatattaagggcatggcttcctcggagttgtttgaaaacattctttctggtgacagtctcgttgtccgc

SEQ ID NO: 779198 - DNA, 75 bp, synthetic construct
  source 1..75: mol_type = other DNA
ttcggtcccgagttctccggcatggtcatgttggatgactacaacaagccagtcgacatgctcagcgaatcgcgc

SEQ ID NO: 779199 - DNA, 75 bp, synthetic construct
  source 1..75: mol_type = other DNA
ctgatgatttgtatgagtcaaactcaggcatgagacatgatcaaggctattttaatgtctccaatggcgtaatgc

SEQ ID NO: 779200 - DNA, 75 bp, synthetic construct
  source 1..75: mol_type = other DNA
taaggggtttgataatccatcaatatattgtgcggatcataagatagtgattagtacagttaaaaaattcttgca

SEQ ID NO: 779201 - DNA, 75 bp, synthetic construct
  source 1..75: mol_type = other DNA
ttggacgaagcattccgcggggcttatgacaatatctgccgtgcttcacgtaatatcgccgcgacactggcgatt

SEQ ID NO: 779202 - DNA, 75 bp, synthetic construct
  source 1..75: mol_type = other DNA
ctggacaacggttacatcctcaatcctcaggcctgcaaccattatcaatcttcgcctttcttcgaggtgagcatg

SEQ ID NO: 779203 - DNA, 75 bp, synthetic construct
  source 1..75: mol_type = other DNA
tgccgtacctgccgctgtcgaaagagacgctcgccaccatcattgccgggaaactggcccgcctggataacgtgc

SEQ ID NO: 779204 - DNA, 75 bp, synthetic construct
  source 1..75: mol_type = other DNA
ggttcgccacgctgccggagaaatatcaacgtgtagtccgcttcatgtacgacaacgcccgcaagtcgggcacac

SEQ ID NO: 779205 - DNA, 75 bp, synthetic construct
  source 1..75: mol_type = other DNA
attctggaacaaggcacgaataattgcatggaatcggtgctgtgtactgagagatcccctcataatttccccaaa

SEQ ID NO: 779206 - DNA, 75 bp, synthetic construct
  source 1..75: mol_type = other DNA
cagtcggacgacatggtagataacctgtttattatgcgttttgatcttacgtttaatattacctttatgcgatga

SEQ ID NO: 779207 - DNA, 75 bp, synthetic construct
  source 1..75: mol_type = other DNA
gcaggttatcgctgacagcgtaatcagtgcccgttcggtgcgccctggcgggaagcgggggcaacaggggaaggc

SEQ ID NO: 779208 - DNA, 75 bp, synthetic construct
  source 1..75: mol_type = other DNA
atgacagcacagatatcagcctacgggcgtttagtcgcagacccgcagacccgcaccacagcaaacggtacaagc

SEQ ID NO: 779209 - DNA, 75 bp, synthetic construct
  source 1..75: mol_type = other DNA
ggcggctggtagctgacccgcagttaaagaccaccagcaagggaacaccaatggcgctggtgagtatggctgttc

SEQ ID NO: 779210 - DNA, 75 bp, synthetic construct
  source 1..75: mol_type = other DNA
atgctggtcagcgatggtgcgaagaaggaacaaaaaacgtctgctgcggtgcagaaacaggataacgggcgtaaa

SEQ ID NO: 779211 - DNA, 75 bp, synthetic construct
  source 1..75: mol_type = other DNA
acaaaaaaaatgctggcctcagtctacagcccctcagatgcgagcaaacattcttgtctggtatattaaaaatgt

SEQ ID NO: 779212 - DNA, 75 bp, synthetic construct
  source 1..75: mol_type = other DNA
tggaactcgctattggctggcgaggagctttatctgaatcaataaaaggagttaagttctgtatctggttttcag

SEQ ID NO: 779213 - DNA, 75 bp, synthetic construct
  source 1..75: mol_type = other DNA
ggactaaaacggcaacaggaaattgagaaatggaaaagggaaaacatgactccatttatgtatattcttaacact

SEQ ID NO: 779214 - DNA, 75 bp, synthetic construct
  source 1..75: mol_type = other DNA
aaaatacaaaattaattccagttgaaataaatgatgcggaatttatttattcactgcgggtagattctcgtctca

SEQ ID NO: 779215 - DNA, 75 bp, synthetic construct
  source 1..75: mol_type = other DNA
atgcgacgctatgcgtcttatccgacctacagttcagttcaccccgtaggcctgataagtcgcgtcagcggcgca

SEQ ID NO: 779216 - DNA, 75 bp, synthetic construct
  source 1..75: mol_type = other DNA
atgaggtaattattattaataaaatcccccccaaaaaaattgatactaaaggagttgctactgaagaagttgcta

SEQ ID NO: 779217 - DNA, 75 bp, synthetic construct
  source 1..75: mol_type = other DNA
tcttattcttcaaagtcggatgcgacgctgatgcgtcttatccgacctacagttggcatgcatccggcaatgttg

SEQ ID NO: 779218 - DNA, 75 bp, synthetic construct
  source 1..75: mol_type = other DNA
ctggaatcgctatattcctttttgggaataaactccatgatggtcgaatcgttaatgctgatggggtccgaaggg

SEQ ID NO: 779219 - DNA, 75 bp, synthetic construct
  source 1..75: mol_type = other DNA
aagcgatgcaaaaggtgacgtgcaccgagcttgctgccagtttgggcattgaacctgcagaggcgattaaaatgc

SEQ ID NO: 779220 - DNA, 75 bp, synthetic construct
  source 1..75: mol_type = other DNA
cagaacactcatcatgttattctcttgacacttgatgttgcaaaaaaaatactcaacccaataacatcatttgat

SEQ ID NO: 779221 - DNA, 75 bp, synthetic construct
  source 1..75: mol_type = other DNA
cggagcaagcgttagcttcaggaggcgtatatcattttgcgatgggattcgctccaggccgattatggtggtcta

SEQ ID NO: 779222 - DNA, 75 bp, synthetic construct
  source 1..75: mol_type = other DNA
actgactacacagtaaccggcgcagggggatatgaaggtggtaatgtaatacttgcaacagctctggctaatggt

SEQ ID NO: 779223 - DNA, 75 bp, synthetic construct
  source 1..75: mol_type = other DNA
cttgctgaacgcatcggtgttactgccgcagccgtgaactcagcctgtatgaatcacagctctacaactggcgca

SEQ ID NO: 779224 - DNA, 75 bp, synthetic construct
  source 1..75: mol_type = other DNA
attatctcccgcagacaccggttgaagccctggaaaaaacgccagtgctccctgcgggaaccgtattcaaaggcg

SEQ ID NO: 779225 - DNA, 75 bp, synthetic construct
  source 1..75: mol_type = other DNA
atggacggtgtggtgattggtgagaacagtattgttggtgtttccgcatttgtgaaagccaaagcagaaatgccg

SEQ ID NO: 779226 - DNA, 75 bp, synthetic construct
  source 1..75: mol_type = other DNA
atgacgccagtacactggttgaccatgctcaggcgcttttcgacgacattaccagcgacatcgccgaagcgacgt

SEQ ID NO: 779227 - DNA, 75 bp, synthetic construct
  source 1..75: mol_type = other DNA
atgctttgggccgcgcacgcggtgtcggaggaccgaccggcggacacgacgagcgtgagcagacgctgaaccagt

SEQ ID NO: 779228 - DNA, 75 bp, synthetic construct
  source 1..75: mol_type = other DNA
ccggatgcccggctcagttgccgaccggcagccggtagtccgcaactggggcgcacggcagtaatgagaacacag

SEQ ID NO: 779229 - DNA, 75 bp, synthetic construct
  source 1..75: mol_type = other DNA
cgtgaatttactgtagtgaagcccaatcaggtgtgggtcaccgacatcacctacagtgtgcccggagttcagggc

SEQ ID NO: 779230 - DNA, 75 bp, synthetic construct
  source 1..75: mol_type = other DNA
cggcagggcttgcgtgggtgttttttaagaagggtgaacaattcaaggaaaaaaaatcaaccccaaacagaaata

SEQ ID NO: 779231 - DNA, 75 bp, synthetic construct
  source 1..75: mol_type = other DNA
ttcctcatgttactattgctctcaatgttgttggtgattcacttgaaattgatcaaataaaaggtaagcaaaatc

SEQ ID NO: 779232 - DNA, 75 bp, synthetic construct
  source 1..75: mol_type = other DNA
tcttcttgctttgttattatctgatttctaaaggtaatattaagttatttttatttttcgtattaatatattctt

SEQ ID NO: 779233 - DNA, 75 bp, synthetic construct
  source 1..75: mol_type = other DNA
gggtgtgtggcacccggcaggcaatgagcagggacccgccgcaacgacggagagcgcgtgcgcgaaacggcgttg

SEQ ID NO: 779234 - DNA, 75 bp, synthetic construct
  source 1..75: mol_type = other DNA
attcaaataatgctaataatatgctaagtaagcggagctttgattgggcgaatatcataagcccaagtatgtatt

SEQ ID NO: 779235 - DNA, 75 bp, synthetic construct
  source 1..75: mol_type = other DNA
cctatgtcaggaaaaacaaaacgcgggcttgattatacgccattattcatgtttttactaagcaaaactggtgaa

SEQ ID NO: 779236 - DNA, 75 bp, synthetic construct
  source 1..75: mol_type = other DNA
gtggcaaattcttccggattcgcccttgccgcattacttaatgctaatattgagatgggaaatgacccaatcatt

SEQ ID NO: 779237 - DNA, 75 bp, synthetic construct
  source 1..75: mol_type = other DNA
ggcggctatgatgagcgctcagttattctgccttattctaaagaattgttctctgttcctgacaacctgtatgtc

SEQ ID NO: 779238 - DNA, 75 bp, synthetic construct
  source 1..75: mol_type = other DNA
tcaggatctgccagacggtgctgagacgacgcttacacttgatcatgaaattgccagaaaggaaggttccgacgg

SEQ ID NO: 779239 - DNA, 75 bp, synthetic construct
  source 1..75: mol_type = other DNA
cagatatttttgccgaacaacggaggcaacttttatacggcatacttgaacaccagcgggaacttaaacgtgcca

SEQ ID NO: 779240 - DNA, 75 bp, synthetic construct
  source 1..75: mol_type = other DNA
gcatattgcgccacttcaggatgccgtagatttggatattgcgacggaggaagaggcatcgttactggctgcatg

SEQ ID NO: 779241 - DNA, 75 bp, synthetic construct
  source 1..75: mol_type = other DNA
cttgctgaacgcatcggtgttgctgccgcagcagtgaactcagcctgtatgaatctcagctctatgcgtggcgca

SEQ ID NO: 779242 - DNA, 75 bp, synthetic construct
  source 1..75: mol_type = other DNA
gaagacatatcgggtattgttgaatcgtgttgatacagaagtagctgcggatgttgagtggccagtcgccccgca

SEQ ID NO: 779243 - DNA, 75 bp, synthetic construct
  source 1..75: mol_type = other DNA
gaggctcaatatattgttgggttttattataatcgcgatagcgcaattgattctccggacgacgaaaagcctttt

SEQ ID NO: 779244 - DNA, 75 bp, synthetic construct
  source 1..75: mol_type = other DNA
atgagcaatggtctcgtttccggaattgtcgatacaaaaacaacaacgcaaaacgaaattctgcgtcttgcgtct

SEQ ID NO: 779245 - DNA, 75 bp, synthetic construct
  source 1..75: mol_type = other DNA
tcaaaaaattcacgcatcagcctgaaaacgcgaacgctgctggggcataccggcaccgacgtcaacagccagttg

SEQ ID NO: 779246 - DNA, 75 bp, synthetic construct
  source 1..75: mol_type = other DNA
gggtggccgaatcgacccaggcgcgcatcgatcaggctatccgcgacatcgtgatgggcgtgttcgagcacgcct

SEQ ID NO: 779247 - DNA, 75 bp, synthetic construct
  source 1..75: mol_type = other DNA
cggcgtgggtgcagcgcgcgtgcgcgacctgttcgagcaggcccgcgggcaggcgccggccatcatcttcatcga

SEQ ID NO: 779248 - DNA, 75 bp, synthetic construct
  source 1..75: mol_type = other DNA
gggcaaaattacaccaccacagccgatgcttccgggaactggagcgtgaccgttccggcgtcacgggtgagcgcc

SEQ ID NO: 779249 - DNA, 75 bp, synthetic construct
  source 1..75: mol_type = other DNA
acgtggctggcgaatggcgggatggacgtggttgatttccgcctctcgacggtgggtgtgaccgcgaacttaagc

SEQ ID NO: 779250 - DNA, 75 bp, synthetic construct
  source 1..75: mol_type = other DNA
ccgccggaaatatcggcgcgaccgccagccagatagtcactgtggacaccaccgcgccgctggcgagcaaaacca

SEQ ID NO: 779251 - DNA, 75 bp, synthetic construct
  source 1..75: mol_type = other DNA
tatcgctgttgcggatctacagtaatgagaaactggtggcctcacatcgcctctgttcggcatcgtctggctggc

SEQ ID NO: 779252 - DNA, 75 bp, synthetic construct
  source 1..75: mol_type = other DNA
ctgccagggcagcagcatgatgaggagtcggggctgtactataaccgtcaccggcactacgatccgttgcagggg

SEQ ID NO: 779253 - DNA, 75 bp, synthetic construct
  source 1..75: mol_type = other DNA
cgtcggtgccaccgacagccagaatgtggtgatcgacaccatcgcgccagatcccgcggtgaaaaccatcgccat

SEQ ID NO: 779254 - DNA, 75 bp, synthetic construct
  source 1..75: mol_type = other DNA
cgtacctgccgccgactggcaggcgctgggtaacggtgagttaaccgttaacgtctcggtaaccaacgccgttgg

SEQ ID NO: 779255 - DNA, 75 bp, synthetic construct
  source 1..75: mol_type = other DNA
agtgtcgctctcggtcagcaccatcagcggcgataatattattaacgccgccgaagcgggcagtgcgctgaccct

SEQ ID NO: 779256 - DNA, 75 bp, synthetic construct
  source 1..75: mol_type = other DNA
tgcgggtgctggatctggcggggaacaccggtccggtggtgtcgaaaacggtggtggtcgatacgattaacccca

SEQ ID NO: 779257 - DNA, 75 bp, synthetic construct
  source 1..75: mol_type = other DNA
gcttaacctggacctggcttgacgggcggacgctgaccgatggcaactacaactatcaggtgcgggttatcgaca

SEQ ID NO: 779258 - DNA, 75 bp, synthetic construct
  source 1..75: mol_type = other DNA
tgataacatcatcaacgccagcgaagcggcggcgggcgtgacggtatccggcaccagcacggcggagacggggca

SEQ ID NO: 779259 - DNA, 75 bp, synthetic construct
  source 1..75: mol_type = other DNA
gacgcagcgggcaacgtcggtgccaccgacagccagaatgtggtgatcgacaccaccgcgccagacccagcggtg

SEQ ID NO: 779260 - DNA, 75 bp, synthetic construct
  source 1..75: mol_type = other DNA
aacgtggggtggcaaacctaggctggttgcgttcgttccatactttttcctttgccagttactgggatccggagc

SEQ ID NO: 779261 - DNA, 75 bp, synthetic construct
  source 1..75: mol_type = other DNA
gatattcattctggtggtaaagctgtagcaacagcaacttcgcttcctttattttcggcatggctcgcaaaagaa

SEQ ID NO: 779262 - DNA, 75 bp, synthetic construct
  source 1..75: mol_type = other DNA
atgagcgtggcgccttcagaacagggagctggatattcagggctaatatttcgctgtcacagcactgcgtgctta

SEQ ID NO: 779263 - DNA, 75 bp, synthetic construct
  source 1..75: mol_type = other DNA
atactcataccgttccattaaggagaccaaacagtggcggtatgaatttcgactggctggatggtgcatcaagtg

SEQ ID NO: 779264 - DNA, 75 bp, synthetic construct
  source 1..75: mol_type = other DNA
atacccttaatcaccgctacggtttgttcagtgaagttcgcggcttaggtcttttgattggctgtgtgctgaatg

SEQ ID NO: 779265 - DNA, 75 bp, synthetic construct
  source 1..75: mol_type = other DNA
gcctatatgcactacggcgtgacgcctgatctgttaactaccgccaaagcgctgggcggcggtttcccggtcggt

SEQ ID NO: 779266 - DNA, 75 bp, synthetic construct
  source 1..75: mol_type = other DNA
caacgaatttgtaagggcccgtgagaaaatgcgagaaataaagcgcttgtttgatgaaaatgaattgcctcaagc

SEQ ID NO: 779267 - DNA, 75 bp, synthetic construct
  source 1..75: mol_type = other DNA
catcggttttggtggaattagccaaagagtattcatcttataatgggtgtagacgaaggcaattaatagaagttg

SEQ ID NO: 779268 - DNA, 75 bp, synthetic construct
  source 1..75: mol_type = other DNA
taactgcgatattaccacatgttatccgtgtttcaggtcaagatttaaccacctacttatctgtaacagacaacc

SEQ ID NO: 779269 - DNA, 75 bp, synthetic construct
  source 1..75: mol_type = other DNA
ataaaacttccctgttagaaaagtacgggactagtaacgcacatcttttatggtcattaggtctttacttagatg

SEQ ID NO: 779270 - DNA, 75 bp, synthetic construct
  source 1..75: mol_type = other DNA
aaggatatctagcccggactggggagggcgtggaagtaatccaaacaaggatgccaggagggtgcaacaagcaag

SEQ ID NO: 779271 - DNA, 75 bp, synthetic construct
  source 1..75: mol_type = other DNA
gggtgatgtaatttccgacatctcgctttatttgccctttatgctactcccgcagagcagtataccgctggtgct

SEQ ID NO: 779272 - DNA, 75 bp, synthetic construct
  source 1..75: mol_type = other DNA
atgtttttagttagtaattactatcgtatgtgttgcattattttgtttatggatactccaaatctactttctctg

SEQ ID NO: 779273 - DNA, 75 bp, synthetic construct
  source 1..75: mol_type = other DNA
atacgggaagcagaagacacaaaaaacagcctgatgcagactgccagtgaacagattgtgccacttcaggatgcc

SEQ ID NO: 779274 - DNA, 75 bp, synthetic construct
  source 1..75: mol_type = other DNA
tcatactggcatgtcacaaactgaggataatcttcatgcagtcgctatgaagattactgcagatattatgcaaga

SEQ ID NO: 779275 - DNA, 75 bp, synthetic construct
  source 1..75: mol_type = other DNA
aaaaaacaggttagttgtcgtgctcaacggaaaaattaatggcaacgcatgtatcgtcgttccattatcaaccac

SEQ ID NO: 779276 - DNA, 75 bp, synthetic construct
  source 1..75: mol_type = other DNA
taaaaaatggttcgaaaataattataataagcgacatgtatttcccaactagtattttaaaggaattgttaattt

SEQ ID NO: 779277 - DNA, 75 bp, synthetic construct
  source 1..75: mol_type = other DNA
atctggccgcgctcgggcagggggcgcagaccattaccgccagcgtgaacgatcgcgccggtaaccccggtcaaa

SEQ ID NO: 779278 - DNA, 75 bp, synthetic construct
  source 1..75: mol_type = other DNA
ctggaccgcaacggtcggcagcggcggaagctggtcggtatttattccggcgcagcagtttgccggattaagcga

SEQ ID NO: 779279 - DNA, 75 bp, synthetic construct
  source 1..75: mol_type = other DNA
caataacggctacaccctgaccgccacggtcagcgatctggcgggtaaccctggcagcgccagcaaaggcgtgac

SEQ ID NO: 779280 - DNA, 75 bp, synthetic construct
  source 1..75: mol_type = other DNA
attacactggagcagcctgaaaaaggtatttttgtgaagaattcagatggttcagatgtatgtactttatttgat

SEQ ID NO: 779281 - DNA, 75 bp, synthetic construct
  source 1..75: mol_type = other DNA
ttgaggctgctgccggctcggggatgtctccggctgttctgaatctgttgtgtatcggggcattactggcggtgc

SEQ ID NO: 779282 - DNA, 75 bp, synthetic construct
  source 1..75: mol_type = other DNA
atggcgctgacgtcggcacagaccacggcctttatggcggcatccggtggcctggcagtgaatgagctgcatctg

SEQ ID NO: 779283 - DNA, 75 bp, synthetic construct
  source 1..75: mol_type = other DNA
tacgcatcagaattagagaccagttactggaaagagggcttcaaaagattaaacagaaagaaattttgggcaaaa

SEQ ID NO: 779284 - DNA, 75 bp, synthetic construct
  source 1..75: mol_type = other DNA
aactgccgctttcccgtgtctggcggctttccggtcatatgcgtgacggtaacgggcagggggtttttattctgc

SEQ ID NO: 779285 - DNA, 75 bp, synthetic construct
  source 1..75: mol_type = other DNA
gacctgtaaagttgagttgcaggacaccggtagtgcaaagattgacaccgtcaatttccagaacgtctatattcc

SEQ ID NO: 779286 - DNA, 75 bp, synthetic construct
  source 1..75: mol_type = other DNA
aacggctcagacgtggtgaatggctttacggtagggacatgggaaggcaccgccgacaccgatcgcattgatatt

SEQ ID NO: 779287 - DNA, 75 bp, synthetic construct
  source 1..75: mol_type = other DNA
taccagcgacacctcgcttaccgtgcgcggcgtattgggggcggcgctcggcgctaacgaattcgcgcaaatcag

SEQ ID NO: 779288 - DNA, 75 bp, synthetic construct
  source 1..75: mol_type = other DNA
caatatcgaccagacggtcaacaccagctggggcggcttacaggccaccgatgccactcacgcttacgacctcag

SEQ ID NO: 779289 - DNA, 75 bp, synthetic construct
  source 1..75: mol_type = other DNA
aacgtgagcgaagctggcgcggggatcaccatcagcggcactaccacggcgcaggccgggcagacgctcaccgtc

SEQ ID NO: 779290 - DNA, 75 bp, synthetic construct
  source 1..75: mol_type = other DNA
ggaacaacgcaggtacgctggtaggtaactccactacgtcgaacagcggcggtagcgccacggtgggcggggcgg

SEQ ID NO: 779291 - DNA, 75 bp, synthetic construct
  source 1..75: mol_type = other DNA
cgccgctggcgagcaaaaccatcgccattgctggcatcagcgatgacactgggttaagtagcagcgattttgtta

SEQ ID NO: 779292 - DNA, 75 bp, synthetic construct
  source 1..75: mol_type = other DNA
gaaacatcggtgattttgtcaaagtcacccagagcggcagcgacaccatcgtgcagatcgaccgcgacggcacgg

SEQ ID NO: 779293 - DNA, 75 bp, synthetic construct
  source 1..75: mol_type = other DNA
gcttcggcaacccacgcctacagcgtcgatgccacggccccgacgcttgccattaacaccatcgccaccgacgat

SEQ ID NO: 779294 - DNA, 75 bp, synthetic construct
  source 1..75: mol_type = other DNA
caagcaattacaccgtcagcgccacggtcaacgacaaagcgggcaaccccggcagcgccagccataatctggcgg

SEQ ID NO: 779295 - DNA, 75 bp, synthetic construct
  source 1..75: mol_type = other DNA
cggtagcagctccggctttgccgcaggtacagcgctgacggtggtgataaataatcaaacttacgccgcgacggt

SEQ ID NO: 779296 - DNA, 75 bp, synthetic construct
  source 1..75: mol_type = other DNA
caattacggccagcggcaacaccaccgccggaaatccggtgagcgttacgcatccggtgaatgtcgatctctcgg

SEQ ID NO: 779297 - DNA, 75 bp, synthetic construct
  source 1..75: mol_type = other DNA
aaaccatcagcgggcaggtgacgggcgcagcgcagggggatacggttaccgttacgctgggcggcaacacctaca

SEQ ID NO: 779298 - DNA, 75 bp, synthetic construct
  source 1..75: mol_type = other DNA
aacgccgccgaagcgggatctgcgctgatcatcagcggcaccagcacggcggaagccgggcagacggtaaccgtg

SEQ ID NO: 779299 - DNA, 75 bp, synthetic construct
  source 1..75: mol_type = other DNA
gccatatcctgagcgtactgccggaatggccctccaaccgtgttgacgaacggctgccatggaacgtagttttca

SEQ ID NO: 779300 - DNA, 75 bp, synthetic construct
  source 1..75: mol_type = other DNA
tataataaaactgatttttatatcattacaaatattgatagagccgctgattttatccaaatggggttagtgtgt

SEQ ID NO: 779301 - DNA, 75 bp, synthetic construct
  source 1..75: mol_type = other DNA
gggatgatttccatcataaatttggtggtgatactcatcaaattgagcaatatatacggtgtaatactgatccta

SEQ ID NO: 779302 - DNA, 75 bp, synthetic construct
  source 1..75: mol_type = other DNA
catctgctgacgtcgatgacggacgccatacgcttccccaggacgtataccggagctgatgcgcgatcttgcaag

SEQ ID NO: 779303 - DNA, 75 bp, synthetic construct
  source 1..75: mol_type = other DNA
ggactgttaaatgcctggagcctggcgggagaacaccgccactggatgatccctctcagaaagggagcgcaatat

SEQ ID NO: 779304 - DNA, 75 bp, synthetic construct
  source 1..75: mol_type = other DNA
gtacttgaaggagaggttctggatgaggtggatgtgaagggcattctgacgcatctcattaaccgagcagtggat

SEQ ID NO: 779305 - DNA, 75 bp, synthetic construct
  source 1..75: mol_type = other DNA
tacctgatttcgtattcaggaggttgtcactttgccaaacgtagaggcgatgcgctgataacgatagatggtgaa

SEQ ID NO: 779306 - DNA, 75 bp, synthetic construct
  source 1..75: mol_type = other DNA
tcagcttaaacaaactattgccagcaaggtggctaacccgctaaatcccggcaataaaaaggtgatcgtgtttac

SEQ ID NO: 779307 - DNA, 75 bp, synthetic construct
  source 1..75: mol_type = other DNA
tcggtgcctactgcggactggatggacaaaattgccaaccctgcattgtctccagggtattgctcatcattgtcg

SEQ ID NO: 779308 - DNA, 75 bp, synthetic construct
  source 1..75: mol_type = other DNA
ttggatgaggtggatgtaaagggagttctgacgcatctgattaaccgggccaccgaagacgataacccggcgatc

SEQ ID NO: 779309 - DNA, 75 bp, synthetic construct
  source 1..75: mol_type = other DNA
gtattgtgaacatggaatttttgggggatatcatgggattcccgagtccagctaaagactacattgaacgcactc

SEQ ID NO: 779310 - DNA, 75 bp, synthetic construct
  source 1..75: mol_type = other DNA
ttttttaagcatatctattgtgatggtattctactgcaaaaatgcctaaatttgttgggcgtcagttgtcaacgc

SEQ ID NO: 779311 - DNA, 75 bp, synthetic construct
  source 1..75: mol_type = other DNA
tcagagtggaaaaccactcaatgcggcgattacctggcaatgcacgcgcagtgccgagttttgtgaaacactgcg

SEQ ID NO: 779312 - DNA, 75 bp, synthetic construct
  source 1..75: mol_type = other DNA
atacgggaggcggaagaaacaaaaaacagcctcatgcgggtagccagtgagcatattgcgccacttcaggatgcg

SEQ ID NO: 779313 - DNA, 75 bp, synthetic construct
  source 1..75: mol_type = other DNA
gaattattttcagggatacggcacatcgctattaatattttgacgaatgataaggtattcaaggcagggttaaga

SEQ ID NO: 779314 - DNA, 75 bp, synthetic construct
  source 1..75: mol_type = other DNA
acaccgcaatccagggcttgtttaacgattcaggaggtcacgtctttactgattcgggagatacttgcacataat

SEQ ID NO: 779315 - DNA, 75 bp, synthetic construct
  source 1..75: mol_type = other DNA
cgtggcgattatctgggggctaacttttgcattggttcccgtcggctggtcaacgtggatcacccgctcgctggc

SEQ ID NO: 779316 - DNA, 75 bp, synthetic construct
  source 1..75: mol_type = other DNA
cattggtgcgggcctgctcgcccgcaaagcgcttatccccggtaccgttgcagatttaaaagcgttattaactga

SEQ ID NO: 779317 - DNA, 75 bp, synthetic construct
  source 1..75: mol_type = other DNA
ttaatttctaacaatatgtttcaaggaggaggagagtccatcagagaatataatactggagtttctttacgaaca

SEQ ID NO: 779318 - DNA, 75 bp, synthetic construct
  source 1..75: mol_type = other DNA
ggcttatgataagatggggtctatcacgatagaaaaacgtcaggggaagggtgctttacccattgggcatagatt

SEQ ID NO: 779319 - DNA, 75 bp, synthetic construct
  source 1..75: mol_type = other DNA
aacaagacaaagaaacagctttgaaagaaatttgtatactcaaaccagatgtgcttatcgtgggtatgggaacac

SEQ ID NO: 779320 - DNA, 75 bp, synthetic construct
  source 1..75: mol_type = other DNA
gcaatttataccattaataatgacgtttatttaagtgatgttatttttgataacaaccaggcatatacatcaaca

SEQ ID NO: 779321 - DNA, 75 bp, synthetic construct
  source 1..75: mol_type = other DNA
agtatttatctttactcccgtcaatgattgcatctcttttctctgctaacggtgtcgcggcggtcactgattcat

SEQ ID NO: 779322 - DNA, 75 bp, synthetic construct
  source 1..75: mol_type = other DNA
atgcatacagaaggattacttccaggtccgtatcaggttaaccgtcgtgcctgtgctttatataaatcgttgcag

SEQ ID NO: 779323 - DNA, 75 bp, synthetic construct
  source 1..75: mol_type = other DNA
tctcacgattaaaatcataaaatacagtgagttgtgtgtgctatattttctatatgtttcttatgcaattactaa

SEQ ID NO: 779324 - DNA, 75 bp, synthetic construct
  source 1..75: mol_type = other DNA
gtcatcaaaattcaaactcctatccgtgattatagtgcatatatatattatgaattgcagtcagtttatttttta

SEQ ID NO: 779325 - DNA, 75 bp, synthetic construct
  source 1..75: mol_type = other DNA
atatcctagagtaaatttaccacaagaaactctggcttttgccttcttattggctccatggatgtgtcttggcgt

SEQ ID NO: 779326 - DNA, 75 bp, synthetic construct
  source 1..75: mol_type = other DNA
tttacctctttctcagggagtttagtctccaggatttccggggcggttcactttgattatcccgcgcagtgcgaa

SEQ ID NO: 779327 - DNA, 75 bp, synthetic construct
  source 1..75: mol_type = other DNA
ttttcacgcatttattgatttagttaacaaaatcaggggtaagaaagactttatgtatatttgcacgctttgctg

SEQ ID NO: 779328 - DNA, 75 bp, synthetic construct
  source 1..75: mol_type = other DNA
atggtgattaattttattactcgcgatagagatgatgatatgaatatatcatatgtgaatagcaacaaaacgaca

SEQ ID NO: 779329 - DNA, 75 bp, synthetic construct
  source 1..75: mol_type = other DNA
atccataacaaggatggcaagattgcgaaaaaagattctcatggcaacgatccttgtccgccaaaagacaagaag

SEQ ID NO: 779330 - DNA, 75 bp, synthetic construct
  source 1..75: mol_type = other DNA
atgggtaaagatcagcatgttgttcctcatgatggcggttgggccgttaagggtgcaggaaacagtaaagcgaca

SEQ ID NO: 779331 - DNA, 75 bp, synthetic construct
  source 1..75: mol_type = other DNA
gcactgaaaggacataatgacaaagccaaaagtttattgcttaaacttgagcctgaacatggtcttgattacacc

SEQ ID NO: 779332 - DNA, 75 bp, synthetic construct
  source 1..75: mol_type = other DNA
tgtacccactatggttttatcaaggcattgaaagattaaaagtagttgctgttatcaatattttatcgcgaataa

SEQ ID NO: 779333 - DNA, 75 bp, synthetic construct
  source 1..75: mol_type = other DNA
tgaaatccggagtgtggcatttgagtcagcgcatgccggaggtgcccattatccccgttgggttgcgcggtactg

SEQ ID NO: 779334 - DNA, 75 bp, synthetic construct
  source 1..75: mol_type = other DNA
ttaaatcttgcacaacctcgttggatggctcatcaatatgacaagcaagattacgttcatccttttataaccaac

SEQ ID NO: 779335 - DNA, 75 bp, synthetic construct
  source 1..75: mol_type = other DNA
atgatgaacgccttagaagtatctatgtacagaatcagcaagcttctccaagaaacaggatggagccaggctgag

SEQ ID NO: 779336 - DNA, 75 bp, synthetic construct
  source 1..75: mol_type = other DNA
gtgttagttaaagccagcgtcgggcagtatctggcaggggataaaggcggcacgctggagatcgccaaacgcttt

SEQ ID NO: 779337 - DNA, 75 bp, synthetic construct
  source 1..75: mol_type = other DNA
atgaatggcaccgcagaatactcagtattaaatgacggttatcaaattgttcaaatgggtggcgcggcaaaccag

SEQ ID NO: 779338 - DNA, 75 bp, synthetic construct
  source 1..75: mol_type = other DNA
aacggcggtaagctatcacatggacctgcaaaacggtacgacgctggaaccctggctgaaagcggccgtgcgtca

SEQ ID NO: 779339 - DNA, 75 bp, synthetic construct
  source 1..75: mol_type = other DNA
aaaacggattatctgttgcggcattaatgatgaaaaacgaactgcactgccagacatctgcttttttgcatgacg

SEQ ID NO: 779340 - DNA, 75 bp, synthetic construct
  source 1..75: mol_type = other DNA
agatagttattggtccatccagttcccgcacagtcgggccaatgcgtgcggcttataattttgtgtcacaattga

SEQ ID NO: 779341 - DNA, 75 bp, synthetic construct
  source 1..75: mol_type = other DNA
acacactgatactcagtgataacggcggcagaagcctgtattttgagcacctgtttccagggaaagatcatcaga

SEQ ID NO: 779342 - DNA, 75 bp, synthetic construct
  source 1..75: mol_type = other DNA
actgaaattaacggagggtatcagtacattgaaatgaatggcaccgcagaatactcagtattaaatgacggttat

SEQ ID NO: 779343 - DNA, 75 bp, synthetic construct
  source 1..75: mol_type = other DNA
tccgctattggtcattaatgttgtccgctttccgccatttcatcatcactgattggcgtggcgttttttgccagc

SEQ ID NO: 779344 - DNA, 75 bp, synthetic construct
  source 1..75: mol_type = other DNA
gactgtaactggcgttgataaaaaagcaggcggaaaattaattgtctcaacgaatgcgctggaagtgagtggtac

SEQ ID NO: 779345 - DNA, 75 bp, synthetic construct
  source 1..75: mol_type = other DNA
caaaccagactaccctcaataatggtgtgctacaggtttatggcgcagcgaatgaacctacgattaaaggcgggc

SEQ ID NO: 779346 - DNA, 75 bp, synthetic construct
  source 1..75: mol_type = other DNA
ggttgggagcatcagaacggtgcctatgttgatggagtggtgaaagttgaccgttttgccaacaccatccatggc

SEQ ID NO: 779347 - DNA, 75 bp, synthetic construct
  source 1..75: mol_type = other DNA
atggttacgctttggggaaattatgaggggatctctcagtactcagtattaaatgacggttatcaaattgttcaa

SEQ ID NO: 779348 - DNA, 75 bp, synthetic construct
  source 1..75: mol_type = other DNA
attttctcgctcacttcaacaaaaaatgcaaaaaccagactttggcgttaatttccagccgtcctgaggggcgtt

SEQ ID NO: 779349 - DNA, 75 bp, synthetic construct
  source 1..75: mol_type = other DNA
aagatggaaatggagttcgtaactgcatgatagtgaatgctgatacaggtatcccattggtttatccaaatctat

SEQ ID NO: 779350 - DNA, 75 bp, synthetic construct
  source 1..75: mol_type = other DNA
ggctgttattaatccactcaaaaacatagtagaggacaaatccaatgtttcaaactctaagaaagctacaagaaa

SEQ ID NO: 779351 - DNA, 75 bp, synthetic construct
  source 1..75: mol_type = other DNA
cgtcgaaggatgcgggattaatgcaatttgccaatgggacacaaattcctattggtacgttaggggcagcaattg

SEQ ID NO: 779352 - DNA, 75 bp, synthetic construct
  source 1..75: mol_type = other DNA
acttcaggatgctgtagatctggaaatcgcaacggaggaagaaacctcattgctggaagcctggaaaaagtatcg

SEQ ID NO: 779353 - DNA, 75 bp, synthetic construct
  source 1..75: mol_type = other DNA
ttgttttcagcgatacagcataaacaacaaaacgttgtagagacggtttatcttgctttatctgaccatgcacgc

SEQ ID NO: 779354 - DNA, 75 bp, synthetic construct
  source 1..75: mol_type = other DNA
cgggtattgctgaaccgtgttaatacaacaactgcaccggatattgaatggccaacaggacccattatcgaatag

SEQ ID NO: 779355 - DNA, 75 bp, synthetic construct
  source 1..75: mol_type = other DNA
gagtcatttacgcggcaactccctcctgctgcagaacgtgcaaatatgatccatgcatatgattatgcaggtgag

SEQ ID NO: 779356 - DNA, 75 bp, synthetic construct
  source 1..75: mol_type = other DNA
ggggtactgctcttttgcatttgggaaaaatgtcattgctcttggagcaaaatctgccgcattctgtgaagaaac

SEQ ID NO: 779357 - DNA, 75 bp, synthetic construct
  source 1..75: mol_type = other DNA
acttcactatttcacgaaaaataattgcgaaaaaaatgattgagtctgagcgtgtttttgctgaaaaatctcagc

SEQ ID NO: 779358 - DNA, 75 bp, synthetic construct
  source 1..75: mol_type = other DNA
cgtattccgctctattcgatcacggattggcatcgaagtccgatcagcgattcgcatccattcgatcaaccggga

SEQ ID NO: 779359 - DNA, 75 bp, synthetic construct
  source 1..75: mol_type = other DNA
caacaaactcagacgccttgctcaacaggagcctgactttattgatatacacgctcatctggcatatgcatttct

SEQ ID NO: 779360 - DNA, 75 bp, synthetic construct
  source 1..75: mol_type = other DNA
cttacccggaagtgcgctcggttctgcttctacgatcattacaggccgaaggttgggggtagggcagatagcgca

SEQ ID NO: 779361 - DNA, 75 bp, synthetic construct
  source 1..75: mol_type = other DNA
ggctgacacacgacccggcatacccggatgaactgccgactgcgccgctggcgcgctacacgtacacggccggtg

SEQ ID NO: 779362 - DNA, 75 bp, synthetic construct
  source 1..75: mol_type = other DNA
agcatggcaggcagtaatgcagcatatgaactgaccagcacatacaccctcacagggcagctacagagcaggcac

SEQ ID NO: 779363 - DNA, 75 bp, synthetic construct
  source 1..75: mol_type = other DNA
tagagtatattgaaggaaccaatgttagatttaattcgaataatatggcgatatattggaatagtagagcatctt

SEQ ID NO: 779364 - DNA, 75 bp, synthetic construct
  source 1..75: mol_type = other DNA
tctgtacattaatttcagacaaagcaccaaagattaatatagctattattcaggtcggcctttattacaaaaacg

SEQ ID NO: 779365 - DNA, 75 bp, synthetic construct
  source 1..75: mol_type = other DNA
ctgaacctcccgcagcttgaccgggactacgactggaacgacaacggacagctaatccgcatcagcggcccgcag

SEQ ID NO: 779366 - DNA, 75 bp, synthetic construct
  source 1..75: mol_type = other DNA
atatccatttatcgacaactgccggtggtgtgacgtcgggccacacctggaaaaatcttcatttttacacccgta

SEQ ID NO: 779367 - DNA, 75 bp, synthetic construct
  source 1..75: mol_type = other DNA
caacaacctgtttgtctctgaagtcgtcgtacaattttccgccatcaccgcggatcatccacatcttagtcgcca

SEQ ID NO: 779368 - DNA, 75 bp, synthetic construct
  source 1..75: mol_type = other DNA
gcagctgcaacagtttacccacaccgcgtatcagattgtgccatatgaaagctacgtcaccctggcggagaaaat

SEQ ID NO: 779369 - DNA, 75 bp, synthetic construct
  source 1..75: mol_type = other DNA
tacaaccgcaaccggtactatgatccgttgcaggggagatatatcacccaggacccgatagggctgagaggtgaa

SEQ ID NO: 779370 - DNA, 75 bp, synthetic construct
  source 1..75: mol_type = other DNA
acttgcaatttggattgcactggttgccagacgcccctgaaaattcattttattcaccagatcagcaagacgtgg

SEQ ID NO: 779371 - DNA, 75 bp, synthetic construct
  source 1..75: mol_type = other DNA
aagtatgaaaagcagtcacaagaagagatgctggaggaggtaagaacctatgttcagcgtccaacagatcacagt

SEQ ID NO: 779372 - DNA, 75 bp, synthetic construct
  source 1..75: mol_type = other DNA
tgaccaaccggtcacaactgctgaaatcacaggtcttggtgcagtaaacctgcttgaagcaattcgaattgttaa

SEQ ID NO: 779373 - DNA, 75 bp, synthetic construct
  source 1..75: mol_type = other DNA
ttcgcgtaatgatgcgtcatttcatcaagcgtttgctgcgatgttgatcaactcacttaatcttccaaaagccct

SEQ ID NO: 779374 - DNA, 75 bp, synthetic construct
  source 1..75: mol_type = other DNA
gaattatgtgcggttattcacgccgaaggcgcacaggttctggcgcgctatggtgaggatttttatgcaggtaca

SEQ ID NO: 779375 - DNA, 75 bp, synthetic construct
  source 1..75: mol_type = other DNA
ttacatgtccctgggattctggagaaagatatcgccatgatgcaacaggctggttgtaacaccatgtcggtgggc

SEQ ID NO: 779376 - DNA, 75 bp, synthetic construct
  source 1..75: mol_type = other DNA
catggtgagaaagcgttaccggcctggtttgcttcgctgggtgatttccatacttcgcagtatcaggtgttaacg

SEQ ID NO: 779377 - DNA, 75 bp, synthetic construct
  source 1..75: mol_type = other DNA
gatctttctgttatgcgtttcgttcaatcctcattaagcctagatgaccacattacacatctaaaaggtaaacta

SEQ ID NO: 779378 - DNA, 75 bp, synthetic construct
  source 1..75: mol_type = other DNA
gaattatgtgcggttattcacgccgaaggtgcacaggttctggcgcgctatggcgaggatttttatgcgggtacg

SEQ ID NO: 779379 - DNA, 75 bp, synthetic construct
  source 1..75: mol_type = other DNA
aatggcagcacgcggaaaaaattgtacttaaagcttacgaatccatcaacctgttggcatcggtgattacttcag

SEQ ID NO: 779380 - DNA, 75 bp, synthetic construct
  source 1..75: mol_type = other DNA
tattcctactattgattttgatgatccaaaacagaaagaaatacatgatacgatcagttcaaagcaacagtattt

SEQ ID NO: 779381 - DNA, 75 bp, synthetic construct
  source 1..75: mol_type = other DNA
atgtgtgacaacggggagatgattggtcttaaacctcaggaagagatgacccccctgacaaaacttgagtttgcg

SEQ ID NO: 779382 - DNA, 75 bp, synthetic construct
  source 1..75: mol_type = other DNA
gtgacctgtctgggctacatcctactgcgcaaaagtgtcagcgttattattaaaggcacgattaaaaccataatt

SEQ ID NO: 779383 - DNA, 75 bp, synthetic construct
  source 1..75: mol_type = other DNA
gtcatatctcaggtatattcggctgttggaaatgtatttgccaggatgtatgattttatctttccttggtgagct

SEQ ID NO: 779384 - DNA, 75 bp, synthetic construct
  source 1..75: mol_type = other DNA
ggcaaccgctacgactttgctgcgatgacacacaaaaaacgccgcaaggtttttgccttcttcacaggcattgcc

SEQ ID NO: 779385 - DNA, 75 bp, synthetic construct
  source 1..75: mol_type = other DNA
ttgcgtgaacgctgggagcgttacgtggtactcaatgctgaattggcagcaagagggcgcaggggatttgaacgt

SEQ ID NO: 779386 - DNA, 75 bp, synthetic construct
  source 1..75: mol_type = other DNA
cggcggcacgtagccagctggcgaaactgcctgccaccgataacacctcgctgaacactcagcggcgcgtggcgc

SEQ ID NO: 779387 - DNA, 75 bp, synthetic construct
  source 1..75: mol_type = other DNA
ttaatctcgggttgacggcaggtaaagtgtggttcaacaccccaaccgatgattataacggtctgcaacttgcag

SEQ ID NO: 779388 - DNA, 75 bp, synthetic construct
  source 1..75: mol_type = other DNA
cgcggaacaggtgcttacacctacgactggacgccagaaacacgctacggcagcatgaagagcatcagtttgcaa

SEQ ID NO: 779389 - DNA, 75 bp, synthetic construct
  source 1..75: mol_type = other DNA
gtcggattccggtgccagcgtggcggtcggctggcgaaatgacgtctggagctgggatatcggtaccacgccgat

SEQ ID NO: 779390 - DNA, 75 bp, synthetic construct
  source 1..75: mol_type = other DNA
tggcacggcaattgatatccagcaggtgaaagattacgcacccagccatttcctgctctacgtacgttattccgc

SEQ ID NO: 779391 - DNA, 75 bp, synthetic construct
  source 1..75: mol_type = other DNA
cggatgttctttcgcagtgatttcgtcaatatgaacgtcggcagtttctccactaatgccgatggcaaatgggat

SEQ ID NO: 779392 - DNA, 75 bp, synthetic construct
  source 1..75: mol_type = other DNA
aatccttacactcaaaagttgaatttcttaaatctttttattttactattggttttcttaagggcttctttaaaa

SEQ ID NO: 779393 - DNA, 75 bp, synthetic construct
  source 1..75: mol_type = other DNA
aacaagagcgcatttaatcaaggctcttcaggaagtacttattactccccagattttaaaaagaacttttatact

SEQ ID NO: 779394 - DNA, 75 bp, synthetic construct
  source 1..75: mol_type = other DNA
atgcaggtagccagtgagcatatagcgccgcttcaggatgctgtagatctggaaatcgcaacggaggaagaaacc

SEQ ID NO: 779395 - DNA, 75 bp, synthetic construct
  source 1..75: mol_type = other DNA
ctttctctgtaaatattaataatacagcccagacaaatgaacaccaaaccctgagtgaattgttttataaagaac

SEQ ID NO: 779396 - DNA, 75 bp, synthetic construct
  source 1..75: mol_type = other DNA
ttacgataattaataaaaatgaaaacacgacactcactcaaaccattgctccaatatttgaagaatacctaatgg

SEQ ID NO: 779397 - DNA, 75 bp, synthetic construct
  source 1..75: mol_type = other DNA
ggaaaacaggtaaaggattttatatgagtaaacgtgaagaaattaaaggtaacctgaagtttgatgaactcaaat

SEQ ID NO: 779398 - DNA, 75 bp, synthetic construct
  source 1..75: mol_type = other DNA
gaaggaatttgccgactgttttctgttttcattggcccggataaattcgatagcaccgatgatgcggcattcgaa

SEQ ID NO: 779399 - DNA, 75 bp, synthetic construct
  source 1..75: mol_type = other DNA
aaatgtggtgatcaattgattgtgacaaaactgggtaatgactccaacttattgatagtgttttatgttcagata

SEQ ID NO: 779400 - DNA, 75 bp, synthetic construct
  source 1..75: mol_type = other DNA
gatgacggtgcgctgccactggacaataaccggtgtgagcgtgcgatccggcaggtggtgatggggcggaatacg

SEQ ID NO: 779401 - DNA, 75 bp, synthetic construct
  source 1..75: mol_type = other DNA
cttataagctgtcgtatgactttcgaattaattatgatagcgtttaagaataacgaatatttgcgccgcattgct

SEQ ID NO: 779402 - DNA, 75 bp, synthetic construct
  source 1..75: mol_type = other DNA
cggtacgctgaccgctacgttgctggctattttctttgttcctctgttttttgtactggtgaaacgtttgtttgc

SEQ ID NO: 779403 - DNA, 75 bp, synthetic construct
  source 1..75: mol_type = other DNA
tgagctggcgaaaacgcagcgccgcagcctggcggatgcgcttcagcagtccggcggtgaagacggtggcagtgt

SEQ ID NO: 779404 - DNA, 75 bp, synthetic construct
  source 1..75: mol_type = other DNA
gcgaccggctgaccacaatacagaacgacagaacccgcatccagacggtttatcagccggggagcttcacgccac

SEQ ID NO: 779405 - DNA, 75 bp, synthetic construct
  source 1..75: mol_type = other DNA
tgctggccgggctggaaacgccaaccgcaggcgatgtgttggcaggcaccacaccgctggctgaaattcaggaag

SEQ ID NO: 779406 - DNA, 75 bp, synthetic construct
  source 1..75: mol_type = other DNA
gccagaacgcagcgccgcagcctggcggatgcgcttcagcagtccggcggcgaagacggtggcggtgtggtgttc

SEQ ID NO: 779407 - DNA, 75 bp, synthetic construct
  source 1..75: mol_type = other DNA
aagtataaaaaatcatctggattcaaaaagagccatttttaagttgaagaaaaatgtagatgcattcgatgaagt

SEQ ID NO: 779408 - DNA, 75 bp, synthetic construct
  source 1..75: mol_type = other DNA
gtctttgcccgttcagatgtcgggcttcccgtcagttcgatggctgacatggttggcgcggcgggtgccgcatta

SEQ ID NO: 779409 - DNA, 75 bp, synthetic construct
  source 1..75: mol_type = other DNA
cgtggaaaaaatccgccagtggcgacagcgttatgcccgtccgatactggaagaactgtggtcatggcttgaaga

SEQ ID NO: 779410 - DNA, 75 bp, synthetic construct
  source 1..75: mol_type = other DNA
ttcacaccaccgcagcgaatctggatatccgcatcccgtatgccacagacccggcaggtaaccgcctgcccgacc

SEQ ID NO: 779411 - DNA, 75 bp, synthetic construct
  source 1..75: mol_type = other DNA
gtctgccggacagcttggcgccgagccgctgccgcaggagagcgatttcctgatctccattaacgcccagggccg

SEQ ID NO: 779412 - DNA, 75 bp, synthetic construct
  source 1..75: mol_type = other DNA
tttttcagcgtcctttgatctgatcgctgaaaaaacaacaaatagtataaaaatgaacaatccgaatccatgcat

SEQ ID NO: 779413 - DNA, 75 bp, synthetic construct
  source 1..75: mol_type = other DNA
atgcctctatccataaaatcaaatagttataatttaattttggagaatgttttttcagcgtcctttgatctgatc

SEQ ID NO: 779414 - DNA, 75 bp, synthetic construct
  source 1..75: mol_type = other DNA
aattgcaaagaatatgtcttgggatgatgttgaatctaaatatagcgaggacttatcacttaatgtattaactgc

SEQ ID NO: 779415 - DNA, 75 bp, synthetic construct
  source 1..75: mol_type = other DNA
ttaccaatgatagcggtccacgtttttcagcaataaaacataatataatctgctataaagtgccttcttcatggt

SEQ ID NO: 779416 - DNA, 75 bp, synthetic construct
  source 1..75: mol_type = other DNA
gtgccacgggcaggctggagagcgtgcgcaccctcgcaccgggcctggacatccgcatcccgtatgccaccgacc

SEQ ID NO: 779417 - DNA, 75 bp, synthetic construct
  source 1..75: mol_type = other DNA
tgctgcatgtgcagtaaatgcaaattctttcgatcagacggttcagcttggtcaggttcgtacagaaaagctaaa

SEQ ID NO: 779418 - DNA, 75 bp, synthetic construct
  source 1..75: mol_type = other DNA
gttggtggagccaatttaaaatcagctaaaaaaaaatgtatcctattaatgaaagtttcagaaaaaattagtttc

SEQ ID NO: 779419 - DNA, 75 bp, synthetic construct
  source 1..75: mol_type = other DNA
cgcgttcttaataagcaatttaattgctttctggaaatttgggtagacggctcatttacaactgaaaaactagat

SEQ ID NO: 779420 - DNA, 75 bp, synthetic construct
  source 1..75: mol_type = other DNA
gtggcaagcgtgatggagggaatgattaaagtcgttgccgaataccgtaatacaaacaacgcaataggctatacc

SEQ ID NO: 779421 - DNA, 75 bp, synthetic construct
  source 1..75: mol_type = other DNA
atgcggtcactggggacaatcgccgcgtatttctgatctcgcagaacaaaataaaattattgcttataactatcc

SEQ ID NO: 779422 - DNA, 75 bp, synthetic construct
  source 1..75: mol_type = other DNA
ctggaaaacctgacaccaccgcataatcctctcgacgtccttgcgcagcaaaccgttgccgccgcggcgatggat

SEQ ID NO: 779423 - DNA, 75 bp, synthetic construct
  source 1..75: mol_type = other DNA
gtgatttagtcgattccgcagtcattgtagagtgtatgttcgcaggcaggctggaaaacctgacaccaccgcata

SEQ ID NO: 779424 - DNA, 75 bp, synthetic construct
  source 1..75: mol_type = other DNA
gccctgacaaatgatgttgcgcccggcattgaagcgcttaaaaaagagcttggacgtttgcaggctggcgttcag

SEQ ID NO: 779425 - DNA, 75 bp, synthetic construct
  source 1..75: mol_type = other DNA
gtgattgtggtgcgcgcagaaagtaaaacaaaggagaaagaggccgaacagcgtgcggcggtgattcaggccatg

SEQ ID NO: 779426 - DNA, 75 bp, synthetic construct
  source 1..75: mol_type = other DNA
aaaaggattatataaagctctaagtgagtttacaataagaataaaccacatgcgcaccatgaatagacattcacc

SEQ ID NO: 779427 - DNA, 75 bp, synthetic construct
  source 1..75: mol_type = other DNA
acaaatacaaaacttactgaagacatggcattatggctaaagttaattgaggatggctatcacctagcaaatata

SEQ ID NO: 779428 - DNA, 75 bp, synthetic construct
  source 1..75: mol_type = other DNA
acattcgtgacgtcttcaccgatcctgctgttcttcaggggctatcagacttggttggtgaagccataagccttg

SEQ ID NO: 779429 - DNA, 75 bp, synthetic construct
  source 1..75: mol_type = other DNA
tgaacgccaaaataagttaattagacagggacatgaaagtgagtttgttggtcgttattcagcctcaagagaaag

SEQ ID NO: 779430 - DNA, 75 bp, synthetic construct
  source 1..75: mol_type = other DNA
ataaacgaagaaaataaataccacggtttttactcaaaaataaattttaatgaagatggttttacaattgaagat

SEQ ID NO: 779431 - DNA, 75 bp, synthetic construct
  source 1..75: mol_type = other DNA
ttaaattccagcgcgaggcatttccgaagcgggaagccttgtttaaacagctggcgacacagcaaagcccgcgca

SEQ ID NO: 779432 - DNA, 75 bp, synthetic construct
  source 1..75: mol_type = other DNA
gcgtatcttgggcgaaatgagcaaagcgttctcccgggcttcaaaactgtgatgattgcgccttttagtacagta

SEQ ID NO: 779433 - DNA, 75 bp, synthetic construct
  source 1..75: mol_type = other DNA
ggatgattacggcgcgttacgcatgacgacgctcaactgcagcggacaatgccgtttacaagccgtggaggcgaa

SEQ ID NO: 779434 - DNA, 75 bp, synthetic construct
  source 1..75: mol_type = other DNA
tatcattgggtattcatgttcgttgttttgatattttacctacttcgattgatcccatttttttcaatgatggat

SEQ ID NO: 779435 - DNA, 75 bp, synthetic construct
  source 1..75: mol_type = other DNA
aataaattacccggacgagttggcgatagccccttagtgggtgccggatgctacgccaataacgccagtgtggcg

SEQ ID NO: 779436 - DNA, 75 bp, synthetic construct
  source 1..75: mol_type = other DNA
gtcaaaagctgcggcgatggtacgtgaaaacgtcattgctcagttggctaatctgcaaacgcatccatcggtgcg

SEQ ID NO: 779437 - DNA, 75 bp, synthetic construct
  source 1..75: mol_type = other DNA
acaatgcttttaaaaatcgacttcttgacttacaaaagcaagctgcacttattgaaacaacaggcaaaaaaacag

SEQ ID NO: 779438 - DNA, 75 bp, synthetic construct
  source 1..75: mol_type = other DNA
gcttattcgcgcatgacagaagagttcgagtcgaatgtaagtctggtacttcgtgaggaacaggcagaaaataaa

SEQ ID NO: 779439 - DNA, 75 bp, synthetic construct
  source 1..75: mol_type = other DNA
taagtgatgcatgtaccatctcagagcgttatggtgaagatttttttgatatggttgtttcaatagagacaatag

SEQ ID NO: 779440 - DNA, 75 bp, synthetic construct
  source 1..75: mol_type = other DNA
tcgtgaagatcaggcggaaaataaaaaagccatatcaatattaaaaaaagatatgaaacaattaacaatgaattt

SEQ ID NO: 779441 - DNA, 75 bp, synthetic construct
  source 1..75: mol_type = other DNA
taaagcaaaagaaaataatgtagatttgaagataatttttgagacacatagccagaccatgattgaagcacttgg

SEQ ID NO: 779442 - DNA, 75 bp, synthetic construct
  source 1..75: mol_type = other DNA
aactgtttactctaaagataaaaaaacaaaaacgaaaacgattaagcttatattggctgatttaacaatatttat

SEQ ID NO: 779443 - DNA, 75 bp, synthetic construct
  source 1..75: mol_type = other DNA
cgctggatgacgagttacggctctacagtaatgagaaactggtggcctcacatcgcctctgttcggcatcgtctg

SEQ ID NO: 779444 - DNA, 75 bp, synthetic construct
  source 1..75: mol_type = other DNA
tcgtgagcgttgaagtgatgtggcctgcgcaaacgctgcctcttcccctgcaacaggcggtggaagcactgacgc

SEQ ID NO: 779445 - DNA, 75 bp, synthetic construct
  source 1..75: mol_type = other DNA
ccagcaaccgcatcacgtttgagcgcgacagccagtaccggatcacgtgtgtcagtcacaccgacgggatccggc

SEQ ID NO: 779446 - DNA, 75 bp, synthetic construct
  source 1..75: mol_type = other DNA
gctgctgatacagaaactctggttgacacactgaaatctcagggattcttatctggcattcagcagatgaaaggg

SEQ ID NO: 779447 - DNA, 75 bp, synthetic construct
  source 1..75: mol_type = other DNA
ttgagtcaaatgtaagttctgtacttcgtgaagatcaggcggaaaataaaaaagccatatcaatattaaaaaaag

SEQ ID NO: 779448 - DNA, 75 bp, synthetic construct
  source 1..75: mol_type = other DNA
cgcaggatacacacgatatctttcaggtacggctggacaaccagcaggaggcgcggtttctctgtcgctacgtta

SEQ ID NO: 779449 - DNA, 75 bp, synthetic construct
  source 1..75: mol_type = other DNA
tgaaaaaaatagccgctcagttcagcagcgactaccagctgtcatcagaactgtatgaccgccacgttgagctga

SEQ ID NO: 779450 - DNA, 75 bp, synthetic construct
  source 1..75: mol_type = other DNA
tgctgatttctggcgcacagtctgcgtggatgctctgcatcgggttttactttctgcgcctcggcggtcagggac

SEQ ID NO: 779451 - DNA, 75 bp, synthetic construct
  source 1..75: mol_type = other DNA
gatgaattaaaaggtcaggcttttcctttttttatcgactggcttaagtataacgttattatggttgagatagtt

SEQ ID NO: 779452 - DNA, 75 bp, synthetic construct
  source 1..75: mol_type = other DNA
cgacttcagtaaaaatatcatcttcaactttgaccggtcatatatgagtatcgaagcggcaagaatgggactggg

SEQ ID NO: 779453 - DNA, 75 bp, synthetic construct
  source 1..75: mol_type = other DNA
tgcattaaaaactgctggctttaccgttaagttcaccatgaatgatgagcttaaggacacgatgcaggcggttat

SEQ ID NO: 779454 - DNA, 75 bp, synthetic construct
  source 1..75: mol_type = other DNA
tgcttattatccgtgaacgctacgctgattttggtccgacgttagcctgcgagaagctcgccgaactccatggtc

SEQ ID NO: 779455 - DNA, 75 bp, synthetic construct
  source 1..75: mol_type = other DNA
ctatcttgttttaaattctgatggtagagtacctacttcttacttattgaataaaagaacattatctctcccaag

SEQ ID NO: 779456 - DNA, 75 bp, synthetic construct
  source 1..75: mol_type = other DNA
cccgtaataatgtcaccaccgatgcgggtgccgggtttgagcagacgctgaccggaatgacagtggggatcgaca

SEQ ID NO: 779457 - DNA, 75 bp, synthetic construct
  source 1..75: mol_type = other DNA
tgggaacatgaaagtggtttctatctggacggtatcgtgaagctgaaccgctttgaaagtaacgtagccggtaaa

SEQ ID NO: 779458 - DNA, 75 bp, synthetic construct
  source 1..75: mol_type = other DNA
tgggttagagataatcttcaggaggtgggattggacccagataatggtgagacattcgaacgatttatacaaaaa

SEQ ID NO: 779459 - DNA, 75 bp, synthetic construct
  source 1..75: mol_type = other DNA
atgagtaagttagataataaaattgaagcacgccatcgtaatttgtttgatgttctaaatgcgcaaaaatatacc

SEQ ID NO: 779460 - DNA, 75 bp, synthetic construct
  source 1..75: mol_type = other DNA
ttcattcatttgaaaaccatgtgtattgtgaccctattgaaataacagagggtatacatatggaacatcaaactc

SEQ ID NO: 779461 - DNA, 75 bp, synthetic construct
  source 1..75: mol_type = other DNA
ttggtgatgccgcatatgaatgaacgcgcgtggaagatccaacagttcgtcgagtggcttgacaaagagttgcga

SEQ ID NO: 779462 - DNA, 75 bp, synthetic construct
  source 1..75: mol_type = other DNA
tgctgaaaaataacaacgggaagatggtgttcaactccgggttcctgctgctggccgatcactatggcttcctgc

SEQ ID NO: 779463 - DNA, 75 bp, synthetic construct
  source 1..75: mol_type = other DNA
gaagaaccacaccagcccttcagccacggtgaatacccggaacggcaaggtacatgtggtggaaaaccatctttt

SEQ ID NO: 779464 - DNA, 75 bp, synthetic construct
  source 1..75: mol_type = other DNA
gaactggtgcagcaggccgataaagcctctgtcgcccgatacctcggcggcgatatcaaaaccgcgctggcgcaa

SEQ ID NO: 779465 - DNA, 75 bp, synthetic construct
  source 1..75: mol_type = other DNA
gacagaggcagctggcagtgcgacagcggcagtgcagagcaaaagttctgctgagtctgcagcaacacgcgcaga

SEQ ID NO: 779466 - DNA, 75 bp, synthetic construct
  source 1..75: mol_type = other DNA
atgcgtgatgcttccgcgtttgatttcgaagaaaatattcgtttaaccaaagaggctgtcgatttcttccatcgc

SEQ ID NO: 779467 - DNA, 75 bp, synthetic construct
  source 1..75: mol_type = other DNA
cagattggttgctctgaacgaacggtcagacgctacctcaaataccctgaaccgccagccagaaaaacccgccac

SEQ ID NO: 779468 - DNA, 75 bp, synthetic construct
  source 1..75: mol_type = other DNA
ggaaaaagctgcaaataatatttacaacacattcgcaggatgcagtaaacgagctagagccagaagctgtttggg

SEQ ID NO: 779469 - DNA, 75 bp, synthetic construct
  source 1..75: mol_type = other DNA
aaaggtaaggttgagcggatggtgaaatacctcaaggagaacttcttcgtccggtaccgcaggttcgacagcttc

SEQ ID NO: 779470 - DNA, 75 bp, synthetic construct
  source 1..75: mol_type = other DNA
gagtcgtggatgggtaagaaattgtttatccggagcggcaaaggcgttcagctcaccccgacgggagagaaatat

SEQ ID NO: 779471 - DNA, 75 bp, synthetic construct
  source 1..75: mol_type = other DNA
cagcaaaaccaccgccgaccgggttcgcgcctggctgctccagcatggagtttccagcgtgccggaaaacaataa

SEQ ID NO: 779472 - DNA, 75 bp, synthetic construct
  source 1..75: mol_type = other DNA
atattattgaaatgcctgaacactttaatatagatactgacttgaatgtaacacacccagcaagatcactagtgg

SEQ ID NO: 779473 - DNA, 75 bp, synthetic construct
  source 1..75: mol_type = other DNA
atccagctattcacagatcaagcttgagcgaagattatgtcgcatttatgcaagagaccaagaattttatagtca

SEQ ID NO: 779474 - DNA, 75 bp, synthetic construct
  source 1..75: mol_type = other DNA
aacccgatccaaagccagacccaaatccaaaaccagaccctactcccgatccaacgccgacacccgttccggaga

SEQ ID NO: 779475 - DNA, 75 bp, synthetic construct
  source 1..75: mol_type = other DNA
ttaggcgcatcacgcattatgcagtggggtggggaagggcgaccgcaatccttaagcagtttctgggatggcttt

SEQ ID NO: 779476 - DNA, 75 bp, synthetic construct
  source 1..75: mol_type = other DNA
aatcaatatactgcggtgccccatgccaaaattatcggtggacgcttcacctttacaccgtttcagtcattagaa

SEQ ID NO: 779477 - DNA, 75 bp, synthetic construct
  source 1..75: mol_type = other DNA
cttcacaccgttccagtcattagaattaggcgcgtcgcgtattatgcagtggggtggggaaggccgaccgcaatc

SEQ ID NO: 779478 - DNA, 75 bp, synthetic construct
  source 1..75: mol_type = other DNA
aatcaatatactgcggtaccccatgctaaaattatcggcggtcgtttcaccttctcaccattccagtctttagaa

SEQ ID NO: 779479 - DNA, 75 bp, synthetic construct
  source 1..75: mol_type = other DNA
gaatcagtcgatcaataaagcattccctcatgctgataccttgaaaggtgtacagctcggttggagcggagatgt

SEQ ID NO: 779480 - DNA, 75 bp, synthetic construct
  source 1..75: mol_type = other DNA
ttagtagtaaatgataacgatctgcgaaacgaccttgcctggctttccgatcgtggggtcatccatctaagcctg

SEQ ID NO: 779481 - DNA, 75 bp, synthetic construct
  source 1..75: mol_type = other DNA
tggtttacgccaaagttaacccggaaaatcagtcgatcaataaagcattcccccatgcggataccttgaaaggtg

SEQ ID NO: 779482 - DNA, 75 bp, synthetic construct
  source 1..75: mol_type = other DNA
aagccttcatcgttcagtctcttgcctgcttcgatactccatcccaggtggttgagctggtcaaaaaagaatttg

SEQ ID NO: 779483 - DNA, 75 bp, synthetic construct
  source 1..75: mol_type = other DNA
aaagcagataaaaaagttgttattttttttcataacatgatcagtgtcagatttttacccaatggaaaacgatga

SEQ ID NO: 779484 - DNA, 75 bp, synthetic construct
  source 1..75: mol_type = other DNA
aatgccaacggcgcctacggcgcggtgaagttctggaaccagtggctctcctttggccaggtaccccagtggtgg

SEQ ID NO: 779485 - DNA, 75 bp, synthetic construct
  source 1..75: mol_type = other DNA
tactgaggataatcagcgatggagcactcgtgtgctttatgcaaaggttaatcctaaagatcaaacaattaacag

SEQ ID NO: 779486 - DNA, 75 bp, synthetic construct
  source 1..75: mol_type = other DNA
ggatgagtcaggttatctgccttctgccaatatgtatctgggcggtgtcgaaggccaccatggctggggtaagga

SEQ ID NO: 779487 - DNA, 75 bp, synthetic construct
  source 1..75: mol_type = other DNA
ctaaaattatcggcggtcgtttcaccttctcaccattccagtctttagaattaggcgcatcgcgtattatgcagt

SEQ ID NO: 779488 - DNA, 75 bp, synthetic construct
  source 1..75: mol_type = other DNA
acccgcagaaagaatgaaagccaggatacagcatcgtgttcctttatcccgacaggccattcacgttctggaaaa

SEQ ID NO: 779489 - DNA, 75 bp, synthetic construct
  source 1..75: mol_type = other DNA
tgagtatagagcgttttctgagcaatatcatcgcgtattcaatcatcctgaatctgagttgagacaaaaaatatc

SEQ ID NO: 779490 - DNA, 75 bp, synthetic construct
  source 1..75: mol_type = other DNA
ggcaaaccgagccgaggcgataaaaaactacgcattgacggcgcagctgatcgaacaggccgcaaaagagtgcgg

SEQ ID NO: 779491 - DNA, 75 bp, synthetic construct
  source 1..75: mol_type = other DNA
catttaggctttggtgcatttcaccgtgcgcatcagggcgtgtatgccgatattcttgctacagaacatttcagt

SEQ ID NO: 779492 - DNA, 75 bp, synthetic construct
  source 1..75: mol_type = other DNA
acaaaattcactttaaaaagggcggatatccgtttccgccgaatcaccagaaaagtgataacagagggcgttgca

SEQ ID NO: 779493 - DNA, 75 bp, synthetic construct
  source 1..75: mol_type = other DNA
tgatgaacgaaggcgagttgctgtatcagggagaaccgacggccctgacacaaaccatggccggacgtagctttc

SEQ ID NO: 779494 - DNA, 75 bp, synthetic construct
  source 1..75: mol_type = other DNA
tcgacttggccgttgagccaggaagagatctcccgggcgctaaaaaaggccaaaccatcctattcttctgaacaa

SEQ ID NO: 779495 - DNA, 75 bp, synthetic construct
  source 1..75: mol_type = other DNA
ttaggcgcatcgcgtattatgcagtggggaggggaagggcgccctgaatcgttcagcagtttctgggacggcttt

SEQ ID NO: 779496 - DNA, 75 bp, synthetic construct
  source 1..75: mol_type = other DNA
ttatcagtcggttcgtctgaatacctcactgtggtacaccaacgctaacaacagcgacagcgatgacgttggggc

SEQ ID NO: 779497 - DNA, 75 bp, synthetic construct
  source 1..75: mol_type = other DNA
ggatgagtctggttatttaccctcggcaaacatgttcctaggtggtgtggaagggcaccacggctgggggaaaga

SEQ ID NO: 779498 - DNA, 75 bp, synthetic construct
  source 1..75: mol_type = other DNA
gaccggcttcctgatgcagcgggcagagcaggcggcgccggaaacctggtggctgcgctgggtaggtccatggca

SEQ ID NO: 779499 - DNA, 75 bp, synthetic construct
  source 1..75: mol_type = other DNA
atgataaaaattgcgcgcattgccgtgactctgggtttgctttcctccctgggagcccaggcttacgcggccggg

SEQ ID NO: 779500 - DNA, 75 bp, synthetic construct
  source 1..75: mol_type = other DNA
tgttgacttacaagatcccattgatgttattcctcaaatgctcgaaaagtgggaaaaaggtgctgacattgtact

SEQ ID NO: 779501 - DNA, 75 bp, synthetic construct
  source 1..75: mol_type = other DNA
ttaattggcattggtgttttaggtgaatatattggcaggatttatcttgaaaccaagcaaaggccaagatacatt

SEQ ID NO: 779502 - DNA, 75 bp, synthetic construct
  source 1..75: mol_type = other DNA
tatatttcttgaacgaggggttaatatatcaataagaatgcaaaaatataatttatcaaataaaccatatattgc

SEQ ID NO: 779503 - DNA, 75 bp, synthetic construct
  source 1..75: mol_type = other DNA
ctggcaatccaggccgcgtcacagaaatggacaatgccgctgagagactggcgaatggcatacaggcaccagaaa

SEQ ID NO: 779504 - DNA, 75 bp, synthetic construct
  source 1..75: mol_type = other DNA
atggtcaaaaatctggagtcggtatctggtgacaaagaccaggtgaacatgcatcaggaaaacacaatgccttcc

SEQ ID NO: 779505 - DNA, 75 bp, synthetic construct
  source 1..75: mol_type = other DNA
caggttatccttctattctggtgtccatactctttcttggtggtgtgcaattaattggcattggtgttttaggtg

SEQ ID NO: 779506 - DNA, 75 bp, synthetic construct
  source 1..75: mol_type = other DNA
gcttattcttgaaaatacatatcaaacagcacaaatatctaatatggtaggaatatcgagtgcttcatatttcat

SEQ ID NO: 779507 - DNA, 75 bp, synthetic construct
  source 1..75: mol_type = other DNA
gttaccccaaacaaaatgggttggctaaagctctgagagagattggccgtatagaacgaacattgtttatgctgg

SEQ ID NO: 779508 - DNA, 75 bp, synthetic construct
  source 1..75: mol_type = other DNA
tataataagaagtttatagagagtgaatctcataaattaatgatggaaatgagcgaggcatttttttatggttta

SEQ ID NO: 779509 - DNA, 75 bp, synthetic construct
  source 1..75: mol_type = other DNA
aagaaataataaaaattaataatgttatgattcataaatacactgtattatatacgtcaaattgtattatagata

SEQ ID NO: 779510 - DNA, 75 bp, synthetic construct
  source 1..75: mol_type = other DNA
taatgcaattgagaatgagtaaggctgcgttattactacttgaaaattcataccagatatctcagatatcaaata

SEQ ID NO: 779511 - DNA, 75 bp, synthetic construct
  source 1..75: mol_type = other DNA
aagagattataaaaattaataatgttagaatacatgagtacactgtattatatacatctaattgtacaatcgatg

SEQ ID NO: 779512 - DNA, 75 bp, synthetic construct
  source 1..75: mol_type = other DNA
tcagcaggactgccagaaagttaaggatgaggcgaaacgccttgaggccgtgctgaatgttgcgtgccggtcggt

SEQ ID NO: 779513 - DNA, 75 bp, synthetic construct
  source 1..75: mol_type = other DNA
attccggctttaatatccttaagggacttctcgccagttccaccagcgacgcgaagcatctgcatgacgcgaaca

SEQ ID NO: 779514 - DNA, 75 bp, synthetic construct
  source 1..75: mol_type = other DNA
gacaaagaaagctgccagtcaatatattaacgctcaaataaacgaaagattgaaatcagcaataggtggtggctc

SEQ ID NO: 779515 - DNA, 75 bp, synthetic construct
  source 1..75: mol_type = other DNA
cgggagctcacagaattcggcgattggcgaaggtgagagcagtcactcagttgttacagttaataatggttacct

SEQ ID NO: 779516 - DNA, 75 bp, synthetic construct
  source 1..75: mol_type = other DNA
cggtgctgctctggacgctggataccggcgactttcccgctgcctaccccatggcggaacacgccctgaaacaca

SEQ ID NO: 779517 - DNA, 75 bp, synthetic construct
  source 1..75: mol_type = other DNA
tgttgcgccatcaggcgcaggccgcaaatcaacaggaaaaccagacctacgccagcggctatgaactgatgctgg

SEQ ID NO: 779518 - DNA, 75 bp, synthetic construct
  source 1..75: mol_type = other DNA
cgggcgtaatgccattgtactggcagacctctcgcccattgccggacgcgctgacggatgccatgaccatatgcg

SEQ ID NO: 779519 - DNA, 75 bp, synthetic construct
  source 1..75: mol_type = other DNA
gtgcgcatcggtgcccccaccggcgtggcctgttcggtgtgccccggcggggggacgtccggccatccggtcaat

SEQ ID NO: 779520 - DNA, 75 bp, synthetic construct
  source 1..75: mol_type = other DNA
gtgcatcaaggcgtaccccggggaataaactgtcagaaacagaaagattaagaatacttgatgtatgcaattctc

SEQ ID NO: 779521 - DNA, 75 bp, synthetic construct
  source 1..75: mol_type = other DNA
aaggtcgtcgctggcccgacagtcatcagatctttcagtcgcgatgaaatcagctgtatcttctctctgcccgta

SEQ ID NO: 779522 - DNA, 75 bp, synthetic construct
  source 1..75: mol_type = other DNA
tagacggttatactctcggtctttatcatgtatttcaacaaaatatcagtgatggactaaatgattcagagcgtc

SEQ ID NO: 779523 - DNA, 75 bp, synthetic construct
  source 1..75: mol_type = other DNA
aggggaaatcactatcgataagtttatagattatctttcctctttgcccagtattaatgctgtacgtaaaaatat

SEQ ID NO: 779524 - DNA, 75 bp, synthetic construct
  source 1..75: mol_type = other DNA
gatatccgcttacagctgcgcgataacacactgatactcagtgataacgacggcagaagcctgtattttgagcac

SEQ ID NO: 779525 - DNA, 75 bp, synthetic construct
  source 1..75: mol_type = other DNA
gatggcaattaataagcagagaaacataaaatcgcacaatgctgaaaaatacagatcatatctaatggggtggga

SEQ ID NO: 779526 - DNA, 75 bp, synthetic construct
  source 1..75: mol_type = other DNA
gacggaaacaacctgcgcataccaggctaagcagcttgcaggccatcagaatgccgatgaagtgatccgacgctc

SEQ ID NO: 779527 - DNA, 75 bp, synthetic construct
  source 1..75: mol_type = other DNA
agcttaaacatgcaggacttaaaggcattccggaaagtatcagagggttaggctaccgtttgggtgataataaat

SEQ ID NO: 779528 - DNA, 75 bp, synthetic construct
  source 1..75: mol_type = other DNA
tgataaagcaaatgcgcaagcaaggtgcgtacattgtcgatattgcgactcaggtgggttgctctgagcgtactg

SEQ ID NO: 779529 - DNA, 75 bp, synthetic construct
  source 1..75: mol_type = other DNA
caggagtttggtggaagagcggtcatacccgcccgtgagcagacgctccactttcgctataacgaaaaaacggga

SEQ ID NO: 779530 - DNA, 75 bp, synthetic construct
  source 1..75: mol_type = other DNA
ctcgataaattggagtttgtagttggcaaagcaaaggaagtggatcgattagaatttggagaccttcttttcaac

SEQ ID NO: 779531 - DNA, 75 bp, synthetic construct
  source 1..75: mol_type = other DNA
ttataaccaggacccggtgaaatttatttccagagcaggcgtacccggtatcggtgcttcatttttcgcattagg

SEQ ID NO: 779532 - DNA, 75 bp, synthetic construct
  source 1..75: mol_type = other DNA
agaacgtcaaggggttatatcgcacactcaagcatcgcgagttttttgagcatctcaaagagcagttgatgaatg

SEQ ID NO: 779533 - DNA, 75 bp, synthetic construct
  source 1..75: mol_type = other DNA
attatagagcatttaggaatagaatatgagagtaactgcggcgaacttagcacaggcgattgccaatctaccaag

SEQ ID NO: 779534 - DNA, 75 bp, synthetic construct
  source 1..75: mol_type = other DNA
ctgggccgcagggtggcaaaacgggtatggcggcgtgaacgggacctgacgggctggatgtcgctgtcacggaaa

SEQ ID NO: 779535 - DNA, 75 bp, synthetic construct
  source 1..75: mol_type = other DNA
gtttagcaagattccagtcagtagaagaaggcgacgatagtaaaaaatcatataaaaggcttcatcgctggagat

SEQ ID NO: 779536 - DNA, 75 bp, synthetic construct
  source 1..75: mol_type = other DNA
aaacatgtgtttactgctagggctgggttagttcgctttaaagctgtagctgaaggggacgatagcaaaaaatct

SEQ ID NO: 779537 - DNA, 75 bp, synthetic construct
  source 1..75: mol_type = other DNA
aaatctatattagagcatttagggataaaagatgaatttgacagcaatgaatcttgtgaatgcgatagccaacct

SEQ ID NO: 779538 - DNA, 75 bp, synthetic construct
  source 1..75: mol_type = other DNA
ctctccgatatggacgcagaaattcaggcgctggaacaacgccttggcaaaacccgccaaatcaaacaaggcatg

SEQ ID NO: 779539 - DNA, 75 bp, synthetic construct
  source 1..75: mol_type = other DNA
tcccgaatttccaggatgatcctgtgattcagtgcattaaagaacaaggattagatcttagctttggaggaacaa

SEQ ID NO: 779540 - DNA, 75 bp, synthetic construct
  source 1..75: mol_type = other DNA
gccagggtgcgctcagctgttggggcaggtaccgtgattgcccgcggggcatctccggtaagcatgggcgtcctg

SEQ ID NO: 779541 - DNA, 75 bp, synthetic construct
  source 1..75: mol_type = other DNA
tcagcggttgtttgggcggttctgctgttcgttttgatggtggtcacaaaagagatgactttttaatggacaaat

SEQ ID NO: 779542 - DNA, 75 bp, synthetic construct
  source 1..75: mol_type = other DNA
ggtaaaaaaagccgcccggcagaatatgaaatggcatgagcagttgatctctcatttcgcggagattttcttccc

SEQ ID NO: 779543 - DNA, 75 bp, synthetic construct
  source 1..75: mol_type = other DNA
gcccgacgccattcaggcggaagtgtttctccatctgacggaaagcctggcgcaaagtgttacgcatatcgctgt

SEQ ID NO: 779544 - DNA, 75 bp, synthetic construct
  source 1..75: mol_type = other DNA
ctgaaaggtcatgcgcaacgcgtgccggtgaaaacaggttcggtcactgaactggtatcgattctcggaaaaaag

SEQ ID NO: 779545 - DNA, 75 bp, synthetic construct
  source 1..75: mol_type = other DNA
cctgtcactatcggtgcaggtggggccggcggcgttagtgcgacgaacggcctcaagggcggtgatagctcgttc

SEQ ID NO: 779546 - DNA, 75 bp, synthetic construct
  source 1..75: mol_type = other DNA
aaaaactgatcgccaaaaaacaggccatcaaaaccgccaccatgcaacaactcctcaccggccgcacccgcctgc

SEQ ID NO: 779547 - DNA, 75 bp, synthetic construct
  source 1..75: mol_type = other DNA
aggcgctggaacaacgccttggcaaaacccgccaaatcaaacaaggcatgatgcaagaactgctcacgggtaaaa

SEQ ID NO: 779548 - DNA, 75 bp, synthetic construct
  source 1..75: mol_type = other DNA
atgatcgtcattcttggttcgctttccagctgcgtgatgtaccagccgcggctggaatacgcgatggcgaaagac

SEQ ID NO: 779549 - DNA, 75 bp, synthetic construct
  source 1..75: mol_type = other DNA
tgataaaaacgcggtgctcgccgcatctccagaacgtgtagattctctggtggcggacgggaagactactgcaac

SEQ ID NO: 779550 - DNA, 75 bp, synthetic construct
  source 1..75: mol_type = other DNA
gaaacgcctggcttcacttggtggagctgccccgaatatggagataacaccacgcaggcgtggagatgtggcaga

SEQ ID NO: 779551 - DNA, 75 bp, synthetic construct
  source 1..75: mol_type = other DNA
acatgaaacgctttgcactgatagctgtgacactcgttgcctttactggttctgctgcaaccgaagaaatcaact

SEQ ID NO: 779552 - DNA, 75 bp, synthetic construct
  source 1..75: mol_type = other DNA
acgagagaataaatccttgaaggtcggacaagcgaaaatttatgtcaatgaagtgtgtgacaagtggtttcgtga

SEQ ID NO: 779553 - DNA, 75 bp, synthetic construct
  source 1..75: mol_type = other DNA
ttcgatctcatcccggagtacgtgattatggaatgtgacaagctcatcgccctgccaccggcagcaaaccagagc

SEQ ID NO: 779554 - DNA, 75 bp, synthetic construct
  source 1..75: mol_type = other DNA
tacatctgaatcactacgaatcgctgctggggcgtgccagcatgatactgggatatgacatcaccgcaggcaaca

SEQ ID NO: 779555 - DNA, 75 bp, synthetic construct
  source 1..75: mol_type = other DNA
atgcaattatctttcccccctgctgatacaggaagtcaatatggcaccaatattactattaatgaaggtgacaga

SEQ ID NO: 779556 - DNA, 75 bp, synthetic construct
  source 1..75: mol_type = other DNA
tatgggggaagcctggactccttcgccagtggcaaactgagcggctttgacatgggttacagcggtatccagttt

SEQ ID NO: 779557 - DNA, 75 bp, synthetic construct
  source 1..75: mol_type = other DNA
gcttagctgttggtattgctttttgggggatttattattactcatatcagaataaaataaaggcagtaatactat

SEQ ID NO: 779558 - DNA, 75 bp, synthetic construct
  source 1..75: mol_type = other DNA
ctttatggtggtgcgttcttattctatgcgggtgcgctagccgtttttcctctgaacattgcacatcctgttttg

SEQ ID NO: 779559 - DNA, 75 bp, synthetic construct
  source 1..75: mol_type = other DNA
cgaatggaccggcgtgccgctcaaccgcctgtcgcagaatgaaatgtcggtcatcaccgacctgccgaaatggct

SEQ ID NO: 779560 - DNA, 75 bp, synthetic construct
  source 1..75: mol_type = other DNA
tggttgatcagatgatagataaggcggcagagctggaaaagtatggcagcgcacttgaaaaaattgttcaggata

SEQ ID NO: 779561 - DNA, 75 bp, synthetic construct
  source 1..75: mol_type = other DNA
tcatgatgaaatgtggtgttcagtccataaacagcctcatggtcaacggtatgggcatatccatgcaactccagg

SEQ ID NO: 779562 - DNA, 75 bp, synthetic construct
  source 1..75: mol_type = other DNA
agatcttgatttatattatcgcttggcagttgatggtcaaattattaaaccatttggagcatttccattactgaa

SEQ ID NO: 779563 - DNA, 75 bp, synthetic construct
  source 1..75: mol_type = other DNA
tacagaaaaactctgttgtcgatctcggaacaaacagttccattaaaaccaatggcgataatgcacacggcctct

SEQ ID NO: 779564 - DNA, 75 bp, synthetic construct
  source 1..75: mol_type = other DNA
cggttcgtatcgcatccatgttcagtgagacgggctcatacacctattcagcacaacttacagtttatggtgcag

SEQ ID NO: 779565 - DNA, 75 bp, synthetic construct
  source 1..75: mol_type = other DNA
ccgcgggactcggggaggttgcgcaatatgaatctgctcgcgctgaattgacggcgattaatccggcctggccga

SEQ ID NO: 779566 - DNA, 75 bp, synthetic construct
  source 1..75: mol_type = other DNA
aacatccacagttattacaacgatcagccggttgattatctcttctggcaaggaatggcgctgcgactgctgggc

SEQ ID NO: 779567 - DNA, 75 bp, synthetic construct
  source 1..75: mol_type = other DNA
taatcgccgatgcccgccccgtcagccgtcatctggtaggcctgaatatcgtgcaggacatttccggcaaggtat

SEQ ID NO: 779568 - DNA, 75 bp, synthetic construct
  source 1..75: mol_type = other DNA
atacgggcggacgttccatgctgcgttactacatccagcccaaacgtaaaatgcgtccgtcaaaaagaacagttc

SEQ ID NO: 779569 - DNA, 75 bp, synthetic construct
  source 1..75: mol_type = other DNA
ataaaacactctccaggaaacccggggcggttcaactgcaaggacagaaatatcgtcttgacgcgaactacaatc

SEQ ID NO: 779570 - DNA, 75 bp, synthetic construct
  source 1..75: mol_type = other DNA
aggcattagcccgcactttgttaggtcgtgccaaattgcttgagagcaaaaacaatccattcaacgggggtgaca

SEQ ID NO: 779571 - DNA, 75 bp, synthetic construct
  source 1..75: mol_type = other DNA
gaacaacggcgttaacgccaacggcactgcgaatggaatgagcatctccctggaagccgggcagaggttcaacct

SEQ ID NO: 779572 - DNA, 75 bp, synthetic construct
  source 1..75: mol_type = other DNA
agaatgagatgactatgaaggcgagtaatggcctcaaatcactacgaatcgctgctggggcgtgccagcatgata

SEQ ID NO: 779573 - DNA, 75 bp, synthetic construct
  source 1..75: mol_type = other DNA
ggcgacatcgccgaagatgacatcacagcggtactctgttttgtgattgaagccgatcagattacctttgaaaca

SEQ ID NO: 779574 - DNA, 75 bp, synthetic construct
  source 1..75: mol_type = other DNA
ataagttgcctgttaatgtcaccagtttaagcagaaaaagcgctaagtatggggtcgctattgctgaagaaatct

SEQ ID NO: 779575 - DNA, 75 bp, synthetic construct
  source 1..75: mol_type = other DNA
aggcattagcccgcactttgttaggtcgtgccaaattgcttgagagcaaaaacaatccattcaaaggagaagaat

SEQ ID NO: 779576 - DNA, 75 bp, synthetic construct
  source 1..75: mol_type = other DNA
gaaggcggcgtactgaccgaagcgattcgccagaaaccgtactcggtggtgctgcttgatgaagtggaaaaagcg

SEQ ID NO: 779577 - DNA, 75 bp, synthetic construct
  source 1..75: mol_type = other DNA
cagataaatgtttatgacggaacccggctggatgcaagggggaatgatgccgttgatggcatgctgaatgtcagc

SEQ ID NO: 779578 - DNA, 75 bp, synthetic construct
  source 1..75: mol_type = other DNA
catcgcctctgttcggcatcgtctggctggcagaccgtgccggagcatcacgccccgctctggcagcaggtcagt

SEQ ID NO: 779579 - DNA, 75 bp, synthetic construct
  source 1..75: mol_type = other DNA
acggcacattgctattaatattttgacgaatgataaggtattcaaggcagggttaagacgtaagatgcgaaaagc

SEQ ID NO: 779580 - DNA, 75 bp, synthetic construct
  source 1..75: mol_type = other DNA
atgaaagaattaaaaaagatcaatagatatataatgtgtttctttttgggatctcgcttagcatatgccgaaaat

SEQ ID NO: 779581 - DNA, 75 bp, synthetic construct
  source 1..75: mol_type = other DNA
attctcagctttatagtggtagcctgttgcttgggacggctaacaatgctgtcgtttctatggatgctaatgatg

SEQ ID NO: 779582 - DNA, 75 bp, synthetic construct
  source 1..75: mol_type = other DNA
gactcttcaaagggggaattaaatatagatggtggtagcactctatatacacagcaattatgggtctctgggaat

SEQ ID NO: 779583 - DNA, 75 bp, synthetic construct
  source 1..75: mol_type = other DNA
ctgagccggtttcgtccgtgtttttccgtcgggccgcacttgcgcttgctgtatcagctgcttttgccagtgcca

SEQ ID NO: 779584 - DNA, 75 bp, synthetic construct
  source 1..75: mol_type = other DNA
cgctatatgcgggtgcatgaaagcatctcattctccaatgacgacctgagcgaagaagagctgaaacagaaggcg

SEQ ID NO: 779585 - DNA, 75 bp, synthetic construct
  source 1..75: mol_type = other DNA
caccgcccactatcggcatcatctggatctggcggaaggtgccgaagccacggtgattgaacattttgtcagcct

SEQ ID NO: 779586 - DNA, 75 bp, synthetic construct
  source 1..75: mol_type = other DNA
ataaagcctttgaggaaaaatttccactgaaagaattaaataatccagagcatgacagttacgcaatgagtgaaa

SEQ ID NO: 779587 - DNA, 75 bp, synthetic construct
  source 1..75: mol_type = other DNA
atcgctggcctacacacagcggcttaaggaagccggattactggcatcaacaggaagtacaggcgactcgtatga

SEQ ID NO: 779588 - DNA, 75 bp, synthetic construct
  source 1..75: mol_type = other DNA
cactggagcaggcagtatgggaccgtcgtccgtctggcactatccatcactgtgataaaggttctctgtatgtat

SEQ ID NO: 779589 - DNA, 75 bp, synthetic construct
  source 1..75: mol_type = other DNA
aaatatcagtgatggactaaatgagtcagaacgtcaggggctgtggacttattcgtctatacaatacatggatta

SEQ ID NO: 779590 - DNA, 75 bp, synthetic construct
  source 1..75: mol_type = other DNA
ttcttgggattatcagaaattatgatctgaaccaattcgatgaactcattgccgtaatatataaccatgatttct

SEQ ID NO: 779591 - DNA, 75 bp, synthetic construct
  source 1..75: mol_type = other DNA
acatgaattagtgaaggaatatggtttttataatgagcaccagaatggttacactttaagaatcagcaatttatt

SEQ ID NO: 779592 - DNA, 75 bp, synthetic construct
  source 1..75: mol_type = other DNA
caagcaacccgtcgcgaccgtgttgtgccgctggttgttgttcagtttgaagaagatggccgtaagaaatgcatc

SEQ ID NO: 779593 - DNA, 75 bp, synthetic construct
  source 1..75: mol_type = other DNA
atgtctgagtttcaggagaaacacaccgtctcgcggctgattggctcccctccaggctacgtcggctacggtgaa

SEQ ID NO: 779594 - DNA, 75 bp, synthetic construct
  source 1..75: mol_type = other DNA
acattgaagtactaaaaatcatctataagtcgaatcacccagcaataacgcatgagattaagagtaaactgatga

SEQ ID NO: 779595 - DNA, 75 bp, synthetic construct
  source 1..75: mol_type = other DNA
atactttaagaataagcaatttattactaaaagacccacgcgtaacagacctcattgagttttttgaaccagaca

SEQ ID NO: 779596 - DNA, 75 bp, synthetic construct
  source 1..75: mol_type = other DNA
ggttctcggacaggggaatagtaccgaagcagaaatgtctgttgagcattctcagctttatagtggcggcctgtt

SEQ ID NO: 779597 - DNA, 75 bp, synthetic construct
  source 1..75: mol_type = other DNA
gttaatattaatggcaccgtcaatattaaagattatttttcggtggctacttgtaatggtcaatctagcacctgc

SEQ ID NO: 779598 - DNA, 75 bp, synthetic construct
  source 1..75: mol_type = other DNA
actcagacagacctgacgctaagcccccagtcatctataaaagtatccgggaatatgtctattgcgcaaggtaat

SEQ ID NO: 779599 - DNA, 75 bp, synthetic construct
  source 1..75: mol_type = other DNA
gccgtcgtcatgacaggtgatgacctgcaggaaagtgaccgtctctaccgctttcaggttccgggacgaccggag

SEQ ID NO: 779600 - DNA, 75 bp, synthetic construct
  source 1..75: mol_type = other DNA
agccagtcgttagtcaccattaatgatgcatcagtttatggtgatggttcattaactttggcaaaaggtaataat

SEQ ID NO: 779601 - DNA, 75 bp, synthetic construct
  source 1..75: mol_type = other DNA
tgtttaaaggagaacgtataaatattggtaatggttcatattcaaaaaattctataagtataactggaaattcca

SEQ ID NO: 779602 - DNA, 75 bp, synthetic construct
  source 1..75: mol_type = other DNA
tggctcgcgtggactacgagacgcgactgatgcgccagcggcagggcatcgcacgagccaaagctgaggggcttt

SEQ ID NO: 779603 - DNA, 75 bp, synthetic construct
  source 1..75: mol_type = other DNA
ataaagactttctcatctgaagtaattgataaatctgacactatgtttgattatttttctaacacattaaataag

SEQ ID NO: 779604 - DNA, 75 bp, synthetic construct
  source 1..75: mol_type = other DNA
gaatcaatcaatctcttttttaaccctaaagccatttgtaataaagataaaaatgaaaatattgaaacatcaatc

SEQ ID NO: 779605 - DNA, 75 bp, synthetic construct
  source 1..75: mol_type = other DNA
gctaccagcttgaatgcgcctgagatagctccggctgtcgctgccactgatgttcagagacaacaggcagactca

SEQ ID NO: 779606 - DNA, 75 bp, synthetic construct
  source 1..75: mol_type = other DNA
cgacactgaaacagaggattcaggataaggggctggtgatcgttgccgttgacctgccaacctcatggcagctac

SEQ ID NO: 779607 - DNA, 75 bp, synthetic construct
  source 1..75: mol_type = other DNA
atgcggatgctggcgatgtcctgcttatcgaaagcattgacaggctaagtcgtcttacacaaaaggagtgggcga

SEQ ID NO: 779608 - DNA, 75 bp, synthetic construct
  source 1..75: mol_type = other DNA
agctgcgcttcgcaaacttgatgctctgctggcgaaaacaaataccccccggtctgaacgccggaaattaatcaa

SEQ ID NO: 779609 - DNA, 75 bp, synthetic construct
  source 1..75: mol_type = other DNA
aaagcaaggtaaagcagttattacagattcgtatggatgaactggcgaaactggtcggtcagtcatcggtgcaaa

SEQ ID NO: 779610 - DNA, 75 bp, synthetic construct
  source 1..75: mol_type = other DNA
ggcaatccaaatgatagccaccttaccaacaaccacgaatgtgctcgaattaactatcatggcaaatgaaatgcc

SEQ ID NO: 779611 - DNA, 75 bp, synthetic construct
  source 1..75: mol_type = other DNA
ttagcatttttatacttttaaatttaataagtgtgatgtatgtttcacaggcccctgatatgtttttagtaatgt

SEQ ID NO: 779612 - DNA, 75 bp, synthetic construct
  source 1..75: mol_type = other DNA
taatccttttgggcatgctgcggcggcaaatcgatatggattaatgagttcgggaactggggatgagatgggagc

SEQ ID NO: 779613 - DNA, 75 bp, synthetic construct
  source 1..75: mol_type = other DNA
tggcgaaacgggtatggcggcgggagcgtgacctgacggggtggatgtcgctgtcgcgtaaaccggaggtgacgt

SEQ ID NO: 779614 - DNA, 75 bp, synthetic construct
  source 1..75: mol_type = other DNA
gaaaaagtatcgggtattgctgaaccgtgttgatacatcagtagcaccggatattgagtggcctgctgtccctgt

SEQ ID NO: 779615 - DNA, 75 bp, synthetic construct
  source 1..75: mol_type = other DNA
tatgccaatcagcacagtaatactcagagtaatcgtgtgggttataaatcggatgggcgcatcagcgggtacagc

SEQ ID NO: 779616 - DNA, 75 bp, synthetic construct
  source 1..75: mol_type = other DNA
cgacactatcagcaacagggactgataaacaaggatcaactggccaatcaaacggcactttattatcagcagcaa

SEQ ID NO: 779617 - DNA, 75 bp, synthetic construct
  source 1..75: mol_type = other DNA
aaaaattattcttactgcttgtcgtttacacccgcaaaaaggtgtcgcaaattcgataaatgctattgaccttat

SEQ ID NO: 779618 - DNA, 75 bp, synthetic construct
  source 1..75: mol_type = other DNA
tcggatacatcgcggccagtgtttggtgtgatcacctacagcatcaacgatgcgcgttcgggcgagttcgacgac

SEQ ID NO: 779619 - DNA, 75 bp, synthetic construct
  source 1..75: mol_type = other DNA
acaagcccggatgcgatatttggggtgatcacgtacaccatcaacgatgctcgttctggcgagttcgacgactgc

SEQ ID NO: 779620 - DNA, 75 bp, synthetic construct
  source 1..75: mol_type = other DNA
tgtcgggaaggatttgacggaggaagagaagaactgcctgggtggtggcagtacgggaagcccgggaggatgggg

SEQ ID NO: 779621 - DNA, 75 bp, synthetic construct
  source 1..75: mol_type = other DNA
tccgttgttagccagtacaatgttacgttgattgatgatcatggaaactatttgagtgaaaaagtgaaaaccgtc

SEQ ID NO: 779622 - DNA, 75 bp, synthetic construct
  source 1..75: mol_type = other DNA
acagagaaaaccgacctcatcccggaaggggttatccgcacggatgatgagcggactcaccggtaccattacgac

SEQ ID NO: 779623 - DNA, 75 bp, synthetic construct
  source 1..75: mol_type = other DNA
aattcaacaccacatgcacatgcacatttaccaggaacaggtagcggtatgaaaggccaaggtccatcccttgat

SEQ ID NO: 779624 - DNA, 75 bp, synthetic construct
  source 1..75: mol_type = other DNA
tgcatcaacacaggaaatgttgacctataagggagcaccacagaatacgccgggcgcctctgttccctggtataa

SEQ ID NO: 779625 - DNA, 75 bp, synthetic construct
  source 1..75: mol_type = other DNA
ccagccagcctccagaaaaaattcacgtcccgttcgtgttgacgccaccggtaactcacgtaaaaggtggcgagg

SEQ ID NO: 779626 - DNA, 75 bp, synthetic construct
  source 1..75: mol_type = other DNA
ggcgaacactctacctaaagatcgcgaaagtctgttcttccttaatgtactggatattccacctaatagtgagaa

SEQ ID NO: 779627 - DNA, 75 bp, synthetic construct
  source 1..75: mol_type = other DNA
agcggggcctgccgctggcgctcatcagcacggaaggggcaacagcgtggtgcgcagaatatgatgaatggggta

SEQ ID NO: 779628 - DNA, 75 bp, synthetic construct
  source 1..75: mol_type = other DNA
ggcaatgactcaacgactagaatttggcaaagccgacattaactatctggcaaacctgtgccataactgcggcgc

SEQ ID NO: 779629 - DNA, 75 bp, synthetic construct
  source 1..75: mol_type = other DNA
atgaggcagcttgaaaagttgattatcgaggccaaaattctcaccgaaccagaggctgaagtcgggcgggtgatg

SEQ ID NO: 779630 - DNA, 75 bp, synthetic construct
  source 1..75: mol_type = other DNA
atggggtgttttctcctttctatggtgttcgaaggggaaagaaacctgaggatgttgattatctgggccgcagcg

SEQ ID NO: 779631 - DNA, 75 bp, synthetic construct
  source 1..75: mol_type = other DNA
agccgatcaaactgtcccccagagtggcggcgttctcaactgcggaaatcaactcatggctggaggccaaaaaat

SEQ ID NO: 779632 - DNA, 75 bp, synthetic construct
  source 1..75: mol_type = other DNA
tgcatctacaaaatatggtttttatgctgatactaagttcggtggcgaagcgataattggaactggtgggggagt

SEQ ID NO: 779633 - DNA, 75 bp, synthetic construct
  source 1..75: mol_type = other DNA
gctggcactggtctttagtctgatcctctttttactcctcgcgatggggctaaagggatcgctactccatccgcc

SEQ ID NO: 779634 - DNA, 75 bp, synthetic construct
  source 1..75: mol_type = other DNA
agatgtatgaagtgtacaacaacggctatcccacagcttatggcaatgttctgcatctgaaaggcgcggcagcat

SEQ ID NO: 779635 - DNA, 75 bp, synthetic construct
  source 1..75: mol_type = other DNA
cgttttgtcaggtatttacgttcaggaaacgggaagaagttcttcggataacatcggcggcgtgtattacaaaca

SEQ ID NO: 779636 - DNA, 75 bp, synthetic construct
  source 1..75: mol_type = other DNA
gagacaatgacgaggcggaatggtctgaatgggcacaggtttttacctcaaaagacagtttcaacgcagcaactg

SEQ ID NO: 779637 - DNA, 75 bp, synthetic construct
  source 1..75: mol_type = other DNA
gcgacaatgatgagtttgctggtttttgccggttatgctcaattcgccaccttagagctttggaccgatcaggtt

SEQ ID NO: 779638 - DNA, 75 bp, synthetic construct
  source 1..75: mol_type = other DNA
tcaggtggttacagcagctaatgaatccgtgagtgcaatgcgacgtgaaatgtcccgttatacgtggaagtctgc

SEQ ID NO: 779639 - DNA, 75 bp, synthetic construct
  source 1..75: mol_type = other DNA
gctccggtttatattcgctcaaggcgtgataccaccgatgcagtctggtctgaatgggcgcaggtgtttacatca

SEQ ID NO: 779640 - DNA, 75 bp, synthetic construct
  source 1..75: mol_type = other DNA
ggaaggggcaacagcgtggtgcgcagaatatgatgaatggggcaacctgctgaatgaagagaacccgcatcagct

SEQ ID NO: 779641 - DNA, 75 bp, synthetic construct
  source 1..75: mol_type = other DNA
ttaaggaatcattaaaaaatatccaagaaaataaaagtatgatgtatttatactcgtttgtattgattctttcct

SEQ ID NO: 779642 - DNA, 75 bp, synthetic construct
  source 1..75: mol_type = other DNA
gcaaaaacccgctgcttcaggatgtggctgtcggctggttgcagaaataccgcaccgacgcgcctgagcgggtga

SEQ ID NO: 779643 - DNA, 75 bp, synthetic construct
  source 1..75: mol_type = other DNA
tgtatggatatcaattgaatccgatatcagacatcgaccccctgggtttatatatgtgggaggatgcaaaatcgg

SEQ ID NO: 779644 - DNA, 75 bp, synthetic construct
  source 1..75: mol_type = other DNA
tatgaccgtcacggcaggctgacagagaaaaccgacctcatcccggaaggggttatccgcacggatgatgagcgg

SEQ ID NO: 779645 - DNA, 75 bp, synthetic construct
  source 1..75: mol_type = other DNA
aaaagaagttgataacgtttacttattaaatttaaatgaattactaaaaaaaaatggaattgatgattatagcgt

SEQ ID NO: 779646 - DNA, 75 bp, synthetic construct
  source 1..75: mol_type = other DNA
tctcattgctaacaaacatcatgtattttttcctcacgatgacatcagttactacagcaaagtcaatgagtaaaa

SEQ ID NO: 779647 - DNA, 75 bp, synthetic construct
  source 1..75: mol_type = other DNA
cagttgccatacggaataataatctttttaataaaaggattatttacattaatggtataccatttaaagcgtata

SEQ ID NO: 779648 - DNA, 75 bp, synthetic construct
  source 1..75: mol_type = other DNA
ggctttgacggccggacgcaacgttaccagtatgacctgaccggaaaactcacgcagagtgaagatgaggggctt

SEQ ID NO: 779649 - DNA, 75 bp, synthetic construct
  source 1..75: mol_type = other DNA
tatgagttgtttgatgaacaaataaaaaaaaataagattaatttgatactaaaacaaaatattaataatattcct

SEQ ID NO: 779650 - DNA, 75 bp, synthetic construct
  source 1..75: mol_type = other DNA
aaacccgcaaaacagaaaatgaccgaaattctgtctgatgagttttatgctgccgaaaagcgagtcagggggtga

SEQ ID NO: 779651 - DNA, 75 bp, synthetic construct
  source 1..75: mol_type = other DNA
cgtatgccagaaccgatgcactgttgttctggctgggtattgatttctcggcaatcatgtttggccctgtgaagt

SEQ ID NO: 779652 - DNA, 75 bp, synthetic construct
  source 1..75: mol_type = other DNA
tgttttaaggggctgcgttttacggatgacaaatatccttttcatcgtgatttatggcgaaaaccaactgcgtcg

SEQ ID NO: 779653 - DNA, 75 bp, synthetic construct
  source 1..75: mol_type = other DNA
agatcatcggggtaaaacggtttatgacgtggcttccggcgacgcgttatttatttctgaactcggctcattacc

SEQ ID NO: 779654 - DNA, 75 bp, synthetic construct
  source 1..75: mol_type = other DNA
catcttgatgatgctttctttcgtggctataaaaatcttgaacctgaagcgaaagcacagttaagaaaaatattg

SEQ ID NO: 779655 - DNA, 75 bp, synthetic construct
  source 1..75: mol_type = other DNA
tggaagtcagaacaaaccgtcatataccgcgaacctggaacgccagcggaacactgactggcgaaaccagagtgg

SEQ ID NO: 779656 - DNA, 75 bp, synthetic construct
  source 1..75: mol_type = other DNA
aactatatcataacatttcgtatgcgattctatgttcactcgccttggtagttttaacttttatacattcaactc

SEQ ID NO: 779657 - DNA, 75 bp, synthetic construct
  source 1..75: mol_type = other DNA
tctcactgttggagcttattttagtattgggtgttgggacaatggtttcttttatgaaatttcaggatatgagaa

SEQ ID NO: 779658 - DNA, 75 bp, synthetic construct
  source 1..75: mol_type = other DNA
actgcgccgagttacaccattgcaaatgccgagtacaacaacgtcggtgacgccctggatgcgctcgacgataac

SEQ ID NO: 779659 - DNA, 75 bp, synthetic construct
  source 1..75: mol_type = other DNA
cagctctatgacaccagcaagtacattgccgatactctgggtggtaacgcagaagtcaatgctgacggcacaatc

SEQ ID NO: 779660 - DNA, 75 bp, synthetic construct
  source 1..75: mol_type = other DNA
atcttgatccacataacgaaggtaccacggtattcctccgtacgcttgatgcgctattgatgtcattacccgaaa

SEQ ID NO: 779661 - DNA, 75 bp, synthetic construct
  source 1..75: mol_type = other DNA
aagaagagagtattgctgatgttattgcatttctagtgagaaaggaaggcggatttggataccctcagatggatc

SEQ ID NO: 779662 - DNA, 75 bp, synthetic construct
  source 1..75: mol_type = other DNA
aatatcagagtgagtatcagacagatagataacatttcgaagaataatgttgactttcaccttgttatggggctc

SEQ ID NO: 779663 - DNA, 75 bp, synthetic construct
  source 1..75: mol_type = other DNA
agaccagacatgcgtacaacgcgcagggactggcgaaccgctgtataccggacagcctgcccgccgtggaatggc

SEQ ID NO: 779664 - DNA, 75 bp, synthetic construct
  source 1..75: mol_type = other DNA
gtggcgcacgtattcggtgaacgcacgttggccatgctggagcgtcttccgggcctgctgtcggcctttgaggtc

SEQ ID NO: 779665 - DNA, 75 bp, synthetic construct
  source 1..75: mol_type = other DNA
tcgttgattttcttcaggctaaccagaccgtaacgccgcgtcaggttcagaaccttctgggatgcgactgcaaga

SEQ ID NO: 779666 - DNA, 75 bp, synthetic construct
  source 1..75: mol_type = other DNA
attcgtcgcctccgagtgaatgaaaatcggaacggttaccaaagccttattcgcgctagccgtgatgccgatagc

SEQ ID NO: 779667 - DNA, 75 bp, synthetic construct
  source 1..75: mol_type = other DNA
tccccgccgcacaatgacagaggccgatattgttaactttgcttgcctcagcggcgatcatttctatgcacatat

SEQ ID NO: 779668 - DNA, 75 bp, synthetic construct
  source 1..75: mol_type = other DNA
cgaacaggctggcaaatgcccacacaattaatggtattccctttgacgggacgcaggatatcactatctcatcag

SEQ ID NO: 779669 - DNA, 75 bp, synthetic construct
  source 1..75: mol_type = other DNA
ctgagtgaaaaagagcgtttctatgctctttctgcgcaaacaggcgcaacgcgggcagacagttgggttgatatt

SEQ ID NO: 779670 - DNA, 75 bp, synthetic construct
  source 1..75: mol_type = other DNA
agaaaaaccaacaggtgtggtggaatgggcggtagaggtattcaatcagcatcaaaccccggtggcgctgtattc

SEQ ID NO: 779671 - DNA, 75 bp, synthetic construct
  source 1..75: mol_type = other DNA
tcgggcttgatgatggctctttctggcctgtactggaaggtatcccggcaacagagatgttcaacgtgattccac

SEQ ID NO: 779672 - DNA, 75 bp, synthetic construct
  source 1..75: mol_type = other DNA
tatatcgcaaaatttgaagaagcggtttacgtattgcattgttttcaaaagaaaacacagactaccagtcaatcg

SEQ ID NO: 779673 - DNA, 75 bp, synthetic construct
  source 1..75: mol_type = other DNA
atttttcaacaactggcgcaggagccgcatgacgttgccgaccctatttacgccatgctcgccacatttgaccgt

SEQ ID NO: 779674 - DNA, 75 bp, synthetic construct
  source 1..75: mol_type = other DNA
ggcggcggcacggctgaccagatcatcggggatgcgccattggtcggcgtcgatccgctcgacgataccggcccg

SEQ ID NO: 779675 - DNA, 75 bp, synthetic construct
  source 1..75: mol_type = other DNA
atgcgcttttacatgaaaagtttatgggatttgatttgccgttataaggcggttttttctgatgtctggaaaatt

SEQ ID NO: 779676 - DNA, 75 bp, synthetic construct
  source 1..75: mol_type = other DNA
ggagaagataatgcgggaggtgaacattttcagagggttagctcattaataaaagagcaattcatgacatggcag

SEQ ID NO: 779677 - DNA, 75 bp, synthetic construct
  source 1..75: mol_type = other DNA
tacaagctcggtattcagttgtatgtcacagtgcgtaagacctcaatgtaaggaggtagtggcatgtattggcag

SEQ ID NO: 779678 - DNA, 75 bp, synthetic construct
  source 1..75: mol_type = other DNA
gcaaacgggacagcggaaggttccattattaatgggtgttcacaggtagttaatgagggcggtctggctgaaaac

SEQ ID NO: 779679 - DNA, 75 bp, synthetic construct
  source 1..75: mol_type = other DNA
ggcggcatgggcagccggtggccggacggtggtggccctgaaactcaccagtacggtaagcaggcgtattgtgct

SEQ ID NO: 779680 - DNA, 75 bp, synthetic construct
  source 1..75: mol_type = other DNA
ctgtatgtggtgacggcaggccgcccggagaaggcctttgtggcagagcctgtggcaccgagcaggacgggcggg

SEQ ID NO: 779681 - DNA, 75 bp, synthetic construct
  source 1..75: mol_type = other DNA
atgaataaccgaccaatgaagggatacggtaatcaaacccacgcagaacgcttccgcatgctggatgcaccagca

SEQ ID NO: 779682 - DNA, 75 bp, synthetic construct
  source 1..75: mol_type = other DNA
atgctggatgcaccagcactctctccgctgcctctggagccttatgaatacacggaatacaaagccgtgaaggtt

SEQ ID NO: 779683 - DNA, 75 bp, synthetic construct
  source 1..75: mol_type = other DNA
cggtagcacttcgcgaaacccgaccaggttcaggaagagcaggtaattttaaagcacttgcgacattcaatttca

SEQ ID NO: 779684 - DNA, 75 bp, synthetic construct
  source 1..75: mol_type = other DNA
aaaaaaaattcctgttacagctggaatgactgttatggcagaaataaaaacaggagtgcgtagtgttatcagcta

SEQ ID NO: 779685 - DNA, 75 bp, synthetic construct
  source 1..75: mol_type = other DNA
tttctttatcacaaactcacatacctaaagaaatagaatatattgaagctaatattaaaagagatatgactgaat

SEQ ID NO: 779686 - DNA, 75 bp, synthetic construct
  source 1..75: mol_type = other DNA
ctggttcagaacgcagaaaacgccaatgaatatctctcggtgcgtcatcagggtctgttgaccagcattcaggcc

SEQ ID NO: 779687 - DNA, 75 bp, synthetic construct
  source 1..75: mol_type = other DNA
aaacaaaaaatagcctgatgcaggcagcgaatgagcatattgcgccacttcaggatgctgtggatctggagatcg

SEQ ID NO: 779688 - DNA, 75 bp, synthetic construct
  source 1..75: mol_type = other DNA
atacctggcattacacgactttggcatgatccagaacaaaattacgttatcgtcgggagtttggctccccttcaa

SEQ ID NO: 779689 - DNA, 75 bp, synthetic construct
  source 1..75: mol_type = other DNA
ccaatggtttttgaacgtgttgatgagacttgtattgccgatgttgtttctgagtggacaggtattcccttaggt

SEQ ID NO: 779690 - DNA, 75 bp, synthetic construct
  source 1..75: mol_type = other DNA
tcaacatattttaaaggagatagaaaaaaaagctaaaagtattgttttattcatagatgaagctcatatgttagt

SEQ ID NO: 779691 - DNA, 75 bp, synthetic construct
  source 1..75: mol_type = other DNA
ttgaaattcttttcgaccgccagagcacaaaaaacctcaaatcaggcacacttcaggcgctacagaatgaaatcg

SEQ ID NO: 779692 - DNA, 75 bp, synthetic construct
  source 1..75: mol_type = other DNA
actctatgtcacgccggagcgcgcgcagcaggtggattttctgccttatatgaaaaccggcggctctttattggt

SEQ ID NO: 779693 - DNA, 75 bp, synthetic construct
  source 1..75: mol_type = other DNA
taaatatggcgatgcaaatatcaatgattattatagagacttagaaataaaacactcacaaccccaaaatagagc

SEQ ID NO: 779694 - DNA, 75 bp, synthetic construct
  source 1..75: mol_type = other DNA
cgttatcattatgacctgaccggaaaactcacgcagagtgaagatgaggggcttgtcatcctctggtactacgat

SEQ ID NO: 779695 - DNA, 75 bp, synthetic construct
  source 1..75: mol_type = other DNA
tgggtggctatcagatcagcattccgcaaaagggcgtggtggataaacgcggtaaacgtaaaaatcgaccagccc

SEQ ID NO: 779696 - DNA, 75 bp, synthetic construct
  source 1..75: mol_type = other DNA
tagggagtgaaaaagctaaggcgggtattatggaaaaaatcaatcataaaacacctgaggagatatatgaggcgt

SEQ ID NO: 779697 - DNA, 75 bp, synthetic construct
  source 1..75: mol_type = other DNA
gttgtttctggttatgtttttgaggttcagacctcgcagtctgacggctccggcattcttttagcggctaaaatt

SEQ ID NO: 779698 - DNA, 75 bp, synthetic construct
  source 1..75: mol_type = other DNA
ggtgccgatgaattcgctaaaaaatacggcttcgatgatgcaaaccatatgattaacaacgtggtgatgcaggca

SEQ ID NO: 779699 - DNA, 75 bp, synthetic construct
  source 1..75: mol_type = other DNA
ctatcgccagataaattttccagaagcgatttaagaaaagaaatcggcttagcagaaaatgatgttgtggtatgt

SEQ ID NO: 779700 - DNA, 75 bp, synthetic construct
  source 1..75: mol_type = other DNA
gctaaaaaatttctttagcggagctgagatactgttaaatggtaatgacggcacggttcaactcaaaacaggtgc

SEQ ID NO: 779701 - DNA, 75 bp, synthetic construct
  source 1..75: mol_type = other DNA
gtggggttccagtactcgacaaaacgtttttgaggttggcacgtctgctgcgtatctgttttatgcgcaaaaaac

SEQ ID NO: 779702 - DNA, 75 bp, synthetic construct
  source 1..75: mol_type = other DNA
tccggtggtggaagtttttcactgtcaacggaggctgccatcatggctacgatcccagcccttactcaacctgaa

SEQ ID NO: 779703 - DNA, 75 bp, synthetic construct
  source 1..75: mol_type = other DNA
actagttgtattgatgaggtttcttccgccgatgttgttgttctgattattgggtcccgttttggtgggaaagta

SEQ ID NO: 779704 - DNA, 75 bp, synthetic construct
  source 1..75: mol_type = other DNA
atgaagctggtgtttaatgccaatggcgttctgacctcaaatccaacagagaatattaccactggcgcaattaac

SEQ ID NO: 779705 - DNA, 75 bp, synthetic construct
  source 1..75: mol_type = other DNA
tcgaatctcgcttaaacgcattttgggagatggtggagaaagaagacccagcacacgctgcaagcccttacctga

SEQ ID NO: 779706 - DNA, 75 bp, synthetic construct
  source 1..75: mol_type = other DNA
ctgccaaggcattaattctcagtttgatagccttttcttcaaccttgaacctctttttcaggtcttcgagttctt

SEQ ID NO: 779707 - DNA, 75 bp, synthetic construct
  source 1..75: mol_type = other DNA
cttcttctccaagcgtcacgacgatgtgctgaaaaagatccgtactctggattgttcccctgagttttgtgcccg

SEQ ID NO: 779708 - DNA, 75 bp, synthetic construct
  source 1..75: mol_type = other DNA
gacgacgcgttcgtcaccagctgtgatatttctcttaataaagcgtataccgcctgctgtctgcggcaggggacc

SEQ ID NO: 779709 - DNA, 75 bp, synthetic construct
  source 1..75: mol_type = other DNA
caaataactattagcaaagatttagaagaaaatgcagtattaacagagtcaatacttactgaaattaaatcttac

SEQ ID NO: 779710 - DNA, 75 bp, synthetic construct
  source 1..75: mol_type = other DNA
ggaatttgatgaggctcattcaatattagaaagtaaaaggcaggattctttaagtttcattgagagagctctgag

SEQ ID NO: 779711 - DNA, 75 bp, synthetic construct
  source 1..75: mol_type = other DNA
ccattttttactttggaatttggtaacgagatagacttaagaagccgttcacttcttgaaatgcttaatttgaat

SEQ ID NO: 779712 - DNA, 75 bp, synthetic construct
  source 1..75: mol_type = other DNA
tcatacggcatgacgcttgatcatggtacgttatcaacgacgcgtagaaggattacaatttctggcggaaccgta

SEQ ID NO: 779713 - DNA, 75 bp, synthetic construct
  source 1..75: mol_type = other DNA
agcggaccttcggaagacttcgagcaatcgccagctcaaaagacggtctggcagtgatggttatcatcgacagct

SEQ ID NO: 779714 - DNA, 75 bp, synthetic construct
  source 1..75: mol_type = other DNA
caaattttgattttgacgtcactgctgcatcctatcttaatcctcttctgcagttctcccggtcaggtgaaatcc

SEQ ID NO: 779715 - DNA, 75 bp, synthetic construct
  source 1..75: mol_type = other DNA
tcgatcgcatcattagcctgcttaaaacagaaaatcgaggttgtccggcaagagataaaagatcatgtgagaagt

SEQ ID NO: 779716 - DNA, 75 bp, synthetic construct
  source 1..75: mol_type = other DNA
gacagcctgcaggcctggctggactactcgaaaacccagcgcgagcagaacaaatacggcctgctcgccaagttt

SEQ ID NO: 779717 - DNA, 66 bp, synthetic construct
  source 1..66: mol_type = other DNA
atggcaggctctgttcggattgtcggcaaagtacgctttgtttatgccagatgcgacgctgacgcg

SEQ ID NO: 779718 - DNA, 75 bp, synthetic construct
  source 1..75: mol_type = other DNA
tgaaacggatgctgcgtattaccctgatgcactgaagaaactggaagcggcggcggatgaggctgtgcgcagggc

SEQ ID NO: 779719 - DNA, 75 bp, synthetic construct
  source 1..75: mol_type = other DNA
tgcaatgggagtaactctagaagaccttaaaactcggctcaagtgctcgaaatgtggtaaacgtgggtccaaagt

SEQ ID NO: 779720 - DNA, 75 bp, synthetic construct
  source 1..75: mol_type = other DNA
catggcctccggacctggctgagtttgtggcgctgatttcggagagcggggcaaatccttttggcctgacggtgg

SEQ ID NO: 779721 - DNA, 75 bp, synthetic construct
  source 1..75: mol_type = other DNA
gcatcgccgaagtgcccgcaagggccaacgccaattgaattactgaaacaggaatacgagcgccggaaggcggct

SEQ ID NO: 779722 - DNA, 75 bp, synthetic construct
  source 1..75: mol_type = other DNA
gtacatgatgaacgtgttattgcaactaaagaagttaaagatcgtaagattgtttataacttctataaagaagcc

SEQ ID NO: 779723 - DNA, 75 bp, synthetic construct
  source 1..75: mol_type = other DNA
tggccgattgaagtcaccgccgaagatgtcaaaggcaatttgtcgaatcgtgaacagagcatggtggtcgttcag

SEQ ID NO: 779724 - DNA, 75 bp, synthetic construct
  source 1..75: mol_type = other DNA
atgttaatggtctggcgacttttgatctgaaaagtagtaagcaggaagacaacacggttgaagtcacccttgaaa

SEQ ID NO: 779725 - DNA, 75 bp, synthetic construct
  source 1..75: mol_type = other DNA
tggctggagttttgaccggaatacttttttctcgttttctgtcgagtatgttaagtgaaatctggggctggaagt

SEQ ID NO: 779726 - DNA, 75 bp, synthetic construct
  source 1..75: mol_type = other DNA
atctcatccactgagggaagcacccacgaatatcttaaagataatgcaaactatatttctcctgatgatattaag

SEQ ID NO: 779727 - DNA, 69 bp, synthetic construct
  source 1..69: mol_type = other DNA
atggctgaacacgatattacgccagaagtcaccatttccaaaacacagcgccgctgtaccgtgggttat

SEQ ID NO: 779728 - DNA, 75 bp, synthetic construct
  source 1..75: mol_type = other DNA
atgtttgggctttttaagaaaaaggcaaaagcggaaaggtgttatgatgtaacacgcattcaatacgagctggtt

SEQ ID NO: 779729 - DNA, 75 bp, synthetic construct
  source 1..75: mol_type = other DNA
tggtcaggttactgaagctgtcctgacccaggatggtcctgtactggagaattttactgcaggacaaagtggcac

SEQ ID NO: 779730 - DNA, 75 bp, synthetic construct
  source 1..75: mol_type = other DNA
atcagcacaaatgtagaacaatataattacaatgggattaatggttctgatattatttcaattaaaaactcgttg

SEQ ID NO: 779731 - DNA, 75 bp, synthetic construct
  source 1..75: mol_type = other DNA
ttcgaatcagacaactggaaaatcaactgggtgtgaaccttttcacccgccacagaaacaatatccgtttaaccg

SEQ ID NO: 779732 - DNA, 75 bp, synthetic construct
  source 1..75: mol_type = other DNA
cgtctttccctttaacagtcccatcatgttttattccttttacagccccgtccgggctgtatgttttcaccagct

SEQ ID NO: 779733 - DNA, 75 bp, synthetic construct
  source 1..75: mol_type = other DNA
atctgcttgagtgcaggatcaaggaaagatcgtttcaactctgccaagttcttctgctgggattccggtaagacg

SEQ ID NO: 779734 - DNA, 75 bp, synthetic construct
  source 1..75: mol_type = other DNA
caagttcgacgcttggcgcgctttctgctcctacaacgtggccgggtgcgaacgctcggctgcttgggttaggtg

SEQ ID NO: 779735 - DNA, 75 bp, synthetic construct
  source 1..75: mol_type = other DNA
acccgttccgatgatgctcaagctaaccgtgttgtatcagcccaacagcgggaacgtgggacagtacaatcgtcg

SEQ ID NO: 779736 - DNA, 75 bp, synthetic construct
  source 1..75: mol_type = other DNA
acgctggcacaagtacccggcagcgccgatgacgggcgctatatcctcaagctgaactacagcggcacaatgaat

SEQ ID NO: 779737 - DNA, 75 bp, synthetic construct
  source 1..75: mol_type = other DNA
gcaaggggcaccgaatttctcctggagtgccgcgcatttgtttatgttgtataacgattttttccgtaagcaata

SEQ ID NO: 779738 - DNA, 75 bp, synthetic construct
  source 1..75: mol_type = other DNA
tgggcgtattcaaattttttggtgggtacgcgtttggaatggagataggtagctttaactcattattcaccatga

SEQ ID NO: 779739 - DNA, 75 bp, synthetic construct
  source 1..75: mol_type = other DNA
tatatttattgctgagatcatatcatttatattcattaagcttggtggatttaacctgccaggcataaccaaacc

SEQ ID NO: 779740 - DNA, 75 bp, synthetic construct
  source 1..75: mol_type = other DNA
cgtagttctaataactatctgggtgctgcaaggaatttggctgcgcgacacgcctctggcgaatatctgatgttt

SEQ ID NO: 779741 - DNA, 75 bp, synthetic construct
  source 1..75: mol_type = other DNA
tatgagtacagcgccgcaggcgacctgacagcaacggtatcaccggacggtaaacgcagcaccatcgaatatgat

SEQ ID NO: 779742 - DNA, 75 bp, synthetic construct
  source 1..75: mol_type = other DNA
cctgagcgaaggccaccgtgtcgctgtccactacggctacgacgataagggccgcctgacgggcgaacggcagac

SEQ ID NO: 779743 - DNA, 75 bp, synthetic construct
  source 1..75: mol_type = other DNA
actggggatcatgtcttttcatcaagattgggaagggcgaacaggaaatccaaaaggtcaaatttgggttttatg

SEQ ID NO: 779744 - DNA, 75 bp, synthetic construct
  source 1..75: mol_type = other DNA
gatgccgccgtctttggttttatcgacaaagaacagctggataaatatgttgcaagcggcggcaaacgtagcgac

SEQ ID NO: 779745 - DNA, 75 bp, synthetic construct
  source 1..75: mol_type = other DNA
aaaagggtctggagtacattcctaatatcgatcgtatgatccgtgagaaagaatgtcgggagctaaccactcttg

SEQ ID NO: 779746 - DNA, 75 bp, synthetic construct
  source 1..75: mol_type = other DNA
taatctctccataagccggcaaggaagcaacggcgatgacagctgctcagaaattggcaaatttggtttattgat

SEQ ID NO: 779747 - DNA, 75 bp, synthetic construct
  source 1..75: mol_type = other DNA
cccaggtgatattttatttgtaccacgaaatgatgatcttaaagttttcgtgatgggggaggttggtaaacaatc

SEQ ID NO: 779748 - DNA, 75 bp, synthetic construct
  source 1..75: mol_type = other DNA
agtaccgtagcgccagcgacactggtaactgggttaactctgacggtaccattttctatccatatattggtaagg

SEQ ID NO: 779749 - DNA, 75 bp, synthetic construct
  source 1..75: mol_type = other DNA
cgcgtgatatcacaacttgttccaacaatttctggtgttcatgacatgacagaaacgggtaaatttattagaact

SEQ ID NO: 779750 - DNA, 75 bp, synthetic construct
  source 1..75: mol_type = other DNA
ttatgggcgaggttggtaaacaaagtacattgaaaatggatcgcagcggaatgactgttgctgaagctttgggaa

SEQ ID NO: 779751 - DNA, 75 bp, synthetic construct
  source 1..75: mol_type = other DNA
cggcgttagcattggcaattgggtttttatcgggttgtacaatcatccctggtcagggattaaatagtctgcgta

SEQ ID NO: 779752 - DNA, 75 bp, synthetic construct
  source 1..75: mol_type = other DNA
cggcattagcattggcgattggttttttatctggttgtacaatcatccctggtcaggaattaaacattctgcgta

SEQ ID NO: 779753 - DNA, 75 bp, synthetic construct
  source 1..75: mol_type = other DNA
gggtgcggacggtgtggaggatggatgaccagcagcagtgggaagaccgggcgcgggcgaacgtggacgtgctgg

SEQ ID NO: 779754 - DNA, 75 bp, synthetic construct
  source 1..75: mol_type = other DNA
atagcgcaacgctaactgcaacggtcaaagatcagttcgacaatgaggtgaacaatcttccggtaacattcagca

SEQ ID NO: 779755 - DNA, 75 bp, synthetic construct
  source 1..75: mol_type = other DNA
gatccgtcgaatcatccggtggcggggataacggtcaacttcaccatgccacaggacgttgcggcaaactttacc

SEQ ID NO: 779756 - DNA, 75 bp, synthetic construct
  source 1..75: mol_type = other DNA
cggaaaagatacaaaggtatctttgtacgcattaatgcagaaaggggatttgacagagaatcatttactctttcc

SEQ ID NO: 779757 - DNA, 75 bp, synthetic construct
  source 1..75: mol_type = other DNA
gtatacccgatgacgccgggcctgatcgaccaactccgtccaaagactgtactcgctcgtccaaacccacaactg

SEQ ID NO: 779758 - DNA, 75 bp, synthetic construct
  source 1..75: mol_type = other DNA
gcctgttgaacttctacgacgttaacggacgcagcaatcccggggtgaatctcgaactgcgtccttcagtggcgc

SEQ ID NO: 779759 - DNA, 75 bp, synthetic construct
  source 1..75: mol_type = other DNA
cggcattagcgttggcaattgggtttttatcgggttgtaccattattccaggacaaggattaaatagtctgcgta

SEQ ID NO: 779760 - DNA, 75 bp, synthetic construct
  source 1..75: mol_type = other DNA
aatgtgtatccgatgacgccgggtctggtcgaccagctccgtccggaaaccgttctggcgaaacctaaccctcag

SEQ ID NO: 779761 - DNA, 75 bp, synthetic construct
  source 1..75: mol_type = other DNA
taccactgctccaatagttcgttggaacagagtgatatctcagttagttccgactatatctggcgttcatgatat

SEQ ID NO: 779762 - DNA, 75 bp, synthetic construct
  source 1..75: mol_type = other DNA
acaggcgaagtttcgaaatcaggtcaacaaccgattacgaatatacctttaacggttatggatgcaatcaatgct

SEQ ID NO: 779763 - DNA, 75 bp, synthetic construct
  source 1..75: mol_type = other DNA
tcatgggagaggtcggtaagcaaagtacattgaaaatggaccgcagcggtatgacccttgcagaggcgcttggta

SEQ ID NO: 779764 - DNA, 75 bp, synthetic construct
  source 1..75: mol_type = other DNA
ttcaggtagctggaaaaacagtaagtcaagtacgacaagatattacaagccgattaactacatatattgaaagcc

SEQ ID NO: 779765 - DNA, 75 bp, synthetic construct
  source 1..75: mol_type = other DNA
aacgactgcacctcttgttcgttggaatcgtgttatatcacagctcgtacctacaatatcaggtgttcatgatat

SEQ ID NO: 779766 - DNA, 75 bp, synthetic construct
  source 1..75: mol_type = other DNA
accccgcgcctgattgaccaattacgcccacgcccgaatgtagcgcgccccaatatgacgctggaaagcgagatc

SEQ ID NO: 779767 - DNA, 75 bp, synthetic construct
  source 1..75: mol_type = other DNA
aatcgggttatatcacagttggtgcctacaattactggtgtacatgatatgactgagacgggtaaatatattcga

SEQ ID NO: 779768 - DNA, 75 bp, synthetic construct
  source 1..75: mol_type = other DNA
aaggtaaaatagctaatatttatcagcttaatgcgcaagatgcttcagcgatggtacttggaactgagtttcagt

SEQ ID NO: 779769 - DNA, 75 bp, synthetic construct
  source 1..75: mol_type = other DNA
tagtgacgcaacaggtgtctttgttgtacgccaattaaaaggcgataaacaagggaaaattgcaaatatatatca

SEQ ID NO: 779770 - DNA, 75 bp, synthetic construct
  source 1..75: mol_type = other DNA
aatcgtgtaatttctcagttagtaccaacgataactggtgtgcatgatatgaccgaaagcgttaaatttgtcaag

SEQ ID NO: 779771 - DNA, 75 bp, synthetic construct
  source 1..75: mol_type = other DNA
cacaactgctcctttggtacgttggaatcgtgtcatctcgcagcttgtaccgactataactggcgtgcatgatat

SEQ ID NO: 779772 - DNA, 75 bp, synthetic construct
  source 1..75: mol_type = other DNA
gcgaacatcagaaaaatacacttaaagttacctggtgataaaccatggcctccagatgcgccgttaagtgcaaga

SEQ ID NO: 779773 - DNA, 75 bp, synthetic construct
  source 1..75: mol_type = other DNA
aattgtccgtcctatgtatttctggaatgacgttcactccacctggcttgaggcgggttatcaacgggttgatta

SEQ ID NO: 779774 - DNA, 75 bp, synthetic construct
  source 1..75: mol_type = other DNA
cgtatcggttttaccggaggggaacctacatcccggagtgatttcattgatctgattgaatacgctaagcaactg

SEQ ID NO: 779775 - DNA, 75 bp, synthetic construct
  source 1..75: mol_type = other DNA
caatcaatggtgaagcctttgtacgtattcatactatcaatggtcaactacgtattgaactaattgaagcagtac

SEQ ID NO: 779776 - DNA, 75 bp, synthetic construct
  source 1..75: mol_type = other DNA
attctcggttccgtgggcgagccaattaacccggaagcgtgggagtggtactggaaaaaaatcggtaatgagaaa

SEQ ID NO: 779777 - DNA, 75 bp, synthetic construct
  source 1..75: mol_type = other DNA
atacctcgacgcttgccgatcctggcgttgtcgagaagctgcttgaagagaagcaggctatcgcgatgccatcgt

SEQ ID NO: 779778 - DNA, 75 bp, synthetic construct
  source 1..75: mol_type = other DNA
gtgctgcactggaccgactccctgcctaaaacccgttccggcaaaattatgcgccgtattctgcgcaaaattgcg

SEQ ID NO: 779779 - DNA, 75 bp, synthetic construct
  source 1..75: mol_type = other DNA
cctcgagatgcgttcaaaggggattgaacgccagatgaccgaaggggagttaaaacggtttgcagaacggcaact

SEQ ID NO: 779780 - DNA, 75 bp, synthetic construct
  source 1..75: mol_type = other DNA
cttatatctggtgagtggcggttataaaatcatccgtaactacatccgtaaaaagattgatgccatggcgactga

SEQ ID NO: 779781 - DNA, 75 bp, synthetic construct
  source 1..75: mol_type = other DNA
tgatgtacgcaccaaaattcgccgctggcgaggtatttgggcttcaggaagcctccggcatgaaaggcgttcttt

SEQ ID NO: 779782 - DNA, 75 bp, synthetic construct
  source 1..75: mol_type = other DNA
atgtggaatccatttaagaaaaataaagaagtaccaattaaagtacagcctcctaaaccagtacaggtacgtgat

SEQ ID NO: 779783 - DNA, 75 bp, synthetic construct
  source 1..75: mol_type = other DNA
gccggtcgcagactggcgacattagaacaaaagttgctcaggatgcaggcacagcaggagaatatttctgggcaa

SEQ ID NO: 779784 - DNA, 75 bp, synthetic construct
  source 1..75: mol_type = other DNA
ctgaatatcacgcttttcatccgttccacgcgcgggcttactctgacagaatccggacaatatttttatcaacat

SEQ ID NO: 779785 - DNA, 75 bp, synthetic construct
  source 1..75: mol_type = other DNA
gaagattcgaaagatgtatataatatatacacaatacatcgcgatgctttttattgccctgccggaacaacagat

SEQ ID NO: 779786 - DNA, 75 bp, synthetic construct
  source 1..75: mol_type = other DNA
cagcttcggcaataatgcatatgaactgaccagcacatacactcacgcaggccggttacagagtcagcacctgaa

SEQ ID NO: 779787 - DNA, 75 bp, synthetic construct
  source 1..75: mol_type = other DNA
ttttaagcgaagcaatattcgcatggcagggaatgtctgtaatcagatgaaaaaaaaaagcgctgtttcgcccta

SEQ ID NO: 779788 - DNA, 75 bp, synthetic construct
  source 1..75: mol_type = other DNA
cgatgcttccacgactggtaaggcttgcagaggaaaaatttattgaactttcctctgatgagttagccaggctaa

SEQ ID NO: 779789 - DNA, 75 bp, synthetic construct
  source 1..75: mol_type = other DNA
ctaccagattcttgcaatcataaaccctgatgcacatcagcgtgtggatgcgatgcttccacgactggtaaggct

SEQ ID NO: 779790 - DNA, 75 bp, synthetic construct
  source 1..75: mol_type = other DNA
acctaaacccaccacgaccgcagatgctggcggcaattatctcaatgtcggttacttattaaactatgttgaaaa

SEQ ID NO: 779791 - DNA, 75 bp, synthetic construct
  source 1..75: mol_type = other DNA
gagggagtgttggatggattgttttattgtgaaaataaagatgaagtaaaggagttattggaagaatttaatttt

SEQ ID NO: 779792 - DNA, 75 bp, synthetic construct
  source 1..75: mol_type = other DNA
ccgaagtatggaaagacaaccgcagcgaaggggcgtcgtactattttctcgaccctgacggccataagctggaac

SEQ ID NO: 779793 - DNA, 75 bp, synthetic construct
  source 1..75: mol_type = other DNA
gctatagcgatggcaacccgactttgcctggtgtttacgatgttagcatctatgttaacgagcaacctgttgcta

SEQ ID NO: 779794 - DNA, 75 bp, synthetic construct
  source 1..75: mol_type = other DNA
atgcaagtggactggtatttatcgactcatattacgataatccgtctacgattaagggggtattaatgcgcgtgg

SEQ ID NO: 779795 - DNA, 75 bp, synthetic construct
  source 1..75: mol_type = other DNA
atcttgcagcgtctgcgcagttcgggagaattacccacggcactgcggacatcactcggcattcagctcgctcct

SEQ ID NO: 779796 - DNA, 75 bp, synthetic construct
  source 1..75: mol_type = other DNA
tgctggtggcgattggttttgttccggggtttcgcccactggcggtgtgcctgttcagttttggtgtcgtggttc

SEQ ID NO: 779797 - DNA, 75 bp, synthetic construct
  source 1..75: mol_type = other DNA
taccttaatttccgtattcacgcttagcggcccaggcccgctttccctgctgcgtcggcaggtgaacgaagtcgc

SEQ ID NO: 779798 - DNA, 75 bp, synthetic construct
  source 1..75: mol_type = other DNA
attaacatcaggaattgactgtaaaaaatatccatggctctatttttccctatccagagccgctccagggttaat

SEQ ID NO: 779799 - DNA, 75 bp, synthetic construct
  source 1..75: mol_type = other DNA
ataaagaggagacaattgtcaggaagaaattcttcaccaaagaaatacgcaaatgccacaggacttttttatcca

SEQ ID NO: 779800 - DNA, 75 bp, synthetic construct
  source 1..75: mol_type = other DNA
atgcaactgacgtggatggatgtgaaggcagataatcatactgaagacaatggcactctggttgaggacagcacc

SEQ ID NO: 779801 - DNA, 75 bp, synthetic construct
  source 1..75: mol_type = other DNA
aagcagataaaacagggacttatgttgatagctggttgctctataactggtttgataacaccgtctccggcgagt

SEQ ID NO: 779802 - DNA, 75 bp, synthetic construct
  source 1..75: mol_type = other DNA
gcagtaagataagtggcctgcaagacctaaaaattggtgattattatggtgatgccaaaggattgatgtttattg

SEQ ID NO: 779803 - DNA, 75 bp, synthetic construct
  source 1..75: mol_type = other DNA
taccgaaggatatgcaaccgcgcttgcagtctcatgccttcatcattttccggtcgttgctgccctatcggcgca

SEQ ID NO: 779804 - DNA, 75 bp, synthetic construct
  source 1..75: mol_type = other DNA
gggaaaaagtacctgctgcccggtagccatctgaaggattgtttttgcccggtacatcaggcgagccgtaacggt

SEQ ID NO: 779805 - DNA, 75 bp, synthetic construct
  source 1..75: mol_type = other DNA
atggcggaaagcattgcccgccagtcgaacccggaagatccagagtcggtgctgactgaaatggcgaaagcaatc

SEQ ID NO: 779806 - DNA, 75 bp, synthetic construct
  source 1..75: mol_type = other DNA
ctcgccagtcttttcacgttccgccgtccgatagctgcggcacagatggcaaaaggggatctgttccgactcatt

SEQ ID NO: 779807 - DNA, 75 bp, synthetic construct
  source 1..75: mol_type = other DNA
gctgcaacacttcccgtttgaaacactcgccagtcttttcacgttccgccgtccgatagctgcggcacagttggc

SEQ ID NO: 779808 - DNA, 75 bp, synthetic construct
  source 1..75: mol_type = other DNA
tcagggatactggcatgcggctgacgggggcccagttcattcatccgggaggaaaaaatatctgctgcccggtag

SEQ ID NO: 779809 - DNA, 75 bp, synthetic construct
  source 1..75: mol_type = other DNA
gagcatctcgatcggtaccacaccgctcacagtaatgactggtattcttcagctaaaaattactctgagattgtg

SEQ ID NO: 779810 - DNA, 75 bp, synthetic construct
  source 1..75: mol_type = other DNA
tatgtcggtgatacaatgaacctggaaggtataatttctaaggagtcgggtactcctttggcaaagagtactccg

SEQ ID NO: 779811 - DNA, 75 bp, synthetic construct
  source 1..75: mol_type = other DNA
tactctatatagatacagtacggaaacttaccgaagaagatctactaggtgaatttggtcttaccagtgagatga

SEQ ID NO: 779812 - DNA, 75 bp, synthetic construct
  source 1..75: mol_type = other DNA
gctaaagctacagcctggagcgtattatccagcattgcatcagcagcaagaaagcagaatgatggatcttatgta

SEQ ID NO: 779813 - DNA, 75 bp, synthetic construct
  source 1..75: mol_type = other DNA
gccagagctttccctgtgcaaattcttgcagaggaagggctaacggttattgttccgacagaggattatgtcgtc

SEQ ID NO: 779814 - DNA, 75 bp, synthetic construct
  source 1..75: mol_type = other DNA
ccaaaagcggtgaagtctgcctatgacaatgctgaaaaacgtctccagaaagatcagaacggtgcggatattcct

SEQ ID NO: 779815 - DNA, 75 bp, synthetic construct
  source 1..75: mol_type = other DNA
gaaactctcgaaatggttcaaagatacgcccacctttcagccgggcatctcaccgagcacgcaagcaaaatcgat

SEQ ID NO: 779816 - DNA, 75 bp, synthetic construct
  source 1..75: mol_type = other DNA
catgttgaaacgatacacacaccttcgggcttatcaacttgtcagtaaactcgatgcccgacgcaagcaaaccag

SEQ ID NO: 779817 - DNA, 75 bp, synthetic construct
  source 1..75: mol_type = other DNA
tacgcggaaaaattcggggatttatacctgcgacgagttagagcaccctgccggggctatttgtgcgttgcgcat

SEQ ID NO: 779818 - DNA, 75 bp, synthetic construct
  source 1..75: mol_type = other DNA
cagcgcatctcagatatggttgtgcctaaaagtgttttatagctactcccataatcaccactatcgcagttatga

SEQ ID NO: 779819 - DNA, 75 bp, synthetic construct
  source 1..75: mol_type = other DNA
aacggtctgggggcgtcgtctgagatttccatgtcgggtaatttttatctgaatcaggcccagaacgccctgcgt

SEQ ID NO: 779820 - DNA, 75 bp, synthetic construct
  source 1..75: mol_type = other DNA
ctccatcccatcaaaccccgcctcaaaccctgacggcagcgcgttctccatcagccacgcatcaaactggtggct

SEQ ID NO: 779821 - DNA, 75 bp, synthetic construct
  source 1..75: mol_type = other DNA
ttctcccccatcacgccaccccaatctccatcccatcaaaccccgcctcaaaccctgacggcagcgcgttctcca

SEQ ID NO: 779822 - DNA, 75 bp, synthetic construct
  source 1..75: mol_type = other DNA
caacatttacctgtttacgctggtgactcgctctcagacctgtccctattctaagacgtttgacactactgaaaa

SEQ ID NO: 779823 - DNA, 75 bp, synthetic construct
  source 1..75: mol_type = other DNA
gcgtgaactgacggtacaggccactaccggtactaactctgagtctgatctgtcttctatccaggacgaaattaa

SEQ ID NO: 779824 - DNA, 75 bp, synthetic construct
  source 1..75: mol_type = other DNA
gcactctaatcgctaatattgatggcaaagatgtaacctttactattgatgcgacagggaaggacgcaacattaa

SEQ ID NO: 779825 - DNA, 75 bp, synthetic construct
  source 1..75: mol_type = other DNA
tcaacgtctggaagaaattgaccgtgtatctgagcaaactcagtttaacggcgtgaaagtccttgctgaaaataa

SEQ ID NO: 779826 - DNA, 75 bp, synthetic construct
  source 1..75: mol_type = other DNA
acaaaacaagtgctgcggctggaactctggcagatactcttctcccggcagctggccagactaaaaccggtactt

SEQ ID NO: 779827 - DNA, 75 bp, synthetic construct
  source 1..75: mol_type = other DNA
tgctccagcaattggcactgctgtaaatgtgaactccgcgggtaaaatcactactgagactaccagtgctggttc

SEQ ID NO: 779828 - DNA, 75 bp, synthetic construct
  source 1..75: mol_type = other DNA
agatcatccagcaggccggtaactccgtgctggcaaaagctaaccaggtaccgcagcaggttctgtctctgctgc

SEQ ID NO: 779829 - DNA, 75 bp, synthetic construct
  source 1..75: mol_type = other DNA
aactggtaacttaactcagaatggtggtaataacggtgttggaacactcgcggaagcgactctgagtggtttagc

SEQ ID NO: 779830 - DNA, 75 bp, synthetic construct
  source 1..75: mol_type = other DNA
atctgaagaaaattgactctgatacgctggggctgaatgggtttaatgtgaacggcaagggggaaacggctaata

SEQ ID NO: 779831 - DNA, 75 bp, synthetic construct
  source 1..75: mol_type = other DNA
atgtctgcccgtatttcgcgtaaggaaatccattatgtactatttaaaaaacacaaacttttggatgttcggttt

SEQ ID NO: 779832 - DNA, 75 bp, synthetic construct
  source 1..75: mol_type = other DNA
ctggcctgcgtattaacagtgctaaagatgacgcagcaggtcaggcgattgctaaccgttttacagcaaatatta

SEQ ID NO: 779833 - DNA, 75 bp, synthetic construct
  source 1..75: mol_type = other DNA
cacatctgatactgtagatttttatctacaggatgatggttcagtgactaacggcagcggtaaggcagtttataa

SEQ ID NO: 779834 - DNA, 75 bp, synthetic construct
  source 1..75: mol_type = other DNA
caacctgaacaacaccactaccaacctgtccgaagcgcagtcccgtattcaggacgccgactatgcgaccgaagt

SEQ ID NO: 779835 - DNA, 75 bp, synthetic construct
  source 1..75: mol_type = other DNA
tgatgatgatatttggttgcctgatcatatagacgactatatgaaatttatccatagcaaccgaaacaaaatgat

SEQ ID NO: 779836 - DNA, 75 bp, synthetic construct
  source 1..75: mol_type = other DNA
ggcgtctgaatcagcttccaaaggattttacatgggatgaactcgtgacgttgcttgggcattatggtttcgaaa

SEQ ID NO: 779837 - DNA, 75 bp, synthetic construct
  source 1..75: mol_type = other DNA
gggatgctcattgatggcgagcacatcatgccaggcgaattaccaaattgtcgttgcacctgggaggctgtcatt

SEQ ID NO: 779838 - DNA, 75 bp, synthetic construct
  source 1..75: mol_type = other DNA
ttaatgacgacttagatgatagttcaattttaataaatgatataattaaagagttggatttgattcttccaaata

SEQ ID NO: 779839 - DNA, 75 bp, synthetic construct
  source 1..75: mol_type = other DNA
caggcgaacaaaaaaaccgggctactgcttggtgtggaaaagcatgaatcaacggccagcgcgtgggggcaacgg

SEQ ID NO: 779840 - DNA, 75 bp, synthetic construct
  source 1..75: mol_type = other DNA
gtacccctatacggcaggtaagctcctctctgagtgcaggcaggcgctgaactattgcgatgcgttcgggtacgc

SEQ ID NO: 779841 - DNA, 75 bp, synthetic construct
  source 1..75: mol_type = other DNA
gaaccaggcatttgcacgcctctgggggattgccgggaaggtcggcgacagtaaccgacagtccgggcggtaccg

SEQ ID NO: 779842 - DNA, 75 bp, synthetic construct
  source 1..75: mol_type = other DNA
gatcaactttgagaaaggcaagctttatgcgtataagcagaaaataccctgcattcaaagtttcatggaatattc

SEQ ID NO: 779843 - DNA, 75 bp, synthetic construct
  source 1..75: mol_type = other DNA
attaaccagcgatatctggaaacggcatccctgcttgtggcgatgtcgctatggcattcccattccctcaaaggc

SEQ ID NO: 779844 - DNA, 75 bp, synthetic construct
  source 1..75: mol_type = other DNA
ccagacagaacgggacttttaaagatgagattttattaatcttgaaatcatttaaatatggaaagcctggtattt

SEQ ID NO: 779845 - DNA, 75 bp, synthetic construct
  source 1..75: mol_type = other DNA
ccgcagcggcgcagcagacgtttaataagttgatcccgcaggcaaaatctcagccaccgtcgatggaaagcgcga

SEQ ID NO: 779846 - DNA, 75 bp, synthetic construct
  source 1..75: mol_type = other DNA
acagatgatgacgaaatgaattattattttcagtatacaaaagaaaaatttgaaaaattttccttaaaatataat

SEQ ID NO: 779847 - DNA, 75 bp, synthetic construct
  source 1..75: mol_type = other DNA
tattgaggcacttaattccaataaatcagattataaaatgattgctgatgatcagcaaaggaaacttgcctgtgt

SEQ ID NO: 779848 - DNA, 75 bp, synthetic construct
  source 1..75: mol_type = other DNA
tttttttcgccaaaacagatgcaccttcttccgccacggttgccaatgccgtaggtgcaaatcattccgcattta

SEQ ID NO: 779849 - DNA, 75 bp, synthetic construct
  source 1..75: mol_type = other DNA
ctgtgacggaacaaggcccacaagcgttaccgcaatgggaaacattttggctggtttcagcaggcgttgccgcag

SEQ ID NO: 779850 - DNA, 75 bp, synthetic construct
  source 1..75: mol_type = other DNA
ccgatgtgccccgcattatgtgccggagcacgtctgccagacgttgccagttcccagggctggccccggaagccg

SEQ ID NO: 779851 - DNA, 75 bp, synthetic construct
  source 1..75: mol_type = other DNA
tggtagagcgtgtgagaatggccatccttcagatggaagaggaagaacggcagcgaggcagggtcatcaatcgct

SEQ ID NO: 779852 - DNA, 75 bp, synthetic construct
  source 1..75: mol_type = other DNA
tgatgatgctcggcggtttttttgttctcggtattggtatgtgggcgcttggccaatggctgcgacgcaaaggct

SEQ ID NO: 779853 - DNA, 75 bp, synthetic construct
  source 1..75: mol_type = other DNA
catttacacaaggcagcaatactctggttggtgctgggacagcatggaacgttacggccaatggtgtgttgcctg

SEQ ID NO: 779854 - DNA, 75 bp, synthetic construct
  source 1..75: mol_type = other DNA
aaggatgcgcgctatgaggccgatcgttctacaatcccgttgacgctatggacacttgacgatttggtccgtgcg

SEQ ID NO: 779855 - DNA, 75 bp, synthetic construct
  source 1..75: mol_type = other DNA
tgccaatatgggcaacgaagccgatctacggacgctggttgatagcgcacatcagcgcggtattcgtattctctt

SEQ ID NO: 779856 - DNA, 75 bp, synthetic construct
  source 1..75: mol_type = other DNA
catgctattaacgaagagatgatcgaatctctcgaccattatttacgacaccacattacgattagtcgaattaac

SEQ ID NO: 779857 - DNA, 75 bp, synthetic construct
  source 1..75: mol_type = other DNA
gtgatcctggtggtccacagggaccaaagggtgacacaggaccaagaggggaacaaggacctcaaggcccaagag

SEQ ID NO: 779858 - DNA, 75 bp, synthetic construct
  source 1..75: mol_type = other DNA
ggccaaagggcgataaaggcgagagaggagcgcaggggcctgcgggtccggcagggaagtctgccagcctggatg

SEQ ID NO: 779859 - DNA, 75 bp, synthetic construct
  source 1..75: mol_type = other DNA
gcatgctgtgttatctccgtcattctgatgttagcgctttattatgctttcctgactatgccgccgttcccgcct

SEQ ID NO: 779860 - DNA, 75 bp, synthetic construct
  source 1..75: mol_type = other DNA
tttttcaggtgcgctagggcgttttcagtgcactcatcagacggtaagtagtttgattcccttttatataccaga

SEQ ID NO: 779861 - DNA, 75 bp, synthetic construct
  source 1..75: mol_type = other DNA
gacgcagcaggcgtcgcttaacaatatcccggtttctgcgctggtatcgcgatttaccgtcaatccatcggtaca

SEQ ID NO: 779862 - DNA, 75 bp, synthetic construct
  source 1..75: mol_type = other DNA
tacctctattctggctatgttcatggcactgaaaggacataatgacaaagccaaaagtttattgcttaaacttga

SEQ ID NO: 779863 - DNA, 75 bp, synthetic construct
  source 1..75: mol_type = other DNA
atgtatatgaatggcagaatggaaatgtaccgttatacaccagagagtttgaaacgagcattagtaatatttaga

SEQ ID NO: 779864 - DNA, 75 bp, synthetic construct
  source 1..75: mol_type = other DNA
tccttgggctcagtgaacaaaaacaagctataaaaacagcagtaacagccatagaaaaggctctggaaattaacc

SEQ ID NO: 779865 - DNA, 75 bp, synthetic construct
  source 1..75: mol_type = other DNA
atgaaagcttcttatgcgatcgttgccgcacgtgatgcgatttccgctaccagcggtgtggcttcccagctttct

SEQ ID NO: 779866 - DNA, 75 bp, synthetic construct
  source 1..75: mol_type = other DNA
tgggattgctgggattgttcgcgatgttcgcccccaattggctgatgcctgttttaatcgccgtggggggatggc

SEQ ID NO: 779867 - DNA, 75 bp, synthetic construct
  source 1..75: mol_type = other DNA
tgggggtacttgcctggggttggctctggctaatgattttttacctttacttaacggtgtcgggcttgcttatgc

SEQ ID NO: 779868 - DNA, 75 bp, synthetic construct
  source 1..75: mol_type = other DNA
ccggtcagctgattgttgcgcaggaacgtgtcggcaacatgccgaccttcatcgcgccgtacttcccggtcaatg

SEQ ID NO: 779869 - DNA, 75 bp, synthetic construct
  source 1..75: mol_type = other DNA
ttatcagtcatcgaatgatgactttgtgatcgaggactacggcaacgtcgcattcattgacggcattacctttgc

SEQ ID NO: 779870 - DNA, 75 bp, synthetic construct
  source 1..75: mol_type = other DNA
gcgcgaccagcaggagaatatcgaatacctgatggagtttaacggtcgtcgctgggattacggcaagcacacaaa

SEQ ID NO: 779871 - DNA, 75 bp, synthetic construct
  source 1..75: mol_type = other DNA
cgttaattaacaccagaattaatgaattgacccagactgaaatacgtatttaccagtttattaaaaataatcgta

SEQ ID NO: 779872 - DNA, 75 bp, synthetic construct
  source 1..75: mol_type = other DNA
gcccctccgcacagggggattcaccatgcagtagtatttttaataaacagtaaacaaaaaaatcaagcattatgc

SEQ ID NO: 779873 - DNA, 75 bp, synthetic construct
  source 1..75: mol_type = other DNA
cggtggattatgaatcgcagggacgccgggtgaattacggtttttcactgacagagggtgaggaaggaggtctgg

SEQ ID NO: 779874 - DNA, 75 bp, synthetic construct
  source 1..75: mol_type = other DNA
tcactgtatgttattggcgtttcctgcacctacgatgtttttgaccaacagtttgctaaggaaggtgcgaataag

SEQ ID NO: 779875 - DNA, 75 bp, synthetic construct
  source 1..75: mol_type = other DNA
cgctctggatcacgatattgctgaaactctcctgcaggaaagaagcccggactcacttcgcctagacctggccag

SEQ ID NO: 779876 - DNA, 75 bp, synthetic construct
  source 1..75: mol_type = other DNA
gcctgacaactggggatttgacgcggaccttttccatgagctggtaacaccatcgattgtgctgacactgctgga

SEQ ID NO: 779877 - DNA, 75 bp, synthetic construct
  source 1..75: mol_type = other DNA
tcgcgctaatcacacagctgaaagcaaagtggccagtgcgggttctttgtcatttattcggtattcaccgtagca

SEQ ID NO: 779878 - DNA, 75 bp, synthetic construct
  source 1..75: mol_type = other DNA
atgtattgtctggtataaatgttcaggatacaggttccaactccgccgataatattgcgggtgtttattacagac

SEQ ID NO: 779879 - DNA, 75 bp, synthetic construct
  source 1..75: mol_type = other DNA
aactggcttccagagtggttattacaaccacatctgccggtggtgattacgcaatgaataactgcgaatttaatg

SEQ ID NO: 779880 - DNA, 75 bp, synthetic construct
  source 1..75: mol_type = other DNA
ttggtattgtcggtgaagtcgatggtgatgaccccgcagtattcagaccaatacaaaaatacatcaatggcacat

SEQ ID NO: 779881 - DNA, 75 bp, synthetic construct
  source 1..75: mol_type = other DNA
gcacctacgatgtttttgaccaacagtttgctaatttctttacttcgtttttcaccactggtgaacagggtacgc

SEQ ID NO: 779882 - DNA, 75 bp, synthetic construct
  source 1..75: mol_type = other DNA
gagatgcatataaaggtgcaagctatgagcattttaacgatcaggttttatttggtgaatatggtcgtgctatca

SEQ ID NO: 779883 - DNA, 75 bp, synthetic construct
  source 1..75: mol_type = other DNA
aaatcaaaagcgctggttggctcggaagatttgccggtgctggatgaaaacacgttcaacagtcacgcccctgcg

SEQ ID NO: 779884 - DNA, 75 bp, synthetic construct
  source 1..75: mol_type = other DNA
tcccgatcccggttagtcctgaaggaacgccagtaaaattcatcaaaaaagaggtttttgattatttctggcggg

SEQ ID NO: 779885 - DNA, 75 bp, synthetic construct
  source 1..75: mol_type = other DNA
ctaatttatacttttaaagaaataaacagtttttccctgccagagacgcttcttcctgatggtttatatgccagc

SEQ ID NO: 779886 - DNA, 75 bp, synthetic construct
  source 1..75: mol_type = other DNA
gctaatgaaatgtctgattttatgatttcaggtgagatggtcccctccaaagaaacggattctgaactaatttat

SEQ ID NO: 779887 - DNA, 75 bp, synthetic construct
  source 1..75: mol_type = other DNA
ataaatacgatccgcctctggaactgaatggcaaatttaatgcgtcaccagatggtgctcaggtgtttgttgttg

SEQ ID NO: 779888 - DNA, 75 bp, synthetic construct
  source 1..75: mol_type = other DNA
cttcaggttccagtaatcattcaaatcaatttttctcctctttccttgaggccgcttggcgccgattcaggaaaa

SEQ ID NO: 779889 - DNA, 75 bp, synthetic construct
  source 1..75: mol_type = other DNA
aagacaatactagaactggatcgttttgaggtcgtgagtaatactggtgctgcgcacatgacccccatatttggt

SEQ ID NO: 779890 - DNA, 75 bp, synthetic construct
  source 1..75: mol_type = other DNA
acttaaatctgactttcgtaaaaaattaccggcaataaaagaatgtgtcgattttagtgtcttccctgaaatcat

SEQ ID NO: 779891 - DNA, 75 bp, synthetic construct
  source 1..75: mol_type = other DNA
agggatgctggataatgatgttaaacaacatataaaatttacaatagttggaaatggcagtttagaattcaaggg

SEQ ID NO: 779892 - DNA, 75 bp, synthetic construct
  source 1..75: mol_type = other DNA
gtaaaatactaaacatgtttgatggggtaaagaaaatatttacaaatagcaattatacaaaaaaaattcttttag

SEQ ID NO: 779893 - DNA, 75 bp, synthetic construct
  source 1..75: mol_type = other DNA
ttatcgtgacgcctcctctgtttgcgatgaagggaaaaaaagagaataccttgcgtattcttgatgcaacaaatg

SEQ ID NO: 779894 - DNA, 75 bp, synthetic construct
  source 1..75: mol_type = other DNA
agacggctattcgttatgccagaacaatccgttggcgtattgaaggtctgggtgatgagtttatgactgatcttt

SEQ ID NO: 779895 - DNA, 75 bp, synthetic construct
  source 1..75: mol_type = other DNA
aatgttcttcagaaaaaatccggtcagacggctattcgttatgccagaacaatccgttggcgtattgaaggtctg

SEQ ID NO: 779896 - DNA, 75 bp, synthetic construct
  source 1..75: mol_type = other DNA
gcgatttttggcgacatgctgtcgatggctcaggctacccggcgcaacggcgggttagtgatagtccaggtaaaa

SEQ ID NO: 779897 - DNA, 75 bp, synthetic construct
  source 1..75: mol_type = other DNA
atcaaaaatattcaggcaatatcatcatgaacttatgtctgtagtaaagaacagacaaaacttcaattttaatat

SEQ ID NO: 779898 - DNA, 75 bp, synthetic construct
  source 1..75: mol_type = other DNA
tacaacttgcagatagcgatactattgaaaacctgacatccgcgttgagccaaagacttatcgctgatcaattac

SEQ ID NO: 779899 - DNA, 75 bp, synthetic construct
  source 1..75: mol_type = other DNA
cgcacctacagcagctaccggactatgactcctgccccggtgggcgtctttggccccggctggaaagcgccttct

SEQ ID NO: 779900 - DNA, 75 bp, synthetic construct
  source 1..75: mol_type = other DNA
cgcacctacagcagctaccggactaagactcctgccccggtgggcgtgttcggccccggctggaaagcgccttct

SEQ ID NO: 779901 - DNA, 75 bp, synthetic construct
  source 1..75: mol_type = other DNA
agcgtaaaatcgtcgcccgtcgctgcgctatggaattgcagcctggggcggtatgcaacgttggctcggggatct

SEQ ID NO: 779902 - DNA, 75 bp, synthetic construct
  source 1..75: mol_type = other DNA
tgtcagggtgatggtactgtttgcgctgcaacatggaagcctacaggtactgtagctgacccctctgataaaccc

SEQ ID NO: 779903 - DNA, 75 bp, synthetic construct
  source 1..75: mol_type = other DNA
ggaggatgcaaaatcgggggcatgtactaatggtctttgcggcacactatccgctatgataggtccagataaatt

SEQ ID NO: 779904 - DNA, 75 bp, synthetic construct
  source 1..75: mol_type = other DNA
gattgcgtgggtgcagtacataaaagccattcaggctatagatacttcatttgcgccaaatatcaactggcccac

SEQ ID NO: 779905 - DNA, 75 bp, synthetic construct
  source 1..75: mol_type = other DNA
ttttcgtatatttcacacaccggggggatgagaagccccgaccggggttcgacaactggcaacagccagttggac

SEQ ID NO: 779906 - DNA, 75 bp, synthetic construct
  source 1..75: mol_type = other DNA
ctttattatagtcgattaactttcacaaaaaatattcttgcttttatatgtgtaatcatttcattttcttcattg

SEQ ID NO: 779907 - DNA, 75 bp, synthetic construct
  source 1..75: mol_type = other DNA
actgtagctgacccctctgataaaccctcaaccccccaaaatggtggtggtgagtctggcggtggtgagtctggc

SEQ ID NO: 779908 - DNA, 75 bp, synthetic construct
  source 1..75: mol_type = other DNA
cgcacctacagcagctaccggactacgactcctgccccggtgggcgtgttaggccccggctggaaagcgccttct

SEQ ID NO: 779909 - DNA, 75 bp, synthetic construct
  source 1..75: mol_type = other DNA
gacgctcatcaaaatcaccggtgacgtcgcctcggttaatgcggcgatcgcgacgggagccagtttcgccggaca

SEQ ID NO: 779910 - DNA, 75 bp, synthetic construct
  source 1..75: mol_type = other DNA
tatcacgtcaacgattcctgatgatgtgcgtgctgaagcaatcgccacagcaagggccaaatgccgtgcggcgat

SEQ ID NO: 779911 - DNA, 75 bp, synthetic construct
  source 1..75: mol_type = other DNA
gaaaattcttcatgataagtattcactaatgatgatctttgtcccaattttcttttattttattattaatggtca

SEQ ID NO: 779912 - DNA, 75 bp, synthetic construct
  source 1..75: mol_type = other DNA
ccgttataacaaatcattcgagctgacagggactagttttacagcggcgagttaccagtattcgtcagatggtta

SEQ ID NO: 779913 - DNA, 75 bp, synthetic construct
  source 1..75: mol_type = other DNA
cttaactagaaatatgcttactcgttatggaattaagattgaagattatcctgaaatgttttattcaaaaacaat

SEQ ID NO: 779914 - DNA, 75 bp, synthetic construct
  source 1..75: mol_type = other DNA
ctgtactgggatgtccgtgagcagatggtgccgggcagtgagagccatgctgacaccagtcgtctgaacctgacg

SEQ ID NO: 779915 - DNA, 75 bp, synthetic construct
  source 1..75: mol_type = other DNA
agcctgaaccggcgtgaggtgctgcatacagaaggcggggccgggctgaagcgggtggtgaaaaaagaactggcg

SEQ ID NO: 779916 - DNA, 75 bp, synthetic construct
  source 1..75: mol_type = other DNA
tgtaataacgatttttattgtgtacatccttgtgtacacggttttttcaggtgtgccgccgatatgggaactgtc

SEQ ID NO: 779917 - DNA, 75 bp, synthetic construct
  source 1..75: mol_type = other DNA
cgcacctacagcagctaccggactaggactcctgccccggtgggcgtattgggccccggctggaaagcgccttct

SEQ ID NO: 779918 - DNA, 75 bp, synthetic construct
  source 1..75: mol_type = other DNA
ttctgcggtggttacataccaacgtctaaggaggctgccaatatggctactatccctaccccaactcatcctgaa

SEQ ID NO: 779919 - DNA, 75 bp, synthetic construct
  source 1..75: mol_type = other DNA
aggggtcattatcccgatatatgaccccagcagtagtcagtagtctgtcgaaaatgaaagagttaatttctacat

SEQ ID NO: 779920 - DNA, 75 bp, synthetic construct
  source 1..75: mol_type = other DNA
ttgataagcaaatcaagcaagtacgccgcgaagccaaaatagctccaaccctggaagagaaacttgcgctgcaaa

SEQ ID NO: 779921 - DNA, 75 bp, synthetic construct
  source 1..75: mol_type = other DNA
tagcctgacattctggcgcgatttgctggggttgcagttacatgctgagtggggtacaggtgcttaccttacctg

SEQ ID NO: 779922 - DNA, 75 bp, synthetic construct
  source 1..75: mol_type = other DNA
atttttctcaaagctcgtcttgctcaggaacaccctcttttaatttttgagtcattaccaaaatcaacagctgat

SEQ ID NO: 779923 - DNA, 75 bp, synthetic construct
  source 1..75: mol_type = other DNA
caaaacataaatgcgctggcaggtatgttgaaatcactgtcgactttagtcttgggtggatgcgtcgtgtgggtt

SEQ ID NO: 779924 - DNA, 75 bp, synthetic construct
  source 1..75: mol_type = other DNA
tgctgaacgagatcacgacgaacgtgaaacgagcttgaacggcagtatcagttccaatctccattacacccaagt

SEQ ID NO: 779925 - DNA, 75 bp, synthetic construct
  source 1..75: mol_type = other DNA
tcatgccgtattcaccttacattcccagaagatgcaccaaaagatgtgttctatgagacagcaacaggagagtgc

SEQ ID NO: 779926 - DNA, 75 bp, synthetic construct
  source 1..75: mol_type = other DNA
aaacggcgctccgtttcaatcctctggcaacattgccaagtggcgacaaagtggcggcagcggttggcattaccc

SEQ ID NO: 779927 - DNA, 75 bp, synthetic construct
  source 1..75: mol_type = other DNA
ggctggtaacagtgaaacatccacagaaagatatcccgttaccaacattaaaaagcatcaaaaaacaagcggggc

SEQ ID NO: 779928 - DNA, 75 bp, synthetic construct
  source 1..75: mol_type = other DNA
ttaaggacgttaagtcaatatctgaattgtcattgtcaattgatttaaaacctgggcttatttgttttgttggag

SEQ ID NO: 779929 - DNA, 75 bp, synthetic construct
  source 1..75: mol_type = other DNA
ggaatatgtccaggcaatggaaaaagcgcacagtcagaaacaacagcaaaaagcgccgatccgtcagttattcaa

SEQ ID NO: 779930 - DNA, 75 bp, synthetic construct
  source 1..75: mol_type = other DNA
tggaaggagccagtatttacggtatcgaaatcgcaccggacaacgcattgcaaaccagcggcagtggtgtgcaag

SEQ ID NO: 779931 - DNA, 75 bp, synthetic construct
  source 1..75: mol_type = other DNA
aaaaaatagtatcaaaggtaaaagagctgttttcacagattgatgttgttgtggcttctacggtaaatcaaatcg

SEQ ID NO: 779932 - DNA, 75 bp, synthetic construct
  source 1..75: mol_type = other DNA
caagaggaagttaagtcattcattttaaagcttatggaacaaaatcctagtgtcagtgcaacacatgcgttgcgt

SEQ ID NO: 779933 - DNA, 75 bp, synthetic construct
  source 1..75: mol_type = other DNA
aatcacaccattacctaaccaggaagcgttagatattatcgtttcaccacaggcgatcattcccatagggttgga

SEQ ID NO: 779934 - DNA, 75 bp, synthetic construct
  source 1..75: mol_type = other DNA
cactatccgctatgataggtccagataaatttgattctatagatagcaccgcatatgacgccttaaataaaataa

SEQ ID NO: 779935 - DNA, 75 bp, synthetic construct
  source 1..75: mol_type = other DNA
tgcgaccatcgcggcctgccgctggcccttatcagcaaggaagggacaacagaatggtgcgcagaatacgatgaa

SEQ ID NO: 779936 - DNA, 75 bp, synthetic construct
  source 1..75: mol_type = other DNA
tcaggggaaggtaatagaggagagctttctataactcttgaagcaaaagtagaagctggcatgagagtgtttatc

SEQ ID NO: 779937 - DNA, 75 bp, synthetic construct
  source 1..75: mol_type = other DNA
cgttttatgtcagagacaaagggttttgctgtttgatgctccggagggtcgcggtaaatatttattacaggcaat

SEQ ID NO: 779938 - DNA, 75 bp, synthetic construct
  source 1..75: mol_type = other DNA
tcgactgcaaattcgtctacagttaatgcaagttatgttgaaccttcagcggaaaaaaataatatcgccaagcga

SEQ ID NO: 779939 - DNA, 75 bp, synthetic construct
  source 1..75: mol_type = other DNA
aaaatattttgcatctaaggcagaaactgataatttaagaaaggagtcatatcctctgaaaagaaaatgtcccac

SEQ ID NO: 779940 - DNA, 75 bp, synthetic construct
  source 1..75: mol_type = other DNA
accaaacgcggcgtaacgccaactgaagcggggaaaattctctacactcacgcccggacaattttacggcagtgt

SEQ ID NO: 779941 - DNA, 75 bp, synthetic construct
  source 1..75: mol_type = other DNA
ttaaccttatctggtttgttataagcatattttggatagattttttatctgttcaagacaaagagtggtttatcg

SEQ ID NO: 779942 - DNA, 75 bp, synthetic construct
  source 1..75: mol_type = other DNA
tgatgagcagccgtgcagaattttctaatgggagttcggactactcccaggctgcacttgaaggcgggattaata

SEQ ID NO: 779943 - DNA, 75 bp, synthetic construct
  source 1..75: mol_type = other DNA
atctggcagggtaataatattgttattacctacactcgggatgaagggatgaccagagtcatccctgcaaatccc

SEQ ID NO: 779944 - DNA, 75 bp, synthetic construct
  source 1..75: mol_type = other DNA
tagatttatcaaaaataccagataatgaaattattgacgttagtaatggacaggggttgtctggtaaggcgtctc

SEQ ID NO: 779945 - DNA, 75 bp, synthetic construct
  source 1..75: mol_type = other DNA
agaactatgacgaagtgattaaggcactgaaggctgcagggatcgatccgaaaaaactcgctgaagcccttacca

SEQ ID NO: 779946 - DNA, 75 bp, synthetic construct
  source 1..75: mol_type = other DNA
cacaaacttttggatgttcggtttattctttttcttttacttttttatcatgggggcctacttcccgtttttccc

SEQ ID NO: 779947 - DNA, 75 bp, synthetic construct
  source 1..75: mol_type = other DNA
ctgctttatacatcgccatgagcaagggtaataaagacgtcgtgttatcttatatatcaacactgagtacttttg

SEQ ID NO: 779948 - DNA, 75 bp, synthetic construct
  source 1..75: mol_type = other DNA
aacggagaacagtaaacgtacagtaccaattcataacaaattgatagatgtcggatttttggtctatgtacataa

SEQ ID NO: 779949 - DNA, 75 bp, synthetic construct
  source 1..75: mol_type = other DNA
ctaaaactacatgcggagcagtacgttgagtttaaaagccgtgacgtttgtgaaagggaagtttcttctatcaaa

SEQ ID NO: 779950 - DNA, 75 bp, synthetic construct
  source 1..75: mol_type = other DNA
gatgtcaacagtaccagtactgtgcagccggttgcgctcatgaggctcggtctcttcgttccaaccctgaaatca

SEQ ID NO: 779951 - DNA, 75 bp, synthetic construct
  source 1..75: mol_type = other DNA
aaagacattattcctcataaggattccgtattttttattgataaaggtgcagttgttacgttgcagacgaaaaaa

SEQ ID NO: 779952 - DNA, 75 bp, synthetic construct
  source 1..75: mol_type = other DNA
tgaatatgctcgcctgctggacgttccttttgtttttgccaccaatggtgatggctttatcttccgcgatgccac

SEQ ID NO: 779953 - DNA, 75 bp, synthetic construct
  source 1..75: mol_type = other DNA
ttcaaccgttgtttggtctgctttctgacaaactcgggctgcgcaaatatctgctatggattattaccgtcatgt

SEQ ID NO: 779954 - DNA, 75 bp, synthetic construct
  source 1..75: mol_type = other DNA
aagcatactggattatattgaacaggaacagttaactgccgaaaatcgtaaccattgtatgaaactgtctaaaaa

SEQ ID NO: 779955 - DNA, 75 bp, synthetic construct
  source 1..75: mol_type = other DNA
cctgctttatttctggctatgatgaacggacatactgacaacgtaaaaatatttatgcaagaaattcagtcactg

SEQ ID NO: 779956 - DNA, 75 bp, synthetic construct
  source 1..75: mol_type = other DNA
ttttaatatactatgcacacttattttcaatgcttctgaccatgcggaaagaacaaataataatcaagatgatta

SEQ ID NO: 779957 - DNA, 75 bp, synthetic construct
  source 1..75: mol_type = other DNA
gaaataccaggtggagacagtcaggtacgctcgatttaccacggcgcaggtacagcggacacacctgcggcactg

SEQ ID NO: 779958 - DNA, 75 bp, synthetic construct
  source 1..75: mol_type = other DNA
acatacaccggaatctagagctaaaatgtcggcatctcgaatgggtgaaaagaaccatcgctatggtaaacctag

SEQ ID NO: 779959 - DNA, 75 bp, synthetic construct
  source 1..75: mol_type = other DNA
ccgcgcaaccgcgcagaaagagttcctcactaaaggctttgaagatacccgcagccagattgatgccgtaatgcg

SEQ ID NO: 779960 - DNA, 75 bp, synthetic construct
  source 1..75: mol_type = other DNA
cgtaaaagtgaactgcttgaacagcgtgccgagccgtttccccggcgatctgtgccggatggtgtgcgttttatt

SEQ ID NO: 779961 - DNA, 75 bp, synthetic construct
  source 1..75: mol_type = other DNA
cgtggtaaccagacccgtgctgcgctgatgatgggcatcaaccgtggtacgctgcgtaaaaaattgaaaaaatac

SEQ ID NO: 779962 - DNA, 75 bp, synthetic construct
  source 1..75: mol_type = other DNA
aaataatgactcttcattagaaggcaatgatatcatagttacatcttgtgatgagcgtagattatttaatcttac

SEQ ID NO: 779963 - DNA, 75 bp, synthetic construct
  source 1..75: mol_type = other DNA
ccctcaggcccggaacatgttttgaagtgacaagtgtggatgaaaggcattatgagtggaatatcatttatgtca

SEQ ID NO: 779964 - DNA, 75 bp, synthetic construct
  source 1..75: mol_type = other DNA
gtcaaagaaatgcttgcagtatcattagcaagacttcatgagattgcgaacaataatccagaacaacaaatatcg

SEQ ID NO: 779965 - DNA, 75 bp, synthetic construct
  source 1..75: mol_type = other DNA
taaagaaaatagataaaaaaattgaagaaatagataatgcaatccgggatctttcctctgaaacagagagattca

SEQ ID NO: 779966 - DNA, 75 bp, synthetic construct
  source 1..75: mol_type = other DNA
ttatctctggccagcaactggctctgactgcccgccagtattatgaaaaacaactcggtagccttgagaaaacaa

SEQ ID NO: 779967 - DNA, 75 bp, synthetic construct
  source 1..75: mol_type = other DNA
agtctagggctgcttcgagcaggattggtgattcgtctatagtggtcactcaatcatacaaggcttcaactaagg

SEQ ID NO: 779968 - DNA, 75 bp, synthetic construct
  source 1..75: mol_type = other DNA
gtcggcaatgcccgggtggagcctaaaggtaacgccattcttatcaccaaacaggccagtggacggggaaaaatt

SEQ ID NO: 779969 - DNA, 75 bp, synthetic construct
  source 1..75: mol_type = other DNA
cgtttattgctttgaataattggattaaccaagaaacagtcaatactattggtggatacatccaaatggtaaccg

SEQ ID NO: 779970 - DNA, 75 bp, synthetic construct
  source 1..75: mol_type = other DNA
aaaccttgcacgatcgtcagtttttaccgcgaattctgctgggcgaatatttccgcgatcaatttttacgattag

SEQ ID NO: 779971 - DNA, 75 bp, synthetic construct
  source 1..75: mol_type = other DNA
atgcaacggaggatggcgcaaagtctaaacgctctgaattgaatggggagtatgaagttcgttatggttcccatc

SEQ ID NO: 779972 - DNA, 75 bp, synthetic construct
  source 1..75: mol_type = other DNA
catgagcgcaaagcctggtatcagtctgaacgtgagcgtcttaagttcgaacaggaaacggcacaactcattccg

SEQ ID NO: 779973 - DNA, 75 bp, synthetic construct
  source 1..75: mol_type = other DNA
aactgaatgatattacttcaatgcctgaaattgttttttgtacaaatatcctcccatcaagtaccacaagtgact

SEQ ID NO: 779974 - DNA, 75 bp, synthetic construct
  source 1..75: mol_type = other DNA
actgattatatagttaccggggccggaggatacaatggtggaaatgtaatattgtcgaaggcgttggccaatggc

SEQ ID NO: 779975 - DNA, 75 bp, synthetic construct
  source 1..75: mol_type = other DNA
tttgttttctgttgtttttggggagggattaggttagagtctcgaagagactatgtttttttaatgctggcttta

SEQ ID NO: 779976 - DNA, 75 bp, synthetic construct
  source 1..75: mol_type = other DNA
tatgatgttgcttaacgctaattctggcatcggaataggattctcaatgcagcctatcattgacgcccttagcac

SEQ ID NO: 779977 - DNA, 75 bp, synthetic construct
  source 1..75: mol_type = other DNA
tgaacagctaaatcagattgataaaaaaagtactatcattcttgaaccttgtggcaggagtacagctctgagaga

SEQ ID NO: 779978 - DNA, 75 bp, synthetic construct
  source 1..75: mol_type = other DNA
acggaaaccggaagtgacctggtacggctgggacggcgaccggctgaccacgatacagaacgacagaacccgcat

SEQ ID NO: 779979 - DNA, 75 bp, synthetic construct
  source 1..75: mol_type = other DNA
gaacagcgggtgggcatgagagtaacctcaagctgtataaacttactgatattctggcagaattaatgaagttgc

SEQ ID NO: 779980 - DNA, 75 bp, synthetic construct
  source 1..75: mol_type = other DNA
ccatcaatgaaagaaaatggtgaaatgtcaccacaggatcggaaagcctggtatcagtcagaaaatgaaaggctg

SEQ ID NO: 779981 - DNA, 75 bp, synthetic construct
  source 1..75: mol_type = other DNA
catcgctactcgttaagcaaaacccggccccgcattacggtcacggctggatctctggaacggatggtaagcgct

SEQ ID NO: 779982 - DNA, 75 bp, synthetic construct
  source 1..75: mol_type = other DNA
tttaaacttattggaaacttcgttgagataacacttaacgataacgaaatactattcagtagtaatattgtaagg

SEQ ID NO: 779983 - DNA, 75 bp, synthetic construct
  source 1..75: mol_type = other DNA
aaaggagctacagcacagggaacccctgcattatacatcgccatgagcaagggtaatgaagacgtcgtgttatct

SEQ ID NO: 779984 - DNA, 75 bp, synthetic construct
  source 1..75: mol_type = other DNA
ggaaaataatcaccctttgtgtgtcacacggttcctctctaaaattaatggcatcgcctttaaatacaagttgag

SEQ ID NO: 779985 - DNA, 75 bp, synthetic construct
  source 1..75: mol_type = other DNA
tggaatggcagtcagtgggtgacagatgaagaagccaggcgtaatgcgctgataaatcaggcggcagagaagaaa

SEQ ID NO: 779986 - DNA, 75 bp, synthetic construct
  source 1..75: mol_type = other DNA
ctgaactggatgcgttgattgtgccgggggggggttggcgcggcgaagaatttaagcaattttgccactcttggt

SEQ ID NO: 779987 - DNA, 75 bp, synthetic construct
  source 1..75: mol_type = other DNA
tattttcgcgggtattgcgacacgaatgccatttgcccctatacatccatcggcaatgttgttaataatggccac

SEQ ID NO: 779988 - DNA, 75 bp, synthetic construct
  source 1..75: mol_type = other DNA
aggccagactcaacagcttattacattattcaaacagttacccatactccctgaaaaagaaatcattgaaataat

SEQ ID NO: 779989 - DNA, 75 bp, synthetic construct
  source 1..75: mol_type = other DNA
atccgggcctgtgggaactgccgtttggtactaccgcgcgcgagatcctcgaagattacgccggtggtatgcgtg

SEQ ID NO: 779990 - DNA, 75 bp, synthetic construct
  source 1..75: mol_type = other DNA
gagttcagcggcaggctctgcccaaaatgttggtattcaaattttggaccgtacgggggaggtattaatacttga

SEQ ID NO: 779991 - DNA, 75 bp, synthetic construct
  source 1..75: mol_type = other DNA
atagttgtgccatgaaagtgtctaccgctaccgcctgtgcatttaagtcggtgttgatggcgcaacaggtgatgc

SEQ ID NO: 779992 - DNA, 75 bp, synthetic construct
  source 1..75: mol_type = other DNA
cgaagaatttgaggcgggaatcaaacagccgttcagcaatacccatttgattaatgggattcagccgaacctgct

SEQ ID NO: 779993 - DNA, 75 bp, synthetic construct
  source 1..75: mol_type = other DNA
aaagcctggcagccaggcggcgcggggactgatttcctgactgaagcgcaccttgacctgccgatggaattcgaa

SEQ ID NO: 779994 - DNA, 75 bp, synthetic construct
  source 1..75: mol_type = other DNA
actacagcagatcgggcgtattggtggtagctcatccgaggaagccgcaaacgccttgcgacagttaggtcaatc

SEQ ID NO: 779995 - DNA, 75 bp, synthetic construct
  source 1..75: mol_type = other DNA
aaaaatctatccgttgtctggaagcggcgatggaccatgataaaaaattatgctggtcgcgcagaaagaagcttc

SEQ ID NO: 779996 - DNA, 75 bp, synthetic construct
  source 1..75: mol_type = other DNA
tctgttcgtgaagccttggctactttacgacgtaaaggacttattgaagttaataatggtgaaagaacgaaggtt

SEQ ID NO: 779997 - DNA, 75 bp, synthetic construct
  source 1..75: mol_type = other DNA
gaaaaaaactctctgagttagttgaggaagaactggagtttatgatcagaaaaggaatttttcaggagggtgaac

SEQ ID NO: 779998 - DNA, 75 bp, synthetic construct
  source 1..75: mol_type = other DNA
aggcggcggagagggtatcgcaacgctgatccctgtattgaatggtgttcatcaagcgggtctgagtaccacaat

SEQ ID NO: 779999 - DNA, 75 bp, synthetic construct
  source 1..75: mol_type = other DNA
atctatcaggtcatccgatcaatgtttctgaagggctggaatttgtgcaatcaggtaccaatgtgccctatgtgc

SEQ ID NO: 780000 - DNA, 75 bp, synthetic construct
  source 1..75: mol_type = other DNA
agcgttgaaacggatagtcagggattcgctgaaattcttgtgacaagcaccgaggtcggactgaaaacagtttca

SEQ ID NO: 780001 - DNA, 75 bp, synthetic construct
  source 1..75: mol_type = other DNA
tgataactctgcctttagcggtaaagtcaaaattgagcaaaatggcgctttagggatcacccaaaatataggtac

SEQ ID NO: 780002 - DNA, 75 bp, synthetic construct
  source 1..75: mol_type = other DNA
aattaccggtaatggtgacctggcattcagcagccagaaaggccagactgtatcgctttctaacaaagacaacga

SEQ ID NO: 780003 - DNA, 75 bp, synthetic construct
  source 1..75: mol_type = other DNA
gagactgaactggatatgaatggtcacagccagaccgtgggcacgctcaatggcagcgccgattcactgctgagc

SEQ ID NO: 780004 - DNA, 75 bp, synthetic construct
  source 1..75: mol_type = other DNA
tcattaaagaattaatgcgcagtatccctcaggattatcagataatattatgcgcaatggagaataatgtgttaa

SEQ ID NO: 780005 - DNA, 75 bp, synthetic construct
  source 1..75: mol_type = other DNA
tatttcaaccacgatgggtttgatggcagtacctggctgctgacaggtgagaaagcatcggaggaaatcgtcgaa

SEQ ID NO: 780006 - DNA, 75 bp, synthetic construct
  source 1..75: mol_type = other DNA
atggagctgaccgactacgctaacatggcgctgagcatcccgtctgcgaacaccaatatctggaacctggaacaa

SEQ ID NO: 780007 - DNA, 75 bp, synthetic construct
  source 1..75: mol_type = other DNA
aatgacgaacggcggccaagccgtgacgaacgaacagggtaaagctaccgtcacttataccaatacccgctcctc

SEQ ID NO: 780008 - DNA, 75 bp, synthetic construct
  source 1..75: mol_type = other DNA
atcacccgtgatgactacggtacaggctatatcaacggctttaccaataacggcgacggcaccttttccagcgct

SEQ ID NO: 780009 - DNA, 75 bp, synthetic construct
  source 1..75: mol_type = other DNA
tttcgatggtgatggcgatatggatctcttcctgccagccagccagggaagagctaactacggctccctgttatt

SEQ ID NO: 780010 - DNA, 75 bp, synthetic construct
  source 1..75: mol_type = other DNA
atgatttaaaaagaactgaagaagaagcattgaaagagttagcaaaaaacattggcattaaaagaaaattaattc

SEQ ID NO: 780011 - DNA, 75 bp, synthetic construct
  source 1..75: mol_type = other DNA
acaagcggatttacgctaaagccggggaactggccgacacggtaacggacagcgccggatatagacgcgtatctg

SEQ ID NO: 780012 - DNA, 75 bp, synthetic construct
  source 1..75: mol_type = other DNA
agctactgctctcccttttcctatatgacccggtgacaggccgcctgcaacataaagctaaccgacgccgggtta

SEQ ID NO: 780013 - DNA, 75 bp, synthetic construct
  source 1..75: mol_type = other DNA
tttcctgccggtccccggaaagagcaaaaggatgtcgccgcaggctccgctttacccggccatgcagggcatggc

SEQ ID NO: 780014 - DNA, 75 bp, synthetic construct
  source 1..75: mol_type = other DNA
cagtataaagagttcggtatcaagttgaatgttggggccaaggtaagcagcacaaagaatattcgtattactctt

SEQ ID NO: 780015 - DNA, 75 bp, synthetic construct
  source 1..75: mol_type = other DNA
ataattctttatttgccacgaattttatatcgtagattacccttagaaacaaagatggctataaaaaaaaggtta

SEQ ID NO: 780016 - DNA, 75 bp, synthetic construct
  source 1..75: mol_type = other DNA
cgaacgtttcggtatttcggtggctgagttacgcaaactcaaccaatttcgtacgtttgctcgaggttttgataa

SEQ ID NO: 780017 - DNA, 75 bp, synthetic construct
  source 1..75: mol_type = other DNA
gatttacattattcaaaaacaaatgtaattttatttcaaataatgatcttctgcagactgcaataattttcaata

SEQ ID NO: 780018 - DNA, 75 bp, synthetic construct
  source 1..75: mol_type = other DNA
gttttaactgttccgcgtgcgcttagccgcattcaccgcatcacaaaatacactttaaaaatggcggatatccat

SEQ ID NO: 780019 - DNA, 75 bp, synthetic construct
  source 1..75: mol_type = other DNA
gagcgtctgggtaatacgtactataccgacatggtgacgggtgagcagaaacaaaccactatgtggatgcgccat

SEQ ID NO: 780020 - DNA, 75 bp, synthetic construct
  source 1..75: mol_type = other DNA
cgtcgctacagagcaaggtgaggccatgaacctggtcaacgcgaaatatggcaataccccgggcctgaaagccta

SEQ ID NO: 780021 - DNA, 75 bp, synthetic construct
  source 1..75: mol_type = other DNA
aatcgctcaaaaatatgatggtcaaaaaccaaatcaacaagagttttccaatgagttgagagtaatcaataaagc

SEQ ID NO: 780022 - DNA, 75 bp, synthetic construct
  source 1..75: mol_type = other DNA
caggcgaggaaatcttctgcgacgaacatggtcgcgtgcgggtgaagttcaactgggaccgctataacccggcag

SEQ ID NO: 780023 - DNA, 75 bp, synthetic construct
  source 1..75: mol_type = other DNA
aggactggatcagccagaaagatgtctatcgccagcaggaggcgcgttgtggcgcagtcagtctgtaccgtcgta

SEQ ID NO: 780024 - DNA, 75 bp, synthetic construct
  source 1..75: mol_type = other DNA
gccagcctccggcgtgcgtatcggtgtgcccaacagacgcgcttaaattcggcagactggatgagacagagatcc

SEQ ID NO: 780025 - DNA, 75 bp, synthetic construct
  source 1..75: mol_type = other DNA
gcagatattacatgtgcctggcttctgggcagaattatcctggcatttacgccagcgtacgacgggtaagactaa

SEQ ID NO: 780026 - DNA, 75 bp, synthetic construct
  source 1..75: mol_type = other DNA
tctacaccaatcagactgtgtgcaatgaaggtgaacggtttgaggatattgtcgacgcaactcttcgcacgctca

SEQ ID NO: 780027 - DNA, 75 bp, synthetic construct
  source 1..75: mol_type = other DNA
tctgcgacatcatcgacaaatccggcgtagaaattgatgcagaagagcgccagaagattatcgacgaggcgatcc

SEQ ID NO: 780028 - DNA, 75 bp, synthetic construct
  source 1..75: mol_type = other DNA
ggtgatcttgctcttgatcgccactgatggtgtggaacgtctggaatcctacggttacacctgtgcgggtgactt

SEQ ID NO: 780029 - DNA, 75 bp, synthetic construct
  source 1..75: mol_type = other DNA
gccggaaccgtggcggctcggttttttctggagaacggggagcaaaaacacgcaaaggattttgaggcggcaaaa

SEQ ID NO: 780030 - DNA, 75 bp, synthetic construct
  source 1..75: mol_type = other DNA
tgggggtctggggttctccccagacggtttccggttgcgctcaaggcgctgccgaaaccgtggcaaacgatggcg

SEQ ID NO: 780031 - DNA, 75 bp, synthetic construct
  source 1..75: mol_type = other DNA
acctggtttgctggaattggtggtcagtggcgatatcaaaaaagccgttgagcgcattcgtgaggtggaatacgg

SEQ ID NO: 780032 - DNA, 75 bp, synthetic construct
  source 1..75: mol_type = other DNA
tcaccaaaaatattggggcctgccgcgcatatagcgcatggctggatattggtggcgatagtcaggtctggacaa

SEQ ID NO: 780033 - DNA, 75 bp, synthetic construct
  source 1..75: mol_type = other DNA
tactcatcaaaccctcaaggatgaatctgaaaaactttcttcacaagataagatcaattatagaaaagaacaaag

SEQ ID NO: 780034 - DNA, 75 bp, synthetic construct
  source 1..75: mol_type = other DNA
gtcaccatcgccatcaactatgactacaacgaaaatctctggctggagcagcaactgaagcaaaagtttggcctg

SEQ ID NO: 780035 - DNA, 75 bp, synthetic construct
  source 1..75: mol_type = other DNA
attatgatatagttaagatgggggcgactcattggcgattcaatcaaggggtacctccgtcacatttaaataaga

SEQ ID NO: 780036 - DNA, 75 bp, synthetic construct
  source 1..75: mol_type = other DNA
acaccctgggtggcaatctgaccaacaacggtacgctgatgaccgggatgtcaggactgcaagctggcaacgtgt

SEQ ID NO: 780037 - DNA, 75 bp, synthetic construct
  source 1..75: mol_type = other DNA
gttacggcctgacccagcttgaattgcaggctaccgacagtgatgccctggtgctgagtgccaacggtaagagcg

SEQ ID NO: 780038 - DNA, 75 bp, synthetic construct
  source 1..75: mol_type = other DNA
tgccgtttgccctggactggctaccgaaagcaaggctgttgctgccaccagcggcactaccctctcacaatgcga

SEQ ID NO: 780039 - DNA, 75 bp, synthetic construct
  source 1..75: mol_type = other DNA
aaaacaagcacactggccgttatccaataccttggtttaagagaactcggtaccagcggtgaaaagatccccctg

SEQ ID NO: 780040 - DNA, 75 bp, synthetic construct
  source 1..75: mol_type = other DNA
gagctaacggcggaagatttaaatcttgagcaaaccgtagaattagccgtaggagcattacagaaaaaccagaac

SEQ ID NO: 780041 - DNA, 75 bp, synthetic construct
  source 1..75: mol_type = other DNA
actggaatagcggtgtttatgatgcagacctaaaaggcgcatcaacattaattcttcatttcaatatgaacgcgg

SEQ ID NO: 780042 - DNA, 75 bp, synthetic construct
  source 1..75: mol_type = other DNA
gatttaaacagaaaaagaaatccttctgcagatttatattatgatgaccttgatactcataatcttgtttttggt

SEQ ID NO: 780043 - DNA, 75 bp, synthetic construct
  source 1..75: mol_type = other DNA
gacgccccttgtttgccgtcagcaggaaaacagcctggctgtggatgcaacaggcaatcgacagagcccgggagg

SEQ ID NO: 780044 - DNA, 75 bp, synthetic construct
  source 1..75: mol_type = other DNA
gatgtttcaggcgataacaagtacgtgacaacctcatgtcgttttaaaacagaacgacaggtaaggttacgtatc

SEQ ID NO: 780045 - DNA, 75 bp, synthetic construct
  source 1..75: mol_type = other DNA
aatggtctggtagcggctggcgtgtggaatggtggccctatcgggcaactgaattccggcgatacgctgactaaa

SEQ ID NO: 780046 - DNA, 75 bp, synthetic construct
  source 1..75: mol_type = other DNA
tgttgacccgggattttatgccggtttcttacctaagcctggcggtgggatgaacctgttaatcacctcagtgga

SEQ ID NO: 780047 - DNA, 75 bp, synthetic construct
  source 1..75: mol_type = other DNA
cctccactaccgatctggcttataagctgaaggcggcaaaatacgctcgcacgtttgtgcagtattccaccagca

SEQ ID NO: 780048 - DNA, 75 bp, synthetic construct
  source 1..75: mol_type = other DNA
gattggactggggatatacgtactggcagaagcgttaatttttgcacctttactgacactggcagcgtatattaa

SEQ ID NO: 780049 - DNA, 75 bp, synthetic construct
  source 1..75: mol_type = other DNA
gttgaggctgacgtgatttccgttgctgctgctattgaggcatccagcttaagccgcattctggccgttaccact

SEQ ID NO: 780050 - DNA, 75 bp, synthetic construct
  source 1..75: mol_type = other DNA
gacagggaagcgcgtaagtcgccggtgattcaggcggcgatcaaactggcgggtgccattcactatgccgacgtg

SEQ ID NO: 780051 - DNA, 75 bp, synthetic construct
  source 1..75: mol_type = other DNA
catgaaacgattcaaacatggcgcgaatatttatgtgatgcctcctttaccgtcgctctctggttaacaccacag

SEQ ID NO: 780052 - DNA, 75 bp, synthetic construct
  source 1..75: mol_type = other DNA
agagtgtgcaatttgcagtgcgctgcgatgaactcattcttgacgatcgtcgtgtgtctgtaacggggttgcgtg

SEQ ID NO: 780053 - DNA, 75 bp, synthetic construct
  source 1..75: mol_type = other DNA
gattcagtagtcacattgccaaatgtcagcgccaccaagttgcaaactaatggtgcagtctctggcgttaaaact

SEQ ID NO: 780054 - DNA, 75 bp, synthetic construct
  source 1..75: mol_type = other DNA
ggttgtcgctgatgatgttgctgatggcggtgatgtgcttgatgctgacgacgtgattgaggttgctaaactcat

SEQ ID NO: 780055 - DNA, 75 bp, synthetic construct
  source 1..75: mol_type = other DNA
accaaagcgccaatagaaagcccgagtctgacaggaacgccaaccgcgccgacggcagcgcaaggtacaaatagc

SEQ ID NO: 780056 - DNA, 75 bp, synthetic construct
  source 1..75: mol_type = other DNA
gtctggttctcggcggcaatggtgctgttgtgtgctggcttcgtgctgtacgacacgtctaatattattcatcat

SEQ ID NO: 780057 - DNA, 75 bp, synthetic construct
  source 1..75: mol_type = other DNA
ttagatataacaatgatagcttctcgtggaaatgttgcagacacagggataactgatcgtgtcaatgacataata

SEQ ID NO: 780058 - DNA, 75 bp, synthetic construct
  source 1..75: mol_type = other DNA
acccctgccgggcagttacagagccagcacctgaacagcctgctgtctgaccgcgattacacctggaacgacaac

SEQ ID NO: 780059 - DNA, 75 bp, synthetic construct
  source 1..75: mol_type = other DNA
ggcgacgtgaacgggacctgacaggctggatgtcgctgtcacggaaaccgcaagtgacctggtacggctgggacg

SEQ ID NO: 780060 - DNA, 75 bp, synthetic construct
  source 1..75: mol_type = other DNA
gcgcaacgctttcttgaccgagtcttggcattaattgatggcgcagaggctgaagcgaatgatgcagcgtttgag

SEQ ID NO: 780061 - DNA, 75 bp, synthetic construct
  source 1..75: mol_type = other DNA
gtatggcggcgtgaacgggacctgacgggctggatgtcgctgtcacggaaaccgcaagtgacctggtacggctgg

SEQ ID NO: 780062 - DNA, 75 bp, synthetic construct
  source 1..75: mol_type = other DNA
ttgataaaacataacaaaataactatcgaaatggctcttgacttggctcggcgtgagttagagttaagggaaatt

SEQ ID NO: 780063 - DNA, 75 bp, synthetic construct
  source 1..75: mol_type = other DNA
ttcaccagtcaccattttcgacacacactcaataccttgcttgatgaaggcggtttgagtgatctactgcagacg

SEQ ID NO: 780064 - DNA, 75 bp, synthetic construct
  source 1..75: mol_type = other DNA
aattagcagatctcaccgctgcggctcgcgagacggcagaagagatgcataaaacacgtgggccggatttacgct

SEQ ID NO: 780065 - DNA, 75 bp, synthetic construct
  source 1..75: mol_type = other DNA
cgtgtgggctaaggatgataagggtcgtctggacgagcaaaaacgccaatatgcgcttactgctctagcccgaaa

SEQ ID NO: 780066 - DNA, 75 bp, synthetic construct
  source 1..75: mol_type = other DNA
agcctgccgccggtggagtggctgacctatggcagcggttacctggcgggcatgaagctgggcgggacgccgcgg

SEQ ID NO: 780067 - DNA, 75 bp, synthetic construct
  source 1..75: mol_type = other DNA
agaatacagcccggatgtggtgacgggcctcatcacgcgcatcaccacgccggatggcagggcatcggagtttta

SEQ ID NO: 780068 - DNA, 75 bp, synthetic construct
  source 1..75: mol_type = other DNA
tggaagacttaagcacaattgcggaatacatgcgcggcgacgatcctgatcgccctgttgttattgatatgaaaa

SEQ ID NO: 780069 - DNA, 75 bp, synthetic construct
  source 1..75: mol_type = other DNA
tatttgccaaaatttgagaaaaaaaaacgaatagctatagctgttggtcgattaactcaccagaagggatttgat

SEQ ID NO: 780070 - DNA, 75 bp, synthetic construct
  source 1..75: mol_type = other DNA
cgcagatgctcgcaaagtcgttgttccgtcaggccaagaagcattttgaccgactgcatgctcaggatcaaatca

SEQ ID NO: 780071 - DNA, 75 bp, synthetic construct
  source 1..75: mol_type = other DNA
accatattgcacatttaaacgccaaaaacactacaaaactggaatatttaaacttaagcaataacaatttactgc

SEQ ID NO: 780072 - DNA, 75 bp, synthetic construct
  source 1..75: mol_type = other DNA
acgcacagcttaaagcatcgcaacaagcagccgccgaagaagctgcaatgcgtgaccagttgcgggctgcccttg

SEQ ID NO: 780073 - DNA, 75 bp, synthetic construct
  source 1..75: mol_type = other DNA
cacttcagaaatgaactcacgaccagaacagggagagtattcagactccttgcgggcaaaggtctggcggggttt

SEQ ID NO: 780074 - DNA, 75 bp, synthetic construct
  source 1..75: mol_type = other DNA
aggaagcccggcttgtgaaaacgctgaacagggcactgttatgggccgcaacagcccctgaagcactaaaaatgg

SEQ ID NO: 780075 - DNA, 75 bp, synthetic construct
  source 1..75: mol_type = other DNA
aatggcaatccgtgccgggggaaaaagaggcttacaccggtcttttgaagcatctgttcgccgtcctggataacg

SEQ ID NO: 780076 - DNA, 75 bp, synthetic construct
  source 1..75: mol_type = other DNA
tgcctgatcaagatatagaagttcattttgatgaaatatctaaaaacacacttgaagtctctgtcatttccactg

SEQ ID NO: 780077 - DNA, 75 bp, synthetic construct
  source 1..75: mol_type = other DNA
actcagctcagcccagcctaaattataatgggatagactactccgagttcaaagtagtactaactataaccatat

SEQ ID NO: 780078 - DNA, 75 bp, synthetic construct
  source 1..75: mol_type = other DNA
ttttagttatgatgatgttattttcaatcctatgtaaatataaaatggcagatcataatcaaacttcattaagtt

SEQ ID NO: 780079 - DNA, 75 bp, synthetic construct
  source 1..75: mol_type = other DNA
tgaatcgaaaaaagaagacactgaaattaaagagttcgggatgggaactgttagcgtaagtgataatattaaaaa

SEQ ID NO: 780080 - DNA, 75 bp, synthetic construct
  source 1..75: mol_type = other DNA
ggagcggttattacgaccgggtacagcatgaaccctcagacagaaaacaaagtgatgagcggctaaaactggaga

SEQ ID NO: 780081 - DNA, 75 bp, synthetic construct
  source 1..75: mol_type = other DNA
tctatctttaaatggaaaaaaagtatcctattgacaataataatattaattattttatccttatcaagggcggca

SEQ ID NO: 780082 - DNA, 75 bp, synthetic construct
  source 1..75: mol_type = other DNA
aaagcaacactgcatggtataaagataggtggcatcgcattaacaagaaatgatggtgaaaatataaacttgctg

SEQ ID NO: 780083 - DNA, 75 bp, synthetic construct
  source 1..75: mol_type = other DNA
ttaaatagcaacattattaatataccagtcatggccagttactatgtatatgatgaaaaaaaagttaaatctggc

SEQ ID NO: 780084 - DNA, 75 bp, synthetic construct
  source 1..75: mol_type = other DNA
tattcgtgatttagcatttcttgatgctcatcaggctgtctacgttcagcatcatgagggcaaagagcctttaga

SEQ ID NO: 780085 - DNA, 75 bp, synthetic construct
  source 1..75: mol_type = other DNA
ctttcagcgccgttgacaggctgacccggcctgccgaaaacgcccgccgcctgatgggcagtttggtgactccat

SEQ ID NO: 780086 - DNA, 75 bp, synthetic construct
  source 1..75: mol_type = other DNA
catataccatatcctgatgcaggattggtgaaaaataatgaaatagagtgcacatactacatcccggttacatgg

SEQ ID NO: 780087 - DNA, 75 bp, synthetic construct
  source 1..75: mol_type = other DNA
atgctgttctgaacatcatcggcgtcgctgacaagatgacgaacaacaacgcaagccaactgaccgacgcgcaga

SEQ ID NO: 780088 - DNA, 75 bp, synthetic construct
  source 1..75: mol_type = other DNA
acgcgttgtttcgggcgaaacgttgctctcttaccgaatgccgcaggtgttgcagcgttttcggcaacgcgcacc

SEQ ID NO: 780089 - DNA, 75 bp, synthetic construct
  source 1..75: mol_type = other DNA
accagttttccccgctgaaaaaatatcccttggtggaacagttccgttatccactatggcaggctaaaccggtcg

SEQ ID NO: 780090 - DNA, 75 bp, synthetic construct
  source 1..75: mol_type = other DNA
aagtggatcgtagttttggcgatattccggaaggtgcgaataagcggggaaattcttctcggctgactcagtcat

SEQ ID NO: 780091 - DNA, 75 bp, synthetic construct
  source 1..75: mol_type = other DNA
gcatcggtagagttatcataggtgatgatgttgaaatcggttgtaacaacaccattgaccgaggaacacttggag

SEQ ID NO: 780092 - DNA, 75 bp, synthetic construct
  source 1..75: mol_type = other DNA
cagaatgaccgtgcggatgtgctggtcagtatcagccgcgtatctgcacagtcgcttgaagccgcgattgctgac

SEQ ID NO: 780093 - DNA, 75 bp, synthetic construct
  source 1..75: mol_type = other DNA
gcgtattgatggtgaccagaagcagacggcgacggcaatgaaggcatgcattaaagagtacaacgccaccctgcc

SEQ ID NO: 780094 - DNA, 75 bp, synthetic construct
  source 1..75: mol_type = other DNA
tttttctggatcttcgtcaacaaagatgctggctatcactgggtggccgtcgtggaagcctcgcaggaactcctg

SEQ ID NO: 780095 - DNA, 75 bp, synthetic construct
  source 1..75: mol_type = other DNA
cgtggcgctgaatatggataatttcgcgcagaaacatcaggttacgtctggtgctgactggaatattgatgtgaa

SEQ ID NO: 780096 - DNA, 75 bp, synthetic construct
  source 1..75: mol_type = other DNA
atgcaatctactattaaatcgttgcccgctatttcgcttagcaacatttacaagtgttatggcgctggggcagga

SEQ ID NO: 780097 - DNA, 75 bp, synthetic construct
  source 1..75: mol_type = other DNA
atgacccgcaacacccgggccggatggtggcacaccgttacgcgggaaggccggatatgcgctaccgctacgacg

SEQ ID NO: 780098 - DNA, 75 bp, synthetic construct
  source 1..75: mol_type = other DNA
ggcggcgtttaaccagctacagacctataaaaacgaactgagcgacctgtttatctgcaatgaagcgctggtggt

SEQ ID NO: 780099 - DNA, 75 bp, synthetic construct
  source 1..75: mol_type = other DNA
cgccgtcgcgggatgataatcgtgaaacatttacccctgcacagaacatgatttacgcccgccgacgcgccggac

SEQ ID NO: 780100 - DNA, 75 bp, synthetic construct
  source 1..75: mol_type = other DNA
tcaagcgtagcccattcctaatggatatgctgaaaaatgatgatgttgatatggctatttcaacggttgattgtg

SEQ ID NO: 780101 - DNA, 75 bp, synthetic construct
  source 1..75: mol_type = other DNA
ctgaacatcagcaacgcggccatcgtcgatcttaatggatcgacgcagacggtagagacattcaccgggcagatg

SEQ ID NO: 780102 - DNA, 75 bp, synthetic construct
  source 1..75: mol_type = other DNA
gcttgatgcgagtgcagctgtcatcctccgacaagatgtttggctttacccatgcaacagggactgaattcgccg

SEQ ID NO: 780103 - DNA, 75 bp, synthetic construct
  source 1..75: mol_type = other DNA
ttaggcagaggaaatattgctagtgacggtctgttaacgctaaaaaacgtgaccggcgaacttaacgaagttagc

SEQ ID NO: 780104 - DNA, 75 bp, synthetic construct
  source 1..75: mol_type = other DNA
ttcaccgcgaggaaggtatcagcctttaccgccactatgacaaccgtggccggttaaccggtgaaagacgcacag

SEQ ID NO: 780105 - DNA, 75 bp, synthetic construct
  source 1..75: mol_type = other DNA
ttgcggaacagatgtcagcacggttgacgtcaccttttcaggaacccccgacggagtgcagagcgaaatgctgtc

SEQ ID NO: 780106 - DNA, 75 bp, synthetic construct
  source 1..75: mol_type = other DNA
gcatgattgaggaagataactgggatgcgcaagcaacggaccatctggttgcagcgatggagacactggatccca

SEQ ID NO: 780107 - DNA, 75 bp, synthetic construct
  source 1..75: mol_type = other DNA
gttgcggcgacgattgtggcgtctaccggcaaatatctgccattacggagtaacatccagccgggcagtaaaaaa

SEQ ID NO: 780108 - DNA, 75 bp, synthetic construct
  source 1..75: mol_type = other DNA
taccgcacggcgacactcaaatccgcaggggcggtgccagagatgctccagcaaattttggccaaggtagaagga

SEQ ID NO: 780109 - DNA, 75 bp, synthetic construct
  source 1..75: mol_type = other DNA
ggaacggcagagacggctgtagagcgacaggggcatggttttcagcggacgattttgatctcggcgctccagctc

SEQ ID NO: 780110 - DNA, 75 bp, synthetic construct
  source 1..75: mol_type = other DNA
ggagtccggcctgtattataaccgccaccgctattatgacccgctgcgggggaggtatatcactcaggatccgat

SEQ ID NO: 780111 - DNA, 75 bp, synthetic construct
  source 1..75: mol_type = other DNA
cgaaggtcttgccaaggcatgccgaaatgctaaaggacatttagtggatatgttctctgaagcggaaaggtcccc

SEQ ID NO: 780112 - DNA, 75 bp, synthetic construct
  source 1..75: mol_type = other DNA
aataatcacgagttagttagttctggtgagcctgacgtaatatgtttaagcaagcaggtctggaaaatcttctca

SEQ ID NO: 780113 - DNA, 75 bp, synthetic construct
  source 1..75: mol_type = other DNA
ttccgcttctggcacatagcagaccagagacactggcgtaaagccatggaggatcggtgggaggaggtaaaaatc

SEQ ID NO: 780114 - DNA, 75 bp, synthetic construct
  source 1..75: mol_type = other DNA
cagtatatatctgaacataaaacatatctaaatatagaacaacctcaaattcaaatgctaatagataagtttaaa

SEQ ID NO: 780115 - DNA, 75 bp, synthetic construct
  source 1..75: mol_type = other DNA
tcagttccacgcggtgcgtgaagcggttgccgctacgattgtggcgtctactggcaaacatctgccgctgcgcag

SEQ ID NO: 780116 - DNA, 75 bp, synthetic construct
  source 1..75: mol_type = other DNA
ggcaggaaaacccggcttcagttacgcaggtttttctcgcgacccgttagcgttcttacgcgatgcggtgaacta

SEQ ID NO: 780117 - DNA, 75 bp, synthetic construct
  source 1..75: mol_type = other DNA
gcaatgataacattctccattttggtaatgactccaacttactgatagtgttttatgttcagataatgcccgatg

SEQ ID NO: 780118 - DNA, 75 bp, synthetic construct
  source 1..75: mol_type = other DNA
caaagcatcgctgaacggcggagagttgcagttattaagcacagggtgtagcaatgataacattctccattttgg

SEQ ID NO: 780119 - DNA, 75 bp, synthetic construct
  source 1..75: mol_type = other DNA
acactaatataattcgaatgtccattctgaatctagagtttctaagaactacatatcctaataaccttatgtatt

SEQ ID NO: 780120 - DNA, 75 bp, synthetic construct
  source 1..75: mol_type = other DNA
aacaaagaaaaaaattgcgattatgactatttattgcaccctgcaatttcaatatcaaaaattattggtggatgc

SEQ ID NO: 780121 - DNA, 75 bp, synthetic construct
  source 1..75: mol_type = other DNA
atggggtttcatttgacggttctgcgaatatttcactgtcaccagcaaatattggttgcccggcatctcctactg

SEQ ID NO: 780122 - DNA, 75 bp, synthetic construct
  source 1..75: mol_type = other DNA
aaaaaggcccatcattggcatataatttaaacttccttgctcaggatggtaatatatacattagtgacaatcata

SEQ ID NO: 780123 - DNA, 75 bp, synthetic construct
  source 1..75: mol_type = other DNA
taataggttaaggccgcttatcattaacaatgccaatggtgctgttacgatcggtaatggactcaatgttactgg

SEQ ID NO: 780124 - DNA, 75 bp, synthetic construct
  source 1..75: mol_type = other DNA
gtgcaatgaatcaacttatcaataatgaaatctatactttaaaaaccggttcaacctctcatgacttagaaattc

SEQ ID NO: 780125 - DNA, 75 bp, synthetic construct
  source 1..75: mol_type = other DNA
attattgacaacatcaatggtgattatggtcgtcagacagtgaactacgaactgagttgtgacgccagtgtacgt

SEQ ID NO: 780126 - DNA, 75 bp, synthetic construct
  source 1..75: mol_type = other DNA
ggcctcaccggatatcacctttcacggcacgctggtgtcgccgcctgcctgcaccatcaacgaaggccagaccat

SEQ ID NO: 780127 - DNA, 75 bp, synthetic construct
  source 1..75: mol_type = other DNA
aacttaagaaaatgactgttgcagagcgcaagaaagaagccatgcgccagcttaaagcatcctttgagcgcgcca

SEQ ID NO: 780128 - DNA, 75 bp, synthetic construct
  source 1..75: mol_type = other DNA
cgtggctggtattacatgatctgacagggaaagatcgtagcgaaatcaaaaaagacgtggatttcccggaagccg

SEQ ID NO: 780129 - DNA, 75 bp, synthetic construct
  source 1..75: mol_type = other DNA
ggggatctgcacgaaagccagccaggaaaaactatctgttattgccaatgtggcagcgcagaaagcagcagcaaa

SEQ ID NO: 780130 - DNA, 75 bp, synthetic construct
  source 1..75: mol_type = other DNA
ccaattattgaacgagcagaggcagaaaaaattgatgcagcggtccggtctgcctacaaaaaatttgatgatgct

SEQ ID NO: 780131 - DNA, 75 bp, synthetic construct
  source 1..75: mol_type = other DNA
gccagacctgatgaccgttgagcaggaagatattattcctaacgactacgccggtaacatgggattgaaccgccc

SEQ ID NO: 780132 - DNA, 75 bp, synthetic construct
  source 1..75: mol_type = other DNA
tataaatggggtattgtttgacggttctaaaaacattgagctaactccaaggtctataggcacgatcaactcaac

SEQ ID NO: 780133 - DNA, 75 bp, synthetic construct
  source 1..75: mol_type = other DNA
cctgtgctatcagcgatggaaagaccctcgaagtggaatttcgcgatctcatcatcgacagtatcaacggagact

SEQ ID NO: 780134 - DNA, 75 bp, synthetic construct
  source 1..75: mol_type = other DNA
ccccggcaaaagtggcgattttatcgaaacccttgccgctggcggagcagcgtcagtggcaaagccagttaccgg

SEQ ID NO: 780135 - DNA, 75 bp, synthetic construct
  source 1..75: mol_type = other DNA
acgtctccaacgttatctcgctgaaaataagccgctgtttaccacggacacacaagagaaaagctggctctatct

SEQ ID NO: 780136 - DNA, 75 bp, synthetic construct
  source 1..75: mol_type = other DNA
gtggcaaaagatgaaaatggcgaggctatcggttgcggggcgatccggccaatatctgaagatattgctgaattg

SEQ ID NO: 780137 - DNA, 75 bp, synthetic construct
  source 1..75: mol_type = other DNA
gagcgcgatacccgtggtgatacctcctgggtgccacctgaaatgattgaacgtattgaagttctgcgtggtccg

SEQ ID NO: 780138 - DNA, 75 bp, synthetic construct
  source 1..75: mol_type = other DNA
gattaataactcaaggacagccaatggcaccgatggtcaggcgtacatggacaataacggtaactggctttgcgg

SEQ ID NO: 780139 - DNA, 75 bp, synthetic construct
  source 1..75: mol_type = other DNA
aaaagaaaatgtgctattattatcaatagaaaaaacggctcgagaaatctctaatagaataatatctttaaatac

SEQ ID NO: 780140 - DNA, 75 bp, synthetic construct
  source 1..75: mol_type = other DNA
gaacaaagggctcaatatgagctcgacaaacgtcgccaagggtgtggcctggattgataagcggctgatgggcga

SEQ ID NO: 780141 - DNA, 75 bp, synthetic construct
  source 1..75: mol_type = other DNA
attatcgacagcattgacggcaattacggtcgtcaggaagtggcatacgaactgagttgcgaaaccaatgagcgc

SEQ ID NO: 780142 - DNA, 75 bp, synthetic construct
  source 1..75: mol_type = other DNA
cgacagcatggtcctgacgtttgttaacgagctgggcaagcctgcgctcaccgatgctcctgatagcacacctct

SEQ ID NO: 780143 - DNA, 75 bp, synthetic construct
  source 1..75: mol_type = other DNA
ctattgattttgctgtaatggaaaaaacagaaaaatgtgttgtatgccctgttgatattggttggagtgacgttg

SEQ ID NO: 780144 - DNA, 75 bp, synthetic construct
  source 1..75: mol_type = other DNA
tgttaacgcagacacccatttcggccgattcttccgttacttcaaagagtgtaaaaacgaagacgtttcagaatt

SEQ ID NO: 780145 - DNA, 75 bp, synthetic construct
  source 1..75: mol_type = other DNA
acctggctgagcgatgtgctgtcgtggatcctgccagcggtatccttctttggcgtctggttcttcctgttccgc

SEQ ID NO: 780146 - DNA, 75 bp, synthetic construct
  source 1..75: mol_type = other DNA
cacttgtacttgcttataaagtaaacccagaagataaaaaaagaataatagaacttgctcaggataatggtgtaa

SEQ ID NO: 780147 - DNA, 75 bp, synthetic construct
  source 1..75: mol_type = other DNA
taatttgctatgatttaattcctcttcttaacaaagagcgctatctttgcgatcctttgtttgaaaagttttata

SEQ ID NO: 780148 - DNA, 75 bp, synthetic construct
  source 1..75: mol_type = other DNA
agttattggttgggatggcgctatgtttgatcccagaaatccggatgcaatatgcactttaatatgtaaggcatt

SEQ ID NO: 780149 - DNA, 75 bp, synthetic construct
  source 1..75: mol_type = other DNA
gctgccggcggtgagtatgtagtacttttcagaacaatcgagcatttgattggtagtattaataaagctgataaa

SEQ ID NO: 780150 - DNA, 75 bp, synthetic construct
  source 1..75: mol_type = other DNA
caacgtcaggacaacaaaattatccgtccttccgccaattatgttggaccggaagaccgcccgtttgtcgcgctg

SEQ ID NO: 780151 - DNA, 75 bp, synthetic construct
  source 1..75: mol_type = other DNA
gttacagggcggcgcaacgcttactgcccacggtggcgcacttcaccgtaccagaatatgggcgggacacgcttg

SEQ ID NO: 780152 - DNA, 75 bp, synthetic construct
  source 1..75: mol_type = other DNA
taaatgggcttaatcagggacaaaaatatgccgctcaaggcagtttcttactgaaatctgagatggaaaaaggag

SEQ ID NO: 780153 - DNA, 75 bp, synthetic construct
  source 1..75: mol_type = other DNA
tattgctgatttttataatctatacttttttggtatttataagtgcacttggagtaaaattaaatagcagagggc

SEQ ID NO: 780154 - DNA, 75 bp, synthetic construct
  source 1..75: mol_type = other DNA
gttcttcatcaacactgtcaatgtttgcatcattctatcaagagcaaatagttataattttccttccatttttgg

SEQ ID NO: 780155 - DNA, 75 bp, synthetic construct
  source 1..75: mol_type = other DNA
atggcgattattcctttctttgtgaatcgggtagggccaaaaaatgcattacttatcggtgttgtgattatggcg

SEQ ID NO: 780156 - DNA, 75 bp, synthetic construct
  source 1..75: mol_type = other DNA
tgggtatttccaccacgaagcggatgtcgaaggcggtcaacacctcaacgtcaacgtaatgaatcgggaaatgct

SEQ ID NO: 780157 - DNA, 75 bp, synthetic construct
  source 1..75: mol_type = other DNA
acgtcggtggcgaaactgccgttcacctacgccaaagatgggatctcgtacaccttctcaatcgttcctgcggcg

SEQ ID NO: 780158 - DNA, 75 bp, synthetic construct
  source 1..75: mol_type = other DNA
aacactatcaataagttggagtcattacccgcgcctgatatcgtctatgttattagcttcttcgaggggcatagc

SEQ ID NO: 780159 - DNA, 75 bp, synthetic construct
  source 1..75: mol_type = other DNA
gttggctctggtggctgatgtgcaataccacgaaccatatctgtcagccgcgctaaaccgaaaattcagggggat

SEQ ID NO: 780160 - DNA, 75 bp, synthetic construct
  source 1..75: mol_type = other DNA
aatgttgagggagaggactctgttctgacgaccgaattattcgaaataggtagctatggcacaggttcattaaat

SEQ ID NO: 780161 - DNA, 75 bp, synthetic construct
  source 1..75: mol_type = other DNA
ctatcaggtgaataccgcgtcacatattcatgcggctgaatttgttgccagaacctataccgattcatatcagtt

SEQ ID NO: 780162 - DNA, 75 bp, synthetic construct
  source 1..75: mol_type = other DNA
cgcgctaaaaacgattctgacgcattttttatgtttaccctggtgtttccttgtctttttgtgttttttgcgtca

SEQ ID NO: 780163 - DNA, 75 bp, synthetic construct
  source 1..75: mol_type = other DNA
cagtatgactatgacgccgcaggccggatggtcagccggacaaaacaccgtgacggctatcgcccggaaacagag

SEQ ID NO: 780164 - DNA, 75 bp, synthetic construct
  source 1..75: mol_type = other DNA
cggaaatccgggaataccgcgatgataaactgtacagcgtacggcacctggtatttaacggctttgagctgataa

SEQ ID NO: 780165 - DNA, 75 bp, synthetic construct
  source 1..75: mol_type = other DNA
atacatgcgtaaactcgccaataagtggaatggcactgatggtccgtggggcgtatggcgtcacactcaatctgc

SEQ ID NO: 780166 - DNA, 75 bp, synthetic construct
  source 1..75: mol_type = other DNA
atcatgctcgaacacttctgcaaggttctttgctgccgtgaacccgtctggtttgagcatgacactgatgtagtc

SEQ ID NO: 780167 - DNA, 75 bp, synthetic construct
  source 1..75: mol_type = other DNA
ccaaccgagtcagaattacaccagtgtaaatctgtcaacgtcaaccagctttgtaagctgttaaagacatattac

SEQ ID NO: 780168 - DNA, 75 bp, synthetic construct
  source 1..75: mol_type = other DNA
cccaggggattctcgagcttatggaagggggtgcgtatgggcgaacccagcgctacacgaccattctcgggaacg

SEQ ID NO: 780169 - DNA, 75 bp, synthetic construct
  source 1..75: mol_type = other DNA
taagcgcggtgaaggtgtctgtggacaccacgacgattatggcaacccaggattacgttgatgataaaatcgctg

SEQ ID NO: 780170 - DNA, 75 bp, synthetic construct
  source 1..75: mol_type = other DNA
atcatgcaggggcagacgtttgataaggcagcatatccgaaactggctattgcctatccttcaggtgttattcca

SEQ ID NO: 780171 - DNA, 75 bp, synthetic construct
  source 1..75: mol_type = other DNA
actgaataagattgcccgtgaatgtgatcgcatcattggcgagtatcgacagaatcgcatcagcgttaaattcag

SEQ ID NO: 780172 - DNA, 75 bp, synthetic construct
  source 1..75: mol_type = other DNA
ctatgaaaaaggcgaaggcgagggcaatttcgagcaactggaggaactgtttgtcttttttgaaaccttttcacc

SEQ ID NO: 780173 - DNA, 75 bp, synthetic construct
  source 1..75: mol_type = other DNA
atgatgagtaaaattacaggcgttttagttgataaccatatctatgatattaaaaatgatatggagagtggttac

SEQ ID NO: 780174 - DNA, 75 bp, synthetic construct
  source 1..75: mol_type = other DNA
ttccggaagcgcaggatatcgatagttacgattatgatgaccatagtggaacgcatattatcaagcgagaagtta

SEQ ID NO: 780175 - DNA, 75 bp, synthetic construct
  source 1..75: mol_type = other DNA
atcattaataatatcagttataaatacaaggagcgtatggatcgtttacttaatcttgtgtcctatgaacaagga

SEQ ID NO: 780176 - DNA, 75 bp, synthetic construct
  source 1..75: mol_type = other DNA
aatggtcaccatggtataattgttatggtattgccggaaaaaaatgtttttcgttttcactacgaccatccgaag

SEQ ID NO: 780177 - DNA, 75 bp, synthetic construct
  source 1..75: mol_type = other DNA
tggaaatgaatgggtgaatgactggtatgctgaagattattataaaaactcacctgaaaaaaatccgcaaggacc

SEQ ID NO: 780178 - DNA, 75 bp, synthetic construct
  source 1..75: mol_type = other DNA
gtggtgtgggtcggtaaggatgtgacaggcattgaaccccgtaacgccagtgttattgaagttcctgatattacc

SEQ ID NO: 780179 - DNA, 75 bp, synthetic construct
  source 1..75: mol_type = other DNA
tacgcgccttaactgccgttgaaaatactgctgttcaactggccgcagaagttaaacaggttttacctgcgcggc

SEQ ID NO: 780180 - DNA, 75 bp, synthetic construct
  source 1..75: mol_type = other DNA
tgacggtttggcaaaagcatgtcgcggtgcgaaaatacacatcgtggagatgttttcggtcgcggaaaaatcgcc

SEQ ID NO: 780181 - DNA, 75 bp, synthetic construct
  source 1..75: mol_type = other DNA
tagttgacaaccatatctatgatattaacaatgatatgaagaatggttaccattttcctaactgcttgtttccag

SEQ ID NO: 780182 - DNA, 75 bp, synthetic construct
  source 1..75: mol_type = other DNA
acgctcaaatggtgttaccgtgcatacgcacgttcataacggtgttcagtccggcggaagcatgacaggggggcc

SEQ ID NO: 780183 - DNA, 75 bp, synthetic construct
  source 1..75: mol_type = other DNA
aagaaatatgcaattgtgctgaagggaagatatctccttggagaggatacctatcaggttaatacagcgtcacat

SEQ ID NO: 780184 - DNA, 75 bp, synthetic construct
  source 1..75: mol_type = other DNA
tgcatttgatgtaaatgctgaacaaatctgtctggagatcaccgagtcagcagtaaaagatataaatgatagctt

SEQ ID NO: 780185 - DNA, 75 bp, synthetic construct
  source 1..75: mol_type = other DNA
gtatatcctgacgcaggaatgtacgccagatacttatggaaaatcggtttttatcaaggagttaaataatttaga

SEQ ID NO: 780186 - DNA, 75 bp, synthetic construct
  source 1..75: mol_type = other DNA
cagcgcacacagtatgaagtgtatgactaccccggacgtttcaagggtgcccacgggcagaactttgcctgctgg

SEQ ID NO: 780187 - DNA, 75 bp, synthetic construct
  source 1..75: mol_type = other DNA
cagatttttgaccatgacgcgacagaaaaactacgcacttacttttcaaatgtatgtgctgattttgaagctgaa

SEQ ID NO: 780188 - DNA, 75 bp, synthetic construct
  source 1..75: mol_type = other DNA
aatgtcgggaaggatttgacggatgaagagaagaactgtttgggcagtggcagtacaggaggttcgggagggtag

SEQ ID NO: 780189 - DNA, 75 bp, synthetic construct
  source 1..75: mol_type = other DNA
tgaacagttacagcagctacgcgatatttttaaagaggatgaagtccggcgactcagggacgtaaaattacctca

SEQ ID NO: 780190 - DNA, 75 bp, synthetic construct
  source 1..75: mol_type = other DNA
gaattaattgatacaacacaggcaaggccaattcagtattgcattaatgggacgtggtataacgcggggagtatt

SEQ ID NO: 780191 - DNA, 75 bp, synthetic construct
  source 1..75: mol_type = other DNA
ttaccgcttaaaagcgtacagcaggcctacttcacgggcttcagcgcagaggtcaacgccaggctttctatgttt

SEQ ID NO: 780192 - DNA, 75 bp, synthetic construct
  source 1..75: mol_type = other DNA
caaaagttaggattctctcatgtccagggatacttataccagaaaccgttaccattttcagagtggcatatagac

SEQ ID NO: 780193 - DNA, 75 bp, synthetic construct
  source 1..75: mol_type = other DNA
tttcactccccaggcttcctgatgtcaaatttcattattttcattatcaaaaagcagaagacacaaacataaata

SEQ ID NO: 780194 - DNA, 75 bp, synthetic construct
  source 1..75: mol_type = other DNA
taccagcgtgatgtcagagaagtcgcgctggtacttgagctcaaccctgaccatttgcgtaaatggatacggttg

SEQ ID NO: 780195 - DNA, 75 bp, synthetic construct
  source 1..75: mol_type = other DNA
cggttcccttattgcacgtaaggagcataaatactgctgtaagcaatgcgccgaaaaataccagatggcacacga

SEQ ID NO: 780196 - DNA, 75 bp, synthetic construct
  source 1..75: mol_type = other DNA
tggggatagtgtcagacctgctaaatttaaagtagtatattcgatagatggtggtcgcccgattgaaaaagtatt

SEQ ID NO: 780197 - DNA, 75 bp, synthetic construct
  source 1..75: mol_type = other DNA
tattaacgacacgctgaattttgccgagcaactggttgataagataaattgcgtatccttggctacccagatcag

SEQ ID NO: 780198 - DNA, 75 bp, synthetic construct
  source 1..75: mol_type = other DNA
ctgtgaatttatatagttaccatggacatcataagatgaagaaagttatcttattcctttgccaaggattagaag

SEQ ID NO: 780199 - DNA, 75 bp, synthetic construct
  source 1..75: mol_type = other DNA
aagaaaactgcagttagtcggaatcgacttacccaacaccctgaacccaagggacgacctagcgcaattggccga

SEQ ID NO: 780200 - DNA, 75 bp, synthetic construct
  source 1..75: mol_type = other DNA
ttttacagcctcaaaatctggacttcaatgagtttgagattcttacttccgtaattgagggcgcccgaattgtcg

SEQ ID NO: 780201 - DNA, 75 bp, synthetic construct
  source 1..75: mol_type = other DNA
ctcatggactcacgcagcttatctgttctaagccagaggcgacgcctgtcacgtcctgtttgagtgggataaacg

SEQ ID NO: 780202 - DNA, 75 bp, synthetic construct
  source 1..75: mol_type = other DNA
ctaatctcgttcgtcgtgattactttataactgaaagtgattttcataatcaacttttcaaagatatcgaagaaa

SEQ ID NO: 780203 - DNA, 75 bp, synthetic construct
  source 1..75: mol_type = other DNA
atgcgcgatgcccttaaactggcagatgaagccactatcacggcacgtatgaatgcaatcccgcactcaaattac

SEQ ID NO: 780204 - DNA, 75 bp, synthetic construct
  source 1..75: mol_type = other DNA
gatattgcaggctacgatcaggttggtcgggtattgcgcgatcttgtcagggaagggcaactgttgaaggttggt

SEQ ID NO: 780205 - DNA, 75 bp, synthetic construct
  source 1..75: mol_type = other DNA
gccagcggctcccggaggctcttcagcggtgattgtcgaaacgctggaacgcctgaaagtacgctatcgttttgc

SEQ ID NO: 780206 - DNA, 75 bp, synthetic construct
  source 1..75: mol_type = other DNA
aagactcatccctgagtcactgcagcaaacaaaatattcaacagcctggaatactgatcactgctggcttaagat

SEQ ID NO: 780207 - DNA, 75 bp, synthetic construct
  source 1..75: mol_type = other DNA
aattcagttgatttagggacattaactcccggtgagaatgtgaactggttgtcggatatcaatattgaagttgat

SEQ ID NO: 780208 - DNA, 75 bp, synthetic construct
  source 1..75: mol_type = other DNA
gaataaattttattccgataattattacttttatattcccggtggttgttatcgctgaaactaagacttatagta

SEQ ID NO: 780209 - DNA, 75 bp, synthetic construct
  source 1..75: mol_type = other DNA
catctgctgaaatcaacagaaaaagacccggcagtaaacgccattgctcacgccattctgggcggtgcagtagcg

SEQ ID NO: 780210 - DNA, 75 bp, synthetic construct
  source 1..75: mol_type = other DNA
gattatctttggaacgaatgctttgatcatcttagtggcaaaattgaatatattaaattttccgaagcaatagat

SEQ ID NO: 780211 - DNA, 75 bp, synthetic construct
  source 1..75: mol_type = other DNA
ttacgagaccgccatcaccgccgggtcatccaccgttttatcgatggtctccccgcagcccgtcagggagatccg

SEQ ID NO: 780212 - DNA, 75 bp, synthetic construct
  source 1..75: mol_type = other DNA
caacgctaaaatcaacaggataaaatcagaaatcatgaaaacacttgaaagcgtaaaaattattgcttacgaacg

SEQ ID NO: 780213 - DNA, 75 bp, synthetic construct
  source 1..75: mol_type = other DNA
ccggttctggctgctaccacgctgaatgctctggatttaccgaaacttgcctcgctggtagatgaactcagccag

SEQ ID NO: 780214 - DNA, 75 bp, synthetic construct
  source 1..75: mol_type = other DNA
ccatgaaccgcgtgcggtgcaggctattgaagagtgttggtgccttgcgctccctatgaaacttaccgtccgctg

SEQ ID NO: 780215 - DNA, 75 bp, synthetic construct
  source 1..75: mol_type = other DNA
ctggcagtggaagccgccatcagcgatacggttgcacaacagatgcgtatttttggcagtgcggggcaggcatga

SEQ ID NO: 780216 - DNA, 75 bp, synthetic construct
  source 1..75: mol_type = other DNA
atgcccgtcggcgttttcgcccacatgtcagaaaaaacaaccgataagctgacggaagggcaaacccactcagca

SEQ ID NO: 780217 - DNA, 75 bp, synthetic construct
  source 1..75: mol_type = other DNA
actggtcttcttaccaaccatgagttgcgggaaaagtatgaccatatcgtatttgatactgcgccaaccggtcat

SEQ ID NO: 780218 - DNA, 75 bp, synthetic construct
  source 1..75: mol_type = other DNA
gccgatgtggtcagcagcattgaagaacagctctccggttcatgcactacggaaatcgcggcatttgatgagttt

SEQ ID NO: 780219 - DNA, 75 bp, synthetic construct
  source 1..75: mol_type = other DNA
atttgtgggtgaaaatgatccgctggcgcaaagtattttagctcgggaggaaaaagcgctacttgctatgccaga

SEQ ID NO: 780220 - DNA, 75 bp, synthetic construct
  source 1..75: mol_type = other DNA
ctcactggtggatgaactcagccagacaggcaaagggctggtcatgacgatgggtaaaggcggagtgggcaaaac

SEQ ID NO: 780221 - DNA, 75 bp, synthetic construct
  source 1..75: mol_type = other DNA
cgctgaatactttggatttaccgaaacttgcctcactggtagatgaactcagccagacaggcaaagggctggtca

SEQ ID NO: 780222 - DNA, 75 bp, synthetic construct
  source 1..75: mol_type = other DNA
gggccgctggtggggctggagaaacaacagcaccagtactcagacgcggttaaggcgctgtctgatgcagctctc

SEQ ID NO: 780223 - DNA, 75 bp, synthetic construct
  source 1..75: mol_type = other DNA
aacacgaattacaaatgaacaacacataaaaatttataacgaagagaataacttaaagcatgagcctaaaaatat

SEQ ID NO: 780224 - DNA, 75 bp, synthetic construct
  source 1..75: mol_type = other DNA
tcgcaatattaatggctacgtatcaaggagagcgatatatttgcgaacaacttacatcatttgagcgtcaaacat

SEQ ID NO: 780225 - DNA, 75 bp, synthetic construct
  source 1..75: mol_type = other DNA
atgatgacgcggctatctgtgcactgttgcaggacgtgttaagcgaacatgtctttacggtttcagtctgccata

SEQ ID NO: 780226 - DNA, 75 bp, synthetic construct
  source 1..75: mol_type = other DNA
cgggtattgagccgtgagcagttgctggagtttacccatagtgacagcatagaggtgtttgatcgcaccatcgac

SEQ ID NO: 780227 - DNA, 75 bp, synthetic construct
  source 1..75: mol_type = other DNA
atgaaaggcgttcttttccgtgctaaagacgcaatcaaggaaaaattcggcgctcgctggctgccagcgaaggcg

SEQ ID NO: 780228 - DNA, 75 bp, synthetic construct
  source 1..75: mol_type = other DNA
gccgctgatttttgctgtcggtttacccattggccttgctaagcaagcgcaagggcgtgcttgtctggcggtgat

SEQ ID NO: 780229 - DNA, 75 bp, synthetic construct
  source 1..75: mol_type = other DNA
aaaaaggagagagccttggcttgtctcctcttttcactcgttcaccgtcattttgcaatgcccttgtacagaaca

SEQ ID NO: 780230 - DNA, 75 bp, synthetic construct
  source 1..75: mol_type = other DNA
atgctgcccactacaaatatctctgtaaattctggagtaatatcttttgaaagtcctgtagattcaccatctaac

SEQ ID NO: 780231 - DNA, 75 bp, synthetic construct
  source 1..75: mol_type = other DNA
tcagagcgctttatcaatgagatgtcacatcgcattgcgcgtgaccagctcgcctttgcggaaacggaaatggaa

SEQ ID NO: 780232 - DNA, 75 bp, synthetic construct
  source 1..75: mol_type = other DNA
ccagcgtctggacgccagcaaagcggaattgctctcttatcaggacaacaacaacgttctggatccacaggcaca

SEQ ID NO: 780233 - DNA, 75 bp, synthetic construct
  source 1..75: mol_type = other DNA
gctgacacaaatgggagatgcatattcctggctgaccggcgggactgtcggtagcctgtcatcctatcagaatgg

SEQ ID NO: 780234 - DNA, 75 bp, synthetic construct
  source 1..75: mol_type = other DNA
ggcgagaaaggcgataatctgcataaaatcggtgagggcacactgattgtacagggaactggtgttaatgaaggg

SEQ ID NO: 780235 - DNA, 75 bp, synthetic construct
  source 1..75: mol_type = other DNA
cgcttactaacgggggatatacaaacgttagctttggtgatggtgaaaaccgttacaatatcgtggaccggaata

SEQ ID NO: 780236 - DNA, 75 bp, synthetic construct
  source 1..75: mol_type = other DNA
gccggaatgctgtatccgggcgtgaaacagtcagacctcagtgaagagcagaagcagacgataagtacgctggca

SEQ ID NO: 780237 - DNA, 75 bp, synthetic construct
  source 1..75: mol_type = other DNA
accacggcgacatcgccatccagctatatggcgaccaggtgcccggaacggttgaaaacttcctgggctactgcc

SEQ ID NO: 780238 - DNA, 75 bp, synthetic construct
  source 1..75: mol_type = other DNA
atacaccacttgagacacggataagagtcattgatggcgtactgacatgtggcattggtcaacgtgttgggattt

SEQ ID NO: 780239 - DNA, 75 bp, synthetic construct
  source 1..75: mol_type = other DNA
gggcatcagcggcaaagaacacatcaaagaagtttcttcggcggccaaccgcgggattattgtggtcggcatcat

SEQ ID NO: 780240 - DNA, 75 bp, synthetic construct
  source 1..75: mol_type = other DNA
ttatctaattatgcatggagtcgtgacaatcttacaaaattcgctattgagtttaacgaagaactcaaacaaata

SEQ ID NO: 780241 - DNA, 75 bp, synthetic construct
  source 1..75: mol_type = other DNA
ccaaggctggggttattgcgtcttcggcgaagtggtggaagggatggacgtagtagacagcatcgccgccgtgga

SEQ ID NO: 780242 - DNA, 75 bp, synthetic construct
  source 1..75: mol_type = other DNA
gtgatggattttataacggaaccatttttcaccgcgtgataagcggttttatggtgcaaggcggcggctatgagt

SEQ ID NO: 780243 - DNA, 75 bp, synthetic construct
  source 1..75: mol_type = other DNA
tgcgcgatgtggcgttatttgccggcgagccgccggcgcggcgcggctatccggcgtcggtttttgacagcctgc

SEQ ID NO: 780244 - DNA, 75 bp, synthetic construct
  source 1..75: mol_type = other DNA
cagacggatgctgatgttttcgttatcgggctgattggcgaacgcgggcgcgaagtgaccgagtttgtggagtgg

SEQ ID NO: 780245 - DNA, 75 bp, synthetic construct
  source 1..75: mol_type = other DNA
tctctggcacagggtaagaatgctcttgccggtgccgcaggcgcagccaccggcgaggtggtgggaatgatagcc

SEQ ID NO: 780246 - DNA, 75 bp, synthetic construct
  source 1..75: mol_type = other DNA
gaaggacagcgaatggggatttttgcgtcagctggttgtggcaaaacttttctcatgaatatgctcattgaacat

SEQ ID NO: 780247 - DNA, 75 bp, synthetic construct
  source 1..75: mol_type = other DNA
atacaccgcttgagacgaggatccgtgtcattgatggtgtattaacttgtggtatcggacagcgtgttggtattt

SEQ ID NO: 780248 - DNA, 75 bp, synthetic construct
  source 1..75: mol_type = other DNA
gggaatatcgtgctggccaaaatgctgataatgattttgcgatgaatgtgcgtccagaacttactaaatggctaa

SEQ ID NO: 780249 - DNA, 75 bp, synthetic construct
  source 1..75: mol_type = other DNA
gaaccagaattatcgctctcacttgaatggcaagagcatgtcctcgtagatatagtgaatagcccttcagttact

SEQ ID NO: 780250 - DNA, 75 bp, synthetic construct
  source 1..75: mol_type = other DNA
gtagttaataaagataaggaaagtaataagaggataattcaagaagttacaagcatcatggaaaataaagatatg

SEQ ID NO: 780251 - DNA, 75 bp, synthetic construct
  source 1..75: mol_type = other DNA
tggggacatgcgaaagattacgtgcgtatgcagtggatgatgttgcagcaagatcacccagaggattttgttatt

SEQ ID NO: 780252 - DNA, 75 bp, synthetic construct
  source 1..75: mol_type = other DNA
attgagggtaatggggtacttgtggaaaatactgaagacgacattggatataaattggataaaatattcgatgac

SEQ ID NO: 780253 - DNA, 75 bp, synthetic construct
  source 1..75: mol_type = other DNA
acagacactatttctcagactgacttaacgtcagtcggtcgcgatattctggccaaaacaagcgtccttgctgtt

SEQ ID NO: 780254 - DNA, 75 bp, synthetic construct
  source 1..75: mol_type = other DNA
gaagcgtttaaatatgcttcaataaataatatggtaccaatatctatatctgatagtgtcggttcgatgggtggg

SEQ ID NO: 780255 - DNA, 75 bp, synthetic construct
  source 1..75: mol_type = other DNA
agcgcatgcaacattgcaaataaatagaggactattacaacagttcggtgaaacaatcagggttgactttcaaca

SEQ ID NO: 780256 - DNA, 75 bp, synthetic construct
  source 1..75: mol_type = other DNA
aaaatctaaaacatgcaatcgctaatgcaattgaaagatttggagtccaactttcggtcgccagaacgcgcgtaa

SEQ ID NO: 780257 - DNA, 75 bp, synthetic construct
  source 1..75: mol_type = other DNA
tgggtaatctgatgttagaaattaccaacatgaaagagcgtatggctaagatggattcagagattaaatcgctta

SEQ ID NO: 780258 - DNA, 75 bp, synthetic construct
  source 1..75: mol_type = other DNA
tggggtggctcctgtcgaatttattgttagaatggctaacagatttgatgggtatgcctatattgatgatgctca

SEQ ID NO: 780259 - DNA, 75 bp, synthetic construct
  source 1..75: mol_type = other DNA
taccggcggagctggcggtgatgctggggaggctggagcgggaactgcggcagggcagcgtgagtgaagaaagcc

SEQ ID NO: 780260 - DNA, 75 bp, synthetic construct
  source 1..75: mol_type = other DNA
atggctactcggcgaggatgttggagagaaagacggccttaagccggacgaacagcgcctgctggagctctatcg

SEQ ID NO: 780261 - DNA, 75 bp, synthetic construct
  source 1..75: mol_type = other DNA
tcaactcccaaacgaagaagaacaacagaacatgttgcggatcgtatctctacggttgaaagaactcgatgaact

SEQ ID NO: 780262 - DNA, 75 bp, synthetic construct
  source 1..75: mol_type = other DNA
gtgcataaaccaaatatttacaatgaccatatgagaaaagaagaacccaacctcgttctggtggagcgccttact

SEQ ID NO: 780263 - DNA, 75 bp, synthetic construct
  source 1..75: mol_type = other DNA
ttatcctatttatccgctatggattggcataacatcacagataaaatacccaagataatccactttacgacatgt

SEQ ID NO: 780264 - DNA, 75 bp, synthetic construct
  source 1..75: mol_type = other DNA
acgtatattctattagagactaaaccgaaaaggttgaatatgtatcttatcgaagaagcgctaacgtcttggttg

SEQ ID NO: 780265 - DNA, 75 bp, synthetic construct
  source 1..75: mol_type = other DNA
tttgaccgggtcatcattgcaacaggtgaactctggcaaccccgccggcccccctgccaggtgaggaaaacttct

SEQ ID NO: 780266 - DNA, 75 bp, synthetic construct
  source 1..75: mol_type = other DNA
atgaaaaacaatactgcacaagcaacaaaagtaattaccgcgcatgtgccattacctatggctgataaagtcgac

SEQ ID NO: 780267 - DNA, 75 bp, synthetic construct
  source 1..75: mol_type = other DNA
gttacctggcaggcatgaaactcggcgacacaccgctggtggagtacacccgcgaccgcctgcaccgggaaacgc

SEQ ID NO: 780268 - DNA, 75 bp, synthetic construct
  source 1..75: mol_type = other DNA
ggagctcatagtggactgcctttttatcgggtggatggaccgttgcagacgatgaaaataacgggtacgccagaa

SEQ ID NO: 780269 - DNA, 75 bp, synthetic construct
  source 1..75: mol_type = other DNA
atcgacagatttcgttgctggctaaagaaaagccggtagaaggcagtccactgtttttactgcaaatgtgcacgg

SEQ ID NO: 780270 - DNA, 75 bp, synthetic construct
  source 1..75: mol_type = other DNA
agaaaagccggtagaaggcagtccactgtttttactgcaaatgtgcacggaacaattagtggagattggaaaaat

SEQ ID NO: 780271 - DNA, 75 bp, synthetic construct
  source 1..75: mol_type = other DNA
aaatataaaaactattacacagcgttaactgaactgattgattatctagggaaggtgcgaataagcaggtcattt

SEQ ID NO: 780272 - DNA, 75 bp, synthetic construct
  source 1..75: mol_type = other DNA
tcagggcggcggaaaagcgcgtctggagaagatggccagtgaacgcggcctgactaacgtgaaattcttcccgct

SEQ ID NO: 780273 - DNA, 75 bp, synthetic construct
  source 1..75: mol_type = other DNA
gtgctatgcagttgatcgtaaatgtccacgagcaccgatgattaactcatacgataactctataacctacgttga

SEQ ID NO: 780274 - DNA, 75 bp, synthetic construct
  source 1..75: mol_type = other DNA
tgtaccgtggttattcttgtgataccgcgactaaattatcactacgctgtatgtttgtccgcgaaggcggaacgg

SEQ ID NO: 780275 - DNA, 75 bp, synthetic construct
  source 1..75: mol_type = other DNA
tttatcgatgtcgatgcggcgctgatagacgacatttttctggaaatgatggaatacgccgagaaaaattcccgt

SEQ ID NO: 780276 - DNA, 75 bp, synthetic construct
  source 1..75: mol_type = other DNA
ggggcatgccgctgcctttagcgcaaagttctaaaccggtcatcaatgccgagcatgatggtcgccactggcgac

SEQ ID NO: 780277 - DNA, 75 bp, synthetic construct
  source 1..75: mol_type = other DNA
cgtcttatggatgtagcacaaaagcgtgcagaccgcatggctggggtggatatgccaagttatggcggggtgctg

SEQ ID NO: 780278 - DNA, 75 bp, synthetic construct
  source 1..75: mol_type = other DNA
tgggttgtgctggtaagtattatcccgttgatatttatctggaggaaccgttcgcaagacaccttctggcgccaa

SEQ ID NO: 780279 - DNA, 75 bp, synthetic construct
  source 1..75: mol_type = other DNA
ttgatcttataaaggcatcactggatgcgaattacagcgaagttcgtagtgttagtaatcgcattgttcgcgcaa

SEQ ID NO: 780280 - DNA, 75 bp, synthetic construct
  source 1..75: mol_type = other DNA
ccagattgatttcagttacatcaaggctaatggttacgatccatttatccgcgattttatcaaggaaaagcccta

SEQ ID NO: 780281 - DNA, 75 bp, synthetic construct
  source 1..75: mol_type = other DNA
atgggggcagaagttgccttacgaccactgggaattcaatttttttacccgaaaaatctgccggcactggtgaca

SEQ ID NO: 780282 - DNA, 75 bp, synthetic construct
  source 1..75: mol_type = other DNA
cgtctggatcacgaagcgtttaaccagcctgaatatatctacctgtccggcaagggtacctacaagcacacctgt

SEQ ID NO: 780283 - DNA, 75 bp, synthetic construct
  source 1..75: mol_type = other DNA
ctggtcatatcgcatccaaattaaacaaaccgctctatgttgttcggcttgactctgttatttcttctctgttag

SEQ ID NO: 780284 - DNA, 75 bp, synthetic construct
  source 1..75: mol_type = other DNA
gtttaaattatcacaggcagatatcggtagacttttaaatgtgagcaggcaaactatatcaggttatttcaagga

SEQ ID NO: 780285 - DNA, 75 bp, synthetic construct
  source 1..75: mol_type = other DNA
aagaccgggcagaagcattgcgcagaatgaaggaatgtctcataacaagacagaatcaacagttgggcctgttga

SEQ ID NO: 780286 - DNA, 75 bp, synthetic construct
  source 1..75: mol_type = other DNA
ctggtcgtatggttatcagtaataacatcattcaaatctatgataataataatgtgttacgtgtacgtatgggct

SEQ ID NO: 780287 - DNA, 75 bp, synthetic construct
  source 1..75: mol_type = other DNA
gaacattctgctcacgcagtttattaccgtcgccggaccgccgaggacgctgtattacgggagttaacgccatga

SEQ ID NO: 780288 - DNA, 75 bp, synthetic construct
  source 1..75: mol_type = other DNA
cgcacacagcgttatcaccacgacctgaccggcaaacttatccgcagcgaggatgaggggctggtcacccactgg

SEQ ID NO: 780289 - DNA, 75 bp, synthetic construct
  source 1..75: mol_type = other DNA
tgatgaacaaagcgcaggagaagggcgtcgcgccggaaaaggtgatctttttcccgaactggtccgaagtggccc

SEQ ID NO: 780290 - DNA, 75 bp, synthetic construct
  source 1..75: mol_type = other DNA
cgacgccatgctgggcctggggatggcaggtaaaggcaagggcggcaaagtggcgaaactcgccagcgcttttga

SEQ ID NO: 780291 - DNA, 75 bp, synthetic construct
  source 1..75: mol_type = other DNA
gcacccagctgctgcagcattatcctccggccgtgctcaaatccgccaacaccctgtggctgctgcgttaccgcc

SEQ ID NO: 780292 - DNA, 75 bp, synthetic construct
  source 1..75: mol_type = other DNA
gtgacaaatcttgctttattcaaccacccaagagcagcaacttaaccaccggaacggttattttaccgtgtatta

SEQ ID NO: 780293 - DNA, 75 bp, synthetic construct
  source 1..75: mol_type = other DNA
gaaagcgcagattatccagcaggccggtaactccgtgctggcaaaagctaaccaggtaccacagcaggttctgtc

SEQ ID NO: 780294 - DNA, 75 bp, synthetic construct
  source 1..75: mol_type = other DNA
gcgggagccgctacagccgatccgttaaaagcactggatgccgcaatcgctaaagtcgacaaattccgctcctcc

SEQ ID NO: 780295 - DNA, 75 bp, synthetic construct
  source 1..75: mol_type = other DNA
aggtacgcccagtggtaattttaaagcaatagataaccacgggaaggaaataacaaacagaaaaggattacctaa

SEQ ID NO: 780296 - DNA, 75 bp, synthetic construct
  source 1..75: mol_type = other DNA
aaaatcgggggcatgtactaatggtctttgcggcacactatccgctatgataggtccagataaatttgattctat

SEQ ID NO: 780297 - DNA, 75 bp, synthetic construct
  source 1..75: mol_type = other DNA
cagagagtggacgctgattggccttgtattgctcagcttaggtttgtgggtatttggcagtgaagtcattaatgc

SEQ ID NO: 780298 - DNA, 75 bp, synthetic construct
  source 1..75: mol_type = other DNA
gacaaaagcattgagatcttattactgtcttgttttgcggcggctgaccaaaaagcaatccagagatatatacct

SEQ ID NO: 780299 - DNA, 75 bp, synthetic construct
  source 1..75: mol_type = other DNA
attgaagagagcaagaaaaccacggccaatatgaattccatcctgggcgatccggatcgcatcgaggcattagcc

SEQ ID NO: 780300 - DNA, 75 bp, synthetic construct
  source 1..75: mol_type = other DNA
cggcggcgcgcagtctcgcccgcagcagtccgctccggcagcgccgtctaacgagccgccgatggactttgatga

SEQ ID NO: 780301 - DNA, 75 bp, synthetic construct
  source 1..75: mol_type = other DNA
cccttacaaaaacataatcttatccagactatttctcgcgttaaccgtaaactggaaggcaaaagtaaagggtta

SEQ ID NO: 780302 - DNA, 75 bp, synthetic construct
  source 1..75: mol_type = other DNA
agcaagcgcgtaaacctttcggtagcggtaaaggcggtacctactttggcgcaacgggctgcggaaaaagctaca

SEQ ID NO: 780303 - DNA, 75 bp, synthetic construct
  source 1..75: mol_type = other DNA
cgcgatatcccgctcggtaaagcccgcctgaatgttcaccacctgaccgacggcggcaaagtccagccgagtagc

SEQ ID NO: 780304 - DNA, 75 bp, synthetic construct
  source 1..75: mol_type = other DNA
aagttttggcttttttgtttgttagtcccctaacaagagctaaggtcagtctacaggattataaaagtaatttat

SEQ ID NO: 780305 - DNA, 75 bp, synthetic construct
  source 1..75: mol_type = other DNA
ggatcacgctctttttaccgctaatcattaaaagtatggccagcgatcagagcaatattgtgatcggcctgcttt

SEQ ID NO: 780306 - DNA, 75 bp, synthetic construct
  source 1..75: mol_type = other DNA
atcccgtgattgtatcgctatcgttagtccagtaacctacgctaaattgcgtcagactccattcctatcgaatac

SEQ ID NO: 780307 - DNA, 75 bp, synthetic construct
  source 1..75: mol_type = other DNA
aagatgccgaagcgaaatgcggtcgcccgcgcctgggccgaacgttcgctcgataaagaacacgttctcaaccaa

SEQ ID NO: 780308 - DNA, 75 bp, synthetic construct
  source 1..75: mol_type = other DNA
gcgaaatactcaagctggcgttaccgccgggaaaacggcgatgccaccgtctggcgctgcccgctgtatgtgcca

SEQ ID NO: 780309 - DNA, 75 bp, synthetic construct
  source 1..75: mol_type = other DNA
atgttggagtgctgtctgtagttccttatgatgagcgtggttgtgcattttctaaaaataaactgtcacgtaaga

SEQ ID NO: 780310 - DNA, 75 bp, synthetic construct
  source 1..75: mol_type = other DNA
atgacaattatcggtgaggacattcctcttatatcagaaaaacagtcgctttcaaaggtacttttaaatgataag

SEQ ID NO: 780311 - DNA, 75 bp, synthetic construct
  source 1..75: mol_type = other DNA
agcctgcccgcagacaccggctacccggacccgcgcggggaactggacccggaagccgaccccggcctgctgtat

SEQ ID NO: 780312 - DNA, 75 bp, synthetic construct
  source 1..75: mol_type = other DNA
gacccccgtgctttaggcgcaagaaaaattctggaaaaatatggtatacacattgattccgcagaaaatggaata

SEQ ID NO: 780313 - DNA, 75 bp, synthetic construct
  source 1..75: mol_type = other DNA
cctaatgtcaaagttcatgtctacaatgtatcttatgggagtaaattgttgggggtgattagttatatattaatg

SEQ ID NO: 780314 - DNA, 75 bp, synthetic construct
  source 1..75: mol_type = other DNA
gctgttcaacaacgtttacccggtttataaccgcgcgctggctgcgatccgccagcatccgttaacgacccgtcg

SEQ ID NO: 780315 - DNA, 75 bp, synthetic construct
  source 1..75: mol_type = other DNA
ggaaaatcaggacagtatttatctgttcctcgatatcatcggcggaatgctgggtccggtaattggtgtcatgat

SEQ ID NO: 780316 - DNA, 75 bp, synthetic construct
  source 1..75: mol_type = other DNA
gtactgattgccagtattatcagcctgctgatctgcccgtggaaattaatggaaaatcaggacagtatttatctg

SEQ ID NO: 780317 - DNA, 75 bp, synthetic construct
  source 1..75: mol_type = other DNA
aagaaacatcaacggtgttaaatttgatggttctgtggacatttcgataccaacaattacgtccagagggcgtgt

SEQ ID NO: 780318 - DNA, 75 bp, synthetic construct
  source 1..75: mol_type = other DNA
actcgcgctacgcattaaaaacggcttgtgtgacaagcgtaagaatgggatctgctgccagttataaaccatcaa

SEQ ID NO: 780319 - DNA, 75 bp, synthetic construct
  source 1..75: mol_type = other DNA
acaagttgcttaacctgctgggtgatgacccatggtacgcaaaatggccgtctgtgccgaaccatcattatcagt

SEQ ID NO: 780320 - DNA, 75 bp, synthetic construct
  source 1..75: mol_type = other DNA
atgagcgtataatcggtgtgctggtagatggaaattttacttatgaacaaaaaaggaatttctcagtcttgaaaa

SEQ ID NO: 780321 - DNA, 75 bp, synthetic construct
  source 1..75: mol_type = other DNA
tacattaacgctgaccaatggactgattgatactggtttctcgcggcttactgccgatggtgaatgggttaataa

SEQ ID NO: 780322 - DNA, 75 bp, synthetic construct
  source 1..75: mol_type = other DNA
cctttcccgacaacggagcgcattaacttccgtggctggccggacgcacaaatacgatgcgcagagtgctggttc

SEQ ID NO: 780323 - DNA, 75 bp, synthetic construct
  source 1..75: mol_type = other DNA
gaaggtcaagcgattgaagaatccgttgcatctttcgatcaaatcgttatgcgtccaaaactatttgctggttca

SEQ ID NO: 780324 - DNA, 75 bp, synthetic construct
  source 1..75: mol_type = other DNA
aattaacgcagaatcaaaatatccgagaatgcatcaggccttaaacttctatgaccaaaaagacttacatcaact

SEQ ID NO: 780325 - DNA, 75 bp, synthetic construct
  source 1..75: mol_type = other DNA
gatatctccttcggtgcccaatgaaattaagccggtgatccaggagcagactcagcaggtcacgccaacggaacc

SEQ ID NO: 780326 - DNA, 75 bp, synthetic construct
  source 1..75: mol_type = other DNA
tatcgtccttggcgataatgatactggttttaaacagaatggtgatggcattcttgatgtttacgctaatagtca

SEQ ID NO: 780327 - DNA, 75 bp, synthetic construct
  source 1..75: mol_type = other DNA
agagggaacagacagtaccagtaacagcaattaatgttgataaccgtactattgaagtagcatttgctacggaaa

SEQ ID NO: 780328 - DNA, 75 bp, synthetic construct
  source 1..75: mol_type = other DNA
cagtgacaaacacaccagcgttgatggctactacagccatgatggttcgctggcgcaggttgacctcagtgcgaa

SEQ ID NO: 780329 - DNA, 75 bp, synthetic construct
  source 1..75: mol_type = other DNA
gccggttgttcctgatgacataaagcctgtcattcaggagcagacgcaacaggtgacacccaccgatccccctgt

SEQ ID NO: 780330 - DNA, 75 bp, synthetic construct
  source 1..75: mol_type = other DNA
tacgccattttttgtagaaaaaataattaaagctttcgatgatcctatggtaagttgtgcttatggaaggcaatt

SEQ ID NO: 780331 - DNA, 75 bp, synthetic construct
  source 1..75: mol_type = other DNA
tcattatattgcaccgttttcttcttacgagtacccgattcctgctggggcggatggtaaggttcagtggaaagt

SEQ ID NO: 780332 - DNA, 75 bp, synthetic construct
  source 1..75: mol_type = other DNA
tatcctatcgatatgaattggaaagggggggttacatggagaatagtgaccgattatggtgggatcagtaaccaa

SEQ ID NO: 780333 - DNA, 75 bp, synthetic construct
  source 1..75: mol_type = other DNA
atcctgataagtcacatatttgcgatgcctctgacataccccgtatgggaataaaaacagtattcatgtcaaact

SEQ ID NO: 780334 - DNA, 75 bp, synthetic construct
  source 1..75: mol_type = other DNA
caccaaaatggttttttttatcaatcattaacaatttgatgaagattgcaggctataaattaggacaaaaatatg

SEQ ID NO: 780335 - DNA, 75 bp, synthetic construct
  source 1..75: mol_type = other DNA
catataatggtggggagttatggaaaacgactgttttttctattaagaaacatactccaaaagaaactctagttc

SEQ ID NO: 780336 - DNA, 75 bp, synthetic construct
  source 1..75: mol_type = other DNA
aggaaggtatcctatctcacgtatctgtaggttataacgtttatgattatcgcatggaaggtaacaatattatcg

SEQ ID NO: 780337 - DNA, 75 bp, synthetic construct
  source 1..75: mol_type = other DNA
gcggcactggtatctggcttcagatgagcagggggcgcgaaattattatcaacccaaccgcgatgatgatgagga

SEQ ID NO: 780338 - DNA, 75 bp, synthetic construct
  source 1..75: mol_type = other DNA
ggcatctggctgacacattatttcacgcttaagcgtgagagacaggcgtcagaagataaaatgaaaaaggaactg

SEQ ID NO: 780339 - DNA, 75 bp, synthetic construct
  source 1..75: mol_type = other DNA
ttgttctggcctcagtggccgcgcttactggctgcgaggataaaacctccgtagactggtatatggcacaccatg

SEQ ID NO: 780340 - DNA, 75 bp, synthetic construct
  source 1..75: mol_type = other DNA
caccattaatggggtttcatttgacggaacggctaatatttctctgtcaccggcaaatattggttgcccggcatc

SEQ ID NO: 780341 - DNA, 75 bp, synthetic construct
  source 1..75: mol_type = other DNA
aggggagcgggcgtctcattttcggcattgtcttactggtattaactttctggatgtttgcacaatcaatgcagg

SEQ ID NO: 780342 - DNA, 75 bp, synthetic construct
  source 1..75: mol_type = other DNA
tgagtgtatgcgccaggcgctgcacaacgccggcatagccccggagtatatcgctgccgtttcggcatgttcgat

SEQ ID NO: 780343 - DNA, 75 bp, synthetic construct
  source 1..75: mol_type = other DNA
tctctgctggcaatggatgtgaagccgaaattgtggaatcagttgttgattcgttccctcttcgtcgtttcgatc

SEQ ID NO: 780344 - DNA, 75 bp, synthetic construct
  source 1..75: mol_type = other DNA
agcgcaaagaggcgtacatccgcagcgaaaatatcttaaacaactcgatctatggggaaaacgcaacgaacgtgc

SEQ ID NO: 780345 - DNA, 75 bp, synthetic construct
  source 1..75: mol_type = other DNA
tgaaaccgtgcagcaaattgtggtgaatcaggcagggtactacggtgtggagcgcaaagaggcgtacatccgcag

SEQ ID NO: 780346 - DNA, 75 bp, synthetic construct
  source 1..75: mol_type = other DNA
acggaagcatatttctcaatggtacgcacattcatctggaaggggagtcggatgtgaacggtgatgcgccagtga

SEQ ID NO: 780347 - DNA, 75 bp, synthetic construct
  source 1..75: mol_type = other DNA
tcgaaaacctataagggcagcgggtttaatgaactgaagtttgacgatgcgacagggaaagaacaggtctacatc

SEQ ID NO: 780348 - DNA, 75 bp, synthetic construct
  source 1..75: mol_type = other DNA
tcttatcaatcaaccagatggtggtttgatactgcggagtttcaacaaagaagagtacccggatgaagtactcaa

SEQ ID NO: 780349 - DNA, 75 bp, synthetic construct
  source 1..75: mol_type = other DNA
atgtgaaggcgaacttcacgctgagcgatggcggtaaagcgattactgatgctgaaggcaaagcgaaagtcacgc

SEQ ID NO: 780350 - DNA, 75 bp, synthetic construct
  source 1..75: mol_type = other DNA
acactaccaatctgtatattgaggtgaaggataattacggcaacggtgtaccccagcaggaggtaaccctcagag

SEQ ID NO: 780351 - DNA, 75 bp, synthetic construct
  source 1..75: mol_type = other DNA
ccacagtcgttgataataatggctttccggtaaaaggtgtgactgtgagctttaccagcagaacaaaatctgccg

SEQ ID NO: 780352 - DNA, 75 bp, synthetic construct
  source 1..75: mol_type = other DNA
cggtaccaaatccggcacctatcccgtgacagttagcgtgatcaattatggtgtcagtgatacgaaacaggtgac

SEQ ID NO: 780353 - DNA, 75 bp, synthetic construct
  source 1..75: mol_type = other DNA
cagcataatcgccggtaccccgcagaacagctccggcagcgtcatcaccgcacagtcgttgataataatggcttt

SEQ ID NO: 780354 - DNA, 75 bp, synthetic construct
  source 1..75: mol_type = other DNA
gatctatcaggtcatccgatcaatgtttctgaagggctggaatttgtgcaatcaggtaccaatgtgccctatgtg

SEQ ID NO: 780355 - DNA, 75 bp, synthetic construct
  source 1..75: mol_type = other DNA
gcgttccgtttgaaggtctgaaagaacgtccgtttaaattacgcctcagtattatcactggcgatcgtcctgtac

SEQ ID NO: 780356 - DNA, 75 bp, synthetic construct
  source 1..75: mol_type = other DNA
aactggcggattaactgctgctggcgagattatttccaaatcggcgaatggtctgcgcattgcctacggaaacta

SEQ ID NO: 780357 - DNA, 75 bp, synthetic construct
  source 1..75: mol_type = other DNA
cagcaggaccatgaaactggtgatttcgctggtaaaaaatccctgatgcaaagcgttgaagcaagcagcaaagac

SEQ ID NO: 780358 - DNA, 75 bp, synthetic construct
  source 1..75: mol_type = other DNA
agaacggtattgctgaagttacccttaagggcacggttttgggtgttcatacagtcgaagccacactgcctaacg

SEQ ID NO: 780359 - DNA, 75 bp, synthetic construct
  source 1..75: mol_type = other DNA
gctgatgccacagctgaatggtgtggatgcggctaaagcccccgccgtggtgaatatcatttctgtttcgtcatc

SEQ ID NO: 780360 - DNA, 75 bp, synthetic construct
  source 1..75: mol_type = other DNA
gcagcagctcgacgacgagaaagagaagtggatcgacgaccgggcacagaaaatcatcgacatgatgccaaaaga

SEQ ID NO: 780361 - DNA, 75 bp, synthetic construct
  source 1..75: mol_type = other DNA
cagatagccagtacttcacagctaattggatctctgctcgccgaagatatgaacagcgagcaagcggcaaatata

SEQ ID NO: 780362 - DNA, 75 bp, synthetic construct
  source 1..75: mol_type = other DNA
ctcccaaaagaagcgcaaatggcactagtcggtgaaaaggcagaggaagcctataacgactatgtcacacgcatc

SEQ ID NO: 780363 - DNA, 75 bp, synthetic construct
  source 1..75: mol_type = other DNA
aaagatccgttgaatcatcccgtggcgggaacaacggtgagcttcaccatgccacaggacattgcggcaaacttt

SEQ ID NO: 780364 - DNA, 75 bp, synthetic construct
  source 1..75: mol_type = other DNA
tcaccgcgagcacaaccgagggcgcgaccctgacggcaagcgtcactgacgcttacggcaacccgctagaaggca

SEQ ID NO: 780365 - DNA, 75 bp, synthetic construct
  source 1..75: mol_type = other DNA
cgttgctgtaattcttttcggagtactcgcttgatccaggtggctaaagaagtgtcaccgtctgctttcgctgcc

SEQ ID NO: 780366 - DNA, 75 bp, synthetic construct
  source 1..75: mol_type = other DNA
aaaaggaaggaaatatacgataaatttacttctgagactggaggaaatcaacttatagttagttctattaagaaa

SEQ ID NO: 780367 - DNA, 75 bp, synthetic construct
  source 1..75: mol_type = other DNA
tacagacggtgggcgttaaccagatagagacggtgggcagtaaccagatcattaacgtgggttctgttcaggtgg

SEQ ID NO: 780368 - DNA, 75 bp, synthetic construct
  source 1..75: mol_type = other DNA
atagccagtacttcacagcaaatcgggtctctgctcgccgaagatatgaacagcgagcaagcggcaaatatggcg

SEQ ID NO: 780369 - DNA, 75 bp, synthetic construct
  source 1..75: mol_type = other DNA
atttttgcagtagcaatggctacacacttccccgtgcagatcatttaaaccatagtcgttcccgaggcatcgggt

SEQ ID NO: 780370 - DNA, 75 bp, synthetic construct
  source 1..75: mol_type = other DNA
atcaagctggtctgagtaccacaatacaattcactcgcgcagaagacaaaataatgagcggtatgaaccgccccg

SEQ ID NO: 780371 - DNA, 75 bp, synthetic construct
  source 1..75: mol_type = other DNA
tgaacaatacgaaatttccctggcaacaggtgagcaaagcgtaatggcaaaacttggattttctcatgtgacatg

SEQ ID NO: 780372 - DNA, 75 bp, synthetic construct
  source 1..75: mol_type = other DNA
accaaccacgacggctatttatacgcaagcatgaccgctacaaaagccggggtttatcaagtgacggcaaccctc

SEQ ID NO: 780373 - DNA, 75 bp, synthetic construct
  source 1..75: mol_type = other DNA
actctccatcgtactgacgagcgtacgcagattaacaacggcttgggttggcgtcatttcactcccacatggatg

SEQ ID NO: 780374 - DNA, 75 bp, synthetic construct
  source 1..75: mol_type = other DNA
ttgcatccatcaccctgaaacagaccgcacctttccgtgctcttctccagatcaacggtgagcgtctgaaacaaa

SEQ ID NO: 780375 - DNA, 75 bp, synthetic construct
  source 1..75: mol_type = other DNA
gcggcacaaaaatggaagctgtgctgctctcgccgcaaggggattgtctctggcgtcaacggcgccctacacaga

SEQ ID NO: 780376 - DNA, 75 bp, synthetic construct
  source 1..75: mol_type = other DNA
ggcagcaatatgtcgacgatgggtaaagacgtcatcaaacagcaggacgctgatttcgatctcgacaaaatggtg

SEQ ID NO: 780377 - DNA, 75 bp, synthetic construct
  source 1..75: mol_type = other DNA
agtcgccatgtccggagcaaaccgttgagcaggatgatggcatagtcattaagaccgaagcatcagagtgccacc

SEQ ID NO: 780378 - DNA, 75 bp, synthetic construct
  source 1..75: mol_type = other DNA
agcgctcagcacgttggtcgagacgcgcagcgtgcatccgctgcccgccctgcgcgccaggctgctcctgaagcg

SEQ ID NO: 780379 - DNA, 75 bp, synthetic construct
  source 1..75: mol_type = other DNA
aatagaattcaattatcccatttacaatccactgctacgttatttaatcagccccaaaaagatctctggtataaa

SEQ ID NO: 780380 - DNA, 75 bp, synthetic construct
  source 1..75: mol_type = other DNA
ttctgacaagcggattatggtgatcgacaacgatgtttcgacggcggtgttgcagcgacctcgtcttgtcggcgt

SEQ ID NO: 780381 - DNA, 75 bp, synthetic construct
  source 1..75: mol_type = other DNA
tgaatggaccacgagtgagtttgtggcctggctgaaagaaaagggggcatttgaccagccttactggatgatgaa

SEQ ID NO: 780382 - DNA, 75 bp, synthetic construct
  source 1..75: mol_type = other DNA
acagcacgctcgattggcggtgtggcatttgatggctcggccaatatcaatcttccaggtgtaaatacaacaggt

SEQ ID NO: 780383 - DNA, 75 bp, synthetic construct
  source 1..75: mol_type = other DNA
accctgtgggattatatgtctacgcccgaccagattaagcggatgcaggacgtcattagcaaccccaaacgactg

SEQ ID NO: 780384 - DNA, 75 bp, synthetic construct
  source 1..75: mol_type = other DNA
ctttaaggctctgggccgcttcgccgtcgataaatacagtctctattttgacggtcagcgcaccgaaagcaatag

SEQ ID NO: 780385 - DNA, 75 bp, synthetic construct
  source 1..75: mol_type = other DNA
gtggttgatcacgtcttcaatggtgggaaaaagcacatttatattatcaaggacagaacgtgggtgcaggatgtt

SEQ ID NO: 780386 - DNA, 75 bp, synthetic construct
  source 1..75: mol_type = other DNA
aatattgatatatcaaatgtatgggcgagagactatcttgatcttgcactagactggccccctgaatctccagac

SEQ ID NO: 780387 - DNA, 75 bp, synthetic construct
  source 1..75: mol_type = other DNA
atgaatgagcaaacaccgaatcccaacgcgaccaacgaaggaacaaacgaacaagccgcggtaagcagccttcct

SEQ ID NO: 780388 - DNA, 75 bp, synthetic construct
  source 1..75: mol_type = other DNA
actacagccagccggtggtggatttgccggaaaccaaagcctgggctgaaaaactgaccactatgctggctgcac

SEQ ID NO: 780389 - DNA, 75 bp, synthetic construct
  source 1..75: mol_type = other DNA
cggtcgctcctctgccccgatgccgcagcgagtaacagaagaaggaaaacaggattatgaagaaaaaccgcaacc

SEQ ID NO: 780390 - DNA, 75 bp, synthetic construct
  source 1..75: mol_type = other DNA
cggtcgctcctctgccccaatgccgcagcgagtaacagaagaaggaaaactgaggtgtactggcaatagcggaca

SEQ ID NO: 780391 - DNA, 75 bp, synthetic construct
  source 1..75: mol_type = other DNA
tggcttcctcgctacgtgcgcgtacggccaaatttaatcttgcctggatccagcaacaccttgcatggattgtaa

SEQ ID NO: 780392 - DNA, 75 bp, synthetic construct
  source 1..75: mol_type = other DNA
cttgatatttattcatcaaacccgagaatatcaaatgataagtccgatgaacgatataatttcctggatgccatc

SEQ ID NO: 780393 - DNA, 75 bp, synthetic construct
  source 1..75: mol_type = other DNA
gtacgatgcgtatggggcgcggcagttctattttccgaatgtgcttaagtatgatcctgatcagttaaaaaacat

SEQ ID NO: 780394 - DNA, 75 bp, synthetic construct
  source 1..75: mol_type = other DNA
agtatctggtgattataattcatttgtatatatcattcgttttgaaacaggtgagtcatatttacggaatgaaaa

SEQ ID NO: 780395 - DNA, 75 bp, synthetic construct
  source 1..75: mol_type = other DNA
gtcctttggactgacaggaaccagttttgcggctgcgagttatcaatatacaggtgaaaattatcacacattagc

SEQ ID NO: 780396 - DNA, 75 bp, synthetic construct
  source 1..75: mol_type = other DNA
tgctttactgagttgcttgttcattgaaaacggtacgtttgtattgatggatgaacctgaaacgcacatgcatcc

SEQ ID NO: 780397 - DNA, 75 bp, synthetic construct
  source 1..75: mol_type = other DNA
gataatccacacagtgacctcccctgcgcaacggacgatgccaccggcagccggaaaaccatgacgtggagccgt

SEQ ID NO: 780398 - DNA, 75 bp, synthetic construct
  source 1..75: mol_type = other DNA
actggctgggtaacggtctacaactggtacaacaatctgcatgaaaatggtctggcgaaccgggaattaaaaggc

SEQ ID NO: 780399 - DNA, 75 bp, synthetic construct
  source 1..75: mol_type = other DNA
acttcagaaattacaccttcatctatcaggataacccggaaaaaacgcagtccggcggctataactcccagcgct

SEQ ID NO: 780400 - DNA, 75 bp, synthetic construct
  source 1..75: mol_type = other DNA
taagcagactagctcttcgtttgaatttgatgaatacgctaaaacaatatagcctgctacgaaaaatatattata

SEQ ID NO: 780401 - DNA, 75 bp, synthetic construct
  source 1..75: mol_type = other DNA
gagcgtcagctacagcaactgagttatgcccgggtgttgatcctggatgaaataggctatctgccgatgaacaga

SEQ ID NO: 780402 - DNA, 75 bp, synthetic construct
  source 1..75: mol_type = other DNA
gggatttttttgaggtgatgtgtttgctaatagaggaatatgaaaaaaaacattatcccattgagccaccatccc

SEQ ID NO: 780403 - DNA, 75 bp, synthetic construct
  source 1..75: mol_type = other DNA
gagcgccagctacagcaactgagttatgcccgggtgctgctcctggacgaaataggctatctgtcgatgaccaga

SEQ ID NO: 780404 - DNA, 75 bp, synthetic construct
  source 1..75: mol_type = other DNA
agcgaaggaaatagtcatgataatagcgatagaaaaaaactcgtatggattggaaatagcaaatggggcgaatat

SEQ ID NO: 780405 - DNA, 75 bp, synthetic construct
  source 1..75: mol_type = other DNA
ggaagtgatgaacttcactcagcggaatccccagtataaagaaattttgatcagcaatattgtcaccacacatat

SEQ ID NO: 780406 - DNA, 75 bp, synthetic construct
  source 1..75: mol_type = other DNA
tgagtacggagagagccgggtaatcatcacggacagcctgaaccggcgggaggtgctgtacacggaaggcgaggg

SEQ ID NO: 780407 - DNA, 75 bp, synthetic construct
  source 1..75: mol_type = other DNA
gtcttcggtttatgcggctgctttttgagcggtctgggatatctgacggcaggattaaccgccagtctgcccgtc

SEQ ID NO: 780408 - DNA, 75 bp, synthetic construct
  source 1..75: mol_type = other DNA
agggagatatgactcagtatggcggtcccattgtccagggttcggcaggtgtaagaattggcgcgccaaccggcg

SEQ ID NO: 780409 - DNA, 75 bp, synthetic construct
  source 1..75: mol_type = other DNA
aatttaacgttacctatgattcgtcgtttacattcccagtttggcattcctcttgaaagcctggttggtgtatga

SEQ ID NO: 780410 - DNA, 75 bp, synthetic construct
  source 1..75: mol_type = other DNA
gcacagccgcagcaacccgacacaccggaggaagagccgcccggcaagctcagccccggtgaaagtgtgactgcc

SEQ ID NO: 780411 - DNA, 75 bp, synthetic construct
  source 1..75: mol_type = other DNA
tacccggcactggccaccccgtcagctgacaaccgtcagctggtcatcaatgccctgacggataacggtctgcag

SEQ ID NO: 780412 - DNA, 75 bp, synthetic construct
  source 1..75: mol_type = other DNA
atgaacagaatatattcgcttaaatatagttcgttgactgatggacttgtcgctgtatctgaattcactaaaaga

SEQ ID NO: 780413 - DNA, 75 bp, synthetic construct
  source 1..75: mol_type = other DNA
ccaacacagaagttctgcgcgctaaagcgttagaaaaggatctaacgttacatgatggcgatggcctttttctgc

SEQ ID NO: 780414 - DNA, 75 bp, synthetic construct
  source 1..75: mol_type = other DNA
gcggattaccttgccttgttagccaacggaattgacccacaaattcaggctgaagttgcagaggaacagcagcaa

SEQ ID NO: 780415 - DNA, 75 bp, synthetic construct
  source 1..75: mol_type = other DNA
taatcgttcaacctacctggttcaaagaaaagatttaatgaactggtggggattattttgtattagttcgaagag

SEQ ID NO: 780416 - DNA, 75 bp, synthetic construct
  source 1..75: mol_type = other DNA
agcattaccaccaagcgaaatcccccggtttatgattgcactggctaacgcatccatccgtctggaaacccgtat

SEQ ID NO: 780417 - DNA, 75 bp, synthetic construct
  source 1..75: mol_type = other DNA
tcgattggcattgccagctacccgcaacatgcccagactgacaacctgctgcgcgccgcggatgtggccttgtac

SEQ ID NO: 780418 - DNA, 75 bp, synthetic construct
  source 1..75: mol_type = other DNA
tggagaaagatgtattccctgccatcggtgagatccccgttcagcaaattaaagcccgaatattagttgaagcat

SEQ ID NO: 780419 - DNA, 75 bp, synthetic construct
  source 1..75: mol_type = other DNA
ctgtacgtatctgactttcctaatgcaggaagtggatctccatgggtaaattttgacttcgctctcactggatgc

SEQ ID NO: 780420 - DNA, 75 bp, synthetic construct
  source 1..75: mol_type = other DNA
aaacgcaagatgttattttttatcattttgagctggtttggctggggggatgctcttctcttaagcttcttgctc

SEQ ID NO: 780421 - DNA, 75 bp, synthetic construct
  source 1..75: mol_type = other DNA
atgattaaatcaaccaatatacaggcaatcggttctggtattatgcatcaaataaacaatatatactcgttaact

SEQ ID NO: 780422 - DNA, 75 bp, synthetic construct
  source 1..75: mol_type = other DNA
tggaatatctggcttttgtcatgtctgccggtaatgttttttttactcgctttcagtttgcggtgttacatttac

SEQ ID NO: 780423 - DNA, 75 bp, synthetic construct
  source 1..75: mol_type = other DNA
atttgcttcttataacagcaattgttgtttcaaccccaatcgcaataaataacatagtagcaaattttgctaaga

SEQ ID NO: 780424 - DNA, 75 bp, synthetic construct
  source 1..75: mol_type = other DNA
gggatactatgcaaatacagggaatgctggtggtattaagattgaaattcaggacagggatggctctaatgcatc

SEQ ID NO: 780425 - DNA, 75 bp, synthetic construct
  source 1..75: mol_type = other DNA
ttgctcgcagcgtatatttttctatttgatgagtacaatgagaagaaagcatccgcccagaaagacattctcatt

SEQ ID NO: 780426 - DNA, 75 bp, synthetic construct
  source 1..75: mol_type = other DNA
gcttgtcggggtgaataacgaaactcaggatacgattcgactcgaggagataaaaattggcaacgtctcaggcaa

SEQ ID NO: 780427 - DNA, 75 bp, synthetic construct
  source 1..75: mol_type = other DNA
gcttttgggcgtgaataacgaaacacaggaaacaattcgtctggaggaaatcagaattgacaacgtctcaggcca

SEQ ID NO: 780428 - DNA, 75 bp, synthetic construct
  source 1..75: mol_type = other DNA
actgggatggtggcgagtttgatgatcatctgacgcttgaacttgaaaaaaatggcaaaggaagtcggatatata

SEQ ID NO: 780429 - DNA, 75 bp, synthetic construct
  source 1..75: mol_type = other DNA
catgggagtgactggtctgaagtattgcgcctgactgacattgttacagagaaggtctcttccggcagggctgca

SEQ ID NO: 780430 - DNA, 75 bp, synthetic construct
  source 1..75: mol_type = other DNA
aggtcttaggccaaagcgcgcaagaagagaataatctgtggcgacgccgggtctggctgtacggagaaaagagcc

SEQ ID NO: 780431 - DNA, 75 bp, synthetic construct
  source 1..75: mol_type = other DNA
ggatatcacggggacgaatacggaaaccggtacacaggtatcaacaggaggaataaccgtttatggcagaaagtt

SEQ ID NO: 780432 - DNA, 75 bp, synthetic construct
  source 1..75: mol_type = other DNA
agtaaaatattttggtcacgcatctgattcatttaattcagctatctcctcctcaagtattccattaatcattga

SEQ ID NO: 780433 - DNA, 75 bp, synthetic construct
  source 1..75: mol_type = other DNA
cagcgttcaggatggcggtacttataacatcacgatgccaatggttactcactggttcagggaagtacggcgcgg

SEQ ID NO: 780434 - DNA, 75 bp, synthetic construct
  source 1..75: mol_type = other DNA
ttgggaaatcagaagggttggtgaatcagtttaaaaccaccgatcaatatctgcgcgaccaggacaaacaggtca

SEQ ID NO: 780435 - DNA, 75 bp, synthetic construct
  source 1..75: mol_type = other DNA
aatcgccatcggataaaagactgaatagtgaaagtctcaggaaactgatgttgaatattaaagatgttgctgaag

SEQ ID NO: 780436 - DNA, 75 bp, synthetic construct
  source 1..75: mol_type = other DNA
ctcagcgtataaaccgcaaagttaactttgcaccagagcccggtaacctccacctccacctcaacttcgcctcag

SEQ ID NO: 780437 - DNA, 75 bp, synthetic construct
  source 1..75: mol_type = other DNA
cttcaaaaaaagagtcgtcatctaataaatatgatttacccgttgacgtggatacagcagctgcaagacttaaac

SEQ ID NO: 780438 - DNA, 75 bp, synthetic construct
  source 1..75: mol_type = other DNA
ccatagcatcaggtgcaatatttgatcaagggcctggatggagtgggttaaaggtgtacggaactgcaaataaag

SEQ ID NO: 780439 - DNA, 75 bp, synthetic construct
  source 1..75: mol_type = other DNA
gtttatttgtgccggtttaggttcttctacgctttattgggggttgctgaatgggcctattattatcaaacgcct

SEQ ID NO: 780440 - DNA, 75 bp, synthetic construct
  source 1..75: mol_type = other DNA
tggattaaatatcgcaccgcgttcacaacaggcactcgaatttagcgtcccttactccttcttccactggggcat

SEQ ID NO: 780441 - DNA, 75 bp, synthetic construct
  source 1..75: mol_type = other DNA
tggcaatgggactggtgatttatttagccaccagtaaatacggcaatattcgtcttggcgaaggaaaaccggaat

SEQ ID NO: 780442 - DNA, 75 bp, synthetic construct
  source 1..75: mol_type = other DNA
tgttcaaccgtctgcaaaaaacgctccgggccatgccaccggacgaccgtgacaacctgcccctgctgtatcaga

SEQ ID NO: 780443 - DNA, 75 bp, synthetic construct
  source 1..75: mol_type = other DNA
aggtgcggcggtgaaagtagttttccgtacccgtcctggtaaagcgttgctgattaaatcccgcatggcagatgg

SEQ ID NO: 780444 - DNA, 75 bp, synthetic construct
  source 1..75: mol_type = other DNA
acgcttagcggaaacatgcaaaaacgtttttcacaaactaccgtcggattgaacgcatcgaagggccaggattac

SEQ ID NO: 780445 - DNA, 75 bp, synthetic construct
  source 1..75: mol_type = other DNA
tttggaagagtttgctactgaaaaactggcacatagcacgctacagtattggtatccaaatcaatacagtgaaca

SEQ ID NO: 780446 - DNA, 75 bp, synthetic construct
  source 1..75: mol_type = other DNA
agattcatttataccaagtcgtttaccgcccgaacatagagataaaaaaatagttatttgcttatgctttggtgg

SEQ ID NO: 780447 - DNA, 75 bp, synthetic construct
  source 1..75: mol_type = other DNA
agttcttacagcgtgtcgctgttaccgatacccagttcctttccattatattgaaggttggttggtcgaccccac

SEQ ID NO: 780448 - DNA, 75 bp, synthetic construct
  source 1..75: mol_type = other DNA
accaatattcggtaaaagatacgttgcaggctgtcaggcattatgcgcagtcagaacccaaaaaaagagcaggaa

SEQ ID NO: 780449 - DNA, 75 bp, synthetic construct
  source 1..75: mol_type = other DNA
gtcttgatatgatgggattggttgccaacaccgacgagcatcactactaccgctctggttatggaagacctgagg

SEQ ID NO: 780450 - DNA, 75 bp, synthetic construct
  source 1..75: mol_type = other DNA
acgccgatgttggcgcgacttactatttcaataaaaacatgtccacttatgttgactataaaatcaacctgttgg

SEQ ID NO: 780451 - DNA, 75 bp, synthetic construct
  source 1..75: mol_type = other DNA
aatttaatccagaagggaaattttgcaattagcattagtagcattgatgcagccccaggaaccaaatttaaagtt

SEQ ID NO: 780452 - DNA, 75 bp, synthetic construct
  source 1..75: mol_type = other DNA
gaactagtttgcattttgcgatgatggaagcaaagaataatgtcttaatgatatcaggtgcgagtccaaatgcag

SEQ ID NO: 780453 - DNA, 75 bp, synthetic construct
  source 1..75: mol_type = other DNA
tgcaagtattcctgtctccgagtggttaatgaaaagaacaacaaaagccaacaaaaatcaatcagatactttgtt

SEQ ID NO: 780454 - DNA, 75 bp, synthetic construct
  source 1..75: mol_type = other DNA
gcgactcctatctatgagacggatgcgctaattcaaatagagcagaagcaaggtaatgctatactaagcagtcta

SEQ ID NO: 780455 - DNA, 75 bp, synthetic construct
  source 1..75: mol_type = other DNA
tctgttgacttgaatatggaagctaaatcagtacttgatcaaatagttaacgttgataatcaactaaatgaatta

SEQ ID NO: 780456 - DNA, 75 bp, synthetic construct
  source 1..75: mol_type = other DNA
cattccagtttccgaagcaatgactaagtataataatttaaaaaataagtcacgtaagaatgaaggaaatatatt

SEQ ID NO: 780457 - DNA, 75 bp, synthetic construct
  source 1..75: mol_type = other DNA
cagcattcctgtttctgagagttttaccaagaaaataaataattcaaataaagttaaaaacgtgaaggctgctga

SEQ ID NO: 780458 - DNA, 75 bp, synthetic construct
  source 1..75: mol_type = other DNA
gaagttagtttacgtagatttgataatagtggtgtacatattaatggttgtattcttaacggcgtaatgaaaaaa

SEQ ID NO: 780459 - DNA, 75 bp, synthetic construct
  source 1..75: mol_type = other DNA
acttatggagaagcgtaaaacgcttcttgatgagaaaagtaagctgaacaagcgtgtgtcagcgatgccagaaac

SEQ ID NO: 780460 - DNA, 75 bp, synthetic construct
  source 1..75: mol_type = other DNA
attattattgctgtcggatttatccttggcctcttatgctcaattggattaattattttacgcgtttttcttcgt

SEQ ID NO: 780461 - DNA, 75 bp, synthetic construct
  source 1..75: mol_type = other DNA
agatcgctttatcccagataaatatagccaatgtaaattcgaatgaagctacaaaattcattctaacggttaaag

SEQ ID NO: 780462 - DNA, 75 bp, synthetic construct
  source 1..75: mol_type = other DNA
tgaaaaaaagaagactttagcacaagaaaaagttaggctgaataaccaagttacatcgatgccaacgactcaaca

SEQ ID NO: 780463 - DNA, 75 bp, synthetic construct
  source 1..75: mol_type = other DNA
gtcgtgctgtatatttgcaattgctaaatcggcaacaagaattaaacattgccaaatcaagtgctattggcaacg

SEQ ID NO: 780464 - DNA, 75 bp, synthetic construct
  source 1..75: mol_type = other DNA
taggtaatcaaatgttccaatatgctgcagcctatatccttaagcaacattttcctgatactatattagtgcttg

SEQ ID NO: 780465 - DNA, 75 bp, synthetic construct
  source 1..75: mol_type = other DNA
tgctgcgtgtggagcgggcgttggaaaggtgtgtgaagcaacagccgccgcagaaggtgtatgacgctacggtgt

SEQ ID NO: 780466 - DNA, 75 bp, synthetic construct
  source 1..75: mol_type = other DNA
tcttgtcggggctgtgctggctatcgccgccacgctgcccggttttcagtcgctcaaaacttccgttgaggggct

SEQ ID NO: 780467 - DNA, 75 bp, synthetic construct
  source 1..75: mol_type = other DNA
gactctcgcttctggtggcggactggatatcaccggagggaaggtgcatatcaatggcccacttaattttctgct

SEQ ID NO: 780468 - DNA, 75 bp, synthetic construct
  source 1..75: mol_type = other DNA
gacaattggtgctgaatacggtgctggatggcgataattcagctacggataaactggtcgtacagggagatacca

SEQ ID NO: 780469 - DNA, 75 bp, synthetic construct
  source 1..75: mol_type = other DNA
aaaagagcggctgcgtctgtgaattacaccctgggcggcaatctgaccaacaacggtacgctgatgaccggaatg

SEQ ID NO: 780470 - DNA, 75 bp, synthetic construct
  source 1..75: mol_type = other DNA
gataaaattggtcttgctcgaaatataatatccattcatatggtggataagagtatgacatcgataaatcatggc

SEQ ID NO: 780471 - DNA, 75 bp, synthetic construct
  source 1..75: mol_type = other DNA
aaaaaagacttcaaaatcgccaggcgaaatatcaaaatgaaattaatcaactatctgcgccaggtattaattttg

SEQ ID NO: 780472 - DNA, 75 bp, synthetic construct
  source 1..75: mol_type = other DNA
atattgatattactcggttatatttgcctgatagtgacgatattagtaataatactcctagtataatattaacag

SEQ ID NO: 780473 - DNA, 75 bp, synthetic construct
  source 1..75: mol_type = other DNA
gttcaggctggcgtgcgaattgtaaaccagaatgccaggaaaaaacaaaacccgccgaagcgggttaagtgcggg

SEQ ID NO: 780474 - DNA, 75 bp, synthetic construct
  source 1..75: mol_type = other DNA
tttaccagaaacatatcgattcggatattgatattgtaaaactacgaaatgatatcccagattatttgatgcgtg

SEQ ID NO: 780475 - DNA, 75 bp, synthetic construct
  source 1..75: mol_type = other DNA
catgcggaactggggatcacgctggacaggtcgtcgcgtccgggaggcctgatgccaatcagaatcaacggctgt

SEQ ID NO: 780476 - DNA, 75 bp, synthetic construct
  source 1..75: mol_type = other DNA
caagtaaaaatgaagatgatatcgatttaagtcgattagtgggcgagtttattgatcatcgaaaacttatcattt

SEQ ID NO: 780477 - DNA, 75 bp, synthetic construct
  source 1..75: mol_type = other DNA
aagttagtaaataaaaatgatgtcacaattaaaattgataaaatagacgctgagccaggtactagctttactgta

SEQ ID NO: 780478 - DNA, 75 bp, synthetic construct
  source 1..75: mol_type = other DNA
ttttgcaatgatggaagcgcgaaacaatattctaatgatatcaggagccagcccaaatgcaggaaaaacttttgt

SEQ ID NO: 780479 - DNA, 75 bp, synthetic construct
  source 1..75: mol_type = other DNA
tcatagatactgatatgcgtaaaggatatacacacaaactttttaataaaaataatgagaatggactatcggatg

SEQ ID NO: 780480 - DNA, 75 bp, synthetic construct
  source 1..75: mol_type = other DNA
ctgtgtatcttcaattacttaatcgacaacaagagttgaatatagcaaaatctagcgcaataggtaatgtgagaa

SEQ ID NO: 780481 - DNA, 75 bp, synthetic construct
  source 1..75: mol_type = other DNA
agcagtattaaacgttttgaacaaagtggcgttccaatcaaaggttgtatactgaatggtattgtgaaaaaagca

SEQ ID NO: 780482 - DNA, 75 bp, synthetic construct
  source 1..75: mol_type = other DNA
tagtgtatctgatcagggaaaagatacaggtatattaactttgtcattgcttgggagtaacccagagttaataaa

SEQ ID NO: 780483 - DNA, 75 bp, synthetic construct
  source 1..75: mol_type = other DNA
catttcaagcagtagccaagaagtggcttgatgagaaagtcaaaacgtcaggcatctcccaggatcatgctaacg

SEQ ID NO: 780484 - DNA, 75 bp, synthetic construct
  source 1..75: mol_type = other DNA
gtggatcactattgcaccgttcgtgacacaaatggtatagacccccaagttcataacaaccaaaaagccaatgca

SEQ ID NO: 780485 - DNA, 75 bp, synthetic construct
  source 1..75: mol_type = other DNA
atatctgacctgaaacaacatggtcagatactgctggttgttgatcagcccgctaccatcggtgcgttacctgtc

SEQ ID NO: 780486 - DNA, 75 bp, synthetic construct
  source 1..75: mol_type = other DNA
tacgaacaacagccccgaaattacccattgagcgatcttttcgtccatgcggaaaacgcccctttcgtccagagt

SEQ ID NO: 780487 - DNA, 72 bp, synthetic construct
  source 1..72: mol_type = other DNA
atgagcggaaaaccggcagcgcgtcagggcgacatgacgcagtatggcggtagcattgttcagggttcagcc

SEQ ID NO: 780488 - DNA, 75 bp, synthetic construct
  source 1..75: mol_type = other DNA
ctcttcaagccgtagcaaggaaatggttggacgagaaggtaaagacctcaggtatctcacaagaccatgcagaag

SEQ ID NO: 780489 - DNA, 75 bp, synthetic construct
  source 1..75: mol_type = other DNA
ctatctcttgaagcaaaatctgtactggatcagattgttaatgtagataatcaattaaatgaattaacatttcgt

SEQ ID NO: 780490 - DNA, 75 bp, synthetic construct
  source 1..75: mol_type = other DNA
ggcaagcagcgcaagatgcgaaaagtttagattttctgaatgaacaattgccaaaagtaagaagtgatctcgact

SEQ ID NO: 780491 - DNA, 75 bp, synthetic construct
  source 1..75: mol_type = other DNA
cttacacttgaggcgaaggctgtattagatcaaattgttaatgttgataatcagttaaatgaattaacgttcaga

SEQ ID NO: 780492 - DNA, 75 bp, synthetic construct
  source 1..75: mol_type = other DNA
caagacaggctgcacaagatgctaagagtttggaatttctgaatcagcagttaccaaaagttcgctctgacttag

SEQ ID NO: 780493 - DNA, 75 bp, synthetic construct
  source 1..75: mol_type = other DNA
aatatcgaaagctataaaaaaaatagactcaattggttttgattttatatcaagaggaatggtaccaccaaatcc

SEQ ID NO: 780494 - DNA, 75 bp, synthetic construct
  source 1..75: mol_type = other DNA
gaggattgcgaactagtctacattttgcaatgatggaggctagaaataatatattaatgatttccggtgcaagtc

SEQ ID NO: 780495 - DNA, 75 bp, synthetic construct
  source 1..75: mol_type = other DNA
aggttgcattatgaatggtgttgtgaagaaagccagcagttattatagctacggctatagttattacggctattc

SEQ ID NO: 780496 - DNA, 75 bp, synthetic construct
  source 1..75: mol_type = other DNA
ttgatataactcatttatatatttctgatgcaaatagtgaattatacttaactgtaaaagagaatgggaactatg

SEQ ID NO: 780497 - DNA, 75 bp, synthetic construct
  source 1..75: mol_type = other DNA
tatacttaatggtgttgtaaagaaagccagtagttattatggatatggatataaccattatggatattcctatac

SEQ ID NO: 780498 - DNA, 75 bp, synthetic construct
  source 1..75: mol_type = other DNA
ttattagcaggtattgtatttggcgggatggtttctgtaggacttgtgttacttagagttctcctacgtagaggg

SEQ ID NO: 780499 - DNA, 75 bp, synthetic construct
  source 1..75: mol_type = other DNA
gccaagcagcacaggatgctaaaagtctagagtttttaaaccaacaactgcctaaagtacgcaatgatttagata

SEQ ID NO: 780500 - DNA, 75 bp, synthetic construct
  source 1..75: mol_type = other DNA
gcaatctcgtatgattctgggaaaaactgtagatgatctaaatttacaagctaagatcgaacaaagttattttcc

SEQ ID NO: 780501 - DNA, 75 bp, synthetic construct
  source 1..75: mol_type = other DNA
attgctcaaactggaaaaaaagtactttttatagacaccgatatgagaaagggttatacccacaagttgttcaat

SEQ ID NO: 780502 - DNA, 75 bp, synthetic construct
  source 1..75: mol_type = other DNA
gcttttcttctgagcgcttcgataccgaaatggaaaattacattaaccaaaaatggatgaatttcaatgaaagaa

SEQ ID NO: 780503 - DNA, 75 bp, synthetic construct
  source 1..75: mol_type = other DNA
cattctctctagtagccatgctgtggccaaaggggtattaacaggtcctgatcaattgcatataagctatgttca

SEQ ID NO: 780504 - DNA, 75 bp, synthetic construct
  source 1..75: mol_type = other DNA
gaccgataaactggattcaccaaaaaagaaacatcgcttatgtaaaaatgatgttgagtgtcgtcagttatctct

SEQ ID NO: 780505 - DNA, 75 bp, synthetic construct
  source 1..75: mol_type = other DNA
ggaatccgccttacggacgtgtcactctcgatattaaaacgagagaaaaatattctcgttcgttatttggtcatg

SEQ ID NO: 780506 - DNA, 75 bp, synthetic construct
  source 1..75: mol_type = other DNA
aaaaattgatctcatagttgaagcattttctaatatgccagataaaaggttagttgttatcggtaatggttctga

SEQ ID NO: 780507 - DNA, 75 bp, synthetic construct
  source 1..75: mol_type = other DNA
ggtaaaggcggttcactggaaactgtcaggccatatggtgtagctcaagcaactggtttcttttttgaacaacaa

SEQ ID NO: 780508 - DNA, 75 bp, synthetic construct
  source 1..75: mol_type = other DNA
tctctgcgtggcagaattacttgaaattcagcggtgcagaaaagagtaaaataccggccagccaactgcatgagc

SEQ ID NO: 780509 - DNA, 75 bp, synthetic construct
  source 1..75: mol_type = other DNA
aatacggactttatctcagcatacttatagcgacaatatatgtcacttctaagttattgggtattacacctgcaa

SEQ ID NO: 780510 - DNA, 75 bp, synthetic construct
  source 1..75: mol_type = other DNA
ggcgtatcaggagactgccggaggaggaacaactgaggggaacgatgagggaggcggatattaacccctggcaga

SEQ ID NO: 780511 - DNA, 75 bp, synthetic construct
  source 1..75: mol_type = other DNA
tggacgaaacaggtggcaataaacagatcccaaattgggatatggtattaaatcagtttaaacaaattcagggga

SEQ ID NO: 780512 - DNA, 75 bp, synthetic construct
  source 1..75: mol_type = other DNA
gaacaggtctatatccacgcgcagaagaacatggatacggaggtgctgaataatcggacgacggatgtgaaggct

SEQ ID NO: 780513 - DNA, 75 bp, synthetic construct
  source 1..75: mol_type = other DNA
tattgagctaatttgtgggcagggagagagcgggacttgttccataaaactggagaaaacaggaaagataataat

SEQ ID NO: 780514 - DNA, 75 bp, synthetic construct
  source 1..75: mol_type = other DNA
ccgcaggcaatatgttggttgaccacgtccatcagattatccagtggccagagcgcggctggctggcggagatca

SEQ ID NO: 780515 - DNA, 75 bp, synthetic construct
  source 1..75: mol_type = other DNA
cctgtagcatctggttgcataggtattcatgcggttaaaatttatcaggtgcgatcgcggcagtttttcgggtgg

SEQ ID NO: 780516 - DNA, 75 bp, synthetic construct
  source 1..75: mol_type = other DNA
atggcagaagagaaaaaaggcggggtgaccgtgtacataagccccgaaatcgtggaggtgctcaagcagcgccac

SEQ ID NO: 780517 - DNA, 75 bp, synthetic construct
  source 1..75: mol_type = other DNA
tattgtcctccctgttatgccttttctcaggattacggcattgataaagccatccgcgaaagccttgcgtatttt

SEQ ID NO: 780518 - DNA, 75 bp, synthetic construct
  source 1..75: mol_type = other DNA
tatgggtagaaaagaagcgtctaatcgctgaattttatcaaaacattgattcctcaatttcgggacgttacactg

SEQ ID NO: 780519 - DNA, 75 bp, synthetic construct
  source 1..75: mol_type = other DNA
tgacatgtcatctgtcgcacaaaacgccagaggcgtatacctgcatttgcgtgaaatccatcaaatctggacaag

SEQ ID NO: 780520 - DNA, 75 bp, synthetic construct
  source 1..75: mol_type = other DNA
ccttggatgtgttaggtaaacacggaagtacttacaccattgtttataatagtgattctgataccgcttatgtta

SEQ ID NO: 780521 - DNA, 75 bp, synthetic construct
  source 1..75: mol_type = other DNA
ccggatttttgtatggctgccacgaacgctggacgcttaccgagagcatcaaactggcacatgcctgcgcacgcg

SEQ ID NO: 780522 - DNA, 75 bp, synthetic construct
  source 1..75: mol_type = other DNA
gacgatgtttatggcactcgcagcgcccgcctgctggcgcagatgcatgacgctggctatgaaacctgtctcgat

SEQ ID NO: 780523 - DNA, 75 bp, synthetic construct
  source 1..75: mol_type = other DNA
caggtgatgacagacccaagcgggcagcggacgtttttccattcgccgggtgcaaacagacttttggatcttccg

SEQ ID NO: 780524 - DNA, 75 bp, synthetic construct
  source 1..75: mol_type = other DNA
aaactgaccaaggaaacaggtaaatcatcctggtatctggatcatgatgccggtactggtgctgaactgctgaaa

SEQ ID NO: 780525 - DNA, 75 bp, synthetic construct
  source 1..75: mol_type = other DNA
atgacttctgaagtgaaactaaaaacaggtggtgacccccggtcattaccggattatgctgccctgcgcgatgaa

SEQ ID NO: 780526 - DNA, 75 bp, synthetic construct
  source 1..75: mol_type = other DNA
ggcagcagtatgatgaggagtccggcctgtattacaaccgccaccgctattatgacccgctgcaggggaggtata

SEQ ID NO: 780527 - DNA, 75 bp, synthetic construct
  source 1..75: mol_type = other DNA
ttcaaaaagccatagaagattaataacttatattagcaaattagaaaaaaaatatggaaagaaccctttaaataa

SEQ ID NO: 780528 - DNA, 75 bp, synthetic construct
  source 1..75: mol_type = other DNA
ttggtacagctttgcctcggtgcctttaaagccggaatgcgtgaatttaccgccaatgtcagcggtaacgatctg

SEQ ID NO: 780529 - DNA, 75 bp, synthetic construct
  source 1..75: mol_type = other DNA
gttattacggggtatgccagaacaaatgcagaggttatcgtcacccagaatggttactccatttatcagacgcac

SEQ ID NO: 780530 - DNA, 75 bp, synthetic construct
  source 1..75: mol_type = other DNA
tgaccatcggtgattatcgtacaaccagtattactgagcagttaattgacggttttcagttccggggtgtgagcc

SEQ ID NO: 780531 - DNA, 75 bp, synthetic construct
  source 1..75: mol_type = other DNA
ttaactatgtgaaggaaggtaaatatactttctgtacgccaggacacatgggaggaacagcttaccagaaatcgc

SEQ ID NO: 780532 - DNA, 75 bp, synthetic construct
  source 1..75: mol_type = other DNA
caaaacgggtatgggtggcaagcgtattgaaggaaaagtaatatatgaaacgcagtcaacgcataagctgttagc

SEQ ID NO: 780533 - DNA, 75 bp, synthetic construct
  source 1..75: mol_type = other DNA
tcttctggtcgccctgccaccaatacagcgcctggaaccaaaagcaacatcgcaggtgcggattgtaaagcaagc

SEQ ID NO: 780534 - DNA, 75 bp, synthetic construct
  source 1..75: mol_type = other DNA
cttttgaaagacctgagcgatcaggtgatctggcacggcgaaaagctggagccagcggagtggaaagacctcatc

SEQ ID NO: 780535 - DNA, 75 bp, synthetic construct
  source 1..75: mol_type = other DNA
taaggaaagcattaaccaagtcattgaattactgggatataagggaagactcacagggcacggtttcagacacac

SEQ ID NO: 780536 - DNA, 75 bp, synthetic construct
  source 1..75: mol_type = other DNA
cggaagccatggtgaagggatatatcacccgtctggagaaccagcctgtacagggcgaagcgtcgtctccggtaa

SEQ ID NO: 780537 - DNA, 75 bp, synthetic construct
  source 1..75: mol_type = other DNA
gttcctctttgctgacaatcattaatagcattgcagttacagatttactgggaatagtcccctatgaactttata

SEQ ID NO: 780538 - DNA, 75 bp, synthetic construct
  source 1..75: mol_type = other DNA
ggcgatttactggttcggtaccgaccgcggcgtgaagttctccgaagcatccaataagcgcatcgcctgggcgca

SEQ ID NO: 780539 - DNA, 75 bp, synthetic construct
  source 1..75: mol_type = other DNA
cttaaaagagataaaactagaacatccgttaccttcaataaagctttacatttcctataataaatcttctttaaa

SEQ ID NO: 780540 - DNA, 75 bp, synthetic construct
  source 1..75: mol_type = other DNA
gaatcactaatcagatagtgtctgctgggtatattgttgtaagtgggttagcaataggcactgatgcgaatgctc

SEQ ID NO: 780541 - DNA, 75 bp, synthetic construct
  source 1..75: mol_type = other DNA
tgcgaattattacgctgttaattgatggcgaccagaatgaattgtcgaatttattagatactgcgtttgagatta

SEQ ID NO: 780542 - DNA, 75 bp, synthetic construct
  source 1..75: mol_type = other DNA
ttaaattcgatccggtcagtataacaggaaatataagagacaagagaataaggtatcgttctttggttaattctc

SEQ ID NO: 780543 - DNA, 75 bp, synthetic construct
  source 1..75: mol_type = other DNA
ttgtcacattgaacatcactggagatcataaaaaactatctgaattactcgatactgcatttgagattgaaataa

SEQ ID NO: 780544 - DNA, 75 bp, synthetic construct
  source 1..75: mol_type = other DNA
ctttcagcagaccagatgatgcacctcagcagaaaatcctcattgttaaatcatgcgtcagagtggataaccctt

SEQ ID NO: 780545 - DNA, 75 bp, synthetic construct
  source 1..75: mol_type = other DNA
gaagaggttatgagtaagttaaccggagaagttatccatggaattcttctttccttacctgagtttattgatatg

SEQ ID NO: 780546 - DNA, 75 bp, synthetic construct
  source 1..75: mol_type = other DNA
atgaatcatgagtatactgcaaagaaggatattgtggcaataaaaagaaatatggaagagaaaaaactagctaga

SEQ ID NO: 780547 - DNA, 75 bp, synthetic construct
  source 1..75: mol_type = other DNA
agcaacacttcagcatcaggctccggaacttcaaatgcgtccgtttattacaatgctctattcgatgtgcctaac

SEQ ID NO: 780548 - DNA, 75 bp, synthetic construct
  source 1..75: mol_type = other DNA
atgttgatgtaaaaatatccttttctaaaatagtaagcaaagttaataaacgcgtgaagcagaggaagttactga

SEQ ID NO: 780549 - DNA, 75 bp, synthetic construct
  source 1..75: mol_type = other DNA
acataggcgatgttcaccgctctggtcatcacgacatcaccaaagcgattaaagaaagaaaaactaaccatggtt

SEQ ID NO: 780550 - DNA, 75 bp, synthetic construct
  source 1..75: mol_type = other DNA
ttgctgccgagctaatgggttttgaggcgcaatctgcggttagccattatctcaacggaaaggctccacttaata

SEQ ID NO: 780551 - DNA, 75 bp, synthetic construct
  source 1..75: mol_type = other DNA
tttttctccgatcaccgtttcacacaatatccatgctggaacacagctgaatcccggcggatgggatatattacc

SEQ ID NO: 780552 - DNA, 75 bp, synthetic construct
  source 1..75: mol_type = other DNA
accggaacttaaggatattattaataaagcactgaatgcaattccctgtatgggtccaccacatattgcaatttt

SEQ ID NO: 780553 - DNA, 75 bp, synthetic construct
  source 1..75: mol_type = other DNA
tgattcaaatggctcggttagtaaaatgcaccattcactcggaaaactcaacatgttgcactcttatacgccgtc

SEQ ID NO: 780554 - DNA, 75 bp, synthetic construct
  source 1..75: mol_type = other DNA
ttcggcagcggaccgacgctggatgaaaccttcggtttaatcgacaccgcagaaaaatcagcacaagtattagtg

SEQ ID NO: 780555 - DNA, 75 bp, synthetic construct
  source 1..75: mol_type = other DNA
tcgccctcacctatgtacttgaaaacgacaccgcggtcttcactcgccaactgtgggaagacagcaccgagtgtc

SEQ ID NO: 780556 - DNA, 75 bp, synthetic construct
  source 1..75: mol_type = other DNA
tgggccgccggacgggaaaacgggtgtggcggcgggagcgtgacctgacggggtggatgtcgctgtcgcgtaaac

SEQ ID NO: 780557 - DNA, 75 bp, synthetic construct
  source 1..75: mol_type = other DNA
cggcgaagggttcaccgttgcagagttgtcgctggtggtggattactgcaacgcgaagtggggtgatgacctgaa

SEQ ID NO: 780558 - DNA, 75 bp, synthetic construct
  source 1..75: mol_type = other DNA
ttttagatgatagaggagctcctcttagaaactgcataaattcatatcgaaaaagatataacattgataaaaaga

SEQ ID NO: 780559 - DNA, 75 bp, synthetic construct
  source 1..75: mol_type = other DNA
aaacagagctgcaaagtggcgttgccggaagccatggtgaaggggtatatcacccgtctggagaaccagcctgtg

SEQ ID NO: 780560 - DNA, 75 bp, synthetic construct
  source 1..75: mol_type = other DNA
tcgataatgaacaaatttggatggagtaaggatcagatttccaagttccaagattcaccactcgattttgttcaa

SEQ ID NO: 780561 - DNA, 75 bp, synthetic construct
  source 1..75: mol_type = other DNA
cagcgcagacagaaagcccgtcaacaagccgatgatgcacgttttaatgataagcctcgtgatacgaaggaaatg

SEQ ID NO: 780562 - DNA, 75 bp, synthetic construct
  source 1..75: mol_type = other DNA
aaaaataccagtatgttgataaacaaacaggagaaattaaagaccgaactttgaatatacctcattacttttgtg

SEQ ID NO: 780563 - DNA, 75 bp, synthetic construct
  source 1..75: mol_type = other DNA
cgagattgcacgtctcaaacgccagctggcagaacgggatgaagagctggctatcctccaaaaggccgcgacata

SEQ ID NO: 780564 - DNA, 75 bp, synthetic construct
  source 1..75: mol_type = other DNA
ggagatgtctaccgagattgcacgtctcaaacgccagctggcagaacgggatgaagagctggctatcctccaaaa

SEQ ID NO: 780565 - DNA, 75 bp, synthetic construct
  source 1..75: mol_type = other DNA
ccttgtgatgagtggcgacgagtttatggaaaggttctcctggcatgtggcggataaggggttccggatggtgat

SEQ ID NO: 780566 - DNA, 75 bp, synthetic construct
  source 1..75: mol_type = other DNA
gcagtgaagccctgaagcttgctgaacgcattggtattgctgccgcagtccgtgaactcagcctgtatgaatctc

SEQ ID NO: 780567 - DNA, 75 bp, synthetic construct
  source 1..75: mol_type = other DNA
actcacatgacaaaatctgtatcaaccagcaaaaagtacgtaaacagcattcgcctgaatttcgcagtgaagccc

SEQ ID NO: 780568 - DNA, 75 bp, synthetic construct
  source 1..75: mol_type = other DNA
agatgtgggctgcgcagcacatcgcccacactcgcccggaaaatttcatcacctccagcggtttaggtaccatgg

SEQ ID NO: 780569 - DNA, 75 bp, synthetic construct
  source 1..75: mol_type = other DNA
gttaaaaacgattcggctaataaattttatttgcgagcgagttttaagattctgacctgttggcgaaagggctat

SEQ ID NO: 780570 - DNA, 75 bp, synthetic construct
  source 1..75: mol_type = other DNA
gcaaaggaattcaataaagattttggctacaaggtaaagtttacatttcgcaatatagcgccaatggatgcagca

SEQ ID NO: 780571 - DNA, 75 bp, synthetic construct
  source 1..75: mol_type = other DNA
cagtgagccggaagatcggcatgtttctgatctggcctttgggatttactgcttagaaaatcgtggaattaatcc

SEQ ID NO: 780572 - DNA, 75 bp, synthetic construct
  source 1..75: mol_type = other DNA
gggaaaccacagcgcctgcaggactgactggtgccctgaatatgagtctgcatgagctggaaaaaatactggagc

SEQ ID NO: 780573 - DNA, 75 bp, synthetic construct
  source 1..75: mol_type = other DNA
gaagcgattgtccgagctaaggtggaatggcaatccgtgccgggggaaaaagaggcttacaccggtcttttgaaa

SEQ ID NO: 780574 - DNA, 75 bp, synthetic construct
  source 1..75: mol_type = other DNA
tcggtgctcgaagagtttagctatcttttaccccaaattagcagccccgattttcgtgacagggactggaactca

SEQ ID NO: 780575 - DNA, 75 bp, synthetic construct
  source 1..75: mol_type = other DNA
gacaagcgacatccattcactcagccggatcaggatacagcaaaacactgcgcagactctaaggttaaacgtgtg

SEQ ID NO: 780576 - DNA, 75 bp, synthetic construct
  source 1..75: mol_type = other DNA
cccagtaatgaccatcacaccggatatggtatcagactgggattaccgggagggggagcggcagggagcatccgg

SEQ ID NO: 780577 - DNA, 75 bp, synthetic construct
  source 1..75: mol_type = other DNA
agtttcgtagtcctgccggaccattgtggcgataatatcaatcaacatggcatttacggctctaaggataccgct

SEQ ID NO: 780578 - DNA, 75 bp, synthetic construct
  source 1..75: mol_type = other DNA
tctattatgaataagtttggatggggcaaagaacagattaaatccttccaggatcgtcctgctgatctacttcaa

SEQ ID NO: 780579 - DNA, 75 bp, synthetic construct
  source 1..75: mol_type = other DNA
cccgcagatgcagcagatttacaggccagcgggcagtcggcgcgcgtgccggtgacgctgaaactggcgaactgt

SEQ ID NO: 780580 - DNA, 75 bp, synthetic construct
  source 1..75: mol_type = other DNA
cagcaggcttcatcgcaaccatcgtgctgtctgctctgatggtgatgaaaagttctatgggcatcatgcccgaac

SEQ ID NO: 780581 - DNA, 75 bp, synthetic construct
  source 1..75: mol_type = other DNA
cacccgtctggagaatcagcctgtgcagggtgaagtatcgtcgccggtaacccttccggctcaggcactccggtc

SEQ ID NO: 780582 - DNA, 75 bp, synthetic construct
  source 1..75: mol_type = other DNA
gcggtgaatgatggcaaactagcagcgactatcgctcagctacccgatcagattggcgcgaaaggcgttgaaacc

SEQ ID NO: 780583 - DNA, 75 bp, synthetic construct
  source 1..75: mol_type = other DNA
atggcgctcataaatctggtatacttatcgttacacattggggctgattctggattcgacgggatttgcgaaacc

SEQ ID NO: 780584 - DNA, 75 bp, synthetic construct
  source 1..75: mol_type = other DNA
gggcgctcatcgccttgtgtaacttattcagcaacgcgcgccctcgccggactaaagcgcaccggccttctggcg

SEQ ID NO: 780585 - DNA, 75 bp, synthetic construct
  source 1..75: mol_type = other DNA
gcgtggatctgggggatattgtgaccacctggctgccattgtgtcagggttttgccggaaaaaaccgggcagatt

SEQ ID NO: 780586 - DNA, 75 bp, synthetic construct
  source 1..75: mol_type = other DNA
aggcggggccgcagctgatgaaggcggtgtatgacatggcccgcaagggggcgcaggatgagattcaggcacaga

SEQ ID NO: 780587 - DNA, 75 bp, synthetic construct
  source 1..75: mol_type = other DNA
acgcaggatgccctgacggaactgttgaaccgctactggtttctgagacatggagatgcaggtaagaagacgata

SEQ ID NO: 780588 - DNA, 75 bp, synthetic construct
  source 1..75: mol_type = other DNA
atggtaattctcgtgtatacgagttgaaaaaaagagctgatgatcctaatagctcaataaccggtgaaactacga

SEQ ID NO: 780589 - DNA, 75 bp, synthetic construct
  source 1..75: mol_type = other DNA
ttatgcgggcttatgatcccggtatcaaacaatttttactagatgattattttaattcattatctatttcattcg

SEQ ID NO: 780590 - DNA, 75 bp, synthetic construct
  source 1..75: mol_type = other DNA
cgttgcctttttacgctatatttgctctccggatattgtggatttgcaaagattaatgatttccgaggccggaag

SEQ ID NO: 780591 - DNA, 75 bp, synthetic construct
  source 1..75: mol_type = other DNA
ggaggaaaaggtgcgttgtatgttgattttattgtgaatacgctcaagaactatattgacagcaattttcgaact

SEQ ID NO: 780592 - DNA, 75 bp, synthetic construct
  source 1..75: mol_type = other DNA
gttcatttaagctaagattacaaatctttttcactctttttacgctttattgtatattttctttatggggtatga

SEQ ID NO: 780593 - DNA, 75 bp, synthetic construct
  source 1..75: mol_type = other DNA
tggatagcaatgaattctggttggaaaattcagatggcagatgaaacggtaatttccacatacactcctattgga

SEQ ID NO: 780594 - DNA, 75 bp, synthetic construct
  source 1..75: mol_type = other DNA
agggttgaggtaagcgaagtaatcatagacccctatggtaatgaaactgagtttaatcatttcaaatatgtgcag

SEQ ID NO: 780595 - DNA, 75 bp, synthetic construct
  source 1..75: mol_type = other DNA
gtctgatcttaacagttcgctacgtcagcgcttccctgattggtttagcgatgctaacaagccagcggcccaggc

SEQ ID NO: 780596 - DNA, 75 bp, synthetic construct
  source 1..75: mol_type = other DNA
ctgttgtgtggttatctgagtatgcagaaaacagcattaacattaacatggaaaacgtccctgacgacatggatt

SEQ ID NO: 780597 - DNA, 75 bp, synthetic construct
  source 1..75: mol_type = other DNA
tctataaatataaaattgatggattcattaatgaaaatactttcaatgaactgttttggcaaagtagtcgtaata

SEQ ID NO: 780598 - DNA, 75 bp, synthetic construct
  source 1..75: mol_type = other DNA
cagttttatctggagaaacaaggctggactcttgtaaaccggagcgcaattaaaaatatgactgtggagcaatta

SEQ ID NO: 780599 - DNA, 75 bp, synthetic construct
  source 1..75: mol_type = other DNA
attatgcgtgagtctccgtaaacaacgcaatgtaactatagattatcatctatggggaggtgatacccactctga

SEQ ID NO: 780600 - DNA, 75 bp, synthetic construct
  source 1..75: mol_type = other DNA
ttaccccgtattgtatatgcacgatgggcaaaatttatttgataaatctatatcatttggtccacatgtatggga

SEQ ID NO: 780601 - DNA, 75 bp, synthetic construct
  source 1..75: mol_type = other DNA
tgagtcgcctcccagaagcattaagaacttcatatcaaacataattaaatcaacacattctgattttaatgtgtc

SEQ ID NO: 780602 - DNA, 75 bp, synthetic construct
  source 1..75: mol_type = other DNA
ctaatccgctggggtggattgatccgtggggattagcgggaactcgtcttcccagaactgatggttattgggatg

SEQ ID NO: 780603 - DNA, 75 bp, synthetic construct
  source 1..75: mol_type = other DNA
acactcactggaagcgacgcagcaaaaggcgttggggtattgattgaaggattagcaaacagaaaaagtgcccta

SEQ ID NO: 780604 - DNA, 75 bp, synthetic construct
  source 1..75: mol_type = other DNA
gatttacaaagtgaatcttataaatcgaaaggattcaccgcttcgctggagacgggatatcgacaaaaactgacc

SEQ ID NO: 780605 - DNA, 75 bp, synthetic construct
  source 1..75: mol_type = other DNA
atggcgcgattccagtttaaaagccgtaaaaataatgggtttatttttttaataagttttatggtgatgggagaa

SEQ ID NO: 780606 - DNA, 75 bp, synthetic construct
  source 1..75: mol_type = other DNA
attctgttataaaaccttgcgctgaaaaactggctaaagatcctgataacatacaaatactaatggagggaatag

SEQ ID NO: 780607 - DNA, 75 bp, synthetic construct
  source 1..75: mol_type = other DNA
ttataaatctgataaaatatttgatgaaaaagaaaatattaagattggcacagagtatttgcaatactggataga

SEQ ID NO: 780608 - DNA, 75 bp, synthetic construct
  source 1..75: mol_type = other DNA
acaggatgtccattcagaagctattaatagtgacgatgaagcgacactacgctatatggcccaatattatgctac

SEQ ID NO: 780609 - DNA, 75 bp, synthetic construct
  source 1..75: mol_type = other DNA
gtgatccttccttccgaatgctatgagaactgctccatgtcggtgctggaggcaatgtccttcgctaaaccggtc

SEQ ID NO: 780610 - DNA, 75 bp, synthetic construct
  source 1..75: mol_type = other DNA
agtatggctttcattactaatgccgatgatcaaactgatattgtagaactagatggcaatgaagaaattggcgaa

SEQ ID NO: 780611 - DNA, 75 bp, synthetic construct
  source 1..75: mol_type = other DNA
gagatcagaagtctggctggacgattgtacaaagaaacatgtggagaagaatttgctcagcgtctacttggccac

SEQ ID NO: 780612 - DNA, 75 bp, synthetic construct
  source 1..75: mol_type = other DNA
agggaggcagcagatcaacttccggcatggttcccattagctatggatttagcccttgtaacaggacaacgtcgc

SEQ ID NO: 780613 - DNA, 75 bp, synthetic construct
  source 1..75: mol_type = other DNA
tgatgggattactgatgaatatttcatctgtaatacctgctttgttttttaaaatagataaaaaagtaaaaatat

SEQ ID NO: 780614 - DNA, 75 bp, synthetic construct
  source 1..75: mol_type = other DNA
aagctttcgctaatgctgatacattttataaatctgataaaatatttgatgaaaaagaaaatattaagattggca

SEQ ID NO: 780615 - DNA, 75 bp, synthetic construct
  source 1..75: mol_type = other DNA
tccgggctcttccgcacttcagttgtattcgcgaagtcctgtcttctggagcctctgaggaggagcagggcaaca

SEQ ID NO: 780616 - DNA, 75 bp, synthetic construct
  source 1..75: mol_type = other DNA
aaggcttatgttactggcggtgttaaccagaatatcttcaatggctattttgaagatcttaacgaagctggaaaa

SEQ ID NO: 780617 - DNA, 75 bp, synthetic construct
  source 1..75: mol_type = other DNA
aaccatagcaaacgccatttgctgaaggttggtgtgggtgtcgatggttcggttattggcgttgttatgtcaaat

SEQ ID NO: 780618 - DNA, 75 bp, synthetic construct
  source 1..75: mol_type = other DNA
atggcgctggaacgccgcccagagctgcgtgaagaagattacaaaacccgcatcgacgtgctggaaaccaaacgc

SEQ ID NO: 780619 - DNA, 75 bp, synthetic construct
  source 1..75: mol_type = other DNA
aataaatttgagatcatggatcaagtcgatgatgatagacttgcagaatttattcctgatttttatgtctttcca

SEQ ID NO: 780620 - DNA, 75 bp, synthetic construct
  source 1..75: mol_type = other DNA
gacggaccgcatcccggcgggtgtgatacggacggacgacgagcggacccatcactaccattacgacagcctgca

SEQ ID NO: 780621 - DNA, 75 bp, synthetic construct
  source 1..75: mol_type = other DNA
tttttttttgctcattttttaatttttttttttgttttttttttttttctctttttttttcgttgtttttttttt

SEQ ID NO: 780622 - DNA, 75 bp, synthetic construct
  source 1..75: mol_type = other DNA
agaagttcatgggttatataattctggtcatattgatgttgattcggttgataactatctggatactgaattaga

SEQ ID NO: 780623 - DNA, 75 bp, synthetic construct
  source 1..75: mol_type = other DNA
aaagaaaagtattataaagcttcaaacaattcttttggtgtttttggttcgactgcagaagaaactctcagcaaa

SEQ ID NO: 780624 - DNA, 75 bp, synthetic construct
  source 1..75: mol_type = other DNA
agttgattagagtggctgcttgctttttggtggttgttcttcattctgtaattataggtatgaatgaaacaggct

SEQ ID NO: 780625 - DNA, 75 bp, synthetic construct
  source 1..75: mol_type = other DNA
aagacgcgccagcgtcgcatcaggcaccggtgcacaattgccggaatgcggtgtgaacgccttatccggccaccg

SEQ ID NO: 780626 - DNA, 75 bp, synthetic construct
  source 1..75: mol_type = other DNA
ccatcttgcgcgcaaatatcgcttgcagtatttgccgcctaacatgaactgcaccagtaactcgtcactgactgc

SEQ ID NO: 780627 - DNA, 75 bp, synthetic construct
  source 1..75: mol_type = other DNA
ccttttatctcggcgcattgggcagccatcgaacccacacgttacgtctgcaaaagctccacgagctgggatggt

SEQ ID NO: 780628 - DNA, 75 bp, synthetic construct
  source 1..75: mol_type = other DNA
gaagacatcagtgtcattgctgaagtcagctgtgatgccatcagaccgtgaaacactcaactggttatgtgtacg

SEQ ID NO: 780629 - DNA, 75 bp, synthetic construct
  source 1..75: mol_type = other DNA
agccgcgctacagcggtttcttcaatacgccgctggacagcattttgcgcagccgtggaatacgccatctggttt

SEQ ID NO: 780630 - DNA, 75 bp, synthetic construct
  source 1..75: mol_type = other DNA
atgggctttccttcacctgcggcagattatgttgaaacacgaatctccctcgatcagcagttaatcagccagcca

SEQ ID NO: 780631 - DNA, 75 bp, synthetic construct
  source 1..75: mol_type = other DNA
attaagtggggcaacctttggtcgtgattttatcgttcctgtagaaaatacacaaaatttcaacattaccggaaa

SEQ ID NO: 780632 - DNA, 75 bp, synthetic construct
  source 1..75: mol_type = other DNA
gaagtttgaatcaactttctggtcagatgttgaaaaacttgcagaacagtatgtcagcagtaaaaattataatat

SEQ ID NO: 780633 - DNA, 75 bp, synthetic construct
  source 1..75: mol_type = other DNA
tgcattttatgccaatattcaggcggctgaatatatttctcaacatatagcgactgcatttaataatgatacaca

SEQ ID NO: 780634 - DNA, 75 bp, synthetic construct
  source 1..75: mol_type = other DNA
actggatgagctgggtatatccggcaactcattaagcgaagtgctcaacaaactaagcaaggaaggcgcatttgg

SEQ ID NO: 780635 - DNA, 75 bp, synthetic construct
  source 1..75: mol_type = other DNA
cagtaacgaggcgctaacagcggaagagcgtcaaagagcgttaaacgaagcactgaatgcgggtgcgtcagcagc

SEQ ID NO: 780636 - DNA, 75 bp, synthetic construct
  source 1..75: mol_type = other DNA
ggttgagaagtacgatccagaactggcagcgctcaataaacgcaagaaagccgtggaagacctggaagcagcaga

SEQ ID NO: 780637 - DNA, 75 bp, synthetic construct
  source 1..75: mol_type = other DNA
aatcagtaaaggcgaaacagaggaagcatttgagaaagtcaaaactatttctctggacgatttacctgcaggata

SEQ ID NO: 780638 - DNA, 75 bp, synthetic construct
  source 1..75: mol_type = other DNA
ttgacaaaaaaaactggaatttgacacatggagccctgaagattctggaggaagaaagaaagattgaggcgggga

SEQ ID NO: 780639 - DNA, 75 bp, synthetic construct
  source 1..75: mol_type = other DNA
agcgccgggtatggtattctggcacaacgacggctggaccatcttccgtgaactggaagtgtttgttcgttctaa

SEQ ID NO: 780640 - DNA, 75 bp, synthetic construct
  source 1..75: mol_type = other DNA
tatggcatgcaataaaaattataaccaacatgaagtggcagactgtttaaccctgtcttaccgtgaggttaatcg

SEQ ID NO: 780641 - DNA, 75 bp, synthetic construct
  source 1..75: mol_type = other DNA
gagttcgataaatataaaacacggatactggattcggggattaactgtaaaaaacatccgtggttatacttccct

SEQ ID NO: 780642 - DNA, 75 bp, synthetic construct
  source 1..75: mol_type = other DNA
acaggaaatcatggaatttgatatgcggagccctgaaaatcctggaggaagacagaacaggacgagcagaaataa

SEQ ID NO: 780643 - DNA, 75 bp, synthetic construct
  source 1..75: mol_type = other DNA
ttagtgaacaacaaaagcggacatttcatcctgtcatcactcgtgtcattgagtatctttcacaacatgatctga

SEQ ID NO: 780644 - DNA, 75 bp, synthetic construct
  source 1..75: mol_type = other DNA
aggcaccgagttggaataataaaagagttgtagatagttggtcaagctatataagtagtaatggtgataggatgt

SEQ ID NO: 780645 - DNA, 75 bp, synthetic construct
  source 1..75: mol_type = other DNA
aaaaggtaatttgatagcattgcttgtatcatgtgctatgactagttttgttgctagtgcagcttcatatccata

SEQ ID NO: 780646 - DNA, 75 bp, synthetic construct
  source 1..75: mol_type = other DNA
acggcagcggttatctggcgggcatgaagcttggcgacacgccgctgctggagtacacgcgcgaccgcatgcacc

SEQ ID NO: 780647 - DNA, 75 bp, synthetic construct
  source 1..75: mol_type = other DNA
cgtcagcaaggaaaaaggggctgacggcgaaccgacaaccccttcataaaggcgcttcaggcatgtcagaaccac

SEQ ID NO: 780648 - DNA, 75 bp, synthetic construct
  source 1..75: mol_type = other DNA
actgcatttggtagttatacgtcagcaaatgcagagaattccgttgcttttggtaatcattctactgtttctggt

SEQ ID NO: 780649 - DNA, 75 bp, synthetic construct
  source 1..75: mol_type = other DNA
acaagagccgatcttaatgcatatagcgattactcagtatatatgcaatcaataaatattggtgagggttatcat

SEQ ID NO: 780650 - DNA, 75 bp, synthetic construct
  source 1..75: mol_type = other DNA
gaacaagttaatgatattaagaagaacatagaatccataaaaaatgatttaacttcacatgataaaaatataaaa

SEQ ID NO: 780651 - DNA, 75 bp, synthetic construct
  source 1..75: mol_type = other DNA
cgtcaggcactgacccggtcagaggcggtattgcagaaaagcctggatataacggaagaggcagatttggcactg

SEQ ID NO: 780652 - DNA, 75 bp, synthetic construct
  source 1..75: mol_type = other DNA
ttccgctctccgacacctggtacgtcagccagctgcagacgatggtcgcaacactgaaaattcctctggaacggc

SEQ ID NO: 780653 - DNA, 75 bp, synthetic construct
  source 1..75: mol_type = other DNA
aggtatattacacaagaccccattgggctggcggggggatggaacctgtataattacccactgaatccgataata

SEQ ID NO: 780654 - DNA, 75 bp, synthetic construct
  source 1..75: mol_type = other DNA
gtgcacaaaacgcagtatgagtacaacgccgcaggcgacctgactgccgttatcaccccggacggcaaccggagc

SEQ ID NO: 780655 - DNA, 75 bp, synthetic construct
  source 1..75: mol_type = other DNA
gcggtcagcaccacgcagggcgggctgacgcgcagtatggagtacgatgctgccggacgtgtcatcagcctgacc

SEQ ID NO: 780656 - DNA, 75 bp, synthetic construct
  source 1..75: mol_type = other DNA
gaagggatgctgccattgctaccagcccaggcagaagttgctaggcgtgttcgagagaatgaattgcgtcagttg

SEQ ID NO: 780657 - DNA, 75 bp, synthetic construct
  source 1..75: mol_type = other DNA
actggggcgaaatcttcgtctctgcccacatcattgaatttggcatcacgttcgagcgctttcttaaagatccat

SEQ ID NO: 780658 - DNA, 75 bp, synthetic construct
  source 1..75: mol_type = other DNA
gggttcattgagaatgtgtacgctaatcagattgcctttggcaggctctaccgggaaaaactgaaagagcaggtt

SEQ ID NO: 780659 - DNA, 75 bp, synthetic construct
  source 1..75: mol_type = other DNA
acaactagcccggtattctggacaggtagaatcgaataacagtacacgtaaacctgatattcatggtcgtgggca

SEQ ID NO: 780660 - DNA, 75 bp, synthetic construct
  source 1..75: mol_type = other DNA
acaatcaactttcaaagttactgaaaatgggcatgcaggaaactaagtggtttacaagagatttacatgctgtat

SEQ ID NO: 780661 - DNA, 75 bp, synthetic construct
  source 1..75: mol_type = other DNA
gcattccagcgtgagcttctatcaaggccagaaaagaaacattcgaacaatgtcaagccaatttttatagccaac

SEQ ID NO: 780662 - DNA, 75 bp, synthetic construct
  source 1..75: mol_type = other DNA
tatgaaacgcaccaacggagaaccgttactaatagtgttcccagaatatgacaatggagacaataatgacgataa

SEQ ID NO: 780663 - DNA, 75 bp, synthetic construct
  source 1..75: mol_type = other DNA
tctggatgcaggaaatccaatcccggaagctctgcaatctcgtgccgaattacgtcaaaaagtacgtaatagtac

SEQ ID NO: 780664 - DNA, 75 bp, synthetic construct
  source 1..75: mol_type = other DNA
tgacgatgtattgattgatttttccagtgggggggaagatgaatcacatgcaatgtcatggttaatatctcagtg

SEQ ID NO: 780665 - DNA, 75 bp, synthetic construct
  source 1..75: mol_type = other DNA
ttattacttttacaatcccccaatgaaaatgatgtcctgatacagaactcactagtaataaaattatacttgtcg

SEQ ID NO: 780666 - DNA, 75 bp, synthetic construct
  source 1..75: mol_type = other DNA
gtggtggctttaaaagcggtttacgtggaggaacacctataaccaccttcgtatgtgggatcgatcttcgctcga

SEQ ID NO: 780667 - DNA, 75 bp, synthetic construct
  source 1..75: mol_type = other DNA
ataagcacattagcgcttgcccgcgccacgctatacaaacatttacgggagttaaaaccgcaaggagggccatca

SEQ ID NO: 780668 - DNA, 75 bp, synthetic construct
  source 1..75: mol_type = other DNA
aactggatgcgttatactgccgggttaacgaccaaaattgcgggtaagacgctggacttgtcgattcccttaccc

SEQ ID NO: 780669 - DNA, 75 bp, synthetic construct
  source 1..75: mol_type = other DNA
aaaaaataggaaaactgcatctggctcaggggctgtgggagctgatagacaacagccagcttgcggatgagatgg

SEQ ID NO: 780670 - DNA, 75 bp, synthetic construct
  source 1..75: mol_type = other DNA
tggtttacagtcgagcctatcagaggaggaataggctctctcttgagaagaggatattcagtacgagctcagcat

SEQ ID NO: 780671 - DNA, 75 bp, synthetic construct
  source 1..75: mol_type = other DNA
ggtgtagagtctcgcagatttctgacatcatagagcctaacattagatgcataacgctacagattgtagaatctc

SEQ ID NO: 780672 - DNA, 75 bp, synthetic construct
  source 1..75: mol_type = other DNA
agttgttgctcagtatcagttcgacttcggtctgcgcccgtccatcgcttatctgcaatctaaaggtaaggattt

SEQ ID NO: 780673 - DNA, 75 bp, synthetic construct
  source 1..75: mol_type = other DNA
gagtcgcgcagcctgaatggtgaatggcgctttgcctggtttccggcaccagaagcggtaccagaaagctggctg

SEQ ID NO: 780674 - DNA, 75 bp, synthetic construct
  source 1..75: mol_type = other DNA
tcgaaatgcagttttgtcagatattacgcctgtgtgccgtgttaatgacaaaagcagataaaaaagttgttattt

SEQ ID NO: 780675 - DNA, 75 bp, synthetic construct
  source 1..75: mol_type = other DNA
ggcattgcacccgaagcggttgcgctgatcgagccgtttgccatcagcgcacatgcggttcgccgtgcggcggtg

SEQ ID NO: 780676 - DNA, 75 bp, synthetic construct
  source 1..75: mol_type = other DNA
aatgttctgcgtgccggagcgggcgagagaactgctgtgaaaatattgcggtgattggcgtacatcgtgatggtg

SEQ ID NO: 780677 - DNA, 75 bp, synthetic construct
  source 1..75: mol_type = other DNA
ccgtatttttgtttattcgtatggcactgaatgcaatagatgggatgctggcacgggagtttaaccagaaaagtc

SEQ ID NO: 780678 - DNA, 75 bp, synthetic construct
  source 1..75: mol_type = other DNA
cgctggtcgaaagtcgctatctttacgacccgctgggccgcagggtggcaaaacgggtgtggcggcgtgaacggg

SEQ ID NO: 780679 - DNA, 75 bp, synthetic construct
  source 1..75: mol_type = other DNA
ctgcgaaaaatcctcctgtaccactgcgaccagcgcggcctgccgctggcgcttgtcagcacggaaggggcaaca

SEQ ID NO: 780680 - DNA, 75 bp, synthetic construct
  source 1..75: mol_type = other DNA
gtctgaaaaaatcgccagaattgtgatggcaaattactcccgtaactggagtaattccgagttggccagtgcggt

SEQ ID NO: 780681 - DNA, 75 bp, synthetic construct
  source 1..75: mol_type = other DNA
aaattatttcctgaagtcaagctgtctggagaacatcttgaaacggtattcaaatacaaaaatggcgatgatgtc

SEQ ID NO: 780682 - DNA, 75 bp, synthetic construct
  source 1..75: mol_type = other DNA
ggagatagccaaaattaacattactctccaaaaagaagagggtggtttatataatttacgtggattggattttaa

SEQ ID NO: 780683 - DNA, 75 bp, synthetic construct
  source 1..75: mol_type = other DNA
ttgcaatatctgagtactgagaatgccgtctataagcagcatgatgaagatggatggttctatgagcagggagaa

SEQ ID NO: 780684 - DNA, 75 bp, synthetic construct
  source 1..75: mol_type = other DNA
ctgaaaaaatatcgcccacaggccgacgatacccggctgctcgccgagttgtcagcgatagccagcaccctgaaa

SEQ ID NO: 780685 - DNA, 75 bp, synthetic construct
  source 1..75: mol_type = other DNA
cggaggtgcatacgataatagctatttacacacgtcaggacgtggcgggcacggagcaaatggcgtgctggtaat

SEQ ID NO: 780686 - DNA, 75 bp, synthetic construct
  source 1..75: mol_type = other DNA
atggagtatttggcttgatataagaattatattcctaaccatatttaaaggttttataggaaaagcagcatatta

SEQ ID NO: 780687 - DNA, 75 bp, synthetic construct
  source 1..75: mol_type = other DNA
gcacaggaaagaggaaaattgctggagacggctctcaacaatctttttcaagcctacggtgttctcattcgtaaa

SEQ ID NO: 780688 - DNA, 75 bp, synthetic construct
  source 1..75: mol_type = other DNA
taagtatgaaaaagaggggtatttccttcatttacaatttaatcagaatgataatttatccagagttacccttat

SEQ ID NO: 780689 - DNA, 75 bp, synthetic construct
  source 1..75: mol_type = other DNA
agttattaggttgctcaaaacttgatagtgaatttattaatgtttcaagtaattttaatgagttgcctataatcg

SEQ ID NO: 780690 - DNA, 75 bp, synthetic construct
  source 1..75: mol_type = other DNA
tcgacaacgactttgagccaaagctaattcagaccgtgcgcggcgtgggttacatgcttgaggtgccggatggtc

SEQ ID NO: 780691 - DNA, 75 bp, synthetic construct
  source 1..75: mol_type = other DNA
gacagcgcccggacccggcccgcgccggagaaatctttgaggcgttctgcggcatgctatctggcggtattcctg

SEQ ID NO: 780692 - DNA, 75 bp, synthetic construct
  source 1..75: mol_type = other DNA
tactgcgaaagcgtgtttgatgtaaatcccctggtggcgaccgcaggccgcccggtggggctggcgtggttctcc

SEQ ID NO: 780693 - DNA, 75 bp, synthetic construct
  source 1..75: mol_type = other DNA
gcagtggttgcacgcaaacggcatcacccgcgccaccgttgcaccggactggatgtccatgccttgtggttatat

SEQ ID NO: 780694 - DNA, 75 bp, synthetic construct
  source 1..75: mol_type = other DNA
gcatggtgatgagtgtcattgatgggaagctgaaaaggcccgatgtcctcagtacattcttatacgtcaatttta

SEQ ID NO: 780695 - DNA, 75 bp, synthetic construct
  source 1..75: mol_type = other DNA
atctcacagccatgcttcgtcagaccaccaccgggaatacgatcaccacaggccaattccaggccaaagtgactt

SEQ ID NO: 780696 - DNA, 75 bp, synthetic construct
  source 1..75: mol_type = other DNA
ttgatgtggccgcagatcctctgacggccttgtctggtgaagataaatggaatattgagggcggactcagtgcgg

SEQ ID NO: 780697 - DNA, 75 bp, synthetic construct
  source 1..75: mol_type = other DNA
aatgaggattttcaattcattatcactaaagttcagagaaccgaaacagcgtcccttccctctggaatcagacaa

SEQ ID NO: 780698 - DNA, 75 bp, synthetic construct
  source 1..75: mol_type = other DNA
atgaacagtaaagaaagtttgcgcagaagatttttacaactaatgacagaaaacgttaaatcagagttacttctt

SEQ ID NO: 780699 - DNA, 75 bp, synthetic construct
  source 1..75: mol_type = other DNA
cgaactgccagaggggcaaaccgccgccagaaccctgattgccatttatggctgggcgtggaatatctattttaa

SEQ ID NO: 780700 - DNA, 75 bp, synthetic construct
  source 1..75: mol_type = other DNA
tgcccgccattaccacttatggcgaaccggaagggaacctgctaacagggccgtggcagcctcgtgtcagctacc

SEQ ID NO: 780701 - DNA, 75 bp, synthetic construct
  source 1..75: mol_type = other DNA
acaggtggcgcaaagccgcacccaggcggaaaaacagttcttaacactgttcccggagcagaagcggattgtgaa

SEQ ID NO: 780702 - DNA, 75 bp, synthetic construct
  source 1..75: mol_type = other DNA
aactgcatgtgctgggcaagccttgctgcactggcatttgatgctgaagagcgggtggaacggcagaaaggcaat

SEQ ID NO: 780703 - DNA, 75 bp, synthetic construct
  source 1..75: mol_type = other DNA
atgttccctgtttcatcaattggtaatgatattagtagtgatttagtccgtcgaaaaatgaatgacattcctgaa

SEQ ID NO: 780704 - DNA, 75 bp, synthetic construct
  source 1..75: mol_type = other DNA
gatttggcagacgctgtctgccaaattgagaggctgtttgatatttccacagcttttgtattgcatctcctattt

SEQ ID NO: 780705 - DNA, 75 bp, synthetic construct
  source 1..75: mol_type = other DNA
aacaactgaaagcaaactatgataaactaaatatacactgcgatattattactgctacagtgagagcaaacgata

SEQ ID NO: 780706 - DNA, 75 bp, synthetic construct
  source 1..75: mol_type = other DNA
taccagagatcttcttgcccctatcaaggctgttgaagcttccgggcgattggaagttgcttcccgattacagca

SEQ ID NO: 780707 - DNA, 75 bp, synthetic construct
  source 1..75: mol_type = other DNA
tctctcttggtgaagctcgcaggaaacgagatgaggccaaaaagttggtatctgatggtatcgatccttccgaga

SEQ ID NO: 780708 - DNA, 75 bp, synthetic construct
  source 1..75: mol_type = other DNA
acaatggtgggctgactaccttaatgccaacagaaaagaacacattacaccgtttgaattcgcccagagaataaa

SEQ ID NO: 780709 - DNA, 75 bp, synthetic construct
  source 1..75: mol_type = other DNA
ggaaaaaattctcccacaaccagctggcaaaacccgttcaggatctggctgatgccattaacagcgtggaccaga

SEQ ID NO: 780710 - DNA, 75 bp, synthetic construct
  source 1..75: mol_type = other DNA
accatcagaaggcaatgcggctggtcaaggccacaacggaatccgccacgcgtggccttgatatgctgggtaatc

SEQ ID NO: 780711 - DNA, 75 bp, synthetic construct
  source 1..75: mol_type = other DNA
acagataattaccaaagaattgatggcttaatgactaagggaaataaactgagggaggatagtgaatgtaattat

SEQ ID NO: 780712 - DNA, 75 bp, synthetic construct
  source 1..75: mol_type = other DNA
agcggggaatatgaattgattttcactggcgatcacaatccgtggaaacccatgagtgaaaatacggtgaataac

SEQ ID NO: 780713 - DNA, 75 bp, synthetic construct
  source 1..75: mol_type = other DNA
gctctgcgaaatctgaggagaaagagtattcacttgttgacggcgacggcatgtccttacttgtaaaacctggcg

SEQ ID NO: 780714 - DNA, 75 bp, synthetic construct
  source 1..75: mol_type = other DNA
attctacgttatataaaagataccatttatgaaggtaagatttccgcttcggatggtgtgaaattatatgcagca

SEQ ID NO: 780715 - DNA, 75 bp, synthetic construct
  source 1..75: mol_type = other DNA
tggtttcaggacaatggcatgtagcgcccttaacgaatcggaaaaatggtcaaaagatgccatagagcgacaaat

SEQ ID NO: 780716 - DNA, 75 bp, synthetic construct
  source 1..75: mol_type = other DNA
atgtcattcggtgcttaccccgaaacatctcttgctgtcgcgcgtgaaaaacgcgatcagacccggcggattctt

SEQ ID NO: 780717 - DNA, 75 bp, synthetic construct
  source 1..75: mol_type = other DNA
gcaatggtgggctgattttctggatgcaaaccgtgaaaatccggtctcacctttcgattacatcagacaacaaca

SEQ ID NO: 780718 - DNA, 75 bp, synthetic construct
  source 1..75: mol_type = other DNA
ggggtaattgggtaataaataaatattacaatcctgaaatgcttgctgaagccatgtgcaaacatatgaacttca

SEQ ID NO: 780719 - DNA, 75 bp, synthetic construct
  source 1..75: mol_type = other DNA
caggagaaaaagcgccagcaatatgcaaaagaaattcaggcaatctatgttgccatcaaaaaaaaatgcgtcact

SEQ ID NO: 780720 - DNA, 75 bp, synthetic construct
  source 1..75: mol_type = other DNA
tcactggtgcgcgcatttgcgttacgtctgcgtgaactcgaaatgaagggagaagaacaccctcacaacgttctc

SEQ ID NO: 780721 - DNA, 75 bp, synthetic construct
  source 1..75: mol_type = other DNA
ctttaaaagccctgttctcagaatggcgcgggctaaggagctggcacagaagaaaaaatcgcagggggttaagcc

SEQ ID NO: 780722 - DNA, 75 bp, synthetic construct
  source 1..75: mol_type = other DNA
aacaaggggaaggaatgcatttcatggtaacaccacgcaactccagcatcagcacggacgcgataatgtcccagc

SEQ ID NO: 780723 - DNA, 75 bp, synthetic construct
  source 1..75: mol_type = other DNA
gaaccgtagcatggttgttcctgaccgggttaacgaactggcagttgccatgacgaacacactatatcggtacca

SEQ ID NO: 780724 - DNA, 75 bp, synthetic construct
  source 1..75: mol_type = other DNA
cagcacgggtgttcctgaccaggttaacgcactggtggctaccatggcggacgctctgcagccgtacacagtgat

SEQ ID NO: 780725 - DNA, 75 bp, synthetic construct
  source 1..75: mol_type = other DNA
cagtgtggaatgttctcagccagtcaggcagcgcttttttctcaacaaacacgtcagtgtgccagtgagcaatgc

SEQ ID NO: 780726 - DNA, 75 bp, synthetic construct
  source 1..75: mol_type = other DNA
gttcgtcaatggcgctctcctgtgaatacaccaataaccccgatttatcgattgccaacgttatatcgttagtgg

SEQ ID NO: 780727 - DNA, 75 bp, synthetic construct
  source 1..75: mol_type = other DNA
gtgatctgatccttcaactcagcaaaagttcgatttattcaacaaagccgtacgtttgctatgcctcggcagtgt

SEQ ID NO: 780728 - DNA, 75 bp, synthetic construct
  source 1..75: mol_type = other DNA
gagaaagagcgtcagaacgccctgaatgaaagtgccgaagccgaacagaactggcgtacccgttttcgcgaactg

SEQ ID NO: 780729 - DNA, 75 bp, synthetic construct
  source 1..75: mol_type = other DNA
atgtcgattcttgaatacatccttgatcataacgctaaaccagatatttgggactattttaaagctatgggggtg

SEQ ID NO: 780730 - DNA, 75 bp, synthetic construct
  source 1..75: mol_type = other DNA
tattcttacagaacttcagacatgggctggtgaaaatggtctggtctttacgggagcacatgacccgcataaacc

SEQ ID NO: 780731 - DNA, 75 bp, synthetic construct
  source 1..75: mol_type = other DNA
tgggcatacgggtttcctggatggggttcgtttatcacgtagtcaaataaacaatattgctaaagaaatggagaa

SEQ ID NO: 780732 - DNA, 75 bp, synthetic construct
  source 1..75: mol_type = other DNA
gtctgaatagtaatgctcttgagtcaataaattttcctcaaggcagaaatgtaagtattacacatatatctatga

SEQ ID NO: 780733 - DNA, 75 bp, synthetic construct
  source 1..75: mol_type = other DNA
aataaattttcctcaaggcagaaatgtaagcattacacatatatctgtgaataataatgctctcagaaatattga

SEQ ID NO: 780734 - DNA, 75 bp, synthetic construct
  source 1..75: mol_type = other DNA
ttcccaacttgaatacgttacttatcaacaacaacttgctttctgaaattaaaatattctttagcaacttctgca

SEQ ID NO: 780735 - DNA, 75 bp, synthetic construct
  source 1..75: mol_type = other DNA
ctcagccataatcaattaactgatattgttgcaggtaataaaaatgaactcttactgctggaactatcccataat

SEQ ID NO: 780736 - DNA, 75 bp, synthetic construct
  source 1..75: mol_type = other DNA
ctatcaaaagtttaaggctggacaataataaaataacccacattgatactaataatacatccgatattggaactt

SEQ ID NO: 780737 - DNA, 75 bp, synthetic construct
  source 1..75: mol_type = other DNA
gatttcctgacttttcttccatctatcaaaagcttaaggctggacaataatgaaataacccgcattgatactgag

SEQ ID NO: 780738 - DNA, 75 bp, synthetic construct
  source 1..75: mol_type = other DNA
tatcaaagtgggatcaaaccaggttgaaaaggtggggatcattcgtgcgctgacggtgggtgtagcttaccagac

SEQ ID NO: 780739 - DNA, 75 bp, synthetic construct
  source 1..75: mol_type = other DNA
gaatgtatggggaaatgtcggcgttcaggttgctgataaagggtataacgatacctcggcgacgattggcgttaa

SEQ ID NO: 780740 - DNA, 75 bp, synthetic construct
  source 1..75: mol_type = other DNA
aatattgcagaggtaaaagccggtgtggaaggtcagataaattcccatctgaatgtatggggaaatgtcggcgtt

SEQ ID NO: 780741 - DNA, 75 bp, synthetic construct
  source 1..75: mol_type = other DNA
tattaacaacaacttgctttctgaaattaaaatattctatagcaacttctgcaatgttcagacattaaacgctgc

SEQ ID NO: 780742 - DNA, 75 bp, synthetic construct
  source 1..75: mol_type = other DNA
gctctcagaaatattgatatagataggctttcatcagttacttattttagtgcggcacataatcaactagagttt

SEQ ID NO: 780743 - DNA, 75 bp, synthetic construct
  source 1..75: mol_type = other DNA
aggtagggctgcataaatcactgatggtgggaatgggctacagcgtcaatgtggggaataacgtcaccttctcgg

SEQ ID NO: 780744 - DNA, 75 bp, synthetic construct
  source 1..75: mol_type = other DNA
gcctgtcagcaggaggctcagtggttggtggtgacggcaataacgccggtgggaggcaggaaaggggattatgag

SEQ ID NO: 780745 - DNA, 75 bp, synthetic construct
  source 1..75: mol_type = other DNA
tctatataatattgatattgaagatattgatgaatgtgtattgcctgaaagatttttaatcgggaaaacatacca

SEQ ID NO: 780746 - DNA, 75 bp, synthetic construct
  source 1..75: mol_type = other DNA
cgcagagcgtcaggcgggcgacggtgacgccatcagccgctggacgccatatgacaagcccgtggtatcagcaca

SEQ ID NO: 780747 - DNA, 75 bp, synthetic construct
  source 1..75: mol_type = other DNA
taacaaatttagaattagctttaattaaatctaagataatgatttttagaatattggcggccccaatgttcctgg

SEQ ID NO: 780748 - DNA, 75 bp, synthetic construct
  source 1..75: mol_type = other DNA
gtattaaagaacattgctcttgcatcgtgtgctgaacaggaaaggtatattttgaatgacattttggatgataaa

SEQ ID NO: 780749 - DNA, 75 bp, synthetic construct
  source 1..75: mol_type = other DNA
tggtggcgcgctgccgctggaaaaaggtgtgttgttggtgatggcgcgctttaaagagatcctcgacattaaccc

SEQ ID NO: 780750 - DNA, 75 bp, synthetic construct
  source 1..75: mol_type = other DNA
gattcttaactgggaaaacttatcatatacaggagtcatttttttacaaacctgaatatgagtcctttaatggat

SEQ ID NO: 780751 - DNA, 75 bp, synthetic construct
  source 1..75: mol_type = other DNA
gccgctcctggaccggcaagcgcattgttcaatgacgaagccagcgacgaagcttctttgaatgcagcggttgaa

SEQ ID NO: 780752 - DNA, 75 bp, synthetic construct
  source 1..75: mol_type = other DNA
ttattgctgaaaccggtgactcttggttcaatgctcagcgcatgaagctcccgaacggtgctcgcgttgaatatg

SEQ ID NO: 780753 - DNA, 75 bp, synthetic construct
  source 1..75: mol_type = other DNA
tagcggagcggcttgtccagattggtctcaagcatcacttcgcagtcgcgggcgactacaacctcgtccttcttg

SEQ ID NO: 780754 - DNA, 75 bp, synthetic construct
  source 1..75: mol_type = other DNA
tattacttcttccgcaatctatagctgtagtatcatattttttctatagtctaatggccgttatggcttttcatt

SEQ ID NO: 780755 - DNA, 75 bp, synthetic construct
  source 1..75: mol_type = other DNA
tatcttattgttcatagcatgtttatctcaatgtaatttatcaaagccaatcagttatttatcttattttatttc

SEQ ID NO: 780756 - DNA, 75 bp, synthetic construct
  source 1..75: mol_type = other DNA
tagttgaagctgttcttaatgataagaaaacaaaaaatgcacgagtggctaagtgtgatggaagtgaattttttc

SEQ ID NO: 780757 - DNA, 75 bp, synthetic construct
  source 1..75: mol_type = other DNA
catcaatttttcttttatggattgcggtcatatttactacaatagcatttaagtttttttatacggtgataacca

SEQ ID NO: 780758 - DNA, 75 bp, synthetic construct
  source 1..75: mol_type = other DNA
cagatcggcgtcgtcggtatggcagtaatggggcgcaacctggcgctcaacattgaaagggctttgttgaataaa

SEQ ID NO: 780759 - DNA, 75 bp, synthetic construct
  source 1..75: mol_type = other DNA
cagttgtgcatagtacatatggtacgcaacagcctgcggttagtggcgtggaaagactataaagcggtaacccgt

SEQ ID NO: 780760 - DNA, 75 bp, synthetic construct
  source 1..75: mol_type = other DNA
cgacatagaattcgtagcaccaaaacagtttcatctcaaaaacatcaagtatacaagaagcttggtattcgtagt

SEQ ID NO: 780761 - DNA, 75 bp, synthetic construct
  source 1..75: mol_type = other DNA
tatcaagctgtaaaaattcttaagcaagaaaataaaactcctgaggatataattaaaaagatacaaagttttgat

SEQ ID NO: 780762 - DNA, 75 bp, synthetic construct
  source 1..75: mol_type = other DNA
ggtcatatttactacaatagcatttaagtttttttatacggtgataaccatttttttcgaaaatggttatcacca

SEQ ID NO: 780763 - DNA, 75 bp, synthetic construct
  source 1..75: mol_type = other DNA
gtgaaaaaggagcccccggagacccggggggaccacccgggccgaaaggtgatgcgggacctaaaggtgacaccg

SEQ ID NO: 780764 - DNA, 75 bp, synthetic construct
  source 1..75: mol_type = other DNA
ccctcgtggagaaacaggtccacaaggcgcacaaggaccacgcggtgaaacaggaccggtggggccgcaaggaga

SEQ ID NO: 780765 - DNA, 75 bp, synthetic construct
  source 1..75: mol_type = other DNA
tatgaaaatattcagggtagctccattgatctgatttcaatacagacaacacaaacaggcgcatcaacaccaaat

SEQ ID NO: 780766 - DNA, 75 bp, synthetic construct
  source 1..75: mol_type = other DNA
tgttactattaaagatatatttccaaaagcaaagggggggcatttaggcatcacccctattgaatatataattga

SEQ ID NO: 780767 - DNA, 75 bp, synthetic construct
  source 1..75: mol_type = other DNA
gttaaaattgggaacgaagaataacagggagttccagtatcaaacgttaagaaaaggaaacagctatcttgtgat

SEQ ID NO: 780768 - DNA, 75 bp, synthetic construct
  source 1..75: mol_type = other DNA
gcgaagctggacctcagggacctcgtggggagccaggcccggcgggcagcgcagcaaatgtggcagatgcgacga

SEQ ID NO: 780769 - DNA, 75 bp, synthetic construct
  source 1..75: mol_type = other DNA
ctgttggtcaggctgctacagatattccgtttactgtcgaggcacttctccagccttacaagatttatggtattt

SEQ ID NO: 780770 - DNA, 75 bp, synthetic construct
  source 1..75: mol_type = other DNA
cttcaacaatgcattccagtttcgcgggtgcaatatcatatatcaaaataagaagagagaagttaaagagatctc

SEQ ID NO: 780771 - DNA, 75 bp, synthetic construct
  source 1..75: mol_type = other DNA
attaattaaacctgaaagattagataaaagagataaagcttcaaagagaaaaccatcctatggtaaggcagcccg

SEQ ID NO: 780772 - DNA, 75 bp, synthetic construct
  source 1..75: mol_type = other DNA
gagaatgctggacaacctgttccagatgaactgttctcctcagaagataaattcaaagaaggtgaagacacaaaa

SEQ ID NO: 780773 - DNA, 75 bp, synthetic construct
  source 1..75: mol_type = other DNA
cggaacggccccagctgccgataacctgcattttaccggtaatttgcttggtaaatcctgtactcctgtaatcaa

SEQ ID NO: 780774 - DNA, 75 bp, synthetic construct
  source 1..75: mol_type = other DNA
tcgtcagcctgttagtcgcacttgcggcggggataccggcgggggggggggggggaagggagggaggcggggggg

SEQ ID NO: 780775 - DNA, 75 bp, synthetic construct
  source 1..75: mol_type = other DNA
tagggatatgttgaaaaacatcgttaatgatgaggtgttcattaaagttcttctcgaaagctataaaaaactgga

SEQ ID NO: 780776 - DNA, 75 bp, synthetic construct
  source 1..75: mol_type = other DNA
gggaggaactgcttatcgagtaacaattcctgctgttattcaagttgctgtactaagggcgaaagtcaataataa

SEQ ID NO: 780777 - DNA, 75 bp, synthetic construct
  source 1..75: mol_type = other DNA
aaaagaactggaaacgctggagagagtggctgaacggatcgataacatctctgtatttggcggtctggatcaggt

SEQ ID NO: 780778 - DNA, 75 bp, synthetic construct
  source 1..75: mol_type = other DNA
ctggttgaggcagagaaatctgcgcaggcgaatgtgattcgccgacgtgaagaaacggcagcgacgcgctcgtta

SEQ ID NO: 780779 - DNA, 75 bp, synthetic construct
  source 1..75: mol_type = other DNA
aatctggcatggaacgacgacacaccgttcgccgacgaggtgacgcgcaactggatagcgcagcaggtcatgatg

SEQ ID NO: 780780 - DNA, 75 bp, synthetic construct
  source 1..75: mol_type = other DNA
atgttctctctgatccaacgtggtaagcggtatgttgatgctgctggttatccggtgaaaatttgtttttgttct

SEQ ID NO: 780781 - DNA, 75 bp, synthetic construct
  source 1..75: mol_type = other DNA
ttttactggcttcagtgctgacgccttctgtctcgcatgcgtttggcaaccctgatagctgggtaagtggctatg

SEQ ID NO: 780782 - DNA, 75 bp, synthetic construct
  source 1..75: mol_type = other DNA
gtgaacgaggcgaagctggacctcagggacctcgtggggagccaggcccggcgggcagcgcagcaaatgtggcag

SEQ ID NO: 780783 - DNA, 75 bp, synthetic construct
  source 1..75: mol_type = other DNA
agaacccgatgaagcttggatgacggaatgtgccagagccagccatatccacgatattatcatgaaaatgcccat

SEQ ID NO: 780784 - DNA, 75 bp, synthetic construct
  source 1..75: mol_type = other DNA
gtacgcaggatctccgcagcatcccgcccgtcacctgtgaaaggcactgccagcgtggcagccatatccagcgca

SEQ ID NO: 780785 - DNA, 75 bp, synthetic construct
  source 1..75: mol_type = other DNA
cgcttttatattcgtggcgatattaatcgttgctaatttttttagcttgtatgctaaagtaatattttttcatta

SEQ ID NO: 780786 - DNA, 75 bp, synthetic construct
  source 1..75: mol_type = other DNA
attgttcaaaactggttaatgaatatggcgggttatgatctttataaacaagcccccgctctggtcgataacgta

SEQ ID NO: 780787 - DNA, 75 bp, synthetic construct
  source 1..75: mol_type = other DNA
tgggcaataacccactggcgtcctggcccctggtggacaccgcgccttatttcacccgcagcctgttcccgcagg

SEQ ID NO: 780788 - DNA, 75 bp, synthetic construct
  source 1..75: mol_type = other DNA
gcgtagcattgatggccgtggctgcggcgatggacgtttcattaccgattaccgccggggctgtgatttcgggtt

SEQ ID NO: 780789 - DNA, 75 bp, synthetic construct
  source 1..75: mol_type = other DNA
tgatggtgcagtctgtcgtgattgccacatgccggacttttgtccgaatattcctgtgccagatctggattgctc

SEQ ID NO: 780790 - DNA, 75 bp, synthetic construct
  source 1..75: mol_type = other DNA
gcgactcccgttcgttacgatgcccgttcggtcagcaccggtattgccggacgtagtctgaccgctgacctgatt

SEQ ID NO: 780791 - DNA, 75 bp, synthetic construct
  source 1..75: mol_type = other DNA
taatgcgtgatatctggcaatttatgcggccgcaactgactgacaaatcaccggtacttccccggatctggctga

SEQ ID NO: 780792 - DNA, 75 bp, synthetic construct
  source 1..75: mol_type = other DNA
tcagtggtctgaatttgtctgtggctccgggagaaagtgtggctataactggtgcctccggtgccggaaaaacca

SEQ ID NO: 780793 - DNA, 75 bp, synthetic construct
  source 1..75: mol_type = other DNA
gttgtgggtgtttttgtgatgatgctgttatatggaggatatcttacctggatagttctcggttttaccatggtt

SEQ ID NO: 780794 - DNA, 75 bp, synthetic construct
  source 1..75: mol_type = other DNA
ggccgacttcttacgggcgtttacccagcttaagttacaacatattcagtttaacgtggtgaacgccgacacgtt

SEQ ID NO: 780795 - DNA, 75 bp, synthetic construct
  source 1..75: mol_type = other DNA
aacactggatccgggtgtctgtggggaatgaacaggataaccagcagtttattcggagcctgaaacgtatcctgg

SEQ ID NO: 780796 - DNA, 75 bp, synthetic construct
  source 1..75: mol_type = other DNA
tcagtcgcttgttgctggaagagcggatgcgtgttgctgtaatatgttatgttcccggcatggatatggacaggc

SEQ ID NO: 780797 - DNA, 75 bp, synthetic construct
  source 1..75: mol_type = other DNA
cagggggataggcccgatgactgctacagcaatcgttgccagcataggtaatggtcatgatttcaagaacgggcg

SEQ ID NO: 780798 - DNA, 75 bp, synthetic construct
  source 1..75: mol_type = other DNA
gcgagagaacggcattgattaatcgcatccggggattactcagtgagttaggtattgttctcccacaggcgttta

SEQ ID NO: 780799 - DNA, 75 bp, synthetic construct
  source 1..75: mol_type = other DNA
aatgttttattgattaaacgagatgtgaataataatgaaaacaaccaacagtgcataacatattttgttccttca

SEQ ID NO: 780800 - DNA, 75 bp, synthetic construct
  source 1..75: mol_type = other DNA
taatggtgttattgcactgttagttgaaggaataaaaaatctgcgtaaagagattagcgaccttaaagagaaata

SEQ ID NO: 780801 - DNA, 75 bp, synthetic construct
  source 1..75: mol_type = other DNA
aatatcttgagataaagtcttttgctgattattttaaatatcttaatttcatcatctgcaaggttgctccatatt

SEQ ID NO: 780802 - DNA, 75 bp, synthetic construct
  source 1..75: mol_type = other DNA
aggtcaacatggtgcgccgggagctgcagagcgttccggggaattcagtgaactgcatgtgctgggcaagccttg

SEQ ID NO: 780803 - DNA, 75 bp, synthetic construct
  source 1..75: mol_type = other DNA
gatgaggcagtccctgccccctcagaacaactgatgcgggtgttcacgtggtttcagaaaaaacagttaacgccg

SEQ ID NO: 780804 - DNA, 75 bp, synthetic construct
  source 1..75: mol_type = other DNA
ccggaacaacccggattatccggacagccagcgtgtgctggccgcgcagtcgcgcccctggattgtgctgcgtac

SEQ ID NO: 780805 - DNA, 75 bp, synthetic construct
  source 1..75: mol_type = other DNA
tgatgcagcagatgccgctgccatttgtgaagctgttgcccgtcctaatatgcggtttgttcccataaaatcagt

SEQ ID NO: 780806 - DNA, 75 bp, synthetic construct
  source 1..75: mol_type = other DNA
gggtatagtttcagtcgcttgttgcttgaggaacggatgcgaattgctgtaaatatgctttattttcaatattgc

SEQ ID NO: 780807 - DNA, 75 bp, synthetic construct
  source 1..75: mol_type = other DNA
aggtaaagctacagggatctattacagtgcgggcagtattgcgacctttactattccgttgattacggctcatct

SEQ ID NO: 780808 - DNA, 75 bp, synthetic construct
  source 1..75: mol_type = other DNA
attgtgctttcccgtcgtctggcggaagccggacactatccggcgattgatattgaagcgtcgatcagtcgggcg

SEQ ID NO: 780809 - DNA, 75 bp, synthetic construct
  source 1..75: mol_type = other DNA
tatactggtcctgatagttccgtattatgaagaaattgtttaccgaacatgtctattcggccttctatgtacgac

SEQ ID NO: 780810 - DNA, 75 bp, synthetic construct
  source 1..75: mol_type = other DNA
aggtaatcagttgccagcagtgtacacagcgaaaggaactcaggctgttgcagctaacgtagcaactacgttgtt

SEQ ID NO: 780811 - DNA, 75 bp, synthetic construct
  source 1..75: mol_type = other DNA
atactttaagcaaagatccggcagatggtcgtaaagtgaaaggcgttatccactgggtaagcgcggcccatgcgc

SEQ ID NO: 780812 - DNA, 75 bp, synthetic construct
  source 1..75: mol_type = other DNA
aagccacgctgcgcaaatggcacgaggaattgcaggagaaacgcggcgaacgtgccagtctgcggcgtagtacga

SEQ ID NO: 780813 - DNA, 75 bp, synthetic construct
  source 1..75: mol_type = other DNA
ccgctgctgggtgcgaaggtgctgccgggcgagacggcccttgcgctgcccggcccgctgccgtttattctttcc

SEQ ID NO: 780814 - DNA, 75 bp, synthetic construct
  source 1..75: mol_type = other DNA
atccatagaccaaagcactgagggattcagtcccttgtcaacaggaactccagccatcaatgcatcaagtcctaa

SEQ ID NO: 780815 - DNA, 75 bp, synthetic construct
  source 1..75: mol_type = other DNA
aaaatggtgatgagtattttagccatgaaaatacatgatggtgagccaggattatacgccgcaatggaaaataat

SEQ ID NO: 780816 - DNA, 75 bp, synthetic construct
  source 1..75: mol_type = other DNA
tttaaggctccgactggtgggactcctgtaatatcaacttacagcacagggaatggagtatttactgactgctca

SEQ ID NO: 780817 - DNA, 75 bp, synthetic construct
  source 1..75: mol_type = other DNA
tactgcgtcgtatataaaacttaatgatactattgcccatatatcaggattggccgggcatgaaaactcaatgca

SEQ ID NO: 780818 - DNA, 75 bp, synthetic construct
  source 1..75: mol_type = other DNA
ccgaccagattaagcggatgcaggacatcattagcaacccaaaacgactggatggtattcccgggcaaatgaatg

SEQ ID NO: 780819 - DNA, 75 bp, synthetic construct
  source 1..75: mol_type = other DNA
catgaagataatctggttaaattactgcaaactaaaagtgctaacgaaacacctggactctatatctccatgttg

SEQ ID NO: 780820 - DNA, 75 bp, synthetic construct
  source 1..75: mol_type = other DNA
tctcaacaggagagaaagtgtcactaaacagggaagaaagcctgtgtctggagaatgtttttgatttaaatgagc

SEQ ID NO: 780821 - DNA, 75 bp, synthetic construct
  source 1..75: mol_type = other DNA
ataagtaatagagagggggaattactttctaaaatcttcaatactgatagcgatttttggataaaacttcaagaa

SEQ ID NO: 780822 - DNA, 75 bp, synthetic construct
  source 1..75: mol_type = other DNA
ttaaagaatcattgcaaaatatccaagagaacaaaagcatgatgtatttgtactcatttgtattgattctttcgt

SEQ ID NO: 780823 - DNA, 75 bp, synthetic construct
  source 1..75: mol_type = other DNA
ccgtgtcatgtcgcctggcgggcgataaatgattacggcgggttgagtgcaaagaaggagcaaaatctgccctga

SEQ ID NO: 780824 - DNA, 75 bp, synthetic construct
  source 1..75: mol_type = other DNA
accagtcaggaatcctggcttatcaacagtaaaattaatcgccctgtacgctgggcggggggagatgcacctgcc

SEQ ID NO: 780825 - DNA, 75 bp, synthetic construct
  source 1..75: mol_type = other DNA
tgtcaggtaatagcacagtgtcatgttgcctggcgggcgataaatgattacggcgggttgagtgcaaagaaggag

SEQ ID NO: 780826 - DNA, 75 bp, synthetic construct
  source 1..75: mol_type = other DNA
gctgctgcatttgaagcattgtttcatggtgacgacgaatttaatttcgatgcagatcccggcgcggtggtgatc

SEQ ID NO: 780827 - DNA, 75 bp, synthetic construct
  source 1..75: mol_type = other DNA
ggagtttggcaacagcgccggatgcggcgcgagcgccttatccggcctacgttttaatgccagcaaaaatggtga

SEQ ID NO: 780828 - DNA, 75 bp, synthetic construct
  source 1..75: mol_type = other DNA
atccgcaatggaattcagctttcgatgcgaagtcattatatttaaatccagacaaaaatactgttaatgctttta

SEQ ID NO: 780829 - DNA, 75 bp, synthetic construct
  source 1..75: mol_type = other DNA
gtgttgctcatgtcttcggtgaacacaccacacaacgtttcggccgacatcaggtgccttatattgaaccgcagc

SEQ ID NO: 780830 - DNA, 75 bp, synthetic construct
  source 1..75: mol_type = other DNA
ggaagcgagtgaccgtatcaactacaacgatatggtggtagttgaacatcccttcagtcggcgtaagttccaggc

SEQ ID NO: 780831 - DNA, 75 bp, synthetic construct
  source 1..75: mol_type = other DNA
gccagatcttggaaccaaactttacattcacgacttattacaggtcaataagcttttattgaataactctcattc

SEQ ID NO: 780832 - DNA, 75 bp, synthetic construct
  source 1..75: mol_type = other DNA
gctactgcaaatgctcgccggaatgcgtatcgcccagcaggggcaggtgctgctggataacatcagcatcgggca

SEQ ID NO: 780833 - DNA, 75 bp, synthetic construct
  source 1..75: mol_type = other DNA
agcggtgctgcacggcaattatcagttcagcaacgctatcttttattacgacgaagaagagaaaattgccgatgt

SEQ ID NO: 780834 - DNA, 75 bp, synthetic construct
  source 1..75: mol_type = other DNA
tgctggataacatcagcatcgggcagcttgatccggcggatttgcgtcgcgacatggggctactcagccagaccg

SEQ ID NO: 780835 - DNA, 75 bp, synthetic construct
  source 1..75: mol_type = other DNA
tgggattaagactgtcggctctccagatggagaagtcgttattacgacgttaaatgatataactttagcagtata

SEQ ID NO: 780836 - DNA, 75 bp, synthetic construct
  source 1..75: mol_type = other DNA
actgaagggaatgctggagcgagttattattattgaaaaatatacagtaactaaaagaaacgacgttagattcaa

SEQ ID NO: 780837 - DNA, 75 bp, synthetic construct
  source 1..75: mol_type = other DNA
gcgggaagagttgctcaccgacatggcgcggcagttgggaatggggttacggctggtggagttttccgccgattc

SEQ ID NO: 780838 - DNA, 75 bp, synthetic construct
  source 1..75: mol_type = other DNA
ggctggtggagttctccaccgactcgctcaacccgtggcggctgccgttgatcgccgtttttgataatcaacaaa

SEQ ID NO: 780839 - DNA, 75 bp, synthetic construct
  source 1..75: mol_type = other DNA
gacatggggctactgagccagaccggacgactgttctttggttcgctgcgggaaaacctcaccatggggatgccg

SEQ ID NO: 780840 - DNA, 75 bp, synthetic construct
  source 1..75: mol_type = other DNA
cgcgccgaacagcgttttcagaatcagtggaaccacaccaacgatgtggcctcgtccatcagcatgaagcaacgt

SEQ ID NO: 780841 - DNA, 75 bp, synthetic construct
  source 1..75: mol_type = other DNA
gcgcggcagttggggatggggctgcggttggtggagttttccgccgattcgcttaacccctggcgtctgccgctg

SEQ ID NO: 780842 - DNA, 75 bp, synthetic construct
  source 1..75: mol_type = other DNA
atcaggggcggattgtgatggatggcgcgaaagaggccattttgcgtgaacagggcgaacccacggcgcgacggg

SEQ ID NO: 780843 - DNA, 75 bp, synthetic construct
  source 1..75: mol_type = other DNA
ggcgactgttctttggttcgctgcgggaaaacctcaccatggggatgccggaggccagcgatgaagatatcgaac

SEQ ID NO: 780844 - DNA, 75 bp, synthetic construct
  source 1..75: mol_type = other DNA
aacactgcctctgctggcgctggttgccaccactctgtttctcatcgcatgcgatgacagaagtgatgacctgaa

SEQ ID NO: 780845 - DNA, 75 bp, synthetic construct
  source 1..75: mol_type = other DNA
tggggctggttgccgccactctgtttctgagcgcctgcgatgacaggagtgatgacctcaaagctatcagtaaat

SEQ ID NO: 780846 - DNA, 75 bp, synthetic construct
  source 1..75: mol_type = other DNA
ttaaggacctcaccccaccgcgtttcagtgatgtggtcagccaccaggatgatgtcagcgaagaatggtcacagg

SEQ ID NO: 780847 - DNA, 75 bp, synthetic construct
  source 1..75: mol_type = other DNA
cgttcgtctggcgcgtcactatgcgccaggcatgacggaacagggctgggggcggattatctttgtctcgtctga

SEQ ID NO: 780848 - DNA, 75 bp, synthetic construct
  source 1..75: mol_type = other DNA
tctgtttatgctggtttatggtattaccgctgcggtaggcaacattctgggtggaaaacttaccgacagcatggg

SEQ ID NO: 780849 - DNA, 75 bp, synthetic construct
  source 1..75: mol_type = other DNA
agcggttacgacctatgcactgggggcaacgttcgcggcccccgtactgtctgcgctgaccgcaagctggaaccg

SEQ ID NO: 780850 - DNA, 75 bp, synthetic construct
  source 1..75: mol_type = other DNA
tacttaggtttaagccattgtaggtcggagtataaaggtgacgaccgattattattggatgtattaagtatatta

SEQ ID NO: 780851 - DNA, 75 bp, synthetic construct
  source 1..75: mol_type = other DNA
catatctaagagcatcgacgaaagagcaagatgcggatagagcattgatagagttagaggcatttgctcattcac

SEQ ID NO: 780852 - DNA, 75 bp, synthetic construct
  source 1..75: mol_type = other DNA
aacatcctgccagcttagtcagcgtgcgtcctaatggtctggaagacaccgcgcagtttaaactggaagttgacc

SEQ ID NO: 780853 - DNA, 75 bp, synthetic construct
  source 1..75: mol_type = other DNA
gatgacctcaaagctatcagtaaatttaaggacctcacgcctccgcgcttcagcgatgtggtgagccgtcaggat

SEQ ID NO: 780854 - DNA, 75 bp, synthetic construct
  source 1..75: mol_type = other DNA
atagttccttatagtgaaaaaacgaatcccctttctggcgtaagccccctgaattctatatatgcagatacgttc

SEQ ID NO: 780855 - DNA, 75 bp, synthetic construct
  source 1..75: mol_type = other DNA
cttatgaaatacctttgggtaccaggtgtgaaatacctgagctcgttcgagtgattaaacccatttacagtgcat

SEQ ID NO: 780856 - DNA, 75 bp, synthetic construct
  source 1..75: mol_type = other DNA
atgccatttgttatttatgtgtttactatcagtgcctttgcgctcggactcgcggaatttgtccccattgggctg

SEQ ID NO: 780857 - DNA, 75 bp, synthetic construct
  source 1..75: mol_type = other DNA
cgactctggcaaaacaggttgctggggatatccctgttatggcgtgtgtgggggcagtcagggaaggtgcgaata

SEQ ID NO: 780858 - DNA, 75 bp, synthetic construct
  source 1..75: mol_type = other DNA
taatcaacaagcgtaacggagtcgttcacccttgggtttacggtagcgcagaggcgtgtccaagcgagggggata

SEQ ID NO: 780859 - DNA, 75 bp, synthetic construct
  source 1..75: mol_type = other DNA
cggcgcggagatgcaacgattaagcctggtaatgatattgagcaggcaactcactggatgccgctaccggaaccg

SEQ ID NO: 780860 - DNA, 75 bp, synthetic construct
  source 1..75: mol_type = other DNA
cgatgcagttcgcaaaggggtgcccgatgctgcgctggagcaagtactggatgcgatatttatgtttgccggact

SEQ ID NO: 780861 - DNA, 75 bp, synthetic construct
  source 1..75: mol_type = other DNA
agattttgatgagatatatatagtttcagcaacgcttgatttcatcgcggaagagttttattcagaacttaacta

SEQ ID NO: 780862 - DNA, 75 bp, synthetic construct
  source 1..75: mol_type = other DNA
taataagtacaatgcatatggcgagaaactactaagaccaattaaaggtaatggtacacaggagttattcaagaa

SEQ ID NO: 780863 - DNA, 75 bp, synthetic construct
  source 1..75: mol_type = other DNA
cattttctgttttttgcattgatgtgtttttggggatggacagccatctgatttaccacttacctaccttaattg

SEQ ID NO: 780864 - DNA, 75 bp, synthetic construct
  source 1..75: mol_type = other DNA
gacaaatttatggtcaaacagggacagatttatggtcaaaaggggacagatttagtgtggataacttttttatac

SEQ ID NO: 780865 - DNA, 75 bp, synthetic construct
  source 1..75: mol_type = other DNA
ttatagaactaagctcaatacgcagcaataaaatcataaaggccttgtatgaatatatggtattaaagcattcaa

SEQ ID NO: 780866 - DNA, 75 bp, synthetic construct
  source 1..75: mol_type = other DNA
ataaaaaataaagtgaatgtacataggttaatatatgcttcttgtctttttataatatccttagttccgttatgg

SEQ ID NO: 780867 - DNA, 75 bp, synthetic construct
  source 1..75: mol_type = other DNA
gtatatagcggtacgttaactgcatggacgcctttggcaacaggtattgttggcgcatctgatgggcagagccac

SEQ ID NO: 780868 - DNA, 75 bp, synthetic construct
  source 1..75: mol_type = other DNA
ttatactcgcggcaattgcctgtggcgctattggcatggaaaggcaaatgcgcggcaaaggagcagggttacgca

SEQ ID NO: 780869 - DNA, 75 bp, synthetic construct
  source 1..75: mol_type = other DNA
atgagcaagagcaccgctgagatccgtcaggcgtttctcgactttttccatagtaagggacatcaggtagttgcc

SEQ ID NO: 780870 - DNA, 75 bp, synthetic construct
  source 1..75: mol_type = other DNA
gccacgaaggcttcagaggcggccacctcagcccgagatgcggaggcctcaaaagacgcggcaaaatcatcagaa

SEQ ID NO: 780871 - DNA, 75 bp, synthetic construct
  source 1..75: mol_type = other DNA
gtgcagcttcctcggcaacggcggcaggaaattccgcaacggcggcaaaaacgtccgagacgaaggccaggtcat

SEQ ID NO: 780872 - DNA, 75 bp, synthetic construct
  source 1..75: mol_type = other DNA
gtgcagcttcctcggcaacggcggcagcaaattccgcgacggcggcaaaaacgtccgagacgaaagccaggtcat

SEQ ID NO: 780873 - DNA, 75 bp, synthetic construct
  source 1..75: mol_type = other DNA
gccacgaacgcttcagaggcggcaacctcagcccgggatgcggaggcctcaaaagacgcggcaaaatcatcagaa

SEQ ID NO: 780874 - DNA, 75 bp, synthetic construct
  source 1..75: mol_type = other DNA
gccacgaaagcttcagaggcggcgacctcagcccgcgatgcggaggcctcaaaagacgcggcaaaatcatcagaa

SEQ ID NO: 780875 - DNA, 75 bp, synthetic construct
  source 1..75: mol_type = other DNA
gccacgaaagcttcagaggcggccacctcagcccgggatgcggaggcctcaaaagacgcggcaaaatcatcagaa

SEQ ID NO: 780876 - DNA, 75 bp, synthetic construct
  source 1..75: mol_type = other DNA
gccacgaaggcttcagaggcggcaacctcagcccgcgatgcggaggcctcaaaagacgcggcaaaatcatcagaa

SEQ ID NO: 780877 - DNA, 75 bp, synthetic construct
  source 1..75: mol_type = other DNA
gccacgaacgcttcagaggcggcgacctcagcccgagatgcggaggcctcaaaagacgcggcaaaatcatcagaa

SEQ ID NO: 780878 - DNA, 75 bp, synthetic construct
  source 1..75: mol_type = other DNA
gccacgaacgcttcagaggcggctacctcagcccgtgatgcggaggcctcaaaagacgcggcaaaatcatcagaa

SEQ ID NO: 780879 - DNA, 75 bp, synthetic construct
  source 1..75: mol_type = other DNA
ataatcaacccgctcgttggttttaatgcaatacctcttccggcaatagaagagcattactactcagcaggggag

SEQ ID NO: 780880 - DNA, 75 bp, synthetic construct
  source 1..75: mol_type = other DNA
ccaacgattgggtttgtgaaagcgttctgatcgcggttaccgggctcaaacccggaaccatcacccgtgccagaa

SEQ ID NO: 780881 - DNA, 75 bp, synthetic construct
  source 1..75: mol_type = other DNA
gtgatgcatccggaggggatgcccgtaatgaggtgtattctgagcggggactcgttcgggtgcgcatgctgaaaa

SEQ ID NO: 780882 - DNA, 75 bp, synthetic construct
  source 1..75: mol_type = other DNA
atgccggaacacactatcaatgcggcgatcgatcaggcggtagctgaagctgaagcgcagggtgttattggtaaa

SEQ ID NO: 780883 - DNA, 75 bp, synthetic construct
  source 1..75: mol_type = other DNA
atggcggtgaaatggcaaagcggtctgaacggtggcctcgtggtagcgaacccgatcccggaacagtttgctatg

SEQ ID NO: 780884 - DNA, 75 bp, synthetic construct
  source 1..75: mol_type = other DNA
aagatttttcatcaggacatgattcaatacattactggtatgatgaatttgctagtggtatttcacaagaaagaa

SEQ ID NO: 780885 - DNA, 75 bp, synthetic construct
  source 1..75: mol_type = other DNA
gctgaaaaggcccgtttatatagtgctattgagcaacggctggaacagtctttagtttctattggtggtgttatt

SEQ ID NO: 780886 - DNA, 75 bp, synthetic construct
  source 1..75: mol_type = other DNA
gctttaagagcatatgaaagagggagtatttctttatctgattacacgatggctttacttgtaagtcatacagga

SEQ ID NO: 780887 - DNA, 75 bp, synthetic construct
  source 1..75: mol_type = other DNA
ttgaacgacagctctactccgcatataagaataatcaggtggtcatcgttaaccagcatcgctttgatgctgatg

SEQ ID NO: 780888 - DNA, 75 bp, synthetic construct
  source 1..75: mol_type = other DNA
aattataaggagaacagcataatcctgtggacgtgtaatggcggagacaatcagaaatttaccattacagatgga

SEQ ID NO: 780889 - DNA, 75 bp, synthetic construct
  source 1..75: mol_type = other DNA
tggctatcaacaatgtaaagcaggtaagtgtggccttgatggagatgagggtggtcatttaatagccagtatttt

SEQ ID NO: 780890 - DNA, 75 bp, synthetic construct
  source 1..75: mol_type = other DNA
cttaccgtctgctcagctacctggtgagcggtttaatcgccacgcagcccttgctgcccgccgttgccgccacgc

SEQ ID NO: 780891 - DNA, 75 bp, synthetic construct
  source 1..75: mol_type = other DNA
atatcccggacagcagcgtccagccgggagccggaaatggcgaaccggtcacggcagaggtgctggcacagcggc

SEQ ID NO: 780892 - DNA, 75 bp, synthetic construct
  source 1..75: mol_type = other DNA
taaatacggacctcttcaggcggatgcgacggaagaacagcgacaggcatatctggcgaaactgcgtgaaacgcc

SEQ ID NO: 780893 - DNA, 75 bp, synthetic construct
  source 1..75: mol_type = other DNA
agaggtgaaagcctcgctctgacgggggatcataaagccggcggcactatgtcgctgagcagccagggtgacatt

SEQ ID NO: 780894 - DNA, 75 bp, synthetic construct
  source 1..75: mol_type = other DNA
tgtcagacctgctaaatttaaagtagtatattcgatagatggtggtcgcccgattgaaaaagtatttaacaatgc

SEQ ID NO: 780895 - DNA, 75 bp, synthetic construct
  source 1..75: mol_type = other DNA
atttgaacgctggaagagcgcctcgggaattctgcaatatggaggggccatttttgataactccatatggcttgg

SEQ ID NO: 780896 - DNA, 75 bp, synthetic construct
  source 1..75: mol_type = other DNA
atcgcctgccgaatataaatgatgagcatattatgaatgcagacatgaccaagacattaaaatcggctatagcaa

SEQ ID NO: 780897 - DNA, 75 bp, synthetic construct
  source 1..75: mol_type = other DNA
gacacatgccaccatcccaaaatttgataggatgggagtagtggcagggattgaacaaaaaaatgtcaaatccat

SEQ ID NO: 780898 - DNA, 75 bp, synthetic construct
  source 1..75: mol_type = other DNA
atggattatccagcagtgtcgttttggctgcctcattgttcagcgtactctcttatgcggcaacagacagtattg

SEQ ID NO: 780899 - DNA, 75 bp, synthetic construct
  source 1..75: mol_type = other DNA
gaacgccttatccgacctacacagcaccgaactcgtaagcctgataagacgcggcagcgtcgcatcaggcaatgc

SEQ ID NO: 780900 - DNA, 75 bp, synthetic construct
  source 1..75: mol_type = other DNA
acacagcatagcgccgcagtagacgcggcagaagcacagcgtcagtcactgattgatactgcaatggcttccatc

SEQ ID NO: 780901 - DNA, 75 bp, synthetic construct
  source 1..75: mol_type = other DNA
gaaggttttatatccggatgagaaagacctgtcgaagctgaccgaggaccagaagcagacgctaagtacgctggc

SEQ ID NO: 780902 - DNA, 75 bp, synthetic construct
  source 1..75: mol_type = other DNA
acgcagctatcaggccaatgttgaagtgctcaacacggtgaaaagcatgatgctgaaaacccttacgctcggtca

SEQ ID NO: 780903 - DNA, 75 bp, synthetic construct
  source 1..75: mol_type = other DNA
atgatattacaacccatggggcgaaaaggccgtgcacccgctcatgttcgcgcatggacacctgaagaagatgcg

SEQ ID NO: 780904 - DNA, 75 bp, synthetic construct
  source 1..75: mol_type = other DNA
gatatattggcgtaagcatgaaaaaatacggagagttgctgcccttcacccgtatacctgatgatgatgttcatc

SEQ ID NO: 780905 - DNA, 75 bp, synthetic construct
  source 1..75: mol_type = other DNA
cgtttttatttgtctgtgtttgtggcttttttgttgctttagctggtggcgtagaatggggaacggagaactgcg

SEQ ID NO: 780906 - DNA, 75 bp, synthetic construct
  source 1..75: mol_type = other DNA
aactggcattgttgtgcgatgtggtggttgccggagagaacgcgcgttttggtttgccggaaatcactctcggca

SEQ ID NO: 780907 - DNA, 75 bp, synthetic construct
  source 1..75: mol_type = other DNA
tattgcggcactggagtttggcaacagtgccggatgcggcgcgagcgccttatccggcctacggttgggcatcgt

SEQ ID NO: 780908 - DNA, 75 bp, synthetic construct
  source 1..75: mol_type = other DNA
cggcggcgaaatcagcggcgttaacggcctgaacatcgcgctcagcgggaacctgcaacagcagggcaaaatgct

SEQ ID NO: 780909 - DNA, 75 bp, synthetic construct
  source 1..75: mol_type = other DNA
ccaaccagataaccgacagcagcagccggtcaggtttctggcgtcaaaaagatacggcttcgtcatccacctcaa

SEQ ID NO: 780910 - DNA, 75 bp, synthetic construct
  source 1..75: mol_type = other DNA
gttatcgccgccgccggaagcaaaatcaccgccctgggcgacgcccgcctgaccggcaaagcgctgagcaaccag

SEQ ID NO: 780911 - DNA, 75 bp, synthetic construct
  source 1..75: mol_type = other DNA
atcttggctttttccgataataataaacatgagtattttttatatataaaggcatattggctcagtttatacttt

SEQ ID NO: 780912 - DNA, 75 bp, synthetic construct
  source 1..75: mol_type = other DNA
caagaatacatatagaacatgagaaagatatctttgatggacttaacaaaatcttggctttttccgaaaaaataa

SEQ ID NO: 780913 - DNA, 75 bp, synthetic construct
  source 1..75: mol_type = other DNA
ttctctatatcaaattatttattgatggaaaagaagtcttggaaattgataagttgaactttatttgtatctttg

SEQ ID NO: 780914 - DNA, 75 bp, synthetic construct
  source 1..75: mol_type = other DNA
accccggacgacggtggcgatgacacgccagtcaaacacgatcctgtggtctataaaaacgatgtcacctgggat

SEQ ID NO: 780915 - DNA, 75 bp, synthetic construct
  source 1..75: mol_type = other DNA
ttatcattgggataatgggggtggtttttaatataagatttgggaattatgctgttaaaaactatcccgtttttc

SEQ ID NO: 780916 - DNA, 75 bp, synthetic construct
  source 1..75: mol_type = other DNA
aaagtataattgcggtcgaaaggaggcattaaacatttccagtggcgctaaggctcagatttatttttatatcaa

SEQ ID NO: 780917 - DNA, 75 bp, synthetic construct
  source 1..75: mol_type = other DNA
tgtacggaactatcagccgtgacacaccgattgattattcgcagccgatggctgatgtttatgttcgtggagaca

SEQ ID NO: 780918 - DNA, 75 bp, synthetic construct
  source 1..75: mol_type = other DNA
gcgtcaaagaatgctatttcgaaattaaacatacattcttttacaacttgattgagactgttttatggattagcg

SEQ ID NO: 780919 - DNA, 75 bp, synthetic construct
  source 1..75: mol_type = other DNA
acttaaacctttcaaacttagtatatctgcaaggatgggaagctgcttggattgccttaaaagagacccggctat

SEQ ID NO: 780920 - DNA, 75 bp, synthetic construct
  source 1..75: mol_type = other DNA
cttacctaaaagatattcggtaccactgctttttattttaattgcatctgtggcaatgtatataataaaggcagg

SEQ ID NO: 780921 - DNA, 75 bp, synthetic construct
  source 1..75: mol_type = other DNA
ttttgataaaaatcattaggggattcatcagcacccaactggcggccaatgctggggcgttaaaagccggaggta

SEQ ID NO: 780922 - DNA, 75 bp, synthetic construct
  source 1..75: mol_type = other DNA
tcagcacccaactggcggccaatgctggggcgttaaaagccggaggtatggtggcttcaatggatcagggcggtt

SEQ ID NO: 780923 - DNA, 75 bp, synthetic construct
  source 1..75: mol_type = other DNA
ataaatggaggatatcctgccccccacgaattaccctcagtgtggcgttttggacgccatgatgccgcagataaa

SEQ ID NO: 780924 - DNA, 75 bp, synthetic construct
  source 1..75: mol_type = other DNA
gtttttctattgtcgccattttttacacgagtacgactcttgcggcccctcaaggtatctgtactccggataatg

SEQ ID NO: 780925 - DNA, 75 bp, synthetic construct
  source 1..75: mol_type = other DNA
actattgagtgtgaaaacttaggattactgaatacagacgatatcaccacatcattttatgctacagaatccagc

SEQ ID NO: 780926 - DNA, 75 bp, synthetic construct
  source 1..75: mol_type = other DNA
atacgataaaaataataaggaaatcaaagtaaacggaggcgaattgtcgacagatatgggcaaaacaaccgtcta

SEQ ID NO: 780927 - DNA, 75 bp, synthetic construct
  source 1..75: mol_type = other DNA
taacagtttaagacccattgattttgattttaaagaaattcctgcggcagatttttcatcggttgtcgggagtac

SEQ ID NO: 780928 - DNA, 75 bp, synthetic construct
  source 1..75: mol_type = other DNA
cagcagcccagatgaaataaaaaacctgtaccgtcgctgtcgtaacggctatgaaaaactgcaggtattccgttt

SEQ ID NO: 780929 - DNA, 75 bp, synthetic construct
  source 1..75: mol_type = other DNA
aatcgtctttcaaactgtttcccttcctctctatgctggaaaatcttcaaccaaacccagaaaaattaaaaaaac

SEQ ID NO: 780930 - DNA, 75 bp, synthetic construct
  source 1..75: mol_type = other DNA
aaatatcctgaacgtaatttacatctggtcaaatccatactgggacacaggagtcttacaacgaccatggggtat

SEQ ID NO: 780931 - DNA, 75 bp, synthetic construct
  source 1..75: mol_type = other DNA
caagggatcgggccggaagccggacaccgcgcaggttggtacaaccactatggacgtgtctgggtgctgaaaacg

SEQ ID NO: 780932 - DNA, 75 bp, synthetic construct
  source 1..75: mol_type = other DNA
tcatgtatacctcttacagttggacagccacaggagcaagggaaaacctgtgagccgctccaaattgcatgagga

SEQ ID NO: 780933 - DNA, 75 bp, synthetic construct
  source 1..75: mol_type = other DNA
ggatattcttctaaaaataaagttacagttatttttacacataaccattgtttatctcgcattgcaaaaaaatga

SEQ ID NO: 780934 - DNA, 75 bp, synthetic construct
  source 1..75: mol_type = other DNA
ttgaacgtagggttgcacagttagttagtgacaattcccgattaagcaaacttgttgaacatactggtcaggcca

SEQ ID NO: 780935 - DNA, 75 bp, synthetic construct
  source 1..75: mol_type = other DNA
taatgaacaattggattatgaatacgaagatatagaaagagtcagtgatgtttttcgtattaatcatggcatata

SEQ ID NO: 780936 - DNA, 75 bp, synthetic construct
  source 1..75: mol_type = other DNA
gatacctcgcttggtacgaatttaagctggagaactcccatcgccataatagatggcagctatagccattctaaa

SEQ ID NO: 780937 - DNA, 75 bp, synthetic construct
  source 1..75: mol_type = other DNA
gtcgctggttgcgatgggagtcggtggcttcattgccgggctgtctgtggcgatgttgtctggtgtggtcagccg

SEQ ID NO: 780938 - DNA, 75 bp, synthetic construct
  source 1..75: mol_type = other DNA
atgatgttactgcacctgttgtgtgagccatttggcgatttcggttttatgcgtcgggcactggtcggatgtctg

SEQ ID NO: 780939 - DNA, 75 bp, synthetic construct
  source 1..75: mol_type = other DNA
attacgatgcaaagcaaaacaaaatttctaaccttgcagatccatcatttgagcaggacgctgtaaataatcgct

SEQ ID NO: 780940 - DNA, 75 bp, synthetic construct
  source 1..75: mol_type = other DNA
atatttgcagttgcattaggctgtacattgcgaactgataatattaaagaactaaaatatttagccgaaactgtt

SEQ ID NO: 780941 - DNA, 75 bp, synthetic construct
  source 1..75: mol_type = other DNA
aaacgtataaagaaaaaatattcgatattaatgaagagcttattcaagttaaacttattttgcggtctatagatg

SEQ ID NO: 780942 - DNA, 75 bp, synthetic construct
  source 1..75: mol_type = other DNA
ggtttatccccgctggcgcggggaacacccgaacggctcggcgctctcatacccccaaatcggtttatccccgct

SEQ ID NO: 780943 - DNA, 75 bp, synthetic construct
  source 1..75: mol_type = other DNA
ttttgttgctgcatttgtgccgatggccgctgtcttcccggcactggaaccaaaacacaaaggtgctgcaatctc

SEQ ID NO: 780944 - DNA, 75 bp, synthetic construct
  source 1..75: mol_type = other DNA
ctgccggagttcagcaataatcataaattactagaagcctttattgatagcttgatatggcgagatattaaggct

SEQ ID NO: 780945 - DNA, 75 bp, synthetic construct
  source 1..75: mol_type = other DNA
gagatatagatcccactatcttacttaaagaaactgggacgaaaaaaataagcaataaagaaatgtggtggctta

SEQ ID NO: 780946 - DNA, 75 bp, synthetic construct
  source 1..75: mol_type = other DNA
gtcattcatgccggggtcggtgtttctgcagaacagaatgattgggagacaaggtattttaccctcaataccctc

SEQ ID NO: 780947 - DNA, 75 bp, synthetic construct
  source 1..75: mol_type = other DNA
gcaacatggacattaatattcagagcggcatgggcgttaatacctttgcgatagatggctcagtcaatataccaa

SEQ ID NO: 780948 - DNA, 75 bp, synthetic construct
  source 1..75: mol_type = other DNA
cagatggttattcatcagataaactcaatgtgaaacaattactgacaggtggaaataacaccctgattgtggcgc

SEQ ID NO: 780949 - DNA, 75 bp, synthetic construct
  source 1..75: mol_type = other DNA
gagtaaccgagggtaaaggtaatgctgacattgatgatttgcaattcttcattaacgaaataattaatcaagatt

SEQ ID NO: 780950 - DNA, 75 bp, synthetic construct
  source 1..75: mol_type = other DNA
cccttttagcagaacaagaatctcctcattttcaggactttttttatttttcgccaatatgttattgcactatca

SEQ ID NO: 780951 - DNA, 75 bp, synthetic construct
  source 1..75: mol_type = other DNA
ggattaaaagtaggtgatggtactgtgttacttagccaatacaaagatgctgaaggcagggttcaggcatttagt

SEQ ID NO: 780952 - DNA, 75 bp, synthetic construct
  source 1..75: mol_type = other DNA
ttcgctatctcaaaccctatcagcgagatgaaattgaaaataagtttgtagaattgaacagcgggttatggaagt

SEQ ID NO: 780953 - DNA, 75 bp, synthetic construct
  source 1..75: mol_type = other DNA
gtgtatcgctgctcgccctgttgaacagcctcgaccggcagcttggcgatttactggagcagaaccgtgataatt

SEQ ID NO: 780954 - DNA, 75 bp, synthetic construct
  source 1..75: mol_type = other DNA
tactcgtattctgaacagcatcgctaacaactatttgcaacagaatatcggtgatgctgccaacttactgattta

SEQ ID NO: 780955 - DNA, 75 bp, synthetic construct
  source 1..75: mol_type = other DNA
gcctggtttgcaggatgagcccctgccagaagatttgctcgacggcttccggcacattaccactgtcgacaatga

SEQ ID NO: 780956 - DNA, 75 bp, synthetic construct
  source 1..75: mol_type = other DNA
cgggaactttacctttaactttttgccactcggtgcaatcgacgggatgcgtatcgggtcgactcttagctattt

SEQ ID NO: 780957 - DNA, 75 bp, synthetic construct
  source 1..75: mol_type = other DNA
ggtttatccccgctggcgcggggaacactggtgtgattccaattgccgcacggaacgccgcggtttatccccgct

SEQ ID NO: 780958 - DNA, 75 bp, synthetic construct
  source 1..75: mol_type = other DNA
gggacaacggcatccgtctgtctgccgtgtggctgacgcacgacccggaatacccggagaatttacctgccgcgc

SEQ ID NO: 780959 - DNA, 75 bp, synthetic construct
  source 1..75: mol_type = other DNA
taccgtaccggcgaaacttggtggactgcgtcaacattttcggatgcgcggcatgacagcggcggtatgaatgtg

SEQ ID NO: 780960 - DNA, 75 bp, synthetic construct
  source 1..75: mol_type = other DNA
taccacaccggagagggatggtggaatgagactccctccgtgaacatgcgtaagcgtcaacggagcaccgtattg

SEQ ID NO: 780961 - DNA, 75 bp, synthetic construct
  source 1..75: mol_type = other DNA
cattgtgtatgtttttgtcttctttttcaaaaagagtttttatgctgtgtgaatgaaagtagaggattatctaga

SEQ ID NO: 780962 - DNA, 75 bp, synthetic construct
  source 1..75: mol_type = other DNA
ctcggaagtagcatcgcgcctcaccggacagctttccggcgaagccaactcggcggcctttcgcgagtttgcctg

SEQ ID NO: 780963 - DNA, 75 bp, synthetic construct
  source 1..75: mol_type = other DNA
tggtcatcaggataccgatatcagtgcgggccaggattttacctccagtacgcaggatcgtgtcgggacggtcaa

SEQ ID NO: 780964 - DNA, 75 bp, synthetic construct
  source 1..75: mol_type = other DNA
ctgcgtcaacattttcggatgcgcggcatgacagcggcggtatgaatgtggctgagatggcaccggataccgaag

SEQ ID NO: 780965 - DNA, 75 bp, synthetic construct
  source 1..75: mol_type = other DNA
gcaggtattcactttggaccggcagataataattctcttactgacaatctgagagttgcatatgatggtaacata

SEQ ID NO: 780966 - DNA, 75 bp, synthetic construct
  source 1..75: mol_type = other DNA
tcctcagccatcagaccacccggaccatcacggaagacagcgtcacccgtgagaagggctctctgctgtcgggga

SEQ ID NO: 780967 - DNA, 75 bp, synthetic construct
  source 1..75: mol_type = other DNA
gaaaccggaaaaagattatcgtttcctgggggatgcggtctttgatacccggtatgtcagtaacgcggtgctgag

SEQ ID NO: 780968 - DNA, 75 bp, synthetic construct
  source 1..75: mol_type = other DNA
tgcgctgtcgctgtccggggcaagtgtaagcagctatcccctgccatccggtaacaatggttattttgtcccgtc

SEQ ID NO: 780969 - DNA, 75 bp, synthetic construct
  source 1..75: mol_type = other DNA
ctggcgcggggaacactttactacaataggtggacacgctacggcgcacggtttatccccgctggcgcggggaac

SEQ ID NO: 780970 - DNA, 75 bp, synthetic construct
  source 1..75: mol_type = other DNA
acaacgggcaggaacagcagcagtggcggtggcgtgggtgtcagtatcggtgccggtggtaacggtgccggtatc

SEQ ID NO: 780971 - DNA, 75 bp, synthetic construct
  source 1..75: mol_type = other DNA
attaccggggcaacggtctcgtccggtggagaccttggaatgtctgcgggtaatgatatcaacattgccgcaaac

SEQ ID NO: 780972 - DNA, 75 bp, synthetic construct
  source 1..75: mol_type = other DNA
tgcagggtaataatgttgctgccggtgcagcaggcgcagcaacgggagagctggcagccagagcgattgccggaa

SEQ ID NO: 780973 - DNA, 75 bp, synthetic construct
  source 1..75: mol_type = other DNA
gaatgataatgactgggatattggtggtggttgtgaaggctcacgggaagagtgtgctgtacgtgacccgagtcg

SEQ ID NO: 780974 - DNA, 75 bp, synthetic construct
  source 1..75: mol_type = other DNA
ctggcattcccgctacagggtaaacgctacaactgggcctatgaaacggaacctgaaccgtttatgaataaccgc

SEQ ID NO: 780975 - DNA, 75 bp, synthetic construct
  source 1..75: mol_type = other DNA
tccctgacaccaccgacggtcagtcagggggtgagcggtgaagccctgctgaatgaaagcggtaccgggataacc

SEQ ID NO: 780976 - DNA, 75 bp, synthetic construct
  source 1..75: mol_type = other DNA
tggaatatctggccgtgtactggggtaagggtgccacggtacctgatgaataccgtatccgtacgggcgatacgg

SEQ ID NO: 780977 - DNA, 75 bp, synthetic construct
  source 1..75: mol_type = other DNA
tgcatggctttggcttcctctttgacggacgccggtttatccccgctggcgcggggaacacatatatcagagcaa

SEQ ID NO: 780978 - DNA, 75 bp, synthetic construct
  source 1..75: mol_type = other DNA
aacaaatcctcaagccagagaaaaactgggaaactgctcgaaacaaggcattggatcttgtaggtaatttaggag

SEQ ID NO: 780979 - DNA, 75 bp, synthetic construct
  source 1..75: mol_type = other DNA
tgatgcagccaaaggcgtgggccgtattcagcaggatgaccaacagtttgtgatgcatggtaacctgaatggtaa

SEQ ID NO: 780980 - DNA, 75 bp, synthetic construct
  source 1..75: mol_type = other DNA
tatccccgctggcgcggggaacacgtattgaatcgtgtgtaaattcgcggcggccccggtttatccccgctggcg

SEQ ID NO: 780981 - DNA, 75 bp, synthetic construct
  source 1..75: mol_type = other DNA
ttacaggatgaccttaaaccaattattgttgcttctccggaggagagtatcttacgctgggaatttgatcgttcc

SEQ ID NO: 780982 - DNA, 75 bp, synthetic construct
  source 1..75: mol_type = other DNA
aagcctctctcaacttatcattaagtagcgggaatactatttatcatggcaatattaaaaataatattgatgtaa

SEQ ID NO: 780983 - DNA, 75 bp, synthetic construct
  source 1..75: mol_type = other DNA
aggtgacaacattcgtctgggagtagaatttgaaaaatccgcctttggtaaatataacgtggacaattctgtcaa

SEQ ID NO: 780984 - DNA, 75 bp, synthetic construct
  source 1..75: mol_type = other DNA
ataatagcaatggtaaaattgtcgttgtttccgagataacaacccagaaacgcaaaagaaaagctaaattattta

SEQ ID NO: 780985 - DNA, 75 bp, synthetic construct
  source 1..75: mol_type = other DNA
attgttgggtgattatcaattgaatggcactttatttaaatataatcaagatgatgcaaaacccaatctagcgat

SEQ ID NO: 780986 - DNA, 75 bp, synthetic construct
  source 1..75: mol_type = other DNA
atattttcaatgcaagtctatgatcgagtcgtgccttctcagtcaattcctacgttatgggtgttggcaggtggt

SEQ ID NO: 780987 - DNA, 75 bp, synthetic construct
  source 1..75: mol_type = other DNA
aaagtcatagggcggcaatccagcgacggaaaagttggttggcgtgttgattatgatcctgaaaaaggcacacac

SEQ ID NO: 780988 - DNA, 75 bp, synthetic construct
  source 1..75: mol_type = other DNA
ttcgataagacggttttcgtcttcgaaattttaggtcaggataccccttcacatatagctggtaagtgggttgag

SEQ ID NO: 780989 - DNA, 75 bp, synthetic construct
  source 1..75: mol_type = other DNA
tagttcgtggcgaacaagttgagcgagtgtttatcaactatcaggataaaaaatacgttgtgaatcgacagtatc

SEQ ID NO: 780990 - DNA, 75 bp, synthetic construct
  source 1..75: mol_type = other DNA
ctgatgaacaaataaaagcatactccaaaaaaatagatttttacacctcagaatatactgtagaaatacttgcac

SEQ ID NO: 780991 - DNA, 75 bp, synthetic construct
  source 1..75: mol_type = other DNA
caccagcggggggcaaaagtggtgatcagcaattctaccgctccgcgcgtaattgaactttacgaacagcacggc

SEQ ID NO: 780992 - DNA, 75 bp, synthetic construct
  source 1..75: mol_type = other DNA
acttatggctttcaggtgtgggaagaactgtggaagtccatctacggcgaagaaaactggcaggccaacccctgg

SEQ ID NO: 780993 - DNA, 75 bp, synthetic construct
  source 1..75: mol_type = other DNA
cctcgcggcacggctgcaatgacgctggagcaatactgcgcttatgagcatgtgctggtgtctaccaatggcagt

SEQ ID NO: 780994 - DNA, 75 bp, synthetic construct
  source 1..75: mol_type = other DNA
gacgaagatttagggcatcagtggctgcgtgaacagctgattgcggtgaggtctgttggtttccacgcagaactg

SEQ ID NO: 780995 - DNA, 75 bp, synthetic construct
  source 1..75: mol_type = other DNA
aattagtgaaaagagtcacggcagagaagaaacccgtcttcatattgtttgcgatgtccctgatgagcttattga

SEQ ID NO: 780996 - DNA, 75 bp, synthetic construct
  source 1..75: mol_type = other DNA
atggtattcctgttcacgatactattgccagagttgtatcctgtatcagtcctgcaaaatttcacgagtgcttta

SEQ ID NO: 780997 - DNA, 75 bp, synthetic construct
  source 1..75: mol_type = other DNA
acaactgataatcaaaagtgctgttaaagaggtagttttaaataccgctaaacgtcgctgcaaagtaacttttca

SEQ ID NO: 780998 - DNA, 75 bp, synthetic construct
  source 1..75: mol_type = other DNA
gtttggtcttggcgaaggcgtttttgtctttaatcataccaataacagtgatgccggctaccaggtcgatatgct

SEQ ID NO: 780999 - DNA, 75 bp, synthetic construct
  source 1..75: mol_type = other DNA
ttcgacaggaggcgtcgggacggtcaatgttgagggagaggactctgttctaacgaccgaattattcgaaatagg

SEQ ID NO: 781000 - DNA, 75 bp, synthetic construct
  source 1..75: mol_type = other DNA
attgagacgttccacgcaattaaacaagccgcggtttatccccgctggcgcggggaacacgtggcgtccgtcgtc

SEQ ID NO: 781001 - DNA, 75 bp, synthetic construct
  source 1..75: mol_type = other DNA
ataatgctgatcgcttatttgccgattatatatcacttgatttttactctatctttcaggatgttgaagagttta

SEQ ID NO: 781002 - DNA, 75 bp, synthetic construct
  source 1..75: mol_type = other DNA
acgcgctggggctgattacgtccttcagttatgccaatgctgaggatgagcaaaaaacgcgctacagcgataccc

SEQ ID NO: 781003 - DNA, 75 bp, synthetic construct
  source 1..75: mol_type = other DNA
gaggtcaataagaatgtctataccaccattggtgttgcgggcgccggaaacctcaatattagcgatggcggtaag

SEQ ID NO: 781004 - DNA, 75 bp, synthetic construct
  source 1..75: mol_type = other DNA
ctttacctacattaattttatttgcaaaaatgcattgtgtggaaatacatttcatagacaataaagtaccaaaga

SEQ ID NO: 781005 - DNA, 75 bp, synthetic construct
  source 1..75: mol_type = other DNA
ttgcgtggtctggtgtttgcgccagtgatgcacgcggtgcaggcaggggtatctgaacggttgctggctttgctt

SEQ ID NO: 781006 - DNA, 75 bp, synthetic construct
  source 1..75: mol_type = other DNA
tgcgattcgcattaacccgaatcgcagcggtgaagagacggtgctgcggattttgcgtgagagtattgccagtat

SEQ ID NO: 781007 - DNA, 75 bp, synthetic construct
  source 1..75: mol_type = other DNA
aagaaattgatcgctggattgagcgccaggcatcagcaagaccaagactgaggtgtactggcaatagcggacact

SEQ ID NO: 781008 - DNA, 75 bp, synthetic construct
  source 1..75: mol_type = other DNA
tggagaaagacgtatttcctgcaatcggtgaaatccctgttcagcaaatcaaagcacgaacattggttgaagccc

SEQ ID NO: 781009 - DNA, 75 bp, synthetic construct
  source 1..75: mol_type = other DNA
ccggtttatccccgctggcgcggggaacacgcgatggatcagggtattacactcgacggcggcggtttatccccg

SEQ ID NO: 781010 - DNA, 75 bp, synthetic construct
  source 1..75: mol_type = other DNA
atcaataaagagagatttggttgattataatatcattaatgaatttttaattgtagcaaaattcaaccagttgaa

SEQ ID NO: 781011 - DNA, 75 bp, synthetic construct
  source 1..75: mol_type = other DNA
tgtgccaacacatgatatattggatggtattaaggaatctatgccttggtatataagcacattagatgttaaata

SEQ ID NO: 781012 - DNA, 75 bp, synthetic construct
  source 1..75: mol_type = other DNA
aaaattattgctgagtttctggggcttacccccagagatatttggccctcacgttatgaagctgtatcagtcaaa

SEQ ID NO: 781013 - DNA, 75 bp, synthetic construct
  source 1..75: mol_type = other DNA
aagcggattggatatacggggagggtaacggggcatggtttccgtcacacgatgagtacgattttgcatgaggaa

SEQ ID NO: 781014 - DNA, 75 bp, synthetic construct
  source 1..75: mol_type = other DNA
agcaattaaaagttaaacctaagacttggttgataacaggagttgctggcttcattggctcaaatttacttgaaa

SEQ ID NO: 781015 - DNA, 75 bp, synthetic construct
  source 1..75: mol_type = other DNA
cgatttataatgttgctgttggacagcagacatcattaaatgaactgtataaatatatcgtagatgagttagtca

SEQ ID NO: 781016 - DNA, 75 bp, synthetic construct
  source 1..75: mol_type = other DNA
ataacgttgcagttggtgaccgtactacgcttaaacaattattcactgtattaaagaatgcacttaatgaaaatg

SEQ ID NO: 781017 - DNA, 75 bp, synthetic construct
  source 1..75: mol_type = other DNA
accattggtgttgcgggtgtcggaaacctcaatattagcgatggcggtaagtttgtatcgcaaaatattactttt

SEQ ID NO: 781018 - DNA, 75 bp, synthetic construct
  source 1..75: mol_type = other DNA
acaacttatctcaaaccaaaaaaatgatgacctttatatatacccactggcagcaacccaatattgtatagataa

SEQ ID NO: 781019 - DNA, 75 bp, synthetic construct
  source 1..75: mol_type = other DNA
cgataataaaaaaatccattgatgcatatgtctctacaatgcagaataaaaaaagcgtactctcttatcacggca

SEQ ID NO: 781020 - DNA, 75 bp, synthetic construct
  source 1..75: mol_type = other DNA
gccgacaatatcggcgggatttattatcgaccggttcagtattgtatcaacggtacatggtacacagcagcatca

SEQ ID NO: 781021 - DNA, 75 bp, synthetic construct
  source 1..75: mol_type = other DNA
gtattcttggcgcgctgttttattattcgccacaacgtcctgaagttaaggcgctgattgaatgcctgccaaccc

SEQ ID NO: 781022 - DNA, 75 bp, synthetic construct
  source 1..75: mol_type = other DNA
ctatgcccgtcttgccgtagtaaccatgcgttatttgcaggatgtgcagcagcaacgagcgttgaaacctgcggt

SEQ ID NO: 781023 - DNA, 75 bp, synthetic construct
  source 1..75: mol_type = other DNA
gtattcttggtgccctgttttactattctcccacgcgtcctgaagttcgggcactgtttgactgtctgccgacat

SEQ ID NO: 781024 - DNA, 75 bp, synthetic construct
  source 1..75: mol_type = other DNA
gcaagattttaagggatgctagcttaaaaaaaatagcgacttttgatggcaaggttttaagggatgcctctttaa

SEQ ID NO: 781025 - DNA, 75 bp, synthetic construct
  source 1..75: mol_type = other DNA
ggaatatttcaggagtgccgcaacagtccggcgatgaagcgagtattgatggtttgggggagggtaggggtatga

SEQ ID NO: 781026 - DNA, 75 bp, synthetic construct
  source 1..75: mol_type = other DNA
aacaggcaattctgcgttatctcgaaacgcaccggaccttcaccgcgaaggatgtggccacagagtgcggcatga

SEQ ID NO: 781027 - DNA, 75 bp, synthetic construct
  source 1..75: mol_type = other DNA
acgacggtttatccccgctggcgcggggaactcgtcgccggttgatttcagcagtccgcgatagtcggtttatcc

SEQ ID NO: 781028 - DNA, 75 bp, synthetic construct
  source 1..75: mol_type = other DNA
aggcgcggggaactcatcgccgaatatccacgcccagttacccagaacggtttatccccgcaggcgcggggaact

SEQ ID NO: 781029 - DNA, 75 bp, synthetic construct
  source 1..75: mol_type = other DNA
cgggagttctccggaatgctccggcaggccacacgtatcagcgatctgttgctggaaaacgaactgaaggaaaaa

SEQ ID NO: 781030 - DNA, 75 bp, synthetic construct
  source 1..75: mol_type = other DNA
ttattttttgattggagggcggatattatttattctttaaaggtggggggaggggctggtatgttagcagggatt

SEQ ID NO: 781031 - DNA, 75 bp, synthetic construct
  source 1..75: mol_type = other DNA
atggaacatcatcaattgatattactggcagtggagatctaatatcattaggtggtcatgcaggacttggcgttg

SEQ ID NO: 781032 - DNA, 75 bp, synthetic construct
  source 1..75: mol_type = other DNA
ggggcattttgcgtatacttatgtagtggatgttgataatccagaatcatcgacagaatctgttggtatcggtgc

SEQ ID NO: 781033 - DNA, 75 bp, synthetic construct
  source 1..75: mol_type = other DNA
agcctggcggatgcgcttcagcagtccggcggtgaagacggtggcagtgtggtgttcccgccggtgctggtgcag

SEQ ID NO: 781034 - DNA, 75 bp, synthetic construct
  source 1..75: mol_type = other DNA
gaaaaatccacctgtaccactgcgaccatcgcggcctgccgctggcgcttgtcagcacggaaggggcaacagaat

SEQ ID NO: 781035 - DNA, 75 bp, synthetic construct
  source 1..75: mol_type = other DNA
agaatggtgcgcagaatacgatgaatggggcaacctgctgaatgaagagaacccgcatcagctgcagcagcttat

SEQ ID NO: 781036 - DNA, 75 bp, synthetic construct
  source 1..75: mol_type = other DNA
cacggttacttgctcacaagaaagggagacgagtttggggattctggtttacaggtgtttgaatccgccgggccg

SEQ ID NO: 781037 - DNA, 75 bp, synthetic construct
  source 1..75: mol_type = other DNA
actcaggatccgattgggcttaaggggggatggaatttttatcagtatccgttaaatccgatctcagagatagac

SEQ ID NO: 781038 - DNA, 75 bp, synthetic construct
  source 1..75: mol_type = other DNA
aaacattttgctgatatggtctacatgaactgtgccacaactctgagcttaggaaccaagaataatagttcctcg

SEQ ID NO: 781039 - DNA, 75 bp, synthetic construct
  source 1..75: mol_type = other DNA
gcaacccatcgctcagaacgaataaactctggccgttctaccttattctccagaatgattattttgacgatttaa

SEQ ID NO: 781040 - DNA, 75 bp, synthetic construct
  source 1..75: mol_type = other DNA
gaggagtccggcctctattacaaccgccaccgctattatgacccgctgcaggggcggtatatcactcaggatccg

SEQ ID NO: 781041 - DNA, 75 bp, synthetic construct
  source 1..75: mol_type = other DNA
ggtttatccccgctggcgcggggaacacatgtcgagcgcgttgacagctatattcgccgtcggtttatccccgct

SEQ ID NO: 781042 - DNA, 75 bp, synthetic construct
  source 1..75: mol_type = other DNA
ggattcgatgacatttatttttatgggggccgtgtgtgtttcttttgcagtcattctgttctggctggtttatat

SEQ ID NO: 781043 - DNA, 75 bp, synthetic construct
  source 1..75: mol_type = other DNA
tgtcgtgaaattgaaatctgaggttggtgcttctatagaagcaaaagctgggtttggatttgataaacgagatga

SEQ ID NO: 781044 - DNA, 75 bp, synthetic construct
  source 1..75: mol_type = other DNA
gctccatttttcaaagcatcattccgatttgatatcatctcatttatatgtgcatactgcaaaatggaagatctg

SEQ ID NO: 781045 - DNA, 75 bp, synthetic construct
  source 1..75: mol_type = other DNA
agaaaacgcattcaagataaattctcgagtgtgatgatcattaataaaacattaaaaacatatcgtgatgttgtt

SEQ ID NO: 781046 - DNA, 75 bp, synthetic construct
  source 1..75: mol_type = other DNA
atacactgcagagaaataaaaaacaatctgaagcatgctctgaaacatcctactctgtcactctaatgatggcac

SEQ ID NO: 781047 - DNA, 75 bp, synthetic construct
  source 1..75: mol_type = other DNA
tttaatgtaaaggaaagtaacatcaagctcggtttaaaaggggtggtgagtgcgacgtttgaggcgaatgttttt

SEQ ID NO: 781048 - DNA, 75 bp, synthetic construct
  source 1..75: mol_type = other DNA
ctaataaggtcactttggatgataacttgtctgaaggtgaaataattgctatgggtacatttcgtgtaccatggg

SEQ ID NO: 781049 - DNA, 75 bp, synthetic construct
  source 1..75: mol_type = other DNA
acgtggacatgaattacaaggtgatgctgttgcacgaagagaagtccaagcaaggataagtgcaacgcaatcaac

SEQ ID NO: 781050 - DNA, 75 bp, synthetic construct
  source 1..75: mol_type = other DNA
atgtccaagcaggttctgaatagccaacagcgagctttcacatggactggtccgtatggaagtgggaaatcatca

SEQ ID NO: 781051 - DNA, 75 bp, synthetic construct
  source 1..75: mol_type = other DNA
acagaccgacaccacgcgtatccagacggtataccagccggggagcttcacgccgctcatccgggtcgagacaga

SEQ ID NO: 781052 - DNA, 75 bp, synthetic construct
  source 1..75: mol_type = other DNA
cccaatggaccctggcggcatgggagagttgggagtggttgaggcagagcaaaccgatagcggcgagctgacaat

SEQ ID NO: 781053 - DNA, 75 bp, synthetic construct
  source 1..75: mol_type = other DNA
aagcaggtatgcctgaaaacacaacccgctacgggggagacttacccgaaatctgatttattcaacaaagcctat

SEQ ID NO: 781054 - DNA, 75 bp, synthetic construct
  source 1..75: mol_type = other DNA
caaagttttaaaaactccatggcattatcagaagaggagtttcttagtgtattcagtaatactcttttaccaaaa

SEQ ID NO: 781055 - DNA, 75 bp, synthetic construct
  source 1..75: mol_type = other DNA
atggggaaatacaaacttcccgaattctgggtgttctctgtaccaatgtatctcatccgcattctggcgctttgt

SEQ ID NO: 781056 - DNA, 75 bp, synthetic construct
  source 1..75: mol_type = other DNA
tccccgtgcgcaactcgcctcggcgcttaatttgccagaaacgtgggtagcagagcgtctgccccagttaaaaca

SEQ ID NO: 781057 - DNA, 75 bp, synthetic construct
  source 1..75: mol_type = other DNA
attttcgccagtggcagtgcgggctatcagctggaaatcttcgagcgccgcagcttttttcagttgctgcaaaag

SEQ ID NO: 781058 - DNA, 75 bp, synthetic construct
  source 1..75: mol_type = other DNA
atgggggataaaattgtcaatacaattacgtccctgattatacgttgtggctttaaagccagttcatttgcaggt

SEQ ID NO: 781059 - DNA, 75 bp, synthetic construct
  source 1..75: mol_type = other DNA
ggatgctgatgttctatgcatacatgacaggaaaaattatttttttagaaaggaaacttatggtacttttctgaa

SEQ ID NO: 781060 - DNA, 75 bp, synthetic construct
  source 1..75: mol_type = other DNA
tgaatatggcggcagcgtatacgatattgataatttacgaattgttacccccagactacacgatgagattcacta

SEQ ID NO: 781061 - DNA, 75 bp, synthetic construct
  source 1..75: mol_type = other DNA
gactgtacgcgtttttatttccagcaagtttaaaggactccgggcagacagcagccgaaaaaattgaacaactga

SEQ ID NO: 781062 - DNA, 75 bp, synthetic construct
  source 1..75: mol_type = other DNA
caggaaatgatggttgtgctgatggataatctggaacgccgcttcggtggcaaacagccagaacagcaagcagaa

SEQ ID NO: 781063 - DNA, 75 bp, synthetic construct
  source 1..75: mol_type = other DNA
tgcggcgaaaaaattcaatgatttattgcaggagagaaccaaaggcgagctgaaattaaaactgttcccggacag

SEQ ID NO: 781064 - DNA, 75 bp, synthetic construct
  source 1..75: mol_type = other DNA
ttctgggggccaccctgacaggatacagttctgtggcaagttctgtaggcggtgtcatcgttaaagaccctggca

SEQ ID NO: 781065 - DNA, 75 bp, synthetic construct
  source 1..75: mol_type = other DNA
aagcatactggctctattatttcgctttttccgccccacagaatgtactttcacctgaaatgctcaatgagatat

SEQ ID NO: 781066 - DNA, 75 bp, synthetic construct
  source 1..75: mol_type = other DNA
gaaccatgccgtcagtctgggtatggcgaaagatattcgttttgaaacgccgctgatgtggattgataaagcgga

SEQ ID NO: 781067 - DNA, 75 bp, synthetic construct
  source 1..75: mol_type = other DNA
cgccaggagggcgcgtctgacggtaataaggccataagcgaaacagagcgtgatgcggtgaaggcgatgttcagg

SEQ ID NO: 781068 - DNA, 75 bp, synthetic construct
  source 1..75: mol_type = other DNA
gaatgctcgccgtgagttggggctgattacgcctcctgtttctgaggtaaatgaacaaaatatggagacagatga

SEQ ID NO: 781069 - DNA, 75 bp, synthetic construct
  source 1..75: mol_type = other DNA
aaacgatgagaatagagatgtagctgttatcaaacggttcactccaaaacttgaaaaacgttaccttcggaaaga

SEQ ID NO: 781070 - DNA, 75 bp, synthetic construct
  source 1..75: mol_type = other DNA
gccgttcaccgggaggaaggcatcagcacttacagcagttataacccgcgtgggcaactggtcagtcagaaggat

SEQ ID NO: 781071 - DNA, 75 bp, synthetic construct
  source 1..75: mol_type = other DNA
gcagccagggcttgcgctggtgggcgatgccgcgcataccatccatccgctggcggggcagggagtgaatcttgg

SEQ ID NO: 781072 - DNA, 75 bp, synthetic construct
  source 1..75: mol_type = other DNA
tttcataatctgataaatgaagaatcctcaaatagctctaatgttgtagattcattgaaggtagaattattggct

SEQ ID NO: 781073 - DNA, 75 bp, synthetic construct
  source 1..75: mol_type = other DNA
aggtaagaaagcctcgttaccattaatgacgggtttaactgaggtacaggatagaattgaagaaatagaacctga

SEQ ID NO: 781074 - DNA, 75 bp, synthetic construct
  source 1..75: mol_type = other DNA
tctgagtttggcgcagtgaaaccgctggatgacgagagtacaagctggacgaaggacatcctgagcttcagcgat

SEQ ID NO: 781075 - DNA, 75 bp, synthetic construct
  source 1..75: mol_type = other DNA
gtctcggctcataccctgcccttacactcgcagcagcacgtcagatacgcgaccagcacttaatcacgcttgcgc

SEQ ID NO: 781076 - DNA, 75 bp, synthetic construct
  source 1..75: mol_type = other DNA
ttgagccaatcaaagctcgtggggcgctagagacccttcgtcgtctggtgcagcgcattaacgagataatgattt

SEQ ID NO: 781077 - DNA, 75 bp, synthetic construct
  source 1..75: mol_type = other DNA
tgctaaccctgcatctggtgttggcatggcttttgagagacctaaaaagaaaaatatgccgactttacgaccgga

SEQ ID NO: 781078 - DNA, 75 bp, synthetic construct
  source 1..75: mol_type = other DNA
ctgggcttgcggcgtaagcactgccgatgtggtagaggtacgatccgatacaccagacagagcaatctacgaagc

SEQ ID NO: 781079 - DNA, 75 bp, synthetic construct
  source 1..75: mol_type = other DNA
atgtcatcgttgatggccatgatgtgcccctcaatatgatccgtccttttgaaacgctcacgttacctttacctg

SEQ ID NO: 781080 - DNA, 75 bp, synthetic construct
  source 1..75: mol_type = other DNA
tcgccgcgctgaccacgctgtgcatgttgtcgctgatctccgcgttttatcaggccgataaagttgccgtcacgt

SEQ ID NO: 781081 - DNA, 75 bp, synthetic construct
  source 1..75: mol_type = other DNA
ccattagatatccaactgaaaaaaaacgatgaaataggtgagatgagttctggtttagctatcatgacagctctt

SEQ ID NO: 781082 - DNA, 75 bp, synthetic construct
  source 1..75: mol_type = other DNA
atgcgaggtcgttttgtagaaggtctgggtggcgcgcaattcgctgaacgtctgactattgaccgattgcgcgat

SEQ ID NO: 781083 - DNA, 75 bp, synthetic construct
  source 1..75: mol_type = other DNA
attactggcaaccggtgcggttatctggtcgggacaaaaaaaactgggtgaagatgacggcctggtggcactgca

SEQ ID NO: 781084 - DNA, 75 bp, synthetic construct
  source 1..75: mol_type = other DNA
ttgcgtcgtatctggaaaatcttcttgcagtaaaacgaatcttcccagcgatgattagcggacaggagcgtcttg

SEQ ID NO: 781085 - DNA, 75 bp, synthetic construct
  source 1..75: mol_type = other DNA
gtgatccgggaggtccagcaggcccgcaaggtcctaaaggtgaacgaggagagaccggaccacagggacctaaag

SEQ ID NO: 781086 - DNA, 75 bp, synthetic construct
  source 1..75: mol_type = other DNA
ttcgccggagatatggccgggacggcgaattgtgctgacggggcatccgcaggcgaacctgaaccggggatgggc

SEQ ID NO: 781087 - DNA, 75 bp, synthetic construct
  source 1..75: mol_type = other DNA
gcagcgtgtaacttacgcgccaacgggttgaatcattatctggccgataaaccggcggtgatggcggcaatgaaa

SEQ ID NO: 781088 - DNA, 75 bp, synthetic construct
  source 1..75: mol_type = other DNA
ggcaacagctttcaatatctggttcagtccggtatcaggaaccgttgaactgtacggtctggatgtgcagaccgc

SEQ ID NO: 781089 - DNA, 75 bp, synthetic construct
  source 1..75: mol_type = other DNA
atccagtacatcaacagaagataaaacattacacacaggttatcggcacaataacgacaaatctgtgcattttga

SEQ ID NO: 781090 - DNA, 75 bp, synthetic construct
  source 1..75: mol_type = other DNA
atgacgataccttagcgctgcagagttcagcggcaggctctgcccaaaatgtcggtattcaaattttggaccgta

SEQ ID NO: 781091 - DNA, 75 bp, synthetic construct
  source 1..75: mol_type = other DNA
aaaaggcgacggttgcggccattgtgcagcgtgtaacttacgcgccaacgggttgaatcattatctggccgataa

SEQ ID NO: 781092 - DNA, 75 bp, synthetic construct
  source 1..75: mol_type = other DNA
gtggaatgactatcgcgcaaagtctctgcaatcagacaccccagccaccgatgctttcctggctgaagtacgggc

SEQ ID NO: 781093 - DNA, 75 bp, synthetic construct
  source 1..75: mol_type = other DNA
agcatttggatgaaagacggctcatggttcagtggtgggctgattatttggatataacaactcaaaaaagcatat

SEQ ID NO: 781094 - DNA, 75 bp, synthetic construct
  source 1..75: mol_type = other DNA
atcccgatgtgatatggcgtgaactgtttgccgccattgccggtggtcagtatggagcggtgacaccgtggcgtg

SEQ ID NO: 781095 - DNA, 75 bp, synthetic construct
  source 1..75: mol_type = other DNA
agcgacagatgaaacaggagattgcggggatgacgcgataccgtgatgtactgtgctatcagcccggctggggga

SEQ ID NO: 781096 - DNA, 75 bp, synthetic construct
  source 1..75: mol_type = other DNA
gttcaaaatactggcgactccaataccgtttcgggggcaagcagaaagttttagcattaggtgtttatccaatgg

SEQ ID NO: 781097 - DNA, 75 bp, synthetic construct
  source 1..75: mol_type = other DNA
tcgtgccgttaagtcgtcaggctttagaacttctaaaaacgatcagagaaatcagtggtgaatgcgaccttgtat

SEQ ID NO: 781098 - DNA, 75 bp, synthetic construct
  source 1..75: mol_type = other DNA
ataatccagctcaagatatggctggtgcaatagctgtagctaaacgagtgcaccgcccagcgcttgatttcgaac

SEQ ID NO: 781099 - DNA, 75 bp, synthetic construct
  source 1..75: mol_type = other DNA
ttatcgctatcttggtgggaaaacgaatacgcagttctgcaatggaaaaatcatgttttacatgcgaaagctcaa

SEQ ID NO: 781100 - DNA, 75 bp, synthetic construct
  source 1..75: mol_type = other DNA
agcacatcccttcaaaccataaagataagcattcagataaagttaataatcatcaacaccatggcaaggttgata

SEQ ID NO: 781101 - DNA, 75 bp, synthetic construct
  source 1..75: mol_type = other DNA
aggccacctggtcagcggaaggcgatgtctcttccagtgacgatctctatacctgggtcggtcagttggcagatt

SEQ ID NO: 781102 - DNA, 75 bp, synthetic construct
  source 1..75: mol_type = other DNA
agaaagcggcaactgaagctgctgaaaaagccaaggcagaagctgagaagaaagcggctgctgaaaaggctgcag

SEQ ID NO: 781103 - DNA, 75 bp, synthetic construct
  source 1..75: mol_type = other DNA
tcaccgggcgtggtcaacagtggctgacaagaaagctgctagataacggaatgcttaaagtaacaggggaggctg

SEQ ID NO: 781104 - DNA, 75 bp, synthetic construct
  source 1..75: mol_type = other DNA
caatatgaattagccaaatctctattagaaagactggaactgaatgttgatccctatacccaactgggagagcta

SEQ ID NO: 781105 - DNA, 75 bp, synthetic construct
  source 1..75: mol_type = other DNA
acttctatacccgctacttcttcgcctcggcgatggcccatatctccgccatgtatctggcctttctggccgtgg

SEQ ID NO: 781106 - DNA, 75 bp, synthetic construct
  source 1..75: mol_type = other DNA
ggacgggaggcactggatgacctggtacgtccgttttatctgctggaggggcgcaacgttcctgacttcaggaac

SEQ ID NO: 781107 - DNA, 75 bp, synthetic construct
  source 1..75: mol_type = other DNA
tcatctgatggtaagaaaattggtactctggcgttcgtaatgcgagttgcctgtcaggccagcgaaaagaagggt

SEQ ID NO: 781108 - DNA, 75 bp, synthetic construct
  source 1..75: mol_type = other DNA
aacgctggctggcaaggagtgacgcttaataccacgcgggggcatttctatcgcgcggcgctggaagggttaact

SEQ ID NO: 781109 - DNA, 75 bp, synthetic construct
  source 1..75: mol_type = other DNA
cgcagtgtggcggtggatctcaccgcgccggttatcagcataaacacggtttcaacggacgaccgactcaacgcc

SEQ ID NO: 781110 - DNA, 75 bp, synthetic construct
  source 1..75: mol_type = other DNA
cggtccaggctgatttaagttggaatgtgagcgtacctgccgccgactggcaggcgctgggtaacggtgagttaa

SEQ ID NO: 781111 - DNA, 75 bp, synthetic construct
  source 1..75: mol_type = other DNA
taagctgttagaaggggaatattttacggtgcgtggctaccagaaagggaccgtacacattgtctttaagcgttc

SEQ ID NO: 781112 - DNA, 75 bp, synthetic construct
  source 1..75: mol_type = other DNA
caatcattcattgcacaatatcaacaaggtaaagcctttgaaatgtcaatgggccatctatcacagtacagaggt

SEQ ID NO: 781113 - DNA, 75 bp, synthetic construct
  source 1..75: mol_type = other DNA
tcgacaaagcaccacaatattcaaatactacttggactggtgcactcattcagcgtagtacaggtgtacaatggt

SEQ ID NO: 781114 - DNA, 75 bp, synthetic construct
  source 1..75: mol_type = other DNA
acctccaacctgtcgatggggctgacccagtattctggcggccctggtccggcgctctttggttcgggctataac

SEQ ID NO: 781115 - DNA, 75 bp, synthetic construct
  source 1..75: mol_type = other DNA
gcctttttcctgccggtccccggacagagcacaaaggaagtcgccgccggctccgctttacccggccatgcaggg

SEQ ID NO: 781116 - DNA, 75 bp, synthetic construct
  source 1..75: mol_type = other DNA
ggctacgctttcacgtaaccccttgatttatttggtggagctggcgggagttgaacccgcgtccgaaattcctac

SEQ ID NO: 781117 - DNA, 75 bp, synthetic construct
  source 1..75: mol_type = other DNA
cctgcaactcccgccagccgtgtgcgtcaggctgcggcttcccttgcgcccctgcatccccgcctgttcgcccgg

SEQ ID NO: 781118 - DNA, 75 bp, synthetic construct
  source 1..75: mol_type = other DNA
tagatacaatcagatgaatcagcctaaaaacccatcttatcagcctgtcaggaacctactagctactattagtaa

SEQ ID NO: 781119 - DNA, 75 bp, synthetic construct
  source 1..75: mol_type = other DNA
gtttacatttgatgcttcatcacaggttccaacggccctggagaatcgaccgagaaacattgcgtttaactacat

SEQ ID NO: 781120 - DNA, 75 bp, synthetic construct
  source 1..75: mol_type = other DNA
ttataaatctgcttgatttgcgctggcaacgtcgtgttccggttattcatcagacggagaccgctgaatgtggac

SEQ ID NO: 781121 - DNA, 75 bp, synthetic construct
  source 1..75: mol_type = other DNA
atattcttaatagcgagcctaaaatacaggctaatcttgcatttatgagtggtgattattatttaattagatcat

SEQ ID NO: 781122 - DNA, 75 bp, synthetic construct
  source 1..75: mol_type = other DNA
atatggtgaaggccttccgctgccggagacatatgaccgtccggacccgcgcattaagcagctggcgcgtcgcag

SEQ ID NO: 781123 - DNA, 75 bp, synthetic construct
  source 1..75: mol_type = other DNA
ggatacagtatctgctgagtctggtccccgacggcccgtggcagcaattgtattcacgcttccctgccagtactg

SEQ ID NO: 781124 - DNA, 75 bp, synthetic construct
  source 1..75: mol_type = other DNA
acacatccgggtataaaaatggtgggtttacatttgatgcttcatcacaggttccaacggccctggagaatcgac

SEQ ID NO: 781125 - DNA, 75 bp, synthetic construct
  source 1..75: mol_type = other DNA
attcgtgagcgcgttgttgaccaactggcgcatattgatctcactctggcccaggcggtggcgaaaaatctcggt

SEQ ID NO: 781126 - DNA, 75 bp, synthetic construct
  source 1..75: mol_type = other DNA
tgaagaacaacttaaaaatgacgagtattcatcgcttttaatacgcgttttctttgccttatcattagaaattaa

SEQ ID NO: 781127 - DNA, 75 bp, synthetic construct
  source 1..75: mol_type = other DNA
tactttaatcatattataaaagaacgttatacttcgagagatactctcaatggtctgagagcatataaatatctg

SEQ ID NO: 781128 - DNA, 75 bp, synthetic construct
  source 1..75: mol_type = other DNA
aacgtcccggaagctggctcaatgccgccgcccgctatcatcgtcccgctggcggcgcgcctgccgcgcgatacc

SEQ ID NO: 781129 - DNA, 75 bp, synthetic construct
  source 1..75: mol_type = other DNA
ccgatatcaccgccctgcgggcggcgcgcccgctgcacgctaccgcaagctggtcagccgccatctgcaacaggc

SEQ ID NO: 781130 - DNA, 75 bp, synthetic construct
  source 1..75: mol_type = other DNA
cccaaactcaaaggaaaagattaaaatacttacagatacttctaatttaatttatgatttattcggggttaaatc

SEQ ID NO: 781131 - DNA, 75 bp, synthetic construct
  source 1..75: mol_type = other DNA
tttatccccgctggcgcgaggaactctgcacgaaaaatggcaggcttgccagcatcctcggtttatccccgctgg

SEQ ID NO: 781132 - DNA, 75 bp, synthetic construct
  source 1..75: mol_type = other DNA
aacgcgctccttggtctggcaaatgtttataatggcttacgggaaacagaataccctaacactttcaacagagat

SEQ ID NO: 781133 - DNA, 75 bp, synthetic construct
  source 1..75: mol_type = other DNA
acgacaatgaaagtaataaattgctaaaagcaggaaagatagctggtaacaataacgagctgttgatggaaataa

SEQ ID NO: 781134 - DNA, 75 bp, synthetic construct
  source 1..75: mol_type = other DNA
tcgcaaatctatggactattgctattcggtttatccccgctggcgcggggaacacgccgcgattattcaaaagag

SEQ ID NO: 781135 - DNA, 75 bp, synthetic construct
  source 1..75: mol_type = other DNA
ctgccagagttgaggttatggatgtggaaggcgaacccggctggtaccaggtcgcgctgagcgtgcggccccatt

SEQ ID NO: 781136 - DNA, 75 bp, synthetic construct
  source 1..75: mol_type = other DNA
gtgttgcagcgtgaacaactggggtcatggaaagaaaggagcgacttagaaagagagcttaatacctggatccgt

SEQ ID NO: 781137 - DNA, 75 bp, synthetic construct
  source 1..75: mol_type = other DNA
aacgacctgaccagctgtgggtggctgattttacttacgtcagcacatggcagggcttcgtctatgtggcgttca

SEQ ID NO: 781138 - DNA, 75 bp, synthetic construct
  source 1..75: mol_type = other DNA
taggcgtggaaatcgacgaagctaaagttattgagttcagtaaaaatgccccggactggcgtaatccgctctggc

SEQ ID NO: 781139 - DNA, 75 bp, synthetic construct
  source 1..75: mol_type = other DNA
gaaggtaaattcccgccacgctgccactttggccgtaatagttgcgcatggcttctgtcagatgttctttggtgg

SEQ ID NO: 781140 - DNA, 75 bp, synthetic construct
  source 1..75: mol_type = other DNA
gcgcggggaacacccgccgttggcaccgtcaaactccggtactgtcggtttatccccgctggcgcggggaacact

SEQ ID NO: 781141 - DNA, 75 bp, synthetic construct
  source 1..75: mol_type = other DNA
caaaaacaagaactcccagagataattttgaggaaggaataaaacatcctgaacatgcaacaataccatatgaca

SEQ ID NO: 781142 - DNA, 75 bp, synthetic construct
  source 1..75: mol_type = other DNA
tcatttattagcggattactatttagcaggatggatagatgaacaacgttatatgaaagaagtctttgatgtaac

SEQ ID NO: 781143 - DNA, 75 bp, synthetic construct
  source 1..75: mol_type = other DNA
ggagatgctccagtcgcttgttgatggtcgacataacgaacaatttcttcaagagcttaaacacataactgaaaa

SEQ ID NO: 781144 - DNA, 75 bp, synthetic construct
  source 1..75: mol_type = other DNA
attacagtattaaatcgcggtgattatcggttattagcgagccatgagtataataaagataatcgttttactgca

SEQ ID NO: 781145 - DNA, 75 bp, synthetic construct
  source 1..75: mol_type = other DNA
tttcaaccgaaaattttaaaagaaaagacctggaagctaaattaattaattttgatacagatggaaaaatattat

SEQ ID NO: 781146 - DNA, 75 bp, synthetic construct
  source 1..75: mol_type = other DNA
tcaatgatgcatcaccagaatcactgcagatagtctgggaaccggtattttaccctggtagtacggttcatcctc

SEQ ID NO: 781147 - DNA, 75 bp, synthetic construct
  source 1..75: mol_type = other DNA
agccggaagtgtgtttgtgctgccgccacaggggcagccgggtgccagccgtgccacccgggataatcttgagcg

SEQ ID NO: 781148 - DNA, 75 bp, synthetic construct
  source 1..75: mol_type = other DNA
aaccatcagtgggcaggtgacgggtgccgcggcgggcgacacagttaccgttacgctgggtggcaacacctacac

SEQ ID NO: 781149 - DNA, 75 bp, synthetic construct
  source 1..75: mol_type = other DNA
gctggcggtagatatcactgcgccggatctcaccattaacaccgtcgcgggcgatgacattatcaacgccatcga

SEQ ID NO: 781150 - DNA, 75 bp, synthetic construct
  source 1..75: mol_type = other DNA
ccacgggctggcggtggatctcaccgtgccggtgctgaccatcaacaccgtctccggcgatgacattattaacgc

SEQ ID NO: 781151 - DNA, 75 bp, synthetic construct
  source 1..75: mol_type = other DNA
ttgctgttactattcctgttgctattatgtgggcatggggggatgcaaaaagaaaacgtaataaaagagataaag

SEQ ID NO: 781152 - DNA, 75 bp, synthetic construct
  source 1..75: mol_type = other DNA
aaggcagcgatttgcagctttccggcaccacctccggcgtggaagcggggcagaccatcaccgttatcttcggtg

SEQ ID NO: 781153 - DNA, 75 bp, synthetic construct
  source 1..75: mol_type = other DNA
tcgtcagcgtcacgctaaacaataaaacctacaccacgacgctggatgcctccggcaactggagcgtcggcgttc

SEQ ID NO: 781154 - DNA, 75 bp, synthetic construct
  source 1..75: mol_type = other DNA
gaaaaactggatagcagcctgacctgggacacccgcttgtcctggacgccacaatttctgaaacaacaaaacctg

SEQ ID NO: 781155 - DNA, 75 bp, synthetic construct
  source 1..75: mol_type = other DNA
gcactggagctggcaaatatctgccagatgcttctggatgaaaatatcgacagtgaattagtccgcgcgacaatc

SEQ ID NO: 781156 - DNA, 75 bp, synthetic construct
  source 1..75: mol_type = other DNA
gctggcgcggggaacacaccccattaccgatgaaggttctccgtattggcggtttatccccgctggcgcggggaa

SEQ ID NO: 781157 - DNA, 75 bp, synthetic construct
  source 1..75: mol_type = other DNA
ggataacctgcggctgttctgcctgagttattacccggattcacagatagccctgcagccggagccgctctggca

SEQ ID NO: 781158 - DNA, 75 bp, synthetic construct
  source 1..75: mol_type = other DNA
tatccccgctggcgcggggaacaccctgagattacgttgaattggctttccgtcagcggtttatccccgctggcg

SEQ ID NO: 781159 - DNA, 75 bp, synthetic construct
  source 1..75: mol_type = other DNA
tggcgcggggaacactgcgttgctatgcagatcgcgcagcgtcccgacggtttatccccgctggcgcggggaaca

SEQ ID NO: 781160 - DNA, 75 bp, synthetic construct
  source 1..75: mol_type = other DNA
caggtgcttcagtattctggcgcacggataaagatgcggattatggtgtacttaatgatcttgcccgtaacaccg

SEQ ID NO: 781161 - DNA, 75 bp, synthetic construct
  source 1..75: mol_type = other DNA
gctgttgagggtaaaaaaatcattattactgaggcctacagcgacggttccagcagctccaattcttatccgttg

SEQ ID NO: 781162 - DNA, 75 bp, synthetic construct
  source 1..75: mol_type = other DNA
gccttcttacataacgaactggatactgctgacgtagaggaaatagctgatcgcgtcatgtgggataacaattca

SEQ ID NO: 781163 - DNA, 75 bp, synthetic construct
  source 1..75: mol_type = other DNA
aatcccgtgatcttgatgctcattttcaagaggtttatgccttcttacataacgaactggatactgctgacgtag

SEQ ID NO: 781164 - DNA, 75 bp, synthetic construct
  source 1..75: mol_type = other DNA
tccaggaataccagaaggccctgaacagctgtgagctgtttgtaaacccgttcccgttcgggaataccaatggtc

SEQ ID NO: 781165 - DNA, 75 bp, synthetic construct
  source 1..75: mol_type = other DNA
ggttctgcatgatgtttatatgcactgctcttatgcggaccttgcggaaaaacatctaatcaagcgggaaatcaa

SEQ ID NO: 781166 - DNA, 75 bp, synthetic construct
  source 1..75: mol_type = other DNA
tcctgcagacagcacagtcaaatatgctgttgagggtaaaaaaatcattattactgaggtctacagcgacggttc

SEQ ID NO: 781167 - DNA, 75 bp, synthetic construct
  source 1..75: mol_type = other DNA
ccgcaaactgtcaccgccacggttaccgatgcggcaggcaacagcgacaatgagacacacacggtcaccgttaac

SEQ ID NO: 781168 - DNA, 75 bp, synthetic construct
  source 1..75: mol_type = other DNA
cggcggcggatgtcacggcgctgggtagcggcccgcaaaccatcactgccagcattaccgacgcggcaggcaata

SEQ ID NO: 781169 - DNA, 75 bp, synthetic construct
  source 1..75: mol_type = other DNA
tacaaagccgtgtatctgctcggtttatccccgctggcgcggggaacactggctctgcaacagcagcacccatga

SEQ ID NO: 781170 - DNA, 75 bp, synthetic construct
  source 1..75: mol_type = other DNA
agtcggctgagcctgaaaagcccgatgccgcggacgtggccgaggcaccgcctggcgacgcgagcaagcctgcgc

SEQ ID NO: 781171 - DNA, 75 bp, synthetic construct
  source 1..75: mol_type = other DNA
tcatcaccgtcacgttaaacagtaaaacctataccaccacgctggacgcttccggcaactggagcgtcggcgttc

SEQ ID NO: 781172 - DNA, 75 bp, synthetic construct
  source 1..75: mol_type = other DNA
ccacaattacgctgacgctgaacgggcaaaattacactgcgacgacggacgccgcaggcaactggagcaccatag

SEQ ID NO: 781173 - DNA, 75 bp, synthetic construct
  source 1..75: mol_type = other DNA
ccgatgacataattaacgccaccgaaaaaggcgcggatctgcaaatttccggcaccagtaatcagccagcaggca

SEQ ID NO: 781174 - DNA, 75 bp, synthetic construct
  source 1..75: mol_type = other DNA
aattgaaagcgggcaaaccgttaccgtcacttttggcggtaaaacctacaccgcaagcgtcgcctccaacgggag

SEQ ID NO: 781175 - DNA, 75 bp, synthetic construct
  source 1..75: mol_type = other DNA
ttaccgccagcgtgaacgatcgcgccggtaaccccggtcaaaccacgcacgccctgaccgtcgataccgttgcgc

SEQ ID NO: 781176 - DNA, 75 bp, synthetic construct
  source 1..75: mol_type = other DNA
gtcagccatccgttcaccgtcgatttaacggcggtggcaatcagcatcaacaccgttgccagcgatgacgtaatt

SEQ ID NO: 781177 - DNA, 75 bp, synthetic construct
  source 1..75: mol_type = other DNA
cgccatcgtcgaaggactggcgcagcgcatggtcgccggtgaagtgcccgagacgctgcgcgacaagcgtctggt

SEQ ID NO: 781178 - DNA, 75 bp, synthetic construct
  source 1..75: mol_type = other DNA
ctgggtggaatgattgcaggagaagctcaattaactaacatccactctcaacaaaacaacaggcgtactatttca

SEQ ID NO: 781179 - DNA, 75 bp, synthetic construct
  source 1..75: mol_type = other DNA
taaaatcatataagcatacactggttgagtatagtaaacccacagaagagctgagcaggcaagatatagaaaata

SEQ ID NO: 781180 - DNA, 75 bp, synthetic construct
  source 1..75: mol_type = other DNA
cggatttaagcggattaaccgccagcagttacaccgtgaccgccacggtgagcgacaaagcgggcaacccggcaa

SEQ ID NO: 781181 - DNA, 75 bp, synthetic construct
  source 1..75: mol_type = other DNA
acatggagcgttggcgttccggcggcagatgtgggcaactggcctgcggggacggtggatatcacggtaagcggc

SEQ ID NO: 781182 - DNA, 75 bp, synthetic construct
  source 1..75: mol_type = other DNA
cggcggcggatgtcacggcactgggcagcggcccgcaaactgttaccgccacggtgactgatgcggcgggtaata

SEQ ID NO: 781183 - DNA, 75 bp, synthetic construct
  source 1..75: mol_type = other DNA
caccgcgccgcttattactatcaacaccatcgccagcgacgatactcttaacgtgagcgaagcgggcgcggggat

SEQ ID NO: 781184 - DNA, 75 bp, synthetic construct
  source 1..75: mol_type = other DNA
taccaccacgctggacgcttccggcaactggagcgtcggcgttccgctggcagatgtcaccgcgcttggcagcgg

SEQ ID NO: 781185 - DNA, 75 bp, synthetic construct
  source 1..75: mol_type = other DNA
atctcagcaatctgaccgccagcccgtacacggtcagcgcctcggtaagcgacaaagcgggtaacccggcgaccg

SEQ ID NO: 781186 - DNA, 75 bp, synthetic construct
  source 1..75: mol_type = other DNA
gctgaagcggggcagattgttacgataacgctcaatagtccaaccgtgcagacctatcaggcaacggtacaggcc

SEQ ID NO: 781187 - DNA, 75 bp, synthetic construct
  source 1..75: mol_type = other DNA
ggagcggaagatggcgacacggtaactattacgttgggcggtaatacttatacggcgacggtgggcagcaatctc

SEQ ID NO: 781188 - DNA, 75 bp, synthetic construct
  source 1..75: mol_type = other DNA
aagccatacagcaaccgtcggtagcgacggaacctggcaagtgacgctgcctgccacggaagtccaggcactggc

SEQ ID NO: 781189 - DNA, 75 bp, synthetic construct
  source 1..75: mol_type = other DNA
atgacgccagccgcacggtcaccgtgaatctcaccgcgccaaccattggcatcaacactatcgccagcgatgacg

SEQ ID NO: 781190 - DNA, 75 bp, synthetic construct
  source 1..75: mol_type = other DNA
tcaccattaacaccgtcgcgggcgatgacatcatcaacgccatcgaacacgggcaggcgctggtcgtcagcggca

SEQ ID NO: 781191 - DNA, 75 bp, synthetic construct
  source 1..75: mol_type = other DNA
tgacgctgaacgggcaaaattacaccgctaccaccgatagcagtggcaactggagtgccacggtgccagcctcgg

SEQ ID NO: 781192 - DNA, 75 bp, synthetic construct
  source 1..75: mol_type = other DNA
cagatattcaggcgctgggtaatggcgatttaacggtgagcgcctcggtcaccaatcaaaacggcaacaccggca

SEQ ID NO: 781193 - DNA, 75 bp, synthetic construct
  source 1..75: mol_type = other DNA
acagcaccagcgatgactacggtgatttttctaactttgccgcctggcccatcaaggttgacgggaaaacctggc

SEQ ID NO: 781194 - DNA, 75 bp, synthetic construct
  source 1..75: mol_type = other DNA
cctgatgacgctacgctgtcagaagctgctcgcacaggtcagtttatccatttcacctgatacccgcgttggcga

SEQ ID NO: 781195 - DNA, 75 bp, synthetic construct
  source 1..75: mol_type = other DNA
gaggatgtgtgtccagccgatgtccagccggtgtccacagataacaatatattaaataacttactacctaaaggt

SEQ ID NO: 781196 - DNA, 75 bp, synthetic construct
  source 1..75: mol_type = other DNA
ggggggctgggttaagatcatggatctttgcatggatagatgaacgtaaagccagaaaatctccgccatcagtcc

SEQ ID NO: 781197 - DNA, 75 bp, synthetic construct
  source 1..75: mol_type = other DNA
gtttgaagtcctgaaaggaaatcgtctgtttgccgtgctgcgtctggcagacaacagccatccgccgtttacgcc

SEQ ID NO: 781198 - DNA, 75 bp, synthetic construct
  source 1..75: mol_type = other DNA
tgtcagggaaaataaactcaatgaaacagcgcgtagctatactacatggacaaaagttttaaacattattaatga

SEQ ID NO: 781199 - DNA, 75 bp, synthetic construct
  source 1..75: mol_type = other DNA
gcttaacgaccgaccaccagatagtgcatgagcacgggctggacgcggtgttctccgtgctgacgcaaatcgcca

SEQ ID NO: 781200 - DNA, 75 bp, synthetic construct
  source 1..75: mol_type = other DNA
agcataacctacgcagacaaacaggctaccctcaagtatgcaggatgggtctctgaagatttcgaggacatggtc

SEQ ID NO: 781201 - DNA, 75 bp, synthetic construct
  source 1..75: mol_type = other DNA
gagtatcagaacacacgcaaaaagcagcttgaaaaaataggaaggaatcatattcaacttaggcttgatgatgaa

SEQ ID NO: 781202 - DNA, 75 bp, synthetic construct
  source 1..75: mol_type = other DNA
cacctgctcctgcgtgctaatcatgaacagacactggtatctactgatgttggcgatgtgatctgcgagcgcgga

SEQ ID NO: 781203 - DNA, 75 bp, synthetic construct
  source 1..75: mol_type = other DNA
cttcgaacgtctgatggatggcgctaagctgctgaaatgtagtgagtttggcgacgcaatcatcgaaaacatgta

SEQ ID NO: 781204 - DNA, 75 bp, synthetic construct
  source 1..75: mol_type = other DNA
ctacgtcaaatcgccaatggttttcctgttatgaaaattaccggaggcttcatgttgttaaccatcatcgacacc

SEQ ID NO: 781205 - DNA, 75 bp, synthetic construct
  source 1..75: mol_type = other DNA
gccaacacagcatacctggtggatttacaggaaatgcagggagataacctgctccgtgaactggtaagaatcact

SEQ ID NO: 781206 - DNA, 75 bp, synthetic construct
  source 1..75: mol_type = other DNA
tggatttctggcaggacgactggagtgaagagcagaagcggcagattttacgtgatgcggcatatgtgcatcagc

SEQ ID NO: 781207 - DNA, 75 bp, synthetic construct
  source 1..75: mol_type = other DNA
gcttatggcagggaatgttgcgttggcatctgatgtgcctactgaagtgactctaatagaaaaacaaacgctggg

SEQ ID NO: 781208 - DNA, 75 bp, synthetic construct
  source 1..75: mol_type = other DNA
tacaggttgttgagcagggtagcttcacgaaagctgctgatgtacttcagattcatcgccccactgtgagcaaag

SEQ ID NO: 781209 - DNA, 75 bp, synthetic construct
  source 1..75: mol_type = other DNA
ttgtttgtacacaagtaattgagcaaagcgtggatattgacctggacgaaatgatctccgacctggcccctgttg

SEQ ID NO: 781210 - DNA, 75 bp, synthetic construct
  source 1..75: mol_type = other DNA
atattaccaaaaccttcggcagtgtgaaggcgattgataacatctgcttgcggttgaatgctggcgaaatcgtct

SEQ ID NO: 781211 - DNA, 75 bp, synthetic construct
  source 1..75: mol_type = other DNA
atgcgtaaatatcctttaagtttactgaaggataaagatattgtgactttttttgatttctggggaaaaacccga

SEQ ID NO: 781212 - DNA, 75 bp, synthetic construct
  source 1..75: mol_type = other DNA
tcctttaggctatagcggtgcgaatcatacacatattgctaatgctctctatcacgcattaccgaactcaattgc

SEQ ID NO: 781213 - DNA, 75 bp, synthetic construct
  source 1..75: mol_type = other DNA
gccgttcgtaattactggcatgataatggaatttcattagttggtatgcaatcactattatttggaacccaaggg

SEQ ID NO: 781214 - DNA, 75 bp, synthetic construct
  source 1..75: mol_type = other DNA
cagaaggcgctggagttcgcgaatttgcttattggcggcagcgagttcggaggccggcaccacttcctcgcccga

SEQ ID NO: 781215 - DNA, 75 bp, synthetic construct
  source 1..75: mol_type = other DNA
atcagcaacaggcgcctggggttgaaggggatttcgcttcggctaaccctaaagcaagtcttcttgcaggtgagg

SEQ ID NO: 781216 - DNA, 75 bp, synthetic construct
  source 1..75: mol_type = other DNA
actgcgtggagcggggagtatgatgagtggggaaacctgctgaatgaggaaaacccgcatcacctgcaccagccg

SEQ ID NO: 781217 - DNA, 75 bp, synthetic construct
  source 1..75: mol_type = other DNA
gcgaaagcggtgaaagcggcaattaaacttgccgataaagcaccggaaagcacaccaactgtctatcgtcgtatc

SEQ ID NO: 781218 - DNA, 75 bp, synthetic construct
  source 1..75: mol_type = other DNA
ggtaatcagagcactactggcaatgctgcaactgcaacaaaactgcaaacagcacgcacaataggcggagtgtca

SEQ ID NO: 781219 - DNA, 75 bp, synthetic construct
  source 1..75: mol_type = other DNA
atggtttgatggacgtctctggtgtgccagtgattatggcatctgggtgctggaagatgacaaactgtgcttgcc

SEQ ID NO: 781220 - DNA, 75 bp, synthetic construct
  source 1..75: mol_type = other DNA
gtggaagcaataaccagaagtcgattccgagatttatctggtttttccgaatcggatatgtatgcagtgggcgga

SEQ ID NO: 781221 - DNA, 75 bp, synthetic construct
  source 1..75: mol_type = other DNA
ggcggaacgggaacggtttatcactttaatggtgagcaatggaaacaactcccttttccgacaaataaacttctg

SEQ ID NO: 781222 - DNA, 75 bp, synthetic construct
  source 1..75: mol_type = other DNA
atatttgaatataaagatctgcgagacaccttcgcatcaccgaagaaaaatgtttcttatcgcgaagccagtccg

SEQ ID NO: 781223 - DNA, 75 bp, synthetic construct
  source 1..75: mol_type = other DNA
atttcctgatggcggaaaagaataatcaggagattgccgggatactggcatcgtggttacaagataaaggactcg

SEQ ID NO: 781224 - DNA, 75 bp, synthetic construct
  source 1..75: mol_type = other DNA
ttttctttcttcttattggcgttggtgtcattgctcgtaaagtgggagttattactccaggaaacacgccccaac

SEQ ID NO: 781225 - DNA, 75 bp, synthetic construct
  source 1..75: mol_type = other DNA
ctatgccaatctgggcttgcccggtaccgggctgagttaccgtacccggcttgaccgggccgcgggccgcgcgtt

SEQ ID NO: 781226 - DNA, 75 bp, synthetic construct
  source 1..75: mol_type = other DNA
attgggtctttctttctggacaattccgtttcagtagttaataccagaacaaaacaactgaacggttatgcatct

SEQ ID NO: 781227 - DNA, 75 bp, synthetic construct
  source 1..75: mol_type = other DNA
gaaacatatataaagttgaagactttttacctgagaaaaataaatggacgttcagttccggcctgtcaatttatg

SEQ ID NO: 781228 - DNA, 75 bp, synthetic construct
  source 1..75: mol_type = other DNA
ttcaggatttatctggtttttccgagtcagatatgtatgcagtgggtggaacgggaaccgtttatcactttaatg

SEQ ID NO: 781229 - DNA, 75 bp, synthetic construct
  source 1..75: mol_type = other DNA
ggtgatcgtttccggtttgcaacgcattcgtccgggtatcaaagcacgagcaatttcctccagccaggaaaacgc

SEQ ID NO: 781230 - DNA, 75 bp, synthetic construct
  source 1..75: mol_type = other DNA
gtggttccgcaagctatgctttggctggggccaaagatgcccgactcgagttacgtacgagtcttgagattaaag

SEQ ID NO: 781231 - DNA, 75 bp, synthetic construct
  source 1..75: mol_type = other DNA
aagcagaaaagcctgtgccgactaaagaactgtccccacccccaaaagttaagactgcgaggtcagcagcagaaa

SEQ ID NO: 781232 - DNA, 75 bp, synthetic construct
  source 1..75: mol_type = other DNA
aggcaggcgaaatggcctgtaaatacatcaccgatcgcctgaaaggcaaaggcaacgtggtgatcatcaacggcc

SEQ ID NO: 781233 - DNA, 75 bp, synthetic construct
  source 1..75: mol_type = other DNA
attgttaaaggtatggaaggcgcaatcaatgcgaagaccgtaacctatgatttcgaacgcctgatggaaggcgct

SEQ ID NO: 781234 - DNA, 75 bp, synthetic construct
  source 1..75: mol_type = other DNA
agagagagtaatgagtataaaatatataaaagtatactatattcttcactatgcatactattattgtcttataca

SEQ ID NO: 781235 - DNA, 75 bp, synthetic construct
  source 1..75: mol_type = other DNA
agatcgtttcaagatatgcaaatggtttccgcattgcctatggaagctacggattctttatccgaaacgatggct

SEQ ID NO: 781236 - DNA, 75 bp, synthetic construct
  source 1..75: mol_type = other DNA
acgaacggcctcaagggcggtgatagctcgttcggaacggtaatagcccctggcggtgaaggcggcgggaaagta

SEQ ID NO: 781237 - DNA, 75 bp, synthetic construct
  source 1..75: mol_type = other DNA
aaacgccatcctgacatcaaagtgctctctgacaaccagaacgcgaaaggcagtcgtgaaggcgggctggaggta

SEQ ID NO: 781238 - DNA, 75 bp, synthetic construct
  source 1..75: mol_type = other DNA
aaataggaatgtattgatagcgtatcaaaataactcttatgagtattatcacaaaaaacatatatggtcaaagca

SEQ ID NO: 781239 - DNA, 75 bp, synthetic construct
  source 1..75: mol_type = other DNA
gcctacacgatgataatgaattagacgaacctgctatttattggaagcatttagataaaaaaacaatttctaaaa

SEQ ID NO: 781240 - DNA, 75 bp, synthetic construct
  source 1..75: mol_type = other DNA
attgcagaacatttcgaaccatacagtgatcgtaatcatattctgaatcgaataattatagagaaagcccctaat

SEQ ID NO: 781241 - DNA, 75 bp, synthetic construct
  source 1..75: mol_type = other DNA
gggaaactaaaagccaacctgataaatcataacctgactcaggagcaggtgatggaagccgcattgaggagcgaa

SEQ ID NO: 781242 - DNA, 75 bp, synthetic construct
  source 1..75: mol_type = other DNA
cgcaaagaatttgtcgatgataaccgggtgaaagtgaataatgacggtaattttgtcaatgatttgtcgggcaga

SEQ ID NO: 781243 - DNA, 75 bp, synthetic construct
  source 1..75: mol_type = other DNA
catatcatggtgtgttggtaggtaataaaaaaaatgacttacttaaattaggtgatatatttattctacctactt

SEQ ID NO: 781244 - DNA, 75 bp, synthetic construct
  source 1..75: mol_type = other DNA
cacgccatccccaccgctgatgatcattttttgcattaccgctggcaggccgtagcgtgggcagaaaaagctgct

SEQ ID NO: 781245 - DNA, 75 bp, synthetic construct
  source 1..75: mol_type = other DNA
gtatcgaattggcggcttatgaaatgtatcctgattatgccattacaagtgggcagtattcgtccccctttgaat

SEQ ID NO: 781246 - DNA, 75 bp, synthetic construct
  source 1..75: mol_type = other DNA
caccgcattattttaccaggccaaagatctctattgggctgatttagcctgggtggcagaaaacgttttgacctt

SEQ ID NO: 781247 - DNA, 75 bp, synthetic construct
  source 1..75: mol_type = other DNA
cgggactctcattagcggaggagagcagcgagtttccagtggtggtaatgctgtagacaccaccattgaggaggg

SEQ ID NO: 781248 - DNA, 75 bp, synthetic construct
  source 1..75: mol_type = other DNA
attacaatcaacagtggttaccaggtcatctcaagcggtggcagtgtaaccaccacgaccatttaccgtggtggg

SEQ ID NO: 781249 - DNA, 75 bp, synthetic construct
  source 1..75: mol_type = other DNA
aaccagggagaaaaatttatcactgctggagtcggttattgatgctccactggttcagcaactggtaatcgcaga

SEQ ID NO: 781250 - DNA, 75 bp, synthetic construct
  source 1..75: mol_type = other DNA
cttgatgggacacagtttattgcaacaatacaggcacttgcgcaaaaaagaagagccgccgttgttgctcgtcca

SEQ ID NO: 781251 - DNA, 75 bp, synthetic construct
  source 1..75: mol_type = other DNA
atgaaaataaaattacgcattactattatattaatttcagccttatgcatttttaatggattattgactcctggt

SEQ ID NO: 781252 - DNA, 75 bp, synthetic construct
  source 1..75: mol_type = other DNA
gctgactggtcgggcacgataaaaattggatccagcctaagtgcatcatttaataattcaggttcaattagtacc

SEQ ID NO: 781253 - DNA, 75 bp, synthetic construct
  source 1..75: mol_type = other DNA
ttaaaggatttagttatagcgatcgcctggcagcactggcgtatcgggcaggaaattattcgttagcacaaacgc

SEQ ID NO: 781254 - DNA, 75 bp, synthetic construct
  source 1..75: mol_type = other DNA
ggaccatttattcccaatcatctgttaactgaccgcaatagcgcactgctggaaatgccaaatggcagttttgtc

SEQ ID NO: 781255 - DNA, 75 bp, synthetic construct
  source 1..75: mol_type = other DNA
tcagggaaaatacgatagcccttactttcagcaattattagccttgccgaaaacagagcaaggggaatggcgtct

SEQ ID NO: 781256 - DNA, 75 bp, synthetic construct
  source 1..75: mol_type = other DNA
agagaacaatgttagccggactaattgcggggcttatgttgccaaccgtacctgctcttgcccaagtatttaatg

SEQ ID NO: 781257 - DNA, 75 bp, synthetic construct
  source 1..75: mol_type = other DNA
ggtgaaaacataatcctgtttaaccctgacacagttgaagcatacgcaaaacgtgcggaaatatcacctaaacca

SEQ ID NO: 781258 - DNA, 75 bp, synthetic construct
  source 1..75: mol_type = other DNA
gtgtggccgcagtgctggcgctggcggcactgatgcctgattttcgtctgctgaatacctcgcctgatggtctgg

SEQ ID NO: 781259 - DNA, 75 bp, synthetic construct
  source 1..75: mol_type = other DNA
aattaaagatctaatgtcccagagtaccggctgtaacctctgtaaggtgttgaagcaatttgacagttctagggg

SEQ ID NO: 781260 - DNA, 75 bp, synthetic construct
  source 1..75: mol_type = other DNA
ttgatatgccatttgagcagtcggtgcatgacaccctggaaaccctgacccggatgattcaggaccggtgctggc

SEQ ID NO: 781261 - DNA, 75 bp, synthetic construct
  source 1..75: mol_type = other DNA
cattaaagattaagccgggccatacgctaggcgtcattgatgccatgttggttcatgaaatggcgaaggctttat

SEQ ID NO: 781262 - DNA, 75 bp, synthetic construct
  source 1..75: mol_type = other DNA
agtctgaacgcgcgtaatactaatgagaacggtattgctgaagttacccttaagggcactgttttgggtgttcat

SEQ ID NO: 781263 - DNA, 75 bp, synthetic construct
  source 1..75: mol_type = other DNA
tattcaaggcgggattcaggaagttggtgaggggggaagtgcaagtggtaccactataaataattctggtatcca

SEQ ID NO: 781264 - DNA, 75 bp, synthetic construct
  source 1..75: mol_type = other DNA
gtctcagggactctcattaataacggggagcagcgagtctccagtggtggcagtgctattgacacaaccattaac

SEQ ID NO: 781265 - DNA, 75 bp, synthetic construct
  source 1..75: mol_type = other DNA
cttgctaccgggaccatcattcgtggcggggagcagcgagtttccagcggcggcagtgccgttgacaccaccatt

SEQ ID NO: 781266 - DNA, 75 bp, synthetic construct
  source 1..75: mol_type = other DNA
taaccttcttaatgaggcagtagctgtcaatacgtataacttcttccgtcatccgctcaatgtgtcggctcttaa

SEQ ID NO: 781267 - DNA, 75 bp, synthetic construct
  source 1..75: mol_type = other DNA
accggtttaccagtgaccaccgcctgcggcggctatgacggctggattggtgactttatcgaagagcgtcgtctt

SEQ ID NO: 781268 - DNA, 75 bp, synthetic construct
  source 1..75: mol_type = other DNA
cttctctgataacaatatcaggcataatcgaggagggaaaagttctattgatagtaaaagtgttggcttgtacat

SEQ ID NO: 781269 - DNA, 75 bp, synthetic construct
  source 1..75: mol_type = other DNA
ctgacttgtacgccacaggatgattcccagtatccagggatggatacaaagacagcaagtgattacctgccacag

SEQ ID NO: 781270 - DNA, 75 bp, synthetic construct
  source 1..75: mol_type = other DNA
atgttaccgtgcacgacctttacgcgcactatcccgattttttattgatatcccccgtgagcaggcattactgcg

SEQ ID NO: 781271 - DNA, 75 bp, synthetic construct
  source 1..75: mol_type = other DNA
gctctggaccaacccatattctcttgcggcccgaaaaggagaccgaacctgcccctgacacccgttcgctaggca

SEQ ID NO: 781272 - DNA, 75 bp, synthetic construct
  source 1..75: mol_type = other DNA
attacggataagggttatgtcacgagttcaatcgtcgccattttaggctatcaggcgggcagtaatggccaggtt

SEQ ID NO: 781273 - DNA, 75 bp, synthetic construct
  source 1..75: mol_type = other DNA
aactgacgcagataattgaaactattcgggagatttctgcgttccagaacaatgcccgcaaatctgaaattgtcg

SEQ ID NO: 781274 - DNA, 75 bp, synthetic construct
  source 1..75: mol_type = other DNA
cgttctcaccggtcctgtcgggttagccctcaccggtttatataccgcttatgatatttccaacccggcgttccg

SEQ ID NO: 781275 - DNA, 75 bp, synthetic construct
  source 1..75: mol_type = other DNA
taatgttcatttagaaggcattgatcaattcgacgaactaatcttgaggtgctacctccaactctgttcagatgt

SEQ ID NO: 781276 - DNA, 75 bp, synthetic construct
  source 1..75: mol_type = other DNA
atatgccaagtttgagtatactggcagcataaaaaactacattcattatatcaataatgtttatatgaactcgct

SEQ ID NO: 781277 - DNA, 75 bp, synthetic construct
  source 1..75: mol_type = other DNA
actatgttaagtatccagatttcaggtgtgacagttggctttttgcttagcttatggacagcctcaaaactggcg

SEQ ID NO: 781278 - DNA, 75 bp, synthetic construct
  source 1..75: mol_type = other DNA
acctatgacttcgaacgtctgatggaaggcgctaaactgctgaaatgttcagagtttggtgacgcgatcatcaag

SEQ ID NO: 781279 - DNA, 75 bp, synthetic construct
  source 1..75: mol_type = other DNA
acccgcatcatgtgtatcagccataccgcctgccggggcagcagtatgatgaggagtcggggctgtactataacc

SEQ ID NO: 781280 - DNA, 75 bp, synthetic construct
  source 1..75: mol_type = other DNA
tcatccgtatcgagacagagaacggcgaacgggagaaaatgcagcgccgcagcctagcggagaagttacagtcgg

SEQ ID NO: 781281 - DNA, 75 bp, synthetic construct
  source 1..75: mol_type = other DNA
ggccgccggacggggaaacgggtgtggcgtcgcgagagtgacctgacgggatggatgtcgctgtcgcgtaaaccg

SEQ ID NO: 781282 - DNA, 75 bp, synthetic construct
  source 1..75: mol_type = other DNA
caagagaatattccggctatatttgataataacaggactttttatgtgtcattagttggtgagcgcaattcttcg

SEQ ID NO: 781283 - DNA, 75 bp, synthetic construct
  source 1..75: mol_type = other DNA
aatgtatggcgcactccgcaatggcacgtaaagagtcccgcggcgcacaccagcgtctggacgaaggttgcacca

SEQ ID NO: 781284 - DNA, 75 bp, synthetic construct
  source 1..75: mol_type = other DNA
gagtgcctgtagcaggaattttgattctatattctaaagaatgtttattactatttggaaatgatttctatcaat

SEQ ID NO: 781285 - DNA, 75 bp, synthetic construct
  source 1..75: mol_type = other DNA
gttgtggctgacattccaggatggaaatctgactccgatggggaaacagtgccggaagtatctcactgacaccat

SEQ ID NO: 781286 - DNA, 75 bp, synthetic construct
  source 1..75: mol_type = other DNA
tttgttagttcaacacaaaacgccacaatctcctgggattatttactaaaaataacacctgttttaataagcatt

SEQ ID NO: 781287 - DNA, 75 bp, synthetic construct
  source 1..75: mol_type = other DNA
tgttttgttagtatttttattgtttggatatattggtgatattagaactggtagacaactatttatacaattggc

SEQ ID NO: 781288 - DNA, 75 bp, synthetic construct
  source 1..75: mol_type = other DNA
atgtattagcacagattcccatggcagttttattcttcaataataaaaaattgaattatatttatgactctaata

SEQ ID NO: 781289 - DNA, 75 bp, synthetic construct
  source 1..75: mol_type = other DNA
aaggtaaaattgaaataaaagcacccaaacaaaaagatagttataagaagtatttgcataatgggtatataaaaa

SEQ ID NO: 781290 - DNA, 75 bp, synthetic construct
  source 1..75: mol_type = other DNA
aaagatattgcagagaagatacaaaaacagggaggtgattatttattcgctgtaaaaggaaaccaggggcggcta

SEQ ID NO: 781291 - DNA, 75 bp, synthetic construct
  source 1..75: mol_type = other DNA
ggcgtgccgggtgtgggtaaaacggccaccgcccgtaattactgccaggagcaaccaaacacctggatgatcacc

SEQ ID NO: 781292 - DNA, 75 bp, synthetic construct
  source 1..75: mol_type = other DNA
ggtatcctcgacggcgaaacactctttgcacaagttcaattcgacggtttcaattactatattatctataatgat

SEQ ID NO: 781293 - DNA, 75 bp, synthetic construct
  source 1..75: mol_type = other DNA
caggagagcaaatttgcccaggccacgttgcagtggggcggaccgtggggaacgacatggtatggtggtggataa

SEQ ID NO: 781294 - DNA, 75 bp, synthetic construct
  source 1..75: mol_type = other DNA
gttgcaggtactgcgtctgcttaaacataaagcccgcgccagtggaactgcggtactgttcatcagccatgatat

SEQ ID NO: 781295 - DNA, 75 bp, synthetic construct
  source 1..75: mol_type = other DNA
tgaaccacaaaaaaccgtttgcccttactgtgcaacagtaataaagaatttcgatgataattttttgggtgaaat

SEQ ID NO: 781296 - DNA, 75 bp, synthetic construct
  source 1..75: mol_type = other DNA
cccggaaaacatcagtataaaaatgcccgtcaggagcataccagcctgccgaatctgcttgagcgtcagtcggcg

SEQ ID NO: 781297 - DNA, 75 bp, synthetic construct
  source 1..75: mol_type = other DNA
ttgattctatagatagcaccgcatatgacgccttaaataaaataaatagccaatctatttgcgaagataaagagt

SEQ ID NO: 781298 - DNA, 75 bp, synthetic construct
  source 1..75: mol_type = other DNA
gccggaggccaccggctgaaacaggccggaaacacgcagtatgactatgacgccgcaggccggatggtcagccgc

SEQ ID NO: 781299 - DNA, 75 bp, synthetic construct
  source 1..75: mol_type = other DNA
tggcgaccgggacagaccagcctgtgggggctggcactcagcctgcccgcagacaccggctacccggacccgcgc

SEQ ID NO: 781300 - DNA, 75 bp, synthetic construct
  source 1..75: mol_type = other DNA
tccgggaataccacgatgataaactgtacagcgtaaggcacctggtgtttaacggctttgagctgataagccagc

SEQ ID NO: 781301 - DNA, 75 bp, synthetic construct
  source 1..75: mol_type = other DNA
caaacggtacttttatcaggggtactaagcataatatcgctttttataatgacaataagtatatttatttttggg

SEQ ID NO: 781302 - DNA, 75 bp, synthetic construct
  source 1..75: mol_type = other DNA
tcgtcgattctattattattgccttttttattgttggttatttattaaatgaggccggttttgttagtgttgact

SEQ ID NO: 781303 - DNA, 75 bp, synthetic construct
  source 1..75: mol_type = other DNA
gaaacaggagctcataaaacaccagacctcaaagttgttaaaggcactgatattttttatgttgagtgcaagcga

SEQ ID NO: 781304 - DNA, 75 bp, synthetic construct
  source 1..75: mol_type = other DNA
ggaaggcgcaatcaatgcgaagaccgtaacctatgacttcgaacgtctgatggaaggcgctaaactgttgaaatg

SEQ ID NO: 781305 - DNA, 75 bp, synthetic construct
  source 1..75: mol_type = other DNA
atgactaatccaatcggtatcaataatttatctcaaagttcaaatatagcgaatgcaacgggtgatgaagtcgta

SEQ ID NO: 781306 - DNA, 75 bp, synthetic construct
  source 1..75: mol_type = other DNA
cgctccttaggttagttataataggtggtattgctatagttttctcccaaacattgttattatttagagcggatt

SEQ ID NO: 781307 - DNA, 75 bp, synthetic construct
  source 1..75: mol_type = other DNA
cagacgtgcaaacaggcgcttaagttctgccggaggcggcgctatgcaatcagcaacgttcttgatgatatgagt

SEQ ID NO: 781308 - DNA, 75 bp, synthetic construct
  source 1..75: mol_type = other DNA
ttgaagaacaggcggcacgattaactgaggcggtggatgtattccgtctgcacaaacattctgtgtcggcagaac

SEQ ID NO: 781309 - DNA, 75 bp, synthetic construct
  source 1..75: mol_type = other DNA
taccagagatcttattgctgttacaaaactcgatttcaataatttaattcaagggcatttttatgaatatatgat

SEQ ID NO: 781310 - DNA, 75 bp, synthetic construct
  source 1..75: mol_type = other DNA
ggcacttgaagagcaggccgggttgctgcaacagtctgtatcagtattcaggctccgggacgacaacctggttgt

SEQ ID NO: 781311 - DNA, 75 bp, synthetic construct
  source 1..75: mol_type = other DNA
tggggcaacctgctgaatgaagagaccccgcatcagctgcagcagcttatccgcctgccggggcagcagtatgat

SEQ ID NO: 781312 - DNA, 75 bp, synthetic construct
  source 1..75: mol_type = other DNA
gagatcggttcagcaaaacctgcttatatttgtcagggttgggggccacaacgacattccaacggcgagcaaaca

SEQ ID NO: 781313 - DNA, 75 bp, synthetic construct
  source 1..75: mol_type = other DNA
tttacatggacagatgccatcgaccatggtaaggaaatgaccgcgacccgtgatggtgttcgtggaaaagaaaaa

SEQ ID NO: 781314 - DNA, 75 bp, synthetic construct
  source 1..75: mol_type = other DNA
caataacggtatggcggcctcaggttttggaacgggaggcaaataccagcaggcgatacaggctgcaacggcagc

SEQ ID NO: 781315 - DNA, 75 bp, synthetic construct
  source 1..75: mol_type = other DNA
tcgaactggaccctaacgctgatatcgatgctttacccgacggcatctacgcccaggtggcagtttactccgacc

SEQ ID NO: 781316 - DNA, 75 bp, synthetic construct
  source 1..75: mol_type = other DNA
aaagccggttttgtcgctgtatttaattctgcgtcagaaaaatggtcacttgttgaagaccatcgcgggaaaatt

SEQ ID NO: 781317 - DNA, 75 bp, synthetic construct
  source 1..75: mol_type = other DNA
tgaactgagtgagacagagaaacagacggtctccacgctggcaacggttgctgccggcctggccggcggtctggt

SEQ ID NO: 781318 - DNA, 75 bp, synthetic construct
  source 1..75: mol_type = other DNA
gacagtaccacgcagtcggcagtgtctgcagggaatatcaccatccgggatacgcagagccagaaacaggatgtg

SEQ ID NO: 781319 - DNA, 75 bp, synthetic construct
  source 1..75: mol_type = other DNA
atggaatcagtatgctgatgccaataatctcaccccggaacagaagcaggcaggactggataaacttgccaaagg

SEQ ID NO: 781320 - DNA, 75 bp, synthetic construct
  source 1..75: mol_type = other DNA
tgcccgggaaaagcacttgcgccggtggaaatagtagtgggaggcgtgacaggagcaggcacaatgaaaggggag

SEQ ID NO: 781321 - DNA, 75 bp, synthetic construct
  source 1..75: mol_type = other DNA
acaaaaacttgctgacattcgtaaaataaacacacagcgtctgcatgctgagaaacgctgccagacagtattggc

SEQ ID NO: 781322 - DNA, 75 bp, synthetic construct
  source 1..75: mol_type = other DNA
agagttcagctggctgctcaataatcagccagggaactttcccttgctggagcagtatcttaatggtgtacataa

SEQ ID NO: 781323 - DNA, 75 bp, synthetic construct
  source 1..75: mol_type = other DNA
attccttatgtttcttcactgtgggtgggggaagacggtgtttttgaaaccgggcaaaatcaggatattcgttca

SEQ ID NO: 781324 - DNA, 75 bp, synthetic construct
  source 1..75: mol_type = other DNA
ttaacctcgaccagcttgtctccatgacctcagttgaaattgctgagctgacaggcaaggagcaccgaaatgtcc

SEQ ID NO: 781325 - DNA, 75 bp, synthetic construct
  source 1..75: mol_type = other DNA
catcaatgctttcatctttatgcgtaacgacgcaatcgtccgagagcgtgtagcggtcaaacaggctgacgaggc

SEQ ID NO: 781326 - DNA, 75 bp, synthetic construct
  source 1..75: mol_type = other DNA
cgcacacaacttgaccgctccggaaatttccggaccgtgaatggtgacggcggtggtacatgggcgaccgaggct

SEQ ID NO: 781327 - DNA, 75 bp, synthetic construct
  source 1..75: mol_type = other DNA
tcgaaatgatgacaaatatgtgatatggattatatactcactttccgataataaattaaatttatctgactatcc

SEQ ID NO: 781328 - DNA, 75 bp, synthetic construct
  source 1..75: mol_type = other DNA
atgtgtctccggaagataaggtaataatcgagggtgaacttgataaagacctgaacagtgttgaactggatgtaa

SEQ ID NO: 781329 - DNA, 75 bp, synthetic construct
  source 1..75: mol_type = other DNA
tacaggtacggggccgcagggggctatcaaacgcgaactgttttctgacaaagaaagtctgtggggatacagcat

SEQ ID NO: 781330 - DNA, 75 bp, synthetic construct
  source 1..75: mol_type = other DNA
atatcagcagtggcgatgatttacatattggcggtagtgatgccagccagaatggcgtttatgtcgtcattaatg

SEQ ID NO: 781331 - DNA, 75 bp, synthetic construct
  source 1..75: mol_type = other DNA
gattattatactattttagatgagattttatttgatattccagttgaaaaacagataaatttcatcgagtattgg

SEQ ID NO: 781332 - DNA, 75 bp, synthetic construct
  source 1..75: mol_type = other DNA
atgacaaaagagcagatgacggaacgccttcaggacctggcagtgattctggggcgtgaagcagatatttcaggt

SEQ ID NO: 781333 - DNA, 75 bp, synthetic construct
  source 1..75: mol_type = other DNA
cgcccagaagtggcgagagctaatcgctaatggcgaccgtttaaaagctgctgagcgtcgagcacagaagcgtct

SEQ ID NO: 781334 - DNA, 75 bp, synthetic construct
  source 1..75: mol_type = other DNA
gccggaagaagacgttcgcccaccttggtgttaacgggcgtactgaacatccgtttgagctggaagaggatgtct

SEQ ID NO: 781335 - DNA, 75 bp, synthetic construct
  source 1..75: mol_type = other DNA
gggtgctaacgaagggatgaatcatgtgaaagtcttctcgcagctggcgcgtaaactggtgaataaaaacttccg

SEQ ID NO: 781336 - DNA, 75 bp, synthetic construct
  source 1..75: mol_type = other DNA
agccgtgaagaagttcttaacgaactgtgggaactcaaaaaaatggcgttgttgataaaacgggtcacacctggt

SEQ ID NO: 781337 - DNA, 75 bp, synthetic construct
  source 1..75: mol_type = other DNA
tcgacaacagccagccaccgcttagcgaggtaaatcaggagaagtttaacaatatcaagaaagcactaagcgaag

SEQ ID NO: 781338 - DNA, 75 bp, synthetic construct
  source 1..75: mol_type = other DNA
gggaagatgcgtgatctgatccttcaactcagcaaaagttcgatttattcaacaaagcccccgacagctcttgat

SEQ ID NO: 781339 - DNA, 75 bp, synthetic construct
  source 1..75: mol_type = other DNA
gcgtaaactggtgaataaaaacttccgccagtcattgtttgccgcgcaagatgcgcaaagcatcctgacgctgct

SEQ ID NO: 781340 - DNA, 75 bp, synthetic construct
  source 1..75: mol_type = other DNA
caaggcatttttgaacgtgcggactgggaagcgtctctccaggggctggagcgtattttcccgacagtgtcataa

SEQ ID NO: 781341 - DNA, 75 bp, synthetic construct
  source 1..75: mol_type = other DNA
cggaggaagtgctcaggagatatagacaactttcattcggtgaaactgataagatttcgagatcacaacgactca

SEQ ID NO: 781342 - DNA, 75 bp, synthetic construct
  source 1..75: mol_type = other DNA
aaataacagaattgatgatagattgttgctacgcccttttccccaacactcaagtaaacaatcattgtctgcgtt

SEQ ID NO: 781343 - DNA, 75 bp, synthetic construct
  source 1..75: mol_type = other DNA
agtcgtgaagaagtgctgaacgagctgtgggaactgaaaagaaatggcgttgttgataaacgggtcacatctggt

SEQ ID NO: 781344 - DNA, 75 bp, synthetic construct
  source 1..75: mol_type = other DNA
aaaatatgcacaactaccaggaacttatcaggttgatatctggctgaataaaaagaaggtttcacagaaaaaaat

SEQ ID NO: 781345 - DNA, 75 bp, synthetic construct
  source 1..75: mol_type = other DNA
gttatgtgatctatcaaagcaacgtgtcaggggtgcctttgaaattaacgatctctacccctcttccaacagcgg

SEQ ID NO: 781346 - DNA, 75 bp, synthetic construct
  source 1..75: mol_type = other DNA
cctgcaagagagccgacgccgaggcgataccgatttgcccgaactgagcgtcgcccagattgaacagcagcttaa

SEQ ID NO: 781347 - DNA, 75 bp, synthetic construct
  source 1..75: mol_type = other DNA
ctgattcactcgtttctgaactggaaatcgctggtagcgattgccgtgggagtgattgtctcctggcttggcgga

SEQ ID NO: 781348 - DNA, 75 bp, synthetic construct
  source 1..75: mol_type = other DNA
cttattcactcgtttctgaactggaaatcgctggtggcaattgcagtaggcgttattgtctcctggcttggcgga

SEQ ID NO: 781349 - DNA, 75 bp, synthetic construct
  source 1..75: mol_type = other DNA
ctcgaacgccgtatctccgccgtttataaagacattcccggcggccagctgcttggcccaacctacgactacacc

SEQ ID NO: 781350 - DNA, 75 bp, synthetic construct
  source 1..75: mol_type = other DNA
tggcggcgctggcgctgaaacaggccagcggcgataacgttgaagcgattttcctgctgcgcgcctaccgcacca

SEQ ID NO: 781351 - DNA, 75 bp, synthetic construct
  source 1..75: mol_type = other DNA
gctctgcaagccccggagtacggcgagcacgcgacaggcccggcgcaggatgaagagttcgtgctggcacatgcc

SEQ ID NO: 781352 - DNA, 75 bp, synthetic construct
  source 1..75: mol_type = other DNA
aagggagattctttattttctgatggtgaataccgacatgcagctattgtttccgcagctgtatatttcgctgca

SEQ ID NO: 781353 - DNA, 75 bp, synthetic construct
  source 1..75: mol_type = other DNA
tgagaaccgatttatctgcaacgctagagctgctgcgttctggtgaaagtgtaactgtcactcagcggggtaagc

SEQ ID NO: 781354 - DNA, 75 bp, synthetic construct
  source 1..75: mol_type = other DNA
cgtttgtttcttatggcgttggtgtcgatggagatatgacttcgcacaatccgacttatcttgcccgtaataatg

SEQ ID NO: 781355 - DNA, 75 bp, synthetic construct
  source 1..75: mol_type = other DNA
gacatcgttacggtgaaagaagcgacggacgccctgctgcattgtgcggaacagcttcgcaaaggaggcaaccag

SEQ ID NO: 781356 - DNA, 75 bp, synthetic construct
  source 1..75: mol_type = other DNA
atgaatatcgcaattgtgacaataaatcaggagaatgccgcaatagcaagctggctggcggcgcaggatttcagc

SEQ ID NO: 781357 - DNA, 75 bp, synthetic construct
  source 1..75: mol_type = other DNA
atgcgcatgaatgttttcgaaatggaagggtttcttcgcgggaaatgtgtaccacgagatttaaaagttaacgaa

SEQ ID NO: 781358 - DNA, 75 bp, synthetic construct
  source 1..75: mol_type = other DNA
ccggtgaaggtaaatgggcgctacgtgatggacccgtcgccgatcccgaaattcgataacccaaaaatggacatg

SEQ ID NO: 781359 - DNA, 75 bp, synthetic construct
  source 1..75: mol_type = other DNA
ttgttgtttgccacgtaatggtatttataaaaaacatatagatatttggtttcccttcccgttgaatgtagaacc

SEQ ID NO: 781360 - DNA, 75 bp, synthetic construct
  source 1..75: mol_type = other DNA
tgaataaagttttccttgaaaataaatactctgatattgaaggtgctatttctgaaataataaaagaaatgataa

SEQ ID NO: 781361 - DNA, 75 bp, synthetic construct
  source 1..75: mol_type = other DNA
atgtaccgcagttttacttatctcattggctcggtcgagaaggtatattggtgcggaataatatattctaaaaag

SEQ ID NO: 781362 - DNA, 75 bp, synthetic construct
  source 1..75: mol_type = other DNA
tgaacgacattatcactctcggcgctacctcatggcggatccagcaaatcacccgcgatcaggtgattgtgactc

SEQ ID NO: 781363 - DNA, 75 bp, synthetic construct
  source 1..75: mol_type = other DNA
ccgtggcggcgggcagtcgtctgagtttttccagtacagcgcgcaactataacggcacttacagcgcccagcgtc

SEQ ID NO: 781364 - DNA, 75 bp, synthetic construct
  source 1..75: mol_type = other DNA
tgtcagcctgttacatggtgtgattcgccggattgctgatctgaaagattacgaagaatcagagcgtgtggctgc

SEQ ID NO: 781365 - DNA, 75 bp, synthetic construct
  source 1..75: mol_type = other DNA
atttatataaccttggaccgtttccggaaggaatacctttcagagtcaaaatcgtttcagcatggcgatccagaa

SEQ ID NO: 781366 - DNA, 75 bp, synthetic construct
  source 1..75: mol_type = other DNA
gaaatagagatggttaaaagccgcatggctgatctgtttaaccagatggataatgttgcgcgggaaaaatatctc

SEQ ID NO: 781367 - DNA, 75 bp, synthetic construct
  source 1..75: mol_type = other DNA
gattccggctggcatttttacagccagagaaataccgatggcagtatcacattcgctgtaaacggacagatgacc

SEQ ID NO: 781368 - DNA, 75 bp, synthetic construct
  source 1..75: mol_type = other DNA
caacgtcacatggaactctgaacctccagagtctgcaccggaacataccgaccgtcggacaaccttatcgctggg

SEQ ID NO: 781369 - DNA, 75 bp, synthetic construct
  source 1..75: mol_type = other DNA
ctccgttaatcctgtcagttgttatattttttgtatttctcctttttattaataaaagaatgaatcaattctctt

SEQ ID NO: 781370 - DNA, 75 bp, synthetic construct
  source 1..75: mol_type = other DNA
ttattcccaaccttcttatcattaatgcttatactttattgctttgataaaaagattacgcgaaagcgtatatca

SEQ ID NO: 781371 - DNA, 75 bp, synthetic construct
  source 1..75: mol_type = other DNA
tcagtttattatggatgcgttctttgacttgaagtgtgtgcggcccatgcctgtatactctgtaccaggtcttat

SEQ ID NO: 781372 - DNA, 75 bp, synthetic construct
  source 1..75: mol_type = other DNA
acgatgtgcatgcaagagtgcccaccgacatcaccacagaagccctgcagcgtatcggtgaactgtatgccatag

SEQ ID NO: 781373 - DNA, 75 bp, synthetic construct
  source 1..75: mol_type = other DNA
ccgtctgaacaatgtggagccagaaaaatggctgcgttacgtcattgatcatatccaggactggccggcaaaccg

SEQ ID NO: 781374 - DNA, 75 bp, synthetic construct
  source 1..75: mol_type = other DNA
cctgttcttcggctctgaccatggtggtgagcggggagcgctactgtacagcctgatcgggacgtgcaaactgaa

SEQ ID NO: 781375 - DNA, 75 bp, synthetic construct
  source 1..75: mol_type = other DNA
cgaaagatgtagcacatctggcagcagagactctaaacaacccaaacgcctctgcgattcagaaaagtttagcgg

SEQ ID NO: 781376 - DNA, 75 bp, synthetic construct
  source 1..75: mol_type = other DNA
gcgccgctgggatgtgctgaatcgtaagcccgcaccgtttgatgtggcgcaggctcgcgccagcttgccagtaca

SEQ ID NO: 781377 - DNA, 75 bp, synthetic construct
  source 1..75: mol_type = other DNA
aagccatcttctggctgaaaaaagctgccctacaaggccatactttcgcttccaacgcccttggctggacactgg

SEQ ID NO: 781378 - DNA, 75 bp, synthetic construct
  source 1..75: mol_type = other DNA
gtgacgccggttattgatggtcaggatggcacaccgttcacgctgacgcagtcaccggtcagtgcatttgcggcg

SEQ ID NO: 781379 - DNA, 75 bp, synthetic construct
  source 1..75: mol_type = other DNA
aatccgctgctcggtgcaaaggtccttcccggtgaaaccgacatcgccctgcccggcccgctgccgttcatcctc

SEQ ID NO: 781380 - DNA, 75 bp, synthetic construct
  source 1..75: mol_type = other DNA
atccgctgcagcttacgggtttccactataaatctcgcgttcactcaacttacggcaacgttgatgtgctgaaag

SEQ ID NO: 781381 - DNA, 75 bp, synthetic construct
  source 1..75: mol_type = other DNA
ctattactacacctctcccaatggcggtactgagaccgtgcagcttaaggcgcggtattaccagaccgcagccac

SEQ ID NO: 781382 - DNA, 75 bp, synthetic construct
  source 1..75: mol_type = other DNA
ggcagcattcacccggacggcctgacaaagaaatttgtcgcagccagaaaattaacaggtatcactgttcagtga

SEQ ID NO: 781383 - DNA, 75 bp, synthetic construct
  source 1..75: mol_type = other DNA
agatttcagagttattatggcgagtatctaagcctagctctgattccttgctttctatggccgtagctgttgaag

SEQ ID NO: 781384 - DNA, 75 bp, synthetic construct
  source 1..75: mol_type = other DNA
ggtcgccaggcgaagaagttcagacaatgtgcccgatgtcggtattcgtattgaaaatctcggcggcggagttgc

SEQ ID NO: 781385 - DNA, 75 bp, synthetic construct
  source 1..75: mol_type = other DNA
caaacctgtaagccagacttacaagttgaacaagctgtcgggcaactatccggtaattccggatagttggataag

SEQ ID NO: 781386 - DNA, 75 bp, synthetic construct
  source 1..75: mol_type = other DNA
agtattacgaaggtgttatctcggatggaagtaagcgtattgctgaactggagaaaagcgaagagcaactcatca

SEQ ID NO: 781387 - DNA, 75 bp, synthetic construct
  source 1..75: mol_type = other DNA
atatgtattttgcagcaaccggggataggccggagtggagcaacttgttcggcttttcagatgctgtagatgccg

SEQ ID NO: 781388 - DNA, 75 bp, synthetic construct
  source 1..75: mol_type = other DNA
atgagtaaatttggtcgcaaagtgcccagtaattcaaaaagtcagcataatttttcagttatcccgagtgccaac

SEQ ID NO: 781389 - DNA, 75 bp, synthetic construct
  source 1..75: mol_type = other DNA
caatgcttattgatacaggtgtgttaaccaactataagaataaagcaacaaatttaagagatatttttcttatga

SEQ ID NO: 781390 - DNA, 75 bp, synthetic construct
  source 1..75: mol_type = other DNA
caggtcaagacggtggtcctgatcgcgctgatcgcactctcccgcaagttcgtgatcctcgactccgacgcgagc

SEQ ID NO: 781391 - DNA, 75 bp, synthetic construct
  source 1..75: mol_type = other DNA
tcaccgccagcaattattgtcaggagcaaccgaacacctggatgatcaccctgtctcccgcgcattccagcgtca

SEQ ID NO: 781392 - DNA, 75 bp, synthetic construct
  source 1..75: mol_type = other DNA
gccatcgtaacattcagcacacggtgcactatactcaaagtaatcctagtcgatttaaaagaatatggaatcctc

SEQ ID NO: 781393 - DNA, 75 bp, synthetic construct
  source 1..75: mol_type = other DNA
agttaatctggtcggtggtgagctggaaacaggaaaatttcagggcacagccaccattaccgtcatcgtgcggta

SEQ ID NO: 781394 - DNA, 75 bp, synthetic construct
  source 1..75: mol_type = other DNA
cttcgaacgtctgatggaaggcgctaaactgctgaaatgttcagcgagtttggtgacgcgatcatcaagaatatg

SEQ ID NO: 781395 - DNA, 75 bp, synthetic construct
  source 1..75: mol_type = other DNA
tggatccctttgcccgagccatttctccttttgaggaaatggcggcttatgaggcgttatggtcagaaaaaggcg

SEQ ID NO: 781396 - DNA, 75 bp, synthetic construct
  source 1..75: mol_type = other DNA
ttggtcgtgtcgggggtgaagcatgccgctaataaaaagaaaaataaagaggttattaaagacttaaaaaaagat

SEQ ID NO: 781397 - DNA, 75 bp, synthetic construct
  source 1..75: mol_type = other DNA
catttatatatggaagattataatctttggctaagaatgcttgcgaacaataaaatttgcctaaacattagcgat

SEQ ID NO: 781398 - DNA, 75 bp, synthetic construct
  source 1..75: mol_type = other DNA
aatggacaccgatgatatatgctttgagaggcgttttgaaaggcaatttgatattttaagatctgatcctaaaat

SEQ ID NO: 781399 - DNA, 75 bp, synthetic construct
  source 1..75: mol_type = other DNA
atggctaaagactcaaagctggtatatggcgcgagtggcaaaacgaacgttttagcgtttgaacctgaaaaactg

SEQ ID NO: 781400 - DNA, 75 bp, synthetic construct
  source 1..75: mol_type = other DNA
atggctaaagactcaaaggtggtatacggcgccagcggcaaaacgaatgttttaacgttcgaacctgaaaacctg

SEQ ID NO: 781401 - DNA, 75 bp, synthetic construct
  source 1..75: mol_type = other DNA
gatgtcgaaaattaacgacgccattcagcatgtacgcgatggtaaagctcgctaccgagtagtcctgaaagccga

SEQ ID NO: 781402 - DNA, 75 bp, synthetic construct
  source 1..75: mol_type = other DNA
gcgaccaggagaacgaggagattgcgcttacggttgggaagctgcgtgttgagcttgaagcagcaaaatcaaaac

SEQ ID NO: 781403 - DNA, 75 bp, synthetic construct
  source 1..75: mol_type = other DNA
agagatgcagacaaaatctgcaccagattcgtttggcatcatcggtgaaaatattcgaacacaggataatcgaat

SEQ ID NO: 781404 - DNA, 75 bp, synthetic construct
  source 1..75: mol_type = other DNA
gaagtaagcacatagcagaactggaaaaacaatgcgccgaatgggagcgaaaagcattaagcaactttgaagagt

SEQ ID NO: 781405 - DNA, 75 bp, synthetic construct
  source 1..75: mol_type = other DNA
cgtgagcatgggatcaacgataatttgctgttcaagtggcgccagtactggcgcgaaggaaaactacgtcctcct

SEQ ID NO: 781406 - DNA, 75 bp, synthetic construct
  source 1..75: mol_type = other DNA
taaaatttgggaaaggtttaagagcgcgaataaaatattttattacttgagagacaatgatgaaaaattagcatt

SEQ ID NO: 781407 - DNA, 75 bp, synthetic construct
  source 1..75: mol_type = other DNA
catacgcattccaccatgctgattgttcatcattccggcaaggatcaggaccgtggtgctcgtggctccagtgcc

SEQ ID NO: 781408 - DNA, 75 bp, synthetic construct
  source 1..75: mol_type = other DNA
gtgaacgcaccggtaacctcgaagtcaaccaggctcagttccgcgagctggagatggcgcgcaacatgagtgcgc

SEQ ID NO: 781409 - DNA, 75 bp, synthetic construct
  source 1..75: mol_type = other DNA
tgatacaggaaatctgtcgtcaggcagatgtggaacccgggatattcacggtaatccacacatgggggagtgacc

SEQ ID NO: 781410 - DNA, 75 bp, synthetic construct
  source 1..75: mol_type = other DNA
aatatttatgcattttattctttcttatttatatcattgttattttttgtcgttgcaatcacctctaatataaaa

SEQ ID NO: 781411 - DNA, 75 bp, synthetic construct
  source 1..75: mol_type = other DNA
agtaccggcttacgccgggcttcggcggtttagctctgtgccatataaaacaacagagtgccgccttacatgccg

SEQ ID NO: 781412 - DNA, 75 bp, synthetic construct
  source 1..75: mol_type = other DNA
cgcccgtggactattgtttcacgtcacgccgctatggctgatagcctggtgccgtttcgcatcagcgattctgaa

SEQ ID NO: 781413 - DNA, 75 bp, synthetic construct
  source 1..75: mol_type = other DNA
aatcagaaagggaaaaaaactgagggccgccgcacattgccaccgctggctgctgtgccggtggttaaggagagc

SEQ ID NO: 781414 - DNA, 75 bp, synthetic construct
  source 1..75: mol_type = other DNA
gctgtgacattgttggcattaacatcgttgaaccgactgaaaccatcaagcaggtcacggcgctgggcgtcgttt

SEQ ID NO: 781415 - DNA, 75 bp, synthetic construct
  source 1..75: mol_type = other DNA
atgtactgcaccctggaggatttgcttgcgcaggtgccggagcggacgctgatcgagctcaccagtgaagagatg

SEQ ID NO: 781416 - DNA, 75 bp, synthetic construct
  source 1..75: mol_type = other DNA
ccggctcgctgcaaacaacatgcagatgctgctcgcggcagcgctgacaggggcgggggtggtctacggccctag

SEQ ID NO: 781417 - DNA, 75 bp, synthetic construct
  source 1..75: mol_type = other DNA
ctggacgcagtgaacgcggtggacgacatccgccgcatgtaccgcgcgtacgatcagaccgttctggcgcagttc

SEQ ID NO: 781418 - DNA, 75 bp, synthetic construct
  source 1..75: mol_type = other DNA
tcgctaaaagtagatctaaaagattacatccccagcattaccagcagggctatgaatggtttccgaaattcgtac

SEQ ID NO: 781419 - DNA, 75 bp, synthetic construct
  source 1..75: mol_type = other DNA
gggcgtaaacttaggccacacttttactgtacaaggaaaatatgccaattcagccgtgtcagttcccaatcctca

SEQ ID NO: 781420 - DNA, 75 bp, synthetic construct
  source 1..75: mol_type = other DNA
acgcttcaatgcagattttttgatcgataaaaatacagctgtgacaggagattatgccgatacattgacagcaat

SEQ ID NO: 781421 - DNA, 75 bp, synthetic construct
  source 1..75: mol_type = other DNA
cacgtcgtttctatcgttcagaagaaggcatcgtgctggtaacgcgcgaaatgctacggaagttagggcataaac

SEQ ID NO: 781422 - DNA, 75 bp, synthetic construct
  source 1..75: mol_type = other DNA
ggggccccctctcggccagccaggagctgactcaccaggcccttatccgcgggtatatcggactgtgggaaggct

SEQ ID NO: 781423 - DNA, 75 bp, synthetic construct
  source 1..75: mol_type = other DNA
cagcgggttatcagaaaccattgaggttatgaactcatataatgaaaggccttactggatttgcccctatatttc

SEQ ID NO: 781424 - DNA, 75 bp, synthetic construct
  source 1..75: mol_type = other DNA
agatattgcagtcaggtattactacaaaggcgttttgtggagtcctggctattttgccagtagctgcggaggtgc

SEQ ID NO: 781425 - DNA, 75 bp, synthetic construct
  source 1..75: mol_type = other DNA
agccttcaactctgcggtcgatcatcggctggcagaactgacaatgaacaagctttacgatcgcgtgccggcttc

SEQ ID NO: 781426 - DNA, 75 bp, synthetic construct
  source 1..75: mol_type = other DNA
atttcaataattacagataatgtcaatgttgaatattttgaatcaactatagttgcagttggacaaattccaaat

SEQ ID NO: 781427 - DNA, 75 bp, synthetic construct
  source 1..75: mol_type = other DNA
atgtttgatagaatatatcttggtgatcgagcaataaaaaaaattgaatttgatttatggagtaaacaaattaga

SEQ ID NO: 781428 - DNA, 75 bp, synthetic construct
  source 1..75: mol_type = other DNA
tactggtgctgacatgtctgagtggctgtaaggaaaaaaatctgctccaggagctggatcagtaccaggcgaatg

SEQ ID NO: 781429 - DNA, 75 bp, synthetic construct
  source 1..75: mol_type = other DNA
tgtgaaaggtgacggactgccgggtgaatcctggaaatcaaaaggacttaccgcctcactggaaacaggttatgc

SEQ ID NO: 781430 - DNA, 75 bp, synthetic construct
  source 1..75: mol_type = other DNA
gttacagtaccgggctgtatgctacctggtatgctgatgatgagactcataacggagcttatctggatacctggg

SEQ ID NO: 781431 - DNA, 75 bp, synthetic construct
  source 1..75: mol_type = other DNA
attctggccctgaatgcggcagtggaagcggctcgcgccggagagcaggggcgtggttttgcggtagtggcaggt

SEQ ID NO: 781432 - DNA, 75 bp, synthetic construct
  source 1..75: mol_type = other DNA
cgtttgacgttaactttgaggcctggcagctggagatcaaccatgtgctggaagccgccagtgcgcaaagccagc

SEQ ID NO: 781433 - DNA, 75 bp, synthetic construct
  source 1..75: mol_type = other DNA
acattatcagcgttatcgacggaattgctttccagaccaatattctggccctgaatgcggcagtggaagcggctc

SEQ ID NO: 781434 - DNA, 75 bp, synthetic construct
  source 1..75: mol_type = other DNA
gggttatggtgtcaccagtgctctttctccttatcatgaaaaccgtatcgcgctggatatcaacgatcttgagaa

SEQ ID NO: 781435 - DNA, 75 bp, synthetic construct
  source 1..75: mol_type = other DNA
gatggtcgtcggctgcttctcactgatactggtcgcgtcgtatttgagcgcgggctggctttactggctgagttt

SEQ ID NO: 781436 - DNA, 75 bp, synthetic construct
  source 1..75: mol_type = other DNA
tatctagatgagtccgcaaaaaaaataattgatgttgataatgaaaatggtataataaatttttcatcatgtgaa

SEQ ID NO: 781437 - DNA, 75 bp, synthetic construct
  source 1..75: mol_type = other DNA
aacttagaaagtattgccgctcaaaaaattagtgagttagctgtaagcattggaggaaggacaggaaaaatgcta

SEQ ID NO: 781438 - DNA, 75 bp, synthetic construct
  source 1..75: mol_type = other DNA
gtgagcaagattgactatcaggcactgcgtgaggcggcagaaaaagcaacgtgtggtgagtggtcgctcgaatat

SEQ ID NO: 781439 - DNA, 75 bp, synthetic construct
  source 1..75: mol_type = other DNA
tgttgagctggaaggcaaagacaagctgattgcagagcttggaaaacaatgcgccgaatgggagcgaaaagcatt

SEQ ID NO: 781440 - DNA, 75 bp, synthetic construct
  source 1..75: mol_type = other DNA
aagattacaaggatatatggacgcaatctaaaaaaatatggagtaaccttacagatgatgaaatcaagatattta

SEQ ID NO: 781441 - DNA, 75 bp, synthetic construct
  source 1..75: mol_type = other DNA
gcggatggactgcttcagatacgcgcgctttatattgacagtcaggcgcaggcaacacacaggttaaaaggtggg

SEQ ID NO: 781442 - DNA, 75 bp, synthetic construct
  source 1..75: mol_type = other DNA
aggcttcgaccaaaaactgataaacacgattttatctttacatcgagtcaacagtcagcgaagcctttgtcctat

SEQ ID NO: 781443 - DNA, 75 bp, synthetic construct
  source 1..75: mol_type = other DNA
tacagcacgttacatatcactggacctgatgccataatgaagtcgatgagagattattataattctctgggagcg

SEQ ID NO: 781444 - DNA, 75 bp, synthetic construct
  source 1..75: mol_type = other DNA
atgaattatatacaggagatttatcaaacaggagattagacattctcttctcaaaaaaacaagattgggatcata

SEQ ID NO: 781445 - DNA, 75 bp, synthetic construct
  source 1..75: mol_type = other DNA
actatatagtggaagtaaatggtgataattttatatacaaagttttcaaccctataaaaaacatatatgccagca

SEQ ID NO: 781446 - DNA, 75 bp, synthetic construct
  source 1..75: mol_type = other DNA
gcgatggataaagcggcggatgcacgcaccaaactggcgcgcctgctggcgaccaaaggcatcacccatgaaatc

SEQ ID NO: 781447 - DNA, 75 bp, synthetic construct
  source 1..75: mol_type = other DNA
gcaggatgtacagactacagctcgaatggcttagagcgaatcacggtgtaccagtaaactgggatgccgttaacc

SEQ ID NO: 781448 - DNA, 75 bp, synthetic construct
  source 1..75: mol_type = other DNA
tttctgtactgaaattcaaacaagcggtaacagcgctgatgaaagaacgcggtttccctttcgaggaaaaaaaga

SEQ ID NO: 781449 - DNA, 75 bp, synthetic construct
  source 1..75: mol_type = other DNA
gcgatgcctgaagagcatcatctctcatcattttccaccgttccgctggaagcgctacgtgacgagtattttgtt

SEQ ID NO: 781450 - DNA, 75 bp, synthetic construct
  source 1..75: mol_type = other DNA
tgccggagtgttcatgaacaaaatagcaggagcgcttaataccactgcgctcggcgttctgagcaacggtaacaa

SEQ ID NO: 781451 - DNA, 75 bp, synthetic construct
  source 1..75: mol_type = other DNA
actatgataattctgatttattaaagtcggtggagtatgcccagcagatcatatctgaaagtttgaagaagattt

SEQ ID NO: 781452 - DNA, 75 bp, synthetic construct
  source 1..75: mol_type = other DNA
acgctttctggtaccagtagccatctggcgcagggaacagaactcaccgttacgctaaacggcaaaacctacacc

SEQ ID NO: 781453 - DNA, 75 bp, synthetic construct
  source 1..75: mol_type = other DNA
tttagcgattaactcacgcaccgaagacgccgccaaaattgtgcaggagaaaaccggtggcgctcacgctgcggt

SEQ ID NO: 781454 - DNA, 75 bp, synthetic construct
  source 1..75: mol_type = other DNA
atttacaaaggatctattttctttcgctcaatttctaatgagtggaaagtattgcttaaagaaaaattatacgag

SEQ ID NO: 781455 - DNA, 75 bp, synthetic construct
  source 1..75: mol_type = other DNA
gggcacgagttcgcggataaaagggactccgttggtctccgctacaacgtggagttggccgaatcagccagcgaa

SEQ ID NO: 781456 - DNA, 75 bp, synthetic construct
  source 1..75: mol_type = other DNA
accggtgtccggtgcgccagcacaggcggctaattatgattctatgccgctggcaaagatgcaacccggcgaacg

SEQ ID NO: 781457 - DNA, 75 bp, synthetic construct
  source 1..75: mol_type = other DNA
tgcacaggcgttaggcgaagggaatcaggcagtgctggtcagtgggaaagacgtcacaggcaatacggtcaccgg

SEQ ID NO: 781458 - DNA, 75 bp, synthetic construct
  source 1..75: mol_type = other DNA
atgccatttaaaaaactctcccgacgcaccttcctgacggcaagctccgcgcttgccttcctccatacacctttc

SEQ ID NO: 781459 - DNA, 75 bp, synthetic construct
  source 1..75: mol_type = other DNA
aatagctggcttgaataccaagaattcgaataggtttaagtatatcgaacttatcttgcgatttttctcatttta

SEQ ID NO: 781460 - DNA, 75 bp, synthetic construct
  source 1..75: mol_type = other DNA
tgtcattttttattttacctgttcatgcgggtgtggtcatctatggtacgcgtattatctatccagaaaaaaaca

SEQ ID NO: 781461 - DNA, 75 bp, synthetic construct
  source 1..75: mol_type = other DNA
gacgcacggtacagggtgcgagtacgctgacgcaacagctggtgaaaaacctgttcctctccagcgagcgttctt

SEQ ID NO: 781462 - DNA, 75 bp, synthetic construct
  source 1..75: mol_type = other DNA
aatggtatttcaattttttctaccctgattccctaccagcagaagttacctatgtggagttattagataccgatg

SEQ ID NO: 781463 - DNA, 75 bp, synthetic construct
  source 1..75: mol_type = other DNA
taaagccaaaaatccccctatgtctatccatttttgctgggattcagtgattgataaaaaagtgtatgaaacctg

SEQ ID NO: 781464 - DNA, 75 bp, synthetic construct
  source 1..75: mol_type = other DNA
aacgccgcagtgggcttcgcaaattaccggtatcccggtggaccgtatcatcaaactggcgcgtgaaattggcac

SEQ ID NO: 781465 - DNA, 75 bp, synthetic construct
  source 1..75: mol_type = other DNA
atgccattctatttcaggaaggagtgtccgttaaactcaggctacctcaaacgcctgatgaactgctacggcggt

SEQ ID NO: 781466 - DNA, 75 bp, synthetic construct
  source 1..75: mol_type = other DNA
gacacccttgaactgaccgccgctgctgacatgcctgatgaagtgcgcgcaaagctgcacaaaatcaccggtctg

SEQ ID NO: 781467 - DNA, 75 bp, synthetic construct
  source 1..75: mol_type = other DNA
gtcgtcgaccgctttagtggtgaagttcgtgcgatggtcggtggttctgagccgcagtttgcgggctacaaccgt

SEQ ID NO: 781468 - DNA, 75 bp, synthetic construct
  source 1..75: mol_type = other DNA
cagactggatatcgcgtgcgccatgctgaaccacggattcggtagcaataccgtcatgaaaataaccggtctgac

SEQ ID NO: 781469 - DNA, 75 bp, synthetic construct
  source 1..75: mol_type = other DNA
gccgacattctgctgccagacctgatgaccgttgagcaggaagatattattcctaacgactacgccggtaacatg

SEQ ID NO: 781470 - DNA, 75 bp, synthetic construct
  source 1..75: mol_type = other DNA
cacctcggtcaagaagctcgcgaaggcatcatagaaaacctcatggtcgtgccgatcatgggaaaactaatggac

SEQ ID NO: 781471 - DNA, 75 bp, synthetic construct
  source 1..75: mol_type = other DNA
tgaatacatcgaagagctagctgataatctcggacttgaataccatccagatgaaccggaagagaatgattatga

SEQ ID NO: 781472 - DNA, 75 bp, synthetic construct
  source 1..75: mol_type = other DNA
acggaccttgcgctgcccggcccgctgccgttcattctctcccgcacctacagcagctaccggacccggacgcct

SEQ ID NO: 781473 - DNA, 75 bp, synthetic construct
  source 1..75: mol_type = other DNA
gagagatatgatttgataataaaaacatggtgtggagagtctggctggctaccttctgaatatgaatataacgaa

SEQ ID NO: 781474 - DNA, 75 bp, synthetic construct
  source 1..75: mol_type = other DNA
tggcgtggatctcaaaacagccagcggccgctataacgttcgtaacatcctttccgcagcacaatatgaatctga

SEQ ID NO: 781475 - DNA, 75 bp, synthetic construct
  source 1..75: mol_type = other DNA
actctgaatgcgggcgatacactggtggtgtggaagctggacaggataggccgcaacgttctgcatgcgctgttg

SEQ ID NO: 781476 - DNA, 75 bp, synthetic construct
  source 1..75: mol_type = other DNA
gtggtaagaagtgaagctgcgcgtctggacatcgtcgccgatacgctgcactttgagcaatttgttatcgaagac

SEQ ID NO: 781477 - DNA, 75 bp, synthetic construct
  source 1..75: mol_type = other DNA
ggacttagacggaggagataaggcattttactttgttgtgttcagggctttcagtgaaatttttcaccattgcct

SEQ ID NO: 781478 - DNA, 75 bp, synthetic construct
  source 1..75: mol_type = other DNA
agaaatgactaaaaacgcgaggcggcgtaatcggtttatccccgctggcgcggggaactcatcccataagcgcta

SEQ ID NO: 781479 - DNA, 75 bp, synthetic construct
  source 1..75: mol_type = other DNA
taacgaggcactggactgccgaaactacgcggtttatccccgctggcgcggggaactcatcctcttcgctgccga

SEQ ID NO: 781480 - DNA, 75 bp, synthetic construct
  source 1..75: mol_type = other DNA
gagaaattgtcattattatatcaatggggataaacagcccccacactttatttatttgaataatgacaataaaaa

SEQ ID NO: 781481 - DNA, 75 bp, synthetic construct
  source 1..75: mol_type = other DNA
gtggttcgcctgcactgtcggcattccgaatcaaacaaactgctggcacgttttcaggctgccaggctcccggtt

SEQ ID NO: 781482 - DNA, 75 bp, synthetic construct
  source 1..75: mol_type = other DNA
tcagggaaaagaaaaaactccgtttgcatgtaactagcgcttatcccatttctgaaaaacagaaaggtaaatcag

SEQ ID NO: 781483 - DNA, 75 bp, synthetic construct
  source 1..75: mol_type = other DNA
aacaacctgcaggggacggttatcgctgctcaggctttcaacttcaaccggtttaaccaggtggccgaaaacgcc

SEQ ID NO: 781484 - DNA, 75 bp, synthetic construct
  source 1..75: mol_type = other DNA
atgaatattgcagaccgctcactcgcactacttgacctagcgctgcgccgtcgtttcgcgtttatcgatctaaag

SEQ ID NO: 781485 - DNA, 75 bp, synthetic construct
  source 1..75: mol_type = other DNA
attcaaggtagagcatcctgagagcaaaacagttacaagctcaatctacttttatctacagaaactatgcaatga

SEQ ID NO: 781486 - DNA, 75 bp, synthetic construct
  source 1..75: mol_type = other DNA
ggcatattgcatggcgcagaccacttctcatgttttaaacgaaaagatgaatatccggggggggggggggcaaaa

SEQ ID NO: 781487 - DNA, 75 bp, synthetic construct
  source 1..75: mol_type = other DNA
ttcgtcaatatcgttattggggtggttattgtctcggcgatttgtgtgacccattacaaaaagcgtaaagaaact

SEQ ID NO: 781488 - DNA, 75 bp, synthetic construct
  source 1..75: mol_type = other DNA
aattaatctcccgcgcctcttatgagatggtcgcgggtgctaccggctcaccgtacgactacccgctctccagcc

SEQ ID NO: 781489 - DNA, 75 bp, synthetic construct
  source 1..75: mol_type = other DNA
ataaaaaaatggctcatcaggcccttgcttattctttaggcaataaaaaagctgatatagcactttatttactat

SEQ ID NO: 781490 - DNA, 75 bp, synthetic construct
  source 1..75: mol_type = other DNA
tgagtatttcatccacgctctacgtaaaaagctcggccggaatgccatcaaaaatgtcaggggggtcggatggct

SEQ ID NO: 781491 - DNA, 75 bp, synthetic construct
  source 1..75: mol_type = other DNA
accgtgctggccgaaatccgccaaaaagcgcttccggtgccggtgctcattctgaccgctcgcgacgcgctcgaa

SEQ ID NO: 781492 - DNA, 75 bp, synthetic construct
  source 1..75: mol_type = other DNA
cgctgaaagacaacgcctgggcggtagactgggttaaaagcggcaatgatgcctgtgtcgggtttagcacctggc

SEQ ID NO: 781493 - DNA, 75 bp, synthetic construct
  source 1..75: mol_type = other DNA
gcttttacgacgacgggcatattgcatggcgcagaccacttctcatgttttaaacgaaaagatgaatatccgggg

SEQ ID NO: 781494 - DNA, 75 bp, synthetic construct
  source 1..75: mol_type = other DNA
gattctccgtcgtgaaaaaacctgtgatatgcctgttcctgctgatgtcgctggtgggctgctcaactacgcgaa

SEQ ID NO: 781495 - DNA, 75 bp, synthetic construct
  source 1..75: mol_type = other DNA
caccgcgcccgcaacagcaaactgtgtctggaaatggggcttggtcaggaaaagcgccgcgacgacggcattcct

SEQ ID NO: 781496 - DNA, 75 bp, synthetic construct
  source 1..75: mol_type = other DNA
cctctgtattatattcgtcgcgatcctgtataccgttttggcgacctggaaaaaatcgcagtgatcctgtttccg

SEQ ID NO: 781497 - DNA, 75 bp, synthetic construct
  source 1..75: mol_type = other DNA
ttcgtcagttaatgctccagcgggaaagggaggaagcatggaaagcgacgcaacctgcttttgataaagatgatt

SEQ ID NO: 781498 - DNA, 75 bp, synthetic construct
  source 1..75: mol_type = other DNA
cctaaataataacatgtctctcagtggcaagactaatcaggatggcgagactgagagaatatatacagatactgc

SEQ ID NO: 781499 - DNA, 75 bp, synthetic construct
  source 1..75: mol_type = other DNA
actgaacttattcacgatctcagcgggcagtttgaagaggctatcgacagcctctggcatcgtctgaataataac

SEQ ID NO: 781500 - DNA, 75 bp, synthetic construct
  source 1..75: mol_type = other DNA
ttgttaacgcaagaaaatattcccgaaaaaatatcatagacacacctgtgcttgatattccacaggatgaagtgg

SEQ ID NO: 781501 - DNA, 75 bp, synthetic construct
  source 1..75: mol_type = other DNA
tgggcaaagcgccctccacatatccattaagcgacgatactatccgcctgttccgtcagttcgcagccaaagaac

SEQ ID NO: 781502 - DNA, 75 bp, synthetic construct
  source 1..75: mol_type = other DNA
atgaaactcgaacattgggcagttcctattacgtctttggacggtatgttactcggcgtagagctggaaacccgt

SEQ ID NO: 781503 - DNA, 75 bp, synthetic construct
  source 1..75: mol_type = other DNA
tggttttgaaagcgcctggattgaaatgcaacttgcgcatgttgataagaactccattcgaggaacttacaatca

SEQ ID NO: 781504 - DNA, 75 bp, synthetic construct
  source 1..75: mol_type = other DNA
tatgccgtcgccaccggacgggctaaatataactttgctcctgacttggctattgcactcaacaagcctaaaact

SEQ ID NO: 781505 - DNA, 75 bp, synthetic construct
  source 1..75: mol_type = other DNA
atattcacggcaggctgatggcgggatctctggacagccagagcagttgcccgtgcaaggcgcggtttattgcgt

SEQ ID NO: 781506 - DNA, 75 bp, synthetic construct
  source 1..75: mol_type = other DNA
tggatttatttgaaagttttaaaaatcagtatgcttatgaagaatgtgtttaggtcaaaacctaagcgcaaatga

SEQ ID NO: 781507 - DNA, 75 bp, synthetic construct
  source 1..75: mol_type = other DNA
gccggataataacctgaattatagcgttcttcctgaagtttctcctggtaccttactgaaccagcagacagcaat

SEQ ID NO: 781508 - DNA, 75 bp, synthetic construct
  source 1..75: mol_type = other DNA
cacaaggcaagaagatcaccctgcaaaacggcaaactcaacgttcctgaaaatccgattatcccttacatcgaag

SEQ ID NO: 781509 - DNA, 75 bp, synthetic construct
  source 1..75: mol_type = other DNA
ggcgcggggagtatgatgaatggggcaaccagcttaatgaagagaacccgtattacctgcaccagccataccgtc

SEQ ID NO: 781510 - DNA, 75 bp, synthetic construct
  source 1..75: mol_type = other DNA
agacgctgagaacgtttctctccacagtctgagacattggttggcgacccggatgaaagagcgtggagtcaatct

SEQ ID NO: 781511 - DNA, 75 bp, synthetic construct
  source 1..75: mol_type = other DNA
tgtagtttttctgagcttgtgtcctcactgctggctgagaaggtccagaccctgaagtcctccagctacaaggac

SEQ ID NO: 781512 - DNA, 75 bp, synthetic construct
  source 1..75: mol_type = other DNA
ctggattgggggatggttcacgaggttgccgccgccacttacccgcaggcacccggcacatactggtggattaac

SEQ ID NO: 781513 - DNA, 75 bp, synthetic construct
  source 1..75: mol_type = other DNA
cgatgcaatgagacattgttacttgatgtgtcgaatgactaagacatttggatcaacaatagctgacgtgatagg

SEQ ID NO: 781514 - DNA, 75 bp, synthetic construct
  source 1..75: mol_type = other DNA
catcacctgcaccagccgtaccggctgccggggcagcagtatgataaggagtcggggctgtactataaccgtcac

SEQ ID NO: 781515 - DNA, 75 bp, synthetic construct
  source 1..75: mol_type = other DNA
cggtcgtgcgcctaaaccaatcgatgcagcactaaaatctggtcagaagcttgaagattttctcatcaagaaaga

SEQ ID NO: 781516 - DNA, 75 bp, synthetic construct
  source 1..75: mol_type = other DNA
cggcggcggtattccggtggtgcgagacgggcaacaactgaaaggtgtggaagccgtgatcgataaagatctggc

SEQ ID NO: 781517 - DNA, 75 bp, synthetic construct
  source 1..75: mol_type = other DNA
acccacggtaatggcccgcaggtgggctttattctgcgccgctctgaactcgccagtaacgaagtttctccggtt

SEQ ID NO: 781518 - DNA, 75 bp, synthetic construct
  source 1..75: mol_type = other DNA
gttggcgattccaatgggcgttggtcagcgggattcctggagcgccaaattgcagggtttactggcgagttgcca

SEQ ID NO: 781519 - DNA, 75 bp, synthetic construct
  source 1..75: mol_type = other DNA
gtttcgaatactgggaacccaccggcggggcaatctcctccaacgaacgcaagctggtaaccggctatgccaagt

SEQ ID NO: 781520 - DNA, 75 bp, synthetic construct
  source 1..75: mol_type = other DNA
ggcgacgccggagagttgtgattttctgcatcaaattaaaataggcgagtggatacacgctgattttaagcgtgt

SEQ ID NO: 781521 - DNA, 75 bp, synthetic construct
  source 1..75: mol_type = other DNA
tcggtcagcgcccaattgagcagattgaaccactggagctgctaaccgtcctgcaaaaaatagagaaaagaggtg

SEQ ID NO: 781522 - DNA, 75 bp, synthetic construct
  source 1..75: mol_type = other DNA
aaggcagcaccgtggatgacggcaccgagcacttccacaccgataccatctggttctacgagcacccttaccctg

SEQ ID NO: 781523 - DNA, 75 bp, synthetic construct
  source 1..75: mol_type = other DNA
acaccctgaattgactgatatggtcatcttccgtgaaaactcggaagacatttatgcaggtatcgagtggaaagc

SEQ ID NO: 781524 - DNA, 75 bp, synthetic construct
  source 1..75: mol_type = other DNA
aaaaccgtgcagaagtggaactggccacactcacgtgggtggactggtataacaatcgacgattgctgggaaggc

SEQ ID NO: 781525 - DNA, 75 bp, synthetic construct
  source 1..75: mol_type = other DNA
atcagctggtctggtgaagaagtatgaaatgcaccggaaagccatttattctgtcctgttatcactgattccttt

SEQ ID NO: 781526 - DNA, 75 bp, synthetic construct
  source 1..75: mol_type = other DNA
acctgaatgttaattattcaggaattggtcgttcgcaaattagagaccatcttaaaaaacaatgtggtatagttt

SEQ ID NO: 781527 - DNA, 75 bp, synthetic construct
  source 1..75: mol_type = other DNA
gataatgattggtatatttcaacatctaccatcgttcaaggtattacatctttaatatcaacaaatgcctcaaaa

SEQ ID NO: 781528 - DNA, 75 bp, synthetic construct
  source 1..75: mol_type = other DNA
tttcctgtctatggcgaaaaaaagctatcgaagcgctggataccgtcggtatgacagaattttcgcagatgcaca

SEQ ID NO: 781529 - DNA, 75 bp, synthetic construct
  source 1..75: mol_type = other DNA
atagcaaatcgcaggaacatgcagtctgacgtaacagggatcttactgtttaatggttctcattttttccagctt

SEQ ID NO: 781530 - DNA, 75 bp, synthetic construct
  source 1..75: mol_type = other DNA
cttccttctgactttgtctcagacagcattattgctgcttttaaaaaccggctgaaagaaattatcgcgcgttac

SEQ ID NO: 781531 - DNA, 75 bp, synthetic construct
  source 1..75: mol_type = other DNA
tgatgcttatagctttgagcactcattttggtgccaagctatgcataaagaacttaataacgagttctacattaa

SEQ ID NO: 781532 - DNA, 75 bp, synthetic construct
  source 1..75: mol_type = other DNA
ttgatcttcttgttgttataacaaacaaagatttaaaggtacgttataaaagcagcgtatttggttacttatggt

SEQ ID NO: 781533 - DNA, 75 bp, synthetic construct
  source 1..75: mol_type = other DNA
gtctgatttctgtaactctgaaagatgggcgagaaatgacaaaacgcctgaatgtaaattatggcaacccagaga

SEQ ID NO: 781534 - DNA, 75 bp, synthetic construct
  source 1..75: mol_type = other DNA
aattatgccaatacaaaatcaactatcatcattaccttcattacggctcttattgcttttgttggtgcgcatgcg

SEQ ID NO: 781535 - DNA, 75 bp, synthetic construct
  source 1..75: mol_type = other DNA
cggtgtacacgccggcgcgaaaaatccacctgtaccactgcgaccatcgcggcctgccgctggcgctcatcagca

SEQ ID NO: 781536 - DNA, 75 bp, synthetic construct
  source 1..75: mol_type = other DNA
tcttactgatatgactggaggagtgactatttattatgatcctgaaacaggtgattcaatgacttttgatagtag

SEQ ID NO: 781537 - DNA, 75 bp, synthetic construct
  source 1..75: mol_type = other DNA
agaatcgaaacagagaatggcgaacaggcgaaggcgcggcaccgtagcctggcggaggtgttgcaggaggacacg

SEQ ID NO: 781538 - DNA, 75 bp, synthetic construct
  source 1..75: mol_type = other DNA
acattgaaatgaatggcgccgcagaatactcagtattaaatgacggttatcaaattgttcaaatgggtggcgcgg

SEQ ID NO: 781539 - DNA, 75 bp, synthetic construct
  source 1..75: mol_type = other DNA
cgaaaatggacacgctgtttgatggcgcaggatttatctttggtttcagggtattaccggcaattatcttcgtca

SEQ ID NO: 781540 - DNA, 75 bp, synthetic construct
  source 1..75: mol_type = other DNA
tttagatattttattgattactgtaccgggaactattttggggtgtcttgttggttgtttgtttgtttataaacg

SEQ ID NO: 781541 - DNA, 75 bp, synthetic construct
  source 1..75: mol_type = other DNA
cggctccgtccgggggatgtgctggtggtctggaagctggatcggcttggccgcagcgtacgcgatctgattacg

SEQ ID NO: 781542 - DNA, 75 bp, synthetic construct
  source 1..75: mol_type = other DNA
agctgcgcgaaggccgcgtcacgctgccgcagcgcgaccgaccagggcatacgctggtgctcggcaccacccgcg

SEQ ID NO: 781543 - DNA, 75 bp, synthetic construct
  source 1..75: mol_type = other DNA
tgaactaccggaatttcaaaggggctaatttttactttgataaaggtattaacacaattattggtgaaaatgcat

SEQ ID NO: 781544 - DNA, 75 bp, synthetic construct
  source 1..75: mol_type = other DNA
ataggaaaatatatccaacgcaggaggataactagggcagcgcttctgttacgactcacaaggataccaattaca

SEQ ID NO: 781545 - DNA, 75 bp, synthetic construct
  source 1..75: mol_type = other DNA
tcgctgtccgctttttctgcgccaaatttcccgaccgttacggcggcgccacggtcgcaaccttttcactactgg

SEQ ID NO: 781546 - DNA, 75 bp, synthetic construct
  source 1..75: mol_type = other DNA
tgccgcagaatgctggataacggcgctacccggcaacagatcgcagatgtgataggggtgaatgtgaagacgcta

SEQ ID NO: 781547 - DNA, 75 bp, synthetic construct
  source 1..75: mol_type = other DNA
gcggaatggactccattgctattgcctggtggaagcgcccggatatagcactgacactcgactacggtcagcaag

SEQ ID NO: 781548 - DNA, 75 bp, synthetic construct
  source 1..75: mol_type = other DNA
agaaaagaaattacatcttttcagaatacttctgaaaatacgcactattttgcatattcaaaaacaataaaaaaa

SEQ ID NO: 781549 - DNA, 75 bp, synthetic construct
  source 1..75: mol_type = other DNA
aggaatggaactggccagacatctagaatttactgtcagcaccggcgttaaagtttacttctgcgatcctcagag

SEQ ID NO: 781550 - DNA, 75 bp, synthetic construct
  source 1..75: mol_type = other DNA
cgggatctgctcccttcatttttgatgaccctatttcatctctggaccacgaatttgagtggcaagttgctaaac

SEQ ID NO: 781551 - DNA, 75 bp, synthetic construct
  source 1..75: mol_type = other DNA
tctttatgcggttgaggattgtcttagatttgtgctttcaaaaaaagaaaacgcagtcgtagtcgatttttttag

SEQ ID NO: 781552 - DNA, 75 bp, synthetic construct
  source 1..75: mol_type = other DNA
tgcagttgaagatgcactccgtttttttatttcagcaaaaaaaaatgctgtagtagtagatttcttcagtggctc

SEQ ID NO: 781553 - DNA, 75 bp, synthetic construct
  source 1..75: mol_type = other DNA
tggcatctaaatatggacacttaaataatggcggatatggagcgagacccaacaaaccgcctacgcccgatccaa

SEQ ID NO: 781554 - DNA, 75 bp, synthetic construct
  source 1..75: mol_type = other DNA
gttatctggaaaaagataaacattacagagaagccgatgcggctttacttaatgttatttatcctgcaaatcttt

SEQ ID NO: 781555 - DNA, 75 bp, synthetic construct
  source 1..75: mol_type = other DNA
taacattaacagaaaatacacgaaagttaacgttgacggagaaaccctggggaacatttattcttgcttctactt

SEQ ID NO: 781556 - DNA, 75 bp, synthetic construct
  source 1..75: mol_type = other DNA
ctctcatatagccacacttgtagaccgaaaatcacgttatacgatcatcctcagactcaggggcaaagattctgt

SEQ ID NO: 781557 - DNA, 75 bp, synthetic construct
  source 1..75: mol_type = other DNA
ttggtgatggaaagagcccatattacacaaattagtagtattgcacctgaagttagaggtaaaactatgttgttg

SEQ ID NO: 781558 - DNA, 75 bp, synthetic construct
  source 1..75: mol_type = other DNA
cgctttcacgtatgacgcgcagcacccgggccggatggtggcgcaccgttacgcgggaaggccggagatgcgcta

SEQ ID NO: 781559 - DNA, 75 bp, synthetic construct
  source 1..75: mol_type = other DNA
atgttgatatgaaaaaacacatgctttactctccattaaactatgcaggacaccatccttatacctttcgtaaga

SEQ ID NO: 781560 - DNA, 75 bp, synthetic construct
  source 1..75: mol_type = other DNA
atcggtatctccgcacaaggaaaaggcttgtttttgctggataaaaacaacaagccgctcggtaacgccattttg

SEQ ID NO: 781561 - DNA, 75 bp, synthetic construct
  source 1..75: mol_type = other DNA
tcttcgatcatggatagtttaccgctcacaatgcaaaggcagttccccgcgatgactccggcaatgatcgagggc

SEQ ID NO: 781562 - DNA, 75 bp, synthetic construct
  source 1..75: mol_type = other DNA
aatcacaaagtgaatcattaaagaaaaaatctggtggtagtgctattaataacttgttgcttggagatttaaaga

SEQ ID NO: 781563 - DNA, 75 bp, synthetic construct
  source 1..75: mol_type = other DNA
catattggctggcgataattctgcaacagacaaacttattgtacagggcaataccagcggcaaaacctttgttac

SEQ ID NO: 781564 - DNA, 75 bp, synthetic construct
  source 1..75: mol_type = other DNA
ttcatactgaaaaccatcaaaacctccatcgatattgtggtgttcttcagacatacccatatgacggagatctac

SEQ ID NO: 781565 - DNA, 75 bp, synthetic construct
  source 1..75: mol_type = other DNA
gcctccggcctgtgaagagagatgtatctcattcaccatacgtaaaccttccctgaggcgcttcacactggagga

SEQ ID NO: 781566 - DNA, 75 bp, synthetic construct
  source 1..75: mol_type = other DNA
aagtaaacaccaaagaattaacaatgtactgcacccgaatgcctgtagccagtgatttcaccgttgcgccaatta

SEQ ID NO: 781567 - DNA, 75 bp, synthetic construct
  source 1..75: mol_type = other DNA
ctcaaatgtgttaagtaggattttttctacatttgattgtaatcctgattttatttgtgccgatagaattttaat

SEQ ID NO: 781568 - DNA, 75 bp, synthetic construct
  source 1..75: mol_type = other DNA
acattagatgttgtttttagctatgcaaatgctatcggcatcgatctgttcggctcactaaaaagactgattgtt

SEQ ID NO: 781569 - DNA, 75 bp, synthetic construct
  source 1..75: mol_type = other DNA
tccggcatttcgtaatgcggcagcgtctgttgcccagctgtacgacgcgctacacaaaccggagatgcaggactc

SEQ ID NO: 781570 - DNA, 75 bp, synthetic construct
  source 1..75: mol_type = other DNA
tctcaagggcaaatgaacttatgtccctatgcgaccaactggaacagcaatccctgacaagtctggacgcacatc

SEQ ID NO: 781571 - DNA, 75 bp, synthetic construct
  source 1..75: mol_type = other DNA
tgcagatgataataacgcagaactcatcccatgcctgagtacagatcttcttgtcagtcttggtataaaaaaata

SEQ ID NO: 781572 - DNA, 75 bp, synthetic construct
  source 1..75: mol_type = other DNA
gactggaacgtttgtcgaacttactctcgaagaaagactctgtttttgtctctgatttactacgcgaagctggtg

SEQ ID NO: 781573 - DNA, 75 bp, synthetic construct
  source 1..75: mol_type = other DNA
caaaagatgaatgggagttggctacgattttcaaaaaaacatatacacaaggcagggggcttgatgccacaaata

SEQ ID NO: 781574 - DNA, 75 bp, synthetic construct
  source 1..75: mol_type = other DNA
tgaagtaatgagttactatatttgtgaagcgctatatgttgagcataatggtttgacagatgcagcacagaaaat

SEQ ID NO: 781575 - DNA, 75 bp, synthetic construct
  source 1..75: mol_type = other DNA
atataccctgatatacatacaggttttggttcttttgctagacgcacaaaaatccgccctttagatgatatagat

SEQ ID NO: 781576 - DNA, 75 bp, synthetic construct
  source 1..75: mol_type = other DNA
caaagctgctttcggttgcgcactgggcgcgaatccgggcttttacggtcagttcgagcagaacgcccgtaactg

SEQ ID NO: 781577 - DNA, 75 bp, synthetic construct
  source 1..75: mol_type = other DNA
ttggatttgatcgttctgtaattgccgaagcatgtaacaagacagaaaatgtaaccattcaattttatactttat

SEQ ID NO: 781578 - DNA, 75 bp, synthetic construct
  source 1..75: mol_type = other DNA
atgacgtcatgacgccattaatcagcgaacggacccgcgagctggaatgcctgctgaagcattaccggctggcgg

SEQ ID NO: 781579 - DNA, 75 bp, synthetic construct
  source 1..75: mol_type = other DNA
catacagtctctcccataatagcaatgaagtgaggggggcaggttattactatgctactgataatggacagagtc

SEQ ID NO: 781580 - DNA, 75 bp, synthetic construct
  source 1..75: mol_type = other DNA
gttgttcactggctaaatttatcagcagaacagaaaaatagtaaagcagagtatacgttgggatatatgtattat

SEQ ID NO: 781581 - DNA, 75 bp, synthetic construct
  source 1..75: mol_type = other DNA
atgaacagtttaacggcaaataaccgtttgtcgcaacagctggtggtcagcgtcgctgaacacctgaaccgcccc

SEQ ID NO: 781582 - DNA, 75 bp, synthetic construct
  source 1..75: mol_type = other DNA
cccttgggaagatggtcgaacaggagagcagtcatcctgttgggtgcgagtatctcagtattggtctggatttgg

SEQ ID NO: 781583 - DNA, 75 bp, synthetic construct
  source 1..75: mol_type = other DNA
ttatttttgatgatacaaaaggtgatgagaaaatatcaataacttcgcaaaaagatttctttttaattgttaata

SEQ ID NO: 781584 - DNA, 75 bp, synthetic construct
  source 1..75: mol_type = other DNA
cgagagaaatatattgaaaaaatcttgaaccagaatacccgagtcggtttcgtccattcccaaggatgtcaagga

SEQ ID NO: 781585 - DNA, 75 bp, synthetic construct
  source 1..75: mol_type = other DNA
tctgttgcccaactgtacgacgcgctacacaaaccggagatgcaggactctctgtgctggaacaccgacaccggc

SEQ ID NO: 781586 - DNA, 75 bp, synthetic construct
  source 1..75: mol_type = other DNA
agccctgggcgaacgccgacgcgatacgaaaaaaagcatgggtgccaaccctcaaaaaagctggcgttcgatacc

SEQ ID NO: 781587 - DNA, 75 bp, synthetic construct
  source 1..75: mol_type = other DNA
aaatattaagtcctatcttgatgaatacctgaaaatttgcatgaaccgcaatctgtcgccgtcaaccattggcgg

SEQ ID NO: 781588 - DNA, 75 bp, synthetic construct
  source 1..75: mol_type = other DNA
attaaatatgctgagcgcctgctaggggagatacaaaatcagatcgccagcggaacgtttgaatatgcgaaatat

SEQ ID NO: 781589 - DNA, 75 bp, synthetic construct
  source 1..75: mol_type = other DNA
atggcattagtatcagatcagggaaatagtgtagccgcaaaaaaggttctgctcaccctgtgggattatatgtct

SEQ ID NO: 781590 - DNA, 75 bp, synthetic construct
  source 1..75: mol_type = other DNA
gagtctgtattacaacgaagattacattaagcaggcgagtaatttcgacacgcctgaggaatttcaaaaactcat

SEQ ID NO: 781591 - DNA, 75 bp, synthetic construct
  source 1..75: mol_type = other DNA
taatctccagcagcgatgaaacaaaagtaaaagccgactggccaacggttacggttgtctctgagccgagcatct

SEQ ID NO: 781592 - DNA, 75 bp, synthetic construct
  source 1..75: mol_type = other DNA
aaatataaaatcttacctggatgaatacctgattatctgccagaaccgtaacctgtcaccatcgacaattaaagg

SEQ ID NO: 781593 - DNA, 75 bp, synthetic construct
  source 1..75: mol_type = other DNA
cttctgccactgcatcagccaacagtcaaacagcagcaaaaaccagtgaaaccaatgcaaagacaagcgagactg

SEQ ID NO: 781594 - DNA, 75 bp, synthetic construct
  source 1..75: mol_type = other DNA
tgtaccggcaccctggagttccgtggtgtgcaggccgatctcggtgaagtggtggcgtggcgcaacaccttctgg

SEQ ID NO: 781595 - DNA, 75 bp, synthetic construct
  source 1..75: mol_type = other DNA
aagtgtgagagattacctagatgagtatctggaaatttgcaaaaacagaaagttatcaccttcaacaataaatgg

SEQ ID NO: 781596 - DNA, 75 bp, synthetic construct
  source 1..75: mol_type = other DNA
ccgccatatcagccggggagcaaacctgttttggcttgcagctcaaatggggcataaagggccggagatgctttt

SEQ ID NO: 781597 - DNA, 75 bp, synthetic construct
  source 1..75: mol_type = other DNA
aaaagcaggtactcgaaaagttgaactgacagatgaagcaatgtctgcactaataaatcagaaaccgttcacttt

SEQ ID NO: 781598 - DNA, 75 bp, synthetic construct
  source 1..75: mol_type = other DNA
atggaattactggaggcattgcgtaaaatggaaaaacgcggagccttggagaaaatgcgcaaggtccgccagcgt

SEQ ID NO: 781599 - DNA, 75 bp, synthetic construct
  source 1..75: mol_type = other DNA
gaaacacagcttgcacacgtcgataagaacgcgattcgtgggacatataaccatgctcagtatctggatggaagg

SEQ ID NO: 781600 - DNA, 75 bp, synthetic construct
  source 1..75: mol_type = other DNA
gttctaaatactggcgtatgaagtaccgctttgctggtaaagaaaagatgctttctattggcgtataccccgatg

SEQ ID NO: 781601 - DNA, 75 bp, synthetic construct
  source 1..75: mol_type = other DNA
gtaatgcaaagccgcttgataaatcctggaaactcagcgatgcgcagggtctgtacctgctgataaagcccaacg

SEQ ID NO: 781602 - DNA, 75 bp, synthetic construct
  source 1..75: mol_type = other DNA
gcaaaccgtatcgcaggatagctgggacatcctcggtccgaccgttcgcgccaataaatccgaagtgtgggtgtc

SEQ ID NO: 781603 - DNA, 75 bp, synthetic construct
  source 1..75: mol_type = other DNA
ctcgcttggcctagcgcacttctacaaggtcaagaataacgagatagagggcagcaacggcacgcgctttacctt

SEQ ID NO: 781604 - DNA, 75 bp, synthetic construct
  source 1..75: mol_type = other DNA
ggtcccacctgcatcgtctgtcaggttatctgcctgggaccacggtctcacctgcgtcatcggtcaggttatctg

SEQ ID NO: 781605 - DNA, 75 bp, synthetic construct
  source 1..75: mol_type = other DNA
acattggaaacagacccatcagtgatatcgaacctcttgaacttctcgcagttcttcagcgtattgaaagccgcg

SEQ ID NO: 781606 - DNA, 75 bp, synthetic construct
  source 1..75: mol_type = other DNA
ctggccctcggcgtctatcccgacgtctcccttgctgaagccagaatcaaacgcgacgatgcccggaaaattatc

SEQ ID NO: 781607 - DNA, 75 bp, synthetic construct
  source 1..75: mol_type = other DNA
aatcaaaccaatggagttactggaagcactgcgtaaaatggaaaaacgtggagctctggagaaaatgcgcaaggt

SEQ ID NO: 781608 - DNA, 75 bp, synthetic construct
  source 1..75: mol_type = other DNA
ccacgcccagtatctcgatggtcgccgtgaaatgatgcaatggtacgctgactacattgattcactttctgagct

SEQ ID NO: 781609 - DNA, 75 bp, synthetic construct
  source 1..75: mol_type = other DNA
aatcgtttcacggggaggcaccttatatgacgttcaggcccagctcggacaccgtagtattcagtcgtcacagcg

SEQ ID NO: 781610 - DNA, 75 bp, synthetic construct
  source 1..75: mol_type = other DNA
ctggcgtttggtgcttacccggccgtttctctggcaaatgcccgcaagctgcgcgaggatgcccgctcggtattg

SEQ ID NO: 781611 - DNA, 75 bp, synthetic construct
  source 1..75: mol_type = other DNA
ctggtcgagtacacgcgggaccggctgcaccgtgagacggtgcgcagcttcggcagcatggcaggcagtaatgca

SEQ ID NO: 781612 - DNA, 75 bp, synthetic construct
  source 1..75: mol_type = other DNA
catcagccataccagtgacggccaccgagtgtcggtccactacggctatgacgataaaggccgcctgacgggcga

SEQ ID NO: 781613 - DNA, 75 bp, synthetic construct
  source 1..75: mol_type = other DNA
ccagcaccgtctggtgttctacacgcggatacagcacggtgagccgcaggtggagagccgctacctctatgaccc

SEQ ID NO: 781614 - DNA, 75 bp, synthetic construct
  source 1..75: mol_type = other DNA
ttataccattgggacaagactggcccgtgaaggatgtagcgtacaggttattgccgaactgttagatcactcttc

SEQ ID NO: 781615 - DNA, 75 bp, synthetic construct
  source 1..75: mol_type = other DNA
cacgggcgggcctgctcgttcgtaaggctgatggcagtcaccttgccgctgatggcgagacgctgccggtcaatg

SEQ ID NO: 781616 - DNA, 75 bp, synthetic construct
  source 1..75: mol_type = other DNA
tcctttttctctgcgatggatgagtgaacacctggagaagtttaaatcgctaaatgccctcggtttggttgtgaa

SEQ ID NO: 781617 - DNA, 75 bp, synthetic construct
  source 1..75: mol_type = other DNA
cccaggggaacccgatgccggtgccttacggggaaatgctggttggctcccgccgtatatcccaggacatcagca

SEQ ID NO: 781618 - DNA, 75 bp, synthetic construct
  source 1..75: mol_type = other DNA
agctcagaacttaagcgcgatattctgtcaattaatgagaaaattgaccacctcatatttcaagtaacttttcgg

SEQ ID NO: 781619 - DNA, 75 bp, synthetic construct
  source 1..75: mol_type = other DNA
ctggatggcactctagcattcgctgactgtctgtctccatgtatccgcgctgaagatatggaaggttttaggctg

SEQ ID NO: 781620 - DNA, 75 bp, synthetic construct
  source 1..75: mol_type = other DNA
agaaggggaaccagtattactttggcatgaaggcgcacatcggcgttgatgatgaatcggggctggtacacagcg

SEQ ID NO: 781621 - DNA, 75 bp, synthetic construct
  source 1..75: mol_type = other DNA
acgctaagcgacccgtcgccatccgctactactcgatgagcagcggcgagtccgagcgggtaattgtgccctttg

SEQ ID NO: 781622 - DNA, 75 bp, synthetic construct
  source 1..75: mol_type = other DNA
ggcaggaacaaccgcagcaaacccatttcgaaagagagtatttcacaagtgattgagttacttggatacaagggg

SEQ ID NO: 781623 - DNA, 75 bp, synthetic construct
  source 1..75: mol_type = other DNA
gcgtcagaggtgcggtgaggtttatcgctacgcaatcataactggccgcgctgaatacaatcctgcgcctgattt

SEQ ID NO: 781624 - DNA, 75 bp, synthetic construct
  source 1..75: mol_type = other DNA
caaaagcaccatccatttttatccgctgaagagttgcctcattttattcgagatcttgaagcgtataccggtagc

SEQ ID NO: 781625 - DNA, 75 bp, synthetic construct
  source 1..75: mol_type = other DNA
agggagatgatgcagtggtatgcgaattatattagtgagttggggaaaggtggaattatagtcgaagggaaattt

SEQ ID NO: 781626 - DNA, 75 bp, synthetic construct
  source 1..75: mol_type = other DNA
ccgctgagatgatgctgcgccacatgggttggacggaagcggctgacgtcattgttaaaggtatggaaggcgcaa

SEQ ID NO: 781627 - DNA, 75 bp, synthetic construct
  source 1..75: mol_type = other DNA
gattgagttaattggctacaaaggacgtgctacaggtcatggttttcgacatacaatgtcgacaattttacatga

SEQ ID NO: 781628 - DNA, 75 bp, synthetic construct
  source 1..75: mol_type = other DNA
tcatgctcaatatctagagagcagaagaaagatgttgcaatggtattccgataacgtaataaatggattacaaga

SEQ ID NO: 781629 - DNA, 75 bp, synthetic construct
  source 1..75: mol_type = other DNA
caggagctgcatcgcgttccttctgcggtcagctataccgtgcgtcagctggaagagtggctggggggggggggg

SEQ ID NO: 781630 - DNA, 75 bp, synthetic construct
  source 1..75: mol_type = other DNA
caggtccggcagtctgacggaggcaaaaccgcccacgacctgctgcacgagaaaagtgaccgcgagtccgacacc

SEQ ID NO: 781631 - DNA, 75 bp, synthetic construct
  source 1..75: mol_type = other DNA
ggttgccggtggtcgtggtgcccgccagcaggtacgtgaacagatgcagcgtactgaacgtgagtgggtggtgaa

SEQ ID NO: 781632 - DNA, 75 bp, synthetic construct
  source 1..75: mol_type = other DNA
atacgggaagacgccctatcgtcgatattaagccgatggactggcttgagatccttcgtcgccttgaaaagcgcg

SEQ ID NO: 781633 - DNA, 75 bp, synthetic construct
  source 1..75: mol_type = other DNA
cgctatgcaattgtcactggcagagctgactacaaccccgcccccgaccttgccagcgcgttagctacgccgaaa

SEQ ID NO: 781634 - DNA, 75 bp, synthetic construct
  source 1..75: mol_type = other DNA
ctgacactgaaatcaaaagcaccaagccagccgataaagaaatcaacttgtttgacggtgatggtctgattctac

SEQ ID NO: 781635 - DNA, 75 bp, synthetic construct
  source 1..75: mol_type = other DNA
ccgctgagatgatgctgcgccatatgggttggacggaagcggctgacattattgttaaaggtatggaaggcgcaa

SEQ ID NO: 781636 - DNA, 75 bp, synthetic construct
  source 1..75: mol_type = other DNA
cgtcatgcaattgtgaccggacgcgctgaatacaatcctgcccccgatctcgctacagccctcgcaacaccaaag

SEQ ID NO: 781637 - DNA, 75 bp, synthetic construct
  source 1..75: mol_type = other DNA
agaaggttttgactctgcgtggattgaaactcaacttgctcatgtggacaagaatgcgattcgtggagcttacaa

SEQ ID NO: 781638 - DNA, 75 bp, synthetic construct
  source 1..75: mol_type = other DNA
ataatcactaaaaatgcaaccaagattgtgatgcttaccggggtaagaacacaagaactgcgttttgccacatgg

SEQ ID NO: 781639 - DNA, 75 bp, synthetic construct
  source 1..75: mol_type = other DNA
gaaactgaatgcagagaacacgtttgaagccgtggctcgcgagtggcatcagactaaagccgatcgctggtcatt

SEQ ID NO: 781640 - DNA, 75 bp, synthetic construct
  source 1..75: mol_type = other DNA
gaaacacagttagcccatgtagataaaaatgctatcaggggaacttataaccatgctcagtatctcgatggccgc

SEQ ID NO: 781641 - DNA, 75 bp, synthetic construct
  source 1..75: mol_type = other DNA
tcacgctcagtatctcgatggccgacgtgaaatgatgcaatggtacgctgactacatagattcactatctgagca

SEQ ID NO: 781642 - DNA, 75 bp, synthetic construct
  source 1..75: mol_type = other DNA
tctctaaagaaagtgtgtcacaagtaattgaactgctgggctataaaggacgtgcgacaggtcacggttttcgac

SEQ ID NO: 781643 - DNA, 75 bp, synthetic construct
  source 1..75: mol_type = other DNA
ccgctgagatgatgctgcgccaaatgggttggacggaagcggctgacctaattgttaaaggtatggaaggcgcaa

SEQ ID NO: 781644 - DNA, 75 bp, synthetic construct
  source 1..75: mol_type = other DNA
ctgaagagttaccttattttattcgggatttggaagcatataccggaagcatcatcacgaaaaatgcgacgaaga

SEQ ID NO: 781645 - DNA, 75 bp, synthetic construct
  source 1..75: mol_type = other DNA
ctgaatacaatccagcacctgatttagctatcgcattagctgtaccgaagcaaaaacatcatccttttctatcag

SEQ ID NO: 781646 - DNA, 75 bp, synthetic construct
  source 1..75: mol_type = other DNA
cgttatgccatcatcacaggtcgtgccaaatacaatccagccccagatcttgcgatggcactggctacaccgaaa

SEQ ID NO: 781647 - DNA, 75 bp, synthetic construct
  source 1..75: mol_type = other DNA
tcatgcacaatatattgaaaatcgaaaaataatgttgcaatggtatagtgatttcctattaacaacagccataat

SEQ ID NO: 781648 - DNA, 75 bp, synthetic construct
  source 1..75: mol_type = other DNA
gcttgagagtagttctggtgctgacatagtcatgactggatcagcaccattcgttgttagaagtgttggcgacat

SEQ ID NO: 781649 - DNA, 75 bp, synthetic construct
  source 1..75: mol_type = other DNA
tagtaattggatttgtgttattttcacttgtctcatattatagagaagggtatgatataaatttcgttaaatata

SEQ ID NO: 781650 - DNA, 75 bp, synthetic construct
  source 1..75: mol_type = other DNA
taaacaaaacacaagcagccagtattacaaatggagggattggttatgtaatttctggttttaacaacacatttt

SEQ ID NO: 781651 - DNA, 75 bp, synthetic construct
  source 1..75: mol_type = other DNA
gggggggggcatcagcgcgcacgttcaccctcaccctaaccctctccctcaagggagaggggaccgatcgagcac

SEQ ID NO: 781652 - DNA, 75 bp, synthetic construct
  source 1..75: mol_type = other DNA
tatttttatcacaataacagatcaagtatctggatataaatgtgtaataccaaatagtgacactgggacatgtgc

SEQ ID NO: 781653 - DNA, 75 bp, synthetic construct
  source 1..75: mol_type = other DNA
ttcagaagtggatctcctgttgatgttcagataacagatctgataacaggttatgcatcaatagacttgagcttt

SEQ ID NO: 781654 - DNA, 75 bp, synthetic construct
  source 1..75: mol_type = other DNA
agcattagcaaatcaacaatggcttaatgtgtactctatatggcgggagaaacgttttacatcggaaggggtttc

SEQ ID NO: 781655 - DNA, 75 bp, synthetic construct
  source 1..75: mol_type = other DNA
cagcaagagctcgaagcgcttttattaaatgcggtaaatcgaggggccagcgatctccatatcacaaggggggat

SEQ ID NO: 781656 - DNA, 75 bp, synthetic construct
  source 1..75: mol_type = other DNA
tacctgacgggccgcatgccggggcagacgcttggcggcgtgggttgccacctgtatcctgtatcaggagtttga

SEQ ID NO: 781657 - DNA, 75 bp, synthetic construct
  source 1..75: mol_type = other DNA
ttacgacgcctatggatcgcagcagttctacttccctgacattgcaaaatacgacccagatcagttaaggcaaca

SEQ ID NO: 781658 - DNA, 75 bp, synthetic construct
  source 1..75: mol_type = other DNA
actatatctacagcgctattagttgttttgatgttctattattatattaatagagttcgctatttatcactaacc

SEQ ID NO: 781659 - DNA, 75 bp, synthetic construct
  source 1..75: mol_type = other DNA
agcggcttgcggctttgggtattagtagcgacaagttatccactcccggttttatagcaggtttgcaatgtcaaa

SEQ ID NO: 781660 - DNA, 75 bp, synthetic construct
  source 1..75: mol_type = other DNA
cgataatcacaagtcaggaaatataagtaatgggtatataaagaaattaaaaacaaaaggatatataaatttttt

SEQ ID NO: 781661 - DNA, 75 bp, synthetic construct
  source 1..75: mol_type = other DNA
tcgagctgcagcttgtggacgggaacggtcagggaattgagctaagtgatttcaaagtcacctttacgatcgact

SEQ ID NO: 781662 - DNA, 75 bp, synthetic construct
  source 1..75: mol_type = other DNA
ttgaactgcgcctgctggatgattccggtcagggtatttccctgactgattttaaggtgacgtttgcgatcgact

SEQ ID NO: 781663 - DNA, 75 bp, synthetic construct
  source 1..75: mol_type = other DNA
gggcggcggcgtaaacgtgcggtgcctgataaacccgaacatccgcattaatggtcttatccagctcgatcaggc

SEQ ID NO: 781664 - DNA, 75 bp, synthetic construct
  source 1..75: mol_type = other DNA
aattttttggggatgtaacattatataatggcgtctacttatctaaatgttttgttaatggccttttaactctaa

SEQ ID NO: 781665 - DNA, 75 bp, synthetic construct
  source 1..75: mol_type = other DNA
cgggattatgtacactggcgacacaaggggccaggcgtggtacatggatatgatgtgcgaagcgcgtggcgcggc

SEQ ID NO: 781666 - DNA, 75 bp, synthetic construct
  source 1..75: mol_type = other DNA
aggggccaggcgtggtacatggacatgatgtgcgaagcgcgtggcgcggcggatttactttcgtcctcagcgcag

SEQ ID NO: 781667 - DNA, 75 bp, synthetic construct
  source 1..75: mol_type = other DNA
ctacaacgaacaggggctggcaaaccgcgtcacgccggacagcctgccgccggtggagtggctgacgtatggcag

SEQ ID NO: 781668 - DNA, 75 bp, synthetic construct
  source 1..75: mol_type = other DNA
gctggcaaaccgcgtcacgccggacagcctgccgccggtggagtggctgacctacggcagcggttatctggcggg

SEQ ID NO: 781669 - DNA, 75 bp, synthetic construct
  source 1..75: mol_type = other DNA
cgttatcaccccggacggcaaccggagcgagacacagtacgatgcgtggggaaaggcggtcagcaccacgcaggg

SEQ ID NO: 781670 - DNA, 75 bp, synthetic construct
  source 1..75: mol_type = other DNA
agaccagatagggcaggtgaacggtcagaactacggcctgatttttgacggtgatattcgcttcaccgtcaccgg

SEQ ID NO: 781671 - DNA, 75 bp, synthetic construct
  source 1..75: mol_type = other DNA
cgcgagcaattgaatattgattatcttgacgattttaaaaacaggcgcattgttcacagcttacgccacactttc

SEQ ID NO: 781672 - DNA, 75 bp, synthetic construct
  source 1..75: mol_type = other DNA
gaatatgatgaaccgggcaggctggtatcggagacatcgcgcagcggggagacagtacgctaccgctacgatgac

SEQ ID NO: 781673 - DNA, 75 bp, synthetic construct
  source 1..75: mol_type = other DNA
ctatttgtgcgccaccatgctcagggcgtgtcgctgacctctatcggtcatcaagtgttaaaagaggcgaagctg

SEQ ID NO: 781674 - DNA, 75 bp, synthetic construct
  source 1..75: mol_type = other DNA
aaataaaattaaagtgctggttgcgacaacggcgctgggaatgggctttgacaaaccggatttggggtttgttat

SEQ ID NO: 781675 - DNA, 75 bp, synthetic construct
  source 1..75: mol_type = other DNA
tattggtaaaaatttgtatttcaaccttgatacaagcttctgtcatatatttgatttttacactgaagaaaatct

SEQ ID NO: 781676 - DNA, 75 bp, synthetic construct
  source 1..75: mol_type = other DNA
tgcaggtgtttttggtctgggtaaatcacgcggtacaagtatcgccgaaacaaaagcggaccagcaacgcactga

SEQ ID NO: 781677 - DNA, 75 bp, synthetic construct
  source 1..75: mol_type = other DNA
aagtagacgatgttcttttgcatctcatggaaaactgcccgaattacctgcccaataagcaactgcttgccaaaa

SEQ ID NO: 781678 - DNA, 75 bp, synthetic construct
  source 1..75: mol_type = other DNA
cgcttctatctgaaaatggccgaaatggaacaccagggtgcaaaaaccttggataactatcagaacttcgccaag

SEQ ID NO: 781679 - DNA, 75 bp, synthetic construct
  source 1..75: mol_type = other DNA
gatggactatgacgaaacaatgtctttcatcctcctgaatgccgccgaacagttcgagcgcctaacgggtgacct

SEQ ID NO: 781680 - DNA, 75 bp, synthetic construct
  source 1..75: mol_type = other DNA
tacccacactccccatatctttgaaggagcttcatgtctcaaataatcaattatgttctcttcctgttttaccag

SEQ ID NO: 781681 - DNA, 75 bp, synthetic construct
  source 1..75: mol_type = other DNA
cctgaactcaggctgcccgatgactccccccactatcccgaaaaaattcgcgcagtcttcactgagttgcaggag

SEQ ID NO: 781682 - DNA, 75 bp, synthetic construct
  source 1..75: mol_type = other DNA
ttgcacttattgaatctcaaattggcagggcacttaagccagcagaaaaagatgaggttcccgttttccttgaca

SEQ ID NO: 781683 - DNA, 75 bp, synthetic construct
  source 1..75: mol_type = other DNA
caaaagcggaccagcaacgcactgaggaacgtgcagcagctactgaagcagttgcagaacgccgggtagagacaa

SEQ ID NO: 781684 - DNA, 75 bp, synthetic construct
  source 1..75: mol_type = other DNA
tcacgcggtacaagtatcgcagaaacaaaagcggaccagcaacgcactgaagaacgtgcagctgctactgaagcc

SEQ ID NO: 781685 - DNA, 75 bp, synthetic construct
  source 1..75: mol_type = other DNA
ggattgcggtgcgtttgatgctcagccaccatctgaagccactctttacgaatggctatcagagcccattaaaac

SEQ ID NO: 781686 - DNA, 75 bp, synthetic construct
  source 1..75: mol_type = other DNA
tttggaatcgggtcaacaatcatcttggtacttctgctcacacttttgcgcaactagttgaggaactaggtgttg

SEQ ID NO: 781687 - DNA, 75 bp, synthetic construct
  source 1..75: mol_type = other DNA
ttccgccctgggggcaatattgggttgcatcggcttatctcaaagatcatcagccgaaaaaagcacagtcaataa

SEQ ID NO: 781688 - DNA, 75 bp, synthetic construct
  source 1..75: mol_type = other DNA
atgattatgattaaaaaactggtttcctttttctggcgcaaagacaacgcatcgacattaatactaaaacaacca

SEQ ID NO: 781689 - DNA, 75 bp, synthetic construct
  source 1..75: mol_type = other DNA
tcagcaacttcaggcgctttttacccgcaatccggaacttcacaacagattaaggggttacataccttttaaata

SEQ ID NO: 781690 - DNA, 75 bp, synthetic construct
  source 1..75: mol_type = other DNA
gacagattccgtgcgcagctcgtcctgcaggcgggtcatcaggggactggcggcatggtcgggaagtgctgtcat

SEQ ID NO: 781691 - DNA, 75 bp, synthetic construct
  source 1..75: mol_type = other DNA
atttatggtccaggtacgcctatgctcgacagcgtgcgcgacgtactgaatctgataagccagcatcatgattaa

SEQ ID NO: 781692 - DNA, 75 bp, synthetic construct
  source 1..75: mol_type = other DNA
cctacctgtaattaacaggggggctaatgattcgttgcatcctcaagtattagagaaaaaacttgcaagtgaacc

SEQ ID NO: 781693 - DNA, 75 bp, synthetic construct
  source 1..75: mol_type = other DNA
ttaggatttctccgagaattgcggcgagctggtatacccggaattgagactcaccaggatgcgatcgcatggtgt

SEQ ID NO: 781694 - DNA, 75 bp, synthetic construct
  source 1..75: mol_type = other DNA
attagatatcggagactatggaccctcaaatagatttgaaaaacaagttagctatctggaagaaaatccagattg

SEQ ID NO: 781695 - DNA, 75 bp, synthetic construct
  source 1..75: mol_type = other DNA
caaggagaacctaaacaagctgcgaatgtgggagaaaacagactttgctcctcgtcctgacgatatttttcagga

SEQ ID NO: 781696 - DNA, 75 bp, synthetic construct
  source 1..75: mol_type = other DNA
taagcctgaaatagcgccgtatccgttaatctcggttcgggaggcgaaccagcgtgctttggccgtccggcagta

SEQ ID NO: 781697 - DNA, 75 bp, synthetic construct
  source 1..75: mol_type = other DNA
cagttttattatttctggcatgctgttctggtttgagaataaacgtctggtattttcccaggttaatggcaatct

SEQ ID NO: 781698 - DNA, 75 bp, synthetic construct
  source 1..75: mol_type = other DNA
agaatatatagagcaagagggacactttgagacaaagtcgagaaggcgtgagttgcatatcgagattctttcaga

SEQ ID NO: 781699 - DNA, 75 bp, synthetic construct
  source 1..75: mol_type = other DNA
cttcagtcctgggcggactttgttgatgcgcagattgaggaggggcggaaggtggttatcgggaagtttgggaag

SEQ ID NO: 781700 - DNA, 75 bp, synthetic construct
  source 1..75: mol_type = other DNA
atttatctcggtttccacgaggctattaaaggcattattctcaatctgttaagccgaattattgataccaagaaa

SEQ ID NO: 781701 - DNA, 75 bp, synthetic construct
  source 1..75: mol_type = other DNA
taagtttctgcaccgattcagtaaatttcagcagggataaaatagtgcagataatcgaagcattacttccagagt

SEQ ID NO: 781702 - DNA, 75 bp, synthetic construct
  source 1..75: mol_type = other DNA
tggcgggtaccgcttatgtcaccgtcaatggggtgactgtgatggtggagggttcgtttaaataccagtcagcta

SEQ ID NO: 781703 - DNA, 75 bp, synthetic construct
  source 1..75: mol_type = other DNA
gtcacactgggggaatacccgtccttctccctcgcagaggctcgtatgtggtgtgagaaatgccgctcaatggtt

SEQ ID NO: 781704 - DNA, 75 bp, synthetic construct
  source 1..75: mol_type = other DNA
gcttaaacgcatgctggcctatgcgatttccaagggaatcatcttcaacaacccggcagctgctatcgaggctcg

SEQ ID NO: 781705 - DNA, 75 bp, synthetic construct
  source 1..75: mol_type = other DNA
gggttgctgcagaagggaagtgggaatgatatagaggctgagcgtgttttcagctggatagaaaaaataaatcaa

SEQ ID NO: 781706 - DNA, 75 bp, synthetic construct
  source 1..75: mol_type = other DNA
aggggaaacttcagagtctgacactctaaaagaaaaaattaaattgttggagtcaatttataacgatcagcaaat

SEQ ID NO: 781707 - DNA, 75 bp, synthetic construct
  source 1..75: mol_type = other DNA
cgagtgaggcgtcagcccagaatattctttccgtcggagttcaggagcgcttccttcctccaacgggacaaatcg

SEQ ID NO: 781708 - DNA, 75 bp, synthetic construct
  source 1..75: mol_type = other DNA
taaaaaaaaatgtggcggatgaagataaaagaaaagtctttgtaaacttcttttatcttagcctcgagagaatca

SEQ ID NO: 781709 - DNA, 75 bp, synthetic construct
  source 1..75: mol_type = other DNA
cgatgaactgagctgcttcctgagtgacggagccgtgcccctggacaacaatatctgcgagcgtgctatccgccc

SEQ ID NO: 781710 - DNA, 75 bp, synthetic construct
  source 1..75: mol_type = other DNA
tgaacgtcctgtggaaaaaatacggcaatggcgacaacggtattcccggccgatagtgaatgacctgtttgcctg

SEQ ID NO: 781711 - DNA, 75 bp, synthetic construct
  source 1..75: mol_type = other DNA
atgaaacccactttatatactgctactggtgagtgcgttacgccaggccgtgaactgggcaaaggtggtgaaggc

SEQ ID NO: 781712 - DNA, 75 bp, synthetic construct
  source 1..75: mol_type = other DNA
gtatacgatgaaaatcatcaggtgtacggtgtgcgtaaagtctggcgtcagttgttacgggaaggaatcagggtg

SEQ ID NO: 781713 - DNA, 75 bp, synthetic construct
  source 1..75: mol_type = other DNA
caggcaataggtgcaggtgccggacctgtaatatcaaaagccattgctaaagagtcttttccaccactaaagcta

SEQ ID NO: 781714 - DNA, 75 bp, synthetic construct
  source 1..75: mol_type = other DNA
tgcccggttgacaaagctaccgggcaaagacattagcgccgggcgtatagatgctactgcctatctgttagtgag

SEQ ID NO: 781715 - DNA, 75 bp, synthetic construct
  source 1..75: mol_type = other DNA
ctggatgaattaaccgaaaataacaccgagcggggggtatttactttctgctttcagcactctgttaaccccggt

SEQ ID NO: 781716 - DNA, 75 bp, synthetic construct
  source 1..75: mol_type = other DNA
cttcgaacgtctgatggaaggcgctaaactgctgaaatgtagcgagtttggcgacgcgattatcgcgaatatgta

SEQ ID NO: 781717 - DNA, 75 bp, synthetic construct
  source 1..75: mol_type = other DNA
gtgtcactggcctatacggagcgactaaaagaagcaaaactgctggcatcaacagggagtacaggcgactcgtat

SEQ ID NO: 781718 - DNA, 75 bp, synthetic construct
  source 1..75: mol_type = other DNA
ctcacattgaaactctaaataacgcgctatccggaaatacagagtctgccctcgcagaactgtccagagaaaatg

SEQ ID NO: 781719 - DNA, 75 bp, synthetic construct
  source 1..75: mol_type = other DNA
gagttagagatagtgaggctaaatgctcacattgaaactctaaataacgcgctatccggaaatacagagtctgcc

SEQ ID NO: 781720 - DNA, 75 bp, synthetic construct
  source 1..75: mol_type = other DNA
atgagcaatttacaaaaccaaatggggttatctgatgaagcgctggctagttacttaaggcaagcgaaggagaat

SEQ ID NO: 781721 - DNA, 75 bp, synthetic construct
  source 1..75: mol_type = other DNA
ctgacttcaacagctatgccagcgttggtgatctgcgcgcgttcgctgcggggcgcggatacaccatccctgctg

SEQ ID NO: 781722 - DNA, 75 bp, synthetic construct
  source 1..75: mol_type = other DNA
gcaagagcttctggattttcttaataatgatttatataaaaatgatggagagattctctcttataaagaatcaat

SEQ ID NO: 781723 - DNA, 75 bp, synthetic construct
  source 1..75: mol_type = other DNA
ctatcgacgccattaatgcaggtatttatatactggaatttatggagcaggttgtcaggccagagctgggggatg

SEQ ID NO: 781724 - DNA, 75 bp, synthetic construct
  source 1..75: mol_type = other DNA
agatgattaagtttattgggaagaatccccaacttggcgaaactattaaggaaaaaatggctaccaataaatttt

SEQ ID NO: 781725 - DNA, 75 bp, synthetic construct
  source 1..75: mol_type = other DNA
ctattgttgcgcctacccccgtcctgcgccccgaagctggaagttacgtcgccaacctggcagccgctaacactc

SEQ ID NO: 781726 - DNA, 75 bp, synthetic construct
  source 1..75: mol_type = other DNA
ctgctctcacagcgggtggcggcttatgcttccgaaatcaaccggctgaaggcgctggttgcgaaactgcagcgc

SEQ ID NO: 781727 - DNA, 75 bp, synthetic construct
  source 1..75: mol_type = other DNA
cggcggtgggggctcagcgggtggccgacattatcacgcggatgggggagtcgcatgtctacagggaggttaagg

SEQ ID NO: 781728 - DNA, 75 bp, synthetic construct
  source 1..75: mol_type = other DNA
cttggcgtaaatggcaatctgaatccggcggccagcgtctggggtaatgtgggcgtgcagctgggtgataatggc

SEQ ID NO: 781729 - DNA, 75 bp, synthetic construct
  source 1..75: mol_type = other DNA
gaatccggcggccagcgtctggggtaatgtgggcgtgcagctgggtgataatggctacaatgacaccgcaatgat

SEQ ID NO: 781730 - DNA, 75 bp, synthetic construct
  source 1..75: mol_type = other DNA
aaggggatgaattagcctatgaatcctatagtgcgaaaggcgcaaccgtctcgctggaagcgggttacggctttg

SEQ ID NO: 781731 - DNA, 75 bp, synthetic construct
  source 1..75: mol_type = other DNA
accagcatcactgcgtaaaagtgcgctttgaggaatgggattcactgattgatgagctgggggatgagactagcg

SEQ ID NO: 781732 - DNA, 75 bp, synthetic construct
  source 1..75: mol_type = other DNA
tacataacggcaagcgcgacaatctggagatcagccccaatttatgggcgggcgttggcttagtgcgcggcggtg

SEQ ID NO: 781733 - DNA, 75 bp, synthetic construct
  source 1..75: mol_type = other DNA
tttcattcatcaaacaacccgcccctaagcgaagcattcaatctctatgttcatacagcccctttagctgcaatc

SEQ ID NO: 781734 - DNA, 75 bp, synthetic construct
  source 1..75: mol_type = other DNA
accagttcaccaaaaggggcttcttgttgcaaatgatgattttacaccacgctttagccacgccaaaaaagcacc

SEQ ID NO: 781735 - DNA, 75 bp, synthetic construct
  source 1..75: mol_type = other DNA
catagccgggatcacctatgcccagctcatagccggaagtgaggcgatcgacgttaaacgtgctaacaacgccgt

SEQ ID NO: 781736 - DNA, 75 bp, synthetic construct
  source 1..75: mol_type = other DNA
aacaaaacagccgaagatatcatctcgctgggcaagaagaaaaaaggcggtacgttcttcaccgtcgaagatcta

SEQ ID NO: 781737 - DNA, 75 bp, synthetic construct
  source 1..75: mol_type = other DNA
gtgaaatactgtctgatagagcaattaactttcttaataattatggtgcgccttgcgtcccatatgttgctttat

SEQ ID NO: 781738 - DNA, 75 bp, synthetic construct
  source 1..75: mol_type = other DNA
gcgccagctgacactgacgatatcaatgccagactggctgcggctatggaatatgaggatgacgaggcttacggt

SEQ ID NO: 781739 - DNA, 75 bp, synthetic construct
  source 1..75: mol_type = other DNA
aacatgaagacgacgaggcttacggttactatgacataccgtcctccccggccccccggacttcagaggtggaaa

SEQ ID NO: 781740 - DNA, 75 bp, synthetic construct
  source 1..75: mol_type = other DNA
cctgcggctgaaaccgccacaacggacatcgctgacaccccggcccctgacggtgcgccggagatgaatgtggca

SEQ ID NO: 781741 - DNA, 75 bp, synthetic construct
  source 1..75: mol_type = other DNA
aactgattatggagtcaatagcgacaaccatatgtttcattgagagacacggccatgagcatcctgcggacccta

SEQ ID NO: 781742 - DNA, 75 bp, synthetic construct
  source 1..75: mol_type = other DNA
aggtaagcagtgatttacagaagacggtaacggcacgtaatgaggcagagggttttgccacagaggccgccagtc

SEQ ID NO: 781743 - DNA, 75 bp, synthetic construct
  source 1..75: mol_type = other DNA
ggttcagcaggataaacaggatactgagcggctgctggagcaggcacaacaggcagccagtgagtcttcagccag

SEQ ID NO: 781744 - DNA, 75 bp, synthetic construct
  source 1..75: mol_type = other DNA
gtgatcgcccagtccgatcaaaaagtgttatttattgatgccgacttacgccgtggttattcgcataacctgttt

SEQ ID NO: 781745 - DNA, 75 bp, synthetic construct
  source 1..75: mol_type = other DNA
aaacttactttactgcaaagcgtcaaaaagatttatatattaattcatatgtttatctatgcctcgaagattcag

SEQ ID NO: 781746 - DNA, 75 bp, synthetic construct
  source 1..75: mol_type = other DNA
gaggaatggagaactgatgcaataaataatcttttcacagaactcaccgatgattaccagcgctggctggcccgt

SEQ ID NO: 781747 - DNA, 75 bp, synthetic construct
  source 1..75: mol_type = other DNA
gaatgtggtaaggctactacgattagttcagccattcagtatctgatacatcagtatgcgattttaggtagcaag

SEQ ID NO: 781748 - DNA, 75 bp, synthetic construct
  source 1..75: mol_type = other DNA
caatccttgcctctgccgcaagcatgaccattccggttgctgcaatggcagacaatattgtttgtcatggcggct

SEQ ID NO: 781749 - DNA, 75 bp, synthetic construct
  source 1..75: mol_type = other DNA
cggaatatctggcaggtaaagatgagctcaacaaagtgatccagcattttggcaaaggaggctttgatgtgatta

SEQ ID NO: 781750 - DNA, 75 bp, synthetic construct
  source 1..75: mol_type = other DNA
tgaaacaggggctgcacatggcaaatcaaaaagtggttattgccggaagtgggccactattactggccgttgctg

SEQ ID NO: 781751 - DNA, 75 bp, synthetic construct
  source 1..75: mol_type = other DNA
agtcagcttcctccactggcccgccattaccgtgatgccgttgccaacgaatcgcggattcgtgtgctcaacgga

SEQ ID NO: 781752 - DNA, 75 bp, synthetic construct
  source 1..75: mol_type = other DNA
atggtgacggtactggctggagttctgaacgtggtgatggtccggctccaggaggcggttctcatgggaatagtg

SEQ ID NO: 781753 - DNA, 75 bp, synthetic construct
  source 1..75: mol_type = other DNA
ggcatctgtgtgattacattctgtttgattccgcgtgggtcggttacgaacagtttatcccgatgatggcggata

SEQ ID NO: 781754 - DNA, 75 bp, synthetic construct
  source 1..75: mol_type = other DNA
ggggcgaagtggcacggctttgaaggatatgccgcggatcagtattttgttgatccgtgcaagctgttactcact

SEQ ID NO: 781755 - DNA, 75 bp, synthetic construct
  source 1..75: mol_type = other DNA
taaggaaattccgatgcagcaagagagaggagatatctggaaagcgaaagtagcgatgactggtggtggttcatg

SEQ ID NO: 781756 - DNA, 75 bp, synthetic construct
  source 1..75: mol_type = other DNA
ttatcactggggctgggcaaggaattgggcgcgctattgctcgtcgtctcgctaaagatggattcaggattggct

SEQ ID NO: 781757 - DNA, 75 bp, synthetic construct
  source 1..75: mol_type = other DNA
actgcaacaatgggcaaaaaacgttgctcttgggcgcatttcagaacctgacgatgtggctgcttgtgtgtctta

SEQ ID NO: 781758 - DNA, 75 bp, synthetic construct
  source 1..75: mol_type = other DNA
ttatattatttctgttttcactccctcttattattttttaccaaccctgggtcaatgcattaccgccaatgcccc

SEQ ID NO: 781759 - DNA, 75 bp, synthetic construct
  source 1..75: mol_type = other DNA
gtcaggcgagtatagaaatgcgtactattggttcgcaggaaacagtttctgcaggtcaatatacgggaaatgtgc

SEQ ID NO: 781760 - DNA, 75 bp, synthetic construct
  source 1..75: mol_type = other DNA
cgggacaatatctgaaaattatcgccgtgtgtttgaagatcccgccaatacactccctgttctttataaagaagc

SEQ ID NO: 781761 - DNA, 75 bp, synthetic construct
  source 1..75: mol_type = other DNA
caccggcagaaattaatgaactcagtatgcaaatgttcagagtgtatgccaccagtgcattgattaatgccgtag

SEQ ID NO: 781762 - DNA, 75 bp, synthetic construct
  source 1..75: mol_type = other DNA
aacctatgacttcgaacgtctgatggacggcgctaacctgctgaaatgttcagagtttggtgaggcgatcatcga

SEQ ID NO: 781763 - DNA, 75 bp, synthetic construct
  source 1..75: mol_type = other DNA
ccgctgagatgatgctgcgccagatgggttggacggaagcggctgactttattgttaaaggtatggaaggcgcaa

SEQ ID NO: 781764 - DNA, 75 bp, synthetic construct
  source 1..75: mol_type = other DNA
ttcaatctgcgtaaggagtttgagcagaagaataccgatcttctccgccagcgtcaggctggtgaaatcgacgag

SEQ ID NO: 781765 - DNA, 75 bp, synthetic construct
  source 1..75: mol_type = other DNA
gcgaactgatcatcaaaatatctgcaaactctcagtcattccagtctgaaatttctcgtgcttcaagaatgggga

SEQ ID NO: 781766 - DNA, 75 bp, synthetic construct
  source 1..75: mol_type = other DNA
attaagaatattgatgtttttgagttaagttctcaagagaaatttaatttaatacaagtttattttaataatgct

SEQ ID NO: 781767 - DNA, 75 bp, synthetic construct
  source 1..75: mol_type = other DNA
gccagtgcccgggcatctgacgacgcgcagttgctgggatatggtgaaggctcacggatgcgtgaacgactccag

SEQ ID NO: 781768 - DNA, 75 bp, synthetic construct
  source 1..75: mol_type = other DNA
tatcagtatgttctggctaaccctggctggacaaccggtgacggattcatgataaaccatctgacatcggtgaag

SEQ ID NO: 781769 - DNA, 75 bp, synthetic construct
  source 1..75: mol_type = other DNA
acgcgggtggcgagatccatgcttcgaatattgtctggcccgaatcggtagatctgattgttgatgcgctgctcg

SEQ ID NO: 781770 - DNA, 75 bp, synthetic construct
  source 1..75: mol_type = other DNA
ccagacatcatgcctatgatggtgttgttataaagagaattgaaaaggaattatgtaaaaccataaaagatagag

SEQ ID NO: 781771 - DNA, 75 bp, synthetic construct
  source 1..75: mol_type = other DNA
cgctacgcttatcaggccttgtattatccctccagtgcagagaaaatcggccagttttctctgcctgcagtccgc

SEQ ID NO: 781772 - DNA, 75 bp, synthetic construct
  source 1..75: mol_type = other DNA
aaagatgaactttttattgattacatcgatgttgaatggagtttaagagcaaagagtaaaggttataatttatat

SEQ ID NO: 781773 - DNA, 75 bp, synthetic construct
  source 1..75: mol_type = other DNA
acagataagaaaagtttcactaaatatactgtcgttgcatttaaggacggcgtttctggtaagtttgggccttgt

SEQ ID NO: 781774 - DNA, 75 bp, synthetic construct
  source 1..75: mol_type = other DNA
gcgtaaatttttggggcggacaatatctattcactctccttttagacgttacttcttggttagaaatagttttta

SEQ ID NO: 781775 - DNA, 75 bp, synthetic construct
  source 1..75: mol_type = other DNA
gcacagagcgggaagaatgctgttgagaataactacctgagcgtgtctgaaaagacagaacttgagatagcaaaa

SEQ ID NO: 781776 - DNA, 75 bp, synthetic construct
  source 1..75: mol_type = other DNA
ctgctatccttctggcagtcataacttttatccctgtttccggtaatacatcatgggttgtcgggggatgggatt

SEQ ID NO: 781777 - DNA, 75 bp, synthetic construct
  source 1..75: mol_type = other DNA
ggagctgcagactattcgaggtttttcagacgacatggtttactttgtaaagcgtatgaaaaacagcctcctaaa

SEQ ID NO: 781778 - DNA, 75 bp, synthetic construct
  source 1..75: mol_type = other DNA
aggttatctttgcggagattaaggcaatggtatacgggccgacgttccatgccgcgttactacattcagcccgga

SEQ ID NO: 781779 - DNA, 75 bp, synthetic construct
  source 1..75: mol_type = other DNA
aatgactctaatcgaaagcgatccctcatatttccgtgatcttttcgggtttgctcacagatattacatacgtga

SEQ ID NO: 781780 - DNA, 75 bp, synthetic construct
  source 1..75: mol_type = other DNA
ggcgctttccggtaaaggagaaaacagcgagcagcgctatgcacgggtaaaagagttctacgtcggtgagggctg

SEQ ID NO: 781781 - DNA, 75 bp, synthetic construct
  source 1..75: mol_type = other DNA
ggactctgatggatttctgggtttaagtatactggtattcaatgttcttatgaccaataaaaaatatatacccat

SEQ ID NO: 781782 - DNA, 75 bp, synthetic construct
  source 1..75: mol_type = other DNA
ccatcgtggaagagatggtgaagcgcgacattgatcgtatttatttcgttgcctgcggatcgccactcaacgcgg

SEQ ID NO: 781783 - DNA, 75 bp, synthetic construct
  source 1..75: mol_type = other DNA
tggactttctggtcaccgaaaatatggttcaggaagtggaaaaagttctcagccatgacgttccgctggtgcacg

SEQ ID NO: 781784 - DNA, 75 bp, synthetic construct
  source 1..75: mol_type = other DNA
cccgccggtgaaccccgcgaccagttccaccggcagtattttggcgcgcagcttatggaagaggcggggctggta

SEQ ID NO: 781785 - DNA, 75 bp, synthetic construct
  source 1..75: mol_type = other DNA
tgacgcttaatagtgaagagcgtcgccaattgtattcaaaaaaaactcgaggcattataaataaagccagtaaag

SEQ ID NO: 781786 - DNA, 75 bp, synthetic construct
  source 1..75: mol_type = other DNA
tcaaagcgctggaactgggtcgggcctgcggcgcgcttactgcggcattcaccaaacgcgcggatagcccgatta

SEQ ID NO: 781787 - DNA, 75 bp, synthetic construct
  source 1..75: mol_type = other DNA
tccgctgcgcccgctgggttacaaagaaggcattgtaacgctaatggaatttacctggacgcacggctgcgtgat

SEQ ID NO: 781788 - DNA, 75 bp, synthetic construct
  source 1..75: mol_type = other DNA
gatcgatagtcaaaagccgtggtccttatatttaggcaggttgcaactattactatcagaaaatgaattacagga

SEQ ID NO: 781789 - DNA, 75 bp, synthetic construct
  source 1..75: mol_type = other DNA
atgtgcttctctatcgccacgcgcagccagcgacggtagtgccgaaagaccatcaaatccgcgaactggttaatc

SEQ ID NO: 781790 - DNA, 75 bp, synthetic construct
  source 1..75: mol_type = other DNA
tcagccggaaagccgttgccgcaggcgaccgcgtaaaccgtcagttcgtggcagaacgacctgaccagctgtggg

SEQ ID NO: 781791 - DNA, 75 bp, synthetic construct
  source 1..75: mol_type = other DNA
atggaaacgacattcgtgctggatgccctggagcaggcgttatgggtccgtcaaccgtccggcacagtccatcac

SEQ ID NO: 781792 - DNA, 75 bp, synthetic construct
  source 1..75: mol_type = other DNA
aacctatgacttcgaacgtctgatggacggcgctaagctgctgaaatgttcagagtttggtgacgcgatcatcga

SEQ ID NO: 781793 - DNA, 75 bp, synthetic construct
  source 1..75: mol_type = other DNA
aacctatgacttcgaacgtctgatggagggcgctaacctgctgaaatgttcagagtttggtgacgcgatcatcga

SEQ ID NO: 781794 - DNA, 75 bp, synthetic construct
  source 1..75: mol_type = other DNA
cggacagccatttcatatttaacttcagagtaactagaattttagacaaacaatcaaataagtttgatgatgaat

SEQ ID NO: 781795 - DNA, 75 bp, synthetic construct
  source 1..75: mol_type = other DNA
taacaatcgacgattgctgggaaggctgggtcatatcccaccggcagaagcagaaaaagcttattatgcttccat

SEQ ID NO: 781796 - DNA, 75 bp, synthetic construct
  source 1..75: mol_type = other DNA
gtggcgttcatcattgatgtgtttgccggatacattgtggggtgccgggtctcatcgtccatggaaacgacattc

SEQ ID NO: 781797 - DNA, 75 bp, synthetic construct
  source 1..75: mol_type = other DNA
aatatgttcttcacatggccttgaaatattaaagtcgtggagtaaagcaggaagttcatatgtcactgttgggag

SEQ ID NO: 781798 - DNA, 75 bp, synthetic construct
  source 1..75: mol_type = other DNA
tggcgttcatcattgatgtgttcgccggatacatcgtgggatggcgggtctcatcgtccatggaaacgacattcg

SEQ ID NO: 781799 - DNA, 75 bp, synthetic construct
  source 1..75: mol_type = other DNA
gtgggcccgtcgtccgtctggcccatccatcacagcgataaaggctctcagtatgtgtcactggcctatacggag

SEQ ID NO: 781800 - DNA, 75 bp, synthetic construct
  source 1..75: mol_type = other DNA
ctttgaacgtctgatggaaggcgctaaattgctgaaatgtagcgagtttggcgacgcgatcatcaagaacatgtg

SEQ ID NO: 781801 - DNA, 75 bp, synthetic construct
  source 1..75: mol_type = other DNA
atctatggatgtttaagtttatttctttcatcctcggagtttaatggtctttctgccccaggcatgccttcaact

SEQ ID NO: 781802 - DNA, 75 bp, synthetic construct
  source 1..75: mol_type = other DNA
aaagacgggcgagcttcgtgtcatgccgctcttcaacggccagccagcagccaccgaagccgcgcagttgacggt

SEQ ID NO: 781803 - DNA, 75 bp, synthetic construct
  source 1..75: mol_type = other DNA
aactctacgcttgttgctgacaataaggctccgaccgtcaaaacgacgacgaaactcaccttcaccgtgaaggat

SEQ ID NO: 781804 - DNA, 75 bp, synthetic construct
  source 1..75: mol_type = other DNA
atgtgggtcgacattcagacgccggaaggggtgacggagaaggattatcagttcctgccgtcgaaaaatgaccat

SEQ ID NO: 781805 - DNA, 75 bp, synthetic construct
  source 1..75: mol_type = other DNA
tgggtttataaccatgagcggcccaatatggcgctgggtggctacacgccgaaacagcgtctggcacaggccgca

SEQ ID NO: 781806 - DNA, 75 bp, synthetic construct
  source 1..75: mol_type = other DNA
ggagctcaatctgcggataaaacccaggaaacggttggttcgggctaagccagagccgttggcggttcccgacca

SEQ ID NO: 781807 - DNA, 75 bp, synthetic construct
  source 1..75: mol_type = other DNA
gttttataatcacgaacgcccgaatatggcgttaaatggctacacgccaatgcaacatattcaacgtatgaccta

SEQ ID NO: 781808 - DNA, 75 bp, synthetic construct
  source 1..75: mol_type = other DNA
tggactccgagggtaatccggtgacgggagaagccagccgcctgcgatttgttccgcaagacactaatggtgtaa

SEQ ID NO: 781809 - DNA, 75 bp, synthetic construct
  source 1..75: mol_type = other DNA
tttaacgccctgacctatggcgggtacgaaatgaagccagtgacggtgaccattaccgcggtggatgccgatacg

SEQ ID NO: 781810 - DNA, 75 bp, synthetic construct
  source 1..75: mol_type = other DNA
aagcgtgaatggcattaatgtatgttttgaaaaaaatgaaatgatatattggattaaaaaagaaatcccttttct

SEQ ID NO: 781811 - DNA, 75 bp, synthetic construct
  source 1..75: mol_type = other DNA
agccaacgatgaggggaaagcagagttgcaggtggtttcagtgactgccggaacgtatgagatcacggcatcggc

SEQ ID NO: 781812 - DNA, 75 bp, synthetic construct
  source 1..75: mol_type = other DNA
aactggtctcaatccggatgcaccgtcattatcgggcgcagctgctgtaggttctacggcatcaggctggacgga

SEQ ID NO: 781813 - DNA, 75 bp, synthetic construct
  source 1..75: mol_type = other DNA
ccggtcagggtagtcagtggcaagtaacgctcccggcttatcgtccaggcaaagacaattattatgcgatttctg

SEQ ID NO: 781814 - DNA, 75 bp, synthetic construct
  source 1..75: mol_type = other DNA
cgacaaatatccggtatctaaattattctatgcatcaatgggatttcctgaacgctggaatgaggaacggttatt

SEQ ID NO: 781815 - DNA, 75 bp, synthetic construct
  source 1..75: mol_type = other DNA
ctcaacgtgccgggaatgcggctgatttgaagtggtcaacaaaaactggccaccgagttagagttttttccagta

SEQ ID NO: 781816 - DNA, 75 bp, synthetic construct
  source 1..75: mol_type = other DNA
aaaaaaataatataacacaaaaagcgttagaaatgatcaacagtggaaaagtatataggtatgcagatcaggatg

SEQ ID NO: 781817 - DNA, 75 bp, synthetic construct
  source 1..75: mol_type = other DNA
ctagttctcaaagtttcaactcagcatctggaaaattaatagcacttgatagccagttagctaatgattttgatg

SEQ ID NO: 781818 - DNA, 75 bp, synthetic construct
  source 1..75: mol_type = other DNA
catctacaatgaaatgattagcagccttgattttaacgatagagacctagcatcccacctcaacagcttccgcgt

SEQ ID NO: 781819 - DNA, 75 bp, synthetic construct
  source 1..75: mol_type = other DNA
ttcgagaaatatgggggaagattaaccatgctagataataacactataagtgctggagaatctaaccttaaaact

SEQ ID NO: 781820 - DNA, 75 bp, synthetic construct
  source 1..75: mol_type = other DNA
agtttatcaccacggattttttcagcgaggcagcgcgtacggcgctacgggatgtggcctggagagcaggtaggt

SEQ ID NO: 781821 - DNA, 75 bp, synthetic construct
  source 1..75: mol_type = other DNA
aggattttgtgaaaatgcaaaatgtttttttaacggtgaaaaactttaaggcagaagaaaaaataaaccaggaga

SEQ ID NO: 781822 - DNA, 75 bp, synthetic construct
  source 1..75: mol_type = other DNA
aggattttgtgaaaatgcaaaatgtttttttaacggtgaaaaactttaaggcagaagaaaaaaataaaccaggag

SEQ ID NO: 781823 - DNA, 75 bp, synthetic construct
  source 1..75: mol_type = other DNA
ttagttatcactgatgttggtaatgcgcggaaagtgcttgagagatgtagctactatcgatttaaagcctatctg

SEQ ID NO: 781824 - DNA, 75 bp, synthetic construct
  source 1..75: mol_type = other DNA
gagtactctcaatcggcatccacattagttggcgaaattaaatcacttctgatgaatagccaagatagatacttc

SEQ ID NO: 781825 - DNA, 75 bp, synthetic construct
  source 1..75: mol_type = other DNA
gccgatagaggcaatcatcgaagcggcgcggatgcgtttacgcccaatcctgatgacctctctggcctttattct

SEQ ID NO: 781826 - DNA, 75 bp, synthetic construct
  source 1..75: mol_type = other DNA
gcacgccgttccgtatgttgccggataacatcaaccaatggtatgtacgcaacgcctctggcacgatggcaccgc

SEQ ID NO: 781827 - DNA, 75 bp, synthetic construct
  source 1..75: mol_type = other DNA
caattgctcagccttcaacacatttgaaaaatatatcattcctaaatcccccaatggttttgcttaaagagtttg

SEQ ID NO: 781828 - DNA, 75 bp, synthetic construct
  source 1..75: mol_type = other DNA
tttatgcttctggcggttattacttaacttataaaggtgcaacagcccaatctaaagattgggcatttatggttg

SEQ ID NO: 781829 - DNA, 75 bp, synthetic construct
  source 1..75: mol_type = other DNA
ttttgattttgaactgactttggcgggcagtgttggtgcaagcttaggtgttgagttgggtgtatcggtgaaaag

SEQ ID NO: 781830 - DNA, 75 bp, synthetic construct
  source 1..75: mol_type = other DNA
cgcaagttgtgcgaacagcctgagctactggaacatcgtgaagatcccgaactgccggtggagcagcaatatgca

SEQ ID NO: 781831 - DNA, 75 bp, synthetic construct
  source 1..75: mol_type = other DNA
tgcaatggctggctaacatttctggccgcgatgatattgacgatatagacggcggtgaaattcgtgaactggcgc

SEQ ID NO: 781832 - DNA, 75 bp, synthetic construct
  source 1..75: mol_type = other DNA
ggcaggttctggttgttttattttcgctcgttgcaactttagttcagttaaaattatcaacattatttctcgata

SEQ ID NO: 781833 - DNA, 75 bp, synthetic construct
  source 1..75: mol_type = other DNA
tcattttaaatgagaaaataaaaatactatcaccagatttagttgtttaccgattacaacaaagaatgaaagaaa

SEQ ID NO: 781834 - DNA, 75 bp, synthetic construct
  source 1..75: mol_type = other DNA
ttaacaatcgggtttgtgtggggcaggtacgtatcagcgcagacgtttatataaactccggtatgtctgaaagcg

SEQ ID NO: 781835 - DNA, 75 bp, synthetic construct
  source 1..75: mol_type = other DNA
cgcggcggcgtggcgaaactggatgaaggtcaccggctggccgcactctggcaggcgctgccggaagaactccgc

SEQ ID NO: 781836 - DNA, 75 bp, synthetic construct
  source 1..75: mol_type = other DNA
atcaccgcccttgaacactggaatgctgctgtagagcacctggtgcagatgaacggggataccgtcaccgtggat

SEQ ID NO: 781837 - DNA, 75 bp, synthetic construct
  source 1..75: mol_type = other DNA
gacagatgttttaattgagtacgtcacagatagtggtgatgtaaccggctatagtggatgtaacaggcagcacaa

SEQ ID NO: 781838 - DNA, 75 bp, synthetic construct
  source 1..75: mol_type = other DNA
ctgtttccggggcgcgctgctgggtgggatttgatccttcgcgtggcgtagatagttctgctgtgtacgaggtgc

SEQ ID NO: 781839 - DNA, 75 bp, synthetic construct
  source 1..75: mol_type = other DNA
gcaataaaacagccatcatgccggagctgaaaaagcatctgccagcaggccagcgccttgttgaacctttcgcgg

SEQ ID NO: 781840 - DNA, 75 bp, synthetic construct
  source 1..75: mol_type = other DNA
tagcgggtgaatgcgcaatgtttattattatagcgatggtttgcgtatctcttagcaaaagagttccctatcatt

SEQ ID NO: 781841 - DNA, 75 bp, synthetic construct
  source 1..75: mol_type = other DNA
atggaaaacttcaaagtacgtcttaaaaatcacattgaacatgttaaaaatgttagagaacactgcacaacggaa

SEQ ID NO: 781842 - DNA, 75 bp, synthetic construct
  source 1..75: mol_type = other DNA
caacgagtcagcttgggaagaaatgacctgcttattcgcaccttccctagcatttcagtattacctgaataaaat

SEQ ID NO: 781843 - DNA, 75 bp, synthetic construct
  source 1..75: mol_type = other DNA
atcggaccgtatcactcaccgcacggtgaacggcgaaccggcagagcagtggcagtatgatggccacggctggct

SEQ ID NO: 781844 - DNA, 75 bp, synthetic construct
  source 1..75: mol_type = other DNA
ccccccctcttcccgaaactgtggcagcctggtttcctgaagcagatcgtcgggaggtttctacacaatggactt

SEQ ID NO: 781845 - DNA, 75 bp, synthetic construct
  source 1..75: mol_type = other DNA
ggcggcggtgatgtcaagctgttaactgttctttcgttagctattgatgaacatgaactggctaattttctcgtc

SEQ ID NO: 781846 - DNA, 75 bp, synthetic construct
  source 1..75: mol_type = other DNA
tgcacatgatgatgcagtccaggccgtttaccggaaagcgtatttcagcgacagcgggtcatccggcgagtctgt

SEQ ID NO: 781847 - DNA, 75 bp, synthetic construct
  source 1..75: mol_type = other DNA
gccttttgcggtggtgaagcggacagcgatccccatggcagtcggtttcgtggtgaatatgattgccacaatcac

SEQ ID NO: 781848 - DNA, 75 bp, synthetic construct
  source 1..75: mol_type = other DNA
ttgaagtcctttctggtgtgagaaccttaagtaaatcgtccgcagccccattaccgtcttatatcactggcgctg

SEQ ID NO: 781849 - DNA, 75 bp, synthetic construct
  source 1..75: mol_type = other DNA
ccaaaaatgtcaaaggcgctacattagaatccacaggacgcgctacggtgggtgaatttgttcaggttaatggaa

SEQ ID NO: 781850 - DNA, 75 bp, synthetic construct
  source 1..75: mol_type = other DNA
gcttaccagttcggttatgatatggatgctattgttggcggagctcataatggggccgccgatgcaatgagacat

SEQ ID NO: 781851 - DNA, 75 bp, synthetic construct
  source 1..75: mol_type = other DNA
tgccgaacgccttcaggcgaaagctgaccaagaacagcgcttcaggtcctttgccgaagctctggcgggaggtgc

SEQ ID NO: 781852 - DNA, 75 bp, synthetic construct
  source 1..75: mol_type = other DNA
cctttgataagctggtcccacctgatgccgaacgccttcaggcgaaagctgaccaagaacagcgcttcaggtcct

SEQ ID NO: 781853 - DNA, 75 bp, synthetic construct
  source 1..75: mol_type = other DNA
ggcacgagccgccttgcttcccatgttcagccttccttcacagcgggatcgtaagctagctcttgaagcattgga

SEQ ID NO: 781854 - DNA, 75 bp, synthetic construct
  source 1..75: mol_type = other DNA
gggagtgtgcccttggaggaggcggtagtgggggcggtctctgggtatctctgtctgtgggggctgtactggctt

SEQ ID NO: 781855 - DNA, 75 bp, synthetic construct
  source 1..75: mol_type = other DNA
actcgcaccgccgataaagattctgcaaaaacttttgttcaggagacgctgaaagatacctgggagtctgctgac

SEQ ID NO: 781856 - DNA, 75 bp, synthetic construct
  source 1..75: mol_type = other DNA
gagtatcgagtgggcgcatattataaaataatatatcctgatggtactgtcgtatctgatggctcaactcatccc

SEQ ID NO: 781857 - DNA, 75 bp, synthetic construct
  source 1..75: mol_type = other DNA
aattgtaaaaatggttgcgccagtagagtatcgagtgggcgcatattataaaataatatatcctgatggtactgt

SEQ ID NO: 781858 - DNA, 75 bp, synthetic construct
  source 1..75: mol_type = other DNA
atcaacctcaacggtggcgcgatcgcgctgggtcatccgctgggctgttccggtgcgcgtatcagcaccacgctg

SEQ ID NO: 781859 - DNA, 75 bp, synthetic construct
  source 1..75: mol_type = other DNA
ttaataaaatcaccaccaaaaaaattgctactgaagaaattaccactaaacaaagtactgctgaagaaattactg

SEQ ID NO: 781860 - DNA, 75 bp, synthetic construct
  source 1..75: mol_type = other DNA
caaaacaatgaaaggtcacaataaagtcctttacttggaacctgggtggaatgctaacctggacggtgctaccct

SEQ ID NO: 781861 - DNA, 75 bp, synthetic construct
  source 1..75: mol_type = other DNA
ttcattgaaaataaggagatatgtactcagacgttgcagctgcataaaggcccaggtaacttgggcgttgatctt

SEQ ID NO: 781862 - DNA, 75 bp, synthetic construct
  source 1..75: mol_type = other DNA
aacctgggtggaatgctaacctggacggtgctaccctggacggtgctatcctggacggtgctaccgtggatggtg

SEQ ID NO: 781863 - DNA, 75 bp, synthetic construct
  source 1..75: mol_type = other DNA
aacttgggcgttgatcttagaaaggcttaccttcccggcgttgacatgagggattgttaccttggtaaaaaaaca

SEQ ID NO: 781864 - DNA, 75 bp, synthetic construct
  source 1..75: mol_type = other DNA
ttgttaccttggtaaaaaaacaatgaaaggtagcaatgatatcctttatgagagacctgggtggaatgctaacct

SEQ ID NO: 781865 - DNA, 75 bp, synthetic construct
  source 1..75: mol_type = other DNA
aaggtttaagtcgtaataccagccagcccaatgatacggcgttggttagtggacaagtgacctggaatgcgccgt

SEQ ID NO: 781866 - DNA, 75 bp, synthetic construct
  source 1..75: mol_type = other DNA
gtcagcttgggaagaaatgacctgcttattcgcaccttccctaactaagtttaataacacgatagaggagaagat

SEQ ID NO: 781867 - DNA, 75 bp, synthetic construct
  source 1..75: mol_type = other DNA
agtgtttattatctaagattcatcgaggatgaggggttatttacctcgtttgaatttgggtttgttattatttta

SEQ ID NO: 781868 - DNA, 75 bp, synthetic construct
  source 1..75: mol_type = other DNA
agacttcctccatcaactaaagctttcttttctgagattgcgaaattatcatcagatcttagttctggtgtgaaa

SEQ ID NO: 781869 - DNA, 75 bp, synthetic construct
  source 1..75: mol_type = other DNA
cgcgtgggcaactggtcagtcagaaggatgcgcaggggcgtgaaatccgttatgagtacagcgccgcaggcgacc

SEQ ID NO: 781870 - DNA, 75 bp, synthetic construct
  source 1..75: mol_type = other DNA
cttctgtaaaagaacaccctggtttttcattggcgttaaatgctcacagatcgcttactcaacaaatacgtttct

SEQ ID NO: 781871 - DNA, 75 bp, synthetic construct
  source 1..75: mol_type = other DNA
aaaatcaacacaaaaaagtttttcagaagctttgaagaatcagacaccagttcttgatgcttccttggaggctgt

SEQ ID NO: 781872 - DNA, 75 bp, synthetic construct
  source 1..75: mol_type = other DNA
cgttcaccgaatattttgctgatcccagggacgtcttcggttgcgcatttacgggagaatatggctgctgaaaaa

SEQ ID NO: 781873 - DNA, 75 bp, synthetic construct
  source 1..75: mol_type = other DNA
ttgccgaaattgtctgtgtgcaaaacgaatacaaacatcgcgcaccgtgctgatgatgcaatgattgatgctttg

SEQ ID NO: 781874 - DNA, 75 bp, synthetic construct
  source 1..75: mol_type = other DNA
gttaatcaacaaatcgagaccaagggcgacgctattgtaggagaaccagttatgaaggacttaagcaacaaaagc

SEQ ID NO: 781875 - DNA, 75 bp, synthetic construct
  source 1..75: mol_type = other DNA
cacgattgattgaaattattcaaccagcgcttgttaatgctcgttttcaaggatatgttggggttgactgtaata

SEQ ID NO: 781876 - DNA, 75 bp, synthetic construct
  source 1..75: mol_type = other DNA
tgcgcaagctggcacaggtggcgtatggagtgctgaagtcaggcgtgccgttcaatgcgtcacggcataatccgg

SEQ ID NO: 781877 - DNA, 75 bp, synthetic construct
  source 1..75: mol_type = other DNA
ctgtccgggtgcagctccgggtcgggcaggcggttacctgccgggtctgtggcatacgggatatcaatgcccagg

SEQ ID NO: 781878 - DNA, 75 bp, synthetic construct
  source 1..75: mol_type = other DNA
gctgggagcgtgatgaagtaaccggtcgtttgcggcaatggggcagtattgaggtaagtgaggatgatggtaagc

SEQ ID NO: 781879 - DNA, 75 bp, synthetic construct
  source 1..75: mol_type = other DNA
cgaatccttattaaactggaataccgctttacagcgtaaccagcgggagtctgcatcgttgcccccggtaacaac

SEQ ID NO: 781880 - DNA, 75 bp, synthetic construct
  source 1..75: mol_type = other DNA
ccggatccgcgttctgccagagagcaggaggacaaaacagggggctactgggaaaacctgctgcagaaaatggac

SEQ ID NO: 781881 - DNA, 75 bp, synthetic construct
  source 1..75: mol_type = other DNA
ttacagataaattttctactctgactaaaatgccagatgaaaatctgaatgaaaaaaatagaacgaaagaatata

SEQ ID NO: 781882 - DNA, 75 bp, synthetic construct
  source 1..75: mol_type = other DNA
ttattaccggatgaacagggcgatcagaagcagattctggagtatgtcgggcgtggcgacatgaccgctgcccgg

SEQ ID NO: 781883 - DNA, 75 bp, synthetic construct
  source 1..75: mol_type = other DNA
cggtgacagcaatgccgcctactgggattcggttcgtcacggcctgagccgttcaggaaacagcgacggagcgta

SEQ ID NO: 781884 - DNA, 75 bp, synthetic construct
  source 1..75: mol_type = other DNA
aggccactgtatcgtttggcggcaaactggacagctcatggcgtcgttctgcatccgatctgcgcagggatttac

SEQ ID NO: 781885 - DNA, 75 bp, synthetic construct
  source 1..75: mol_type = other DNA
ttctttgctaaaagaagcggccaaaaaaatgattaacacctgtaatgagtatcagaaaagacacggtaaaaagac

SEQ ID NO: 781886 - DNA, 75 bp, synthetic construct
  source 1..75: mol_type = other DNA
atggcgttaacacaccgcgaactctgtcagattgcgtacaaattccttaagcgcaacgggttcaaggtttgcttt

SEQ ID NO: 781887 - DNA, 75 bp, synthetic construct
  source 1..75: mol_type = other DNA
ttatccaccagcaggcctggtatctggtggcagagcacgacggacatatcgccgtattctccctggatgaaatcc

SEQ ID NO: 781888 - DNA, 75 bp, synthetic construct
  source 1..75: mol_type = other DNA
ttgacagttgcctgactggcagagcttttgtaaaaaaatcttgcatagggaatcccgcagtgcagagtggaaact

SEQ ID NO: 781889 - DNA, 75 bp, synthetic construct
  source 1..75: mol_type = other DNA
actcacagtgattattttgtgaaagaaatcaatagcttgattatgttgcatggcgtttctgaaaatatgattgaa

SEQ ID NO: 781890 - DNA, 75 bp, synthetic construct
  source 1..75: mol_type = other DNA
taacactggtaaaacatgggttatgtatgggttatatggcttcctaaatatgccatcaccatctttaaaattgcc

SEQ ID NO: 781891 - DNA, 75 bp, synthetic construct
  source 1..75: mol_type = other DNA
gcagcagaaatcaagcgcgccaaactggccggtgaaagcctgggggatttgaagcgccgctataccgatatttcc

SEQ ID NO: 781892 - DNA, 75 bp, synthetic construct
  source 1..75: mol_type = other DNA
atggcatcaaaattaaactggctgttgcaaaacacctctccgggaagcctggtgttacaatcgtggctgacccgg

SEQ ID NO: 781893 - DNA, 75 bp, synthetic construct
  source 1..75: mol_type = other DNA
acaatttaaaagtggtcgaaaaggcggataacgcggcacaaatcaaagacgcgttaaccaaaatgcgcgctgcgg

SEQ ID NO: 781894 - DNA, 75 bp, synthetic construct
  source 1..75: mol_type = other DNA
atgcgtaaaagcctgttagctattcttgcagtctcctcattggtattcagttcggcgtcgtttgccgctgatctg

SEQ ID NO: 781895 - DNA, 75 bp, synthetic construct
  source 1..75: mol_type = other DNA
gccgcgcatcaaatttaaatcgacctccattgaggcgataagaggtatggtggcgcaaggccacggtgtcaccat

SEQ ID NO: 781896 - DNA, 75 bp, synthetic construct
  source 1..75: mol_type = other DNA
atctgtctgaaattatttggaatgcaggtatatgtggctgatttgtatcagctaatgagtacaggtctgaatcta

SEQ ID NO: 781897 - DNA, 75 bp, synthetic construct
  source 1..75: mol_type = other DNA
ccaaatggtttaaagaatttcccggcgttgagtggctgatggtatcagctctgaagcttcctcaactggatgaga

SEQ ID NO: 781898 - DNA, 75 bp, synthetic construct
  source 1..75: mol_type = other DNA
ctccgcgctgtacgacgcccgcgaccagatggtggaagaactgagcgggatgatggatgtgcaggtcaatatcga

SEQ ID NO: 781899 - DNA, 75 bp, synthetic construct
  source 1..75: mol_type = other DNA
aacagcgccggtaacggcgtacaggtcgacagcattcgccgcgtctccaaccagtatcaggtgaatcaggtgtgg

SEQ ID NO: 781900 - DNA, 75 bp, synthetic construct
  source 1..75: mol_type = other DNA
cgggatcaagcgcattgtgactttcctgcgaaacgacctctatcccggcgttctgtcgttcggacagggggtggt

SEQ ID NO: 781901 - DNA, 75 bp, synthetic construct
  source 1..75: mol_type = other DNA
aaagtaaaagaagcacaggctgccgcagagcaactgaaaacgacccgcaacgcctatcaccagaagtatcgttaa

SEQ ID NO: 781902 - DNA, 75 bp, synthetic construct
  source 1..75: mol_type = other DNA
cgcgggttaaaagtattccttcatattgataaaatttctgaagagataccttatgaaataatatcattgggcaat

SEQ ID NO: 781903 - DNA, 75 bp, synthetic construct
  source 1..75: mol_type = other DNA
gtctgagattggcgtctcttggtggtgaattcaaaattcactgtatagaggctgccatcatggctactaccccta

SEQ ID NO: 781904 - DNA, 75 bp, synthetic construct
  source 1..75: mol_type = other DNA
atcgctttcgtgaaaaactcaaaccggatcagtatctctgtcgtatcgaaggtacgcagtttgtcctcgtgagcc

SEQ ID NO: 781905 - DNA, 75 bp, synthetic construct
  source 1..75: mol_type = other DNA
tgattatgttttccgctacgggggcgatgaatttatcattgtattgactgaagcttctgaaaacgaaacgttacg

SEQ ID NO: 781906 - DNA, 75 bp, synthetic construct
  source 1..75: mol_type = other DNA
acagcaatatcacgggtggtggattactggcttaccgcgtggggtataactcttcaatgtattctgtttatctgc

SEQ ID NO: 781907 - DNA, 75 bp, synthetic construct
  source 1..75: mol_type = other DNA
ttgagcgttatgaaaattttcatttttacaaagatgtaggccagttaccatataatgctcatgaattattaaatt

SEQ ID NO: 781908 - DNA, 75 bp, synthetic construct
  source 1..75: mol_type = other DNA
aatattttttttaggcggtgaaaccgaacttttcaataaatggtttaaaaaatggagtatcggaaaaccccatga

SEQ ID NO: 781909 - DNA, 75 bp, synthetic construct
  source 1..75: mol_type = other DNA
attttttaaaaaaaattaaattaataaatatatttctagcagaacatttatcgttggttgagtattataagtcta

SEQ ID NO: 781910 - DNA, 75 bp, synthetic construct
  source 1..75: mol_type = other DNA
gatcctcgacgagccaacccgcggcattgatgttggtgcccacgccgagatcatccgcctgattgaaacgctgtg

SEQ ID NO: 781911 - DNA, 75 bp, synthetic construct
  source 1..75: mol_type = other DNA
acagcggcacggcgttgatcaaaggcaaaccgcaaaacctgcgatcgccacatcaggcttcggtactgggcatcg

SEQ ID NO: 781912 - DNA, 75 bp, synthetic construct
  source 1..75: mol_type = other DNA
gcccaccagcttccggtagctatttacagttattgccagtatcaggacggtgcagcccccgggcgtggtgcctag

SEQ ID NO: 781913 - DNA, 75 bp, synthetic construct
  source 1..75: mol_type = other DNA
aagctgatcttgatgtacgccgccgcgcttatggctacgtcgtccggcgcgcgccgcatcaaatcgcagggtgcg

SEQ ID NO: 781914 - DNA, 75 bp, synthetic construct
  source 1..75: mol_type = other DNA
aatatcatcctcgctctccaggcccagcgcggctggctacgacccatttcccgcaaagagcagcaagagattgcc

SEQ ID NO: 781915 - DNA, 75 bp, synthetic construct
  source 1..75: mol_type = other DNA
atgccgagatcatccgcctgattgaaacgctgtgcgctgacggtctggcgctgctggtgatctcttccgaactgg

SEQ ID NO: 781916 - DNA, 75 bp, synthetic construct
  source 1..75: mol_type = other DNA
tccggcgcagaatttaaccagcaaaaaaatacgcttctggtgctgtctcatgaatctcgcgcactccaggaagta

SEQ ID NO: 781917 - DNA, 75 bp, synthetic construct
  source 1..75: mol_type = other DNA
gctaccgtatcaaccgacgcggcgacagggtggttgattttgacccgacctgtatccgatctttttacagcgttg

SEQ ID NO: 781918 - DNA, 75 bp, synthetic construct
  source 1..75: mol_type = other DNA
caagtttgtgatgcttattagcgacgcgcttctccagtatctgccatccgatccagacgtggcccgtgacgccgc

SEQ ID NO: 781919 - DNA, 75 bp, synthetic construct
  source 1..75: mol_type = other DNA
agcgggcggcaaaagcgccaacatcgttttcgccgactgcccggatttgcaacaggcggcaagcgccaccgccgc

SEQ ID NO: 781920 - DNA, 75 bp, synthetic construct
  source 1..75: mol_type = other DNA
aagaaattatcaaccgcagcatcgccaatggctggcaaggcctgtttgagccaaatggtgccaagcctcaaccaa

SEQ ID NO: 781921 - DNA, 75 bp, synthetic construct
  source 1..75: mol_type = other DNA
atcagcggtgctggagcaattgcaatgggggcatcagctcaagtcagcggcggagcctctgcattaaaggcagcg

SEQ ID NO: 781922 - DNA, 75 bp, synthetic construct
  source 1..75: mol_type = other DNA
cagggtggttgattttgacccgacctgtatccgatctttttacagcgttgatcagctgaaactgcttgataataa

SEQ ID NO: 781923 - DNA, 75 bp, synthetic construct
  source 1..75: mol_type = other DNA
gggcaccttaatcgactgcgcccacgccgactcggtccatagctttattcgggaaggcgaaagcaaagggcaact

SEQ ID NO: 781924 - DNA, 75 bp, synthetic construct
  source 1..75: mol_type = other DNA
atgcaaatcggtatcaaaaaaatcgccgcgctatacttgccggatggtgtgttgaacgtggtgacgggttttggt

SEQ ID NO: 781925 - DNA, 75 bp, synthetic construct
  source 1..75: mol_type = other DNA
attcgcatccattcgatcaaccgggaacttaactttttctaccgctttttaacgcgttttttcgctgctttccac

SEQ ID NO: 781926 - DNA, 75 bp, synthetic construct
  source 1..75: mol_type = other DNA
aacgcggcgactggtcactctcttctccggctaaacgtaaagcggtactgaataaactcgccgatttaatggaag

SEQ ID NO: 781927 - DNA, 75 bp, synthetic construct
  source 1..75: mol_type = other DNA
gcaacatgaaacgcgtctggctggaagcgggcggcaaaagcgccaacatcgttttcgctgactgcccggatctgc

SEQ ID NO: 781928 - DNA, 75 bp, synthetic construct
  source 1..75: mol_type = other DNA
gaacgtggtgacgggttttggtcatgaagccgggcaggcgctttcgcgccataacgatatcgatgccattgcctt

SEQ ID NO: 781929 - DNA, 75 bp, synthetic construct
  source 1..75: mol_type = other DNA
ctgactttattgatatacacgctcatctggcatatgcatttctggagcagccaaggtgggcaatatttttattta

SEQ ID NO: 781930 - DNA, 75 bp, synthetic construct
  source 1..75: mol_type = other DNA
ggcaggcgtcagcctgccaggggttttcgcgcgggctgacaggcggcctccaccgcctgccctgtatcacctgtt

SEQ ID NO: 781931 - DNA, 75 bp, synthetic construct
  source 1..75: mol_type = other DNA
tactggaaggtgaaattgttctgacgattaatggtcaggattaccacctcgtcgcggggcaaagttatgccatta

SEQ ID NO: 781932 - DNA, 75 bp, synthetic construct
  source 1..75: mol_type = other DNA
gaaaacgcttgtcggaaatccgccagcagcaggggctttcacaacgtcgtgccgccgaactctccgggctgactc

SEQ ID NO: 781933 - DNA, 75 bp, synthetic construct
  source 1..75: mol_type = other DNA
tggaaggaataaaaattatttttgccgataacaacaaggagtttattaaagagatttgtgaaccattgataaata

SEQ ID NO: 781934 - DNA, 75 bp, synthetic construct
  source 1..75: mol_type = other DNA
cgggaccttttacccgacagcaggccgaagcgattacccgcaggtatcgcaacatcagcattgaagacgaccagg

SEQ ID NO: 781935 - DNA, 75 bp, synthetic construct
  source 1..75: mol_type = other DNA
attgatttatctcgttttagtaatgctggcatttggtggaataatattgaggcattttctctcgaatttagcaac

SEQ ID NO: 781936 - DNA, 75 bp, synthetic construct
  source 1..75: mol_type = other DNA
gtggcgttacgataaaggcaaaaaaacttcagatcctgacgccagcaatggatatccggggcggcggcgtggatc

SEQ ID NO: 781937 - DNA, 75 bp, synthetic construct
  source 1..75: mol_type = other DNA
ggtatagtaacactcgcatcaatcagttctgtgatagcctgataaaattgagtgggtgtaatatgtatcccttct

SEQ ID NO: 781938 - DNA, 75 bp, synthetic construct
  source 1..75: mol_type = other DNA
ttaaccggcactgaaatctacgggcaaatctcggcgatggtttttgagcagcacaaatcggcccgcacagagctg

SEQ ID NO: 781939 - DNA, 75 bp, synthetic construct
  source 1..75: mol_type = other DNA
ctgctgtatgggcccccgtcggcagttgggtcgatacgccagcggataaacaagtaaaatttggcgatgagttgg

SEQ ID NO: 781940 - DNA, 75 bp, synthetic construct
  source 1..75: mol_type = other DNA
cgctgacgacagcccggagcagacgctcacgctgtgcgatgatgtggcgggcctgccggtgtacggggagatacc

SEQ ID NO: 781941 - DNA, 75 bp, synthetic construct
  source 1..75: mol_type = other DNA
cgagtgggtcaggaggtgatcgtggacttcctgaacggtgatccggatcagccgattatcgtcgggcgaacctat

SEQ ID NO: 781942 - DNA, 75 bp, synthetic construct
  source 1..75: mol_type = other DNA
accgttgatgaagaagacggcgagattgttcgtagcctgaaaatccgccagatcgaacctgaattcttgaacctg

SEQ ID NO: 781943 - DNA, 75 bp, synthetic construct
  source 1..75: mol_type = other DNA
caaacacgaagaagccctgcgtattgctcaggagatgctggatagaggtttagacagagagttagtcatgatggt

SEQ ID NO: 781944 - DNA, 75 bp, synthetic construct
  source 1..75: mol_type = other DNA
tgaaaatgtatcccaggtaacggtctaccctgtttatgatgaagattatgggttaggacgactcgtaaataccgc

SEQ ID NO: 781945 - DNA, 75 bp, synthetic construct
  source 1..75: mol_type = other DNA
tgccagaacagaaatagcgactaaaaacttcccagtatcaacgactatttcaaaaagtttttttgcgcctgaacc

SEQ ID NO: 781946 - DNA, 75 bp, synthetic construct
  source 1..75: mol_type = other DNA
ctcccggctatcagttccagcacgactggggtgaaatcgaggtggaggtcgccgggcagcgatgtagaattaact

SEQ ID NO: 781947 - DNA, 75 bp, synthetic construct
  source 1..75: mol_type = other DNA
aacttcaggaaaatttaggcggtgcctccagggagcaggctctggaaattgcaacccatgttgttcatatgctgg

SEQ ID NO: 781948 - DNA, 75 bp, synthetic construct
  source 1..75: mol_type = other DNA
gttaacctggctgcttgagtatctcggcgatagtgagacgctgaataaggagtggctgcgggagccggaagagac

SEQ ID NO: 781949 - DNA, 75 bp, synthetic construct
  source 1..75: mol_type = other DNA
cctttccacgtaagcatcccctaacataccaacctattgactggccggtcgagaaagttatttttctacctcccc

SEQ ID NO: 781950 - DNA, 75 bp, synthetic construct
  source 1..75: mol_type = other DNA
atagacgaactctgtgcaaaaagaataatatctctgctttctgaatctgagaaaaatatagaaatacgtgtaaat

SEQ ID NO: 781951 - DNA, 75 bp, synthetic construct
  source 1..75: mol_type = other DNA
ctgctgttcaactaccggatgatctgaactacaaaaaagttagcaacatagctccttatcttgaaaagttacaat

SEQ ID NO: 781952 - DNA, 75 bp, synthetic construct
  source 1..75: mol_type = other DNA
cagcggctctgtcgttcgtgtgggtacgccgcttgattatggccggacgcacaacgaggggttttccggctcggt

SEQ ID NO: 781953 - DNA, 75 bp, synthetic construct
  source 1..75: mol_type = other DNA
tataacggacagattgccaagttcgtaactgtgcaaggccattctatggctgtttatgatgcatatggggcgcag

SEQ ID NO: 781954 - DNA, 75 bp, synthetic construct
  source 1..75: mol_type = other DNA
atctgctggtgcaattcatcctatacacattattatttccttaccagaaaatgatacgtggcagctctacttgcc

SEQ ID NO: 781955 - DNA, 75 bp, synthetic construct
  source 1..75: mol_type = other DNA
gaaaaataaacaatgtttcggtgtgagagcttccgataagacacctctgtgctttttaaaaccaggagatgtttt

SEQ ID NO: 781956 - DNA, 75 bp, synthetic construct
  source 1..75: mol_type = other DNA
gattgtccaacggttgtccaacagttgtccataaacaataatataaataatatctctaatactgacgtattagag

SEQ ID NO: 781957 - DNA, 75 bp, synthetic construct
  source 1..75: mol_type = other DNA
acgccggtcattacaaccagggaaaccgatgacaaaataacatggtcactgacaggctataacacggtagcaaac

SEQ ID NO: 781958 - DNA, 75 bp, synthetic construct
  source 1..75: mol_type = other DNA
gtgtttctggtgcgagttggctggtctgccgattacgccgaagcattaaaacagccggttgatgccccctccccg

SEQ ID NO: 781959 - DNA, 75 bp, synthetic construct
  source 1..75: mol_type = other DNA
gttagcaactcaattaatacaacgacgtttaccaaaaagttttaaagatataaggattttatcttgcaattctgg

SEQ ID NO: 781960 - DNA, 75 bp, synthetic construct
  source 1..75: mol_type = other DNA
agagcttccgataagacacctctgtgctttttaaaaccaggagatgttttatatatctttgctcatggaaataca

SEQ ID NO: 781961 - DNA, 75 bp, synthetic construct
  source 1..75: mol_type = other DNA
atttatctcactacctggtttaatgaattcatcaccaccgggccacatggtgtggtgttggcaatgttcccgctt

SEQ ID NO: 781962 - DNA, 75 bp, synthetic construct
  source 1..75: mol_type = other DNA
ttaatctattaaaatctgccgctgatcatggagatattgatgcagccttagttttaggtcaactttatgttcatg

SEQ ID NO: 781963 - DNA, 75 bp, synthetic construct
  source 1..75: mol_type = other DNA
accgatacacaggggatccgccgtgaaaaacggcagggggatattgcccgtctctgtcgtcgtcccaatgcacag

SEQ ID NO: 781964 - DNA, 75 bp, synthetic construct
  source 1..75: mol_type = other DNA
catggaaggaccagggaatgcatctgtccatgaaggacaaggactacaatccgctgattggccgaacgggtgtgg

SEQ ID NO: 781965 - DNA, 75 bp, synthetic construct
  source 1..75: mol_type = other DNA
cggaacacagattaaacagcttggtgaagcagttaaccgctatatcagtattcgatatgacaagatttccacact

SEQ ID NO: 781966 - DNA, 75 bp, synthetic construct
  source 1..75: mol_type = other DNA
tgatgtccgttggcctgaatgcagaaatcagggataacgtccgctttggactggagtttgagaaatccgcctttg

SEQ ID NO: 781967 - DNA, 75 bp, synthetic construct
  source 1..75: mol_type = other DNA
ctgccgattacgccgaagcattaaaacagccggttgatgccccctccccgctaaagtgttgcccgaaaactggtg

SEQ ID NO: 781968 - DNA, 75 bp, synthetic construct
  source 1..75: mol_type = other DNA
gtgcgcgtaaatgctcctgaagcccatatggaaagtattggcacacgcatcaaaagcgcacgtaaaaaactggga

SEQ ID NO: 781969 - DNA, 75 bp, synthetic construct
  source 1..75: mol_type = other DNA
actcatggaggaatattgctcgaattgatgcttttttgtttaattataattttattttgaaaagtttaattgtca

SEQ ID NO: 781970 - DNA, 75 bp, synthetic construct
  source 1..75: mol_type = other DNA
gaggctgaccgctttaagctgaatgaagccgctcaatcagccagcaataatgaagagacggccttcaatgatggt

SEQ ID NO: 781971 - DNA, 75 bp, synthetic construct
  source 1..75: mol_type = other DNA
tatcctataactgttaaaaattctgcgcagcgaaaatctttatttgattatctgcgaaataaaagcatcggggtt

SEQ ID NO: 781972 - DNA, 75 bp, synthetic construct
  source 1..75: mol_type = other DNA
ggggatgaaaaaaggcgattggctttggacatcaccaaatacttttgttgcttctgcgaactgtgctctttattg

SEQ ID NO: 781973 - DNA, 75 bp, synthetic construct
  source 1..75: mol_type = other DNA
aggctgctcgatctcgatgaagaaattatcatccagtgggagagcggagagtacgaaccaaccatcagcatgctt

SEQ ID NO: 781974 - DNA, 75 bp, synthetic construct
  source 1..75: mol_type = other DNA
ctgttccacaatggtaaatacattgcctatcttgatgaaaaaaactcagatggcaaaattgaaattcaagattac

SEQ ID NO: 781975 - DNA, 75 bp, synthetic construct
  source 1..75: mol_type = other DNA
ccactcatcagagttgaaactgccaccggtgaactggccagaacgcagcgccgcagcctggcggatgcgcttcag

SEQ ID NO: 781976 - DNA, 75 bp, synthetic construct
  source 1..75: mol_type = other DNA
gtgtttctggtgcgcgttggctggtctgccgattatgccgaagcattaaaacagctggttgatgccccctccccg

SEQ ID NO: 781977 - DNA, 75 bp, synthetic construct
  source 1..75: mol_type = other DNA
cggggttgagcttgaatgcgctcaaaaggcgctcgatgaaatttgtgaagagattcgcagcagcaaagcatttga

SEQ ID NO: 781978 - DNA, 75 bp, synthetic construct
  source 1..75: mol_type = other DNA
acgtaaaaaccactcccaaaccttttggtgtggacgtcgaatggaaatggccgggtggctgcgcggtgctagaac

SEQ ID NO: 781979 - DNA, 75 bp, synthetic construct
  source 1..75: mol_type = other DNA
acgtcgtgaagccgagggggatgtggtgattgctgatgttccggcagaaacatccctccctgaaaccaaaaatca

SEQ ID NO: 781980 - DNA, 75 bp, synthetic construct
  source 1..75: mol_type = other DNA
tgtaaatatcaacaacaacctgaaggtaaaatccgatacctatcttaatacgctatcaacaacaggtctggcgaa

SEQ ID NO: 781981 - DNA, 75 bp, synthetic construct
  source 1..75: mol_type = other DNA
atgctgtaaatatgctagtcagcaaaaagcatctaatgtacccagaagcttatgcaatgattcatcagcgtttca

SEQ ID NO: 781982 - DNA, 75 bp, synthetic construct
  source 1..75: mol_type = other DNA
tcatgggctggcatttttattgatttacaatggatccctgttttggttctggggttactatatataaataataaa

SEQ ID NO: 781983 - DNA, 75 bp, synthetic construct
  source 1..75: mol_type = other DNA
gtcggggttaacctggggccatggcgtatgcgcgctgactggcagaccaactatcaacatacgcgcagtaatgat

SEQ ID NO: 781984 - DNA, 75 bp, synthetic construct
  source 1..75: mol_type = other DNA
aattaacgcttatggctttaaagaaattgatggagtaatgcattgtaaaccttataatatatctcttttcccagc

SEQ ID NO: 781985 - DNA, 75 bp, synthetic construct
  source 1..75: mol_type = other DNA
gattctaaagaacatcattcgtccaatgaatctattgataaagacagtaacattgataagtccttagcagaaata

SEQ ID NO: 781986 - DNA, 75 bp, synthetic construct
  source 1..75: mol_type = other DNA
ccaacgacgagttttatcgtcgttggatggaaatgaaagaagaaccggataacctggattatttacatccagtca

SEQ ID NO: 781987 - DNA, 75 bp, synthetic construct
  source 1..75: mol_type = other DNA
actcaatactggtaagcagtatgctagtagtcttgtggatcagcaagttaataactttctgaaagaaaagggtag

SEQ ID NO: 781988 - DNA, 75 bp, synthetic construct
  source 1..75: mol_type = other DNA
tcaagcagccagcccgcaatcagtctcgcgtatctgagaacttcgctggcaaggactatggccagactgaaattc

SEQ ID NO: 781989 - DNA, 75 bp, synthetic construct
  source 1..75: mol_type = other DNA
actcattgcgatgaatgttttggtgtccgacggcatgctgatcgggcccaacaaaaacctgagtgagtgggtaat

SEQ ID NO: 781990 - DNA, 75 bp, synthetic construct
  source 1..75: mol_type = other DNA
cgctgatgaaggaatatgctgccgccctgactccgaaagatgcaggcaatcaggtgggccgggctgtgaaccgct

SEQ ID NO: 781991 - DNA, 75 bp, synthetic construct
  source 1..75: mol_type = other DNA
ggtgcagaaggttgggaagatatagaggattttggggaaacacatctcgattttttaaaacaatacggtgatttt

SEQ ID NO: 781992 - DNA, 75 bp, synthetic construct
  source 1..75: mol_type = other DNA
gcagatgatggtgatactacttatgcccgtcttggcttcaaaggtgaaacccaatggatttgcccctatatttcc

SEQ ID NO: 781993 - DNA, 75 bp, synthetic construct
  source 1..75: mol_type = other DNA
cttctggaagatattcaattttatctagaaaaagtcgcaacagcagaaaaagagtcatactatgctgcttgtaga

SEQ ID NO: 781994 - DNA, 75 bp, synthetic construct
  source 1..75: mol_type = other DNA
ataaatgttgtatttccacccaaagttacatatgaacaaacggtaaaacaaaatttttgccctaaactctccaca

SEQ ID NO: 781995 - DNA, 75 bp, synthetic construct
  source 1..75: mol_type = other DNA
acgccgcagcatcgacgccgttccacggttctctggctggcattccaggcaatttttcatgggatggaactaatg

SEQ ID NO: 781996 - DNA, 75 bp, synthetic construct
  source 1..75: mol_type = other DNA
ttaaaaagaaataccctgagttatggtgcgaaattgatagtgttgatatgagggaaaacttcgtaaacaactata

SEQ ID NO: 781997 - DNA, 75 bp, synthetic construct
  source 1..75: mol_type = other DNA
aagaattaagagatttatttgttagtattttaagacgttctctttttcgcccccccatcaaaataaatggggata

SEQ ID NO: 781998 - DNA, 75 bp, synthetic construct
  source 1..75: mol_type = other DNA
cggatcatataaagagaatatatcgcgtgttgcttgcaagaaaaattgtttctgaaaaatcacttagtcacgaga

SEQ ID NO: 781999 - DNA, 75 bp, synthetic construct
  source 1..75: mol_type = other DNA
aagttactttctgaacgtctcgcgccagctgcgggaaaggagcatgagattaaaattgcagaaacagcatcgtta

SEQ ID NO: 782000 - DNA, 75 bp, synthetic construct
  source 1..75: mol_type = other DNA
ctggtttcccgatggggccgctggaattaaccgatctgattggtcaggacgtcaattttgctgtcacctgttcgg

SEQ ID NO: 782001 - DNA, 75 bp, synthetic construct
  source 1..75: mol_type = other DNA
ctataaccgcgattgctgcggaggtaaaaaatcctgaacgtgttgcggggctgcatttttttaacccggcaccgg

SEQ ID NO: 782002 - DNA, 75 bp, synthetic construct
  source 1..75: mol_type = other DNA
agaaactgggagtggagccgctattacgcctggcgcgccctgccgtcattaaaagccaaacttgcgctcggcgaa

SEQ ID NO: 782003 - DNA, 75 bp, synthetic construct
  source 1..75: mol_type = other DNA
tgggcgcagagcgtattacgttccagttggcggcagcattcctgccagcggttcggtaactctttctccggcaaa

SEQ ID NO: 782004 - DNA, 75 bp, synthetic construct
  source 1..75: mol_type = other DNA
cgatatatctgaattttcggattcagggtatgactcagcaactttttctgaaaacaatagaattattgttggcat

SEQ ID NO: 782005 - DNA, 75 bp, synthetic construct
  source 1..75: mol_type = other DNA
gataccgccatgcgtcttggggtgaattatccatatggcccacttgcctggggagcgcaacttggctggcagcga

SEQ ID NO: 782006 - DNA, 75 bp, synthetic construct
  source 1..75: mol_type = other DNA
ccagcactgattgctatcgtggcgaatacagcatcccgcgctgactccacgattgagacagaccaggataattac

SEQ ID NO: 782007 - DNA, 75 bp, synthetic construct
  source 1..75: mol_type = other DNA
atagttaccgccgggaagacgtctggcgcgttatcgctgatgccgcaatttaacggcgatgatatcgctaagacg

SEQ ID NO: 782008 - DNA, 75 bp, synthetic construct
  source 1..75: mol_type = other DNA
cttaatggcagtgatggagcagttcaactcaaaacaggtgctgttaacggtgctaaagcgcaggcgctcactatc

SEQ ID NO: 782009 - DNA, 75 bp, synthetic construct
  source 1..75: mol_type = other DNA
gatcgcggatctggtggtcattaaggacggctcagaggcggacggtgcgacggcgaacacgctgcgggcgagggt

SEQ ID NO: 782010 - DNA, 75 bp, synthetic construct
  source 1..75: mol_type = other DNA
ggacggtttgacggcgaacacgctacgggcgagggtgaccgatgcgttcggtaatgcgcttgccgggcagacagt

SEQ ID NO: 782011 - DNA, 75 bp, synthetic construct
  source 1..75: mol_type = other DNA
gggatggcttcgctgctggcgggtagcggtgtggtcgaggtgagcggtacagataaaaatgaaacgggtaactgg

SEQ ID NO: 782012 - DNA, 75 bp, synthetic construct
  source 1..75: mol_type = other DNA
gaagcctcggcgctggaatattgcggattccatcctcagttggtcgaaggccgtgcggataacattaaagtcacg

SEQ ID NO: 782013 - DNA, 75 bp, synthetic construct
  source 1..75: mol_type = other DNA
ttataacgcccaaattattcaacgatcggacaatacttgtgaacttaccattaatgaaccgttaaaaaaaccagg

SEQ ID NO: 782014 - DNA, 75 bp, synthetic construct
  source 1..75: mol_type = other DNA
ggatatattgctaactggaacaattctccccaaaaagattatcccgcttcggatctgtttgcctttttgtggggg

SEQ ID NO: 782015 - DNA, 75 bp, synthetic construct
  source 1..75: mol_type = other DNA
caggaatggaaaaaactacttacggctgacgatctagactggccccctgaatctccagacaaccaatatcactta

SEQ ID NO: 782016 - DNA, 75 bp, synthetic construct
  source 1..75: mol_type = other DNA
attgcacgccggaatcgccggatgcagcccgtgcacattcccgcactgcgcggaagtgagtgggcgcacctgtta

SEQ ID NO: 782017 - DNA, 75 bp, synthetic construct
  source 1..75: mol_type = other DNA
acaataaccttgccttgtttcccaagaagttaattaataacaaatcatggaatgtagtgtatattgagccccatg

SEQ ID NO: 782018 - DNA, 75 bp, synthetic construct
  source 1..75: mol_type = other DNA
caacggcgcaacggtgtctccgacggtcatcacagggccggacggtacggtggagatctctgtcaccagccagac

SEQ ID NO: 782019 - DNA, 75 bp, synthetic construct
  source 1..75: mol_type = other DNA
cacgctgcgggtgagggtgaccgatgcgttcgggaacacgctagccgggcagacggtcagcgtgttggcggacaa

SEQ ID NO: 782020 - DNA, 75 bp, synthetic construct
  source 1..75: mol_type = other DNA
gacggttcgacggcgaacacgctgcaggcgagggtcactgacgcgttcgggaatgcgcttgccggacagacggtc

SEQ ID NO: 782021 - DNA, 75 bp, synthetic construct
  source 1..75: mol_type = other DNA
acggcacggtggagatcagtgtcaccagtcagacggcgggcaccagtgccgtcactgcaaccatcaacagcagca

SEQ ID NO: 782022 - DNA, 75 bp, synthetic construct
  source 1..75: mol_type = other DNA
acattggtccagttggacatttgtaggtgatggcagatatgagcgtacctatatggcttacaaagaaggagaaaa

SEQ ID NO: 782023 - DNA, 75 bp, synthetic construct
  source 1..75: mol_type = other DNA
acccgtcagaaacgggaagctgggttgaatcaggtggcgtgtataccacaacccgaatggcgacgattgccagta

SEQ ID NO: 782024 - DNA, 75 bp, synthetic construct
  source 1..75: mol_type = other DNA
acagcagcagccagagccggaacgtcacgtttatcgccgatgtcaggacggcgcagatcgcggacctggcggtta

SEQ ID NO: 782025 - DNA, 75 bp, synthetic construct
  source 1..75: mol_type = other DNA
cccgactgtcatcacagggcaggacggtacggtggagatctcagtcaccagccagacggcgggagtcagtgcagt

SEQ ID NO: 782026 - DNA, 75 bp, synthetic construct
  source 1..75: mol_type = other DNA
tcaccgccagcatcaacagcagcagccagagccgggatgtgacgtttatcgccgatgtcaggacggcgcagatcg

SEQ ID NO: 782027 - DNA, 75 bp, synthetic construct
  source 1..75: mol_type = other DNA
aacggtcgctccggcggtcaccacagagccggacgggacggtggagatccctgtcaccagccagacggcgggcac

SEQ ID NO: 782028 - DNA, 75 bp, synthetic construct
  source 1..75: mol_type = other DNA
taccgtagcggatgccagcactgttgaggctaagatcaatcaaagcagcgatagtaaaacggtgaactttgttgc

SEQ ID NO: 782029 - DNA, 75 bp, synthetic construct
  source 1..75: mol_type = other DNA
cgacggcgaacacgctgcgggcgagggtgaccgatgcgttcggtaatacgcttgccgggcagacggtcagcgtga

SEQ ID NO: 782030 - DNA, 75 bp, synthetic construct
  source 1..75: mol_type = other DNA
cagatcgcggtgctggaagtgacgcaggattacgccgtggcagatggttcgacggcgaacacgctgcgggcgagg

SEQ ID NO: 782031 - DNA, 75 bp, synthetic construct
  source 1..75: mol_type = other DNA
aaacacctttcccatttgagaataataattctcatactggcgtagtaacggagcctattctcggtaagttaatag

SEQ ID NO: 782032 - DNA, 75 bp, synthetic construct
  source 1..75: mol_type = other DNA
cgaccacatttaggagaattatatgaggcgtataaaacgacactgacagacctgaaaccagaatatatcggctcc

SEQ ID NO: 782033 - DNA, 75 bp, synthetic construct
  source 1..75: mol_type = other DNA
tgatgcagcagaaagaaaccgcttcagattgcccacgtcgcgcggtgcgcaaatatatggcacgcagacgaaggc

SEQ ID NO: 782034 - DNA, 75 bp, synthetic construct
  source 1..75: mol_type = other DNA
gactttcgacaatgaagttatcgctggcggcgatagttttcgactcgattttcatggcggtatatgtgctcaatg

SEQ ID NO: 782035 - DNA, 75 bp, synthetic construct
  source 1..75: mol_type = other DNA
gctatagcgcgctgggaagtcggtattctgaatttgcgctttttggcgacacgttaggcctttatttgggcttta

SEQ ID NO: 782036 - DNA, 75 bp, synthetic construct
  source 1..75: mol_type = other DNA
catctttcccaccgtgagacggcgcaggtcgaggaatatcagtttccggattcgctctatgaaacgaaagatgaa

SEQ ID NO: 782037 - DNA, 75 bp, synthetic construct
  source 1..75: mol_type = other DNA
cagcaacttgcctatctggcactgaaacgctgggcacgcctttattgtcctgaagtgattcttggagtgtacacc

SEQ ID NO: 782038 - DNA, 75 bp, synthetic construct
  source 1..75: mol_type = other DNA
tcatacagtcagtctcattacattatggtaatgcctttggtggagagtatgtctggaaagatgtacagggaaatg

SEQ ID NO: 782039 - DNA, 75 bp, synthetic construct
  source 1..75: mol_type = other DNA
gctgcgggaggcggagaaacctgtggtggatgcggagaaaaaaacgataattcagaattaacagatgaactggta

SEQ ID NO: 782040 - DNA, 75 bp, synthetic construct
  source 1..75: mol_type = other DNA
agatgctatcggtattaaagtgccggacaacgccaatatcatccgcaacattatgctggcaacgctctggtgcca

SEQ ID NO: 782041 - DNA, 75 bp, synthetic construct
  source 1..75: mol_type = other DNA
acatcgatcctgtaactgaacaggagcgttcaagccgactttggctacgtcaaattggcgggcataatgcctggc

SEQ ID NO: 782042 - DNA, 75 bp, synthetic construct
  source 1..75: mol_type = other DNA
cgctgcgatggaaattgatgatgactttgacagcgcgtttgaacacggaaaagctgtcggctggaacgcctatcg

SEQ ID NO: 782043 - DNA, 75 bp, synthetic construct
  source 1..75: mol_type = other DNA
aacaaatggtggaccatagatgacgaaacggttcgaaaggtaacacactggatgccacttccagcagcacctctg

SEQ ID NO: 782044 - DNA, 75 bp, synthetic construct
  source 1..75: mol_type = other DNA
cgacacgtttgcacgatcccaaaatgacatcggcgtatcaggcgtcatcgtggggcgcaaaaatgaacttggata

SEQ ID NO: 782045 - DNA, 75 bp, synthetic construct
  source 1..75: mol_type = other DNA
atgaattctatctggggagcagagcttaactatgcgccggactactggccgctgtggctcatttatgcaggcgtt

SEQ ID NO: 782046 - DNA, 75 bp, synthetic construct
  source 1..75: mol_type = other DNA
tgtggttttgccttactggccttctgggtgggatttgtgctgatcaacctcaccacaggaaacgggtgtcattat

SEQ ID NO: 782047 - DNA, 75 bp, synthetic construct
  source 1..75: mol_type = other DNA
aagaggaacattggaatacttatttgatgaaattattgctggcgagtgtgcattggccttattacaaaaagaaat

SEQ ID NO: 782048 - DNA, 75 bp, synthetic construct
  source 1..75: mol_type = other DNA
gtttatccggtcagcacgacgggcgtaccaccggaaaccgggcgctttgaagccacggcgacggtaagaataaac

SEQ ID NO: 782049 - DNA, 75 bp, synthetic construct
  source 1..75: mol_type = other DNA
ataatttttctattgtacgacaaggtgttgctgctgcgttattcgcttattccattcgttatttgatagcgaaaa

SEQ ID NO: 782050 - DNA, 75 bp, synthetic construct
  source 1..75: mol_type = other DNA
attcgctggcggtccgccgctggcactggggtaatgcgctgctctttatcctgcttctgctgagcggcctgtttg

SEQ ID NO: 782051 - DNA, 75 bp, synthetic construct
  source 1..75: mol_type = other DNA
tctaaacccgaaacactcgcttccttcaacggcctcccgttcaccattactcaccccgatgacggggaggtgacc

SEQ ID NO: 782052 - DNA, 75 bp, synthetic construct
  source 1..75: mol_type = other DNA
gcagcacgttgctgggcctgcattattccacgccgctcagcgctatcagtaaccagcttgaagcctatgccggtg

SEQ ID NO: 782053 - DNA, 75 bp, synthetic construct
  source 1..75: mol_type = other DNA
gctatagcgcgctgggaagtcggtactccgaatttgcgctttttggcgacacgttaggcctttatttgggcttta

SEQ ID NO: 782054 - DNA, 75 bp, synthetic construct
  source 1..75: mol_type = other DNA
ggagcgccagcacttagttttgatacatatctgcaggacaatgttaaatatagagtgataattaataatctttat

SEQ ID NO: 782055 - DNA, 75 bp, synthetic construct
  source 1..75: mol_type = other DNA
cttctgattgcacttgctcataaaaaagaggaaccagaaaaagattatctggaagaagcaaggaaaaaagctggt

SEQ ID NO: 782056 - DNA, 75 bp, synthetic construct
  source 1..75: mol_type = other DNA
gatattgatgcatctggaaaacaacttaaggaaggtgcgaataagcaggtcatttcttcccaagctgactcgctg

SEQ ID NO: 782057 - DNA, 75 bp, synthetic construct
  source 1..75: mol_type = other DNA
ccggaaggcgggatgcagcgagtgcaccgtgaggtacacactgcataaacggggttacagccttaagaaatgcgg

SEQ ID NO: 782058 - DNA, 75 bp, synthetic construct
  source 1..75: mol_type = other DNA
caatcgcttctttctatgaggaaagttattcagatgacacaggattaccggaactgctctcattacttgaaaaat

SEQ ID NO: 782059 - DNA, 75 bp, synthetic construct
  source 1..75: mol_type = other DNA
ttaattttcagatctcgctgcaaaattgtgttcgtataagcagtattaaaacaaaactaaaatctaatgtagggt

SEQ ID NO: 782060 - DNA, 75 bp, synthetic construct
  source 1..75: mol_type = other DNA
ggtgatatcaccagacaccgtgcaggatgaagtgcggcgcgatgtttattactatcgggtgtacattcgcacttt

SEQ ID NO: 782061 - DNA, 75 bp, synthetic construct
  source 1..75: mol_type = other DNA
gcaagtgcgaaaaagatttctgatattgtgacccgtattggccctttaggcagtgttgcgggtgtggcctccgga

SEQ ID NO: 782062 - DNA, 75 bp, synthetic construct
  source 1..75: mol_type = other DNA
atgtaaaaaccgcacaggaaatggctctggaagtgggatgcagtgagtgcacagtgaggtacacactgcgtaaac

SEQ ID NO: 782063 - DNA, 75 bp, synthetic construct
  source 1..75: mol_type = other DNA
tagttcaaaaagattcgcaattggttcgtgaagaaacacagttgtataatacacgacggaaaaatttagaagagt

SEQ ID NO: 782064 - DNA, 75 bp, synthetic construct
  source 1..75: mol_type = other DNA
caagctttagtcaaaattacagcgtacgattatgcgatatatggcggattacatggcaaagtgaccgtgatatct

SEQ ID NO: 782065 - DNA, 75 bp, synthetic construct
  source 1..75: mol_type = other DNA
agagcaaaacatttcagttactgatgaagtagcaaaaaattatgaaacttttgataaaaacctaaatgatcttaa

SEQ ID NO: 782066 - DNA, 75 bp, synthetic construct
  source 1..75: mol_type = other DNA
agccgcccggtacgccgccgtttgaggcacatattgatttgccggggaacacgacaacggcggtcgaaccgccgg

SEQ ID NO: 782067 - DNA, 75 bp, synthetic construct
  source 1..75: mol_type = other DNA
ccaattgatctccaaatcaacacgctggtagattcattaaatttatctgagatatatactaagatcagcacagca

SEQ ID NO: 782068 - DNA, 75 bp, synthetic construct
  source 1..75: mol_type = other DNA
atgctaaatgactttataaaacaggctattgaagctcaccactttatagaaattgaaagcacgttagataatatt

SEQ ID NO: 782069 - DNA, 75 bp, synthetic construct
  source 1..75: mol_type = other DNA
gtggccttaatgaaccgcatctgccgcgatcggcgctggcagttcgcgttaccgcagtgatgctgctctgttttc

SEQ ID NO: 782070 - DNA, 75 bp, synthetic construct
  source 1..75: mol_type = other DNA
attccattagtcaaacgtggaaccattcacccggatcagtttggtcaacgtctttctgatttcagcaaccgctta

SEQ ID NO: 782071 - DNA, 75 bp, synthetic construct
  source 1..75: mol_type = other DNA
cttggctggcgtaacggcgataacgcctggtatgacttcattatggatatccgtaagaccgggcagtttgacgtt

SEQ ID NO: 782072 - DNA, 75 bp, synthetic construct
  source 1..75: mol_type = other DNA
ttttgcaattctgttcctttgtcaatcacggcaacaccagttgttgctgttttagggccaatgcccttaatttgg

SEQ ID NO: 782073 - DNA, 75 bp, synthetic construct
  source 1..75: mol_type = other DNA
gctctactgcgatggctggatgggtaaagaacatcttgcatctgcaacaaacagtaggccatgagaaaagtggag

SEQ ID NO: 782074 - DNA, 75 bp, synthetic construct
  source 1..75: mol_type = other DNA
agcgttacatggaagtcttgatggttgtcttgggagagacaactgacgtagttgcgatttctaagcaggacatca

SEQ ID NO: 782075 - DNA, 75 bp, synthetic construct
  source 1..75: mol_type = other DNA
ttggcaacttagcgcacttgcagcaggttgtagggcatgagaaaagcggggcagggatcactagaagatacttac

SEQ ID NO: 782076 - DNA, 75 bp, synthetic construct
  source 1..75: mol_type = other DNA
cattgccaatttttgtttattacggaactgggcgtggagtgtttgatataccactcagaaaacgtgcatttaaca

SEQ ID NO: 782077 - DNA, 75 bp, synthetic construct
  source 1..75: mol_type = other DNA
tgataaagatgacatttcggatagcccctctttgaataaagaactcagcatcgaagatattgctgagggtgtaat

SEQ ID NO: 782078 - DNA, 75 bp, synthetic construct
  source 1..75: mol_type = other DNA
atgaacggacaactgcaatacaaccgtggcctgactgaacctcgcctgccgcgttcggcgctggcggtacgcgtg

SEQ ID NO: 782079 - DNA, 75 bp, synthetic construct
  source 1..75: mol_type = other DNA
actcaaatccagcaagtgatatggccggtgcgctatcgacaaccaaagcgcgacattaccccgctttaccttcaa

SEQ ID NO: 782080 - DNA, 75 bp, synthetic construct
  source 1..75: mol_type = other DNA
tggcaagcattcgtgcagcaatagccgctcagaatcaatggacagcggcggcaggtaaaacatccctgaaattaa

SEQ ID NO: 782081 - DNA, 75 bp, synthetic construct
  source 1..75: mol_type = other DNA
tggagataacccagcttatgtagccttacttcgtgctgagcgccgaaaaataatggggacacaaggaagtaaaca

SEQ ID NO: 782082 - DNA, 75 bp, synthetic construct
  source 1..75: mol_type = other DNA
ggtcgaatagtgatttttttaaatcgcttaatgatttgaacaaaaaaggtatttcaccaagtggtatgagtacaa

SEQ ID NO: 782083 - DNA, 75 bp, synthetic construct
  source 1..75: mol_type = other DNA
ggagcagatgcaaaaccagatggacccggtgtacacgccggcgcgaaaaatccacctgtaccactgcgaccatcg

SEQ ID NO: 782084 - DNA, 75 bp, synthetic construct
  source 1..75: mol_type = other DNA
gcatccagacgatttatcagccggggagcttcacgccactcatcagggtcgaaactgccaccggtgagctggcga

SEQ ID NO: 782085 - DNA, 75 bp, synthetic construct
  source 1..75: mol_type = other DNA
gaggcacgaaagataatgccctgtatgtgaaaattgtccggggcagtaaaacactattgatgtacaaggttaaaa

SEQ ID NO: 782086 - DNA, 75 bp, synthetic construct
  source 1..75: mol_type = other DNA
attacccctagaacaaagctgaccattaagtatgagagaccgccatctgaaataacaattgtaccagttggttta

SEQ ID NO: 782087 - DNA, 75 bp, synthetic construct
  source 1..75: mol_type = other DNA
agcattcgcatgttacggttctttagatttttggctatataggttttctcgtaaaacagtatccgttcaattatg

SEQ ID NO: 782088 - DNA, 75 bp, synthetic construct
  source 1..75: mol_type = other DNA
atgattacggaaaccgaacaggcgtacatcgtccgcatccgggagtatttcgggaacgaactggtgtctgttgac

SEQ ID NO: 782089 - DNA, 75 bp, synthetic construct
  source 1..75: mol_type = other DNA
ggtcaccgatgcgttcggtaatgcgcttgccgggcagacggtcagcgtgatggcggacaacggtgcagcggtcgc

SEQ ID NO: 782090 - DNA, 75 bp, synthetic construct
  source 1..75: mol_type = other DNA
gacaacggtgcaacggtttccccgacggtcaccacgcagccggacggtacggtggagatctcagtcaccagtcag

SEQ ID NO: 782091 - DNA, 75 bp, synthetic construct
  source 1..75: mol_type = other DNA
ttactattacaggaacgccgaaaagcaataaagggaataaagttacatataaattctcactgcagaaatggttta

SEQ ID NO: 782092 - DNA, 75 bp, synthetic construct
  source 1..75: mol_type = other DNA
gacgtttatcgccgatgtcaggacggcgcagatcgcggatctggtggtcattaaggacggctcagtggcagacgg

SEQ ID NO: 782093 - DNA, 75 bp, synthetic construct
  source 1..75: mol_type = other DNA
cacattttgcggaagcgaatttgaatgcgcaactgaagatggcgggttgggtcgatgccaattattcaaaaagct

SEQ ID NO: 782094 - DNA, 75 bp, synthetic construct
  source 1..75: mol_type = other DNA
ggacggtgcgacggcgaacacgctgcgtgcgagggtaaccgatgcattcggaaatgcgcttgccgggcagacggt

SEQ ID NO: 782095 - DNA, 75 bp, synthetic construct
  source 1..75: mol_type = other DNA
atgctttcttactcattaaacgcctaccactccgactctaaaaatggcaaccgggacagtatatacggagccttc

SEQ ID NO: 782096 - DNA, 75 bp, synthetic construct
  source 1..75: mol_type = other DNA
ttgaaggcctgggttcgccagataatcttcaccccatgcaggcggcctttatcaagcatgatggcttccagtgcg

SEQ ID NO: 782097 - DNA, 75 bp, synthetic construct
  source 1..75: mol_type = other DNA
cggaaccgtctggcacaaaaagggatttgatttcctgcttaacgataatacctacctgaaagttcgtgagggtga

SEQ ID NO: 782098 - DNA, 75 bp, synthetic construct
  source 1..75: mol_type = other DNA
gaacgccgcaattctccgctggggattgctccgagcattcatgaggtcgcccggcgtttaatgcagcgggcgctt

SEQ ID NO: 782099 - DNA, 75 bp, synthetic construct
  source 1..75: mol_type = other DNA
attaacagacgatcagaaaaagtttttattacaagaacaggatacccgtctacgttttggtgccgatgaaaaccc

SEQ ID NO: 782100 - DNA, 75 bp, synthetic construct
  source 1..75: mol_type = other DNA
tgaagctgaaaaaattaagaagcaacaagaagcagcagctaagaaagcggcaagagcggcagaagcagcggcaaa

SEQ ID NO: 782101 - DNA, 75 bp, synthetic construct
  source 1..75: mol_type = other DNA
ataatgccgtatttcttcaaaaggttgatgatgttcgttcattgcccactccatgtgatatcgattgcaaggaaa

SEQ ID NO: 782102 - DNA, 75 bp, synthetic construct
  source 1..75: mol_type = other DNA
gctgtatccggtaaacagtttgcatggaaggaccagggaatgcatctgtccatgaaggacaaggactacaatccg

SEQ ID NO: 782103 - DNA, 75 bp, synthetic construct
  source 1..75: mol_type = other DNA
ttaaagttgatttatacgaattatttgtaatgttcatccttaactatataacgcatttcgatattatttataatt

SEQ ID NO: 782104 - DNA, 75 bp, synthetic construct
  source 1..75: mol_type = other DNA
caataaaattgagctaattgaaaaacaacaagcacagctaaagagtcaactggaaactattcaaaacaacaagct

SEQ ID NO: 782105 - DNA, 75 bp, synthetic construct
  source 1..75: mol_type = other DNA
gtggcttgaagagctgaacctgccggaaacctgtctgaagccggtcggcacagggtatgttgttcttgttgatct

SEQ ID NO: 782106 - DNA, 75 bp, synthetic construct
  source 1..75: mol_type = other DNA
agccgcccggtacgtcgccgtttgaggcacatattcatcttaagggtacaggtgaaaacatgaatcccaacgaag

SEQ ID NO: 782107 - DNA, 75 bp, synthetic construct
  source 1..75: mol_type = other DNA
aaacgtatgggtgacctgcgtgacatcaatggtgaagctggcgcatgggcacgtatcatgagcggaaccggctct

SEQ ID NO: 782108 - DNA, 75 bp, synthetic construct
  source 1..75: mol_type = other DNA
ggtggagatctcagtcaccagccagaccgccggaaccagtactgtcactgcaaccatcaacagcagtagtcagag

SEQ ID NO: 782109 - DNA, 75 bp, synthetic construct
  source 1..75: mol_type = other DNA
ggtcagcgtgttggcggacaacggcgcaacggttgccccgacggtcaccactcagccggacggtacggtggagat

SEQ ID NO: 782110 - DNA, 75 bp, synthetic construct
  source 1..75: mol_type = other DNA
cgatgtcaggacggcgaagatcgctgatctggtggtcattaaggatggttcagaggcggacggttcgacggcgaa

SEQ ID NO: 782111 - DNA, 75 bp, synthetic construct
  source 1..75: mol_type = other DNA
taacacaaactatattccctgttatggccgctgcccctacgcatattaatcatgcgcattcggatactgccacgt

SEQ ID NO: 782112 - DNA, 75 bp, synthetic construct
  source 1..75: mol_type = other DNA
atcagtgtcaccagccagacggcgggtaccagtacagtcactgccagcattaacagcagcagccagagccggaac

SEQ ID NO: 782113 - DNA, 75 bp, synthetic construct
  source 1..75: mol_type = other DNA
atgtcaggacggcgcagatcgcggagctggtggttattaaggatggttcagaggcagacggttcgacggcgaata

SEQ ID NO: 782114 - DNA, 75 bp, synthetic construct
  source 1..75: mol_type = other DNA
cgccggagccagtacggtcactgccagcattaacggtagcagccagagtcagagcatcacctttgtaccgggtga

SEQ ID NO: 782115 - DNA, 75 bp, synthetic construct
  source 1..75: mol_type = other DNA
actccgacggtgaccaccaagccggacggcacggtggagatatctgtaaccagccagacggcgggaatcagtgca

SEQ ID NO: 782116 - DNA, 75 bp, synthetic construct
  source 1..75: mol_type = other DNA
gcaacggtcgccccgacggtcaccacgcagccggacggtacggtggagatctctgttaccagccagacggcgggg

SEQ ID NO: 782117 - DNA, 75 bp, synthetic construct
  source 1..75: mol_type = other DNA
ttcagggcgacagatggttttcctgaaacaggatttgatggggctaaattcaccttagtattaacccataatatg

SEQ ID NO: 782118 - DNA, 75 bp, synthetic construct
  source 1..75: mol_type = other DNA
gccgggcagacggtcagcgtgttggcggacaacggcgcaacgactgccccgacggtaatcacagagccggacggc

SEQ ID NO: 782119 - DNA, 75 bp, synthetic construct
  source 1..75: mol_type = other DNA
atggtgtaacgtcagatcgctatgacatacagtccggttctccggcgcaagccacatcaactatcgctacggata

SEQ ID NO: 782120 - DNA, 75 bp, synthetic construct
  source 1..75: mol_type = other DNA
tctgcgtctgcgcaggcaacggactggctcagtcgttggggaactgcccgggtatctcttggtgtggatgaagat

SEQ ID NO: 782121 - DNA, 75 bp, synthetic construct
  source 1..75: mol_type = other DNA
gcaacgactgccccgacggtcatcacagggccagacgggacggtggagatcagtgtcaccagccagacggcgggc

SEQ ID NO: 782122 - DNA, 75 bp, synthetic construct
  source 1..75: mol_type = other DNA
cagccagagccggaacgtgacgtttatcgccgatgtcagcacggcgcagatcgcgagtctggaggtgacgcagga

SEQ ID NO: 782123 - DNA, 75 bp, synthetic construct
  source 1..75: mol_type = other DNA
tgagggtcacggatgcattcggtaatacgcttgccggacagacggtcagcgtgacggcagacaacagtgcaatgg

SEQ ID NO: 782124 - DNA, 75 bp, synthetic construct
  source 1..75: mol_type = other DNA
aaagatttaccggtgctgatgaatgatcatcaggatctgaagcatgcggtgctccgtgccaaaaatctgcgcagc

SEQ ID NO: 782125 - DNA, 75 bp, synthetic construct
  source 1..75: mol_type = other DNA
aaacgtgctgcatacatccaccgccacagagggactaaagcggcgctgatggcatcgctggctgacagtcccttc

SEQ ID NO: 782126 - DNA, 75 bp, synthetic construct
  source 1..75: mol_type = other DNA
ctttagtgccgagcaacggcagggtaaacagggggaaaacgacacccgaattggtatggagttgacgttgcaacc

SEQ ID NO: 782127 - DNA, 75 bp, synthetic construct
  source 1..75: mol_type = other DNA
gcccagggtaactttattactgatggtgtcgcgcagcttaatgaggaaaacgtacaagtcaggaacgctgattct

SEQ ID NO: 782128 - DNA, 75 bp, synthetic construct
  source 1..75: mol_type = other DNA
gctttatcactggcgatatctcgcagctgacctccaccatcaagacggacgatgtgtcatacactgcgggtggca

SEQ ID NO: 782129 - DNA, 75 bp, synthetic construct
  source 1..75: mol_type = other DNA
cgtggagtgatggcgtaacgtcagaccgctatgacatacagtccggttctccggcgcaagccacatcaactatcg

SEQ ID NO: 782130 - DNA, 75 bp, synthetic construct
  source 1..75: mol_type = other DNA
gcagcagccagagccgggacgtgacgtttatcggcgatatcaggacggcgcagatcgcgagtctggaggtggcgc

SEQ ID NO: 782131 - DNA, 75 bp, synthetic construct
  source 1..75: mol_type = other DNA
atgtcaggacggcgaagatcgcgagtctggaggtgatgcaggataacgcggtggcagacggttcgatggcgaata

SEQ ID NO: 782132 - DNA, 75 bp, synthetic construct
  source 1..75: mol_type = other DNA
atgcagcgctcacagcttcgtatacgcgaagttttattggttgctggagcggatttacctgtcagtgttttatta

SEQ ID NO: 782133 - DNA, 75 bp, synthetic construct
  source 1..75: mol_type = other DNA
ctctgtcaccagccagatggcgggcaccagtgcggtcaccgccagcattaacagcagcagtcagagcggggatgt

SEQ ID NO: 782134 - DNA, 75 bp, synthetic construct
  source 1..75: mol_type = other DNA
atggagcaaaccgcgcataccctgaacctcggatatgtctcccccgccgccaacctgccgcttcaacccatggtg

SEQ ID NO: 782135 - DNA, 75 bp, synthetic construct
  source 1..75: mol_type = other DNA
cgtctgtggcaggtgctgtacgacacgataacccggaatcaccagtgccgcgccatgtggcaactactgaaaaag

SEQ ID NO: 782136 - DNA, 75 bp, synthetic construct
  source 1..75: mol_type = other DNA
agggggatttaccagcccgtgaactaacggtgggtgtgaatcacattgaacgtctgtggcaggtgctgtacgaca

SEQ ID NO: 782137 - DNA, 75 bp, synthetic construct
  source 1..75: mol_type = other DNA
agaacggggtggatatctatattcctgattcagccagaggaaaacatgcccttgttgttatcaataacggcagca

SEQ ID NO: 782138 - DNA, 75 bp, synthetic construct
  source 1..75: mol_type = other DNA
tgagatgacgatccctgcaggtgtaagcgcagttaaaatcgtaccaacagatagtctgacatcttctggacagca

SEQ ID NO: 782139 - DNA, 75 bp, synthetic construct
  source 1..75: mol_type = other DNA
tcatgccatataccttatggaaaggcagaagatgatgcaatggtacagtgattatcttcgcaaaaaaaaggggtt

SEQ ID NO: 782140 - DNA, 75 bp, synthetic construct
  source 1..75: mol_type = other DNA
aacgtattgttagcgatgcggcggcgattacgctccccacgcaacttctgatatcaggcgatgactatgtggtgc

SEQ ID NO: 782141 - DNA, 75 bp, synthetic construct
  source 1..75: mol_type = other DNA
atatctacaaacccagtaattttggccgtcataccctatcgtcacatgatttcgggtggcctaaatccctttcac

SEQ ID NO: 782142 - DNA, 75 bp, synthetic construct
  source 1..75: mol_type = other DNA
cagttctgggatactcattttattggactaataacatttgtatctgagtctataacatcgagcctctataaagct

SEQ ID NO: 782143 - DNA, 75 bp, synthetic construct
  source 1..75: mol_type = other DNA
ggttattcaggtaaatccacaacgccgtgaatttttagagcgtaaataccgggtttacctgacgctttgggagca

SEQ ID NO: 782144 - DNA, 75 bp, synthetic construct
  source 1..75: mol_type = other DNA
acgcatctaccgcaaacctggcaggccgctcatcgctttttcgatctggcggattttctggtctggaaagcaaca

SEQ ID NO: 782145 - DNA, 75 bp, synthetic construct
  source 1..75: mol_type = other DNA
tactcaatgaacttaaaaccatgacagggaactatcgttatgtttttccagggcggaatgatccgaacaagccta

SEQ ID NO: 782146 - DNA, 75 bp, synthetic construct
  source 1..75: mol_type = other DNA
cagaaataccagaacgcgtcccttcatatcccaatggcagcgtcggtatcgcaagcgttcaggctggcgaagaaa

SEQ ID NO: 782147 - DNA, 75 bp, synthetic construct
  source 1..75: mol_type = other DNA
atcgttgccggggattacaacgccctggttgtggggctgggtcgtgacctgaatgagttcggtacggtatctgct

SEQ ID NO: 782148 - DNA, 75 bp, synthetic construct
  source 1..75: mol_type = other DNA
ttgaaaataaatagattgttaaatgagtcttcttttgctacatctatggcgagaaggtttgcgatcaattctggc

SEQ ID NO: 782149 - DNA, 75 bp, synthetic construct
  source 1..75: mol_type = other DNA
agaaaaaaacggttataatggctttgaaacgaattgcatcaatccaacaaatcggtgcagagcaatttaggcata

SEQ ID NO: 782150 - DNA, 75 bp, synthetic construct
  source 1..75: mol_type = other DNA
gtgcaatggtcgcttcgactgtcatcacagggccggacggcacggtggaaatcagtgtctccagccagaccgccg

SEQ ID NO: 782151 - DNA, 75 bp, synthetic construct
  source 1..75: mol_type = other DNA
atctcattggcgacaaattaacggcccagctgacgatgcccggctggcaaaccaagcattcggatgcgttcagta

SEQ ID NO: 782152 - DNA, 75 bp, synthetic construct
  source 1..75: mol_type = other DNA
gctacattaagcatggcccctttcagtgaacgtaatgaatgttataaatttttagcagctttaattaaaatacag

SEQ ID NO: 782153 - DNA, 75 bp, synthetic construct
  source 1..75: mol_type = other DNA
aacatccagcaagtatattaagtcaacattgctaatgaacggctctttaacttctgctgaaaaaatatctgtctc

SEQ ID NO: 782154 - DNA, 75 bp, synthetic construct
  source 1..75: mol_type = other DNA
acggcacaggaagtcttttttgtgttggacaaaataacggacaatcttcagctggttatgcttacgctacattcc

SEQ ID NO: 782155 - DNA, 75 bp, synthetic construct
  source 1..75: mol_type = other DNA
agtgacggatatgtagccacaacacaggtgtatattacgcctgacgagaaatatccggaaacagctcctccgtca

SEQ ID NO: 782156 - DNA, 75 bp, synthetic construct
  source 1..75: mol_type = other DNA
catgaaaatagaactattgttataaaagacaatggtattggaatgacatttgaagaatgtcaaaagaaatttctt

SEQ ID NO: 782157 - DNA, 75 bp, synthetic construct
  source 1..75: mol_type = other DNA
taaaatggagagttttcttcttaaaagaaactataaaggaagaggaattacaaggtatttcaatattttctcatg

SEQ ID NO: 782158 - DNA, 75 bp, synthetic construct
  source 1..75: mol_type = other DNA
agcactggtgcgccttctggtgaagaaggcgatcatcaccgcagaagagggccaggccattttcagctcttcagc

SEQ ID NO: 782159 - DNA, 75 bp, synthetic construct
  source 1..75: mol_type = other DNA
gcgatcgatggcgaagccctggacgatgttactgtcatcggggtcgtgacatttactatctgcgatgttcgttct

SEQ ID NO: 782160 - DNA, 75 bp, synthetic construct
  source 1..75: mol_type = other DNA
gcaatgaatattttgattagtcatctcaagactaatattaaagaaataaagttaccagaaatcgatattatagaa

SEQ ID NO: 782161 - DNA, 75 bp, synthetic construct
  source 1..75: mol_type = other DNA
ggtatggaatccttctccgctgcagtgttgagttatggcattactcacgacgttgtacgtggctacgccctaaat

SEQ ID NO: 782162 - DNA, 75 bp, synthetic construct
  source 1..75: mol_type = other DNA
actgggagagtgtcaggcaacagtttctggacaaagtggcattgctggaaaagcgcaggaagagaaggaatatca

SEQ ID NO: 782163 - DNA, 75 bp, synthetic construct
  source 1..75: mol_type = other DNA
ttgcaattttacttcgtttttttatttaccggagactcagaaagaaaacagccgcctttgagcaggccgtttcag

SEQ ID NO: 782164 - DNA, 75 bp, synthetic construct
  source 1..75: mol_type = other DNA
gcggttacgttgtgttggatatctccctgaaaccaaggcagggtagtcaggttctgatccagcacggcggcggga

SEQ ID NO: 782165 - DNA, 75 bp, synthetic construct
  source 1..75: mol_type = other DNA
gcgatcgagggcgaggccttggacgatgttaatgtcatcggcgtcgtgacgtttactatctgcgatgtgcgccag

SEQ ID NO: 782166 - DNA, 75 bp, synthetic construct
  source 1..75: mol_type = other DNA
accgccaaaaacagataaaaaatgtgatgcaagtcactatgcagcacgcattgaaactattctggcgaccaaaag

SEQ ID NO: 782167 - DNA, 75 bp, synthetic construct
  source 1..75: mol_type = other DNA
caacttcctaaagacagagaaacgctcttctattttaacgtgcgagaaataccgcccaaaacagataaaaaaatg

SEQ ID NO: 782168 - DNA, 75 bp, synthetic construct
  source 1..75: mol_type = other DNA
tttaaaaggtgcaattgaagctgttcgcccaccttcagtttctgattggctgtcgaatggtttgcagccttcaca

SEQ ID NO: 782169 - DNA, 75 bp, synthetic construct
  source 1..75: mol_type = other DNA
acttcacagcggtgtaggcctgataagacgcgccagcgtcgcatcaggcaaccggctcgggcgttggatgtcgga

SEQ ID NO: 782170 - DNA, 75 bp, synthetic construct
  source 1..75: mol_type = other DNA
tggagtaaaaaatatattccttccagactgttgagtgaatttatgcgtataataaaagcacgttgctctgtgagt

SEQ ID NO: 782171 - DNA, 75 bp, synthetic construct
  source 1..75: mol_type = other DNA
tacggtttcccgacagatgtagtgacgtttgataacttcacgatggaagattatatccgcgaaaaatcgcagaaa

SEQ ID NO: 782172 - DNA, 75 bp, synthetic construct
  source 1..75: mol_type = other DNA
gctgaataaacttgaaaaatccattaagaataaaaaactaccattttacagaaaagcgaaaaatttattttctag

SEQ ID NO: 782173 - DNA, 75 bp, synthetic construct
  source 1..75: mol_type = other DNA
gatccggggccaagaacctgtacgtctaatggctgtgaaatcacttaccagacgttaattaatgaaggtttgttg

SEQ ID NO: 782174 - DNA, 75 bp, synthetic construct
  source 1..75: mol_type = other DNA
agcatcaaaaacatcaaagatatgacggcatcagggacaacaacaaccggagcacttaagacaacgggtaatgcg

SEQ ID NO: 782175 - DNA, 75 bp, synthetic construct
  source 1..75: mol_type = other DNA
ggtaataaaagaataacttatattaatttatttattgtccttttaaagtttattgcatttggtaaacttcagtcc

SEQ ID NO: 782176 - DNA, 75 bp, synthetic construct
  source 1..75: mol_type = other DNA
cagaatttaattctctaataagtaatatggagaaagagattgagcattatctggaaaacgccgacaaagagttga

SEQ ID NO: 782177 - DNA, 75 bp, synthetic construct
  source 1..75: mol_type = other DNA
aataaatataatttttttgaaggcgacccagttttaaacaccaccctaataacaacaagcaatggaagactagat

SEQ ID NO: 782178 - DNA, 75 bp, synthetic construct
  source 1..75: mol_type = other DNA
ttgacggaaagaattttagccaacagccagaaacgctatggcaagctggcacctttgacttttgtcggtggacgt

SEQ ID NO: 782179 - DNA, 75 bp, synthetic construct
  source 1..75: mol_type = other DNA
gacctgacactccatatcggttttgataccgaatatgttttcaaccctgaaacacgacagaatgaaccgccccgg

SEQ ID NO: 782180 - DNA, 75 bp, synthetic construct
  source 1..75: mol_type = other DNA
cggagtcgatgctgaatgaaaatgatgcaccgaaaagtatggaagctcactatccaccgcgtccgggtaaagcgg

SEQ ID NO: 782181 - DNA, 75 bp, synthetic construct
  source 1..75: mol_type = other DNA
gccgcagcgagtcgttctggctggcgcggggcggggtggcggagcagcacagttcgcagccgctaagcgcgctct

SEQ ID NO: 782182 - DNA, 75 bp, synthetic construct
  source 1..75: mol_type = other DNA
ttgagctatccaacgatatcggctggatggtcaccttcccaaactgaattagttatagttgatatcgactgtgaa

SEQ ID NO: 782183 - DNA, 75 bp, synthetic construct
  source 1..75: mol_type = other DNA
aaacgaccatctacgatctggccgaattaaccggcgtttctgccagtgcggtgagcgcgattttgaatggtaact

SEQ ID NO: 782184 - DNA, 75 bp, synthetic construct
  source 1..75: mol_type = other DNA
aactctcaaaaaaaataatcttgataatatttaatcgtgggatttcattttggctccctctaatatgcatgatga

SEQ ID NO: 782185 - DNA, 75 bp, synthetic construct
  source 1..75: mol_type = other DNA
agttccggcagacaaagtgaagaacaacacagaggtgacggcaacagcgaaagatccgggtggtaatgaaagtga

SEQ ID NO: 782186 - DNA, 75 bp, synthetic construct
  source 1..75: mol_type = other DNA
ggcaaatataacgtctcacaattcagtagaacaaggaaattatgctgattcatggtataaaggagatactgtgga

SEQ ID NO: 782187 - DNA, 75 bp, synthetic construct
  source 1..75: mol_type = other DNA
tcccttatccaaagctcggtagtgttcatatagcgtactacaacgcgatgctcaaggcgaaaaataatagtaagt

SEQ ID NO: 782188 - DNA, 75 bp, synthetic construct
  source 1..75: mol_type = other DNA
atgaaaaatagaaatcgtatgatcgtgaactgtgttactgcttccctgatgtattattggagcttacctgcactg

SEQ ID NO: 782189 - DNA, 75 bp, synthetic construct
  source 1..75: mol_type = other DNA
caatattaatatgggtgatggagatgataaactatatacgcaggatggtttcgcttcttcaggtacccgaaatat

SEQ ID NO: 782190 - DNA, 75 bp, synthetic construct
  source 1..75: mol_type = other DNA
tttgatattcacaaaattgataaaactaaagacaatatattattttccggtacaggtgaaaataatacgcaagtg

SEQ ID NO: 782191 - DNA, 75 bp, synthetic construct
  source 1..75: mol_type = other DNA
tgagtaagcagttttcggaggtgcttgttgcgctgaagaaagcggttgttgccatccataccggtgttcatcatc

SEQ ID NO: 782192 - DNA, 75 bp, synthetic construct
  source 1..75: mol_type = other DNA
gtattggtgtgatatgtttttttttaattattcctaattctgttaagtctgctgaatttaatgcgttaggcaaac

SEQ ID NO: 782193 - DNA, 75 bp, synthetic construct
  source 1..75: mol_type = other DNA
cgaatcactgacagacagcccgttccggtcacagattgtggagtggtatgagcagacgccaccaggtgaacccta

SEQ ID NO: 782194 - DNA, 75 bp, synthetic construct
  source 1..75: mol_type = other DNA
ctctagtgcacttgaagtgcatcaatcgaatcattttccattcctaaaagctgatgaaatacctgattttctgcg

SEQ ID NO: 782195 - DNA, 75 bp, synthetic construct
  source 1..75: mol_type = other DNA
atgtccattcccgtactcgacgcgccaatgagaaattcactggcgcgtatttttgttcgcggcttagttacggct

SEQ ID NO: 782196 - DNA, 75 bp, synthetic construct
  source 1..75: mol_type = other DNA
tggtgtatcacaaggcatggcggtatttaatcagttgaaatggctggtaaacccatcagcgccaaccactattgc

SEQ ID NO: 782197 - DNA, 75 bp, synthetic construct
  source 1..75: mol_type = other DNA
aaatctcatgatgaacatacgcttttcccaatttttactgcgagttggcaagctactcgtataaagaataaaggt

SEQ ID NO: 782198 - DNA, 75 bp, synthetic construct
  source 1..75: mol_type = other DNA
tagaaatgaaaaaatagaatgcgcttgtgattttatgatggctaaagatgcgcaggggtatatcgacctgtctga

SEQ ID NO: 782199 - DNA, 75 bp, synthetic construct
  source 1..75: mol_type = other DNA
gaaatatcatttattaaatcgaatctgactaatgttatgtttgataatgtgcgaatgtcgacagggaattttaaa

SEQ ID NO: 782200 - DNA, 75 bp, synthetic construct
  source 1..75: mol_type = other DNA
ttgatgtccttgtcactaattcttttgtttaatgaaccgtttggcgttattacaaattattgtcaatcacgaatt

SEQ ID NO: 782201 - DNA, 75 bp, synthetic construct
  source 1..75: mol_type = other DNA
tgttctttatattatgtatggtatggcctgttatcagaaatgaacatggcaatgatatttaatataaattacgtt

SEQ ID NO: 782202 - DNA, 75 bp, synthetic construct
  source 1..75: mol_type = other DNA
gggcgtgtgtgcacaaaaaaagcggctgcatgagccgctgattgaggcgttctggaggattttgccgaaccacaa

SEQ ID NO: 782203 - DNA, 75 bp, synthetic construct
  source 1..75: mol_type = other DNA
aaaaattcttaatattgttaataaaaactttattgagaatatgaagaaaacatttagccattgtccttatataaa

SEQ ID NO: 782204 - DNA, 75 bp, synthetic construct
  source 1..75: mol_type = other DNA
gttccccatcttctggagtaattagtttaggtatcataagtaattttttatttctagtgttgggtgcaatctttt

SEQ ID NO: 782205 - DNA, 75 bp, synthetic construct
  source 1..75: mol_type = other DNA
ccaatgggggccgaacctgctgatgtacaacactaaaaccttcccgacgccgccggatagctggcaagtggtttt

SEQ ID NO: 782206 - DNA, 75 bp, synthetic construct
  source 1..75: mol_type = other DNA
taacattcgaatgtaaagaaataggggattgcaattttactactgcaacagttgataatgtcatatttaaatgtc

SEQ ID NO: 782207 - DNA, 75 bp, synthetic construct
  source 1..75: mol_type = other DNA
atggataaagatgcgcaggggtatatcgacctgtctgatttggatttaacaagttgtcattttaaaggtgacgtt

SEQ ID NO: 782208 - DNA, 75 bp, synthetic construct
  source 1..75: mol_type = other DNA
ttcgatacccaacagatgatccattttattaacaggtttaatatgaataaagggctgattgataaaaataacaat

SEQ ID NO: 782209 - DNA, 75 bp, synthetic construct
  source 1..75: mol_type = other DNA
tcgttgagggtgccacagatgcgtttacagagttgcacgacactgtgatcctgaccttccgcattattgagtatt

SEQ ID NO: 782210 - DNA, 75 bp, synthetic construct
  source 1..75: mol_type = other DNA
ggcaaaaaaccattattcattaaatgacgcgatggtaaaagctgatgaatctaaaattttttatgaacctacaac

SEQ ID NO: 782211 - DNA, 75 bp, synthetic construct
  source 1..75: mol_type = other DNA
aacgccatcggtaggtgatgcgaactcgcaaacaccggaatataaagcgtttctggtcaacatagagcgagtgta

SEQ ID NO: 782212 - DNA, 75 bp, synthetic construct
  source 1..75: mol_type = other DNA
ccgtggcggatttcaatcgaatctgcgaaattctcgctagtacctgtgttcctgatcgcaccgccaccatcctgt

SEQ ID NO: 782213 - DNA, 75 bp, synthetic construct
  source 1..75: mol_type = other DNA
tccgggaaacggcacggatcgacaaaccgggcgcgtgccatatcttccggcactcgatggcgacgcagatgctgg

SEQ ID NO: 782214 - DNA, 75 bp, synthetic construct
  source 1..75: mol_type = other DNA
cctcattgccaaatgcctggaagcttcgccgcaagcattgattgtcgatgagccgacgcgcggcgtggatgtctc

SEQ ID NO: 782215 - DNA, 75 bp, synthetic construct
  source 1..75: mol_type = other DNA
aggtattcattaaatgagaatacatttgacccaatctcacaacaaagtctatttgttcctcctgggtatgcggaa

SEQ ID NO: 782216 - DNA, 75 bp, synthetic construct
  source 1..75: mol_type = other DNA
tcagatgcaggcattgcaggtgcaatggccatgacagcaataccaatgattgatggtaaacagtattctttcggc

SEQ ID NO: 782217 - DNA, 75 bp, synthetic construct
  source 1..75: mol_type = other DNA
tggcgcgaactcagtcacaacacgctcaaatgaagtcagtataggcacaaaaaatggagaaactcgcataattgg

SEQ ID NO: 782218 - DNA, 75 bp, synthetic construct
  source 1..75: mol_type = other DNA
tgcaatggccatgacagcaataccaatgattgatggtaaacagtattctttcggcatggctgcaagtaattatcg

SEQ ID NO: 782219 - DNA, 75 bp, synthetic construct
  source 1..75: mol_type = other DNA
agtgttaggcatacaaaaaaaggtgcgcagataacattacccctaaatggtagggagatttaccaatacggcacc

SEQ ID NO: 782220 - DNA, 75 bp, synthetic construct
  source 1..75: mol_type = other DNA
agtgttaaacatacaggaagaggtgcgcagataaccttaccccttgaaggcaaagagatttatcgatatggctcg

SEQ ID NO: 782221 - DNA, 75 bp, synthetic construct
  source 1..75: mol_type = other DNA
cttactttgtagataaagagtctaaaaaaatcctattatcatccgatggtttagggaatgtaatggtcattggac

SEQ ID NO: 782222 - DNA, 75 bp, synthetic construct
  source 1..75: mol_type = other DNA
acacgacagcgactggcacagtacccgcgatgatacacgctggtcgtcggtatttaaggtcagggatgaaagccc

SEQ ID NO: 782223 - DNA, 75 bp, synthetic construct
  source 1..75: mol_type = other DNA
caaaagggggatttggtaatctcatagcattacctctgcaaaaaagaccgcgtgaatcggggggaagtgtttttg

SEQ ID NO: 782224 - DNA, 75 bp, synthetic construct
  source 1..75: mol_type = other DNA
gaatggttgttccgagaagccgagatggcggtgtcgaacgaggatatcgcccgtcgcttcgtagccgagtgccga

SEQ ID NO: 782225 - DNA, 75 bp, synthetic construct
  source 1..75: mol_type = other DNA
gcctgggtgccgacgatctcgtagactatgctgcccgcgaggaaacacggcacgagcatcttgccgagttacggg

SEQ ID NO: 782226 - DNA, 75 bp, synthetic construct
  source 1..75: mol_type = other DNA
gggtattaatgaaaacatcaaagcagggtataccgctgcgttttggcgcgatagcgacgctggacggcatacaga

SEQ ID NO: 782227 - DNA, 75 bp, synthetic construct
  source 1..75: mol_type = other DNA
tagaaaataagattgatgtcggaaatacagtcactagagataatattaaagagagcgatttgttttctgatttta

SEQ ID NO: 782228 - DNA, 75 bp, synthetic construct
  source 1..75: mol_type = other DNA
gtttaaagatcttattaaaattgcaaaatctttgaatatgtctattacaaatattcccacaggaagctttaaatg

SEQ ID NO: 782229 - DNA, 75 bp, synthetic construct
  source 1..75: mol_type = other DNA
tgaatgatcttccttgtgaggagcctattgtaatatgcaatgagcaacatcgttttatagtagctgaacagttac

SEQ ID NO: 782230 - DNA, 75 bp, synthetic construct
  source 1..75: mol_type = other DNA
tatcgttaacttcattatcaactccttcatcaaatgttgcgggggaataccgggctggtttgggaaatggctggg

SEQ ID NO: 782231 - DNA, 75 bp, synthetic construct
  source 1..75: mol_type = other DNA
tgcctgtacttatgatgtgccgagtttgtaccttgatcatggttataaaattttaggtgatgcaccgggtaataa

SEQ ID NO: 782232 - DNA, 75 bp, synthetic construct
  source 1..75: mol_type = other DNA
aaggaaaatggtctaccgggactaagaataggaagttgccgctcgcttttacatatcctttgctacggaaaagta

SEQ ID NO: 782233 - DNA, 75 bp, synthetic construct
  source 1..75: mol_type = other DNA
ctgacattctcaacggtagggattcgctataccgtaggtggaaagccagccagcgccacatcagaattgattatc

SEQ ID NO: 782234 - DNA, 75 bp, synthetic construct
  source 1..75: mol_type = other DNA
gatggcggtaagaagctgggcctgaagccgacacatatcgttgtaccggtcgggctggaaaaagccgcagagcaa

SEQ ID NO: 782235 - DNA, 75 bp, synthetic construct
  source 1..75: mol_type = other DNA
ttaacacaaataattttcatgttgataatctcaaggtttctggatttgatgtaattattaccgacatcaaagggg

SEQ ID NO: 782236 - DNA, 75 bp, synthetic construct
  source 1..75: mol_type = other DNA
caatggcgacgacgtatcaaaacaaaatgaattaaaaaaacaaatcaaaagaacattaaataataaatttagcgt

SEQ ID NO: 782237 - DNA, 75 bp, synthetic construct
  source 1..75: mol_type = other DNA
caaattagaaatgcttttttaagttacaggcgcaatggtgttacatttaattttttatttagggaaattgtaaat

SEQ ID NO: 782238 - DNA, 75 bp, synthetic construct
  source 1..75: mol_type = other DNA
gacgctgatggtgacctcgaaagggattgctggcgtgccgggcgtgtcgtttgtggtgttgctggcaacgctggg

SEQ ID NO: 782239 - DNA, 75 bp, synthetic construct
  source 1..75: mol_type = other DNA
ggggaactcttaatcaggtcgtcgtactcagcgccgctggccggtttatccccgctggcgcggggaactcagcac

SEQ ID NO: 782240 - DNA, 75 bp, synthetic construct
  source 1..75: mol_type = other DNA
gtggtatttcaagacccggagcgattcaaacattatcccgtaatctagtaaaaataacaacctctattataaaat

SEQ ID NO: 782241 - DNA, 75 bp, synthetic construct
  source 1..75: mol_type = other DNA
gccgaacgcggcgaactcattcgttacggtcgtctaggtttgttcagggacccaaaggctgtaattgatttcgat

SEQ ID NO: 782242 - DNA, 75 bp, synthetic construct
  source 1..75: mol_type = other DNA
agcatcaaaacctggtgaatatatagtttcaaaaaatatgtatggtgacgtgaaggtattgcaggaagtcgttaa

SEQ ID NO: 782243 - DNA, 75 bp, synthetic construct
  source 1..75: mol_type = other DNA
atttaaaaactggtttgcgaaagatgcctcaggagcagataatcatcttgttgaggttataacagataaagatgg

SEQ ID NO: 782244 - DNA, 75 bp, synthetic construct
  source 1..75: mol_type = other DNA
cgattagcatctttatataatttatccttacatcaaaataacacacactcaacaactttaacgacaactgtctga

SEQ ID NO: 782245 - DNA, 75 bp, synthetic construct
  source 1..75: mol_type = other DNA
gtcacaggaagcgagggataacattgttaacgcagccaaaattaacgccaacgctatggggcagcagtttaacca

SEQ ID NO: 782246 - DNA, 75 bp, synthetic construct
  source 1..75: mol_type = other DNA
accatcgttataaactgaaatcaaatggtacgtaccacattaagaatacgcaaccattaaatacagcgaagcccg

SEQ ID NO: 782247 - DNA, 75 bp, synthetic construct
  source 1..75: mol_type = other DNA
cattctgttgaagaactcattggcggaaaacatgatgatgaattcaaaggcggtaagtttaatgatatattccat

SEQ ID NO: 782248 - DNA, 75 bp, synthetic construct
  source 1..75: mol_type = other DNA
ttgttcgttttccccatattcatgacggtttatccccgctggcgcggggaactcctttattccatcccttaatgc

SEQ ID NO: 782249 - DNA, 75 bp, synthetic construct
  source 1..75: mol_type = other DNA
ttgactccaaaaatacacttgtcgataattttaaattatcggggtttgatgtcgttgttactgatgtaaaaggag

SEQ ID NO: 782250 - DNA, 75 bp, synthetic construct
  source 1..75: mol_type = other DNA
actggggatggtctttcatcttttgcgaactctacagctcaaatttctggtaatgtattaaatattactgttgca

SEQ ID NO: 782251 - DNA, 75 bp, synthetic construct
  source 1..75: mol_type = other DNA
ctgtggctgcatcagcggcagtatctggttcagtgatggctgctgattggacggaaggtcaaccaggtgacatta

SEQ ID NO: 782252 - DNA, 75 bp, synthetic construct
  source 1..75: mol_type = other DNA
ataattcgccatttacccttggtgaacatcaatttaccgttgaagtatcggataaggcgggtaacacgtcgtcaa

SEQ ID NO: 782253 - DNA, 75 bp, synthetic construct
  source 1..75: mol_type = other DNA
acatattatattggattcaaaattagatgtgccgacagctacattggtagaatctgataatagtggagatcaatc

SEQ ID NO: 782254 - DNA, 75 bp, synthetic construct
  source 1..75: mol_type = other DNA
gaaattggattgtttatgttgaggaagagttacaggatggtacgtatgattatatagttacagctactggttctg

SEQ ID NO: 782255 - DNA, 75 bp, synthetic construct
  source 1..75: mol_type = other DNA
ccgctggcgcggggaactcatccagcgcattcctgtgtgccgtatctaaatcggtttatccccgctggcgcgggg

SEQ ID NO: 782256 - DNA, 75 bp, synthetic construct
  source 1..75: mol_type = other DNA
gcgcggggaactctccggtacgcgcgggatcgaatccggcccagacggtttatccccgctggcgcggggaactca

SEQ ID NO: 782257 - DNA, 75 bp, synthetic construct
  source 1..75: mol_type = other DNA
ggcgcggtttatccccgctggcgcggggaactcgccgcgttattttccctgaaaacaataaagctcggtttatcc

SEQ ID NO: 782258 - DNA, 75 bp, synthetic construct
  source 1..75: mol_type = other DNA
ttatccccgctggcgcggggaacacgcgatggatcagggtattacactcgacggcggcggtttatccccgctggc

SEQ ID NO: 782259 - DNA, 75 bp, synthetic construct
  source 1..75: mol_type = other DNA
agataacagcacatattcaatgattcttacattgaaagataaaacaacaggtgagttgggctttgagtattcgcc

SEQ ID NO: 782260 - DNA, 75 bp, synthetic construct
  source 1..75: mol_type = other DNA
acaccgcgccagcggtgaaaaaagccatcaactccctgcgcgataacagcgattttcgtgggatgtacctgaaag

SEQ ID NO: 782261 - DNA, 75 bp, synthetic construct
  source 1..75: mol_type = other DNA
actctgacggttcggttaccccctctttttctgacggagatgatacatttattgttactgcgggtaatcacgcag

SEQ ID NO: 782262 - DNA, 75 bp, synthetic construct
  source 1..75: mol_type = other DNA
ggtgcctacgaatattcattaacccgaggtaataccgaagcgaccaataaaaactggtatctgactaacttccag

SEQ ID NO: 782263 - DNA, 75 bp, synthetic construct
  source 1..75: mol_type = other DNA
tgaccattacggatagtgaggtatcatcggctgcagatgtttttattaataatattaaaggtcatttggtcatcg

SEQ ID NO: 782264 - DNA, 75 bp, synthetic construct
  source 1..75: mol_type = other DNA
ttattgttactgcgggtaatcacgcagtcggcgttcttgcgtgtgcatctcccggaagcgcgcgtgcgtgtgtat

SEQ ID NO: 782265 - DNA, 75 bp, synthetic construct
  source 1..75: mol_type = other DNA
gtacagaaagtttgtttgatgcgggtacagacattgcattcaatccagtaaaaacagagtcatgtgatgtaaata

SEQ ID NO: 782266 - DNA, 75 bp, synthetic construct
  source 1..75: mol_type = other DNA
cacaaggtggtaatcctgagcgaggagtgaacataaatatttttgagcactttatgacgtcatatatgccttata

SEQ ID NO: 782267 - DNA, 75 bp, synthetic construct
  source 1..75: mol_type = other DNA
acattgttttaacggattgacgcgttacaaccaggccggtgagttcaatgtcggttatgggaagtataaaactcc

SEQ ID NO: 782268 - DNA, 75 bp, synthetic construct
  source 1..75: mol_type = other DNA
ggaaattataacaatgatcaaggcgtttaccgcgcaggtagaagccgatttagggcgtaaaccggttatctacac

SEQ ID NO: 782269 - DNA, 75 bp, synthetic construct
  source 1..75: mol_type = other DNA
gggtgtgatacggacggacgacgagcggacccaccactaccactacgacagccagcaccggctggtgttttacac

SEQ ID NO: 782270 - DNA, 75 bp, synthetic construct
  source 1..75: mol_type = other DNA
taataatctgatatcgcgtgttgactcatctccgtcaaaggctatgaaaatttttatttatcgcaataaaatatg

SEQ ID NO: 782271 - DNA, 75 bp, synthetic construct
  source 1..75: mol_type = other DNA
cctatagtgcgaaaggcgcaaccgtctcgctggaagcgggttacggctttgccctgaataaatcctttggtctgg

SEQ ID NO: 782272 - DNA, 75 bp, synthetic construct
  source 1..75: mol_type = other DNA
aggtagcggtatgaaaggccaaggtccatcccttgatgttaatggtcgcgttgtaccatggaatagtagtgccgc

SEQ ID NO: 782273 - DNA, 75 bp, synthetic construct
  source 1..75: mol_type = other DNA
tattgtgctatgtatgttgaaatgtcaacgggaagcaatcaagatgaggctgatataatgtgcggaatgcctgag

SEQ ID NO: 782274 - DNA, 75 bp, synthetic construct
  source 1..75: mol_type = other DNA
atgaatatgatgatctcatatcaggaacttgttcgcaccttccttaacaaagtgctgggcggtctggataaagca

SEQ ID NO: 782275 - DNA, 75 bp, synthetic construct
  source 1..75: mol_type = other DNA
aaggcagtcaaatggcaaatgcacagtacgagaaagggaaaatcatacttgagcacactaaaactcaagtcaaga

SEQ ID NO: 782276 - DNA, 75 bp, synthetic construct
  source 1..75: mol_type = other DNA
cttatttttcaatctcgataaagaacactataaaaatagccgtaaattacaggaattgatttgggataagttggt

SEQ ID NO: 782277 - DNA, 75 bp, synthetic construct
  source 1..75: mol_type = other DNA
gtgtgtctgagtgggaagaggagcttgctgtttccgcggagtgcattatgactctggatatcgggagcgggaaac

SEQ ID NO: 782278 - DNA, 75 bp, synthetic construct
  source 1..75: mol_type = other DNA
aatgcccattgatcatcaaaaacagataaaaacttgccgctggcgcgtggctagacagttgccaggagattttgc

SEQ ID NO: 782279 - DNA, 75 bp, synthetic construct
  source 1..75: mol_type = other DNA
atggtaagcaatcaagaatcattaaatccagaatctttggctaagttacagatgatgctctcaaattattcaata

SEQ ID NO: 782280 - DNA, 75 bp, synthetic construct
  source 1..75: mol_type = other DNA
tcattcaatagaaaaacacttatccgaacttaatcgaatgctttgcctaactcccatggagttaaatgaacatgc

SEQ ID NO: 782281 - DNA, 75 bp, synthetic construct
  source 1..75: mol_type = other DNA
gatgctgcatttatcgccgcagccaaccccgccaccgtgctggcgctgctggatgagctggaatccgcagagaag

SEQ ID NO: 782282 - DNA, 75 bp, synthetic construct
  source 1..75: mol_type = other DNA
ccgctgatgtttttcgcattgtcattcaacgctaatctggtttcgttctttgcccccggttattggcgtaaggtc

SEQ ID NO: 782283 - DNA, 75 bp, synthetic construct
  source 1..75: mol_type = other DNA
gttataaaacgatgtcaattgcggattacctggcggaaaatggttattcgtctgggtttgtgtatcaggcactct

SEQ ID NO: 782284 - DNA, 75 bp, synthetic construct
  source 1..75: mol_type = other DNA
tatgtggagcttgcaaatgcaattgacgacaaacgggctgagtcatttctcaaaccagcagttatcgtctgggaa

SEQ ID NO: 782285 - DNA, 75 bp, synthetic construct
  source 1..75: mol_type = other DNA
ggtgacagatttcagtcgtgtcagcggttcacgtgaccaggcgacgtaccggataattattgagccgtttctgtc

SEQ ID NO: 782286 - DNA, 75 bp, synthetic construct
  source 1..75: mol_type = other DNA
accgttctgtttaccagcagtgacctgaacatcagtgcatcgcagttactgagtaagccggcgacgctgaccatg

SEQ ID NO: 782287 - DNA, 75 bp, synthetic construct
  source 1..75: mol_type = other DNA
acgccctgtctgcattaactgaaggcgggctgaaccgctaccgtctggatattccgtcctgtaccgcatcgccgg

SEQ ID NO: 782288 - DNA, 75 bp, synthetic construct
  source 1..75: mol_type = other DNA
atgatgagtggggcaacatgctgaacgaggagaacccgcatcacctgtatcagccataccgccttccgggtcagc

SEQ ID NO: 782289 - DNA, 75 bp, synthetic construct
  source 1..75: mol_type = other DNA
aaacgaaaattagtctgttttattcagcaataattgacggtttaatgaaaaaaatgtataaatgtagcttcaaat

SEQ ID NO: 782290 - DNA, 75 bp, synthetic construct
  source 1..75: mol_type = other DNA
tttattgagcgcctgctggctgaagtggggatattttattttttcaccctgcagccggacaccctgacggaagtg

SEQ ID NO: 782291 - DNA, 75 bp, synthetic construct
  source 1..75: mol_type = other DNA
gatcaggtgtttgcactaaatttttccctgccgctcaatctgttgctccccagaagtaatatagctataccagga

SEQ ID NO: 782292 - DNA, 75 bp, synthetic construct
  source 1..75: mol_type = other DNA
tcgttaaaacgtaacgtggatcttgaaaatgccgtagtaaacgtggttcccaccaaaggggcattggttctggcg

SEQ ID NO: 782293 - DNA, 75 bp, synthetic construct
  source 1..75: mol_type = other DNA
gggcaatatgctgaatattaccgtgccgctatgtttggtctgggttttaacctcggcgatttcggagcaatttcg

SEQ ID NO: 782294 - DNA, 75 bp, synthetic construct
  source 1..75: mol_type = other DNA
atgttgagtgctgttccttacagcgagattgtctgctggcgaccaccgttacttcctcgtccgaaaatcaccggg

SEQ ID NO: 782295 - DNA, 75 bp, synthetic construct
  source 1..75: mol_type = other DNA
gacagccaggctgcgctgacgtttgataagacgctggcgataaacagtccgtccggaatgaatgataacagagcg

SEQ ID NO: 782296 - DNA, 75 bp, synthetic construct
  source 1..75: mol_type = other DNA
ccaacagtattcatagcagttcagatagtgattccacagatagctattttttgaatttaaacagtggcgtgaatt

SEQ ID NO: 782297 - DNA, 75 bp, synthetic construct
  source 1..75: mol_type = other DNA
acctgtataattacccactgaatccgataataaggatggatcctttgggtttgtataatttatatcaattattat

SEQ ID NO: 782298 - DNA, 75 bp, synthetic construct
  source 1..75: mol_type = other DNA
atctgaaagaagcgcatattgaatataataagattgaggttattcctgcgatacctggcaatttaaaattacttt

SEQ ID NO: 782299 - DNA, 75 bp, synthetic construct
  source 1..75: mol_type = other DNA
gattgctcagttagtaaaaataaatatcctccggcatagccggaggtttttcaaatgcgcctataaggctctctt

SEQ ID NO: 782300 - DNA, 75 bp, synthetic construct
  source 1..75: mol_type = other DNA
ttacatatgattttgatagtattgaggagttttttacttccttaaaagaaaataaattaaataaatatcttacta

SEQ ID NO: 782301 - DNA, 75 bp, synthetic construct
  source 1..75: mol_type = other DNA
agtttaatttcaattcataaatcagggattttaagtctggagagaaaacttaagttaccaccttttatatcccta

SEQ ID NO: 782302 - DNA, 75 bp, synthetic construct
  source 1..75: mol_type = other DNA
taggccaggttgtaaatgatttttctattatatgcacagcaaaaaattatctgtctactatagatttttatattg

SEQ ID NO: 782303 - DNA, 75 bp, synthetic construct
  source 1..75: mol_type = other DNA
taaaatcacatctaatactgagtctacgataaaacaacacgagttagtatctgatgatgcaatcataaatgaatt

SEQ ID NO: 782304 - DNA, 75 bp, synthetic construct
  source 1..75: mol_type = other DNA
atggcgatgtttatcgccggtattgcagggattggtgaagtctacttcccgtttgtactggctaatccgttgtta

SEQ ID NO: 782305 - DNA, 75 bp, synthetic construct
  source 1..75: mol_type = other DNA
ccgccaccgattgtaatcacattcgatataattaaataccgttgcccgcattatttcccggctgataaagtgttc

SEQ ID NO: 782306 - DNA, 75 bp, synthetic construct
  source 1..75: mol_type = other DNA
gagcaactggcaagacaggtggagccggaatacacaccggcgagaaaatttcatctttaccactgcgaccaccgg

SEQ ID NO: 782307 - DNA, 75 bp, synthetic construct
  source 1..75: mol_type = other DNA
tttagagagcctaataaaacaatctgatcatatagtaactttgtgttctcaatctgcaatcgaggctgcattttt

SEQ ID NO: 782308 - DNA, 75 bp, synthetic construct
  source 1..75: mol_type = other DNA
tatatcgcagcaaaaatatattgttacgaaccccgatgattatgataaatattctgacatggttaaaagggtcgt

SEQ ID NO: 782309 - DNA, 75 bp, synthetic construct
  source 1..75: mol_type = other DNA
agaattagaactcgatgccaataactttacagaatgtccaaaattacctgatggagttaccctggtctccttaaa

SEQ ID NO: 782310 - DNA, 75 bp, synthetic construct
  source 1..75: mol_type = other DNA
atgatgacgctggcgctggcggttttggggctgatcccggatatggggatctggctggtagtgatggcatttgcg

SEQ ID NO: 782311 - DNA, 75 bp, synthetic construct
  source 1..75: mol_type = other DNA
tgatttccgtagcgtttgccccggagactcgagggatgtcactggcgcagaccagcaatatgacgatccgcgggc

SEQ ID NO: 782312 - DNA, 75 bp, synthetic construct
  source 1..75: mol_type = other DNA
aggaggcatatgcacaattaaatacaacaaagagaggacaagaaataacaaaaccgttagaagattcgaaagatg

SEQ ID NO: 782313 - DNA, 75 bp, synthetic construct
  source 1..75: mol_type = other DNA
gtcagcaatgtctgggttgtcatgcttgtgaaatcgcctgtgtcatggctcacaatgacgagcaacatgtcctga

SEQ ID NO: 782314 - DNA, 75 bp, synthetic construct
  source 1..75: mol_type = other DNA
cttttgccatttcactgactgtcaaaagtgcgctggcatttttaatattaattatttattttggcccaatactgg

SEQ ID NO: 782315 - DNA, 75 bp, synthetic construct
  source 1..75: mol_type = other DNA
aactttgcctttctcaacaaactgaagaggatcagttcatcgtatgggaggctttgcgtcatgagtattctcgcc

SEQ ID NO: 782316 - DNA, 75 bp, synthetic construct
  source 1..75: mol_type = other DNA
caggatttggatcatggctattattacacgccggaaaacccggtgctgtggcaatctgctcaggaggatgaatta

SEQ ID NO: 782317 - DNA, 75 bp, synthetic construct
  source 1..75: mol_type = other DNA
tttataatgtttcgtttgattacattgacaatgtgatgacaactattgatatgtataatgtgggtacatccagca

SEQ ID NO: 782318 - DNA, 75 bp, synthetic construct
  source 1..75: mol_type = other DNA
tgctttcacagtgggtgttacgcaactttcgcagcgatgacacagccctgtatgcaaaggaaaagcagcgggtat

SEQ ID NO: 782319 - DNA, 75 bp, synthetic construct
  source 1..75: mol_type = other DNA
ctgctgaatgaggagaacccgcatcacctgcaccagccataccgtctgccggggcagcagcatgatgaggaatca

SEQ ID NO: 782320 - DNA, 75 bp, synthetic construct
  source 1..75: mol_type = other DNA
aaagtcacgtttgacaatgcgccacagggaatgcgcgttatcgatttgccgaaaacaggcgatccctttatgaaa

SEQ ID NO: 782321 - DNA, 75 bp, synthetic construct
  source 1..75: mol_type = other DNA
ttgataccgcaggcggtggagttttgggccgccagttctgatcgtctgcaccggcgactgcgggccgagtatcac

SEQ ID NO: 782322 - DNA, 75 bp, synthetic construct
  source 1..75: mol_type = other DNA
cgcaaatagatgcattctccagggcttaattgatggtgtgaattatctgaagaaaccctgtaccgttgaattaat

SEQ ID NO: 782323 - DNA, 75 bp, synthetic construct
  source 1..75: mol_type = other DNA
tccacgctgggggaaaccttcctgccttcaatcaatgaaggcataaaagagatgaagccttttctggaagaagtg

SEQ ID NO: 782324 - DNA, 75 bp, synthetic construct
  source 1..75: mol_type = other DNA
cggtccgtgtgggtgccagcgattgcctcgccattcataatgttgtttccaccagccgtggtcgcgccagtgacc

SEQ ID NO: 782325 - DNA, 75 bp, synthetic construct
  source 1..75: mol_type = other DNA
cgcgccagcgtcgcatcaggcgctgaatgccggattgttacccggcatttgtcatttagcggtgatgtttgcctg

SEQ ID NO: 782326 - DNA, 75 bp, synthetic construct
  source 1..75: mol_type = other DNA
tgcgtgagcagtgaaagccgccagtggcttgcgcagtgcgggctgacggtggagcggctggcggcacagatagag

SEQ ID NO: 782327 - DNA, 75 bp, synthetic construct
  source 1..75: mol_type = other DNA
gggttgacatgtccatcaacaacagattgctcagatagatgtagtgattatattaatccagagcataaaaaacga

SEQ ID NO: 782328 - DNA, 75 bp, synthetic construct
  source 1..75: mol_type = other DNA
gaaacattgcgtggagcggggagtatgatgagtggggcaaccagctgaatgaagagaccccgcatcacctgcacc

SEQ ID NO: 782329 - DNA, 75 bp, synthetic construct
  source 1..75: mol_type = other DNA
ttcccagttttttgcatggacagaagctgcccgcatagacattcaataccttagcctagaaaaaaataaaaaaat

SEQ ID NO: 782330 - DNA, 75 bp, synthetic construct
  source 1..75: mol_type = other DNA
aattgtcatccgataataaaactaccgttatattcacccataatcattgcctgacacaaatagcaaaaaaaatga

SEQ ID NO: 782331 - DNA, 75 bp, synthetic construct
  source 1..75: mol_type = other DNA
agattgatgagatcccgctctacccgggttatcacaatcaatttgccaattcccttaaattgcaaagtagcgatg

SEQ ID NO: 782332 - DNA, 75 bp, synthetic construct
  source 1..75: mol_type = other DNA
aaaagaataatattaatcctgacaaaaaagatattggtaaagttgcattcattattgaccaactaaaacatcctc

SEQ ID NO: 782333 - DNA, 75 bp, synthetic construct
  source 1..75: mol_type = other DNA
ggggaacaagaagtatcgcgtatggtgatcaagaacctcggtgctgactgcccatccgacgaagcgacagaaaac

SEQ ID NO: 782334 - DNA, 75 bp, synthetic construct
  source 1..75: mol_type = other DNA
gaaaggctaatcagaatacagcacgcgttaatcgatttaattaattttcttgatcctggcatgattcgatttgac

SEQ ID NO: 782335 - DNA, 75 bp, synthetic construct
  source 1..75: mol_type = other DNA
ggatgtgtgccgcgaggggtatgttgcgccgtacatttatgcccggcagcataaggcagcctgggtgatgctgcc

SEQ ID NO: 782336 - DNA, 75 bp, synthetic construct
  source 1..75: mol_type = other DNA
tcttcatgatgacattcttttacacccctaaggtacaagaaaaaagcacaaccattataaatataataagttcac

SEQ ID NO: 782337 - DNA, 75 bp, synthetic construct
  source 1..75: mol_type = other DNA
aagcgtttgaggaatacctgcagccagccagattcaaggtagcttatggcgggcgaggttccgccaagacgcgaa

SEQ ID NO: 782338 - DNA, 75 bp, synthetic construct
  source 1..75: mol_type = other DNA
ttcccccggcaggtccgcataggtatccgttcggtaggtttctacgaacatgaagttaaccagtggctggctgac

SEQ ID NO: 782339 - DNA, 75 bp, synthetic construct
  source 1..75: mol_type = other DNA
gtgcatcagcctgcccagcatggatgcgaataaaagccacacgtcacctggcgatgtattccgcttatttagccg

SEQ ID NO: 782340 - DNA, 75 bp, synthetic construct
  source 1..75: mol_type = other DNA
tccgctgggtggagaaggatacgcctgatgctgttgaaaaaattcaggcgctgttaccggcgatcgaaaaggcga

SEQ ID NO: 782341 - DNA, 75 bp, synthetic construct
  source 1..75: mol_type = other DNA
ggtctggatacgccggatgcatttaaggccatgacggagcaggtacgcgctttgtctacagagcttcccatgtct

SEQ ID NO: 782342 - DNA, 75 bp, synthetic construct
  source 1..75: mol_type = other DNA
cgacgcatttaccctctccggcgatgacccggaaggtgtattcccggtagttctcggtcacgaagggccggcgtt

SEQ ID NO: 782343 - DNA, 75 bp, synthetic construct
  source 1..75: mol_type = other DNA
atcggtaaagtctttgctgatgttcgagatcagttgggtattccttatctggacgattatggacagcggcggttg

SEQ ID NO: 782344 - DNA, 75 bp, synthetic construct
  source 1..75: mol_type = other DNA
tttgttattggcatatacgggagcgagaaggggcgagataggaaagctggagaagtcacagattaaattcgatga

SEQ ID NO: 782345 - DNA, 75 bp, synthetic construct
  source 1..75: mol_type = other DNA
aagtgactgctgatccccgttctcctcgtggtggcctttctctgttctggcatctggcgatgaatgatgatgaat

SEQ ID NO: 782346 - DNA, 75 bp, synthetic construct
  source 1..75: mol_type = other DNA
aattggcgctatttataaagggccattttccggtcgggggcaggattacattggctttggcgtcagcaaaatgca

SEQ ID NO: 782347 - DNA, 75 bp, synthetic construct
  source 1..75: mol_type = other DNA
tgatcccgctttacaccgcggagtgcggcgagtgtgagttctgtcgttctggcaaaactaacctctgtgttgcgg

SEQ ID NO: 782348 - DNA, 75 bp, synthetic construct
  source 1..75: mol_type = other DNA
cgtgaactgcaaaacagtatcagcgattcggtaatccggttgcttgaagacaccatcgagcgtgaagggtattcg

SEQ ID NO: 782349 - DNA, 75 bp, synthetic construct
  source 1..75: mol_type = other DNA
cagatgttgcccaaccagaggaaattaaaactccgggcgcatcctgcctgataaaaatgactcggccatgcttca

SEQ ID NO: 782350 - DNA, 75 bp, synthetic construct
  source 1..75: mol_type = other DNA
atcctcaccgccgacaggattctcctgcgtttatggcttttctgcaagttttgcgtgacaggtacaataatggaa

SEQ ID NO: 782351 - DNA, 75 bp, synthetic construct
  source 1..75: mol_type = other DNA
ataacataccctctccatttccaggccacgctacaacaggatggaactataccaatagaagctggtgagtttaaa

SEQ ID NO: 782352 - DNA, 75 bp, synthetic construct
  source 1..75: mol_type = other DNA
cgactggcggtaaatcctgtcgaggaagcagatgatgaagaaaaagatgccaccgctgaacatgaaatactacgt

SEQ ID NO: 782353 - DNA, 75 bp, synthetic construct
  source 1..75: mol_type = other DNA
agcgactggcggcgaatatcctcgaaggtggtcaaagcgcatttaatcaacgccgggaaaaatacgggtttaaat

SEQ ID NO: 782354 - DNA, 75 bp, synthetic construct
  source 1..75: mol_type = other DNA
gaacttatccaggcacgttctcaacgttctgcagcattggcaaaatcagtaaaacgtctgaacagaaaactggat

SEQ ID NO: 782355 - DNA, 75 bp, synthetic construct
  source 1..75: mol_type = other DNA
ccatccgcaagccgttttccgaaatatgggtgagctttaacccgaaaaacatcctcgacgatacctatcagcgat

SEQ ID NO: 782356 - DNA, 75 bp, synthetic construct
  source 1..75: mol_type = other DNA
ttgtctgctgacggtgaactacaccgacaacccgcactttcctgaagttctccgtctggagatggaagagtgtaa

SEQ ID NO: 782357 - DNA, 75 bp, synthetic construct
  source 1..75: mol_type = other DNA
gatgctaaaggttacgcatcgcgtcacggctcggtggttaagcgcattgccgaaggtctactgatggacatcaac

SEQ ID NO: 782358 - DNA, 75 bp, synthetic construct
  source 1..75: mol_type = other DNA
acatccgcagtatcgcttttcacatcgatgaagacgattaccacggcaaacatattgcgtatttcatgcgacaag

SEQ ID NO: 782359 - DNA, 75 bp, synthetic construct
  source 1..75: mol_type = other DNA
tgagttcctgcgctggaataaagctggcggtaaagtcctgaacggactgacccgtcggcgtgaggcggagcgcgc

SEQ ID NO: 782360 - DNA, 75 bp, synthetic construct
  source 1..75: mol_type = other DNA
aagcaggagacggcggagcgattgctgaagaccggactggtcagctatgaaagtgacgtatcccgcctggttaaa

SEQ ID NO: 782361 - DNA, 75 bp, synthetic construct
  source 1..75: mol_type = other DNA
agtatccagggatggatacaaagacagcaagtgattacctgccacagacaaattggccaacaactcaattaccac

SEQ ID NO: 782362 - DNA, 75 bp, synthetic construct
  source 1..75: mol_type = other DNA
aaggttcagagagagtaggcgattatcacactcacggtttttactctgacgataaaggaaataaagtaacaaaag

SEQ ID NO: 782363 - DNA, 75 bp, synthetic construct
  source 1..75: mol_type = other DNA
atcaattaacgagaataaagaatatggtggactaatatgtaagaagcaaggtgaatatttacccatgaatccgat

SEQ ID NO: 782364 - DNA, 75 bp, synthetic construct
  source 1..75: mol_type = other DNA
atgggtccgtgacctgcaagctcgttacggggccaacgagcggcagttctgtttcgcagtagggatcagccgcag

SEQ ID NO: 782365 - DNA, 75 bp, synthetic construct
  source 1..75: mol_type = other DNA
tgggtgcactatggctgatggctattatggtgaagtagatatttcgacagagtctttggcaaagttgcaaaattt

SEQ ID NO: 782366 - DNA, 75 bp, synthetic construct
  source 1..75: mol_type = other DNA
aaataaaaataaatgacataaagagatttattgttaatagttttgcaagcgtacaatatgagaatagactggccc

SEQ ID NO: 782367 - DNA, 75 bp, synthetic construct
  source 1..75: mol_type = other DNA
gtggcagatctcgacgatggttatacgcgcattgcaaatgagttgctggaagctgtgatgctggccggattaaca

SEQ ID NO: 782368 - DNA, 75 bp, synthetic construct
  source 1..75: mol_type = other DNA
cggtcagatgatggcacagtggcgcactgcctttaaactgacacagggagaggtggcaggacttgcggacaagat

SEQ ID NO: 782369 - DNA, 75 bp, synthetic construct
  source 1..75: mol_type = other DNA
aaccctcagactgtaacgactgaagatgttaagagtccaggtgtcactcttacaacgctgggtattgaggctact

SEQ ID NO: 782370 - DNA, 75 bp, synthetic construct
  source 1..75: mol_type = other DNA
tcttatatgaatggaatggaaaaaaaagaatacagtagttacttgggaacaccaaataacacctatctaaaatat

SEQ ID NO: 782371 - DNA, 75 bp, synthetic construct
  source 1..75: mol_type = other DNA
tctactttgtgcctgataatcggaagagatattatgacagtgatacagttacttgtttatctaatctctccaatt

SEQ ID NO: 782372 - DNA, 75 bp, synthetic construct
  source 1..75: mol_type = other DNA
tactgagcatcctagtgcttctgatctgatttattacccagaaggtaataatgatggtagccctgaagctgttat

SEQ ID NO: 782373 - DNA, 75 bp, synthetic construct
  source 1..75: mol_type = other DNA
tgtgaaaggagtaaaaaattgcaagagagatattagtgacattttaatttttaatatagatacttttcgcagaga

SEQ ID NO: 782374 - DNA, 75 bp, synthetic construct
  source 1..75: mol_type = other DNA
taactctttgagtattacaaataaagattctgtcagttcagttataacaggcaatctgaatgcaggtacagatac

SEQ ID NO: 782375 - DNA, 75 bp, synthetic construct
  source 1..75: mol_type = other DNA
gacagagggcaagatggtaatacagcaatattactgaaaggaggttctaattcattgaatcttttttccggttcc

SEQ ID NO: 782376 - DNA, 75 bp, synthetic construct
  source 1..75: mol_type = other DNA
ggggggcggctatattcgggagtaatattgagataaataatacgggatatataacaggcggccagggaggaactg

SEQ ID NO: 782377 - DNA, 75 bp, synthetic construct
  source 1..75: mol_type = other DNA
aaatgttggtaaagctgtttcgcaatatattctggctcagagaatggcacagggattatcgacaacagctgcaag

SEQ ID NO: 782378 - DNA, 75 bp, synthetic construct
  source 1..75: mol_type = other DNA
tgaaggtattgcaggaagtcgttaatgaacaggaggtgtcagtgggaaagcgaacagagaaaatacaatatcgtg

SEQ ID NO: 782379 - DNA, 75 bp, synthetic construct
  source 1..75: mol_type = other DNA
gacatgctgcgtttttagaagactctctgtctttgcttgctgatttttctcgtcagcatgcagtagaaagagctg

SEQ ID NO: 782380 - DNA, 75 bp, synthetic construct
  source 1..75: mol_type = other DNA
ttgtgctggtatagaggggaatgctaacatttacgacatagtcattccttcgcagtgcgatcagcatgatgcagg

SEQ ID NO: 782381 - DNA, 75 bp, synthetic construct
  source 1..75: mol_type = other DNA
gaagcggatgctcggcgtaatatttcaactggtaccaaagaattgttgcaaagtgagggaaaagcacgagagagt

SEQ ID NO: 782382 - DNA, 75 bp, synthetic construct
  source 1..75: mol_type = other DNA
tgcaactcgaaagcatgaaactcgaactgcaagcaaaagcggctcgtgtccagcgagaaaacgattttatagagc

SEQ ID NO: 782383 - DNA, 75 bp, synthetic construct
  source 1..75: mol_type = other DNA
ggaagatttttatggtattgactacgaagaagattatttgtggcttcttttgcacttaccgaagagtttttccag

SEQ ID NO: 782384 - DNA, 75 bp, synthetic construct
  source 1..75: mol_type = other DNA
tggcgcaattgcaaaatggtttagtcatctattatggaaaataggcacgccagaagccctggcattgattcagga

SEQ ID NO: 782385 - DNA, 75 bp, synthetic construct
  source 1..75: mol_type = other DNA
ttggagaaaacttacaaacgctcgccgcagccccagcgaccgaacgttagtgagcgagtgggcgaggaagcggaa

SEQ ID NO: 782386 - DNA, 75 bp, synthetic construct
  source 1..75: mol_type = other DNA
tcgatattaaaagtaaatctttagaaagtttattagataatgtaggtaaacagctacaagccgaactcgatgaaa

SEQ ID NO: 782387 - DNA, 75 bp, synthetic construct
  source 1..75: mol_type = other DNA
ggttttacttccgttccgccggaaggttcagaagccatcgtgctggccgttggcggacggcgtgacgggctggtt

SEQ ID NO: 782388 - DNA, 75 bp, synthetic construct
  source 1..75: mol_type = other DNA
tccaggtgatactaaatatgaaagtgtgaataatcttcatagcgacattgcaaatctaaatcataggcgtctagc

SEQ ID NO: 782389 - DNA, 75 bp, synthetic construct
  source 1..75: mol_type = other DNA
tccggggcaaagtaagtttgaagctgtaaatcctatgcatagggatttagtcgctattgaccatcgacaacttgc

SEQ ID NO: 782390 - DNA, 75 bp, synthetic construct
  source 1..75: mol_type = other DNA
agatgcgaactgggcatttaaatttgagtctatggaaaaaatagcgaaaatacttgataattataaaccaattga

SEQ ID NO: 782391 - DNA, 75 bp, synthetic construct
  source 1..75: mol_type = other DNA
gaattttcaaaggatattcaggtcgccggaaaatctgttcttgagcatttccatattgacggagatagcgaaaaa

SEQ ID NO: 782392 - DNA, 75 bp, synthetic construct
  source 1..75: mol_type = other DNA
cggttcagaagcactcattctggctgtggggggacgccgggaaggtctggtggcaatcgctgttgaagacaagcg

SEQ ID NO: 782393 - DNA, 75 bp, synthetic construct
  source 1..75: mol_type = other DNA
acaatactttcagtaacctaatgaaagaattacctactctgaaaaaacctcgttcgctaaaaatacaagatatcc

SEQ ID NO: 782394 - DNA, 75 bp, synthetic construct
  source 1..75: mol_type = other DNA
atgctggagaacttgactcgcctgaaggtatttgactgttctagtaacgatttgatctcttcaccacggctgccg

SEQ ID NO: 782395 - DNA, 75 bp, synthetic construct
  source 1..75: mol_type = other DNA
actctccaggaaacccggggcggttcactgtatacactgcgctgtgctttcaacagtattagcttaatacctgat

SEQ ID NO: 782396 - DNA, 75 bp, synthetic construct
  source 1..75: mol_type = other DNA
ggggatgcgttcatctcattctccttgtaaaatacagattggtttttaactcaatgttcaatatcgggattaatt

SEQ ID NO: 782397 - DNA, 75 bp, synthetic construct
  source 1..75: mol_type = other DNA
ctgctgcatgaactggtacacagtaccggtcatgaaaagcgtctgcggcgggccgggataagttcttttgccggc

SEQ ID NO: 782398 - DNA, 75 bp, synthetic construct
  source 1..75: mol_type = other DNA
ctgctgcatgaactggtacacagtaccggtcatgaaaaacgtctgcggcggaccgggataagctcttttgccggt

SEQ ID NO: 782399 - DNA, 75 bp, synthetic construct
  source 1..75: mol_type = other DNA
aatgtttttattgcagcaaggcatatatcagcactctcgttggatgaagaaaaattaaatgatttgtttgtaatg

SEQ ID NO: 782400 - DNA, 75 bp, synthetic construct
  source 1..75: mol_type = other DNA
ggcaaaaacgctacagcaaaggcaactccgattaatgttaaagcgggtactgtttcggttgaccacgcggaaatg

SEQ ID NO: 782401 - DNA, 75 bp, synthetic construct
  source 1..75: mol_type = other DNA
aaatatcgcgtcgtttgccgcgaatgccggtaaatttttaagcagtcagccggatagcgatgcgacacgcaattt

SEQ ID NO: 782402 - DNA, 75 bp, synthetic construct
  source 1..75: mol_type = other DNA
agcagattgtttttgccctgaagcaggctgaactggggacgtccgtgccggaagtctgtcgcaaactggggattt

SEQ ID NO: 782403 - DNA, 75 bp, synthetic construct
  source 1..75: mol_type = other DNA
acatgaagataatatttcttcatatctcaggtttagattcatgcgtgcaggtttgacgcaaaagccatttaacat

SEQ ID NO: 782404 - DNA, 75 bp, synthetic construct
  source 1..75: mol_type = other DNA
gagccttatggcccaggctcacctacagagtactgaagggattagatagaagcaaagatgaaggcacagccagaa

SEQ ID NO: 782405 - DNA, 75 bp, synthetic construct
  source 1..75: mol_type = other DNA
cctatgacaacccggtgaccggtctcactccagatacaccgtcattaacgggggcagccgctgcgggttcttcag

SEQ ID NO: 782406 - DNA, 75 bp, synthetic construct
  source 1..75: mol_type = other DNA
aaataaagacaatgtacaatatttatgtccatatttatgcagctgaaatctgcggttgggtaaaaacaagcatgg

SEQ ID NO: 782407 - DNA, 75 bp, synthetic construct
  source 1..75: mol_type = other DNA
ctcgtaaacttcaggcccggagcgcaaaaggcgccctgactgtgagtttattgcccagttttgccattcagtggc

SEQ ID NO: 782408 - DNA, 75 bp, synthetic construct
  source 1..75: mol_type = other DNA
cgatgatggcaaagctatttatatctatgactcatcagagatgcgtaatgctctgattaatctgagaaaggtatc

SEQ ID NO: 782409 - DNA, 75 bp, synthetic construct
  source 1..75: mol_type = other DNA
tccagatgattttctttatcaatcggccataacaaaactgtctgttgataaaggtgagtttggctcacttcttgg

SEQ ID NO: 782410 - DNA, 75 bp, synthetic construct
  source 1..75: mol_type = other DNA
taaattacttcgcaaaaaaattacagattcatcacattccaccaaatctctcactctctctgaatctccttctta

SEQ ID NO: 782411 - DNA, 75 bp, synthetic construct
  source 1..75: mol_type = other DNA
tattggtgatacattcagacaagtcagcgaaggcagttcacgcattttatgttgcggagtaaaaataaatgatac

SEQ ID NO: 782412 - DNA, 75 bp, synthetic construct
  source 1..75: mol_type = other DNA
ggcggcgggagcgtgacctgacggggtggatgtcgctgtcgcgtaaaccggaggagacctggtacgggtgggacg

SEQ ID NO: 782413 - DNA, 75 bp, synthetic construct
  source 1..75: mol_type = other DNA
ttacagtctttactcaaagcgcggtcggcgcgtttattctgttgctgattggcggcatcctggaacagattgaca

SEQ ID NO: 782414 - DNA, 75 bp, synthetic construct
  source 1..75: mol_type = other DNA
cctatgattataacgtgacgaaaagtgacgatcagaactggtacttaaccagtgaacccccacttataccacctg

SEQ ID NO: 782415 - DNA, 75 bp, synthetic construct
  source 1..75: mol_type = other DNA
tttcagggaacgggatacggtgaaacgctggttgatggtgacaattcttcattagccgtgaatgagtttatctcc

SEQ ID NO: 782416 - DNA, 75 bp, synthetic construct
  source 1..75: mol_type = other DNA
cttcaaaaagaggctccatccactcaaacccttcagggtgtcggcgctgttcgcgttctggtatctcgccataac

SEQ ID NO: 782417 - DNA, 75 bp, synthetic construct
  source 1..75: mol_type = other DNA
gttgggctcattagggttgcttctcaatcgtggatcggcttcgttatgcaaagggctggtgtggctggcggccgt

SEQ ID NO: 782418 - DNA, 75 bp, synthetic construct
  source 1..75: mol_type = other DNA
gctgggcgcactggggttgcttctcaatcgtggagcggcttcgttatgtaaaggactggtgtggctggcggccgc

SEQ ID NO: 782419 - DNA, 75 bp, synthetic construct
  source 1..75: mol_type = other DNA
cttatagaggaacaggtgcgtttcggtgttctggggctggctgacgaacgccgttgggatcgtgaatcgaagtcc

SEQ ID NO: 782420 - DNA, 75 bp, synthetic construct
  source 1..75: mol_type = other DNA
atcccgtacctggcttcctaaatacgtctatatcaccgcgttagggtttcagatgctgggagtggatctggaaaa

SEQ ID NO: 782421 - DNA, 75 bp, synthetic construct
  source 1..75: mol_type = other DNA
tgaggttgtggtattcgatgcagaaatgttgaatacccgaccagaggatgaggaagagcagaagaatttcactcc

SEQ ID NO: 782422 - DNA, 75 bp, synthetic construct
  source 1..75: mol_type = other DNA
cgacggtatttctaccaataccaacgccaatagtctgacaatcaaaaacagcactattcacggtatgatttatgg

SEQ ID NO: 782423 - DNA, 75 bp, synthetic construct
  source 1..75: mol_type = other DNA
caggtaacgatccattaccacagcgttcatggatatgggatttcgagcagccactgataaccgataatggtgcag

SEQ ID NO: 782424 - DNA, 75 bp, synthetic construct
  source 1..75: mol_type = other DNA
tggggattgtcgcccgccagatccgctcagcgatgctggaacaattgagtgaagactacattcgtaccgcccggg

SEQ ID NO: 782425 - DNA, 75 bp, synthetic construct
  source 1..75: mol_type = other DNA
cttgcttcagccagctctggaatcagtgaatatcccatcggaggtgttccggtatccgccccacgtgaaccaaca

SEQ ID NO: 782426 - DNA, 75 bp, synthetic construct
  source 1..75: mol_type = other DNA
cggtggaacaagttccctgcttgaggtcgagatgcgcggacgtattaccgaagttgaccagggcgaagccaagca

SEQ ID NO: 782427 - DNA, 75 bp, synthetic construct
  source 1..75: mol_type = other DNA
tgccccggcggagtgacgtccggccatccggtcaatcccctgctcggtgcaaaggtccttcccggtgaaaccgac

SEQ ID NO: 782428 - DNA, 75 bp, synthetic construct
  source 1..75: mol_type = other DNA
atgccaactatcaaagatatagcaagaattgctggtgtgtcgcatgggactgtctcaaatgtgctcaatggaaga

SEQ ID NO: 782429 - DNA, 75 bp, synthetic construct
  source 1..75: mol_type = other DNA
ttatccgtcgccatctgcggcgctatccccgtattctgcggcagcatcttctccgggagctcagccgcctcgtcg

SEQ ID NO: 782430 - DNA, 75 bp, synthetic construct
  source 1..75: mol_type = other DNA
ggggttatcctgtcgctgattatgaccgtaccgctgatactgtgccatgccggtggctttaaagctaaaataggc

SEQ ID NO: 782431 - DNA, 75 bp, synthetic construct
  source 1..75: mol_type = other DNA
aaaaggaccgaaatatgtggtttacccttgccttgtgttctttacggttggactggtggttctcggctacaccta

SEQ ID NO: 782432 - DNA, 75 bp, synthetic construct
  source 1..75: mol_type = other DNA
atgatgactaaccaaagacctatggtctcccaaagacctatggttgacccgcgcacacctgagggtcgcatgact

SEQ ID NO: 782433 - DNA, 75 bp, synthetic construct
  source 1..75: mol_type = other DNA
aagcggcacgaacaaccagcgttgtgtgaatcatatttctgaaccggataacgaaattccgccgggcttcagggg

SEQ ID NO: 782434 - DNA, 75 bp, synthetic construct
  source 1..75: mol_type = other DNA
ggagtactggaaggaacataatattagtcctctaaaagatgaacctcttacagagagattgaaaaaacgttttgg

SEQ ID NO: 782435 - DNA, 75 bp, synthetic construct
  source 1..75: mol_type = other DNA
ctgagtacttgctgcgttactacgcgttaggtgggcgattggtgcgtgaaggggagccgatacaacttgatactt

SEQ ID NO: 782436 - DNA, 75 bp, synthetic construct
  source 1..75: mol_type = other DNA
agttaaaacattatattatagcaggttatgatagttatgttgagattttagctactggttttagctgtatacgat

SEQ ID NO: 782437 - DNA, 75 bp, synthetic construct
  source 1..75: mol_type = other DNA
gaacaggaagtgctggtgcgtactgcaatcagccagtttgaaggctacatcaagctgaacaaaaaaatcccacca

SEQ ID NO: 782438 - DNA, 75 bp, synthetic construct
  source 1..75: mol_type = other DNA
gctggtctggccgtaagcgtcgggaggcactcgtttaccgccgcaaaaaaggcgcagagcgtaaacgtgccaaca

SEQ ID NO: 782439 - DNA, 75 bp, synthetic construct
  source 1..75: mol_type = other DNA
cattacgttaactgaaacggaaaacagcgctggcgcggaggtgatcggcaatatggctaacgtggctccttacga

SEQ ID NO: 782440 - DNA, 75 bp, synthetic construct
  source 1..75: mol_type = other DNA
gtgtcgtacagcaaatttatcgataccaccgccaccaacttcaccctggcggcctatcgctattccactaaaggc

SEQ ID NO: 782441 - DNA, 75 bp, synthetic construct
  source 1..75: mol_type = other DNA
agggcctgagataaccactccctggaagtcttaccagcatgaaaaaaacagaaatggacttatgcctttgattag

SEQ ID NO: 782442 - DNA, 75 bp, synthetic construct
  source 1..75: mol_type = other DNA
gatgcaggaatcctctgttggaccagcattgagcatgaacttcgacatgcgcaaagacgtacgaggtgtctttat

SEQ ID NO: 782443 - DNA, 75 bp, synthetic construct
  source 1..75: mol_type = other DNA
gcattgagcatgaacttcgacatgcgcaaagacgttcgcggcgtctttatggcgaaaaaagaaacactgctatct

SEQ ID NO: 782444 - DNA, 75 bp, synthetic construct
  source 1..75: mol_type = other DNA
atcaaagggctgacgatgagcggctttggtccggtaacgcagatttatatcggcggcaaaaacaaacgggtcatg

SEQ ID NO: 782445 - DNA, 75 bp, synthetic construct
  source 1..75: mol_type = other DNA
ttagaagctcaatctacagggttaccatgtatcgtttctaatatcaatggtaataattgtttggttaagaatgaa

SEQ ID NO: 782446 - DNA, 75 bp, synthetic construct
  source 1..75: mol_type = other DNA
aatatcaaccaatgttattaacaataattcaaattgcaagaaggaataatttcattgctattttagatacactag

SEQ ID NO: 782447 - DNA, 75 bp, synthetic construct
  source 1..75: mol_type = other DNA
gtcataccaagaggaaaaaactgaagttttgtgaaaaggtaagttataaggaaatgctaaaaacctgtagtttcg

SEQ ID NO: 782448 - DNA, 75 bp, synthetic construct
  source 1..75: mol_type = other DNA
ttaaccctggtgcagggcctgagataaccactccctggaagtcttaccagcatgaaaaaaacagaaatggactta

SEQ ID NO: 782449 - DNA, 75 bp, synthetic construct
  source 1..75: mol_type = other DNA
ttgatgatcagcgaaaacgttacattataggaccgataacagtctctattgatgaaatgaccaatgctctcgatc

SEQ ID NO: 782450 - DNA, 75 bp, synthetic construct
  source 1..75: mol_type = other DNA
gtggcgtatacgcggccatatcaaaaatgataagggagatatctggacaaaagcagcaaattatcattcaaaaac

SEQ ID NO: 782451 - DNA, 75 bp, synthetic construct
  source 1..75: mol_type = other DNA
gcttgccttcctccatacccctttcgctcgcgcacttcctgctcgaccaagcgttaatatcaacgattacaatcc

SEQ ID NO: 782452 - DNA, 75 bp, synthetic construct
  source 1..75: mol_type = other DNA
cgggcgtcattcatacactgaagtctatgtttctgaagatgacaaaaaagttccagatgaatttaacttatatga

SEQ ID NO: 782453 - DNA, 75 bp, synthetic construct
  source 1..75: mol_type = other DNA
acagagattaaagtaggggcaacgtttgaacaaaaacgtctggaggatgagttacgtctcaatagttttcattta

SEQ ID NO: 782454 - DNA, 75 bp, synthetic construct
  source 1..75: mol_type = other DNA
gtctgtgcttgaggattatgacgtcatcattgccagagagtttttcacgccggcgaagcgcttccggaatctgga

SEQ ID NO: 782455 - DNA, 75 bp, synthetic construct
  source 1..75: mol_type = other DNA
gtccagaaaacgctagaaaactagatggcattagagaagtcataaacaatttatcttgtgataatattctgactg

SEQ ID NO: 782456 - DNA, 75 bp, synthetic construct
  source 1..75: mol_type = other DNA
ctatcataaacgagagtttcatcgccagttacaatgtatgttacttgctgcttatactggtcggcacattttatg

SEQ ID NO: 782457 - DNA, 75 bp, synthetic construct
  source 1..75: mol_type = other DNA
cctcagaaagaacagttgatagatgatttttttacctattttcaacccaagacattgttttccctttcgccacgt

SEQ ID NO: 782458 - DNA, 75 bp, synthetic construct
  source 1..75: mol_type = other DNA
tctttatcatcaagatgttttgagtaagttgaattatgttataaataatatatcggagggggttaactttatata

SEQ ID NO: 782459 - DNA, 75 bp, synthetic construct
  source 1..75: mol_type = other DNA
caaagcggaggtaatacaccgtaagagctggaaaaaccgtgcaggagtggaactggtcacactcacgtgggtgga

SEQ ID NO: 782460 - DNA, 75 bp, synthetic construct
  source 1..75: mol_type = other DNA
aatgcgaagaacataacaccggattacagcaaaaaagcaggtattgataacgcaacgattgccatatatggctgt

SEQ ID NO: 782461 - DNA, 75 bp, synthetic construct
  source 1..75: mol_type = other DNA
tacgtctcgacgctgatttttgacgacgatgaagatgtgattgaagctgaagctggtttcgaaaacggctggatc

SEQ ID NO: 782462 - DNA, 75 bp, synthetic construct
  source 1..75: mol_type = other DNA
atgagttttttctcatttttacgaaagataagtaataaagaaattgttatcagtgaggagcgatttttctccctg

SEQ ID NO: 782463 - DNA, 75 bp, synthetic construct
  source 1..75: mol_type = other DNA
agcatgtcgatcgccagacggtgaacagcgttttttccactgcgtataatgattatctgattaatgcatggatgg

SEQ ID NO: 782464 - DNA, 75 bp, synthetic construct
  source 1..75: mol_type = other DNA
ttaatgaggagaacccgcatcacctgcaccagccgtaccggctgccggggcagcagtatgataaggagtcggggc

SEQ ID NO: 782465 - DNA, 75 bp, synthetic construct
  source 1..75: mol_type = other DNA
cggtttatttgcctgagcgaaaaatacatctttatcactgtgaccaccggggcctgccgctggcgcttatcagtg

SEQ ID NO: 782466 - DNA, 75 bp, synthetic construct
  source 1..75: mol_type = other DNA
aaccggcagagcagtggcagtacgacgagcacggctggctgacagacatcagccacctgagcgaaggccatcagg

SEQ ID NO: 782467 - DNA, 75 bp, synthetic construct
  source 1..75: mol_type = other DNA
tacgaaatataagcttataaatccgtcggatatggtttcagttgttggtttcaaccatggaagtggcagtagagg

SEQ ID NO: 782468 - DNA, 75 bp, synthetic construct
  source 1..75: mol_type = other DNA
gtaacggtattgtgtttaagcgccccagacttgctactgaggtacaaaacccctttaagagtgtcttagaatcaa

SEQ ID NO: 782469 - DNA, 75 bp, synthetic construct
  source 1..75: mol_type = other DNA
gcggaagattactacctgcgtctcgcggccaatattgcgtttatgggcaaagctccggttgctgaagcacagccg

SEQ ID NO: 782470 - DNA, 75 bp, synthetic construct
  source 1..75: mol_type = other DNA
cgtcctgatggactacaacctgtttgccagcagctaccgcccacaggatggtagcaacagcactaacctgaacgc

SEQ ID NO: 782471 - DNA, 75 bp, synthetic construct
  source 1..75: mol_type = other DNA
gggccagtagccattttgatactcagcaggacgagcggggcttaagctaccgttttaattacagcaaacaagtgg

SEQ ID NO: 782472 - DNA, 75 bp, synthetic construct
  source 1..75: mol_type = other DNA
acttatgctgccaatgactacagttctgttagcagcagctggagtggttctttcacggcgacgcaatatggtgca

SEQ ID NO: 782473 - DNA, 75 bp, synthetic construct
  source 1..75: mol_type = other DNA
gggctgacgcgcagtatggagtacgatgttgccggacgtgtcaccacgctgaccaacgagaacggcagccggagt

SEQ ID NO: 782474 - DNA, 75 bp, synthetic construct
  source 1..75: mol_type = other DNA
cgaacaggggctggcaaaccgcgtcacgccggacagcctgccgccggtggagtggctgacctacggcagcggtta

SEQ ID NO: 782475 - DNA, 75 bp, synthetic construct
  source 1..75: mol_type = other DNA
gccagcagctaccgcccacaggatggtagcaacagcactaacctgaacgcctatggaacagccggaattaacgcg

SEQ ID NO: 782476 - DNA, 75 bp, synthetic construct
  source 1..75: mol_type = other DNA
cttcacatccgataatctggcaataaagcgccctggtacaggtatgtctccttatttatattggaatttaataaa

SEQ ID NO: 782477 - DNA, 75 bp, synthetic construct
  source 1..75: mol_type = other DNA
ggcgcgcacccaaaatttgtgtatcaattgtttttaacaataaactggaaagtttataacgaggcatccggagta

SEQ ID NO: 782478 - DNA, 75 bp, synthetic construct
  source 1..75: mol_type = other DNA
attactactgttgtgtacgcgacaacgccaaaatttgttttgaataattatgggctattctcaggcaaagttgca

SEQ ID NO: 782479 - DNA, 75 bp, synthetic construct
  source 1..75: mol_type = other DNA
accttcgttatgccaatgcctccgagctggagcaaaaagaagcgtgaacagctcaacggcaagccgcaccagtca

SEQ ID NO: 782480 - DNA, 75 bp, synthetic construct
  source 1..75: mol_type = other DNA
ggctgaaaatctgtccgctctggagcaggatatcaccaatctggaaaaagcagcagcattaagcattgccagaat

SEQ ID NO: 782481 - DNA, 75 bp, synthetic construct
  source 1..75: mol_type = other DNA
gagcgggagctggagagcattgccgatcccttcgaggagacagtcctacgggaggttgaggaaggttcccttgat

SEQ ID NO: 782482 - DNA, 75 bp, synthetic construct
  source 1..75: mol_type = other DNA
caaaaacagggcggtgattatttattcgctgtaaaaggaaaccaggggcggctaaataaagcctttgaggaaaag

SEQ ID NO: 782483 - DNA, 75 bp, synthetic construct
  source 1..75: mol_type = other DNA
gctcagaaacaaccccgatatgttgcgccttttcgccgataacgggcataccgattcccggcttgccagctcact

SEQ ID NO: 782484 - DNA, 75 bp, synthetic construct
  source 1..75: mol_type = other DNA
catcgttggactattgaagaactgaaggaaatcagactgaccgcgctggctgacctgcgcgcgctgaaaaagcag

SEQ ID NO: 782485 - DNA, 75 bp, synthetic construct
  source 1..75: mol_type = other DNA
attcctttcaaccgcctttgattccgagagcttggattttcttgttaatgagcttggcgtcaaaaggctaaagtt

SEQ ID NO: 782486 - DNA, 75 bp, synthetic construct
  source 1..75: mol_type = other DNA
acattcgtcctaccaatgccaccaagctggagtaagaagaaacgagcggagttcgccgggaagccccaccaggcc

SEQ ID NO: 782487 - DNA, 75 bp, synthetic construct
  source 1..75: mol_type = other DNA
tatcacaagggaatgttcaggtatctgatgaactccatctctgaaggtggtcctaaggctgagatgctaaaagga

SEQ ID NO: 782488 - DNA, 75 bp, synthetic construct
  source 1..75: mol_type = other DNA
acgtgaggcctataatgctatgcgcgttgctctggtatttggtgtaaccaatactccccgcgccgcaatcgccaa

SEQ ID NO: 782489 - DNA, 75 bp, synthetic construct
  source 1..75: mol_type = other DNA
ggtgacaaaaccattccatgcatcaatgattcactggtcgataaatttggtttaaaaccagatatccgtcagtcc

SEQ ID NO: 782490 - DNA, 75 bp, synthetic construct
  source 1..75: mol_type = other DNA
caccggctggtgcactacacgcggacacaatatgcagagccgcggtcgaaagtcgctatctttacgacccgctgg

SEQ ID NO: 782491 - DNA, 75 bp, synthetic construct
  source 1..75: mol_type = other DNA
gtccgggagctctgtaaccgacgtggaaccgcgcgtaaagttgcacaaagcataggcgtcagcgtcccggtcctg

SEQ ID NO: 782492 - DNA, 75 bp, synthetic construct
  source 1..75: mol_type = other DNA
taatcccataatgatgatttcgtgcctgagtgatgaagcaaggcggaagtcagtattgctaaacattgccaaggc

SEQ ID NO: 782493 - DNA, 75 bp, synthetic construct
  source 1..75: mol_type = other DNA
agcactacaccgacacggccggcttcaccgatcacgtctttgccctgatgcaccttgctaggcttccgcttcgcg

SEQ ID NO: 782494 - DNA, 75 bp, synthetic construct
  source 1..75: mol_type = other DNA
ggagtcgccgaccattgatgagcgggaacaggaagtgctggtgcgtaccgcaatcagccagttcgaaggctacat

SEQ ID NO: 782495 - DNA, 75 bp, synthetic construct
  source 1..75: mol_type = other DNA
agagctggaaaaaccgtgcagaagtggaactggccacactcacgtgggtggactggtataacaatcgacgattgc

SEQ ID NO: 782496 - DNA, 75 bp, synthetic construct
  source 1..75: mol_type = other DNA
atccgctgttacttgcacaaatgggtgattctgacgctatcgctatcgcgaaattccaagctggatcaggtattt

SEQ ID NO: 782497 - DNA, 75 bp, synthetic construct
  source 1..75: mol_type = other DNA
acctttccccattattccagctaaccagcacccgcaattttttactgtcgtcactaaacatttttgatggtgacg

SEQ ID NO: 782498 - DNA, 75 bp, synthetic construct
  source 1..75: mol_type = other DNA
cggagtgggcgagtctgttacccgcgacggtgaataccgtgagctgtatcgtgacctcatgccacagctcgatat

SEQ ID NO: 782499 - DNA, 75 bp, synthetic construct
  source 1..75: mol_type = other DNA
cgatcgtacaggcaaagtgacttggctgagtaaaaacttggttgatatatttgaaatacctttgcctgtttctga

SEQ ID NO: 782500 - DNA, 75 bp, synthetic construct
  source 1..75: mol_type = other DNA
cgatgactgcaaccatcgacgcatcaagcaccacgccttctatggtgttccagcaattcgatcagatgcacacag

SEQ ID NO: 782501 - DNA, 75 bp, synthetic construct
  source 1..75: mol_type = other DNA
gaccgctgacgctgtagccgtgcctaaattcgctaaaggctctaacgtctaccagagcatctacggggctgcttc

SEQ ID NO: 782502 - DNA, 75 bp, synthetic construct
  source 1..75: mol_type = other DNA
tgttccgggtaaaggcaaactgacctataccggttcgctcggcgaagtgatgcaggagtccattcaggcggcgtt

SEQ ID NO: 782503 - DNA, 75 bp, synthetic construct
  source 1..75: mol_type = other DNA
ctggggtgatagccagcattgctcgctccatcttcctgaacatatggaagacaccgcaaatcgcctgattttacc

SEQ ID NO: 782504 - DNA, 75 bp, synthetic construct
  source 1..75: mol_type = other DNA
caaagaaacgtggattgaaggcgctattggttacaaatcgctggcttcccgttctggtaaagacgttaacattat

SEQ ID NO: 782505 - DNA, 75 bp, synthetic construct
  source 1..75: mol_type = other DNA
cctcccctcggagcggatatccgccaggaggatagcggcattagcgtgggaatggttggcgaggaaggacacgcc

SEQ ID NO: 782506 - DNA, 75 bp, synthetic construct
  source 1..75: mol_type = other DNA
attagcgtgggaatggttggcgaggaaggacacgcctggttaagtggagtcgctgaaaatcaacaatttaccgtg

SEQ ID NO: 782507 - DNA, 75 bp, synthetic construct
  source 1..75: mol_type = other DNA
ggaaagaaggtgtcgccggtgtcctgatggattacaacttgtttgccagcagctaccgcccacaggatggcagca

SEQ ID NO: 782508 - DNA, 75 bp, synthetic construct
  source 1..75: mol_type = other DNA
cggcggcctgctgatttcgggtgacgactaccattctgccgcaatgggtatcgggcaaaatatgctctggcttgg

SEQ ID NO: 782509 - DNA, 75 bp, synthetic construct
  source 1..75: mol_type = other DNA
aagggcaccgggtgacggtgcattacaggtatgatgagaaaggccggctgaccggtgagcgccagacggtgcatc

SEQ ID NO: 782510 - DNA, 75 bp, synthetic construct
  source 1..75: mol_type = other DNA
tgaaattacattgatatatttctcagaatattcaaaaagaattgtccaagaggtttttgtgtttaatgttgaaga

SEQ ID NO: 782511 - DNA, 75 bp, synthetic construct
  source 1..75: mol_type = other DNA
taaaaagcagatggagaaatcccagcgtgagtactatctgaacgagcaaatgaaagctattcagaaagaactcgg

SEQ ID NO: 782512 - DNA, 75 bp, synthetic construct
  source 1..75: mol_type = other DNA
aggatgacagcggcattagcgtggggatggttggcgaggaaggacacgcctggttaagcggagtcgctgaaaatc

SEQ ID NO: 782513 - DNA, 75 bp, synthetic construct
  source 1..75: mol_type = other DNA
tagccagcattgctcgctccatcttcctgaacatatggaagacaccgcaaatcgcctgatttaccttgtcattaa

SEQ ID NO: 782514 - DNA, 75 bp, synthetic construct
  source 1..75: mol_type = other DNA
acgcactctcttgcatgggctatcgagacgagagaagtagccaaagaaaaaaaacgagataagaacctacttggt

SEQ ID NO: 782515 - DNA, 75 bp, synthetic construct
  source 1..75: mol_type = other DNA
cagaaaatgcactgtctggcggtgaatacaacggtattttctttgcgaaaaatggcggaactcttgacctgaacg

SEQ ID NO: 782516 - DNA, 75 bp, synthetic construct
  source 1..75: mol_type = other DNA
attagatgtccgaaaaacccagaacaccaacctgaaaacaggtgagggtcttgtcattcttggagctgaaaaaac

SEQ ID NO: 782517 - DNA, 75 bp, synthetic construct
  source 1..75: mol_type = other DNA
ctgcaggcgcaggccaacaatacattgtctccctggaaacagggacgcaaaacacttatcaaacgcatgaatttt

SEQ ID NO: 782518 - DNA, 75 bp, synthetic construct
  source 1..75: mol_type = other DNA
actacagactggaaagaaaccgcagatggcgtctataaggcgacctataccgcctataccaaaggcagtggactt

SEQ ID NO: 782519 - DNA, 75 bp, synthetic construct
  source 1..75: mol_type = other DNA
catacggttaccgcaacgctgggtaataacaataccagtgattcgcagccggtaacgtttgtggcggacaaaacc

SEQ ID NO: 782520 - DNA, 75 bp, synthetic construct
  source 1..75: mol_type = other DNA
acaaccaacacttcaggtgaggcacaagtcgttctgaccagcaataaagtcggtacatatgtggtgacagcatcg

SEQ ID NO: 782521 - DNA, 75 bp, synthetic construct
  source 1..75: mol_type = other DNA
aagtaataccaatgagtctggcatcgcgcaggccactctcgcaggcgttgcctttggtgagcagacggttactgc

SEQ ID NO: 782522 - DNA, 75 bp, synthetic construct
  source 1..75: mol_type = other DNA
ggaaggaccagggaatgcatctgtccatgaaggacaaggactacaatccgctgattggccgaacgggtgtggatg

SEQ ID NO: 782523 - DNA, 75 bp, synthetic construct
  source 1..75: mol_type = other DNA
ccatttcctgacttctcaccggttgcaaacaaagggtcaaccacatctattggtggtgcatacagtatcacagcc

SEQ ID NO: 782524 - DNA, 75 bp, synthetic construct
  source 1..75: mol_type = other DNA
gtcttggtataagccaactggcaggtggaagtcttatgttggttataaaaataagacaatatcgttagggtattt

SEQ ID NO: 782525 - DNA, 75 bp, synthetic construct
  source 1..75: mol_type = other DNA
gcaagttagtgcaattgactacagtaaaaatttctcaggcgagtacaaagccactgttacaggcggcggagaggg

SEQ ID NO: 782526 - DNA, 75 bp, synthetic construct
  source 1..75: mol_type = other DNA
cagtaccaacccggcagatactcaacttagtcagagcacgagcaatactaacgacagtggtgttgctgaagttac

SEQ ID NO: 782527 - DNA, 75 bp, synthetic construct
  source 1..75: mol_type = other DNA
agtgcagagccaccagagcacatgaccatcagccaaaatattgtctctactgatacgcatggtatagccgaggtc

SEQ ID NO: 782528 - DNA, 75 bp, synthetic construct
  source 1..75: mol_type = other DNA
tatgaacgctgcacgatagagtatgttatggggattatagggaggattaagtgcagggagcttaaggtagccggt

SEQ ID NO: 782529 - DNA, 75 bp, synthetic construct
  source 1..75: mol_type = other DNA
actgatcaagaaaaggttggggcatacgttgcctaccaagatctgtctggcgattttttttgtcttgtccagatg

SEQ ID NO: 782530 - DNA, 75 bp, synthetic construct
  source 1..75: mol_type = other DNA
accgcctttgcctgtttgacggggatcttcccgaaaatggaagccttcactgcagagtggaccttccagttggcg

SEQ ID NO: 782531 - DNA, 75 bp, synthetic construct
  source 1..75: mol_type = other DNA
acccactgctcgcgctggcttagcttcatcctggccctgtattcaattccatgctcaatatgttttggaagagtt

SEQ ID NO: 782532 - DNA, 75 bp, synthetic construct
  source 1..75: mol_type = other DNA
ctgatgatttgtatgagtcaaactcaggcatgagacatgatcaaggctattttaatgtctccaatggcggcaaaa

SEQ ID NO: 782533 - DNA, 75 bp, synthetic construct
  source 1..75: mol_type = other DNA
taatcatgtttctttctgaaaattgggcgctatttgagcgtttttgcgaggaacatggtgaagaccctaacgata

SEQ ID NO: 782534 - DNA, 75 bp, synthetic construct
  source 1..75: mol_type = other DNA
ctaatagtgctttgcagctacccacgctggagcatgtctacgcacttctgaaagcaaattgtaaacctgaccgct

SEQ ID NO: 782535 - DNA, 75 bp, synthetic construct
  source 1..75: mol_type = other DNA
ttcaatggtatattggtcatctaattctgcaggcgcaggccaacaatacattgtctccctggaaacagggacgca

SEQ ID NO: 782536 - DNA, 75 bp, synthetic construct
  source 1..75: mol_type = other DNA
tacgaaatccgtgtgaagagttggtgggtgaactccggcgatgctttcatgatatacagccttgctgaaaatttt

SEQ ID NO: 782537 - DNA, 75 bp, synthetic construct
  source 1..75: mol_type = other DNA
gtgctgaaaattattgtaataacgagatcggcaacggttacgcgattcctggcgtgaatcttttaagcagtggag

SEQ ID NO: 782538 - DNA, 75 bp, synthetic construct
  source 1..75: mol_type = other DNA
cgggaataacggtgaacttcaccatgccacaggacgttgcggcaaactttaccctcgaaaataacggtattgcca

SEQ ID NO: 782539 - DNA, 75 bp, synthetic construct
  source 1..75: mol_type = other DNA
aatacggtgccctacacccttggagcgctggaatcggcccaaatcgttgccgaacgtttcggtatttcggtggct

SEQ ID NO: 782540 - DNA, 75 bp, synthetic construct
  source 1..75: mol_type = other DNA
tttctgacagcgtctgtttatcgacctggaaagcggcgttactcggtagcgaacataaacgggtgcccgacgatt

SEQ ID NO: 782541 - DNA, 75 bp, synthetic construct
  source 1..75: mol_type = other DNA
aaatgagattatatctaccattgagggacttcagtgcgaggtgctttcaatacctgggatgttagacctcattga

SEQ ID NO: 782542 - DNA, 75 bp, synthetic construct
  source 1..75: mol_type = other DNA
tcattgcaggggcaggtcatccatggtgtaagcgtattttcacccgaaaaattagcttggttgatagagaagtac

SEQ ID NO: 782543 - DNA, 75 bp, synthetic construct
  source 1..75: mol_type = other DNA
cagtccgactgctgcgcctgttccggtaactatcgacttgagtccaacccggaaagacacgacaaaacgccactg

SEQ ID NO: 782544 - DNA, 60 bp, synthetic construct
  source 1..60: mol_type = other DNA
acgcagttaaacaacaccttcaaagatattgcccttgagtggcacagtaacaaattataa

SEQ ID NO: 782545 - DNA, 75 bp, synthetic construct
  source 1..75: mol_type = other DNA
gggactcaatgacatcacagaatggagagttctctatttttgaaggcatgaacattcttgttaaccctgacaaag

SEQ ID NO: 782546 - DNA, 75 bp, synthetic construct
  source 1..75: mol_type = other DNA
cagacgatttatcagccggggagcttcacgccactcatcagggttgaaaccgccaccggtgagcaggcgaaaacg

SEQ ID NO: 782547 - DNA, 75 bp, synthetic construct
  source 1..75: mol_type = other DNA
gtgctgattgccatgaacgttgtgcagtacacactaattaactggttgccaacaatattcatgacccaggggatt

SEQ ID NO: 782548 - DNA, 75 bp, synthetic construct
  source 1..75: mol_type = other DNA
caaagtgttctcacagtacaatacagctattcgtgcagataactcgccgctgaatgtactgaaagacagttataa

SEQ ID NO: 782549 - DNA, 75 bp, synthetic construct
  source 1..75: mol_type = other DNA
gaaaaaaattgatataaagaaagaaaacaagcaaattttcgatgctgtcaagcagtttgagcgtaatgaaatagc

SEQ ID NO: 782550 - DNA, 75 bp, synthetic construct
  source 1..75: mol_type = other DNA
acgaaccccccgttcagtccgaccgcagcgtcttatccggtaactatcgacttgagtccaacccggaaagacaca

SEQ ID NO: 782551 - DNA, 75 bp, synthetic construct
  source 1..75: mol_type = other DNA
gggccacggcgtgttctgggtaatggcgctggtggcgcttccggcaatgtttttgcgcccgaaagttgttccctc

SEQ ID NO: 782552 - DNA, 75 bp, synthetic construct
  source 1..75: mol_type = other DNA
tcacgcattaatcaaaagggactataatttccagattgtaattcttgagaataaaggtccgacgttccaaataaa

SEQ ID NO: 782553 - DNA, 75 bp, synthetic construct
  source 1..75: mol_type = other DNA
ctgccgcattgatcaattgggcggagggatttcccaggcgttagggaccggtggccatgatttacacgaggaaat

SEQ ID NO: 782554 - DNA, 75 bp, synthetic construct
  source 1..75: mol_type = other DNA
gaatcaaaggcgagaaagacggacgcatgctcatgaatgttggtctgaatgctgagattcgcgataatctccgct

SEQ ID NO: 782555 - DNA, 75 bp, synthetic construct
  source 1..75: mol_type = other DNA
tgttgatgtgggtaaatccttctccggtaaggactggaaagtcactgcccgtgccggcctcggttaccagtttga

SEQ ID NO: 782556 - DNA, 75 bp, synthetic construct
  source 1..75: mol_type = other DNA
atgttgatatgaccaatcaacaggaagtaaccattgaaaacggtaaacttgccggcatcggcactgacacatccg

SEQ ID NO: 782557 - DNA, 75 bp, synthetic construct
  source 1..75: mol_type = other DNA
aaaatcgtatatgtccggtaattacaaagccttcctgacagaagtcaacaacctgaataaacgaatgggggatct

SEQ ID NO: 782558 - DNA, 75 bp, synthetic construct
  source 1..75: mol_type = other DNA
agtactcaggccataggtttcagcaacatatctcctgtgatcagcacgaaagaggatcaggaacataccacgtgg

SEQ ID NO: 782559 - DNA, 75 bp, synthetic construct
  source 1..75: mol_type = other DNA
atagcgctaagtgccacggggcagttgcagccgtcctttatggtgacccatgtcggtgggctggatgcggtgcca

SEQ ID NO: 782560 - DNA, 75 bp, synthetic construct
  source 1..75: mol_type = other DNA
gcattcagagccggctctggtgtggtatccgttaaaaaaaatggacgcataactccatttaatgaggtttcttat

SEQ ID NO: 782561 - DNA, 75 bp, synthetic construct
  source 1..75: mol_type = other DNA
tggtggtgcatacagtatcacagccacacacaatacgaaaaaccaccactcagttgcgacgcaaaactgggggaa

SEQ ID NO: 782562 - DNA, 75 bp, synthetic construct
  source 1..75: mol_type = other DNA
gtgctgttttttatgttgctcggtcagcactatctgccgcttaatccacagcagttgcggggctgtcgtgggatc

SEQ ID NO: 782563 - DNA, 75 bp, synthetic construct
  source 1..75: mol_type = other DNA
tcttttgttcatatcgacaactgggatagtgtatatatattaaccaataatcagtttgatgaatttaataacctc

SEQ ID NO: 782564 - DNA, 75 bp, synthetic construct
  source 1..75: mol_type = other DNA
gtgcctatatcgacctgattggtaagtatgttcaccatgataatgagtatactgcgacctttgccggacttggca

SEQ ID NO: 782565 - DNA, 75 bp, synthetic construct
  source 1..75: mol_type = other DNA
ggtgatgcgcgcctcgcttgggcgacgttatgccatggtcggcccgctggaggccgccgacatgaccggactttc

SEQ ID NO: 782566 - DNA, 75 bp, synthetic construct
  source 1..75: mol_type = other DNA
ttggaacgagaaagccaattgtatggctcgtttgatggcgcgatgaagtttataaaaggcgatgcaattgctaat

SEQ ID NO: 782567 - DNA, 75 bp, synthetic construct
  source 1..75: mol_type = other DNA
atatactttgacaaagtgtgtattacagatgaaaatggagatatagatgctctaggtattcctgttgtttcaact

SEQ ID NO: 782568 - DNA, 75 bp, synthetic construct
  source 1..75: mol_type = other DNA
agttggcgcgaacggtgtgggcaatagccgctcacggacgtaaatacgacaaaaatcatgtcagtatcaggcctt

SEQ ID NO: 782569 - DNA, 75 bp, synthetic construct
  source 1..75: mol_type = other DNA
gaaaaccttgtgatgagtggcgacgagtttatggaaaggttctcctggcatgtggcggataaggggttccggatg

SEQ ID NO: 782570 - DNA, 75 bp, synthetic construct
  source 1..75: mol_type = other DNA
aatttttcacctgataaagttttttttgttccagcactgactaatataaaaaaaatatcaaaccttttctctatt

SEQ ID NO: 782571 - DNA, 75 bp, synthetic construct
  source 1..75: mol_type = other DNA
accgacctgatagctcacctcaaagctattggcggcgtatttaccggaagcaaagacacgcttgcacatgaagta

SEQ ID NO: 782572 - DNA, 75 bp, synthetic construct
  source 1..75: mol_type = other DNA
ttgctgttcacccgctgctggctcagcaatgagcgtccggggctacttttcgatctggcgaccagatggcttctg

SEQ ID NO: 782573 - DNA, 75 bp, synthetic construct
  source 1..75: mol_type = other DNA
tgaaaaacgataaacgctctaatttcaaagccgccagcatggcatcgaaaacgcatcgttatttgatggataaaa

SEQ ID NO: 782574 - DNA, 75 bp, synthetic construct
  source 1..75: mol_type = other DNA
agaacattatgctcattatcaggccattattaatgaggctgatggtcttccgatggtggtatataatattccggc

SEQ ID NO: 782575 - DNA, 75 bp, synthetic construct
  source 1..75: mol_type = other DNA
caaacggtttggggggcagcgctgtgcctgcactgtgccgcaggcagatgagcgaattgggcgcagtgtgtctgg

SEQ ID NO: 782576 - DNA, 75 bp, synthetic construct
  source 1..75: mol_type = other DNA
taatcgaaatggtgagtgaagggcgcgtggagatggggattgcctttgaacctgactattgcggccatttgcatt

SEQ ID NO: 782577 - DNA, 75 bp, synthetic construct
  source 1..75: mol_type = other DNA
acgcttatcacactcgcgttgccgacctctgccaatttgcggcaatcaagacaaagagtgcgacgggcagtctcc

SEQ ID NO: 782578 - DNA, 75 bp, synthetic construct
  source 1..75: mol_type = other DNA
gcttgaagagattatgagtatttcagatagttcacttagaaaacgtcttgggtatgaggttttaagcttctcgct

SEQ ID NO: 782579 - DNA, 75 bp, synthetic construct
  source 1..75: mol_type = other DNA
atgaaacttacccataaaaaaactgaaaatcatcatgttaatctgaacacaagagcaattttgactttttttcaa

SEQ ID NO: 782580 - DNA, 75 bp, synthetic construct
  source 1..75: mol_type = other DNA
tgccattcagaaaaaacatttacttgccgggattgaacgcagaaaaaaaaatcaaccccgtatctgtatgacttt

SEQ ID NO: 782581 - DNA, 75 bp, synthetic construct
  source 1..75: mol_type = other DNA
ggtcaatctgctattctgtgcgctggtgatatgcgcacgcggaaatgtttcgaaactcctgtcattacgaaggcg

SEQ ID NO: 782582 - DNA, 75 bp, synthetic construct
  source 1..75: mol_type = other DNA
agatacggtggttcctgtttctttgcctgccatgaatcttgtactgggaaaaacagttcttaccacacctgccgg

SEQ ID NO: 782583 - DNA, 75 bp, synthetic construct
  source 1..75: mol_type = other DNA
gcatgaagggctttctcctcgtgtaacttacggcaagggagtggctaatttttctcttgtatggacagaacctgg

SEQ ID NO: 782584 - DNA, 75 bp, synthetic construct
  source 1..75: mol_type = other DNA
gcacatttgttttcagaatgcaggccgcgggggtgttgcgtcatgttcaggacggacagccggtgtatgccggtg

SEQ ID NO: 782585 - DNA, 75 bp, synthetic construct
  source 1..75: mol_type = other DNA
tatccttgatatgctagataatttgaccatgcgacaacaggctgttatggaggaatttttaagggtattcacatc

SEQ ID NO: 782586 - DNA, 75 bp, synthetic construct
  source 1..75: mol_type = other DNA
gaggctattatgagcaatgtttttgaacaacttgtccagtatcagagaaaagaaaccgaacgcgccacagcagca

SEQ ID NO: 782587 - DNA, 75 bp, synthetic construct
  source 1..75: mol_type = other DNA
aggaatttttaagggtattcacatcaatgtataaagcctcagctatgtctgaggctattatgagcaatgtttttg

SEQ ID NO: 782588 - DNA, 75 bp, synthetic construct
  source 1..75: mol_type = other DNA
taaaaccacttggtatcatataaatcatccattcaggttaaatccaccagcagggtctctgcccactccgggcat

SEQ ID NO: 782589 - DNA, 75 bp, synthetic construct
  source 1..75: mol_type = other DNA
gtggaaacaggttaaagccgcgcatgtatcaaaaatccgtacgctggtaaatgaagcgaatatgctgattgattt

SEQ ID NO: 782590 - DNA, 75 bp, synthetic construct
  source 1..75: mol_type = other DNA
atcctaatggacgattgacgactcaggcaaaagaggctgctcaaagtatcggggtggagctttacaagttgggtg

SEQ ID NO: 782591 - DNA, 75 bp, synthetic construct
  source 1..75: mol_type = other DNA
ctaaagaaaacacagctaaggttgttggtactaattatgatttcacttgcaatgtcttttgtagtgatgaaaaac

SEQ ID NO: 782592 - DNA, 75 bp, synthetic construct
  source 1..75: mol_type = other DNA
tctggaatatctgatggctatgatggagtcggaaatcgatctgctgcaggttgagaaacgtattcgcaaccgtgt

SEQ ID NO: 782593 - DNA, 75 bp, synthetic construct
  source 1..75: mol_type = other DNA
ttaagctacacgtatcagtatgagaaagacccatcaccatcaccgacagcctggaccgccgtgaagtgctgcaca

SEQ ID NO: 782594 - DNA, 75 bp, synthetic construct
  source 1..75: mol_type = other DNA
gtcatcttcgattacagtaaccacacaacgaaagtttcggtggctgagcagctgaaagggcaatcaggatggtta

SEQ ID NO: 782595 - DNA, 75 bp, synthetic construct
  source 1..75: mol_type = other DNA
tgtggcggtggacagaagtgtaccgaaaacagcggcaagggatttaatgatgaggatgggcggcgagccgtggtc

SEQ ID NO: 782596 - DNA, 75 bp, synthetic construct
  source 1..75: mol_type = other DNA
aggacaaacctttcagcgcttggcgttgcgccgcatgtagccgaaaaggttttaggtcataaactggcggggatg

SEQ ID NO: 782597 - DNA, 75 bp, synthetic construct
  source 1..75: mol_type = other DNA
tttccgttctcaccggtaacgtcggcataaacggcggcaactcaggcgtacgcgaaggtagctgggatctggggg

SEQ ID NO: 782598 - DNA, 75 bp, synthetic construct
  source 1..75: mol_type = other DNA
ggcttttttattctcggcttgtctacctttagtattatgctggcaattatcctcagcgcctttttggtaatgact

SEQ ID NO: 782599 - DNA, 75 bp, synthetic construct
  source 1..75: mol_type = other DNA
tgattggcaaaatctggccgggatttttgactctcggtggtgatttcactctgttaggcctttctctaccgggct

SEQ ID NO: 782600 - DNA, 75 bp, synthetic construct
  source 1..75: mol_type = other DNA
ggcattattcgttactacacccgtgaggcgggcgtgcgtggtctggagcgtgaaatctccaaactgtgccgcaaa

SEQ ID NO: 782601 - DNA, 75 bp, synthetic construct
  source 1..75: mol_type = other DNA
gcgtgatgatcgttttaattccctgaaacaggaattttccggcgttcctgatgatgcggctgatgcgctttcgtc

SEQ ID NO: 782602 - DNA, 75 bp, synthetic construct
  source 1..75: mol_type = other DNA
ttattgttaatgataaagaaaatgcatgagaatgcttaccggcataatatacttgtctcaattctcgaagaagaa

SEQ ID NO: 782603 - DNA, 75 bp, synthetic construct
  source 1..75: mol_type = other DNA
gaatttgttaaagcaattctttatattattttatttttttttttttgcattggcgatcaaagtattttgaagtaa

SEQ ID NO: 782604 - DNA, 75 bp, synthetic construct
  source 1..75: mol_type = other DNA
taagacggctttcaactggttcacgtcactgaccgaaccggtcaaatacagcggcgaggaactggataaggccgg

SEQ ID NO: 782605 - DNA, 75 bp, synthetic construct
  source 1..75: mol_type = other DNA
aataacgcgaaaccggtacggtcagcttcaggcatttacggactgttcagggtacacgacgcggtatgaatacga

SEQ ID NO: 782606 - DNA, 75 bp, synthetic construct
  source 1..75: mol_type = other DNA
taatttcatatcgtgcaaaaaacaaatctatagaagtggcaagatataaagcactgagagcaatgaatatcgctt

SEQ ID NO: 782607 - DNA, 75 bp, synthetic construct
  source 1..75: mol_type = other DNA
gtattacttatcatagaagaaaactatggtgctatttgtacccattattaattagacttgttaataataaaaaaa

SEQ ID NO: 782608 - DNA, 75 bp, synthetic construct
  source 1..75: mol_type = other DNA
attggtaatggtattggctatagtacattaacacaggatccacataatttttacttatcaactattattgattcc

SEQ ID NO: 782609 - DNA, 75 bp, synthetic construct
  source 1..75: mol_type = other DNA
tccgtaagcgtgccaagcgtgacgactggtcgcgtgacctcaatgcgaagattcagcaaaaggctgatgatctgg

SEQ ID NO: 782610 - DNA, 75 bp, synthetic construct
  source 1..75: mol_type = other DNA
ctttgactatcgatgaagggcaaattgcttttatagagcgaaatatacaaataaacgtctccataaaaaaatctg

SEQ ID NO: 782611 - DNA, 75 bp, synthetic construct
  source 1..75: mol_type = other DNA
cggtggctaccggcattcgtgccgttggtgcggcgttcatatccactggcgtgggtgctgccgtagctggcctgg

SEQ ID NO: 782612 - DNA, 75 bp, synthetic construct
  source 1..75: mol_type = other DNA
caatcaggcatcgccaccagcgaactaaccaagtttgctgaatcggccatcaaaatgggtgtggcttttgacgtc

SEQ ID NO: 782613 - DNA, 75 bp, synthetic construct
  source 1..75: mol_type = other DNA
aacattggcaacctgaccaacaaggcactggagtttaaaaacgccgtgtctgatgttgctggtggtgcgtggcag

SEQ ID NO: 782614 - DNA, 75 bp, synthetic construct
  source 1..75: mol_type = other DNA
ttgtttatcgagaaaaaattattggatgatatagggtatctcgataaaaaatatcggctaatggaagattatcct

SEQ ID NO: 782615 - DNA, 75 bp, synthetic construct
  source 1..75: mol_type = other DNA
atatctatcatagaaaactggttagttgataactatcttaagttttattttgttaataagatatatcatcataaa

SEQ ID NO: 782616 - DNA, 75 bp, synthetic construct
  source 1..75: mol_type = other DNA
ttattgtcttggcatacaattctgctgatactataacatctacattagaaagtatagctaaacaagagtatggtg

SEQ ID NO: 782617 - DNA, 75 bp, synthetic construct
  source 1..75: mol_type = other DNA
atatcgaagggccgtatgaagatctctactgtttcccgacaattaagagcaatgataattgcatcgtgaaaaatt

SEQ ID NO: 782618 - DNA, 75 bp, synthetic construct
  source 1..75: mol_type = other DNA
caacttatcaggaagcattactctaattttaagaagaaaaattattttattatttccgttgatgagttaaaggaa

SEQ ID NO: 782619 - DNA, 75 bp, synthetic construct
  source 1..75: mol_type = other DNA
cgagggcgagttttcaaaattagggctgaagaccttgcagcgctcgccaaaatcaccccatcgcttgcttatcga

SEQ ID NO: 782620 - DNA, 75 bp, synthetic construct
  source 1..75: mol_type = other DNA
ttttacgccgacatgccgaacaacaatttgctgaagaactggatgagctgcaaaaaaacgatactcatccgcgcc

SEQ ID NO: 782621 - DNA, 75 bp, synthetic construct
  source 1..75: mol_type = other DNA
ttcaggaaaatacggccagaccatcaccggctgggatgaagaccggagcggcatacgtaccttttaccggagtga

SEQ ID NO: 782622 - DNA, 75 bp, synthetic construct
  source 1..75: mol_type = other DNA
tgttcccgccggtgctggtgcagatgctcgaccggctggaaagtgaaatcctggctgaccggggtgagtgaggaa

SEQ ID NO: 782623 - DNA, 75 bp, synthetic construct
  source 1..75: mol_type = other DNA
accgtggagcagatgcaaaaccagatggacccggtgtacacgccggcgcgaaaaatccacctgtaccactgcgac

SEQ ID NO: 782624 - DNA, 75 bp, synthetic construct
  source 1..75: mol_type = other DNA
aggcagcgggaagtccacgctcattgaaagcattcgtcttgcaatgcgcaaaacagaaggtctcactgcgaccca

SEQ ID NO: 782625 - DNA, 75 bp, synthetic construct
  source 1..75: mol_type = other DNA
taatagccccattccgagtgaagtccctaaccatcagctcgttcttcagctgggccccgccggcatcatcagtaa

SEQ ID NO: 782626 - DNA, 75 bp, synthetic construct
  source 1..75: mol_type = other DNA
ccatcgcggcctgccgctggcccttatcagcacggaagggacaacagcgtggtacgcagaatacgatgaatgggg

SEQ ID NO: 782627 - DNA, 75 bp, synthetic construct
  source 1..75: mol_type = other DNA
taggcacgttaaaactaaatggtgaagagttcacaataaaagaaactttactaaaaaaaacgtcttcaagagcta

SEQ ID NO: 782628 - DNA, 75 bp, synthetic construct
  source 1..75: mol_type = other DNA
gttattattggtatggctttatggaatatattgaaaacattactgcgtgtgatgatattttttctgagtattgtt

SEQ ID NO: 782629 - DNA, 75 bp, synthetic construct
  source 1..75: mol_type = other DNA
ctgcagagatccgatatcccgccggaaccttccggtctgctgatggcatttatggcgcgcctgtcatctgtgcaa

SEQ ID NO: 782630 - DNA, 75 bp, synthetic construct
  source 1..75: mol_type = other DNA
caaaaacggtgccgatgtttgcgaagctgcgcacggcccgttatctgaaagtgaaggcggacgcatcaggcgtga

SEQ ID NO: 782631 - DNA, 75 bp, synthetic construct
  source 1..75: mol_type = other DNA
cgcctcgcaaaacaacctccaggaagagctacatctgctgattggccagttatatggtaatggtcgcaatgacct

SEQ ID NO: 782632 - DNA, 75 bp, synthetic construct
  source 1..75: mol_type = other DNA
atgcccccacacaaaattcgccaagagtggctgacgctggatgaggctgcagaagtcatccggcagcacaacatc

SEQ ID NO: 782633 - DNA, 75 bp, synthetic construct
  source 1..75: mol_type = other DNA
tggccggcaatactggcagtctcctgatgatgacaatttaccgttattgcgggaaacattggcacgtaaagaata

SEQ ID NO: 782634 - DNA, 75 bp, synthetic construct
  source 1..75: mol_type = other DNA
ggtataagtatgccatggggcaatgatgatcatgtcgaagaattagccccattactttatgctaaggttgttaaa

SEQ ID NO: 782635 - DNA, 75 bp, synthetic construct
  source 1..75: mol_type = other DNA
agtgctggtgtgcaaaaaattgctgctgccttgcaggattattatattaatgcgggatatatcacaacgcgaatt

SEQ ID NO: 782636 - DNA, 75 bp, synthetic construct
  source 1..75: mol_type = other DNA
ggcagattacaacggtgaactgggtgaatccgtgctccaggactgtctggatgattacggtcaccgcgtgtcccg

SEQ ID NO: 782637 - DNA, 75 bp, synthetic construct
  source 1..75: mol_type = other DNA
ggttaaggtctggctggatgtggcgtggatgggaacgcttacgagcatttgggcggtacaaagcaaaatcacggt

SEQ ID NO: 782638 - DNA, 75 bp, synthetic construct
  source 1..75: mol_type = other DNA
ccagggaagcaacggaaattaccaccccggcagagacatggcagattgattttactgcccgtctggcggcaatgg

SEQ ID NO: 782639 - DNA, 75 bp, synthetic construct
  source 1..75: mol_type = other DNA
gaatgcgtgccggaatattcaggtcacgccttttacctcgaatgtggccgggacgctcgaatgttcggtgtcgca

SEQ ID NO: 782640 - DNA, 75 bp, synthetic construct
  source 1..75: mol_type = other DNA
catattgattggtcatttagatttaaaatctaaagccattattcatggggtaattatattatttatatactggac

SEQ ID NO: 782641 - DNA, 75 bp, synthetic construct
  source 1..75: mol_type = other DNA
cccttatcagcaaggaagggacaacagaatggtgcgcagaatacgatgaatggggcaacctgctgaatgaagaga

SEQ ID NO: 782642 - DNA, 75 bp, synthetic construct
  source 1..75: mol_type = other DNA
tccggcagagacatggcagattgattttactgcccgactggtgggaatggatgaacgccagcgccgggaaaatat

SEQ ID NO: 782643 - DNA, 75 bp, synthetic construct
  source 1..75: mol_type = other DNA
cggtaattgaagagctggcccgcctgcaggggaatgagctgaatgccaccgatatgctggagttacgttgcaggg

SEQ ID NO: 782644 - DNA, 75 bp, synthetic construct
  source 1..75: mol_type = other DNA
cggcgtggtcggtaggcacatcagaaagcacaggcaaaatgttgttcctgaaaaaccacagaagcagcgctcaag

SEQ ID NO: 782645 - DNA, 75 bp, synthetic construct
  source 1..75: mol_type = other DNA
agtttctgcttcggattatgcgaacatgcaaacgctgatcagcaacgacacaaaacgtatatacgttcgctttgt

SEQ ID NO: 782646 - DNA, 75 bp, synthetic construct
  source 1..75: mol_type = other DNA
ccgggctgaccgataacaaccagatgcgttacggcctggttaaaggtgacggctttattgaggtttgggccttcc

SEQ ID NO: 782647 - DNA, 75 bp, synthetic construct
  source 1..75: mol_type = other DNA
atgctatgcttacaggcgctttcggtcttggcggtagcgggatatcaacaaacggcaagatgagcgatgtagaga

SEQ ID NO: 782648 - DNA, 75 bp, synthetic construct
  source 1..75: mol_type = other DNA
gcaaaacgttgtatctgaaaaaccacagaaccagttcacaagtgctgataagtggcgatactggatctattaagc

SEQ ID NO: 782649 - DNA, 75 bp, synthetic construct
  source 1..75: mol_type = other DNA
tcagagaacaaggcgaaagaatatctcgacaaggtcgggggactcgtcagcccgatgacgcaatacgattggccc

SEQ ID NO: 782650 - DNA, 75 bp, synthetic construct
  source 1..75: mol_type = other DNA
tgttcgccggccggcagcgatgacaacggaggcgctgaagcatatagccgggctgtatgtggtggaagcgacaat

SEQ ID NO: 782651 - DNA, 75 bp, synthetic construct
  source 1..75: mol_type = other DNA
atgatgacgctggcgcagtggtttgaagagaggggaagacaggaaggaagacaggaggtaagacaagaggtaaga

SEQ ID NO: 782652 - DNA, 75 bp, synthetic construct
  source 1..75: mol_type = other DNA
ctgagtaaaggaatgtctcgggaagacgttgcagagatggcaactttatctcttacagaggttgataagctaatt

SEQ ID NO: 782653 - DNA, 75 bp, synthetic construct
  source 1..75: mol_type = other DNA
aacaaaggccagtgaagcatcgaaaagtgctgctgctgcagagtccttaaaaagcgcggcagctaccagtgccag

SEQ ID NO: 782654 - DNA, 75 bp, synthetic construct
  source 1..75: mol_type = other DNA
atgcggaccacgcgctcagttaatttgacggaagcgggagaacggctgcataaatcgttgtcattacctttatcc

SEQ ID NO: 782655 - DNA, 75 bp, synthetic construct
  source 1..75: mol_type = other DNA
gtagtcacagatgaggaattcgatatcgtagccgcaggttacgatgctggcgtaaggctcggagaagtcattgaa

SEQ ID NO: 782656 - DNA, 75 bp, synthetic construct
  source 1..75: mol_type = other DNA
tgttaatggaaactggacagcgtggagtcaggttgttgtttccggatggaatcaggatataactgtcaggtcgtt

SEQ ID NO: 782657 - DNA, 75 bp, synthetic construct
  source 1..75: mol_type = other DNA
aacaagataaaggaatatcaattgatgcatcaaatatcgattctcaagccaaaatagcactattaagtgttgaac

SEQ ID NO: 782658 - DNA, 75 bp, synthetic construct
  source 1..75: mol_type = other DNA
atgaatggtggttccataacaactaatggcattaatagctatggtgcttatgctaatgggaaaaaagcatatatt

SEQ ID NO: 782659 - DNA, 75 bp, synthetic construct
  source 1..75: mol_type = other DNA
atggctccgctttgtgatgaatatggttatcgtgattcttgcgaggacccaacgtacgacgtgttgcctccgtgg

SEQ ID NO: 782660 - DNA, 75 bp, synthetic construct
  source 1..75: mol_type = other DNA
cggtatgtaagtccagagcgagcaggatcgttcaagcgtgatggcaccgtcctcacaaatatgagcgacaacccc

SEQ ID NO: 782661 - DNA, 75 bp, synthetic construct
  source 1..75: mol_type = other DNA
aaattggccgactttacggcttaaacaacatcaacataattatgggccgaaacggtgcgggaaaaagtcgtttcc

SEQ ID NO: 782662 - DNA, 75 bp, synthetic construct
  source 1..75: mol_type = other DNA
atgcgttacgagagttgaagaacgaaaactctttaagagtttctgtgaaaattgcccgtaacgttcgctccctca

SEQ ID NO: 782663 - DNA, 75 bp, synthetic construct
  source 1..75: mol_type = other DNA
tatccattggttttaaggttgacaaccttgatcaaaaatatctcggaatcaatggcagtggagatctagcttttg

SEQ ID NO: 782664 - DNA, 75 bp, synthetic construct
  source 1..75: mol_type = other DNA
tgggtttaaggttgatgatgttgatcaaaaatacctaggtatagctggtgacggtgatttgtattttggtagtta

SEQ ID NO: 782665 - DNA, 75 bp, synthetic construct
  source 1..75: mol_type = other DNA
agcgcagccaccgcagaatttgcaaacacaagcaccagttccgataacactacggtaagcatcaaaggatctcag

SEQ ID NO: 782666 - DNA, 75 bp, synthetic construct
  source 1..75: mol_type = other DNA
atccccgggtacaggaaatggtggataactggcagaagagcgtaaggagtcgtgcgctcccggaagaggcgatga

SEQ ID NO: 782667 - DNA, 75 bp, synthetic construct
  source 1..75: mol_type = other DNA
tcttaacaacctgaccatcatcaagtcagatgccggggcagttaaatactatatttgtccatcctctgcaggtgg

SEQ ID NO: 782668 - DNA, 75 bp, synthetic construct
  source 1..75: mol_type = other DNA
aactttttgctacgtgtagagtcacttcgcaataacacggatgtagactatataaacgtacaaaccctggttagc

SEQ ID NO: 782669 - DNA, 75 bp, synthetic construct
  source 1..75: mol_type = other DNA
atgaaaaacttcaagagtcaatgtgcagcgttctcccgccccattgatgcaggtcaactgctcaggcaaggcaca

SEQ ID NO: 782670 - DNA, 75 bp, synthetic construct
  source 1..75: mol_type = other DNA
agatgacacagctcagcagaacaccttcactgctaaatcatgcgtcagagtggataaccctttccggtcagcaga

SEQ ID NO: 782671 - DNA, 75 bp, synthetic construct
  source 1..75: mol_type = other DNA
cctgttcagtccgccaccagcgagcttggaacctccggtggtggaagttatccattgcatacggaggctgccatc

SEQ ID NO: 782672 - DNA, 75 bp, synthetic construct
  source 1..75: mol_type = other DNA
atcgaatataaaaaaagctatttcagaattaataattaggtttagatatcttaaggttaaaaaaaataatatagt

SEQ ID NO: 782673 - DNA, 75 bp, synthetic construct
  source 1..75: mol_type = other DNA
cagctttgggtgagtttgatacaaaatttgatcttgttttaattcacacaggtgcgaatactctaagcaaacata

SEQ ID NO: 782674 - DNA, 75 bp, synthetic construct
  source 1..75: mol_type = other DNA
aaagtgaacgctctaaagctaatacatttttaatccttggtaatccaatcactgttttatggatgtctattgtct

SEQ ID NO: 782675 - DNA, 75 bp, synthetic construct
  source 1..75: mol_type = other DNA
acgcaggctgccacaccaaaagctgtgaaggctgtatatgaccttgccaatggaaaacaacctgccgacgccacg

SEQ ID NO: 782676 - DNA, 75 bp, synthetic construct
  source 1..75: mol_type = other DNA
tctcgctgctgctgttgcagaaaatggcggctaacacggcgattgcccggattcggttgtcggcagtggacggcg

SEQ ID NO: 782677 - DNA, 75 bp, synthetic construct
  source 1..75: mol_type = other DNA
ctatttatattaataaataatgtattgctcaacggcgaatccggtttagtcggttttctggggctggaaggcgca

SEQ ID NO: 782678 - DNA, 75 bp, synthetic construct
  source 1..75: mol_type = other DNA
gttttggtggggtgctcgtttcacacggcctgcgatctatcgccagtacagcccttaatgagcagggatttccac

SEQ ID NO: 782679 - DNA, 75 bp, synthetic construct
  source 1..75: mol_type = other DNA
tcccgtctggtgtatgttgtttctgaaacaaaagcagaacccacaccctcccttcagaaatccccgcccacgttt

SEQ ID NO: 782680 - DNA, 75 bp, synthetic construct
  source 1..75: mol_type = other DNA
ttgatgaaattgccgagatttatgatggccctcatgcaacgcctaaaaagttagagacaggggatgctatttttt

SEQ ID NO: 782681 - DNA, 75 bp, synthetic construct
  source 1..75: mol_type = other DNA
tacacttaatgatgtagttcaaagtatcagtagttggctaaaagaaaatcaaaatatggtgaaagctattaagaa

SEQ ID NO: 782682 - DNA, 75 bp, synthetic construct
  source 1..75: mol_type = other DNA
attatttcatgtgattttccttttatttttttgaaaaataactcttccattattgatggatgtatttttacaata

SEQ ID NO: 782683 - DNA, 75 bp, synthetic construct
  source 1..75: mol_type = other DNA
cgtttagcagatgaattagcctcggttttcgataagaatatggtcgaagtattaaacgaaggaataaattgtagt

SEQ ID NO: 782684 - DNA, 75 bp, synthetic construct
  source 1..75: mol_type = other DNA
tcttagctgcttcttgcaatgctaatgcagcatcacgtgagcttcttaatatggtagatccgattgaaaattatt

SEQ ID NO: 782685 - DNA, 75 bp, synthetic construct
  source 1..75: mol_type = other DNA
aatacatgacggtcagtgaactgaaaacggaggtgtttggcatcatgcaggcttttaaccggcatatcccggcag

SEQ ID NO: 782686 - DNA, 75 bp, synthetic construct
  source 1..75: mol_type = other DNA
aaaatcaggccgtatttctgaacaacgtgcatcacgagaaagtcacccacagcggcacgctgtatgagaacgaat

SEQ ID NO: 782687 - DNA, 75 bp, synthetic construct
  source 1..75: mol_type = other DNA
gctgtcgccaaaaatcatgtcatacgtccacagcaagtttatccgcttaaggggatattataagttttatccttt

SEQ ID NO: 782688 - DNA, 75 bp, synthetic construct
  source 1..75: mol_type = other DNA
taccacaataaatacaaaaataattaatataataaaacgcaatacaagtagacattgtaatatgtcagttagacc

SEQ ID NO: 782689 - DNA, 75 bp, synthetic construct
  source 1..75: mol_type = other DNA
taatattcgtatatcggatattaactttagtgattccagtctggctatccgtcgtcgggctgatgataagaacga

SEQ ID NO: 782690 - DNA, 75 bp, synthetic construct
  source 1..75: mol_type = other DNA
gtaattctaggtatcagtcgttggctaaaagaaaatcaagttatggtggaaactattaagaaaattaattctgag

SEQ ID NO: 782691 - DNA, 75 bp, synthetic construct
  source 1..75: mol_type = other DNA
aaaagaagccttgctaaaggctagtgaacttgtgtctggtatgggggataaacttggcgagtatcttggagaaaa

SEQ ID NO: 782692 - DNA, 75 bp, synthetic construct
  source 1..75: mol_type = other DNA
atgaagcagggtaagtcgaagttaattcagcggacggacacaaacgtgatctgccaggagtgccgcaacagcgcg

SEQ ID NO: 782693 - DNA, 75 bp, synthetic construct
  source 1..75: mol_type = other DNA
ggcttcgctggtgaatgtggcaacgaaagcgaagcaactgggtggcactgtggccttgctgaccattttccccga

SEQ ID NO: 782694 - DNA, 75 bp, synthetic construct
  source 1..75: mol_type = other DNA
gtgatgtacacagtggagagtgaaggccagacgctagtgttgtggggcgatattattcatgccaaagcagtgcag

SEQ ID NO: 782695 - DNA, 75 bp, synthetic construct
  source 1..75: mol_type = other DNA
cgcatattcatgccgaccactctggtggcatctcccgtcagggcaaaccagctttccctaacgcccaggtattcg

SEQ ID NO: 782696 - DNA, 75 bp, synthetic construct
  source 1..75: mol_type = other DNA
ttcccgcccacgtttctgaaaccgtttgtggctggtgtctgtgcggcattgctgactgtcagcgtggccattccg

SEQ ID NO: 782697 - DNA, 75 bp, synthetic construct
  source 1..75: mol_type = other DNA
ggaccaactggctctgggaagtcgacttttttagaccgttttttcagtcgtacccttaataaaacgattagagaa

SEQ ID NO: 782698 - DNA, 75 bp, synthetic construct
  source 1..75: mol_type = other DNA
tttaacaagagattgtataacactatatttgatgatattcacaacaaacgtttattgttaaataatgaattaaca

SEQ ID NO: 782699 - DNA, 75 bp, synthetic construct
  source 1..75: mol_type = other DNA
aatgctcaacacccctgcggtagagtcagctatagagaagttcgaacacgactggaatgccgcatttggcactac

SEQ ID NO: 782700 - DNA, 75 bp, synthetic construct
  source 1..75: mol_type = other DNA
tccattggttaaggctcagaaatttaagtctgcacataccgaacttcgcagacttgaaaaaaagagagaatctct

SEQ ID NO: 782701 - DNA, 75 bp, synthetic construct
  source 1..75: mol_type = other DNA
agctttctaaaggggcaaaattcagtagcaggttatttcaaaaagtttttaggttgcaacgatattctaattgcc

SEQ ID NO: 782702 - DNA, 75 bp, synthetic construct
  source 1..75: mol_type = other DNA
aaatggatgctatggagttgaggccaaatataaatgtggcttcggaaatttttgcaaaaataacaggtgtaagtg

SEQ ID NO: 782703 - DNA, 75 bp, synthetic construct
  source 1..75: mol_type = other DNA
ggctaactggactgcctgggccaatgacgtgcgcacaatgcggatgctggatggcagaagccacagacaaatttg

SEQ ID NO: 782704 - DNA, 75 bp, synthetic construct
  source 1..75: mol_type = other DNA
agcaaaaactgacgcaggatgccctgacggaactgttgaaccgctactggtttctgagacatggagatgcaggta

SEQ ID NO: 782705 - DNA, 75 bp, synthetic construct
  source 1..75: mol_type = other DNA
aagtctgcccataccgaacttcgcaggctggaaaaaaagagagaatctcttattgaatactttatagacgagtta

SEQ ID NO: 782706 - DNA, 75 bp, synthetic construct
  source 1..75: mol_type = other DNA
tacagttctagattggatgactgaagaaataataaaaacccttgagacccagctttacaaggacggcgtacctga

SEQ ID NO: 782707 - DNA, 75 bp, synthetic construct
  source 1..75: mol_type = other DNA
atttcggcctgtcgatgccggaaaatcattcccgcaccacaccttacatgctggccgaagaggtcgcactcgcgg

SEQ ID NO: 782708 - DNA, 75 bp, synthetic construct
  source 1..75: mol_type = other DNA
acatcaagataaaatccatgtctctatctaatatctctgttgatccttttactttagcaaagacaaaaatagtaa

SEQ ID NO: 782709 - DNA, 75 bp, synthetic construct
  source 1..75: mol_type = other DNA
caaaagctggcaatgcgatcggagttcctcttaacgaaaccgcatgccagatattaagaaaacagcaggggctcc

SEQ ID NO: 782710 - DNA, 75 bp, synthetic construct
  source 1..75: mol_type = other DNA
gtgaactgaaaacggaggtgtttggcatcatgcaggcttttaaccggcatatcccggcagaagagcagttacgtc

SEQ ID NO: 782711 - DNA, 75 bp, synthetic construct
  source 1..75: mol_type = other DNA
tgatgcgggtctcggcctctgagaatgcgcggcgggctgctgctccgctgcgcaatgcaactgcctatgagcaga

SEQ ID NO: 782712 - DNA, 75 bp, synthetic construct
  source 1..75: mol_type = other DNA
gttttggcctgtcgatgccggaaaaccattcccgccccgcgccttacatgctggccgaagaggtcgcgctcgcgg

SEQ ID NO: 782713 - DNA, 75 bp, synthetic construct
  source 1..75: mol_type = other DNA
gatgctttaggagcaacagaactagctgtcgataaagctttagagagcttaattatggcaaaattaatagaaccc

SEQ ID NO: 782714 - DNA, 75 bp, synthetic construct
  source 1..75: mol_type = other DNA
tattttccccgtaacagataaatcagcttggattttctccaagacagatatatttagcatctatcaatcgaaatc

SEQ ID NO: 782715 - DNA, 75 bp, synthetic construct
  source 1..75: mol_type = other DNA
gtaagcaatagaaaaatgcttccaataatagtcgtagataacactgatgaattcacacttgactttaaaacaaaa

SEQ ID NO: 782716 - DNA, 75 bp, synthetic construct
  source 1..75: mol_type = other DNA
acgccaattagcgagttagctgcaagatataatgtgactgttcaggccatacacgccattaaaaaagggaagaca

SEQ ID NO: 782717 - DNA, 75 bp, synthetic construct
  source 1..75: mol_type = other DNA
ttacaaccgccaccgctattatgacccgctgcaggggcgatatatcactcaggatccgattgggctgaagggggg

SEQ ID NO: 782718 - DNA, 75 bp, synthetic construct
  source 1..75: mol_type = other DNA
cggccgttatgaactctccaccgcttacacccctgccgggcagttacagagccagcacctgaacagcctgcagta

SEQ ID NO: 782719 - DNA, 75 bp, synthetic construct
  source 1..75: mol_type = other DNA
cctgacgcactgaatacgctgaacgagttagcggcggcgctgggcaacgacccgaattttgcgaccaccatgact

SEQ ID NO: 782720 - DNA, 75 bp, synthetic construct
  source 1..75: mol_type = other DNA
gccgataatatagcgggcgtttattacagacccgttcaaaagtatataaatggcacctggtataatgtagcgagc

SEQ ID NO: 782721 - DNA, 75 bp, synthetic construct
  source 1..75: mol_type = other DNA
tagtttagataccagcattgcactaaacaatattaatagaatggattttattaactttacatttgctaaggatga

SEQ ID NO: 782722 - DNA, 75 bp, synthetic construct
  source 1..75: mol_type = other DNA
catttttggtagaaacgcagtatcaacaagttctgcgcaggctttgttaagacaagaccatgcagaacgcaaatt

SEQ ID NO: 782723 - DNA, 75 bp, synthetic construct
  source 1..75: mol_type = other DNA
atgtggtttgaaacaggcgacaacggcaatgaatatttcaaatggagaagcaaacaaagcaccacaacaaaagac

SEQ ID NO: 782724 - DNA, 75 bp, synthetic construct
  source 1..75: mol_type = other DNA
gcccatatgtgggagcgtctgcgtggtgcgatcatgatttcgttgttctctgacaccttaacggcgctggttaac

SEQ ID NO: 782725 - DNA, 75 bp, synthetic construct
  source 1..75: mol_type = other DNA
ctgggctaccgtgttcttgtcaggccttctacgcgcgagcccttcacggcgcaacgcgtagttcgtgctatggcg

SEQ ID NO: 782726 - DNA, 75 bp, synthetic construct
  source 1..75: mol_type = other DNA
gatttcatcaacgggcagatgacagatgaagtaaaagccgcgaccagcacgcagattttcagcattaaccagacg

SEQ ID NO: 782727 - DNA, 75 bp, synthetic construct
  source 1..75: mol_type = other DNA
atccagccggggaatataacaacattgttgtggctgaaacggtagcaaaagaatggcgtattcgttacggaaata

SEQ ID NO: 782728 - DNA, 75 bp, synthetic construct
  source 1..75: mol_type = other DNA
tttctaccttaaggtcatccgtgctttcatcgctttacgtaacgacaaagtgtcggaagctaaggcgctggcgca

SEQ ID NO: 782729 - DNA, 75 bp, synthetic construct
  source 1..75: mol_type = other DNA
ccccgaatatcatttatccaatggcatggaatcgaaatcagtcgatacccgcagtatatatcgtgaactgggtgc

SEQ ID NO: 782730 - DNA, 75 bp, synthetic construct
  source 1..75: mol_type = other DNA
aatgtcaacccaaatccgaacccaaaaccagacccgactcccgatccaacgccgacacccgttccggagaaacgc

SEQ ID NO: 782731 - DNA, 75 bp, synthetic construct
  source 1..75: mol_type = other DNA
gtctggttgttacaggagatatatttgcaaaccgttttgcaattaacagtagtaccggcatgtggattcatatgc

SEQ ID NO: 782732 - DNA, 75 bp, synthetic construct
  source 1..75: mol_type = other DNA
gagatatgcgcagttcggcaatgattgctgctcttgagaactcaagtcagcgatacagcttgaaaaatcttgagg

SEQ ID NO: 782733 - DNA, 75 bp, synthetic construct
  source 1..75: mol_type = other DNA
atcctcggcggtatgactggcgtgttcacgctgactatcctgggcggtggtctggtttctccggcatctccggtt

SEQ ID NO: 782734 - DNA, 75 bp, synthetic construct
  source 1..75: mol_type = other DNA
accattccagccaacgcgaatgccagtgctgcggcgaaggtagttgccaatttcctgctctcacccgatgcgcaa

SEQ ID NO: 782735 - DNA, 75 bp, synthetic construct
  source 1..75: mol_type = other DNA
gcacacacgatgtattgctgatggcgcaagaggcgtatcgcacaggctatgatgcagtgatgatcctcccgcctt

SEQ ID NO: 782736 - DNA, 75 bp, synthetic construct
  source 1..75: mol_type = other DNA
acagccagcagctcccggaggtgggcgacagcgacaggtcgatgtcctggctggcctgggagccatgtctgacaa

SEQ ID NO: 782737 - DNA, 75 bp, synthetic construct
  source 1..75: mol_type = other DNA
ccggaatgcaaacaacgcgcgacgctgatcaacgacgatacagatgtaccgctggtggctaaggagcagctatga

SEQ ID NO: 782738 - DNA, 75 bp, synthetic construct
  source 1..75: mol_type = other DNA
attctcatataaaaaacacaataattctgtttgctgataagttattcacattatctacaggattattaatagcaa

SEQ ID NO: 782739 - DNA, 75 bp, synthetic construct
  source 1..75: mol_type = other DNA
cggtactgaaggcactggtcagccatccgcgtgagccgctctcccgcgataagctgatgaaccttgcccgtggtc

SEQ ID NO: 782740 - DNA, 75 bp, synthetic construct
  source 1..75: mol_type = other DNA
gaacaagcaatttggcatctacatgattaataactcaaggacagccaatggcaccgatggtcaggcgtacatgga

SEQ ID NO: 782741 - DNA, 75 bp, synthetic construct
  source 1..75: mol_type = other DNA
gatcgcgtaggttctcgcgtgacttattttattgcgatatttggttggtcagtggcgactttattccagggctta

SEQ ID NO: 782742 - DNA, 75 bp, synthetic construct
  source 1..75: mol_type = other DNA
cttgtatttcatcattaattgcatactttattgcaaatgtttttatatttttttgcatcaaaaggactcgtttta

SEQ ID NO: 782743 - DNA, 75 bp, synthetic construct
  source 1..75: mol_type = other DNA
gtgacaagcttgattggggtgttaggctttatttatactctagggttggagaatgttgtaataaatgaagcaagc

SEQ ID NO: 782744 - DNA, 75 bp, synthetic construct
  source 1..75: mol_type = other DNA
ataaaacgctggaaagtaaccgcgtgaaaaaggcgttgaaagaccttcagaacgggccttacaacctgctttata

SEQ ID NO: 782745 - DNA, 75 bp, synthetic construct
  source 1..75: mol_type = other DNA
atatattgaaagagtatggagggatttataccgatacagatattcttcctgcatattcagataaagtatcacaga

SEQ ID NO: 782746 - DNA, 75 bp, synthetic construct
  source 1..75: mol_type = other DNA
ctcttctaagccaggtgttttagggcgtattgcagccaggctgaatggtgttaaactgatacttcacactgtgca

SEQ ID NO: 782747 - DNA, 75 bp, synthetic construct
  source 1..75: mol_type = other DNA
aaaatagaatctcagttaatgggagtatctgaaattcaatcgagatatagcctattagaagaacgttaccattcc

SEQ ID NO: 782748 - DNA, 75 bp, synthetic construct
  source 1..75: mol_type = other DNA
gtgactaatgatccgatgacgctggtgcgctggctaacggcgggggccgggatcgcctacgtgccgctgatgtgg

SEQ ID NO: 782749 - DNA, 75 bp, synthetic construct
  source 1..75: mol_type = other DNA
atgcaagacaactattttacatattgtatatcaaacggaatatcaaatactgatgatatatccagacttgacttt

SEQ ID NO: 782750 - DNA, 75 bp, synthetic construct
  source 1..75: mol_type = other DNA
atcactcaaagtttgataattaatgagttgttaaatggagttgatagaaataccatcccttttcagaaaataagt

SEQ ID NO: 782751 - DNA, 75 bp, synthetic construct
  source 1..75: mol_type = other DNA
aaaagcagctactctcggtgcggattatgaagctcactacggctctcaccgactcgatagtgacgatttcgtcta

SEQ ID NO: 782752 - DNA, 75 bp, synthetic construct
  source 1..75: mol_type = other DNA
tttcatcaatccagcagattacagaccgtcaacttgaaggggtcgtactggataagatatttactgataaagcat

SEQ ID NO: 782753 - DNA, 75 bp, synthetic construct
  source 1..75: mol_type = other DNA
tcgctccaggttataccgatgacgaaatttacgaatggatgatcaagaaagttaaggcggcgcaggatctgaaat

SEQ ID NO: 782754 - DNA, 75 bp, synthetic construct
  source 1..75: mol_type = other DNA
tcacgtttatcggcgtggcaattctggtgctaatcgtcgggtatttttcaccgttaccgcccaaagcgggagaag

SEQ ID NO: 782755 - DNA, 75 bp, synthetic construct
  source 1..75: mol_type = other DNA
gctggcagtgtgcagcgcgctgtgggcgcagatgaacgggatgagcgcgctttctctggtgctaatctttgccgt

SEQ ID NO: 782756 - DNA, 75 bp, synthetic construct
  source 1..75: mol_type = other DNA
catgatgacaacagcttaaaattatttgcttcgctgttaatttcaatttcatattctagtgcctacacagattta

SEQ ID NO: 782757 - DNA, 75 bp, synthetic construct
  source 1..75: mol_type = other DNA
cctttgcgccttttatggtgggtgcagcgctggtactgccggaagcaggacgggaaaaagatccgcgtcattggc

SEQ ID NO: 782758 - DNA, 75 bp, synthetic construct
  source 1..75: mol_type = other DNA
cgcatcaggcatccgtgcacaaccgccggatgcggcgtaaacgccttatccggcctacaaaatcatctcttccgt

SEQ ID NO: 782759 - DNA, 75 bp, synthetic construct
  source 1..75: mol_type = other DNA
attgtatttaataatattagttctaatccttaaccatgatggattaatatcttctttgctatttcaattgattag

SEQ ID NO: 782760 - DNA, 75 bp, synthetic construct
  source 1..75: mol_type = other DNA
atagatgtatatatttatatattctaataagcgtaatcccattttttgctatagctagttcattgcggcaatatc

SEQ ID NO: 782761 - DNA, 75 bp, synthetic construct
  source 1..75: mol_type = other DNA
cggcagatggaagagtccgtgggattacgcacaataaaatattgtgggattcatccacactgggggcaattctga

SEQ ID NO: 782762 - DNA, 75 bp, synthetic construct
  source 1..75: mol_type = other DNA
aggggatgcttgaggtatttttgaaagcgaaaactccctttatatctacaaaagacttagctaatgcggggtacg

SEQ ID NO: 782763 - DNA, 75 bp, synthetic construct
  source 1..75: mol_type = other DNA
tatatctgcaacgtgcgggggttttctctttccagcaaccaatgccaccagggataaagcccccgcaacattgcg

SEQ ID NO: 782764 - DNA, 75 bp, synthetic construct
  source 1..75: mol_type = other DNA
actttcttccctgcgttacaccctcagcgaacaggatgatccgcagcgcctgattggtctgacgcctgcggcaca

SEQ ID NO: 782765 - DNA, 75 bp, synthetic construct
  source 1..75: mol_type = other DNA
gtccaatccaggtggacagtgcgttacaacagcggctggtggcgctctggcaggaggtactcggcgtgagccacg

SEQ ID NO: 782766 - DNA, 75 bp, synthetic construct
  source 1..75: mol_type = other DNA
tggggctggcacaaggctacctgaacgacgcagagaaaacggcggcgagctttgtctggcgcgaagcgagtggtg

SEQ ID NO: 782767 - DNA, 75 bp, synthetic construct
  source 1..75: mol_type = other DNA
tccacgtaaccgcctggacggaacgcgaagcgcgtagccgttgcccgtcaggttgtgttgctgtatttgccgccc

SEQ ID NO: 782768 - DNA, 75 bp, synthetic construct
  source 1..75: mol_type = other DNA
agcgaacaggatgatccgcagcgcctgattggtctgacgcctgcggcacagaaaaatatccgtctgctgcggagc

SEQ ID NO: 782769 - DNA, 75 bp, synthetic construct
  source 1..75: mol_type = other DNA
cggaacgccgtccggcagcctgaccacaaaccgtgacagcatggcagagcaggccatgccgcagctgtaccgcac

SEQ ID NO: 782770 - DNA, 75 bp, synthetic construct
  source 1..75: mol_type = other DNA
agaaactcgctataatgactttgcaccaaaagctttattagatatttttaatcacagacaatattgtctttcata

SEQ ID NO: 782771 - DNA, 75 bp, synthetic construct
  source 1..75: mol_type = other DNA
gaaggccaccgggtgacggtgcattacgggtatgatgagaaaggccgcctgaccggtgagcgccagacggtgcat

SEQ ID NO: 782772 - DNA, 75 bp, synthetic construct
  source 1..75: mol_type = other DNA
cagttaattgcggtgaaagacacgcagggccatgaaacgcggtatgaatacaacgccgccggtgacctgaccgcc

SEQ ID NO: 782773 - DNA, 75 bp, synthetic construct
  source 1..75: mol_type = other DNA
ctggcgcagctggtatcgctcggtttgtattatttaacgcgatattccattgcaattttgaccttactggaatca

SEQ ID NO: 782774 - DNA, 75 bp, synthetic construct
  source 1..75: mol_type = other DNA
ttgttgccgctcgtgagataagcctcaccttgctgcccctgatgccagaattattaaacgaagagacgtatgcaa

SEQ ID NO: 782775 - DNA, 75 bp, synthetic construct
  source 1..75: mol_type = other DNA
aggcagaacaggaaaatttccgcacactggatgcgattcacgatacgcaacgtctggaagagatgttgctggtag

SEQ ID NO: 782776 - DNA, 75 bp, synthetic construct
  source 1..75: mol_type = other DNA
cttaaagttcggcaggacagtcgcgtcatcaacaaatcggtgttcctggcactgggcatcaatatcgaaggtcag

SEQ ID NO: 782777 - DNA, 75 bp, synthetic construct
  source 1..75: mol_type = other DNA
agtccgtcagtttccccgcgagaacataattttatccaccaaattcacgccgcagattgcggacaagcagtctgc

SEQ ID NO: 782778 - DNA, 75 bp, synthetic construct
  source 1..75: mol_type = other DNA
ataacgccacctggtttttagctgctgacaagcgcaccaaaagtacacagggacgcggcctgactattccgctgc

SEQ ID NO: 782779 - DNA, 75 bp, synthetic construct
  source 1..75: mol_type = other DNA
tctggccctttccgtactggcagaagtcgccgctgtacgtctccgtcaggaggattcatgcctgcccccatcgtc

SEQ ID NO: 782780 - DNA, 75 bp, synthetic construct
  source 1..75: mol_type = other DNA
aggaggattcatgcctgcccccgtgtcctgatccttgcggctgggcgtggagagcgctttctcgcctccggggga

SEQ ID NO: 782781 - DNA, 75 bp, synthetic construct
  source 1..75: mol_type = other DNA
ataaaaaagtacgaagtaaccatgatatgtctaattatatatctaagttatatgaggaatctactggttccttac

SEQ ID NO: 782782 - DNA, 75 bp, synthetic construct
  source 1..75: mol_type = other DNA
gctcagcttgcagatctctctgctaatcgggcaaatatcgaaatgaaagttttagaaattttaaagaaactagga

SEQ ID NO: 782783 - DNA, 75 bp, synthetic construct
  source 1..75: mol_type = other DNA
gggctaaaacagattgcctacggtttccatgaggcctcaagggaagcctataacctcgatgtcgccgcgaaaaat

SEQ ID NO: 782784 - DNA, 75 bp, synthetic construct
  source 1..75: mol_type = other DNA
tggtggccagcgaccaggcgacggaagccattgagcgtatcaatgaggctatccgtgatctggaaccaaagctgg

SEQ ID NO: 782785 - DNA, 75 bp, synthetic construct
  source 1..75: mol_type = other DNA
atataaacatgcctgagggcttagataagtcttttagtggaaagctttatttctcaatatccaaaagcatccatt

SEQ ID NO: 782786 - DNA, 75 bp, synthetic construct
  source 1..75: mol_type = other DNA
atgattgtgtctatgaacacccttcatgaatgcgctttgaagggaatgcttctacaaggaaatcatcaatgctta

SEQ ID NO: 782787 - DNA, 75 bp, synthetic construct
  source 1..75: mol_type = other DNA
ttcagacaagctaaatgtcgttgctaacgacgggcgtgttgatttcatgcgttctggctctgaagccacgcaact

SEQ ID NO: 782788 - DNA, 75 bp, synthetic construct
  source 1..75: mol_type = other DNA
aaaatctgtccaaaaatgcccgtgataacgtgcagtatatcggggatatggtgccgccgctgaagatggtcggtg

SEQ ID NO: 782789 - DNA, 75 bp, synthetic construct
  source 1..75: mol_type = other DNA
caaacaacttgaaagtattgcccggagtcgtggtctccccccaaaaaaactgctgaatgaaatgattgagcaggc

SEQ ID NO: 782790 - DNA, 75 bp, synthetic construct
  source 1..75: mol_type = other DNA
agctaaaaaccccaaaatagtagatgttggaattgggaaatatggactcacaaactctatagtaaaaggggcaag

SEQ ID NO: 782791 - DNA, 75 bp, synthetic construct
  source 1..75: mol_type = other DNA
cgtcggattacaggataaatacctgatcactcctcaccccataagggaatcagaaattctgacaaatctccgcct

SEQ ID NO: 782792 - DNA, 75 bp, synthetic construct
  source 1..75: mol_type = other DNA
catcttcaatgattactcctcccccttttcgtgggtggacagcagggacagtgaacagtgtgactggttatggaa

SEQ ID NO: 782793 - DNA, 75 bp, synthetic construct
  source 1..75: mol_type = other DNA
caaacagcttgaaagtattgcccgaagtcgtggtctccgcccaaaaaaactgctgaatgaaatgattgagcaggc

SEQ ID NO: 782794 - DNA, 75 bp, synthetic construct
  source 1..75: mol_type = other DNA
caaacaccttgaaagtattgcccggagtcgtggtctccacccaaaaaaactgctgaatgaaatgattgagcaggc

SEQ ID NO: 782795 - DNA, 75 bp, synthetic construct
  source 1..75: mol_type = other DNA
tgaaaagatttatcatgatcaatcttcaaggtgtttatgggcataatttaattacaagatataagttttatttgt

SEQ ID NO: 782796 - DNA, 75 bp, synthetic construct
  source 1..75: mol_type = other DNA
gcaaggccgctgatctcttgcgagatcggtacaggtacctctttcattaaccaggacaaagtgagtggttgcgtg

SEQ ID NO: 782797 - DNA, 75 bp, synthetic construct
  source 1..75: mol_type = other DNA
gttgaaccatcaccgctgaatgatgatagtttcttaaaaaaatatgatttgcgtgaaagtatatctgtagctgat

SEQ ID NO: 782798 - DNA, 75 bp, synthetic construct
  source 1..75: mol_type = other DNA
atcacggggttttctgcgtatacaaccggttttgtccaggtgttatgtgcaatttgttatatatattatatgata

SEQ ID NO: 782799 - DNA, 75 bp, synthetic construct
  source 1..75: mol_type = other DNA
ttatcctgtgactatggctgtcagtaaacagctattacctatttatgataagccgatgtctattacccgctctct

SEQ ID NO: 782800 - DNA, 75 bp, synthetic construct
  source 1..75: mol_type = other DNA
tcttttcgtgtaaataaaattgaaaaaaaacagtcttccgaaattgaaatttcagggaatttattatgtgcaatt

SEQ ID NO: 782801 - DNA, 75 bp, synthetic construct
  source 1..75: mol_type = other DNA
gttgagaagaagcggcaagagcaggaactggcaaataaaataaaaagtattaatgattattatgctgacatttta

SEQ ID NO: 782802 - DNA, 75 bp, synthetic construct
  source 1..75: mol_type = other DNA
gtctgttttataaatttactctccccacagacaatgcaagagttgcagatgaatttttctcgagatttgtagaat

SEQ ID NO: 782803 - DNA, 75 bp, synthetic construct
  source 1..75: mol_type = other DNA
tgaattaaaaacacgtaatcaaactctaacctttatggttgataatgaagttgttaatgaaagtgatatttttaa

SEQ ID NO: 782804 - DNA, 75 bp, synthetic construct
  source 1..75: mol_type = other DNA
ggagaactaccaagaatttgataattacttgacggataaaacatctttaaggaaattcattaatactttaaatac

SEQ ID NO: 782805 - DNA, 75 bp, synthetic construct
  source 1..75: mol_type = other DNA
aacaacatttatctatcttattatggtgctgtttgtatcgccatttattgcttgtatatttaaaaatgaccgaaa

SEQ ID NO: 782806 - DNA, 75 bp, synthetic construct
  source 1..75: mol_type = other DNA
gccgaggccttagcagaaatcgagcgtggccgcgatatggctacagatttcgagaatgcctgcattaacgctctt

SEQ ID NO: 782807 - DNA, 75 bp, synthetic construct
  source 1..75: mol_type = other DNA
gcgatgagagaacatgggaagctgatcattcccctatcggtaccagagataatagatttgctgaaaaccaaagac

SEQ ID NO: 782808 - DNA, 75 bp, synthetic construct
  source 1..75: mol_type = other DNA
gccgcagtgaccttgatgccacccttgcgctccgtaaccatttgaattcagctaaacaatcaatgattcgatcca

SEQ ID NO: 782809 - DNA, 75 bp, synthetic construct
  source 1..75: mol_type = other DNA
tggtcaccagcgttacccgcgaagacggctcgatcgtatacctgcatgtgacgccattcccctatgaggtggtgg

SEQ ID NO: 782810 - DNA, 75 bp, synthetic construct
  source 1..75: mol_type = other DNA
tcggaagtgatcgctggcctgctgctcggcgctgctggcagcgctttgttcctgttgctgcaaaaacgtaccacc

SEQ ID NO: 782811 - DNA, 75 bp, synthetic construct
  source 1..75: mol_type = other DNA
tgctggggcaaatcgccaccgcaattgggccgctggataaaccttttaccagagaggacctgcacaagcaggcct

SEQ ID NO: 782812 - DNA, 75 bp, synthetic construct
  source 1..75: mol_type = other DNA
tacttttttaggaaagcatattacaccaatatccgcaccttttagacattactatcaggcaagaaatattttatt

SEQ ID NO: 782813 - DNA, 75 bp, synthetic construct
  source 1..75: mol_type = other DNA
cttgatcgaaatcaaattccagaagacaggatcgcccttctcctgggccatacacgcggcaatacagagacattc

SEQ ID NO: 782814 - DNA, 75 bp, synthetic construct
  source 1..75: mol_type = other DNA
tgaaggctatatgttacggcataaggtgaaaccaggaattactggactggcgcaagtaaaaggctggcgcggtga

SEQ ID NO: 782815 - DNA, 75 bp, synthetic construct
  source 1..75: mol_type = other DNA
caaacatcgaaagcggaaatcattgggaatggcgtggatgagacaactctgacagcaacagtgaaagatcctttt

SEQ ID NO: 782816 - DNA, 75 bp, synthetic construct
  source 1..75: mol_type = other DNA
ggtgatatcaccgtcaccaacacagctccgctacatatgactgcaaccttgcaggataaaaatggcaacccatta

SEQ ID NO: 782817 - DNA, 75 bp, synthetic construct
  source 1..75: mol_type = other DNA
ccaaagagcagttgattgagcaggctaagaagaatattgaggttcttcgcggtgcggtggaaagagtcccgggcg

SEQ ID NO: 782818 - DNA, 75 bp, synthetic construct
  source 1..75: mol_type = other DNA
gcgaagcgcgcaccgtgcagttggcagaaaaaaacatcactctacatgttatgcccactgaggttaatgttgctg

SEQ ID NO: 782819 - DNA, 75 bp, synthetic construct
  source 1..75: mol_type = other DNA
agattcaccgctgctttcgcgtcacttccctgccgctgagcataatctggcgcaacgtctgctggccgcgcaaaa

SEQ ID NO: 782820 - DNA, 75 bp, synthetic construct
  source 1..75: mol_type = other DNA
atgtttggtattttcaaaaagaaaacccgcaaggccattactgaagtgaagaaaatggagaaccgcgacgcggtg

SEQ ID NO: 782821 - DNA, 75 bp, synthetic construct
  source 1..75: mol_type = other DNA
caccaggggcggggtggaaaaaaactgaaccgtgcggggatccaaccccctcccacgaaaaacccatttcgggat

SEQ ID NO: 782822 - DNA, 75 bp, synthetic construct
  source 1..75: mol_type = other DNA
aacgttcgtaagcgtacagcgagggccgtattgacggggatgtgttattcagctggcagtgctatgcgccacgga

SEQ ID NO: 782823 - DNA, 75 bp, synthetic construct
  source 1..75: mol_type = other DNA
cacgaatgttgtcagcattgcactttgtagcgacacctgcggcacagccgctcagcgatgcactggatactataa

SEQ ID NO: 782824 - DNA, 75 bp, synthetic construct
  source 1..75: mol_type = other DNA
atcccaagcatgacagttacgcaattagtgaaaagagtcacggcagagaagaaacccgtcttcatattgtttgcg

SEQ ID NO: 782825 - DNA, 75 bp, synthetic construct
  source 1..75: mol_type = other DNA
atgctcttaaacattatagcgataaaattgggattgaaaatcggttctatataagcgagcgattccctggggaag

SEQ ID NO: 782826 - DNA, 75 bp, synthetic construct
  source 1..75: mol_type = other DNA
cgccgtcaggggctgagggcaaaggcctcccggaagttcagcccggtcagttaccgcgcacatggcctgaggtga

SEQ ID NO: 782827 - DNA, 75 bp, synthetic construct
  source 1..75: mol_type = other DNA
ttatccttgccttcgcttttttattgtctggttgcggtggtgatagtggtgaattagccggaacatatatagaaa

SEQ ID NO: 782828 - DNA, 75 bp, synthetic construct
  source 1..75: mol_type = other DNA
acatttcattcgcgtgattgataaaaacacgcttcagttcagagatgatgaaaacgatctgtatatacgtacgaa

SEQ ID NO: 782829 - DNA, 75 bp, synthetic construct
  source 1..75: mol_type = other DNA
ttatccttgcctttacttttttattatccggttgcggtggtgataatggtgaattagccggaacatatatagaaa

SEQ ID NO: 782830 - DNA, 75 bp, synthetic construct
  source 1..75: mol_type = other DNA
ctgaaatgcgcgcaagagtagaaaatttcaataaactcttcgaagaaatgcttaaagcacgtaaaaacaaatcaa

SEQ ID NO: 782831 - DNA, 75 bp, synthetic construct
  source 1..75: mol_type = other DNA
attagccgcattgggtgcctggatggggtggcaggctcttccacaaattattttgctagcggcaggaagcggact

SEQ ID NO: 782832 - DNA, 75 bp, synthetic construct
  source 1..75: mol_type = other DNA
gatcttatgcagtattcaaattatgcgaatgtccgacaaaccgtcattgcgattgtgcgttaaatgaaataggtg

SEQ ID NO: 782833 - DNA, 75 bp, synthetic construct
  source 1..75: mol_type = other DNA
ccgcgtataacaatacgacgtgggccaggagagtttgccctcgttctaaaaatggaacctccaacaggattgatt

SEQ ID NO: 782834 - DNA, 75 bp, synthetic construct
  source 1..75: mol_type = other DNA
ttattgctaagctggaaaaagatccgcagcttaaagcgcagttcctcgaagtctatccgcaaggtttcagtggcg

SEQ ID NO: 782835 - DNA, 75 bp, synthetic construct
  source 1..75: mol_type = other DNA
ggattagttaatacaaatactactaatatgcttcttaaagcatgttgttcaggaaaacttaatgctcaaaaatta

SEQ ID NO: 782836 - DNA, 75 bp, synthetic construct
  source 1..75: mol_type = other DNA
ctattcttacaatgattgtattcgtcctgattatctggctcttctgtatcctgtcgtctctatgaagaaagatat

SEQ ID NO: 782837 - DNA, 75 bp, synthetic construct
  source 1..75: mol_type = other DNA
cttcaggcagaaccgcgttatattattttggttcctgtgctggcggctatctggattattggcagtctgacaagc

SEQ ID NO: 782838 - DNA, 75 bp, synthetic construct
  source 1..75: mol_type = other DNA
gttgattaaagattataatactttcacagattcaattgtaaaaattcactcacctactgcaacttattcctacat

SEQ ID NO: 782839 - DNA, 75 bp, synthetic construct
  source 1..75: mol_type = other DNA
attgctgtatattctattaaaacagggcactaccataatgcggacatacttccactaaataatgaggttaatgta

SEQ ID NO: 782840 - DNA, 75 bp, synthetic construct
  source 1..75: mol_type = other DNA
gacgctggcggataacgtacagcagaatgcagaagccgttgccgaagacaaaaatcaggtggcgctgctggcatc

SEQ ID NO: 782841 - DNA, 75 bp, synthetic construct
  source 1..75: mol_type = other DNA
tgacggatggtgcggggctccccttgtccggataccatattattctgaaagcccggcaaaatacatccgcagtgg

SEQ ID NO: 782842 - DNA, 75 bp, synthetic construct
  source 1..75: mol_type = other DNA
catcaggggtggcgcgggatgaatcggttgatgcagccggacgcgccagtcagtataaggaagcagcgtcttcgg

SEQ ID NO: 782843 - DNA, 75 bp, synthetic construct
  source 1..75: mol_type = other DNA
gagtacctattccatacccatctcaccctcaaaaatctttagacgaacaggggcgtattgtggatattctggata

SEQ ID NO: 782844 - DNA, 75 bp, synthetic construct
  source 1..75: mol_type = other DNA
cacagctacctgcagtcgtttcctgtcgattacatcaaactcgataaagggtttgtacaaatggtcggagtggat

SEQ ID NO: 782845 - DNA, 75 bp, synthetic construct
  source 1..75: mol_type = other DNA
tgactgatggcgcaggcatccccatgtccggatgccacataattctgaaatcccgggtaaacacctcagaggtgg

SEQ ID NO: 782846 - DNA, 75 bp, synthetic construct
  source 1..75: mol_type = other DNA
agcaacgtatttcaatagcatatttaccaaaagtcttagtgaagatgcgtgttggtggaattagcaatcgttcag

SEQ ID NO: 782847 - DNA, 75 bp, synthetic construct
  source 1..75: mol_type = other DNA
atattcgctacacagggaaatacacttataatcgtacttcacagaaattgaacgcccaaagaattcagaatccac

SEQ ID NO: 782848 - DNA, 75 bp, synthetic construct
  source 1..75: mol_type = other DNA
aatgaattaaacctaaaagaaaataacagccttctctttgagatgtatcgattcgacgatatcaacatatttttt

SEQ ID NO: 782849 - DNA, 75 bp, synthetic construct
  source 1..75: mol_type = other DNA
agtgtcgtggcaagtcgttttggtgggcttttgaatgcctataaactcatcaattacacaccagaaagagattat

SEQ ID NO: 782850 - DNA, 75 bp, synthetic construct
  source 1..75: mol_type = other DNA
cacacccggcagcctgccggggacgaagacgcagatgaccattcgttcgaaaacctataagggcagcgggtttaa

SEQ ID NO: 782851 - DNA, 75 bp, synthetic construct
  source 1..75: mol_type = other DNA
atgctggatccgtgtggcacaggcgtgggcaggcaccggctttggcaacctggcgataccgcgagtgggtcagga

SEQ ID NO: 782852 - DNA, 75 bp, synthetic construct
  source 1..75: mol_type = other DNA
tgggagtaagcatattgctgaactggaaaaaatcgccactgaatatgcgctgaaatttcagaaagcccaggacgc

SEQ ID NO: 782853 - DNA, 75 bp, synthetic construct
  source 1..75: mol_type = other DNA
ccgtctgcggtacgtgcctatgacgtgggtgccggtgcggttgaccgcggtgttgtggccactgcggaggtgaag

SEQ ID NO: 782854 - DNA, 75 bp, synthetic construct
  source 1..75: mol_type = other DNA
ctcaaacgagagattggcgaattagctttacaagcaataaaacaaggcgatataagcgaacaatcactacctgat

SEQ ID NO: 782855 - DNA, 75 bp, synthetic construct
  source 1..75: mol_type = other DNA
gaaattagacaaaactaataaaatatattttaatggaaatctattccgacgagactctactcaaaaaataaaggc

SEQ ID NO: 782856 - DNA, 75 bp, synthetic construct
  source 1..75: mol_type = other DNA
acagccttctctttgagatgtatcgattcgacgatatcaacatattttttaaaatgctttcgaccaataaaaagg

SEQ ID NO: 782857 - DNA, 75 bp, synthetic construct
  source 1..75: mol_type = other DNA
ctgtggctgctggtgctgttatgtccgtatccagtgtagctaatgcatatactccttcattttctaacggagata

SEQ ID NO: 782858 - DNA, 75 bp, synthetic construct
  source 1..75: mol_type = other DNA
ataaaatcggtggtattactttcccgatgcaggtagcagctgtttcagctatcgttgataatgctaactcttcag

SEQ ID NO: 782859 - DNA, 75 bp, synthetic construct
  source 1..75: mol_type = other DNA
atgcggtatcacgctaatcagcgattttgatcaatatgatggcgggaagatgctctggcagaagatcgcgcgcga

SEQ ID NO: 782860 - DNA, 75 bp, synthetic construct
  source 1..75: mol_type = other DNA
atcgactctacaacaatgccacctgcgttgcccgcagcgccacgccgttagtattgctgccgacaattgcagaag

SEQ ID NO: 782861 - DNA, 75 bp, synthetic construct
  source 1..75: mol_type = other DNA
ctcaaatttatgataaaattcaatcagaactggaaaaagaaggagtaaccataggagaatttcgctataaatatg

SEQ ID NO: 782862 - DNA, 75 bp, synthetic construct
  source 1..75: mol_type = other DNA
agctgaaaggaatcaaatttggccgcaggcgtaccgtggacaggaacgtcgtgctgacgcttcatcagaagggca

SEQ ID NO: 782863 - DNA, 75 bp, synthetic construct
  source 1..75: mol_type = other DNA
ggaagatattcgcgctatgagacagaatggtattatctggccaatagctttagcgtataaaaatctatccaaact

SEQ ID NO: 782864 - DNA, 75 bp, synthetic construct
  source 1..75: mol_type = other DNA
tgaatttacgaatgttgataagaccgcatattctattaaagaaccgcctactgcgccagatgaaccaaagaacaa

SEQ ID NO: 782865 - DNA, 75 bp, synthetic construct
  source 1..75: mol_type = other DNA
cctggttggatactggcatacgcatccgcaggcagttcctcacatctcagggactgacattgccagttttgcgcg

SEQ ID NO: 782866 - DNA, 75 bp, synthetic construct
  source 1..75: mol_type = other DNA
tggaggcctacttcattcgttgatgctcacactaaagttgggacaaagtcattttctattggtttgtcaaattgc

SEQ ID NO: 782867 - DNA, 75 bp, synthetic construct
  source 1..75: mol_type = other DNA
cagatggaggatgcatacatcccggagcggaggctgcatctttaccactgtgaccaccgtggactgccgcaggcg

SEQ ID NO: 782868 - DNA, 75 bp, synthetic construct
  source 1..75: mol_type = other DNA
aatactgcaaacatctgccactgtaccgtcagagtgaaatctttgcccgtcagggcgtcgagctgagccgtgcat

SEQ ID NO: 782869 - DNA, 75 bp, synthetic construct
  source 1..75: mol_type = other DNA
tggtcaaatgatatcagtatagtttctccgagcagttggctattcaaatgtgcaaaggatagtagtttatttagt

SEQ ID NO: 782870 - DNA, 75 bp, synthetic construct
  source 1..75: mol_type = other DNA
gggggtgttcggtcccggctggaaagcacccttcgatatccgcttacaggttcatgagcgggaactgatactcaa

SEQ ID NO: 782871 - DNA, 75 bp, synthetic construct
  source 1..75: mol_type = other DNA
attgaccagctcgccactctgcacccggcgctgttcgataaatacctgtacgtcggcatcacccgtgcggcaacc

SEQ ID NO: 782872 - DNA, 75 bp, synthetic construct
  source 1..75: mol_type = other DNA
cgttgctttcttcgttattattttcctcagcattatcgtgcgttatttcttcgcttccggtagtgcctatatcgt

SEQ ID NO: 782873 - DNA, 75 bp, synthetic construct
  source 1..75: mol_type = other DNA
cagcagcatttcagatgcggagaaacgtcggtcggagttgatgacgcgtgtaaaggggctggaagacctggcacg

SEQ ID NO: 782874 - DNA, 75 bp, synthetic construct
  source 1..75: mol_type = other DNA
gagtgttcgctggtggcagggaaaacttcgggtattttctcgacgctggcgtgaacatctgcttatagcgatggg

SEQ ID NO: 782875 - DNA, 75 bp, synthetic construct
  source 1..75: mol_type = other DNA
tcaagacggatgataaatctaatgagattacagctatcccagaacttcttaacatgctggatattaaaggaaaaa

SEQ ID NO: 782876 - DNA, 75 bp, synthetic construct
  source 1..75: mol_type = other DNA
tccccgcctctctctcttgatggctcctgctcttcggaggacgctcaggattctgtggttcccgccacaaaatca

SEQ ID NO: 782877 - DNA, 75 bp, synthetic construct
  source 1..75: mol_type = other DNA
tttctctggcagcatgaccattcccgcccggtggggcagtgtacggtgcgccggtcagcgaagggctggaaatca

SEQ ID NO: 782878 - DNA, 75 bp, synthetic construct
  source 1..75: mol_type = other DNA
gaaaatcaggactatatgattgcttcccaaattcgggaagcaaaaggtagaggcggtcacaaccgcaaggactac

SEQ ID NO: 782879 - DNA, 75 bp, synthetic construct
  source 1..75: mol_type = other DNA
agtgcaaaaaggaatagattaaattatggtttttctccagaagatagtttttgttatagcattagtattcccaga

SEQ ID NO: 782880 - DNA, 75 bp, synthetic construct
  source 1..75: mol_type = other DNA
ctgatgctgccggggaaaggcgtaacgaaaaaacagcctccgttaccggagagcaagtaggctgaatgcagttta

SEQ ID NO: 782881 - DNA, 75 bp, synthetic construct
  source 1..75: mol_type = other DNA
gtgttaaccgtcaggttaccgtgctggcattccagtttggtgatggcttcagtcacatcatttacccaacctcag

SEQ ID NO: 782882 - DNA, 75 bp, synthetic construct
  source 1..75: mol_type = other DNA
cgaaaaaggtcgtcaggtacgacgctacttcattgaatgcgagaaacgtttaagacaacaagaaacaaaagtgga

SEQ ID NO: 782883 - DNA, 75 bp, synthetic construct
  source 1..75: mol_type = other DNA
agatagctgtatgaagtttctatccaccttcccgaaagggaaagtgaaactggttctggaactgacagaacgaaa

SEQ ID NO: 782884 - DNA, 75 bp, synthetic construct
  source 1..75: mol_type = other DNA
tgatgaacttattgatttcacgtttgaatggaaagggctgaagaaattatgcgtggcagtctcctttcggtccat

SEQ ID NO: 782885 - DNA, 75 bp, synthetic construct
  source 1..75: mol_type = other DNA
tccggcctgtattacaaccgccaccgctattatgacccgctgcaggggcgatatatcactcaggatccgattgga

SEQ ID NO: 782886 - DNA, 75 bp, synthetic construct
  source 1..75: mol_type = other DNA
acctgaacagaggtgatatgctcacctcagaacaacacaggtgtcataatgaaaaaaagaaatttcagcgcagag

SEQ ID NO: 782887 - DNA, 75 bp, synthetic construct
  source 1..75: mol_type = other DNA
taacccgtgtaccggggaatttaaccatacttaatcaataccaaaaagacattgatcacctgtctaaattatttt

SEQ ID NO: 782888 - DNA, 75 bp, synthetic construct
  source 1..75: mol_type = other DNA
ttcagatggacaaactatctatatctatgatgcggaggaaattcgtaattctgttatatcattacagaatatttc

SEQ ID NO: 782889 - DNA, 75 bp, synthetic construct
  source 1..75: mol_type = other DNA
aagctcaacaaaactgttgttgtcagtaaaagcgcgtccagaaaaaaaattaacggtaattttaatttcagggac

SEQ ID NO: 782890 - DNA, 75 bp, synthetic construct
  source 1..75: mol_type = other DNA
gatgttgccaaacggcatgtagagttatctttgtggatcattgatctaaacaagaatgatttggaacagttaggg

SEQ ID NO: 782891 - DNA, 75 bp, synthetic construct
  source 1..75: mol_type = other DNA
cgtgtcccggtacggattgcatttgacgacgcaaaggaattaaagcaacttcttcgcccgggactgtccgtcacc

SEQ ID NO: 782892 - DNA, 75 bp, synthetic construct
  source 1..75: mol_type = other DNA
tggatttcacccgcgaccgcctgcaccgggaaacgctgcgcagcttcggtcgttatgaactcaccaccgcttaca

SEQ ID NO: 782893 - DNA, 75 bp, synthetic construct
  source 1..75: mol_type = other DNA
taaccggagaacaacaaggatgtatttcctctcgttgcggaacgagcgcatcaataggtaatcgctggcagattg

SEQ ID NO: 782894 - DNA, 75 bp, synthetic construct
  source 1..75: mol_type = other DNA
ctgccgctggcccttatcagtaaggaaggggcaacagaatggtgcgcagaatacgatgagtggggcaacctgctg

SEQ ID NO: 782895 - DNA, 75 bp, synthetic construct
  source 1..75: mol_type = other DNA
aagagccgctggtcgaaagtcgctatctttacgacccgctgggccgcagggtggcaaaacgggtgtggcggcgtg

SEQ ID NO: 782896 - DNA, 75 bp, synthetic construct
  source 1..75: mol_type = other DNA
aggtagcatcaaccttgaatttagcggtaataccaccgatgccaccgataatacagccctggcaattgacaccgg

SEQ ID NO: 782897 - DNA, 75 bp, synthetic construct
  source 1..75: mol_type = other DNA
ctgatgctgccggggaaaggcgtaacgaaaaaacagcctccgttaccggatagcaagcaggctgaatggagttta

SEQ ID NO: 782898 - DNA, 75 bp, synthetic construct
  source 1..75: mol_type = other DNA
gaactacgcgggagaggtaaaggtaaacgggccgcatgaatatgccaaattcacccttgaacatatccgccagtg

SEQ ID NO: 782899 - DNA, 75 bp, synthetic construct
  source 1..75: mol_type = other DNA
ctctggtccgtacggccaatactcacggatgaaagtcaaaacagggtgcatgaagcagctcgctactccccggcc

SEQ ID NO: 782900 - DNA, 75 bp, synthetic construct
  source 1..75: mol_type = other DNA
aagaaatcggtagagtcggtgatcggctcgcatcattagcagagagtaatcaaaccctcccagagagcgatctta

SEQ ID NO: 782901 - DNA, 75 bp, synthetic construct
  source 1..75: mol_type = other DNA
agcgtctacttggccacacatcggagaagacaacaaaaatgtatcttgatgagagagaaaaaacgtacttactgc

SEQ ID NO: 782902 - DNA, 75 bp, synthetic construct
  source 1..75: mol_type = other DNA
gtcgctggtttacgacttggtgcagtagttgaacaatgccgcatggtaagtaggggggattatctaatcagtgcc

SEQ ID NO: 782903 - DNA, 75 bp, synthetic construct
  source 1..75: mol_type = other DNA
ggtacaaggcgcgaaaaaactggcgtggctgaacaagagcgggaatatgtcgaatccacactatctcgcccaacc

SEQ ID NO: 782904 - DNA, 75 bp, synthetic construct
  source 1..75: mol_type = other DNA
aattagttggttttttattgactgcttttcgacattagataatgaatctaagaaccaacaagattttgtgccagt

SEQ ID NO: 782905 - DNA, 75 bp, synthetic construct
  source 1..75: mol_type = other DNA
ataacagctcagcacctggccgaacttgtcgatatctctcatcagcaactctcacgctatgaacgtggtacaaac

SEQ ID NO: 782906 - DNA, 75 bp, synthetic construct
  source 1..75: mol_type = other DNA
tattagttggttttttattgactgcttttcaacattagacaatgaatctaagagccagcaagattttgtaccaat

SEQ ID NO: 782907 - DNA, 75 bp, synthetic construct
  source 1..75: mol_type = other DNA
catcgccgcagttccaccaatgaaccacgcctgatggtcagcaccgacggcgtgggcgatattccgattcagggc

SEQ ID NO: 782908 - DNA, 75 bp, synthetic construct
  source 1..75: mol_type = other DNA
gtcagcctattactctgctgaatcttaatctctacgccaacatcctgcatcagagctggtggaatgcggatacct

SEQ ID NO: 782909 - DNA, 75 bp, synthetic construct
  source 1..75: mol_type = other DNA
tttttctttgcgccatcgtggcagtgagcctgttttttgtgcaatcctgcgtccgtaaaagccagcatgtcgcag

SEQ ID NO: 782910 - DNA, 75 bp, synthetic construct
  source 1..75: mol_type = other DNA
ctgtctcaggaacaggatggcgttaaatctcatggtcacaccgccagcgccgctaacacggatttaggcactaaa

SEQ ID NO: 782911 - DNA, 75 bp, synthetic construct
  source 1..75: mol_type = other DNA
gatttcaatgcatgacatgaccccaacagttatatgtaaaaatcaatttgtctattgccataatccttcaccatt

SEQ ID NO: 782912 - DNA, 75 bp, synthetic construct
  source 1..75: mol_type = other DNA
agaaaggcgatgcggctgaacatgcagagttccatatgaaagacaaccgctgggtgtctggctggatgtgtacac

SEQ ID NO: 782913 - DNA, 75 bp, synthetic construct
  source 1..75: mol_type = other DNA
cactgctggcatggacgctctgcctgaatgtgtttggcagcggagcgtacagtaaaccagcacaaatcagcctgg

SEQ ID NO: 782914 - DNA, 75 bp, synthetic construct
  source 1..75: mol_type = other DNA
gtgaacaaattgatatcaattcacaatttaactcatttgaatatgacggagtttcttttcaacttaaaaatatga

SEQ ID NO: 782915 - DNA, 75 bp, synthetic construct
  source 1..75: mol_type = other DNA
agttttctgtacttttgatagatgatgattttaaaggtaaatcatatcttaacagcaaagacagttatgtaatgt

SEQ ID NO: 782916 - DNA, 75 bp, synthetic construct
  source 1..75: mol_type = other DNA
atgaaagatattattaatgtttcaagtctggacgacattgaatctttgtttgcaaggttagatggtggcgaagag

SEQ ID NO: 782917 - DNA, 75 bp, synthetic construct
  source 1..75: mol_type = other DNA
aacaaaaatcatttttttcccttaaaaaatacataaaatatatagcgtttcttccagagtattatctttcgatta

SEQ ID NO: 782918 - DNA, 75 bp, synthetic construct
  source 1..75: mol_type = other DNA
catgatgcaggcgatgcgtgcgctgggcgttgaaacgtatgattacgccgacgcaatggaccagttgaacggcat

SEQ ID NO: 782919 - DNA, 75 bp, synthetic construct
  source 1..75: mol_type = other DNA
ctaacaaaaacatcgcgggctattagcggcaatctgcgtgccggattccagcaggctggataccagatccaggac

SEQ ID NO: 782920 - DNA, 75 bp, synthetic construct
  source 1..75: mol_type = other DNA
aaaatttccgaatctgaagattattgccagcaacggtgtgggctatgaccctattgatatcgtggcagcaaggga

SEQ ID NO: 782921 - DNA, 75 bp, synthetic construct
  source 1..75: mol_type = other DNA
ggaaagcattacacagctgggcgtgaaattacatctggttaatagccgggagggaacgcagcatgttgaagctgg

SEQ ID NO: 782922 - DNA, 75 bp, synthetic construct
  source 1..75: mol_type = other DNA
tagaagttcaagttgctactttatcagtctccaatcgaattactatacaaggatatgtgcaaaatggagaaccac

SEQ ID NO: 782923 - DNA, 75 bp, synthetic construct
  source 1..75: mol_type = other DNA
tactataattagatttttttcagaggatatttttaataaggaagaaatagataatgcaaagaaacaaaactctgt

SEQ ID NO: 782924 - DNA, 75 bp, synthetic construct
  source 1..75: mol_type = other DNA
ctgatacgtttctaggtgtcgctctctggacatttatttgggcaatatgtgcgacgatttttaccttcagttttg

SEQ ID NO: 782925 - DNA, 75 bp, synthetic construct
  source 1..75: mol_type = other DNA
acatatcccgagatttgtatgaggctagtgaggtcgatggcgcaactaaatggcaacagtttaaggaaattacat

SEQ ID NO: 782926 - DNA, 75 bp, synthetic construct
  source 1..75: mol_type = other DNA
cgcttaccgttacctttactctctccggagctccggaatatgtcaccagagacaccggtcaggctctgagagccg

SEQ ID NO: 782927 - DNA, 75 bp, synthetic construct
  source 1..75: mol_type = other DNA
atggctgaacccttatgcatggcatcctggcacactgctgtgctggatgccctgaaaaaacttaaatggatcaat

SEQ ID NO: 782928 - DNA, 75 bp, synthetic construct
  source 1..75: mol_type = other DNA
taaaaaaagaattagaggtaaagcatttttaataatagcagttgctgttgtcatttttagtattctaacgataga

SEQ ID NO: 782929 - DNA, 75 bp, synthetic construct
  source 1..75: mol_type = other DNA
tggccggatacagatgccctgccgccggcgtttatctcttctgaacttccgcaaggtgaggggccagttgctctg

SEQ ID NO: 782930 - DNA, 75 bp, synthetic construct
  source 1..75: mol_type = other DNA
attcgagtgggcgttttaacactagccctgaagtgagaactctggtctggatccgtgctgcgggtcattgtgaac

SEQ ID NO: 782931 - DNA, 75 bp, synthetic construct
  source 1..75: mol_type = other DNA
gaagaggaactgaaacgggaagggcataccgttttaaatccggctgtgcttccggatgggctgacacagccgcac

SEQ ID NO: 782932 - DNA, 75 bp, synthetic construct
  source 1..75: mol_type = other DNA
ctattgatcgcgggtgcattaacaaacatatcccgagatttgtatgaggctagtgaggtcgatggcgcaactaaa

SEQ ID NO: 782933 - DNA, 75 bp, synthetic construct
  source 1..75: mol_type = other DNA
cagtatcggaatgaattcagttgattttctgtcggttccattaaatgcaaaaataacagtaattgccgtttgtgt

SEQ ID NO: 782934 - DNA, 75 bp, synthetic construct
  source 1..75: mol_type = other DNA
tccagggaaaattcctcttgatttaattgaagttcgttctggatcttatttagaagaagacgatgttatccgttt

SEQ ID NO: 782935 - DNA, 75 bp, synthetic construct
  source 1..75: mol_type = other DNA
gcagtattatcagcggtcagaatgtgcacctggcaggagggaatgtcactaacagtggcagtaccctgatggcgc

SEQ ID NO: 782936 - DNA, 75 bp, synthetic construct
  source 1..75: mol_type = other DNA
tggtatatcagtatgatctgaagcagtttatgtcagacggttactcgaagaaggtcatgctgttggaagcaaacc

SEQ ID NO: 782937 - DNA, 75 bp, synthetic construct
  source 1..75: mol_type = other DNA
gtcgaaatgaccattcagctaccaggtgatacccaacgtcgccctgttatctgcctggctttacgtaaacttgct

SEQ ID NO: 782938 - DNA, 75 bp, synthetic construct
  source 1..75: mol_type = other DNA
cctaccatgctgcggttctggccgccctgaaaaagctgaaatgggtcagggatgcggatatctaccctgaacggg

SEQ ID NO: 782939 - DNA, 75 bp, synthetic construct
  source 1..75: mol_type = other DNA
tgagaacgtcagacgccatctgtctaataaaaaagtccggctaagctctgacaccagtatctggcataaagtgat

SEQ ID NO: 782940 - DNA, 75 bp, synthetic construct
  source 1..75: mol_type = other DNA
gcagcgaaaagctgttgtataaccggctgaagcagtttgatgaaccagggttgttccatgacaactatcagacac

SEQ ID NO: 782941 - DNA, 75 bp, synthetic construct
  source 1..75: mol_type = other DNA
gttcgtttatgacggtaagcgcagcttcacccgccggtttgataacagcgcgaaagatttgagtgtgctggagca

SEQ ID NO: 782942 - DNA, 75 bp, synthetic construct
  source 1..75: mol_type = other DNA
ggtagagggttcggatgtggtggctgaccgggatgtgtcactggcggcgggtaaccatgttgatgttcttgctgc

SEQ ID NO: 782943 - DNA, 75 bp, synthetic construct
  source 1..75: mol_type = other DNA
cggtcacaggggcagaaatcagtgccggagaccgcgcagcacttattgccggcaatgatctcagtctgaatgcca

SEQ ID NO: 782944 - DNA, 75 bp, synthetic construct
  source 1..75: mol_type = other DNA
agtatctggatattagtaacaaaaacagcaaggagctggctgaggcttgtactggtggtggcgtcgcctgtgtaa

SEQ ID NO: 782945 - DNA, 75 bp, synthetic construct
  source 1..75: mol_type = other DNA
tgggagtagcaccggatacggggcggcagcatgtggacgactattaccttatcctggaggcaggagctgatgagt

SEQ ID NO: 782946 - DNA, 75 bp, synthetic construct
  source 1..75: mol_type = other DNA
tgtcgtttacccaggaggcagcttttggcgtggatccgttcgcccgcaccgctatgccactgagtcaggtctggc

SEQ ID NO: 782947 - DNA, 75 bp, synthetic construct
  source 1..75: mol_type = other DNA
cattctgaaagtgacacagtatccggcagtacgctgaatgccgggaataatctgtctgttgtcgcaaccggcaaa

SEQ ID NO: 782948 - DNA, 75 bp, synthetic construct
  source 1..75: mol_type = other DNA
cgtttatgtcgacggtgtggcggcgtcaatggcgtcggtcattgcgatggtaggaaacccggtcattatgccgga

SEQ ID NO: 782949 - DNA, 75 bp, synthetic construct
  source 1..75: mol_type = other DNA
ggtgcccgggcaaaacgaatcggacaatttcccgatcgagactgctacggccaccacggttgttagcggcacata

SEQ ID NO: 782950 - DNA, 75 bp, synthetic construct
  source 1..75: mol_type = other DNA
cagagcgacacggatggcggcctgaagtacgttactgagtggatgtgcatcgggatcggcaaatatgattacgag

SEQ ID NO: 782951 - DNA, 75 bp, synthetic construct
  source 1..75: mol_type = other DNA
aagcgcttccgcagttattaatatatctgactctttgactggtaagtcatcaggatttagaacgttaaaaaatat

SEQ ID NO: 782952 - DNA, 75 bp, synthetic construct
  source 1..75: mol_type = other DNA
agaaacctctcgagcgtaatggtgacatcgctcattgtgaaacctgtgacaaaaatttctctctccaggcattgt

SEQ ID NO: 782953 - DNA, 75 bp, synthetic construct
  source 1..75: mol_type = other DNA
aaaaccctctcgaacgcaatggcgagacggctcactgcacaacttgcgataaagatttcactgttcaggcgcttt

SEQ ID NO: 782954 - DNA, 75 bp, synthetic construct
  source 1..75: mol_type = other DNA
attcgaccagcccaagggcatcattggcgacattctcagcccgatcttcaaagttgtcggcgcggtattctcttt

SEQ ID NO: 782955 - DNA, 75 bp, synthetic construct
  source 1..75: mol_type = other DNA
aaccataaaagagttaagtcgctttaaacaggagtattcacaggcagcctccgttttagtcggcgatattaaaac

SEQ ID NO: 782956 - DNA, 75 bp, synthetic construct
  source 1..75: mol_type = other DNA
ttttctctcaaagagaaaaagagagaaaactggaatatgatgcttcggcaacaatggcaaaatttgaagacaaat

SEQ ID NO: 782957 - DNA, 75 bp, synthetic construct
  source 1..75: mol_type = other DNA
gggacggcggacagagtacggtctgaatgtggtgtcaggcgacatcacggacatcaccacgccggacgggcggga

SEQ ID NO: 782958 - DNA, 75 bp, synthetic construct
  source 1..75: mol_type = other DNA
aaacggaatgaatggcgtgacatgtaggaacatacgtcactacaaccttacagtcattaatactcttcacaacgc

SEQ ID NO: 782959 - DNA, 75 bp, synthetic construct
  source 1..75: mol_type = other DNA
tagaaaaaataaaacaacttaacgtcacgttgtcgtttgatttttccgggcgcggtaccgatgactattttagac

SEQ ID NO: 782960 - DNA, 75 bp, synthetic construct
  source 1..75: mol_type = other DNA
gacgccgctgcccggcacgtgcaggatgccctgcaggagttgcaggttgatattcagcgatgtcggcattacgac

SEQ ID NO: 782961 - DNA, 75 bp, synthetic construct
  source 1..75: mol_type = other DNA
gcgttgccagagatgcgtcaactgtctctggcaaaagaagatgtgcacaatttacgcgaaggtgtgcgttatctg

SEQ ID NO: 782962 - DNA, 75 bp, synthetic construct
  source 1..75: mol_type = other DNA
ttgatctggaaacgcaaacacgcacgattaaaaaaagtggtgagtggtttgcgacagttgcagaaaataacggtt

SEQ ID NO: 782963 - DNA, 75 bp, synthetic construct
  source 1..75: mol_type = other DNA
agcactggtttacctttaacgaaccgattgtgccggtagagggcggttatttatatgacttccattatccgaacg

SEQ ID NO: 782964 - DNA, 75 bp, synthetic construct
  source 1..75: mol_type = other DNA
caccttgttccactttgatatgccgatggtgatgcaggaaaaaggtggctgggagagtcgggaagtcgtagaagc

SEQ ID NO: 782965 - DNA, 75 bp, synthetic construct
  source 1..75: mol_type = other DNA
aaccgcgccactgaaggcatatggggcttataagattggtggtggagagtggaacccatttactcaaactgatcc

SEQ ID NO: 782966 - DNA, 75 bp, synthetic construct
  source 1..75: mol_type = other DNA
tatggtataaaaattgcgatagtaaaaataaaaatgtggcagttgaacttcttcaaatctacgaattgcatcaat

SEQ ID NO: 782967 - DNA, 75 bp, synthetic construct
  source 1..75: mol_type = other DNA
gttttgagtcgtcatacgtaacagaactcttttcccgctttgctcgaacagcgtttgaactgtttggccataagg

SEQ ID NO: 782968 - DNA, 75 bp, synthetic construct
  source 1..75: mol_type = other DNA
ccggctgaaacatccacgttttacaagaattatcatcaagatattctgttgatgaagcgtattggacataacagc

SEQ ID NO: 782969 - DNA, 75 bp, synthetic construct
  source 1..75: mol_type = other DNA
gtgggctctgaagtactgagtcgggtaattgcgtcaggtctcaaagtactgacacgggtactggtggcaggtgat

SEQ ID NO: 782970 - DNA, 75 bp, synthetic construct
  source 1..75: mol_type = other DNA
atctgacatcgaaggacgtgattagttatctattgactcagcatgatgttcccaccgtctgggatgagctggcac

SEQ ID NO: 782971 - DNA, 75 bp, synthetic construct
  source 1..75: mol_type = other DNA
tgaaggtgaatgcatatgccctgaatgaacgaacaggaatgtcaaccgtggccagcgacgtgaaccaccgctggt

SEQ ID NO: 782972 - DNA, 75 bp, synthetic construct
  source 1..75: mol_type = other DNA
ttatcacgtcattattatgttaaaggcggaatattctttgcaatacaagtatgctttttgctttatctttccgat

SEQ ID NO: 782973 - DNA, 75 bp, synthetic construct
  source 1..75: mol_type = other DNA
attaccgaattgattttattcgggagcacctgaagtgggtacatcgtgctattagcgaagggtctcaatgccaag

SEQ ID NO: 782974 - DNA, 75 bp, synthetic construct
  source 1..75: mol_type = other DNA
gtatccgatggtcgaaaaagatattgcggaagggcggttgcgtgtcgtcagcccggaatcgaccagtgagatcga

SEQ ID NO: 782975 - DNA, 75 bp, synthetic construct
  source 1..75: mol_type = other DNA
ttcacggtccagtacgataccaatcgcctccggtttgtgtcggaggacaaaacttaaaaacttgctcgtatccgc

SEQ ID NO: 782976 - DNA, 75 bp, synthetic construct
  source 1..75: mol_type = other DNA
tgtttttatttaccaatgtcattgtcactgggtttatgaattttctgcaactcaatcctgcgcagaaccttttcc

SEQ ID NO: 782977 - DNA, 75 bp, synthetic construct
  source 1..75: mol_type = other DNA
tgctcaggagccagcgcccacctgccgggctaatccaccacaccgatcgaggttcacagtactgcgcatacgatt

SEQ ID NO: 782978 - DNA, 75 bp, synthetic construct
  source 1..75: mol_type = other DNA
ctctggacgacgagactcgtgaggagattcaaacccaagttgatgaggctcagcgggaactggctgatcatgatg

SEQ ID NO: 782979 - DNA, 75 bp, synthetic construct
  source 1..75: mol_type = other DNA
gaagatgatctgcagcgctatatcgacgtcacccgcggcgaaatattcttttcacgtggggtgatcctagtggaa

SEQ ID NO: 782980 - DNA, 75 bp, synthetic construct
  source 1..75: mol_type = other DNA
cgactggctgaagcgcggcgtgcgcagcgatgcggcggatctctatcgccagcaggatcttaacgtcaccctgga

SEQ ID NO: 782981 - DNA, 75 bp, synthetic construct
  source 1..75: mol_type = other DNA
acaggatgcggaggcgatgctacgccagcaaccgccttccacgcgcattgatcttacgctggctgactgggcaca

SEQ ID NO: 782982 - DNA, 75 bp, synthetic construct
  source 1..75: mol_type = other DNA
gaaattattgccaggcttttgttgtcgctgaattatcagcccggcaagcctgtcattaaaactgcggagggtgaa

SEQ ID NO: 782983 - DNA, 75 bp, synthetic construct
  source 1..75: mol_type = other DNA
agttgatttcaagaaaaccgcaccacattatcaaaatcaagaatttgattctgaacttttccttggcgcattgag

SEQ ID NO: 782984 - DNA, 75 bp, synthetic construct
  source 1..75: mol_type = other DNA
tattgtgtatggaatttgaggtgtttttgaaagacagaatatctgaggcagaaaaaggggaactgccgtgggata

SEQ ID NO: 782985 - DNA, 75 bp, synthetic construct
  source 1..75: mol_type = other DNA
tctatgtacggtattccgccgccggatggcagggcgatatggatttaccgccacagccgctgataccttacgccg

SEQ ID NO: 782986 - DNA, 75 bp, synthetic construct
  source 1..75: mol_type = other DNA
gattactaattgcattgtaccttgtttattatttgcatttgggaatggaagggattgcggtggggtttatattag

SEQ ID NO: 782987 - DNA, 75 bp, synthetic construct
  source 1..75: mol_type = other DNA
aaaatatcaagaatgaatggcttgtcgttggatggccatatcggaaagcaatttacggcatctatgggaagggat

SEQ ID NO: 782988 - DNA, 75 bp, synthetic construct
  source 1..75: mol_type = other DNA
aaaatagcatcaagacatggattatgccttgatggtcataaggggaaacaatttacttcatcgttaggccgcaga

SEQ ID NO: 782989 - DNA, 75 bp, synthetic construct
  source 1..75: mol_type = other DNA
ggtgaaaacggaagccaaaagtaatgaggttacagccattccagagttgcttaacctactgtatttaaagaaaaa

SEQ ID NO: 782990 - DNA, 75 bp, synthetic construct
  source 1..75: mol_type = other DNA
attatatcgtctacatgattctcaaatcacctcgcttaataacattaaagtcaatgatgttcttattaatgatct

SEQ ID NO: 782991 - DNA, 75 bp, synthetic construct
  source 1..75: mol_type = other DNA
tcgcaaaagtgatgaagcatttgcatctgtatatcagttaatcgagttagctggcttacgttgggttgagaaatt

SEQ ID NO: 782992 - DNA, 75 bp, synthetic construct
  source 1..75: mol_type = other DNA
ttgatctgtgaaagaaatggctttacattagatggacataaaggacagcaatttacatcgtcccttgctaggaaa

SEQ ID NO: 782993 - DNA, 75 bp, synthetic construct
  source 1..75: mol_type = other DNA
ttttttatacttaaccactatgcattaatgctgcgttatttcattctacctaagaaaaaccagcgttacgcaaat

SEQ ID NO: 782994 - DNA, 75 bp, synthetic construct
  source 1..75: mol_type = other DNA
tgatctttataaaatatgaacaggttgaaaaaaaaacagtaactttgctgttttttatacttaaccactatgcat

SEQ ID NO: 782995 - DNA, 75 bp, synthetic construct
  source 1..75: mol_type = other DNA
gtgggaaatatgcagttattacccagtttagtgatttgtttagaactatggcaagtttgataggaagtgtccttg

SEQ ID NO: 782996 - DNA, 75 bp, synthetic construct
  source 1..75: mol_type = other DNA
gcagaagaaagaagataaatcagcagaaggtgtaagcatccgatattatatttcatcaaaggatatggatgctaa

SEQ ID NO: 782997 - DNA, 75 bp, synthetic construct
  source 1..75: mol_type = other DNA
tattccaacaagcaactggctataaatatcatttggcgacatggaatgccttagtggttccggcgggtactcctg

SEQ ID NO: 782998 - DNA, 75 bp, synthetic construct
  source 1..75: mol_type = other DNA
ctggtcgatggaccactcaacttgtcaataagcacttaggttacagatacacaggagtattcaaaaccctggcaa

SEQ ID NO: 782999 - DNA, 75 bp, synthetic construct
  source 1..75: mol_type = other DNA
atggtcgcggccgtccgcgtaagttccagccaggtgaagcggtggagtggcgattgcgtgctccggataatttgc

SEQ ID NO: 783000 - DNA, 75 bp, synthetic construct
  source 1..75: mol_type = other DNA
ctaattgattgtggtgatattagtgctaaagatgcaaaaagcacacagaaagcctggaattgtcgtcactccaga

SEQ ID NO: 783001 - DNA, 75 bp, synthetic construct
  source 1..75: mol_type = other DNA
atctggctcgcgactgccgcgatgtatcggtagttgaaataaatcaggaaccttatttcgccaatattaaatcgc

SEQ ID NO: 783002 - DNA, 75 bp, synthetic construct
  source 1..75: mol_type = other DNA
tatatgatgagcccctgcgacaagttcagggattgtatcaactgcaacgagcaagtttgtgtgaaaggcgaagaa

SEQ ID NO: 783003 - DNA, 75 bp, synthetic construct
  source 1..75: mol_type = other DNA
gggcgtgaaacaagatatgattgcaactcattacccacgagttcctcccgtgtcaaatcccaacaaactgagaga

SEQ ID NO: 783004 - DNA, 75 bp, synthetic construct
  source 1..75: mol_type = other DNA
gaggtggaagttatttcagacagtagcaacggaatattcagccgccatataaaaaaaaggttaagtaatatttgc

SEQ ID NO: 783005 - DNA, 75 bp, synthetic construct
  source 1..75: mol_type = other DNA
ggaacggaggcgcgtattcctccaggagctctcgcgtggataacaggaagcagggccactttgccttgttcagaa

SEQ ID NO: 783006 - DNA, 75 bp, synthetic construct
  source 1..75: mol_type = other DNA
atatttctattattcccgattacagacaagcctggaaagtagagcataaattgtcaggcatcctactattgacta

SEQ ID NO: 783007 - DNA, 75 bp, synthetic construct
  source 1..75: mol_type = other DNA
ttatcctgttctcctctgtcgatgatgggcctgttatggtggtaagctcccagcgcttacatgatatgttgaatc

SEQ ID NO: 783008 - DNA, 75 bp, synthetic construct
  source 1..75: mol_type = other DNA
gtttgtttatgacagggagaagagcttcactcgtcgcttcgataacagtacaagggatttaagcatacttgaaca

SEQ ID NO: 783009 - DNA, 75 bp, synthetic construct
  source 1..75: mol_type = other DNA
gaaaaagggcgacaagctggtgcaggcgaacctggcaaagagcctggagatgattgccgaaaacggcccggacga

SEQ ID NO: 783010 - DNA, 75 bp, synthetic construct
  source 1..75: mol_type = other DNA
caccggccagagattttaaatgtggttgtgtggttgaaattaatgtcgagccttatttcgtaaaagtcgaaacac

SEQ ID NO: 783011 - DNA, 75 bp, synthetic construct
  source 1..75: mol_type = other DNA
atatttctattatccccgattacagacaagcctggaaagtggaacataaattgtcaatattctactgtatgctat

SEQ ID NO: 783012 - DNA, 75 bp, synthetic construct
  source 1..75: mol_type = other DNA
gaggtggaagttattttagacagcagcaacggaatattcagccgacatattaaaaaacggttaagtaatatttgt

SEQ ID NO: 783013 - DNA, 75 bp, synthetic construct
  source 1..75: mol_type = other DNA
gtccggcatgatggtgtggaatatctggccgtgtactggggtaagggtgccacggtacctgatgaataccgtatc

SEQ ID NO: 783014 - DNA, 75 bp, synthetic construct
  source 1..75: mol_type = other DNA
cggagtgatatcaccatcagtggttttaccggcacggcaggcagtctgacaatgaatgtggccggtaccctgctg

SEQ ID NO: 783015 - DNA, 75 bp, synthetic construct
  source 1..75: mol_type = other DNA
cgggaacaacgtgcagcttgcgggcggcaatatcaccaacagcggcggcagcatcaacgcacagaatgacctcct

SEQ ID NO: 783016 - DNA, 75 bp, synthetic construct
  source 1..75: mol_type = other DNA
acggtgctcaggtcaacggcaacaggattatcgccgatgtgggccacgacctgctgataagcagccagcaggaca

SEQ ID NO: 783017 - DNA, 75 bp, synthetic construct
  source 1..75: mol_type = other DNA
tggtgtgcaggccggacaggctgcgacaatggcctccgcaaccggtgacccgaatgcgacgggagtcagcctgtc

SEQ ID NO: 783018 - DNA, 75 bp, synthetic construct
  source 1..75: mol_type = other DNA
ctcatatcagcggttcggatgtgattgcgaaccgggatatcagcattaccggtgacagtgtggtggttgacccgg

SEQ ID NO: 783019 - DNA, 75 bp, synthetic construct
  source 1..75: mol_type = other DNA
ctatcttttaaaaatggattttcagaatttcttcaataaaattaaaccggctcttttatttgataaacttcgctc

SEQ ID NO: 783020 - DNA, 75 bp, synthetic construct
  source 1..75: mol_type = other DNA
ttgcttattcgtgctaccgcgaataactattattcaaacgataataaagatgttccatttttcataaccccccca

SEQ ID NO: 783021 - DNA, 75 bp, synthetic construct
  source 1..75: mol_type = other DNA
tttttatttcatttggagctatagctagctctgggggaattactttagatgtttctagagttgtttttgactctc

SEQ ID NO: 783022 - DNA, 75 bp, synthetic construct
  source 1..75: mol_type = other DNA
agaacagccaacacggtttgagtttgattatcaacatgactcagatctgctgccgctgcgtaaatctggtattga

SEQ ID NO: 783023 - DNA, 75 bp, synthetic construct
  source 1..75: mol_type = other DNA
atggcagacaaagcatccaaaaaaaatgtcgcgcgtcgaagaatactcgaaactgcaaaagttggtgactatttc

SEQ ID NO: 783024 - DNA, 75 bp, synthetic construct
  source 1..75: mol_type = other DNA
ttgactattgaaagaggaaactgctttaacaattcatatgtaaaagtagaacactgcttaaattcttctgtatac

SEQ ID NO: 783025 - DNA, 75 bp, synthetic construct
  source 1..75: mol_type = other DNA
ctggaaaagaaaacccgtttttatcaggcttccacttctgaactgtacggtctggtgcaggaaattccgcagaaa

SEQ ID NO: 783026 - DNA, 75 bp, synthetic construct
  source 1..75: mol_type = other DNA
ttttgacttcacgttatgagggattcccgatggcgatactagaagcactagatgcaggtttgccatgtttagtta

SEQ ID NO: 783027 - DNA, 75 bp, synthetic construct
  source 1..75: mol_type = other DNA
ttctttccttatcgtgacggaaaatgttgtgaacgagttttggatactataattaaacttgaacaaccaagagta

SEQ ID NO: 783028 - DNA, 75 bp, synthetic construct
  source 1..75: mol_type = other DNA
acatccaattataacttcattaaaaatattagggatgatgaaaatataaatgttatacatgttaatttatttaat

SEQ ID NO: 783029 - DNA, 75 bp, synthetic construct
  source 1..75: mol_type = other DNA
ccggcaaacatccctgtgaaaaaccggcggagatgttgcgtcagataattacctccagcagtcgtccgggggatt

SEQ ID NO: 783030 - DNA, 75 bp, synthetic construct
  source 1..75: mol_type = other DNA
gttggtttttaaaggaacaaaactaccaattaggcgctgtgttaggctatcaggagacgcgtttcagttggttgg

SEQ ID NO: 783031 - DNA, 75 bp, synthetic construct
  source 1..75: mol_type = other DNA
tatgactggctggagccggggcagcaccactggagcgattggtcacatcacccggcaacgcggttgaattttgca

SEQ ID NO: 783032 - DNA, 75 bp, synthetic construct
  source 1..75: mol_type = other DNA
agtgaggcggcttatattcagtgtccttcctgttcaggacggattatgcctgaacaaaaacgtgagctgaacgga

SEQ ID NO: 783033 - DNA, 75 bp, synthetic construct
  source 1..75: mol_type = other DNA
tgtcgctctataaccgtggtgatcgccgtcgctggtactggccctgtccacactgtggtgagtattttcagccct

SEQ ID NO: 783034 - DNA, 75 bp, synthetic construct
  source 1..75: mol_type = other DNA
attaccgccacggattattattttattcaggacatcatctctgtggttcatgcggttcctgcaatacaattccgt

SEQ ID NO: 783035 - DNA, 75 bp, synthetic construct
  source 1..75: mol_type = other DNA
tggtcgagagttcaccggggcgggatatcactgacaccaaatggcgttgtggtggcgcacatgaggcaccgccaa

SEQ ID NO: 783036 - DNA, 75 bp, synthetic construct
  source 1..75: mol_type = other DNA
actgcctgtcgtcccgtgagtttgatgcggttgtttttgttggtcctgcccgtacgggcaagactaacggcctga

SEQ ID NO: 783037 - DNA, 75 bp, synthetic construct
  source 1..75: mol_type = other DNA
aacgaaaaagtgaactgcttgagcagcgggcagagccagttccttcccgcagtgtgccggatggcgttaattttc

SEQ ID NO: 783038 - DNA, 75 bp, synthetic construct
  source 1..75: mol_type = other DNA
ttttaccagatcagtttcatattgggatcaatatttcaccagcacactttctgtctccggggctggaggatgact

SEQ ID NO: 783039 - DNA, 75 bp, synthetic construct
  source 1..75: mol_type = other DNA
tatctctacgagatgaattagtaacagaaatagaggaatcaaaaagacagctcgatgaaaatgatatagattctt

SEQ ID NO: 783040 - DNA, 75 bp, synthetic construct
  source 1..75: mol_type = other DNA
ctagaactcagctttcaaaagaaatagcaaagttcgaagataaaaagcgagcaaaagaaatcaatgataagttta

SEQ ID NO: 783041 - DNA, 75 bp, synthetic construct
  source 1..75: mol_type = other DNA
gaaaagctattgcaaatcataccaaagttgtatgaggaaaaatctgtatatgatgatcaactctctaaaattaaa

SEQ ID NO: 783042 - DNA, 75 bp, synthetic construct
  source 1..75: mol_type = other DNA
ccgccggcagatggaactggatattctgaaaaaagcggagaaaatcataaaaaatctatggtcacccccgttttt

SEQ ID NO: 783043 - DNA, 75 bp, synthetic construct
  source 1..75: mol_type = other DNA
taaaacggctggaatcatttgaaaaatggtatgaaactaataaagttttgttggtaagtaataaaaaaatacgaa

SEQ ID NO: 783044 - DNA, 75 bp, synthetic construct
  source 1..75: mol_type = other DNA
ttttccgagcaagggccggagctggtgctcagcctgctgacgccggatctctcaagcagcgagcgccgactggag

SEQ ID NO: 783045 - DNA, 75 bp, synthetic construct
  source 1..75: mol_type = other DNA
tcatgaagataaaaaaatacttacatctgagtattgttggcagagcttgaataaaaagagagccgttcaaatcaa

SEQ ID NO: 783046 - DNA, 75 bp, synthetic construct
  source 1..75: mol_type = other DNA
tcactctggtacagccaaaatcagaggaggaaggactcctcaacgttgtgatagccgacagaaaaaagcggcgag

SEQ ID NO: 783047 - DNA, 75 bp, synthetic construct
  source 1..75: mol_type = other DNA
ctggaaaaaacatccatattacgcttgattctccagttcagggggatgctcccgttacatggaaagcttctctac

SEQ ID NO: 783048 - DNA, 75 bp, synthetic construct
  source 1..75: mol_type = other DNA
aattaccgcttatcccgttagcactaccggaaaattacccgctgccggggattatagcggtattgctaccataca

SEQ ID NO: 783049 - DNA, 75 bp, synthetic construct
  source 1..75: mol_type = other DNA
gccgatgttggtgcagtcattgaggacggtaaaggtaatattcttaagccgaatgacagtaatagcttattagaa

SEQ ID NO: 783050 - DNA, 75 bp, synthetic construct
  source 1..75: mol_type = other DNA
gtcgctggaatgcttttgatgcagcaatggatttgcattggttaacaggtgcgaatttctcagaagacattggcg

SEQ ID NO: 783051 - DNA, 75 bp, synthetic construct
  source 1..75: mol_type = other DNA
gttcaggatggaaatggactaaacctcggcgtgcaatgggcgaataaaaacgttggcgcacagcaatttaccaat

SEQ ID NO: 783052 - DNA, 75 bp, synthetic construct
  source 1..75: mol_type = other DNA
tatttcttctcacgccctttacccgccgaagagatctctgtctggatgtctactgcgctaccgcttcaaatcgac

SEQ ID NO: 783053 - DNA, 75 bp, synthetic construct
  source 1..75: mol_type = other DNA
ttcagtgcaatcgcgcgtttacagaaatgttcggctattgcatcagcgaagccagcggtatgcagcccgatgcgc

SEQ ID NO: 783054 - DNA, 75 bp, synthetic construct
  source 1..75: mol_type = other DNA
gattaactgccgcgttattcagggttacttcttctcacgccctttacctgctgaagaaatcccagcctggattag

SEQ ID NO: 783055 - DNA, 75 bp, synthetic construct
  source 1..75: mol_type = other DNA
tattttgttcaacagcgtttactgctgttattgctctttcggttcccagcatatcttttgctgaagattttagca

SEQ ID NO: 783056 - DNA, 75 bp, synthetic construct
  source 1..75: mol_type = other DNA
atttgccacgcggaaaccgaggcaacagcacaggtcaggatgcttttagtggcatggacgaatcaaagcctgtat

SEQ ID NO: 783057 - DNA, 75 bp, synthetic construct
  source 1..75: mol_type = other DNA
agcaggatcaaggaaagatcgtttcaactctgccaagttcttctgttgggattccggcaaaaggaaacggtcatt

SEQ ID NO: 783058 - DNA, 75 bp, synthetic construct
  source 1..75: mol_type = other DNA
ttcctctcgcagaagagattggtgaaatcgaaaatattgggcgctgggtcatcgcggaagcttgccgtcagttag

SEQ ID NO: 783059 - DNA, 75 bp, synthetic construct
  source 1..75: mol_type = other DNA
gtaacggaaatcaaaattgacaaaagttttgtcgatcgttgtctgaccgaaaaacgcatccttgccttacttgaa

SEQ ID NO: 783060 - DNA, 75 bp, synthetic construct
  source 1..75: mol_type = other DNA
gccggtgctgtgtggaaatccgcccaccttaccgggcgccggtgctgtgtggaaatccgcccatcttgccgggcg

SEQ ID NO: 783061 - DNA, 75 bp, synthetic construct
  source 1..75: mol_type = other DNA
aagaacaatttgagatgctacgcaagattaactgccgcgttattcagggttacttcttctcacgccctttacctg

SEQ ID NO: 783062 - DNA, 75 bp, synthetic construct
  source 1..75: mol_type = other DNA
actggaaaaaaaggacggcacaaaaatctggactcgcttcgccctgtcgaaagtctccgccgacgggaaaattta

SEQ ID NO: 783063 - DNA, 75 bp, synthetic construct
  source 1..75: mol_type = other DNA
tgaacgaaatggtaaaagagcgtttggttttaggcgcagcgctgaaagaagcgattagcaataaccaactgaaac

SEQ ID NO: 783064 - DNA, 75 bp, synthetic construct
  source 1..75: mol_type = other DNA
ccgaggtaacagcacaggtcaggatgcttttagtggcatggacgaatcaaagcctgtattagaaaatcagctagt

SEQ ID NO: 783065 - DNA, 75 bp, synthetic construct
  source 1..75: mol_type = other DNA
ctcggcccgacatttaacacccgtactattcaaaacgccgtgctggtaaaaaccggtgaaacggtggtcctgggc

SEQ ID NO: 783066 - DNA, 75 bp, synthetic construct
  source 1..75: mol_type = other DNA
agtctattgaagtagagtcatattttgtcgacaagtcaatatggaatgtccatatttcatatcatgatgacaaac

SEQ ID NO: 783067 - DNA, 75 bp, synthetic construct
  source 1..75: mol_type = other DNA
tgtgattaaaagaaaaatttctgatggattgaaagaaatagtttctcttaaagaaaaaatccttcttgaaaccac

SEQ ID NO: 783068 - DNA, 75 bp, synthetic construct
  source 1..75: mol_type = other DNA
ctctaactcgacgctcggcccgacgtttaatacccgtactattcaaaacgccgtgctggttaaaaccggtgaaac

SEQ ID NO: 783069 - DNA, 75 bp, synthetic construct
  source 1..75: mol_type = other DNA
ctttccgcgaagattgtggcggataagcgaaccaactctcttatcatcagcgggccggaaaaagcacgccagcgc

SEQ ID NO: 783070 - DNA, 75 bp, synthetic construct
  source 1..75: mol_type = other DNA
atctttacggttattccgtcatcacgctggacaatggtttcctgaaagtggtgcgctctgccaatgtaaaaacgt

SEQ ID NO: 783071 - DNA, 75 bp, synthetic construct
  source 1..75: mol_type = other DNA
gttgaacgcaaatggattatgtccgaagccggacaaggcgtaattaaagcacgtcaacagtcacgcgatcattca

SEQ ID NO: 783072 - DNA, 75 bp, synthetic construct
  source 1..75: mol_type = other DNA
attaactacacggcatccagctacgatatcaattatgaaaatagccagaacctacaagcgtcaggcggacaaatt

SEQ ID NO: 783073 - DNA, 75 bp, synthetic construct
  source 1..75: mol_type = other DNA
aagtgagttatggagacaaacaaccggtacataagtttgtatatgcccgtagaataaaacctacaggaacgagag

SEQ ID NO: 783074 - DNA, 75 bp, synthetic construct
  source 1..75: mol_type = other DNA
tgggtaacaaaattaccatcaatatcaggtcctgtaaatctccatatacctaccagtttcaaagataagtctctt

SEQ ID NO: 783075 - DNA, 75 bp, synthetic construct
  source 1..75: mol_type = other DNA
cagaattagaaaaaaacagaataaacatgataaacgatctgaagagcatattgttaaaatcttcagaggaagttg

SEQ ID NO: 783076 - DNA, 75 bp, synthetic construct
  source 1..75: mol_type = other DNA
ccgcgaaatagtcagcctggcactgacgcacaacgctgctgctgtgatactggtgcataaccatcccagtggtga

SEQ ID NO: 783077 - DNA, 75 bp, synthetic construct
  source 1..75: mol_type = other DNA
acctgagactgacaggacagattaaacagttctggctggaatcgggatgcgtctatggttatcgcaaaatccatt

SEQ ID NO: 783078 - DNA, 75 bp, synthetic construct
  source 1..75: mol_type = other DNA
aattacgaagtaacggtttaaatctggcggactatgttatatatcttttgagtaaggggggggggccactgattc

SEQ ID NO: 783079 - DNA, 75 bp, synthetic construct
  source 1..75: mol_type = other DNA
ggggataccgattgcgataaatgatgatcatttatctaataatatgatttccactaatgatgaagtgaaatgtat

SEQ ID NO: 783080 - DNA, 75 bp, synthetic construct
  source 1..75: mol_type = other DNA
ctgcgggaccgggtgagggaggcaggccgccgctggctggcatcgtcaggcgtgactgagaagcagatgcaaacc

SEQ ID NO: 783081 - DNA, 75 bp, synthetic construct
  source 1..75: mol_type = other DNA
gccttgccagcgccggtagtgccggaagaagcaactccggaaaacgtagaaatgctctctggctatgtttccacg

SEQ ID NO: 783082 - DNA, 75 bp, synthetic construct
  source 1..75: mol_type = other DNA
ccaggattcgtgccgatttcgatgattttgacggtgacaggcgaggtatcggtgattgtctggatgaggctgagc

SEQ ID NO: 783083 - DNA, 75 bp, synthetic construct
  source 1..75: mol_type = other DNA
cgatgcaagtacccaatagcactgatactgggttggataagatcgggcctatcaaatatgacatagcagccaaag

SEQ ID NO: 783084 - DNA, 75 bp, synthetic construct
  source 1..75: mol_type = other DNA
cagcactcatgcaatggataacctgccatttgtctataataccggttacaacattggatatcagaatgcaaatgt

SEQ ID NO: 783085 - DNA, 75 bp, synthetic construct
  source 1..75: mol_type = other DNA
gaaatagaatcacaagaaataaaaaataatgaattagaattctcgattgatattgatgatggagagtcaaatagg

SEQ ID NO: 783086 - DNA, 75 bp, synthetic construct
  source 1..75: mol_type = other DNA
aaaatgtataatatcacaatataaatttataactattatttctttaattaaaaattttatcaggctctatgtcag

SEQ ID NO: 783087 - DNA, 75 bp, synthetic construct
  source 1..75: mol_type = other DNA
ttctataaagcacttaatcattctgaatatcttttacttatgcaaaatgctgatatttatttggatagttatcct

SEQ ID NO: 783088 - DNA, 75 bp, synthetic construct
  source 1..75: mol_type = other DNA
attccggacagcgatccggacgggctgcacctgtcggatgatattcgtctggggatgctgatgcttatcagccat

SEQ ID NO: 783089 - DNA, 75 bp, synthetic construct
  source 1..75: mol_type = other DNA
tctttgttacttcgctggcaccgacaagcaatcaaccttagggtggtgtcgtgtcggtcgggcaaccatcgacaa

SEQ ID NO: 783090 - DNA, 75 bp, synthetic construct
  source 1..75: mol_type = other DNA
cccggagaactgtatcttgataaagatacaggccgatactatattctgaaaaaaaatacttactctcctacattc

SEQ ID NO: 783091 - DNA, 75 bp, synthetic construct
  source 1..75: mol_type = other DNA
cgctgatgatcttcacggtcttcgggcaatgtgtagcaggtggttttatcgttctggctttggcgctgctcaaag

SEQ ID NO: 783092 - DNA, 75 bp, synthetic construct
  source 1..75: mol_type = other DNA
tatcaaatcgacaccgtgccaacctggcataacggttacactacgctggctttcttcctgacggtattgttgagc

SEQ ID NO: 783093 - DNA, 75 bp, synthetic construct
  source 1..75: mol_type = other DNA
atggacgctaaccttccctttctgattttgtacgcttgtttatctgtcctacttttttatgggatgcaaagcatg

SEQ ID NO: 783094 - DNA, 75 bp, synthetic construct
  source 1..75: mol_type = other DNA
gttgtattccctgaaaataccattacgatagatatgtttggctccgcaaaatacagaaattatgagtatggtgca

SEQ ID NO: 783095 - DNA, 75 bp, synthetic construct
  source 1..75: mol_type = other DNA
agttatttggccccgcaataagaggtaagcgtctgaaaaacgcagatcgtatacccggctccttgccttttgtta

SEQ ID NO: 783096 - DNA, 75 bp, synthetic construct
  source 1..75: mol_type = other DNA
tgaatctgaccttcaagatgagattaaaaacaaattaaattcgattgataaaaataaaaattgcattttcatcag

SEQ ID NO: 783097 - DNA, 75 bp, synthetic construct
  source 1..75: mol_type = other DNA
ataccctcattagaaaccttcgtgagctgtctgttttgtatcgatggttcaacgttcatcggatcgacatgcact

SEQ ID NO: 783098 - DNA, 75 bp, synthetic construct
  source 1..75: mol_type = other DNA
ggacacattaaaccgacttgatgaagtattgccccgcaaactgtacgaaagatgggagaaagaacatacagtcaa

SEQ ID NO: 783099 - DNA, 75 bp, synthetic construct
  source 1..75: mol_type = other DNA
cttaaagccagctttggtacagagttcagcaaaatgagaaatcttaccgagcgactcaaagctgctggacttgac

SEQ ID NO: 783100 - DNA, 75 bp, synthetic construct
  source 1..75: mol_type = other DNA
tacagccgtcgtttatggtgacccatattggtggcctggatgcggtgccagaaaccgtgctcaatctgccggata

SEQ ID NO: 783101 - DNA, 75 bp, synthetic construct
  source 1..75: mol_type = other DNA
atgaagttaaaaaaaatggaggttttcaggaaaaaataaaacgtcttttaaaagaaaaatctattttaagctacc

SEQ ID NO: 783102 - DNA, 75 bp, synthetic construct
  source 1..75: mol_type = other DNA
aaggcgtgacccccagtaataacgctatatatactaccaaccacgacggcaatttttacgcaagctttaccgcta

SEQ ID NO: 783103 - DNA, 75 bp, synthetic construct
  source 1..75: mol_type = other DNA
aggataatgatttagaaatggcttgtgaagcaaaacatttcacgccttatttccagcctctcgttacgcaggaag

SEQ ID NO: 783104 - DNA, 75 bp, synthetic construct
  source 1..75: mol_type = other DNA
tgctaacttagatttactggaaaaaatcaggccagatctaattaaaatcgatgcctcctttgtcagcagaatgac

SEQ ID NO: 783105 - DNA, 75 bp, synthetic construct
  source 1..75: mol_type = other DNA
ttagcgataagcctgcaaaaaatattattttgctgattggcgatgggatgggggattcggaaattactgccgcac

SEQ ID NO: 783106 - DNA, 75 bp, synthetic construct
  source 1..75: mol_type = other DNA
atacctgacgacaaagggcgtgtttgagaatgaagaaacagacctgggcactgaaccgccccgggaatcctggag

SEQ ID NO: 783107 - DNA, 75 bp, synthetic construct
  source 1..75: mol_type = other DNA
gccatggacacgaagttgcttattgcctatggctttatttgatactacgcatccccataccagaagtcgtcgtta

SEQ ID NO: 783108 - DNA, 75 bp, synthetic construct
  source 1..75: mol_type = other DNA
tgaatcaacaatatcgttgacaactccagaccctgccagcaatggcggaagagcattcaacccaaagcattcatt

SEQ ID NO: 783109 - DNA, 75 bp, synthetic construct
  source 1..75: mol_type = other DNA
gccttaaaggcaatggatactctgaacctgctgggaaaagaaggtgcctatgaactgaaagacatcgcagaaaaa

SEQ ID NO: 783110 - DNA, 75 bp, synthetic construct
  source 1..75: mol_type = other DNA
aggtgcttgagaaaaggggagattggttgttcgttgagccattttaatattattagagattttgcattaaactcc

SEQ ID NO: 783111 - DNA, 75 bp, synthetic construct
  source 1..75: mol_type = other DNA
ttactttatagtaaagaaagattggctattaatcaaagctatatttaatggtgttaatcccctttttttggtgag

SEQ ID NO: 783112 - DNA, 75 bp, synthetic construct
  source 1..75: mol_type = other DNA
ggggattcggaaattactgccgcacgtaattatgccgaaggtgcgggcggcttttttaaaggtattgatgcctgg

SEQ ID NO: 783113 - DNA, 75 bp, synthetic construct
  source 1..75: mol_type = other DNA
atgcctattctggaaaaccgggctgctcagggcgatattactgcacccggcggtgctcgccgcttaacgggtgat

SEQ ID NO: 783114 - DNA, 75 bp, synthetic construct
  source 1..75: mol_type = other DNA
gcactatggcgcgataccagaatgcgaacagcgtcgataccctgaaggttatgaatggatgcagtctctttttga

SEQ ID NO: 783115 - DNA, 75 bp, synthetic construct
  source 1..75: mol_type = other DNA
ttaaaaatggcgcttcacctgttccctttgatatctcgcttcagaattgtattcgtgtgcgtaatattgaaacaa

SEQ ID NO: 783116 - DNA, 75 bp, synthetic construct
  source 1..75: mol_type = other DNA
cgctttgaaccggagccgtctccggaacggctgcaaagttttggcgcaatgctggcatggaagattatccctcca

SEQ ID NO: 783117 - DNA, 75 bp, synthetic construct
  source 1..75: mol_type = other DNA
ctgcaatcgctctgggattattcgtccctgccaaaagacatgtaccaccagtattaccttgctccgctggatcat

SEQ ID NO: 783118 - DNA, 75 bp, synthetic construct
  source 1..75: mol_type = other DNA
tgtcaccctcaaaggcaaaaaagcgggcacgcatactgtgaccgccacgctgggtaacaataatgccagcgatgc

SEQ ID NO: 783119 - DNA, 75 bp, synthetic construct
  source 1..75: mol_type = other DNA
caaatgatcatcagccagaatacggtctctactaatacgcagggtgtagccgaggtcaccatgacgcccgaaaga

SEQ ID NO: 783120 - DNA, 75 bp, synthetic construct
  source 1..75: mol_type = other DNA
gtttctgaagggatggaatttgtgcaatcaggtactaacgtgccctatatgaaaattagcgcaattgattacagt

SEQ ID NO: 783121 - DNA, 75 bp, synthetic construct
  source 1..75: mol_type = other DNA
ttttgtttatgcggcggtgcctgctgtcgttgagatggctgacgaattactggcggaagatggctgtctgaactt

SEQ ID NO: 783122 - DNA, 75 bp, synthetic construct
  source 1..75: mol_type = other DNA
aaaaagcgggcacgcatacggttaccgcaacgctgggtaacaataatgccagcgatgcgcaaccagtcacattcg

SEQ ID NO: 783123 - DNA, 75 bp, synthetic construct
  source 1..75: mol_type = other DNA
ccctgctcaacaggtggtgacgaataacagcgacagcgtgcagctgacggcaacggtgaaagatccgtcgaatca

SEQ ID NO: 783124 - DNA, 75 bp, synthetic construct
  source 1..75: mol_type = other DNA
ctgatttttattcagaaatatattggtcttctaataccgcaggtggaggccgacaatacattgtttccctggaaa

SEQ ID NO: 783125 - DNA, 75 bp, synthetic construct
  source 1..75: mol_type = other DNA
tgttggcgctgtctctgcgtgctgtccagagtaattcacgctctaaggtgatttcaacgccgcgtattcttactc

SEQ ID NO: 783126 - DNA, 75 bp, synthetic construct
  source 1..75: mol_type = other DNA
caaaacctcggctcaggttgtcctgcagatgtcaaaagatgagatcacaggtaatggcgtcgataacgcaacgct

SEQ ID NO: 783127 - DNA, 75 bp, synthetic construct
  source 1..75: mol_type = other DNA
gcctctgtgagctctggttcccaggctaatcaacaggtgaattttatcggtgatcaaagtactgctgccctgacc

SEQ ID NO: 783128 - DNA, 75 bp, synthetic construct
  source 1..75: mol_type = other DNA
atatcactgctgcaactaaaaaggctaaaggatcgtctgcgccgttaattgatacaggcgccctgcgtggtgcca

SEQ ID NO: 783129 - DNA, 75 bp, synthetic construct
  source 1..75: mol_type = other DNA
atattagttgtttttttaacctgggggtttgaatggctaatttttaagttcaatgtaaacctcgaacctcatgat

SEQ ID NO: 783130 - DNA, 75 bp, synthetic construct
  source 1..75: mol_type = other DNA
tgcacataagctggagattgctggttactagtgctgatatcagtatcgatgagcctgtttaccattctgtgtcaa

SEQ ID NO: 783131 - DNA, 75 bp, synthetic construct
  source 1..75: mol_type = other DNA
ccgcaggcgacctgacagcaacggtatcaccggacggtaaacgcagcaccatcgaatatgataaacgcgggcgtc

SEQ ID NO: 783132 - DNA, 75 bp, synthetic construct
  source 1..75: mol_type = other DNA
gtgcaccgctggttaaaggtacgccagacccggtttcttgcgcggaggacgttatccgctttgccgatgaacacg

SEQ ID NO: 783133 - DNA, 75 bp, synthetic construct
  source 1..75: mol_type = other DNA
tactgatgtttaaatattgtttgacatcttctgtaggggcgatatcgagcgaagatagtggacctgacattaagt

SEQ ID NO: 783134 - DNA, 75 bp, synthetic construct
  source 1..75: mol_type = other DNA
gtctcaggtcgaacatagccttaattctgttgcgcattttttaccgaatcaatttcatattgggatcaatatttc

SEQ ID NO: 783135 - DNA, 75 bp, synthetic construct
  source 1..75: mol_type = other DNA
ggcaacgctgtgtagataaagtactcgcggctattccctcgctatctccagcacggcaaccttttgcggcgttac

SEQ ID NO: 783136 - DNA, 75 bp, synthetic construct
  source 1..75: mol_type = other DNA
cccatcaccaaagccactcctgaagttgaaacttctcctgagagtaaaaaccaacgcccctggctggctgatgat

SEQ ID NO: 783137 - DNA, 75 bp, synthetic construct
  source 1..75: mol_type = other DNA
tacggcctgtcggctgccgttctggcgctgattggtgctggcgcatctgctcctcagatacttgcccagtttctg

SEQ ID NO: 783138 - DNA, 75 bp, synthetic construct
  source 1..75: mol_type = other DNA
cgttttgacgatgccgcacgcttgatggaacagatcaccacttccgatgagttaattgatttcctgaccctgcca

SEQ ID NO: 783139 - DNA, 75 bp, synthetic construct
  source 1..75: mol_type = other DNA
tgcaattgagaatttaattacaaactcggtttattgggttcagcagggggggagaagtgatcgtcgtattacttt

SEQ ID NO: 783140 - DNA, 75 bp, synthetic construct
  source 1..75: mol_type = other DNA
gccgcctgacgggtgaacggcagacggtggagaacccggagacaggggagatgctgtgggagcatgagacggggc

SEQ ID NO: 783141 - DNA, 75 bp, synthetic construct
  source 1..75: mol_type = other DNA
tattctgcgatgaatcctgtcacctactaaatgatcataataaagtcatggtattgggtgcgctttggtgccctg

SEQ ID NO: 783142 - DNA, 75 bp, synthetic construct
  source 1..75: mol_type = other DNA
attttaaaggatgaaattcaccgtagtacggcgtggaaattcgacggcgaactcatgtcctatcggtgctgcaac

SEQ ID NO: 783143 - DNA, 75 bp, synthetic construct
  source 1..75: mol_type = other DNA
agccacaggcggtgccgggacgcaggggttcaggtaccacgctgaataaccactttgcggtaataccggcagacc

SEQ ID NO: 783144 - DNA, 75 bp, synthetic construct
  source 1..75: mol_type = other DNA
gcgacgttcagcggctacaacgccgacaaccggttaagctggcagcgcagcctgccaggtggcagccagaatcca

SEQ ID NO: 783145 - DNA, 75 bp, synthetic construct
  source 1..75: mol_type = other DNA
ccatacggatgaagagaaacgggagacgcgctggcagtacaccccggaagggctggttgccagtctgagcaacgg

SEQ ID NO: 783146 - DNA, 75 bp, synthetic construct
  source 1..75: mol_type = other DNA
cgtcaggcggcaaagatggggtcgaaatttggtacaaaatgtgcggcaaaatttattggtggcgaaatggtcggg

SEQ ID NO: 783147 - DNA, 75 bp, synthetic construct
  source 1..75: mol_type = other DNA
aaactcaatctgcaaaatgatctttcatattttcctgtgccattctttgatccgcgagataaccgggtaatgact

SEQ ID NO: 783148 - DNA, 75 bp, synthetic construct
  source 1..75: mol_type = other DNA
tctttgtttcaagaaaactaaaaaaattaccactattcataattactttgatgttgatttcgtgcagactaaagg

SEQ ID NO: 783149 - DNA, 75 bp, synthetic construct
  source 1..75: mol_type = other DNA
tttgaaaagaaatgtaatgtagtagtatttaaaaaaacaagcctatttaagatattgaattttttatataaaaac

SEQ ID NO: 783150 - DNA, 75 bp, synthetic construct
  source 1..75: mol_type = other DNA
aaccgctggtggacggtccgcagagcgccgtcgtgacggggccggagggtgaggaaatcttctgtgatgaacatg

SEQ ID NO: 783151 - DNA, 75 bp, synthetic construct
  source 1..75: mol_type = other DNA
ttaaggtggcaagtggcaacgccgatcccgcactgctgagcaaagtgttcattggtgcgctgattgctctgctga

SEQ ID NO: 783152 - DNA, 75 bp, synthetic construct
  source 1..75: mol_type = other DNA
atttgcgaaattacatcaacagggagtattgtttgcactggatgattttggtactggctatgcaacccacagcta

SEQ ID NO: 783153 - DNA, 75 bp, synthetic construct
  source 1..75: mol_type = other DNA
gcgcagtcccgtattcaggacgccgactatgcgaccgaagtgtccaacatgtcgaaagcgcagattatccagcag

SEQ ID NO: 783154 - DNA, 75 bp, synthetic construct
  source 1..75: mol_type = other DNA
ccgccgcaatatggtcgggcgttactccgcactgctgctacaggtaaaagacaataagccgtggagtgatccagt

SEQ ID NO: 783155 - DNA, 75 bp, synthetic construct
  source 1..75: mol_type = other DNA
gtgagcgaacaagataacggccttcaactggctgtgaacaacctcgccactgaaatgaggcgagcaaattacctg

SEQ ID NO: 783156 - DNA, 75 bp, synthetic construct
  source 1..75: mol_type = other DNA
cggacgataaggtgacaaccgatgatccactggccgatgacacccgaacagaaggagaaggtgggcctgccgata

SEQ ID NO: 783157 - DNA, 75 bp, synthetic construct
  source 1..75: mol_type = other DNA
tttgatgacttttaccgggcgtaccggcgaaatgcggtggctggtgccgccgtgacgcgcatgctcgacggctgc

SEQ ID NO: 783158 - DNA, 75 bp, synthetic construct
  source 1..75: mol_type = other DNA
gccattcaccatcttgtttggtcagcagacaggaaggcttgcttcagatcaggacaaaaacgactttgccaagcg

SEQ ID NO: 783159 - DNA, 75 bp, synthetic construct
  source 1..75: mol_type = other DNA
tccctgtatgggagccgcagctaacagtagctgactgggataacgaccgtcagtctgaaacattcggtcagccga

SEQ ID NO: 783160 - DNA, 75 bp, synthetic construct
  source 1..75: mol_type = other DNA
gacgaggggcgctattgtgtccggctgtacaaggcaggccacatcaggccatcaaatattaatgccattgcgcac

SEQ ID NO: 783161 - DNA, 75 bp, synthetic construct
  source 1..75: mol_type = other DNA
ggtgagcagcagttttccgaactggataagctgcaaatcgtaccggacggacgctatcgcgtgcgtctctatcag

SEQ ID NO: 783162 - DNA, 75 bp, synthetic construct
  source 1..75: mol_type = other DNA
cccctctcgcagctctgattatgatgacattccatacaaatgccattgctgcccaggagagccacgatcatgcaa

SEQ ID NO: 783163 - DNA, 75 bp, synthetic construct
  source 1..75: mol_type = other DNA
acacgaagcgcccgacgctctatcaggagtttggctacccgcgcacgatcacgttcaacgacttctacaacatgt

SEQ ID NO: 783164 - DNA, 75 bp, synthetic construct
  source 1..75: mol_type = other DNA
gatgcaaatttttaccctgatggtatgcacggtcagaaggtggagaactggcgcgaatacgggagctgcagggcc

SEQ ID NO: 783165 - DNA, 75 bp, synthetic construct
  source 1..75: mol_type = other DNA
ccgataacgcaacagttgatgtctcaggtcgaacatagcttgaattctgttgcagattttttacccgatcaattt

SEQ ID NO: 783166 - DNA, 75 bp, synthetic construct
  source 1..75: mol_type = other DNA
tcaacttcaacttcagcgccaagacaagctttacgcagctcgcaagggcgctgggcgtaagcgaggcccaactct

SEQ ID NO: 783167 - DNA, 75 bp, synthetic construct
  source 1..75: mol_type = other DNA
gcgttaaagtgctggcttctgatcaggatatgactattcaggttggtgcaaacgacggcgaaacaattactatta

SEQ ID NO: 783168 - DNA, 75 bp, synthetic construct
  source 1..75: mol_type = other DNA
gctgttgcaaatggtaaaaccacggatccgctgaaagcgctggacgatgctatcgcatctgtagacaaattccgt

SEQ ID NO: 783169 - DNA, 75 bp, synthetic construct
  source 1..75: mol_type = other DNA
aagtgactctgggtagttcaaccactgcgccaaatacagcaacagcagtaactaagaaccaagttgctggaacgc

SEQ ID NO: 783170 - DNA, 75 bp, synthetic construct
  source 1..75: mol_type = other DNA
gatcaatatatcaccagcgcactttctgtccctgggactggagaatgactgcagaaaatttttatccgcgttccc

SEQ ID NO: 783171 - DNA, 75 bp, synthetic construct
  source 1..75: mol_type = other DNA
ggacgacagcggcatacaaaaagaaagtcattcaaaaaaatacccgttctccctgatttataccatcccggtgaa

SEQ ID NO: 783172 - DNA, 75 bp, synthetic construct
  source 1..75: mol_type = other DNA
atcctttggctgctatcgataaagcactgtctcaggttgactcgttgcgttctaacctaggtgcaattcaaaacc

SEQ ID NO: 783173 - DNA, 75 bp, synthetic construct
  source 1..75: mol_type = other DNA
gcctgtcgctgttgactcagaacaacctgaacaaatctcagtcttccctgagctctgctatcgagcgtctgtcct

SEQ ID NO: 783174 - DNA, 75 bp, synthetic construct
  source 1..75: mol_type = other DNA
ctgttaaaaacaccttacaaaaacggtacggtcattaccgccacggattattattttattcaggacatcatctct

SEQ ID NO: 783175 - DNA, 75 bp, synthetic construct
  source 1..75: mol_type = other DNA
gcagaaatggcaccctggggcgtgcgcgtcaacgcggtcgcaccgggaatgattgaatcgaaaatggtgaaaaaa

SEQ ID NO: 783176 - DNA, 75 bp, synthetic construct
  source 1..75: mol_type = other DNA
tcgtgagctgacggttcaggcctctaccggtaccaactctgcttctgacctgtcttccatccaggacgaaatcaa

SEQ ID NO: 783177 - DNA, 75 bp, synthetic construct
  source 1..75: mol_type = other DNA
ccagcatgttcacacagttactcaactgaattatgaagttattcattaccctgtaaatctatatcatgagcctgt

SEQ ID NO: 783178 - DNA, 75 bp, synthetic construct
  source 1..75: mol_type = other DNA
gagtgaaagttctggctcaggataacaccctgaaaattcaagttggtgcaaatgataatgaaagcatttccatca

SEQ ID NO: 783179 - DNA, 75 bp, synthetic construct
  source 1..75: mol_type = other DNA
tcacatcagcggccaggatcagaagtggtggcctgctgctgccggtattgctgcatatggaagcaaccacgctgg

SEQ ID NO: 783180 - DNA, 75 bp, synthetic construct
  source 1..75: mol_type = other DNA
ctctcgatattttgatttgcttgctgcaggacaacatctgttgcgacaacgggattatcttcgataacgacgaag

SEQ ID NO: 783181 - DNA, 75 bp, synthetic construct
  source 1..75: mol_type = other DNA
ctctcgatattttgattcactggctgcaggacaatatcgattgcaacagtgagattattttcgacaacgatgaag

SEQ ID NO: 783182 - DNA, 75 bp, synthetic construct
  source 1..75: mol_type = other DNA
tctgggcggtggtggttttatgttaatccgctcgaaaaatggcaataccacggctatcgatttccgcgaaatggc

SEQ ID NO: 783183 - DNA, 60 bp, synthetic construct
  source 1..60: mol_type = other DNA
ctgactggcattaccccttctggggccgttttttgttttcccaaaacaacttttccataa

SEQ ID NO: 783184 - DNA, 75 bp, synthetic construct
  source 1..75: mol_type = other DNA
ggcgtgaaatttgcccttgatgattttggaaccgggtattcagttctttcgtatctgaaacacttcccgattagt

SEQ ID NO: 783185 - DNA, 75 bp, synthetic construct
  source 1..75: mol_type = other DNA
gaactgcacggcgaacagccacaggcggtgccaggacggcagggagcggggacggcgctggagaaccattttgcg

SEQ ID NO: 783186 - DNA, 75 bp, synthetic construct
  source 1..75: mol_type = other DNA
ccaaatgatactttggtctgtgaaaaaagaaaccgatatccggcgtggaagcattgtgttttcctgatgcatgtt

SEQ ID NO: 783187 - DNA, 75 bp, synthetic construct
  source 1..75: mol_type = other DNA
atgatactttggtctgtgaaaaaagaaaccgatatccgtcgtggaaggcattgtgttttcctgaggcatgttcac

SEQ ID NO: 783188 - DNA, 75 bp, synthetic construct
  source 1..75: mol_type = other DNA
gcgaagtactgattcgctggcatcaccccgtcagcgggattatcccaccagatcagtttatcccgctggcagagt

SEQ ID NO: 783189 - DNA, 75 bp, synthetic construct
  source 1..75: mol_type = other DNA
acacctggtgcaaccggaattgaaataaaagacaaaaatggaaatgcagttggtacgcttgatgtgccaatgatt

SEQ ID NO: 783190 - DNA, 75 bp, synthetic construct
  source 1..75: mol_type = other DNA
gcgggggaagttcaactgggaccgttataacccggcagaccaagacagttcgtgctggatccgtgtggcacaggc

SEQ ID NO: 783191 - DNA, 75 bp, synthetic construct
  source 1..75: mol_type = other DNA
atcctgaaaattcattcctcaataccttgctaatacaaacacgccgggcgctggcggccagtaccggcgtctttt

SEQ ID NO: 783192 - DNA, 75 bp, synthetic construct
  source 1..75: mol_type = other DNA
ttcaaggttattatgatggctatacaaaaggcattattgatgagatggataattttatacccttgataagcttgc

SEQ ID NO: 783193 - DNA, 75 bp, synthetic construct
  source 1..75: mol_type = other DNA
caaacccggcatcgctaactatcacaatatcatcacatgtggtttttcaacgttgttaccctatataaggcaaca

SEQ ID NO: 783194 - DNA, 75 bp, synthetic construct
  source 1..75: mol_type = other DNA
ttcttttatatcaatggctgtaatgtacattgcttgttacttatcagtcagtgatggtaacttgcctgtctcggc

SEQ ID NO: 783195 - DNA, 75 bp, synthetic construct
  source 1..75: mol_type = other DNA
tgagtcaatgctggaagcaacagaagatgatcgccatccggggtgtccggtatttgcctgcatgaaattaccgga

SEQ ID NO: 783196 - DNA, 75 bp, synthetic construct
  source 1..75: mol_type = other DNA
actcaataaaataaattctttctttcgctgcgaatactcaaatgttgatcagcgcccggtgcggcggcgggcttc

SEQ ID NO: 783197 - DNA, 75 bp, synthetic construct
  source 1..75: mol_type = other DNA
atgatccaattagttatattcatcctacaacgagtaagcttgaataatacacctattaacaatccggtgctgata

SEQ ID NO: 783198 - DNA, 75 bp, synthetic construct
  source 1..75: mol_type = other DNA
aatgaacatcttttttatggagcagtatttgaaagatctatgtcgaatgggtatagtaacggtgatgcttttgca

SEQ ID NO: 783199 - DNA, 75 bp, synthetic construct
  source 1..75: mol_type = other DNA
taatggggctgtaggtataactcctaaaatttcattctcagattttgagaataacaaagtagatttgaagcaaga

SEQ ID NO: 783200 - DNA, 75 bp, synthetic construct
  source 1..75: mol_type = other DNA
ttggtggcggggccgccatcgcaacggatggctcctttactgcaccaacttatcagattcagggcagtggccgct

SEQ ID NO: 783201 - DNA, 75 bp, synthetic construct
  source 1..75: mol_type = other DNA
tcaattgaaaatgtcactattgaaccacatggtaaggctacactgtctgattatagtgggagttttacttctgga

SEQ ID NO: 783202 - DNA, 75 bp, synthetic construct
  source 1..75: mol_type = other DNA
acaaattgtctttttatgaagaaaaaatccgctggcgaatgcgtcggcaaatctcgaatgcagaggcaatatttt

SEQ ID NO: 783203 - DNA, 75 bp, synthetic construct
  source 1..75: mol_type = other DNA
atgaataagtattggctgtcaggaattatttttctcgcctatggattggcgtctcccgcgttttcatcagatacc

SEQ ID NO: 783204 - DNA, 75 bp, synthetic construct
  source 1..75: mol_type = other DNA
atgatactttggtctttgaaaaaagaaaccgatatccgacgtggaaggcattgtgttttcctgaggcatgttcac

SEQ ID NO: 783205 - DNA, 75 bp, synthetic construct
  source 1..75: mol_type = other DNA
gaacaacatcgagggcgcaatgattgagcgatacggcgtcgaacagggtacggaaaaagccattgtgttttataa

SEQ ID NO: 783206 - DNA, 75 bp, synthetic construct
  source 1..75: mol_type = other DNA
cgctggcagagctacacgatggattcattgccgatctgaatgaaaacggcttgcctgaaatgccagcggcgcact

SEQ ID NO: 783207 - DNA, 75 bp, synthetic construct
  source 1..75: mol_type = other DNA
ccatcacggaggatgacggcaaatcgtcgctggtgacgttttattcaaatggcacggcggggattgtggtttacc

SEQ ID NO: 783208 - DNA, 75 bp, synthetic construct
  source 1..75: mol_type = other DNA
tgaatgacgtggcgcgggcagccagtcaggttcagacacttgcggagaaaaaccagcatcaggcgcaaattgagc

SEQ ID NO: 783209 - DNA, 75 bp, synthetic construct
  source 1..75: mol_type = other DNA
atgccatttgctcgttatttctgtattttcataaacgttggtttgggagaagcggcaaaacggggggtgggaaca

SEQ ID NO: 783210 - DNA, 75 bp, synthetic construct
  source 1..75: mol_type = other DNA
ccaacataactagagcattgtcagaacaacttattgatgctgtaggtgaccaacaatctggagttttgaaatggt

SEQ ID NO: 783211 - DNA, 75 bp, synthetic construct
  source 1..75: mol_type = other DNA
gcaagaagcctgttttacgctgttacagctatcgtaatttttcttgttggatggataattggcgttagaatgatt

SEQ ID NO: 783212 - DNA, 75 bp, synthetic construct
  source 1..75: mol_type = other DNA
tgttggtggaccaagtatgtgggatctatggaagtgtgctatgtgggtagatccaacaacagacgaagaaggcaa

SEQ ID NO: 783213 - DNA, 75 bp, synthetic construct
  source 1..75: mol_type = other DNA
tttattgatgatggcaactgtgatctttcagcttacatcaatttattacaaaaaatggggaggaggagagtcaga

SEQ ID NO: 783214 - DNA, 75 bp, synthetic construct
  source 1..75: mol_type = other DNA
aaaccaactatgggatgtacccgtgcacagaatgaagatgtagatgagttgtgtaagaaagtgacaagttggatg

SEQ ID NO: 783215 - DNA, 75 bp, synthetic construct
  source 1..75: mol_type = other DNA
gctggcggtgatgctggggaggctggagcgggaactgcgtgcgggtgcggtgagtgcggagagtgaggcatggct

SEQ ID NO: 783216 - DNA, 75 bp, synthetic construct
  source 1..75: mol_type = other DNA
cgtatcagcagccgttccttatacgggggaggggggctggccgcacaagcacgtgcagtatttccccggcaaaca

SEQ ID NO: 783217 - DNA, 75 bp, synthetic construct
  source 1..75: mol_type = other DNA
tcttactgttttcaattatttatttaggcgtgggcttgtattaaaaatgcatctgcaaacattcattccaagagc

SEQ ID NO: 783218 - DNA, 75 bp, synthetic construct
  source 1..75: mol_type = other DNA
ccctgacttaaaaaataactacactctgcaaaactgcctgaggaaagccaattatcacaacgaagctagagtgat

SEQ ID NO: 783219 - DNA, 75 bp, synthetic construct
  source 1..75: mol_type = other DNA
gcattatgaacacttcggtggctctgatgcagtcctcgcagatcggtttacataaatcgttgagggtcgggctgg

SEQ ID NO: 783220 - DNA, 75 bp, synthetic construct
  source 1..75: mol_type = other DNA
tgattgcccttagtactggatgtactactacgcacagcttcatggataaagcttacgttggctatgtagatgaca

SEQ ID NO: 783221 - DNA, 75 bp, synthetic construct
  source 1..75: mol_type = other DNA
atgatactttggtctatgaaaaaagaaaccgatatccggcgcggaaggcattgtgttttcctgaggcatgttcac

SEQ ID NO: 783222 - DNA, 75 bp, synthetic construct
  source 1..75: mol_type = other DNA
atgatactttggtctatgaaaaaagaaaccgatatccgccggggaaggcattgtgttttcctgaggcatgttcac

SEQ ID NO: 783223 - DNA, 75 bp, synthetic construct
  source 1..75: mol_type = other DNA
acgcttttagaacgaataaaaagggttacagaaaagaactcagaaggggtaaaaacaccagatgtagacctggat

SEQ ID NO: 783224 - DNA, 75 bp, synthetic construct
  source 1..75: mol_type = other DNA
ttcagtcggcagtgctacgcgccaggggagcagttcgccgacccggtttatcggccagtcggctatgacgtcaag

SEQ ID NO: 783225 - DNA, 75 bp, synthetic construct
  source 1..75: mol_type = other DNA
gaagacaatagtaagcgtgcagcaagaaccgtattgacggggatgtgttattcagtcggcagtgctacgcgccag

SEQ ID NO: 783226 - DNA, 75 bp, synthetic construct
  source 1..75: mol_type = other DNA
attatcctgatgcaagtgtacttgatatgggctgcggagcagggcatgccagctttgtcgctgcgcaaaacgtaa

SEQ ID NO: 783227 - DNA, 75 bp, synthetic construct
  source 1..75: mol_type = other DNA
tagtactgctaacaggctgtagtaacgtacatcactcattcatggataacgcttttgtcggcaatgttgataaca

SEQ ID NO: 783228 - DNA, 75 bp, synthetic construct
  source 1..75: mol_type = other DNA
ctaaataatgaagcatcttttgcagcacttgataactcgcccttcctggctgttgaaaaagactccgctgcataa

SEQ ID NO: 783229 - DNA, 75 bp, synthetic construct
  source 1..75: mol_type = other DNA
tgttcattgttctgctgacatttttctggaaaaaagcagagctggtgaatgacagccagatcagagctaatttcg

SEQ ID NO: 783230 - DNA, 75 bp, synthetic construct
  source 1..75: mol_type = other DNA
aggatctcctgcagaaatccgaagaagaagaaaaactgcagcaagaaaaagacaaagagctgattgcaaaagttc

SEQ ID NO: 783231 - DNA, 75 bp, synthetic construct
  source 1..75: mol_type = other DNA
agagtatgcgtttcgtttcgttgatctgtttgccgggattggcgggattcgtaagggattcgaagcgattggggg

SEQ ID NO: 783232 - DNA, 75 bp, synthetic construct
  source 1..75: mol_type = other DNA
aatggcttcactcttcgtgacgtcagtcgattttatcccgaacgacgtccatcgtttggtgagctactggagcca

SEQ ID NO: 783233 - DNA, 75 bp, synthetic construct
  source 1..75: mol_type = other DNA
aggcggtatcagtgaagttgatagcgaaaccgtggcttatcatttccacgaaccgttaggcgtggtggggcagat

SEQ ID NO: 783234 - DNA, 75 bp, synthetic construct
  source 1..75: mol_type = other DNA
gtctatctacgaacgctttatggaacgcgccatccgccgtgttgaaagtattcgtagcggtaacccgctcgacag

SEQ ID NO: 783235 - DNA, 75 bp, synthetic construct
  source 1..75: mol_type = other DNA
ctcgaactgttagcgacggctgaaacctgggataacggcaaacccattcgcgaaaccagtgctgctgatgtaccg

SEQ ID NO: 783236 - DNA, 75 bp, synthetic construct
  source 1..75: mol_type = other DNA
aaaaatgagtggagccgtgaaaccatcaaccgctggattaatggcaagtgtttaccaaaatcgttgacttcagta

SEQ ID NO: 783237 - DNA, 75 bp, synthetic construct
  source 1..75: mol_type = other DNA
gatcatgatgtccttctggccggttttccatgtcagccctttagtctggctggggtaagcaagaaaaattctctg

SEQ ID NO: 783238 - DNA, 75 bp, synthetic construct
  source 1..75: mol_type = other DNA
aaaaatgaatggagcagagaaacacttaaccgttggataaatggtaagtgtaaccctaaacaattaacttctgct

SEQ ID NO: 783239 - DNA, 75 bp, synthetic construct
  source 1..75: mol_type = other DNA
acagtgtgtttttaccagcgaatggaataaagaagcggtaagaacctacaaagctaattggtttaatgatgaact

SEQ ID NO: 783240 - DNA, 75 bp, synthetic construct
  source 1..75: mol_type = other DNA
gaagaaaatcaggcgcatcggccccgtaggctgactccacgagagtgcgcgcgccttatgggttttgaaaaagta

SEQ ID NO: 783241 - DNA, 75 bp, synthetic construct
  source 1..75: mol_type = other DNA
ttgccagcaacgttgcagaaaccatcccgcccattactccgatacccactgcgttctgcgcgccactgccggcac

SEQ ID NO: 783242 - DNA, 75 bp, synthetic construct
  source 1..75: mol_type = other DNA
atcttctttgctgatgtgatggatgaagaagatgcctttttcgataaagcgctggaaggctttgcactgtttgcc

SEQ ID NO: 783243 - DNA, 75 bp, synthetic construct
  source 1..75: mol_type = other DNA
tggcgacatgcggcaaacagtcgggtaaatcgtcgtccgtccacgcagtttctgggaccggacaacgacatgctg

SEQ ID NO: 783244 - DNA, 75 bp, synthetic construct
  source 1..75: mol_type = other DNA
cctgtcgctcaaacgggtggatgaatccctgtccgatatgttcggtgatctcagtgcgcaactgaataatctgca

SEQ ID NO: 783245 - DNA, 75 bp, synthetic construct
  source 1..75: mol_type = other DNA
ggaagtttaggaacattcactgcaacagctacaaccgccaaagcaactgcgttagatggcactgagcatagttat

SEQ ID NO: 783246 - DNA, 75 bp, synthetic construct
  source 1..75: mol_type = other DNA
agcaattcgcacgttattccggcgctgatgcgccgcttccatgaagcggtacagcaaaacgccgcggacgtggtg

SEQ ID NO: 783247 - DNA, 75 bp, synthetic construct
  source 1..75: mol_type = other DNA
ggacagccgcgccgtgcatgatttctttgccagcgaacgtattgaccaggtctatctggcggccgcgaaagtggg

SEQ ID NO: 783248 - DNA, 75 bp, synthetic construct
  source 1..75: mol_type = other DNA
tggcgacatgcggcaaacagtcgggtaaaccgacgtccgtccacgcagtttctgggaccggaaaacgacatgctg

SEQ ID NO: 783249 - DNA, 75 bp, synthetic construct
  source 1..75: mol_type = other DNA
cgtgacgcaaatgggcgcgcaggtttctcacgggcaactggaaaccatcctcaattacattgatatcggtaaaaa

SEQ ID NO: 783250 - DNA, 75 bp, synthetic construct
  source 1..75: mol_type = other DNA
aagaagatgctttcttcgacaaggcgctggagggctttgcattgttcgccttcaaccagggcgaagtctgtacct

SEQ ID NO: 783251 - DNA, 75 bp, synthetic construct
  source 1..75: mol_type = other DNA
cgacctcaaaacgcattgctaaagtggcatttaccggctcaacggaagtcggtcagcagattatgcagtacgcta

SEQ ID NO: 783252 - DNA, 75 bp, synthetic construct
  source 1..75: mol_type = other DNA
agtgaagtcaccgccattgccaaagatccgagtggtaatgaaagtgacccgtcaaccgtgacctcaaaaactgat

SEQ ID NO: 783253 - DNA, 75 bp, synthetic construct
  source 1..75: mol_type = other DNA
agattaagcccggcgagtatggcttccccctcaagttaaaagcccgctacgacaactttattggcggcgaatggg

SEQ ID NO: 783254 - DNA, 75 bp, synthetic construct
  source 1..75: mol_type = other DNA
gccgccgggcgtggtgaacgtggtcaacggcgcaggtggggaaattggcgaatatctggcgacctcgaaacgcat

SEQ ID NO: 783255 - DNA, 75 bp, synthetic construct
  source 1..75: mol_type = other DNA
gtggatgtcacctttgaagatgaaaagggtgctaatcacaccgtgacgctggagaacggagataacggctggaca

SEQ ID NO: 783256 - DNA, 75 bp, synthetic construct
  source 1..75: mol_type = other DNA
tcaggggcgtatcccgcaaatcatggataacctgctggctgaagggaaaattaaaccgatgctggtggtgatccc

SEQ ID NO: 783257 - DNA, 75 bp, synthetic construct
  source 1..75: mol_type = other DNA
ttaagacgcaagatgcgaaaagcagctatggacagagactacctcgcgtcagtccttgcggggagcgggctttcg

SEQ ID NO: 783258 - DNA, 75 bp, synthetic construct
  source 1..75: mol_type = other DNA
aagaaatccgtcttcatattgtttgcgatgtccctgatgaacttattgatttcacgtttgaatggaaagggctga

SEQ ID NO: 783259 - DNA, 75 bp, synthetic construct
  source 1..75: mol_type = other DNA
gatgacggtctggtataccgcgctggtggtggcgggcagcaccgtgctcgggctggcagtggcgatgtttttcaa

SEQ ID NO: 783260 - DNA, 75 bp, synthetic construct
  source 1..75: mol_type = other DNA
gataacctgctggctgaagggaaaattaaaccgatgcgaagggcattattcccgaagatttcgtgcctcaggaaa

SEQ ID NO: 783261 - DNA, 75 bp, synthetic construct
  source 1..75: mol_type = other DNA
gtgctctatttctatcacggctttggtgataccggacgttccgctatcgatcaggggcgtatcccgcaaatcatg

SEQ ID NO: 783262 - DNA, 75 bp, synthetic construct
  source 1..75: mol_type = other DNA
acctcagcatttagtacagcctttgcaccactagccccactctttgactctatcggtaatgctgtcggtggcgtc

SEQ ID NO: 783263 - DNA, 75 bp, synthetic construct
  source 1..75: mol_type = other DNA
ctccattagccccaatctttgacgcgataggctccgctattagcggcgtttgggattggtttacaaaattgcttg

SEQ ID NO: 783264 - DNA, 75 bp, synthetic construct
  source 1..75: mol_type = other DNA
gacgctcggcacccctgccgaagttgccgccagcgccaccaatgcaatggtgcgcgaactctcaatcgctacggt

SEQ ID NO: 783265 - DNA, 75 bp, synthetic construct
  source 1..75: mol_type = other DNA
cgcagaaaagttcgccacagcaatccgaaaccactggcacgtggagaataagctgcactggcgtctggacgtggt

SEQ ID NO: 783266 - DNA, 75 bp, synthetic construct
  source 1..75: mol_type = other DNA
gttaagacgtaagatgcgaaaagcagccatgggcagaaactacctggcgtcagtccttacggggagcgggctttc

SEQ ID NO: 783267 - DNA, 75 bp, synthetic construct
  source 1..75: mol_type = other DNA
cagttgcgtgacgtgacgcaatggcaaaaaagttcatcgttgaagctattgagtagtagcaactcacgttcccag

SEQ ID NO: 783268 - DNA, 75 bp, synthetic construct
  source 1..75: mol_type = other DNA
agatcttggtagtggtatgaaggatgcctctaatatgccagaggagtatctctctgtttatcaggatggaacaga

SEQ ID NO: 783269 - DNA, 75 bp, synthetic construct
  source 1..75: mol_type = other DNA
gtggatgtcacctttgaagatgaaaagggtgataaccacaccgtgacgctggagaacggtgataacggctggaca

SEQ ID NO: 783270 - DNA, 75 bp, synthetic construct
  source 1..75: mol_type = other DNA
gtggatgtcacctttgaagatgaaaagggtgataatcacaccgtgacgctggagaacggcgataacggctggaca

SEQ ID NO: 783271 - DNA, 75 bp, synthetic construct
  source 1..75: mol_type = other DNA
atggtaacaacagattacaatgatacggtttatgttggctattaccagagtggtaaagaaacaacatcgtacagt

SEQ ID NO: 783272 - DNA, 75 bp, synthetic construct
  source 1..75: mol_type = other DNA
gtggatgtcacctttgaagatgaaaagggtgctaaacacaccgtgacgctggagaacggtgataacggctggaca

SEQ ID NO: 783273 - DNA, 75 bp, synthetic construct
  source 1..75: mol_type = other DNA
gtggatgtcacctttgaagatgaaaagggtgttaaccacaccgtgacgctggagaacggagataacggctggaca

SEQ ID NO: 783274 - DNA, 75 bp, synthetic construct
  source 1..75: mol_type = other DNA
gtggatgtcacctttgaagatgaaaagggtgttaaacacaccgtgacgctggagaacggcgataacggctggaca

SEQ ID NO: 783275 - DNA, 75 bp, synthetic construct
  source 1..75: mol_type = other DNA
gatatgactgttggcagcgatctgaaagctggcaatacagctcagttagtcaagttaacggcatcggatgtattg

SEQ ID NO: 783276 - DNA, 75 bp, synthetic construct
  source 1..75: mol_type = other DNA
cggtgagtattccgtgacagcggaaatcacagacccggcaggcaacaccagtggtcagggtcaggcggctgagtt

SEQ ID NO: 783277 - DNA, 75 bp, synthetic construct
  source 1..75: mol_type = other DNA
atgccgaagaactgaaggatggcgtacaggcagaagtcacgttgccggcaggaacagtggaaggtgcggtcatta

SEQ ID NO: 783278 - DNA, 75 bp, synthetic construct
  source 1..75: mol_type = other DNA
gaatactgcattacgtgttatgtatgcgggtagttatatctttactgagtctggcgatgatattgttacgatcaa

SEQ ID NO: 783279 - DNA, 75 bp, synthetic construct
  source 1..75: mol_type = other DNA
tttatcttggttcaggtagtgatacatttatccagggggatgctactgacaataacgatacaacattatctggtt

SEQ ID NO: 783280 - DNA, 75 bp, synthetic construct
  source 1..75: mol_type = other DNA
ttcccgcaactattgaagataaggatgattccactggactggtttatacggtttctctgaatcatgtcactacaa

SEQ ID NO: 783281 - DNA, 75 bp, synthetic construct
  source 1..75: mol_type = other DNA
cgcgacgacagaagcaactacctcggatcacgaaaaaagaaaaacggcagaagacggctcttcagacattcccac

SEQ ID NO: 783282 - DNA, 75 bp, synthetic construct
  source 1..75: mol_type = other DNA
atctatcaaatcagaatcacacagtaagcacaaacatgataataacgacagtgatgattcagataattctgaatc

SEQ ID NO: 783283 - DNA, 75 bp, synthetic construct
  source 1..75: mol_type = other DNA
gatttcatggatgaatattggcctgtcattgagaaaccaatttcattattaaaagaacatggtatcgatgtggcc

SEQ ID NO: 783284 - DNA, 75 bp, synthetic construct
  source 1..75: mol_type = other DNA
agtgcggccaatattgtccgctatgcggaaattgtggtggagcgaagccgcgcacggggtctgatgatgctgggg

SEQ ID NO: 783285 - DNA, 75 bp, synthetic construct
  source 1..75: mol_type = other DNA
gcgctggatggtctgaccggtacgccaaccggtttcagtcaactggacgagatgacctgcggccttcagccgggc

SEQ ID NO: 783286 - DNA, 75 bp, synthetic construct
  source 1..75: mol_type = other DNA
tacgcaaatcatgccctggtaacgagcgttgatagtcttggttcatctgtagttactgaactatctcgtatcatt

SEQ ID NO: 783287 - DNA, 75 bp, synthetic construct
  source 1..75: mol_type = other DNA
gaaagaaaatcattcattctatgttttgccaatagtattaacgcaagatttttcaggagaagaaactgataaaga

SEQ ID NO: 783288 - DNA, 75 bp, synthetic construct
  source 1..75: mol_type = other DNA
gccgcagcaaataacagggcgttcgcagaacgccttgttggtgtttacagactagccaaagcaggagtgaaacat

SEQ ID NO: 783289 - DNA, 75 bp, synthetic construct
  source 1..75: mol_type = other DNA
gccgcagcaaataacagggcgttcgcagagcgccttgttggtgtttacagactagccaaagcaggagtgaagcat

SEQ ID NO: 783290 - DNA, 75 bp, synthetic construct
  source 1..75: mol_type = other DNA
atgtctaaaaaacgttccatcaaagaggttcaggacttccgtgacagtgtaaaacgagtagtcgctctcctttca

SEQ ID NO: 783291 - DNA, 75 bp, synthetic construct
  source 1..75: mol_type = other DNA
ggccgggattgatatagaagcggtgctttctatggctctgctgccgtcagtgtcaccgcagaacgggagccattc

SEQ ID NO: 783292 - DNA, 75 bp, synthetic construct
  source 1..75: mol_type = other DNA
ggtgctgccgtgtggggcaaagccggactgaatattgaatgcggcgattgcgagctggctttcatcgaaaattaa

SEQ ID NO: 783293 - DNA, 75 bp, synthetic construct
  source 1..75: mol_type = other DNA
ggataaccggtacgccaacggggttccgtgaactggatgaaaaaacctgtggtttgcaggcgggtgatttggtgt

SEQ ID NO: 783294 - DNA, 75 bp, synthetic construct
  source 1..75: mol_type = other DNA
cagctacgatatgctgaacgaggaacaatattatcagttctttctcagtgtgctggacgtttatggttttgccgt

SEQ ID NO: 783295 - DNA, 75 bp, synthetic construct
  source 1..75: mol_type = other DNA
ctttttttttagtctcatgtgcaactcatacatataaggaaagtcaaaaaaatattaatgtgaatttaaaagaaa

SEQ ID NO: 783296 - DNA, 75 bp, synthetic construct
  source 1..75: mol_type = other DNA
tgttatttgtctcatcctgtacaacaaaacagtatcaaaggagtgaacataatattaatagtaatgttaatgaaa

SEQ ID NO: 783297 - DNA, 75 bp, synthetic construct
  source 1..75: mol_type = other DNA
caactgactgtattggttgtcgtacttgcgaagtggcttgcgtggtcgcccatccgttagaacaggagttgaatg

SEQ ID NO: 783298 - DNA, 75 bp, synthetic construct
  source 1..75: mol_type = other DNA
acacaggcgctgcagttgcttactgaaagagaactcaggcgagtccgccagcagcgtattgttgccagcggtgag

SEQ ID NO: 783299 - DNA, 75 bp, synthetic construct
  source 1..75: mol_type = other DNA
taatacgaaggtaatttacctgaaatatgcgaaggcaaaggatttagtggaagtcctgacgggcatcagcagcaa

SEQ ID NO: 783300 - DNA, 75 bp, synthetic construct
  source 1..75: mol_type = other DNA
cagttgatgctgaacaggccgtgcttggcggcctgatgcttgataatgatcgctgggatgaagtggtgctgatgc

SEQ ID NO: 783301 - DNA, 75 bp, synthetic construct
  source 1..75: mol_type = other DNA
ctgcgtgcccgcgcccgtcgctatgtccgaaaatacggcagaccctctctcatcatgctggactatctgcagctt

SEQ ID NO: 783302 - DNA, 75 bp, synthetic construct
  source 1..75: mol_type = other DNA
atcggcacaataaaggtgcaatatcaggcggagattacccgttttgaggattttacaggaggtcgctatgacttc

SEQ ID NO: 783303 - DNA, 75 bp, synthetic construct
  source 1..75: mol_type = other DNA
agtacccgtcggacaaaggacacatagacgacggtaaaaactatctcgacgtcattttgtggaatatgaacgtcg

SEQ ID NO: 783304 - DNA, 75 bp, synthetic construct
  source 1..75: mol_type = other DNA
gacaactggctattgattatgaagagcaaggccgccgtgtgcgttatgacttcgccctgccgggtgaagcaaacg

SEQ ID NO: 783305 - DNA, 75 bp, synthetic construct
  source 1..75: mol_type = other DNA
atgtcagagctggcaatcagcggtcagccgttcgacctcatcactctgagtgagcatattgagaaaacgcacaat

SEQ ID NO: 783306 - DNA, 75 bp, synthetic construct
  source 1..75: mol_type = other DNA
catgtcgaatggggattcattgaaaaatatggcgaagctgaaggcatggggcgagttctgtttctctatcaaaaa

SEQ ID NO: 783307 - DNA, 75 bp, synthetic construct
  source 1..75: mol_type = other DNA
actaaaacggagtttttccgcgatggtatgccgcgccggcttgagttcaccctgtcgctcaaacgggtggatgaa

SEQ ID NO: 783308 - DNA, 75 bp, synthetic construct
  source 1..75: mol_type = other DNA
tccctgcccgatatgttcggtgatctcagtgcgcaactgaataatctgcagggaacggcaacatctgccttaagc

SEQ ID NO: 783309 - DNA, 75 bp, synthetic construct
  source 1..75: mol_type = other DNA
tgtttatgctgcgcaccgtgccgtatcaggaactgcagtatcagcgcagctggcgacatgtggctaacagccggg

SEQ ID NO: 783310 - DNA, 75 bp, synthetic construct
  source 1..75: mol_type = other DNA
cggtcggtgagttgcaaaagcagcttgggatacctggctccacactcagccaccatatatcagcactggtatcgg

SEQ ID NO: 783311 - DNA, 75 bp, synthetic construct
  source 1..75: mol_type = other DNA
atagtacaccaattaaagtttattgtttgccagatgaaaaagcgcaaatccaggaaaatgcagaagcatctggct

SEQ ID NO: 783312 - DNA, 75 bp, synthetic construct
  source 1..75: mol_type = other DNA
agataacgggcggcaggctgtcgttgctggcactggagcagatggcagaacaggggaaagcatggcccctgattg

SEQ ID NO: 783313 - DNA, 75 bp, synthetic construct
  source 1..75: mol_type = other DNA
acactatccggggtgctgttaccggaaatcaccggcggcaggctgtctatgctggcgctggaacagatggcggag

SEQ ID NO: 783314 - DNA, 75 bp, synthetic construct
  source 1..75: mol_type = other DNA
aaggcagcggaaccatttacggcatgtttgttattgagagtctgagccagacaaagacggagttttttgccagtg

SEQ ID NO: 783315 - DNA, 75 bp, synthetic construct
  source 1..75: mol_type = other DNA
gtgtggggcagcggtacgccgatgcgcgaatttctacacgttgatgatatggcagcggcgagcattcatgtgatg

SEQ ID NO: 783316 - DNA, 75 bp, synthetic construct
  source 1..75: mol_type = other DNA
agcttggcattccctcatcaacgttaagtcatcatatttcagccctggtatcagtagggctcgtcacacaaaacc

SEQ ID NO: 783317 - DNA, 75 bp, synthetic construct
  source 1..75: mol_type = other DNA
ggcgcttttatctccggcagtgtgtctggttacgccataacttttaacgccaagattattggccgttttggggat

SEQ ID NO: 783318 - DNA, 75 bp, synthetic construct
  source 1..75: mol_type = other DNA
cggcttatgggcagcactggaccagtaatgaactgcgtaagaaaggcgtatttatctccggcagaaaaaaatctg

SEQ ID NO: 783319 - DNA, 75 bp, synthetic construct
  source 1..75: mol_type = other DNA
tttgatgacgtggttaagttgcttgagtttgatacaaccactcagaagttcgaaagcccagcaaaggaggcagcc

SEQ ID NO: 783320 - DNA, 75 bp, synthetic construct
  source 1..75: mol_type = other DNA
taatcgatgctgaccacgaacacattgctatcaaagaagcaaacaacctgggtattccggtatttgctatcgttg

SEQ ID NO: 783321 - DNA, 75 bp, synthetic construct
  source 1..75: mol_type = other DNA
ccacgaacacattgctatcaaagaagcaaacaacctgggtattcctgtatttgctatcgttgataccaactctga

SEQ ID NO: 783322 - DNA, 75 bp, synthetic construct
  source 1..75: mol_type = other DNA
gcgcgggattgatgcgggacgtaccctgctttcagggcaggatggtacaagtttttctcattacggaggtaattt

SEQ ID NO: 783323 - DNA, 75 bp, synthetic construct
  source 1..75: mol_type = other DNA
aagttacgccacacggtataaaaattggcaatacaaccatagattatgccgaggccgtacagcgacttaatgatg

SEQ ID NO: 783324 - DNA, 75 bp, synthetic construct
  source 1..75: mol_type = other DNA
gattcattgtctctgctatggggcgcgaagggtttgaattacttctggatgaaattattcacgatctgaatactc

SEQ ID NO: 783325 - DNA, 75 bp, synthetic construct
  source 1..75: mol_type = other DNA
agattgcttcttgcaaaggtaaaatccttttcgttggtactaaacgtgctgcaagcgaagcggtgaaagacgctg

SEQ ID NO: 783326 - DNA, 75 bp, synthetic construct
  source 1..75: mol_type = other DNA
aaacttacggtacgctgacaggcgacaccggactgatcaaacgtctggtgcaggttgaccagaaaccgataggcc

SEQ ID NO: 783327 - DNA, 75 bp, synthetic construct
  source 1..75: mol_type = other DNA
ctgatgaggaaacgcgtctccagttttatggaaggtaaactgtgtcctgtctgccacggaaaaaggcttaaaccg

SEQ ID NO: 783328 - DNA, 75 bp, synthetic construct
  source 1..75: mol_type = other DNA
atgacaatcacaaaacaacgtgtagaagaaatcatatcccgtattgaaatgtatgggcatggtgctgggtataca

SEQ ID NO: 783329 - DNA, 75 bp, synthetic construct
  source 1..75: mol_type = other DNA
taaacaaggctggtaacgccgttcagcgttccggcgataaaatgaccggagaactgaaaattggaacgatgaatg

SEQ ID NO: 783330 - DNA, 75 bp, synthetic construct
  source 1..75: mol_type = other DNA
caaactggcaaaagcctaccccgccaataaattaccggatttacggggagaatttattcgcggctgggatgatgg

SEQ ID NO: 783331 - DNA, 75 bp, synthetic construct
  source 1..75: mol_type = other DNA
cacccgcccaggtatcacaggtttgtgaaagccgcacggcaccgtttattgcccgggagttgtcacggaactggt

SEQ ID NO: 783332 - DNA, 75 bp, synthetic construct
  source 1..75: mol_type = other DNA
tgccgctgtatgacacgccgctttccggggttaaccgcctgataaaacgtgcggaagacattgtgctggcgacgc

SEQ ID NO: 783333 - DNA, 75 bp, synthetic construct
  source 1..75: mol_type = other DNA
tgatggagagcttccgtaatcagccgtggttagggtttgaagtggtgggcgtttaccacgacccgaaactgggcg

SEQ ID NO: 783334 - DNA, 75 bp, synthetic construct
  source 1..75: mol_type = other DNA
tgccgctgtatgacacgccgctttccggggttaaccgcctgctcaaacgtgcggaagacattgtgctggcgacgc

SEQ ID NO: 783335 - DNA, 75 bp, synthetic construct
  source 1..75: mol_type = other DNA
gattttcagcgccggactggtggcgttcaataatgatttcgacacgcaactgaaaatctggctagcgtggtatac

SEQ ID NO: 783336 - DNA, 75 bp, synthetic construct
  source 1..75: mol_type = other DNA
cttcaacattctccattcacgtctcgaagagatgaacggcgttccggtggtgccgctttacgacacgccgctttc

SEQ ID NO: 783337 - DNA, 75 bp, synthetic construct
  source 1..75: mol_type = other DNA
aaactgagctcaccggggccggttattttccgccagactcgctacggcatggacggcaagccgatcaaagtgtgg

SEQ ID NO: 783338 - DNA, 75 bp, synthetic construct
  source 1..75: mol_type = other DNA
gttcggcttcctgataaaggtcgttgaatggtggcagaacggaggcgagcggggaacatttcaacttgaaattgg

SEQ ID NO: 783339 - DNA, 75 bp, synthetic construct
  source 1..75: mol_type = other DNA
attctggtgccaggcagttatctggatacgcgttctgttgcgcatggtgatttgatcaccataacttaccactcc

SEQ ID NO: 783340 - DNA, 75 bp, synthetic construct
  source 1..75: mol_type = other DNA
caggaatatccgggtctgaaccatgaaatggatgtctggcggcctgcctatgcagccttcgtacagaaattaggt

SEQ ID NO: 783341 - DNA, 75 bp, synthetic construct
  source 1..75: mol_type = other DNA
tgattgctgatgcccgcccggtcagccgccacatgacagggctgaatatcattcaggagattcagggagatattt

SEQ ID NO: 783342 - DNA, 75 bp, synthetic construct
  source 1..75: mol_type = other DNA
ttgccttatctggcatgggcgttttccgttgaccgctgggatgaaaactggccagccgataccaagcggcaggtg

SEQ ID NO: 783343 - DNA, 75 bp, synthetic construct
  source 1..75: mol_type = other DNA
gctccctgctccccaacaatgccagctcgctggagcagaatctggcgcaaaccggcagtctgactgaacaaatgc

SEQ ID NO: 783344 - DNA, 75 bp, synthetic construct
  source 1..75: mol_type = other DNA
gtggccaaaaattgaggcatttattacctggctaagagagcaggtatgtcagtcttgtcagtaactgagataccg

SEQ ID NO: 783345 - DNA, 75 bp, synthetic construct
  source 1..75: mol_type = other DNA
gtgagaatggtgcagcattaagtgtgctaataactgaggtttttgtgacgattgcaatgcttattgttgtgcttg

SEQ ID NO: 783346 - DNA, 75 bp, synthetic construct
  source 1..75: mol_type = other DNA
tgtattaggcattcagacaatgcttactttgggttataaaagagagttttttttaatattattaatatctagttt

SEQ ID NO: 783347 - DNA, 75 bp, synthetic construct
  source 1..75: mol_type = other DNA
ttttttcattactttgtgtacaaggtgtaagttatttaattcctttaataactttaccgtatttagttaaaacat

SEQ ID NO: 783348 - DNA, 75 bp, synthetic construct
  source 1..75: mol_type = other DNA
ggtgatgctcgctggggttgttctgacctggctggcgtcgccagaaagccgcggcaattcagcattgcgcgtcta

SEQ ID NO: 783349 - DNA, 75 bp, synthetic construct
  source 1..75: mol_type = other DNA
gtatgctgcgggcaatatcggttctatcgccgcccccatcgcctgcggcctggctgctcagtggtatggatggca

SEQ ID NO: 783350 - DNA, 75 bp, synthetic construct
  source 1..75: mol_type = other DNA
agcctgtatctggcgctggcaatcattatttgtggctacggtttattcaaatcaaacatcagctgtttgcttggc

SEQ ID NO: 783351 - DNA, 75 bp, synthetic construct
  source 1..75: mol_type = other DNA
aatttgccgacatcttctggaattggctttgatcgttctgatttagctgttatcgccgcgatgaatcatattggg

SEQ ID NO: 783352 - DNA, 75 bp, synthetic construct
  source 1..75: mol_type = other DNA
gtggccaaaaattgaggcatttattacctggctaagagagcaggtatgtcagtcttgtcagtaccagtgataccg

SEQ ID NO: 783353 - DNA, 75 bp, synthetic construct
  source 1..75: mol_type = other DNA
gtggccaaaaattgaggcatttattacctggctaagagagcaggtatgtcagtcttgtcagtatcagcgataccg

SEQ ID NO: 783354 - DNA, 75 bp, synthetic construct
  source 1..75: mol_type = other DNA
gaagacaaggcaacggtagaccagagcgggaacgttactggtgtagaagttggcactgcgacgattgagatcgtt

SEQ ID NO: 783355 - DNA, 75 bp, synthetic construct
  source 1..75: mol_type = other DNA
tgaatgccgtaatggcaattgctgattatctcggtgtgaaaaatcaaatcgaggtgatcgaatactcagccgaat

SEQ ID NO: 783356 - DNA, 75 bp, synthetic construct
  source 1..75: mol_type = other DNA
ggcgatctactttgatgatgcgccgtcagcgcaattggctcatcactttctgatggatgaagaaatcttgccagt

SEQ ID NO: 783357 - DNA, 75 bp, synthetic construct
  source 1..75: mol_type = other DNA
tcagcgtcaggttaactccagtatgattctggtaccgggcagttatctggatacacgttctgttgtgcatggtga

SEQ ID NO: 783358 - DNA, 75 bp, synthetic construct
  source 1..75: mol_type = other DNA
acgtaccgcagtcagtgaaccgttgttccccaactacctgtttgtagaattcgatccagaagtgattcataccac

SEQ ID NO: 783359 - DNA, 75 bp, synthetic construct
  source 1..75: mol_type = other DNA
acggcgaggctcgctccatgctgttacttaatcttatcaataaagagattaagcacagtgtgaagaacaccgagt

SEQ ID NO: 783360 - DNA, 75 bp, synthetic construct
  source 1..75: mol_type = other DNA
atgcaaaccatcgaaaatgctgcggtctgggcgcaaattggcgacaagatggtgacggtggggaatattcgggcc

SEQ ID NO: 783361 - DNA, 75 bp, synthetic construct
  source 1..75: mol_type = other DNA
ggttctcgtgactattgtggcgctgatttgtacgattatccttgtttcgtttcagcgttgggtcgtgcgcaggac

SEQ ID NO: 783362 - DNA, 75 bp, synthetic construct
  source 1..75: mol_type = other DNA
ccaggctcggatgtcattattcatcaggacccttgttccgtcgtgcccagggaaggtaaacggtttgagctatca

SEQ ID NO: 783363 - DNA, 75 bp, synthetic construct
  source 1..75: mol_type = other DNA
tttcaggccatttttaccgagccagacggtgaagcgcgttccatgctactccttaatctgatcaataaagagatt

SEQ ID NO: 783364 - DNA, 75 bp, synthetic construct
  source 1..75: mol_type = other DNA
gtgcacatggtcagccatccaggaaatccaaagtatccggttgattttaaagctattgctgaggccgctgcggaa

SEQ ID NO: 783365 - DNA, 75 bp, synthetic construct
  source 1..75: mol_type = other DNA
tagcacattaagtgattacattgcccaggccaaacaaaagggcattaaactttttgcgatcaccgatcatggccc

SEQ ID NO: 783366 - DNA, 75 bp, synthetic construct
  source 1..75: mol_type = other DNA
tagcacattaagtgattacattgcccaggccaaacagaaaggcattaaactttttgcgatcaccgatcatggccc

SEQ ID NO: 783367 - DNA, 75 bp, synthetic construct
  source 1..75: mol_type = other DNA
caattttgcataaactgaaagacaggttaaatcaaacctggtatcagatccgtattggcgatcggctggcctata

SEQ ID NO: 783368 - DNA, 75 bp, synthetic construct
  source 1..75: mol_type = other DNA
tttttgtttagtgtctactcatctgacggcatttgcatcagcagtttgcgtaccgtgccgaagcgtgccatgtaa

SEQ ID NO: 783369 - DNA, 75 bp, synthetic construct
  source 1..75: mol_type = other DNA
ttttggctttggtaaagggtttatcgataaaggtcatctcgagccggttcaggggcgacaaaaagttgaagacgg

SEQ ID NO: 783370 - DNA, 75 bp, synthetic construct
  source 1..75: mol_type = other DNA
actggccgttgcgttacacaatattcctgaaggtctggcggttgcaggcccggtttacgcggcaacggggtctaa

SEQ ID NO: 783371 - DNA, 75 bp, synthetic construct
  source 1..75: mol_type = other DNA
gcggtgatatcaccgttaccagcgaacagggtaaaggttcgatcttcactctgacaatccacgcgccgtcagtag

SEQ ID NO: 783372 - DNA, 75 bp, synthetic construct
  source 1..75: mol_type = other DNA
atcgtcggcctgagccgcattctgctggataccgaactcaccgccgagcaggaaaaatatctcaagaccatccat

SEQ ID NO: 783373 - DNA, 75 bp, synthetic construct
  source 1..75: mol_type = other DNA
tgatgggctttggtcgcgacattaccgagcgtaagcggtatcaggatgcgcttgaacgcgccagccgcgacaaaa

SEQ ID NO: 783374 - DNA, 75 bp, synthetic construct
  source 1..75: mol_type = other DNA
gagtcgaacctgacggcgcaggataaaaaaggcatcgtcgaggaagggcataaaattaaaggcgcggcgggttca

SEQ ID NO: 783375 - DNA, 75 bp, synthetic construct
  source 1..75: mol_type = other DNA
tcctatgctggaacagtatctcgaacttgtagggccgaagctgatcactgacgggttagcggtgtttgagaaaat

SEQ ID NO: 783376 - DNA, 75 bp, synthetic construct
  source 1..75: mol_type = other DNA
tgaaatccgtaaagtgccgtactacgaccgcgtgggtaaacgccacggtttgatgggctttggtcgcgacattac

SEQ ID NO: 783377 - DNA, 75 bp, synthetic construct
  source 1..75: mol_type = other DNA
ccattctgctcactctcggcatcagtctgcataacttcccggaagggattgccacctttgtcacggcgagcagca

SEQ ID NO: 783378 - DNA, 75 bp, synthetic construct
  source 1..75: mol_type = other DNA
gtgttctgcgaaggacgactgacgcaaatcctgacgaatcgcgatgacatgagcgaagaggagattatggcatgg

SEQ ID NO: 783379 - DNA, 75 bp, synthetic construct
  source 1..75: mol_type = other DNA
atgttgggtggagcggacaatccaaatggtgaattactgtcttatatcattggcgctgacacggctaaaccgtca

SEQ ID NO: 783380 - DNA, 75 bp, synthetic construct
  source 1..75: mol_type = other DNA
gcattgctcgatattcccatgctggaacagtatctcgaacttgtaggaccgaagctgatcaccgacgggttagcg

SEQ ID NO: 783381 - DNA, 75 bp, synthetic construct
  source 1..75: mol_type = other DNA
acctggtgttgctggatattcagttgccagatatgaccgggctggatatctctcgtgaactgacgaagcgttatc

SEQ ID NO: 783382 - DNA, 75 bp, synthetic construct
  source 1..75: mol_type = other DNA
ttcgccatgtattaccaggtgaaagacagtcatggcggtaaacctgccaccggcaccggtattggtctggccgtt

SEQ ID NO: 783383 - DNA, 75 bp, synthetic construct
  source 1..75: mol_type = other DNA
aagaggtgactggtgtggcttctggagtaacgaggatgtatcggtgtggtggaaccgtctgtgtgacaacgtact

SEQ ID NO: 783384 - DNA, 75 bp, synthetic construct
  source 1..75: mol_type = other DNA
cagtatggcgtgaagtggcctgtggggtatgaggtgaatatcagcagtcagggagacaacttcattcaggtggat

SEQ ID NO: 783385 - DNA, 75 bp, synthetic construct
  source 1..75: mol_type = other DNA
gcggtactggacagcgtcgctgggaagggttaccggatgatgtcagggaaagcatcaccgcacttttcaccccaa

SEQ ID NO: 783386 - DNA, 75 bp, synthetic construct
  source 1..75: mol_type = other DNA
atgccaaactggtgctcgaatcgtatggatttttctggtgaaccggcacagattgctgagattaaacgactggcc

SEQ ID NO: 783387 - DNA, 75 bp, synthetic construct
  source 1..75: mol_type = other DNA
gatcgctgagattaaacgactggccagcggcgcagtcacaccgctttatcgccgcgccacaaatgaaggtattca

SEQ ID NO: 783388 - DNA, 75 bp, synthetic construct
  source 1..75: mol_type = other DNA
cgacagatgacgatgagctgccggaagtcaccggacctgcgtggatagtcgacaatgtggcgcattacggtggat

SEQ ID NO: 783389 - DNA, 75 bp, synthetic construct
  source 1..75: mol_type = other DNA
gtggggggagctggaatggtcacatccgacagatgatgacgagttgccggaagtcaccggacctgcgtggatagt

SEQ ID NO: 783390 - DNA, 75 bp, synthetic construct
  source 1..75: mol_type = other DNA
acagatgacgatgagctgccggaagtcaccggacctgcgtggatagtcgacaatgtggcgcattatggcggatga

SEQ ID NO: 783391 - DNA, 75 bp, synthetic construct
  source 1..75: mol_type = other DNA
tgctgcgtcgcttccacgaggcgacagcacagaatgcaccggacgtggtggtgtggggcagcggtacgccgatgc

SEQ ID NO: 783392 - DNA, 75 bp, synthetic construct
  source 1..75: mol_type = other DNA
accatcactgtgcatttcaccgccaaaagaggtgactggtgtgacatctggggtagcgaggatgtatcggtgtgg

SEQ ID NO: 783393 - DNA, 75 bp, synthetic construct
  source 1..75: mol_type = other DNA
cactggtacgccgaacagggctgcaatttctgtggctggcagttgtatgagcgcggagagcttgttgatgtgctg

SEQ ID NO: 783394 - DNA, 75 bp, synthetic construct
  source 1..75: mol_type = other DNA
aatggtcttccccgacagatgacgatgagctgccggaagtcaccggacctgcgtggatagtcgacaatgtggcgc

SEQ ID NO: 783395 - DNA, 75 bp, synthetic construct
  source 1..75: mol_type = other DNA
gatttgaaccatgccccggactgacggctgccggacgtggcgttgtatcgccggagaatatcgcgttcacccgct

SEQ ID NO: 783396 - DNA, 75 bp, synthetic construct
  source 1..75: mol_type = other DNA
gagaagctgcaaagcgctggcatgaagaccgctgcgactggtgcggcggtagtagctcctgtcgtcgccgctatc

SEQ ID NO: 783397 - DNA, 75 bp, synthetic construct
  source 1..75: mol_type = other DNA
ccgcgcattctggtctgcgggctgaatccgcacgcaggcgaaggcggtcatatgggtacggaagagatagacacc

SEQ ID NO: 783398 - DNA, 75 bp, synthetic construct
  source 1..75: mol_type = other DNA
tgaacggcgaatttgccgcgctgatcacaggtccggtgcataaaggcgttattaacgacgctggcattcctttta

SEQ ID NO: 783399 - DNA, 75 bp, synthetic construct
  source 1..75: mol_type = other DNA
gccgggcgacggaacagatcaaccagcgcaccgcgcaatacaaccgccagcttgccgaacagcagcgacggcttg

SEQ ID NO: 783400 - DNA, 75 bp, synthetic construct
  source 1..75: mol_type = other DNA
caaaaagccgatctgctgtctttcgccagcatggcggcaaaggcttctgttgcctttgaacttcccgccgaccag

SEQ ID NO: 783401 - DNA, 75 bp, synthetic construct
  source 1..75: mol_type = other DNA
aaagaggtgactggtgtgacatctggggtaacgaggatgtatcggtgtggtggaaccgtctgtgtgacaacgtcc

SEQ ID NO: 783402 - DNA, 75 bp, synthetic construct
  source 1..75: mol_type = other DNA
atcaccccacaacttctgcacgaagtgattgctattttacatcacgatttgcgtacgaaatttggcattgccgaa

SEQ ID NO: 783403 - DNA, 75 bp, synthetic construct
  source 1..75: mol_type = other DNA
cgctggctgacacacctgcagaacggtgtactgctggatgagcaaaactgcctgatgctgcatgaactctggctg

SEQ ID NO: 783404 - DNA, 75 bp, synthetic construct
  source 1..75: mol_type = other DNA
cgtatgcatttttctggtgaaccggcacagattgctgagattaaacgactggccagcggtgcagtcacaccgttt

SEQ ID NO: 783405 - DNA, 75 bp, synthetic construct
  source 1..75: mol_type = other DNA
accactgcgcgatatcgcagacgccataactcctgcgcttttgcacgaagtgattgctattttgcatcacgattt

SEQ ID NO: 783406 - DNA, 75 bp, synthetic construct
  source 1..75: mol_type = other DNA
cttcctgtcgcgctacgtgaatctgtcactgcggggcagttagcggttgaaaatgggcattatgtggtggaaacg

SEQ ID NO: 783407 - DNA, 75 bp, synthetic construct
  source 1..75: mol_type = other DNA
atcaccccgcccctgctgcatgaagtcatttctattttgcatcacgatttgcaaaccaaatttggtattgctgag

SEQ ID NO: 783408 - DNA, 75 bp, synthetic construct
  source 1..75: mol_type = other DNA
ggatagccgtgcggtgcatgatttctttgccagcgagcgcattgaccaggtttatctggcggcagcgaaagtggg

SEQ ID NO: 783409 - DNA, 75 bp, synthetic construct
  source 1..75: mol_type = other DNA
gaacgagcaattccgtctccggtctggttgatgcatagcgatcgtgtgggttacgaaacgctcggtcgtctctgg

SEQ ID NO: 783410 - DNA, 75 bp, synthetic construct
  source 1..75: mol_type = other DNA
aggcgctgaatcttcaggatcgcggggtgattggcgagggcaaacgcgccgacctggtgctggcgcatcgcaagg

SEQ ID NO: 783411 - DNA, 75 bp, synthetic construct
  source 1..75: mol_type = other DNA
caaaacgcgggcatttgactgccagcaccgtgattcagtatcgcggcgcgattatcccgcgtgaggcgatgccag

SEQ ID NO: 783412 - DNA, 75 bp, synthetic construct
  source 1..75: mol_type = other DNA
acctggagctgggctttggtatcgctctggcagtggcgttgcacaatattcctgaaggtctggcagtggcgggtc

SEQ ID NO: 783413 - DNA, 75 bp, synthetic construct
  source 1..75: mol_type = other DNA
ggtgcctgttgggttttttgctgatttcgggcgttcaggccgccgagtctgacgagctggcgctggtaatgaagc

SEQ ID NO: 783414 - DNA, 75 bp, synthetic construct
  source 1..75: mol_type = other DNA
atagatatatttattggcgtttcgccttttgctgaactaccttttatcagcgcatttttaatgcaaaggagtatc

SEQ ID NO: 783415 - DNA, 75 bp, synthetic construct
  source 1..75: mol_type = other DNA
agcggaggagcctgaaaagctgatcaaacagatggccatggaattggatacccgtttgtacgaagtcggcgaata

SEQ ID NO: 783416 - DNA, 75 bp, synthetic construct
  source 1..75: mol_type = other DNA
agaaggcaaaggattatgcgcaggaagcggtgtttaaggattggcaaaaagcagctaaaaatgtcagcaaggcag

SEQ ID NO: 783417 - DNA, 75 bp, synthetic construct
  source 1..75: mol_type = other DNA
tcttaagtggtcgtcgtcattttcagtccacgcgtggcatggataaaaaagcgctcactaccgtgaagtttgcct

SEQ ID NO: 783418 - DNA, 75 bp, synthetic construct
  source 1..75: mol_type = other DNA
taactaccgtccacgcctgtgggccagcaaagaagagacgcagcaggtctaccagcaaatgctggaatgcacgga

SEQ ID NO: 783419 - DNA, 75 bp, synthetic construct
  source 1..75: mol_type = other DNA
ctataatattattgagcatgtgatagccagaaataatgatgatacgggaatttctatttcagcgaaagataaaga

SEQ ID NO: 783420 - DNA, 75 bp, synthetic construct
  source 1..75: mol_type = other DNA
ttaaaaatcgacaacacttcggtgagctcatcaactattacggtagtaaactcaaacgattcaaacgcgcacagc

SEQ ID NO: 783421 - DNA, 75 bp, synthetic construct
  source 1..75: mol_type = other DNA
gagatgctacctgccgcattagccgctgaagggatgtcccctgttctgggctatgggatgtttatctttggtctg

SEQ ID NO: 783422 - DNA, 75 bp, synthetic construct
  source 1..75: mol_type = other DNA
atttggccgcattttatgggagcgtagtcagggcattgacgagcgcgacgttaacagcgaaaggttgcgaaaatc

SEQ ID NO: 783423 - DNA, 75 bp, synthetic construct
  source 1..75: mol_type = other DNA
tggtgttctgaacggtgttccttctgcatatcactggtatacggaacagtatggcgtgaagtggccttgtgggta

SEQ ID NO: 783424 - DNA, 75 bp, synthetic construct
  source 1..75: mol_type = other DNA
gaggatgtatcggtgtggtggaaccgtctgtgtgacaacgtagtgccggaaaaaaccatgccgtttgacctgctg

SEQ ID NO: 783425 - DNA, 75 bp, synthetic construct
  source 1..75: mol_type = other DNA
cagggtacgctggagccgaccaacgagccttatgccattgccaaaatcgccgggatcaaactgtgcgaatcttac

SEQ ID NO: 783426 - DNA, 75 bp, synthetic construct
  source 1..75: mol_type = other DNA
tggaaccgtctgtgtgacaacgtagtgccggaaaaaaccatgccgtttgacctgctgacggttctgccgacccgc

SEQ ID NO: 783427 - DNA, 75 bp, synthetic construct
  source 1..75: mol_type = other DNA
gggcgcggggtgcggctgggggggctgcatgtgacgttgcttgacccgcaaatggaaagacaactggtgctggga

SEQ ID NO: 783428 - DNA, 75 bp, synthetic construct
  source 1..75: mol_type = other DNA
cggccgcctgctgattagcgcccacaccgaagatttttttgatcccctgacttttacggtatctcttgatgatta

SEQ ID NO: 783429 - DNA, 75 bp, synthetic construct
  source 1..75: mol_type = other DNA
accgatcgcccggtggtctttctgcgcaaggatcaccccctgctcgagcagaagtggtcgctggagaactttctg

SEQ ID NO: 783430 - DNA, 75 bp, synthetic construct
  source 1..75: mol_type = other DNA
tgaactgtcacggtgagtttgcccggctgacctgccggggggcggttctgaagggagcgggagggatcatactat

SEQ ID NO: 783431 - DNA, 75 bp, synthetic construct
  source 1..75: mol_type = other DNA
acagatgatgatgagctgccggaagtcaccggacctgcgtggatagtcgacaaggtggcgcattacggtggatga

SEQ ID NO: 783432 - DNA, 75 bp, synthetic construct
  source 1..75: mol_type = other DNA
ctctgcgacccttatcgctcaggaaatccgccagacgatcttcaacgagctgcaactgacggcgtctgcgggcgt

SEQ ID NO: 783433 - DNA, 75 bp, synthetic construct
  source 1..75: mol_type = other DNA
gtggtactggccggcgtcgctgggaagaattaccggatgatgccagggaaagcatcaccgcacttttcaccccaa

SEQ ID NO: 783434 - DNA, 75 bp, synthetic construct
  source 1..75: mol_type = other DNA
cagtaaacaatggcccggtaaagccgctattggtcgtctgaaagacgaggaactggcactatataatttgtggct

SEQ ID NO: 783435 - DNA, 75 bp, synthetic construct
  source 1..75: mol_type = other DNA
ataacggcgtctgggacgccattattaataatcaggcaaatattgccattggcgctcccgataccctgctggacg

SEQ ID NO: 783436 - DNA, 75 bp, synthetic construct
  source 1..75: mol_type = other DNA
atccgtaagtccattagccagtgcattttacattacgaacctcgtattaccgatgttgttgttacggctgcggca

SEQ ID NO: 783437 - DNA, 75 bp, synthetic construct
  source 1..75: mol_type = other DNA
ccctttgttctggtcacggaggatttccgccgcgactggtagctgaaactgttccctggttcaccgttaacggta

SEQ ID NO: 783438 - DNA, 75 bp, synthetic construct
  source 1..75: mol_type = other DNA
cccttggggttttccatcgtaacgacaacggcagtggtagcgatgataacggtttgtatctgtcattttcgttat

SEQ ID NO: 783439 - DNA, 75 bp, synthetic construct
  source 1..75: mol_type = other DNA
ggttgcgcatcaacccgtgacattcagtgcagagccatcctcgcaaatgatcatcagccagaatacggtctctac

SEQ ID NO: 783440 - DNA, 75 bp, synthetic construct
  source 1..75: mol_type = other DNA
aacacaccgcacgcttattacaggtactgaaaaagcaatttcctacctgccagattaccgtcaccaccgaagtgt

SEQ ID NO: 783441 - DNA, 75 bp, synthetic construct
  source 1..75: mol_type = other DNA
cccagggcgattatgctattgcacagcatttcctgacgaacctgcctacagatgctggcgaatatgccgtatttc

SEQ ID NO: 783442 - DNA, 75 bp, synthetic construct
  source 1..75: mol_type = other DNA
cgggattaattggcgggtatgggaagaatcaggtggtttgtagggcgccagataaagatcttgctcatctgactg

SEQ ID NO: 783443 - DNA, 75 bp, synthetic construct
  source 1..75: mol_type = other DNA
gggaatgagttgtctcaattgacagcaaatgctgttaagcaattcattgaagaaaacgctgaaaaagctgccatg

SEQ ID NO: 783444 - DNA, 75 bp, synthetic construct
  source 1..75: mol_type = other DNA
aacaacagatagctacatttggtgcagcactaaatgggggaaatcaaccgcaatctgagtacatagaagccttct

SEQ ID NO: 783445 - DNA, 75 bp, synthetic construct
  source 1..75: mol_type = other DNA
cagagaactatgacgcagttatcgatgctcaggggctggtaaaaagcgcggcgctggtgacgcgtctggcgcatg

SEQ ID NO: 783446 - DNA, 75 bp, synthetic construct
  source 1..75: mol_type = other DNA
gatgctggcgaatatgccgtatttcttcatgcaacgacccgtgatgataaacactggccggaagaacactggcga

SEQ ID NO: 783447 - DNA, 75 bp, synthetic construct
  source 1..75: mol_type = other DNA
ctattcaggttcaggcacagttaaaacagcctaaattacgtggaaacgtccagacggcgcaaagggagattgcac

SEQ ID NO: 783448 - DNA, 75 bp, synthetic construct
  source 1..75: mol_type = other DNA
aatatgagtttgaaaatgatctgaccgtgttcgaatggatgagtcagtggaagcaggaaggcgatgacgagcagg

SEQ ID NO: 783449 - DNA, 75 bp, synthetic construct
  source 1..75: mol_type = other DNA
ggcccgatgagcgaagttgcacccggctggaagttgcgtgtgttgctggcgcaggcgttgtttgccgacccggac

SEQ ID NO: 783450 - DNA, 75 bp, synthetic construct
  source 1..75: mol_type = other DNA
cgcactggagcctttcgggcggtcgctcgcaacgtgatggacggtcgcgaaggccgctatcccacccccctaaac

SEQ ID NO: 783451 - DNA, 75 bp, synthetic construct
  source 1..75: mol_type = other DNA
aagttaatgatgcagaagccgaacattctgatcatggacgaaccgaccaaccacctggatatggaatccatcgag

SEQ ID NO: 783452 - DNA, 75 bp, synthetic construct
  source 1..75: mol_type = other DNA
tttcgttagccgctttagcgccaacgcctcgaaatctcgtcaggcaacttcgcgtgcgcgtcagattgataaaat

SEQ ID NO: 783453 - DNA, 75 bp, synthetic construct
  source 1..75: mol_type = other DNA
accaaagggtttgataacggtcccctgtttaaaaatctcaacctgctgctggaagtgggtgaaaaactggcggta

SEQ ID NO: 783454 - DNA, 75 bp, synthetic construct
  source 1..75: mol_type = other DNA
gacttacagctctacactggctgtcagtcgctatggcgttaatttgggtgccagtggtacagacgatttgctggg

SEQ ID NO: 783455 - DNA, 75 bp, synthetic construct
  source 1..75: mol_type = other DNA
ccacgctggcggtgagtcgctatggcatcaatgtgggggccagcggcacagatgatttgctgggggcggtgttgg

SEQ ID NO: 783456 - DNA, 75 bp, synthetic construct
  source 1..75: mol_type = other DNA
taccataaacagcgcggttaacgggcgttgggatggtcaatatggaaatgtctacgctacagtctcagacagtta

SEQ ID NO: 783457 - DNA, 75 bp, synthetic construct
  source 1..75: mol_type = other DNA
gttgatctgccggtggagcctttcaaggttacggtgaaggagtatggcctatcacctgcactaccaagtttatta

SEQ ID NO: 783458 - DNA, 75 bp, synthetic construct
  source 1..75: mol_type = other DNA
acagtgatttaagtaccttaaaggcaacggttgaggatggcagtggtaacctgatcgaaggtctcactgtgtact

SEQ ID NO: 783459 - DNA, 75 bp, synthetic construct
  source 1..75: mol_type = other DNA
cagggggccagtctagatagtttgcgttgggataaacagcagagctttgaaaataactatcttcgccagacaact

SEQ ID NO: 783460 - DNA, 75 bp, synthetic construct
  source 1..75: mol_type = other DNA
gggcgcaccgcatgaagaagctcgggcgaaaaggctggcggagggatttgattatgtcgacgtattgccgaagat

SEQ ID NO: 783461 - DNA, 75 bp, synthetic construct
  source 1..75: mol_type = other DNA
ccgctggctgaccattttaccgctgggtggcgataccgcacgagctgtgggaatggcgctgacgccgacgcgaat

SEQ ID NO: 783462 - DNA, 75 bp, synthetic construct
  source 1..75: mol_type = other DNA
cagatgatttttcactacagcttgctgccgcgtctggcgatttcgttgctggttggcgcaggtctgggactggtg

SEQ ID NO: 783463 - DNA, 75 bp, synthetic construct
  source 1..75: mol_type = other DNA
ctgggaattaccgtcaccacgctctgggcgatccccggcgcgatggcgagccagtttgccgcgttggcaggggct

SEQ ID NO: 783464 - DNA, 75 bp, synthetic construct
  source 1..75: mol_type = other DNA
ttgcagactgcaagaactatcggcggcgtggccttcgatggatctgcgaacataaatttgcctggtgtaaacacg

SEQ ID NO: 783465 - DNA, 75 bp, synthetic construct
  source 1..75: mol_type = other DNA
acagcaacgaaattgcagacggcaagatctatcggtggagttgttttcgacggttctgcaaatattaaccttcca

SEQ ID NO: 783466 - DNA, 75 bp, synthetic construct
  source 1..75: mol_type = other DNA
gcaacagtaataacgtggcctggcttcccaccccggttgagaaagggctggccgtcagctggctgcttgaaaaac

SEQ ID NO: 783467 - DNA, 75 bp, synthetic construct
  source 1..75: mol_type = other DNA
ctggggattaccgtcactacgctctgggcgatccccggtgcgatggcgagccagtttgctgcgctggcaggggct

SEQ ID NO: 783468 - DNA, 75 bp, synthetic construct
  source 1..75: mol_type = other DNA
gaatggcgctgacgccgacgcgaattgcgctactgctgctggcggcttgcctgacggcgaccgcgacaatgacca

SEQ ID NO: 783469 - DNA, 75 bp, synthetic construct
  source 1..75: mol_type = other DNA
catcagtgcgctgctggtgaacgcggtggggattatcggctttatcgggttgttcgcgccgctgctggcaaaaat

SEQ ID NO: 783470 - DNA, 75 bp, synthetic construct
  source 1..75: mol_type = other DNA
gtgagtaaacgtattgcgcttttcccggtgttattgctggtgctgttggtgattgccgctgcggcgttgacctgg

SEQ ID NO: 783471 - DNA, 75 bp, synthetic construct
  source 1..75: mol_type = other DNA
gtgcgctgatcctctggctttccgatcaaatcatcctctggctgactcgcgtgtggatggaagtgtccaccggtt

SEQ ID NO: 783472 - DNA, 75 bp, synthetic construct
  source 1..75: mol_type = other DNA
ccacaccgcatgttactggcggggatgggcgttaagcaccgcgttcaccatgcttttgatgatgttgcaggcaag

SEQ ID NO: 783473 - DNA, 75 bp, synthetic construct
  source 1..75: mol_type = other DNA
cgaacacatatttcatgctaacagcatcaggagacacattaggttcatggaacggtttgcgacctattacaatta

SEQ ID NO: 783474 - DNA, 75 bp, synthetic construct
  source 1..75: mol_type = other DNA
tggagggttaacgtcttctggtgagatcgtttcaaaatatgcaaatggtttccgcattgcttacggtaactttgg

SEQ ID NO: 783475 - DNA, 75 bp, synthetic construct
  source 1..75: mol_type = other DNA
gatatgctgatgaacttttgtcattaagacctgtttggtatcgttcaatttgtcgaggtgaccgaaaggattggg

SEQ ID NO: 783476 - DNA, 75 bp, synthetic construct
  source 1..75: mol_type = other DNA
cgatgtatagctcacatcagaaacctacaccatcagatattggagcactgccaacaaccggaggaacagtttcag

SEQ ID NO: 783477 - DNA, 75 bp, synthetic construct
  source 1..75: mol_type = other DNA
gcaaacaatattggcgtaacgggcggcgcgtttgacagctatctgctgctgcgcggtctgcgtactctggtgccg

SEQ ID NO: 783478 - DNA, 75 bp, synthetic construct
  source 1..75: mol_type = other DNA
gcacggtgctcatggacttacgccaacaataattatatagacgacactggttgcggtaggatcgatctatctggt

SEQ ID NO: 783479 - DNA, 75 bp, synthetic construct
  source 1..75: mol_type = other DNA
gttcctcaagagatggctatggttttgaaagtggttgggagcaggtttacacgactggatttatgcctcagccgg

SEQ ID NO: 783480 - DNA, 75 bp, synthetic construct
  source 1..75: mol_type = other DNA
tgcgaacttcctctgtttcaggtggggatatgggcatgagtttgtccgcattcattagccaccttaaatcaaatg

SEQ ID NO: 783481 - DNA, 75 bp, synthetic construct
  source 1..75: mol_type = other DNA
cgaaaacagaggtaacaaaccttctcagttcctatgtgaagagtagttctcttccaagcatgactgtgcgaactt

SEQ ID NO: 783482 - DNA, 75 bp, synthetic construct
  source 1..75: mol_type = other DNA
aatttgaccggaaacgcagatactgcgaccaagatcaagacagcacgtaagattgggggcgtggcatttgatgga

SEQ ID NO: 783483 - DNA, 75 bp, synthetic construct
  source 1..75: mol_type = other DNA
tgtacaaataaagagttcctgcgcagtcaccataagcaggggatgacaggtgtatgggtaacagctcgtgttaat

SEQ ID NO: 783484 - DNA, 75 bp, synthetic construct
  source 1..75: mol_type = other DNA
atttatactgagtctgaactgttacgatgtctgtgtttatctttttccggataaggttattagctatgtagactg

SEQ ID NO: 783485 - DNA, 75 bp, synthetic construct
  source 1..75: mol_type = other DNA
tcagcatctgcagcaaaaacctctgaaacaaatgcaaagacttcagaagacaatgctgcttcctctaaggcggca

SEQ ID NO: 783486 - DNA, 75 bp, synthetic construct
  source 1..75: mol_type = other DNA
tttttacgttgtttgtggatggtgaaaacgaagtgggtaaagtgacctccgtcactcagcccaaactgacgcgca

SEQ ID NO: 783487 - DNA, 75 bp, synthetic construct
  source 1..75: mol_type = other DNA
tttttacgatgtttgtggatggtgaaaacgaagtgggtaaggtgacctccgtcactctgcccaaactgacgcgca

SEQ ID NO: 783488 - DNA, 75 bp, synthetic construct
  source 1..75: mol_type = other DNA
tttttacgatgtttgtggatggtgaaaacgaagtgggtaatgtgacctccgtcactcagcccaaactgacgcgca

SEQ ID NO: 783489 - DNA, 75 bp, synthetic construct
  source 1..75: mol_type = other DNA
tttttacgttgtttgtggatggtgaaaacgaagtgggtaaggtgacctccgtcactcggcccaaactgacgcgca

SEQ ID NO: 783490 - DNA, 75 bp, synthetic construct
  source 1..75: mol_type = other DNA
tttttacgttgtttgtggatggtgaaaacgaagtgggtaacgtgacctccgtcactccgcccaaactgacgcgca

SEQ ID NO: 783491 - DNA, 75 bp, synthetic construct
  source 1..75: mol_type = other DNA
tttttacgttgtttgtggatggtgaaaacgaagtgggtaatgtgacctccgtcactctgcccaaactgacgcgca

SEQ ID NO: 783492 - DNA, 75 bp, synthetic construct
  source 1..75: mol_type = other DNA
ttcgcttctcgggtgaatactattccgaagaagggattgagtacgtcgatattgaagcccgtggtcgcattgtcg

SEQ ID NO: 783493 - DNA, 75 bp, synthetic construct
  source 1..75: mol_type = other DNA
cgatggcgacagtcagttgattgaggttgaaatgcgcggacgcatcagtgaaatcgatatgggggaagcaaaaca

SEQ ID NO: 783494 - DNA, 75 bp, synthetic construct
  source 1..75: mol_type = other DNA
agaaaagattttatataaacaaaatcaagattaatttcctttcttttatatttcgtagggaaattaataatcaag

SEQ ID NO: 783495 - DNA, 75 bp, synthetic construct
  source 1..75: mol_type = other DNA
cgatgaagagcagagcgacctgtatgaaattgagcttcgcggccgcgtgacggaaattgatacgggggaggcaaa

SEQ ID NO: 783496 - DNA, 75 bp, synthetic construct
  source 1..75: mol_type = other DNA
tgttcacgctgtttactgacggggtgaaccagattggcagggtgaccggcttcaccccccccaaactgacccgta

SEQ ID NO: 783497 - DNA, 75 bp, synthetic construct
  source 1..75: mol_type = other DNA
tatgccaggctctgcggcggtggatctcggtcttgatgatggtgcgctggatctctcctttgcggttggcggtat

SEQ ID NO: 783498 - DNA, 75 bp, synthetic construct
  source 1..75: mol_type = other DNA
tttttacgctgtttgtggatggtgaaaacgaagtgggtaatgtgacctccgtcactccgcccaaactgacgcgca

SEQ ID NO: 783499 - DNA, 75 bp, synthetic construct
  source 1..75: mol_type = other DNA
caatgaccaactccaaaaactatgatccgggtaaggagcttggcgggtatcaagctgcactacaggcaatcaata

SEQ ID NO: 783500 - DNA, 75 bp, synthetic construct
  source 1..75: mol_type = other DNA
ttatcgtgatgggcagcttcggcctccagttagccgggaaatatgtacaaaccatcctctggattcagctatgga

SEQ ID NO: 783501 - DNA, 75 bp, synthetic construct
  source 1..75: mol_type = other DNA
tggatactcttttggcctcagcagatatggatatcagaaatcagtgtattcgtactgctttaagcagccttgcgg

SEQ ID NO: 783502 - DNA, 75 bp, synthetic construct
  source 1..75: mol_type = other DNA
gagattaaaatcgatgatgtttccgccgctgccggaaccgtggggtatgagttgatgtgcgcactggcgttacgt

SEQ ID NO: 783503 - DNA, 75 bp, synthetic construct
  source 1..75: mol_type = other DNA
ttcatataaagctatatgacgcagatgtttcactggcactgatatcaaaggtcaccgatgccgtgatggagctgg

SEQ ID NO: 783504 - DNA, 75 bp, synthetic construct
  source 1..75: mol_type = other DNA
ccgaccacaacggtgactatcgaagacgcttacacagggcaggtccgagtcgtcgccaatgtgcctattggagta

SEQ ID NO: 783505 - DNA, 75 bp, synthetic construct
  source 1..75: mol_type = other DNA
gggcgaagccacatcacacacttacgccattaaaaacacctactacaagctgagtgttaacgatcgtccgttgtg

SEQ ID NO: 783506 - DNA, 75 bp, synthetic construct
  source 1..75: mol_type = other DNA
tttttacggtgtttgtggatggtgaaaacgaagtgggtaatgtgacctccgtcactcggcccaaactgacgcgca

SEQ ID NO: 783507 - DNA, 75 bp, synthetic construct
  source 1..75: mol_type = other DNA
tttttacggtgtttgtggatggtgaaaacgaagtgggtaaagtgacctccgtcactctgcccaaactgacgcgca

SEQ ID NO: 783508 - DNA, 75 bp, synthetic construct
  source 1..75: mol_type = other DNA
tgagggggtccgggagcgagtttttcaacgcgcagttttttattgcggcttctcgctggatgtaagaggtgccca

SEQ ID NO: 783509 - DNA, 75 bp, synthetic construct
  source 1..75: mol_type = other DNA
gtaaggtgacgtccgtcactctgcctaagctgacgcgcaaaaccgacagctaccggggtggtggcatgatgggtg

SEQ ID NO: 783510 - DNA, 75 bp, synthetic construct
  source 1..75: mol_type = other DNA
gcgtcgagttcgaccttgagtacatccgcgaatggagcgtctggttcgatatcaaaatcgttttcctgacggtat

SEQ ID NO: 783511 - DNA, 75 bp, synthetic construct
  source 1..75: mol_type = other DNA
aagcgttactattcattttaccatccccacgatgaatgtttaaaagaacatatgagtacacgagcaatagaaata

SEQ ID NO: 783512 - DNA, 75 bp, synthetic construct
  source 1..75: mol_type = other DNA
cgttgccgctggtggctggaatttcccacaatggaaaacacccgctaccacctttagcgtgctgtttggcaaaca

SEQ ID NO: 783513 - DNA, 75 bp, synthetic construct
  source 1..75: mol_type = other DNA
gctggaaatagtgctggaaggtgagtttgttgataccggcgctggagcaacgttagttcccggcgatgtgctgta

SEQ ID NO: 783514 - DNA, 75 bp, synthetic construct
  source 1..75: mol_type = other DNA
aaaggtatctcgcgttaggcagtaatcagtatgtacgtgttaaatctccctggtttggccgggcagcgaaacatg

SEQ ID NO: 783515 - DNA, 75 bp, synthetic construct
  source 1..75: mol_type = other DNA
gcctgcttagccactgccgcgatttgctcggcagccaaatccagaccgcctcacgcagccaggcactatttgaag

SEQ ID NO: 783516 - DNA, 75 bp, synthetic construct
  source 1..75: mol_type = other DNA
tggcgaagcaacacgtcgcccgacgcggcccacgcataggttcttttctgctacaaacgctcaatgaaatgcaaa

SEQ ID NO: 783517 - DNA, 75 bp, synthetic construct
  source 1..75: mol_type = other DNA
gcaactcggcttcagcgtcgtgcaatgggatggcaaacaatatcaaaatctggcgaagcaacacgtcgcccgacg

SEQ ID NO: 783518 - DNA, 75 bp, synthetic construct
  source 1..75: mol_type = other DNA
ccgcatctatgctttgccggaaatgagtgaagaagacggctataaagtggccgatctggaagttaaatacggcga

SEQ ID NO: 783519 - DNA, 75 bp, synthetic construct
  source 1..75: mol_type = other DNA
ggcccgatgagtgaagttgctcctggctggaagctgcgtgtgctgctggcgcaggcgctgtttgctgatccggac

SEQ ID NO: 783520 - DNA, 75 bp, synthetic construct
  source 1..75: mol_type = other DNA
tgaaaacatttccgtcaaatttggcggcggcaatcgttacggcctgattggcgcgaacggtagtggtaaatccac

SEQ ID NO: 783521 - DNA, 75 bp, synthetic construct
  source 1..75: mol_type = other DNA
gaaaatctctccttttccgggcagacttgacagaaatggaggcagaggaaccctacaccgttatgtggaaggtac

SEQ ID NO: 783522 - DNA, 75 bp, synthetic construct
  source 1..75: mol_type = other DNA
tatagaggataaatatccggtggatatcaggtactcactcaaccttgactgtaccgtaacccaggatggtttccc

SEQ ID NO: 783523 - DNA, 75 bp, synthetic construct
  source 1..75: mol_type = other DNA
cgttacacgccggccttgctggaggtgctggaactgcgcgccgcgccgagcgcggccgtgaggcttggacgctag

SEQ ID NO: 783524 - DNA, 75 bp, synthetic construct
  source 1..75: mol_type = other DNA
attatatcgacgaacgctatgcctccgcgcttacccgcgaatctgtcgcacaggcattctatatttcaccaaact

SEQ ID NO: 783525 - DNA, 75 bp, synthetic construct
  source 1..75: mol_type = other DNA
gccctcaatcccgccgacgctgtgaccgaaaacacccggcggtttctgcagtcgctgggagctgtggaagtggtc

SEQ ID NO: 783526 - DNA, 75 bp, synthetic construct
  source 1..75: mol_type = other DNA
gccgatcacggccggatgcccgtcacggagcgtatcgtcacatttgacatccagtcacagcgcggccgcgccatc

SEQ ID NO: 783527 - DNA, 75 bp, synthetic construct
  source 1..75: mol_type = other DNA
tggtgccttcagcggtattgttcaaaactggttaatgaatatagcgggttacgatctttataaacaagcacccgc

SEQ ID NO: 783528 - DNA, 75 bp, synthetic construct
  source 1..75: mol_type = other DNA
taagagtgagcagttagtggtgaactttactgcggatacgctcactgcgcaggttaatcttaacgttaccgagga

SEQ ID NO: 783529 - DNA, 75 bp, synthetic construct
  source 1..75: mol_type = other DNA
aaattgagtcccgtctggactcgctggcgaagaaaaccgggaggacaaagacgttctatgcccgggaagcgatac

SEQ ID NO: 783530 - DNA, 75 bp, synthetic construct
  source 1..75: mol_type = other DNA
gtatgtggccgaccaggctgcctgtttactggccggtgtactgaacgtcacgttcatggttaatgccgccagtcg

SEQ ID NO: 783531 - DNA, 75 bp, synthetic construct
  source 1..75: mol_type = other DNA
ccctgaagacccggcaagaactgattgaaaccgctatcgcccagtttgcactacatggcgtaagcaaaacgacgc

SEQ ID NO: 783532 - DNA, 75 bp, synthetic construct
  source 1..75: mol_type = other DNA
tgaatttaatgatgagatgctggccgagggagtgatacgcgaaaagatgggcttcaatccgcagactctccgcga

SEQ ID NO: 783533 - DNA, 75 bp, synthetic construct
  source 1..75: mol_type = other DNA
ccaaactatctctcgcacctgtttcaaaaaacgggggccattggttttaacgaatacctgaatcacacgcgactg

SEQ ID NO: 783534 - DNA, 75 bp, synthetic construct
  source 1..75: mol_type = other DNA
tggtgccttcagcggaattgttcaaaactggttaatgaatatggcggggtatgatctttttaaaaaaaccccccc

SEQ ID NO: 783535 - DNA, 75 bp, synthetic construct
  source 1..75: mol_type = other DNA
ttaatgagatgtggttgcaacagccttcattgcgggagttaatccaggaacacttgacggctgggttagagcatg

SEQ ID NO: 783536 - DNA, 75 bp, synthetic construct
  source 1..75: mol_type = other DNA
atcattgcgggagttaatccaggagcggctggcggcaggttcagaccataacccgtaccagcaattgcgtgaaaa

SEQ ID NO: 783537 - DNA, 75 bp, synthetic construct
  source 1..75: mol_type = other DNA
tcgtccaggcgtaggtgatgagttggtcactcgtatcgtaccgcttgagaacgttcctgctcgtgatcttgcccc

SEQ ID NO: 783538 - DNA, 75 bp, synthetic construct
  source 1..75: mol_type = other DNA
gctctgacgggctgaagcgtacacaggagatggccgggaagctggtcaagccgtgggatcgctttgtacaaatcc

SEQ ID NO: 783539 - DNA, 75 bp, synthetic construct
  source 1..75: mol_type = other DNA
agcgtgatgccctgcgcttcagtacaacctatggtgccagcgcggtggagttcgttaaatccacggaaaatatta

SEQ ID NO: 783540 - DNA, 75 bp, synthetic construct
  source 1..75: mol_type = other DNA
tccacagcagcggatcagcctgctgatctggactgctgaagatgtccatgactgcaccagtgatatgaacctcac

SEQ ID NO: 783541 - DNA, 75 bp, synthetic construct
  source 1..75: mol_type = other DNA
ttgatgtcatcggcacagagaagcagcaaattattcatctggaatatgcatcagcggaagatctcgccgaaattc

SEQ ID NO: 783542 - DNA, 75 bp, synthetic construct
  source 1..75: mol_type = other DNA
ctctccgcgaagattgtggcggataagcgaaccaactctcttatcatcagcgggccggaaaaagcacgccagcgc

SEQ ID NO: 783543 - DNA, 75 bp, synthetic construct
  source 1..75: mol_type = other DNA
agtccataaaaagcggtttcctgacgtcatggaactggattgtcgaaaaacttaataaaatccccggcgtggata

SEQ ID NO: 783544 - DNA, 75 bp, synthetic construct
  source 1..75: mol_type = other DNA
gccttacttgctgcgggttgctggctgctggtgaaacactgggacacggtgaaaaatgccgtgatggaaacagag

SEQ ID NO: 783545 - DNA, 75 bp, synthetic construct
  source 1..75: mol_type = other DNA
catcacccgccagctggcgattgattacgaagaccagggccgtaaggtgcgttatgagttcaccctgccgggaga

SEQ ID NO: 783546 - DNA, 75 bp, synthetic construct
  source 1..75: mol_type = other DNA
aagccttgaagggaacctgaaagcccaggcggaactggatgcagcctttggtgacagttcggcagtggttaaaca

SEQ ID NO: 783547 - DNA, 75 bp, synthetic construct
  source 1..75: mol_type = other DNA
gtcgccaatacgctcgcttttgcgcttaagtccacggcagcagacacggcagagtttatggggcagatgttcggt

SEQ ID NO: 783548 - DNA, 75 bp, synthetic construct
  source 1..75: mol_type = other DNA
gtactgatggtctgaagcgtacccaggaaatggcgcagaaaatggtgaagccgtgggatcggtttgtcgcaatcc

SEQ ID NO: 783549 - DNA, 75 bp, synthetic construct
  source 1..75: mol_type = other DNA
taacggtgattatctcgccgactggtctgattgcgcaggtcagcccgaacggtttaacgccccgctggcaggagg

SEQ ID NO: 783550 - DNA, 75 bp, synthetic construct
  source 1..75: mol_type = other DNA
gcgttatttcttggcctggcaggcaacatgaacagtgccgaacgtaatcgtcagtcgttgatggcctcggtgtac

SEQ ID NO: 783551 - DNA, 75 bp, synthetic construct
  source 1..75: mol_type = other DNA
tgtttaaaaatctcaacctgctgctggaagtgggtgaaaaactggcggtactgggtaccaacggcgtcggtaaat

SEQ ID NO: 783552 - DNA, 75 bp, synthetic construct
  source 1..75: mol_type = other DNA
aagagcaggagccgtgctgtccgcccgacgggccattaaataaggcgattaactatattctgaaccggcgcgatg

SEQ ID NO: 783553 - DNA, 75 bp, synthetic construct
  source 1..75: mol_type = other DNA
ttcgcccggtggtcatgggacggaaagcatggttattcacaggttcactaatggccgggaaccgcgcggcacaga

SEQ ID NO: 783554 - DNA, 75 bp, synthetic construct
  source 1..75: mol_type = other DNA
caacctggaacgctggatgagcgaaagccgcgacctttcaacgcagggaaaacttcaccgcgcatccggcgtcgc

SEQ ID NO: 783555 - DNA, 75 bp, synthetic construct
  source 1..75: mol_type = other DNA
ctgctgttggacggtgaaacggtgatgacagggcgatacccaaaacgtgctgaactggctcgctggttcggtatt

SEQ ID NO: 783556 - DNA, 75 bp, synthetic construct
  source 1..75: mol_type = other DNA
agagctggcccgctggttcggaataccgctggagaaagtaggattagcatctaaaagctgctgcggtggtaatac

SEQ ID NO: 783557 - DNA, 75 bp, synthetic construct
  source 1..75: mol_type = other DNA
tgcacgccatctacgtcgatcaactggtacaacgctgtaccggcgatgccattgagaacggcgtggacgccatga

SEQ ID NO: 783558 - DNA, 75 bp, synthetic construct
  source 1..75: mol_type = other DNA
caatgaccccgctgatgctggatggcactacccgtaagctggttgtgtgggatggcaccaccgacggtgcagccg

SEQ ID NO: 783559 - DNA, 75 bp, synthetic construct
  source 1..75: mol_type = other DNA
ctgctgttggacggtgaaacggtgatggcagggcgatacccaaaacgtgctgagctggctcgctggttcggtatt

SEQ ID NO: 783560 - DNA, 75 bp, synthetic construct
  source 1..75: mol_type = other DNA
aaaaagcgaaagcgtttcttgaggcttccggggcggaaggattgcccttgatcttactgggaggcgaaaccgtga

SEQ ID NO: 783561 - DNA, 75 bp, synthetic construct
  source 1..75: mol_type = other DNA
gaagaccagggccgtaaggtgcgttatgacttcaccctgccgggagaggcggacgcacagggtggtctggactga

SEQ ID NO: 783562 - DNA, 75 bp, synthetic construct
  source 1..75: mol_type = other DNA
atctgcttcagataatgatagtgcgattaaatttaaaagtaactataacataccagttatacctggtgtgttgct

SEQ ID NO: 783563 - DNA, 75 bp, synthetic construct
  source 1..75: mol_type = other DNA
tttcagcagggaaaggaatttatgaagatattatacctgaaggaaaacgtgagtttatacaaaaacattctaaag

SEQ ID NO: 783564 - DNA, 75 bp, synthetic construct
  source 1..75: mol_type = other DNA
acctggtgggattgatcgattccgactatcagggccaattgatgatctctgtatggaaccgtggtcaggacagct

SEQ ID NO: 783565 - DNA, 75 bp, synthetic construct
  source 1..75: mol_type = other DNA
aatattgcttcaggttatgcaaccaacgattatttgttttttgttaatccagattgtattttttctgtagacgtg

SEQ ID NO: 783566 - DNA, 75 bp, synthetic construct
  source 1..75: mol_type = other DNA
atgttaagtttaattacagtaaattataatagttctaaagcaatatctaatttgttatcgtcatttgcaataaca

SEQ ID NO: 783567 - DNA, 75 bp, synthetic construct
  source 1..75: mol_type = other DNA
ggtaattttgatataaaggtctcagatgggaattatagtctcaaggttactggtggaagtggtagttttgttact

SEQ ID NO: 783568 - DNA, 75 bp, synthetic construct
  source 1..75: mol_type = other DNA
ctgaaagaaaaattaagcagtattacgacgcgtcgggcagtgacagcaccaaccgcaacagagattatgactacc

SEQ ID NO: 783569 - DNA, 75 bp, synthetic construct
  source 1..75: mol_type = other DNA
aaaaatagggctggcgttgggatctggcgcggcgagaggttggtcgcatattggcgttattaatgcgctaaaaaa

SEQ ID NO: 783570 - DNA, 75 bp, synthetic construct
  source 1..75: mol_type = other DNA
taaaaagcagcaattgattaatcaggccaacgattatatgaacagtagacaatgggttggtaaagcggctattgg

SEQ ID NO: 783571 - DNA, 75 bp, synthetic construct
  source 1..75: mol_type = other DNA
ttaccagggccagttgatgatctccgtatggaaccgcggtcaggacagcttcatcattcaacctggcgaacgtat

SEQ ID NO: 783572 - DNA, 75 bp, synthetic construct
  source 1..75: mol_type = other DNA
caacaagaccttctttcattcaatgtcagtactgaaaatgatgacactgaagatgctttaccgtggcatgcacgg

SEQ ID NO: 783573 - DNA, 75 bp, synthetic construct
  source 1..75: mol_type = other DNA
gcgtggcggattgctgcgcggtgagcgtgtattcaatcggtatcgcgaaattatgccggaaacagagatagaaaa

SEQ ID NO: 783574 - DNA, 75 bp, synthetic construct
  source 1..75: mol_type = other DNA
tcatctggtgattctctcctgactgtaaagaaggatatgatcagcactattaaccgctctatgtcgttaactatt

SEQ ID NO: 783575 - DNA, 75 bp, synthetic construct
  source 1..75: mol_type = other DNA
atccgcgcagggaggtgagttggcgttgaaaacgctgtgggaagcagtgccgtcggcatttacacggctggcaga

SEQ ID NO: 783576 - DNA, 75 bp, synthetic construct
  source 1..75: mol_type = other DNA
cgccggggcagaaagtcgcggtgcatatcagccgtcagatcccggtggattatgaatcgcagggacgccgggtga

SEQ ID NO: 783577 - DNA, 75 bp, synthetic construct
  source 1..75: mol_type = other DNA
acctttgtttttacggacggcacgatccgcacggtgccgaagccggctgaccggacggacggcggcagtcaggcc

SEQ ID NO: 783578 - DNA, 75 bp, synthetic construct
  source 1..75: mol_type = other DNA
tcgtcagaaggctgagtatgagcagcaggtgaagggatacagcaatgaacagcagcgagtcaccacacaggcggt

SEQ ID NO: 783579 - DNA, 75 bp, synthetic construct
  source 1..75: mol_type = other DNA
aaatgcccagttgcaaaacaagggcaataacgtggacgggcgcatcaatgatgcggtgaatgccgccaaacagga

SEQ ID NO: 783580 - DNA, 75 bp, synthetic construct
  source 1..75: mol_type = other DNA
catcaccagcagtgggccgcactgtatcgcctggttgactccacccccttcagcgaggaaaaaacgctgctcttt

SEQ ID NO: 783581 - DNA, 75 bp, synthetic construct
  source 1..75: mol_type = other DNA
cagcaaaaacgctgaccataaaactcaaaagcgatgcgaaatttgcctccggtaatccggtgcgcccggaagatg

SEQ ID NO: 783582 - DNA, 75 bp, synthetic construct
  source 1..75: mol_type = other DNA
tacatcaacttactgatgtggatacagctacagctgcggctatatcccgattcgataatgtttgtacccacataa

SEQ ID NO: 783583 - DNA, 75 bp, synthetic construct
  source 1..75: mol_type = other DNA
ttaagtaaagctgactataagtctctggagctgttacacggtatgcatatgtgttgtgagataggagaacaatgc

SEQ ID NO: 783584 - DNA, 75 bp, synthetic construct
  source 1..75: mol_type = other DNA
gaaaagttatgaggagaagcagcgccagttacagaacgagcagaacgccctgatggcaaaggtgcagtccctgac

SEQ ID NO: 783585 - DNA, 75 bp, synthetic construct
  source 1..75: mol_type = other DNA
acgttggttgttgcccagggactggatgatattgtgagtctggacccggcagaagctaacgaactctccagtatt

SEQ ID NO: 783586 - DNA, 75 bp, synthetic construct
  source 1..75: mol_type = other DNA
attaccatcgcgcagtcaattcaggccagctttgctcagggcggtgtaaaagttgatttgctgccagccgcgggg

SEQ ID NO: 783587 - DNA, 75 bp, synthetic construct
  source 1..75: mol_type = other DNA
ggcatgtccgcgattcacctggtcactaccgtctttttgaaacctggcgatctgctggttgcgccacacgactgc

SEQ ID NO: 783588 - DNA, 75 bp, synthetic construct
  source 1..75: mol_type = other DNA
gcgtggtgattgctaaagatccggacgttgtcaccgaactggcctggtgggcaaacaatattggcgtgacgggcg

SEQ ID NO: 783589 - DNA, 75 bp, synthetic construct
  source 1..75: mol_type = other DNA
cgtctgactatgttgcgttacggcgttaccgacctgcgttcattcttcgaaaatgatctgcgtttcctcaaacag

SEQ ID NO: 783590 - DNA, 75 bp, synthetic construct
  source 1..75: mol_type = other DNA
gtgaccttctcgacttcgccggactgagtagcaaccttgcctatatcgcaagtgtgttcatcggttacatcggta

SEQ ID NO: 783591 - DNA, 75 bp, synthetic construct
  source 1..75: mol_type = other DNA
ggcatgtccgcgattcacctggtaacgaccgtctttttgaaaccgggcgatctgctggttgcgccgcacgactgc

SEQ ID NO: 783592 - DNA, 75 bp, synthetic construct
  source 1..75: mol_type = other DNA
gcaaacaatattggcgtgacgggcggcgcgtttgacagctatctgctgctacgcgggttgcgaacactggtgccg

SEQ ID NO: 783593 - DNA, 75 bp, synthetic construct
  source 1..75: mol_type = other DNA
tttaatcacgatatttgtttagaagctggcgaacctctgacagcattaggtctgagtctgcttcacaatgtgccg

SEQ ID NO: 783594 - DNA, 75 bp, synthetic construct
  source 1..75: mol_type = other DNA
gtattatcgaactggttaaacagcagggttatgtcagtaccgaggaactggtggagcacttctccgtcagcccgc

SEQ ID NO: 783595 - DNA, 75 bp, synthetic construct
  source 1..75: mol_type = other DNA
atgccaagtaccgccggtccgggaaccattgcgatgattattagctcggcgtccacagtgcgtcagagttcaacc

SEQ ID NO: 783596 - DNA, 75 bp, synthetic construct
  source 1..75: mol_type = other DNA
aatgtgcgcgtcgaatatttgggtaaaaaagggcacttaacccttcagatgacgaccctgcgtgagctgccgcca

SEQ ID NO: 783597 - DNA, 75 bp, synthetic construct
  source 1..75: mol_type = other DNA
cgaattacgcagccgcgatggtgggatcattggcgaagcgacgctcgattttatctcccagttccgtctggactt

SEQ ID NO: 783598 - DNA, 75 bp, synthetic construct
  source 1..75: mol_type = other DNA
ttcaacgctgtttatcgatatcggcaccacgccggaagcggtggcgcacgcgctgctcaatcacagcaatttgcg

SEQ ID NO: 783599 - DNA, 75 bp, synthetic construct
  source 1..75: mol_type = other DNA
aggctttgtgaagaaattgaacagcgaataaaggaaagtgataagaaataccacgaggatattattgacgactac

SEQ ID NO: 783600 - DNA, 75 bp, synthetic construct
  source 1..75: mol_type = other DNA
atcgctattctacgcaaggtttttatagcctacagtcgaatgagtggttacaccgtcaagcctcctaccggagac

SEQ ID NO: 783601 - DNA, 75 bp, synthetic construct
  source 1..75: mol_type = other DNA
atggcgacagtacgcagtcacgatcagtacaacacgacgatttatggtatggatgatcgctatcgaggggtattc

SEQ ID NO: 783602 - DNA, 75 bp, synthetic construct
  source 1..75: mol_type = other DNA
tggaaattacggtacgacatttttcagtgccagtcgccaaagttactggaacacgtcacgcagcgaccagcaaat

SEQ ID NO: 783603 - DNA, 75 bp, synthetic construct
  source 1..75: mol_type = other DNA
atgctgatggtgtcacctttggacagccgatgggtgacactatggttctggttaaggctcctggcgcggagaatg

SEQ ID NO: 783604 - DNA, 75 bp, synthetic construct
  source 1..75: mol_type = other DNA
cacttggtgcgacgcgggtaatttatccggcaaaccagaaacaggttttattgcctgtcacgaataatgatcctg

SEQ ID NO: 783605 - DNA, 75 bp, synthetic construct
  source 1..75: mol_type = other DNA
aaaataaattcaacagaagcgatgttgcccgatagccaacatggtttcgctccggtgattcatggtattgcccgt

SEQ ID NO: 783606 - DNA, 75 bp, synthetic construct
  source 1..75: mol_type = other DNA
atgttcacccttcacccattattcaccacctatcactctgaaataaaaggagaaaatcaaagggtgaacagtgtg

SEQ ID NO: 783607 - DNA, 75 bp, synthetic construct
  source 1..75: mol_type = other DNA
acttatctcactgttcgagctattgggcaagcaggtgaacctctttatccgtagatacgaaagcgagcatggtag

SEQ ID NO: 783608 - DNA, 75 bp, synthetic construct
  source 1..75: mol_type = other DNA
tccgaaaaatatgagtgaatcttattcattgagtaacgcatgtattaaagagggcactgttgcaaatagtcggtg

SEQ ID NO: 783609 - DNA, 75 bp, synthetic construct
  source 1..75: mol_type = other DNA
cggctatgtttctcctgatctgtgggaagaaggaataaatgctgggcttctaaactatagttttaatggtaattc

SEQ ID NO: 783610 - DNA, 75 bp, synthetic construct
  source 1..75: mol_type = other DNA
atgcgctgccagttgagtcgtgtccgtgcgatggtgattctcagtgctgggtgacacgtggctggcatgagacta

SEQ ID NO: 783611 - DNA, 75 bp, synthetic construct
  source 1..75: mol_type = other DNA
tacgccggttgagctgtggggcaaggagatcaaaattgatgatgtcgccgccgctgccggaacggtgggttatga

SEQ ID NO: 783612 - DNA, 75 bp, synthetic construct
  source 1..75: mol_type = other DNA
ggtttaatctacgaattttgcgtgaagtattgcaagcctgtcaaaagcaggggtatatggcaaatcacctggatt

SEQ ID NO: 783613 - DNA, 75 bp, synthetic construct
  source 1..75: mol_type = other DNA
ccatggctggctggcgctggactgtgacagcgaagacgaagacatccaagccgatattcgcaaaacgctggtgca

SEQ ID NO: 783614 - DNA, 75 bp, synthetic construct
  source 1..75: mol_type = other DNA
cgccatctcattgatgacaagcgtccggtgccggagttgccagaaaaatatcgcccgaaaaaacctcgtgaatag

SEQ ID NO: 783615 - DNA, 75 bp, synthetic construct
  source 1..75: mol_type = other DNA
tttcttttgacagtaatgagtcagtcgttttgtggcagataaatttgtttcctgattacccattttttctttatg

SEQ ID NO: 783616 - DNA, 75 bp, synthetic construct
  source 1..75: mol_type = other DNA
aaaaccgtggtgctcaccggtagcttaagtcagatgtcgcgtgatgacgctaaagctcgcctggtcgaactgggc

SEQ ID NO: 783617 - DNA, 75 bp, synthetic construct
  source 1..75: mol_type = other DNA
gtcactcagtggataaaaagagaatttagcttacaaggaatactgacggggatttatcaggatttgatgcatcga

SEQ ID NO: 783618 - DNA, 75 bp, synthetic construct
  source 1..75: mol_type = other DNA
gcggcattcataactcggtcacccgcgtttgcccgaaaccaacgcatatgattggcggttacgcgcagctggcct

SEQ ID NO: 783619 - DNA, 75 bp, synthetic construct
  source 1..75: mol_type = other DNA
gttgcacttaccaacaaaaatggtggaacgcctctctacctagctcctcccgtaatgaccatcacaaatgaacga

SEQ ID NO: 783620 - DNA, 75 bp, synthetic construct
  source 1..75: mol_type = other DNA
tgccgattcacatcgtaaaggagctgaacgtttacctgcgaaccgcacgtgagttgtcccataagctggaccacg

SEQ ID NO: 783621 - DNA, 75 bp, synthetic construct
  source 1..75: mol_type = other DNA
cgaagcgttacatacttcttttcaaaggtaccaccctcccaaaaaggatcgtacctttatgcaaaggttaaaaat

SEQ ID NO: 783622 - DNA, 75 bp, synthetic construct
  source 1..75: mol_type = other DNA
cacaaagcgggttatatggtctggcaggcggactggcggaggaatatctacaagcgatgggaatggcggcgcgtt

SEQ ID NO: 783623 - DNA, 75 bp, synthetic construct
  source 1..75: mol_type = other DNA
cgcatctggtggtggatgtgccgcataacatcatccttcgcgagcatgaaatgaatattcatcgcaaaggtgcaa

SEQ ID NO: 783624 - DNA, 75 bp, synthetic construct
  source 1..75: mol_type = other DNA
ggtggactggcggaggaatatctacaagcgatgggaatggcggcgcgttacgcatggttaaatcgcgtgaccatt

SEQ ID NO: 783625 - DNA, 75 bp, synthetic construct
  source 1..75: mol_type = other DNA
gaagtgccaatgctgtcgctggataacgtttttgatgaagaaagctttcttgctttcaacaaacgtgtgcaggac

SEQ ID NO: 783626 - DNA, 75 bp, synthetic construct
  source 1..75: mol_type = other DNA
atgagctatacggatagcagcagactcacgcctaaaacggatgcaagtcagaaggcctcttccccgcagcctgtt

SEQ ID NO: 783627 - DNA, 75 bp, synthetic construct
  source 1..75: mol_type = other DNA
gctgaaaaagcagtttcctacctgccagattaccgtcaccaccgaagtgtataacggcgtctgggatgcgattat

SEQ ID NO: 783628 - DNA, 75 bp, synthetic construct
  source 1..75: mol_type = other DNA
ctgagtctatacatcaatccttttttcagcttcgggattcgcttgatgctttttcatgcctttcctacatgattc

SEQ ID NO: 783629 - DNA, 75 bp, synthetic construct
  source 1..75: mol_type = other DNA
atgaaaacacagcatgatcattatgaccgcctgtccgtcaggctatcggtcattatcagccgcctactggctggc

SEQ ID NO: 783630 - DNA, 75 bp, synthetic construct
  source 1..75: mol_type = other DNA
cattatcacccgcttactggctggcgaatctctggagcttaaagcgttagctgatgaatttggtgtctcagaacg

SEQ ID NO: 783631 - DNA, 75 bp, synthetic construct
  source 1..75: mol_type = other DNA
atcgaaagtaagttctatgacgcatcgtcctatgcaggcaaaacctgtacgctgcgcataaaactggcacccgat

SEQ ID NO: 783632 - DNA, 75 bp, synthetic construct
  source 1..75: mol_type = other DNA
gacgtcgagtttcaggttgggcgtactggcgcgattacgcctgttgcacgtctcgaacctgtccatgtcgcgggt

SEQ ID NO: 783633 - DNA, 75 bp, synthetic construct
  source 1..75: mol_type = other DNA
ttcacggcgagaatatcccggcgcgtctggaagttcgtggtgaagtgttcctgccgcaggccggcttcgaaaaga

SEQ ID NO: 783634 - DNA, 75 bp, synthetic construct
  source 1..75: mol_type = other DNA
ggaagatatcacgtctaatgtgcgtactattcgcgccattccgctgaagctgcacggagagaatatcccggcgcg

SEQ ID NO: 783635 - DNA, 75 bp, synthetic construct
  source 1..75: mol_type = other DNA
ggcggtctgtgcagacaaagtggacatgattattgcgtgtcaggagcgaaacagtgaacaaaccacaatccctgc

SEQ ID NO: 783636 - DNA, 75 bp, synthetic construct
  source 1..75: mol_type = other DNA
atttctccggctcatccgctggcgtttattcctgagcccatttctgagagtcagttacgtctgtacccgaacatc

SEQ ID NO: 783637 - DNA, 75 bp, synthetic construct
  source 1..75: mol_type = other DNA
tcaggattcacgaatgctgttggcaaccaggcattcggcaagcggtcaagtcactcagtggataaaaagagaatt

SEQ ID NO: 783638 - DNA, 75 bp, synthetic construct
  source 1..75: mol_type = other DNA
atgaacagaaaactgttggccttattgatggcagtcatagcgctacctgtcgcagcagcgcagtacgtaaaaccc

SEQ ID NO: 783639 - DNA, 75 bp, synthetic construct
  source 1..75: mol_type = other DNA
taatgcctcaacgggggatggttcgggcgtatgcaatatagagggaacggcacagcaaatagctgccggagaaag

SEQ ID NO: 783640 - DNA, 75 bp, synthetic construct
  source 1..75: mol_type = other DNA
atgacacgtggttgcgagggatactgcggggcttctgcggcaggcgcaatggatggtctatttaataagaaataa

SEQ ID NO: 783641 - DNA, 75 bp, synthetic construct
  source 1..75: mol_type = other DNA
aaagcccgcactcaggacgcagggctggcagcagcgctggagattgcgcggctgatggggctgcgttcgcaggag

SEQ ID NO: 783642 - DNA, 75 bp, synthetic construct
  source 1..75: mol_type = other DNA
tggagccacccggctaaccatcgtgtttggcaccaaaggcgggcggccccgcgatacccttattcagaatgctgg

SEQ ID NO: 783643 - DNA, 75 bp, synthetic construct
  source 1..75: mol_type = other DNA
ggtgacgggcgtgggcggtatgtggcgcaggtttatgggcaaatcactgttgcttttgtgtccgacaaagcgata

SEQ ID NO: 783644 - DNA, 75 bp, synthetic construct
  source 1..75: mol_type = other DNA
caaaaaaggcgcgaccgaacgtgaagaactgcgggtatcgaaaatcaccgtgctgattttgggtgtgattgcgat

SEQ ID NO: 783645 - DNA, 75 bp, synthetic construct
  source 1..75: mol_type = other DNA
cccgtaacgactactacaccgcaggcggtaatatcaccggcttccagaacggtctggcgatagccggtgactata

SEQ ID NO: 783646 - DNA, 75 bp, synthetic construct
  source 1..75: mol_type = other DNA
gatgatgtacgtcctgttcggcggcatgctggcgaccacctgggtacagattatcaaagctgtgctgttgctgtt

SEQ ID NO: 783647 - DNA, 75 bp, synthetic construct
  source 1..75: mol_type = other DNA
ccatccacagtttttcgccaaaggggaagaggaacaaacgcttaatcgcggtttacatcagcgcggcgttaatcg

SEQ ID NO: 783648 - DNA, 75 bp, synthetic construct
  source 1..75: mol_type = other DNA
ggggctgattaccgcagtggtactgatgatcctcggcccgacgatttgggtacagatcctcggtcacgaaaaggc

SEQ ID NO: 783649 - DNA, 75 bp, synthetic construct
  source 1..75: mol_type = other DNA
gcttctttacggtcagcgatgcccgcgaagcacgtaagagcgtgttctacgccaccggatttatgggctacttct

SEQ ID NO: 783650 - DNA, 75 bp, synthetic construct
  source 1..75: mol_type = other DNA
cggggaaaaccggctgaaagtggtgtttggcaccaaaggtgggcgtccccgccatacgacagttctggatactgg

SEQ ID NO: 783651 - DNA, 75 bp, synthetic construct
  source 1..75: mol_type = other DNA
tcgatcaggtgcaaaatacctattcagatattggcacaaccgcaggctggctggcgctgtccatcccgtttattg

SEQ ID NO: 783652 - DNA, 75 bp, synthetic construct
  source 1..75: mol_type = other DNA
gtggggcgtggtttcaggattcgctcaatggtgtggcgtcgtttctggacagccgcgcgggcgatgcactgattg

SEQ ID NO: 783653 - DNA, 75 bp, synthetic construct
  source 1..75: mol_type = other DNA
aacatcgccgcaatagtgctgaatctcaggtcgataatgataaaaattctgtgaactcatccggtaattctgcca

SEQ ID NO: 783654 - DNA, 75 bp, synthetic construct
  source 1..75: mol_type = other DNA
ctggccagccagctgtcgtccaccttctccagtctgaagagtcaggcatcgcaatataatgacgctgttacccgt

SEQ ID NO: 783655 - DNA, 75 bp, synthetic construct
  source 1..75: mol_type = other DNA
ccatcgtgaaggccatatgaccagtcagctggagagcggggcgatgaagacgctgacgacttccgggcagtcggt

SEQ ID NO: 783656 - DNA, 75 bp, synthetic construct
  source 1..75: mol_type = other DNA
tacagggtaacaagtgggacaccaactacagccatcgtgaaggccatatgaccagtcagctggagagcggggcaa

SEQ ID NO: 783657 - DNA, 75 bp, synthetic construct
  source 1..75: mol_type = other DNA
tatggcaccaaaggtggtcggccccgcgaaacggtcattctggatgctggggcagttcgcaaggcgctggagaat

SEQ ID NO: 783658 - DNA, 75 bp, synthetic construct
  source 1..75: mol_type = other DNA
gccgatcgttcatccgaaagtcactacctttaccgatttggcgcagttgcctgcgctctggaaggcgcggggctg

SEQ ID NO: 783659 - DNA, 75 bp, synthetic construct
  source 1..75: mol_type = other DNA
tcgactgcgacggtacgctggtcgatagcgagatcatttgctctcgcgcctatgtcacgatgttcaaagaattcg

SEQ ID NO: 783660 - DNA, 75 bp, synthetic construct
  source 1..75: mol_type = other DNA
gactgaagggggaattttccccgcactcgctgcgttatgcgtgggcgcaggacgcgatccgccattatctggcgc

SEQ ID NO: 783661 - DNA, 75 bp, synthetic construct
  source 1..75: mol_type = other DNA
acggcacgcgccgcgccatcacgccggaacattaccagcaggtgatggagaaagcccgcactcaggacgcagggc

SEQ ID NO: 783662 - DNA, 75 bp, synthetic construct
  source 1..75: mol_type = other DNA
tgcagtcagaaaggcggtggaaaacgcgttaccgatcgccagacagcgcaatggcaggctgatcgacaggcctga

SEQ ID NO: 783663 - DNA, 75 bp, synthetic construct
  source 1..75: mol_type = other DNA
acgctggcgggcgcatcggcggtgtctcacgacctgtacgctaacgtcttcaaaaaaggcgcgaccgaacgtgaa

SEQ ID NO: 783664 - DNA, 75 bp, synthetic construct
  source 1..75: mol_type = other DNA
gcaaggcgcagcacacttctttggtgagccgatgctggatatcaaagactggatgcgcaccgatgccaacggtaa

SEQ ID NO: 783665 - DNA, 75 bp, synthetic construct
  source 1..75: mol_type = other DNA
aatgagcttaatctttctaatattttgcttaaacgctatagctatttattatcacaacacgctaaggaacataaa

SEQ ID NO: 783666 - DNA, 75 bp, synthetic construct
  source 1..75: mol_type = other DNA
gaaaaagaagttgcagcatcaaaaaaagaaataaccgatgcttttaataactttaaaaaagactctagacaagta

SEQ ID NO: 783667 - DNA, 75 bp, synthetic construct
  source 1..75: mol_type = other DNA
gtccttctgtggtggaacgggcgatggtgattgcgccttgttcgcggatgggaccggtgacggaagatgagcgta

SEQ ID NO: 783668 - DNA, 75 bp, synthetic construct
  source 1..75: mol_type = other DNA
gcgtcaatgactggcaaccgcatgccaatccggtggtggtgtgggatatctttggcgagaaaggccatccggtgc

SEQ ID NO: 783669 - DNA, 75 bp, synthetic construct
  source 1..75: mol_type = other DNA
aaaagcgccgcccgccaggtgacgaatcagattgtgcgcgggatgttggggagtttgctggggggggagaagaag

SEQ ID NO: 783670 - DNA, 75 bp, synthetic construct
  source 1..75: mol_type = other DNA
atgcctggcgggaatcccgtggcgatattaggtaaaggatggagagcgtaccgttcgggtggtggcagtcaggat

SEQ ID NO: 783671 - DNA, 75 bp, synthetic construct
  source 1..75: mol_type = other DNA
gtggaccagttgtctgcagccctgaactcagcgaaacagagttacgaccagtacacgacgaatatgacccgcagc

SEQ ID NO: 783672 - DNA, 75 bp, synthetic construct
  source 1..75: mol_type = other DNA
aactgaagttatcgacagaaaactggctgccctgtaccactggttcaggaaataccacaggacacacgccgcacc

SEQ ID NO: 783673 - DNA, 75 bp, synthetic construct
  source 1..75: mol_type = other DNA
acaacgcataattgattatgctgaatttgtggcgtcgcaagaagctgtgttatgggataagccgggaatgaatgg

SEQ ID NO: 783674 - DNA, 75 bp, synthetic construct
  source 1..75: mol_type = other DNA
gtaatatccgtaatgatgtaaaacatcaggttgataatatggtcacagaatataaagggaatatcggagatactc

SEQ ID NO: 783675 - DNA, 75 bp, synthetic construct
  source 1..75: mol_type = other DNA
agaacgccgtcgggctatggcgtggtcttttgttcaggaacaggtgcagcctggtgttgataatgcctggcgtga

SEQ ID NO: 783676 - DNA, 75 bp, synthetic construct
  source 1..75: mol_type = other DNA
aggatgaggtggaccgggaatccgcctatgagatgttgcaaaaaggcgtacaggcaagcgccgagcagcaaaata

SEQ ID NO: 783677 - DNA, 75 bp, synthetic construct
  source 1..75: mol_type = other DNA
gcgggcttgccgcacattctgatgcgcttctttacagtcagcgatgcccgcgaagcacgtaagagcgtgttctac

SEQ ID NO: 783678 - DNA, 75 bp, synthetic construct
  source 1..75: mol_type = other DNA
ggcggtacacccgaaaggtgtcgacatcatgaaaccgggcggactggtgaaagatccgatctccgcgctctctct

SEQ ID NO: 783679 - DNA, 75 bp, synthetic construct
  source 1..75: mol_type = other DNA
tctgtcaccttaaaaaaactatcttatataaataagatctcagcattacttagtgtatattatcatggtgattgc

SEQ ID NO: 783680 - DNA, 75 bp, synthetic construct
  source 1..75: mol_type = other DNA
aggcgattattatgttcctgattttcgtcgtgtttacgctcggcattacctactgggcgtcaaaacgcgtacgtt

SEQ ID NO: 783681 - DNA, 75 bp, synthetic construct
  source 1..75: mol_type = other DNA
cgataattcagaggaaggcgcgcgcgagcgtgaactattccgcgcgcaatttatccgctcccagacgggttttgg

SEQ ID NO: 783682 - DNA, 75 bp, synthetic construct
  source 1..75: mol_type = other DNA
cagaatatcgccttcatggtgggcctggcatttgccatcgcggcgagctgcaacttcccaattattctgctttcc

SEQ ID NO: 783683 - DNA, 75 bp, synthetic construct
  source 1..75: mol_type = other DNA
tttacgcctaaagatcagaaagcagtgaaggcagcggcgcaaaccatgcgggccaatccgacgtttgataccgaa

SEQ ID NO: 783684 - DNA, 75 bp, synthetic construct
  source 1..75: mol_type = other DNA
tcgcgttcaacacgctttgcgtgcttttacgcctaaagatcagaaagcagtaaaagctgcggcgcaaaccatgcg

SEQ ID NO: 783685 - DNA, 75 bp, synthetic construct
  source 1..75: mol_type = other DNA
gctttcagagttgtatgaacaattgccggaagcgggcgatggtgattgccccctgttcacgaatggggccggtga

SEQ ID NO: 783686 - DNA, 75 bp, synthetic construct
  source 1..75: mol_type = other DNA
aagccaggtgcgatttgtctttgcctgatgcgacgctggcgcgtcttattatggccacaccactgcaatatattg

SEQ ID NO: 783687 - DNA, 75 bp, synthetic construct
  source 1..75: mol_type = other DNA
tttacgcctaaagatcagaaagcagtgaaggcagcggcgcaaaccatgcgggccaatccaacatttgataccgaa

SEQ ID NO: 783688 - DNA, 75 bp, synthetic construct
  source 1..75: mol_type = other DNA
aagtgaagatgacggtattctgggtgggttgaaggatattttgtttggcactaccggaccgcgcggcgggaagaa

SEQ ID NO: 783689 - DNA, 75 bp, synthetic construct
  source 1..75: mol_type = other DNA
atgttcaagcgtcgttatgtagcactacttcccatttttgtattacttgccgcctgtagcagcaagccaaaacct

SEQ ID NO: 783690 - DNA, 75 bp, synthetic construct
  source 1..75: mol_type = other DNA
aggtgacctggtggcggtgatggcaaacggccaggctccaggtttaccaaatggtttcaaaactaagtacagcgt

SEQ ID NO: 783691 - DNA, 75 bp, synthetic construct
  source 1..75: mol_type = other DNA
ctcccaggcgaagcgtctggattcggtactgcggctgatggataaccaggcaccaaccacatcggtgaaaccgcc

SEQ ID NO: 783692 - DNA, 75 bp, synthetic construct
  source 1..75: mol_type = other DNA
ttatatctgggggggcacgcggcctgataaaggcttcgactgtagcgggttggttttttatgcctacaacaagat

SEQ ID NO: 783693 - DNA, 75 bp, synthetic construct
  source 1..75: mol_type = other DNA
tgaaaaagttattttgaagactgacgataatactgacacaggggcgaccctctccctgagagaaaaggagagcgg

SEQ ID NO: 783694 - DNA, 75 bp, synthetic construct
  source 1..75: mol_type = other DNA
cgccgtccggcggcttcctgcttgagccgcagcacaatgtgatgcagatgggcggtgacttcgctaacaacccga

SEQ ID NO: 783695 - DNA, 75 bp, synthetic construct
  source 1..75: mol_type = other DNA
gggcaacgattgtggcgaataacgacctgcgccggggagatttgctgtttttccatatccacagccgcgagattg

SEQ ID NO: 783696 - DNA, 75 bp, synthetic construct
  source 1..75: mol_type = other DNA
ccgctggaactggtcgatatggttgagaaactggacctgtacatcaccgttaaaggtggtggtatctctggtcag

SEQ ID NO: 783697 - DNA, 75 bp, synthetic construct
  source 1..75: mol_type = other DNA
agagcaacagtaatttcactcctcaaaggccgttacgctgattttggacctacgtttgcgtgcgaaaaattgcgc

SEQ ID NO: 783698 - DNA, 75 bp, synthetic construct
  source 1..75: mol_type = other DNA
cgggtaagtcggttagctgaacctttccggcaggatcactttttgggcgcgcgcaggattttgacagaagagacg

SEQ ID NO: 783699 - DNA, 75 bp, synthetic construct
  source 1..75: mol_type = other DNA
atttgggctatgggcaatttatcgagtcgccacgtaccggcgaaaccattcggataagccgattaaccgaacctt

SEQ ID NO: 783700 - DNA, 75 bp, synthetic construct
  source 1..75: mol_type = other DNA
atatctctttcagctacgccgcccgccagcggatgcaaaaccgtgcgcgtttattaaaacagtaccaaacccatc

SEQ ID NO: 783701 - DNA, 75 bp, synthetic construct
  source 1..75: mol_type = other DNA
acagggtgatgagaaagtgtatctgatgacggatggcggtcagcgcacaggtgcgacgctttccctgaaggaaaa

SEQ ID NO: 783702 - DNA, 75 bp, synthetic construct
  source 1..75: mol_type = other DNA
gttttttatgcctacaacaagatccttgaggctaagctcccgcgcacggccaatgagatgtaccactaccgtcgg

SEQ ID NO: 783703 - DNA, 75 bp, synthetic construct
  source 1..75: mol_type = other DNA
gcaacgattgtggcgaacaacgacctgcgccggggagatttgctgtttttccatattcacagtcgtgagattgcc

SEQ ID NO: 783704 - DNA, 75 bp, synthetic construct
  source 1..75: mol_type = other DNA
actgaatatagggaaaacagagtggcgctggataccaataccctggctgataacgtcgatttagataacgcggtc

SEQ ID NO: 783705 - DNA, 75 bp, synthetic construct
  source 1..75: mol_type = other DNA
atgaaaatacgaacagctttgctggtaattagtttaccgctatgtttttttgtatctgcaaatgcaaaaacgttt

SEQ ID NO: 783706 - DNA, 75 bp, synthetic construct
  source 1..75: mol_type = other DNA
ttattaaaacagtaccaaacccatctgaaaaaacaggccagctacattgtggaaggcaatgccgaaagcagaagg

SEQ ID NO: 783707 - DNA, 75 bp, synthetic construct
  source 1..75: mol_type = other DNA
tgcacaaagcagaaaggcgctacgccagcacaaccgggcgcagattaagcagcatcctgaatggtttcccggccc

SEQ ID NO: 783708 - DNA, 75 bp, synthetic construct
  source 1..75: mol_type = other DNA
gggaatggctgacggagccggagattcaggcggtaacggactgcctgtcccgcgccgtgcgggatatctcccggc

SEQ ID NO: 783709 - DNA, 75 bp, synthetic construct
  source 1..75: mol_type = other DNA
ttgagcgacataatctgaatctgagacaacatctggcaaggctgggacggaagttactgtcgttctcaaaatcgg

SEQ ID NO: 783710 - DNA, 75 bp, synthetic construct
  source 1..75: mol_type = other DNA
ctgcgtggcgctggaagactctgtaaacggcatgatcgcctctaaagcggcacgtatgcgttctatcgtcgtccc

SEQ ID NO: 783711 - DNA, 75 bp, synthetic construct
  source 1..75: mol_type = other DNA
tactgcgttcgaagatatcaactggacgctcagctatagcctgacgaaaaacgcctggcaaaaaggacgtgatca

SEQ ID NO: 783712 - DNA, 75 bp, synthetic construct
  source 1..75: mol_type = other DNA
cccttgtgatgcgccgtgcgcgcgatctgatcgctgattacggatggcccgaccataccgatgttgaccagcgcg

SEQ ID NO: 783713 - DNA, 75 bp, synthetic construct
  source 1..75: mol_type = other DNA
gaaacttccgtctggttgtgaaggaaaatgatatgccctgctggctggacgatgatgacaatttgccggtggtgc

SEQ ID NO: 783714 - DNA, 75 bp, synthetic construct
  source 1..75: mol_type = other DNA
tcatgccggaagcagaaaatgaggtcaaagctacagccgccgagtttggcattgaactgacggcgattggtgaac

SEQ ID NO: 783715 - DNA, 75 bp, synthetic construct
  source 1..75: mol_type = other DNA
agggcatgttaaaggtgagtacaccggaagaagtggctcctcgcacgggaccagttccgatcagatccgacaggg

SEQ ID NO: 783716 - DNA, 75 bp, synthetic construct
  source 1..75: mol_type = other DNA
taccgtgtgcagcaggctgacatggaaaatagcgccgcgcagcacggcgtaaaagcagggggcgaggtggcaaca

SEQ ID NO: 783717 - DNA, 75 bp, synthetic construct
  source 1..75: mol_type = other DNA
gtaaaactgcatccagcagctggcaacaacaactgcgtgactcactgagtgagtcgcagagcctcactaacagcc

SEQ ID NO: 783718 - DNA, 75 bp, synthetic construct
  source 1..75: mol_type = other DNA
aaaaaagacaaaatgattggataggtgacaatagtttcgggagaaaggagttgaacaatatcaaagataatctgc

SEQ ID NO: 783719 - DNA, 75 bp, synthetic construct
  source 1..75: mol_type = other DNA
aacagcaggctgacatggaaaatagcgctgcgcagcacggcgtaaaagcagagggcgaggtggcaacagatgtgc

SEQ ID NO: 783720 - DNA, 75 bp, synthetic construct
  source 1..75: mol_type = other DNA
tccgaaagaatgtgataatgaacggcctgcgcagcggactggagagtttttccgcactgagcggggatacggcag

SEQ ID NO: 783721 - DNA, 75 bp, synthetic construct
  source 1..75: mol_type = other DNA
ggctgcagggagcagtgatttccggttctctgagccggagattcagcgcatgttctcggattatgttcataactg

SEQ ID NO: 783722 - DNA, 75 bp, synthetic construct
  source 1..75: mol_type = other DNA
tgcagcaaatgcaaatggaaaacagggccaacgaaagcggcgtgagacaacagggcgatgtcagtggtgatgtgg

SEQ ID NO: 783723 - DNA, 75 bp, synthetic construct
  source 1..75: mol_type = other DNA
ggagaataccgtgaacagcaggctgacatggaaaatagcgctgcgcagcacggcgtaaaagcagagggtgtggtg

SEQ ID NO: 783724 - DNA, 75 bp, synthetic construct
  source 1..75: mol_type = other DNA
ccaccttctccagcctgaagagtcaggcgtcacaatataatgatgccgttacccgtagccatgagtatgcccggc

SEQ ID NO: 783725 - DNA, 75 bp, synthetic construct
  source 1..75: mol_type = other DNA
tgcttttcggggcgcaactggcggcagggagcagtgatttccggttctctgagccagaaattcagcgcatgttct

SEQ ID NO: 783726 - DNA, 75 bp, synthetic construct
  source 1..75: mol_type = other DNA
cagtgagcttgaaatcactcataatctaacagtgaccaaaacagcctcagccattgcaccaaagcaaccgaagcg

SEQ ID NO: 783727 - DNA, 75 bp, synthetic construct
  source 1..75: mol_type = other DNA
ttataacaccctgttacgtatagccgaaatttccaggatcagggttaaagatatctcacgtactgacggtgggag

SEQ ID NO: 783728 - DNA, 75 bp, synthetic construct
  source 1..75: mol_type = other DNA
gctggaccaacgtaaacattgtcatgaactacattcgtaacctggatagtgaaacgggggcaatggtgcgcctgc

SEQ ID NO: 783729 - DNA, 75 bp, synthetic construct
  source 1..75: mol_type = other DNA
ctgaccgcaaagcaatggagtctttaaccgggaaggggagaggtttgaatgctcccccacaattccccggcatca

SEQ ID NO: 783730 - DNA, 75 bp, synthetic construct
  source 1..75: mol_type = other DNA
cccaatacagccacggcgctggttgcggctgtaaaatttccccaaaagtgttggaaaccatcttgcacagtgagc

SEQ ID NO: 783731 - DNA, 75 bp, synthetic construct
  source 1..75: mol_type = other DNA
catgtgcaaaacgcctcaacattcccgaaatgaatggacgttatttcaatgcaggcgttatctatgtcaatctta

SEQ ID NO: 783732 - DNA, 75 bp, synthetic construct
  source 1..75: mol_type = other DNA
tgtatggtgctggcgtttcaatttcttccgttttgattaataattcagatattaattttgtctttcatgttttca

SEQ ID NO: 783733 - DNA, 75 bp, synthetic construct
  source 1..75: mol_type = other DNA
aatgggattcagtgatacccatctccgttgctatgtcttacatgacgacgatggccagcacatacacattatcgc

SEQ ID NO: 783734 - DNA, 75 bp, synthetic construct
  source 1..75: mol_type = other DNA
accttataagtacacggatcattagtgaactcgaaatcgctcacggtctgacagtgaccaagacagcagcttcca

SEQ ID NO: 783735 - DNA, 75 bp, synthetic construct
  source 1..75: mol_type = other DNA
gcagaagtcggctggacggctaacattgcttctaccggtaagatgaacggcttctcattcgaataccgcgatata

SEQ ID NO: 783736 - DNA, 75 bp, synthetic construct
  source 1..75: mol_type = other DNA
gaaattgccaggatcagggttaaagatatctcacgtactgacggtgggagaatgttaatccatattggcagaacg

SEQ ID NO: 783737 - DNA, 75 bp, synthetic construct
  source 1..75: mol_type = other DNA
atacaataccaggaaaagccaagaaactttcaagaaatgaaacaatgtatgaaaaacgaaccgggaatatctgca

SEQ ID NO: 783738 - DNA, 75 bp, synthetic construct
  source 1..75: mol_type = other DNA
ctatcggaacgaaccggggtgctttcaccaagagaagctctgcagcagatacttgataaaagtttatctgataag

SEQ ID NO: 783739 - DNA, 75 bp, synthetic construct
  source 1..75: mol_type = other DNA
atcgtcaacaacctggtaaggtgggacagatgggggtttcatcttatcaccgggcaacaggccgatcgacttgcc

SEQ ID NO: 783740 - DNA, 75 bp, synthetic construct
  source 1..75: mol_type = other DNA
cgatccccgacaaccgggaaaacatcaccattcatctggatgaccacatccagtctgttcagggtaaagaggact

SEQ ID NO: 783741 - DNA, 75 bp, synthetic construct
  source 1..75: mol_type = other DNA
cacattctggctgtacgaaagagtacactgctgcaaatcgacacacttatccggcaactggcagaaatctcagta

SEQ ID NO: 783742 - DNA, 75 bp, synthetic construct
  source 1..75: mol_type = other DNA
ccggaaatcagcgaggcgaatatcctgagtacattcgaacaactgcaccgaagtaaggatgaggtgtttgagcga

SEQ ID NO: 783743 - DNA, 75 bp, synthetic construct
  source 1..75: mol_type = other DNA
atggagaaacctgaaacggcaatgaaagccatcacacgcaatctcgatcgcgaaatctggcgtgacctgatgcaa

SEQ ID NO: 783744 - DNA, 75 bp, synthetic construct
  source 1..75: mol_type = other DNA
ggtaaggtgggaccggtgggcacttcatcttatcatcggacaacaggcagatcgactcgccgacctggaaagaat

SEQ ID NO: 783745 - DNA, 75 bp, synthetic construct
  source 1..75: mol_type = other DNA
ggattttcgctgtggctgctggctgatggagaaaccggaaaccgcaatgaaagccatcacacgcaatcttgatcg

SEQ ID NO: 783746 - DNA, 75 bp, synthetic construct
  source 1..75: mol_type = other DNA
ctacacctcgcgtattgaaccgttgtcactggatgaggcttatctcgacgtcaccgatagcgtccattgccacgg

SEQ ID NO: 783747 - DNA, 75 bp, synthetic construct
  source 1..75: mol_type = other DNA
gtaaagagcgctatgaagacgagatgttcatcattaaatattttaagaagggatctgcacacatcactttcaaaa

SEQ ID NO: 783748 - DNA, 75 bp, synthetic construct
  source 1..75: mol_type = other DNA
atcgtcaacaatctggtgaggtgggaccggtggggattgcatcttatcaccgggcaacaggcagatcgacttgcc

SEQ ID NO: 783749 - DNA, 75 bp, synthetic construct
  source 1..75: mol_type = other DNA
tcgccaaaatcgcctccgacatgaataaacccaacggccagtttgtgattacgccggcagaagttccgacatttt

SEQ ID NO: 783750 - DNA, 75 bp, synthetic construct
  source 1..75: mol_type = other DNA
gggatgctttccttaatggatgcacaggcccgtgatacatggtaccgatcactggagtacgataattttccggaa

SEQ ID NO: 783751 - DNA, 75 bp, synthetic construct
  source 1..75: mol_type = other DNA
gaaacgccgtggtttaacatctcggcgaccatcatccgcgaacgcttgcaaaacggcgaatcatgtgaagatttg

SEQ ID NO: 783752 - DNA, 75 bp, synthetic construct
  source 1..75: mol_type = other DNA
ctgaacgttggacagccgatcaaatcctcgaagaacatcaatttgcgttgcagctggtaaatgatgaagttccgg

SEQ ID NO: 783753 - DNA, 75 bp, synthetic construct
  source 1..75: mol_type = other DNA
atgaacaacagcgcttttactttccagacactacacccggataccatcatggacgctctgtttgagcaagggatc

SEQ ID NO: 783754 - DNA, 75 bp, synthetic construct
  source 1..75: mol_type = other DNA
agacggggcgcaaacagctttttatccatcgcccgaccatcggtctgaatgaatatctcattgaaccacgtaagt

SEQ ID NO: 783755 - DNA, 75 bp, synthetic construct
  source 1..75: mol_type = other DNA
taacacgtagcgccgacagcgaatacccctatcgtcagaacagtgacttctggtacttcaccggctttaacgaac

SEQ ID NO: 783756 - DNA, 75 bp, synthetic construct
  source 1..75: mol_type = other DNA
gattactggcggcggcagacagcgacctttatagagcaggtaaaagttctacaagaaccccctttgcaattaaca

SEQ ID NO: 783757 - DNA, 75 bp, synthetic construct
  source 1..75: mol_type = other DNA
cgctttgtcgttaaattttatcgtcctgaacgctggacagcctatcaaatcctcgaagaacatcaatttgcgttg

SEQ ID NO: 783758 - DNA, 75 bp, synthetic construct
  source 1..75: mol_type = other DNA
cagaacaaggatgaggtgtttaagcggggagtgattaacgtcttcagggaactgagctggaattataaaaccaac

SEQ ID NO: 783759 - DNA, 75 bp, synthetic construct
  source 1..75: mol_type = other DNA
tctgagcacatttgaacaactgcaccagaagaatgatgaggtgtttgaccggggcgtgatcaacgtcttcatagg

SEQ ID NO: 783760 - DNA, 75 bp, synthetic construct
  source 1..75: mol_type = other DNA
tctgagcacatttgaacaactgcaccagaataacgatgaggtgtttgagcggggcgtgatcaacgtcttcatagg

SEQ ID NO: 783761 - DNA, 75 bp, synthetic construct
  source 1..75: mol_type = other DNA
cggctacatggagactgccacgccgggaatattctctggcgcgatggtccaatgtttgttgatctggatgatgca

SEQ ID NO: 783762 - DNA, 75 bp, synthetic construct
  source 1..75: mol_type = other DNA
ttgggtcaggtctggatttaagttccattctcgatagcctcactgctgcgcaaaaagcgacgctaacccctattt

SEQ ID NO: 783763 - DNA, 75 bp, synthetic construct
  source 1..75: mol_type = other DNA
caaatcagcaatcgtcgtttaccgctaaacttagcgcctacggtacgctgaaaagcgcgctgacgactttccaga

SEQ ID NO: 783764 - DNA, 75 bp, synthetic construct
  source 1..75: mol_type = other DNA
attatcaacaatctggtgagatgggaccggtggggatgtcatcttatcaccggacaacagactgaccgactcgcc

SEQ ID NO: 783765 - DNA, 75 bp, synthetic construct
  source 1..75: mol_type = other DNA
atttggcgttgcttacggcaatgtttttggtcatcgcggttttacccattcgctggtgtttgcgtttgttgtccc

SEQ ID NO: 783766 - DNA, 75 bp, synthetic construct
  source 1..75: mol_type = other DNA
acaccaaagttcacccggcgtaccgcacgctgctggagaaacggcaggcgctggaagacgaaaaagccaaactta

SEQ ID NO: 783767 - DNA, 75 bp, synthetic construct
  source 1..75: mol_type = other DNA
tcggcctgatgctttctatcgtgggtgtgctgctgcgctcgttgttcaatcgcggcattgaaagcccgcaggtgc

SEQ ID NO: 783768 - DNA, 75 bp, synthetic construct
  source 1..75: mol_type = other DNA
atttgcgcgtctttatgctggtcgctcgtcgggctggttttgccgccgttgctgaagagctgggcgtttctcctg

SEQ ID NO: 783769 - DNA, 75 bp, synthetic construct
  source 1..75: mol_type = other DNA
gctgagctgggattacaaaaccaactcaccctgtaaattttgcagtaaaattatcgtcaacaatctggtgagatg

SEQ ID NO: 783770 - DNA, 75 bp, synthetic construct
  source 1..75: mol_type = other DNA
cacgccgtacgggcatcaggtgattatttctgaattgatgtgggtatggttgccggggatgctactgatgggaat

SEQ ID NO: 783771 - DNA, 75 bp, synthetic construct
  source 1..75: mol_type = other DNA
tgcacagcgaagttaacctgccgattgatttcctcgttaaccagacgctgacgctgggtacggagtggaatcagc

SEQ ID NO: 783772 - DNA, 75 bp, synthetic construct
  source 1..75: mol_type = other DNA
ataattttccggaaatcagcgaagcgaacattctgagcacatttaaacaactgcaccagaacaaggatgaggtgt

SEQ ID NO: 783773 - DNA, 75 bp, synthetic construct
  source 1..75: mol_type = other DNA
tttaacgaaaaagcgacacaggatttcgtcgatatcgatctcgatgacgtgatgctgcatagcgaagttaacctg

SEQ ID NO: 783774 - DNA, 75 bp, synthetic construct
  source 1..75: mol_type = other DNA
tgttgatcgactgcgatatgcgcaaaggttatacccacgagctgttgggcaccaataacgtcaatggcctgtcgg

SEQ ID NO: 783775 - DNA, 75 bp, synthetic construct
  source 1..75: mol_type = other DNA
agacggtgaaagtgactacctttaaccgcccgaaagagatggcggaccaggtgtttacgcttaatgtgctggacg

SEQ ID NO: 783776 - DNA, 75 bp, synthetic construct
  source 1..75: mol_type = other DNA
tggtgtgctaaaaccgaagaaagggctgattatccttggggcgattatccttggcctgatgctctctatcgtggg

SEQ ID NO: 783777 - DNA, 75 bp, synthetic construct
  source 1..75: mol_type = other DNA
catctgttcagcgacaaaccgattcccgacaaccgggaaaacatcactattcgtctggatggtcacatccagtcc

SEQ ID NO: 783778 - DNA, 75 bp, synthetic construct
  source 1..75: mol_type = other DNA
cacacatcacgttcaggaaaccagaactggttgacaggctaaatgacataattgccaggcactatccaaatgtat

SEQ ID NO: 783779 - DNA, 75 bp, synthetic construct
  source 1..75: mol_type = other DNA
tcctttcccgtgttttattaggtctggcagtaggtgttgcctcttataccgcaccgctgtatctctctgaaattg

SEQ ID NO: 783780 - DNA, 75 bp, synthetic construct
  source 1..75: mol_type = other DNA
tcagtggcatccccactcccgacaaccgggaaaatatcataattcgtctggatgagcatatccggtctgttcagg

SEQ ID NO: 783781 - DNA, 75 bp, synthetic construct
  source 1..75: mol_type = other DNA
tcaacgtcttcagagggctgaactggaattacaaaaccaattgcccctgtaaatttggcagtaaaattatcgtca

SEQ ID NO: 783782 - DNA, 75 bp, synthetic construct
  source 1..75: mol_type = other DNA
cattgctgcaaatcgacacacttatccgacaactggctgaaatatcagcaatgacagaaagtattggaggtaaaa

SEQ ID NO: 783783 - DNA, 75 bp, synthetic construct
  source 1..75: mol_type = other DNA
acatcacccttcgtctggatgatcacatccagtctgttcagggtcaggagtgctatgaagatgagatgttcagca

SEQ ID NO: 783784 - DNA, 75 bp, synthetic construct
  source 1..75: mol_type = other DNA
ccgtttgtttcatccattggtttattaacccagactggcgattacacgcggcgttcgtttatttatggcagcgtt

SEQ ID NO: 783785 - DNA, 75 bp, synthetic construct
  source 1..75: mol_type = other DNA
ccggatttatgacactgataaccgtaccgctggcggtaattccattttcaccgtttgtttcatccattggtttat

SEQ ID NO: 783786 - DNA, 75 bp, synthetic construct
  source 1..75: mol_type = other DNA
tggcagtggttcccgctcggcagtggtggcacgttgtcaccgggaattattctgacggcggtgattaccggtctg

SEQ ID NO: 783787 - DNA, 75 bp, synthetic construct
  source 1..75: mol_type = other DNA
tcaacataaaaaattcagcaaaatttaatattcgttcaactagccgtctcacatatgacattattagtcaactcc

SEQ ID NO: 783788 - DNA, 75 bp, synthetic construct
  source 1..75: mol_type = other DNA
tcagtaacggcttactggtcggaattttactggctgttcttatggataatcttattccgtgggaacgcatcgaat

SEQ ID NO: 783789 - DNA, 75 bp, synthetic construct
  source 1..75: mol_type = other DNA
accagtctggcggtggggattgcgatttccggcgtgctgacgatattgattggacttagtggattaggtcatcgc

SEQ ID NO: 783790 - DNA, 75 bp, synthetic construct
  source 1..75: mol_type = other DNA
ttggtgcttccggcaccgtgcaggcgttacaggaaatcatgatggcacaggggatggatgaacgcattaccctgg

SEQ ID NO: 783791 - DNA, 75 bp, synthetic construct
  source 1..75: mol_type = other DNA
cagtactgaactggtaaccggcacgggtgcacaaaccacctcgttgttcagcctgtcgatgggctgcgtcacctg

SEQ ID NO: 783792 - DNA, 75 bp, synthetic construct
  source 1..75: mol_type = other DNA
ttttcatatgctggttgtgcgcgaggtggctggaagcatccagacgctgacgcgaataaaacgcaaagtgcgtct

SEQ ID NO: 783793 - DNA, 75 bp, synthetic construct
  source 1..75: mol_type = other DNA
cacaccactggcggtgccgatcagcgcctggtggtggatatcggcggagccagtactgaactggtaaccggcacg

SEQ ID NO: 783794 - DNA, 75 bp, synthetic construct
  source 1..75: mol_type = other DNA
gggatggatgaacgcattaccctggaaaagttgcagcaactgaaacagcgagccattcattgcggtcggctggaa

SEQ ID NO: 783795 - DNA, 75 bp, synthetic construct
  source 1..75: mol_type = other DNA
gcctgtcgatgggctgcgttacttggctggaacgttattttgctaatcgtcatctgggacaagaaaactttgtcg

SEQ ID NO: 783796 - DNA, 75 bp, synthetic construct
  source 1..75: mol_type = other DNA
gaattttcgctgcggttgctggctgatggagaaacccgaaacagcaatgaaagccattacccggaatcttgaccg

SEQ ID NO: 783797 - DNA, 75 bp, synthetic construct
  source 1..75: mol_type = other DNA
tgagcacatttgaacaactgcaccagaataacgatgaggtgtttgaccggggagtgatcaacgtcttcacagggc

SEQ ID NO: 783798 - DNA, 75 bp, synthetic construct
  source 1..75: mol_type = other DNA
tgagcacatttgaacaactgcaccagaataacgatgacgtgtttgaccggggagtgatcaacgtcttcagagggc

SEQ ID NO: 783799 - DNA, 75 bp, synthetic construct
  source 1..75: mol_type = other DNA
ggaccagtggggatttcatcttatcagtggaattcaggcagatcgcctggctgacctggaaagaatgttgcatct

SEQ ID NO: 783800 - DNA, 75 bp, synthetic construct
  source 1..75: mol_type = other DNA
cgaactctggcgtgatctgatgcaacgttccgggatgctgagtctgatggatgcgcagacccgggacacatggta

SEQ ID NO: 783801 - DNA, 75 bp, synthetic construct
  source 1..75: mol_type = other DNA
ggatctgcacacatcactttcaaaaggctggaactgattgtaagcgtacagcctgaaccgtctggtcagaatctg

SEQ ID NO: 783802 - DNA, 75 bp, synthetic construct
  source 1..75: mol_type = other DNA
tgttcagcggcaaaccgatccccgacaacagggaaaacataactattcatctggacgatcacatccggtctcttc

SEQ ID NO: 783803 - DNA, 75 bp, synthetic construct
  source 1..75: mol_type = other DNA
ggcgcacggcagcaatccactggcggcgacattgcgtggacggcgggtcagccggatagcagttcatccggcgcg

SEQ ID NO: 783804 - DNA, 75 bp, synthetic construct
  source 1..75: mol_type = other DNA
ccatacaccacaaggcaatatcgtcatttccgcatttgaacagacgttatggcgaagcgatccagaaacgccgtt

SEQ ID NO: 783805 - DNA, 75 bp, synthetic construct
  source 1..75: mol_type = other DNA
taccggcgctgcgtgggcgtttacagaaaaacgccagtgacgcgcagttatgtaccacacttaaactttcaggcc

SEQ ID NO: 783806 - DNA, 75 bp, synthetic construct
  source 1..75: mol_type = other DNA
atgtgagcattatcgtttacgccgcgacgcacaaattctctcgcaatggaatggtgaaagcatctcggttgatcc

SEQ ID NO: 783807 - DNA, 75 bp, synthetic construct
  source 1..75: mol_type = other DNA
tgaagaggcagcgcaggcgctgttcgcacttgatgatgttcgcacagagcgcctgcgcgatcgcataacgcaatg

SEQ ID NO: 783808 - DNA, 75 bp, synthetic construct
  source 1..75: mol_type = other DNA
tcagcgggaaggcacaggacaacaacttattgcctgcactctgaaagagacccatgacctcgactatctttcagt

SEQ ID NO: 783809 - DNA, 75 bp, synthetic construct
  source 1..75: mol_type = other DNA
tattctgactttccatacgccactctttaaagatggtccgtacaaaacgcgacatctggcggatgaaaaactgat

SEQ ID NO: 783810 - DNA, 75 bp, synthetic construct
  source 1..75: mol_type = other DNA
tgaaaaggctggtgcatttggtgtatgatgtgcgccgcgatgacgcaccgctgcgtaaagtcgccgggataccgg

SEQ ID NO: 783811 - DNA, 75 bp, synthetic construct
  source 1..75: mol_type = other DNA
agacaatcacccagccctgcagcacgttcccggatgcttaaacagcgtgacatggctaaagggggcgagaaggaa

SEQ ID NO: 783812 - DNA, 75 bp, synthetic construct
  source 1..75: mol_type = other DNA
actaaacgatgccatcctttctgacgacgactggcttgaactggccggttttgctttcgctcatcgtccgctatt

SEQ ID NO: 783813 - DNA, 75 bp, synthetic construct
  source 1..75: mol_type = other DNA
gcgatcttatctactatcctgcaaagaagggagatgatgaacctgaaaacatcctgaaaatcgtcaaagaatggc

SEQ ID NO: 783814 - DNA, 75 bp, synthetic construct
  source 1..75: mol_type = other DNA
taccgtggggatcgtgggcgttggtaacgttggtcggcgtttacaggcacgactggaagcgttagggattaaaac

SEQ ID NO: 783815 - DNA, 75 bp, synthetic construct
  source 1..75: mol_type = other DNA
gaacaaagatgaagtgtttgagcggggggtgatcaacgtcttcaggggactgagctggaattacaaaaccaattg

SEQ ID NO: 783816 - DNA, 75 bp, synthetic construct
  source 1..75: mol_type = other DNA
ggtgagccgatgctggatatcaaagactggatgcgtaccgataccaacggtaaaggcgttatcaatatcctcagc

SEQ ID NO: 783817 - DNA, 75 bp, synthetic construct
  source 1..75: mol_type = other DNA
tttacgcccaaagatcagaaagcggtaaaagctgcggcgcaaaccatgcgggccaatccggcatttgataccgaa

SEQ ID NO: 783818 - DNA, 75 bp, synthetic construct
  source 1..75: mol_type = other DNA
tcagcggcaaaccgatccccgacaaccgggaaaacatcacccttcgtctggatgatcacatccagtctgttcagg

SEQ ID NO: 783819 - DNA, 75 bp, synthetic construct
  source 1..75: mol_type = other DNA
gctgttgcttgcacgactgttaaatctcaacgacgtgcaaactggcgtgctggatatcatcttccgcattgctga

SEQ ID NO: 783820 - DNA, 75 bp, synthetic construct
  source 1..75: mol_type = other DNA
agatggcgtggtacagactatggcgaaaagcgccgcccgtcaggtgacgaaccagattatacgcggggtgctggg

SEQ ID NO: 783821 - DNA, 75 bp, synthetic construct
  source 1..75: mol_type = other DNA
tgtggtgcaaacaatggcgaaaagcgccgctcgccaggtgacgaatcagattgtacgcgggatgttggggagttt

SEQ ID NO: 783822 - DNA, 75 bp, synthetic construct
  source 1..75: mol_type = other DNA
aaacgcccaccgtcctttctttatgcatggccttagccattggttagggctggatgtccatgacgtaggtgttta

SEQ ID NO: 783823 - DNA, 75 bp, synthetic construct
  source 1..75: mol_type = other DNA
tggccaggagcgctcgcgcattcttgaaccgggcatggttctgaccgtagagccaggtctttatattgcgccgga

SEQ ID NO: 783824 - DNA, 75 bp, synthetic construct
  source 1..75: mol_type = other DNA
cctccattctggaagttaccggtgaagtggtgcgcataatgattagcggcctggtaaaactcgggatcctcaagg

SEQ ID NO: 783825 - DNA, 75 bp, synthetic construct
  source 1..75: mol_type = other DNA
tggtcaggatcgctcgcgcattctggaaccgggcatggtactgaccgtagagccaggtctgtatatcgcgccgga

SEQ ID NO: 783826 - DNA, 75 bp, synthetic construct
  source 1..75: mol_type = other DNA
tggcgttcagcgaaatcaatcagcaactttatcaactacttaatggtctggatgtggtttaccacgcccagggcg

SEQ ID NO: 783827 - DNA, 75 bp, synthetic construct
  source 1..75: mol_type = other DNA
tggtacttcactggctttaacgaaccggaagcggtgctggtgctgattaaaagtgatgacactcataaccacagc

SEQ ID NO: 783828 - DNA, 75 bp, synthetic construct
  source 1..75: mol_type = other DNA
atccaccagccaaaggaaaagagatggctgtggatgactgtattctcggtgggttaaaggacattttgtttggca

SEQ ID NO: 783829 - DNA, 75 bp, synthetic construct
  source 1..75: mol_type = other DNA
ccgccctggactgggcgatgaaacaggattttcgctgtggctgctggctgatggagaaacaggaaaccgcaatga

SEQ ID NO: 783830 - DNA, 75 bp, synthetic construct
  source 1..75: mol_type = other DNA
cgtgacctgatgcaacgttccgggatgctttccttaatggatgcacaggcccgtgagacatggtaccggtcactg

SEQ ID NO: 783831 - DNA, 75 bp, synthetic construct
  source 1..75: mol_type = other DNA
gatctggaaagaatgctacatctgttcagcgacaaaccgattcccgacaaccgggaaaacatcactattcgtctg

SEQ ID NO: 783832 - DNA, 75 bp, synthetic construct
  source 1..75: mol_type = other DNA
gttcagaaaaccggaactggttgagcgactgaatgatattattgcagaacactatcctgacatgctgtcagtata

SEQ ID NO: 783833 - DNA, 75 bp, synthetic construct
  source 1..75: mol_type = other DNA
tcagcggtaaaccaatccccgacaatcgggaaaacatcactattcgtctggatgatcacattcagtctgttcagg

SEQ ID NO: 783834 - DNA, 75 bp, synthetic construct
  source 1..75: mol_type = other DNA
cccctgcaaatttagcagtaaaattatcgtcaacaacctggtgaggtgggaccggtgggggtttcatcttatcac

SEQ ID NO: 783835 - DNA, 75 bp, synthetic construct
  source 1..75: mol_type = other DNA
gttcacgaatggggccggtgacggaagatgagcgtaatggcttgattaatcactctccggtgtatggcaagtacg

SEQ ID NO: 783836 - DNA, 75 bp, synthetic construct
  source 1..75: mol_type = other DNA
tggttcgtttcgcaaaacccgtcggatattccggataatgtgctcgggcagctcggtaatcgtgttcaacatgct

SEQ ID NO: 783837 - DNA, 75 bp, synthetic construct
  source 1..75: mol_type = other DNA
gtgggatatctttggcgagaaaggccatccggtgcgggcgacggtttcagacctgggccgctgttgctggcgcga

SEQ ID NO: 783838 - DNA, 75 bp, synthetic construct
  source 1..75: mol_type = other DNA
ctgacagaaagtattggaggtaaaaccgccctggactgggccatgaaacaggattttcgctgcggctgctggctg

SEQ ID NO: 783839 - DNA, 75 bp, synthetic construct
  source 1..75: mol_type = other DNA
ccgggaaaacatcaccattcatctggatgaccatatccaatctgttcagggaaaagaggactatgaagatgagat

SEQ ID NO: 783840 - DNA, 75 bp, synthetic construct
  source 1..75: mol_type = other DNA
ccgcactggactgggccatgaaacaggattttcgctgtggctgctggctcatggagaaaccggaaaccgcaatga

SEQ ID NO: 783841 - DNA, 75 bp, synthetic construct
  source 1..75: mol_type = other DNA
gctggtgtggcgggtaaggttcaatggcaggtaataaccgattacggtggaaagagtaagctgtttgaatcagaa

SEQ ID NO: 783842 - DNA, 75 bp, synthetic construct
  source 1..75: mol_type = other DNA
ctgctggcattaggattcagcaaaggcaccacgctggcattcgtcatggctgccggttttattgccgatactgcc

SEQ ID NO: 783843 - DNA, 75 bp, synthetic construct
  source 1..75: mol_type = other DNA
gatgttgcatctgttcttccgcaaagatattccgccgacttacgacctggctctcctgaaagcaccggcaaaagc

SEQ ID NO: 783844 - DNA, 75 bp, synthetic construct
  source 1..75: mol_type = other DNA
ctcggtgcggcggtggcggcactgtttgccaacgatggtgcggcacttattctgacgccgatagtcatcgccatg

SEQ ID NO: 783845 - DNA, 75 bp, synthetic construct
  source 1..75: mol_type = other DNA
caaactcacctttgcaggtcgatattcagctgttgcgcatcgattcccgtgaatcgcgcaacacgcccgcagagc

SEQ ID NO: 783846 - DNA, 75 bp, synthetic construct
  source 1..75: mol_type = other DNA
ctgacagattatctctctgacgtgctgaacgaactggcagataaaggactgtgggccgccacgctggggacggga

SEQ ID NO: 783847 - DNA, 75 bp, synthetic construct
  source 1..75: mol_type = other DNA
tcctgaccatcgttttggttatctggcagccgaaaggattagggattggctggagcgccacgttgggggctgtac

SEQ ID NO: 783848 - DNA, 75 bp, synthetic construct
  source 1..75: mol_type = other DNA
tctttcgataacgaaaaagtcggtgaactgcaagcaaaagccctggtcgatatcgtcccgcaaggaaattatttc

SEQ ID NO: 783849 - DNA, 75 bp, synthetic construct
  source 1..75: mol_type = other DNA
aacatgataaaccggggtgtcgatgttcttgtcattattccgtataacggtcaggtattaagtaacgttgtaaaa

SEQ ID NO: 783850 - DNA, 75 bp, synthetic construct
  source 1..75: mol_type = other DNA
cggccaggatgcggatctcgcaggtattaaacgtattgctgccggtacgcaaactatgacggtgtataaacctat

SEQ ID NO: 783851 - DNA, 75 bp, synthetic construct
  source 1..75: mol_type = other DNA
ctactttgcataaaacctatttctattattatattctcttatatgctttatgtattgttgggtggaactggttta

SEQ ID NO: 783852 - DNA, 75 bp, synthetic construct
  source 1..75: mol_type = other DNA
catccgggatgcacgaacctttaaggctggctgggtggttttggttcttctgctggttggcttttttgctctgga

SEQ ID NO: 783853 - DNA, 75 bp, synthetic construct
  source 1..75: mol_type = other DNA
gggaaagtcctgcgcggcgcgccatggcagatagttattttctcgctgggcatgtacctcgtggtctatggcctg

SEQ ID NO: 783854 - DNA, 75 bp, synthetic construct
  source 1..75: mol_type = other DNA
ccgcaaaatacaccgcgagcgagctggcgtagtcacggtaatttgctgtttaccaactggctcaactattacgtc

SEQ ID NO: 783855 - DNA, 75 bp, synthetic construct
  source 1..75: mol_type = other DNA
cgccggtgcggcagtttcgcggcatagtggctccagatggcggagaaggaaataaaaagacttcaccccgtaagc

SEQ ID NO: 783856 - DNA, 75 bp, synthetic construct
  source 1..75: mol_type = other DNA
aatggctcccggcggtggagaagggaagaaaaaggattcgccacgcaagagagcgccgaaaaaagcccgccatca

SEQ ID NO: 783857 - DNA, 75 bp, synthetic construct
  source 1..75: mol_type = other DNA
cgaaaccagtgctgccgacgtgccgctggcgattgaccattttcgctattttgcctcgtgtattcgggcgcagga

SEQ ID NO: 783858 - DNA, 75 bp, synthetic construct
  source 1..75: mol_type = other DNA
tgtggcaccaggtgggggggctgttaaaaaagcacccaataatcgtgtgaaaaaagcggcaaagcccaaaaaaga

SEQ ID NO: 783859 - DNA, 75 bp, synthetic construct
  source 1..75: mol_type = other DNA
agtggtagagcggcaaacccagccgccgcgccattttaccgatgcaacactgctttcggcgatgaccgggattgc

SEQ ID NO: 783860 - DNA, 75 bp, synthetic construct
  source 1..75: mol_type = other DNA
tgtcctgcccaaaccgcaccggaaaggcgatggctttatcgagtgcggtaatggtcaggtagtgacctggtgtat

SEQ ID NO: 783861 - DNA, 75 bp, synthetic construct
  source 1..75: mol_type = other DNA
ggccggattcattgccgataccgccagcctgccgcttattgtctccaacctggtgaatatcgtttccgcagattt

SEQ ID NO: 783862 - DNA, 75 bp, synthetic construct
  source 1..75: mol_type = other DNA
cgcaggaagaaggtattcgtcttgaaccttcggcactggcgggtatggccggacctcagcgcgtgtgtgcatcag

SEQ ID NO: 783863 - DNA, 75 bp, synthetic construct
  source 1..75: mol_type = other DNA
atacaaagtgaggacctggctggaggttattatattcagccgactttattacagggtcataataaaatgagggtt

SEQ ID NO: 783864 - DNA, 75 bp, synthetic construct
  source 1..75: mol_type = other DNA
gcgaaacccacaaaatgatgcttgagcattaccagcaaaccaagtgcctgctggtgagctactcggataaaccgt

SEQ ID NO: 783865 - DNA, 75 bp, synthetic construct
  source 1..75: mol_type = other DNA
cagttgatcgccagtatcaaaaatggctatgattcccgtgcaccttataaaacgggtgtcgggattaggaccccg

SEQ ID NO: 783866 - DNA, 75 bp, synthetic construct
  source 1..75: mol_type = other DNA
tactctggctgcacgtactttcgcagaagaatatgactatcagctggggatattacttccgtacagggattatca

SEQ ID NO: 783867 - DNA, 75 bp, synthetic construct
  source 1..75: mol_type = other DNA
atgaaaataaagaacatcttactcaccctttgcacctcactcctgcttactaacgtcgcagcgcacgccaaagaa

SEQ ID NO: 783868 - DNA, 75 bp, synthetic construct
  source 1..75: mol_type = other DNA
cagtctggtgctggttttcattgagatctggtgtgcgttttcactggtgaaagggcgtcgctgggcgcgctggct

SEQ ID NO: 783869 - DNA, 75 bp, synthetic construct
  source 1..75: mol_type = other DNA
ctgcaatttttgcagaaactggcgaaagagtcaggttttgacggcgaactggcggatttgacggatgacattctg

SEQ ID NO: 783870 - DNA, 75 bp, synthetic construct
  source 1..75: mol_type = other DNA
ggcactcatgattgctaacgccgaagagaactgggcagcgccagatgaagcagagggcactgttgcaaatagtcg

SEQ ID NO: 783871 - DNA, 75 bp, synthetic construct
  source 1..75: mol_type = other DNA
ttggcgctgttcacagcctatcggttgatcaatgtccgtttgagcgcaggctgtcgcgaatgttcggacgcgccg

SEQ ID NO: 783872 - DNA, 75 bp, synthetic construct
  source 1..75: mol_type = other DNA
ggtcatcaactggcaggaggaacaggagggggcatgcttggtgataacggcaattccgggagtaccggcggctga

SEQ ID NO: 783873 - DNA, 75 bp, synthetic construct
  source 1..75: mol_type = other DNA
gcgtacaaacctggagtttaacgctggtctttctaagcagccttgcgctggtttttattgaaatctggtgtgcgt

SEQ ID NO: 783874 - DNA, 75 bp, synthetic construct
  source 1..75: mol_type = other DNA
ggggaatatattaatgtcacattcggtggtgatcacgcaggaacggggactgtgttcgctcttcctccaacaaat

SEQ ID NO: 783875 - DNA, 75 bp, synthetic construct
  source 1..75: mol_type = other DNA
tcggtggtgatcacgcaggaacggggactgtattcgcgctccccccaacaaatttatccggtggtaaagacgaat

SEQ ID NO: 783876 - DNA, 75 bp, synthetic construct
  source 1..75: mol_type = other DNA
acaactccttgagcatgtcgagggattacggaaacagcctaaaggggctgattggatctactctcgtattgagaa

SEQ ID NO: 783877 - DNA, 75 bp, synthetic construct
  source 1..75: mol_type = other DNA
gcaggttgatgatttcattattggcgagacaaactgtacggcgaacctgctgaacgccagccaggtcagcaccat

SEQ ID NO: 783878 - DNA, 75 bp, synthetic construct
  source 1..75: mol_type = other DNA
cacgcacgctagaatacgacgacggcacaaaagagatcagcgcggtagatatttcagttatcgggattgttggta

SEQ ID NO: 783879 - DNA, 75 bp, synthetic construct
  source 1..75: mol_type = other DNA
agtcgacgattttattattggtgagacaaactgcacagcgaacctgctgaatgccagccaggtcagcacgattat

SEQ ID NO: 783880 - DNA, 75 bp, synthetic construct
  source 1..75: mol_type = other DNA
ggagccgggtgcggacgaaaccgatgtactggtggtggatatcgatcaaccgctggaaggtgttgtggcaagcac

SEQ ID NO: 783881 - DNA, 75 bp, synthetic construct
  source 1..75: mol_type = other DNA
gcgctacgctggcatttgtaatggctgcagggtttattgccgataccgccagcctgccgctgattgtgtcgaacc

SEQ ID NO: 783882 - DNA, 75 bp, synthetic construct
  source 1..75: mol_type = other DNA
tgctctggctgcatgtcctttcacagaagaatatgaccatcacctggggatactatttccgcaccgggatcgtca

SEQ ID NO: 783883 - DNA, 75 bp, synthetic construct
  source 1..75: mol_type = other DNA
gaatcaggctttttcgaatgggcggcattgcatgtttcgcgctggggtaacggtcgtggccgtttgctctttacg

SEQ ID NO: 783884 - DNA, 75 bp, synthetic construct
  source 1..75: mol_type = other DNA
atctccgtcttgaacgctggcaaaaagatcgagatatttttgtgaaaaaggcagaatctctcggtgcgaaagtat

SEQ ID NO: 783885 - DNA, 75 bp, synthetic construct
  source 1..75: mol_type = other DNA
atgccattctatttcaggaaggagtgtccgttaaactcaggctacctcaacattctactcaccctttgcacctca

SEQ ID NO: 783886 - DNA, 75 bp, synthetic construct
  source 1..75: mol_type = other DNA
aatatcgtctggaacgcgacggcggcgtttatagccgtcattatcatcagcttgctgctggatgagtccggcttt

SEQ ID NO: 783887 - DNA, 75 bp, synthetic construct
  source 1..75: mol_type = other DNA
tggttttaataaaaaaatacgggtttgggcttgagagagatatcaaaggaaggccattaatttatcctatcgaaa

SEQ ID NO: 783888 - DNA, 75 bp, synthetic construct
  source 1..75: mol_type = other DNA
gacggcaatttggtcaggactgtttattctcagcgatgagaatgtcttgcaatggcgctggaaagagccaccaca

SEQ ID NO: 783889 - DNA, 75 bp, synthetic construct
  source 1..75: mol_type = other DNA
ctgataaaaacttatcaactctcacatgagcgctgggcagtgagacacaggctaggggcgagctggcattcctta

SEQ ID NO: 783890 - DNA, 75 bp, synthetic construct
  source 1..75: mol_type = other DNA
tccagggcgataagcgtgatttattaaaatcactacttgaagctgaagcgaaagggatgaaggtaaaactcgcag

SEQ ID NO: 783891 - DNA, 75 bp, synthetic construct
  source 1..75: mol_type = other DNA
gcagttaaagatggagttattgaaatccagggtgataagcgtgatttattaaaatcactacttgaagcgaaaggg

SEQ ID NO: 783892 - DNA, 75 bp, synthetic construct
  source 1..75: mol_type = other DNA
cagggcgataagcgtgatttattaaaatcactgcttgaagcgaaagggatgaaggtaaaactcgcaggcggttaa

SEQ ID NO: 783893 - DNA, 75 bp, synthetic construct
  source 1..75: mol_type = other DNA
ggtcgctcacgaggttttatcaacggtacagctgttcctctgtcacaacttcgcgaactgggccagttgctgatt

SEQ ID NO: 783894 - DNA, 75 bp, synthetic construct
  source 1..75: mol_type = other DNA
gcacagctgatcaccgacagtatgcatgcgctctcaatgccgcatgggcagtttacgattgatgttaaatttgac

SEQ ID NO: 783895 - DNA, 75 bp, synthetic construct
  source 1..75: mol_type = other DNA
ttgctggctttaggtttcagtaaaggcacaacgcttgcattcgtcatggcggctggattcattgccgataccgcc

SEQ ID NO: 783896 - DNA, 75 bp, synthetic construct
  source 1..75: mol_type = other DNA
ctgatgctgaaccctatcccgtaccgccagcccgcattaaatggctgacagccttattactgatgctgtctgtcg

SEQ ID NO: 783897 - DNA, 75 bp, synthetic construct
  source 1..75: mol_type = other DNA
gcacagctgatcaccgatagtatgcatgcactctctatgccgcatgggcagtttacgattgatgttaaatttgac

SEQ ID NO: 783898 - DNA, 75 bp, synthetic construct
  source 1..75: mol_type = other DNA
cggcctgtgtctcggtggtcgcgctgaagccgacatggtgcgtaccggcgctgcccgcgctgatttgtgcgcccg

SEQ ID NO: 783899 - DNA, 75 bp, synthetic construct
  source 1..75: mol_type = other DNA
actggtcgtgcgtctggtgcatgatcgtgatgcctggcggctggcggactattacgcagagaatcgccatttcct

SEQ ID NO: 783900 - DNA, 75 bp, synthetic construct
  source 1..75: mol_type = other DNA
gaaagactatctgttgattgatggacaatggcgcgatcacgtactgacggcattaactaccccagactggacgcc

SEQ ID NO: 783901 - DNA, 75 bp, synthetic construct
  source 1..75: mol_type = other DNA
ggcaggccaggctaggtatgatcaacgaatttcataaacaaggttctgcattctactttggcttatttgatcctg

SEQ ID NO: 783902 - DNA, 75 bp, synthetic construct
  source 1..75: mol_type = other DNA
tggagtgcgacgctgggcgcaatactggcgttagttacaggcgtggttcatccgggtgatattccggtggtgtgg

SEQ ID NO: 783903 - DNA, 75 bp, synthetic construct
  source 1..75: mol_type = other DNA
agtcaacttgaagctttaattgaagagctgctgacttatgcccgactcgatcgcccacaaaacgagcttcatctt

SEQ ID NO: 783904 - DNA, 75 bp, synthetic construct
  source 1..75: mol_type = other DNA
ggcaggccaggctagggatgattaacgaatttcataaacaaggttcagctttttactttggcttattcgacccgg

SEQ ID NO: 783905 - DNA, 75 bp, synthetic construct
  source 1..75: mol_type = other DNA
ccgtatttctgggggctggcctgtggtgtgcctgcctttatctggtctctggtctgttcagtgcgcaggctggtg

SEQ ID NO: 783906 - DNA, 75 bp, synthetic construct
  source 1..75: mol_type = other DNA
aacgtttaccaaagaacttcatagatatcagagtgttgtcctgcgcctcggggatacattcgagaaccccagcct

SEQ ID NO: 783907 - DNA, 75 bp, synthetic construct
  source 1..75: mol_type = other DNA
agccgttgctgaagcagccgcgaaacatcaggtggcgctggaaatcaataattcctcatttttacactcacgtaa

SEQ ID NO: 783908 - DNA, 75 bp, synthetic construct
  source 1..75: mol_type = other DNA
acgtactgcagtcagtgagccattgttccccaactacttgtttgtggagttcgatccggaagtgattcataccac

SEQ ID NO: 783909 - DNA, 75 bp, synthetic construct
  source 1..75: mol_type = other DNA
atcccaaatatgaaatagatgtgaaagccgttgctgaagcagccgcgaaacatcaggtggcgctggaaatcaata

SEQ ID NO: 783910 - DNA, 75 bp, synthetic construct
  source 1..75: mol_type = other DNA
atgttgggtggagcggacaatccaaatggtgaattactgtcttatatcattggcgctgacaatggcaacacatca

SEQ ID NO: 783911 - DNA, 75 bp, synthetic construct
  source 1..75: mol_type = other DNA
cgggctggctgcgtaatcatggctataacaagcggatggtcgcggtggcgggggatttagccgccggacaaatgc

SEQ ID NO: 783912 - DNA, 75 bp, synthetic construct
  source 1..75: mol_type = other DNA
tggacgatcagcagcgcgtcaccgacaccttgtttatgaaaggactgaccgttttcgcccgaccacaaaaaattc

SEQ ID NO: 783913 - DNA, 75 bp, synthetic construct
  source 1..75: mol_type = other DNA
tggacgatcagcagcgcatcgtcgacaccttgtttatgaaaggactgaccgtcttcgcccgaccgcaaaaaattc

SEQ ID NO: 783914 - DNA, 75 bp, synthetic construct
  source 1..75: mol_type = other DNA
atggtatccgcactcatcaccgtcgccgttatcgcctggtgtgcgcaactggccttaggcggctggcaaatttct

SEQ ID NO: 783915 - DNA, 75 bp, synthetic construct
  source 1..75: mol_type = other DNA
tttcaggccattttcaccgagcccgatggcgaggctcgctccatgctattgcttaatcttattaataaagagatt

SEQ ID NO: 783916 - DNA, 75 bp, synthetic construct
  source 1..75: mol_type = other DNA
gcaacaggatggtgtgattccaggtgacgcccaggcgattgccggaacctggtcgaccttttctgaaagcggtga

SEQ ID NO: 783917 - DNA, 75 bp, synthetic construct
  source 1..75: mol_type = other DNA
cagcgcatcgtcgacaccttgtttatgaaaggactgaccgtcttcgcccgaccgcaaaaaattcccgcaattacc

SEQ ID NO: 783918 - DNA, 75 bp, synthetic construct
  source 1..75: mol_type = other DNA
gggcatccgccgcgcttttttgccacgctgaagatgtgcggcgtacaaccggaaaaatgtgtaccgctggccgat

SEQ ID NO: 783919 - DNA, 75 bp, synthetic construct
  source 1..75: mol_type = other DNA
gatgcgcgacaatcccgccctgcgcgatatccctattgctattggcggcagccgcgaacgacggggggtgatcag

SEQ ID NO: 783920 - DNA, 75 bp, synthetic construct
  source 1..75: mol_type = other DNA
tccaacagtgagtttgtaccgctgtgcgtttctgcgctggcgcgagcgcgtgccgactggttgtacggcatcaat

SEQ ID NO: 783921 - DNA, 75 bp, synthetic construct
  source 1..75: mol_type = other DNA
agcagtgtcgctaccaggactttatgcagccgctggtggggacgctttaccaattgattgatcaggcaaaacgta

SEQ ID NO: 783922 - DNA, 75 bp, synthetic construct
  source 1..75: mol_type = other DNA
cctcgcccgctgtttaccgctgcccgggaagtgaaaacggttgttccggtcagttcagttacgccggtaacacct

SEQ ID NO: 783923 - DNA, 75 bp, synthetic construct
  source 1..75: mol_type = other DNA
cagaccgtcaccgcgaccactccgtccggcagcagacctgcggtgacggcacatccggagcagaaactgctggca

SEQ ID NO: 783924 - DNA, 75 bp, synthetic construct
  source 1..75: mol_type = other DNA
cggctgtgccggaacgaactccgattttgagtgtgatgccaccacatccgatacctgtatgacgatggagcaggc

SEQ ID NO: 783925 - DNA, 75 bp, synthetic construct
  source 1..75: mol_type = other DNA
accgggatcgcgcgctttgtgcaggacaaagatctgaaaaagatccttcgtgcgaccgatggtctggggacagaa

SEQ ID NO: 783926 - DNA, 75 bp, synthetic construct
  source 1..75: mol_type = other DNA
ttgtcgctaaagcgcgttttcttgctgaagcaggctggcgcacgctgttaggcagcaaagagcgcgatgaagaaa

SEQ ID NO: 783927 - DNA, 75 bp, synthetic construct
  source 1..75: mol_type = other DNA
aaaagcgttattccattcgctgccagaaatggctacgcgaccggacatgaccgcgcactgggaatcggtgctgac

SEQ ID NO: 783928 - DNA, 75 bp, synthetic construct
  source 1..75: mol_type = other DNA
aagaaaaaggcttcaccacgcaagcgaacgccgaaaaaaagcccaccatcggaagatgcgggcagtggagcgata

SEQ ID NO: 783929 - DNA, 75 bp, synthetic construct
  source 1..75: mol_type = other DNA
atcagtgtccatgcgccgagtcttctgccgcagcccgtggttgatccagatttacgcaaccgctgctgggatgac

SEQ ID NO: 783930 - DNA, 75 bp, synthetic construct
  source 1..75: mol_type = other DNA
ggcgatggctttatcgaatgcggcaatggtcaggtggtgacctggtgtatcggtcacctgcttgagcaggcgcag

SEQ ID NO: 783931 - DNA, 75 bp, synthetic construct
  source 1..75: mol_type = other DNA
cgttacggggcgtcaggcgcgcagtttttcgctatttgtgaaaattttcctgtttaaggcgtttccgttcttctt

SEQ ID NO: 783932 - DNA, 75 bp, synthetic construct
  source 1..75: mol_type = other DNA
ggtaatactaaaaacaatggcgcatcaggggccgatatcaataactatgccgggcagattaaatctgctatcgaa

SEQ ID NO: 783933 - DNA, 75 bp, synthetic construct
  source 1..75: mol_type = other DNA
aagatggaaaaacgcgtcgagttcgacctggaatacattcgcgaatggagcctgtggtttgatatcaaaattgtt

SEQ ID NO: 783934 - DNA, 75 bp, synthetic construct
  source 1..75: mol_type = other DNA
aagatggaaaaacgggtggagttcgatctcgaatacatccgcgagtggagcctgtggctcgatatcaagatcgtc

SEQ ID NO: 783935 - DNA, 75 bp, synthetic construct
  source 1..75: mol_type = other DNA
tgcggtaatcgtcaatggcggcgtaccgcgtgatggtgaaattccgatgaatttaataccgggtcaggcagtgaa

SEQ ID NO: 783936 - DNA, 75 bp, synthetic construct
  source 1..75: mol_type = other DNA
ttctggcgcaacatcccgatgtgcaaattatcgtgactgacgacggtttacagcattatcgtctggcgcgggatg

SEQ ID NO: 783937 - DNA, 75 bp, synthetic construct
  source 1..75: mol_type = other DNA
gttggcagcagctaaacttgcgaagatcccgaaaccaccaagccaggcagtatatgaagtgttcaaaaacgcgcc

SEQ ID NO: 783938 - DNA, 75 bp, synthetic construct
  source 1..75: mol_type = other DNA
atgaacgttttctcgcaaactcaacgctataaggcgttgttctggttatttcatctgctggtgatcacctccagt

SEQ ID NO: 783939 - DNA, 75 bp, synthetic construct
  source 1..75: mol_type = other DNA
ccgtgcgtatttttggcgcgccgctggctcgtcgcatcatctttgcggtaatgatccccgcattgctgatctcct

SEQ ID NO: 783940 - DNA, 75 bp, synthetic construct
  source 1..75: mol_type = other DNA
ccgtgcgtatttttggcgcaccgctggcccgtcgtatcatctttgcggtgatgatcccggcgttgctgatctcct

SEQ ID NO: 783941 - DNA, 75 bp, synthetic construct
  source 1..75: mol_type = other DNA
gagcctgattaaaaaactgatgcgcgagctggcggacaccacctgttcggtgctgattatccctgatgtctttac

SEQ ID NO: 783942 - DNA, 75 bp, synthetic construct
  source 1..75: mol_type = other DNA
ggcggaagagttaagcagacgtcaattctctgatattacagggattccacttaatactattcagaaatatgaaac

SEQ ID NO: 783943 - DNA, 75 bp, synthetic construct
  source 1..75: mol_type = other DNA
atggcagggattcggcgcactcgcccacttcaacctgtttgtcgcccgtatcgccaccgccagtttcatggccta

SEQ ID NO: 783944 - DNA, 75 bp, synthetic construct
  source 1..75: mol_type = other DNA
ttaacagtgaacggttgcgaaaatccgtcggcgtggaacgcacgatggcggaagatattcatcactggtctgaat

SEQ ID NO: 783945 - DNA, 75 bp, synthetic construct
  source 1..75: mol_type = other DNA
tgtgacgggtgcggaatccggtgagaacctgtgttctgtgcttatcaacgccatgcaggagcgtggcggcgcaga

SEQ ID NO: 783946 - DNA, 75 bp, synthetic construct
  source 1..75: mol_type = other DNA
tgcacccggaacaactggatgcccctgcaccgcataccgaagtggccagtctgcagcccaatcatgtctggcaga

SEQ ID NO: 783947 - DNA, 75 bp, synthetic construct
  source 1..75: mol_type = other DNA
ggcggtatttggcgaaagttacaaaaccctgccggaaacaccggcgcaggcggcggcaaaagaaaccgaagcgct

SEQ ID NO: 783948 - DNA, 75 bp, synthetic construct
  source 1..75: mol_type = other DNA
gccctgccggaaacctcggcacagatggcggcaaaagaaactgaagcgctggttaccggtacagacaacgccgca

SEQ ID NO: 783949 - DNA, 75 bp, synthetic construct
  source 1..75: mol_type = other DNA
ctgcatcccaatcatgtctggcagattgacgcctcactctgcacgctttactacctgagcaatggacataaaggg

SEQ ID NO: 783950 - DNA, 75 bp, synthetic construct
  source 1..75: mol_type = other DNA
aagttccggccggttcacagtctggaagaactcaacgcgctggccgcgaaatggcgcagccactttaacgccacg

SEQ ID NO: 783951 - DNA, 75 bp, synthetic construct
  source 1..75: mol_type = other DNA
gggcgtactggtcggcgaaaaactgatgattacccgcaacccgtggcgcactgatgtggcacaggtggtactgac

SEQ ID NO: 783952 - DNA, 75 bp, synthetic construct
  source 1..75: mol_type = other DNA
taccgccagttaacggcacagtagccggacggcgtaccggaagccgcactggatgaagtcatggccacgctgacc

SEQ ID NO: 783953 - DNA, 75 bp, synthetic construct
  source 1..75: mol_type = other DNA
gtgactgataaacgcaaaaaacgcgccgatgccggtcgcagcgccctgacccgcgacgaagccgcgctgatatct

SEQ ID NO: 783954 - DNA, 75 bp, synthetic construct
  source 1..75: mol_type = other DNA
gggcgcggggggcgactgggggggctgcatgtgacgttgcttgaccctcaaatggaaagacaactggtgctggga

SEQ ID NO: 783955 - DNA, 75 bp, synthetic construct
  source 1..75: mol_type = other DNA
gatgtcagaaagaacgagtttggctttgctgaaggcgcggcggtatttggcgaaagttacaaagccctgccggaa

SEQ ID NO: 783956 - DNA, 75 bp, synthetic construct
  source 1..75: mol_type = other DNA
gtaacggagcagcattttcttctgaaaaataccccaaactggcaaaggcttacccaacgttaaaattaccggatt

SEQ ID NO: 783957 - DNA, 75 bp, synthetic construct
  source 1..75: mol_type = other DNA
cgggggttgaagagtacattaagttgggcgcagtgcctggcggcaccgaacgtaactttgccagctacggtcatc

SEQ ID NO: 783958 - DNA, 75 bp, synthetic construct
  source 1..75: mol_type = other DNA
tggggcatttgagcgaaatgtgtcagggcgcaggagtacaggcacgtgtcgactatgacgcgatcccgaaactgc

SEQ ID NO: 783959 - DNA, 75 bp, synthetic construct
  source 1..75: mol_type = other DNA
tgttgcaggtggcgtagccggtcagggcgtacagagtgcaatgaacaaaacgcagggtgtcgagctggaaattcg

SEQ ID NO: 783960 - DNA, 75 bp, synthetic construct
  source 1..75: mol_type = other DNA
agcgcccgtctggcacccggcattattctcatttgtctgggaatgatctgctacagtattttctccaaagtgtgg

SEQ ID NO: 783961 - DNA, 75 bp, synthetic construct
  source 1..75: mol_type = other DNA
tcccgaaaaacgcagcgggtagtaagagtgatggaacaccattgcaggcgtattcttcaactatcggtaattact

SEQ ID NO: 783962 - DNA, 75 bp, synthetic construct
  source 1..75: mol_type = other DNA
ctggcggtgacggggatcgtaccgactgaacgggtgaagaaaaacagtaccgcacaagcgggatgtaaactgttc

SEQ ID NO: 783963 - DNA, 75 bp, synthetic construct
  source 1..75: mol_type = other DNA
aggacaaagatgaagaaggcggtgatgctcttcctcctctgccgaaggacaaggaatggaagaacgtccgggctg

SEQ ID NO: 783964 - DNA, 75 bp, synthetic construct
  source 1..75: mol_type = other DNA
atgagtatagacaggatgtgtccgatcagaaaaaagggcgcgtttcattacagctagctgataaaccatcagacc

SEQ ID NO: 783965 - DNA, 75 bp, synthetic construct
  source 1..75: mol_type = other DNA
aaagtgtattaaccttggataccatgacactgccgaacttgccgctgcggcttttgaggcagccagaatgaaata

SEQ ID NO: 783966 - DNA, 75 bp, synthetic construct
  source 1..75: mol_type = other DNA
gtacagattcagggcggtgatgattccaacgttatcggtgcaattggcggtgctgttcttggtggtttcctgggg

SEQ ID NO: 783967 - DNA, 75 bp, synthetic construct
  source 1..75: mol_type = other DNA
gagtagttttacaacggggcactctggagcagcagactggccgaatcctaaatctggatggagtaaggggccgga

SEQ ID NO: 783968 - DNA, 75 bp, synthetic construct
  source 1..75: mol_type = other DNA
gagtagctttgcatcagcactctcttcgagtggctaccagaaattaccttctggactaattattcagtggggggc

SEQ ID NO: 783969 - DNA, 75 bp, synthetic construct
  source 1..75: mol_type = other DNA
taccgccagttaacggcacagtacccggacggcgtaccggaagcggcactggatgaagtcatggccacgctgacc

SEQ ID NO: 783970 - DNA, 75 bp, synthetic construct
  source 1..75: mol_type = other DNA
cagcagaatgcaaaactgcaggagagtcagaaaggctcagccgatgcgctggctaaaaaaggctcggaactgtcg

SEQ ID NO: 783971 - DNA, 75 bp, synthetic construct
  source 1..75: mol_type = other DNA
ggaaaactgaaagcctgttaagggaaaagattggtaataaacattacagaaagattcagccaggtgtttatctgg

SEQ ID NO: 783972 - DNA, 75 bp, synthetic construct
  source 1..75: mol_type = other DNA
tgagctgaccgcacagattactgctctccgtcagcagaatgataaaccgttagataaaaagaaacccggagaaat

SEQ ID NO: 783973 - DNA, 75 bp, synthetic construct
  source 1..75: mol_type = other DNA
agcagtgtcgctatcaggactttatgcagccgctggtggggacattgtaccagttgattgatcaggcaaagcgca

SEQ ID NO: 783974 - DNA, 75 bp, synthetic construct
  source 1..75: mol_type = other DNA
gtcctgttgattctctccatcatgattattacttatggcgagggaagaacattgaggataaaagactttttctcg

SEQ ID NO: 783975 - DNA, 75 bp, synthetic construct
  source 1..75: mol_type = other DNA
gtggtgatgcgtgggaaaattaatcttgatgaactgtataccgcacctggcgattataaatattacgataacggt

SEQ ID NO: 783976 - DNA, 75 bp, synthetic construct
  source 1..75: mol_type = other DNA
acagctggtaacgtttattggaaagtaataacggattatggtggtaatagtaaacagtttgaggcaaagcctaag

SEQ ID NO: 783977 - DNA, 75 bp, synthetic construct
  source 1..75: mol_type = other DNA
cgtcgtaagtttgcccgaatttatcagcgccggatgcggcgcccatcctacggtgaactcatccagattgatggc

SEQ ID NO: 783978 - DNA, 75 bp, synthetic construct
  source 1..75: mol_type = other DNA
agcaacagtaatttcactcctcaaaggccgttacgctgattttggacctacgtttgcgtgcgaaaaattgcgcga

SEQ ID NO: 783979 - DNA, 75 bp, synthetic construct
  source 1..75: mol_type = other DNA
aatggacttcagatatcggaaaaaactttgactcagggctttaatgatgcctctaataaaaaattgaaactttca

SEQ ID NO: 783980 - DNA, 75 bp, synthetic construct
  source 1..75: mol_type = other DNA
caggccgctatacgcgaattatttgaagaaacgggtttgacaagaacattagcaggaccacaaatagcgtcccga

SEQ ID NO: 783981 - DNA, 75 bp, synthetic construct
  source 1..75: mol_type = other DNA
gtaaatctttccgtcagcagttgtgtgaagctgtttgttcgtccgcctgcggttaaagggcctccggaggatgcg

SEQ ID NO: 783982 - DNA, 75 bp, synthetic construct
  source 1..75: mol_type = other DNA
ctggtgatccccaatgtcatcctgatggtcatcattgagaagttgctgaaggggaactatctgtcgcaatccacg

SEQ ID NO: 783983 - DNA, 75 bp, synthetic construct
  source 1..75: mol_type = other DNA
actggcccgaggatgtggagattgtcgatggcggtactcagggactgaacttgctggggtatgtcgaaagcgcca

SEQ ID NO: 783984 - DNA, 75 bp, synthetic construct
  source 1..75: mol_type = other DNA
aatgagcctgcatcagaacagcttctccgaagtgctggcgctggcggatattcgaggtcatcttcctgcacaaat

SEQ ID NO: 783985 - DNA, 75 bp, synthetic construct
  source 1..75: mol_type = other DNA
gccggatatcttaacgattttccttttgcctttccgtcagcatgttatggaatgatagttagtcatgtggggcat

SEQ ID NO: 783986 - DNA, 75 bp, synthetic construct
  source 1..75: mol_type = other DNA
tcgcgctcgtccacactggctggatgtgcaaccggcttcttcacttatcagcgaactaaacaagggcaaaacact

SEQ ID NO: 783987 - DNA, 75 bp, synthetic construct
  source 1..75: mol_type = other DNA
taccgcaaccgactgaggagttgcgctgtctcaattatgactgtctgtcgatggaaaattacgaaggcgttcgct

SEQ ID NO: 783988 - DNA, 75 bp, synthetic construct
  source 1..75: mol_type = other DNA
atgagcgagcaacgtgtagtggtaatggggttgggcaacctgctgtgggccgatgaaggtttcggtgtgcgggtg

SEQ ID NO: 783989 - DNA, 75 bp, synthetic construct
  source 1..75: mol_type = other DNA
atcggatcggcattagccaacaaaccgcctgcatcggacgccgagatccagttgattcgttcgcgtctggtgctt

SEQ ID NO: 783990 - DNA, 75 bp, synthetic construct
  source 1..75: mol_type = other DNA
acgcactggtacaaatcgagcaaaacagcggcaattcgttagtgcaggacattggttcggcattagccaacaaac

SEQ ID NO: 783991 - DNA, 75 bp, synthetic construct
  source 1..75: mol_type = other DNA
ttggcctgatgctctctatcgtgggtgtgctgctgcgctcgttgtttaatcgcggcatcgaaagcccgcaggtgc

SEQ ID NO: 783992 - DNA, 75 bp, synthetic construct
  source 1..75: mol_type = other DNA
gttcccgattttcggggcgggctgggatcgcctgatgggacgccagaacgagacggtgaaagtgactacctttaa

SEQ ID NO: 783993 - DNA, 75 bp, synthetic construct
  source 1..75: mol_type = other DNA
agacggtgaaagtgaccacctttaaccgcccgaaagagatggcggatcaggtgtttacgcttaatgtgcttgatg

SEQ ID NO: 783994 - DNA, 75 bp, synthetic construct
  source 1..75: mol_type = other DNA
aggctatacccacgagctgttgggcactaataacgttaatggcctgtcggaaattctgattggtcagggcgatat

SEQ ID NO: 783995 - DNA, 75 bp, synthetic construct
  source 1..75: mol_type = other DNA
gatcgctaaaacaaaagtgcaatttgcggcaatatagttattccatgaccgtgcaatcttgcattcagtgtaaat

SEQ ID NO: 783996 - DNA, 75 bp, synthetic construct
  source 1..75: mol_type = other DNA
aaggtaaaacctgatttgctgattgcccgccagggggtgaaattaaagttcgacgattttcagcaaactactcag

SEQ ID NO: 783997 - DNA, 75 bp, synthetic construct
  source 1..75: mol_type = other DNA
tgtactactccgctaaaccggaattgccatttggcatgaatcctaactccatgttgtttaacaccttattagcca

SEQ ID NO: 783998 - DNA, 75 bp, synthetic construct
  source 1..75: mol_type = other DNA
tcgtttctggcggcaaattgttactctatctggcgcaaggtggcaaaaaaatgctggtctggcaggaaaaagagg

SEQ ID NO: 783999 - DNA, 75 bp, synthetic construct
  source 1..75: mol_type = other DNA
gcaaattgttactctatctggcgcaaggtggcaaaaaaatgctggtctggcaggaaaaagaggaattactcgccc

SEQ ID NO: 784000 - DNA, 75 bp, synthetic construct
  source 1..75: mol_type = other DNA
tgggcggcgcgcaatttgctgatcgcctgactattgaccgattgcgcgatctcgccgccgccagccaaccgcagc

SEQ ID NO: 784001 - DNA, 75 bp, synthetic construct
  source 1..75: mol_type = other DNA
aaagtactgcgtgcgacaaactttctcctgccgaactggggatggctgctggttctgctggtggcaacgcctgca

SEQ ID NO: 784002 - DNA, 75 bp, synthetic construct
  source 1..75: mol_type = other DNA
tgccgaaatagtcagggataattacggcaagctggatagcatcagcaggccgacacaatacgcacccccaccacg

SEQ ID NO: 784003 - DNA, 75 bp, synthetic construct
  source 1..75: mol_type = other DNA
gcccgacgagttggtcgggtgtgccgaaatagtccgggataattacgtgcggtttaacgatatagaacagtctaa

SEQ ID NO: 784004 - DNA, 75 bp, synthetic construct
  source 1..75: mol_type = other DNA
gtaatcgcggagcacattggtgtgtcgcagaactctatgcgttgcagactgagaagcatggttgccgaaggacag

SEQ ID NO: 784005 - DNA, 75 bp, synthetic construct
  source 1..75: mol_type = other DNA
cccaagatgtgattaatttcctgaccgatcacccatgttcaaaagtggacgtaatcgcggagcacattggtgtgt

SEQ ID NO: 784006 - DNA, 75 bp, synthetic construct
  source 1..75: mol_type = other DNA
tactacgatttgaaagctgaaagcctagaaggtaacgactatcgatatgatatcttagctacaaaacttgaagat

SEQ ID NO: 784007 - DNA, 75 bp, synthetic construct
  source 1..75: mol_type = other DNA
cgctgctgtgcgtgcgcacccttaaccaccgtgacggtgaaagcagcccggcggagtactccgtcagcctgacgc

SEQ ID NO: 784008 - DNA, 75 bp, synthetic construct
  source 1..75: mol_type = other DNA
tcaccactggaatcgaatgatgttcaaagcttgcgtattgcgtagtcaacgatttcgtctaaagaaaaacccttt

SEQ ID NO: 784009 - DNA, 75 bp, synthetic construct
  source 1..75: mol_type = other DNA
actaggcaaagatgatgaacgtgatttgtttccaacagcgctcaaaattgtgaacatcattaagccaaaagcagt

SEQ ID NO: 784010 - DNA, 75 bp, synthetic construct
  source 1..75: mol_type = other DNA
gggaaaaaaacagctgcttatcgtcaagtaggtaacgcttttcctcctcctgttgccgaagcaacaggaaggcaa

SEQ ID NO: 784011 - DNA, 75 bp, synthetic construct
  source 1..75: mol_type = other DNA
tcaatccccgaaaattcaaacttggcaaagattcgggattttctcatgaagactaaacagaatgatcattcgtaa

SEQ ID NO: 784012 - DNA, 75 bp, synthetic construct
  source 1..75: mol_type = other DNA
ttcgtcgcgggtcatgtgctgatttctctggcggccatatgcctggcattattcactaccgcatttattatcatt

SEQ ID NO: 784013 - DNA, 75 bp, synthetic construct
  source 1..75: mol_type = other DNA
aaaaggggtttatcgggtatgttggaagagacggaaaaattcggactggttttgaaaatatgcctcgtttgactg

SEQ ID NO: 784014 - DNA, 75 bp, synthetic construct
  source 1..75: mol_type = other DNA
caggtgctggagtggtcgaaagatcacgtcacctcgacgctgtttgtctgctgggctgtacaggccgcgctcaat

SEQ ID NO: 784015 - DNA, 75 bp, synthetic construct
  source 1..75: mol_type = other DNA
ctgctctcccggcgtaacccggatttgccgcttatacttgtggcaaatggacacgttcagggaggcatcaagtga

SEQ ID NO: 784016 - DNA, 75 bp, synthetic construct
  source 1..75: mol_type = other DNA
ctgacgcgctggggattaccgagggcgagaacgttatccatttgcgcaccctgcgtcgcgtcaacggcgtcgcgc

SEQ ID NO: 784017 - DNA, 75 bp, synthetic construct
  source 1..75: mol_type = other DNA
atgagcaaaaaatttgaaggcagcgtcgcgcctcgcgagcgtattaatatatcgtatgtcccaaagacggctgaa

SEQ ID NO: 784018 - DNA, 75 bp, synthetic construct
  source 1..75: mol_type = other DNA
gtggaaggcactgttagctggttatctggatagattaataaaatgttttatacgtcgcattagggaagtatcaag

SEQ ID NO: 784019 - DNA, 75 bp, synthetic construct
  source 1..75: mol_type = other DNA
agcaattttcatagccaacaattaaatttatcttttcatgaaaaaataaataaatatggttataatagtccaata

SEQ ID NO: 784020 - DNA, 75 bp, synthetic construct
  source 1..75: mol_type = other DNA
ctctggcgcaatttaatccgcatgtctggtatctttcgtatccgtttggcggatttaatgacaaagccgtgaagg

SEQ ID NO: 784021 - DNA, 75 bp, synthetic construct
  source 1..75: mol_type = other DNA
gtgatgaccgcagaaggtccaacattaaccggttttaattccgcttacagaactgcatcaaccagttccacagta

SEQ ID NO: 784022 - DNA, 75 bp, synthetic construct
  source 1..75: mol_type = other DNA
cttaacgattttccttttgcctttccgtcagcatgttatggaatgatagttagtcatgtggggcatacaccttca

SEQ ID NO: 784023 - DNA, 75 bp, synthetic construct
  source 1..75: mol_type = other DNA
tctggcactgacgtatcaagaacgcgattcactgtggcgtatacgacacccaatctcggcgaaacaccgacactg

SEQ ID NO: 784024 - DNA, 75 bp, synthetic construct
  source 1..75: mol_type = other DNA
tggtctcacaagactacacaccagatagcggggctgttggttatattgcctgtgcaggttttagtcccgacccgg

SEQ ID NO: 784025 - DNA, 75 bp, synthetic construct
  source 1..75: mol_type = other DNA
ttattctgcctttagaacaacctcgacaagtccaactgttaccatgaattactgttggtgggctgttggcgagta

SEQ ID NO: 784026 - DNA, 75 bp, synthetic construct
  source 1..75: mol_type = other DNA
agcggcaaaacgaaatgtgggaacaggggaaaatcagataccggacatggcttcatttagtggggtgagggatta

SEQ ID NO: 784027 - DNA, 75 bp, synthetic construct
  source 1..75: mol_type = other DNA
ggcggaggcggagcctgcgcacctgccggaagtgaggctcaatcgggaggtgacggtgccccgggaatagttatt

SEQ ID NO: 784028 - DNA, 75 bp, synthetic construct
  source 1..75: mol_type = other DNA
cgttaaccggctttaattctgcttacagaacgtcatcaaccagcgacacggtatcgatgaattacagttggtggg

SEQ ID NO: 784029 - DNA, 75 bp, synthetic construct
  source 1..75: mol_type = other DNA
tttccaaacagatgtctgcgtgttttggtctcacaagactatacaccagatagcggggctgttggttatattgcc

SEQ ID NO: 784030 - DNA, 75 bp, synthetic construct
  source 1..75: mol_type = other DNA
gctgactaatttgagtggaaaggatgtagctggtcttctcacataccttcaattgggagaagcggcaaaacggga

SEQ ID NO: 784031 - DNA, 75 bp, synthetic construct
  source 1..75: mol_type = other DNA
tggaaaggatgtagctggtcttctcacataccttggtttgggagaagcggcaaaacgggatgtggggacagggga

SEQ ID NO: 784032 - DNA, 75 bp, synthetic construct
  source 1..75: mol_type = other DNA
gttaaccggctttaattctgcttacaggacgtcatcaaccagcgacacggtatcgatgaattacagttggtgggc

SEQ ID NO: 784033 - DNA, 75 bp, synthetic construct
  source 1..75: mol_type = other DNA
aaatcggacggcacggtgaaaacggctcttcaaaaccttggtttgggagaagcggcaaaacgggatgtggggaca

SEQ ID NO: 784034 - DNA, 75 bp, synthetic construct
  source 1..75: mol_type = other DNA
ttcgcgaatgcaaaattcacattcaaagcatcgactacaacgatgcgctacatgttatatgtcgggttcatggga

SEQ ID NO: 784035 - DNA, 75 bp, synthetic construct
  source 1..75: mol_type = other DNA
cttcagttggggcggttaacactctcattcactggataatttttgctgctctttactcacagggcttcaaccagt

SEQ ID NO: 784036 - DNA, 75 bp, synthetic construct
  source 1..75: mol_type = other DNA
cctacaaggatgacgtctatcgtgcttgacgagagccagttacgtaataccggatttacatgcagatgctttgac

SEQ ID NO: 784037 - DNA, 75 bp, synthetic construct
  source 1..75: mol_type = other DNA
tacttatggtgcttttagtgttccaacttctggaacaaaaatatcacaaagtgaatgtattgatattttatttgc

SEQ ID NO: 784038 - DNA, 75 bp, synthetic construct
  source 1..75: mol_type = other DNA
cagattatttctgtcatcccaaccgcagccgattattatcaattcaactttggttttgctacgggatatattgat

SEQ ID NO: 784039 - DNA, 75 bp, synthetic construct
  source 1..75: mol_type = other DNA
atgttaaagttatttgtaaagtacacatctataggtgtgctgaacacacttatacactgggtggtttttggtgta

SEQ ID NO: 784040 - DNA, 75 bp, synthetic construct
  source 1..75: mol_type = other DNA
cccatttcccaattgcatttccaaacagatgtctgcgtgttttggtctcacaagactacacaccagatagcgggg

SEQ ID NO: 784041 - DNA, 75 bp, synthetic construct
  source 1..75: mol_type = other DNA
gtttttatgtccgctgccagatgtacgacggaacaccatcaacaagtgctttttcctggagggtttattgtgcgc

SEQ ID NO: 784042 - DNA, 75 bp, synthetic construct
  source 1..75: mol_type = other DNA
aatggactggctaaagtcgtttatccaattgcgctacctaagctttcacgttttatcagcatagcggaaagaata

SEQ ID NO: 784043 - DNA, 75 bp, synthetic construct
  source 1..75: mol_type = other DNA
gtagttttatgctttctgcttcagttcctggatatcaaaaattgccatccggtttaattattcaatgggggccaa

SEQ ID NO: 784044 - DNA, 75 bp, synthetic construct
  source 1..75: mol_type = other DNA
ctcattctggtgatggcggtgcgcctttaggcgctgggcgagggttcgtgatgactgcagaaggcccaacgttaa

SEQ ID NO: 784045 - DNA, 75 bp, synthetic construct
  source 1..75: mol_type = other DNA
ctctatgtgtaactgcttttccaaaaaccttggtttgggagaagcggcgaaaagggatgtgggcacaggagataa

SEQ ID NO: 784046 - DNA, 75 bp, synthetic construct
  source 1..75: mol_type = other DNA
cgccttgcccgcaggcgggtattggtacgccggttgagctgtggggcaaggagatcaaaattgatgatgtcgccg

SEQ ID NO: 784047 - DNA, 75 bp, synthetic construct
  source 1..75: mol_type = other DNA
tcgctatcgcgccaccgatccgaatggcattgtggaaaatgaagtgtgtccggtatttgccgcacgcaccaccag

SEQ ID NO: 784048 - DNA, 75 bp, synthetic construct
  source 1..75: mol_type = other DNA
atcgatgccacgccgtgggcattcagcccatggatggtaatgcaagcgacaaatagcgaaaccaaaaaacggttg

SEQ ID NO: 784049 - DNA, 75 bp, synthetic construct
  source 1..75: mol_type = other DNA
ccggaaaatcataagccggatccggaatggtactgctcctctctttgtcgcgaaacagaaacactgtgtcaggac

SEQ ID NO: 784050 - DNA, 75 bp, synthetic construct
  source 1..75: mol_type = other DNA
acccggttcgggaccatcgaatcggtcacttatgatattgccgagggttcggttgtcagtctggcggccggaggg

SEQ ID NO: 784051 - DNA, 75 bp, synthetic construct
  source 1..75: mol_type = other DNA
aatatcagtgccctgaacaaagtaatgaagggtacgctggtgacatctctggcactggtagctgtcacaaccggc

SEQ ID NO: 784052 - DNA, 75 bp, synthetic construct
  source 1..75: mol_type = other DNA
tgactttcgctaccgcgccaccgatccgagtggcattgtggaaaatgaagtgtgtccggtatttgccgcacgcac

SEQ ID NO: 784053 - DNA, 75 bp, synthetic construct
  source 1..75: mol_type = other DNA
gagaagcagatgcctgcgctggcaggctttgcggaacaaaatatttcgttcacgcgccatatgagttccggcaac

SEQ ID NO: 784054 - DNA, 75 bp, synthetic construct
  source 1..75: mol_type = other DNA
ctggttctcgtgggtttcattcaatggcaccaatattgacgacagcaatcagcaagcatttgcacagaaatatag

SEQ ID NO: 784055 - DNA, 75 bp, synthetic construct
  source 1..75: mol_type = other DNA
cggggtattccgctgagcgaagaggaagaaacctttgactggtcccacggtcatctgcaggtgccattagtgatt

SEQ ID NO: 784056 - DNA, 75 bp, synthetic construct
  source 1..75: mol_type = other DNA
tcgggtatatggacaggttgggttcaactttgcggcgcatgcgcgggggattgcctttaacgccggggagtggcc

SEQ ID NO: 784057 - DNA, 75 bp, synthetic construct
  source 1..75: mol_type = other DNA
tctgacgattgccggaatgatcatcagcttcatgtggggacttgatggtaaacatatcgcgctggtgcaaaatgg

SEQ ID NO: 784058 - DNA, 75 bp, synthetic construct
  source 1..75: mol_type = other DNA
ttgagcaaggtaacccagacgctgtttccgttcagtatccgttaagcgagctgcgctatcgcgatatgggcaccg

SEQ ID NO: 784059 - DNA, 75 bp, synthetic construct
  source 1..75: mol_type = other DNA
ttggtttttcaccgctatcaaaaaccatcgtgttggcaaaaatgcgtgacttaggggatggaacaaaacgtcgtg

SEQ ID NO: 784060 - DNA, 75 bp, synthetic construct
  source 1..75: mol_type = other DNA
tcatccctggtctggaatatgaattttgacagcgatacgaatgtgattgatgtggccgtgagacgtctgagaagt

SEQ ID NO: 784061 - DNA, 75 bp, synthetic construct
  source 1..75: mol_type = other DNA
caaagaaccaaattttaaagagtattttaaaaaatataaagatgcttctaatcatgaagaaaaaggtgatatgcc

SEQ ID NO: 784062 - DNA, 75 bp, synthetic construct
  source 1..75: mol_type = other DNA
ctttgactctgtgaaatttattctgactaccgctctcgccgctggtctgctggctcttcccgtgcagataagaac

SEQ ID NO: 784063 - DNA, 75 bp, synthetic construct
  source 1..75: mol_type = other DNA
attgtcgcgccaggcccgatctggacagcactgcaaatttccggcgggcaaacgcaggataagatcccgcagttt

SEQ ID NO: 784064 - DNA, 75 bp, synthetic construct
  source 1..75: mol_type = other DNA
tgtatatgtttatctggcaagtcaggagtcgagctacgtcaccgcagaagtgcacggcgtgtgcggcggcgagca

SEQ ID NO: 784065 - DNA, 75 bp, synthetic construct
  source 1..75: mol_type = other DNA
tcctaacttaacatcatattccagaaataaagtgtcaattgatactagttcacttgatagaaatatagaagtatc

SEQ ID NO: 784066 - DNA, 75 bp, synthetic construct
  source 1..75: mol_type = other DNA
tgctacgcctgtcaggcctattcgactcctgcaatgtattgaatttgcatagttttataggtcgaataaggcgtt

SEQ ID NO: 784067 - DNA, 75 bp, synthetic construct
  source 1..75: mol_type = other DNA
acccccacgagtacctgccaatgccccaacgccccgggcatggcttcacccccgtcagccccctgcagcgttcca

SEQ ID NO: 784068 - DNA, 75 bp, synthetic construct
  source 1..75: mol_type = other DNA
cgtgatcatgccaacggtgttagttttgagtgtcgttaatatcctcatgggaaaagcagagagaacgtgcaaatg

SEQ ID NO: 784069 - DNA, 75 bp, synthetic construct
  source 1..75: mol_type = other DNA
tttcccggggagagctgagggaatttgaactggcagacggaaactggttactgaacaatgcctggtatgaaagaa

SEQ ID NO: 784070 - DNA, 75 bp, synthetic construct
  source 1..75: mol_type = other DNA
tttcaccgtcactgatgtggtggggcgggttgttgtactggctggctgcattagtgacgctgctatgggcggcca

SEQ ID NO: 784071 - DNA, 75 bp, synthetic construct
  source 1..75: mol_type = other DNA
gtgaaatttattctgaccaccgctctcgccggtggtctgctggctgttcccctgcagatcaaaaacattcagcag

SEQ ID NO: 784072 - DNA, 75 bp, synthetic construct
  source 1..75: mol_type = other DNA
gacatgggtttgccgctgaacggggaaaccatatttgtcgacagagtccgtctgaaaaacgcacggatcctcggt

SEQ ID NO: 784073 - DNA, 75 bp, synthetic construct
  source 1..75: mol_type = other DNA
catgtatgacatgcttggctggctggcgcaggaagaagacattcgtcttgaaccttcagcactggcgggtatggc

SEQ ID NO: 784074 - DNA, 75 bp, synthetic construct
  source 1..75: mol_type = other DNA
cgtatcgtcgatgctgataaccctctgtttgtctatctgccgtgtggcgttggcggtggtcctggtggcgtcgca

SEQ ID NO: 784075 - DNA, 75 bp, synthetic construct
  source 1..75: mol_type = other DNA
gcctgaccgaacaggatgttcaggacgcccatgcgcgcttatcccgttttgcaccctatctggcaaaagcatttc

SEQ ID NO: 784076 - DNA, 75 bp, synthetic construct
  source 1..75: mol_type = other DNA
aaacaacaggttgcgcgcgccgttgcggagatccgccgtggcgagtatgtcaaagtgattgtctcgcgcgccatt

SEQ ID NO: 784077 - DNA, 75 bp, synthetic construct
  source 1..75: mol_type = other DNA
actggcgtttggcgatcatgttcactgcttttttgccgaacccacgcactccccttgtatgctgttaggcgtcca

SEQ ID NO: 784078 - DNA, 75 bp, synthetic construct
  source 1..75: mol_type = other DNA
attattgaatcagaactggttgccattccggctatgcaaaaacggctggaaaaggaatatcaccagccgatcgcc

SEQ ID NO: 784079 - DNA, 75 bp, synthetic construct
  source 1..75: mol_type = other DNA
attactatgttcttaccgttgccggtcagtctaatgctatggcgtatggcgaaggactcccgttaccagacagtg

SEQ ID NO: 784080 - DNA, 75 bp, synthetic construct
  source 1..75: mol_type = other DNA
cgaagcgttcagcagcgattacgatctgccgaatgacacggtatacgccgaaagctgtgcttccatcggcctgat

SEQ ID NO: 784081 - DNA, 75 bp, synthetic construct
  source 1..75: mol_type = other DNA
tcatatcgaccgcgtatttggtccagatgaagacaagctgcagggttatcccggtcatccggaaattgaactggc

SEQ ID NO: 784082 - DNA, 75 bp, synthetic construct
  source 1..75: mol_type = other DNA
ttaccgcagcggatggccttgcagttggtcgcgcatcaggctttgtcgggcgggcaatggagcgtctgctggatg

SEQ ID NO: 784083 - DNA, 75 bp, synthetic construct
  source 1..75: mol_type = other DNA
actggaaaatttattttttgcaatatgaaccgccccgggtttcctggagagtgttttatctgtgaactcaggctg

SEQ ID NO: 784084 - DNA, 75 bp, synthetic construct
  source 1..75: mol_type = other DNA
cgaaggaacatattcagaacagcacggagccagccatgatgcatgtcgttggggaacggatactccgctgtatca

SEQ ID NO: 784085 - DNA, 75 bp, synthetic construct
  source 1..75: mol_type = other DNA
tcaaataagtcagtctgttaaagttgaattcaaaacgcagtttgctaatgatgatatttatcagttaatcaagag

SEQ ID NO: 784086 - DNA, 75 bp, synthetic construct
  source 1..75: mol_type = other DNA
acgatatttcaccgtcactgatgtggtggggcggggtgttgtactggctggctgcattagtgacgctgctatggg

SEQ ID NO: 784087 - DNA, 75 bp, synthetic construct
  source 1..75: mol_type = other DNA
tggaagtcccccgtgatcagtatgccggcgctgttgaaaccatgaggaataagatccgcgaaggtaaagtaaccg

SEQ ID NO: 784088 - DNA, 75 bp, synthetic construct
  source 1..75: mol_type = other DNA
agcttcatgtggggacttgatggtaaacatatcgcgctggaggctcacacctttgactctgtaaaatttattctg

SEQ ID NO: 784089 - DNA, 75 bp, synthetic construct
  source 1..75: mol_type = other DNA
aaggggaccggtgcaggaaatatcagtgccctgaacaaagtgatgaagggtacgctggtgacatctctggcactg

SEQ ID NO: 784090 - DNA, 75 bp, synthetic construct
  source 1..75: mol_type = other DNA
gcagacagactggtcagcggaacagaaatccagacgaaatattgttcaactgcagcccgtagcgtcggtgcggca

SEQ ID NO: 784091 - DNA, 75 bp, synthetic construct
  source 1..75: mol_type = other DNA
aatatcacccggttcgggaccatcgaatcggtcacttatgatattgccgagggttcggttgtcagtctggcggcc

SEQ ID NO: 784092 - DNA, 75 bp, synthetic construct
  source 1..75: mol_type = other DNA
aacatatcgcactggaggctcatacttttgactctgtaaaatttattctgaccaccgctctcgccgttggtctgc

SEQ ID NO: 784093 - DNA, 75 bp, synthetic construct
  source 1..75: mol_type = other DNA
aggagatctgagggaatttgaactggcagacggaaactggctactggacaatgcctggtatgaaagaaacatggc

SEQ ID NO: 784094 - DNA, 75 bp, synthetic construct
  source 1..75: mol_type = other DNA
agaacttaccgcatcagaaagcaggtgtcgatgcggtgatgaacgtttttgtttccgcgacatctcatcaggagg

SEQ ID NO: 784095 - DNA, 75 bp, synthetic construct
  source 1..75: mol_type = other DNA
caaagtgatgaagggtacgctggtgacatctctggcactggtagctgtcacaaccggccctgacatgatcaaaat

SEQ ID NO: 784096 - DNA, 75 bp, synthetic construct
  source 1..75: mol_type = other DNA
gtccactgggaccatttggtgcactgacagggcgtgtggttggcggtgttctggggggaatgattgcctccgctg

SEQ ID NO: 784097 - DNA, 75 bp, synthetic construct
  source 1..75: mol_type = other DNA
cagttcatcaggaatcttgccgtggcatcttccggtgtggcaggtggagctgtcgggtcagtggcgggcgggata

SEQ ID NO: 784098 - DNA, 75 bp, synthetic construct
  source 1..75: mol_type = other DNA
gatgaagcctgacgacctgatcggcgcatgggcttgtagtgactgccacgcggagatcgaccgacgcacaaggat

SEQ ID NO: 784099 - DNA, 75 bp, synthetic construct
  source 1..75: mol_type = other DNA
gcgcgcgtggggcaggaagttagccgcgcaactgaatctgactgaagatatccgtctctggcaggaagaagatgt

SEQ ID NO: 784100 - DNA, 75 bp, synthetic construct
  source 1..75: mol_type = other DNA
actggcaggagaaattgtgggttcttctgcgggcggcgagcagccaaaatttacctgctatgcacaaacgccgtc

SEQ ID NO: 784101 - DNA, 75 bp, synthetic construct
  source 1..75: mol_type = other DNA
cgcagtgaattgctgaaggcgttgttgggctggagacgtatgaacagggcgaaattgttatcaacggcgagaaaa

SEQ ID NO: 784102 - DNA, 75 bp, synthetic construct
  source 1..75: mol_type = other DNA
gcgtcgatatcgaagccaaacagcagatttaccgtattgtccgtgagctggctgccgaaggaaaaagcgtggtgt

SEQ ID NO: 784103 - DNA, 75 bp, synthetic construct
  source 1..75: mol_type = other DNA
gccagaaaaccgcaaagaagcggggatcattcccataagcgctaacttaagggttgaaccatctgaagaatgcga

SEQ ID NO: 784104 - DNA, 75 bp, synthetic construct
  source 1..75: mol_type = other DNA
gggcagaaatgaccgagctttccaccaacgtcaagcgccacgacgcgcaccgtttctatctgcgcgaaggctacg

SEQ ID NO: 784105 - DNA, 75 bp, synthetic construct
  source 1..75: mol_type = other DNA
tgaccaaaattcaacaaaaagaggggataccgttgtttggttgcaacgaagttccaccccgcccaccgacaggtc

SEQ ID NO: 784106 - DNA, 75 bp, synthetic construct
  source 1..75: mol_type = other DNA
ttctgggttatcgaatggacagaagaccaccactaccatgcccatgtcgtgttctggctggatggtagtaaaact

SEQ ID NO: 784107 - DNA, 75 bp, synthetic construct
  source 1..75: mol_type = other DNA
agatttacaaagtatgattataaaatagttaaggagttacaaaaatataataatgttaagataaactcattaact

SEQ ID NO: 784108 - DNA, 75 bp, synthetic construct
  source 1..75: mol_type = other DNA
aagactatagtgtatattttgaaaataaacctgggcatattgatagatttgacacattaaaaaaacgaataaagt

SEQ ID NO: 784109 - DNA, 75 bp, synthetic construct
  source 1..75: mol_type = other DNA
ttacgcgctgatttgtgagctaaaacaggcggagtttgaccaccacgcgtttcgcgtgggctttaacgccaatct

SEQ ID NO: 784110 - DNA, 75 bp, synthetic construct
  source 1..75: mol_type = other DNA
ctggattggcgagacgcgactggaaggtgacgaagctacgctgactcgccgtgccgctgaactgggggttcgtgc

SEQ ID NO: 784111 - DNA, 75 bp, synthetic construct
  source 1..75: mol_type = other DNA
atgtctaaagggttcacattcgaaaagaatttacctcatcaaaaggctggcgttgatgcggtgatgaatgtcttt

SEQ ID NO: 784112 - DNA, 75 bp, synthetic construct
  source 1..75: mol_type = other DNA
atgccactgctggataagctgcgtaagctgtacggggccggaccggtatgcagtgaactacatattgccccgtca

SEQ ID NO: 784113 - DNA, 75 bp, synthetic construct
  source 1..75: mol_type = other DNA
caatctccggtcaaaaaccgctgatcaccaaagcacgcaaatctgttgcaggcttcaaaatccgtcagggctatc

SEQ ID NO: 784114 - DNA, 75 bp, synthetic construct
  source 1..75: mol_type = other DNA
gacttccgcttattttgcgaaggcggagttcgaccgcctctggaaaaaaataatgccactgctggataagctgcg

SEQ ID NO: 784115 - DNA, 75 bp, synthetic construct
  source 1..75: mol_type = other DNA
gcactggagcaggcagtatgggaccgtcgtccgtctggcactatccatcactgtgataaaggttctctgtatgta

SEQ ID NO: 784116 - DNA, 75 bp, synthetic construct
  source 1..75: mol_type = other DNA
catggaaacgacattcgtgctggatgcactggagcaggcagtatgggaccgtcgtccgtctggcactatccatca

SEQ ID NO: 784117 - DNA, 75 bp, synthetic construct
  source 1..75: mol_type = other DNA
cggatttcccggggagagctgagggaatttgaactggcagacggaaactggttactgaacaatgcctggtatgaa

SEQ ID NO: 784118 - DNA, 75 bp, synthetic construct
  source 1..75: mol_type = other DNA
gtttgcaaatattcgacattcagacaacaaccgatagtcctaacatgttcgtaagtccgattgctggctacaaca

SEQ ID NO: 784119 - DNA, 75 bp, synthetic construct
  source 1..75: mol_type = other DNA
acgcattttgttgacgctggatatgcaaaagaatgcgcgctggaaggtatggcgagaacgcaggttatctggctg

SEQ ID NO: 784120 - DNA, 75 bp, synthetic construct
  source 1..75: mol_type = other DNA
tattggcgttggttactctgccaacgcttgcggaggagacgccgttacaactggcgctgcgcggtgcgcagcacg

SEQ ID NO: 784121 - DNA, 75 bp, synthetic construct
  source 1..75: mol_type = other DNA
ttattgaaaaacagattgaatgcctggttaatcaactcaggcaatcagggttattaaaaactcattcagagccag

SEQ ID NO: 784122 - DNA, 75 bp, synthetic construct
  source 1..75: mol_type = other DNA
tacatgggaaataatggccccatgcaactggaagtcccccgtgatcagtatgccggcgctgttgaaactatgagg

SEQ ID NO: 784123 - DNA, 75 bp, synthetic construct
  source 1..75: mol_type = other DNA
tccgaatagatctgttttaccaggatcataccgctaagtttttcttgcaggatcaccggcaactcgaatgggata

SEQ ID NO: 784124 - DNA, 75 bp, synthetic construct
  source 1..75: mol_type = other DNA
atgaaacctgtaaaaccacctcgtattaatggacgagtgccggtcctgtcggcacaggaagcggtaaattatatt

SEQ ID NO: 784125 - DNA, 75 bp, synthetic construct
  source 1..75: mol_type = other DNA
cgccacgtaatttatcaattattagccccacagggcttggcgatcgcgccgaccgtggtattagtccgctggcgc

SEQ ID NO: 784126 - DNA, 75 bp, synthetic construct
  source 1..75: mol_type = other DNA
tcgtccaggaaggacgggtgaagaaatttattcgggaactaccggaaattacttttagcggaaaaatcgctctcg

SEQ ID NO: 784127 - DNA, 75 bp, synthetic construct
  source 1..75: mol_type = other DNA
gaaatgaccgaactttcgaccaacgtgaagcgccacgacgcgcaccgtttctatctgcgcgaaggctacgagcag

SEQ ID NO: 784128 - DNA, 75 bp, synthetic construct
  source 1..75: mol_type = other DNA
gcgcgacccaaacatgcgctaccatctggcgctgctggatggcgaagttgtcggcatgatcggcctgcatttgca

SEQ ID NO: 784129 - DNA, 75 bp, synthetic construct
  source 1..75: mol_type = other DNA
ttgcaccggattacctggcagatgccatgagatttaacccggtagccaacatagtgatcaccgaagaaaaagagc

SEQ ID NO: 784130 - DNA, 75 bp, synthetic construct
  source 1..75: mol_type = other DNA
gtactgattgagaaaaaaggctattacgtcaacatgcgcataactggtgacgatgttgatttgtcgccgctggaa

SEQ ID NO: 784131 - DNA, 75 bp, synthetic construct
  source 1..75: mol_type = other DNA
gcggctacgaaggcggcgattctgaactacagccgtggcctggcaaaacaggtcgcggagaaaggtattcgggtg

SEQ ID NO: 784132 - DNA, 75 bp, synthetic construct
  source 1..75: mol_type = other DNA
aagaagaagacgcccaggatgtgaaaaagattattgaagaatgcggacgcaaagtcgttctgctgccgggcgatt

SEQ ID NO: 784133 - DNA, 75 bp, synthetic construct
  source 1..75: mol_type = other DNA
gtgccactggcaatgccaagtaccgccggtccgggaaccattgcgatgattattagctcggcctccacagtgcgt

SEQ ID NO: 784134 - DNA, 75 bp, synthetic construct
  source 1..75: mol_type = other DNA
ttctctcagatacccatgacgcagaactgccaatttaccggctggctgccgacgatccggatgaggagaacaccc

SEQ ID NO: 784135 - DNA, 75 bp, synthetic construct
  source 1..75: mol_type = other DNA
ttttcctcagttacgggatgaatgcttgctggctaccattactccgagtcgcggtctgagctttacgagttttgc

SEQ ID NO: 784136 - DNA, 75 bp, synthetic construct
  source 1..75: mol_type = other DNA
taacgtgaaacgccacgatgcccaccgtttttacctgcgcgaaggctacgagcagagccatttccgcttcactaa

SEQ ID NO: 784137 - DNA, 75 bp, synthetic construct
  source 1..75: mol_type = other DNA
atcaagcgcgaacaattttacgtggcgtatcaaccggtggtggatacacaagctttgcgggtaacgggcctggaa

SEQ ID NO: 784138 - DNA, 75 bp, synthetic construct
  source 1..75: mol_type = other DNA
tagttctggagatcaccgagcgcgatatgttgaaagaacatgaagcctcaaagctgttcgcctggctacactctg

SEQ ID NO: 784139 - DNA, 75 bp, synthetic construct
  source 1..75: mol_type = other DNA
gctccagccgcttaccttagatacctgccagcaagctaacccggagctgactgcacgcgcagcatttagcatgaa

SEQ ID NO: 784140 - DNA, 75 bp, synthetic construct
  source 1..75: mol_type = other DNA
catgatcctgcgtgcttcttacggcgtacgtggcgcactgtttccccggattattaagaggcggtattgctgcca

SEQ ID NO: 784141 - DNA, 75 bp, synthetic construct
  source 1..75: mol_type = other DNA
tggaagattaatgaaccccagttatgcgatagtcagaagtgcaataaggactgtgcggcctgatttaccagtcgg

SEQ ID NO: 784142 - DNA, 75 bp, synthetic construct
  source 1..75: mol_type = other DNA
caattaatcagccggaaatggcttatcttgcacatgatgatattcccaggctaaccgcacttttatctggcgata

SEQ ID NO: 784143 - DNA, 75 bp, synthetic construct
  source 1..75: mol_type = other DNA
attaataaaaatgtcgatatggcgatcttacccggcacgccgatggtgccgaacaaacccgcaatcgtcatctgg

SEQ ID NO: 784144 - DNA, 75 bp, synthetic construct
  source 1..75: mol_type = other DNA
tcggcgtagaaattgctattgatgacttggcaccgggcacagcgcgcttatctatcttgagcgttttacgctcga

SEQ ID NO: 784145 - DNA, 75 bp, synthetic construct
  source 1..75: mol_type = other DNA
cttttatagttcacggcaggaagattacgatggcgtcgccctcattattggtaatactgcgctatctaccttttc

SEQ ID NO: 784146 - DNA, 75 bp, synthetic construct
  source 1..75: mol_type = other DNA
ccgacctgaaatccactactgaccggctccagccgctgaccttagatacctgccagcaagctaaccccgaactga

SEQ ID NO: 784147 - DNA, 75 bp, synthetic construct
  source 1..75: mol_type = other DNA
tatcaacgccatcggtacggaaacgatcacttcacccgtacttgacgcggtgctgacgctggcgaaacgcctcaa

SEQ ID NO: 784148 - DNA, 75 bp, synthetic construct
  source 1..75: mol_type = other DNA
tgcgggcattcctctgaccgttcggctttatgcagatgactggacatggaacgatgtgtggtacgcatttttact

SEQ ID NO: 784149 - DNA, 75 bp, synthetic construct
  source 1..75: mol_type = other DNA
ggacagagctgccgaacctcggtaaagagcagatttttgttcgcctgaagccctggtgcgaacagcgctatctgg

SEQ ID NO: 784150 - DNA, 75 bp, synthetic construct
  source 1..75: mol_type = other DNA
aaagaagcaggcgcttccagagagcagaaagtaaaactgataaattttaattgcgagaaacttcagtcctcgtga

SEQ ID NO: 784151 - DNA, 75 bp, synthetic construct
  source 1..75: mol_type = other DNA
aaaaggaaggtggttctcctaccagctggacaaggtactcaaaaacaaagttaaccaaatcggaatgcgaaaaaa

SEQ ID NO: 784152 - DNA, 75 bp, synthetic construct
  source 1..75: mol_type = other DNA
cagagtgcgttacaacaggaagcgcagcgaatcattggtcagcttgaaagtcaggttgagtcgctgatgcagatg

SEQ ID NO: 784153 - DNA, 75 bp, synthetic construct
  source 1..75: mol_type = other DNA
cgccagcgacggcttttgtgtcgatcaactgacccgcacgggttactgctggggaaacagcgtgcaggtcggcgg

SEQ ID NO: 784154 - DNA, 75 bp, synthetic construct
  source 1..75: mol_type = other DNA
ttattctgcgtgcattgggtgagctggtgctacaccgcccttccagtggcagttttgtctcttatgcccgtgagt

SEQ ID NO: 784155 - DNA, 75 bp, synthetic construct
  source 1..75: mol_type = other DNA
tgcaacaggcacagcgttacatacggggtggcaaacggtgggtggtggatatggagatatggatctggagaagtt

SEQ ID NO: 784156 - DNA, 75 bp, synthetic construct
  source 1..75: mol_type = other DNA
cttatcagcgcgtggtggaaaacaaaggcacggcgggggtggataacctcagcgtggcggagttgaaaccgtggc

SEQ ID NO: 784157 - DNA, 75 bp, synthetic construct
  source 1..75: mol_type = other DNA
ggcagcgacattctgaaagtggtctacggcgcaaccttccggttcgataaagaggcgttgatcaatgaactggac

SEQ ID NO: 784158 - DNA, 75 bp, synthetic construct
  source 1..75: mol_type = other DNA
atggatgcgaatcccgaaccggttatggtggaagtgaaaaagaagcactcgaaagatggaataaacgaaccactg

SEQ ID NO: 784159 - DNA, 75 bp, synthetic construct
  source 1..75: mol_type = other DNA
caaaccaacccataaggtagtccaacagaagtctaagtcgacgatggataagttgacctctggtcttgggaaaat

SEQ ID NO: 784160 - DNA, 75 bp, synthetic construct
  source 1..75: mol_type = other DNA
gaaattcctctctatacagaagcgtttaaacatctccctggcatcctgaccggaattgggattatcggcaccttt

SEQ ID NO: 784161 - DNA, 75 bp, synthetic construct
  source 1..75: mol_type = other DNA
gtataccgccgagctgcaagggttaatggggcagtttcaacagtccatagaaagtcagttagggcagggtacagt

SEQ ID NO: 784162 - DNA, 75 bp, synthetic construct
  source 1..75: mol_type = other DNA
ggaataatggcagtatcgcgaatcagcaggatcagaacgctgacagcgccggggcgcaggtgggcgatactatct

SEQ ID NO: 784163 - DNA, 75 bp, synthetic construct
  source 1..75: mol_type = other DNA
aatatcgcctacattgacacgtttaaaaggagaaacgtcgcaacgagtttcacctttctcggatatgacttcaaa

SEQ ID NO: 784164 - DNA, 75 bp, synthetic construct
  source 1..75: mol_type = other DNA
gatatgctgctgtcggtgctcgatctggaaaaaatgaccgttgatgacatcatggtgccgcgcagtgaaattatc

SEQ ID NO: 784165 - DNA, 75 bp, synthetic construct
  source 1..75: mol_type = other DNA
gcgtgctgaccttcgtagtgctggtttttgctgaagtattgccgaaaaccattgccgcactgtacccggaaaaag

SEQ ID NO: 784166 - DNA, 75 bp, synthetic construct
  source 1..75: mol_type = other DNA
gatgctggcgtggcaattgcgactggcgtgctgaccttcgtagtgctggtttttgctgaagtattgccgaaaacc

SEQ ID NO: 784167 - DNA, 75 bp, synthetic construct
  source 1..75: mol_type = other DNA
cgaaactcgacaccacctttggtcagcagtttacaaacctcaacgaaatgatgagacaaaccgttggtgcaattc

SEQ ID NO: 784168 - DNA, 75 bp, synthetic construct
  source 1..75: mol_type = other DNA
gccagcatcagggaacgacagaaacacttcgcttgctcgcagaacaaaccaaccgacagattcaggatatgcaaa

SEQ ID NO: 784169 - DNA, 75 bp, synthetic construct
  source 1..75: mol_type = other DNA
ggaaaacgagcggctagcgaccaccctcagcaccacctatcgcgaaacaggacaacagtttgccgagcaagtcag

SEQ ID NO: 784170 - DNA, 75 bp, synthetic construct
  source 1..75: mol_type = other DNA
aaaagatgagatcctctccgaattaccagatattaatttttcccgcctttggcgtattgccaatttagccaataa

SEQ ID NO: 784171 - DNA, 75 bp, synthetic construct
  source 1..75: mol_type = other DNA
tgctctctgggagtggattatctgcaggggttttatttcggcaggccggaaaagatggatatattttgttgtgga

SEQ ID NO: 784172 - DNA, 75 bp, synthetic construct
  source 1..75: mol_type = other DNA
cctgcgtggtcaggtcgcgctagcggcgatcctgactattgccgcagcgattggctggtttgggcgagaaggggg

SEQ ID NO: 784173 - DNA, 75 bp, synthetic construct
  source 1..75: mol_type = other DNA
tgccgtggattgatgaaggcgcgaaaagccgcgtcgagaaagcccgtattgcgctggataaaattatcgttcagg

SEQ ID NO: 784174 - DNA, 75 bp, synthetic construct
  source 1..75: mol_type = other DNA
aacagatttttctttgggtgctcagtggtccggaatggtttcagcggtagcgctaatggggttatatgctcgacg

SEQ ID NO: 784175 - DNA, 75 bp, synthetic construct
  source 1..75: mol_type = other DNA
tcctggttgtgtgcactggcaacatttgccgttcgccgattggcgaacggttgctgcgtaaacgcttaccgggcg

SEQ ID NO: 784176 - DNA, 75 bp, synthetic construct
  source 1..75: mol_type = other DNA
ttgctgcgtaaacgtctgccgggcgtaaaagtcaaatcggcaggtgttcatggtctggtaaaacaccctgcagat

SEQ ID NO: 784177 - DNA, 75 bp, synthetic construct
  source 1..75: mol_type = other DNA
gtggtctccggacaaccctgtgcagggaaagaaaatctgacagcggaatttatttctgctgttgtagggaataat

SEQ ID NO: 784178 - DNA, 75 bp, synthetic construct
  source 1..75: mol_type = other DNA
gaatcgtacttcctgcactgaaggaattcggttctgaatcattgccgcacaattttaatatggcagctgtcggag

SEQ ID NO: 784179 - DNA, 75 bp, synthetic construct
  source 1..75: mol_type = other DNA
gcggggaaagcaactctgactgcagagttaatttctgctgttgtggggaataataaaaaaggagaagggcaatga

SEQ ID NO: 784180 - DNA, 75 bp, synthetic construct
  source 1..75: mol_type = other DNA
atagatacgctggaaaattgtgatgatgaccgtattgagggtgttaaggctgttttgcgcagactggctgtcaac

SEQ ID NO: 784181 - DNA, 75 bp, synthetic construct
  source 1..75: mol_type = other DNA
tgctcgaccgcatagatacggcggaaagttacgatgatgaccgtattgaggctgttaaggctgttttgcgtagac

SEQ ID NO: 784182 - DNA, 75 bp, synthetic construct
  source 1..75: mol_type = other DNA
ttaaggctgttttgcgtagactggcaggcaactctccggtaactccggatggttggataagctgtagtgagcgaa

SEQ ID NO: 784183 - DNA, 75 bp, synthetic construct
  source 1..75: mol_type = other DNA
ctctttatgataagtctgcattcatgaatctcacaagagaacatctaccccaccctctcagcagggaaaagatag

SEQ ID NO: 784184 - DNA, 75 bp, synthetic construct
  source 1..75: mol_type = other DNA
tcattcgtttaatgtaaacactgatgaattttcttgcgataaacaattccttgaatgcccgataacgctatgcat

SEQ ID NO: 784185 - DNA, 75 bp, synthetic construct
  source 1..75: mol_type = other DNA
aaacatattgcgtatttcatgcgacaagcattggcctggctggaagggcattcatgcagcaacgacagacagggt

SEQ ID NO: 784186 - DNA, 75 bp, synthetic construct
  source 1..75: mol_type = other DNA
actgcacgctctgtaccggataaaagcgtatcagatgattttatgcatgctgttctcagtaactgcaccacaaga

SEQ ID NO: 784187 - DNA, 75 bp, synthetic construct
  source 1..75: mol_type = other DNA
cacccgtcagtgctccacgctcatcaatactgttgaactggcaacgcttggcgcgacgctggcggcggggggggt

SEQ ID NO: 784188 - DNA, 75 bp, synthetic construct
  source 1..75: mol_type = other DNA
gcgcgacgctggcggcgggtggtgtgaatccgttgacgcataaacgcgttcttcaggccgacaacgtgccgtaca

SEQ ID NO: 784189 - DNA, 75 bp, synthetic construct
  source 1..75: mol_type = other DNA
atgcaatggaagcctgtgacgtgtacacccgtcagtgctccacgctcctcaatactgttgaactggcaacacttg

SEQ ID NO: 784190 - DNA, 75 bp, synthetic construct
  source 1..75: mol_type = other DNA
ccggttgcaagtcctggccaaaacatcaggtggtgctggttttggtgctctggtcggagaagaactgtctataac

SEQ ID NO: 784191 - DNA, 75 bp, synthetic construct
  source 1..75: mol_type = other DNA
aactggttgtatcatcatggtgcaaacggggtaattatatatcaccccgtcacaaattgtcttacgtgcaatgaa

SEQ ID NO: 784192 - DNA, 75 bp, synthetic construct
  source 1..75: mol_type = other DNA
tgctgaccaccggcttgattcttgggggcgcgcaaagcgcctccgctggcatcatcgtgaccaaccctaccgagc

SEQ ID NO: 784193 - DNA, 75 bp, synthetic construct
  source 1..75: mol_type = other DNA
caagtttcgacgatatgattgctctcaagggcaacaaagaaattggcgaaaaaattaacaaaaccatcagattac

SEQ ID NO: 784194 - DNA, 75 bp, synthetic construct
  source 1..75: mol_type = other DNA
aattttaatatggctgctgtcggtgtgatgaagaaggggaggtcgatgagtttgttttcttctcctggaaataca

SEQ ID NO: 784195 - DNA, 75 bp, synthetic construct
  source 1..75: mol_type = other DNA
cggacaaccctgtgcagggaaaacaaatctgacagcagagttaatttctgctgttgtggggagtaataaaaaagg

SEQ ID NO: 784196 - DNA, 75 bp, synthetic construct
  source 1..75: mol_type = other DNA
ttatccgaaactcactgatagcgacattaaaattcttctggtgcaggataaatggcagagtagcctgactaatgc

SEQ ID NO: 784197 - DNA, 75 bp, synthetic construct
  source 1..75: mol_type = other DNA
tatcaaaggcatcattggcctgcccgctaacttgttctacggcacgggtatcccagcatgcatcattgtcatcga

SEQ ID NO: 784198 - DNA, 75 bp, synthetic construct
  source 1..75: mol_type = other DNA
tcgactttgctgtagctaacccccctttctccaacaaaaactggaccagcgggctggatgctgcgaacgatactt

SEQ ID NO: 784199 - DNA, 75 bp, synthetic construct
  source 1..75: mol_type = other DNA
accttccggcgtcgagtacgacgtgatgaccgccgacgatatggtggtggttgagatagccagcggtaaggtggt

SEQ ID NO: 784200 - DNA, 75 bp, synthetic construct
  source 1..75: mol_type = other DNA
gacccgatcaccgcgcgcctgactgctgctccgggcaacggtgcttctattggcggtctgaaagtgatgactgac

SEQ ID NO: 784201 - DNA, 75 bp, synthetic construct
  source 1..75: mol_type = other DNA
actgcgtgataagttcgatctggcgtttgctaacgatccggattatgaccgtcacggcatcgttactccggcagg

SEQ ID NO: 784202 - DNA, 75 bp, synthetic construct
  source 1..75: mol_type = other DNA
gacacgccaacgcatctggcgctctaccgtcgctatgcagagatcggtggcattgtgcatacccactcgcgccac

SEQ ID NO: 784203 - DNA, 75 bp, synthetic construct
  source 1..75: mol_type = other DNA
accgtcgctatgccgaaatcggtggtattgtgcatacccactcgcgccacgcgaccatctggtcacaggccgggc

SEQ ID NO: 784204 - DNA, 75 bp, synthetic construct
  source 1..75: mol_type = other DNA
gccaccatctggtcgcaggccggacttgatctccccgcctggggcactactcacgccgattatttttacggagct

SEQ ID NO: 784205 - DNA, 75 bp, synthetic construct
  source 1..75: mol_type = other DNA
atgtgatctcaggttcaattcatcctacaaagttcactaatgcagatggtgagcctgtgaatgaggtattatcaa

SEQ ID NO: 784206 - DNA, 75 bp, synthetic construct
  source 1..75: mol_type = other DNA
ggtgagcgccagcaccctggcaggtgacccgatcaccgcgcgcctgaccgctgcgcctggcaacggtgcttctat

SEQ ID NO: 784207 - DNA, 75 bp, synthetic construct
  source 1..75: mol_type = other DNA
ctttatgcacctcgataaagacggcgcgatccgtatggactgttcctccgagtgtgcaatggcgggcctgctggc

SEQ ID NO: 784208 - DNA, 75 bp, synthetic construct
  source 1..75: mol_type = other DNA
gctgcgacttccgcacaaaaagcggcgctgtctaagctgtctccggaaatggtgagcgccagcaccctggcaggc

SEQ ID NO: 784209 - DNA, 75 bp, synthetic construct
  source 1..75: mol_type = other DNA
tgttgctgtcggtaaaacgctggtttcttctgcgatgatcgaccgtgtggtcaatgccttgggccgtaagctggt

SEQ ID NO: 784210 - DNA, 75 bp, synthetic construct
  source 1..75: mol_type = other DNA
tttgctaacgacccggattatgaccgtcacggcattgtcactccggcaggtttgatgaatccaaaccattacctg

SEQ ID NO: 784211 - DNA, 75 bp, synthetic construct
  source 1..75: mol_type = other DNA
cattgtgcatacccactcgcgccacgccaccatctggtcgcaggccgggctggatctccccgcctggggcaccac

SEQ ID NO: 784212 - DNA, 75 bp, synthetic construct
  source 1..75: mol_type = other DNA
catggtggcagtgctgtaaatgtgccgtggatttgtggtgacacgacgtattactggaaaaatacatacgctacc

SEQ ID NO: 784213 - DNA, 75 bp, synthetic construct
  source 1..75: mol_type = other DNA
ttacatattgccaaaaaactgcttccgtatatcccgaataacgcggggatcctgctggcaccatgctgtcgtggt

SEQ ID NO: 784214 - DNA, 75 bp, synthetic construct
  source 1..75: mol_type = other DNA
atgacatttaaacattacgatgttgtcagggcggcgtcgccgtcagaccttgcggaaaagctgacacacaaactg

SEQ ID NO: 784215 - DNA, 75 bp, synthetic construct
  source 1..75: mol_type = other DNA
atggaaggcgacagtcaatatgccgatgtgatggagcgcgcactgtacaacactgtgctcggcggcatggcgctg

SEQ ID NO: 784216 - DNA, 75 bp, synthetic construct
  source 1..75: mol_type = other DNA
aatggcactccctatgttaatcgcaacgtcaatgaagatgacagcgttgaatcatacacagggaaaatatttgag

SEQ ID NO: 784217 - DNA, 75 bp, synthetic construct
  source 1..75: mol_type = other DNA
tgaattgtagcgacggagacgtggtggtgctgatttctcacacgggaagaacaaaaaatctggtcgagctggcgc

SEQ ID NO: 784218 - DNA, 75 bp, synthetic construct
  source 1..75: mol_type = other DNA
acgatcaggtcgatcaaaccttccactttatgcaccttgataaagacggcgcgatccgtatggactgctcctccg

SEQ ID NO: 784219 - DNA, 75 bp, synthetic construct
  source 1..75: mol_type = other DNA
gattgccacagcgatcagcgcaccaatccgaactttaacccggcgtctgttccgttgcttaaggagcagccatga

SEQ ID NO: 784220 - DNA, 75 bp, synthetic construct
  source 1..75: mol_type = other DNA
ctgctggggtgctggcgtcgggcctgttgtggagcctgaacggaattaccgctacccctgcggcgcaggcatctg

SEQ ID NO: 784221 - DNA, 75 bp, synthetic construct
  source 1..75: mol_type = other DNA
tgatgaggcttgggagcgtgcgcgccgtcgtgcggagatcatcagtccgttggcgcagtcggagacggtcgggca

SEQ ID NO: 784222 - DNA, 75 bp, synthetic construct
  source 1..75: mol_type = other DNA
gcgaatttgacttaatgaccagtgactacgcgtcacaccctcaacactttaatcatatggttgaagcctttcgta

SEQ ID NO: 784223 - DNA, 75 bp, synthetic construct
  source 1..75: mol_type = other DNA
tcttctgcgatgatcgaccgtgtggtcaatgacttgggtcgtaagctggtagaagtcccggtaggtttcaaatgg

SEQ ID NO: 784224 - DNA, 75 bp, synthetic construct
  source 1..75: mol_type = other DNA
ccagtgccaatatgagcgtcgggtttgatgtgcttggagcggcagtgacgcctgttgatggttccttgttgggag

SEQ ID NO: 784225 - DNA, 75 bp, synthetic construct
  source 1..75: mol_type = other DNA
caacgataattaaacccggcaatccgccggtaacctggacccgttactccggaaataaaatgaccaggacagagt

SEQ ID NO: 784226 - DNA, 75 bp, synthetic construct
  source 1..75: mol_type = other DNA
gtgcagaacatcaagcctccgtaatgtatcaaacgttcggacacctcgacgcgaagctaggcgaaaagcataaag

SEQ ID NO: 784227 - DNA, 75 bp, synthetic construct
  source 1..75: mol_type = other DNA
gctggcgatgccggggcgtcaatttcggattacgttgaaacaaaatttgttgttggcagtgctggcgaggctggc

SEQ ID NO: 784228 - DNA, 75 bp, synthetic construct
  source 1..75: mol_type = other DNA
cagtatgccagcctgacgtcactgtttgcccagcttttcattgagctggcggaatggcatagcccacttttcctg

SEQ ID NO: 784229 - DNA, 75 bp, synthetic construct
  source 1..75: mol_type = other DNA
cacgcaaccttccgcaactgggcattgccaatctgcgtgttcgtgaccaactgctggaaattggcagtcagcaac

SEQ ID NO: 784230 - DNA, 75 bp, synthetic construct
  source 1..75: mol_type = other DNA
aaaacgccgatgaagcgtgcggggcaaccggcggaactggcccctgtatatgtttatctggcaagtcaggagtcg

SEQ ID NO: 784231 - DNA, 75 bp, synthetic construct
  source 1..75: mol_type = other DNA
agcggctctttgagcaaagaagagttgcgcactatcgtgcacgaatcacgctcacaaatttcccgtcgcaatcag

SEQ ID NO: 784232 - DNA, 75 bp, synthetic construct
  source 1..75: mol_type = other DNA
ctcggcactattgttgggatgcgtttgtacggcgatgcgggcgtggcaattgcgactggtgtgctgacttttgtc

SEQ ID NO: 784233 - DNA, 75 bp, synthetic construct
  source 1..75: mol_type = other DNA
gcgagtacgatatcgatattctcgacgtacaggacaatatgattaagcaggtaaaagtttttcctgtgaaaccgc

SEQ ID NO: 784234 - DNA, 75 bp, synthetic construct
  source 1..75: mol_type = other DNA
ctatgactattcagcctggagttcagatgacattgatgactgctggtgactactgggtgaaaactgccggtgcgg

SEQ ID NO: 784235 - DNA, 75 bp, synthetic construct
  source 1..75: mol_type = other DNA
aggagatttcgcttcggctaaccctaaagcaagtcttcttgcaggtgagggcgctcttgttgccggtgcaaatgg

SEQ ID NO: 784236 - DNA, 75 bp, synthetic construct
  source 1..75: mol_type = other DNA
tggaacacatttctactactacgttgatcattattctgatcatcatggtggtcatttcagcctatttttccgggt

SEQ ID NO: 784237 - DNA, 75 bp, synthetic construct
  source 1..75: mol_type = other DNA
taacattctatggaccagctcttattccttcgtttggtgaatatccacctcttgtggatataacatatgaatcat

SEQ ID NO: 784238 - DNA, 75 bp, synthetic construct
  source 1..75: mol_type = other DNA
cgtagtgaattgctgaaagcgattgttgggctggaagcgtatgagcagggtgagattgttatcaacggcgagaaa

SEQ ID NO: 784239 - DNA, 75 bp, synthetic construct
  source 1..75: mol_type = other DNA
gtcgctgatgctcgggcgcgatcacgttgatattacgccggtcgttcctcaggaaattgcggaccaggccgtact

SEQ ID NO: 784240 - DNA, 75 bp, synthetic construct
  source 1..75: mol_type = other DNA
gatttaccgtattgtccgcgagctggctgccgaaggaaaaagcgtggtgtttatctccagtgaagtggaggagtt

SEQ ID NO: 784241 - DNA, 75 bp, synthetic construct
  source 1..75: mol_type = other DNA
aatcgtatttatataagagagcaattgtctattaataaccatgataggttgattctcagtgttggcagattaaac

SEQ ID NO: 784242 - DNA, 75 bp, synthetic construct
  source 1..75: mol_type = other DNA
tggatgcggtaaatcagcttgatttcaacagctatgccacggcgctggcgaaatatcgccaacaacgggaggcgg

SEQ ID NO: 784243 - DNA, 75 bp, synthetic construct
  source 1..75: mol_type = other DNA
cgttggcgcaggtaccagcactattgagtccgttccgtgcgccattgcgctggttgaactggcacaaaccgaccc

SEQ ID NO: 784244 - DNA, 75 bp, synthetic construct
  source 1..75: mol_type = other DNA
tttgtaaatcacggtgataccaatttgtttcaagtcgaaactaacgacgaagaactcatacgtaaaatgtttgga

SEQ ID NO: 784245 - DNA, 75 bp, synthetic construct
  source 1..75: mol_type = other DNA
gaaatcggcgcggtagcgagcggtatctccggctccggcccgactttgttcgctctgtgtgacaagccggatacc

SEQ ID NO: 784246 - DNA, 75 bp, synthetic construct
  source 1..75: mol_type = other DNA
atgtagtcacggttgaggcagcagagacattcagtctcaacaacctcggacgctttgccgataagctgccgtcag

SEQ ID NO: 784247 - DNA, 75 bp, synthetic construct
  source 1..75: mol_type = other DNA
aaattgcgcgggtgatgaagggtgaaccgcgcgtggtcattcttgatgagcccaccagttcgctcgccagtgcgg

SEQ ID NO: 784248 - DNA, 75 bp, synthetic construct
  source 1..75: mol_type = other DNA
ccctgaacagcttgtttctatgctaagcccggcgcaaaaacagctagtggaaattgcgcgggtgatgaagggtga

SEQ ID NO: 784249 - DNA, 75 bp, synthetic construct
  source 1..75: mol_type = other DNA
ccgaagaggtgatgcagcggatgacggtcaaggctgccagtagcgaaacgcctatcggcacgctttctggcggca

SEQ ID NO: 784250 - DNA, 75 bp, synthetic construct
  source 1..75: mol_type = other DNA
gtcagtgataatccggtgatggtcgcagagctactgcgtgagtttccagattatgcatggcaggtggcaattgcc

SEQ ID NO: 784251 - DNA, 75 bp, synthetic construct
  source 1..75: mol_type = other DNA
acatacaccgcgcgctgaggggtataacaaagtccgaatcaccggctggatgttgaaatacgacgacgagctgcg

SEQ ID NO: 784252 - DNA, 75 bp, synthetic construct
  source 1..75: mol_type = other DNA
catatcgctcagggttacctggtggtgaaagcggctatacgacgagaaaaatcgtggatgaaaacaattgagttt

SEQ ID NO: 784253 - DNA, 75 bp, synthetic construct
  source 1..75: mol_type = other DNA
tggcagctcttcgtcgccttcgccttgcacaagaactctcggaacgagagtggcggatggtgttttatggcctcg

SEQ ID NO: 784254 - DNA, 75 bp, synthetic construct
  source 1..75: mol_type = other DNA
ttttccgggacaggaaatgcgatgtatgcctatcgaataggtcacgcgccatttaaccctgaaacacgcacgctt

SEQ ID NO: 784255 - DNA, 75 bp, synthetic construct
  source 1..75: mol_type = other DNA
tctgatgcatttctttgaattgctgcgcggtaatggcgatgttgatcaggcacgattgcactactggctgcgttt

SEQ ID NO: 784256 - DNA, 75 bp, synthetic construct
  source 1..75: mol_type = other DNA
agtttctggacaaaattagctggttgttaggtctggctgcccagtgggtacgtttccgtgatgacatcataactg

SEQ ID NO: 784257 - DNA, 75 bp, synthetic construct
  source 1..75: mol_type = other DNA
gaacgactcgatcaccaggaataccgacaaattcgggcagaagcagagcaggaaactcatctgaaaaaattacga

SEQ ID NO: 784258 - DNA, 75 bp, synthetic construct
  source 1..75: mol_type = other DNA
aagcgtaccaatcaacatgctggtgaaggtgaaaggcacgccgctggcggataacgacgatgtcgatgcctttga

SEQ ID NO: 784259 - DNA, 75 bp, synthetic construct
  source 1..75: mol_type = other DNA
gaggcgtgtatgacgctgggcacgttgagtgaatctcaggcgcagcgccttgcgaatgccgggctggattactac

SEQ ID NO: 784260 - DNA, 75 bp, synthetic construct
  source 1..75: mol_type = other DNA
ttccggcgatctgatggtcgtggataaagcagaacagccgcggcacggggatattgttatcgcggaaattgaggg

SEQ ID NO: 784261 - DNA, 75 bp, synthetic construct
  source 1..75: mol_type = other DNA
tatttcgtgcgagctcagggaaacagcatgcaggatgtcggtatgcgtgatggagatttgctggtggtggaccgt

SEQ ID NO: 784262 - DNA, 75 bp, synthetic construct
  source 1..75: mol_type = other DNA
acccaaagtgcaaccggtaaagatcctgaaatcaccatcacgacctgggaggaatggaatagcaacagaaaataa

SEQ ID NO: 784263 - DNA, 75 bp, synthetic construct
  source 1..75: mol_type = other DNA
ggcacaagaactcacggaacgagagtggcggatggtgttttatggactcgccgataatgatccattatatcctga

SEQ ID NO: 784264 - DNA, 75 bp, synthetic construct
  source 1..75: mol_type = other DNA
tatgcctggggtcacgcccgcattccggcgcaatatgactacatcagttggatgctgcatatgagtttctacgtt

SEQ ID NO: 784265 - DNA, 75 bp, synthetic construct
  source 1..75: mol_type = other DNA
ttcgtctggcaaaagtgaaggatttgtcgctaaaagccgacttttcgctggcaaaaccgctgatcattcacaatg

SEQ ID NO: 784266 - DNA, 75 bp, synthetic construct
  source 1..75: mol_type = other DNA
gacgccaattatcaacggcaatttcgatgtgttaattaataccgacggtgggcgaatgacgttgctcggcgtgct

SEQ ID NO: 784267 - DNA, 75 bp, synthetic construct
  source 1..75: mol_type = other DNA
gacaaactgagttttaacctgagtgaagccagttctgacattctgggcgatgcttacgagtatctgattggtcag

SEQ ID NO: 784268 - DNA, 75 bp, synthetic construct
  source 1..75: mol_type = other DNA
ttatcaacggcaatttcgatgtgctgattaataccgaaggcggacgcatgacgttgctcggcgttctggtggcgc

SEQ ID NO: 784269 - DNA, 75 bp, synthetic construct
  source 1..75: mol_type = other DNA
gttcagtctctctaccctgctgcctgtttttctgttcggcgctatgtgggggattggtaatatcaactacggtct

SEQ ID NO: 784270 - DNA, 75 bp, synthetic construct
  source 1..75: mol_type = other DNA
gttcgtgcattattagctccattctcggaattacatagcttgggtatcagtcattgtgatattgacccgcacaat

SEQ ID NO: 784271 - DNA, 75 bp, synthetic construct
  source 1..75: mol_type = other DNA
ccggtttatggtggccgtccgcgtccgccaaaaggtgcttcggaagcatttatctccacgctgcgtaagtttgac

SEQ ID NO: 784272 - DNA, 75 bp, synthetic construct
  source 1..75: mol_type = other DNA
cagagttattgcgtttggcgggaaaaagaaaaccgaagaagtggaccagctggcatcaaagttaatggctgcaag

SEQ ID NO: 784273 - DNA, 75 bp, synthetic construct
  source 1..75: mol_type = other DNA
gccagtcccggtgacatcagaaggactggttaaagccgtgcgtttctatgaacaagttaagcgtgaaaatccgcc

SEQ ID NO: 784274 - DNA, 75 bp, synthetic construct
  source 1..75: mol_type = other DNA
agccgaaaccggagcatggaaagacgctattgactgggtgctcaaagaggcttgccaagctgtaaacattggcat

SEQ ID NO: 784275 - DNA, 75 bp, synthetic construct
  source 1..75: mol_type = other DNA
gcaatacttttattgaactactgtttaatctcgagccagtaattgacgccatcattgagcgggctaatcctaatc

SEQ ID NO: 784276 - DNA, 75 bp, synthetic construct
  source 1..75: mol_type = other DNA
cgtactgttatttgccgccgggatcgtggtttccagcattagccgtcaggagatcagcctgaatttacagccggg

SEQ ID NO: 784277 - DNA, 75 bp, synthetic construct
  source 1..75: mol_type = other DNA
gctgaagaaatatggttacaccggtaaggacgacaaagtttatttgcaatgttttgatgccgatgaactgaagcg

SEQ ID NO: 784278 - DNA, 75 bp, synthetic construct
  source 1..75: mol_type = other DNA
gtccggattaccatatgttgattgaggaaacatcgcagccgggtaatatcaaactcactggcatggtgcaagatg

SEQ ID NO: 784279 - DNA, 75 bp, synthetic construct
  source 1..75: mol_type = other DNA
ctgactatctggagcaggatttggtaatgaccaaagacgaccatctggtcgtcctgcatgaccactatcttgatc

SEQ ID NO: 784280 - DNA, 75 bp, synthetic construct
  source 1..75: mol_type = other DNA
gactcaagcatctccagattcaccatacactccatcgcttatcagcttcctaacccagagccctcgtgaattgag

SEQ ID NO: 784281 - DNA, 75 bp, synthetic construct
  source 1..75: mol_type = other DNA
gattattcagttaagcttttatgggcctgggctacctatgtgttacttaccttgacctatacgttaatcgctatt

SEQ ID NO: 784282 - DNA, 75 bp, synthetic construct
  source 1..75: mol_type = other DNA
atccagttgtgggaacaatgacagacagaacgaatacacgttggggaaaatatcggccgtggttgctttttatgt

SEQ ID NO: 784283 - DNA, 75 bp, synthetic construct
  source 1..75: mol_type = other DNA
ttaaatgggttaaacaagcacagaataacaatgtagccctgtgtgcgtttaattgccctaaatgcaaagaacaaa

SEQ ID NO: 784284 - DNA, 75 bp, synthetic construct
  source 1..75: mol_type = other DNA
ggaaattcgggattccctgacatgttgtccgtggtgcagcgcggttttctttaagcaggtaaaaggcgcgaaggt

SEQ ID NO: 784285 - DNA, 75 bp, synthetic construct
  source 1..75: mol_type = other DNA
tcaccattaacgatcaatccctgcgtcaggcactgaaagcgctggaatcagctgcaacagacatgacacccgcga

SEQ ID NO: 784286 - DNA, 75 bp, synthetic construct
  source 1..75: mol_type = other DNA
gtgttgcaggagcgcaaagtacgcccgctgggcagcaaccgcgatattgatatcgacgtgcggattatttccgcc

SEQ ID NO: 784287 - DNA, 75 bp, synthetic construct
  source 1..75: mol_type = other DNA
gggtgaaaacacggcgctgccaacctttgttgaggcacgtaatcagtttgaactcaactatttgcgtaagctgct

SEQ ID NO: 784288 - DNA, 75 bp, synthetic construct
  source 1..75: mol_type = other DNA
gatggtaaaccctggcagtcgtatgaaacagcgcaaattgcggttgatctgcgcttcttccagtttgtaccaggg

SEQ ID NO: 784289 - DNA, 75 bp, synthetic construct
  source 1..75: mol_type = other DNA
cctattttgtgctgaacggcacatcggcagcgaataaagtggtgacgaatgcgctgttaacgcgtggcgatctgg

SEQ ID NO: 784290 - DNA, 75 bp, synthetic construct
  source 1..75: mol_type = other DNA
cttcgtgcggatatttccaccagcaatcgaaggccgcgatctcaatccgatgctgcaacatcccggtcttatctt

SEQ ID NO: 784291 - DNA, 75 bp, synthetic construct
  source 1..75: mol_type = other DNA
aataaacgattttaatgaactgtttgaacggatcgatcaccaggaataccgacaaattctggcagaaacagagca

SEQ ID NO: 784292 - DNA, 75 bp, synthetic construct
  source 1..75: mol_type = other DNA
gtatgggcgatgatgccttaatctatgctctgagccgttatttactttgccaacaaccgcagggccacaaaagct

SEQ ID NO: 784293 - DNA, 75 bp, synthetic construct
  source 1..75: mol_type = other DNA
tttgccgcggggatcgtggtctccagcgtcagccgtcaggagatcagcctgaatttacagccgggtcagcaggtg

SEQ ID NO: 784294 - DNA, 75 bp, synthetic construct
  source 1..75: mol_type = other DNA
ccatccgccgctgctttatctcggctatggcggtttgatggtggcggcgagcgtggcgctggcgagtttactgcg

SEQ ID NO: 784295 - DNA, 75 bp, synthetic construct
  source 1..75: mol_type = other DNA
ggctggcgggtgcgggacggtgggccggtggggcgtttttcgggtttatcgcgagaaatgttaatcctcgcaacg

SEQ ID NO: 784296 - DNA, 75 bp, synthetic construct
  source 1..75: mol_type = other DNA
cgaaagttgtctgggtaaccgatgctgccttactaaccgacgccgcggctaacgcattgctgaaaacgcttgaag

SEQ ID NO: 784297 - DNA, 75 bp, synthetic construct
  source 1..75: mol_type = other DNA
cattggtgagttcaacaacctgttcgaacatattgaccaacaggagtaccgcaaaattctggcgggcactgagca

SEQ ID NO: 784298 - DNA, 75 bp, synthetic construct
  source 1..75: mol_type = other DNA
ctacaacgcgggattccgcagcaccatgaaccagcgacgggaggactacgcagacaatatttatgccatctaccg

SEQ ID NO: 784299 - DNA, 75 bp, synthetic construct
  source 1..75: mol_type = other DNA
agccgccagcagaaacctggtttttcctcgctacccgagagcctgaacgtttactggcgacattacgtagccgtt

SEQ ID NO: 784300 - DNA, 75 bp, synthetic construct
  source 1..75: mol_type = other DNA
gctgaaaacgcttgaagagccaccagcagaaacctggtttttcctggctacccgcgagcctgaacgtttactggc

SEQ ID NO: 784301 - DNA, 75 bp, synthetic construct
  source 1..75: mol_type = other DNA
atttctgtcacaggcgtaaaccgcgagcttgtcatcaccgatcttttactacgtattgagcattacctgcaaccg

SEQ ID NO: 784302 - DNA, 75 bp, synthetic construct
  source 1..75: mol_type = other DNA
gaggtgcttagccatatccgcaaagcggtgctgtttattgaagggataacggtaagcggcggcgaagccacgacc

SEQ ID NO: 784303 - DNA, 75 bp, synthetic construct
  source 1..75: mol_type = other DNA
gaatatttcaaatggagaagccgccagagtaccacaacaaaagacctgatgacgttgaaatgggatgcactaaat

SEQ ID NO: 784304 - DNA, 75 bp, synthetic construct
  source 1..75: mol_type = other DNA
aattttgattcacgctatgtgagagatgtcagacttggcacgcgtgttgttcaaactatgcaaaaaggcgtgatg

SEQ ID NO: 784305 - DNA, 75 bp, synthetic construct
  source 1..75: mol_type = other DNA
cggaagacgttgagccgttggctgatgcattaaaggtgcgcggggtgggccggttgatatttccggcgctgtatt

SEQ ID NO: 784306 - DNA, 75 bp, synthetic construct
  source 1..75: mol_type = other DNA
atgaacagcagatgcgctttagtcagtaagattatccccttctcctgcgttgacgggccaggcagtcgtctggct

SEQ ID NO: 784307 - DNA, 75 bp, synthetic construct
  source 1..75: mol_type = other DNA
acagattaagcacagcatctgtttgcttgcagagcgcggtaagctggcggaactgcgtttgctggtaatccccaa

SEQ ID NO: 784308 - DNA, 75 bp, synthetic construct
  source 1..75: mol_type = other DNA
gggcgctgacagggaacgccgacaccgcgacgaaattgaaaacagctcgaacaatcaacggggtgggatttgatg

SEQ ID NO: 784309 - DNA, 75 bp, synthetic construct
  source 1..75: mol_type = other DNA
catttctatagtcagcgaaatacagataactcagtaatatttgctgttaacggtcagatacaacccagcaactgg

SEQ ID NO: 784310 - DNA, 75 bp, synthetic construct
  source 1..75: mol_type = other DNA
gatgcactaaatattcttgttaatgccgtcattaatggcagccttggagttggtacgacgaatgcgttaggtggt

SEQ ID NO: 784311 - DNA, 75 bp, synthetic construct
  source 1..75: mol_type = other DNA
cggagataacgacaccggtattaaacagggcggcgatggtgtccttttattctatttaaatggacaactgatatt

SEQ ID NO: 784312 - DNA, 75 bp, synthetic construct
  source 1..75: mol_type = other DNA
gtaaacaaggctggtaacgctgttcagcgttctggcgatacaatgaccggaaaactgaatctaccacagacatct

SEQ ID NO: 784313 - DNA, 75 bp, synthetic construct
  source 1..75: mol_type = other DNA
atctcaatagcacatatgtaagagacattcgacttggtagcgcagaatcaatatcagcatggcgaggccctggtt

SEQ ID NO: 784314 - DNA, 75 bp, synthetic construct
  source 1..75: mol_type = other DNA
ctatatctgtcagccacggggccaaaattgaaggaggtctagctattggtgctactgataacgcactgggtgaaa

SEQ ID NO: 784315 - DNA, 75 bp, synthetic construct
  source 1..75: mol_type = other DNA
ttggcgggttgatcatcggcaccatcaacaacggtctgaatattttgcaggtacaaacctattaccaactggtgg

SEQ ID NO: 784316 - DNA, 75 bp, synthetic construct
  source 1..75: mol_type = other DNA
tgttattagaagcaaatttaaattatcctgtcggctccagttttaacaccatcaccaaagatttaatcggtaaca

SEQ ID NO: 784317 - DNA, 75 bp, synthetic construct
  source 1..75: mol_type = other DNA
gatgggtataactataagttatcatctataccagatacctttcatttggtaataagtaaagagaaggcggatctt

SEQ ID NO: 784318 - DNA, 75 bp, synthetic construct
  source 1..75: mol_type = other DNA
ttgccctggttttggtgctggaaggtttagggccgatgctttacccgaaggcatggaagaagatgatcgctgcga

SEQ ID NO: 784319 - DNA, 75 bp, synthetic construct
  source 1..75: mol_type = other DNA
gcgcgattctggcgctttccggtatggtgaccgccaaactgatgttggcaggtgttgacccgtttctcgcggcgc

SEQ ID NO: 784320 - DNA, 75 bp, synthetic construct
  source 1..75: mol_type = other DNA
gtacaaacctattaccaactggtggtgatgggcggattaattatcgcggctgtcgcccttgaccgtcttatcagt

SEQ ID NO: 784321 - DNA, 75 bp, synthetic construct
  source 1..75: mol_type = other DNA
aaagaacggcagaacattaccgtaataaaattgctgtctacctgcgctggtatcagacgcggggcttcccggatg

SEQ ID NO: 784322 - DNA, 75 bp, synthetic construct
  source 1..75: mol_type = other DNA
atggttcgcgcatcggacatattgatgggttaggattacatctttataaagatattgaatctaattgcagcaatt

SEQ ID NO: 784323 - DNA, 75 bp, synthetic construct
  source 1..75: mol_type = other DNA
cgacaccggatttaggcaagatggagatggtattattagcttctattcaaatggttcgcgcatcggacatattga

SEQ ID NO: 784324 - DNA, 75 bp, synthetic construct
  source 1..75: mol_type = other DNA
tcgtggattttttattaccctcgcccaaccagttgaggtgaataacgaagtcattaaccatgtcttgatcgcctg

SEQ ID NO: 784325 - DNA, 75 bp, synthetic construct
  source 1..75: mol_type = other DNA
gaaacagtagaggtagcagcaaggaaagataatctaacagcagaggatgtgcaaagaagtattaaaaacaacatt

SEQ ID NO: 784326 - DNA, 75 bp, synthetic construct
  source 1..75: mol_type = other DNA
aagccggaaaacgctaccagattgcgcctgatcttcttaaaaccattgcacagcaggaaagcagtctggtcgcca

SEQ ID NO: 784327 - DNA, 75 bp, synthetic construct
  source 1..75: mol_type = other DNA
aacggtaaacagggctggtaacgccgtgcaaaaaaatggcgatactttgtccggtgggcttacttttgaaaatga

SEQ ID NO: 784328 - DNA, 75 bp, synthetic construct
  source 1..75: mol_type = other DNA
caaacaaaaaaggcgggatgacaaaatcgccatgcagactgcgattgatgttctcagggataatcagcgcattaa

SEQ ID NO: 784329 - DNA, 75 bp, synthetic construct
  source 1..75: mol_type = other DNA
atgggtactattgcaactaaaagcaagaaagcggctcgcatcgagtcagccttgctgaacaaactggcactgatt

SEQ ID NO: 784330 - DNA, 75 bp, synthetic construct
  source 1..75: mol_type = other DNA
ttaaacatagcggtattgcggcagggacgctggtgggacatcggctgcaccgctacccgcatgggcagaagagaa

SEQ ID NO: 784331 - DNA, 75 bp, synthetic construct
  source 1..75: mol_type = other DNA
gatgcctttgattttattcgcaccattgcggtcgcgcggatcatgatgccgacctcttacgtgcgcctttctgcc

SEQ ID NO: 784332 - DNA, 75 bp, synthetic construct
  source 1..75: mol_type = other DNA
ccacaaagaatgcaacgtttaatttatggggtgcttcaacccgtccagtagttgcagagttaggcgatgaggcag

SEQ ID NO: 784333 - DNA, 75 bp, synthetic construct
  source 1..75: mol_type = other DNA
aatggggtgtcgtcgacgacgacatggctcgattggcacgacaagttgcttcgattctcaccaataaaaaacgcc

SEQ ID NO: 784334 - DNA, 75 bp, synthetic construct
  source 1..75: mol_type = other DNA
gccgccttatattgcctttgtctgtccggtaaaaaaggcggctcttcttgagcagcgactgctgggcaggatgcg

SEQ ID NO: 784335 - DNA, 75 bp, synthetic construct
  source 1..75: mol_type = other DNA
agcagcgactgcggcaggatgcggagtccatgatgccccggttgctgtggggctggtccgtcggggcttctttta

SEQ ID NO: 784336 - DNA, 75 bp, synthetic construct
  source 1..75: mol_type = other DNA
gcatcgtgattattaattttgtttttttatttattgcaaaaaaacaaaaaagtaacgatatgcatgtttctacaa

SEQ ID NO: 784337 - DNA, 75 bp, synthetic construct
  source 1..75: mol_type = other DNA
ctaaagccgacatcgtggtggtcgggttgattggtgaacgcgggcgcgaagtgaaagagtttatcgaccactcgc

SEQ ID NO: 784338 - DNA, 75 bp, synthetic construct
  source 1..75: mol_type = other DNA
ccttaacccgccgttcggtggacgaaccgctggacgtgggcgtgaaagcgatcaacggcctgctgaccatcggca

SEQ ID NO: 784339 - DNA, 75 bp, synthetic construct
  source 1..75: mol_type = other DNA
actggtcgagagcgcaggcaacagcgaaagcgcaggatcgatgaccgccatctacaccgtgctggcggaaggcga

SEQ ID NO: 784340 - DNA, 75 bp, synthetic construct
  source 1..75: mol_type = other DNA
gaacaacagcagcgtctggagcaggcgctgatgaccccggacactgacgaatattacaacgcggcagcactatga

SEQ ID NO: 784341 - DNA, 75 bp, synthetic construct
  source 1..75: mol_type = other DNA
gctgattggcgaacgcgggcgcgaagtgaaagagtttatcgaccactcgctgggcgcggacgggctggcaaagtc

SEQ ID NO: 784342 - DNA, 75 bp, synthetic construct
  source 1..75: mol_type = other DNA
gcatatcgtattaacccgcaaactggcggaagcggggcactatccggccattgatatcggccagtcgatcagccg

SEQ ID NO: 784343 - DNA, 75 bp, synthetic construct
  source 1..75: mol_type = other DNA
gaccgggcagctgtgccgcatcgaaagtgccaatcacacgctgatcgacgcgcaggccgtgggctttaatcgcga

SEQ ID NO: 784344 - DNA, 75 bp, synthetic construct
  source 1..75: mol_type = other DNA
aacagcgctattactccaggagaggctgcaagctcctgcgatgggagtaataacagcaacaaagtgacttatttt

SEQ ID NO: 784345 - DNA, 75 bp, synthetic construct
  source 1..75: mol_type = other DNA
aaatagagaaagatgagttttataggaactaccttgaaaaaactattaaggatatatcttctgttcatggtggtt

SEQ ID NO: 784346 - DNA, 75 bp, synthetic construct
  source 1..75: mol_type = other DNA
cggcattcggcatgatccccaaactggtcgaaagcgcaggcaacagcgaaagcgcgggatcgatgaccgccatct

SEQ ID NO: 784347 - DNA, 75 bp, synthetic construct
  source 1..75: mol_type = other DNA
atggcgatgatgaagccatcttcagaccaatacaaaaatacatcaatggcacatggtataacgtcgcacaggtgt

SEQ ID NO: 784348 - DNA, 75 bp, synthetic construct
  source 1..75: mol_type = other DNA
actgggggaattttgattcccgctatgtgaaagatgttcgcctgggtacgcgtgttgttcaattgatggcgcgtg

SEQ ID NO: 784349 - DNA, 75 bp, synthetic construct
  source 1..75: mol_type = other DNA
tatcatcaccacacgcacttatcaggaacgcctcgatacgctggaaaaagtgcgcgatgccgggatcaaagtctg

SEQ ID NO: 784350 - DNA, 75 bp, synthetic construct
  source 1..75: mol_type = other DNA
ccaccgaactgtgccactccatcgccgcctggtttcgcgaccgcgggcatcacgttttactgctggtggattccc

SEQ ID NO: 784351 - DNA, 75 bp, synthetic construct
  source 1..75: mol_type = other DNA
acatcagcaatccgcccgcgcgttaaagcaaaactacgccgcctatatggagatcaaaccgctgatcccgctcgg

SEQ ID NO: 784352 - DNA, 75 bp, synthetic construct
  source 1..75: mol_type = other DNA
ccgccgctgccgccgtcggtcaatcccttaacccgccgttcagtggacgaaccgctggacgtgggcgtgaaagcg

SEQ ID NO: 784353 - DNA, 75 bp, synthetic construct
  source 1..75: mol_type = other DNA
catttgctgatgaatatgtttgcactcctggtggtggggggagtggtggaacgtattctggggaaatggcgactc

SEQ ID NO: 784354 - DNA, 75 bp, synthetic construct
  source 1..75: mol_type = other DNA
cttcatttgaagcgaatgcgttatcggtcattaacgtggcgacgggggagattattcagtcgattaccaccggcg

SEQ ID NO: 784355 - DNA, 75 bp, synthetic construct
  source 1..75: mol_type = other DNA
catttgaactactggtgattaacatctgttcgctttcctggtcggatatagaagccgccgggttgatgtcgcatc

SEQ ID NO: 784356 - DNA, 75 bp, synthetic construct
  source 1..75: mol_type = other DNA
gaccttgagcagagcgaagccatcggcgatcgctttggcgtctttcgctttcccgccacattagtgtttaccggc

SEQ ID NO: 784357 - DNA, 75 bp, synthetic construct
  source 1..75: mol_type = other DNA
gtcagcgataatccggtaatgattgccgaattactgcgtgaatttccagactatacatggcaggtcgcgattgcc

SEQ ID NO: 784358 - DNA, 75 bp, synthetic construct
  source 1..75: mol_type = other DNA
tagtgtgtcagcgattgatctggtgacttatcagcatgtggcggatatcccgctggagaaatacgacgggacggg

SEQ ID NO: 784359 - DNA, 75 bp, synthetic construct
  source 1..75: mol_type = other DNA
cactgaaattaacaggaaagtcgcgctcgcaattatatcgtgacatggctaaaggccttgtcagctatcgtacag

SEQ ID NO: 784360 - DNA, 75 bp, synthetic construct
  source 1..75: mol_type = other DNA
gtaacgccagaccagacaaagacagcaacaaaattaaaaaacttcgtgacggtaaaggcctgtatctctacgttc

SEQ ID NO: 784361 - DNA, 75 bp, synthetic construct
  source 1..75: mol_type = other DNA
atatccggtgatgaagtgtttattttccccggcgaccattaccagataaaaccaatgagcgaaaacaccattaac

SEQ ID NO: 784362 - DNA, 75 bp, synthetic construct
  source 1..75: mol_type = other DNA
ggtaacgcagcggcaaccgttgcggcgacgggtggcgcaccggtagtgggtgatatgcccgcacaaactgcaccg

SEQ ID NO: 784363 - DNA, 75 bp, synthetic construct
  source 1..75: mol_type = other DNA
gtacttaccctggcgggaccaagtttctccttgtggccagccggacaaccgacgaccactgtaacaacgacgggt

SEQ ID NO: 784364 - DNA, 75 bp, synthetic construct
  source 1..75: mol_type = other DNA
taatgatggcaaaggtggcgcaatttataccattaataatgacgttttagactggccccctgaatctccagacaa

SEQ ID NO: 784365 - DNA, 75 bp, synthetic construct
  source 1..75: mol_type = other DNA
cgtcttgacgactggcttacgcaagcgccagacggcgtggtgttattaagcagcgacccgaaacgcacgccagaa

SEQ ID NO: 784366 - DNA, 75 bp, synthetic construct
  source 1..75: mol_type = other DNA
tggcactgaccgtcctcacactgctgaccataacactctggcagacattcagactggggcaggaagacggacaca

SEQ ID NO: 784367 - DNA, 75 bp, synthetic construct
  source 1..75: mol_type = other DNA
ctatggttttcatgtggatggcgcagtacgcagtcatccacaaaacggctggatgcgcaccgatctttccgccac

SEQ ID NO: 784368 - DNA, 75 bp, synthetic construct
  source 1..75: mol_type = other DNA
tggaaactgaatattatagccgatgagttcaatgtatcagaaataaccatcagaaaaagactcgaaattgagaat

SEQ ID NO: 784369 - DNA, 75 bp, synthetic construct
  source 1..75: mol_type = other DNA
atggctggttggtttgaactcagtaagaacagtgataatcaattccggtttgtgctaaaagcgggcaatggggag

SEQ ID NO: 784370 - DNA, 75 bp, synthetic construct
  source 1..75: mol_type = other DNA
ccgaccgtggacaggtcgatggcattaatggtccggtggattttaatgtgtttaatggcacagaggaggagttgc

SEQ ID NO: 784371 - DNA, 75 bp, synthetic construct
  source 1..75: mol_type = other DNA
atttgcgtctatgaatatttctaattgccaaatccctttttcaaatgtgtttactcaattcggtgatatattctt

SEQ ID NO: 784372 - DNA, 75 bp, synthetic construct
  source 1..75: mol_type = other DNA
tgttggcgatatcgagctgttctgccgcgaagcacaagcgccgattgtggcgatcaccggttctaacggcaaaag

SEQ ID NO: 784373 - DNA, 75 bp, synthetic construct
  source 1..75: mol_type = other DNA
ctcgctcgcggcgtgacgccgcgcgttatggatacgcgtatgacaccgcctggcctggataaattacccgaagcg

SEQ ID NO: 784374 - DNA, 75 bp, synthetic construct
  source 1..75: mol_type = other DNA
atgtcgcgaaaagatggggtgttggcgctactggtagtggtcgtatgggggctaaattttgtggtcatcaaagtg

SEQ ID NO: 784375 - DNA, 75 bp, synthetic construct
  source 1..75: mol_type = other DNA
taagctccgttcgagcggtagcaccacatctaaacttcaagaggtagggcgtggtttacgtcttccagtgaatga

SEQ ID NO: 784376 - DNA, 75 bp, synthetic construct
  source 1..75: mol_type = other DNA
tctgattgtcgccagtcccggtattgcactggcgcatccatccctaagcgctgccgctgatgccggaatcgaaat

SEQ ID NO: 784377 - DNA, 75 bp, synthetic construct
  source 1..75: mol_type = other DNA
atggcgaaagcagcaggtgttaacgttggcgtgggtggcaacattggcctgccagccttgatgctgctggatgct

SEQ ID NO: 784378 - DNA, 75 bp, synthetic construct
  source 1..75: mol_type = other DNA
ccatccctttacccactcaggccatgcagcttcttgacgatataagaaatatatccggtgatgaagtgtttattt

SEQ ID NO: 784379 - DNA, 75 bp, synthetic construct
  source 1..75: mol_type = other DNA
caaccggccccagtatgcctgaaatgaatgaaaaggtaagggtgttgaaccctatcgcctgtatgcgatcgcgct

SEQ ID NO: 784380 - DNA, 75 bp, synthetic construct
  source 1..75: mol_type = other DNA
gcgttctggtccattctcacggcccgtttgcatggggcaaaaatgccgaagatgcggtgcacaacgccatcgtgc

SEQ ID NO: 784381 - DNA, 75 bp, synthetic construct
  source 1..75: mol_type = other DNA
tagtggctggttacgtggtaatggcaaaaataaattacgctttgatgaaatcagccgtaccaaaggtattgaggg

SEQ ID NO: 784382 - DNA, 75 bp, synthetic construct
  source 1..75: mol_type = other DNA
ggttttttcacctttattttgaacgtcagcggagggtttcgtttgctggctaatgccttgaatctaacacctgac

SEQ ID NO: 784383 - DNA, 75 bp, synthetic construct
  source 1..75: mol_type = other DNA
ccccaccatgtcttatctggcatcagggtgcacccataccgccttcccgcccgggcatcttcacccgactggtca

SEQ ID NO: 784384 - DNA, 75 bp, synthetic construct
  source 1..75: mol_type = other DNA
cgatgaccatcccacgcagtttctggcaggcaaaccgctgccgctttcgcaataccggctcggcccgatgcggct

SEQ ID NO: 784385 - DNA, 75 bp, synthetic construct
  source 1..75: mol_type = other DNA
caaagaagacaccaggacagcggacagccgcaagccaaataagccagtcaggaagccactaaaaagcatgatcat

SEQ ID NO: 784386 - DNA, 75 bp, synthetic construct
  source 1..75: mol_type = other DNA
ttctggaaaccactcttctggaaaagtctctttctcatctccttatgctggagaacgccagggatacgtgtattc

SEQ ID NO: 784387 - DNA, 75 bp, synthetic construct
  source 1..75: mol_type = other DNA
gttatggtgatgtcgatgcggaaggcatatcaaacgaagcatggcttgaacaggatctggacgaagacgaggagg

SEQ ID NO: 784388 - DNA, 75 bp, synthetic construct
  source 1..75: mol_type = other DNA
attgctacgcctctggaaatcgtcaaacggaccggccaactggcggtcacggaacacatgactttggacaatacc

SEQ ID NO: 784389 - DNA, 75 bp, synthetic construct
  source 1..75: mol_type = other DNA
cgtgaggattacggctttgaagatggcctgttcaccggctacgacgcggaaaaacgcaagtacgataagtccacc

SEQ ID NO: 784390 - DNA, 75 bp, synthetic construct
  source 1..75: mol_type = other DNA
atgtatgccgaacagggtggcgcgaacccggaccaggtgctgaacatgacctggaactacgccattccgcatgag

SEQ ID NO: 784391 - DNA, 75 bp, synthetic construct
  source 1..75: mol_type = other DNA
tttcaggttttggaaataagttacgcacatcacgtggagatcgtcgctgggatgccttagctaaagctgtgggta

SEQ ID NO: 784392 - DNA, 75 bp, synthetic construct
  source 1..75: mol_type = other DNA
ggcgttacctcattttcatctttttcattcactgctcgctgacgacagttacgggcagattatccataaggaaca

SEQ ID NO: 784393 - DNA, 75 bp, synthetic construct
  source 1..75: mol_type = other DNA
atgtcccagactgagcgtcgccatgaaaggctggcggtccggttgtccctcattatcagccgcctgattgctggc

SEQ ID NO: 784394 - DNA, 75 bp, synthetic construct
  source 1..75: mol_type = other DNA
cacgaaatcatcggcgacatcgtgccgctggcaaagcgctatgccgacgaaggcgcagatgaattagtgttctac

SEQ ID NO: 784395 - DNA, 75 bp, synthetic construct
  source 1..75: mol_type = other DNA
gcaatctaaggggatctatcctgcaaatatcaatgatgcactggcacatgttgcacgattaaaagcggaggggaa

SEQ ID NO: 784396 - DNA, 75 bp, synthetic construct
  source 1..75: mol_type = other DNA
cgtgatggttacatctacgcgctgacggaacatcagagctctgcggatcgttttatggccctgcgcatgatgcat

SEQ ID NO: 784397 - DNA, 75 bp, synthetic construct
  source 1..75: mol_type = other DNA
aaatggggatgacgccggagcagattaagcaggctaccggactttccgatgacgaactgaagaaaatcactcatt

SEQ ID NO: 784398 - DNA, 75 bp, synthetic construct
  source 1..75: mol_type = other DNA
cgctggcaaaacgctacgccgaagaaggtgcagatgaactggtgttctacgatatcaccgcttccagcgatggcc

SEQ ID NO: 784399 - DNA, 75 bp, synthetic construct
  source 1..75: mol_type = other DNA
atcgtcagggccggtgccgtctgctgtccggcagccgtcagcgggaactggcagtgatgacctttgcccgtcagt

SEQ ID NO: 784400 - DNA, 75 bp, synthetic construct
  source 1..75: mol_type = other DNA
agcggctggcggttcggctgtccctcattatcagccgccttgttgctggcgaaacactggatattggccttcttg

SEQ ID NO: 784401 - DNA, 75 bp, synthetic construct
  source 1..75: mol_type = other DNA
cgcacccgcgtcactcaatgggaaacgctcgactgggtacaggaagtgcaaaaacgcggtgccggagaaatcgtc

SEQ ID NO: 784402 - DNA, 75 bp, synthetic construct
  source 1..75: mol_type = other DNA
ggatcgctttggcgtgcagtgcatcgtggtgggcattgatacctggtatgacgccgacaccggtaaatatcatgt

SEQ ID NO: 784403 - DNA, 75 bp, synthetic construct
  source 1..75: mol_type = other DNA
tctttcctttggcgcggataaaatttccataaactcgcctgcgctggcggatccgacgttaattactcgcctggc

SEQ ID NO: 784404 - DNA, 75 bp, synthetic construct
  source 1..75: mol_type = other DNA
gcccattaaccatactgccattgacgggataccggtataccgcgaggagctgatgattgtcacgccacaaggaca

SEQ ID NO: 784405 - DNA, 75 bp, synthetic construct
  source 1..75: mol_type = other DNA
tcttggttcgctggaaagcaccgctgcagtgcgcattccgcccacgctggcggagtttaaccgtcgttatcccaa

SEQ ID NO: 784406 - DNA, 75 bp, synthetic construct
  source 1..75: mol_type = other DNA
acttcaaagcacgcctcccccattcactcatcagagggcatcccgttggatttgcccctatatttccagacatct

SEQ ID NO: 784407 - DNA, 75 bp, synthetic construct
  source 1..75: mol_type = other DNA
ctgatgacctttttgccctggcagctctactcgctggtggtgatgttggggatctgtatcggcgtctatctttgt

SEQ ID NO: 784408 - DNA, 75 bp, synthetic construct
  source 1..75: mol_type = other DNA
ctgatgacctttttgccctggcagctctattcgctggtggtgatgctggggatctgtatcggcgtctatctttgt

SEQ ID NO: 784409 - DNA, 75 bp, synthetic construct
  source 1..75: mol_type = other DNA
gttggttaacaacctggctggtctggcgtcgcggtgcgaaaacacgtccgcttgaggcatttattgagctgctgg

SEQ ID NO: 784410 - DNA, 75 bp, synthetic construct
  source 1..75: mol_type = other DNA
cggaaccggtagagtttgccgatatgggcggcgatcctgatcccgtacctgtcagggtgatttttttgctcgcct

SEQ ID NO: 784411 - DNA, 75 bp, synthetic construct
  source 1..75: mol_type = other DNA
gccacaaagggaaaatattcggtgcgttaccaaagcatcagtaatgcttctgaccctttactgataaaactggaa

SEQ ID NO: 784412 - DNA, 75 bp, synthetic construct
  source 1..75: mol_type = other DNA
cagttgatgtctactatgcttcagaaagcgccgaaggtaagaatgtagctaaaatcaccgtcgttacgtacaaca

SEQ ID NO: 784413 - DNA, 75 bp, synthetic construct
  source 1..75: mol_type = other DNA
actcttcagaaggtatcccgtggcatgagttgccagcttcacacaggggaaacaatcagatgagtttgcctttat

SEQ ID NO: 784414 - DNA, 75 bp, synthetic construct
  source 1..75: mol_type = other DNA
actcttcggaaggtatcccgtggcatgagctgccagcttcacacaggggaaacaatcagatgagtttgcctttac

SEQ ID NO: 784415 - DNA, 75 bp, synthetic construct
  source 1..75: mol_type = other DNA
cacggaccataaacatgtccggcacaatgcaattgccgtcggtattttgccagagccggtagagtttgccgatat

SEQ ID NO: 784416 - DNA, 75 bp, synthetic construct
  source 1..75: mol_type = other DNA
ggggatcatgatcgacgatattgtcgccggagtgatttccgctggaatactctattttatcggccatcactggcc

SEQ ID NO: 784417 - DNA, 75 bp, synthetic construct
  source 1..75: mol_type = other DNA
cacgccgcaactggcgaacgtcaaagcggtggatgatatctacccgatgtatggcgagctacaaaccaatccccc

SEQ ID NO: 784418 - DNA, 75 bp, synthetic construct
  source 1..75: mol_type = other DNA
gatctgctcgaccgctggcaacagcagctaccgccagaaagcccgaactactttttaattaacatcgccacagaa

SEQ ID NO: 784419 - DNA, 75 bp, synthetic construct
  source 1..75: mol_type = other DNA
cgaagagccactgagcgcagggcagattaagcgcattgaaacactgatgcgcaacctgatgccgtggcgcaaagg

SEQ ID NO: 784420 - DNA, 75 bp, synthetic construct
  source 1..75: mol_type = other DNA
ggcccgcccgttcctgccggtgacggaggatggagagctacagcctgaagtggtagtccccatcctcgataccat

SEQ ID NO: 784421 - DNA, 75 bp, synthetic construct
  source 1..75: mol_type = other DNA
gatgaagggcgtccctcctggctcccttcgctggcagcagaagaacgtgatggccagacactgcaggatacagga

SEQ ID NO: 784422 - DNA, 75 bp, synthetic construct
  source 1..75: mol_type = other DNA
tcaccattaacgataaatccctgcgccggagtctccgcgcactggagctctctgccacagatctggaacccgcga

SEQ ID NO: 784423 - DNA, 75 bp, synthetic construct
  source 1..75: mol_type = other DNA
tccggaaaatgattcaaacaccgtgcggcaaaagtattaccagtgcaacaacctggaatgcggcgtatgcttctc

SEQ ID NO: 784424 - DNA, 75 bp, synthetic construct
  source 1..75: mol_type = other DNA
actcttcagagggcatcccgtggaatgagctgccagcttcgcacaggggaaacaaccagatgagtttgcctttac

SEQ ID NO: 784425 - DNA, 75 bp, synthetic construct
  source 1..75: mol_type = other DNA
ttgatcgcaatgtacatggcggcatggggatcatgatcgacgatattgtcgccggggtgatctccgcaggcatcc

SEQ ID NO: 784426 - DNA, 75 bp, synthetic construct
  source 1..75: mol_type = other DNA
gacgcaccgaatggatggttactgaatcgctggccgatttcctcgacccacatgatccgagtaagacagttgaag

SEQ ID NO: 784427 - DNA, 75 bp, synthetic construct
  source 1..75: mol_type = other DNA
ccacatgatccgagtaagacagttgaaggttatccggcacctaaacgcgcggtgctgattgcgcgcaagccgtaa

SEQ ID NO: 784428 - DNA, 75 bp, synthetic construct
  source 1..75: mol_type = other DNA
ttacgcgcaaatgcgtaatgtctactttattccctcggcgctggcgctgaaaaactggctgaagaagtgtggttt

SEQ ID NO: 784429 - DNA, 75 bp, synthetic construct
  source 1..75: mol_type = other DNA
atgggatcccgtgggctgatccgtaaaatactggcgatttctggggtaggaaaatatataaaggatgatattggg

SEQ ID NO: 784430 - DNA, 75 bp, synthetic construct
  source 1..75: mol_type = other DNA
cgaagcgatggttgcgcgggcgcgtactgaagtgaatcgcatcatggcggaagcaaacccatttctggccgttat

SEQ ID NO: 784431 - DNA, 75 bp, synthetic construct
  source 1..75: mol_type = other DNA
gatccgctcaagcatccgtacttcagaagcggcacagaacgagtcgataaaccgtgctcgctcgtttaaaaccaa

SEQ ID NO: 784432 - DNA, 75 bp, synthetic construct
  source 1..75: mol_type = other DNA
agcaaaactggtcgcgctttgtcagttcttttattctgacagagagattaaaaaacagggcaaggcgcgttgatg

SEQ ID NO: 784433 - DNA, 75 bp, synthetic construct
  source 1..75: mol_type = other DNA
gaaaggcaaagatgcgctgacgcaggagttcgtcgagcgtctgatcggtgcatctaaagaggttttcatggcttc

SEQ ID NO: 784434 - DNA, 75 bp, synthetic construct
  source 1..75: mol_type = other DNA
gtcgacaatggagacaacgaagaaaggtgagtatcgcgacaaattcaatatcagcgtaatcaaaacaggctccag

SEQ ID NO: 784435 - DNA, 75 bp, synthetic construct
  source 1..75: mol_type = other DNA
actgaagtgaatcgcatcatggcggaagcaaacccatttctggccgttattaagcgccatgaagacaacctggct

SEQ ID NO: 784436 - DNA, 75 bp, synthetic construct
  source 1..75: mol_type = other DNA
gtgaaacataaacaacgttgggcgggggcaatctgctgttttgtcctcttcattgtggtgtgcctttttctggcg

SEQ ID NO: 784437 - DNA, 75 bp, synthetic construct
  source 1..75: mol_type = other DNA
cagataatcggctccagtcaaatgtacgccaccgctcaatcacgcgaaatcggaattgcctcagtaaaaaacaat

SEQ ID NO: 784438 - DNA, 75 bp, synthetic construct
  source 1..75: mol_type = other DNA
atggctggttggtttgaactcaataagagcagtgataatcagttccggtttgtgttaaaagcgggtaacggtgag

SEQ ID NO: 784439 - DNA, 75 bp, synthetic construct
  source 1..75: mol_type = other DNA
ctgaacaaatcatttggtattaacaagtttatcatcattgttcctaccctatctatcaaagctggaacagttaac

SEQ ID NO: 784440 - DNA, 75 bp, synthetic construct
  source 1..75: mol_type = other DNA
tggctctccgctttcgatcatcgacagcgttctgcatccccagtatgtgattcgtgacagggaaactggcgaggt

SEQ ID NO: 784441 - DNA, 75 bp, synthetic construct
  source 1..75: mol_type = other DNA
atagccgccgatatgttgctgatcgacaaaaatctgcggcacggtttctacgggtttacctgccttttgttgtag

SEQ ID NO: 784442 - DNA, 75 bp, synthetic construct
  source 1..75: mol_type = other DNA
aagtgagcgcaaaaagttagcctcaaaagaagaacatgacgccaagttgctcaaagttcgtggtgcgataactga

SEQ ID NO: 784443 - DNA, 75 bp, synthetic construct
  source 1..75: mol_type = other DNA
ccgctggcaaacggtacgccggagcaaatccgtaataacccggacgtgatccgtgcctatttaggtgaggcataa

SEQ ID NO: 784444 - DNA, 75 bp, synthetic construct
  source 1..75: mol_type = other DNA
gtggtcaatcaggggacgccgctggcaaacggtacaccggagcagatccgtaataacccggatgtgatccgtgcc

SEQ ID NO: 784445 - DNA, 75 bp, synthetic construct
  source 1..75: mol_type = other DNA
accgatgacggcggcgtggacatgaaatgcccgacggaaatcgccatctctgaccgccgtgaagcggaactggcg

SEQ ID NO: 784446 - DNA, 75 bp, synthetic construct
  source 1..75: mol_type = other DNA
caaactaaaaacgaacttggagaatataaatcccgactttctacgctacaaaaaagcattgctgaaaacaaatat

SEQ ID NO: 784447 - DNA, 75 bp, synthetic construct
  source 1..75: mol_type = other DNA
gtcgcaaaataaacaagagctgagagcaacacagaatgaactgggggtatataaatcccgactttcgaccttaca

SEQ ID NO: 784448 - DNA, 75 bp, synthetic construct
  source 1..75: mol_type = other DNA
gtcgttacctatgatggcaacgtgggtgagcagtataacgatgcctggtttggtgacagtgccaatgaaaatatc

SEQ ID NO: 784449 - DNA, 75 bp, synthetic construct
  source 1..75: mol_type = other DNA
caatcagcttgattgaggtgagggacatcagcccgccaggcgagcaggcaaagctattctggtccgagccccaaa

SEQ ID NO: 784450 - DNA, 75 bp, synthetic construct
  source 1..75: mol_type = other DNA
ggctgcagtcacgcaaaatcggcatcttagtgccagatgttgtggtgtcagaaaagcatgttgatgcgctcgaaa

SEQ ID NO: 784451 - DNA, 75 bp, synthetic construct
  source 1..75: mol_type = other DNA
aatcagatatgcaggatggcgtcagcacatcggcggtgcagaattccgggatgaaatccactacaccgccaaacg

SEQ ID NO: 784452 - DNA, 75 bp, synthetic construct
  source 1..75: mol_type = other DNA
tgcggattattattttgatcacaccccgccggatgtggatctgctcggctccattgccaaagtggcagcctccgc

SEQ ID NO: 784453 - DNA, 75 bp, synthetic construct
  source 1..75: mol_type = other DNA
cttcattggcgcacagtcgttgcaaaaaccacaggaatattacgatccggacgccacggccaacgccaatctctc

SEQ ID NO: 784454 - DNA, 75 bp, synthetic construct
  source 1..75: mol_type = other DNA
acggttgcagatgctggaggcggcggcaacggcaatcagcttgattgagatgagggatataagcccgccgggcga

SEQ ID NO: 784455 - DNA, 75 bp, synthetic construct
  source 1..75: mol_type = other DNA
aaaacaccatcatacactaaatcagtaagttggcagcatcacccaaaaacagaagtcaatttgcctaaccaacta

SEQ ID NO: 784456 - DNA, 75 bp, synthetic construct
  source 1..75: mol_type = other DNA
agatggaaaagctcttgatttaggttccatgccgggagcagacatggccggttactctggtttccgagatcaggt

SEQ ID NO: 784457 - DNA, 75 bp, synthetic construct
  source 1..75: mol_type = other DNA
cttctcaagcgaagccttgcatagctatttgtacgggattgatattgagtcaggcatttctattgaaagacatac

SEQ ID NO: 784458 - DNA, 75 bp, synthetic construct
  source 1..75: mol_type = other DNA
agcgacctttggtgccgactcattcgtcatcatgtgtatttatatcgctgaaatcgttatcggtgttgcgacgta

SEQ ID NO: 784459 - DNA, 75 bp, synthetic construct
  source 1..75: mol_type = other DNA
aaaagaccgatgtacattgctataggctgtgtggctgcattctgccttgtcgttgcatacgtcgcgaataaacgt

SEQ ID NO: 784460 - DNA, 75 bp, synthetic construct
  source 1..75: mol_type = other DNA
ctgtcaccagtccgtctccggcctgcgtcactatctctgtgctgtcacgtgaaaataacggcgtcgcatccgaag

SEQ ID NO: 784461 - DNA, 75 bp, synthetic construct
  source 1..75: mol_type = other DNA
cgtcaccatctctgtgctgtcacgtgaaaataacggtgtcgcatccgaagacctgctggctgtggtgcgtaacgc

SEQ ID NO: 784462 - DNA, 75 bp, synthetic construct
  source 1..75: mol_type = other DNA
ggtgaaaccaacaaaaataaaaaaagccacggatggaaaaaagcgtactaaaatgcgtattggtaagttcagtga

SEQ ID NO: 784463 - DNA, 75 bp, synthetic construct
  source 1..75: mol_type = other DNA
ccttaatggcgaggacgtcaggccggtggccgaccgtgtgaccgtgcagtctgccgccattgttgaataccagat

SEQ ID NO: 784464 - DNA, 75 bp, synthetic construct
  source 1..75: mol_type = other DNA
tatcagtatcatggtcgcagtgctgacgggcgtgtcgcggatatctctgtcaccagtccgtctccggcctgcgtc

SEQ ID NO: 784465 - DNA, 75 bp, synthetic construct
  source 1..75: mol_type = other DNA
ctgccgtcatcgttgaataccagataaatgccacgctttactttatcctggccccgaaagcgaacccattcgcgc

SEQ ID NO: 784466 - DNA, 75 bp, synthetic construct
  source 1..75: mol_type = other DNA
acacctaaacaactggatcgctggggcgttgataccggtaagctatctacatcaataaataccaccccccaacaa

SEQ ID NO: 784467 - DNA, 75 bp, synthetic construct
  source 1..75: mol_type = other DNA
cttatcagtctggtaatgcgtctatgacgagcacagatgcggttaactccgatgtggcggagaaagctgcgcagt

SEQ ID NO: 784468 - DNA, 75 bp, synthetic construct
  source 1..75: mol_type = other DNA
ttcaaagccgcttacgcaggaatagcttatcaatcaggtgatgcatctacggtaagaaccagtatgcctgataca

SEQ ID NO: 784469 - DNA, 75 bp, synthetic construct
  source 1..75: mol_type = other DNA
cgcatcaaatcctgacacactgaaatctctgtgcaaagcaattattcatcatgagcaaggcagtcagccgtacag

SEQ ID NO: 784470 - DNA, 75 bp, synthetic construct
  source 1..75: mol_type = other DNA
ggcgggctaccaggcgggatttggcgaaaaccggggcgacatcagcaacagcggggcgtactttgaacagccgct

SEQ ID NO: 784471 - DNA, 75 bp, synthetic construct
  source 1..75: mol_type = other DNA
gatacgcacgcagggagcgctgacgaccttcagcggctacaacgccgataaccggttaagctggcagcgcagcct

SEQ ID NO: 784472 - DNA, 75 bp, synthetic construct
  source 1..75: mol_type = other DNA
accccatctaccacaccagcgcccttgccgggtttttaattggggcgatcattggcattgccattattgccgttg

SEQ ID NO: 784473 - DNA, 75 bp, synthetic construct
  source 1..75: mol_type = other DNA
acacctcaacagctggatcgctggggcgttgataccggtaagctctccacatcaaataatactacaacccaacaa

SEQ ID NO: 784474 - DNA, 75 bp, synthetic construct
  source 1..75: mol_type = other DNA
ggttactacgattttgatgagttacaacaaattcagagtggattcgttgatgagaaaaatataaacagttatcat

SEQ ID NO: 784475 - DNA, 75 bp, synthetic construct
  source 1..75: mol_type = other DNA
acctcaacggatggtgcgatatttgacagttttccttttgaaggagcacagttttcatctgatgatggcatgatt

SEQ ID NO: 784476 - DNA, 75 bp, synthetic construct
  source 1..75: mol_type = other DNA
atacgggcagtatgtgctcagctcggtgtaactcctgaccagccgcttgacgcatcaaatcctgacacactgaaa

SEQ ID NO: 784477 - DNA, 75 bp, synthetic construct
  source 1..75: mol_type = other DNA
acggcattgcacatggctggagtgacgagcaaatccaggccaagaaaatcgagtttaaagaagcaacagcaaaag

SEQ ID NO: 784478 - DNA, 75 bp, synthetic construct
  source 1..75: mol_type = other DNA
gcatatctcgataccatcaggcagagcactggtggtgggcaggtgtatatgtcagcactacagcagatcagtgcc

SEQ ID NO: 784479 - DNA, 75 bp, synthetic construct
  source 1..75: mol_type = other DNA
gatggaatctgatactgattatcgtctgcgtattcagcaggcgtttgaaggtttaagcgtcgccgggtcggtggg

SEQ ID NO: 784480 - DNA, 75 bp, synthetic construct
  source 1..75: mol_type = other DNA
tgacgcgacgctctacgtctaccccggcccggaatctgagcccatcaggcaggcatcagagcagaagctgcagag

SEQ ID NO: 784481 - DNA, 75 bp, synthetic construct
  source 1..75: mol_type = other DNA
actggactatgaaaccatccttgcggagcgcaaagcgatactgatttcgctctatcccgaagaccagcaggaggc

SEQ ID NO: 784482 - DNA, 75 bp, synthetic construct
  source 1..75: mol_type = other DNA
atggtagaggctaaaattaaaaaggaaaaagaaaaaggtaataatatagagtcgaatgaattaattaaccaataa

SEQ ID NO: 784483 - DNA, 75 bp, synthetic construct
  source 1..75: mol_type = other DNA
acctgctggacgtggtggaaaaagctctgaacagtgagaacgtccgcccggtggctgaccgtctgacggttcgca

SEQ ID NO: 784484 - DNA, 75 bp, synthetic construct
  source 1..75: mol_type = other DNA
gacgtggtcctgaacaaaacgcaggcggcatcatgtacgcagtggagcgtgaccaacgggggaacggatgaatag

SEQ ID NO: 784485 - DNA, 75 bp, synthetic construct
  source 1..75: mol_type = other DNA
gcgcaggcggtgatggtggcttacgcgatgggcggcgatcttgaccagctcgctgccaactacaacgttacacgc

SEQ ID NO: 784486 - DNA, 75 bp, synthetic construct
  source 1..75: mol_type = other DNA
ccgctggccgacatcgtgctcaacagtacgcaggcgtctttctgtaccgaataccgcgtcgtgaccggaggctct

SEQ ID NO: 784487 - DNA, 75 bp, synthetic construct
  source 1..75: mol_type = other DNA
caacaaaaggtgctggtaccaccctatgggtttacaccggaaccggtgacccttatgccaacccgctttcagata

SEQ ID NO: 784488 - DNA, 75 bp, synthetic construct
  source 1..75: mol_type = other DNA
gtcgcggccacgacgcaactggttgtttctgtcctgccagcaagtgcttcagataagtctttccacgtagccagt

SEQ ID NO: 784489 - DNA, 75 bp, synthetic construct
  source 1..75: mol_type = other DNA
ggttactttcctatgctcaaaaatgggctatagataaacacagtgaaaatatttatctttcaaaagaaaaggaat

SEQ ID NO: 784490 - DNA, 75 bp, synthetic construct
  source 1..75: mol_type = other DNA
ctgtcaccagtccgtctccggcctgcgtcaccatctctgtgctgtcacgtgagaataacggtgtggcatccgaag

SEQ ID NO: 784491 - DNA, 75 bp, synthetic construct
  source 1..75: mol_type = other DNA
ctgtcaccagtccgtctccggcctgtgtcaccatctctgtgctgtcacgtgaaaataacggtgtcgcttccgaag

SEQ ID NO: 784492 - DNA, 75 bp, synthetic construct
  source 1..75: mol_type = other DNA
tctgcgccagcgcattaacgaagccgtgcaggctgtgatggtggcttacgcgatgggcagcgatcttgaccagct

SEQ ID NO: 784493 - DNA, 75 bp, synthetic construct
  source 1..75: mol_type = other DNA
tgcatgtgcacggtgtgcaacgcgtggagataatcgaacccacacagaatatgaccatcagcgacatacaggcgg

SEQ ID NO: 784494 - DNA, 75 bp, synthetic construct
  source 1..75: mol_type = other DNA
ggtagtgcctgaagatgcagatattcgtccactgaatggctgtgatgttattagtgcaaaaacattgcatacccg

SEQ ID NO: 784495 - DNA, 75 bp, synthetic construct
  source 1..75: mol_type = other DNA
tggtgccaattacaacaccacgcgcctgattatcaccccggcagatgattcgaccattccgccgacaccggcagt

SEQ ID NO: 784496 - DNA, 75 bp, synthetic construct
  source 1..75: mol_type = other DNA
gcacgggcggtaatgctggcctgtgccgccggtaatgaccttgatgtgattggtgccaattacaacaccacacgc

SEQ ID NO: 784497 - DNA, 75 bp, synthetic construct
  source 1..75: mol_type = other DNA
tgcatgtgcacggtgtgcaacgcgtggagataatcgaacccacacaaaatatggccatcagcgacatacaggcgg

SEQ ID NO: 784498 - DNA, 75 bp, synthetic construct
  source 1..75: mol_type = other DNA
ccgccggtaacgacctcgacgtcgtggccgggaacaacaataccgaacgcctgaccatcaccccggcggatgaca

SEQ ID NO: 784499 - DNA, 75 bp, synthetic construct
  source 1..75: mol_type = other DNA
ggagataatcgaacccacacagaatctggccatcagcgacatacaggcggcgcgctgtgagtcattcaccatcag

SEQ ID NO: 784500 - DNA, 75 bp, synthetic construct
  source 1..75: mol_type = other DNA
ttcatccgaaagatgagcaggaagccgtgatccgcacgctggaactggaatctgaacccgtcaccaaattgctgc

SEQ ID NO: 784501 - DNA, 75 bp, synthetic construct
  source 1..75: mol_type = other DNA
ccgcaggccgacatagtgctgagtaagtcgcaggcgtcgaactgcaccgagtaccagataactatcgggggctcg

SEQ ID NO: 784502 - DNA, 75 bp, synthetic construct
  source 1..75: mol_type = other DNA
atgccgattatcgacctgaaccagctacccgcaccggatgtggtcgaggagctggactttgaaaccattcttgct

SEQ ID NO: 784503 - DNA, 75 bp, synthetic construct
  source 1..75: mol_type = other DNA
ctggcgtcagcgtgtgaatgaggctgcacgggcggtgatgctggcctgtgccgccggtaatgaccttgatgtgat

SEQ ID NO: 784504 - DNA, 75 bp, synthetic construct
  source 1..75: mol_type = other DNA
gtgcgtgatgcgcgggctgtcagcccgtctccggccaacgtgacggtctccatcctgtccactgaaggcgacggc

SEQ ID NO: 784505 - DNA, 75 bp, synthetic construct
  source 1..75: mol_type = other DNA
acctgcaaaaagccaacgatcaaatgtgcgtactggtgcagatcgaaactcgtgaggcaatgaagaacctaccgc

SEQ ID NO: 784506 - DNA, 75 bp, synthetic construct
  source 1..75: mol_type = other DNA
gccgatggttcaaaacgctgacgaagcccgtgaagcggtacgcgccacccgttatccccccgccggtattcgcgg

SEQ ID NO: 784507 - DNA, 75 bp, synthetic construct
  source 1..75: mol_type = other DNA
cgtataatatctattgatgataaaaattcaaaatattttttaaatgatgttgaagtagataagaaacaatattct

SEQ ID NO: 784508 - DNA, 75 bp, synthetic construct
  source 1..75: mol_type = other DNA
gaccgccaccgcctcgctgtcggctgaagatatcgccgccgcccatcttctgggtaaaaccgaagccgaattcct

SEQ ID NO: 784509 - DNA, 75 bp, synthetic construct
  source 1..75: mol_type = other DNA
ggaaacggcaccgcgcgttgagcgagacattactccgcaaacaactactgctgcgggaatgaacagtctgatcaa

SEQ ID NO: 784510 - DNA, 75 bp, synthetic construct
  source 1..75: mol_type = other DNA
ttggcgttgttgggaccataatcactattgctactagcttcatccgcaaccaagatatttcacaatggttgctcg

SEQ ID NO: 784511 - DNA, 75 bp, synthetic construct
  source 1..75: mol_type = other DNA
ccactggcgcaggccatagttcgtgaagcgcaagttgccgcactcagcattcctggcgcagagtcacagcgagcg

SEQ ID NO: 784512 - DNA, 75 bp, synthetic construct
  source 1..75: mol_type = other DNA
agctggaaagtcagcggcatggactgtgccgcctgtgcgcgcaaagtagaaaatgccgtgcgccagctttctggc

SEQ ID NO: 784513 - DNA, 75 bp, synthetic construct
  source 1..75: mol_type = other DNA
aactgccatcagtgaactgaacgcgctgggggttaaaggagtgatcctcaccggcgataatccacgcgcagcggc

SEQ ID NO: 784514 - DNA, 75 bp, synthetic construct
  source 1..75: mol_type = other DNA
aatagaaactgtaaataaaaaatcaatgatcttcatgaacaagaatcatccctatttagaacaatcaaagaacct

SEQ ID NO: 784515 - DNA, 75 bp, synthetic construct
  source 1..75: mol_type = other DNA
aaagagaatttgccgctgattacgctaatcgtgttgatggcaatcagctgggggctggagcagtttaatcatccg

SEQ ID NO: 784516 - DNA, 75 bp, synthetic construct
  source 1..75: mol_type = other DNA
tgtttattggcgcaacggctgaagctgcgatggtgttgctgctgtttttgattggtgaacgactggaaggctggg

SEQ ID NO: 784517 - DNA, 75 bp, synthetic construct
  source 1..75: mol_type = other DNA
gaaggctggctgattaacgaatccgcctgtaaccggatgaaagccgggctttccgccctgcatcagccgttactg

SEQ ID NO: 784518 - DNA, 75 bp, synthetic construct
  source 1..75: mol_type = other DNA
atgaataaacaacaagttcgggcacgactagttgaacgaggcagtagcttgcgccagttcgcgcttaacgcaggc

SEQ ID NO: 784519 - DNA, 75 bp, synthetic construct
  source 1..75: mol_type = other DNA
cccagccacttccggatgtagcacagcgtctgatagaccatcttgctgcacatggtattcagccagcccggaata

SEQ ID NO: 784520 - DNA, 75 bp, synthetic construct
  source 1..75: mol_type = other DNA
tcctgcgggctggtgaatcgcgttgtcgccagggaggcgttacacgacgccggactgcaactggcacaacgtatc

SEQ ID NO: 784521 - DNA, 75 bp, synthetic construct
  source 1..75: mol_type = other DNA
aaaaaacgccagtaaagccagtgtttcaacccttgagcgttacgcggcggcatgtggtgcaactataaaaatagt

SEQ ID NO: 784522 - DNA, 75 bp, synthetic construct
  source 1..75: mol_type = other DNA
cagaatgtggcggcgaagtctttgacacatcctttaaaccgcatggctctgacagtttcgcgggagccatctgca

SEQ ID NO: 784523 - DNA, 75 bp, synthetic construct
  source 1..75: mol_type = other DNA
gatgttggcttgcttgataatcagtttgataccccattttctgcacttagtgcgataaaaccattcattatcatt

SEQ ID NO: 784524 - DNA, 75 bp, synthetic construct
  source 1..75: mol_type = other DNA
gattaaagaaggcgttatccgcgagggcgaggaaatctctgttcactcggctcgtaaacgctggtatgcgcagcg

SEQ ID NO: 784525 - DNA, 75 bp, synthetic construct
  source 1..75: mol_type = other DNA
gccagacgcctgaagaaactgcctgccgaccagcagattcatgagatggcagagtatctcaggaagcgtctgccg

SEQ ID NO: 784526 - DNA, 75 bp, synthetic construct
  source 1..75: mol_type = other DNA
cattgccgcaggttgggttaagccggaaaacatcgaatggcgtgagggtcaggggattttcattaaacctgaatg

SEQ ID NO: 784527 - DNA, 75 bp, synthetic construct
  source 1..75: mol_type = other DNA
catcgcaaagtgcgctggcggaaatgtacaacatcagccgcaccacagtgcgtcatattctcagccacttacgcg

SEQ ID NO: 784528 - DNA, 75 bp, synthetic construct
  source 1..75: mol_type = other DNA
atacgggcgggatatttatgccgcttgtctgagaggagaggccggtgaaattgcagaatatgtacagccatccat

SEQ ID NO: 784529 - DNA, 75 bp, synthetic construct
  source 1..75: mol_type = other DNA
gcgcacgatgaaaaaagagattgaagcgctgggtgatgcggaagctatactggcgtataaggtcggcatggctga

SEQ ID NO: 784530 - DNA, 75 bp, synthetic construct
  source 1..75: mol_type = other DNA
aactggaaagcgccgggcaaacggtggtgctggtcgtacgcaattctcaggtactcggcgtgattgccttgcagg

SEQ ID NO: 784531 - DNA, 75 bp, synthetic construct
  source 1..75: mol_type = other DNA
cgggcatctgctccagacagcgctggacggtatcacggtgagtgaatatgagcgtgacagcctgcaccgtcaggt

SEQ ID NO: 784532 - DNA, 75 bp, synthetic construct
  source 1..75: mol_type = other DNA
cggaacagcaactgtccgtacgggatggattatcaaagaaggtactgatattccagcattaacaactctatttgt

SEQ ID NO: 784533 - DNA, 75 bp, synthetic construct
  source 1..75: mol_type = other DNA
aacagcgcccggacggcctgataaggatgtttgcgctgaatgcgggcgggtttccggtcatcatccagacgcagg

SEQ ID NO: 784534 - DNA, 75 bp, synthetic construct
  source 1..75: mol_type = other DNA
gccgacgggcgggtcgccgacgtttcggtcgcaagtccgtcgccagcctgcgtgacgattaccgtgctatcccgc

SEQ ID NO: 784535 - DNA, 75 bp, synthetic construct
  source 1..75: mol_type = other DNA
cgcctaatggaagcatgatgatgaatcatgcaactgttgatggcttaacagcagagcaggctgaaaagctatttc

SEQ ID NO: 784536 - DNA, 75 bp, synthetic construct
  source 1..75: mol_type = other DNA
gtgatggacaaccgcctgccgggctacgggcgtgaccgttaccgttataacgaatggggcgaactgaaagagcgc

SEQ ID NO: 784537 - DNA, 75 bp, synthetic construct
  source 1..75: mol_type = other DNA
ccgcctgcatgacggacgctatgtactgcattacaccgaccgcagctattacatatttgatgaatttgatgacca

SEQ ID NO: 784538 - DNA, 75 bp, synthetic construct
  source 1..75: mol_type = other DNA
atcctatctaccacaccagcgcccttgccggttttttgataggggccatcattggcattgccattattgccgccg

SEQ ID NO: 784539 - DNA, 75 bp, synthetic construct
  source 1..75: mol_type = other DNA
gatgaaaagcaaaggagtgacaacagacacctcaatgtctggtaaaaaaagtagaaatcgtatggggtcaggaga

SEQ ID NO: 784540 - DNA, 75 bp, synthetic construct
  source 1..75: mol_type = other DNA
agccatcccggtaaacagcaggaccgttacacgtggaacgcgctggggttactgagcagccaccgccgcatcacg

SEQ ID NO: 784541 - DNA, 75 bp, synthetic construct
  source 1..75: mol_type = other DNA
cacgcgccgggcgctggatgacgaccacgtatggaaggcggattacaacgaacacggccaggtgatacgggagac

SEQ ID NO: 784542 - DNA, 75 bp, synthetic construct
  source 1..75: mol_type = other DNA
gccgtggaactccccggcgaacgcagggtaacgctggaatacgacaccctgagccgggtggtgaaagagacggac

SEQ ID NO: 784543 - DNA, 75 bp, synthetic construct
  source 1..75: mol_type = other DNA
ctgcgcacgcaacaggcgtttgagggattgagcgtggcgggtccggtcggtgcatatgagtatcacggccgcagc

SEQ ID NO: 784544 - DNA, 75 bp, synthetic construct
  source 1..75: mol_type = other DNA
cacttggcagcgaaggcatgttaatcactcgctacacagaggacgcatgttttcatgaagtggaaacaaagaact

SEQ ID NO: 784545 - DNA, 75 bp, synthetic construct
  source 1..75: mol_type = other DNA
cactcggcagcgaaggcatgttaattactcgctacacagaggacgcgagctttcacgaagtggtaactaaggatt

SEQ ID NO: 784546 - DNA, 75 bp, synthetic construct
  source 1..75: mol_type = other DNA
aaaacggctgtagctcgttatgtcttctgcctcactttcgtgaaacgaatggaagaggactatggtcgcgtacca

SEQ ID NO: 784547 - DNA, 75 bp, synthetic construct
  source 1..75: mol_type = other DNA
gaaccaacatgcgccgctggcgatggtcggcgacggcattaacgacgcaccagccatgaaagccgccgccatcgg

SEQ ID NO: 784548 - DNA, 75 bp, synthetic construct
  source 1..75: mol_type = other DNA
cgacgagccacaagaatcgcgcctgaaagagaatctgccgctgattacgctaatcgtgatgatggcaatcagctg

SEQ ID NO: 784549 - DNA, 75 bp, synthetic construct
  source 1..75: mol_type = other DNA
gaactggcacgcgccactcacgccaatatccgccagaacatcactattgcgctggggctgaaagggatcttcctc

SEQ ID NO: 784550 - DNA, 75 bp, synthetic construct
  source 1..75: mol_type = other DNA
tttttagcgcattgcccgcttatgccgggttaacttccattaccgcgggctacgattttaccgattattctggcg

SEQ ID NO: 784551 - DNA, 75 bp, synthetic construct
  source 1..75: mol_type = other DNA
tctgatccactggtgaagtatctggaggaaaacgcctatcgggaggttatctggcgtcagcgtgtgaacgatgcg

SEQ ID NO: 784552 - DNA, 75 bp, synthetic construct
  source 1..75: mol_type = other DNA
cgtgacgattaccgtgctatcgcgtgagggggacggcactgccagccctgagctactggcgattgttgataaagc

SEQ ID NO: 784553 - DNA, 75 bp, synthetic construct
  source 1..75: mol_type = other DNA
ccggtgatcaccagctaccgctatacccattatgactccagcgatgcaggtgatcctacccacgtaatatggaca

SEQ ID NO: 784554 - DNA, 75 bp, synthetic construct
  source 1..75: mol_type = other DNA
ctggttatacgcaactatggctaagccgcggaacaggtgcttacacctatgactggacgccagaaacacgctacg

SEQ ID NO: 784555 - DNA, 75 bp, synthetic construct
  source 1..75: mol_type = other DNA
aagtgtggtacgacaccccaaccgatgattttaacggtctgcaacttgcagcccgtctgacctggaaattcagat

SEQ ID NO: 784556 - DNA, 75 bp, synthetic construct
  source 1..75: mol_type = other DNA
gtgtgcggtgtcggtccgtctgcagtgggggttacgggtgatggccgagcggatgataaagtgtctgccacgtga

SEQ ID NO: 784557 - DNA, 75 bp, synthetic construct
  source 1..75: mol_type = other DNA
tcataccggctccggtacgtgccgtaatacaggccgtccgtaacaccgtggtatccgttgcccgtactgtgtggg

SEQ ID NO: 784558 - DNA, 75 bp, synthetic construct
  source 1..75: mol_type = other DNA
ggccagcagtccggtagcggtacaactcagtgctccgcttcgtaccgatgccgttaataaaaaagccagtgacga

SEQ ID NO: 784559 - DNA, 75 bp, synthetic construct
  source 1..75: mol_type = other DNA
agcctgtgtaatgccctgtttgccagtgaggtatcgccagtcagcgatgttgctgcctgtacccgtgagccactg

SEQ ID NO: 784560 - DNA, 75 bp, synthetic construct
  source 1..75: mol_type = other DNA
cggtgtaggcgaaagtggcgctcgcgataccgagtatgctgcgctgtatcgcgaacaactcccccggctcgacct

SEQ ID NO: 784561 - DNA, 75 bp, synthetic construct
  source 1..75: mol_type = other DNA
gtctacggcgcagaagcagaatatcagccgcaaaatctttctgctgcatgagctgttccagcctgtgcatccagt

SEQ ID NO: 784562 - DNA, 75 bp, synthetic construct
  source 1..75: mol_type = other DNA
agccgtcagagcctgcttcagcttatgcgtctgactgaagacgtaccggatgcgagacaggaactgcttaaccgt

SEQ ID NO: 784563 - DNA, 75 bp, synthetic construct
  source 1..75: mol_type = other DNA
tggtcgggattggatttgcccctatatttccagacatctgttatcacttaacccattacaagcccgctgccgcag

SEQ ID NO: 784564 - DNA, 75 bp, synthetic construct
  source 1..75: mol_type = other DNA
tcggcctgacggtagccatttcattcgatctggcgcgttattgacaggtgtcgactttgataattcatcgatcgc

SEQ ID NO: 784565 - DNA, 75 bp, synthetic construct
  source 1..75: mol_type = other DNA
atttttaccggcaggtgattggtgaagcataccggcataaggtgttgtttgttatcagccagtctgacaaggttg

SEQ ID NO: 784566 - DNA, 75 bp, synthetic construct
  source 1..75: mol_type = other DNA
attgttagatggcgatgcgacgccgattccggtaaagctggatattctggctattacttcaaccgcaaaaacgat

SEQ ID NO: 784567 - DNA, 75 bp, synthetic construct
  source 1..75: mol_type = other DNA
gccgtcagagcctgcttcagcttatgcgtctgactgaagacgtaccagatgtgagacaggaactgcttaaccgtt

SEQ ID NO: 784568 - DNA, 75 bp, synthetic construct
  source 1..75: mol_type = other DNA
cggtgtgggtgaaagtggcgctcgcgataccgagtatgctgcgctgtaccgcgaacagcttcctcgcctcgacct

SEQ ID NO: 784569 - DNA, 75 bp, synthetic construct
  source 1..75: mol_type = other DNA
atgttacgtatgtttatcccaacatctaacggtaagatttccagacgccgatatatattttcatttattttaata

SEQ ID NO: 784570 - DNA, 75 bp, synthetic construct
  source 1..75: mol_type = other DNA
cagggcaagaatgaacgtgatgaccttcaggaagctaatggtgatggttatggtttctctgccagttatgaatat

SEQ ID NO: 784571 - DNA, 75 bp, synthetic construct
  source 1..75: mol_type = other DNA
acccagaatatgacgacctttggtgatcaaggtgttgcggataaagctcagaatatcgaagccgttgttcagtat

SEQ ID NO: 784572 - DNA, 75 bp, synthetic construct
  source 1..75: mol_type = other DNA
ctaacggtaagatttcaagacgtcagtatatattttcatttattttaacaaatctgatttgtatcctgcttatat

SEQ ID NO: 784573 - DNA, 75 bp, synthetic construct
  source 1..75: mol_type = other DNA
gcactccattatctcgtcatcaacatgaattgccaacgactccgtgatagtggtttcatctatataaaaacttat

SEQ ID NO: 784574 - DNA, 75 bp, synthetic construct
  source 1..75: mol_type = other DNA
cttttacattatctcgttatcaacatgaattgccaacgactccgggatagtggttttacttatataaaaacttat

SEQ ID NO: 784575 - DNA, 75 bp, synthetic construct
  source 1..75: mol_type = other DNA
cactacagaactccctttccggtctaccgctatgggtatctgaacgtatattgcagcagataaatcagttaaccc

SEQ ID NO: 784576 - DNA, 75 bp, synthetic construct
  source 1..75: mol_type = other DNA
ccctgcaggactcgcttacgggtttgccggaatgggcctcagagcgggtcatgcagcagatacgtcagctcacaa

SEQ ID NO: 784577 - DNA, 75 bp, synthetic construct
  source 1..75: mol_type = other DNA
agcctgtgcaatgccctgtttgccggtgaggtgtcgccggtcagtgatgtggcggcctgcacccgtgtacctttg

SEQ ID NO: 784578 - DNA, 75 bp, synthetic construct
  source 1..75: mol_type = other DNA
ctgctgtagcagtggcagtgatgtttgctgcgggggcgcaggcagcagaagtttataataaagatggtaataaac

SEQ ID NO: 784579 - DNA, 75 bp, synthetic construct
  source 1..75: mol_type = other DNA
caaacatcaaaagcaaaatggcaggaatttatggttgtccaccagagttgctgatatgcccttcctggatgacgg

SEQ ID NO: 784580 - DNA, 75 bp, synthetic construct
  source 1..75: mol_type = other DNA
attgtaactcttgagcgggcggttaaattgaatatggcaacagatgaggaacgagctaaactggaagcatgggag

SEQ ID NO: 784581 - DNA, 75 bp, synthetic construct
  source 1..75: mol_type = other DNA
aagtggtaagctcgaattgttaaacaacgaaattgaaacacagaaaattcttctgtccagaggaaacagcttagt

SEQ ID NO: 784582 - DNA, 75 bp, synthetic construct
  source 1..75: mol_type = other DNA
aatttgccaaagagaaaggtgtgaaaacctcttcaactggtctggtttatcaggtagtcgaagccggtaaaggcg

SEQ ID NO: 784583 - DNA, 75 bp, synthetic construct
  source 1..75: mol_type = other DNA
acagcatggaatgcgcgctaacggcgcagcaaaacggcgcagacagagttgaattatgcgcagccccaaaagagg

SEQ ID NO: 784584 - DNA, 75 bp, synthetic construct
  source 1..75: mol_type = other DNA
ccatggtagcggtggggttgtgttacaacaatttagggcaacgggtcattagcgaacagcaacagattcaggaga

SEQ ID NO: 784585 - DNA, 75 bp, synthetic construct
  source 1..75: mol_type = other DNA
tatttattttcaatttatcaggttgtggatataacgatattcaaacttatgacgagcaggttaattcatcctggt

SEQ ID NO: 784586 - DNA, 75 bp, synthetic construct
  source 1..75: mol_type = other DNA
gaagtgaaaatcggattgccgttgcgcgaggaagatatattaaagccattgaacaatataatgtcactatccgca

SEQ ID NO: 784587 - DNA, 75 bp, synthetic construct
  source 1..75: mol_type = other DNA
tgccattctgaatgaaaaagaggccgtaaaaaatattcccggtattaccataagaagtgatattgaggatttttc

SEQ ID NO: 784588 - DNA, 75 bp, synthetic construct
  source 1..75: mol_type = other DNA
attttgccgatgcggagcatcctgatgggatttctggcgcgatggcgcgtattgagcaggcagcggaaggtctgg

SEQ ID NO: 784589 - DNA, 75 bp, synthetic construct
  source 1..75: mol_type = other DNA
gctggatgtttaccttaaggtgaacagtggaatgaatcggttggggttccagcccgatcgcgtgcttactgtctg

SEQ ID NO: 784590 - DNA, 75 bp, synthetic construct
  source 1..75: mol_type = other DNA
gttggcgaaatgacgctgatgtcgcattttgccgatgcggagcatcctgatgggatttctacggcgatggcgcgt

SEQ ID NO: 784591 - DNA, 75 bp, synthetic construct
  source 1..75: mol_type = other DNA
cgcctgtaactgatgacatcagcagagcggtggcttttgccattaagtgggtggcggttggcatcgccgtgtctc

SEQ ID NO: 784592 - DNA, 75 bp, synthetic construct
  source 1..75: mol_type = other DNA
ttaacagcgaacggttgcgaaaatccgtcggtgtggaacgcacgatggcggaagatattcatcactggtctgaat

SEQ ID NO: 784593 - DNA, 75 bp, synthetic construct
  source 1..75: mol_type = other DNA
ggggcaaccgatggctttgcattacttaacctggaagaagcgataacgttacgtgaacgcggctggaaagggccg

SEQ ID NO: 784594 - DNA, 75 bp, synthetic construct
  source 1..75: mol_type = other DNA
aattatttgccggatgatgtcgccgctgtgagtaaagcaccaataatagattttagccagaatgctaatgctcat

SEQ ID NO: 784595 - DNA, 75 bp, synthetic construct
  source 1..75: mol_type = other DNA
gaagtacctgataatccgccaaatgaaatttacgcgactgcacaacaaaagctgcaggacggtaactggagacag

SEQ ID NO: 784596 - DNA, 75 bp, synthetic construct
  source 1..75: mol_type = other DNA
gagaaaattgcgcccacggtgagcattgatcatctcaaagggggcgcgccagaaatctaccgcaagttggccgaa

SEQ ID NO: 784597 - DNA, 75 bp, synthetic construct
  source 1..75: mol_type = other DNA
attgaagcgattgtggcggcaaagcctgacctgatcatcacagaaccgacccgtaatacgcccattgaacaactg

SEQ ID NO: 784598 - DNA, 75 bp, synthetic construct
  source 1..75: mol_type = other DNA
gatggaaaatgcttaccgccagatgcagatgaacgctcaggctgaaaaagtcgcaaaaattattgccgctaacag

SEQ ID NO: 784599 - DNA, 75 bp, synthetic construct
  source 1..75: mol_type = other DNA
atctacgcctactataaaaacgccgatttgccgttagcacaggctgccatcgatcgttttattcgcctcaacccg

SEQ ID NO: 784600 - DNA, 75 bp, synthetic construct
  source 1..75: mol_type = other DNA
atgctgcgtgatttcccggatactcaggctacacgtgatgctctgccactaatggaaaatgcttaccgtcagatg

SEQ ID NO: 784601 - DNA, 75 bp, synthetic construct
  source 1..75: mol_type = other DNA
tataagcttgatgtcattgatttttttgatcacctttacacaattgaagacaatcacaatctccaccccaatcct

SEQ ID NO: 784602 - DNA, 75 bp, synthetic construct
  source 1..75: mol_type = other DNA
aaaaccatactcaatcctgatgtagaaacaatcatatttacggatatttatggcggcacaccttcaaatatcgcc

SEQ ID NO: 784603 - DNA, 75 bp, synthetic construct
  source 1..75: mol_type = other DNA
ttattagtgagcgttaccctcagttaaaggctcaagagctctatcaaaacttaatggtacagctcgaaggaagtg

SEQ ID NO: 784604 - DNA, 75 bp, synthetic construct
  source 1..75: mol_type = other DNA
catagatggtgcggcggcagaactactacgcataggtctaagtgaagcttcaatcaaaaataccaccaaatcgaa

SEQ ID NO: 784605 - DNA, 75 bp, synthetic construct
  source 1..75: mol_type = other DNA
accttctttcatttctactaccacgcctttataccgtgacatttatcttctccggcctgttatatcagacatgga

SEQ ID NO: 784606 - DNA, 75 bp, synthetic construct
  source 1..75: mol_type = other DNA
aggtttggtaattctgaaaaaccgtttgctactctagagttgccatctgttatttcttattttgggaccaatgat

SEQ ID NO: 784607 - DNA, 75 bp, synthetic construct
  source 1..75: mol_type = other DNA
tcgctattgctgctcatacgactactttatctccaccgttctttccgcagctgcacgacggctgtgggacaagct

SEQ ID NO: 784608 - DNA, 75 bp, synthetic construct
  source 1..75: mol_type = other DNA
tttaagcatatgggagacatgcagttcaacccgattcaggaaagctattttgagtggattctggagcgtttacgc

SEQ ID NO: 784609 - DNA, 75 bp, synthetic construct
  source 1..75: mol_type = other DNA
cagcaaggcagaccgtcaggtcactacgcgtattcagcaggcgctggacctggttgatatccgcctgctggacca

SEQ ID NO: 784610 - DNA, 75 bp, synthetic construct
  source 1..75: mol_type = other DNA
tacaggcgctggccctggttgacatccgggtgccggaccatctgatagtcggtggcagccaggttttctcctttg

SEQ ID NO: 784611 - DNA, 75 bp, synthetic construct
  source 1..75: mol_type = other DNA
tggatatccgggtaccggaccatctgatagtcggtagcagccaggttttctcctttgccgaacacggtctgcttt

SEQ ID NO: 784612 - DNA, 75 bp, synthetic construct
  source 1..75: mol_type = other DNA
gcatcatcttctccgcagtctggttgatggaaatcgtacctgagcgtgtaatttatgcgcatttcccggaagaac

SEQ ID NO: 784613 - DNA, 75 bp, synthetic construct
  source 1..75: mol_type = other DNA
ctatcagagcatcagcgagtttatcatgccgggcgggcgtctttacgagcagcgtaaccgtgcgtgggagttgat

SEQ ID NO: 784614 - DNA, 75 bp, synthetic construct
  source 1..75: mol_type = other DNA
gacgagttggctgctctaatgacactacgttcaaaacatgttgttgaactgtttgatgtgattaattatgctgaa

SEQ ID NO: 784615 - DNA, 75 bp, synthetic construct
  source 1..75: mol_type = other DNA
cgctatgggattttattcaaatgtcagagtttgagataaataatcaaaataaaaaatatcgtgtagcaacaatga

SEQ ID NO: 784616 - DNA, 75 bp, synthetic construct
  source 1..75: mol_type = other DNA
tttacgataaaatcctctacgacgacgccgagcatcactcgatcgcgccgttggctcctgacctgctgaccatta

SEQ ID NO: 784617 - DNA, 75 bp, synthetic construct
  source 1..75: mol_type = other DNA
agcggtgcattatctttgcgatgaatcctctgactggttcccggacctcgatgatattcgcgctaaaattacgcc

SEQ ID NO: 784618 - DNA, 75 bp, synthetic construct
  source 1..75: mol_type = other DNA
tgttaccgtggaagatatttacatcggcaatggtgtatcggagcttatcgttcaggcaatgcaggcattgctgaa

SEQ ID NO: 784619 - DNA, 75 bp, synthetic construct
  source 1..75: mol_type = other DNA
gaagcgttagaactggttgatgtgaaaacgctcgatcatcttgttgtcggtcgggatggcattgtgtcgttcgct

SEQ ID NO: 784620 - DNA, 75 bp, synthetic construct
  source 1..75: mol_type = other DNA
taaaaaacttgagcaatgcacgtcaggtgcaattacgaaatctgacttaagaccggatatctatgcattacagtt

SEQ ID NO: 784621 - DNA, 75 bp, synthetic construct
  source 1..75: mol_type = other DNA
tttatctggcaataaacgatatagaacacacgaaaacaaaggcgatgtccccgcagaccaacggcatctacgagc

SEQ ID NO: 784622 - DNA, 75 bp, synthetic construct
  source 1..75: mol_type = other DNA
tgtggcaaagtagagcagcatgattatcagctttatctggtaataaacgatatagaacacacgaaaacaaaggcg

SEQ ID NO: 784623 - DNA, 75 bp, synthetic construct
  source 1..75: mol_type = other DNA
tatttacggctggttttcaatggttataaaaaagccagttttgtgctggctaaaaaacttgagcaatgcacgtca

SEQ ID NO: 784624 - DNA, 75 bp, synthetic construct
  source 1..75: mol_type = other DNA
tgctggcgaccactatggccgttgctctgcatgcgccaatcacctttgctgctgaagctgcgaaacctgctgcaa

SEQ ID NO: 784625 - DNA, 75 bp, synthetic construct
  source 1..75: mol_type = other DNA
cgccaaagaacagaatgtaatgcaaatcgccatgcaaagccgcctgaagctattctggcggccaaaagcgattga

SEQ ID NO: 784626 - DNA, 75 bp, synthetic construct
  source 1..75: mol_type = other DNA
aacctggccctgttgccaaaaacgcttttcacgaccggttatcgctacactaaatattacgatgatgtcgaagtc

SEQ ID NO: 784627 - DNA, 75 bp, synthetic construct
  source 1..75: mol_type = other DNA
tgatttccgtgcgtctgaaggacccgcgcggtgctggttatacgcaactatggctaagccgcggaacaggtgctt

SEQ ID NO: 784628 - DNA, 75 bp, synthetic construct
  source 1..75: mol_type = other DNA
gcgatccggagcccagtcaatgcgaccgcaacattacaggcaggcttaaagaagcattagcagtggttgatgtga

SEQ ID NO: 784629 - DNA, 75 bp, synthetic construct
  source 1..75: mol_type = other DNA
aaagccagcgatgacgaggcttgtggtgaaattgaaaccgcccatccaggttatctgggttcacaggacacattc

SEQ ID NO: 784630 - DNA, 75 bp, synthetic construct
  source 1..75: mol_type = other DNA
accgacagaggcacggagtactgtggcaaagtagagcagcatgattatcagctttatctggcaataaacgatata

SEQ ID NO: 784631 - DNA, 75 bp, synthetic construct
  source 1..75: mol_type = other DNA
caagaacgggaagtgtttatggtgctctatctcgataaccagcaccgtttactggagagtgaaacgctatttgcc

SEQ ID NO: 784632 - DNA, 75 bp, synthetic construct
  source 1..75: mol_type = other DNA
cgatttttttgcaggttcaggtacaacagctcatgcggcgactattctaaatagcttggatggggggacaaggaa

SEQ ID NO: 784633 - DNA, 75 bp, synthetic construct
  source 1..75: mol_type = other DNA
gcaaaacgtcgggctggttagcgtgacgcgcgtgcacagtcgctgggtgtgcattgcttccggcatcattttgat

SEQ ID NO: 784634 - DNA, 75 bp, synthetic construct
  source 1..75: mol_type = other DNA
gactgggccgccggaggtaaagggaatccgcaatatggtaatcccgtttatttaggtatctcctttgccgtctta

SEQ ID NO: 784635 - DNA, 75 bp, synthetic construct
  source 1..75: mol_type = other DNA
tattggcgccgcttatcggtcgcttaatgcctttattcccgccgctggtaactggggtagtcattacttcgattg

SEQ ID NO: 784636 - DNA, 75 bp, synthetic construct
  source 1..75: mol_type = other DNA
atgtacgcgaagccgcgtccactgtcagagcaaaaaacgtgcactggaaattatcagcgaactggctgcgaaaca

SEQ ID NO: 784637 - DNA, 75 bp, synthetic construct
  source 1..75: mol_type = other DNA
ctgtagtttctgctcttctcagtggtggagctatggctgcactgaacaacggtcaggcagataactcggcaagta

SEQ ID NO: 784638 - DNA, 75 bp, synthetic construct
  source 1..75: mol_type = other DNA
attttcgatcccgtttccattttgaccatgaccgcagtactcatcatcgtatttattgagtcaatggggatgttc

SEQ ID NO: 784639 - DNA, 75 bp, synthetic construct
  source 1..75: mol_type = other DNA
tgctcggccattggctatccctttgataaattttaccgacgattaattgatgaagggaaagtgggtattatggcg

SEQ ID NO: 784640 - DNA, 75 bp, synthetic construct
  source 1..75: mol_type = other DNA
atggatatttttaatacctcaatttctcgtaaaggaacatattgcacacaatgggacttttgtgaagacagattt

SEQ ID NO: 784641 - DNA, 75 bp, synthetic construct
  source 1..75: mol_type = other DNA
cacattcaagcactagaccttgcaactatagcatcacgattgatagatcttgaacacgatgttgagacgctaaag

SEQ ID NO: 784642 - DNA, 75 bp, synthetic construct
  source 1..75: mol_type = other DNA
accggtgtggttattacttctattggacttagcatcattcaggtgggtattgactgggccgccggaggtaaaggg

SEQ ID NO: 784643 - DNA, 75 bp, synthetic construct
  source 1..75: mol_type = other DNA
tggttgctatttttcgtggattaattgctctgccattggttatccctttgataaattttacagccgattaattta

SEQ ID NO: 784644 - DNA, 75 bp, synthetic construct
  source 1..75: mol_type = other DNA
ctatttcagatatggatcttccgataccggaagctatcatcagggcattaaaaaaacgtctggaacacccgattt

SEQ ID NO: 784645 - DNA, 75 bp, synthetic construct
  source 1..75: mol_type = other DNA
ctctggctgttgtttccgttcttcttagtggtagcgcaatggcggagttgaataatattggtcaggcagataact

SEQ ID NO: 784646 - DNA, 75 bp, synthetic construct
  source 1..75: mol_type = other DNA
ttatctgatattctactgttgactatttgtgccgttatttctggtgcagaaggttgggaagatatagaggatttg

SEQ ID NO: 784647 - DNA, 75 bp, synthetic construct
  source 1..75: mol_type = other DNA
gatattctactgttgactatttgtgccgttatttctggtgcagaaggttgggaagatatagaggattttgggtaa

SEQ ID NO: 784648 - DNA, 75 bp, synthetic construct
  source 1..75: mol_type = other DNA
acaagcctggaaagtggaacataaattatcggatattctactgttgactatttgcgccgttatttctggtgcaga

SEQ ID NO: 784649 - DNA, 75 bp, synthetic construct
  source 1..75: mol_type = other DNA
ataaactaagccgagaacttggccttttttctaattatgagatcaatgttagtgataaagttgatgtgtcaccgt

SEQ ID NO: 784650 - DNA, 75 bp, synthetic construct
  source 1..75: mol_type = other DNA
ctggtacaaatggaataactggctgacaacccgaacgggtattgcctttgcggataatacgccggtctttgcccg

SEQ ID NO: 784651 - DNA, 75 bp, synthetic construct
  source 1..75: mol_type = other DNA
agagttgtatcctgtatctgtcctgcgaaatttcatgagagctttattaactggatgcttgactctgagagatcc

SEQ ID NO: 784652 - DNA, 75 bp, synthetic construct
  source 1..75: mol_type = other DNA
tggttcctggccaacagcactgctgacgcggtcacgcagacgcagattggcaaagattgctacgtggtggacagc

SEQ ID NO: 784653 - DNA, 75 bp, synthetic construct
  source 1..75: mol_type = other DNA
ctgaccagcttgatgtattagattgggctaccatagataataatgcatggggttatgctgacgagactcagaggc

SEQ ID NO: 784654 - DNA, 75 bp, synthetic construct
  source 1..75: mol_type = other DNA
gggaaatagtagctaaagggaggaataaaaatcagttgttcgatatagttacatcttctgaagatatcaatatgt

SEQ ID NO: 784655 - DNA, 75 bp, synthetic construct
  source 1..75: mol_type = other DNA
attctattgttgactatttgtgccgttatttctggtgcagaaagttgggaagatatagaggatttcggggaaaca

SEQ ID NO: 784656 - DNA, 75 bp, synthetic construct
  source 1..75: mol_type = other DNA
gcaagggcagcgatggcgacgccaccgttctggtgcgttgcggcaaagattttctgatggcgaacagcacctcag

SEQ ID NO: 784657 - DNA, 75 bp, synthetic construct
  source 1..75: mol_type = other DNA
cagacagtggctaaaaccagtgataccaacgcccgcccggtcgccggaaaagtgctgggtcttgagaatgatggc

SEQ ID NO: 784658 - DNA, 75 bp, synthetic construct
  source 1..75: mol_type = other DNA
aaacaggtatcagacgtatcacaacaggaaaagaccgcttagccgtagtaaatgaaaatacaggagaacaggttg

SEQ ID NO: 784659 - DNA, 75 bp, synthetic construct
  source 1..75: mol_type = other DNA
atgttcatcagagcttatttaagggcgtcaacagaagatcagtttgcagatcgggcaaaagagatgctggatcag

SEQ ID NO: 784660 - DNA, 75 bp, synthetic construct
  source 1..75: mol_type = other DNA
tgagcatccgtgaaacggcagaagcaacaggctacagcacttcacaggtttgccgaatccaggcatattatcgag

SEQ ID NO: 784661 - DNA, 75 bp, synthetic construct
  source 1..75: mol_type = other DNA
gaagtgactgttactgaagataaaaaacagtatgcccgcgctaaagtcgtacggcggttaagcgacagtccggaa

SEQ ID NO: 784662 - DNA, 75 bp, synthetic construct
  source 1..75: mol_type = other DNA
aaagacagtgaagctctgggggcgctgggccaggcgtattctcagaaaggcgatcgcgccaatgcagtggcgaat

SEQ ID NO: 784663 - DNA, 75 bp, synthetic construct
  source 1..75: mol_type = other DNA
ctctaaaatctggtacgggcagattaaagacatgcccgtcagcgatgccagcgttcaggcactgaaaaaatatct

SEQ ID NO: 784664 - DNA, 75 bp, synthetic construct
  source 1..75: mol_type = other DNA
gacgaaccacatagatttcctactggtaaaaaaacatgggaaaacatagagaaatttaacgcacaatatattatc

SEQ ID NO: 784665 - DNA, 75 bp, synthetic construct
  source 1..75: mol_type = other DNA
agcatgatggacaatccggaggtgctgcgggggacgctggcgctctatgactggaccgacgatgaaatgaaccgc

SEQ ID NO: 784666 - DNA, 75 bp, synthetic construct
  source 1..75: mol_type = other DNA
atgatatcgatcagtgttgccgatggtgcgggactacagaactacgatgccgtgcttgaacatatttataacacg

SEQ ID NO: 784667 - DNA, 75 bp, synthetic construct
  source 1..75: mol_type = other DNA
tggtagtgagttcggtatccagctggaatatgccgaacagcccagtccggacggtctggcgcaggcctttatcat

SEQ ID NO: 784668 - DNA, 75 bp, synthetic construct
  source 1..75: mol_type = other DNA
gtattcgagaaacagctgatgctacaggatatagctgttcgcaagtatgtcgaatacaggttatatataaacaaa

SEQ ID NO: 784669 - DNA, 75 bp, synthetic construct
  source 1..75: mol_type = other DNA
cagcggtacaaaacttgaccgcccggaactgaaacgcttactgatggacagccactgtaatgatattttgctggt

SEQ ID NO: 784670 - DNA, 75 bp, synthetic construct
  source 1..75: mol_type = other DNA
atgagcggatccgcattgacggatggttttcacccggtggttttgcagaagaagatcggctgtggccgaaaggtg

SEQ ID NO: 784671 - DNA, 75 bp, synthetic construct
  source 1..75: mol_type = other DNA
agcggcaacgactggcgctggaccccggcagcgtatggattacttaccgactttcgcaggatctctggcaggccg

SEQ ID NO: 784672 - DNA, 75 bp, synthetic construct
  source 1..75: mol_type = other DNA
gagaaatcggaccggctccggataaccttatcgccagagattttaaggcggagcaacctaatcagaaatggctga

SEQ ID NO: 784673 - DNA, 75 bp, synthetic construct
  source 1..75: mol_type = other DNA
actcgtctgtggctggagggctggattgccagtcaacaaggatggcgcattgatgtcctcgcactcgctcaatca

SEQ ID NO: 784674 - DNA, 75 bp, synthetic construct
  source 1..75: mol_type = other DNA
acgcggctgtggctggagggttggattgccagccagcaaggatggcgcattgatgtcctcgcccattccctcaac

SEQ ID NO: 784675 - DNA, 75 bp, synthetic construct
  source 1..75: mol_type = other DNA
aaataagggattggattaaatcccacgggtacgatgaaggctatattttgcaggcccgtttctggaatgaaaaat

SEQ ID NO: 784676 - DNA, 75 bp, synthetic construct
  source 1..75: mol_type = other DNA
aagccagttggcgctattcctgcaatacagacaagagaagggcgctttatttttaccgtagcctttcaaaccatc

SEQ ID NO: 784677 - DNA, 75 bp, synthetic construct
  source 1..75: mol_type = other DNA
cgcatcaaaaaattacaattagaattaagtgatagcaatcaaaaaaatgaagaatacaaatctcgctttgcagat

SEQ ID NO: 784678 - DNA, 75 bp, synthetic construct
  source 1..75: mol_type = other DNA
acgatttctgctcttccagcagtgccagacgcgcagtgtaatcgcccgccgcttccagcttgcgcagctcagcgg

SEQ ID NO: 784679 - DNA, 75 bp, synthetic construct
  source 1..75: mol_type = other DNA
gtcgttttcgcacgttcaatgtcgttgatgactttaatcgtgaggcgttatcgattgaaatcgacctgaatctgc

SEQ ID NO: 784680 - DNA, 75 bp, synthetic construct
  source 1..75: mol_type = other DNA
ctgtatcgtctggaacttattgatccgaataacccggatgtcgttgccgcccgttttcgctctctgttacgccag

SEQ ID NO: 784681 - DNA, 75 bp, synthetic construct
  source 1..75: mol_type = other DNA
atggcgctttacacaattggtgaagtggcgttgctttgtgatatcaatcctgtcacgttacgcgcgtggcagagg

SEQ ID NO: 784682 - DNA, 75 bp, synthetic construct
  source 1..75: mol_type = other DNA
aggattatcccgctcagaccctcaccacacatctgtttattcctctgcgccgacggcttcagtgtcagcagccaa

SEQ ID NO: 784683 - DNA, 75 bp, synthetic construct
  source 1..75: mol_type = other DNA
tcgccaaaaaggctttctcaccgtcatggatctcaaagagcgcggcattccgctggttggcacctactgcacgtt

SEQ ID NO: 784684 - DNA, 75 bp, synthetic construct
  source 1..75: mol_type = other DNA
agatgtcaccacggaaaatggtgatattcagccggagtcaccggtgacggatatgacagacacacagccagaatc

SEQ ID NO: 784685 - DNA, 75 bp, synthetic construct
  source 1..75: mol_type = other DNA
gtaatattatttgatgaatttgaaaatgttcgttcagtgattaatagtaataataccgatccagtgattgattct

SEQ ID NO: 784686 - DNA, 75 bp, synthetic construct
  source 1..75: mol_type = other DNA
ctctacgtaatgccgtgaattcagtgttacatacagcatcatcagttgaacttattcgtaatgccatgcgttcag

SEQ ID NO: 784687 - DNA, 75 bp, synthetic construct
  source 1..75: mol_type = other DNA
atggcttatgtcgatgattttaaagaagcaatcatcaggactcggcggttacaacttgcacaacccgttgattta

SEQ ID NO: 784688 - DNA, 75 bp, synthetic construct
  source 1..75: mol_type = other DNA
ttgatcatgaaagtatcagattgttatcttttaaagacagaagtatatctttttctccttcgttcattagttttc

SEQ ID NO: 784689 - DNA, 75 bp, synthetic construct
  source 1..75: mol_type = other DNA
cccttctgtctatctttctggtatatggacacagcagggacagaataaacttcatcagtggtatacgcatataaa

SEQ ID NO: 784690 - DNA, 75 bp, synthetic construct
  source 1..75: mol_type = other DNA
cccaaaaatttagaactattcgttggtggtttttcagagatttaagtgtactggaactgtcaggtaagatatatg

SEQ ID NO: 784691 - DNA, 75 bp, synthetic construct
  source 1..75: mol_type = other DNA
taaatacaaatctgagtaataaactctttgcaaaatacagctgggagaatagtggttggatttcaaaaataccca

SEQ ID NO: 784692 - DNA, 75 bp, synthetic construct
  source 1..75: mol_type = other DNA
gctgctttaactggattaaatactatcggggcggctaatcgcaaatattacgatgatatgacacaaggagaattg

SEQ ID NO: 784693 - DNA, 75 bp, synthetic construct
  source 1..75: mol_type = other DNA
aaattgcaattgaaatttatcatacccatgagactgatgaaaataaaaaagaaaaactgtctattccttggattg

SEQ ID NO: 784694 - DNA, 75 bp, synthetic construct
  source 1..75: mol_type = other DNA
aagcattattaattttttacaagggccagccaacgggtttttagtaattgagcctacaggtgtcaggttattgtc

SEQ ID NO: 784695 - DNA, 75 bp, synthetic construct
  source 1..75: mol_type = other DNA
tgtaaaaaacaaccaccacagggagttgttctattaattcctgttaaaaaattacttaatcatgattatgcagat

SEQ ID NO: 784696 - DNA, 75 bp, synthetic construct
  source 1..75: mol_type = other DNA
tataagtaaaaaaggaaaaggaaaggcaccatggtttttacttacaggtatttcagaaaataatacatcactact

SEQ ID NO: 784697 - DNA, 75 bp, synthetic construct
  source 1..75: mol_type = other DNA
ttctctggatttctatttctgttttcgttttatttgtttgctatgtcattggggtattcaggaactggacagata

SEQ ID NO: 784698 - DNA, 75 bp, synthetic construct
  source 1..75: mol_type = other DNA
tcactctgtgcaacgcaacagcaggcgtttatcggcgtattcgtctttatgatgcccgccattctgctttccggt

SEQ ID NO: 784699 - DNA, 75 bp, synthetic construct
  source 1..75: mol_type = other DNA
ggatcgctggcgctgttctacttcacgatggtgatttacggtttatcgctggtgggattcggtctgttgatttca

SEQ ID NO: 784700 - DNA, 75 bp, synthetic construct
  source 1..75: mol_type = other DNA
atgtttcatcgcttatggacattaatccgcaaagagttgcagtcgctgctgcgcgaaccacagacgcgggcaatt

SEQ ID NO: 784701 - DNA, 75 bp, synthetic construct
  source 1..75: mol_type = other DNA
cacctcagaaaacggcgatattcaaccggagtcaccggtggttgatgtgactgaagcacaacctgaaccgggcac

SEQ ID NO: 784702 - DNA, 75 bp, synthetic construct
  source 1..75: mol_type = other DNA
actgtatgccatcgaggcagaagtccggggatgtacagcagaacagagtctggcggcaagaaaagccagagctgc

SEQ ID NO: 784703 - DNA, 75 bp, synthetic construct
  source 1..75: mol_type = other DNA
gaaaggctatgaagcgcaaccctctggtggtgtgtctgctcattatctgcattacgattctgacattcacactcc

SEQ ID NO: 784704 - DNA, 75 bp, synthetic construct
  source 1..75: mol_type = other DNA
aaactgcttatggattgtatccataattgcttttctgcagaaaaatacagaaagctgctaaagttattttcccgt

SEQ ID NO: 784705 - DNA, 75 bp, synthetic construct
  source 1..75: mol_type = other DNA
gcgttcagacccaaaaaacaagctggtaatattatttgatgaatttgaaaaggttcgttcagtgattaacagtaa

SEQ ID NO: 784706 - DNA, 75 bp, synthetic construct
  source 1..75: mol_type = other DNA
gaataaacttcatcactggtatgagaatatcaaagaggcatatggacgtgatacggttccggaagcgttttcatc

SEQ ID NO: 784707 - DNA, 75 bp, synthetic construct
  source 1..75: mol_type = other DNA
gcagaatgtgctccgtaatgccgtaaattctgagttacatacagcatcatccgttgaactgatccgtaatgctat

SEQ ID NO: 784708 - DNA, 75 bp, synthetic construct
  source 1..75: mol_type = other DNA
gtcttattcatggtttgtttctgagtctgttaatattcctgccgtaaaaattacggatttttgggaagatgaaaa

SEQ ID NO: 784709 - DNA, 75 bp, synthetic construct
  source 1..75: mol_type = other DNA
ccctgagttttctaccacctataaatttacaggtgaaacagcatggattgattttatcaacaagttttcggacgg

SEQ ID NO: 784710 - DNA, 75 bp, synthetic construct
  source 1..75: mol_type = other DNA
cgcagaaggataagttcggcgcgggtaagaacggttttacccgtggtaacccccagaccggcacgcctgctaccg

SEQ ID NO: 784711 - DNA, 75 bp, synthetic construct
  source 1..75: mol_type = other DNA
tattgctttagggatttttgttcgcaagtatgccgaacttggtttttatgaaacgatctcgttaacggttaattt

SEQ ID NO: 784712 - DNA, 75 bp, synthetic construct
  source 1..75: mol_type = other DNA
gctgggcggcattgccagggatcgccttagggatttttgtccgcaaatatgcagagctgggtttttacgaaacgc

SEQ ID NO: 784713 - DNA, 75 bp, synthetic construct
  source 1..75: mol_type = other DNA
ttccggacgatccggcactgatccgacaactggcctatgtgaaccagcgtctggatgacatgcctgcgacgcagc

SEQ ID NO: 784714 - DNA, 75 bp, synthetic construct
  source 1..75: mol_type = other DNA
ggggcgtgacaactcccgcaaccggagctaatggaagtgacggtggggctacgattatcgacggtattacagcta

SEQ ID NO: 784715 - DNA, 75 bp, synthetic construct
  source 1..75: mol_type = other DNA
atggatcagggtctaccggggtgtctatgtcgggtggagcaggggctgacggtctggcgattttgtgggtatacg

SEQ ID NO: 784716 - DNA, 75 bp, synthetic construct
  source 1..75: mol_type = other DNA
ttcagtcgctgccgcgagggcagaagaatgccgcgctggcgatgggattgacactgccgcaggcctaccgctacg

SEQ ID NO: 784717 - DNA, 75 bp, synthetic construct
  source 1..75: mol_type = other DNA
ttgatcataaagctgtggttgaaggattaggatgtaaagcgattcgcgtattcgcatcacaggatattgcgcctg

SEQ ID NO: 784718 - DNA, 75 bp, synthetic construct
  source 1..75: mol_type = other DNA
tatcacgaaatgaataaggttttcggaccggagacacgctatatttcgacaattggtctggcgcaaatcgccgca

SEQ ID NO: 784719 - DNA, 75 bp, synthetic construct
  source 1..75: mol_type = other DNA
acgctaccgcaggcttaccgctacgtactgctgcctaatgcttatcgcgttatcgtcccgccgatgacctcagag

SEQ ID NO: 784720 - DNA, 75 bp, synthetic construct
  source 1..75: mol_type = other DNA
ccatcgcctcgactatcggtctggtggatatggcggcgcaggcgggtaaattgctcgattactcagcccatgcct

SEQ ID NO: 784721 - DNA, 75 bp, synthetic construct
  source 1..75: mol_type = other DNA
tactgctgcctaatgcttatcgcgttatcgtcccgccgatgacttccgagatgatgaacctggtgaaaaactccg

SEQ ID NO: 784722 - DNA, 75 bp, synthetic construct
  source 1..75: mol_type = other DNA
tggtgttagcgatttttgtgatttccgtcacattaggtgcgcagaatgatcaacaggtaacatttaattatctgt

SEQ ID NO: 784723 - DNA, 75 bp, synthetic construct
  source 1..75: mol_type = other DNA
caggacgtccgccaatggcggtggggtttgatatcgatgacacggtacttttttccagtccgggcttctggcgcg

SEQ ID NO: 784724 - DNA, 75 bp, synthetic construct
  source 1..75: mol_type = other DNA
gcaaatagcacgctgtgaacgggcgggtatcgcaaaagagaaattgttgctcgacccgggattcggtttcggtaa

SEQ ID NO: 784725 - DNA, 75 bp, synthetic construct
  source 1..75: mol_type = other DNA
ctggaagcggctgcggaaactggtttacccgtatgcctgatgcatatgcagggaaatccaaagaccatgcaggaa

SEQ ID NO: 784726 - DNA, 75 bp, synthetic construct
  source 1..75: mol_type = other DNA
ctgtatcagtcctgcactcgccccacctggaatagcggtgttccgtggacggaatggaaagaacgtagtcgtgag

SEQ ID NO: 784727 - DNA, 75 bp, synthetic construct
  source 1..75: mol_type = other DNA
cagtaatttttgcgggtgataaaccaggacaaaacacgaaaacgcagtggttgcaggataaaaatatccgaatgt

SEQ ID NO: 784728 - DNA, 75 bp, synthetic construct
  source 1..75: mol_type = other DNA
acacggtacttttttccagtccgggcttctggcgcggcaaaaaaaccttctcgccagaaagcgaagattatctga

SEQ ID NO: 784729 - DNA, 75 bp, synthetic construct
  source 1..75: mol_type = other DNA
ataccatgctgcgcgccagcgcctcattctttaatggcggcaaatacagcgacgaatggcacccgaacggttcag

SEQ ID NO: 784730 - DNA, 75 bp, synthetic construct
  source 1..75: mol_type = other DNA
cgtaaaataaagcgactggaaaaccagctttcacccgcgactgacgtggctgtagcgccgcactcgtcagcggcg

SEQ ID NO: 784731 - DNA, 75 bp, synthetic construct
  source 1..75: mol_type = other DNA
cgtaaaataaagcgactggaaaaccagctttcacccgcgactgacgtggctgtagcgccgcactcgtctgcgtcg

SEQ ID NO: 784732 - DNA, 75 bp, synthetic construct
  source 1..75: mol_type = other DNA
ataactctctgattgatgcagtgaaacatgcgaatctgatgatcaacgctggcgcgacgattatcgacgttggtg

SEQ ID NO: 784733 - DNA, 75 bp, synthetic construct
  source 1..75: mol_type = other DNA
gcaaatagcacgttgcgagcaggcgggtatcgcaaaagagaaattgttgctcgaccccggattcggtttcggtaa

SEQ ID NO: 784734 - DNA, 75 bp, synthetic construct
  source 1..75: mol_type = other DNA
tgcggtcattgccgcaatgcaaggcgcgcacattattcgtgttcatgacgtcaaagaaaccgtagaaacgatgcg

SEQ ID NO: 784735 - DNA, 75 bp, synthetic construct
  source 1..75: mol_type = other DNA
tattgatcatattctggcccgtcatgttgagggcgcctcgcatatggctgaaggttacacccgcagtcagaatgg

SEQ ID NO: 784736 - DNA, 75 bp, synthetic construct
  source 1..75: mol_type = other DNA
gttatcgccttagagttgcatggcggcaaaccgctttcgccactggtaaatgctggcgctattgccaccaccagc

SEQ ID NO: 784737 - DNA, 75 bp, synthetic construct
  source 1..75: mol_type = other DNA
gatgagctggaagttccgcacgctgggtgaagcaatgaactgggtattcgtcagcaagctggcggtaaaaacgga

SEQ ID NO: 784738 - DNA, 75 bp, synthetic construct
  source 1..75: mol_type = other DNA
tttttgtgatataaaagacatcataaatataactgaataccttaacattcagacaatcagaaaaattaaatctgg

SEQ ID NO: 784739 - DNA, 75 bp, synthetic construct
  source 1..75: mol_type = other DNA
agacacagctgttgcaaaacgtcttgcaaaagatgcggcagaatcacagatagagaaaatactcgaagagaataa

SEQ ID NO: 784740 - DNA, 75 bp, synthetic construct
  source 1..75: mol_type = other DNA
cgatggaagctctaaccgattcgttcgttaaattccgctcagcaggattagatccaacagatggctctttaaaga

SEQ ID NO: 784741 - DNA, 75 bp, synthetic construct
  source 1..75: mol_type = other DNA
tcgttttggtggtgatagtgagctgttgaagcgtgcatccattgcgatccagcagatgtccggtaagggcgtcgt

SEQ ID NO: 784742 - DNA, 75 bp, synthetic construct
  source 1..75: mol_type = other DNA
cgaacaaatcagtaaatccataaagataactttcatgacccagttttcaggtgataaaattcacgacctgataaa

SEQ ID NO: 784743 - DNA, 75 bp, synthetic construct
  source 1..75: mol_type = other DNA
taaaactgataaaattattcacatgaaaccaactggtgctattccggcgatcatgacgaaggaagggcgctatat

SEQ ID NO: 784744 - DNA, 75 bp, synthetic construct
  source 1..75: mol_type = other DNA
aaataagggattggattaagtcccacgggtacgacgaaggttatattttgcaggcccgtttctggaatgagagat

SEQ ID NO: 784745 - DNA, 75 bp, synthetic construct
  source 1..75: mol_type = other DNA
tgggctagaaatgaatttaagaaaatgcaacgagatccatcttatgtcccatctatacaagagttagagtattat

SEQ ID NO: 784746 - DNA, 75 bp, synthetic construct
  source 1..75: mol_type = other DNA
atggaaaacgctaaaatgaactcgctcatcgcccagtatccgttggtagaggatctggttgctcttaaagaaacc

SEQ ID NO: 784747 - DNA, 75 bp, synthetic construct
  source 1..75: mol_type = other DNA
actggcgtttggcgatcatgttcactgcttttttgccgaaccaacgcactccccgtgtatgttattaggcgtcca

SEQ ID NO: 784748 - DNA, 75 bp, synthetic construct
  source 1..75: mol_type = other DNA
agcccaacgatcagctaatgcctcgcagcgtgcggccaagaaagaacaggcagcgcaacagaaactggcagccgg

SEQ ID NO: 784749 - DNA, 75 bp, synthetic construct
  source 1..75: mol_type = other DNA
gtattttctgctgcgttaatccgccgtgcactgattgttgcagcggtctgtctggctgtggcaacaggactgtga

SEQ ID NO: 784750 - DNA, 75 bp, synthetic construct
  source 1..75: mol_type = other DNA
gtatctggcaaaagcatttcctgaaacggctgccgcggggggggattattgaatcagaactggttgctattcctg

SEQ ID NO: 784751 - DNA, 75 bp, synthetic construct
  source 1..75: mol_type = other DNA
gtaagttatcaacagatgcacggtttcagcgccgaacaactgcgtaatgccactcatctggtgtgggcgacggga

SEQ ID NO: 784752 - DNA, 75 bp, synthetic construct
  source 1..75: mol_type = other DNA
gtcaccctccattttcattttagcgttgatgataaaaaggcctggcaggacgaagcgctaatggcgcgttccgct

SEQ ID NO: 784753 - DNA, 75 bp, synthetic construct
  source 1..75: mol_type = other DNA
ttgacgtacaaaaaacccgcctgcgtggatggcttgttgcggccgtgctgctgctcctcatcatcgcgctggtct

SEQ ID NO: 784754 - DNA, 75 bp, synthetic construct
  source 1..75: mol_type = other DNA
tcctggtcagtacctgaaacatgacgacaggctgatggctgaagggcgtttcccggtacagaccggccttcacct

SEQ ID NO: 784755 - DNA, 75 bp, synthetic construct
  source 1..75: mol_type = other DNA
accggcgcgctgtctgccgcgtttgcaatgcttggagctaatgcttccggctctggtaataagtggttgagtttt

SEQ ID NO: 784756 - DNA, 75 bp, synthetic construct
  source 1..75: mol_type = other DNA
acgtggtggttactcttggcatatcggtaaaaataacgaaggcagtatgttctctggccttcgtggcaacatttt

SEQ ID NO: 784757 - DNA, 75 bp, synthetic construct
  source 1..75: mol_type = other DNA
attgagcgcgtcgacacaaccacctcttccgttaataagctcaccacatcgttgcgcaaggttcagtctgaactc

SEQ ID NO: 784758 - DNA, 75 bp, synthetic construct
  source 1..75: mol_type = other DNA
attggtcgacgaatgtgccttacccgcgaaggaaaaaagctgctgccgcacatctatgaacttacccgagtgatg

SEQ ID NO: 784759 - DNA, 75 bp, synthetic construct
  source 1..75: mol_type = other DNA
gatcgctgaaagcattggtggactctgttgcacgcttcggcggcgatagtgaactgctaaaacgcgcagcagtgg

SEQ ID NO: 784760 - DNA, 75 bp, synthetic construct
  source 1..75: mol_type = other DNA
tttcagcttgggctggcggtggtttcgacagcgtgacatcaagctctgctaaaaccgcaaccagcagtgtggctg

SEQ ID NO: 784761 - DNA, 75 bp, synthetic construct
  source 1..75: mol_type = other DNA
gtggtcattaccggagcaggtatgagcgccgatcgcacggcgttaacgcttgacggtcagagccgtattcaaatg

SEQ ID NO: 784762 - DNA, 75 bp, synthetic construct
  source 1..75: mol_type = other DNA
aaatgtgcagtgggaagcgccgtcattactggctgagggtggcaaaattaccggtcagggtagtcagtggcaagt

SEQ ID NO: 784763 - DNA, 75 bp, synthetic construct
  source 1..75: mol_type = other DNA
tactggcaggcagccgctatgacctggttgagcgtaataacaacatcgttcttgagtaccgcaaatctgaagtga

SEQ ID NO: 784764 - DNA, 75 bp, synthetic construct
  source 1..75: mol_type = other DNA
taccggggattaattgccggcgttgcaggtatcagtgccgaccgcatctattttctgcatgacgcaccacgcggc

SEQ ID NO: 784765 - DNA, 75 bp, synthetic construct
  source 1..75: mol_type = other DNA
agcatgtccagactgggcgaagagatccaccaggtatttccacaggtggagtcggttacattttctcttccggat

SEQ ID NO: 784766 - DNA, 75 bp, synthetic construct
  source 1..75: mol_type = other DNA
gatggcgggagtcaatcccgtaggaggaagtatgtgggtcgacattgaggctccggaaggagtgacggagaagga

SEQ ID NO: 784767 - DNA, 75 bp, synthetic construct
  source 1..75: mol_type = other DNA
tacaccagcaatgagctgccgcattttattcgcgacatgacctacaactacgaaggcaacccggagttggggcag

SEQ ID NO: 784768 - DNA, 75 bp, synthetic construct
  source 1..75: mol_type = other DNA
cattcccagcctgaaactggaatacggcacgctggtgccgatgcgctacatgaatgaagacaagcacttcaaagt

SEQ ID NO: 784769 - DNA, 75 bp, synthetic construct
  source 1..75: mol_type = other DNA
ctgtgcagaccattttgaaggcgtctacaccagcaacgagctgccgcattttattcgcgacatgacctacaacta

SEQ ID NO: 784770 - DNA, 75 bp, synthetic construct
  source 1..75: mol_type = other DNA
ggcacgcatgggggacctgaagcgctttgatatcgtcgttagcgattgctgcccggaagatgaatatgtgaaata

SEQ ID NO: 784771 - DNA, 75 bp, synthetic construct
  source 1..75: mol_type = other DNA
aaccgcgcagcgccagccattacctgttaagcgatcaaaaatcccgtctggtagaggaaaaacgccgggcggcaa

SEQ ID NO: 784772 - DNA, 75 bp, synthetic construct
  source 1..75: mol_type = other DNA
aaccgcgcagtgccagccattacctgttaagcgatcaaaaatcccgcctggtggaagaaaaacgccgggcggcaa

SEQ ID NO: 784773 - DNA, 75 bp, synthetic construct
  source 1..75: mol_type = other DNA
gccgtaacggtgtacgtcagaaatctggccaacctgacagacgacgaacagaacagcctgaaggccgggattgaa

SEQ ID NO: 784774 - DNA, 75 bp, synthetic construct
  source 1..75: mol_type = other DNA
tggtgaatcgtatcttgtccaacaaacacagccagcgttgcgatatgaatgtaacgattgttgttcattcaccag

SEQ ID NO: 784775 - DNA, 75 bp, synthetic construct
  source 1..75: mol_type = other DNA
caagtacgcaaaattgtatcggttggcgaacccttcttctttagagtcatagtgccctttaagattaagatgtaa

SEQ ID NO: 784776 - DNA, 75 bp, synthetic construct
  source 1..75: mol_type = other DNA
gaagggattgatggcgtgtttattggacctgcggatctttctgcgtcgttgggctacccggataacgccgggcac

SEQ ID NO: 784777 - DNA, 75 bp, synthetic construct
  source 1..75: mol_type = other DNA
gattacgccggaccggctacaggttaccgcctgcaaggggaacgctgggaagagatcaaaaatattcccggtgca

SEQ ID NO: 784778 - DNA, 75 bp, synthetic construct
  source 1..75: mol_type = other DNA
atgtttgctggttcaaacgaagatgctgaagacttcgatgattacaacgtcattcagcgtgacctgaaggttgat

SEQ ID NO: 784779 - DNA, 75 bp, synthetic construct
  source 1..75: mol_type = other DNA
tttgactgggattccggacaagtaatgatttttccagcccagcaactgactacgctaactccagagcaggttgct

SEQ ID NO: 784780 - DNA, 75 bp, synthetic construct
  source 1..75: mol_type = other DNA
gaaaaatgtggtccggtggcgctggcacatattaagcagctgattctggcgctggaaaataaacacgccgattac

SEQ ID NO: 784781 - DNA, 75 bp, synthetic construct
  source 1..75: mol_type = other DNA
gcagagcggcggcttcttgccgcctgacattgaaccgtgaagataaatgtcatgctattaatgaagaaatgatcg

SEQ ID NO: 784782 - DNA, 75 bp, synthetic construct
  source 1..75: mol_type = other DNA
ttagtcacggccattgtgactgcgccggtgatgtggctgaaagaggttctggtatccacggtgctggccaatatg

SEQ ID NO: 784783 - DNA, 75 bp, synthetic construct
  source 1..75: mol_type = other DNA
ggggccagtgtggcacgggctgcgcgctggggacgcattgagaattacatggcgcaagtcaacgattcgctttgt

SEQ ID NO: 784784 - DNA, 75 bp, synthetic construct
  source 1..75: mol_type = other DNA
gtgtcccggacagtaccggaccgtcaccctcaccggaaccggtatccacgcctgttaaaaaacaaaaacggaaga

SEQ ID NO: 784785 - DNA, 75 bp, synthetic construct
  source 1..75: mol_type = other DNA
atcattcagatgacggaggaaaaagcccgcgaacactccaaaaaacgactcgccagaacgtttcgcgtcagcccg

SEQ ID NO: 784786 - DNA, 75 bp, synthetic construct
  source 1..75: mol_type = other DNA
agccagcgaattgatccagccagctatccggaagactgggatgtcctgctgacggatgtttttcataaaagctgg

SEQ ID NO: 784787 - DNA, 75 bp, synthetic construct
  source 1..75: mol_type = other DNA
atgatgcgggaaaaatcccgacgtccgtcgccgctgcagcggcgggtgctgattgtgctggccgccctcggtgca

SEQ ID NO: 784788 - DNA, 75 bp, synthetic construct
  source 1..75: mol_type = other DNA
acctcgccatgtaaaaaacccattccttaatgatacaaatatacatacaaaaacaggtatcagacgtatcacaac

SEQ ID NO: 784789 - DNA, 75 bp, synthetic construct
  source 1..75: mol_type = other DNA
ttcgccggaaaaaattgaagcctgccagagcgtgttaaacgtgctgaagaaagagaaacaacatcagcagtttgc

SEQ ID NO: 784790 - DNA, 75 bp, synthetic construct
  source 1..75: mol_type = other DNA
ggttccggagtccgcagtcccgtgacgcaggctccagggctctggcgatcctggccggttacacggggcaggagg

SEQ ID NO: 784791 - DNA, 75 bp, synthetic construct
  source 1..75: mol_type = other DNA
agatcaggcaggccgttatcacgcctggtgaggggctccgcgacctgccggcgccggcgcgcctgctgcaggttc

SEQ ID NO: 784792 - DNA, 75 bp, synthetic construct
  source 1..75: mol_type = other DNA
caccctgcgagccccgaacctgcagctggccgttgagctgacggacgctggccgtgcgctggccgccccgcttct

SEQ ID NO: 784793 - DNA, 75 bp, synthetic construct
  source 1..75: mol_type = other DNA
gcaccacctcgacgatgaccaccgacaccggcggttcattaggcgcactgtttgattatcaaaacgatgtgctga

SEQ ID NO: 784794 - DNA, 75 bp, synthetic construct
  source 1..75: mol_type = other DNA
gataacagcagcctgagcggcggcttcgataactttttcgccgcccttaacgaagcgaccaccagccccgatgat

SEQ ID NO: 784795 - DNA, 75 bp, synthetic construct
  source 1..75: mol_type = other DNA
tcgataacttcttcgccgcccttaacgaagcaaccaccagccccgatgattccgccctgcgcgagcaggtgatca

SEQ ID NO: 784796 - DNA, 75 bp, synthetic construct
  source 1..75: mol_type = other DNA
ccagtatcaggtgaatcaggtgtggtatgccgccagcgattacggctattacagcacccagcaggggtatctcac

SEQ ID NO: 784797 - DNA, 75 bp, synthetic construct
  source 1..75: mol_type = other DNA
accgctgcgtccaatgtttattctgaggcgcaaaaccagcagagcagcgtcagcggcgtcagcatggacgaagag

SEQ ID NO: 784798 - DNA, 75 bp, synthetic construct
  source 1..75: mol_type = other DNA
ccgaccatgtcgctgacgttcgctggcaccacctcgacgatgactaccgacaccggcggttcattaggcgcactg

SEQ ID NO: 784799 - DNA, 75 bp, synthetic construct
  source 1..75: mol_type = other DNA
ccggcggacaggcttcatccacgacagtaacctggtaccagcacctgctcagggcactgcgacaatacgatgtga

SEQ ID NO: 784800 - DNA, 75 bp, synthetic construct
  source 1..75: mol_type = other DNA
gcccgccgtgccagagccagtggcgatgtcgcgctgtggctggttcagacggatgcgtttaaggaccgtgtaaat

SEQ ID NO: 784801 - DNA, 75 bp, synthetic construct
  source 1..75: mol_type = other DNA
cagatcaccggatacggagagcagggggaacgctggattgttgatcgctacaacatccggcattcactgcgctgc

SEQ ID NO: 784802 - DNA, 75 bp, synthetic construct
  source 1..75: mol_type = other DNA
ggcgcgctggaacgtatgcgccaccctgaaaaaacagaaagcagtatgccagcaatgtctgaccagcctgtaaat

SEQ ID NO: 784803 - DNA, 75 bp, synthetic construct
  source 1..75: mol_type = other DNA
ccggctatgtgcatttccctgactggctggggagctggttttacgacgaactgacgtatgaagagcggagcagtg

SEQ ID NO: 784804 - DNA, 75 bp, synthetic construct
  source 1..75: mol_type = other DNA
ggtgccatgggatcctgaactgacaccctacatcattgagcccatgaactgcctggcatcgcgtgaatacgatgc

SEQ ID NO: 784805 - DNA, 75 bp, synthetic construct
  source 1..75: mol_type = other DNA
ccatccttagtggttacgaaaaaatcaaatggccgtcagctcctgagtgggcacggcgggaaacgtggatcgagg

SEQ ID NO: 784806 - DNA, 75 bp, synthetic construct
  source 1..75: mol_type = other DNA
tgctgaactgggttgaatctgcgcgtcagatgagcgcagtcagagggatggcatcagagttcacgactctgcgaa

SEQ ID NO: 784807 - DNA, 75 bp, synthetic construct
  source 1..75: mol_type = other DNA
acgctgaaatcactgctggaaagtggccacaacgcagcactgtatgacctgtaccgcttccgagcagcgcttgcc

SEQ ID NO: 784808 - DNA, 75 bp, synthetic construct
  source 1..75: mol_type = other DNA
cgctgcaggaacgttttctggcactggcgaaaacggtggaagggacccctggtgcccttcgatcggatcggtatg

SEQ ID NO: 784809 - DNA, 75 bp, synthetic construct
  source 1..75: mol_type = other DNA
atggacgatgcgcttttaattacacaatggacactttccttccgtgattggaaactctcaaatcacgggaggaag

SEQ ID NO: 784810 - DNA, 75 bp, synthetic construct
  source 1..75: mol_type = other DNA
tatgttcagccatattccgggctggttgaatgccatgctctgcaagatgctgcaccagacgctgagccacatcag

SEQ ID NO: 784811 - DNA, 75 bp, synthetic construct
  source 1..75: mol_type = other DNA
ttccggggaatgcccgaagagttcactgaactgcgcaaactgctggccaccaatgcagacataccggtggcaaac

SEQ ID NO: 784812 - DNA, 75 bp, synthetic construct
  source 1..75: mol_type = other DNA
gcaaccatgcgcaaggggtttcgctctcctgcgcgatgctgggtatcgacggtaaagtggtgatgccaaaaggtg

SEQ ID NO: 784813 - DNA, 75 bp, synthetic construct
  source 1..75: mol_type = other DNA
ggcacaagaaattaacgccgaatatggtgaaggtatggcgtacggttttggtgctgacgccaccagcgagcaaag

SEQ ID NO: 784814 - DNA, 75 bp, synthetic construct
  source 1..75: mol_type = other DNA
caaatgtggcacaagaaattaacgccgaatatggtgaaggaacagcgtacggttttggtgctgacgccaccagcg

SEQ ID NO: 784815 - DNA, 75 bp, synthetic construct
  source 1..75: mol_type = other DNA
tcgaaaatgaatcaggcgcgttatcccgcgtgattggccttttttcccagcgtggctacaacattgaaagcctga

SEQ ID NO: 784816 - DNA, 75 bp, synthetic construct
  source 1..75: mol_type = other DNA
caaggtcgccccgctaatcagtattgagcgttttgtgtggttggtggggtatctgaataaccgctggggaacgga

SEQ ID NO: 784817 - DNA, 75 bp, synthetic construct
  source 1..75: mol_type = other DNA
atcccgacgcgttaagccttcaagtgccgaactaaaattgatgcgtctgattcaagctaacccagcgttaagtaa

SEQ ID NO: 784818 - DNA, 75 bp, synthetic construct
  source 1..75: mol_type = other DNA
gcgaccaagctgggtatcaaaccggatcaagtcgagcagtattacatcgacaaagtaccgctcaaacgcggctgc

SEQ ID NO: 784819 - DNA, 75 bp, synthetic construct
  source 1..75: mol_type = other DNA
tggcagcgctggcggcagaggggatgccctccggtgagcaggcactcgcatccgtcatcgaacaggcccagcgct

SEQ ID NO: 784820 - DNA, 75 bp, synthetic construct
  source 1..75: mol_type = other DNA
taaggagttacgggcaaaaaatcaaataacactacccgtaactctgaaaaatgagcggcaaattaatgttttttt

SEQ ID NO: 784821 - DNA, 75 bp, synthetic construct
  source 1..75: mol_type = other DNA
ggcacaagaaattaacgccgaatatggtgaaggaacggcgtacggttttggtgctgacgccaccagcgagcagag

SEQ ID NO: 784822 - DNA, 75 bp, synthetic construct
  source 1..75: mol_type = other DNA
cagctcggcgattttgaccgttcgctacaagtgaatctggtgggttatttcctgtgtgcgcgtgaattttcgcgt

SEQ ID NO: 784823 - DNA, 75 bp, synthetic construct
  source 1..75: mol_type = other DNA
tgctgttctacgccagtcctaaggcgtcgtactgcaccggacagtcgatcaatgtcaccggcggtcaggtgatgt

SEQ ID NO: 784824 - DNA, 75 bp, synthetic construct
  source 1..75: mol_type = other DNA
ttttagcatcgattcgcgatgtggcgaaaattgttgaagttgcccgctccggcgtcgtcggtctttcgcgcggcg

SEQ ID NO: 784825 - DNA, 75 bp, synthetic construct
  source 1..75: mol_type = other DNA
ctcactttatgttgctttccacctggcgctggaaacagccatgcgacaaggggagattctgtcactacgttggga

SEQ ID NO: 784826 - DNA, 75 bp, synthetic construct
  source 1..75: mol_type = other DNA
gttgctgctcggtaacatgggtatggccggtggcggcgtgaatgcattgcgtggtcactccaacattcagggtct

SEQ ID NO: 784827 - DNA, 75 bp, synthetic construct
  source 1..75: mol_type = other DNA
cgtcaggcgaacgagctaccaggcgcaccgtcacaggaagaggcggtaattgctttcggtaagttcaaacttaac

SEQ ID NO: 784828 - DNA, 75 bp, synthetic construct
  source 1..75: mol_type = other DNA
tatgaactcgccggaggcgttgcaaagtatcagtttactgcgcgacgccctgcctaaggactgcctggtcggagc

SEQ ID NO: 784829 - DNA, 75 bp, synthetic construct
  source 1..75: mol_type = other DNA
gccctggcatgacgccagagcaggtctataaaaatgcagtactgtttatgaacgcatggaccaatttaaacaaca

SEQ ID NO: 784830 - DNA, 75 bp, synthetic construct
  source 1..75: mol_type = other DNA
tcactttatgttgctttccacctggcgctggaaacagccatgcgacaaggggagattctgtcactacgttgggaa

SEQ ID NO: 784831 - DNA, 75 bp, synthetic construct
  source 1..75: mol_type = other DNA
gaataataaaatcttacgaaaagaattggagggaagcattgccaaacttgatttacaatacaaagaatcagaaga

SEQ ID NO: 784832 - DNA, 75 bp, synthetic construct
  source 1..75: mol_type = other DNA
tttagctcttatttgcctctcagttttaataaatataccatatacatttatctatacaaaccttgttcgattaaa

SEQ ID NO: 784833 - DNA, 75 bp, synthetic construct
  source 1..75: mol_type = other DNA
ataatatattcttacgaaacacaatgtttaattacattggtatgatttggatggggggggggataatagtcctta

SEQ ID NO: 784834 - DNA, 75 bp, synthetic construct
  source 1..75: mol_type = other DNA
gctgctgttaatattgttattgatggttcttttgctgattcgaatccagaggtgattgccccatattgttctgtc

SEQ ID NO: 784835 - DNA, 75 bp, synthetic construct
  source 1..75: mol_type = other DNA
aaggaataagagtaatatttagtagaccattgagtagaagtgagttacctgtacgtattttgtcaatgggaaggg

SEQ ID NO: 784836 - DNA, 75 bp, synthetic construct
  source 1..75: mol_type = other DNA
gaacgcttcttgcctgttcgtttggggtaatcaccgcgctggcgcttgagcacgtcgaatcaggcaaagccggtc

SEQ ID NO: 784837 - DNA, 75 bp, synthetic construct
  source 1..75: mol_type = other DNA
atgaagtttgctttgagtattcttccgcacgatttgtccataaatgattattatcgtaaagttaaggagttacgg

SEQ ID NO: 784838 - DNA, 75 bp, synthetic construct
  source 1..75: mol_type = other DNA
tctccgtggacgggaaccaaactgataaaccgaccggtgaatacacactgaacctcaccgggggttactggacga

SEQ ID NO: 784839 - DNA, 75 bp, synthetic construct
  source 1..75: mol_type = other DNA
cctgatcagcgacaacaatagggataagctctatgtcaatatacggcctacggataactccgcctggacgaccga

SEQ ID NO: 784840 - DNA, 75 bp, synthetic construct
  source 1..75: mol_type = other DNA
caatcatttgaataaagcgggtattccatgggcaattgtcacttctgtttctatgccagttgcacgagcccgcca

SEQ ID NO: 784841 - DNA, 75 bp, synthetic construct
  source 1..75: mol_type = other DNA
cccgggtaatttaacttacgaaatcgttcgtgaattagtcgatgacattgtactggttagcgaagatgaaatcag

SEQ ID NO: 784842 - DNA, 75 bp, synthetic construct
  source 1..75: mol_type = other DNA
gctcttgatggcaacggacgtctgacgggcgcccgtactgcacaggccgcaccttatgctcactacacctgccac

SEQ ID NO: 784843 - DNA, 75 bp, synthetic construct
  source 1..75: mol_type = other DNA
ctgctacgccgaaacgatttctgtctacggcacggaacctgttttcaccgacggcgacgatacaccgtggtcaaa

SEQ ID NO: 784844 - DNA, 75 bp, synthetic construct
  source 1..75: mol_type = other DNA
ggatgccctgaaagatcgggtgaataacgcgttatggcgtgactcgccaggtcccggctggcgaggttctgatgg

SEQ ID NO: 784845 - DNA, 75 bp, synthetic construct
  source 1..75: mol_type = other DNA
tctcctcacaagagagcgaagagtttcaggcggaactgtccgttaatctggccaattcgctaagaagccaattta

SEQ ID NO: 784846 - DNA, 75 bp, synthetic construct
  source 1..75: mol_type = other DNA
ggctggcaactgctgcaactggacggcagtcacgccactttccgtaaaggcggacagcggctgacgctgaacgtc

SEQ ID NO: 784847 - DNA, 75 bp, synthetic construct
  source 1..75: mol_type = other DNA
tctctgcgtcactttatggcggggaaaaccgaggcagaaattgccgccgagtttacgcgtctggaacaaatcgag

SEQ ID NO: 784848 - DNA, 75 bp, synthetic construct
  source 1..75: mol_type = other DNA
taccccgcgcctgaatgaagtcgatttagtcctccacagtctggagcaaattactgtgaccaaacagccaaatgg

SEQ ID NO: 784849 - DNA, 75 bp, synthetic construct
  source 1..75: mol_type = other DNA
ctgttaggcgcgcagctgctggggcttgcgccgcaggagtgtgtggtggtggaagatgctcccgctggcgtgctt

SEQ ID NO: 784850 - DNA, 75 bp, synthetic construct
  source 1..75: mol_type = other DNA
cgccaaaatccaaagttgcggcaacgtgtgactactccgctgaagtcgtactgcatggcgataacttcaacgata

SEQ ID NO: 784851 - DNA, 75 bp, synthetic construct
  source 1..75: mol_type = other DNA
aaaaccaacccgatgaaagggatggtagccgcggtttctgtcgggattgtgaacggcgaagcggtttgcgatctg

SEQ ID NO: 784852 - DNA, 75 bp, synthetic construct
  source 1..75: mol_type = other DNA
gaatatgttgaagactctgccgcagaaacggacatgaacgtggtgatgaccgaagatgggcggatcattgaggtt

SEQ ID NO: 784853 - DNA, 75 bp, synthetic construct
  source 1..75: mol_type = other DNA
ataccaaagtgttgtgtaccgcctctattgaagaaggcgtgccgcgcttcctgaaaggtcagggccagggctgga

SEQ ID NO: 784854 - DNA, 75 bp, synthetic construct
  source 1..75: mol_type = other DNA
gacctgaatgatattgaaagaataacgtatataaaagcaggcaggaagtttctcgcgcaaatggaggggagacaa

SEQ ID NO: 784855 - DNA, 75 bp, synthetic construct
  source 1..75: mol_type = other DNA
gtgacggtgtcccatgtggcgtgtttgcatggtattcaacccagcctgttgtttaagtggaaaagacaagatctg

SEQ ID NO: 784856 - DNA, 75 bp, synthetic construct
  source 1..75: mol_type = other DNA
cgcccgtgctcttcgcgcggcagtagatttgaaagcgctgggtgagttcaccattacgctggactgcgacgtgct

SEQ ID NO: 784857 - DNA, 75 bp, synthetic construct
  source 1..75: mol_type = other DNA
gagttgttgaatgatggcgtgcctcagaatattgcagataaacttgacggatattatctgcttcgtggtcagagt

SEQ ID NO: 784858 - DNA, 75 bp, synthetic construct
  source 1..75: mol_type = other DNA
tgccatctggcacaacattgagtcggtgatggtggaagggatgggtcaaactccaccacagtggccgatgatttt

SEQ ID NO: 784859 - DNA, 75 bp, synthetic construct
  source 1..75: mol_type = other DNA
cgaaacccaggttcccgccgggccattccgcattcaggatatcggcgattctgtctctggcacactacacgtccg

SEQ ID NO: 784860 - DNA, 75 bp, synthetic construct
  source 1..75: mol_type = other DNA
ccattaagatgattttccccagcgcttcaggaaatagcagcgggcttccggcaggtgaagagccatttatcgtgc

SEQ ID NO: 784861 - DNA, 75 bp, synthetic construct
  source 1..75: mol_type = other DNA
gcctgatgggattgattctggtgatgatggcaacccagatgttcctcgacggcattcgaatgtggatgaaggggt

SEQ ID NO: 784862 - DNA, 75 bp, synthetic construct
  source 1..75: mol_type = other DNA
tgtgccttcgacggtgcgcggcagttttgccggaacagcgcaggtgttccaggagacgatgaactcacaggtgat

SEQ ID NO: 784863 - DNA, 75 bp, synthetic construct
  source 1..75: mol_type = other DNA
gacgctgacgtccgatacttattcacagggggagttgtacgatttcgcctcaacacaactggccccgacgatttc

SEQ ID NO: 784864 - DNA, 75 bp, synthetic construct
  source 1..75: mol_type = other DNA
cgtgaactccgatcagcaggataacggcgcggagatgaatctggtttacgaccgcgacaccatggcacggctggg

SEQ ID NO: 784865 - DNA, 75 bp, synthetic construct
  source 1..75: mol_type = other DNA
tcagagtatttcgtttcaggcgatgcgcggtaagttgcaggatttcatgaaaattatccgtgacgatccggcggt

SEQ ID NO: 784866 - DNA, 75 bp, synthetic construct
  source 1..75: mol_type = other DNA
gctggcgctggagctgttcaatgccccgttcagcctaatagccctgatagggatcatgctattaatcggcatcgt

SEQ ID NO: 784867 - DNA, 75 bp, synthetic construct
  source 1..75: mol_type = other DNA
tttggcgcgctgccgctggtgttgtcgggcggcgacggctcggagctgcggcaacccctggggatcaccattgtc

SEQ ID NO: 784868 - DNA, 75 bp, synthetic construct
  source 1..75: mol_type = other DNA
atgccttggatccaactgaaactgaacaccaccggcgcgaacgcagaagatcttagcgatgcgctgatggaagca

SEQ ID NO: 784869 - DNA, 75 bp, synthetic construct
  source 1..75: mol_type = other DNA
gataatttccacccgatgcgctttggcgaacgtctgtggatctgtccaagctggcgcgatgtaccagacgaaaat

SEQ ID NO: 784870 - DNA, 75 bp, synthetic construct
  source 1..75: mol_type = other DNA
gccgaacgtaatggcgtttctgaccgtctggaactctacttaccgaaagatcagccagaagaaatgaaagccgac

SEQ ID NO: 784871 - DNA, 75 bp, synthetic construct
  source 1..75: mol_type = other DNA
agaccattccggcggcgattgatctgcaaattgcccaggatcgctcccccaccattcgcgcctcgctggaagaag

SEQ ID NO: 784872 - DNA, 75 bp, synthetic construct
  source 1..75: mol_type = other DNA
tcagagtatttcgtttcaggcaatgcgcggtaagttgcaggatttcatgaaaattatccgtgacgatccggcagt

SEQ ID NO: 784873 - DNA, 75 bp, synthetic construct
  source 1..75: mol_type = other DNA
gcctctgcctggcgaaactcgcctgtggggcgataccgatgtgataggtctgttcgacgctgaaaccgacatgaa

SEQ ID NO: 784874 - DNA, 75 bp, synthetic construct
  source 1..75: mol_type = other DNA
tttcgtggtggatgacgccatcgtggtgctggaaaacattgcccgtcatctggaagcgggaatgaaaccgttgca

SEQ ID NO: 784875 - DNA, 75 bp, synthetic construct
  source 1..75: mol_type = other DNA
cagcaggactatgcctccacagaactgtttactaccattgaaggtaattacgcggatgctgtgcgcctgctaaca

SEQ ID NO: 784876 - DNA, 75 bp, synthetic construct
  source 1..75: mol_type = other DNA
cgctggataccggctatccggacgatcgtctgaagatgatgctggaagatgcgcgcccgtcgctgttaatcacca

SEQ ID NO: 784877 - DNA, 75 bp, synthetic construct
  source 1..75: mol_type = other DNA
gatctctatctcactggcattcaactggcgcaggggtatcttggacgacccgatctgaccgccagccgctttatt

SEQ ID NO: 784878 - DNA, 75 bp, synthetic construct
  source 1..75: mol_type = other DNA
tggcgcaggggtatcttggacgacccgatctgacagccagccgctttattgccgatccttttgccccaggtgaac

SEQ ID NO: 784879 - DNA, 75 bp, synthetic construct
  source 1..75: mol_type = other DNA
gtcgttctgctgcaacttccgcagttgccgcttagcgccaacggcaagctggatcgcaaagccttaccgttgcct

SEQ ID NO: 784880 - DNA, 75 bp, synthetic construct
  source 1..75: mol_type = other DNA
ttatcgacctgcgaaccaatattgatccgcacggtactgcgcaggccttaatgcaggccgatttgcaacaaaacc

SEQ ID NO: 784881 - DNA, 75 bp, synthetic construct
  source 1..75: mol_type = other DNA
ctgttgaataacgccttcggccagcgacagatttcgaccatttaccagccgatgaaccaatatcaggtggtgatg

SEQ ID NO: 784882 - DNA, 75 bp, synthetic construct
  source 1..75: mol_type = other DNA
aatcgacgtgcaggccgccaacagcctgttaaataacgccttcggtcagcggcaaatctcgaccatttaccagcc

SEQ ID NO: 784883 - DNA, 75 bp, synthetic construct
  source 1..75: mol_type = other DNA
tgatccgcaagctgccggaagccaatattatccagacggtagacagcatccgcgcccgtctgccggaattacaat

SEQ ID NO: 784884 - DNA, 75 bp, synthetic construct
  source 1..75: mol_type = other DNA
gcgcgtccgtcgctgttaattaccaccgacgatcaactgccgcgctttagcgatgttcccaatttaacaagcctt

SEQ ID NO: 784885 - DNA, 75 bp, synthetic construct
  source 1..75: mol_type = other DNA
cgagcggagcgaaacggcccaacagattatcgatcgcttgcgtaaaaaactggcgaaagaaccgggagcgaatct

SEQ ID NO: 784886 - DNA, 75 bp, synthetic construct
  source 1..75: mol_type = other DNA
tgatccgcaaactgccggaagccaatatcatccagacggtagacagcatccgggcgaaattaccggagttacagg

SEQ ID NO: 784887 - DNA, 75 bp, synthetic construct
  source 1..75: mol_type = other DNA
atgccttggatccaactgaaactgaacaccaccggcgcgaacgcggaagatcttagcgatgcgctgatggaagcg

SEQ ID NO: 784888 - DNA, 75 bp, synthetic construct
  source 1..75: mol_type = other DNA
atctggagttgctccggaaatgcacagggcaaatatcatatgggctgggatacagaaacgaaaatgaacatttac

SEQ ID NO: 784889 - DNA, 75 bp, synthetic construct
  source 1..75: mol_type = other DNA
tattcaggaaataagatagacagctatctggaattgctccggaaatgcgctgagcaaatatcatatgggctggga

SEQ ID NO: 784890 - DNA, 75 bp, synthetic construct
  source 1..75: mol_type = other DNA
tagtccgtgctgaaaaaatattaacccacattgcatgggttggtatggcaagttatatggagttattaaataaat

SEQ ID NO: 784891 - DNA, 75 bp, synthetic construct
  source 1..75: mol_type = other DNA
ctcgccagccgtattaatggcctgttgccagatttaagcaatgaagaggcactggagagcgctgcgatattaagt

SEQ ID NO: 784892 - DNA, 75 bp, synthetic construct
  source 1..75: mol_type = other DNA
atcaagaactattgctgatattgagcaatctgacgtcattactcgccagcatttacaggaagcggtgagctatcg

SEQ ID NO: 784893 - DNA, 75 bp, synthetic construct
  source 1..75: mol_type = other DNA
ttcctgggcctggtgaaatttcgctggcgcataacggcgtgctttttcttgatgaactccctgaatttgaacgac

SEQ ID NO: 784894 - DNA, 75 bp, synthetic construct
  source 1..75: mol_type = other DNA
cttataatgcccccggcgtgcaaagcccggttatcgactcgctgatcaaccaaattattgccgcgcagggaaata

SEQ ID NO: 784895 - DNA, 75 bp, synthetic construct
  source 1..75: mol_type = other DNA
gtcacaacgggtcagccactcagctttgaattattgcttcccgcaagcagcaatagtcagtgggtattgccgttc

SEQ ID NO: 784896 - DNA, 75 bp, synthetic construct
  source 1..75: mol_type = other DNA
tctcgggctcaatgacttccgaatggacttgctcaactatgtgaaggccaatggcgaaatgagcaacgtgccaag

SEQ ID NO: 784897 - DNA, 75 bp, synthetic construct
  source 1..75: mol_type = other DNA
tccggcaggtcagaaaaagaaacatgatgcggagcatagcgaatgtggaactttttgcgacgaacccgaaaaaac

SEQ ID NO: 784898 - DNA, 75 bp, synthetic construct
  source 1..75: mol_type = other DNA
aggcggagtacatcacggtgcgacgtccggcaggtcagaaaaagaaacgtgatgcggagcatggcgaatgtggaa

SEQ ID NO: 784899 - DNA, 75 bp, synthetic construct
  source 1..75: mol_type = other DNA
ctgccagccgcatggagtacagccgcacgaatgaacaggggcgattaacccacaaatgcgcagtaaaaatcatgg

SEQ ID NO: 784900 - DNA, 75 bp, synthetic construct
  source 1..75: mol_type = other DNA
gatgagctacctgaatttgaacggcgtacactggatgccttgcgagagccgattgaatccgggcagatccatctt

SEQ ID NO: 784901 - DNA, 75 bp, synthetic construct
  source 1..75: mol_type = other DNA
agaatcctgtgggctggttgcttgcagtgctgaagcgagcccgggagggaaatttttatccgccgaagcagaaac

SEQ ID NO: 784902 - DNA, 75 bp, synthetic construct
  source 1..75: mol_type = other DNA
aaaatcagcaggttatcacagagttcgggaaccgaaccattacgtacgtaatatcacacacagtgtgattaaaaa

SEQ ID NO: 784903 - DNA, 75 bp, synthetic construct
  source 1..75: mol_type = other DNA
ttgcgtacacgctggaaaaaatgcaagagcggatagtgcagaaaggccgacaacaggacggaaaaatacaaagcg

SEQ ID NO: 784904 - DNA, 75 bp, synthetic construct
  source 1..75: mol_type = other DNA
gagattaaaaacgatcccaccatgcggcactatcacagccatctgtctctgcttgaaacccgtctgggtcgccca

SEQ ID NO: 784905 - DNA, 75 bp, synthetic construct
  source 1..75: mol_type = other DNA
cgcctccgcgacctgtggtagcttctgaagagcaggtcaggaattacgtcaccagtctgcgggaacaactgaggc

SEQ ID NO: 784906 - DNA, 75 bp, synthetic construct
  source 1..75: mol_type = other DNA
aaagggaaaagcctccagagaaaccgtcagccgggtattactgatgttgcggatcacgggctggctgagcctgtg

SEQ ID NO: 784907 - DNA, 75 bp, synthetic construct
  source 1..75: mol_type = other DNA
atttaagcggcagaataagttgaacgcctggctggatagtccggaaatacgccaattctgcaagcttgagagcga

SEQ ID NO: 784908 - DNA, 75 bp, synthetic construct
  source 1..75: mol_type = other DNA
aacagcaccaccgttaaacaacgtgtaatggccgccagagagcgccaatttaagcggcagaataaactgaacgcc

SEQ ID NO: 784909 - DNA, 75 bp, synthetic construct
  source 1..75: mol_type = other DNA
cagtctgacattatcacacgtcagcatttgcaggaggcagttagctatcgtgccattgaccgtttgctcatccat

SEQ ID NO: 784910 - DNA, 75 bp, synthetic construct
  source 1..75: mol_type = other DNA
gggccggggatatccgtgatgtggcacagccgtgtgcggaggtgctggttcgcctggggaaggcggagtacatca

SEQ ID NO: 784911 - DNA, 75 bp, synthetic construct
  source 1..75: mol_type = other DNA
cagcatttacaagaggccgtaagttatcgggctatcgaccgtttgctcatccatttgcaaaagctgctgacgtaa

SEQ ID NO: 784912 - DNA, 75 bp, synthetic construct
  source 1..75: mol_type = other DNA
actgcgatggtgggcggtggtgcaattcccgggcctggtgaaatttcgctggcgcataacggcgtactttttctt

SEQ ID NO: 784913 - DNA, 75 bp, synthetic construct
  source 1..75: mol_type = other DNA
tataaccggcacatttggtaatggacaaaccgaagctaatgcggctattagctttaatacagcgagtggtgtttt

SEQ ID NO: 784914 - DNA, 75 bp, synthetic construct
  source 1..75: mol_type = other DNA
gtgcttacctgtaccgacaaccagtcgcgtaaccgccgttttggcatgatgctcggtcagggcatggatgtacaa

SEQ ID NO: 784915 - DNA, 75 bp, synthetic construct
  source 1..75: mol_type = other DNA
cgcgttaactgggatgattttaccgaatcggtgcctgcgtttattaccacggtgatgatgccctttactttctcg

SEQ ID NO: 784916 - DNA, 75 bp, synthetic construct
  source 1..75: mol_type = other DNA
ccttgatgcttcaagaattgttccaactgcaaacgaaaaccgacctcgtaacattgcctttaattatatcgtgag

SEQ ID NO: 784917 - DNA, 75 bp, synthetic construct
  source 1..75: mol_type = other DNA
atggaattatggacagggggcggactcgccgcaggaagtgcacgggaaggcgtaaacccaggaatactggctaca

SEQ ID NO: 784918 - DNA, 75 bp, synthetic construct
  source 1..75: mol_type = other DNA
ttctgctgaagaatacccggaactggcaaaggtttatccgacaaataaattgcctgatttacgcggtgaatttat

SEQ ID NO: 784919 - DNA, 75 bp, synthetic construct
  source 1..75: mol_type = other DNA
gtggaatgactatcgcgcaaagtctctgcaatcagacaccccagccaccgacgcattcctggctgaaattgaacg

SEQ ID NO: 784920 - DNA, 75 bp, synthetic construct
  source 1..75: mol_type = other DNA
atgatacactccaaaaaaattaaaaacaataagagaggaactatgtcacatccccctaaaaaacttaaaaaatca

SEQ ID NO: 784921 - DNA, 75 bp, synthetic construct
  source 1..75: mol_type = other DNA
cagtggatcgcccacggtgaagatggcaaatacattgttcgccgcgttgaaggtggactgaataccgaacaacag

SEQ ID NO: 784922 - DNA, 75 bp, synthetic construct
  source 1..75: mol_type = other DNA
cacctgtttgattgccggtatcggcagtattgcgatggggatatttgctaacttacccgtggcactggctccggc

SEQ ID NO: 784923 - DNA, 75 bp, synthetic construct
  source 1..75: mol_type = other DNA
gtgatgattggtgatttaagttctcacggtgtgttgttaggtatattagggttttttattataaccgtgttgtca

SEQ ID NO: 784924 - DNA, 75 bp, synthetic construct
  source 1..75: mol_type = other DNA
gatattctggggcgcaattgggctatttttgctcacgctgtttcgtatccggtactggatgatctccaacattcc

SEQ ID NO: 784925 - DNA, 75 bp, synthetic construct
  source 1..75: mol_type = other DNA
cgtcgagctgcgtggcaacgctcgctgtattgcgttcgataaacgttactgcgaggcgatggggctgattaagct

SEQ ID NO: 784926 - DNA, 75 bp, synthetic construct
  source 1..75: mol_type = other DNA
agtttaaacgcgaatccgctcaactggtggttgaccagagatacactgtggcagatgccgccaaagctatggatg

SEQ ID NO: 784927 - DNA, 75 bp, synthetic construct
  source 1..75: mol_type = other DNA
agtttaaacgcgaatccgctcaactggtggttgaccagatatacacagtggcagatgccgccaaagctatggatg

SEQ ID NO: 784928 - DNA, 75 bp, synthetic construct
  source 1..75: mol_type = other DNA
agtttaaacgcgaatccgctcaactggttgttgaccagaaatacaccgtggcagatgccgccaaagctatggatg

SEQ ID NO: 784929 - DNA, 75 bp, synthetic construct
  source 1..75: mol_type = other DNA
caaggtaaaacaggaaagaaacagataaaagcctggagcccccgcctgcaatcagttatagaaaaagccaaacaa

SEQ ID NO: 784930 - DNA, 75 bp, synthetic construct
  source 1..75: mol_type = other DNA
aaatggctgttcagtaaagcggaggaacgtcaggctgcacgttttgcctctcttgagcagtcactgcagcagtcc

SEQ ID NO: 784931 - DNA, 75 bp, synthetic construct
  source 1..75: mol_type = other DNA
catgagctttgtcggcggtatggccaagtggctgttcagtaaagcggaggagcgtcaggcggcgcggttcgcctc

SEQ ID NO: 784932 - DNA, 75 bp, synthetic construct
  source 1..75: mol_type = other DNA
tctgctgtttagtgccgaagaactggcacagattgaccaacatatcgctgatggcgagctaaatctgtggcaggc

SEQ ID NO: 784933 - DNA, 75 bp, synthetic construct
  source 1..75: mol_type = other DNA
tctgacatttagcaccgaggagctggcgcagattgatcagcatatcgccgatggcgagctgaatctgtggcaggc

SEQ ID NO: 784934 - DNA, 75 bp, synthetic construct
  source 1..75: mol_type = other DNA
aagagatcctcataaaataggcaatagaacgatcttcggcagaaaagagattttagataacggtgagacaaaccc

SEQ ID NO: 784935 - DNA, 75 bp, synthetic construct
  source 1..75: mol_type = other DNA
gaaacaagttggtcgaaactggaaagagagtttcttgaatttcgtgccgagcttccgctgcattatgtccgcaga

SEQ ID NO: 784936 - DNA, 75 bp, synthetic construct
  source 1..75: mol_type = other DNA
tcggcctttccacaatgacgcgatgggtgaaacaattacgtgatgagcggcagggaaaaacaccaaaaagcctcc

SEQ ID NO: 784937 - DNA, 75 bp, synthetic construct
  source 1..75: mol_type = other DNA
atggtctggttagcgaatcccgagcgttacgggcagatgcagtaccgttattgcggaaaaagcggtttacgcctg

SEQ ID NO: 784938 - DNA, 75 bp, synthetic construct
  source 1..75: mol_type = other DNA
tggtatatcattgataactactacggtggtcgtaccgataacctgagtgaacaggaacgtcagcaaatcagcatg

SEQ ID NO: 784939 - DNA, 75 bp, synthetic construct
  source 1..75: mol_type = other DNA
tgcgtattcttgatgcgatgatgcatccggtgccgccgggtgtggcgggtgatctctatctcactggcattcaac

SEQ ID NO: 784940 - DNA, 75 bp, synthetic construct
  source 1..75: mol_type = other DNA
attcgaaaccattctgccgttgcgtgaaggtaatggcccgacgctgttttgtttccatccggcgtccggttttgc

SEQ ID NO: 784941 - DNA, 75 bp, synthetic construct
  source 1..75: mol_type = other DNA
acccggaagtgctggcggagattaaccgcgagcgcgaggccttcctggcggcacagcagggaagtacttcaacgg

SEQ ID NO: 784942 - DNA, 75 bp, synthetic construct
  source 1..75: mol_type = other DNA
agataactggcaacagacagtatcagaagaacgcgctatccgttgtgccaaaagattaattcaatgtaaaggata

SEQ ID NO: 784943 - DNA, 75 bp, synthetic construct
  source 1..75: mol_type = other DNA
tcccactacaaccagcgggctggcagcctgaagaagatgaaaatcagttggatgagttacggctgaatgtggttg

SEQ ID NO: 784944 - DNA, 75 bp, synthetic construct
  source 1..75: mol_type = other DNA
agataactggaaacaggcaatatcagaagaacgtgctattcgctgtgcaaacagactaattcagtgtaaaggata

SEQ ID NO: 784945 - DNA, 75 bp, synthetic construct
  source 1..75: mol_type = other DNA
ggcaagctggatcgtaaagctttaccgttgccggaattgaaagcacaaacgccgggacgagcgccgaaagcgggc

SEQ ID NO: 784946 - DNA, 75 bp, synthetic construct
  source 1..75: mol_type = other DNA
acgcagcgcctcggcagatattctgcgcctgaaactggaatttaccgatggggaatttcggcagttggcagcaca

SEQ ID NO: 784947 - DNA, 75 bp, synthetic construct
  source 1..75: mol_type = other DNA
gttgaagctggtgcggcctggctaccgctggataccggctatccggacgatcgcctgaaaatgatgctggaagat

SEQ ID NO: 784948 - DNA, 75 bp, synthetic construct
  source 1..75: mol_type = other DNA
tgatgcggcattctgggcggaacagcgtcgtcaactgccgccgcccgcgtcactttctccggcacctttagcggg

SEQ ID NO: 784949 - DNA, 75 bp, synthetic construct
  source 1..75: mol_type = other DNA
gcgctgatattcgaactgccagaaattatcgacctgcgaaccaacattgatccgcacggtactgcgcaggcatta

SEQ ID NO: 784950 - DNA, 75 bp, synthetic construct
  source 1..75: mol_type = other DNA
gcgcatgtggatattatctcgccgatggcgtttgaaaaaatagggccaattattcgtgcgacgctaaataagtaa

SEQ ID NO: 784951 - DNA, 75 bp, synthetic construct
  source 1..75: mol_type = other DNA
agataactggaaacaggcagtgtcagaagaacgtgctattcgctgtgcaaacagactaattcagtgtaaaggata

SEQ ID NO: 784952 - DNA, 75 bp, synthetic construct
  source 1..75: mol_type = other DNA
acgtcacgatcaacctgtcgcataacggtaaaattgtgcgtcagtaccgcgcagtgccggaaggcgggcaaaaag

SEQ ID NO: 784953 - DNA, 75 bp, synthetic construct
  source 1..75: mol_type = other DNA
tcttttgcccgtaagattaattttcctgttgaaacgccctgttttcagattaaacagacggaactggagggggct

SEQ ID NO: 784954 - DNA, 75 bp, synthetic construct
  source 1..75: mol_type = other DNA
tggaaacgcctttgccgttggagggtaacgctcagccagcaccgcgtcctgtaccagaaaaccgcgtggcagcag

SEQ ID NO: 784955 - DNA, 75 bp, synthetic construct
  source 1..75: mol_type = other DNA
taatctgagtcgaagtcgctttgtgccaaacttctttgccgactggaacacgcgactggggaagaggaacagaaa

SEQ ID NO: 784956 - DNA, 75 bp, synthetic construct
  source 1..75: mol_type = other DNA
atgcatcaaaattcagtgacttcagattctgcgggagcaatcactcgttactttgcaaaagctaacttgcctact

SEQ ID NO: 784957 - DNA, 75 bp, synthetic construct
  source 1..75: mol_type = other DNA
ccattccgactgtgcgttgctggagcgcgacggcaacatttcacttttagccttgccagtggcagaacgttggct

SEQ ID NO: 784958 - DNA, 75 bp, synthetic construct
  source 1..75: mol_type = other DNA
tttttcatggctactgtcatatttatgtctgttgcgcggttttatctgtgtatataaaatacatctgtcttcatt

SEQ ID NO: 784959 - DNA, 75 bp, synthetic construct
  source 1..75: mol_type = other DNA
gtcattcaatagcttattatgatattcacaccctccctttaatttcgtgtggtcatcagaagatagttcctttta

SEQ ID NO: 784960 - DNA, 75 bp, synthetic construct
  source 1..75: mol_type = other DNA
gctattgatgatacccgcatggattgtcattcaatagcttattatgatattcacacactccctatgatttcgtgt

SEQ ID NO: 784961 - DNA, 75 bp, synthetic construct
  source 1..75: mol_type = other DNA
gcggaaattcagtattgctacgtgaatgggcgcatgatgcgcgatcgcctgatcaatcatgcgatccgccaggcc

SEQ ID NO: 784962 - DNA, 75 bp, synthetic construct
  source 1..75: mol_type = other DNA
ctggcaaaagcgaaaaaacgcggagttgacgtccgtattgttgttgatgacaaggggaatacgaaccgggcaagt

SEQ ID NO: 784963 - DNA, 75 bp, synthetic construct
  source 1..75: mol_type = other DNA
atgtcaggtaaaaaaactatcgttactctgctccgggtatcgctactggcatgcccgttactgttcacgacacca

SEQ ID NO: 784964 - DNA, 75 bp, synthetic construct
  source 1..75: mol_type = other DNA
gtcttcaccctgccggacacgctgtggccggtgttcgaaagcaaccgctggctgttgaatgacgtgtgccgtctg

SEQ ID NO: 784965 - DNA, 75 bp, synthetic construct
  source 1..75: mol_type = other DNA
agacccgaccgctgaaacgcctgttcacagccaaccagtgctggacatcctttctggatgcgggcggtctgcgcg

SEQ ID NO: 784966 - DNA, 75 bp, synthetic construct
  source 1..75: mol_type = other DNA
gaaaacgggcatatcactaacgacaaaccggatgatttcatcttctccatcatccgcgacatggataaggttgct

SEQ ID NO: 784967 - DNA, 75 bp, synthetic construct
  source 1..75: mol_type = other DNA
gcgttcgcgagattgttgccgcaggccgtgaaattgttgttgattcaccggaggtcgcagaccttatcgcagctg

SEQ ID NO: 784968 - DNA, 75 bp, synthetic construct
  source 1..75: mol_type = other DNA
acggcagtcaggttctgtatgcaccattctctgctgtgaaaggctgctctgagaatggttgtcaggccatcatga

SEQ ID NO: 784969 - DNA, 75 bp, synthetic construct
  source 1..75: mol_type = other DNA
cccgaaaacgggggctggaacccggtatcttctgcgccatccacacgtatggccgtcgtctcaactggcatccgc

SEQ ID NO: 784970 - DNA, 75 bp, synthetic construct
  source 1..75: mol_type = other DNA
aggttgtagctacaacatttagtgagcatccaaatcacgtcgaattgcgtgccagcattgacctggaggctgaaa

SEQ ID NO: 784971 - DNA, 75 bp, synthetic construct
  source 1..75: mol_type = other DNA
cgaggccgaagaagatggcgctggtgggctggtcagtacgcgtaccagcaaggtagtgaagaccacctttagcga

SEQ ID NO: 784972 - DNA, 75 bp, synthetic construct
  source 1..75: mol_type = other DNA
atcacgaggcacagagcttctacagtgcagatgccttcgccaatatgatgtttatcggtctggacgaagtgcgcg

SEQ ID NO: 784973 - DNA, 75 bp, synthetic construct
  source 1..75: mol_type = other DNA
acgggaatgagttcaagaaggccaacaataaagacggcttcctgaaccagttagaaaactacctgaacggtgtta

SEQ ID NO: 784974 - DNA, 75 bp, synthetic construct
  source 1..75: mol_type = other DNA
atctcttcggcgactacggtattgatagcggtcacatactggaaccgtcagcaggcacaggtattttccaggaga

SEQ ID NO: 784975 - DNA, 75 bp, synthetic construct
  source 1..75: mol_type = other DNA
acgttctcgtggtgatctggaacgtgcgattaaagccggggttctggagcttgatgccgatgtattgcagaaccc

SEQ ID NO: 784976 - DNA, 75 bp, synthetic construct
  source 1..75: mol_type = other DNA
gtgttcgcgagattgttgccgaaggccgtgaaattattgtcgattcgcctgaagtcgcagacctcatcgcagctg

SEQ ID NO: 784977 - DNA, 75 bp, synthetic construct
  source 1..75: mol_type = other DNA
taccacttctcggcgatgcctggaacatagtgcaacgtcagcccaaaatcagcgagttaattttcccttataact

SEQ ID NO: 784978 - DNA, 75 bp, synthetic construct
  source 1..75: mol_type = other DNA
gcagactggaagctgtgtccgcatcaccggagaacgatttaccgcgctcatggtggcggcgtcttttacagagag

SEQ ID NO: 784979 - DNA, 75 bp, synthetic construct
  source 1..75: mol_type = other DNA
cggtctgcctgtcgggaaattcacaacctggcagaaccgttgtcccggcatgatgtgtatcttcgtctgcagatc

SEQ ID NO: 784980 - DNA, 75 bp, synthetic construct
  source 1..75: mol_type = other DNA
tgccgctgtttttaacccagttctctgggctgttgttgccgttagtgcaacagcaatggcactgcaaacagcagt

SEQ ID NO: 784981 - DNA, 75 bp, synthetic construct
  source 1..75: mol_type = other DNA
aaattggctcaagcgttgtaaaagtcgttgagaaggcggcagaagcgctggttaaaaacgtttttgcaaaaattt

SEQ ID NO: 784982 - DNA, 75 bp, synthetic construct
  source 1..75: mol_type = other DNA
cgggcgtggtggtgacgatcatctttgctctgccgccgattatccgtctgacgattctgggaattaaccaggttc

SEQ ID NO: 784983 - DNA, 75 bp, synthetic construct
  source 1..75: mol_type = other DNA
gtcggttcgggattactggaatcaatgaagataaagttcatctcggcacgtaaaatatcatgcgaaccaactgac

SEQ ID NO: 784984 - DNA, 75 bp, synthetic construct
  source 1..75: mol_type = other DNA
gcgttcgcgagattgttgccgctggacgtgaaattgttgttgattcaccggaggtcgcggacctcatcgcagctg

SEQ ID NO: 784985 - DNA, 75 bp, synthetic construct
  source 1..75: mol_type = other DNA
gctgcgtaacacgctggatgtatatcactacgtgaacgggcgtcgcgttcgcgagattgttgccgctggccgtga

SEQ ID NO: 784986 - DNA, 75 bp, synthetic construct
  source 1..75: mol_type = other DNA
ggtatgtcagtgctgacggtaatcaccgcagctgtctggcccgctttctgtttcacctgcagggggaggggcgca

SEQ ID NO: 784987 - DNA, 75 bp, synthetic construct
  source 1..75: mol_type = other DNA
ggtggcgttacagcgcagactggaagctctgtccgcatcaccggagaacgatttaccgcgctcatggtggcggcg

SEQ ID NO: 784988 - DNA, 75 bp, synthetic construct
  source 1..75: mol_type = other DNA
ctgtcagcgtcaccggagaaagcgttgccgcgctcatggtggcggcgtcttttacagagaggtacccggtcatga

SEQ ID NO: 784989 - DNA, 75 bp, synthetic construct
  source 1..75: mol_type = other DNA
gattagtggaaagcgcattcctctgacttatcagaatgaagaagttcggcgcttgtcagaagatgggcgcggcat

SEQ ID NO: 784990 - DNA, 75 bp, synthetic construct
  source 1..75: mol_type = other DNA
ccaactgcgggctatcatttcgaagcatcaaaaggtctggcagatgacgaccactttgtcggtctggctatcgac

SEQ ID NO: 784991 - DNA, 75 bp, synthetic construct
  source 1..75: mol_type = other DNA
cttggtaaagacgttgccgatgtccatgacattgcaaaaagcagcaaagaagatctggaagcttatgacattctg

SEQ ID NO: 784992 - DNA, 75 bp, synthetic construct
  source 1..75: mol_type = other DNA
atctgcactggtggacaaaaactatactaacgttggcctggggttcatccgctcttttggctggtttggtgcaat

SEQ ID NO: 784993 - DNA, 75 bp, synthetic construct
  source 1..75: mol_type = other DNA
ttcttcgcgggaaatgtgtaccgcgagatctgaaagtgaatgaaacaaatgctgagtatctggtgcgtaaattcg

SEQ ID NO: 784994 - DNA, 75 bp, synthetic construct
  source 1..75: mol_type = other DNA
tgcatgcaattgcagatcatgcaaagccagtggcatggcggtatcgctacgtgaaaaaaggcgttacggactctc

SEQ ID NO: 784995 - DNA, 75 bp, synthetic construct
  source 1..75: mol_type = other DNA
tgaaaccggagcatggaaagacgctattgactgggtgctcaaagaggcttgcctggctgtaaatataggcatcaa

SEQ ID NO: 784996 - DNA, 75 bp, synthetic construct
  source 1..75: mol_type = other DNA
agtgttgcctaatttgttaagaccgggaacgtataactacgccctcgccatgggtagcaaagttaaccaagataa

SEQ ID NO: 784997 - DNA, 75 bp, synthetic construct
  source 1..75: mol_type = other DNA
acattcggcaatgagtgagttcctcgcgcagcagacagaacggcgcaatcagcgggcgaagttaattgccgaaag

SEQ ID NO: 784998 - DNA, 75 bp, synthetic construct
  source 1..75: mol_type = other DNA
ttctggttcgccgatcagcgccgcaatggctgctatgctcactattatggaggttaacggcgtcagttttattga

SEQ ID NO: 784999 - DNA, 75 bp, synthetic construct
  source 1..75: mol_type = other DNA
tcaaagaacagcgtttcccggttgctgttctgccaaatttattgaagcctggcaattataattacaatattgcca

SEQ ID NO: 785000 - DNA, 75 bp, synthetic construct
  source 1..75: mol_type = other DNA
cttgaccagtgtcaatttaatacgcagtcactgaagaaaaactatgaccaaactcaggagattcactgtgagtaa

SEQ ID NO: 785001 - DNA, 75 bp, synthetic construct
  source 1..75: mol_type = other DNA
gcaaaataccataatggtaagaatctaaaaggctatagcacgtcattaaaatatgcaaaagcgcttggtgataat

SEQ ID NO: 785002 - DNA, 75 bp, synthetic construct
  source 1..75: mol_type = other DNA
gcaagccgtcttgctgctgctttcaatcacggatttatcaataagcctttggctgaagttttcgacgttacacgc

SEQ ID NO: 785003 - DNA, 75 bp, synthetic construct
  source 1..75: mol_type = other DNA
tacaaaaactggctgaatgacaaggaaagaaagttttcttatctgtttgtcttatgcaatggtgaacttgtttac

SEQ ID NO: 785004 - DNA, 75 bp, synthetic construct
  source 1..75: mol_type = other DNA
gcgtgaggttaatacggaggtctcagcggctgacggggatattattctgctgggtggcctggctgaatctaaggt

SEQ ID NO: 785005 - DNA, 75 bp, synthetic construct
  source 1..75: mol_type = other DNA
aggtgagctacgccgacaacaggccgatacagtcgattgaataccgttccagcggcgttatcctcgacgtgaagc

SEQ ID NO: 785006 - DNA, 75 bp, synthetic construct
  source 1..75: mol_type = other DNA
acgtaccgtttggtgaagggcgttccggtgtcgccgggcttgatccggcatatgcaaacgagaagaacgttggca

SEQ ID NO: 785007 - DNA, 75 bp, synthetic construct
  source 1..75: mol_type = other DNA
gatcagttactggagtcttccgtcaatgacggtgcgtctgtatcatgacgcgatggtggctgaagtgtgttcaag

SEQ ID NO: 785008 - DNA, 75 bp, synthetic construct
  source 1..75: mol_type = other DNA
cgaaagcaaccgctggctgctgaatgacgtgtgccgtctggcggtggagaatctgctgtatgcggggtctgacgc

SEQ ID NO: 785009 - DNA, 75 bp, synthetic construct
  source 1..75: mol_type = other DNA
gtgctgattaagatgtatccagacgcagatattccaatggtgcagttgagtatcgatagcaccaaacctgcggcc

SEQ ID NO: 785010 - DNA, 75 bp, synthetic construct
  source 1..75: mol_type = other DNA
gatgacattgccacgtccgaaagcgattgtcgtggtttccgcgcactggtttacccgaggtatgggggttactgc

SEQ ID NO: 785011 - DNA, 75 bp, synthetic construct
  source 1..75: mol_type = other DNA
aggcttactgactggcaatggtgtaaatggcgtactgaaaggcgctgctgtaggtgcaggtgttggcgcagtcac

SEQ ID NO: 785012 - DNA, 75 bp, synthetic construct
  source 1..75: mol_type = other DNA
cgatgcgctgtatgagctgttcaggacggacagccgttttcatgtcgtcagttccccgcggctcagggtgaagga

SEQ ID NO: 785013 - DNA, 75 bp, synthetic construct
  source 1..75: mol_type = other DNA
ggctctcttgatgcgctgtatgagcttttcaggacggatagtcgttttcatgtcgtcagttccccgcggctcagg

SEQ ID NO: 785014 - DNA, 75 bp, synthetic construct
  source 1..75: mol_type = other DNA
gggctttgaccacggctcgtggggcgtgctgattaagatgtatccgcaagcggatatcccgatggtgcagttgag

SEQ ID NO: 785015 - DNA, 75 bp, synthetic construct
  source 1..75: mol_type = other DNA
gtgatcgtcgttcgcgtggctgaacacaaagaagaagacggaaagacgcaggatcaactggttatcggtggttct

SEQ ID NO: 785016 - DNA, 75 bp, synthetic construct
  source 1..75: mol_type = other DNA
gatgaccagctggttaccgccacatgaaattgcggtcaacatccctggttttatcgacgccatacaggttatttt

SEQ ID NO: 785017 - DNA, 75 bp, synthetic construct
  source 1..75: mol_type = other DNA
tgcgtccaccactaatcgtggccgtctgattttcggcgcgctggcaggtttattagtctggttgatccgtagttt

SEQ ID NO: 785018 - DNA, 75 bp, synthetic construct
  source 1..75: mol_type = other DNA
atgtgcaataacacccgtccggacgcagccgccgaagctatcagaacgctgatgcacgcgctgattaatatttct

SEQ ID NO: 785019 - DNA, 75 bp, synthetic construct
  source 1..75: mol_type = other DNA
cttagtattgcgtcagactatgcggaatatgtggcagagacgcgttacagaagaaaatccacggaggatgtaagc

SEQ ID NO: 785020 - DNA, 75 bp, synthetic construct
  source 1..75: mol_type = other DNA
gatgtactaaatatcaccgctgattatgcggaatatgtggcagaagtcgatttaagaaaaatcccgaattgtcgc

SEQ ID NO: 785021 - DNA, 75 bp, synthetic construct
  source 1..75: mol_type = other DNA
aactggaatagacgtactgaatatcgccgccgattatgctgatttcgtgacagaggttattttaagaaaaacgac

SEQ ID NO: 785022 - DNA, 75 bp, synthetic construct
  source 1..75: mol_type = other DNA
tgattgtgaaaatggggggggttatgcgtgatgatcgttttaattccctgaaacatgaattttccggcgtatctg

SEQ ID NO: 785023 - DNA, 75 bp, synthetic construct
  source 1..75: mol_type = other DNA
acacgctgaacagcagtgaggtgaccacgattattcaccagggtgacggctccttccgtttctgggggaaccgta

SEQ ID NO: 785024 - DNA, 75 bp, synthetic construct
  source 1..75: mol_type = other DNA
tctggtgcgactatgctcggcgcattctttattttgactgacccggttactgcttctacgaccaatcgtggtcgt

SEQ ID NO: 785025 - DNA, 75 bp, synthetic construct
  source 1..75: mol_type = other DNA
gatgctcgcgcttattgatatttctgttattgctgacagggcgcataagcacgccaccagtgaaacagaatatgc

SEQ ID NO: 785026 - DNA, 75 bp, synthetic construct
  source 1..75: mol_type = other DNA
atgtgcaataacatccgtccggacgcagccgccgccgcactcactacgctgatgcacgcgcttattgatattgaa

SEQ ID NO: 785027 - DNA, 75 bp, synthetic construct
  source 1..75: mol_type = other DNA
tgaaacaggaatttgatggcgcaccggaagatacagacgatgcgttgttatgcgttgccggcatgatgaaagccg

SEQ ID NO: 785028 - DNA, 75 bp, synthetic construct
  source 1..75: mol_type = other DNA
tatacgcgttcgaagcgctcaaagcagagctggaaaaaatcgacgagctgcaattcatctttacctcgccgacgt

SEQ ID NO: 785029 - DNA, 75 bp, synthetic construct
  source 1..75: mol_type = other DNA
ggggcagttatttggcccataatgatgacgagaatgcgtattgaaccgccccggttttccgggagagtgttttat

SEQ ID NO: 785030 - DNA, 75 bp, synthetic construct
  source 1..75: mol_type = other DNA
tcgcgatatgttcatcaatcatcccttcatcccgtttgggcatgaagagtttttcatcaagggtatggtttgcgg

SEQ ID NO: 785031 - DNA, 75 bp, synthetic construct
  source 1..75: mol_type = other DNA
gagcggtgagtcgttcggcacaccgctgaatcgcatcaactggggtaactatgaccttgttatcatcgacgagtc

SEQ ID NO: 785032 - DNA, 75 bp, synthetic construct
  source 1..75: mol_type = other DNA
cgacgacctgccaagcaatggcgacagtgagatcggtggcaaggtcaaaatcagcctcgccgatatggacttgcc

SEQ ID NO: 785033 - DNA, 75 bp, synthetic construct
  source 1..75: mol_type = other DNA
cggacaactggctgaactacagccgtaacctcaagaccaacatatttgctcgcgaccggttcaactacgacgtgc

SEQ ID NO: 785034 - DNA, 75 bp, synthetic construct
  source 1..75: mol_type = other DNA
gctaattttgtttcatttcaccaggacgtagattcgcaaacattaccatcaatatctctttttgccaccagaatg

SEQ ID NO: 785035 - DNA, 75 bp, synthetic construct
  source 1..75: mol_type = other DNA
caaaaacagcctttgaaaacagtgtaaatattccaccaactatctacaaaaatcagggtgagattattactttga

SEQ ID NO: 785036 - DNA, 75 bp, synthetic construct
  source 1..75: mol_type = other DNA
aagaacagaaagaccggacacagttcgccctggaatgtatccgatacatcgcaacgcggtcactgaatgacgcta

SEQ ID NO: 785037 - DNA, 75 bp, synthetic construct
  source 1..75: mol_type = other DNA
gcctgcatgcagaatgctattgaagcactggctaatattccaggaacccgaatagaacgtcttgcgctgtatgaa

SEQ ID NO: 785038 - DNA, 75 bp, synthetic construct
  source 1..75: mol_type = other DNA
aaaaaggccgcaaagctggtgtcgttcatgcagaagccccaaacaacgccgactgaatacattgctatgtggtaa

SEQ ID NO: 785039 - DNA, 75 bp, synthetic construct
  source 1..75: mol_type = other DNA
ctgaaaaccgagtatgataaaaagcacacttgccccctctgcggcaaaatagctgtctctgatgaggaaattgag

SEQ ID NO: 785040 - DNA, 75 bp, synthetic construct
  source 1..75: mol_type = other DNA
gtcttcgtcagggcattgtgcgtattcgctacaaatacacgcccgtaccaccgatggaatgtatggaactctatc

SEQ ID NO: 785041 - DNA, 75 bp, synthetic construct
  source 1..75: mol_type = other DNA
gtttaaaggtctgcgtaccattccggtgatttttgacatcgtaaaagatgtcgaagaactttgtccgaatgcatg

SEQ ID NO: 785042 - DNA, 75 bp, synthetic construct
  source 1..75: mol_type = other DNA
cgatcggtggcgggagtagctataccccagaattactggaaggctttattaagcgttatcatgaactgccggtta

SEQ ID NO: 785043 - DNA, 75 bp, synthetic construct
  source 1..75: mol_type = other DNA
tagacgtcatttccgccaccgcgttgagtgaactacagcttatgaaaattcgtgctgcgatggaaaaacgtctgt

SEQ ID NO: 785044 - DNA, 75 bp, synthetic construct
  source 1..75: mol_type = other DNA
tgctttattacttcaagcaaaaagagatgctggctattgaaatgggcgaatactacaaaggcggcgcacgagcac

SEQ ID NO: 785045 - DNA, 75 bp, synthetic construct
  source 1..75: mol_type = other DNA
ctattggtggcgggagcagttataccccggaattactggaaggatttattaagcgttaccacgaattgccagtca

SEQ ID NO: 785046 - DNA, 75 bp, synthetic construct
  source 1..75: mol_type = other DNA
ttggccaggaaactaatggtgcgggtggcctgtttaaaggtctgcgcaccattccggtgatttttgacatcgtaa

SEQ ID NO: 785047 - DNA, 75 bp, synthetic construct
  source 1..75: mol_type = other DNA
ctgcaaaaccaggcgaattatatacagagtgcttctcagctgatgtctgattctgcgcgagtgaatatccgtatt

SEQ ID NO: 785048 - DNA, 75 bp, synthetic construct
  source 1..75: mol_type = other DNA
tatctgaactgacagaaaatgacgtaattgaacattgcaggctaagaaacaacgctggtgcaggtccagcaacag

SEQ ID NO: 785049 - DNA, 75 bp, synthetic construct
  source 1..75: mol_type = other DNA
ggcgactatccgtatctttctcaggtgaataccgttgaccctcagcaaatgatgatgatggttactctgttatcc

SEQ ID NO: 785050 - DNA, 75 bp, synthetic construct
  source 1..75: mol_type = other DNA
aatcccatgttttgtaagaaaagctcgctctgagctattcaaagcaaaaactgataaaaagcccttgctgactgt

SEQ ID NO: 785051 - DNA, 75 bp, synthetic construct
  source 1..75: mol_type = other DNA
gaaaaatgtgcggctgagctttgccatctactgggaatccctcatgcagaatacgaattagctctaattgatggg

SEQ ID NO: 785052 - DNA, 75 bp, synthetic construct
  source 1..75: mol_type = other DNA
ctaaaagatgctattaagcaaatggataaacacctgacagaattaacttcccagtcaggcgcaactgacgccgca

SEQ ID NO: 785053 - DNA, 75 bp, synthetic construct
  source 1..75: mol_type = other DNA
aacgctatctacaacgacaagcaagcagaacattacgttaatatcccgcatcatgggcatattgataatattccg

SEQ ID NO: 785054 - DNA, 75 bp, synthetic construct
  source 1..75: mol_type = other DNA
acgaatttacgtcaggggcgcgtgcgtattcgctacaaatatacgcctgttcccccgctggaagacatggagctt

SEQ ID NO: 785055 - DNA, 75 bp, synthetic construct
  source 1..75: mol_type = other DNA
atgaaattcattaatcctgtgctgatagcggcattatctgtaagttttgccgggttttctgctgcatataccatc

SEQ ID NO: 785056 - DNA, 75 bp, synthetic construct
  source 1..75: mol_type = other DNA
catgcaaggcaaacccattaagttcattgcagatgccctcagaatacctctgagtacgtcatacaggattgctca

SEQ ID NO: 785057 - DNA, 75 bp, synthetic construct
  source 1..75: mol_type = other DNA
gtatgacgtggtggataacggcaccacggatttacgtcaggggcgtgtgcgtattcgctacaaatatacgcccgt

SEQ ID NO: 785058 - DNA, 75 bp, synthetic construct
  source 1..75: mol_type = other DNA
aacttatcggtgcggagtgctggtatgacgtgctggacaacggcacgacggatttacgtcaggggcgcgtgcgta

SEQ ID NO: 785059 - DNA, 75 bp, synthetic construct
  source 1..75: mol_type = other DNA
atgtgctggggatgtccaggcatgtgttctggtcgttgcaggccgaagacagcgatgccaatagcctcaacaaca

SEQ ID NO: 785060 - DNA, 75 bp, synthetic construct
  source 1..75: mol_type = other DNA
actcatggaccacgctggttgagttgatgtctatctacaaacgtctgtgcagctttgaacatgaattaaatgtat

SEQ ID NO: 785061 - DNA, 75 bp, synthetic construct
  source 1..75: mol_type = other DNA
ctgctggcggttctggtgatgtccttcctggtcactatgctgttcaactccaaactctctgacgatccgatttat

SEQ ID NO: 785062 - DNA, 75 bp, synthetic construct
  source 1..75: mol_type = other DNA
tctggtctgttcattctgccgacctacccgacgctggttgcttgcggtacagatgggatgacacgggtactaccc

SEQ ID NO: 785063 - DNA, 75 bp, synthetic construct
  source 1..75: mol_type = other DNA
accgatgatatccacaatcagtcatgggttggtgaaagggtattctgtaacccaccatacagcgacactaaaaca

SEQ ID NO: 785064 - DNA, 75 bp, synthetic construct
  source 1..75: mol_type = other DNA
gtgccattaaatgaaggcattcaactcccggttcccccgaaaaaagacgtccaggtaccggagaaaacaatcaca

SEQ ID NO: 785065 - DNA, 75 bp, synthetic construct
  source 1..75: mol_type = other DNA
tgatcatcttagctgccactgtctttggcgtcatgggggagacagttcttgccggaactctcgtttcaatagatc

SEQ ID NO: 785066 - DNA, 75 bp, synthetic construct
  source 1..75: mol_type = other DNA
gaaacggtggtttcaccacaagccgttttcgacgcgccacaactcaccacggttgccaaagagtggccgctgttt

SEQ ID NO: 785067 - DNA, 75 bp, synthetic construct
  source 1..75: mol_type = other DNA
gcccggataaaatttatccggggcaagtgttgcgtgttccggaagagttgttaattgccagccatcgcctgctgg

SEQ ID NO: 785068 - DNA, 75 bp, synthetic construct
  source 1..75: mol_type = other DNA
gccgatggcaaagcgacggtcactggtgacggcctgagtcaggaggcgaaggagaaaatccttgttgcggtgggg

SEQ ID NO: 785069 - DNA, 75 bp, synthetic construct
  source 1..75: mol_type = other DNA
gaatttgtcgttgtgcctggcgagaaagccctgctgcatgaacctgatgttctgacgctgaccctgaccgcgcca

SEQ ID NO: 785070 - DNA, 75 bp, synthetic construct
  source 1..75: mol_type = other DNA
gtgaggatgttgcgtgggtacttcagcctgaaaatatcaatgcactgattaacgtccagaatcaaaagtacgcgc
